United States Patent Application Publication US 2026/0103690 A1 - sequence listing, part 44

SEQ ID NO: 208800 - protein, 359 aa, unidentified
MNAIQYIGLDVHKKTISYCIKAADGQIVQEGTLEAERTVLRHWAKGLRQPWHGAMEATLFSAWIYDTLKPYAQQLYMGHPAKMKAITAGKKKSDRIDARTIADLVRCDLLPKCYVLPPELRDLRRLLRYRNMVVQQSVRMQNKMAGLLMESGTAFNKEKLHGKKYFTDLIKSLREVPESVKDLLRMSRGAMEMFESTQKQLIQRLLSEPALEQRVERLMSIRAVGPITALTWALEIADPHRFSSIADAASYCGLTTAFRSSAGKQQRGPISKQRNAWLQTILIEAAKLAPRWNPQLAALYAQQLKRGHPNRATLQVARKLVAYLLAVDKSGQPFQLPTPPTLPMTTKTKKKKAALARAA

SEQ ID NO: 208801 - protein, 417 aa, unidentified
MSEYAAFVGFDWADKKHDICLVDAATGKKEPSVIKHTPQAIEEWATSLRSRFGGQKIAVCLEQSRGPLIFALLKYDFLVLYPVNPSTLAKYREAFSPSRAKDDPQDAEYAAELVIDHRERLKAWQPDDEKTRTLQYLVEHRRRVVSDRTRASNRMTALLKLYFPQVLEWFDDIRTDLVCDFLLQWPTLEAVKKLRRATLEKFFRAHNSVRGRANEERFAAIKEAVPLTQDRAVIDSSVPMIKALASQMKTAIAAIREFDQKIEELCAGHEDFHLFASLPGSGSVYSSRLLAAFGTDRERYESADEVARYSGIAPVIERSGQSCWIRWRYFCPKFLRQSFVEYAGESIKHSFWARAYYAQQKAKGKSHQAAVRALAFKWIRIIYRCWHTRTEYNEVKYLESLRKKGSSLLSYAAQNAA

SEQ ID NO: 208802 - protein, 385 aa, unidentified
MQASNVCTPTVDHFGTILVAIELSRQSWLVTMHSPDRDRISRHKLPGGDHAGLLALIERAQERAARALGSVPAVVSCYEAGYDGFWLHRRLMAAGITNHVFDPASIAVEQRARRAKTDRIDGELLLRTLMAHWRGEPRVVRIVRVPSAEQEDARRDTRERQRLITEQTAHTNRIKALLRLLGMAVGNPRRRDWLIWLAAQRDWQGQPVPPRLAAELEREHARLMLVREQLEALSQAAVGTDAPAAAAQMARRSALLLRLKGLGPVFAATLTNEVFYKDFRNRREVAGYCGLAPSPWRSGATNHEQGISKAGNPRARHKAIELAWLWLRHQPDSALSQWFRERTLNGSGRIKRIAIVALARKLIAALWRYLTTGLVPEHAVLKAKA

SEQ ID NO: 208803 - protein, 359 aa, unidentified
MDVHKETIAIAVIRDNNRNVEFERQIRNDAGRIKKFFKRLQDKGENIICCYEAGPTGFAIYRQLEEMDITCYIAAPSLLPRKPGDRIKTDKRDAIMLAKVLRNQEIVPVHVPTKSDESVRDYLRMCDDMKSDLKKQKQRLLQFLLRIGKKFETGKKYWTGVHRMWLKSLKFQEGMHRLVFDEYYTAIVEQEAKIDRIKEKIEVMSTEDAYAERVSKLRCFKGIDTLTALTFVVEIGDFRRFGKAHEFMAYMGLVPSESSSGDKRRTGGITKAGNSRLRKLLIESSWHYRHYKPSKRLAVRRKGQEIGIIAYADKAGKRLNRKYMKLISGGKIPQKTVTAVARELSGFIWGMMVGKTALV

SEQ ID NO: 208804 - protein, 422 aa, unidentified
MNSLTDDVFTAYVGIDWADSKHDICVQASDSQQRDFDCISHQVDRIEQWAQSLHKRFGGVIAVALELSKGPIIYALQKYDFFVIFPINPSTLAKYREAFQPSRAKDDPTDAELALDLLLRHPDRFNPLRPQSVEMRTLIVFVEQRRGLVNDRIRITNRLRNTLKQYYPQTLEWFDRIDTLLFCDFIARWPTLIQVKRARKTTLERFFHQHSMRFSHVLDARLKAIKVAQALTLDEAVITPYRLHALVLAEQLRVTLQSIRRFDNEIAELAPKYPDYGLFSALPGAGPSLAPRLLVAFGEQRERFASAADVQKYSGIAPVTERSGKKHWVHWRWQCPTFLRQTFVEWAAQTINKSYWAGAYYRQQREKGCSYQAAVRALAFKWIRILYRCWQSGTPYNETTYLNALKRRGSPLLNPATDAEMT

SEQ ID NO: 208805 - protein, 381 aa, unidentified
MRFYTKQHKAYCGIDLHARSMYMCILSQDGEILLHRKMKTSPEMFLKAIAPYREDLVVCVECMFTWYWLADLCAREGIPFVLGHALSMKAIHGGKAKNEKIDAQKIAVLLRGGMLPQAYVYPAAMRATRDLLRRRTHVMRKRAELLTHIQQTNSQYTLPEIGKKIAYKANRDGVAERFPDPAGQKSIEVDLALIGHYDQLLRDVELSILTTAKQHHAQTLYLLRTVPGIGEILSLVLLYEIHDITRFPRVQDFLSYCRLGKCTKESAGKRYGTSGTQIGNAHLKWACSEAAVLVLRANPAGQKYLTTLEKKHGSGKALTLWGQKLGRTVYYMLQRQTAFDMDKFLNGSGSGADEPYASLDHHGLSLRIVLCNACFTVSLHT

SEQ ID NO: 208806 - protein, 398 aa, unidentified
MKTSGLDVHKDKIFCAIYDGKSYSEVKEFSTTTVSIRSMGEYLQREGVKKVAMESTSTYWVPIWDIFYEMGFEQKLVNPLHIKQMPGRKSDVKDAQWIAKLLYQNMLSGSLVPSPLIQELRSYTREYRLLTQEVTKVLTKMDRVLVMCGIRLSSCISNMNSKSAIQIIEALVKGETSPDKLVSLVYGNRKNKESGKLKECLTGNMKEHHRIKLMTCKQQYDLFEQQITFYLSKMQKLCSEHFSKDVSNLTTIPGVSDISAMIIIAETGGDMSAFETSGKFTGWTGLRPRNDESAGKFKSTATTKGNKHLRAIIVQVGWGAARNKGSYFMDKFQKLSMRKSRKKALVAIGRKILVIIWHVLKEKTPYNPKLVHIYDPVKVESKIKYHEREIEKAKKLIA

SEQ ID NO: 208807 - protein, 347 aa, unidentified
MRFYTTQHKFYCGIDLHARTMYLCILNQEGRIVLHRDIKTNPEVFLKTIAPYREDIVVAVECIFTWYWIADLCSQEHIPFVLGHALYMKAIHGGKAKNDKVDAYKIATLLRGGMMPMAYVYPADMRATRDLLRRRNHLAHKRAELIAHVQNTLHQYNLPEIGKNLGKKGNREGVAKRFPDMIVQKSIELDLGIIDHYDQLLHRIEHEISLIAKKCDADSYFRLRSIPGIGRILGLTILYEIHDINRFPRVQDFVSYCRLVKCTKESAGKITGTSGKKIGNVHLKWAFSEAAVLFLRRNPEAQKYRAKLERKHGKAKSLTILAHKLARAVYKILRQKEVFQPQTFFAK

SEQ ID NO: 208808 - protein, 341 aa, unidentified
MSEVSIIGIDLAKRVFQLHGTCANGAVIFRKKLTRVQLLAFMSKQPECTVAMEACATAHCWGREIEKLGHTVRLIAPNYVKPFVKRQKNDVADAEAIVEAVSRPTMRFVELKSEAQQARAMLFRTRQMFIGQRTQTINALRGHLAEHGVVAPKGAIHVKRLADAVEDETIGLLEDVRELAQVYLAQIEGLNVQVAALDQRMKGAAKEAEAARRAQTMPGVGPITALAIETFAPGLNCFRRGRDFAAWLGLVPKQNSTGGKPRLGKTSKMGQRDIRRLLISGAMAVLQAVERFGTPHNTWLIATLERKPRMLVAVALANKMARSLWAMVTKQEDYRTPAAMA

SEQ ID NO: 208809 - protein, 356 aa, unidentified
MSRDIKYIGMDVHKEAVVIAVLNGTGKQVMESIVETQANSILQFIHGLQGELHVTWEEGTWAAWLYDLLKPHVQQVLVCNPRRNALLKEGSKSDKIDAQKLADLLRTGMLRPVYHGEHGLRTLRELGRSYHTISQDLNRVMNRIKALYRGWGIACGGTQVYAARYREEWLDKIEHKGVRRRAELLYQQLDGLQTLRRTLRPELLAESRKHKAATLLRQIPCIGPIRAARLLALMQTPHRFRSKRQLWTYSGLGIETRDSAQYRFVRGQLQRTKKPQQIRGLNRNHNHEMKDIFKGAATRASCGVGPLRDFYVALLDKGMKPEMARLTLARKIAAIALTLWKKEERFDAGQLKTQAA

SEQ ID NO: 208810 - protein, 364 aa, unidentified
MYIGLDVHKDTIHIALAPGNGEEVRSYGEVRGDLNAIDKALSKLRGVHPKLSVVYEAGPCGYALYRHLTKKGITCAVVAPSMIPKRPGDRIKTDRRDAIKLARLHRAGELTGVYVPSAEDEALRDLTRAREDAVIVHKRARQQLSALLLRQNIRYPGKQAWTQAHKRWTARVSMPHPVQQIVFQEYMNAIDEAHQRVERITEQLRLAMETWRVAPVARSLQALRGVSLVAGASVLAELGDLTRFDNPRHLMAFLGLVPSQYSTGPHQRLGAITKTGNAHARRMLVESAWAYRFPARVSRGLRERQEDLPQKVRDIAWKAQARLCHKYRRLAAKGKLKQVITTAIARELVGFMWAIAKEVPMAKA

SEQ ID NO: 208811 - protein, 397 aa, unidentified
MYIVGIDIAKRKHEAAVIDGEGTVIIKPFSFTNNCSGYNRLLAMLAKAKLPLDEVSFAMEATGHYWLALFTRLQKEGFRVQVINPVQTNSIRSFYIRQAKTDPRDALLIAEVIRFGHFSESTLHPENIYELRELCRGRHAIVSMQADIKRKVVALLDQVFPEYETAFTNLFGDTSMAILQACPTPKELSEMPLEELCHLIEVSSHKRFRMAKAQELQELARNSFGFAMAGDVFSTMIRLYAKHLDFLKQQVREMDRKIAEIMETLDTPITTITGIGPTLGAYILSEIGDINRFSSSAKLAAYAGIDPTMRQSGEYNGVRNRMSKRGSPYLRHAIWLAASSAVLHDPALKLYFQKKRDEGKPYMASVGHACRKMVSIIYAVMRDNKAYTPYIPNEISA

SEQ ID NO: 208812 - protein, 316 aa, unidentified
MNYLGIDVSKRKIDCCLIVGDKYLHRVLKNDQSGFEKLRDWLKKYTDKPVYACLEATGIYSEHIADWLHDEGHSVALANPLSIKKFAEMQLLAVKTDKQDAKTIAKYCRMTQPTLYAPPPKSERQLKALTRQVEYLKEMVVANQNRFQVSQDVTAPIIADTIAHLRQQIAQVEQQIQTHIKQSPDLKDKADLLKSVRGIGAATIPHLITLFGFKTFSTAKAAIKYVGLNPIIKQSGEKKTRFIAISKQGDKTIRTALYMPAVRAFTLPEWQPFVNRLKAAGKTGKQIVCAIMRKLLVYCFTVLKSGRPYDPQIQAA

SEQ ID NO: 208813 - protein, 318 aa, unidentified
MPESIVIGIDIAKQTFDAALGVRGSIKTFANDDAGFDTLLAHLAGQAVDLIVMEATGGLESNLACALQAAGFAVAVINPRQARDFAKAMGYLAKTDRIDAKALAQLAQVLARSPERDRFVTALPTPEQQALQALVARRRQLVAMQVAERQRLSVSHAAARKSIEAMIMAIRAQLDEVETELAKHIETHHADLALRLSSVRGIGPTTVATLIAEVPELGQLSRREISALIGLAPFNRDSGQMRGKRAIFGGRGQVRRGLYMAALAAIRFNAVIKQFYDRLVAAGKPKKVAIVACMRKLLTILNAMVRTGKAWDDSLHTA

SEQ ID NO: 208814 - protein, 408 aa, unidentified
MRIIGLDIHRVFAEAAALEDGKVKRLGRIGMTRGHLAAFAKTLSPRDHVVVEATGNATAVSEILAPYVARVAVANPLQVHLIAKAKIKTDATDARVLAKLYAAGFLPEVWIPDAATLARRRQVTRRTQLVRQRVRLKAIVQSILHANLIPRCPHADLFGSKGRTWLRAQYLPDDEREAVEQHVHEYDRLTEALKGVERDIARAALADPNVTRLMTIPGIDMVVAVGLMAAIGQIERFANPDKLAAYIGLNPSVYHSGDGPVFHGRITKRGRSNARHLLVEAAWQTVRSPGPLRAFYERVRARRGNHIAAVAVARKLTVIIWHLLTKGEDYDWVRPALHAKKLRDLELRAGCPEQRGQRGRSYDYNLPHRRREERARAEQAEAAYRRMTQGWRKRGPRQPTGAADEDRQ

SEQ ID NO: 208815 - protein, 340 aa, unidentified
MGEITTVGIDLAKNVFSVHGVDAHGKTVLRKTVSRGALLELMAQLPRCLVGMEACSGAHQLARDLQPLGHLPRIMMPKFIIPYRRNQKNDGNDAEAICEAVARPNMRFVPIKSVEQQAVLVVHRVRKELVELRNGQINQARSLLAEFGVVIAVGRYRFRQQIGAALDDPRVPELARQVLHEVNARIRALDEDILAYDRRISAQVRDSAAMQRIVAVCGVGPITASAVVASVGDAKLFRNGRQFAAWLGLVPRQFSTGGKPVLGRITKQGDVYLRTLLIHGARSALLTLTRRDDKLSRWASALIARRGFKKACVALAAKNARVIWALLAKGEAFQLDRAAA

SEQ ID NO: 208816 - protein, 340 aa, unidentified
MSCYLGVDLHRNCFTVCTLKEDGQSELRKWSIHALGEFAQTVQATDAVAVEATGNTRYFCQSLKDRGCRLVVVNPQQFQVISRSVKKTDTHDAKTLAQFLARDLLPEVRQKDALLAEIASLLQTRDKLVKLRTTLKNKINNLLAGRGILIRRESLSSDKGLEQVLQASVIGLERVELEVLIGQIRHLNGSIQKLEAAIKKQGPKLPGYQNLKSIKGLGDIGSSTLLSTIGDINDFASEGKLAAYFGIVPRVTNSNETARSGRITKRGNKLGRTTLVQCALIARRYSPYLAHYYARIKAARGTGKAIIALARKFLGIIYRTLKNGWVFEDFPRFVIAPAEG

SEQ ID NO: 208817 - protein, 364 aa, unidentified
MNNRTSIGLDVHARSIKAAAFIPETGEIIEKGFAYDPAALASWINTLPKPAEAVYESGPCGFELVRALERQGISCKVGAVSKMFKPSGDRVKTDRRDAIFLARMLAVGNIVEVYVPSPELEAARDLSRAREDARKDLMRARHLLSKFLLRKGIVYESDKTTWTKMHRAWLSSLVFEYPEEQLVFEDYLGGVAFFEYRRDGLDKKIHALARLDAYAPMVDALCCLRGISTITAFAITVETGDFLRFSKAGHFMAFLGLVPSENSTGDSTVRGKITRTGNTHLRTLCIESSWHHKRALRPLSPTTTKAFGNVPGDVISIARKANRRLHDRYGYLLARGKNANVANVAIARELAGFIWAMGRLVQGR

SEQ ID NO: 208818 - protein, 353 aa, unidentified
MNCVGIKVPLKKEELKMKDNTYGLDIAKNIFHAFTITEDGEIIKKVLNRKTLLSYFAKRPKSLIGIEACGSSHHWAREFMKLGHDVILMNAKHVKAYLKGNKNDFNDAEAIYDCVSQANVRPVGIKTIEQQDVQLIHSFRQELIKQKTAIINQIRGHLRERGITINLGVNAFMKAIPSILENEKGLLSEFSIPLFREQYEHLKQITDAINIKDKAIDNLCHSNELSRRLHEVRGIGPKTATIVAADLGKSRVYANGRQYAASLGLVPRQHSTGGKSYLLGISKRGNKYIRTLLIHGARAVVGKIGDKKDKLSCWIRELVKRRGYNVASVALANKNARILWSLATKETSYEAAV

SEQ ID NO: 208819 - protein, 331 aa, unidentified
MKGMKAVVGVDVAKDSVSVTILYGKKERSFTSENEGKAFESELSKALNGLDRQRILVVMESTGIYHVKLACHLHGMGYAVSVVNPFVIKKYAEMQMKRTKTDAVDSKIIAEYGRSANDLKLFTPKNEIQQAMEIKLKTIEDFYTQINALQNQLAALEHLPACTNKLKRPYEKTIKLLYEEIGKIEKDLVKLSKKHYPEEIRILNSVPGVGDRLSCIIVSMLRNFDSFERGKQITSYLGICPSPYESGTSVKRRGRIMKKGNPYIRKILYLCALSASRYNKSCRLLFERLVQKGKNKRLALIAVANKLIKQAFAVLKSKTLYNEDYLLVKGA

SEQ ID NO: 208820 - protein, 368 aa, unidentified
MSLREEILFVALELSNKIWKLCFGDGRQVRQRSIPARDETALLQEVQRAKEKLGLAPSARVVCCYEAGRDGFWVDRMLRSHGFENYVMDPASIEVPRRARTRKTDRLDAEKLLNLLVRAELWGQRKAFSVVRVPTQIQEAALRVHRERERLVKERTGHRGRMKSLCVLHGVQVSNPATVALETLRDWQGQPLPAEWVTEFGREQQRLRLVEAQLSGLEKQQAEALKQPQTVAVQKARKLCQLKAVGTQSGWVLSHECFGWRTFANRRHVGSFAGLTGTPFDSGDTRREQGISKAGSGRVRTTMIELAWGWVRWQPHSALTRWFVERYVRAGTPRSKRKGIVALARKLLVALWKYVEQDVVPEGAILKA

SEQ ID NO: 208821 - protein, 320 aa, unidentified
MSILGLDISKNTFHATVFHHNKSYRRTFGKQPKGFAELHRWLSKKAVACGHACMEATGIYWEQVAHVLHELGWTVSVITPLRIKAFAQTDLARNKTDRYDSWLIARFCQEKRPAAWGPPSPTQRKLQALSRHLEALEQTLQQQRNRLEACVDETVQQSLQEIITQLEHHITKIKQQIQGHIDDTPELKRDQDLLCSITGIGPKTAQKIMAEVPTMTTYPNARKVAAHAGVTPKHVQSGTSIHGKPKLSKIGNARLRKALYVPAISAIQHNPIIKDFANRLRQNGKTEMCIIGAVMRTLLHLSYGVLKHNQPFDPNFLHNA

SEQ ID NO: 208822 - protein, 480 aa, unidentified
MNVKTRRTKKQVNVENQAINLLSKEELNKKIEVVEKELRSYTWRELETNGKFAKNDKLSFITDDMLIAGCDIGSETHYIRAIDVRGRELSSGAFEFSNTSEGFANARAWVLALAAKNDKKQIVLGLEPTGHYWFALAAWMISNGISVVQVNPYAIKQSKEIEDNSQLKDDRKDPKLIANLVKDGNYGMPYLPEKVYADMRRLSMFRDQLTEDRIRNINRLHRELKIYFPEYMDAFGKIDGAFTLEVLKVSAIPSDITALGAEGIKNIWHNEKLRGRGYSRANEIVSYAEKSVGLTDGTDVGREAVKWYAEQILRLDEQLSEIESALHEKCREIPYAENILAINGVGENILAGILAEMGDISRFDDVKEIQKLSGMGLVACSSGKHKGQTKISHRGRKRLRYWLFQAAKSAVSHADEFKQLHEYYTTRSNNPLKKMQSLVVIACKILRVIYTILKTGTTYDPQKLLKDIKHPEASQAPMAA

SEQ ID NO: 208823 - protein, 362 aa, unidentified
MSNTVPSITVPSIGVIVGVDTHKLTHAAVAISALGARLGAITIPVNGKGYRALKTWAQSMGPVRAFGIEGTGSYGAGLSRFLCEHGHTVLEVNRPNRQLRHQKGKDDPLDAESAARAVLAGQATALPKSGTSTVEMIRHFKVARDTAVKGRTQAMQTLKAIIVSSPHALREQLDCLAGKMTLIRHVAALRPGPLTSTTASAKTSLRAIARRWLALDAEIKGHDAHLEQMTQQLAPELVQAHGMGAGTAAEMLLLVGDNPERIRSEGALAKLCGACPIPASSGKTSRHRLNRGSNRQANAALYRVVIVRMRGHQPTLDYIRRRTAEGKSKPEIIRCLKRFVAREIFGYLCRPPNAAPPGQMAA

SEQ ID NO: 208824 - protein, 352 aa, unidentified
MAKNDFDELMSVGVDIGKDVFHLVGFDRDGQLVLRKKIKRMALVATFEELPRCIVGMEACMSAHFVSRTLRKMGFESRIIPAIYVQPFNKGQKNDYNDAEAIAEAALRPNLKTVSEKTREQLDLQALHRVRSRLVSRRTATMNQIRAFLIEQGITVRKSVAALRTSLQAILDNRDDEVSLRMRKLILGLQQDWIWIDKRIEMTTSEIEDISKSEASCQRLMTIPGIGPIISTAVVAAVGNGEAYDRGRDFAAWLGLVPRQHSTGGRTILGRITKRGSRYLRMLFVQAAQVIMMRPKNWPKFSFGPWLESAATRMQHNKLGVALANKLARIAWSVLNSGKDFDWKEKEFATAI

SEQ ID NO: 208825 - protein, 343 aa, unidentified
MQTVTTIGLDIAKSVFQVHGVDAEGKVLIRRQLKRRYVLAFFEKLPPCLVGIEACASSHHWSRQLKALGHTVRLMPPAYVKPYVKRQKNDATDAEAICEAVTRANMRFVETKTPEQQSCLMLHRTRQLFIRQQTSVINAIRAHLAEFGIVAPVGRKGVEQLLAVVADASDQRVPELARACVAALGAQLRRLKEQILEFDRRILAWHRSNETSRRLDEIPGIGPALATALVASVADPKAFRSGRHFSAWLGLVPKQHSSGGKDRLGSISKQGDRYLRSLFTAGALAVIRYAKIHGTKHRPWLAALLARRPTKVAAIALANKIARIAWAMMVRGEPYKEPVALAA

SEQ ID NO: 208826 - protein, 415 aa, unidentified
MKRRPSRKHSRSERRPILAGNRAVVGIDIGKRKHAATAVSPQGEVIARLASFPNTREGVDLLERKVLRKVGGPRRTLVAMEATGHYWMCLYHELVRRGYRCVVLNPVQTHASFRARIRKTTTDKIDSLGIARFILTGNAKATRVPDEKTTELRLLVRHRRRLLQARTDMERYAGTLVDRVFPEYEGLFSKPFLPSARAMVREIGIAPEEIASRKDEVRDTLHRASRGRIAPEKVDLLLQRAKRSIGSRQAESLATEQLRSVFDYTETIQRQIGEIEEQLESRIEEMDSPLLSLGINPALAATIHAETDPITDFPGPDQYVAYTGLDPSVHESGDTIRGRSKISKRGSPVLRSALYLTAFSVYRKHDYFHRSYQKHRRQGRSHTSALVVVAHRLARVVWRLLTDNRKFTKRPPKRP

SEQ ID NO: 208827 - protein, 345 aa, unidentified
MTLTFFVGIDVSLDSSSICVIDERGVIIKEGKTDSDPTAIARFVRHKGRKIEHLGLETGSLSQWLHAGLSREGFRVTVMEARHVRAAFAAMRVKTDRNDARGIAQLIRLGWFKAVHVKAPSAQETRTLLNGRRFLVDKLTGIENSMRASLRNFGLKMGHVTRSKWAARARELAVGIPALELVIESLLRVRDALRQELRTIDRQLLDEAKADPVVRMLMTAPGVGAVVALTFKSAVDDPIRFKRVRDVGPWLGLTPSRYQSGRTDIVGHITKAGDAGVRTALYEAATTVLSRVTRWSTIKNWGMRVASRSGAKKARVAIARKLAIVLLTMWRSQTPFRWSATQASA

SEQ ID NO: 208828 - protein, 410 aa, unidentified
MRYYLGVDWADQTHAVWVVDETGSKLTACAVAHTAEGLREWGRELDAWRAQGIELWAAIERPDGRVVDFLLDHSVVVYPVNPKALDRARDRFRQSGAKSDPFDARVLADFLRTDHAHLRALQPSSEAAQELKLLTEDCQRHIRQQTRLVNQLTATLKAYYPRALEIAEVPSALMREFLPAYPTPEALTAVTERQWQRWARAHRLSETRTADLWAVLRQPQLPVPAHVVRAKARLMHTLMEQLRPVVAAVAQYRTAIDDFFARMPAAQWARTLPIGKHGITAPTLWARLGDAPGRWESFRHLQAHAGTVPVTKRSGKQQRVVQFRFACDKALRYVVDQVAYLSLLSSAWARAYYDQQRARGHSHRQALRALGAKWLKIIFVMWQRQVPYDEQSHLATMARQQLRQHQERLA

SEQ ID NO: 208829 - protein, 434 aa, unidentified
MSNLEKIIKNCAGIDIGSEKVFVAMEGHPVRHFRTFTASYKELVVYLREKGIEHVAMEATGIYWITLYDILESSGFDVCLVNPADSKNLPGRKTDVQDCQWIQQLYSYGLLRKSYVPKDIVRKLRVYTRMREDKLQMASTHIQHMQKALTQMNIRLPEVLSQTHGVSGLSMIKAILEGERNPQVLLNHCTSDLKKRKGADIILALEGNYKAEYIFELQQAYDGYLFYLNQVKSCDAETEKILIEFNKKSGNGFTDGNKIKPIRHNKPEIKHLHELLLGIHGANPTVLPGLTDYSLMRLTAELGNNIMQWPNVKSFVSWLGLAPGKNQTGKTNKRSKKRANTRSGQIFKQAAQSLLISKQPGLGVFARKIKARRGAAVAIKATARKLAEYYYKVFAQGMEYVEKGVVLYEQKLKEQQLRFLTKKAAELNMQLIYN

SEQ ID NO: 208830 - protein, 362 aa, unidentified
MTETMPRVGLDVHANQTHVAMLDVHTGELARRRVQGPPESSLGYLLELGPQLVAVYEAGPTGFALARAARELGIDLRVAAPGLIPRGPCDRVKTDARDAERLARLLAAGELSFVHVPSVEEECFRDLIRAREDVRGDLMRARHRLSKLLLRKGLRYPGPGKNWTRGHRNWLAKLSFEAPASRAAFADYLAAVCGLEQRRDALEAEIERLWPESPHAESIARLRAFRGVDTLTAAGICAEIGDFHRFAKPKLLAGHLGIVPSERTSDEKRRQGSITKAGPKHARRLLVEAAHHYAHPPRIGESLRRRQQGCDPRVAEIAWRAQRRLHSRWRHLGAHRGKPSGKVAVACARELSAFMWEAATFG

SEQ ID NO: 208831 - protein, 332 aa, unidentified
MIIIGVDFHPEFQQIASVDTDSGEFQEQRLQHREEAERFYRELAGRGVAVRVGMEASGHARWWERLLAELQVELWIGDAAAIRSKRVRKQKTDRQDAQLILQLLLEDRFPRIWIASWENRDLRQLLWHRHRMVQARTRIMNQLQAVALNEGLRCKKRLWRDAGREQLESFPLAPWASRRRRDLLELLDRLTPTIAELTQTIEQEVEKCPEAQRLRTHPGVGALTALAFVLIIGRADRFQCGKQIASYLGLVPLEESSGQRRRLGHITKQGNSLLRFLLVEAAQVTVRSDPEWRSKYFHLAMRRGRKIAKVAMARKLAVRLYWMWRKGWDYEQ

SEQ ID NO: 208832 - protein, 355 aa, unidentified
MSEEKYIGMDVHQATISVAVMDAQGKLIMECLLETKAATIVEFIQGLQGTLSLTFEEGTSAAWLHDLLKPHVSRLVVCDPRKAALLKEGNKSDRIDARKLAELLRTHQLKPVYHGEHGVRTLKELGRSYLTLTKDVTRVMNRIKSLYRSWAIPCSGTTVYAPRHHAEWLAKIGEPGVRVRAERLYQQLDSLQPVRLQARRELLLESHKHPAVKLLRQIPSIGPIRAALLVALLQTPHRFRTKRQLWAYSGFAVETHDSGEYRLVRGKVQRNRERITVRGLNDNHNKDLKNLFKSAAISASTRPGPLHDFYVARIAKGMRPTMARLTLARKIVTITLTIWKKGVSFDPQQLHRRAA

SEQ ID NO: 208833 - protein, 481 aa, unidentified
MPRQKQQPNELGEGNTTTGKGKRGRKQKGMCLGDRPILEPNAAGIDIGAREIFVAVPPDRDEDPVRVFSTFTEDLQKMAKWLMSCGITTVAMESTGVYWIPLYDVLEQNGVKPCLVDARGMKNVPGRRTDWHECQWLQFLHSVGLLRAAFRPDGDVCAVRSVMRHRSEQVLMANQHIQHMHKALTQMNVQLQHVISDITGVTGLAIVDAIIGGQRDPAALAKLRDPHIKASEETIRKSLEGSWRPEHLFTLEQSRKSYQHYQQQITACDEEIEKLVTAFAPRVNPEEKPLPPDRKRKQRGRKKKNVNPKTGFDLRTESYKLFGVDLTQIPGLMAMVLVLFSEVGRDMSRWSTAAHFASWLGLCPDNDISGGRVLWRGLRRVHNRAGDLFRLAAYSLHHDESPLGDYLRRMKSKLGPAGATTATAHKIAIIFYTMVKKQVEYDASLWAQRDAERTQRFEAKLKRQAQQMGYKLVPIEEMPAA

SEQ ID NO: 208834 - protein, 340 aa, unidentified
METIKVNNIIGIDISKKTFDVALLINNKLNESNIFSNNLEGFNKLILWLKSKNTNLNSSLFCMEKTGIYSNMLSNFLSTNKYKLWLEDPLKISKAQGFKRGKNDKIDAIRIAEYAFRFQDKIDLFDPNDEIYQKMNHLFSLRERLVLILGILNKPLFESKGIFDQSFQLILESICSLPILYIKASIKTVDKKLDESLKENTTIKEKYKIVTSVKGIGKQTAIYLLIITRGFTKIKTARKCSCFGGMAPFEYSSGTSVKGRTKVSCFGNKKLKKLIHMGAISILNTKKGEEYEYYCRKVSEGKHKMKVINALRNKILARVFSCIKGNRMYEESYDKYKKAS

SEQ ID NO: 208835 - protein, 406 aa, unidentified
MEVVHERCCGLDVHKKKVVACVLTPEGKEIRTFGTMTEDLQAMCQWIRQHGCTHVAMESTGVYWKPIYNLLEDQGLEILVVNAQHIKQVPGRKTDVKDAEWIAQLLQHGLLKGSYIPSREQRELRELIRYRKSLIRERASEVNRLQKVLEGANIKLASVASNVLGVSGRAILEELIAGNTNEQDMAALAKGRLRNKTKELEQALKGIVRPHQRKLMAIQLQHIDELDELIEEVSAEIERRMHPFDEDLARLEGIPGVGRKAAEMIVAEVGLDMNRFPTAAHLASWAGLCPRNHESAGKRYSGKTRKGNGWLRETMVECARAAARSKNTRLSARYHRIAARRGTKRAAVALAHTLLIIVYHLLKHNVAYHDLGPDYYDRQNRETLIRRHVHRLKQLGVQVVITGEAS

SEQ ID NO: 208836 - protein, 427 aa, unidentified
MSYRIAAVDVHKKMLAVVVTDIAGEGEYQFERRKFGSAPEELRRLAHWLVQLEVEEVVMESTAQYWRPVWGMLELLWKPARQQREGAHKMSGALHLCQARSNHGPRGRKNDFLDAERMVKRLVAEELVLSFVPDEEQRLLRTVTRRKHQLTRAKVGFKNQLESLLEQGHIKLSSLVSDLLGVSARRILKALAEGETDPGVLAALADKGLRATPEQLRDALGASAHLSGAFRRLLKLSLEELQLIEAHIEQLGREAMELLKGHEDVVQRVAEVPGFGPDCAVQMIAEVGVQAEKFLAAKNLSSWVGVCPGNEESAGESQSTRSPKGNRQMRRLLNQAAQSAVKVKGSIFEVIFHRLLPRLGYKQAIWALAHRLCRLLWLILHQGVRYEERGPAVSAKSKRTRAARMIRELKKLGYRVEGGPVPAAAGA

SEQ ID NO: 208837 - protein, 418 aa, unidentified
MDGSITWVGIDAHKKTLVTAVLHPGKRQPEEFTVENDERAIRKLVRRLERGTKGEIRICYEAGPCGYALQRRLESAGRVVCEVIAPSLIPRKPGERIKTDRRDARKLVELYAADTLTAVSPPTPAQEAIRDLCRCREDVRADLGRCRHRLVKMLVRRGYVFKSTSRLWSEAHRRWLAGLEFEDETDRVTIAEYRLAIEQAERRLKAMDGEMEKAAQLPLYRDHVAWLRCFRGIDTTTAMIFVAELHGIDRFESPRQLAAYLGLVPTVHASGDSTRRGAITKTGNGHIRRALVQACWAYRHYASVGAKLRDRRKGQPECVLTIADEAQRRLTTRFRRLLERGKAKNKIVIAIARELVGFLWAALRDDREPARHGARTSARLEGANASAAPRSGPHIRAAKISRTEVGQRRAARKDKRAI

SEQ ID NO: 208838 - protein, 470 aa, unidentified
MSKTIRPAAKMPVIHPQAAGIDVGSVEHFVCVPQDAVPEGESAVRSFGGFSGELDKLVEWLQSCGVKTAAMESTGVFWIPLAQKLEEAGIEVVLVNARHLRQVPGRKTDVKDCQWLQQLHSYGLLQGSFRPGQDICYVRSLMRHRQNLTQSCGREVLHMQKALQQMNVHLHHVVSDLDGETGLRILDAILAGERDPAKLVQLRDALCRKSTPEQMVAALQGDWRPEHLFVLRQALETYRHLLEQLRVCDLAVQEALTKVILPVEEEPVEPAPSNPPASSKPRKKKRFHHRKTGTGLRQDLSGQLARICGVDLTQVTGLNVLGVLIIISEIGLDMSRWRDSKAFSSWLGLCPGNKISGGKVLSSHTAHVVNRVAILLRTVAPAVGRSDTWLGSFHRRMRARLGPAGANTATAHKLATLIYHLLKYKEEYIDVDRVLYEEKLRGKRLARLRKQAEELGFELVQKNQIISQAV

SEQ ID NO: 208839 - protein, 464 aa, unidentified
MANQKLWRSRKERKEWARRLQSENPGLEIVHPRAAGIDVGNVAHYVAVRPDRDPEPVRRFECFTADLYRLADWLHQCGVKTVAMQSTGVYWIPIYGILEERGFQVYLVNARHTKNLPGRKSDVQESQWLLKLHTYGLLNNSFQPPSEIRVLRTYWRQRGEHVQGAATCIQRMQKALTQMNVQIANVISDVSGLTGQTIIRAMVAGERDPQKLAELSDPRIHASREEVAKSLEGNWRPELLFILQQEVEMYDTYQQRIAECDQQLQKHLASFVGTVSPQPTESEPKRKKAKPAKNAPRFELHSELRRITGVDLTRIDGIDVMVAQTLISEVGLDMNRWKTEAHFSSWLGLCPDNSTSGDKVLARGTRRVVNRAATALRMAAVTLMRSRTYLGAQYRRLRTKLGAPKAITAMAHRLARLVYRMLKYGQQYVDKGAEYYEHRYRRQQIEFLKKKASKLGFRITLAQV

SEQ ID NO: 208840 - protein, 408 aa, unidentified
MSIVFGIDVSSRDSSVCVLQSGATREYKITNDTIGFKTLLIDLKEYAEHPQIILEATGVYSRRITRFLDEYDYDYVLLNPLKAKKEINQGLRRNKTDRNDAYHLALAQDQNQHQPNRKEPDVYHQLQSLSRAYEELTHDIISSKNRLHKYLQLTFPELETIFNNSRGVNYWYLVELFPHCQDVRNLEVSTIAKQIKDFKGYGINRAQKLAIKLKHLADLAYPAVDQDDPERDEVVYYANRLLRLTADRERRSEEMIKLAKTLPNRDLEILMSIPGIAEITAVRILAELGDIRRFSNPNKINAFVGIDPGRYQSGEKDSSLRISKHGNAVARKILYRAIGQIDLAAKTSPCHIADYYERKKQFSQTKGFKKIAIASIHKLLRTIYILIITDQMYDYNVANNNQKDFCRN

SEQ ID NO: 208841 - protein, 426 aa, unidentified
MWDAKRRVLKIKSLKHGIIQDKRGNVMRAVFGIDVSKTSSEVAILVNGEKVHGYSILNDAIGFNRLLGDLKTIHNPEIIFEATGVYSRRLQAFLEECGYAYTRLNPLEAKKQLDSLRVRKTDKIDAEKLAKSQLVHNRKPTYVQEEVYQHLRDLSRFYQNMTEDLVRAKNRLHKVLQVTFPELENLLSTPTGEQYWNLVMAFPCKEFVLSLSQSDLYEIIRQSTSKRISEKRIAYLTDKLIKLAKQSFCAVKKTSPMLEEVRYYAQELLRLSERRQVVLNDMVALAQPLPEYDILRSIPGIAETTATSIIGKLGDIRRFHSANQINAFIGIDLRHYESGNFLAKEHITKRGNPYARKILFKCIHNIASASHTNPCHIADFYEKRKRQSTIASTKPHTIASIHRLIRTMYYLITHNKLYDYSLTQNR

SEQ ID NO: 208842 - protein, 465 aa, unidentified
MEIVHPHAGGIDCGAQQHYVAVPSQSVELGEPYVRCFSAFTEGLDALVEWLKACGVTTVAIESTGVYWIALCQKLEAAGIEVFLVNARHVHHVPGRKTDVKDCQWLQRLHSFGLLSASFRPEDLICRLRSLQRHRLNLVWTAGAEIQHMQKALQQMNLHLHHVVSDITGVSGLRIIDAILAGERAANQLAKLRDHRVYKSTLTQMEAALVGDYRPEHLFVLGQSLQAYRFYQARTQDCDAEIESLLQQLAERFDSSSALGAQLPQPEVLNDAAPSQNPRPAKRKVKRKPQANEPKIDLADYLRRICGVDLTQVIGLNVLSVLLIVSEIGVDMSKWRSAKAFCSWLGLSPRNKISGRKVLDTRTCKVINRVATTLRLAAQSVGRTNTALGIFYRPKTAHLGPAKATTDTARKLACLVYHLLKYKEQYREPDPAAYQLKVQKTILAKIQRQAAALGYKLLPTALVPA

SEQ ID NO: 208843 - protein, 356 aa, unidentified
MYGLKHQKEKRSMDHFAGLDVSVKETSVCIVDDSGKIVREVKVASEPEALLAVLKNPSYHFKRIGLEAGPLSQWLFSALAEAELPVVCVETRHMQAVLKAQINKTDRNDARGIAQMMRVGLYRPVHVKTLRSQKLRMLLTHRKLLQSKAIAIDNDLRGTLRNFGLKVGMVGTVKFEARIRELVETLPDLAVLVEPLLVVRRVLREQFVILHRRLLAIVRDDEVCRRLMTIPGVGPVVALTYRATVDVPARFRKSKAVGAVFGLTCSKYQSGEVDWSGRISRCGDEMMRVMLYEAAQSMMRSKKWSWLKAWAMQIARRRGMRKAIVALARRLAVIMHRIWVDGTEFRWTREQVPAAA

SEQ ID NO: 208844 - protein, 359 aa, unidentified
MREQRNKISFRGQKIYVGIDVHLKSWSVTVLSETSVLKKFSQHPSPEALYGFLTRSYPGAEYHSVYEAGFCGFWIHERLTALGIDNIVVNPADVPTKSSEKLRKTDTVDSGKLARSLRANELKGIYTPDSVSLEMGSLIRLKNSITKDTTRQKNRLKSQLRYLGIEIPQEFLTPFSNWSKRFFAWLKEIETLTPSGRQALDIHIRHLEELRRQKLEMTRALRTLAKTDRFREPLRLIMSVPGFGQATGMAFLSEICDITRFRNAEQLAAYIGMIPMCHSSGEKDGTGDITIRKHAVMRCNLIEAAWVAVRQDPAMNLFYTEQCKRMPKSKAIVKVARKLVNRLFFVLKHQTEYVNSIVS

SEQ ID NO: 208845 - protein, 349 aa, unidentified
MLADQLDYVVGVDTHLDEHVLAVVAAPTGAVVARQAVRASEGGYAAALRFAGEAAHGARAWAIEGAGHYGAGFARYLAGRGETVLEVSRTPRAERRLRGKDDALDAVRSARAALASETLALPRNGERREALRLLLVARRSAVDVRREALGQLRGVIVTAPDRLREELRVLPTGRLLERCSRLRRSSTAGADELATRLVLRSLARRIEAATAEAAELEREILAHVRALAPALLDEPGVGPIVAAQLIVAWSHRGRLRSEAAFARLAGVAPVPASSGQTRRYRLSRGGDRQLNRALHTVILHRRQHDPATKDYIARRTAEGKSRREATRLLKRYLARHLYRLLQNQEPLLV

SEQ ID NO: 208846 - protein, 383 aa, unidentified
MENRPLKFGARRIFGLDLSKKTLKACRLDEDSGFEKQNIFDEKMTDDGRHHLASRLRKGDYVAMEGGSSTSFLARYLMENTEAEIFVLNPCKLHIIFESACKTDKQDCIKIAKYIRDTNPSNWCLIPVPTYEETSLRSLINSHISTKQERTRAINQLHAFFNLNGISFLKKSDLGDSDRRHDLVDHYFSQDDLRGMQARLMLQDIDNIELSTDCYEDMIRKALLSRPRESLIWMSIPGVGPLTALACVAYIGDGKRFSTPDQLRNYVGLTPRIDQSGIREVIYGVNHYGCMPVRRNIVQAAWSVSNLSFDCRFRQRWKELKASGKKGQKIAVKVANDMLTMGWTLLKKGELYNGLGDFSYLKRKLRTYKMTAIDFSCFGECMK

SEQ ID NO: 208847 - protein, 429 aa, unidentified
MHYTQNEKLEQVTEKTLVIGVDIGSENHHARAFNYRGIEYSQKDFKFGNDAKGFEAFQGWMQGYVRRNGAKKVIVGFEPTGHYWYNFADFLKALGIMFVMVAPQHVKHSKEMDDNTQRKDDHKDPRVIAKLVTEGRYIIPYVPEGIYAELRTAYGRYCELTETKVRLENRITRWFDIYFPEYREVYKNSGAKTGMMVLRIAPLPADVLKLGADGINQLWRSVKVKAAGMKRAETLVAAAARSTGRAGGDAVRRDLWQMLEEYELVTRHLAEMQIMLEELVAQIDGAERLLRIKGVGFITVAGFFAEVGDLSRFTDPKQIQKLAGLSVVTPDSSGKHNGQSEISRRGRKRLRMILFRAAMSLVKSNREMKMLHEYYTTREQNPLKKMQSLMAIAGKIIRVFYGIMRNGTEYDPVRLLTDIKRPGTDKSAA

SEQ ID NO: 208848 - protein, 335 aa, unidentified
MIENYLGVDVHQKRCYVVWMDAAGHVQDHRRLANEEMPGYLDTLPKNTLAVIEATRSWQHIYDLLQEKLQQVELVHPQKAKAIASARIKTDKIDANTLAHLARTDLLPTAYAPPPAIRHGRDLARHRARLVRDRSRLKNRVHDILGRYGLSSPVSDLFGKQGRLFLSQQLPRLSPIHQTILTDILTLIDGLNERIKAASRDINALAKDEPRIRLLQSIPGIGTYSAWLILMEIGDIHRFSSPKQLCSYAGLVPSTYSSDERTHHGPITKQGSSWLRWIMVEAAQKAPLFSPHLARTFQRISYRRGKMAARVALARKMLTIIYYMLKRGELYQESG

SEQ ID NO: 208849 - protein, 349 aa, unidentified
MGQVTYVGLDVHKNSITAVFGPAKTKPESMKVKNESTGWERLAKRLEGCDVRSVYEASSCGFEVHDVMSGRGWDVIVVAPTLMPKSVRNKKRKTDLEDALELRNHLVAHWEAGTWLPGVWIPPQVVRQDRELVRRRLAIGGKLTRVKSSIKSLLQIHPVRPAPEFKTQWSLEHRAWLKSLCGEKSALARPVKTALASMLRELEFLVGEGKGLDKELKRLAEESRHKEQVEAVTEVVGVGLLTAMTFLTELGDVTRFQNRKQVGSYLGLTPTSYESGEAEDRKGHITRMGPARIRKVLNQAAWCGVQRDPQRAARYAEASEKSGSKKAIVGVMRKLGIELWHRAVAAKTA

SEQ ID NO: 208850 - protein, 438 aa, unidentified
MSNKVFFNLDELFISVGIDVGADFSWMSIALPNQQLLGKPYKILHSSMDSLTTAVSKIKEAEELYSLESRIFLESTGIYHYPLFCYLRDKGFNCSVINPIITKNSTNINIRKVHNDRFDSKKASLVGLKPDLKGSLMPSDLALNCRNLCREYYDLMDNRSAYVNKLQGELRMAFPQYLGIFSKVTTNTSLTLLDKYTSPNAFLEADMQEIIDTIKSTARFGLTYAHNKYNAIIQAAHDANEFGHIIDSNIKRIRLYISFIRKYDEEIESILDAMHELVDTNEDTDFVKQIHLIESFKGAGFLSAISLMGEIGDFSAFSKPKQLFAYFGLDPAVKQSGKFEGTKIQISKRGSSIARRVIHTLTLQSISVSRTGEAKNPVLRDYYLEKCKSKPKLVAMGAVSHKVCNIIFAILRDNKPFEIITPQEHIKQYNAAKCDMAA

SEQ ID NO: 208851 - protein, 405 aa, unidentified
MKVREKVWVGIDVGKAAHHACVVDGAGKAVFSQKVVNGQSAIEALIARVKSEAVEVVWAVDMTSGAAGLLLALLAATGDRVVYVPGRLVNRMAGAFAGEGKTDAKDARTIAETARMRGDLAPITSPDQIVTDLKVLVARRENLMSDWVRGINQLREMLASIFPALERAFDYSTRSALILLTGFQTPAGLRAAGHDGVRTYLLEHGAWAKGVAAMTDKALAAAAEQTIALPGEAVTAPMIARLARQLLDLDREIKDLDKQLTERFGEHPHAAAIASVDGFGPILGAQLLAEAGGDLRGVFGNAGRLAAYAGLAPVPRDSGKIRGNLHRPKRYHRGMRKVFYMAALSSIRRADGPSRAFYQKKRAEGKAHTQALIALARRLIDVIWALTRDNRTFTNEAPAPISAAA

SEQ ID NO: 208852 - protein, 364 aa, unidentified
MNKCHSNTELSSLEGTRGQFNGGRCAIKLGIDVHQDFYVVVEQVGGTNPKPAQRFHKQAFLHWAAKLKQSGAEMHAVYEACGFGFSLQRQLAALGIDCHVVCPQKLDERNKRVKTDSLDAKALVLKLDRFVQGNRDALAIVRVPTEEEEQARAIHRQREQLVGTRKRLEAQGRSLLVNHGLEPVQNWWKPRTFAALAVPRWMRELLLNSQPILLALQEKIALLTLQLQSAAAPNQPRGLGKMTSVIIDREIGDWRRFNNRRQIASYTGLCPGEYSSGNTRLQSCVTKHGNPRLRAALVELAWRLVRFQPNYEPVVKWRQILAKGALATGGARKKAIVAVARQLAVDLWRIKTARLTAEQLGLTI

SEQ ID NO: 208853 - protein, 392 aa, unidentified
MKDFTTYVGMDVHKNQHHVAMLLPGSQQPKQWSIEASSAEVRRMVQRVRKDAPGPVVFCYEAGVCGFALKRLIEAQGARCIVIAPSLTPVKPGQRVHTDRRDAKGLACYLQAGMLTEVQPPSQEEEASRDLVRCRDAARKDLMRIRHQVSKLLMRRGVYYVKGKNWSAAYMRWLREVRFEQAMDEVVFRDYLAELDHRTGRLEHLDEHLKLLSQTAAYQEAVGWLRCFRGIDTVTAMVLVTELYAFGRFTSARALMSFLGLTPSESSSGESRRLGGITKAGNGLVRRVLVEAAWHQQHVPRRGKLVQARRVGQPDWVIRQAERAERRLYRRYWRLVHGGKLPVKAATAVARELAGFIWAVLFYRGPAPGDSRADSRAENPGGRKEQAKAGRG

SEQ ID NO: 208854 - protein, 399 aa, unidentified
MNHNILLYIGIDVSKDKHDICIKSNDGNVLKRFQIKNTNKDLNKLYTTVDKLKSNAGENTNVLFGMEATGVYCFPLYSALKRDGYPVKLYNPIQTYGYRKMEIRKTKTDLIDSAIIADMLRYQEPPATTAIDNLILYQLRELCRVRQRNVEKRTKCKIQFVRNLDMVWPGYKSVMKSVYGKTSMALLKQYSVPSIVAAEPFEDIYMLIKQVSRSQMTRERSEEIYNHARNTLTTPEIDSIVSIEIKTLISEIEMYDVQIQALEKKIKQLMEPVDSKIRTIPGIGNILGAMILGEIGDIDKFSSAKKLVAFAGLDPVIRQSGNFKNSTGPISKRGSPQLRSALFMAANVARQNDENLGAYYNGKIENGKHHKSALNALAAKLLRIVYWVLKNDKEYKSIS

SEQ ID NO: 208855 - protein, 462 aa, unidentified
MKIYLGGDVSKGYADWIILSEKKRTVLENFQLDDTYAGHCRLYSMLETCIEQYPGAEIYAAVESTGGYENNWFKTLQSYQKVFNLKVSRINPAGVTFNRKAGMKRNVTDAISALSIAEFMIDHPENIVYDQDDKWKSLCRHWNFVEMQKQQRIQTINQLETILYSANPTLMRFKKGNFPNWLLELITQCPTADKLARAKPNKLAKIPYLSLARAKELVAEANQNIASATDRNAEILVTQIALQIKSFDQNIKSQMELIERDLICPEIELLKSFKGISTISAIGLLLEIETIERFPTVKGFSCYFGLHPKFKQSGDKVIGVRMSKQGSKNMRKILFNIAKGAITYNPLITEVYEKKISHGMAKMSAIGVCMHKILRIIYGILKNKQAYNPLIDKQNCERSKEKQQDKLQQENANIEKNRRYQEFDVTAPISRKQTKKRKEHDLSQCEITSQSTGSTCSSETKL

SEQ ID NO: 208856 - protein, 343 aa, unidentified
MQAVTTIGLDIAKSVFQIHAVDAAGNVIVRRQLKRRYVLPFFQKLPACLIGMEACASSHHWSRELTALGHTVRLMPAAYVKPYVKRQKNDAADAEAICEAVSRANMRFVPTKTAEQQSCLLLHRTRHLFIRQQTAVINAIRAHLAEFGIVAPVGRNGVEQLLDVVADTSDKRLPEIARACVLALGAQLRTLKVQILNFDRQIMAWHRSNEASRRLDEIPGVGPALATALVASVADPKAFRSGRNFSAWIGLVPKQHSSGGKDKLGSISKQGDRYLRSLFTAGALAVIRYAKIHGSKHRPWLTTLLARRPTKVVAIALANKIARMAWALMARGDRYREPFVLAA

SEQ ID NO: 208857 - protein, 418 aa, unidentified
MNEELIARLSRRYLALDIHKHYSVVAGVNFEGQMVLEPVRIEHADLEVWLAKHIQPTDYVVIESTTNAWHIYDLLEPLAEKVLVANPIKVKQIAQARVKTDIRDTLILARLLAANMVPAIWVPPAHVRNLRYLLSQRRHLVGMHTATVNRMHSVAHRHHLSHARGKRFNEKNTKWQHDDELSDSEQFQLELDMSTKEHLAEQGDKITKKLAHMSHQKPWAESMMYLMQLPGFGVITGMTVLAAIGDISRFKDFKKLTSYSGLTPGVEQSGTKNRGKKITKEGRKDLRWAMVEVARRAVKSDPLWTHRFVELCRRMHKNQAIVAIARRLLELVWYVLSRKQAYRNFSDERIAYKYLTWSWQLSERDRDGLTRQQFTRYYLMRLGIGHDLERIALNPRYPRRLASEAEVLALRPELARTE

SEQ ID NO: 208858 - protein, 377 aa, unidentified
MKAPSTRPAAVLGLDVGKSSHWACLIDRDGEVLDSAPVRNREAELDALFASAPAGTLVVVDQFRNIGSLAVRRARAAGLGVAYLPGLAASRAAGLFAGEAKTDERDAAVIARTALGVPDSLSGVPGRGEALEAARALSSQRDHVVACATRDKNRLRAVLLESCPALEAAVDLSDRRWLELLAGFGGAWGIARSGAEGPRAEAAGEVAAASTAPPPALVEAENRQVRFLAARISEALDEAGALEAETAALLEGDETYACLLTVPGIGPRTAAQLAVSVDIGRFPDHDHLASYCGIAPRVRSSGTSVRSVRASRRGDARLKSLLIFSCNSLVRSSGRYGEYYRACRARGMGHGRALKAVARKRLRAIYAVMRDRVPYRE

SEQ ID NO: 208859 - protein, 420 aa, unidentified
MSYYRGNHGNHSGVFRMYYVGIDWADEAHHAYITDDSGQKLASFPIEHSEKGMSKLQSRVYRFSRKLDNVLFSIETDKGLVTSTIMDWGYTVYPINPKAVNRYRDRYKVSGVKSDELDACVLANILRTDRSRFQPILSDSELARELKVLTRDRDKLVGDRTRLSNRLTAILKAYYPAALELFSEVAQPITLSFLRKYPTYDDARKTSFAEFKRFLSENHYPHPKRAQGIYEKLQQPHLECEDMLVRTKSRLMLTTVSQLQILMDEIKSYEKEIEKLLQSHPDSDIFLSLPGAGDILSARFIAECGDNRDRYKKAKDVQAESGSAPITIQSGKKKYVKFRRSCKKPFRKTIHSFAFCSINECTWAREHYDQQIATGKTHSQAVRSLSNKWMKIIFTLWKRHQTYDEEHHLLMKQKHAVVAA

SEQ ID NO: 208860 - protein, 317 aa, unidentified
MQANSKKVFVGIDVSKDWVDVAVRPTGEAWNSVQDEAGVDALVQRLRKLEPHLVVLEATGGYEVPLVVALGTANVPVAVVNPRQVRDFARSMGKLAKTDRLDAAAIAHFGEASGVVAQPLASTEARELEALVARRRQVIQMKVAEQQRRQRALPVVQQRIDRVIAVLEQELGDLDGDLHDRLRQSPLWREREDLLCSVPGVGPALTFTLLAGLPELGTLNRRQIAALVGVAPLSRDSGKLRGQRTCWGGRANVRAALYMPTLVAVRHNPVLAAFYERLLAAGKPKKVALTACMRKLLVILNSMIKHHRCWSPITQIS

SEQ ID NO: 208861 - protein, 402 aa, unidentified
MIFINCLGIDISKSESVVAHYKDEVLVKEMVIQNNQNGYRYLKNYIKHLDSLFILFESTGIYSRGMKRFCEIHKIDYLEMNPLEAKFKTSSLRSWKTDKSDAHKLALLAFRMKDSKVQRHPEEIYFELRERARFHLEMEINQNRLKVELVETLHQTFPGLEKLFTNRYSKIALNIAKAFPHPDFVSTLTHDELVEKVLHSTDKGISVNKAHKYVQKLIEIKNNSFPNVDKSSFLLQKVQYLCDKLLIGIEEMKEFDQEMIDLAKNTTEFENIISIPGIGELTAALLIGELGNIREFKTNKQLNAFVGIDIKRYQSGTSKSRDTINKRGNKKARRLLYLIIMNIIRGRNHYQSHIVDYYYKLREQPHGKTHKTAVIASINRLLKTIHYLIVNNKLYDYQKAPH

SEQ ID NO: 208862 - protein, 345 aa, unidentified
MPIVGGLDIHRKQITFDYLNTVTGEVKRGQIAPADRGHVRAWLARFAGHGDVAFAVEGCAGWRYVAEELAAAGIAAHLGEPADTAALRGRKRHAKTDKTDARHLRALLAEGRLPECWIPPAQILEYRALLETYHDLRRAHTAWVQRIHAVFFHQGAPPLSEGALRTEPGLAALRAAAATHLSAAGQQQVATALDMLAATEAQLGPLRHQLRQAAAHLTGAKVLTARLYGVGPVTALALTCWLAGKDRFSSSRKAVRFTGLDITVHSSDRKGPPGRLSRQGPPVLRWAVYEAGKTHARTSAPDHGYYATVADRKNSKRAALSEARKIVRQACHILTELGDDALTAA

SEQ ID NO: 208863 - protein, 342 aa, unidentified
MSIIGCDLHTRYQVVAMLETETGEIVTRRLEHEGGEAKRFYAGLGKPALIGIEATGYTQWFERLVGELGHELWVGDPAEIRARAVRRQKTDTRDAEHLLDLLLSDRFPRVWVPTPEERDLRQLLKHRDKLVKMQTSVRNQLHFLAMSQGVCRKRKLWSEHGRQELEGLELGEWGSRRRQELLGLLDRLGPGIEELDKAVKAQAARRPEAAELMQQSGVGPVTALAFVLTVGPIQRFPSSRKLVSYLGLNPRENSSGGHQRLGHISKQGNEMLRWLLVEAGHTAARLDPLLERRYLRLKFRRGANVAKVAIARRLAVRLYWRLRRRAAGSHVQQPVLAHGGCN

SEQ ID NO: 208864 - protein, 335 aa, unidentified
MQIYGIDLAKEKFDVSFFDLTSKKVSNQPSHKVVKNNFKSIGRFLETLPSDAVLVAEHTGVYGDTLLKCCMDSNVKIAFVGGYVIHRYRATPDRAKTDVLDCALLREFGERYPDKLKYKTFPEEALYELRQLARHREMLVEQRKQLITADKSEDCRPVRSLAVKRSMDRIKEMLDTEIAETEKEMLKVINGHESIHHNYELVKSVDGVGLITAVELLVKTENFTKITTARQYAAYAGTAPYEKSSGKMDKGAHISKIGNRRSKTLLYICAESARLHNKEIKLYYERRTLIDKKPRHYVLNAIANKLLRIIFTLVEKGEYYDANFIRQDPRVVKYN

SEQ ID NO: 208865 - protein, 380 aa, unidentified
MIIGLDVHKDWVYVTRMEKDGKITEQYEMKNAEESWNKFVGKYLLEMPEIALEASTSGKYVARILRNAGFSVYIADPKKLALIFKSSKKNDKSDSEKLAKLLRLNEFPEAYLPSREYEEMRTITRHRKYLGEEIVRIKNKVHSILSLNGIKIKATDIFGKKGLRELSKSIEKLSYSEKIVINDMLTRIIDIKERIEKSENEMAKIGKDREDVKKLMTIPGINIYISTGIIGEIGDIQRFRNKESLASYAGLVPRQDQSGKNDRKGHITKEGPSLLRYLLILAAHTVIKYSKKMNNKYHSLVRRIGKNRAIVAIARILAETIFIMLKKNVDFEDEITPLTEKKVNKMIERAKLVVGEINIKESIKLISSKRFRLLSNKPFS

SEQ ID NO: 208866 - protein, 349 aa, unidentified
MNNINVIGIDLAKNVFQLHGINIQGKVTLKKRLTRDKLLPQIAQINQCVIGIEACGGSHYWARKFKSLGHEVKMMSPQYVKPYIKTNKNDANDAEGICEAVTRPTMRFVPIKTIEQQDILSIHRVKSRLIENRTQLANQIRGLLMECGIAIKKGITQLKIIPTILADEKNELSYHGRELIEDLYSEFLELKNKITRYEEKIKIFAKKDKRCVCLETIPGIGKITATAAVAMVGNGEVFKKGRHFSAWLGLVPRQNSNGDKNKLLGISKRGNCYLRTLFIHGARAAINASLKKDKTDKVSVWIKQLVERCGINKATVALANKNARIAWALLVSKNCYNGKYACGFDESNS

SEQ ID NO: 208867 - protein, 290 aa, unidentified
MKSYKRVIGIDISNERLDIADSNAKIAHEVDYAIDAIKSKILKFIKKPSETLVVCEATGGLEYTLVDVLHDAKIDVVVANPARIRDFAKGHGFLEKSDKIDARVLQLYGQQVTVSLAKPRTLQERNFIALTRRRTQLLQLISQESNRLRQSNDPQVKAFVEEMLKSLKTQMKTVDSSIEKALEEQAKTNPSIDIIRSVPGVGPVMTATLVAELPELGTISRTKIAKLVGVAPMIKQSGKSDERRRARGGRGGVRRVLYMATLAATQKNEVIKKRYVKLVASRKSKKVALV

SEQ ID NO: 208868 - protein, 335 aa, unidentified
MLFSGIDLHKRSLVIHTLDADGTTAREAELKSDRAAVMAYFGTLAGPHRAVVECVQSWYWLRDLLAPAGVDLRLAHAKYVKAISYAKVKTDRVDARMLAQLLRVGLIPEAHMIGAEHRETRDLLRSRLQLVTRAVRCQHAVGSLLEKYNVATPAELPELARMQATLQDEQRTLLRTHIKRVEATLKQRLLPTADVQRLVWVPGIGKLGAYALVLEIDDVTRFPTVRHFHSYCRLVPGADNSAGKTRHKRSRDGNRYLKQVFHTAAIRAAQYHPEIRQEYRRLARRKGKIIARALIAKELASIVYFVLRKQEAFNGRFRGHVLTPKPAVWPRLASP

SEQ ID NO: 208869 - protein, 430 aa, unidentified
MKSNTQNAKIEAITEKTLVLGIDVGSETHYARAFDYRGIEYSKKPFKFSNTEAGFVTFKEWILDLKERHEKDKVVPGMEPTGHYWFNLGKFLQDNEMKPVLVNPHHVKKSKELDDNNPTKNDRKDPKVIAGLVREGRYMIPYLPDGVYADLRTASNIRFQLQAELTRIQNRISRWFNIYFPEYRTVYGKPDAKSGMLLLKAAPLPEDILTLGIDGVNQIWRDAKLRAVGKARAKTLIEAAEHSVGSKEGAVSARMEIRMLLEDYESRNTRLQEVMVLIEELVRKIPMAEKLLEIKGVGIRTVSGFLAEVGDISRFNNPKELQKLAGLALVENSSGKHKGETTISRRGRKRLRYLLFEVAMSLVSKNQEFRELHNYYTTRRLNPLKKMQSLMAIAAKLIRVFYAMLTKGVDYDPKKMVSDIKRPAVYLQAA

SEQ ID NO: 208870 - protein, 350 aa, unidentified
MKSLFIGIDVSKEKLDLCIQSKGKVVKEWKLPNTAAAIKSSFKSLQKEHGVEKSAFLVCAEHTGQYTYPLMCACEEIGFDLWLDNPAQIKHRSGIKRGDNDRLAARNIADYAARFQDKAQLFSLPQKNIASLRQLVSERDLYVSDRGKYQGQLTDQKRFMNEDDYAKKSKRLKSLIEGLDEAITTVEKEMEQLIKRDDVLSNQYDLLCSIGGVGKQTSVKMIAETNAFKDFDNGRKFCCHAGVAPFQYTSGTSKRSRNKVSHRADKSIKTILHMAALSAATRKKDGELREYYLRKVGEGKNEMSVLNAVRAKLVLRMFAVIKNNKKYDKNFRTPDVAQTKLSRFYRLVLN

SEQ ID NO: 208871 - protein, 341 aa, unidentified
MSDYSYFCGIDLAKNHFSLHAVDQNAKVILHKSVTRSKLLTTIANMPLIRIGVEACGGAHYWARTLNKLGHDARIMAVKYVIPYRTKGKNDLNDAVAICEAVQRPSTRFVPVKSPEQQAILSVHRMREHWVRERTALMNRMRALLSEFGLVIPVGRSSLMKQVTLMLEDAENELPHLARTVIADAYHHLGELNQRIADTEQVFDSFAKVSANVQRVMKVRGIGPQTATAILASIGNGSQFDKSRDFSAWLGLVPKQYSTGGKPRLGRITKHGDKYLRTLLVHGARTVIANLGDKQDKLSQWCRGVLERRGMNRAIVALAAKNARIIWSLLHNQTEYENYAA

SEQ ID NO: 208872 - protein, 346 aa, unidentified
MKQITTIGLDLAKQIFQVHAADAGGVPIFNRKLRRAEVLRFFEKTPACLVGMEACGSAHYWAREIRALGHDVRLIPPVYVKPFVKRGKTDAADAEAISEAVTRKTMRFVPAKSTDQQAAAVVLKTRALLVNQRTQMINALRAHLSEFGIIAAAGTTKVAGLISIVRDETDLRLPKAARHALMEVASQIDALKAQIERLEKVIVATVKRDDDARRLVTIPGVGAITAASVRALVPDPGGFKSGRHFAAWLGLTPKPHSSGGKERLGRISKMGNPVLRSLLVVGATAVLGHARGNPKASRWITALLARRPYKIVAVALANKMARIIWVLLARGGTYQENGARNQIATA

SEQ ID NO: 208873 - protein, 350 aa, unidentified
MKKSSTRSRTIVGLDLSDKQSTFVVLDRGGKVVEEGKVRTTPSALAQQFRGAPSRIAMETGCHSPWVSRQLSEMGHEVIVANPRQVHLISKSYRKSDRQDALILARVARLDPALLGPVRHRSEEAQVDLALLRSRDALVATRTALVNHVRGSVKSLGERLPGCSAASFHKKVAAHIPAALRLALGPVLASISELTAQIRAIDKEVMRLLKKYPAARALKEQIHGVGVLTALAFVLTLEDHTRFAKSREVGAYLGLTRKRRESGESEPELHITKAGDPFLRRLLVQCAHYILGPFGRQSDLRRWGMALAARLGRKRAIIAVARKLAVLMHRLWTTGEVYQPLRQLPAQAAA

SEQ ID NO: 208874 - protein, 414 aa, unidentified
MDVLYPRCVGLDVHKRTVTAACRLREADGSEQVKARTFSTMTGSLLKLAEWLAQEQVTHVAMESTGEYWKPVYNLLEGCFEVWVVNSHHVKNLPGRKTDAKDAEWLSELLQHGLVRPSFIPPAPQRDLRELTRCRTNFVRERVNVCNRIQKMLESANIKLASVASDVLGVSGRAMLNALVAGQENPAALAQLSRGRMRKKKEELEEALCGRMRAHHRIMLREMLRQIDSLDESIARLEQAILEYCAPFEEAIALADTIPGIARPTAEALISEVGADMSRFPTAGHLCAWAGIAPGNHESAGKRLSGRIRQGNHALRNALVQAAHAAARSRGTYLSAQFHRIAARRGKKRAVFAVAHSILRALYYMLSRRQEYKDLGDDYFDKRKPERTTHQLVNRLKSLGYDVSIKPKEVAAAA

SEQ ID NO: 208875 - protein, 388 aa, unidentified
MIYVGIDIAKLNHFAAAVSSDGEILIEPFKFTNDYDGFYLLLSKLAPLDQNSIIIGLESTAHYGDNLVRFLINKAFKVCVLNPIQTSSMRKNNVRKTKTDKVDTFVIAKTLMIQDSLRFLTLEDLDYIELKELGRFRQKLVKQRTRLKIQLTSYVDQVFPELQYFFKSGLHQHSVYTLLKEAPTPNAISSMHMTHLAHILEVASHGHFDKDKARELRVLAQKSVGVNDSSLSIQITHTIEQIELLDSQLLHTELEMANLVTCLHSVLMTIPGIGFVNGGIILGEIGDIHRFSEPKKLLAFAGLDPSVHQSGNFQAQRTRMSKRGSKVLRYALMNAAHNVVKNNATFKAYYDAKRAEGRSHYNALGHCAGKLVRVIWKMLTDEVEFNLE

SEQ ID NO: 208876 - protein, 414 aa, unidentified
MALIRWVGRAIGLDVHRDFCVVAICEEGVVRSAGRVPSTPEGLRLLAESLLASDRVALEVTGSCWEVARILEPYVERVVVVSLDDTGISSARAKTDKLDARTLAGLLWKGELDAVWMPDERCQVLRRRLARREQLIRGRTRAKNEIQAVLARRLQAKPGFADLFGVKGRQWLADLELPLEERESVDAGLRQIAFLDAEIAAVDRLIARQALGWPEIRRLMTVSGVNLICAASFLAAIGEPSRFLTSRKLVAYLGLDPKVRQSGEAPARSGRISKRGSANARWALVESAWSVVKQPGPLRAFYERTRARRGHGKAIVATARKLTVLFWCMLTRGEDYAHQRPALTKKKLRQLELTAGARARTTQAAGVWSTNRAILHAERALAEQAEVSYKRMVTDQQAGRPARKVGASATPERA

SEQ ID NO: 208877 - protein, 335 aa, unidentified
MTGGVDTHADTHVVAALDGIGGLLGVQEFAATPAGYSRLLGWLQGFGTVCLVGIEGTGSYGAGLARHMAAAGIRVVEVDRADRQDRRRKGKSDPLDAVSAARAAQSGRASGAPRGRDGQVEAIRALMVAKRTARAQRTQTICQARALILTGPDDIRARFTSHTPAGLVAGLAALRPQPGSMVRYHTLLSLRELGRRAQFLDGQLRRLDELITPLVTARAPGLLRLYGIGPDTAATLLIAAGDHPGRLRSEAAWAHLCAVAPIPASSGKVNRHRLNRGGDRQANHALWRIVITRMGSHPPTRAYVARRTAEGLSKKEIIRCLKRYAAREIYPCLRG

SEQ ID NO: 208878 - protein, 312 aa, unidentified
MAQMVATAGIDVSKLWLDVAVWPTREEIRVSRDAAGLAVLIGWLSEHGVMRVGLEASGGYEREAIDTLQAAGFEVALLNALRVRRFAEAKGRLAKNDRVDARTVAQFTAVIVEEVPPQRRRDLDALTELLTYRRQLKSWCTDCTNQLEHLRDTALRKVIAQRQASFERDLAKIDKQVADLLAEHNDWNALARRLRTVPGVGPVVSASLIALLPELGTLSRRAIASLVGLAPFDDDSGGRQGERHIKGGRKTVRDALYMAALSARQHNPLIAAFAKRLAGKKPKVIITACMRKLLVMLNAMVRDGTDWRAAAA

SEQ ID NO: 208879 - protein, 403 aa, unidentified
MVKYHVGVDVGKDRHHVCIRDLSKDMYCKTFSITNGRSGFMELIAALEKLSPKKSDFLIGVEACSYALNLSYFLMAIGFDLVEVNPFRVGQFRKAQGKKAKTDKIDARTIAAILLLGDHKPLSIPDPILDNLKELTRFRVDLINEKSTMIIHLREALSVLFPEYEKVFRQLDSAGSLALLAAYPGPEHMIGAGEEAVGKTLSLASPRRMSRGMARRIIEAAKRTVGVVQKQPSLGVKISVLAKTIADLQSTIRDLDKQITTLFNSLPCKPRGFPVGRAPSLATIISEIGDIHRYPTLKKFLSHLGWCPQSFQTGNYHLKHPKMSHAGNKYVRRLIWMLSIFAIQFVPRYREYFQRRVSEGKAKMHIIVAVGRKLLSALYAMLKSGMAYDPNWEVNSRPALARR

SEQ ID NO: 208880 - protein, 393 aa, unidentified
MLFIGIDVAADKHDYCVLSSDGKILCEGSFLNSRDGFEEFLRVTERCRLFKDGGGFKIGMESTGHYSANILAFLKANGFDTTLFNALTVKNYITSKTLRRTHTDKLSAKHIARMLATEDYDSVCRQDNPLDRLKSLTRARYRLDKEIQPVKNWHRRLIRLLFPEAIAFFGQIDTSTALALFDALPSAHDIACCNVAKLTSILSAASKGHFKRAKADALKHLAKISIAVYDSGSAFELRQTVRRIKFLEQQKFDFDAEIKSIMLELNSPITSIKGIGYILGAVILAEIGDIRNFATPNKLLAFAGAEPSIYDSGKYSADKTPMAKRGSRYLRRALYLATDKARLNSPSFRAYIDLKRAQGKHFYTAMSHGMKKLCRVIFAVLTTNIPYVEPKSI

SEQ ID NO: 208881 - protein, 349 aa, unidentified
MLADELDYVIGVDTHRDEHVLAVLTAGAGAVVAGEALPANARGYRETLRFAGRYAAGRRAWAIEGTGSYGAGLARFLAGRGETVLEVSRTPRAERRLRGKDDTLDAARTARAALASDTLALPRSGERREALRLLLVARRSAVDVRREALTQLRGVIVTAPERLREELRGLTTGKLLHRCNRLRRSSAASVDELATKLVLRSLARRIEAATLEAEELERDLLGHVRALAPALLDEPGVGPIVAAQLIVAWSHRGRLRSEACFARLAGVAPVPASSGQTVRHRLSRGGDRQLNRALHTIVLHRRQHDQATKDYITKRIADGKTRRDATRQLKRYLARHLYRVLNNQAPLMT

SEQ ID NO: 208882 - protein, 405 aa, unidentified
MIMDNTPQIYVSVDIGCRQHSVAIGLSNGDVLDEFAIFHRPEGFKQFFERIEHHRQRHGGAVAVAMEGYNGYARPLDSLVKVRGYELYNINNLKLARFKEIFPAAAKNDRIDACKGLELFQLRDHLPLAKDVLQEIMPTPRENDMLKRLSRRRRALVDEKSRLQSRLQGDLHAVCPGLLDITKDADNLWFLRFITSVDELTKLSRLRVSTLLKIPGVGRKYADSIVAWQSHASFSHEVEWVGEMIIEDARRILALKNDIKALELRCKMLMQESQAAQLIDSIPGFAVICASELAGEIGTIDRFASERSLALYLGMANLDNSSGKFRGSKAPQHVNKRAKTAMMAAVDKHRKCVPESQRYYEKKRIEGKSHNQAIRALGRQLCRIIFRMLKQNRAYEIRKKIDENT

SEQ ID NO: 208883 - protein, 345 aa, unidentified
MHIASIGIDLGKTTFHLVALGERSKVLVRKKFSRTQLLAYTANLPASLIGMEACSGAHFVGAALREQGHDVRLIPAQFVKPYRKSNKNDFLDAEAIAEAVTKQNMRFVQIKTEEQLDVQAMHRVRDRLVQRRTALINEIRGFLLERGITFPVQPIHLRKNLPTVVEDAEQNLTPRLRWLLNRLWQEWKQTEIDIKTVTDEIERIGDEDERCQRLRQIPGFGPLISTAMVAAIGNGTAFRRGRDLAAWLGVVPRQYSTGGKQKLFGMSKRGNIYLRRMLIHGARAVLFRVKYDTAGLGQWVRRLSQRAPRNKVVVAIANKLARIAWAVLSSGRTYRHQPLQQRAAA

SEQ ID NO: 208884 - protein, 403 aa, unidentified
MTTFYAGLDWASQTHAVCILDEHCNVCEQLEVEHNAAGLATLVRRLRHYGSPPVAIERPSGLIVDTLVEAGLPVVPIHPNVVKATRPRYRSHGAKSDASDAYLLADLLRTDGHRFMPLAPQGDEIRALRALVRGRDDLVATRVQLANQLRSLLESFWPGANAVFADLDSPIALAFIERYPTPESAARLGPKRMAAFCAQHAYCGRRTPEQLLARLRQAAAPTGDELEIDAKGELARSLAKTLQPLVEQIRRLTSRIEHHIASLEDGRILMSFPRAGRVCAAQILAELGSVRERFDSDEHLAAEAGVTPLTYQSGKSKAVAFRWACNHRLRAAMTCLADNSRHAHPWAASIYARARTRGCDHPHAIRILARAWIRVLWRAWQDRKPYDPSLHRGAQLAFIAAKA

SEQ ID NO: 208885 - protein, 347 aa, unidentified
MLHAGLDLSRRRVDVHVLNEAGETLVVDAFPPDADGLAHLVRHVASFREEVHAVIESMNGARFVHDTLELHGWGVEIADALRVKGLAPLACKTDKIDAKVLAELSRRDLVPAIWLPTPSVRAERERARFRLHLVHHRVALKNRIHATLLAFGHPCPVSDLFGESGRALLDRLAIPEPWAGTVSASLRLIDELDDQIDAAERELRRLGANHPYMSLLQTVPGVGWVLAYTIASEVGDIARFESPKKLVGYTGLCPRVYQSGGTDRRGRIAKNGPTYLRWALIEASIHACKNPLYKPAYDRTKARLGRDRGGKVARVELGRKLAEAMWHMLTKGERFAPARSQVVALVA

SEQ ID NO: 208886 - protein, 356 aa, unidentified
MKKIVKQAVGIDVAQKELVVAFGQMHDDWSTAIIATKTFHNTKKGFEMFLKWAKKCAIAELEVTYAMEATGVYHESFAYYLDENKCHVSVVLPNKISSYFKTLDIKTVTDKSAAEAITKFALERKLELWKKPNPLYKKLKQLTRERDQILTDRTVTKNRLHAELSEAEPNSSSMARIKKRINLLTQQENEINKEIQLLIKTNDQLNNIVKRMTSIPGLGDLSAITILAETNGFELIRNKKQLVSYAGLDIKERLSGTSVKGKPKISKRGNRYLRKTMYFPALAAIRSDEKYKSIFTRLVSRHGLKLKAAVAVQRKILELSFIVFKNNINYIPNYGIDDIKTSENNLIFDKVEGSYN

SEQ ID NO: 208887 - protein, 347 aa, unidentified
MTIVETRAITGGVDTHADMHVAAALDSVGGLLGVREFPVTAAGYAGLLGWLGGFGTVSLVGVEGTGSYGAGLTRHMAAAGVRVVEVDRSDRQDRRRQGKSDSLDAVSAARAAQSGRAAGAPKGRDGAVEAIRALMVARRSARRERTQAINQARALIVTGPGELRERFARHTAAQLVAGLAAMRPRPGGDVPGYATAIALRELGRRARFLDTQAGHLQELITPLVAARAPALLALHGVGPDTAALLLIAAGDHPERLRSEAAWAHLCGVAPIPASSGKTARRRLNPGGNRNANHALWRIVITRMNSDPATRAYVERRTAEGLSKKEIIRCLKRYAARQVYPRLRAAAG

SEQ ID NO: 208888 - protein, 443 aa, unidentified
MADVNKTIKHWRFQMNYTQNEKIEQVTDSTMVVGIDIGSQIHYARAFDNRGRELTKRIFSFHNDLEGFNSFNLWAETLKTENKKTAVLIGCEPTGHYWFAFAKYVNDHQKRLVMVNPFSVKKIKELDDNSPKKTDSKDPKTIAKLVVDGRYSIPYMPEGIYAEIRDLVYSRDRIMKQHNISANRIQRWLAIHFPEYLGLYTRFDAISGLAVLEKAPLPKDVIALGVNGIRKIWHDKKMRGRGVTEDRAKTLVEAAHNSVGLDGGIGTKSELYMLLEEHRLWTSQLEAVNKVLEEMILKVPHVEKLLAIKGVGSITIAGFIAEVGDIRRFDSPKQIQKYAGLELVENSSGKHKGRTRISKRGRRKLRKILYQVMVPLLARNKEFRGIYDYYVTRVKNPLKRRQAMVAVSCKLIRVFYAVLTKGVEYDRFKMMSDIHRKSDIIAA

SEQ ID NO: 208889 - protein, 312 aa, unidentified
MDATIVGIDVSKNRLDVAVRPTGEVFAVARDAEGLDTLVTRLKPLAAAVVAVEATGGYETVVAASLAAAGLPVVVVNPAQVRSFAHALGKRAKSDPIDAQVIAHFVEATRPAIRPLPDAETRLFADLMARRRQIVAMMVAESQRQKVVADKRLQKSIARLLAALQKELSSLEALIDEAVRGSPAWRDKEDLLASVPGIGKVIARTLIAELPELGTLDRRQVAALAGLAPWTRQSGTWKGKSFIGGGRADVRAALFIGAMTAARHNPELKAFRDRLVQAGKPKLVALVATARKLLTILNAIVRDQQPWRQQSA

SEQ ID NO: 208890 - protein, 337 aa, unidentified
MIVVGVDVHKQSLTAVAVDEVGRALAEATTADAAGLLVWSASLQGERLWALEDCRQLTRGLERTLLVAGERLVRVPPKLMAPQRRASRMRGKSDPIDALAGARAALREPRLDHPRPGERRLRELKLLVDHRDDLVDERRRAQQRLRWHLHELDPQLAVPAGALDRAIWLDRLARRLARQEQTVQVRIARELVARCRSLTRTILERERELEERTAETAPALLALPGCGTLSAAKLLGEIGPIERFDTDAQLARHAGVAPLEASSGKHRRHRLDRGGNRQLNCALHRIAITQARAHPPARAYLDRKQAEGKSRREALRCLKRQLARTVYTTLKSEPPLT

SEQ ID NO: 208891 - protein, 395 aa, unidentified
MLTYIMVKDSIVHTACGEASVASRAASCGRREIGRAQACQAVTERDPRRSCGNNPNSQMNRHRPTCPASSHSQDWEKTMSEPLFIGIDVAKDTFHVASRPDVINFSLPNSSTGIHQLIKSLKSHSIALIVLEATGGYERPIVAELLQANHKVVVASPRQVRDFARGIGEFAKTDPIDARVLARFAQVVQPKPKQPFSSETDELAGLVRRRSQLIDLRTQELNRRQNIHHPKVGKSIRKMLKILDYQIAELDELIRQHIKDDDDLRQKDKILRSVKGVGPQTSAILLSQLPELGRLNRQQIAALVGVAPYDFRSGRFAGQSHIRGGRKDIRSVLYMAVLSAMRFNPVIHRFANRLLAKGKLFKVVATACIRKLLIILNTMIRNKTLWNPEKILKNT

SEQ ID NO: 208892 - protein, 315 aa, unidentified
MSKSTVEKFVGIDVSKGTLDLCIEPAGETLHVDYDDKGISQVVKRLVEVSPTLIVMEATGGLEMRLAGELSAKSLPVAIINPRQARDFAKATGQLAKTDLVDAATLAAFARAIRPAVRPIKGADTRALDDLVTRRRQLVDMRVQETLRLGTASKIQKKSLAAHITWLDKRITDLDDDLTKRLRASDVWKTKDDLLRGIPGIGAVTSLTMLAKCPELGQLNRREIAALAGVAPLARDSGKHRGKRFIWGGRADVRAVLYMATISAIRFNSRIKPFAERLKQAGKPGKVIIVACMRKLLTIMNTILKNNTPWSPQNA

SEQ ID NO: 208893 - protein, 369 aa, unidentified
MKKNSKNNKEKARQRALQAKSRKMKLTVGIDLGDEWSHCCFLGEEGEIVEECRVKTTREAVKSRFGELKLAVIALEVGTHSRWVSQMLSEFGHEVIVANARELRAITGSDRKSDRVDAEKLARYARVDRRILRPIKHRGEEAQVDLVVLRARGVLVKTRTQLVNSVRGVVKSFGYRMPNCSTERFVKLNNEVPEKLREHLAGLMEVLEHVQKQIEEYDQRVEKLAKEKYPETTVLRQIWGVGEITSVSYVLTIEDKGRFEKSRDVGPYLGLRPRRSQSSESDPELGITKAGDCFLRSLLVECAQRILSKKGPDTALKQFGLRIEARGKKKAKKRAIVAVARKLAVLLHKLWVTGEVYEPFPETTVRKAA

SEQ ID NO: 208894 - protein, 420 aa, unidentified
MATVDIVYPICCGMDVHKNFIVACIATTDDHSKTTHQIRRFSTFTGDLRRLADWLTANNCKDVCMESSGKYWIPVFNILEQTCNVCLTHPKYVKAIKGKKTDKKDAKWISELFKCDLVRSSFIPPPQIRQLRDLCRYYAKLTYVNSSEKNRAQNCLTMCNLKLDDVFTDVFGKSATRVLDALIEHGAGNFEIEPLLHKGCKKSVEDIQAALDGNLVSEQMSKLEIIRSHKEFIDSLQDSLETLILKLAEPFDEEISLLLTVPGIKSPLTAVRILAEIGADMSVFETSKRLCSWAGLTPQNQESAGKKKTTRIGRAGAYLKPLLVQCTFAVSKSEKHPEFKNKFQSLKKRRGGKKAVIAIARKLLTAIWHILEKKEAYNAELYQKADKPPKSRELTPQQAFDLLRRKGFVILGNDVLHDSA

SEQ ID NO: 208895 - protein, 349 aa, unidentified
MQKKSQIRSIGIDLGKTTFHLVALGIRSQILVRKKFSRAQLLAYTANLPSTLMGMEAGVGSHFLGRALREQGHQVRLIPAQFVRPFVKSNKNDYRDAEAIAEAVERENMRFVPIKTEDQLDLQALHRVRDRLVARRTSVINQMRAFLLERGISFRKGPASLRRQMPEILENADEKLSARMRCLLDFLWQEWKGLQEQIESLNTDLEQIASSDASCVRLQQIPGVGPLVSTAVVSAIGNGAALKKGREFAAWLGLVPRQWSTGGKPKLLGISKRGNPYLRKMFIHGARAAVLRVKREGSSLGKWMSGLETRAARNVVIVATANKLARISWAVLASGNDYHPSYKAVVVSN

SEQ ID NO: 208896 - protein, 344 aa, unidentified
MNNKQSQFTTVIGIDVSKNKIDVADNQNSAVKTVGNNKKELTQWIKSIADRTITIVVMEATGGYESLLVELLHQNEIALAVVNPRRVCNFAIGIGRDAKTDPIDAGVIVRFGEVVQPVPQLAQSDEQIKLGVLVERRRQILDLINQEQNRSQQTRDKEIRDSIDTVLETLKKQLKTLDERIAKAVVADEANVRKVEILNSVKGIGPVTISTIVAELPELGKLNRQKIAKLAGVAPLNNDSGQSIGKRKTAGGRSGVRRTLYMATLVATRFNPRIKAYYQRLLAKGKLKKVALTAAMRKLITILNTLVRTDQLWIDPGVRDRVRLSSAVLKNVKISNRQITVTLG

SEQ ID NO: 208897 - protein, 499 aa, unidentified
MRERYAAVIGGASLGLVLGELVAIGGVKVSNREAAKGMPRQRGRPRMEHFVGLDVATLKTAVCVVDREGEIVFETEVETDPLVIAEILKPWARTLRGLGHEAGALAPWLHTGLLEAGLPTSCLETRHVRASLGAQRNKTDRNDARGIAQLMRTGWFSAIHMKSRDCYRIRLILVHRRTLKRKFLDIENTIRHSLKVFGIKLGLVSRGKLGDAVMAAVAGDTLLEGLCGAMLAAREALWVQVERLDRLVGELAGGDEVCRRFMGIPGVGPITALTFKTAIETPGRFTKSRDVGAYLGLTPRRWQSGDSDGHNGAISRRGDGEVRTLLYEAAQSMLTRSGTWSTLKAWGMAQAKRSGHKKAVTAMARRLASIMHAMWRDGTVFEFAPGKWAPDWEPSPSNPGKPKRDRSRSQENDDLSANEKPPKAPRQRPPQGVTPQIIALVQSSKRTLPARQLGKIKAALAALDPKLRDEAIAAASKPMTLKRRGKPPKAGPAKAAPPA

SEQ ID NO: 208898 - protein, 341 aa, unidentified
MELFVGLDVSVRTTSVCVMDASGKLIRESKVETEPEAIGALLHRIGGPYKRVGLEAGPLSQWLYGGLAVAGYPVICVETRHMKAALSAQINKTDRNDARGIAQMMRVGLYKPVHVKTIRSQEIRMLLTARKFVQTKILDAENNLRGLLRNFGLKVGAVTKLQFERRIIELLEQSPHLRLVIEPLLEVRRVLRKQYQRLHKAMERLAESDNICKLLMTAPGVGPMVALSFRAGVDEPARFSRSRSVPAHFGLTPSRYQSGEIDRDRGISKCGDAGIRWVLVEAAGILLRISKRSSPLKVWGLSVARRRGLAKATVAVARRLAIILYRMWVDNTPYRWETKAA

SEQ ID NO: 208899 - protein, 429 aa, unidentified
MKNDDRHNDREPYAAYIGIDRADRKIDTALIDAPGTNLGHRVVDTKPADLKAWILGVAARFPGRRVAICIEQPCANLISFLSAFEFVDIYPINPVSLKRWREAFVLSHAKDDKGDSRHLAELVRERHHMLKRWAPDDAHTRKLRHLTEARRTLVGERTRLTNRLTAHLKDYFPLALEVTGKHLHGQLACRFLRKWPTLGKLQRTGEATVRDFYHRNASRRQPTIDKRIAAIAAGVPLTEDPAILETAPLATNAIAAQLDAIRAGVEKFDAEIEKVFAEHEDHAIFASLPGAGPNFGARLAAAFGTDRSRYADAAGAQKFLGVAPVTVQSGNSKRVHRRFACPKFHRQTLIEWAGQTVTKSTWARAYYLQQRAKGAKRFTALRALAYKWLRIIFRCWQDRAPYDEARYIAGLKKAGSPLVHNIETAGKAA

SEQ ID NO: 208900 - protein, 339 aa, unidentified
MGTYAGIDLHSTNNYIGVIDDKDKRLYSKRHGNQLEHVLKALKPFKKTMQGIAIESTYNWYWLVDGLEENGYKVHLANPAAIQTYSGLKHTDDKWDAFWLAHMLRLGLLPEGYIYPKEQRSVRDLLRRRLMFVRQRTAQILSLQSMITRSRGINYPGSSIKRFKEEFIDKLFKSDATLAFTGKKNLSVIQYLDKIVSEIEVEVKAQLVLKKEFEMLLTTTGIGNILGLTIMLEVGNINRFKKVGNYSSYCRCVESKRISNGKKKGENNKKNGNKYLAWAYVEAANHTMRNCKKAQKFFQRKMAKSNRVLATKALANKLTKATYYIMRDQVPYDAGNLFR

SEQ ID NO: 208901 - protein, 316 aa, unidentified
MTNRKSAEAGVNVGVDIGKDFLDFYIHERDVHWRSDNTPDGIKYSLNRLARYKVARLVMEATGRYELPLAEAGFERDMPVIIANPRAIRRYAGAVEQLAKTDKLDAALIAEFAARIQPTPSRSQGKNLRKIKDLLARRRQLMNMRTRELNRQSIMGDGVLASTYRRLIKQLDKEVEWVDEQLSSAIEKEAAWEEKKALLKSVPGVGDVLVHTLLGDLPELGTLNNKQIAALTGVAPMNRDSGKLRGKRRIRGGRSTVRVVLYMATVSATQCNPVIKAHYRKLVAQGKHKKVALTACMRKMVTILNAMVRDGEVWAA

SEQ ID NO: 208902 - protein, 345 aa, unidentified
MKQISVIGLDLAKNVFQVHGVNAAGETVLQKKLTRGQMVKFFAKLSPCLVGMESCGGAHYWHGELSRFGHDVHMMAPAFVKPYLKSNKNDRNDAEAICEAVQRPNMRFVTPKTPEQQSILHLHHGRQLLVDQRVALGNHMRGVLLEYGISLPQGFKALLQQLPEILEDAENNLPMQTRHLLATLKVQYDRLLDSEDQLKQALNAWHQQNETSQRLETIPGVGLQTATALAATIGEGKDFKNGRQLSAYLGLVPRQHSSGGRDKLLGISKRGDGYLRKLLIHGARSVIRHVRRRISLGQPGGNPWVEQLLVRCHPNEVAVALANKMARISWVLLSRNETYRSMPAG

SEQ ID NO: 208903 - protein, 452 aa, unidentified
MIMEEKEHGNYNLLRLVSVGNKNTLTGGVTAMRSKNDNRQVKKRQRITDATLVIGMDIGCECNAMCLMSKEGTILGRYPKIYNSRKGFDYFHGIVESMKEKYGFTDVLIGMEPTGHYWRKIAYFAMDKQYEVRFIRTTALKHQRELDESSSAKNDIRDAYTIANIAREGKYIDTVIEDNIFRQLRTLAHTREKIQRISTGAKHALKGMLEDYFPELKHIFWSMKAKGLWALLEHCPFPEDVLKTDIDTVTELIAQSTRRKIQAHEKALQIYKAAQHSIGLQRVGDADRWRVAAYLSEIRHSETQLKEIEAQMEALLKKIPFAEYILSMPGIGALTCGVFLGELGNPCNFTNPKQIVKYAGYDPKEHDSGQRTGRRIISKKGRWLLRKYLYFMAMRVVHRSPFLKDYYENKQKTMTKKEALCAVVIKLIKVIFALLRDKRTFTEKQSCLKQAA

SEQ ID NO: 208904 - protein, 380 aa, unidentified
MNYVDGIRLQEFWQVKSEIRGSKKHLIVGIDVAKEKHNAFFGTADGRTLHKGLIFDNTVEGFRKLLAMTEALKIQHDLAKVVFGFEPTANYHKPLGEHLIECGHLVVLVAGAAVKHNRSLLDGRWDKHDTKDSANVADLICQGKFLFYEYPDPKVQGLRNLLALKRRLKKEEQGLQVRIRNQLLAQYFPEMDRHFGTMMSLSVVRRCLDPSRIAGMEFDEFCKSVAPGRIKIIQQRMLQTIWRLAPESCGCHVGDEVPFEAKVMVSKLQQVRETIKEVKVRIEALSMQFPEYPCLLSIPGFGPDISSTIIGAIGNPFRFTNVKQVLKLAGLDLCAARSGKMSNSVTPVISKQGKSNLRYALYQAAFTASLNGLTTYYTCQ

SEQ ID NO: 208905 - protein, 405 aa, unidentified
MGNGVRLEDEELRGKVVAGVDTHVDTHWLCVLDESGRVALSEEFPATAEGYAALAGAIGDPAGCAAVGIEGTCSYGAGLAEELARRGFRVLEVLNKKKERRRGRGEGKDDAMDAERAARDVLAADGTSVPKLRGGWVDDLRSLLVARDRCVSARVEAHAAALSLARCAPDAERRRWEGMSQQAMMTAMAGIEGEGATALGRSMLALARAWRACSDEAEALEAELRRVLERSCPSLLAVYCCGPVSAAQLAVAAGENPSRLRSEASFAMLCGAAPIPASSGKTSGRMRLNRGGDRRANSALHTIVVRRMRYDPETRAYVERRRSGARPLGRAEIMRCLKRYVAREVYRALMHPHNVGEMVDRSSLRQARLSAGLTQAQAAKALGVLAERYSRWVMDGLPVDVESPQ

SEQ ID NO: 208906 - protein, 363 aa, unidentified
MIVIGTDTHKRTHTCGAVFAGTGQLAGELTAPAREPGFRQLLDWGRDLDAERIWAIEDCRHVSGALERFLVASGERVVRVPPMLMGQSRRGERTRGKSDPIDALAIARAALREGPETLPAAHLDEDALQVKLLLDHREDLVKARSEDQCRLRWHLHDLWPELEIPAGALDRILWLDRVARKLARAEQGARVRVARELVTEIRRRTRRAAELEREIGALVKAQAPALLELEGCGALTAAKLIAETAGAKRLPSDAKFARLAGVAPIPASSGNRVRHRLDRGGNRQLNCALHRIAVTQGRCYAPAREFLAKKQAEGKTRIEALRCLKRHLARRVWRLLVNPEREISMTTVDTQRGKLTPQIAVAA

SEQ ID NO: 208907 - protein, 317 aa, unidentified
MHSESVFVGIDVSKDQLDIAIRPGEVRFRESNNDSGIQALIARLLSLKPQLILLEATGGYEILAAASLRQAGLPAHIINPRQVRDFARSSGRLAKTDKIDAAVLAHFAEALKPSLRPWPDEQQQELAALMSRRRQLVEMLVMEKNRLSMTFSPRVRRSLQTNLQYLKEQLKELEQDLDDFIRQSPIWLEKDQLLQSVPGVGPLTSQSLLAWVPELGTLNRKKIAALVGLAPFNRDSGQMRGKRTVWGGRARVRPPLYMATLAACRVNPAIRAFYLRLLAVGKSKKLALTACMRKLLTILNAILKQQQPWCPQAPVNP

SEQ ID NO: 208908 - protein, 339 aa, unidentified
MEKNQAKQSKLIAVGIDVAMETLAICLRYADKDKFQEIANSKTEIKKLARKLNKDKFKGKIVMESTGRHHLQTALTLTENNLDVRVINPLIAKKYSSSSIRKVKTDKRDSQVLAEIAIKEEKLPEKFHLGKNELIIKKKVSLIAFLDKEIQKMNASMNEYINNANELGLKLSKADKQIKKTIDLLKKQKEELEREVEKMIDDSKCNSNEIKKYSSIPGVSRYTASVSSLFFSGDYNLSPKQWIAFAGIDISVRESGRWRGKGKLTKRGNGYLRKRLFQAAWGAKMHNDDFKRYYDHLRDKGKSYVETLMIIARKIVVIMFNLSKNNECYNASKLSFLTV

SEQ ID NO: 208909 - protein, 345 aa, unidentified
MEITTVGLDLAKNVFQVHAINGAGEVVVRKKLRRAQVLRFFEQLDPCLVGIEACGTSHYWAREISKFGHKVRLMPPAYVKAYVKRGKTDASDAEAICEAVSRPTMRYVAIKSSEQQAALTIHRTRDLLVKQRTQLVNMIRGLLAEFGIEIRRGITHALSLAERVATGDMPGIPALAAKIIASLAGQILDLEARLRTIERELLAWHRANDVARRLATIPGVGTICATAFAASVTDPQQFRSGRQFAAWLGLTPLQHSSGGKERLGRISKMGDKYLRRLLIVGMTSLVRRAKYKPDAVDPWLAALLSRKPARVVTVALANKAARVIWAIMSRGEIYRAPQTAGAVAA

SEQ ID NO: 208910 - protein, 318 aa, unidentified
MNPSHDLCNKADVSRDWLDIHCLPDGQRHRIPNTDNGHVAVSDLAHDQRAAVCFEATGGQEWRLWSYLQDAGVEARQVPPAQVKAFARSLGTRAKTDRIDAELIARFLVFRPEAGRTLPAEYLRLLRALTTRRAQVVEMRKRLLAQIRAHRKSGTAELFEDIDVELKERLDVAITELESRISELLGRYRRLADTARILRSVPGIGPVASSTLIAELPELGALTGEEAAALTGLAPVAQDSGTLRGKRTITGGRRALRYVMFQAALVASHHNPTLKAFADRLRKAGKPHKVIVTAVARKLVIIANALCKSRREWEHRHP

SEQ ID NO: 208911 - protein, 354 aa, unidentified
MDGTLVQNEVILGVDTHLDAHVGVVINDQGKVIGILTSIPTNRAGYLKLLTWARTLGNVRRAGVEGTGTYGAGLARLLREQGIEVWEVNRPDRAKRRLQGKSDSTDAESAARTVLSGNATATPKSQSGVAEALRMLSVVRRSAVKARTQTINQLRSLLISAPDDLRERLWKTKPEECVAGCARLRKAKANVLHKTLAATLRLLAKRWLMLSAELKEIDVTLDRLTSQSAKRLLNQFGVGPQTAATLIAVAGDNPERLRNEAALAALCGVSPLQASSGKTIRHRLNRGGNRSANNALWTIAMVRMRSEPRTQSYVARRAAQGMSDKEIQRCLKRYIVRELYPLILADLSDAAAIT

SEQ ID NO: 208912 - protein, 378 aa, unidentified
MREIIRIGVDTSKSVFQLHGVDAAEQPALGKKLRRRQVLEFFAKLPPTRVGMEACGGTHHWARELVALGHQVTLLPPQRVKPYVARNKNDAADAEAICEAMSRPRMTFVPVKTAEQEAALMLVGMRDQLTGRRTQLSNMIRGHAAEFGLVAAKGHAKVKPLLERIAADETVPELAKELFVGLAEEYDQVTARLRTIEAKLMDWHRGNELSRRLAEIPSIGPVTAAMMVMKVPDAKAFRCGRDYSAWIGLTPKDHSTAGKQRLGVITRAGDEALRKNLVVGATAVIQQVNRGRAQASPWLLALLKRKPPKLAAVALANKTARIAWKLMVSGECYDNAKAGRAGPRALLNGGSAARPALPARPRTRTITVLASEVTKVSA

SEQ ID NO: 208913 - protein, 350 aa, unidentified
MMIIGCDFHTRFQQIAMLEGTTGEVIERRLEHENGDAERFYGTLPGPARVGMEATIHAQWFERMLQRYQHELWIGDAAEIRAARVRKQKTDSRDALHILDLLLTNRFPRIWIPSPTDRDVRQLVRHRHKLVRVRTSVMNQLHALAIGQGLCRKQKLWSKLGRRELEALTLDPWAHRRRQDLLQMLDQLNPPIAELDRAVLQEAQRRPPAVQLMNEPGVGPVTALAFVLTIGPVDRFPRSKQVVSYLGLNPTEASSGGRQRLGSISKQGNAMLRHLLVEAAQTAAKLDPELRRDYQRLKFRRGSGVAKVAIARKLAVRLYWKLREAAQSSTAARMQGSPMNPVVDESLSPK

SEQ ID NO: 208914 - protein, 416 aa, unidentified
MVKHRNNACGADIHKNKIVATILSLSETKNQAEFGTTLPELLKFKAWLILNDCEAVAMESTGTYWIPVCSVLEDSMEVIVANPYMIKHIPGKKTDSIDAEWLAELCLKDLIVPSRIFPRDDRVLRSLTRAREGLVKIRTQLKNKIHRDLSSSHIKLSSVVTDIFGKSGMHILRGLLDDRSIDEIINSIPSSRVKRNADKIRESIENNLDSSQIFLIESSLDLMGNIQDKIDTIDADLRKKMCKKQSDLKIALSIPGIEFMSATTILAEIGNYRNFSSPEQLASYFGIVPFVSQSADKLHTGCITKHGSKHLRWIMVQVAHAASKKIGSKLRRFYLRVRSRRGANVAIVALARKILCILYHLLMNQEMYEEPGAAKKTRPNRLDQLPPQREFTAQEMIDILKRSGYEVRKIDRGACS

SEQ ID NO: 208915 - protein, 317 aa, unidentified
MAQKQIVVGIDVAKEKIDAAIWLGAEGCFANNPQGRGELLAWLEKHGVDKAVMEASGGYERSWVRLLRGAGVAVAVVDPKRVRHFAKSAGQQAKTDAIDARMIAWFGDSFSARLGKPDDAEREELDQLVTARQAIIRLKEQIDHWAEHEQPKAVQEVQQALLKDVARQQAKLEAVIADKIDNTERFAERAEIIKSVPGLAETAAAGLIAFLPELGLVDRQAASALLGVAPFAEDSGKRRGPRHIRGGRHKLRCLLFMPILSAATRHNPVLKAYYQRLIAKGKLAKVALIACMRKLISILNIMLARGEKWDPTRHALA

SEQ ID NO: 208916 - protein, 358 aa, unidentified
MAVNEGTRRIVGGVDTHKDLHVAAVVDEQDRVIGTRSFATTRQGYRQMLAWMRSFGELQRIGVESTGSYGAGLLRFIQQAKVAVLEVTTPDKQDRRRRGKNDDLDAQNAAHAAFAGHRIVTPRSRDGMIESLRVLMACRKTAVSARRVALQMIHNTIVCAPDGLRDQLRSLTRMQLVRTLASWRPDLTAYRDLEEAYRIGLKSLARRYLELHDEIADLDAMIVALVDELAPSLVARNSIGHIGAAQLLLTAGGNPERLRSEASFASLCGVSPVPASSGKTVRHRLNRGGDRAANSALHIIAIGRLRTDQRTKDYVARRIAQGHSKLDAIRALKRYLAREVFTLITQRRREINATQIAA

SEQ ID NO: 208917 - protein, 404 aa, unidentified
MEALYARCAGLDIHKKTVMACVITPEERIVREFGTMTRDLLALADWLLAQRVTHVAMESTGVYWKPIYNLLEPLELTAWVVNAQHIKAVPGRKTDVKDAEWIADLVRHGLVRGSFIPDRPQRELRELVRTRRTLIQERARAVRRIQQVLEGANIKLSAVATDVLGKSGREMLEALVAGVAEPAALADLARGKLRNKRDALHAALEGLVGAHQRLLLAHHLRHSTFLDDESTQLSDEVEQRLRPFEDALTRLDEVPGVGRRVAEDVLAEIGVDMSRFPSAAHLASWAKVCPGNNESAGKQKSGRTGHGNPWLRAALVEAARGAARTKRSYLGAQYRRLVPRRGAKRAALAVAHSILTIIYHLLRTSCHYQDLGVDYFDQRDQERTVRRLTHRLERLGYVVRPVAA

SEQ ID NO: 208918 - protein, 325 aa, unidentified
MRESCSPSFVGIDVSKRTLDVCIEPSHADQSPQRFSLDNTDQDISALVDRLRAISVGLVIIEATGRYHRRLAATLLMAGIPTKVINPQRSRDFAKSLGKLEKSDPIDAQVLAHFGRAINPQPDVLPKEGLGDLADLVSRRRSLIQIRVAEANRSHDQMPKLAARQCKSLLRMVDQQIEDLDREIAKAIEADDDWHKKSQIIDSVPGIGPDSANQLVIDLPELGQLNRQQIAKLVGVAPLMRDSGRFRGQRTIGGGRHDIRTTLYMLAHNAVMYCPRFKQYFDDLIARGKLYKVAKTACMRKLLITLNQMVKTNTHWKQLDVVEAL

SEQ ID NO: 208919 - protein, 340 aa, unidentified
MNQSMTIGIDLAKHVFFVAALDGSGKPARRKKLRRHEVLPFLANHPGAVVGMEACSGAHHWAREIRALGHSVQLLPAQHVKAYLRGQKNDYNDALAIAEAVQHGRIRCVEIKTVDQQLDQSLHRLRQALVTEQTGLINRTRALLAEHGVDLPEGKYRFRQTVIAQLEDAENGLPWRLRELLGRQYQLFIALEQELAWYEREIKTKAAENEACQRLMSVPGYGPIVSSAFYGWLGSGQQFRCGRDVAAALGLVPKQYSTGGKTVLGSISKRGDRHLRALLVHGARAVARYAKERDDRLSRWVCSLIERRGYNKAVVALANKLARIGWAVVARGQAYQAVPA

SEQ ID NO: 208920 - protein, 341 aa, unidentified
MKNKSFIGIDISKNVIDVSIFCEETPIKDFSHDVFNNSRKGFGEMCTWLKKNHVVLSNCLFGMEFTGSYSMELEKFLNTRNYQFCMLSTHVVKHYPMGPKDKSDKIDSAKIADFLYRYNGTECVKPYNMPDKTMQRLKALMNERKFLVEQRTCFMNRRQLCITKEDAQLYDGYIKKFSRDIENIELEEQKLLATDDSLLSTYKNLLTIPGIGFVNTINVIVITRNFTAFETARQYASYVGVAPHFRTSGTSVKWRPRPSARCDGQAKADLSMAATVVVQYDAELQSFYNRKLGGKQDSDTKRKALNAVKFKLVLRMFAIGKQNRKWEPLDSKSSNEKLAIS

SEQ ID NO: 208921 - protein, 439 aa, unidentified
MRKIRESAAGIDIGAKKVFVYVEGQKVKSFYTFTEDFELLCQYLLKHKIKTVAMEATGVYWSILYEILEEAGIDTWLVDGRQTKQVPGRKTDVKDCQWIQELHSLGLLNRCFVAKDDVKELRSYNRLREDHIRTASMHVNHMQKALTEMNIRLKEVLSQIHGVSGIKIIEAILNGERNKTTILNMCDARIIKNKKKQVLKSLNGRYTNTGLFALRQAFDGYNFYQGQIKQCDKEIETIIHRMGNGGLNNNLPTKRKAIRHNKPEVENLGAHLIDIFKGRDATIISGITDYSWMQLLSEVGTDLSRWPTEKHFSSWLGVAPGQHWSGKMNRNKKKFGHPKAGQIFRQIAQGLLASKNIALGSFGRRIRSRKGPAKAIKAMARKLAVMYWRVMVKGVDYAEIGIKKYEEQLLAQKQKSVKRMAKELNLQLVNIQPSMKSCH

SEQ ID NO: 208922 - protein, 355 aa, unidentified
MFHVGLDIHTKHIAICALDEKGQVVHRSQVRTIQDLVRVLTGLPDRLEVCYEASCGYGHCHDLLRPLATRVLVAHPGQLRLIFRSKHKNDRNDAERLAKLLYLGEAPAVHVPSLEVRTWRELINCRSQVIAKRTRAKNTVRALLRSAGVTPPKSPGLWSKKGLAWLRQLELPTASQQLRRDLLLEEIEGLIRPVRRVEQQLNRQAGQTGAVARLRSIPGVGIRTAEAMAAFIDDPQRFGDAKAVGCYFGLVPCQDQSGDKNRLGHITREGAPVVRQLVAEAAWQAQRRSPTVRAYFERVQRDDPQRKKIALVATAHYLVRVMWAMLKRGTDWQEGPALATASGAAAGGDPAPEVD

SEQ ID NO: 208923 - protein, 310 aa, unidentified
MTINPDIVGIDISKLHLDVSDPRRGHVEHFANSAAAAAELAARFAAAGQRVVFEATGAYDRQLCLALHAAGVTFFRVNPGQARDFARAAGYLAKTDAVDARMLAAMGRALELRPAKPVEPDRDSLARLHKRRDQLVAMRSQERTRRRGEFDAQMLDSIDQHLRWLDDQVRELDRRIRQLIAASPGLAEAERRLRSVPGIGPVAAATLLALAPELGERSSKAIAALAGLAPFNADSGQKRGQRMIRGGRKRIRDALYMAAVSASRSNNRFAAFYRSLRAARKPAKLALIAVARKLLVTLNAMMRDQTAFQT

SEQ ID NO: 208924 - protein, 413 aa, unidentified
MSRVIGLDISKRMAEVAILQSGEAAPQRTRFPAQPAAIARFASGLGPGDRVALESCTNAVAFHRLLSQHAGEVVLSNPLKTRIIAEAKVKTDKVDAEILARLLAADFLPLVWVPDAATQQLRHLVFHRQGIVTQKTQAKNRIHAILHRNLIAPEMADLFGRAGRRLLASIDLAPDERALLDADLRVLDFLEGEIEAADRRLAEIALDDPDMRRLMTVPGLSLTSAVGLKASVGDIRRFRAAPHLVSYFGLNPSVYQSGQTAYHGHISRRGCSHARAVCVEVAHQLVKAPGPFHAFFERLRRRKPYNVAITAVARKLVVLVWHMLTRAEDYRYMPPALTRKKLSRVHKLATGQPLPRSPRGAGRNAGDDRQAGREGERDYNGFIDDRFGSEGPPTHAMASTRTAQTSGTGKKRD

SEQ ID NO: 208925 - protein, 441 aa, unidentified
MKNEPTQNNNSIPAADPIAAWVGLDWADKKHSLFVRPTDGAATTACELEQKPQALDQFFLQLHQKHPQGRIAVCLEQSRGPVLYALMKYDFVVIYPVNPRCLADFRRAFKVSGAKADPTDADLLSELGCKHHQRLRALVPEDLATRQLRFLVEARRDFVNKRTALANELTATLKSYYPLALEVVGENLEGPMGLEFLRRWPNLAKLQGAKPSVVRAFFYAHNSRSEEKIAARLEAINTAVPLTEDPAIVGSLQLQAAGLARQLAAVQKTVAEYDQQIRVVFEGHSEKWLFEKLPVAGPVLAPRVAAAFGTMRTNLGAALDLLCLSGVAPVKRQSGQQETVHFRFARPKFLHQSLVEFAKCSIGQCDWARLLYEKQITQGKSAYAAIRVVAFKWVRILWRCWKDGQAYDEVKYLRSLKKRGIKLYESLYNALPAETGPVNNS

SEQ ID NO: 208926 - protein, 377 aa, unidentified
MHSENIAAYIGLDVHKETLAVAIAAPERLGEVRYYGTINNEAQAVRRLFQKLQGLYGNILSCYEAGPCGFGLYHQLTAMNIKFQVIAPSRIPKSPTDRIKNDHRDAISLARLLRAGELTPVWIPDLTHEAMRDLIRARAAAKRDSRVARQRILSMLLRTDKRYAGKHWTGKHRTWLANQSFSQPSQQIAFQHYCQSLEQIEDRILQLDPEISRLLPEWSLCNLVCQLQALKGVGQLIAITLVAELGDFSRFSNPKQLMAFLGLVPGEYSSGNSIRPRGITKVGNSELRRLLYEAAWSYRTPAKVGAWLIYYRPDSVTQYSKDIAWKAQQRLCSRYRTLTAKGKKSQVAITAVARELTGFMWDIALAAQSSFSQQKQN

SEQ ID NO: 208927 - protein, 343 aa, unidentified
MDTYIGLDVSLREISVCMVDEAGAIQLERTVAADPDAIAALVHAQASSVRRVGMECGPTSVWLWRELARRGLPVICIDARHAKAALSMQINKSDRNDAAGIARIMQTGWYREVQVKSPHSHAIRGLLNSRSLLVKVQRDLENQVRGLLKSAGLIVGRAKDGVFSARTKYLLAAHIDLAAIALPLLEAREAIHQQLVQLERRVRQLAKEHRQTSAFMTVPGVGPMTALAFMATVDDPTRFRRARSVGAYVGLTPRRYASGEVDWTGRISKCGDTMLRTYLFEAAGVLLTRVQKWCALKAWGLRLAKRSGMKKARTAVARKLAIILLRMWRDGTQFHWTAAPAGS

SEQ ID NO: 208928 - protein, 344 aa, unidentified
MNNINTIGIDIAKRIFQVHGVDKNGKTVLKKKLMRDQVLTFMANLPKYLVGIEACGGANYWAREISKLGHEVKLMVPQFVKPYVKSNKNDQADAEAICEAVSRPNMRFVPVKSVEQQDILSIHRIRARLVKNRTALANEIRGLLHEFGIIIPQGINKVTAKLTEVLDSGKLSLISQQTFSDLKDEFIENDKKVKDLETRLKIMAGELDKYQQIITIPGIGLITATALIASIGNGRQLSAWLGLVPRQASSGGKEKLLGISKRGDIYLRTLLIQGARAVLNIKLRFTTESQKAKKDYSKFTQWMFNLHDRSGHNKTIVAVANKLARVVFAVLSSGNDYVENKVCS

SEQ ID NO: 208929 - protein, 338 aa, unidentified
MKYYSGLDVSLKETFISIVDEKGKIVKEEVVASESDAIAKCLLDQDKRYEVIGIESGQLSISMCKELRSFGLPVVCVDARHMAAALSARISKNDKNDARGIAQMMRVGLYKEVLVKSDESCQIKVALGSRRQLICSKQQIVGTIRGLLKIHGIKLGKRSKFETFALRIQETINNVDEISRSSIEALLHSLKTIEESIRKLDKILSEQGRKDEDCKLLTTVPGVGVIVAMTYKAAIDDPYRFETSYTVGAYMELSPRQYASGEVDRHGSISKMGPMECRSMLYEAAQVLLTISRKNFKLRSWGLKLAKKKGMKKAIVAVARKLAVIMHRMLVNKTEFCY

SEQ ID NO: 208930 - protein, 340 aa, unidentified
MSLYGGIDLHANNSVIVLINEQDEVLYQKRLPNDLTTIMGQLAPYHTEMKGLVVESTYNWYWLVDGLMEADYRVHLANPAAIQQYNGLKYTDDHSDARWLAHLLRLGVLPEGYIYPKAERAVRDLLRKRAHLVRQHTANVLSVQNIMARNTGARFSVKRIQELTKEDLSTLLAEASQVLAVTSSLVVLDCLRQQIKTLEKTIHKCLKHTPAYEQLLTVQGIGTILAQTIALETGAISRFPTVGNYASYCRCVDSTKISNGKRKGTGNVKNGNPYLAWAYMEAAQFAMRFQPAVQRFYQRKLAKSRNNTVLARKAVAHKLARACYYIMRDLVSYEVTKAFG

SEQ ID NO: 208931 - protein, 339 aa, unidentified
MLIIGCDYHPSFQQIAWLNTETGECGNRRLEHNEEAEAFYRGLRGQAVVVGMEATGGTGWFRQLLSACGHGLQVADAARVRARATRRQKTDARDAELLLELLLDRKFVWLTMPTAEQRDRRQLLLHRHRLVQMRTRVKNQLQSLAMDQGVRQQKKLWSSQGRTQLEALSLPPWTTVRRGDLLQLLDDLDQRLVGLDREVRQQAYGSAEVRRLMTHPGVGPVVGLAFQLTILDPARFAGSRQLTSYLGLIPSEHSSGGKQRLGHISKQGNALLRGWLVEAAQVAVRRDPQWGRQFRRLAMRKNRSIAIVATARKLAVRLWWMWKRGLDYGQMVQSGSHVE

SEQ ID NO: 208932 - protein, 337 aa, unidentified
MKRYLGVDLHRTQFVVCTRWENGEQEIRQWRIGELAKFVDQLRPEDQIAVEAMGTTARFYDAVAGRVERVVVVNPHQFKVISESVKKTDRRDAAALALYLEKDLLPEVRMKPKQNRELMHLAETRDLLVKQRSALKGKINNLLAMQGIELKREALSSKIALERVLAQPVSGMVQLELRILVEQIRSLSESIAELDERLEEEGQQLPGYENLTSIKGIGWLSATVLLTVIGKISDFADENKLAAYLGLVPKVANSNENERSGRITKQGNKLARTALVQCGLVAKRYSPYLQAFYERIKQRRGGGKAKIALARKLVKIVYDTLKNQWVFEDFPSFTLAA

SEQ ID NO: 208933 - protein, 429 aa, unidentified
MSYRIAGIDVHKKMLAVVVSDVEVDAEFQFERRMFGSNPEQLRSLAAWLVEQAAEEVVMESTAQYWKPVWEALERYWKPLREKQEGAKRRSGSLHLAQAESNRGRRGRKRDFADAERLVKRLVARELVLSFVPDMEQRLWRTITRKKFQLRRARIRLQNQLEALLEEAHIKLSSFVSDLLGFSARRMLKALAEGETDPAALAALADERLRATPEQLSDALGACTELNDVYRRLLQMALEECRLIDEQIGKLDQELASLLSQHQDAVERLAEVPGLGVDSAQQIIAEVGPTAATFPSEKCLSSWVGACPGEEESAGVNRSHRSPKGNRHMRRLLNQAANAAARTKGSIFEIVYRRTVPRLGHNQAVGVIAHRLCRLIWLILHQAVRYEERGPAVTKRSKQLRTWKMIRDLRRLGYRIELPNPLPSQAPAQ

SEQ ID NO: 208934 - protein, 402 aa, unidentified
MNAVGIDVSKGKSMVAIMRPFGEIVSAPFEIKHTASDINSLVELINSVEGESRIVMEHTGRYYEVLAHQLSEANLFVSAINPKLIKDFDNDSLRKVKSDKADAVKIARYALDKWQNLKQYSVMDELRNQLKTMNRQFGFYMKHKTAMKNNLIGILDQTYPGVNTYFDSPARSDGSQKWVDFASTYWHVDCIRKMSLNAFIDHYQKWCKRKKYNFSQSKAEEIYGKAKELVPVLPKDNITKLIIKQAVNQLNIASATVESLRTLMNETASQLPEYPVVMAMKGVGTSLGPQLMAEIGDVSRFTHKGAITAFAGVDPGVNESGSYEQKNVPTSKRGSSNLRKTLFQVMDALIKTHPQDDPVYQFIDKKRAQGKPYYVYMTAGANKFLRIYYGRVKEYLSSLPES

SEQ ID NO: 208935 - protein, 312 aa, unidentified
MSEEKVFIGIDVSKAKLDVAAAPCGRYASFCNTEEDMPGLLEFISSVSPSIIAIESTGGFERLALRALSLARLPVVAINPRQIRDFAKSLGILAKTDKIDAHVIARFAQAVKPEIRHLKSEDEQMLDALQARHFQLVEMITAEKNRFASAPKWTKKDIQSNIKGLEKRLAKVNRDMDDLIKKSPIWSERGKILKSVPGVGPVMLSTMLAALPELGTLNRKKVSALVGVAPLNCDSGKYKGKRMVWGGRAKVRSVLYMCALSAIKCNPKIKTFYNRLRQAGKAFKVAITACMRKLLIILNAMAKNETYWAVSN

SEQ ID NO: 208936 - protein, 344 aa, unidentified
MITFGVDAHKRTHTMVAVDDRGQAVGQTTVGTTSKDHFGLLRWAGQFGLERRWAVEDCRHLSRRLERDLLAAGERIVRVPPKLMAHIRDSARTYGKSDPIDALAVARTAQREPDLPVARLDGPDRDLRLLVDHRESLVAERTRLICRLRWHLHELDPGWEPMARSLDPKRTLIEVQVRLEDRSGLVARLARDLAERCVGLTISITRLAQEITQLAEQLAPTLLALPGCGPLTAAKIVGETAGVDRFKSRDACARYNGTAPLPVWSANKARHRLSRTGNRQINAALHRIALTQARWHPSAQAMIQRHRSNGDSGREAVRILKRRLSDAVFQALRTDQRELTTLAA

SEQ ID NO: 208937 - protein, 410 aa, unidentified
MRVIGLDIHRAFAEVAILERGKVRHEGRFHLEHKSVIAFGRTLKRSDEVVVEATGNTSIVVRLLRPHVRRVVVANPRQVRVIAHAKVKTDKIDAAVLAKLHASGFLPEVWMPDDETEALRRRVAERCQLVSHMTRLKNRVQSVLHANLLPRYPGKLYSKRGRAWLAAQPLPDDQRRVVVRHLDEHDRIAAELATMEKQIAQDALKDDRVKRLMTIGGVNVIVALSVLSAIGDVARFSSAEKLVSYFGLNPKVRQSGDRPAYHGRISKEGRAHARGMLVESAWSIAAQPGPLRAFFHRIKQKRGQQIAAVATARKLTVLIWHMLTKKEDYAWTRPALMQWKLRELELRAGRASRRGGNKPGPARDYSLKTIRDKERQWLGLAESDYRRFVSAWREKPPQRRPGAAKEVRQS

SEQ ID NO: 208938 - protein, 348 aa, unidentified
MHTTVGVDLAKNSFQVAEADAQYRLIARKRLTRTQFSRWMGTHPPCQVVMEACGTAHHWARVLKGYGHQVKLLPAQHVRAYVRRNKTDAADAAALIEASRSGEIHSVEVKSVAQQVLQQLHRVRTQWQAARVARINALRGMLREFGIDVPVGAVRGIATIREALETGDNGLPDALRPVIAQLLREIDEFAERMKEVERSLAGLSAEDATVQRLRTIPGVGLIVSTAMRAAVGDIHRFRSGRHLSSWLGLTAREHSSGEKRRVGPISKQGDVYLRTQLTHGARAALFSAKNAARKGLELDRLRRWALETEKRVGHNKAAIALANKLARIVWATWKHERTFEGNWTTRTA

SEQ ID NO: 208939 - protein, 387 aa, unidentified
MKKAYIGTDAHKEQNVIALAFAGREDPELYGKAPADLDGFERVLRRVLVKYGLEKADVAICYEAGPTGFVLCRRLRSLGFECEVVAPSKIPKAAGDRVKTDRRDARKLARMFRAGDLVFVNVPDVADEVIRDVCRGRTDAAEVRGRARQQLGALLLRNGYRYGDKTNWTEAHMRYLRELVLPDPAQKFVLEEYLQRVDASVAQVERIEAQMARLLPAWQRRKFVEALQGFRGFQLVAAMTLGSELGDLLRFDHPRRLMAYIGLVPGENTTGERRRQGPITKCGNSHVRWMLVEAAHHYHYPPKVSKELSKRQEGLSREVRAVSWRAQERLHRRFWRLLKRGVHRNKVVIAIARELTAFVWELAQVLERERAAADPRQPARPAARKAS

SEQ ID NO: 208940 - protein, 339 aa, unidentified
MKTYCGIDLHSNNNVMVVIDEADKILLERKLVNSLDAVLDALSIIREPISGIAVESTYNWYWLVDGLQEAGYSVRLVNTSAVKQYDGLKYSDDKYDAFHLAHLMRLGILPTGYIYPKQERAVRDLLRKRLQLVHQRTTHVLSIQNQLTRNTGRQFKANEIKKLTASIVKNRIEDENIQVSILSNLTVLNVLTSQITSLEKRVLKQVELKPEFQKLLKIPGIGIILALTIMLETGDILRFAKVGNYSSYCRCVNSKRMSNNKQKGTGNRKSGNKYLSWAFMEAANFSIRFNPNAKQFYQKKTAKTKRVVALKALAHKLARACYYVIRNNEDFDNQRLFSS

SEQ ID NO: 208941 - protein, 324 aa, unidentified
MYKIKHFVGVDISKDKFDVWDNKTGHHSYANQPKGFREFARQLSANSFCVMESTGSYYQQLAMYLYEHHFELSVVNPVTIKRFIQMKLQQNKTDKSDARMIALYGQEQPGLLPWVPAPEYITQCRQLQRVIVIYLKQNTSLKNHIQSLESRGVKSGVLIRSLKRQLKQVRQEIALLEAEMQSLIYQYDGGLFVNLSTIPGIGKKTAAFLIVLTNGFRDFENYRQVSSFCGLSPTEYSSGSSIRGRSRISKRGNPYIRNQLFMCSFTASQCNAQCRLLYQRLVNKGKSKKLALIAVCNKLIKQAFSIAQSGIPYDPKYRSSIVVQ

SEQ ID NO: 208942 - protein, 319 aa, unidentified
MVYVGVDLHRKRSHVVALDPAGAVVLSRRIGNAPAEFLRLFGELEPQPIEVAFEATYGWSWFADLLADAGIPAHMAHPLATKAISAARVTNDAVDAKTLAHLLRTNLLAEAWIAPPDAREARRLVRTRAGLVRMRSRVQSQLHALLADLGVIPELTTLFGPAGRRWLAELQLPAGARGRLDAGLRLIDAITVEVGRADADLRTSFAGDHRVQRLLPIPGVGLVTAATVVAEVWDIQRFPAPERLCSWAGLTPGERTSDAHTRRGHITKQGSRWLRWMLVEAATTAVRDPQLGRFTAQIAQRRGPKIARVALARRLLTLC

SEQ ID NO: 208943 - protein, 482 aa, unidentified
MVVPNEEPKKPTKPKKPAKPKKPAKPRKSRESSLPVPVPASAAGLHVINPDAAGIDIHSDMHMVCVPADRDANPVRQFGANTADLQEIVAWLKKCRIKTVALESTGVYWIPLFELLESEGFEVYLVEPGQLSRCGARPKTDVLDAQWIQRLHSYGLLRASFRPPDSVLALRAYWRQRQMQVRYAASHVQHMQKAMEQSNVKLAEVVSNITGVTGMLIIAAILEGERDPVKLAQLRDERCQHSEEEIALALQGTWRPEHLFELRQAYELYQFHHRQITECDQQIEAELANFPNRAGEKTHTVKPRKRGRKSNDVGFEATGPLFQALGVDLTLIEGIDVGTALVILAEIGVDVSRFPTEKHFASWLRLCPPQDESNKTNRRRGHRKATNRVTIALRMCAQSLGRTMTPLGLFYRRIRSRIGGLGAAKATAHKLACLVYRMLKYGQEYVTQSMEEYEAKVKANMLKALKRKAAALGFQLSPLPTQ

SEQ ID NO: 208944 - protein, 320 aa, unidentified
MTISTAAGVDVGRDWLDVAIARSSEAGVAGRHFRLPNTPAAIAGIPARLRRAGVTRVVIEATGAPAARLVRTLAEAAMPLGVVDPRRIKALRLAEGRKAKTDKLDAGLIARFALLMTDAVRPAPSPAALELRALSTRRRQLVEMIAAEKTRLKQAFEPALMASFRLTIELLGEERARIEAMIEARTSATPEDRRKGDLLRSIPGFGPVISATLMADLPELGALDNKAIASLAGVAPHIQQSGTQAGRAHIQGGRPCVRAALYMAALSAVRHDAGFKADYKAMRAAGKPAKVALIAIARKLIVAANAILKHDEPWKPAQRS

SEQ ID NO: 208945 - protein, 322 aa, unidentified
MIPFQLGIDVAKAKLDCVLRLPEGKLRHKVVENSPSGFQALSTWLAKQGAETVHACMEATGTYWEAVAEYLAAIEGITVSVINPAQIKAFGASRMVRTKTDKADAKLIAEFCFERRPDPWQAPAPAEQILRALVLRLEALQAMRTQESNRLDVARPALKDSIVTHIAWIDGEIARIIQSIRDHIDNDPALHDKQRLLDSVPGLGERTIAALLAFYATPGRFGNARQAVAFAGLDPRQYESGSSVKGKPRMSKIGHTFLRKALYMPAMVTLYRTDWGKQFRNRLAAAGKPPMLIIGAMMRKLIHVAFGVLKSGKPFNPALHGA

SEQ ID NO: 208946 - protein, 377 aa, unidentified
MTTTDAAAEARETVYVAIELSKKTWVLGIAHPDRDRPSIHRVCGGNIAELVSRLRVAARNNRRILVCYEAGYDGFWLARVLAKMGIECRVLDPASIQVNRRARRVKTDRIDVLALLRALIATDRGERHVCAIVRVPSVEEEDARRSHRERQRLVRERTGHINRIKGLLFAQGIRDIKPKLRRTRIDFAALETAEGHPLPDRLRRELEREYARLSLIAAQLREVEKERDTADAQDPVVEQKRQLLVALHGVGATSAAILAREVFARSFASRRQLGSYLGLTPSAYDSGSTTRCQGISKAGNSGARRILIEVAWLWQKYQPASPLSYWYIQRTAGQSSRIRRIMLIALARKLAISLWRYVETGLVPEGVAIAKAKLRPA

SEQ ID NO: 208947 - protein, 354 aa, unidentified
MNSVRYVGMDVHRDTISVAVLDESGRLMMQSVLATRAGAILDFIHGVRGTLQVTFEEGTHSAWLYDVLVRRVEKLVVCNPRKNALMKSGSKSDAIDARKLAELLRAGMLSPVYHGETSALEVQQVARSYSQLTEDTTRVMARLKAVFRGQAVSCAGKKLYGKRHRGEYLAQLGGGLRRRAEHLYEELDALQPLRHEVRRELIVECRKHAAARWLQSVPFLGPIRAALLIGRVQTPHRFRSKRQFWTYCGLGLETRDSGQYRMVNGQVERRRKPVLIRGLNWNHNHEMKNLFKSTATAASVREGVWREFYLGLLDKGMRPEMARLTLARKIAAVTLKIWKKGETFDAEHLKLQAA

SEQ ID NO: 208948 - protein, 324 aa, unidentified
MYRILKIGMDVHSKTYTLCAMEPMIGAEDRILANIQVTADYKNILLFIENLKAKLGSQDTYDIQCGYEAGCLGYSLYNQLTEVGVNCVILAPSTMLTPQGKRIKTDKRDAHVIAQCLSYGTYHPVYVPTEDDDSVKEYIRMRKVHKDKIKEMKQRIGAFCLRKGLKYDGTNWSLKHLQWLRNLKLSALNREILNEYMATFGELTAKVERFDARIEELAAQERYQEKVKRLGCLLGIQTHTALSLIVETGDFHRFAKGNIYAAYLGMAPGENSSGDKVKRTGISKAGNNHLRKLLIEASQGICREASGTNQRCCVHGRREISQKS

SEQ ID NO: 208949 - protein, 337 aa, unidentified
MSKITLIGIDTAKHVFHLVGIDKRGNYAYRKKLSRQRLIPTLAQLEPCEVVLEACAASHHWARSITLCGHQVRLIAPQHVKPYRRGQKNDYRDAEAIISAALSPGMHFVGVKRVEQQAEQALHRVRSRILSHRNAAANELRGLLGEYGLVFRTGIKPLRAGAVCFIDSGQADALGLVEMVRDVLDELAWLQHRLDAYTHRIEQRVGNDAVSRRLCDELSGVGPLSASALRVKVADPRDFDNGRNFAAYLGMVPGHKGTGGKVKIGKIRRGHDRYVRQLMIHGARAVVQHLGAKQDEQSRWLRAMLERRGFNIASVAMAHRNARQAWALLARAQAGQT

SEQ ID NO: 208950 - protein, 335 aa, unidentified
MWHIGVDLHRKTVVIAAVHDTGEVRPPIRWENWQTEEIYRTFQSFGEFRAVVEATGTYRWLYKLIRPLGVVLLAHPQHLRAMVQRRSKTDKLDAQLLANLLRINQIPLAYIPPDDYQMLRELTRHRARMARGLATVKTSLRALLARHNVQPLYKYPFGPRGLHWFSKQDFGLIENGARDELLSRFDHFTAEIARADGRMKELQPAYPQAEALTELYGIGLYSALMIIAELGDVERFRRAKQVAAYTGLTARVHQSGDHCYRGHVSKQGSPWLRWILIEAAMKVVKKDVALANFYQRIRKRSSAKIARVATGRKMAEICWKRLLRWQRDHKEGNVA

SEQ ID NO: 208951 - protein, 358 aa, unidentified
MNYIGCDCHISSLDFAVVNERGQETKKQRVNTGVKEFMEFVRSIPKPRTVIIEEGTLAGWLLEICTAYGEKLIITDPKRNRWIGRAGQKNDTIDANKLAHLARGGYIKEIHHPIGHRRRFRELVLSYHDTVKSQTRIKNKLKAKFRQNGIRCSGETVYSAKYRKEWRKKLPKDKVVQVIVEGLWQQLDQTHEVQEELLSHIRRQGKNYSEIKRFKKIPGIGPVHAATISAIMENPHRFAHKKKLWMYAGFGLAEKGSGEKVYSRNLARDYNRLLKNALKQATEAAIIAKDNQFRRQYLRLTIEQGIPSHRAKLTVARSILATLYGIWKSGEDYDPNIDRRRTESNKTQVRAYHLVRSG

SEQ ID NO: 208952 - protein, 334 aa, unidentified
METQSLSPSVLGVDVCKGFLDACLLRPDGSRRERRFANDARGIAALLAWGEEARVLGMESTGGYELPLAKAGAASGLLVRVENPRRVRDFARASGRLNKTDRADARTVAEYLPRFEGRAWSPPSDRARELEGLTAHRAALLQERTRVGNRLERREELPALVARQLDERLRGLARELEELERERRRIVQEDEGLARDRDALMGLKGVGETTALLVLSLAGNVEDYPTAQAYAAAAGLAPCRRESGSWRGRTRISRQGGAALRAGLYMAAVVASRWDPLLREFRERLVERGKTPMQAVVACMRKLLMRMYGVLKAVRSGKEPFYGTRPGLETDGGA

SEQ ID NO: 208953 - protein, 345 aa, unidentified
MSIVILGIDLGKNSCSIVGLDADGSVVLRRRLRRDGVIGFAAKLPPCTMAMEACCGAHHMGRSLAELGHEIRLMSPEYVRPYVKAQKNDDRDAEAIAEAATRPTMRFVELKTEEQLDVQTLHRVRDRLVCERTSLTNQIRSLLLERGYVVAQGHGRLRIMLGELLDCGASALTPRMAFLLGDMRIRWDELDRRIASFDAEFAAMTRNDDRALRLTGIPGIGALNATALVAAVGNAATFGKGRDLAAWLGLVPRQATTGGRPKLLGITKRGSRYLRKMLIQGARSAMPSVAKSNTATGSWLRALLARVHPNVAVVALAAKMARTVWALLHHGQNYAVTPATAAGRI

SEQ ID NO: 208954 - protein, 400 aa, unidentified
MLSIGIDVSKGKSTVCGMKPGGEIVYTPFEIQHTREGMSDLVSLLRSSGEEVRAVLESTGSYHCPVVAALLENGIFVSVVNSLRMKRFCSQSIRKVKTDRIDAMQIALYGLAYWQELQPAKLPEDTYRELQLLARQYYQMTSLLIKAKVDFNAICDQVLPGMQELMSDHAGRHKLSDFVLRYHHTTHILEMGETRFRKDYCKWAEKKGYRNCERMAALIFATAQNGIPVLPDAPSTQIVITEAIRVLHTVEASRDAILTQMQALAKTLPEYSLVREMPCIGDTLAPRLIAEIGDVRRFHSKRALIAYAGIDAPPYQSGKFCANNRHISKRGNRYLRKTGYEVMQSYVMHKPANDPIFTFIEKKRSEGKCGKLAMVAGLNKFLRVYYGKVTELYRSLPAIE

SEQ ID NO: 208955 - protein, 359 aa, unidentified
MNKKIVAQNRTVFIGADVHTRKHVVSVKTGREILGTCNLSPNPDAWRSFLKRFPGCELHAIYESGPHGYNLYDWLTGMNGENGQAVHVAIAPPALVPKAPGKRVKTDKRDSKALITAFEMDSFRPVVVPDKQKREERELIRTRNQAKAEDKRLKNQIHGMVKFHGIEYPYGIRWSDKWVQQLAANAKAADTTGNLVFALKLKLKLLGEMKKAVAALDKRIERLYAKGACSEVAQKLTVLTGIGKLSAVIIATEVADFGAFDNSDAFASYVGVVPGEDSSGETTRRGHITRAGNRRLRWIFVECAWIRIRHDPEAKRIYHRIKMGKKDRSRIAIVAVARRLAVKAYHQVVNGEQSGKAAA

SEQ ID NO: 208956 - protein, 334 aa, unidentified
MKKDHYIGVDISKKTIDVAIYVKNALKSSSFPHETFQNSEVGFKDMKRWMRKQNVVLAKSLFCMEATGNYTYELCLFLERNDVSYSVQSPLHLKRSFGLTHGKNDKVDASRIAYYAHLHRDDIKLSRLAPESVRRLKSLIAERKSLVVEIARCKMQLKEVGEHAPSPGTIKRTESLQKFLEEQVVSIEEEMEQTIETDERMNKNYHLLLSVDGIGVVNAINTIIATHNFEMFDNARQYASYIGVAPFEHTSGTSVRGRTHVEPGAKMLKADMTGAVRTCINHDKEIKHYYERKMAEGKPYGVVANAIKFKLLLRMFAVIKRQTPFVKKPDFIFK

SEQ ID NO: 208957 - protein, 331 aa, unidentified
MNYSHFVGLDVGKKTFDASLMSADEKELSHKSFDNTPTGIQSLLDWIAGYHLSLSKLLFCAENMGSYVTELSVSSVSMGFSLALVCPLTIKKSIGLQRGKNDRIDAKRIANYAVLHYRKLELYKLPDKDLVRLRGWIIIRDNLVKQKVSSIKLLETFSWMAKLADVTESISFLEEQLKSIKEKILEVEEDMEQLIAVSTSLYTNYLLLRSIKGIGIINAIVLLCVTDNFQRFDNPRKFACYCGVAPFEHTSGISIRGKTQTSSLANKEVKVYLTRAAITAISWDPQMKAYYKRKIAEGKHKASVINAVRAKIIARSFAVIRRQTPFVTLAV

SEQ ID NO: 208958 - protein, 451 aa, unidentified
MEEKKVSLEVVHPHAAGIDIGSRSHWVAVGQNAEDVKEFGVYSDDQSALCGWLKEKGVIHVAMESTGTYWQNLFSTLIVNGFEVILVNGKQTKNLKGKKTDIKDCQWIQKLHSLGLLQKSFLPDSTTDVIRTYSRHKLNLLNQSASAIKRMQKYLRLMNMRLDVVVRDIVGETGSKIIQSFTEGTKDGNKLAQNRHYNCRKSEAEIAKALQYNGREDYYFALQQEWNTYQHIQNQIKQTDEKIALLLKEIIDKDDNKKLHIAANKPFKRKNKNTNSKLDFNQVSYQYFEGVDLMAIEGVNESTIMTIISEVGLEGMKKFQSAKQFTSWLRLAPNNKISGGKVLSHHLPKGSSRLKLALRNAANAIGQLKEGHLNAFFRKINYKKGRATAVSALARKLAVIIWNMVSKGISYNPPTQYLCLDEKRKLGLVNRIRKQIAKFALTNEDLGFVTN

SEQ ID NO: 208959 - protein, 392 aa, unidentified
MRKPKRRKPFNDLSRSPTALNVNETLIAVVELSQKTWLIAGIIPGIERQPLKKLEPDENAVLNLLDRWRREAEKAGHKIKRIAVAFEAGRDGFWLARWLRAYGIEAHVIHASSVAVPREHRRAKTDRLDTELLKRAFLGWLRGEREHCKMAAIPTIAEDDARRPSRERESLVGEQTRIVNRMKAALARLGIRDFNPKLGKAADRLEDLRTPEGEPIPPNTLSELRRHIDRRRLIMHQIRQVEAARLERLKQATRNGSHAMVRLLARVKSISVETADMLVHEALSRNLRDRRAVARYAGLTGSPEESGNKRREKGLARSGNIRVRRGMIQLAWRFLRFQKDSALARWYRARTDNVPGSRKKMIVALARKLLIALWQFVREGVVPEGVLFRPAQ

SEQ ID NO: 208960 - protein, 349 aa, unidentified
MRFYTNQHRYYCGIDLHARMMYVCVVDQTGTVIVHRNLATTREAFEQVIGPFRGEVVVCVECIFSWYWIADLCSELGVAFVLGHALYMKAIHGGKTKNDKIDSQKIAGLLRGGMLPMAHAYPQEHRSTRDLLRRRMYLMHQQSELLAHIQNTNIQYNLPGFEKRIGSPSNRTTLAEHFEEPMVRTSIEADIEVLDRLHEVLLKIERTVLTQARESDPVTLQLLRSIPGVGKILSLVILYEMEDVKRFPKVGNFISYARLVKCSRESAGKKSGARNSKIGNAHLKWAFSEAAVLFLKDHQAAKDWHDKLVSQYGKAKSLSIMAQKLGRTVYFMLKRKEPFDPKRFFAQEV

SEQ ID NO: 208961 - protein, 450 aa, unidentified
MGNGSGVSRGDRNRNARLARLRVLVPVCNAIVGIDLADRKQMVVVTDHDSKVLARKTFRCRAWDLGVALDWAGAQASAKGFTGVTVACEPTGHRWRVLGELAGAREMPFVCVQPMLMSLARRSEDLTFDKTDEKDAVIIARLAAQLRCYVPEPVDETWGRLRHLGARREQLLVEAGSQVQQLRALLECVWPAALATAQQPFRSCTWMATMSVLLERDAGDLARSCRLGLARLESAVRREVVRQGRQKPCLRIVRALYTALTDPAGVIAHRRGGLERVALLLGDWRQTQCRLLDAETRMTAILDELKLTELVTSLTGLSTIGAAAILAETGDPHRFATARALVKHAGLAPREKLSGAFVGRTKLTGQGRPGLRLAAWRAVWGAQRANPVYAARFTHLTTRANNKLTVTQAQAVIAAAILRQIHAVITTGRRWDPVIATHGARHSTAIPIAA

SEQ ID NO: 208962 - protein, 391 aa, unidentified
MVCVGIDVAKDKHDCCILDSDGMVRADCFTIPNNMDGFKQLLQTIRNCTKKSDKIKVGLEATGHYSYNILGFLLDNDLAVHVMNPLHTNLYRKSLSLRKTKTDRVDARTIATMLLSDVDLKSYTDTAYHNEELKSLTRYRFDKVRERAKLKQSVSRLVTILFPELEKLVPSLHIASVYSLISEYPGAKQVSEVHLTKLTNLLTTASKGRYGKDKAIQIRDAAKTSIGSVMPAKSLELKHTIKLIKELTSEIDEIEDSIQQIMDELHPPILSIPGVGIQSVAMILAEIGDFSNFESPDKILAYAGCSPSTYQSGKLTNCYAHMEKRGSRYLRCALYNATKYVCHWNPVFAEYLAKKRAEGKHYNVALSHAMKKLVRLIYALQKSGKAYLTAA

SEQ ID NO: 208963 - protein, 462 aa, unidentified
MRVIDVACRADHQASLADERGEFIFSGWRFRTTPADLERLWAELPPDAEVVVILEPTGNAWVPLAAWLRAHGAKVVLVPPEQSADRRDYYNKHTKTDRLDSRVLARLPLLHPEGLRTIDDLGPAEALRRAVRHRSSLVKRRAGSALRLDALVELLGPAWADVLGTGDYNKTALAVLGRYADPVALKKLGRKRLTTLMIRASRGAWREAKADELLAAAEETLQLWSAGGLDFAELAEDIAAEVRVIAALDAEIATIEDRIEALYDEVDPAGIVRSAPGVGVTLAAGILGRTGDLRRFANLAGVRSFTGIVPKIDQSGLTHGHNGITKAGDPGLRQTLYPAADHARKVDPTLAARYHRLVVTDGKHHVSAVNSLAAVLMTRIAACWRNGQRYELKDLDGTPITDTEGRAICTDRYKIDPAVRAARRQTSTAKQLKQRTSRRGKESTKAAPASGPSTTNPTEKVA

SEQ ID NO: 208964 - protein, 349 aa, unidentified
MYYVGVDYHKRYSVATVLDEAGTMLARRRLDNRLDDFRGFLAPYDKAEVKAVVEATRSWGIPVDILEQLADRVVLANPGEVKLIAKGRIKTDKVDSLALAKLLRLDGIPEAYLRSRANREQQLILRIRCFLVQLRTRVKNRIHDLIDRQEESIREMTTGFSDLFGKKGMTWLRGLDLGEPSDTLLGQLLAVYDELDKEVRQSDRLVAELYLTDTDCQLLKKIPGIGTFFAVLIKTEVGSIERFANSPKFCSYAGVVPSTESSGGKVWHGRIIKQSNCWLRWALVEAVIPATVADAGLRAHYEYYRRTKGSKVAKVVTARRLGCIVYRVLKERKPYYERPVQSPSCRQTR

SEQ ID NO: 208965 - protein, 349 aa, unidentified
MAQFIAFDSHKQYTLAVIESDDGKKRQERKIRHERGAVRGFLASCEDGSEVAVETVGNWYWIVDEIEAAGMEAKLVHAGKAKVMMGMINKTDRLDGEGLIRLQRNGVLPVVWIPPGETRDQRELPRTRMVLVHQRTQLKNRLHATLDKYALTLQGISDIFAAGAREELLKALEALPSETRFTAGQVLEEIEALGEKITELEARMEGVLEESEEIQFLQTIPGVGPILSAVIWLEIGDIERFGGPGKLAAYSGTTPRLHSSGGKQRHGQLRPDVNRYLKWAFMEAANVICRWRKKWPQRHTVRLYERIRERRGHQKAIGAVARHLAEATYWILKKKTCYKEPGSASSTKA

SEQ ID NO: 208966 - protein, 402 aa, unidentified
MNAVGIDVSKGKSMVAVMRPFGEVVLSPFEVPHSSSELSKLARLLKSLDGESRVVLESTGNYHAPVAKMLHDAGLYVSVVNAMLVHDYGNNSLRRAKTDKKDAVKLANYGLDHWLSLPGYVPEEDTRLLLKNCYRQYQQYAKVQTMMKNNLLSLLDMIFPAVNRLFSSPVRTDGSEKWVDFIDAFWHVQCVSGLSANAFSAKYLKWCRKHGYNFSEEKALEIHRTARDHVAVMPKTDTTKLLVKQAVAQLRTVSSAKAALQNEMDALAASLPEYPVVMDMFGVGPKLGPQLMAEIGDVRRFHSKKALVAYAGIDAPPYQSGQLNVHSRSISKRGSPALRRTLFLVMSVYLKNSPTDEPVFQYMAMKRAEGKPYLVYMMASANKFLRRYYAAVKAYLNALEQG

SEQ ID NO: 208967 - protein, 334 aa, unidentified
MSEIKLVGIDLAKNVFQVHAVSGSGAVQVRKKLSRAKLLSFLAQLPACTVAMEACAGAHYWGRQITLLGHQVRLIPAQYVKPFVKGNKNDRNDAEGICEAALRPNMRFVPLKSEEQQALMAAQGAREQLIAQRTQLVNQIRGRLAEFGIIAPKGIGQVRRLLNEPQLERVPQLMRQVCAQLHEGLAWLDEQIRQASQRLERCAQDSPMCRQLMRRDGIGVINAVALSTQIDPVHFRNGRHLAAFVGLVPKEHSSGGKVVRLGISKRGNTQLRTLLIHAARSLARVAARKRDPFSMWITQLIARRGKHKAIVAAANKLARYVWVDMMQARRAGIA

SEQ ID NO: 208968 - protein, 388 aa, unidentified
MHVMTDLSRSPVALDEGSTLIAVIEMSLTGWLVAGVTPGLTRQPVKKLKVDEEALLSLLHRWRDEAERNADRPIERICVAYEAGRDGFWLARWLQMQGIETHVMHATSVPVKRDHRRAKTDRLDCRLLMRAFVGWLRGEIEHCRMVPVPSLEEEDARRAHRERDNLVSERTRIVNRLKSTFVRLGIRDFNPKLRRAADRLKDLRTPEGAPIPPNTLAELRRDMARLRYVNEQIKEIEVAREERLAADPDDKHHSMVRLLSQIHGLGLETADMLVGEIFSRDIPHRRALARYGGLTGSPDESGKRRREKGLARAGNSRVRAGMIQLAWRFLIFHKDSALARWYRERTADGRSSVRKTMIVALARKLLIALWRFVTLGEIPEGFVFKAPA

SEQ ID NO: 208969 - protein, 361 aa, unidentified
MNRAGLARAQSRVMAVIPASAQVKIAVEAAGHYHRPVLDYRWPDGWEVLELNPAHVAEQRRVQGRRRVKTDVIDLEAITELVLAGRGYPATGRDAVIGEVGAWAGHRNRRVATRSATKNQLLGQLDRAFPGLTLALPDVLGTKIGRLVATEFSDPSRLAALGVNRLIRFAAARDLRLRRPVAERLVTAARDALPTRDAVIARQILAADVNLLADLDTQIQAAEAELAVLLPRSPFATLTTVPGWGVVRVSNYAAALGDPNRWPGPRQIYRASGLSPMQYESAHKRRDGSISREGSVALRRALIDLGIGLWLTEPSAKTYAGGLKARGKRGGVIACALAHRATRIAHALTRDHTAYDPARWT

SEQ ID NO: 208970 - protein, 338 aa, unidentified
MRLYCGIDLHSTNSYVAIIDEEDRAVYRQRLPNDLGLILSELGPYADRLVGVVVESTYNWYWLVDGLADSGYRVHLANPSALGQYHGLKYADDQSDSRWLAHLLRLGILPEGYIYPREQRGLRDLLRRRGRLVQQRTASLVSLQNQFHRHTGRRLPARAVRALDIESIGQQLVDANVALSAMATWRVVECIDKEVQSLEREVQRQLKPDRMVKLLKTVAGVGDVLAPTIRLETGDVGRFRSPGKYVSYCRAVGSRHLSNHKVKGRGNTKNGNPYLSWAFVEAAHFAVRFHPPVRRFYERKKARTHRVVAVKAVAHKLARASYHVMRDQVQFQVERAFG

SEQ ID NO: 208971 - protein, 354 aa, unidentified
MLIIGCDYHPSFQQIAFVDTDTGELQERRLEQREEAEKFYRELAVQGIKVRVGMEASGQARWFERLLGELKFELWVGDATEIARKRERKQKTDRQDAQHILKLMLKDDFPQIWVPSWENRDLRQLLWHRHRMVQARTRIMNQLQAVALNEGVRCNKRLWREKGREQLESFRLAPWASRRRHDLLEWLDRLNPTIGALSQAIEQEVEKCPEAQRLRTHPGVGPLTALAFVLIIGKPDRFQCGKQIASYLGLVPLEDSSGNRRRLGHITKQGNSLLRFLLVEAAQVTVRSLPEWRRKYVHLTMRRGRKIAKVAMARKLAVRLYWMMRKQWDYEQLKKFGSHAGQPGNRDGVKQNIE

SEQ ID NO: 208972 - protein, 397 aa, unidentified
MYIVGIDIAKRKHEAAVIDGDGAVIIKPFSFTNNCSGYNRLLAMLTKAKLPLDEVSFAMEATGHYWLALFTRLQKEGFRVQVINPVQTNSIRSFYIRQAKTDPRDALLIAEVIRFGHFSESTLHPENIYELRELCRGRHAIVSMQADVKRKVVALLDQVFPEYETAFTNMFSDTSMAILQTCPTPKELSEMPLEELCHLIEVSSHKRFRMAKAQELQALARNSFGFAMAGGVFSTMIRLYAKHLDFLKQQVREMDRKIAEIMDTLDTPITTITGIGPTLGAYILSEIGDISRFSSAAKLAAYAGIDPTMRQSGEYNGVRNRMSKRGSPYLRHAIWLATSSAVLHDPALKLYFQKKRDEGKPYMASVGHACRKMVSIIYAVMRDNKAYTPYIPNEISA

SEQ ID NO: 208973 - protein, 356 aa, unidentified
MKILALDIGKYKSVGCDYEAETGRHSFATVATTPQALHDLLVEREPDRVVIEICSIAGWICDLVRTLGIEIQVANTSDERWSWRKVKQKNDRRDALKAAQLSAVNQLRPVHVPRLEIRQWRALIAYRQQLVRRRTKIKNHTRDLLQREGVILLRGRKAWTQMGMAALQELVKPLSESSLNELWRGELGVELAQLKELQQQIEVVEAKLDELGAADARVRLLRTIPGVGPRLAEAIVTMFDDPRRFGSGREVSAYVGMVPKQFDSGETERSGRITRQGNRLVRSLLVEVAWASLRHNAWARQCYQRIHGGKKSRKKTAIVAVGRKLLVRCWGMLRHQTPWHWEMKTATPVSSELRVG

SEQ ID NO: 208974 - protein, 339 aa, unidentified
MELYAGLDLHSRNTYIGILDKAFNRVFKKRVPNHLEHILQTLDPFQSQLKGLVVESTFNWYWLVDGLMDAGYSSVHLANPSAIKQYEGLKHIDDKHDAFFLAQLLILGILPQGYIYPKKDRPVRDLARKRMFLVQHKTAHVLSLQSLIQRCCAMKIRTNDMRHLTVKELEAWLEEEYLVLSAQANLDSINFLKQRIQGLEKAIRKKVRLKKAFHYLKTVPGIGDILALTIMLEVGDINRFSKVGNFTSYCRCAPSRRLSDGKSKGHGNRKNGNRYLSWAFTEAAHLGRRYNERFKRYYNRKVAQANTSLATKALGNKLARICYYIMRDQVPFQEELFCH

SEQ ID NO: 208975 - protein, 388 aa, unidentified
MFFLGIDVGKNTHVASLLDEKAKVIFKAHSFANTLDAAEALLVKLEPYKDSLEIGMEATGHYWLSLYSFLTEHNFIVHVINPIQTDGWRKGIEIRKRKTDVIDSVLIADLIRYGDFLETSLADEDILSLRNLTRFRAYLVNSVSDLKRKAIAVLDQIFPEYASVFSNVFGQTSKELLKSLSLPSDYENLSATKIEEVLSNITQKKKASETISTLSDKASHSFGISFCKDSFAFQLKLIIEQICFIEEQIASVELEIEQLMSKLGTNIKTIPGVGNVIGAVILGEIGDIERFDNPSKLVAYAGLDASVSQSGEYEASSGKLSKRSSPYLRKALYMAAQRAEFCDPVFQAYYEKKRNEGKHHLVATNAVARKLCHTIYAILKKDIPYEIQ

SEQ ID NO: 208976 - protein, 405 aa, unidentified
MAKVFVGHDWAEAHHDVHIEDAAGQRFAAARLPEGIEGARRFHELVAGHADEPGEVTVATETDRGLFVGSLVAAGYRVLAVNPLSTSRYRERHSTSGAKSDPGDARVLAELARLDGHNHRPVAGDSDLAHAVKVLARAHQSMIWNRQRQTNQLRSTLREFYPAALEAFDDLASGDALGVLAIAPTPALGRRLSRSKIAAALRRGGRQRRVDERTIEIQAALRSDQLEAPPVVADAMGASVAASVAVITELVTQTNQLEGELTDRFDQHPDAKIIRSLPGLGTILGARALGEFGDDPNRYADAKSRKNYASTSPITRASGRQRVVLARYARNRHLADACRMWAFAALTTSPGARGFYDQRRANGDTHNRALRSLANRLVGILHGCLHHGTLYDEHTAWAHRTELAA

SEQ ID NO: 208977 - protein, 424 aa, unidentified
MDVMHDRVAGLDVHKETIVACVRIMTGRKVPTRDCRTFDTTTSGLEALLKWLTENGCTQVAMEATGVYWKPVWNILSEGEFELIVANAAHIKNVPGRKTDMNDATWIADLVSFGLIKASFVPEQEFQELRSLLRARKQLTREQTSHVQRIQKTLEEANIKLDSVISEIMGLSGRRMIEAMIKGVKNPTKLAELADRRIKARPKQLYDALHGRLTDHHRFMLQLYLQQYDSLADAITKIDNQVDTAIAKMDTEVAADQATFRALISLLCTVPGISDLAAKTILAEIGTDMGRFATAGHLLAWAGLCPGQNESAGKHRSSRLRKGSPWLKTLIVQCGWAAARKKDSYYKAQFNRLRGRHGAKKAICAVAASMLTAIYHMLKNGTYHKDLGADHFDRRSTEIKAKRLAAQIKKLGFEVEIRPTKEAA

SEQ ID NO: 208978 - protein, 366 aa, unidentified
MCVGLDTHKAKIAVAVAEPGRSGDVRFQGEIANQPEAVRRLIERLADKHGKLRVCYEAGPCGYGLHRQITALGHDCTVVAPSLVPVRAGNRAKTNRRDAVTLARLHRAGELTAVWIPDPTHEAMRDLVRARTAAMEAVRRARQQLQGFLLRHDRVFTGRTTWSPAHRRWLAGLRFEHPAQQVVLQEQLDVIDEAERRRDRLEAQIRELVPGWSLAPVVAALQAVRGVALLSAVVLAAEVGDFRRFANPRQLMAWLGLVPSEHSSGPRVERGGITKAGNGRARRVLVEGAWSYRFPARVTGPIQARLEGVPDAVRTIAWKAQLRLCARYRRLVAAGKNANLVTAAIAREMAAFAWAIACQAQPAATA

SEQ ID NO: 208979 - protein, 404 aa, unidentified
MWYTGIDWADEHHDALTIDEKGHQMGSIRVDHSPQGFAKLDIFLMQIIGSASKEDMACIIETTHGLLIAHLLEAGWPVYPVNPRTVDRRRSASGAKTDLIDAYLLAKTGRADFADLHRLTPDSDQVAELKQLTRDQDTLIRTQTRLVNQLTACLKAYYPVALDLFSKLQQKSTLGFLQAYPTIEAARAATLPEIQQQLKQTRHPHPADAAASIVELLQQPQLQADRVLTRTKSRLMLALVSQLLPLLAQIADYDKEIRTLFLTHEDHALFESLPRAGQHLAPRLLAEIGDDRERYQDASSLQALGGTSPVLYQSGMYSKAHRRLGCIKPLRNALHQFAWQSTQCEAWAKDYYQRKRAEGKSHTVAIRALSNVWVRIIFAMWTRRECYQTATFELAKLQHARRVA

SEQ ID NO: 208980 - protein, 454 aa, unidentified
MNQESISMEVVNPQAAGIDVGSRSHWVAVGQSQEDVREYGVFNEDLFAMTAWLKEKKVKTIAMESTGTYWQNLYAVLIANGFHVILCNGKFTKNIKGKKSDVMDCQWIQKLHTLGLLSSSFLPDEKTEQLRTYCRHRSNLLHSAASTSKKMQKYLRLLNLRLDVVVKDICGLTGLLIIRAICDGESNPEKLAALRHGNCRKSEAEIARALQSNGRKDYLFALQQELETYDHLKVKIEQCDKEIEKMLDEIINSNDDKKQHHIDPKPHKRVNKNTPKDIDLNLKSYQMFEGTDMLAIEGMSYSTVLALMSEVGINGIRKFPSAKQFASWLRLAPNNKVSGGKVLSSKVPKGSNRLKIALRNAANAIGNLKESTPLRDFFQRINYRKGRVSAISATARKLAVIIWNMAVKRVAYINPEGYLFLDQKRKLGLVKRIKKQIDKFGLTTEDIGLANADY

SEQ ID NO: 208981 - protein, 375 aa, unidentified
MTIISASPQQHHTQLSIRPDRVVFAGVDTHKELHVAAVIEASEQVLGTRSFSTTRAGYRAMLAWIAQFGDLARIGVEGTGSYGAGLTRHLAKAGVVVLEVDRPDRSDRRRKGKDDDLDAISAARAALHQRRTVTPKSKDGAVASLQVLRVGRAHAVRERRSALQLMRMTIISAPEELRDQIRNLTRMQLIRTLAAWRPDVSNATDPVTAYRVTLKSLARRYLELSDEIADLDELINPIVEALAPQLLQRTGIGIEVAGQMLVTAGGNHDRMKSEAAFAMLCGVAPLPASSGMTQRHRLNRGGDRQANRALHLAVISRLRLDPKTQTYVAKKTAQGHSKLEIIRCLKRYLAREVYYLLNPGQPTTPQRKKKINITS

SEQ ID NO: 208982 - protein, 360 aa, unidentified
MVLGTDPHKRSHTVAALDALKAERVDELSVRARDGGHERLLAWARELDGERVWALEDCRHVSGGLERFLLRSGERVVRVSPKLMAGARRSARESGKSDAIDAGAVARAAIREGVETLPEARLSGPEREIALLLDHREDLVSERTRIQNRLRWLLHDLDPTIEIPGRALDRDKWLQRLQGRLARREQTIQVRIMREQLRRCRELTRQAKALERELGALVRRQAPQLLALPGCGPLTAAKLIAEVAGIDRFESEAKLAKLAGAAPLDASSGKQQRHRLNRHGNRQLNLALHRIAMTQGRIHTPAREYLARRQADGKTRKEALRALKRHLARRIYRILTPITKDMTNPNRIEIRTAPQVPCLT

SEQ ID NO: 208983 - protein, 379 aa, unidentified
MEIITRNEKILYVGIDVHKDTYSLCCFDFFRNELSDEMTIKATTKAVIKYLEAIKKKHKEEILFACGYEAGPTGYGLCRGLQKAGYGCVVMAPTTMSNPDGKKRVKTDRIDARAIARILAYKSYSQVHLPSEEMEALKEYTRARDAKKRMFKKAKQELLSFLLRNGKSYPESGNYWTEKFFKWIKTVQFSEKWMQEALNEYLSEVYSLKAKIELMDARIREIAELEIVKDKVDKLICFSGIDVITAVETVVEIHDFTRFATAAQFVSYLGLCPGEDSSGKTKNMLPLTKAGNKRVRALFCESAKAIKRTNPYGQKSKRILERQKNANPEIVAYADKATKRIRTKMKHLEERGKNYNVSSAAGARELACFVWGMMNGKIA

SEQ ID NO: 208984 - protein, 350 aa, unidentified
MLIIGCDYHPGFQQIAFVDTESGEVGERRLSHREEAEQFYRELKQRNLAVRVGMESSGHSRWFERLLHELGFELWIGDAAEIRTKRVRKQKTDRQDAQLLLRLLLEDRFPRIWVPDAANRDMRQLLWHRHRLVQMRTRVMNQLHVVALNEGLRRKKALWRPAGRKELESIALAPWASRRRQDLLNLLDQLTPKIQELTRALEEEVEKRPVTRRLMTHPGVGPLTALAYELVIGSPERFHCGKQIASYLGLVPEEKSSGDRRRLGHISKQGNVLLRFLLVEAAQVTVRSHPEWRHKFFHLAQRRGRKIAKVAMARKLAVHLYWMWRQGCDYGPWQKLGSHAGEPGNPHGVQ

SEQ ID NO: 208985 - protein, 312 aa, unidentified
METKFVGIDVSKLTLDFDCLPVSASQPFANDAVGIAAMIALLQDSGVERIVIEATGGYETAAVIALAVAKLPVVVVNPKQVRDFAKATGHFAKTDRLDAKLLALFGERMRPTLRVLPDEAQRALADLLGRRGQLVFMRAQEKGRLSMVPAVAKKDVELHITWLSKRIAKVESDLRSRLKKSPVWCEKATLLESAPGVGEVTTFSLLADLPELGTLSRQKISALVGLAPFADDSGKRKGQRYVRGGRAEVRCVLYMATLSAIKYNPPIKALHERLLKGGKPFKLSMTACMRKLLTILNAMLKTNKPWEIKAAS

SEQ ID NO: 208986 - protein, 400 aa, unidentified
MLSIGIDVSKGKSTVCGMKPGGEIVYAPFEVQHTREGMSELVSLLRSSGEEVRAVLESTGSYHCPVVAALLENGIFVSVINSLRMKRFCSQSIRKVKTDRIDAMQIALYGLAYWQELQPTKLPEDTYRELQLLARQYYQMTSLLIKAKVDFNAICDQVLPGMQELMNDHAGRHKLSDFVLRYHHTTHILEMGETRFRKDYCKWAEKKGYRNCERMAALIFATAQNGIPVLPNAPSTQIVITEAIRVLHTVEASRDAILTQMQALAKTLPEYSLVREMPCIGDTLAPRLIAEIGDVRRFHSKRALIAYAGIDAPPYQSGKFCANNRHISKRGNRYLRKTGYEVMQSYVMHKPANDPIFTFIEKKRGEGKSGKLAMVAGLNKFLRVYYGKVTELYRSLSAIE

SEQ ID NO: 208987 - protein, 347 aa, unidentified
MSITRIGLDTAKSIFQVHGVDETGKAIMKRKLQRCEMLPFFERLEPCTIYLEACGAGHYWARVLIGLGHDVKLIAPEAVKPFVKKGKKNDPADAAALCEAGGRPNIKFVSVKTVEQQAILAVHSVRALLVKQQTMLSNAMRGLAAEFGLIVPKGIDKLVELMAFVDADASVPKQARQAGKELLDQREAVGERIETLEAEIIAHARQDKAARRLATIPGVGPITASLIAATVADFGVFKRARDFAAWLGLVPRQHSTGGKTRLGRITKTGNREIRKCLVLGAQSMTFRARQWKSAAGVWTDSLLQRRPVRLVTVALANKIARIAWALMTRNEVYHAKGRVVAAAKAVA

SEQ ID NO: 208988 - protein, 369 aa, unidentified
MGKSISYVGLDVHKDTIVVALAETGLRGEVRQHGKILNTPAALKALTVKLARTGRDLRYCYEAGPCGYGIQRLLAGMGHDCTVVAPSLIPRKPGVRIKTDRRDATNLAKLHRAGELTPVWVPDQAHEAIRDLVRARQAAVRTLRKARQQLSGFLLRQGCHYHRPAWTQLHRRWLASLKFDQAVHHIVLEDCIAAVEAATTRRDRLEAHIEAALPEWSLASVVQALQALRGVGLVAAATLVAELGDITRFTNPRQLMAFLGLVPSEHSSGSTRRQGGITKAGNGAARRMLIEAAWSYRFPARISREQLLRQERLTKPIREIAWKAQERLCRRYRSLTRAGKLPTVVTAAIARELAGFIWAIAQQVQPAAF

SEQ ID NO: 208989 - protein, 448 aa, unidentified
MFTMHYKRLLALIDSVSSYLSVGLDVGADFTWMSIALPNGSFIGKPFKIVHSDPGARDLAVAKIKEAQETYSLKSRCFLESTGIYHIPLLCFLRDKGFDCSVINPIITKNSTNISIRKLHNDKFDSKKAALVGLNVSLKTSIIPDDSVVDLRNLIRDYYYFKDLQSAVALKLTAELKVSFPAYAKIFSKVTTQSSLKLLSSYPLAEDMLTAPKDDIVKIIRSTARFGEAYALRKYDAIIAAAQDAAVFGRALPSNAVRIRLYIDTYQEYQKHLDALLKALHKTVDQLQDTLIYDQICLLQSLRGIGFLTAAVLIAEMGDFKLFSSPKKLYAYFGLDPAVKQSGKLNGDKVHMSKRGSSLARRVLHMVALNNIKIDKGSGTPVNPVVYNYYTRKCSGKKKPVAMGAVMHKICNIIFAMLRDNKPFEVITPEEHCRRFAAEHPDKIQKAA

SEQ ID NO: 208990 - protein, 344 aa, unidentified
MSIKVVGIDIAKNLFQVCVLGTNGQILSNRKVKRDKLLDTVLQLPEQTALAMESCATSHHWGRIFQELGYTVALIPAQHVKPFVGRQKNDANDARAICEAYSRPNLHFVPVKSVEQQDLKAIRSVRKRLVENRTALANQIRGLAAEYGVVFPLSIKALRSHLPLALEDAENALSPVMRNLLQTLYCDFVSLSEEIDEMTQSVTMLSQQNPKYEAIRNIPGFGPILTAALISEVGAGNQFQNGRQFSAWCGLVPKQNSTGGKSSLGSLSKNGNRELRALLIHGARAVVRCGANKADAMGVWLRGLIARRGKAKAIVALANKLGRVAWHILAKNSEYDINQAFKPV

SEQ ID NO: 208991 - protein, 338 aa, unidentified
MLYGAIDLHSRASQIRIVDEAGAVLRDRRVRTTRDRLVAVFAGADAVRILVETGTESEWVAQALEAAGHEVIVADPNYAPMYGELRRRVKTDRRDVAALAEANRRGWYRPAYRRSAAQRATTQVLGVRRQVVKMRAETVVLVRSLLRQEGYRLPTGSAARTPARLARLEMPAALRARLTPLVVAITQLTEQIVGLDAEVATRAAADPVVTRLQTVPGVGAVVALTFRAQVDDVTRFGSAAQVSAALGLVPREDSSAERRHRGHITKAGPSVVRSLLVQAAWACWRSRHSGALRRWADGVASRRGRRIAVVGLARRLSRILYALWRDETTFRPHVLMPS

SEQ ID NO: 208992 - protein, 444 aa, unidentified
MAVRKRDDEVFPNAAGIDVGASSHWAAVPRHLAEQAGCEAVREIGAMTDDLNALADWLLACGVDAVALESTGVYWIPVYEVLEQRGLKVWLVDARQMKYVPGRKSDVQDCQWLQKLMSLGLLRAAWRPDGEVCVVRAVARQREVLITEQASWVQRMQKSLVQMNIQLTEVLSDVMGATGQTIIRAIVAGERDPKVLARHRHGRIKASAEDIAKALTGNWREEHLFVLRQALAMYDDIARHLGDCDAKLQALLAERSGCPIDLGKAPKAGSKSRVEFDVRQALANWAGVDLTRINGLGPTAVMKLLSEIGPNLTRFATVKHFCSWLGLCPGTKISGGKVLSSGTKRSANRARHALKMAAMSLSHSDSALGAFYRRLCSRMDKPRANTATAHKLARMVYFMLTRGEASVDQGQQRYEEQQRQRSIASLKRRAATLGFQLHPTTPSA

SEQ ID NO: 208993 - protein, 374 aa, unidentified
MGNIIEAYVAFDTSKLRNAIAIADAGRAGEVRFLGEIENTAAAVAKLVRKLAAKYGRLTFCYEAGPTGYGLYRQIKSLGHECMVVAPSLIPKKPGDRVKTNRRDALSLVKQLRSGDLTAVWVPDSRHEAMRDLTRAREAAVEDLRRKRQQVSGFLLRQGLHYPGERAWTKTHRGWLASQKLEYAEQRIAFEEMLLAMRQAQERIERLEQAIRVAVPDWSLAEVVTALMAMRGIDFISATAFLAEIGDLSRFPTPRELMAYLGLVPSEDSTGDTVKRGPITKAGNRRARRILVECSWSYQHPPRVGKQKQERVAAAPRAVREIAWKAQCRLTARYRALTRKGKLKTVAVTAVARELSAFIWAINREIANPRAAAR

SEQ ID NO: 208994 - protein, 339 aa, unidentified
MKDMMIGVDLAKRVFQLHGALLDGKVQFRKKLTRQQFRAFMEKQAPSLVIFEACSSASYWAREIESLGHEPKLIAPQYVRPFVKRQKNDAADAEAIVIAARQPEMRFVAPKTVEQQARAALFRGRDRLVRQRTEDVNALRAVLYEHGYIFPAGLVHLKRIEALVEEETCELPVIIREECRDLLAQIAEKTARITARDKKLKDLAAQSDTARRLQTMPGVGPLTALAVEAFSPDVTQFKRGRDFAAWLGLVPRQHSSGGKERLGRISKAGQADIRRLLIIGAMTRLLGRARRKILAESWIERMLARKPKMLVAIALANKMARQIWAMLTKNEAYRDPAAA

SEQ ID NO: 208995 - protein, 461 aa, unidentified
MKKPKRRATGRVDQGSKLSVIQSDVAGIDIGSREMFVCGPADEEGRREVRVFATTTQQIQQCVRWLKQQKVRSVAMESTGVYWIPVLEIMESSALEVLLVDTRPLSRVPGRKTDVEDCQWLQTLHSHGLLRGAYRPSEQISELRTIVRQKAVLVRQQADWIRRMHKCLDQMNVRVHHAVKDTQGVTGMAMLRAIVAGEKDPRNLAKLRDPGCQKSETEMIELLTGNWRSDHVFNLKQHMAMYDSAARQIAVYEEEIQRRMQEVTPAGRKDIQAPPLANIEKRKTMKKRDQEGKRQALYRAMGVDLTTIDGIGVETVEVIMSEYGTEMSKFPTEGEFVKHVGLAPHRPVSGGKVLKNKPKRQQGTRTAEVLRNAASSLKHSRSALGAYYRRMARRKDSGVAVFATARKLGGLIYRMLRYGQQYVDVGQAAYERQYEEKRVRALNNTAHQMGYNLVKQEAVSA

SEQ ID NO: 208996 - protein, 419 aa, unidentified
MTHPRMKWTYIGIDSHKDTHCAVFLDCFFGKIGEITFNNIPSDFDTFLKEAEKYKVVGTNFAFGLEDMSAYGRHLNVFLTKKNHMVKHVNAALVASERRSNNTLHKTDSFDAECAARVLLSRFDELPIADPQDKYWIIAGIVTRRSSLVKANVSLKNHLHALLTDNYPNYKKYFPLIASKAALTFFEKYPSPDTLNGVTAEELREFIHREASGRLSLAKSTDFLTHIEKCGWEPSEYQAEKNFTVKSTVRQLKTNIFEIDEVEETLADFLKHFPYKLTSMSGIDTVTAARLIAEIGDIRRFPTAAKLAKYAGVSPVTYASGKSDVQYANTRGNRKLSETFFRLALLLTMAVGKTNRIVNPYFYHYYRKKLSDGKTKKQALKCCQRRLVNILWGMMKNNTEYINPPTYDEPPVTKKGDTA

SEQ ID NO: 208997 - protein, 337 aa, unidentified
MKLYGGIDLHSNNSYVVILDEEERIMYEKRLANDSQEILRALSPYQASLEGLVVESTYNWYWLADALLAENYTVHLANPCAIQTYSGLKYSDDKSDARWLAKLLKLNILKTGYIYPKDQRPLREVLRRRLILVHNQTRQLLSIQGLGARYLNQHWSSNQIKKASKEWFKAISDPLIRQSIQSHYRVLKCVQAEIERLETIIKKELKPSDDFKRLKSMPGVGAILAMTILLETGDIKRFPSAGDYSSYCRTVKSIRLSNEKKKGENNRKNGNAYLSWAFIEAANAAIRAYKPITRYYQRKLQKQLRVVALKTIANKLSKASYFMLRDKVEFDMKKLFP

SEQ ID NO: 208998 - protein, 357 aa, unidentified
MKIVGCDLHAKQQTIAMVDTETGEFTEKTLAHEGNKVREFYAALEGPVVVGIEATGAMQWFLQLLEELGIECQVGHPAKIRAKETRKQKHDRRDARLELELLMEDRFPTIWMPSSEQRDLRTLLRDRHQWVKVRTRVQNTLQAIALNHALRHGHALWSPAGQKALQALALSRYTRQRRDELLHLYVQLQKRIKELDRQVEEEAKRRPQALRLLTHPGVGPITALATDVFLGDAHRFATGNQVASYIGMIPCEHSSGKRQRLGKLSKQGNALLRYLWTEAVMHAAAKDPELKRFYRRKLIQKGMGKARIAAARKLGIRLWIMMRDQIDYEEFCRRGKLRQSGEAHAGMPACNSGPALL

SEQ ID NO: 208999 - protein, 316 aa, unidentified
MSTVPVFVGIDIAKDRSDVAVRPTGNRWAVANDDAGITMVVSRLQALRPALVVLEATGGLEIPLTGALAAAGLPVVVVNPRQVRDFAKATGQLAKTDALDAAVLAHFAEAVRPALRPLPDAATQALSALLARRRQLLEMRTAEQNRLSSAPSPVRTRIRAHLTWLERELAHLDEELGRAIRESPVWRERDDLLQSVPGVGPVLARTLLASLPELGTLNRKQIAALVGVAPLNRDSGTLRGRRTVWGGRAHVRAALYMSALAAARWNPVIRAFYQRLCGAGKAKKVALTACMHKLLMILNAMVNTGTPWQSNFAHTP

SEQ ID NO: 209000 - protein, 356 aa, unidentified
MSRDIKYIGMDVHKEAIVIAVLNGSGKLVMETILETKASSILEFLHGLRGELHVTWEEGTWAAWLYDLLQPQVQEVVVCNPRRNALLKEGSKSDKVDARKLADLLRTGMLRPVYHGENGLRTLRELARSYQTISKDLTRVMNRLKALYRGWGIPCAGTQVYAPRYREQWLHKIAQAGVRRRAELLYQQLDGLQALRRNLRPEFLAESRKHKAAKLLRQIPCIGPIRAARLIALMQTPHRFRSKRQLWTYSGLGIETHDSAQYRYVGGQVQRSQKPQQIRGLNQNHNHDMKEIFKGAATRASCASGPFRDFYAALLAQGMKPEMARLTLARKIAAITLTLWKRGERFDAEQLKTQAA

SEQ ID NO: 209001 - protein, 382 aa, unidentified
MPMKQVCGLDVHKDSVFVCILNENGVVFQEKYGVLTPELEQMLAKMLEYHVEEVCMESTSIYWMPVWRVLENYVSLKLVNPYFIKQLPGKKSDVKDAEWIATCLLKDLIKGSYVPDDLIQQLRQYDRRISDLNAECVRKLGKLDAALQRCNIRISNYVSTTDSKSYKEVVRLISEGTRDPAELTKVIHGRTVNRVGKDVILASLTGVISNTDIDVIRQLREEVALAEKHKDECQSKMDAICQQYFPEQLKNLQTIPGIKGRSATAIIAEVGTDMSSFEDAAHLVSWCGLKPRNEESAGKIKARSITHGNKYLRKTLIECAWAASKTQGCYFNKFSYHQVVVRRKNKMKVQVAIARKVLTAVWYVMHDSVAYRDFTPDIAPTE

SEQ ID NO: 209002 - protein, 344 aa, unidentified
MGEVSTIGLDIAKSVFQIHGVDRDGEVAIRKRVSRAKLLELFAGLPPCVIGIEACPTAHHWSRKLQTLGHTVRLMPPSYVKAYLKRSKNDANDAAAICEAVTRPSMRFVPIKSEQQQSGLMLHRSRQLLVRQRTMLSNAIRGHMAELGIISAKGRNGTAELLKIIATENDDCIPAAARFSLDVLARQYVAIAAEIGVIEKRIHAWHRSCAESRRLEEIPGIGPIVATALVAEVGDWKAFSSGRNLAAWIGLVPKQHSTGGKERLGGISKQGNRYLRWLLVAGAMAVIRYARQHGTKRLWLARIMNRRPIKVAAVALANKIARIAWAMMVRGERFKEPRLLPAVT

SEQ ID NO: 209003 - protein, 352 aa, unidentified
MMSHHEGRAVHMSIVTIGLDLAKQVFQVHGINAAGRVVVRRQLRRAGVEAFFEALPPCLVGVEACASAHYWARRIAAYGHEVRLISPARVKAYVQRGKKNDATDAAAIAEAVTRPHMAFVPVKSEEQQSILMLHRTRELLVRQRTMLINALRAHLAEFGIIAAQGRAKVKALIEELSDAALPSLAKTALTEVADQIKACDLRIDALEKEIVLWHRTCETSRNLATIPGIGPIIASALAASVPDPALFKNGRHLAAWLGLVPRQNSSGGKDRLGHITKAGNTYIRRLLVLGATSVIRCARDKAPGEAMWLKNLLERKPPRLVSVALANKMARIVWAVLTRGEVFREIRPAIAA

SEQ ID NO: 209004 - protein, 348 aa, unidentified
MRFYTQQHRYTCGIDLHARSLYVCILDDTGQVLVHKNVNASPEALSKLIAEYRNDLIIGVECMFSWYWIADFCEDHGIEFVLGHALYMKAIHGGKAKNDRIDSEKIARLLKGGMFPYAYVYPRDMRGSRDLMRRRIKLARERGELMGHIKNTLSQYNLPAHPKNLRYDKHRDPMRTAFPDPSVQRSIDLDLARIEFYDGQLSKLEWYLKRTAKLVDPKTVIRLKSVHGIGDILSLVILYEIHDIERFPRVQDFVSYCRLVKCQRESAGKKHGTGGAKIGNPYLRWAFGEAAALFLRGNPKAQRWLEKKTRKHNKAKAMTILAHKLGRAVYYMLKRGTLFDQDRFLAQS

SEQ ID NO: 209005 - protein, 362 aa, unidentified
MRIIGCDLHARQQTLAMLDTATGEVVSMTLKHEGNNVREFYSSLPRPVRVGIEATGSMQWFVNLMEELGIECLIGHPAEIRAAEPRKQKHDRRDADLILKLLAENRFPAIWRPSKELQDLRALVRHRHQWVRIRTRIQNALQSIALANGLRRGPALWTQGGQHAIASLPLAPHTAYRRNELQAMYKKFEAEIEKLNQRVEEQASQRPGARLLMTHPGVGPVTALATEVFLGDPARFADSKALASYVGMIPREYSSGPRQRLGGLSKQGNPLLRFLWGEAGAHAVRRDPELKRFYRRKLNQKGFGKASVAVARKLGIRLWIMLRDQIEYNEFCRRGQKQQQSSDACVCGDARNAVWCEKSPDV

SEQ ID NO: 209006 - protein, 408 aa, unidentified
MNPLYVGIDVSSKSNVVYFMLPDGSKHCNFSVANSHTGSSQLVKRILSAMTSCSLDTVLIGLEATSVYGDNLVYFLREDAALARFNSKIHVLNPKQVKKFHDAYNDLPKNDYVDSFVIADCLRFGRINKEVYLGDYRYKALQNLTRARFFAVQNLIKEKQRFMNVLFKKYSTMTQEKVFSDTFSTTALAVYDEFDSAEALANMDLHELTDFIIEKGKNRFPDPDAVAKAIQKAARSSYRLPKTVNDSVNQVLSISITSMKALESQIKEFDKAIKAQMELLPNVLISIPGIGPVYSAGIMAEIGDINRFDNQAALAKYAGLAWKQHQSGSFEAEVTRLIPSGNRFLKYYLYEAAFSLVRCDKEYSDFYHLKYKEVNRCQHKRALALTARKFVRLVFRLLKDNRLYVPAK

SEQ ID NO: 209007 - protein, 377 aa, unidentified
MAKGIRFVGLDVHGETIAATVAEEGETVTDVGIVPNRPEAVRRLVKRLGPVQKLRVCYEAGPCGYVLYWQLTGLGVHCEVVAPSLIPQKPGDRVKTDRRDARKLAQMYRAGVLTPVWVPDMQHEALRDLVRAREAAKRDELVARHRLRKFLLRTGRRAPEGTRAWTKRHGQWLQSLRFEHLAQEVVFLDYRHEVDHACERVMRLERAIDEAVERMPASQRAVVDGLQGLRGVCKVTAVTVYTEVGEFSRFARPDRMMGYTGLVSGEHSSGSRIRRGAITRTGNAHLRRVLIQAAWAYCRRPHLSPALKKRQAGLCDQIKEISWKAQHRLSGRYRRLISRGKTPQQTITAVARELVGFLWAIGVEVERRQESQGHAAA

SEQ ID NO: 209008 - protein, 394 aa, unidentified
MTLYIGIDVAKTFHIACVINSQGQMVVQLRFDNDAVGFHQLQQTIQRFGLPEMGSVFCGMESTGHYGIALRDFLTQLGYPVQVFNPLKVNRFRDFYIQPHKDDYRDAFVIAQMLRYGERAPYAPLQPAPRALKQLTRYRTSLVRARAKVKTQIRAILDEVFPEYQQTPLFGDVFAASSLALLKRFPTPQELALTSQEELARLLSGNSRGRLSSQRAALILEKAKGSVGSPASARAFAIILPDLIDELEILESRVSHFAAKIEAQLAEIGQTLTTIPGIGPIFAATILGEVGDITRFPSADALVAYCGFAPRRYQSGQFTAKNMHLAKRGVPQLRYVFYRAALVSIQHNPHLAAYYQAKVHQGKPKKKAVIAVARKLIRIVYALLKSQTPYVSPG

SEQ ID NO: 209009 - protein, 354 aa, unidentified
MQITNNGFINLNLEKIELIKTGIIYDHYIAIDWSQKSMAIARISNKNPDKVKITIGPANLSGLKEHLNKIKGTKILTIEESTPAHWLYVELYDCIEKIIICDPYKNRLLGDGAKNDPIDAKKLCLLLKGGLLHEVFHTTENIYKLRKLVSSYEDIISQSVRLKNQRAGFLAQNGKSKKTKELPKETIEKLIQESQDKLINGYTEVKEKYLEEISIFCKRDKRLRFMKTIPGIGEILAVKILAMTVDPRRFKNGGKYLAYCGLVKHAKESGGRIYGRRNTRYNRVLKSAYKTAALAAIGGNNPVREYYEVLIKNGLAEYNARHTIARYIARLCFGIMKNPKKYEPYLWRKNRCEK

SEQ ID NO: 209010 - protein, 385 aa, unidentified
MKGKTFKPTDYEVFGGLDIDKRSISVTFTNHQGFIRSLRMPYSVEHLVNHVRKHFGDQKVAFAYEAGPTGYGLYDGLVAKAYPCLIAAPSMIPKAPGQRVKTNRLDSRGLSENLRGGQLKSIHVPCALYRELRHLTQLRDTFVSEMVGMKQRIKSLLLFEGIEFPPAPAGRQWSFRVKDKLRKLECSKTVRFKLDQLLDSLEFSEKQVLKATREIRRFCRNDAELSQCIEYLMTIPGIGWIVASQLVARIGDWRELKNIRQLGGFLGLVPTENSTGERTDRGSITHTGDGRLRSKLIQASWSAIRQDGELREFFRSVCRTHARHLASRVAIVAVARKLSVRISVVLMKQRPYEVRQKVRSTPLTQGETSPQGTTRRQAEPGEKNS

SEQ ID NO: 209011 - protein, 334 aa, unidentified
MKSDTVHIGVDVSKEKLDVFVPAQKEGMRPTTREVGNDIDGFKELRDLARKAKATVCVEPTGGYELELIAFMHRFDVPVAYTDALRVRQFARAEGNLAKNDRIDAALISRFADKIGVRLIEAQDVEAVELKRKAKFRQTIMDSRTAMANRLETEINPEMRAMLRAQIKGLDRLIDRTGRLCLETVGKNERMNSLRERFTLVGGVGDLTAISILAGLPEIGTLSDEKLNRLVGISPEENQSGSKDRLRRIWGGRKDVRNALYMAAVASIQWNAILGSYYRKKRAEGHPHKWAIVPTMRKLLSLLNRIARDPGFIPMPKPESTKQNANVGRRTKAA

SEQ ID NO: 209012 - protein, 412 aa, unidentified
MLLLVGDDWAEDHHDVEVMDSAGRTLAKARLPEGISGLTRLHALVAAQLGDQADEADEAEVRIGIETDRGPWVAALVAAGYTVYPVNPLQAARYRERHGVSGAKSDPADAHTLADMVRTDAHQLRVMAGDSTDADAVKVVARAHKTLIWERSRQTQRLRHALREYFPAALAAFDDLDAGDTLELLAKAPYPAAAARLSRAQISAALRRARRRDIDTKTTAIRAALRAPQLGRPAVVVTAYAATTRAAVAVLTTLNEQITVLEGQVEAHFRRHPDAEILLSQPGMGAVLGARVLGEFGDAPGRYADAKARKNYAGTSPITRASGKRKLVAARHVHNDRLVDALMLQAQSALQASPGARAYYDRQRARGLDHNPALRQLANRLVGILHGCLKTRTRYDETTAWSHHNNDRQTAA

SEQ ID NO: 209013 - protein, 342 aa, unidentified
MTMIGIDPHKATHTAVAIDDDEDVIDEYTLKASRSQTERLTTWADQFAKREWAVESANGLGYLVSQQLVAAGETVFDVRPVLASRVRLMGSGRSQKNDPNEARSIAIAVLRSHRLAVVEPVDHGVVLRLLVKRHRDMARLRNKHCSRLHALLIELAPGGIGGKISASNASELLDRVDVANAVIRYRILVARELVDDIARLDATMKASKKRILVAVTASGTSLTGIVGVGPIGAATIIGYTKDITRFPTKGHYATYNATAPIEVSSAGNKKHRLNLRGNRILNHAIHIAAVTQLRHDTIGRTYYDKKITEGKTPKEAIRALKRRISDAIYKSLIVDMVRNSTS

SEQ ID NO: 209014 - protein, 467 aa, unidentified
MSSESCNFFWDYDPDIKPAMILRMPKCVPERECECARTSDRHLPISGNDNMNAEKEIVCGADIHRDFLVATMISRSGLKLQEQFGMDQDGLLAFRSWILDHGCQRVAVESTGNYWYPIFCILEGHVEIILANAFQIRNIEGKKTDRLDSERIAIYCLNDLIKPSRIYPKDYRDLRSITRSREALVNARSKLKNQIHQSLAVCCIKLSSVISDSFGKSGRYIIEQLLEGKTIEQIISMIPSKRIKKKADELRKAIRNGLDPVQILLIKTNLDAIDYLSEKIKLLDAEIAIKVKPFEEDLNIILSVPGIGLTSAATILAEMGDYKDFQDADKLAMYFGIVPAVYQSAGKLRTGKITKRGSKHMRRILVQVAKAISKTKKSSKLKRFFLRVFTRSGKKNVAAIALARKVLCIIYHLLMKREDYQEPEVKKNKPKIPSCISPLSMMDIDEMIKTISQAGYLVKKGLTEGCG

SEQ ID NO: 209015 - protein, 368 aa, unidentified
MGKSSKLYVGMDVHKDSIDVATGDDAAGEVRHYGAIGGDLASVSRLARKLESTGKVLVFVYEAGPCGFGIYRMLRDRGHECWVVSPGMTPRSNADRVKTDRRDCLKLARLARAGELTPIHVPDETDEATRDLVRAREDAVVMQRQVRQRLGALLLRNDVRYNGKTAWSPAHRRWIAELKLPHAAQHIAFEEYAQSVDEAGKRIERLEAAIRDELTRWRWRPVVAALEAFRGIRTIHAVRLVAELGDLTRFASPRHLMGFLGLVPSENSTGNRRRQGAITKTGNSSARRALVEAAWAYRYGARVSVGIARRQSGLPKAVTDLAWKAQLRLCARYRRLSARGLPRNKIIVAIARELSGFVWALGQLVKPA

SEQ ID NO: 209016 - protein, 391 aa, unidentified
MTKPKTKTVNDFSRCLDPLDMDATLIAVIEMSQSSWLVAGIVPGVERQPLKKLAIDEHALLSLLNRWRAEAEKQGHRITRIAVAFEAGHDGFWLARWLAAQGVEAHVIHASSVAVTREHRRAKTDRLDTELLKRAFLGWLRGERGHCKMVAVPTLAQEDAKRPSRERETLVGEASRIITRVKAAFVRLGIRGFNPKLKAAATRLETLRTPEDEPIPPNTLAALKRDLERHQIVKKQIREIEQTRLHVLKQAPEKGPHAMVLLLARVIGVGVETADMLVQEVLSRTMRDRRAVGRYAGLTGSPDESGAKRRDKGLARSGNARVRHGMIQLAWRFLLFQKDSALAQWYRQRTADAPSTRKTLIVALARKLLIALWRLAREGVVPEGVRMRPAA

SEQ ID NO: 209017 - protein, 424 aa, unidentified
MKVVAINPEIKTEKVLDVAFDVGKDKLNSVFEAGLSRYEDEFRNAGNVIRGKLKLYMELAKKHGMDRIRVLVEPSGGYENALLKTAHRLGCRTAYVSGEASCKFRMVVHGDPGKTDTRDPQPLLGVAAQGKLLTHRVLPADYELLREINREYDWVSERRVEIRCEVHALLVRLFPDFPMESDFLYESGGMAVARDYGWNPGRIVEKGQERLRMCLKAASPHVRATTVTKIWEAALESSGLHDGGGAVEFLTERVQRLYESFIRLDGQRMALRARLEEVYLRLRETDPNLPFAVSGVVNLYMLARIVAETGPLSDFRSIQQLYRFAGINLCERKSGSYVGKIRISRKGRVPLRRVLGLAILPLVRAGGLYGAWYHTSAGETKKSKGMAALMRKFLKMIFGWYKSGRGFDLRRVFTSASQYAVRAA

SEQ ID NO: 209018 - protein, 344 aa, unidentified
MSQVITIGLDIAKNVFHAHGADERGAMVFSRKLSRCKLLDFFAKQTPCLVALEACGGAHHWARELQAIGHDVRLIPPAYVKPFVKRNKNDANDAEAICEAAQRPGMRFVAVKSEEQQAAGLVFRTRDLAVRQRTQLINAIRGHLAEYGWVAPRGTAHMAMLADLLEDEEMASTLPEAALPMFRLMVGMLAELDKRISMLDREVERRAKEDEAARRLMTIPGIGPIAATAIIALAPPIETFSKGRDFAAWLGLAPRQHSTGGKQRLGSISKMGERTIRRLLIIGGSSMVRRACRFGAPAGSWLERMLARKPRMLVSVALANKMARMVWALLTKKEDYRAPAAVAA

SEQ ID NO: 209019 - protein, 357 aa, unidentified
MKSQDSNYVGIDCGKKNLEVIRINSEGSYERQQFSTTEIGISKLINWLNPNDVVGLEAGSQSFRIAKSILNKGIQVIVLNPGDLATIYQSLKKTDKEDSLKIARLIQRFPIEELPVVPIPNDEEEDNRRLCSEQENWTRQLTQSKNRLHSLFTQAGLTHITKKHLRTKANRETSVAILPSRYQKEAERILKVLDLVEQNLKLIEEEIKEALKKNQAYTQTIMSMPGIGMITSLAIMSYMGDCKRFSSAKQAAYYVGLVPRVDISGDSAYYGRIVNRGCHSIRRVIVQAAWSLVRCQHGGKIKEFYQRLYPKKGAKKSIIATSRKMIEVLYSMIRTETLFDSMPEEVLNRKLAQYGLM

SEQ ID NO: 209020 - protein, 343 aa, unidentified
MSIVILGVDLGKNACSIVGVDATGAVVLRRSMRRQTLIDYVSKLPACIVAMEACCGAHHMGRLFADHGHEIRLMSPEYVRPYVKAQKNDDRDAEGIAEAASRPTMRFVELKSQDQLDIQTLHRVRSRLVAERRSLINQLRAIMLERGTIFPVGRRKLELGVDALLTQEETALSSRIRRLIGDLRAEWRDLDEKIESLNAEFVELARNDAAARRLTSIPGIGVLNATALIAAVGNAGSFAKARDLGAWLGLVPRQHTTGGKPWLLGISKRGNTYLRTLLIHGARASLPSISRSDTPLGRWLKAMLERGVHRNAAVVALANKLARIAWAALRKGATFERSYPVAI

SEQ ID NO: 209021 - protein, 404 aa, unidentified
MKGPIVSIDVSKGKSDYQAFKNLNVKYTGSRSIKHTKEGFDEIVNLVREMEKKLETEVCVVYEATGVYHRVLKKVLEDNNIKQFIINPLLSAKTRKNDSLRCPKTDKLDPKSIAKTYYSHSLHNSHKPETIYHELRELSRYYEDILVHIRKDKVAFRAQLDVVFPGYDTLFDDLYGPVALAVIEKYPHPEMLQKKKINTVSKVIQSKTCHRQAASDTMADKAIEYSKTIYSGCDKDDIEVLILQRFIKKLKEDMAEAERTIGEMIKLAQELPNFSIIKSIPGIGDNLAARIIAELGDMTRFKKKNELVAFAGLDPRISESGKNDGDHMHITKKGNKRLRCLLYLAVTCSIRLKRDDNSIKDFYIKKKQQSNPMCSKAAKTACASKLVRIIYSMCKTGELYQYNK

SEQ ID NO: 209022 - protein, 425 aa, unidentified
MSPGCKALPRRPALDIRFPCCAGAEVPQKTVVVCVRRLRPNGTIHQQVRTFGTMTADRLARSAWRAHDGVTDVAMASTGVYGRPLCNLLEGVFPVLLVNPQHRPRVPGRKTDVQDCAWIAPLLQCGLLPPRFIPPRPVRELRELTRQRVQLTAAKTAAVHRIPKTLDDASSQRAAVATDVLGKSGRVRIRALIAGQDDPDVLAKLACGALQKKLSALKVALHGRVPEHHRLLLQLLLDHVASVARRIERLDPRIYRWSTPLQETMRNLDTIAGTHRRGAACLVAELGTDMEPLPQATPLASWAGLCPGNRHSGGTSQGGKIRKGNRWLRRLRVQAAWAASRTQGSSRRAEYQRLKGRRGQKRAAVALAHTLLVMAYYVIQRGVASQELGADYFDRQPPEELTKSLVRRLERLGHKVTREPKDDAA

SEQ ID NO: 209023 - protein, 391 aa, unidentified
MRGAVFCSSADIGENDMTIISASPQQHHTQLSIRPDRVVFAGVDTHKELHVAAVIEASEQVLGTRSFSTTRAGYRAMLAWIAQFGDLARIGVEGTGSYGAGLTRHLAKAGVVVLEVDRPDRSDRRRKGKDDDLDAISAARATLHQRRTVTPKSKDGAVASLQVLRVGRAHAVRERRSALQLMRMTIISAPEELRDQIRNLTRMQLIRTLAAWRPDVSNATDPVTAYRVTLKSLARRYLELSDEIADLDELINPIVEALAPQLLQRTGIGIEVAGQMLVTAGGNHDRMKSEAAFAMLCGVAPLPASSGMTQHHRLNRGGDRQANRALHLAVISRLRLDPKTQTYVAKKTAQGHSKLEIIRCLKRYLAREVYYLLNPGQPTTPQRKKKINITS

SEQ ID NO: 209024 - protein, 348 aa, unidentified
MSTIPIAVDLAKTVFEVAISETPGVVTSRRRLSRAAFPRFLAAQAPAEVLLEACGSAHHWGREAQRTGHRVTLLHPADVARYRDGNKTDRADAKALLEASRNHALTPVPVKSVEQQAVVALHRIRQGYLRTRTARINALRGHLRELGHPMPVGARRVTLDARSALADEAVPDFLKQALFELIAEIRSLEERADAVRTSPTSLLHSMPDARRLMTVPGVGVLTATAMVACVGDIHRFRSGRHFASWLGLTPREHSSGSSRKLGSITRKGNSYLRMLLIHGARSALRAGAVTDTPDDWRAWAKEVSIRHCHNVAAVALANKLARISWKVWRDGRDFERREPQEEGHTTNG

SEQ ID NO: 209025 - protein, 385 aa, unidentified
MKPPPRHVRRRSALLPLQPKGDQVIVVGVDPHKRTHTAVAIERASGELRAELTVAARAAGHEELLLWARQQSQVRLFALEDCRHVSGALERFLIGRGERVVRVAPKLMGQSRRGSRSYGKSDSIDALAVARAALSEPRLPEARLAGAELEVKLLLSHREDLVGEANRTSNRLRWHLHDLDPEIALARGRLDRTAWMERLSRRLQRGEQTVRVRICRQQLRRLRSLAREIKGAEAELDALIRTQAPELLELPGCGTLCAAKLVAEVAGVERFPDDAKLAMLAGVAPLDASSGRQQRHRLNRKGNRQLNLALHRIAVTQARFHQPARVFLERKRAEGKGRREALRCLKRHLVRVVWRTLRAASSERMISISPNLQEIKMPTPEPVLT

SEQ ID NO: 209026 - protein, 410 aa, unidentified
MVKENFIYVGIDLHKETHTAVMIDCYNQKLGEITFPNRPAAFPKLVTKVKKCNTDGKEVVYGLENAYGYGRALAVWLIDKGYLVKDVNTAISHRQAKHRGAMYRKSDSDDAEAIALATLNMLDKLPDAYPNDAYWSLGQLVHRRDNIMKQRTRLVNQLHEQLCIAYPSYKQFFNDISRPTALYFWEHYPSRKYLKGKSVEDLRAELVPVSHNKCSTKTCEKILDAVASDKVKNNAYQDARDMVTLSIVSDLQYYDKQLAEVDKMLEQMYKMLGCTLTTIPGVNVITAVKILAEIGDIKRFSNANKLAQFAGIAPLHLSSSGKGKDVATKQGNRRLQATIYFLAIQMVQVSSKGTPRNSVVRAYYEKRKAEGKTSQQALICISRRLISIIYGMLKHGTEYRMPVVESAGEK

SEQ ID NO: 209027 - protein, 337 aa, unidentified
MKNFDYFIGIDVSKLTLDVTVLLLQTGKEELIDYQVIDNNEKRVVSYLEKVFKGQCFPENTLFCFEDTGIYSMPLAYILSDQQLNYWQVPALEIKRSKGICRGKSDKTDSKGIALYAFSHLYKLRLSTVSDAVIQKLRLLFSEREKIIKSLGAFKRTSENKDFCSKEVFQSVENINKDIVTQLDNSLKKVEEKLMDIIQEDEKITQEFELINSICGVGRYTALYLIICTKGFSCFENWRQLACYAGVAPFEYSSGTSVRGKTRVSSLADMKLKSLLNMCALVAIRRDKELRGYYERKLAEGKPKMLVINNVRCKLLARIFAVINRNSPFVNTWKFAG

SEQ ID NO: 209028 - protein, 392 aa, unidentified
MSTSITSADTLTTLYVAIELSKAGWLVAMQTPLDGRPRRYKLKAGDIAGLLALIERWRERVIGADGGKPAVFCCYEAGYDGFWVQRRLAAQGISCHVMDPASLQVDRRARRVKTDAIDVEALLRALIAWSRGEIQVCRMVRVPTVAEEDARRLHRERKRLVGERIAHVNRMKSLLALHGVGDYQPLRSDRHTRLERFVGADGCALPPQVQRELERELARLELVMAHIAEVEAARDAVVTATARPEDEKSRLMIANLTRLRGIGPEIATVLVREIFYRCFGNRRQVASYAGLTPSPYASGGTSRDQGISKAGNALVRTTMIELAWLWLRYQPDSALSRWFRERAGKMAGRIRRIMIVAVARKLLVALWRYVNGGLVPTDAVIRRACQREPVAA

SEQ ID NO: 209029 - protein, 338 aa, unidentified
MIVIGVDVHKQSVTAVAVDEAGRMLDERTVLVGSDELIGWASAFGGERLWALEDCRQLTRWLERQLLGLGEDLVRVPPKLTVPERRAGRQRGKSDPIDALAIARAALREPDLSRPRPGEQVFRELKLLVDHRDDLVDERRRIQQRLRWHLFQLDPTFAIPLRMLGRPSHLERVSRWLGRQERELQVRLARELVTRIRALTRAITELDHELEQRAATISPALLELPGCGVVTAAKLLAEIGPIDRFKSDAQLARHSGVAPLEASSGRTQRHRLDRGGNRQLNAALYRIAITQARYHPDARAYLERKRAEGKSRREAIRCLKRLLVRVVFNTLKASPALT

SEQ ID NO: 209030 - protein, 348 aa, unidentified
MMTNILKQVAGIDVAQKELVVSMGRMDQELTLEIFAFKTFPNNEKGFKALIQWSATITDDKVKVRYVMEATGVYHESLAYYLADNGFELSIVLPNKISNYFRTLDINTITDKTASQTIARFGLERKLEVWLKPKKIFRDLKQLTRERDQLIAERTLLKNQLHAELAEAFPNQRSVNRINSRIRFLNEQEKEIKGDIAEIVKQDNELLKKVQTITSIPGVGKLTAIIVLAETNGFELIRNKRQLASYSGLDIREKQSGTLVKGKPRISKKGNRHLRKAMHLPALSAIKHNEQFKVIFTRLVSRHGIKMKAAVALQRKLLELIFVIWKTDKPFAKDHLESANKLTILQNT

SEQ ID NO: 209031 - protein, 399 aa, unidentified
MEEGEKSSSCRYIALDIHKYYSVVAGVDREGQEVLIACRVEHMDLEDWLKKHLLATDRVVIESTTNAWHVYDLLEPLVAEVLVANPIKVKQIACARVKTDKKDTFILARLLAANLVPTVWVPPKHVRELRQLVSHRRRMAGMHTQVVNRMHSVAHRHHLNHPKGKDFQAKNTLWQRDESLSRLEKMQLELDMETREHLEKQIERMTRELGRMSHEEPWASEMLYLMQIGGCGVVTGMTILAAIGDITRFETPKALASYSGLTPGLEQSGVKLRGKGITKEGRRELRWVMVEVAWRAVKADPYWKKYFEELKRRMHPNQAIVAIARHLLTMVWYVLTRHEPYSHYTPERIAYKYLTWSWVLDKDQRQGMTRPQFARYYLMRLGIGNELKRVALNPENPYK

SEQ ID NO: 209032 - protein, 298 aa, unidentified
MNKYKETFGVDISKDVFDVHGSNKGHDQYKNDEIGFKKFLKELPKSSLVVMEATGYYHYRLAQFLYKNRVVVSVVNPLSIKRFIQMKLAKVKTDKSDAKAICEYALINEVPIYNALTDTQSECLQLFRLLDTYLKQRTATKNKIHGEAVLGIPSKFVYRSLIRNKKQLNKEVAAIESKILSLVKEDQQEQLTLLMSIPGIGQKTALFLIVVTDGFNKFETASQLCSYVGITPTIRESGSSVRGRARISKVGNRKLRNLLFLCSFNACKHNKACREVYERIVNKGKSKKLALIAVANKY

SEQ ID NO: 209033 - protein, 387 aa, unidentified
MPQLNDLSRSLVALDQNSTIIAVIELSQSSWLVAGVLPGIERQPCKKLEPSPERLLAVLHRWRDEAVRAGRNITRIAVAFEAGRDGFWLARWLEARGVEAHVIHPASVAVSREHRRAKTDRLDTELLKRGFLGWLRGERGHCSMAHVPTIAEEDAKRPNRERESLVGERTRIVNRIKATLARLGIRNFKPTLRKAAERLTTVHTPEGMPLPPNAEAELQRDMARLGFVVRQIREIEDARRKRLEQQPETGPHAMVRLLARIVGVGVETADMLVHEVLSRPMRDRRAVARYAGLTGAPDESGARRREQGLTRAGNVRVRRGMIQLAWRFLLFQKESALALWYRARTADSRLGTRKTMIVALARKLVIALWRFVTTGETLEGVIVRPAG

SEQ ID NO: 209034 - protein, 313 aa, unidentified
MAKVISQITLGIDVSKHELVIYDWDTQQCVHLTNQPEPIRGWLESLPGPVRLAIEPTSSYHLEVVEQAHRLGHPVYLINTRELAHYRQAVGLRHKTDPDDAYLLARYLEHEAAQLRRYTLRCHQSQQLWALLKRRAVIVQARKQLQQSLAETSISAKALFTQFKQLLARIDRRMMALLRALGWSADYDYCHSIPGIGPLNALALVSVFHRGTFASADAFIAFIGLDVRRRESGSFKGKRKLTKRGEAEIRRLLYCAAQPARTEPRFADYYQKQLDKGLSKTAAKVILARKLARIAFALISKQQLFDKSEKTYR

SEQ ID NO: 209035 - protein, 493 aa, unidentified
MLIQEPDEPGRKGGDNATTALAPVTSPERAAFAPKERIYVGLDIGYREHVAAASPLSVFNVGRSPDGWKRVKPIHFASDATGFGRFQRYLDRHSPDPRDFLILLEPTGSYGLTVLMYLLSKGYRVLQVENRAVKDYREKIFGSETKTDDTDARLMARMGFLHELVGEEFSIQPVLLMNPDAAALRGMVHDLAKLQKEITRRRNQLQQMAALTFPELKTFFKGSTAAPAARALLEHFATPQDLAAASTEHVAEVLRSAHAYSHATRAAELQALAQATAGVPTLTHHQWRQAWLIKQLSVLERARQELVDEVALATATHPYARIIESLPVKSPIWTATLIGAIGDVSRFSNVNQFKAYLGWSPQLTRSGSSIDHSELAKTGVRPARNVLGQMTVIMLSSRIKATPFREVYHRLTGRGMRPASALGHVAGKLSVVLYGMLKNMTPYDQDQHRRQLGLVHSADQTDSLPVDVSLELVDLAESQNDLVADDQSATAAL

SEQ ID NO: 209036 - protein, 448 aa, unidentified
MFIMHYKRLLTFIDGVSSYLSVGLDVGADFTWMSIALPNGSFVGKPFKIIHSDSRSRDLAVTKIKEAQETYSLKSRCFLESTGIYHIPLLCFLRDKGFDCSVINPIITKNSTNINIRKLHNDKFDSKKAALVGLNVSLKTSILPDDSVVDLRNLVRDYYYFKDLQSAVALKLTAELKVSFPAYAKVFSKVTTQSSLKLLSSYPLPADMLAASKDDIVKIIRSTARFGEAYALRKYDTIIAAAQDAAVFGRALPSNAVRIRLYIDTYQEYQKHLDALLKALHETVEKLQDTLIYDQICLLQSLRGIGFLSAVVLIAEMGDFKLFSSPKKLYAYFGLDPAVKQSGKLNGDKVHMSKRGSSLARRVLHMAALNNVKVDKGSGTPVNPVIYDYYTRKCSGKKKPVAMGAVMHKICNIIFAMLRDNKPFEIITPEEHCRRFATEHPDKIRKAA

SEQ ID NO: 209037 - protein, 430 aa, unidentified
MTTGHPLVQDAVPGTWVAIDIAKDTHVVLVEHAGQRERFRMQNTREDMDGLIAHLGQLPQPVRIAFEPTGVYHRPLGYRLVRAGFDVRFVSSLSCARYREARYATWDKNDPKDARVILEVLQQGMTMRYVEPLVAGWHDVQEVSKTYWHVTLMRTRVQHSLLTHFLPLYWPEFARYWRSTRSELFVRFLLVFPTPASITALTEAAFLEAAWEPIGRKVGKRVWLQGVYELAQRSVALPVAVDSPTVAAFRLRLQSFLDLTLQRKALEQWANQLLESNPDYQQLQTIPGIGPVFALTILAEAGDLRRFAHHRQFLKFCGLDLAKSQSGQSRGHERLSKRGNARLRCAFWFAGRVAVRSKEHSVRDKFERYTASDPFSPDRRRKAYTAIAAKMARIAHAIIKTGRPYRAYYEHDFPRGSTPMKRALEAVTTS

SEQ ID NO: 209038 - protein, 456 aa, unidentified
MEGSYAGVDWASEKHDVVVQNAAGEELLTASFAHDEAGLRSLCRQLVRLNVQLVAMERPDGVLVERLLDAGLRVLALHPNQVAAARARFRVSGGKSDRFDAFVLCELARTDHHRFRVLEPDSDQTKALRALCRGREDLVQARVALTNQLRAELERFWPGAVKIFRSLDSPIALAFLAKYPSPIEAKTLGEQRLAAFLAREHYSGGKTPRELLAKLRSAAEGRAGETEIRTRRQLVLALVGLLRPLIAQIKQLERELAQALDEHPDGQLFRPLFRDPKSVITAAELVSEIGDCRGRYPTGEALAGDAGQAPVAIESGKRKVACYRWTCNKRLRDAVCTLADSTRHWHPWAADHYARAIARGHDHPRAIRGLGRAWCRIIWRCWQDHTPYEPARHHALQQHALVTIPASSGPQPDTAATQRMLGDAVTRQGGPKAPSATRLTTSRHPLTRPGGLTHDV

SEQ ID NO: 209039 - protein, 350 aa, unidentified
MVVVGADVHKRTHTFVAVDEVGRKLAEKTFVATSGGHAEAVMWARERFGAEVVWAIEDCRHLSARLERDLLTAGQKVSRVPPKLMAMVRKSARTRGKSDPIDALAVARAFLREPDLPVASHDEVSRELKLLVDRREVLVSQRTATINRLLWHVHELDPEHAPKARAMDLAKHQRMLGDWLATQPGLVAELARDELADIIRLTEVINGLAKRIGERVRRAAPTLLAMLGCGELTAAKLVGEAAGVTRFKSEAAFARHAGVAPIPVWSGNTAGRVRMTRSGNRQLNAALHRIAVTQIRMDGPGQAYYRKRLAAGDSKTEALRCLKRRLARVVFGHLHTDHQIHQTACHPAAA

SEQ ID NO: 209040 - protein, 366 aa, unidentified
MKIGPVAIERIQIFKESQRTIGMDLGDRSSHNCILDEVGEVIWESKLPTTPKGIEEVFSRIPRSRMALETGTHSPWVSRQLTELGHEVIVAHARNVRLIGESSRKDDRLDARTLARLARIDPGLLSPVRHRSAKAQIHLTVIRARATLVSARTALVNAARGLTKSYGARLPKCGSEQMNREIAPGLSQELREALDPLLAEIESLNECIAEYDRRIEKVAKEAYPEAALLRQVKGVGPLIALTYVLTLDDPHRFRRSRDAGCFLGLRPGRRNSGMSEPQMHISKEGDRYLRTLLVQGAHYILGPFGQDSDLRRWGLKLAKRGGKNAKKRAVVAVARKLAVLLHKLWVSGEVYEPLRNNNHKVVAAVA

SEQ ID NO: 209041 - protein, 351 aa, unidentified
MLIMGCDWHPRYQIVAWVEEETGEVMSRRLEHENGEARKFYASLPPGAVVGIEATFPSHWFEGLLAECGHELWVGDAARIRASEVRRQKTDTRDAEHILDLLLAGRFPRIWVPSIKERDLRQLLVHRMKMVRTRTAVKNQLHYLAMSQGVCRKRKLWSMRGRAELEGLRLLPWASRRRQELLGWLDQLDRSVEELDRAVEEAGRARAEVALLRTHPGVGPVTGLAFVLTVGPIGRFANSRKLVSYLGLNSSEHSSGGRQRLGAISKQGNSMLRWLLVEAAQTAARYDPELRRAYQRLKFRRPSGVAKVAIARRLAVRLYWMLRAQADYAQLVRTSGSPSSAVVPSQSGSTV

SEQ ID NO: 209042 - protein, 457 aa, unidentified
MEQTLAQRNRTFSLEPGKTRQALTITHPNAAGIDIGSASHFVAVPPDRDDEPVREFASFTADLHRLADWLAACGVDTVAMESTGVYWIPLFELLESRGFTVLLVNARHVKNVSGRKSDVLDCQWLQQLMTYGLLRGAFRPADEVCVLRALYRQRGTLLRSQARHVQHMQKALAQMNIQLANVLADVVGETGQKILRAIVAGERDGYVLAALRNVRVRASAEEIAKSLQGHWRAEHLFALKQALDAFDFVGTQLAECDHEIERQLQRLQLHDADPAKGKQRGRARNAPKFDLRARLFRMCGVDLTRIDGVDVTTALAVVSEIGTDLSRFPSVKHFTSWLGLCPGTKITGGKVISGKTQRVVNRAAQALRLAAAALRSSKSALGAYFRRLCARMDKPKAVTAAAHKLARLIYTMLTQGQEYTDQGQDYYEQRYRERVLRALSQRAAKLGMKMVPAEQPA

SEQ ID NO: 209043 - protein, 412 aa, unidentified
MDTIYQRCCGLDIHKKVVVACLITPGAKGRPHKEIRSFGTMTADLLELADWLTAAGCTHVAMESTGVYWKPIYNILEGSFELLLVNARHIKAVPGRKTDVKDCEWIADLLQHGLLRSSFVPDLDQRELRELTRYRSSLVRERTAEVNRLQKTLEGANIKLASVASEVTGVSGRAMLQELVAGNRDAQALAQLAKGQLRNKIPQLERALVGRFGPHQSFLVARQLAHIDFLDQTIEQVSQEVADRMGPFEAELAALDTIPGVGPWTAEVIIAEIGTDMSRFPSAGHLASWAGMCPGNNESAGKRKSGKTRKGSKWLRVALTEAANAAGRGKGTYLSSQYHRLVARRGKKKAAIAVGHSILVIAYHILKDHTTYQDLGPDYFDHRQSAKLQTRLVNRLKGLGFNVSLTPVEQAA

SEQ ID NO: 209044 - protein, 341 aa, unidentified
MIIIGADYHPGFQQIALVDTDTGEFEERRLEHREEAEKFYRDLATRLLCVRVGMEASGQARWFERLLGELQFELWIGDAAEIRTKRVRKQKTDRQDAQLILRLMLEDRFPRIWVPSWENRDLRQLLWHRHRMVQARTRIMNQLQAVALNEGLRCKKRLWRDKGREQLKSFPLGPWADRRRRDLLELLDRLTPTIEELTQAIEQEVEKCPEAQRLQTHPGVGALTALAFVLIIGRAERFQCGKQIASYLGLVPWEESSGQRRRLGHITKQGNSLLRFLLVEAAQVTVRSDPEWRSKYFHLAMRRGRKIAKVAMARRLAVRMYWMWRKGWDYEQMRKFSSHAG

SEQ ID NO: 209045 - protein, 345 aa, unidentified
MVVLGADLHKRSHTIVVIDATGRQLAEKTIPATDTGHLELRRWAAHWPERTWGLEDCRHLSRRLDAELVRAGESVVRVSPKLMAGARRSGREPGKSDPIDALAVARAVLREPDLPVAALDGPDRAVRLLVDHREDLIGERTRHEQRLRWFLVELAIAEPTPRSLGRVTVQSALASALVGRTEPVARFARDLLARIVELSTTIRALEHEIEILVRTLAPTLLALPGCGALTAAKIIGEAAGMSRFRSKEAFARHNGTAPVPVWSGNVVRHRLNRGGNRQLNAGLHRIAITQLRLGGPGATYLEHRLASGDTRTEAIRALRRRISDDVFRRLRADEAARSTRLAAAA

SEQ ID NO: 209046 - protein, 391 aa, unidentified
MIYVGIDVSKDKHDCTIVSSNGEVLADVFTVQNNLDGFKLLFQKIKSVTPDLSKVKVGLEATGHYSYNILGFLLDKGLHTFVINPLHTNLFRKSTSLRRTKTDRVDARTIAAMMMSGVVLSSYTAISYHNEELKSLSRYRFDKVRERAKLKQSVSRLVNILFPELEQLVPTLHLAAVYALLAELPGAKQIAACHLTRLTNLLATASKGHYGRSRAIEFRDAAKCSIGSVMPAKSLELQHTIRLIHELNTEIAEIEAALKQIMDEIASPILTIPGISYCMGAMILAEIGDFSRFASPDKLLAYAGLSPSTYQSGKLDNAYAHMEKRGSRYLRYALYNATKYVCIWDRSFAAYLAKKRAEGKHYNVAISHAAKKLVRLIFALQRSGQPYCPAM

SEQ ID NO: 209047 - protein, 412 aa, unidentified
MKDLLEISCGLDIHKEKIVACILTGPLGKPTHSEIREFTTLIPDMLALRDWIISENCHHVAMESTGIYWIPIYEILEDAFSGNITLLVVNARHMKNVPGKKTDMRDSEWISTLLRAGLLNASFIPEKRIREFRDLNRFRKSIIRDITSQKNRVEKFLQSSGFRLSSFISDIFGASGRNIILHLMEHGRIDKISLDSYLKTKTRKRIDEILMSVNGTLSEHQKSFLKILMCHYDSMKEHLIEIETHLQEDMLPFALQIEQLNTIYGISTTASCAIIAEIGTDMKPFKTAEHICSWAGLCPGNNESAGKRKSTSITKGNPYIKSMLCEIAWVIAGKRNTYLSAWYWRIKQKKGARKAIVALARKLLVIIYTMLKQGTNFDENCFEVRRKNCEQKQLSRYIRELEKHGYTVEAQV

SEQ ID NO: 209048 - protein, 344 aa, unidentified
MKKVLIGIDFSKEKFDVAIIVKSTSTQEHALFDNKVSGYRKMIKWINSVVEDVPCSSWLFCGETTGGYSRMMSDWLYAQGYDVWIENALVIKRTFPLKRLKNDTVDAFMIAEYALRFEDRVQLYEPMSQALTELREIFLYRHHLVRHRCSFEVRRIEKRFTQQKSANKNVISQSARHIITEINKEIAKCDEKIKEYIESDDQLSSIFAIVTSMPGIGTINAVSLMVYTNNFTKFAYNPRKIACYYGIAPFGRDSGTSVHTDPRVGFIANKMLKSLLTQAALASVRTCPQIAKYYQRLIERGKKPMVALNNVKNKMIAIITAMVRTGCMYQPDNICLATQSVIVK

SEQ ID NO: 209049 - protein, 436 aa, unidentified
MRGCRCSMIMGFTKPIEHFNLQRKKVITMNTLYVGIDVSSKSNVVYLMLPNGDKHSNFSVANSHEGSTQLVKRILSALTSHSLDTILIGLEATSVYGDNLVYFLREDATLAPFNRKIHVLNPKQVKKFHDAYNDLPKNDYVDSFVIADCLRFGRINKEVYLGDYRYKALQNLTRARFFAVQNLVKEKQRFMNVLFKKYSTMTQEKVFRDTFSTTALAVYDEFESAEALANMDLQELTDFIMEKGKNRFPDPDAVAKAIQKAARSSYRLPKTVNDSVNQVLSISITSMKALESQIKEFDKAIAAQMELLPNVLVSIPGIGPVYSAGIMAEIADINRFDSQAALAKYAGLAWKQHQSGGFEAEVTKLIPSGNRFLKYYLCEAAFSLVRCDKEYSDFYHLKYKEVNRYQHKRALALTARKFVRLVFRLLKDNRLYCPAK

SEQ ID NO: 209050 - protein, 367 aa, unidentified
MKKVSTVGAKPSKKISQQKLTVGLDLGDRNSWYCILDESGQIQLEQRVRSNAKALREVFGQLPHSRIALEVGTHSPWISRLLSELGHEVIVANARKVRLIGESRKKDDRLDAQTLARLARIDPGFLSPVKHRSAQAQADLMMIRARAGLVRARTALVNTVRGLAKSYGERLRGCNVRNMNPEKAEGLSPELQSALEPLLAGIEELSEQIREYNERIEKLAQESYPQVALLRQIKGVGTLIALTFLLTLEDPHRFRKSRDVGCYLGLQPGRRNSGQSEPQLHISKEGDPYLRTLLVQGAQHILGPFGVDCDLRRWGLKLAERGGRSGKKRAIVATARKLAVLLHHLWVSGEVYEPWHNSRRTTVAAAA

SEQ ID NO: 209051 - protein, 359 aa, unidentified
MSEIIRNRAVRVGVDLSKRVIQVQEVDGAGKVLTNRALSREKFMPWCAQLPPGCLVVMEVSSGAHHWARRLRGLGLDARIVSAQMAAPYRSQGATGKNDANDAAAICEAGGRPHMRFVAVKTVEQQSMLCVHRLREGIKADRTACINRIRGLLAEFGVVVAAGVQALQARLDDILEDGGNELNGLARMTLRRAQQQWHELELHLQWCDERLAAHEHDNVEVQRAAQLLGIGTVGASAAVATVGDFGQFDSGAQFGAWLGLTPRQHSSGGKSHLGTITKRGDAYLRTLLIQGAKSVVNTAHLRSDPISRWVLALKQRSGWQKAVVALANKNARILWAVMTRGERFDAHHVSLKPATPRPA

SEQ ID NO: 209052 - protein, 318 aa, unidentified
MEQSRQPPIVGLDVSKAWLDGYLPATGKRLRVSNDPGGIDRLLRSLAHPGGSLVVMEASGGYERAAHQALVARGVPAAIVNPKRVRDFARGMGLEAKTDRVDARLIARYGAVMRPAATPVPDPARAELREILACRRQLIDEITVRKQQLEHLQSPSLRARTTKVLALLRQEERELSKLLRQQIQADAALAADFALLTSMPGCGPILAATLLAEMPELGVLDRRKIAALAGLAPVARDSGLRENRRVIKGGRGQVRRALYMAAVASLRIRASPLKQRYAQLVAKGKAPKLALTALMRKMLVTLNAMLKTRQAWKDQRET

SEQ ID NO: 209053 - protein, 400 aa, unidentified
MDVHRDSVTACVEIFDGVEVSVIKERFSTTVKGVRGLGEWLADADVELVVMESTGVYWKPVFYGLEGRFDDMWLVNAHHVKNVPGRKTDMSDAEWLADVAAHGMVRASMVPEPEIRALRELTRYRKTQIVARGVEMQRLEKVLQDAGIKLTSVASKVWSKSSRAMIEMLISGQVDPEVLAELAKGRMRPKIPALVEALEGRWGRQHSVVAKAIIAHIDFLDTTIDELSDEIVEATRPFDELVRLWSTIPGVSTRTAEMMVAEIGADMGRFPSAKHLAAWAGLAPASHESAGKRRPAGTRQGSRHLQGALVEAARAAARTKGTFLSERYKRIARRRGPNKAAVAIAHSMLVAAYHMAITGEIYRDLGSGYYDNRKDPKAKVNRHVKELQAAGYTVNLTPAA

SEQ ID NO: 209054 - protein, 413 aa, unidentified
MTNNIITAVGIDVSKGKSMVAIRRPGGEVLRMPFEVKHNTTDLKSLIKLLKQIGGEVRIVMEHTGTYWYPIARTLHEAGFFVSVVNAILIHNFSDNSLRKVKTDKADALKIANYALAFWGTLHQYTPEEETRLILKTQSRLYERTIDTSVVLRNGLISLLDQTFPGVNKLFTTAYRNSSGHYKWVDFVRRFWHRDCVAGVSERSFSESYAKWCTHEGYQYSAACAARIYQAAKQAVAVFPKNDSVKALIVQAVDTLNAVYASLQVMREEMQRLAEQLPEYEIVMGMYGVGAVTGPQLIAEIGDVRRFTNKAALVAFAGVDAPPYQSGTFDSKSRHISKRGSPHLRRIAFMVCSAILQKSNPNNQVYAFMDKKRAEGKHFYVYMVAGTAKFLRIYYARVMEHLNSLESTEQIPA

SEQ ID NO: 209055 - protein, 430 aa, unidentified
MKSNTQNAKIEAITEKTLVLGIDVGSETHYARAFDYRGIEYSKKPFKFSNTEVGFATFKEWILDLKERHEKDKVVPGMEPTGHYWFNLGKFLQDNEMKPVLVNPHHVKKSKELDDNNPTKNDRKDPKVIAGLVREGRYMIPYLPNGVYADLRTASNIRFQLQAELTRIQNRISRWFNIYFPEYKMVYGKPDAKSGMLILKAAPLPEDILTLGIDGVNQIWRDAKLRAVGKARAKTLIEAAEHSVGSKEGAVSARMEIRMLLEDYESRNTRLQEVMVLIEELVRKIPMAEKLLEIKGVGIRTVSGFLAEVGDISRFNNPKELQKLAGLALVENSSGKHKGKTTISRRGRKRLRYLLFEVAMSLVAKNPEFRELHNYYTTRRLNPLKKMQSLMAIAAKLIRVFYAMLTKDVDYDPKKMISDIKRPTVYLQAA

SEQ ID NO: 209056 - protein, 440 aa, unidentified
MPVLHPDAAGIDVGASEIFVAVAADRDAEPVRSFATFTRDLNSLADWLQACGIRSAAMESTSVYWIPLHQILEARGIEVCLVNAQHVKNVPGRKTDVSDCQWIQYLHSVGLLRASFRPPAVICAIRSFWRHRDSLIQMAAEHVMHMQKALDQMNLQVHRVLSDITGFSGLRIVDAILAGERDPIKLAQLCHSRVKSSQDTVAKSLEGDYRIEHVFALRQSLAGYRYYQGLIAEVDQEIQRQLADLKTADGDSKPPKRTKKTPYQRYRYEPAGFDLRGELYRILRVDLTDVPGISSVTAHTILCEVGTDVSRFRNASAFASWLGLCPERQISGGKVLYTKSRRVRNRVALALRLGANSLHHANNYLGEFFRRITRKLGKAQAITATAHKLARIVFHLLNTKEAYNESVFRRCEEEALKHAELRLRKHAARMGFQLVSAANG

SEQ ID NO: 209057 - protein, 342 aa, unidentified
MLFVGLDVSVAETSVCIMDRDGGLVLEGKVRTDPAAIGRYLVKHAPEAERIGLEAGGSSSWLCRELRSQGLPVVHLEARHAHRALSMRINKTDRNDARGLAELMRVGWFKAAHAKSVEAHRIRSLLLARQRLINMRRDLENQARNIMKTTGTMLGSTAGRGFSSRVRAACEGNEALAAMCMPLLKVVTAIRDQIKEYDRLLLGMARRDETAKRLMTVPGVGALTSLAFMSAIDDPARFKRSSDVGAYLGLTPRRHQSGEMDWSGRISKLGDGLARTYLFEAASVLVGRIERWSALKAWGVRLAKRVGSKKARIAVARKIAVILHCIWVDGTEFEWAAKTADA

SEQ ID NO: 209058 - protein, 352 aa, unidentified
MTADQDPTSEVVVGVDTHADQHTAAALDGLGRILGILQIPTTPAGYRRLVAWARGWGRFERAGVEGCGAYGAGLVRHLHDAGIMVIEVDRPNRQHRRRRGKSDPSDAEAAARAVLAGDATGVPKDTTGRVEAVRVLHLCRRSAVKARTQAGNQIKDLVLTAPDPVRAQLRDKTTPQRVRTAANWRPGEVIDPTSATRRALRDLARRWLALTAEIKALEADLVRLLNDLAPRLLAEHGVGIDVAAKLVIAAGENPDRLRTQAAFAALCGTSPVETSSGKHHGHRLNQGGNRQANNALHTVVMHRWRTCPETAAYIQKRRAQGRNDRHIRRCLKRALARRFHKILLQDLAAALT

SEQ ID NO: 209059 - protein, 340 aa, unidentified
MEKPINLQAPSFILGIDVSKDSLDVCLIRVSDNQQLGHKLNNNPSGFRRMKAWLKQHGCEAGPDTLCCLEHTGLYTRQLVHYLLARDVQVWMESALQIKRSIGMVRGKDDKVDAQRIARYALLHRHEARCVNLSGVTLERLKDLQANRGRLLKALQSIKVTIKELLAVDPVSGKTLEQVNKKAIRGLEKSMEQVEEKMQEFIAKDIELKRKYDLLTGIKGVGKVLAISLLVYTQGFTKMDDGRKLACYCGVAPFEYRSGTSVMGRTGVSKFANKELKHILHMAAINSVRFNEEFRLYFERKVGEGKSKMSVINAVRNKLLHQIVAVVKRGTPYELKLKNI

SEQ ID NO: 209060 - protein, 349 aa, unidentified
MDQQTPVTTYVGLDISLAETHVCVLDQDGKRLFQGAVASDPDALTRIIQEKAPNCQRVGMETGATMPWLWRALRARGLPVICMDARHANRALSMRRNKTDKNDARGLAELMRIGWFKEANVRSPQTQYVRSLLSARYQLRLSRKDVLNQMRGVVKSFGLFTGSTATRTFPAIVREIIQENPQFGPLLTLLLAVHDALVAQITAYEDALKNIAASDPDARRIMTVPGIGYLVALTFMTAVDDPTRFSSSNKLGPYLGLSPRVRQSGEASWSAGIGHAPDRMMRSYLYQAATMVLTKTASWSALKAWGLRLYKRSGFKRAAVAVARKLAIIMHAIWVGGTEFKYGQKERTA

SEQ ID NO: 209061 - protein, 347 aa, unidentified
MDYYAGIDVSLEASSVCVVDASGKIIREAKVLSELENLIGWFRDLGLEMTRIGLEAGPLSQWLYAAMKEEGLAVELLETRHVHDAFKTMPVKSDRNDARGIAQLMRLGWFRPVHCKSMPAQEVRALLTARKLVQSKLFDIEMSLRGILRGFGLKIGRTTPNRFRLRVEELVAGHPTLEIIGKALLAAHEILLREFNGFEKRVRQQARQDKRVRLVMSAPGVGPIVGLTYVAAVDDPARFKSSKQVGPHFGLTPKRYQSGETDYSGRISKIGDASVRTALYEAANAILTRPLKGATALKSWGMKLAKRAGMAKAKVALARKLGVIMHRMWVDGTKFADKGISSKPVTA

SEQ ID NO: 209062 - protein, 394 aa, unidentified
MRKNIKEKLEKEQSGEPKAGGFLLRKLTIAKTKKEKAETERVEYYIGIDLGDRKSYYCVLDESGEILAEGHMPTTVSGFEGHFKALGRSRIALEVGTHSPWVSEQLEEQGHDVYVANPRKMCGGKKSRRKNDRLDAELLARQVRSDPKQLYPIRHRRAKTRQALVLLRARNAMVNARTKLVNGVRGLVKSSGYRLPKCGTKTFHNVCLDGLPEELRVAINPIIEQVGQLTEKIKAYGNEVKRISLKMYPETEILRQVNGVGMLVALAYVLTMEDPGYFRKSRDAGPYLGLVPKQYESGNSSPQLRITKTGDRMMRKLLVQSAQYMLGPFGQDSDLRRHGLKIAARGGKNGKKRAVVAVARKLAVLLHRLWLTGEVYEPLYNSRTEDENELRECA

SEQ ID NO: 209063 - protein, 450 aa, unidentified
MNLYIGVDVGKEFNYASFLNEKGLEIDKRFKFKNNYLGFLKLKDNIDKLTYDYNFNYNDILIGFESTGHYWINVDWFLTEKLNIKTVMVRNDAVRHTRALNSQGKGKNDSLDSRTIAECLKNGYYFDVQGRKEDYIVLRRLTRERSELEKEIARYKNRFRAWLDVNNPIFLENFSNVFSAGALALLKVYPSPLDIIKDSYLEVREKLREVGYSRTNKTLKIYYEEVQTYKNIINGISYADRLEISEYIEALEMYIKKKENLDERIEVLMNFLEGKVYTSLSEIKGMPKAQVASLIAEIGNINNFKSARHLLSYAGLNLQGEGSGKNKGYSWISKTGNRKIRKELYVITFNLVIHNDYFRGLYCYYKSYKRPNEKSSKEMLIALMCKLLRVVYGMLKYNVEFNLNEMLKNYDFRNINKEKFIDEFLGNSEKKQRIITQEIEDIFLNNRKSN

SEQ ID NO: 209064 - protein, 468 aa, unidentified
MRKDTKEKQYKSKQKKANSKNQLPQHLQHINKMAAGIDIGSNSHFVAIPEGSDEISVREFKSFTVDLIALADWLEDCGIETIAMESTGVYWIPLYELLESRGFEVKLVDARHVKNVSGRKTDVLDCQWLQQLHTYGLLNGAFRPAEQICVLRSYMRQRSMLIQYASNHIQHMQKALSQMNLQLHNVITDITGETGMNIIRAIVEGERDPQKLARYRHNRCKNSLATIEKSLTGNYREEHIFALAQALELYDVYVKKSIACDKQIEDQLSVFENRVSWDQTNEQPQGLVNKKSRTRTKNSLKFDVHSHLIRVTGVDLTAIPGIEASTALKIVSEIGLDLSRWQNPKQFSSWLGLCPGNKVSGGKRLGGKSKRTSNNAASALRMAASTLYRSDSALGAFFRRLKSRLGAPKATTATAHKLAVIIYSMIKTRSEYHEVGQDYYEKQYRERMVKNLSLRAKTFGFELKEIAC

SEQ ID NO: 209065 - protein, 364 aa, unidentified
MTESITFVAFDMHQDSITAAWLRPGAAEPETRTVPNEPKPFRRLVKELLARGPARACYEAGPVGYEPQRQLAAWGLPCEVIAPSLIPRRSGDRIKTDKRDAKKLVKFYRSGELTPIRIPTPAEEAARDLVRCREAAGVDALRALHRLRKFLLRRDLRCPAGRPGTQAWWRWVHALRLPDPAAQRTLEEYTLAATTARTRWKALDPEVTALATREPWVAPVAQLRCFRGIDTLGAVSLHLEVFDWRRFGSPRPCMSFVGLVPSEHTTGRRRRQGSITKAGNAHLRRILVEAAWHYTRRADRRAAVRKRQQGQPPAVVAVAQQAEQRLYRRFQHLVAGRKLRTVAVTAVARELCGFLWAAMVASPA

SEQ ID NO: 209066 - protein, 378 aa, unidentified
MKRILKIGMNVNTTNYTLCAMEPIIGEDDRVFATIKVTPDYKNILMFIENLKLKLGLNDEYDIQCGYEAGCLGYSLYNQLTAAGIKCVILAPTTMLTPQGVRIKTDMRDAYMIAQCLSYGGYHAVYIPTEDDDSVKEYLRMRNDHKLALKKIKQQINAFCIRHGFCYDGTKWTLSHLKWLKKLEITNGLYRETLDEYMASYEEQEAKIERYDKRIGEIAEQTRYHDKVKKLGCFLGIKTHTALSLIVETGDFERFAKGNQYASYLGLAPGENSSSDNIHRLGITKAGNSHLRQLLIEASGGICKGAVGHKSKELRARQNGNTAEVIAYADKANTRLRSRYYKFIRHGKKRNVAVAAIARELACFVWGMMTDNIEMKAA

SEQ ID NO: 209067 - protein, 390 aa, unidentified
MFEHFAGIDMAKDTFSFCVTDLNGKEVEKGCCPVDKEGFDKFFSVISSFSNIAVAVESTGTYHITLLSALVSANFTTYLITPILVKKFAQSCSLRTIKTDRIDAKIISVFIARNHSTLIPAVSTGNEGLRELARLRESVTGDLGSTKTKLKQLLTTTFPELVRNFNIFTASMLVLIEAFPSANAFVNASETEIETPLKTKGKGRKISVSVKQFQELASKSVGKSDPMIEKAVLHQIRKIRFLTDELKKVTDELVEAAHICSGKEIEILTSIPGIGDTTAAQFIAEIGNIDKFDSVKQLTAYAGTDPGINQSGMSLKRKKISKKGNASIRRVGFLMTVHVIRFSDVFNKYYFKKRNEGMAKKKAIIATFNKLLRCMFAMLKNHSHFLFVYS

SEQ ID NO: 209068 - protein, 315 aa, unidentified
MEAMIERCAGLDVHQETVVACVLFGPLDKKPKTSIETFSTTTTGLLALSDWLATLQVSDIVMESTGVYWKPIWNILEGSFHLVLANARHVKNVPGRKTDVKDAEWLAKLLRCGLIESNFVPPEDIRDLRDLTRYRKKLIHHRTSEQNRIHKILQDANIKLTSVLSDIFGVSGRRILEAILNGEKIETDGLRKMVDWRTKASITDIANAINGRIRRHHRDMLRYHWEHMSYLEKAIEELEKQIDQLLSPYRKEVELLDGIPGVNKAAAATFIAEMGVDMSVFKSAKHLASWAGVSPGNYESAGKKKRVKPHKVTKL

SEQ ID NO: 209069 - protein, 345 aa, unidentified
MKKSTTIAIDLAKHSFQVCKLQGSSDEFNKAFTREKLKAWLIQQPPTTVVMEACSTAHYWGRFCCNHGHSVCLIAPKYVTAYRTGQKTDKNDATAIAVASQQANARFVALKSIDEQALQSIDRIRQHLTDSMTATSNMVRSLLSEFGFNIPKGHSAFKRHIIEILEDGQNSLPDILREHVANAYHLHETLVKKRADLETSLTQHLKHHDACKKLEALEGVGPVNALGLYLSLGANGGNFKNGREASACIGLTPKQHSTGGRVTLLGISKKVGQKKLRSSLIQGALAVAKVVDKREPRNVKETWLKSLIQRAGLMKAAVALANKTTRTAWALLHYGSEYQAPLTYE

SEQ ID NO: 209070 - protein, 350 aa, unidentified
MTRYIAFDVHAESTTCVVLSSAGKRLKEEVVETSASALISFLKTIPGRKQLVIEEGTQSAWLHETLSPFVDEFVVAIVDESNGAKNDSRDSWRLAEQLRIGAIQRTVFKRPQELAALRAAVKAHRLLTSDVVRVKNRLRALFRSRGVAVTEEVYQPNARSVKLACLPQHVRYQAEMLGKQLDLLEPLRDEARGRLREEAKEVPSVERVATLPGFGVIRAATLVAATITPNRFRTTRQFWSYSGLALVTRSSSDWVRHEHGWKRAAVNQTRGLNRNRHPWLKDVFKAAATTVAAMPNHPLHADYQRLLQQGTKPNRAKLTIARRLASAALAVWRKQEAYEPNKHKSLIATP

SEQ ID NO: 209071 - protein, 378 aa, unidentified
MAIAEGGRGGEVRFLGEFPATEAAMRKLVAKLAAKYDKLTFCYEAGPTGYGLYRLIKSLGHECAVVAPSLTPKKPGDRVKTNRRDAVSLARLSRAGELTAVWVPDERHEAMRDLSRARQAAKKDLQGKRQQISSLMLRLGRCYPGKKTWGPAYMKWLRSQKLEHGEQRMALEELLEGVRQEGERVERLEQAIREAVPEWSLVELVTAVQAMRGFDLIAAVGVVAETGDLSRFQNPRELMGYLGLAPSESSTGDSVKRGGITKAGNGRARRMLVEAAWAYRHPARVGREKQAKVAAAPRSVREIAWKAQTRLCRRFRFLERKGKRRTVVATAVARELAAFIWAINREVMQNRQATSAGAVDRSSRECARPAHSPSVAIQ

SEQ ID NO: 209072 - protein, 411 aa, unidentified
MKSMEITAVGIDVSKRKSTVAIRRPGGVIVACPFDISHSSHDLEKLVSILKTTGGDIRVVMEHTSNYWKPIALTLKNAGFYVSVVNAMLIHDFSDNSIRKLKTDRADSLKIANYALTFWNQLPPFNDEDETRLVLKEQSRMYERLASTATSLRNGLIALADQTFPSIDQAFGHAIKNADGHEKWVDFFSIYWHRDCVLRLSIEKFTESYRKWCLRRNYKFRTNTAHKLYALAQDAVPTLPKNNGTKALVLQACKSLNAVCEAKQSTQEEMNRLASLLPEYEVVMKMEGTGPITGPALMAEIGDVRRFKNKKALVAFAGIDAPPFQSGNFESKSRHVSKRGSPHLRRTIFIVSNIILTRSNPENAVYCFMDKKRSEGKHYYVYTVAGSAKFLRVYYARVTEFLRSQPSPDAC

SEQ ID NO: 209073 - protein, 345 aa, unidentified
MLYLGLDVHGKWTTVRGFDPATGEIVRIDRMSNEREAIRENLGGLDGPLQGVMEAGTNSWAMYREFLPFFETLVVADPAKLWDRKTDRGAKTDRRDALAMAEKLYRGEIHPIYIPDERTQDLRVLVRGKIRASRWVTRLTNEIGSLLKSWGYVGERSLLCKAGKAILDEAETPSRSARVLQLWREMLEKAQEIESELQAAIEEEAAEDADCEILQSIPSVGAFTALLVRAEIGDVRRFAKAESLASYAGLSPRTFQSGDCCYYGRLGHWGNRWLRYGLGLLAQRVARGRKDNSLHRLYWRVCLRSHRNSAKIAVARKAAEIVYHLLRNGELWEDSVREERAAVRV

SEQ ID NO: 209074 - protein, 367 aa, unidentified
MKKHTTMNKPVSATDVSVCTTVAVDLAKKVFQVAGEDALGQLAYEQRIKSREAFQVFLQKLPEGVTVLMETGPGAQAWARLLQAQGNPVRILPAQRVAEHRSGAKNDRNDAHAILRAGRDSSIASVPVKSVAALAMQAWHRVRRGYVRRRTAMGNQIRGLLLEQGIALAQGDVGLKQGVTRVLEDARQPLPALLRELIDEMLNEWKRLGERIAALTGRLEACAAADPTAKRLMTVRGIGPITATALLAKQVEPERFANARQFAAYFGIVPDQHSSGQKVRLGKMTKRGDAYVRSLMVVGSHAVLKQLRPDSEHPDDRRLQRWLQRLGRKGAAVRLANRNLRIAWVLLCSEQTYQRKPNACREMEMSH

SEQ ID NO: 209075 - protein, 351 aa, unidentified
MIIIGVDYHPSFQQIAFLDQETGECGERELNHSDGEGERFYRELKQRGVSVRVGMEATGHSRWFERLLAELGFELWIGDPAEIKTKRVRKQKTDREDARLMRKLLLENRFPRIWVPSPENRDVRQLLWHRHRLVQMRTRIMNQLQAVAMNEGYRWKKKLFSEQGRTLLEKLSLAPWASRRRKELLELLDQLDPKIAELTAAVEREARKRPEVLLLMTHPGVGPITGLVYVLVIGTPERFPCGKQIGSYTGLIPCEDSSARRQRLGHISKQGNALLRFLLGEAAQAAARCNADWRRRYVHLMMRREKRIAKVAMARKLAVRLYWMWRNNWQYSQLVEFGSNAGKLGIVHGVK

SEQ ID NO: 209076 - protein, 400 aa, unidentified
MHLTANISIPQKNFIAIDLHSDNAVICVRRNALNKASELVGKNIWCGRVSIRDGLDNFIKVLVPHCQDFDHVAVVESTYNWYCLADAFEERGWLLRVADPSTVSQANLKSSDDRTDAQYLAERLRVGSLKHYLPLNYSSRALRDLCRYRMAMVQDCASLKINLINLYRNQLSKNVRVADLLERCQPHMQPNYRFNSDILEEFKDPNIRLRVAFEISRIAMLEEMIEECNAEIQKQCKDQELVKLCKIIPGCGPVLSAVICTEIGTMQRFKSAGDFVSYCRLCSTSKLSNGKSKGLGNAKNGNAYLSWAFTEVAQYASRNPVIREILQRLLRKYGGLRVKAIRTLATKIARVTFYVLKNKQPFNAAKCFGMELTKSIVKKLPHKPLREDAAVVLPAVAGQA

SEQ ID NO: 209077 - protein, 412 aa, unidentified
MTGETKRWFAGVDWGSEKHQVCLLDDSGAVVGERAFRHDGAGLAALCDWLVSVAGDPGAVAVAIEVPHGPVVDALLDRGFAVHAINPKQLDRLRDRISVAGAKDDRRDARVAAAGLRTDPHLFRQVTAGDPRVVELREWSRLAEELQQERVRLANRVRQQLWRYYPQLLEVADEVAAEWILELWTMAPTPAKAARLREATLARLLRRHRIRKLDAASLLGVLRQPAITVAAGVTEAAVLHLRSLVARLRLANTEFRQAERKLDELCARLGQDATAAADGPCDAAILRSVPGVGTVTLATLLTEAGDPLARRDHIALRTLSGVAPVTKRSGKTCIVVMRYAAQVRLRQAVFHWARVAVVHDPKSRSRYEALRARGHSYGRALRGVADRLLGVACVLLRRQVLFDPDHGKSAAT

SEQ ID NO: 209078 - protein, 416 aa, unidentified
MNAAGIDVSSRKSTVAVLRPFGEVVKLPFDVRHSAEDLAALAAQLKSIDGETRVVMEHTGRYYESIAKVLHEAGLYVSAVNPLLIKEYGNNSLRKVKTDKADAMKIAKYALDNWTELRDYTPMDTIRYELKTLNRQFQLASKQKTATANNLIALQEQSFPGIRKLFDSPVRSDGTQKWVDFTHDFWHVDCVRSDSQNAFAERYRKWCKRNRYQFSMEKATEVYAVAKSAVVLVQKTSVTKTLVQEAANQLTAISRSVETYRSEMNKLASRLPEYPVVMEMYGVGESLGPQLMAEIGDVRRFERKQSLVAFAGIDPAPSESGDYCSRSNRTTKRGSPYLRKTLFNIMKVHLQRAPADEPVFQFLDKKRAEGKPYYVYMTAAGNKFLRRYYGKVMAYFSTLEGLPPVDMDSTGLHHAE

SEQ ID NO: 209079 - protein, 369 aa, unidentified
MRWSARSEKPGVSTLSGFLSNVEEITHENGLKLLGIDIGKNSFHLIGHDAGGHQVLRKCFNRNRLLQFAAQIEPCTIAMESCGGSHWLARKLASLGHRVKLIAPQHVKPYVTGNKNDFIDAEAICEAASRPRTHYVAVKTVEQQVLSVQHRLRESLVCHRTEAINRVHGFLLEFGIALPATKAAIAKVPELIDDSRSDLPLQFKRVMEHLLEDIHRLDTEIKACDAQIKQQLAQDDAGTRLMTIPGIGPITASAFVADLGDASNFRASRDLSAFLGLVPRQFSTGGRPVLLGISKRGDRHLRTLLVQGSRALMIRIERRDDALGQWVRDLLARKHPNKVACALANKLARIVWAVLRRGSTQRINDLSRT

SEQ ID NO: 209080 - protein, 320 aa, unidentified
MSETSPQDGISVGIDVSKENLDVDFAPTREPMRFANTPAGHAAIVKRLSSMKLRVIVLEATGGYERAIAAELAAAGLPVAVVNPRQVRDFARATGRLAKTDQIDAAVLADFGLAIRPPQRPLPDAETVEMREKLARRRQIVEMMTAETNRLEHVTAKSVRRSIATVRNLLQQQLAHIEDDLDQMIRRSPLWQEKAELLRSVPGIGPQNVRMLLVQLPELGHCSRQQIAALVGVAPLNRDSGKFRGKRTIWGGRGDLRACFYMAALAATRSNPKIRAHYQRLLENGKCKKLALTACMRKLLTILNAMVRDRRTWQIAPYVT

SEQ ID NO: 209081 - protein, 436 aa, unidentified
MQIHPKMRYTYVGCDSHKNSHTFVFLNFLSEKLGELDTTNTPSDFEPFLKKAMKFLQPDTKFIFGFEDTNQYGRLIVKFLMDKGYTVKHVNANLVTSERNSYNVIQKTDYIDAECAGRVLISRFDDLPLACVDEKYYIMSLLVVKRQSFSKQATRLKRTLHNLLYLQYPNYQRFFCNLDGKSAMDFYETYPSPHTLANVSVDDLNDFFISNNPKGHSKRKAQLILDSVENAGVTPSDFQDSIDHVIRFTVRELKMIVKYLDEIESRMARMLDYFNYPLTSMKGIDTLTACRLITEIGDIRRFKNSKALAQYAGIAPVPHSSGNSDMRLSNKRGNRQLNSLFFNIALVLIAPKKGMVINPFFYDFYHQKISEGKTKKQALKVIQRRIVNIVYGMMKHGEDYINPPVTYINDQTGEILENELNDNQLTHIEKRISMFE

SEQ ID NO: 209082 - protein, 317 aa, unidentified
MSFVGIDVSKKELVLFHWESNTSWKAVQNPQGWAEVLARLQELRVVRVALEATGSYERGIADLLARAGTHVMRLNPRMARDLAKGMGYLAKTDRVDAKALAEIASIRPKHPRWEPPTQADDELRHLVEWRLDLVETRTQEKNRLQITASKFVASALTQLIKQLDKAIDKVEKEVKARVKAQRELQLDAELLESEKGIGWITAISVLVLLPEIGSATRGQISLLAGLAPLADDSGDRKGKRHIRGGRKTARTALYMATVSATTHNPEIHAFYHRLKDVKGKESKVAITAAMRKMLVRLNAKLRDAREERRRENLPKAA

SEQ ID NO: 209083 - protein, 338 aa, unidentified
MALYCGIDLHSTNCWVSVLEEGRRVVWEKKVGNDLTAILEFLEPHRAELEGIAVESTYNWYWLVDGLMDAGYQVHLTNTWAAKQYEGLKYADDRHDARWLAHLLWLKILPEGYIYPKEERGVRDLLRRRTFLVQKRTSFLLAMRGAFECRTGLRTSSNDVKKWTVEDVDFHIEDPCASLGVTCLLGPVAAMSEQIQLLEKEVLKRGKLRKEYARLTTVWGIGKVLGLTIMYEVGEIDRFAKVGNFASYCRCVKSDWLSNGKRKGSGNSRNGNPHLSWAFSEAAHFATIHYEQAKKYVQKKRAKTNGIVAIRALAHKLARASYYVMKDEVDFDPERLFT

SEQ ID NO: 209084 - protein, 391 aa, unidentified
MIYVGIDVAKDKHDCFITNSEGEVLFNAFTIPNNADGFHDLFQKISSLTNDFSNVKVGLEATGHYNYNLLGFLIDKGLPTFVINPLHTNLFRKSLSLRQTKTDKVDAHTIALMMMSGVNLQSYSDTSYHNEELKSLTRYRFDKVQERAKLKTSISRLVNILFPELEKLVPSLHMVSIYALLAEFPSSAQIASCHLTRLTNLLANASKGHYNKEKAIEIRNAAKHSIGSNMPAKSLELKHTIRLIQELTSEIDEIECSIKSIMDEIRSPILSIPGINYRMGAMIIAEIGDFNHFSSPDKILAYAGLSPSTYQSGQLDGCYSHMEKRGSRYLRYALFNATKFVCIWDNQFSAYLAKKRSEGKHYNVAISHAAKKLVRVIYQLEKSGQLYHRAA

SEQ ID NO: 209085 - protein, 413 aa, unidentified
MEVMYPRCAGLDVHKETVVACVRLAAGSDTSHVVRTFATTTADLIELSEWLEENGCTHVAMEATGVYWKPVWQVLADSSCFELILANAAQVKNVPGRKTDVNDATWLAELLAHGLVRASFVPEPAIQELRGLLRTRKQLVREKASHVQRVQKTLEEANIKLESVLSDVMGRSGRAIIQALIDGETDPAKLAALAHWKVRASTETLSEALRGRIKRNHRFLLRLHLQQIQALDAGIAEIDREVDDGLACFRDAVDRLSTIPGISQLSAQVIVSEIGTDMSRFATDAHLRSWAGLCPRNDESAGKRRSTRLRKGAPWLKSMLVQCAWAAVRSKGTYLHAQYVRLRGRRGPKKAICAVAASILTAAYHMLKDGTFYNDLGPTHFDRRRPETQARRLIKRLAELGFSVELKSMATAS

SEQ ID NO: 209086 - protein, 368 aa, unidentified
MEKCITYVGLDVHKNSIAVAFADEYGAEIRSYGTIGPDPESLDKVARRLVSQGKEPRFVYEAGPCGYKIYRHLRQQKFECMVAAPSLIPKKSGDRIKNDRRDAMMLARLYRSGELTPVRVPSAEDEAMRDLSRARGDAKKAERKARQQLGAFLLRHGFRYSGLSHWSLAHWRWISDIKMDHEAQQFTLQEYVDTVRCCTERVDRITQQIRLLVGKWRLGPVVEALQALRGVSLVVAATVVAELGDLTRFDNPRQVMAYLGLIPSQHSTGEKIKLGPITKTGNGHARQMLTEAAWAYRLPARVSRRLLDRQQKLPEKVRQVAWKAQVRLCARYSRLLARGKPSQLVITAIARELAAFMWAIARTVEVSA

SEQ ID NO: 209087 - protein, 314 aa, unidentified
MKKAVEVYVGIDVSKAWLDEAVHEQKEVTRFSNDDAGIASLVKALKKLKPKLIVLEPTGGFEMLVVAELSQAGLPVAVVNGKRIRDFAKATGQIAKTDKLDARVLAHFAAAIRPEVRPLRTEEEEQLTALLTRRRQILDMLTVEKNRRVSVRAKMRADLEAHIHWLSDHLQELDQEIEEFVKGSPAWKEKDTLLQSVPGVGPVTSATLLGMLPELGLLNRQEIAALVGVAPMNKDTGNKKGKRSIYGGRADVRSVLYMAALSAKKHNPFIRKFYERLIRHGKEKKVALTACMRKLLVILNAMVRTNQPWRSQTA

SEQ ID NO: 209088 - protein, 408 aa, unidentified
MEVIYPRCAGLDVHKETVVACVRIARDGPPLQEVRTFQTTTSGLLALGDWLDSFGVEHVAMEATGVYWKPVWHVLEGHFELVLANAAHVKNVPGRKTDVNDAMWLADLLAHGLIRASFVPPVAVQELRSLTRTRKQFVRERSAHVQRIEKVLEDANLKLGVVLADIVGKSGRAVLQALIGGERDPERLVSLVSVRVKASRAELLEALRGRVSAHHRFMLKLHLGHIDALDQAIAAIEKEVGQGLAPFRHAAKLLSTMPGLSEVSAHVVVAEIGIDMSRFATPAHLLSWACMCPRNDESAGKRRSVRLRRGGRWLKTTLVQAAWAAIKVKGSYLQAQFHRLRARRGAKKAIIGVAASMLTAAWHMLRDGTEWHDLGAAHFDRADAHKTATRLVRRLQQIGYAVQLTPAA

SEQ ID NO: 209089 - protein, 419 aa, unidentified
MRNRKAKKVTVVNEKMLLVAVDIGKSVNHGYMRIPHGKEVKPFSFHNTGHGFNKCWRKICQFKREQGLEEVVVGFESTGSYAEPLCHFLRKRGVQLVQTNPMHTKRLKELSGNSPEKSDKKDPRVIADIIMLGHALSVIIPEGASAELRRLTQARERAIKDRTADGNRLHDRMFILFPEFLEIMKGTSTKSALYLMLNHPTPEDIVHLGVECLAARLKKVSRGKLGKERACELFDAARKSIGIDEGKQSMLMEIEHLVCRIEGAEHFIKNLEKHMERYLEHIPYSHCILSIKGIGIITTAGIIGEAGDFRGYSTIKEVSKLAGFDLYEVSSGKHKGQRHISKRGRPLMRKQLYYAAVNTVGSNGIMHDYYHTMLDRGMPKTKALIAVARKLLKLIFALVRDTTKYVENFEHNRKSKSAA

SEQ ID NO: 209090 - protein, 331 aa, unidentified
MEREYIGIDLHKVFFQACAMSETGDRHWEGRFARTREGIARFIAHGVGPQQVVAVEASGPTWAFVDALGPTGARICVVDPRKTKLKAGFAAKTDRLDARRLADAVRRDSVVSIYIPPPAIRELREVCRGRHQVVRVRSRLAQMIRALLLRSDAGDPPTDRLYTPRALAWLAQVRLTPDADCSLRRLERLFRAVHAEATAADAAVRHRAAADPIAGALDAMVGVGPVRALTIRAEIGDIARFRRGPELASYAGLVPRVDRSADRSYTGRITREGSPWLRYVLVQAAVSAMRRTDRTGRWARRLAVRKGPYKARVALARVLCDEVVAHWPRSL

SEQ ID NO: 209091 - protein, 460 aa, unidentified
MNQFFLGIDASKGYSDFVMLNAIKQTVIDNFQLDDTFDGHAQLYEVLHSFNKDNPEATIYAAVESTGGYENNWFQSLLTFQASLPVKTAHLNPLGVSHNSKADLKRNITDKISAKNVAEYMIAHPEKVSYQHQDSLASLRKQWGFITMLTKQSTQLLNQLESLVYNANPEILTYCKDGSPQWVLKLLTSYPTALRLSRAKVKVLARIPYISLDRAKQLIATAKKSVASASDKVTEQLIVATVKQILHLKKTIKMQSEVLANECQIPEVALLKTFTGIGDYSAIGLMLQIQSVNRFLTSKKLSSFFGIHPEYKKSGDGTYKYRMSKKGRKEGRRILFIVAMSAVQSNPLIRDVYQQAVERGMEKMSAMGLCMHKILRIVYGMLKHNKAFDPQIDMKNRQKTPSRQSKVGQDKNRRYQNFDSNAPISRRQKMKRKERKQSQNVINVEYGISEASVPSTQLAN

SEQ ID NO: 209092 - protein, 416 aa, unidentified
MTFKVVRFICGGMDVHKNLIVATIGTTDRQTLITEYIQQSFSTFYSDLIRLKEWFISHDCYDVCMESTGKYWIPIYNVLETELNICLTHPKYVKAIKGKKTDKRDSKWICDLYKCDLVKHSFIPKKEIREMREIARYRCKLVYMRSSERNRYQNCLTISNISLASAVSDPFGKTATNIMKELMQSEVIEDDKILKLIHKNCKDKDKILDSLQGYHIESDQRFKMDTVMNHIEYLDKQIQACEAELIKRAYPLRDYFQHITHIKGISALSAILIVSEIGTDMNQFESDKQLVNWAGLSPANNESANKKKSVRISKAGQYLKPLLVQCALSSIKDKNSYFGIKYCRIKKRRGHKKAIIAIARMMLVCIYHMILTGEEFNPCDYESLTNPKPKKEPIMTVESALQFLKDSNFDFSSIQL

SEQ ID NO: 209093 - protein, 403 aa, unidentified
MNSNTNQKINQTSENTLVIGIDIAKHKHFACAVDDRGRVLQKSFPIMQSRCGFEGFYERLLALKATHEKQEILVGFEPTGHYWMNLAAFLTHYGIPFVMVNPMHVNRSKELDDNLQTKNDQKDALVIARLMRDGRFSYPRILDGVEAELRNGATLRSKIQEDLNALQNRIIRWLDRFFPEFTHVFKSFGKMAYAVLEMTPLPSDIKGRTPEELLFLYRQVDGMKSPQLPKAKQLVEVAQNSIGLTDGVVMAKLEIATLLSRVKLMQAQLDELTAQLIELAKQMTDYEYLASVPGIGDVTIVDLLSEVGSLTQYAHPRQLIKLAGLTLRENSSGQQKGQKRISKRGRRKLRALLFRVMMPIILHNPAFKQLHEYYTTRTKNPLRKKQSIVVLCGKLLKVTSKNS

SEQ ID NO: 209094 - protein, 486 aa, unidentified
MAMQTSVYERLMGGNRKQRKDLQRRLCSDDPGLGVVHANAAGIDIGNESHFVAVPAGRDAEPVREFGSWTADLERMAAWLQSCGIETVAMQSTGVYWFAVYDVLEKRGLQVFLVNASHTKNLPGRKSDVQESQWLMKLHTYGLLRNSFRPPEEIRPIRAVWRLRDRHVEEAARSIQHMQKSLTSMNVQLANAISDVGGVSGQAIIRSILAGERDARQLARLRDRRIKASEEEVARSLEGTWQEDQLFELQQAVDEYDFRQKQIAECDRKLQDYLAVLPSRPAPDGDAGTVMPPPATPGKKKRRAKKIGGGNAPQSFDLGAELKRVTGVDAIRIEGVNLMTIQTVVAELGTELGNWWPTEQHFASWLGLSPKRDVSGGKVIRHTHGKNPNRVAGILRMAAISLLRSDSYLGARYRSLRTRLGAPKAIKAMARYLACVIYRLFTKGQAWVDRGAEQFEQQRQTRDLARLQAQANSRGFRLVSTANQIA

SEQ ID NO: 209095 - protein, 319 aa, unidentified
MSARGVFVGVDVAKDALDVAVRPSDERWSVANDEADVAALVARLRPLEPTLVVCEATGGFEHAVIAALAAAGLPVVVANPRQVRDFARATGQLAKTDRLDAGILALFAERVRPTPRPLPDAAAQLLDAVLTRRRQLLEMLTAEKNRLGFAPKPLHRGIRAHIRWLERQLDDVTKELAAQIEQSPVWRAKDDLLQSVPGVGPIVSYTLLGELPELGTLTHKRIAALVGVAPLARDSGTLRGKRLIWGGRASVRTALFMAALCGRRWNPTRKIFYERLKAAGKPTKVALIACARKLLVILNAMVRNNTPWMTPTARIQYSC

SEQ ID NO: 209096 - protein, 429 aa, unidentified
MNNPYISVGIDVGADFSYVCIMMPSYELFCKPFKVVHTDLSSMNKAVSTIKKAEVEFQMKSQIFLESTGIFHFPLFCFLRESGFEVSVINPLIIHSTKNMDIRKVKNDKFDSKKIAKVGLDPTIRKSLIPDEFVLNLRFLCREYYSLSDDRTALINKLSGYVRLVFPAFIGIFSQLAGGASLAVLNYTQSLDHLLSASDDEIIGLIAKAARKGKKYAAEKYIAILDAATVSKTLSMQLPNVFTLIHSIINHISLIDQQMDDILKTINSILDDNHDHVFVRQIQLIDSIPGVGFLSAVTIMCEIGDFKAFKNPKQLFSYFGVDPSVNDSGKFKGSRNHMSKRGSRFARRVLYSIALASIRNKPNSQPMNAVLQAYYQGKVVSKFKKVALGAIMHKVCNIIFAVLRDDSSFVLRSPKEHICLHALSASNAA

SEQ ID NO: 209097 - protein, 406 aa, unidentified
MLFIGDDWAEDHHDVEIQDETGRRLAKARLPEGISGITKLHGLIGRFLPEDGDAISVKIGIETDRGPWVAALVASGYRVHAINPLQSARAREGYGVSGAKSDAGDAHVLADLVRTHSHQLRTIAGDSEQAGAVKVLTRMHQTLIWDRTRQVLRLRSSLREFFPAALAAYEDLAFPDVLELLAKAPDPDSAARLTRAQITAPLTRARRRDREAKTTAIMLALRAEHLTQPPLIAAAYGATVRALAALITTSNEQIAALEVQVEACFGQHPDAEIYLSQPGLGPVLGARVISEFGDDPTRYDGARARKNYAGTSPITRASGKKKVVLARYVRNNRLADALHQQAFSALTGSPGARAYYDALRDRDMSYNAALRQLANRLVGILHGCLKTHTPYDEATAWNQHAQRAAA

SEQ ID NO: 209098 - protein, 311 aa, unidentified
MDAIYVGIDISKDRLDVHVRPAMQVFNVPRTDTGIEALTARLLELKPTYVALEATGGLERIVVASLATAGLPVVLINPAQVRDFAKSLGKRAKTDSIDAAVIAHFVEATKPELRPSPDEATRNLADLVTRRRQIVDLIGMESQREKGAHGRAKESIARVIASLKKELREIDSDIDGSVKGSPIWLADQKLLVSVPGIGNTTARILLAHLPELGKIDGRKIASLAGLAPFTKQSGAWRGKSTIAGGRTVIRCAMFVVALTAMRRNPVLSKAYNALVEKGKPKMVALIAIARRLLVMLNAIMRDKKLWQPQNA

SEQ ID NO: 209099 - protein, 376 aa, unidentified
MGVCIPNLKQRRPTVKDSTIVPQSAVQPLVQTLGMDVGDRRSSYCLVSAAGHTLEESSVATTRDSLSALFQATEACRVVLEACGHVHWIARLASDAGHEVVVANPREVRLISQSGRKNDRNDARTLARLGRVDVELLRPVKLRGEACRASRSTLHARDLLVRMRAKFVNFVRGQVKTFGGRVPSCSTSAFRNKAIEHVPEPIQRAVTPMLEMLKHIEEQIRGLDREVERLCEERHPETGVLRQMRGVGPILALAYVATIEDPARFTSSRTVGNYVGLAPAQYASGAKTPQLRISKRGDGFLRRLLVNAAAYMLGPFGEDSDLKRYGERIAHSGSQRDKARARIAVARKLACLLHHLWRTGSVWDPNYADSIVAPTA

SEQ ID NO: 209100 - protein, 372 aa, unidentified
MSLPGCGSKEVRTLSTRIRSAHLGFTVNEKGIVMTMIGIDPHKATHTAVAVDDDEQVIDEFTLGSSNDQAERLTSWAEGLGKREWAVESANGLGYLVARQLVAAGETVFDVPPVLASRVRLLGSGRSQKNDPNDARSIAIAALRSHRLRVVEPDDHVVVLRLLVKRHRDMARLRNKHCSRLHALLIELEAGGIGVKISVTNASGLLDRIDVVDEASRYRILVAREVVDDIARLDQTLKASKKRIADAVTASGTSLTDIVGVGPIGAATIIGYTKDVTRFPTRGHYATYNATAPIEVSSGGNTRHRLNLRGNRILNHAIHIAAVTQLRHDTNGRVYFDKKIAEGKTPKEAIRALKRRISDAVYRRLIADTNNQ

SEQ ID NO: 209101 - protein, 408 aa, unidentified
MNTLYVGIDVSSKSNVVYLMLPNGDKHSNFSVANSHEGSTLLVKKIYSALTSHSLDTVLIGLEATSVYGDNLVYFLREDATLAPFNRKIHVLNPKQVKKFHDTYNDLPKNDYVDSFVIADCLRFGRINKEVYMGEYRYKALQNLTRARFFAVQNLVKEKQRFMNVLFKKYSTMTQEKVFSDAFSTTALAVYDEFESAEALANMDLHELTDFIIEKGKNRFPDPDAVAKAIQKAARSSYRLPKTVNDSVNQVLSISITSMKALESQIKEFDKAIIALMELLPNVLISIPGIGPVYSAGIMAEIGDINRFDNQASLAKYAGLAWKQHQSGGFEAEVTRLIPSGNRFLKYYLCEAAFSLVRCDKEYSDFYRLKYKEVNRCQHKRALALTARKFVRLVFRLLKDNRLYCPAK

SEQ ID NO: 209102 - protein, 387 aa, unidentified
MQSVTSATAVATTVLVNDITLFASLELSKSKWVVTINSPGSEKFSKHVVEGGDGARLLDLLSQSRAKAEERYGVRVKAIVIQEAGLDGFWIHRLLLANGIESQVVDAASIAVDRRHRRAKTDSIDGETLLRTLMAWARGERRVCSMVRAPSPEEEDRRRLTRERSTLIKERIQHTNRIRGLLSGQGIRDYNPLRRDCFERLEALRTGDGRELPPLLKAEIRRELDRIAVAATQLAAVERARDALIRTNAEGWNNPAAHLLKLKGMGPEFASLLWLESLFRSFGNRRQVAAYAGLAPSPWQSGGVERDQGISKSGNRRLRHTMIELAWFWLRHQPDSALSRWFQARVGAGKGRVRRIAIVALARKLLVALWRYVTQGAVPEGAVFKTA

SEQ ID NO: 209103 - protein, 356 aa, unidentified
MGKLTTIGIDLAKEVIAVCVLDVHGTVMERRVLRRDAFARWAEQLPASNVAMEACGSAHYWGRWFAARGHITRLIAAEFVVPFRKGGKNDTADAEAIAIAARQPTMRFVPIKTVDPQAILAWHSVREGWKEERTALLNRVRGLLAEFGIVIARSSERLLTALPELTEDARLPDAMRAMLLEAREQFAALHARLARCDAQIAAHARNSPAAQRASELLGVGPVTASALAATVPDAKVFRNGRQFGAWLGLTPRQHSSGGKTRLGRISLRGNVYLRTLLIQGARSTLQAAMNREPARASRLQRWIIELYGRKGYYKTLIAIANKHARILWAMLAKGERYDASAWQRHPMHQPPLAGSA

SEQ ID NO: 209104 - protein, 358 aa, unidentified
MNFYRQQHKQYCGSDLHARAMYICVLDQSGTILVHKNLPTTPEAFLRVIAPYLEDLVVGVECMFTWYWLADLCAKEGLAFVLGHALYMKAIHGGKAKHEKIDAHKIAVLLRGGMLPQAYVYPAEMRATRDLLRRRGHLVGKRAELLAHVQNTNSQYNLPEIGKKLAYKANREGVEEHFPDPSVRKPIEVDGSLIDHYDKLLGEVELYITRTAKAHDVQTFARLQSVPGIGKILALVILYEIQDIARFPRVQDFVSYCRLVKCAKESGGKRLGTSGKKSGTVHLRWAFAEAAVLFLRHNQPGKDYFTKLEHKHGKGKALTVLAHKLARAVYYLLSREQAVELTRVVTASPLRGETEPAV

SEQ ID NO: 209105 - protein, 411 aa, unidentified
MDRVYDKCCGIDVHKKLIVACFKQGSEQEIRDFGATTRELMEMADWLKEGGCEMVAMESTSSYWKPLYNILETCELKAMVVNARHMKAVPGRKTDVKDAEWIADLLQHGLLTASYIPDREQRELRELVRYRRSLVGERNREVNRLQKMLEGANIKISGTITDINGRSGRNILEHILSGKKIDSAEYDVLYKKKVIAHNLKATKEQIIDDLNGVMSEVQKKMMRILLNHLDELNAHIRELDDDIDHFMKPEEKRAAEAIQEIPGIGKTSAQAILSVIGSDMERFPTDGHLSSWAGLCPGNNESAHKRKSGRSTKGNAVLRDTLVVCAHAAVKNKSSYLSAQFARISVHRGKKRAYVAVAHSMLIAIYHILKDGVVYRDLGSGYYNQFNRERKIREYLKKLKALGWEGCAAAV

SEQ ID NO: 209106 - protein, 350 aa, unidentified
MNHKCKIIIGIDTHKATHVAVALDTQGTRLAALSIPTNPKGYLELDRWSQSLGEVHAFGIEGTGSYGAGLSRSLLAQGHNVVEVTRPNRQLRYTQGKTDTLDAEGAARSVLSGQATARPKTQTGISEMIRHLKVARDTAVKSRSQAMVTLKTLIINAPADLRDVLDKIRGKVALIRHIAAFRPGEINNTMASAKAAMRALARRWLWLHEEIITHDKELERLVTERAPDLMTSHGIATLTVAEMLIVVGDDPTRVRSEAAFAKLCGVCPIPASSGKTHRFRLNRGGNRQANAALYRVAIVRMRSHEPTLAYVRKRTKDGKSKSEIIRCLKRYIVREIYSQLCVPKSAQIAT

SEQ ID NO: 209107 - protein, 412 aa, unidentified
MEVLYACCCGIDVHAKMLVACRLKAGKKEVRTFATMTEDLLRLLDWLTQAGCTHVAIESTGVYWRPVFNILEGTMEVILTNARDAKGYKARKTDVIDAEWLADLLRHGLLKPSFIPPLPIRELRDLTRYRESLVREQTALANRIQKLIESANIKLGQVASDALGASGKLMLRALAAGKTDAEQMSHLAQGILKRKRPQLQQALEGRFTQAQRWILAELLDQYDQVEAALQRVAERIRQEVETSADPFVADAVQLLDTIPGVGETVAQIIVAEIGVDMDRFPTDHHLASWAGVCPGNNESAGKRKRGKTTKGSRYLRAALVQAAWAASHQKGTYLAAQYKRLVKRMGKKKALIAVGHSILVIAYHVLQTRTPYQELGGEYFDRRNGDKQRKRLIRQLESLGLKVTVEEIKEAA

SEQ ID NO: 209108 - protein, 369 aa, unidentified
MAKSITYIGLDVHKDTIAVALAEASLRGEVRERGKIPNSPAALKALAVKLASTGRDLRFCYEAGPCGYGIQRQLAGMGHECAVVAPSLIPRKPGERIKTDRRDAINLAKLHRAGELTAVWVPDQAHEAIRDLVRARQAAVRSLRQARQQLSGFLLRHGYHYHRPAWTQLHRRWLASLKFEQPVHHIVLEDCIATVEAATARRDRLETHIEAALPEWSLASVVQALQALRGVGLVAAATLVAELGDITRFTNPRQLMAYLGLVPSEHSSGGTRRQGGITKAGNGAARRMLIEAAWSYRFPARISREQLLRQERLAKPIRDIAWKAQERLCRRYRKLARAGKLPTVITVAVARELAGFIWAIAKQAQPTAP

SEQ ID NO: 209109 - protein, 318 aa, unidentified
MSESVYVGLDVAKATLDVAVRPSGESWQVPNDEVGVTGLVVRLRALGPALIVCEATGGFERIAIVALAAAGLPIVVANPRQTRDFAKGTGQLAKTDRLDAAVLALFAERVRPTPRPMPDEAARLLDAVLTRRRQLLEMLTAEKNRLGFAPRPLHKGIRQHIRWLERQLDDVTRDLANQIEQSPAWRAKDDLLQSILGVGPIVSATLLGELPELGALGHKQIAALAGVAPLAWDSGKLRGKRMVWGGRASVRTALYQAVLSARRWNPQIRAFYERLITAGKPTKVALIACARKLLTILNAMVRDNACWRVPELSMQHSC

SEQ ID NO: 209110 - protein, 397 aa, unidentified
MYIVGIDIAKRKHEAAVIDGEGTVIIKPFSFTNNCSGYNRLLAMLAKAKLPLDEVSFAMEATGHYWLALFTRLQKEGFRVQVINPVQTNSIRSFYIRQAKTDPRDALLIAEVIRFGHFSESTLHPENIYELRELCRGRHAIVSMQADVKRKVVALLDQVFPEYETAFTNMFSDTSMAILQTCPTPKELSEMPLEELCHLIEVSSHKRFRMAKAQELQALARNSFGFAMAGDVFSTMIRLYAKHLVFLKQQVQEMDRKIAEIMDTLDTLITTITGIGPTLGAYILSEIGDISRFSSAAKLAAYAGIDPTMRQSGEYNGVRNRMSKRGSPYLRHAIWLAASSAVLHDPALKLYFQKKRDEGKPYMASVGHACRKMVSIIYAVMRDNKAYTPCIPNEISA

SEQ ID NO: 209111 - protein, 332 aa, unidentified
MKISQNTRDIQRYLALDIHKEYVLAGGMNAKQEWTLQPRKIEMGKFREWAAANLCAGDAVVIETTTNVWDIYDIVAPLVTRAVVAHAGAVRQIAEARVKTDKEDVKRLIRLLIADIVPEVWVPPQHVRELRGLMSYRQRLVKTGTMIRNRLHSLLHRHNLLLPEDGLASRAWWDQQGAISALEKIQIHQEIAMLAQIEQHKTEVDQELGRQSVGEVWGKQAVRLVQLPGLGVVVSMTVLSAIGEVSRFESSGKLVGYSGLGAGVHDSGKEHLEKRITKSGRKELRWAMVEAAWRAIRISPYWKEQYEKYLRRTRRPNQAIVVIARKLLVAVW

SEQ ID NO: 209112 - protein, 452 aa, unidentified
MAQETLLLEVINPLAAGIDVGSRSHWVAVGQTEQDVREFGVFNHDLFDLADWLSSNKIETVAMESTGTYWQNLYAVLISKGFQVILCNGKFTKNIKGKKTDVKDCQWIQKLHSLGLLSSSFLPDGKTEQLRTYCRHRANLLRNAASTSKKMQKYLRLLNLRLDVVVNDICGLTGLLIIRAICNGETDPYKLAELRHGNCRKSKEEIAKALYSNGRKDFLFALNQELDTYDHLQNKIAQCDKMIEQMLNEIIDNDENKKQHHIEPKSYKRVTKNTPKDIDLNLKSYQMFEGADLLAIEGMSFNTVLTLMSEVGIEGIKKFPTAKHFTSWLRVAPNNKVSGGKVLSSKVPKGSNRLKIALRNAANAIGNLKESTPLRDFFQRINFRKGRVSAISATARKLAVIIWNIIVKGTPYINPEGYLFLDQKRKLGLVKRIQKQLDKFALTKEDFNFSTN

SEQ ID NO: 209113 - protein, 415 aa, unidentified
MLKIVYPICCGIDVHKTFVVATIATTDLKNITTYQTKRFSTFTKDLRALALWLSNNQCVHVCLESTGKYWIPVYNILEPSCQITLAHPKYVKAIRGKKTDKKDSIWIADLHKHGLVPGSFIPPADIREIRDLLRYRSKLVSFASSEKNRVQNSLTVSNIMLSSVVSDTFGKSSLAILSHLLKHPDDQDFDFRPLLHGSMLKKQDEIALAIDGTISKVQAGKIVLCLSHMDKIKGLITEIEATALRLAAPYSGALEIIQSVPGITLFSALAILSEIGADMTAFHSDKHLCSWAGLAPSNDQSAGKKKSVRISRAGVYIKPLLVQCANAAIKDKDFTHYRTRYESIKLRRGHKRAIIAIARMMLTAIYHMLSTGEMFNPALYEMSQCKPGFVASSEQHAVKLLQRLGYSVVKIPESA

SEQ ID NO: 209114 - protein, 400 aa, unidentified
MLSIGIDVSKGKSTVCGMKPGGEIVYTPFEVQHTRKEMSELVSLLRSSGEEVRAVLESTGSYHCPVVAALLENGIFVSVVNSLRMKRFCSQSIRKVKTDRIDAMQIALYGLAYWQELQPTKLPEDTYRELQLLARQYYQMTSMLIKAKVDFNAICDQVLPGMQELMNDHAGRHKLSDFVLRYRHTTHILEMGETRFRKDYCKWAEKKGYRNCERMAALIFATAQNGIPVLPNAPSTQIVITEAIRVLHTVEASRDAILTQMQALAKTLPEYSLVREMPCIGDTLAPRLIAEIGDVRRFHSKRALIAYAGIDAPPYQSGKFCANNRHISKRGNRYLRKTGYEVMQSYVMHKPANDPIFTFIEKKRGEGKSGKLAMVAGLNKFLRVYYGKVTELYRSLPAIE

SEQ ID NO: 209115 - protein, 482 aa, unidentified
MARRILGMDLGITSAHHAVVIDESCQVLARSRAHPTVDSLETLERLALDGAPEGTELEVVIDPTGAAWLPVAVFFTARGHRVFRPDSSRTAHLRRALARRRKTNRIDAEVLAKLAVWNRGALHELELPTGERACLDRLVRATERLTEEIARHKARIRDLARTAMPLVGQAISKTMGRADLEVLRSHGDPRELLELGVERLTELIARVSRGEHGEAKARAYLRAAEEAVALYGSSGAVAFEVLACELAAEITRLEVAEATLRALERRREEAYRRVDPTELARSVPGIARVGAPLGVAFTGRPARFPSGDRYASYVGLVPGSRETGETDRKGQPITKAGNRRLRRMFVRAADTARKLDPQLARIYHAQMVERGAHHNKALCVVAAHLARRFWATMVRGTPYVIRDVDGRPLSRAEAKAIVAARYTVPEDVRARRRSRKGRRTVPHQVLVGHVSVASPRRAAEPRPPSPAPVMMRRRGEVVKAGS

SEQ ID NO: 209116 - protein, 443 aa, unidentified
MSFDRLKRTQRRKRLPGHKLKPSRATLFVQNSKPHLSMKPTYFLGIDAAKHKMRATLSNRSEHVLFEKDLSVEATGLRQLLAAIKRQVNDPEQLLVLIEATGLLHLNWSAALTKAGYAVAVINPLIARRLYTLQNSIRDNKSDPIDARGLCTIGALHGEKLLVHYRFSLRPEQFTLQRAQSVRKALRSALTNLKKTYQSLMDLSFPELGGLLQLDGVGIRQLLIQAPTPAAIAGKRLSTLENNWMVRPKAAALKALAADSMADPDLAAASGPALVALLQSVAAMEGRLHALDQQIAKLACTSVDPQTKALIETIPGFGPVNAAKTLAWLPTEILHSGSNRKVAARLQAFMGNDPRLRQSGQWKGHTKMSKRGVEMLRTAFFQSAFSAAHNDPELRAYYQCKRAQGKTHEVALSHLMRILTRRLVAVLRSGKPYQSHYNLKNAA

SEQ ID NO: 209117 - protein, 392 aa, unidentified
MIYVGIDVAKDKHDCFAMNSDGEILIERMTIQNNFDGFNSLFNSISQFNESFENIKVGLEATGHYSNNILNFLASKGFNVYVINPLQTNLYRKGQSLRKTKTDKLDARFIATMLITENLKPYSNLSYHISELKSLVRHRFRLVHERSKFKTSLSRLVTLVFPELEKIVWSISQNSVLYLLNELPSVKEISECNLKHLTAVLEKYSKGKYSRDKAIEIRELARKSIGTNSRSLSFELKQVIQTILFLQSQIDDIDKELKNLVDELNSPIMSIPGISYVSAAFILAEIGDINNFDSPAKLQAFAGLDPSTYQSGKYSATHSQMVKRGSKYLRWALLNATRLVCMRDKTFNDYKNSKLAEGKHYFVALSHTTKKLIRVIYYLLKTNNSYQLSKVA

SEQ ID NO: 209118 - protein, 373 aa, unidentified
MDQDVIFVGLDVHKATIAVALAPDGRSNEVRFHGSVPHRPGAMADLGKRLLSKHPGTRLSFCYEAGSCGYGLARELTDAGHECVVIAPSLIPTRPGDHIKTDKRDATTLAKMHRAGELTSVWVPDASHEAVRDLVRAREAAMYWRNRARQALSSFLLRHGYRYGGRSAWTASYWRWLATLKLEHPAQQITMQEYILAIQEGDARHDRLVKQIEGIIPTWSMAPLVIALQAMRGVAMITAATIVAEIGDLARFTTPRKLMAYLGLVPAEHSSGAKIRRRGITKAGNPRARRLLVESAWTYAKAPRVGQEIQRRQEGVELEIVRIAWKAQLRLHDRYRRLAATGKPKNVVITAIARELVGFIWAIGQRVAAPAAA

SEQ ID NO: 209119 - protein, 350 aa, unidentified
MEVLIGVDPHKATNVVAAVDEQGEVVGQETFPANRKGMRALERWAKGFPERRWAVEGAAGIGRPLAQKLLAGGEQVVDVPPKLSARVRVLSTGNARKNDRLDATFTALAALRNGRLASVQPEDGPDGHAEILRLLTERREHLVAERTRSLNRLHVLLLRDLLSDPVGKQLSADAAAKLLRRARPKHPAGRVRRRLASELVRDVRALDRRIAELDERIAVEVEASGTTLTLLFGVGPILAAKIVGIVGDVGRFPSKAHFASYAGVAPIEASSGEVVRHRLSLAGNRRLNKVMHMIAVCQARSDPRGGAYHRKKLAEGKSRREAMRCLKRRVSDAVFGALVADSARASLAPT

SEQ ID NO: 209120 - protein, 410 aa, unidentified
MGYETINRRAHVMTRKNTLKSLPTDTEFRVVGLDLAKSDVSVAAIPVDDNTPSLVDRMTYADLLDWAGKISPTLFAMEPCNGYSLLCLQLENLGHEIKVISGSTVSMWINTHLSGQKTDLNDAIALARLAVSDAELTPIRHKSITEIRIQTVQAVRQQLMSQRSKSIVSFKALAQQWGIPCAAGHRNLKKLRESIEAKVDLITRPVANAMLFLLDAVKSLDRQIGQLNQTLQELVMSDERGRLLQSVLGVGTQISARVITVVGNVERFNSPRSLVAYVGVAPRNFITGHKNLTKKKHGNCPDLSHKGQGKISRRGDKLLRSLFIQGAACLYMQFCKDQLPECQLKRWILKQLARQKTYGKLIVSLAAKLIRIVWAVLTYREKFNIQKAGMTRSMWSEMALETPLNKEVPA

SEQ ID NO: 209121 - protein, 343 aa, unidentified
MTLIGCDLHARMQQVAVLDTGTGEIQEHQFPHHGDAVERFYAALPRPVTVAVESTGYSLWFHTLIRQLGHTLIVGDAAKIRAMVVRKTKTDRRDALHLLELLRHDRLPTIWVPDPATRDRRALLAHRMRLVRIRTTVKNGLHAIALSHRLVEGSKRLTKPRLAVLQGLPLAPYTARRRDESLELLHWLDEHIRQLDDEVAEAAAGDLAARRLLTHPGVGPVTALATVVVLGPVGRFPGSKEVASYVGLAPALHASADTHHLGQITKQGNPFLRLVLVQAASIAIRYDEDLHRLYTTLHRRRGHAKAKVAVARKLLIRLFIMLRDGIDYDEFRRRGRAAQPMPT

SEQ ID NO: 209122 - protein, 389 aa, unidentified
MVRPPLALHCSHPPVDRGRCRQSSCKVPEWQPSQPLILEATMQSTLNLPVIGLDLAKSVFQLHIVDVESGEIQRRQIKRAKLTEFFAKCTRSLVAMEACGSSHYWARTIRALGHDVKLLPAQHVKAFLLRDKTDAMDAQAIWVAAQQPHILPVPVKSERQQACLSMHGMRRQMMKMRIMQTNALRGILAEFGIAMPVGHNQLLKMIQAEIAEAQEKGHLPADLVICIQEQLKRIDGLQDDIDQIGQRLGAMIREDRQMQAIQQIPGVGDLTASALVAAVGDFCTFKSARQFASWVGLVPRHVGTGGKTQQLGISKRGDTYLRTLLIAGARAVIARSGKSDWIERLLQRRHYNVVVVALANKMARTAWAVLARGTAFDRTRWNPLETVSA

SEQ ID NO: 209123 - protein, 410 aa, unidentified
MLLLVGDDWAEDHHDVELQDASGRVVGKARLPEGVAGIARLHALVGEHVGDDDDEPVQVVVGIETERGPWVQALVAAGYEVYPINPLQVARYRERHGVSGAKSDAGDAHTLADMVRTDRHQLRPIAGDSAQAEAVKVVTRAHKTLVWERTRHTLRLRRTLLDFFPAALAAFADLTAPDTLELLAAAPDPASAAVLDIDQIAAALRRARRRKVAAKAAQIQAALRTEQLRQPPVVAAAYAATVRAQVAILTTLNTEITTMEEQVEAHFGEHPDAEVYLSQPGLGVVLGARVLAEFGDDKSRYPDARARKNYAGTSPITRQSGKKKLVLARYVHNDRLIDALGQQAFSALRASPGARAYYDQLRARGVGHRAALRQLANRLVGILHGCLKTGTTYDEDTAWPQPQQDLQTAA

SEQ ID NO: 209124 - protein, 326 aa, unidentified
MYILGIDLAKKTFDVTLLTPTGARHHHTFPNTPTGFRALWRWVSAHGAASVRACMEATNVYWEALAQYLVDQDATVHVVNPARIKGYAQSQMLRNKTDKQDSATIAAFCAAHALTAWVPPTAAQRKLRALVRHRDDLIASRIQQTNRLEDTTDPDVRASLQAVITTIASQLTSIQQQITAHLQAQDDLREQHDLMDAVPGIGPVTAQKLVAEFSDLASYSSAKAVGADAGLTPANYESGSSVRRRPRLSKMGKASVRAALYMPAITVMSRNTEFKAFAARLAARGKSYGVILGAVMRKLLHIIYGVVKHKAPYDPQKVLGPAAITT

SEQ ID NO: 209125 - protein, 407 aa, unidentified
MDVIHAKCAGLDVHQKTIVACARVMTGKTVHHHLQTFGTTTDDLLALGDWLARHEVTHVAMESTGVYWKPVWHALEGQFELLLANPMHVRNVPGRKSDVNDATWIADLLAHGLVRSSFVPPEPIQELRDLTRTRKQLTREIARHTLRIQKTLDQANLKLTGLLTDILGVSGRAILDALVAGERDPERLADLATGRLKASRAELVAALHGRVTPHHVFMLQLHLTQVDALRAAVRDLEARLGDALAPFRAAVERLTTIRGIGPLAASVLVAELGVDMSRFPTAGHLRSWAGLSPRQDESAGKRRSTRTLAGNPWLKTTLVQAAWSAVRKDNTYFRAQFLRLKARRGPKKAIVAVAASILTAAYHVLQREVRYDDLGGDYFSRRDKAKLARRLIARLHDLGVMVEVKVA

SEQ ID NO: 209126 - protein, 384 aa, unidentified
MQASHVSTPIKSNVSTIFVAIELSQRSWLVTMHCPDKDKISHHKLEGGDHAGLRMLIDRMRERAARTLGAVPAVVSCYEAGYDGFWLHRLLMAAGITNHVFDPASIAVDQRARRVKTDRIDGEKMLRTLMAYLRGEPRVVRIVRVPTPEQEDARRASRERGRLTKEQTAHTTRIKALLRLLGMAVGNPRRHDWLTWLVKQRDWQGQAVPPQIMAEIKREHARLMLVREQLDALAQAPADLTPAAAQMAQRSELLLRLKSLGPAFATTLTNEVFYKDFRNRREVASYFGLTPSPWQSGGIDRDQGISKAGNPRARCAAIEMAWLWLRHQPDSKLTQEYRRRTLNASKRIKRVAIVALARKLIVALWRYLTTGLVPEGAMLKTAEV

SEQ ID NO: 209127 - protein, 416 aa, unidentified
MNAAGIDVSSRKSTVAVLRPFGEVVKLPFDVRHSAEDLAALAAQLKSIDDETRVVMEHTGRYYESIAKVLHEAGLYVSAVNPLLIKEYGNNSLRKVKTDKADAMKIAKYALDNWTELRDYTPMDTIRYELKTLNRQFQLASKQKTATANNLIALQEQSFPGIRKLFDSPVRSDGTQKWVDFTHDFWHVDCVRSGSQNAFAERYRKWCKRNRYQFSMEKATEVYALAKSSVVLVQKTSVTKTLVQEAANQLTAISRSVETYRSEMNKLASQLPEYPVVMEMYGVGESLGPQLMAEIGDVRRFERKQSLVAFAGIDPAPSESGDYCSRSNRTTKRGSPYLRKTLFNIMKVHLQRAPADEPVFQFLDKKRAEGKPYYVYMTAAGNKFLRRYYGKVMAYFSTLEGLPPVDMDSTGLHHAE

SEQ ID NO: 209128 - protein, 345 aa, unidentified
MSNNIHFSCICGIDIAKKVMQVFKVTSDGVVTNTSVSRKDFLEHFRNIPPALIGMEACATSQHWGRELQGLGHTVKLLSPKAVKPYVKGLKNDRNDAEGIYRALIMGVREVSIKSTAVRDLSLLQTMRAKRQRDKVATINHIRGILAEYGLVMGKSVRAFLSNAGTLIARLKESETTSQLVISELEKLLKEVKEIVSRIEELESSIKKIASENKNYDLFRSAPGVGPITAAMMVVLLCNPTVFKNGRDFAAYLGLAPMSFGSGGRNQVTGIPSKYRCHNEARSLLVQCAHSITRLKYKSDWVASILSRKPKKVAIIAIANKLARQLWVMAKKGDKFEKRLVLAAV

SEQ ID NO: 209129 - protein, 337 aa, unidentified
MRQIKFFIGTDVSKEWLDMCIILEGEVIHRQQIKNKETAIRKWLKQTQKQYGYSMQDSLFTMEFTGIYNHHLLELLHQAGANIWLIPGLEINASRGLQRSKNDKDDARLIAEYAIKNLKKVRLWKKPRTVLKQLAALLMMREKLMTSKHQYQTTLKEYKSFSTKDEYLIIKDYSSAMLKTICQDLKTIEHQIKDIIEGDEQLKELNEYITSVDGVGIITSANTLVETNEFLDISEAKKFSNHSGVVPHKDESGKKIKKPKVSHKANKKMKKLLHLAAMSVIRKKGELRDYYERKIAEGKNKMSVLNAIRNKLVLRIFACVNNKRKYEKNYVYSLVNP

SEQ ID NO: 209130 - protein, 447 aa, unidentified
MKKKSGFPVLHPNAAGIDIASSEHYVAINPEVDEQSIRAFGCFTEDLYAIADWLLECKVDTVAMEATGVYWVSLYLILEEAGLNVVLVNAKHVKNISGKKSDVKDAEWIRQLHSCGLLSASFQPDHFTRTLRTFMRHRKNLTDMAATHIHMMQKAMEQMNIKLQNVIADITGKSGQAIIEAILKGEHRPEVLVQLLDGRIKASHEEVRKSLEAVWKEENLFELKQSFELYRTYRSKIRECDEQIKAHLTTRTNEMEKEISVSKQKVKTKAKSNKNNLSFDATEMLQQIVGTDLTEIFGITDTNAIEIISEIGLDVSKWATVKHFTSWLNLAPNNKVSGGKILSSKTQKKKNKAGQIFKLAAYAVQRSKNWLAMFYHRIKSKHGTKKAITATARKIAVIFYKLMKEKTSFNPLSAELYTRTFREQQLKRLKKQADKLGLMLIQNELVT

SEQ ID NO: 209131 - protein, 345 aa, unidentified
MKKVVAGMDLHSNNVMIGIMDMDGKRLAHRKVDCDLKEVVKFLAPYKSRLEKAAVESTFNWYWLVDGLKALDYPVVLANPARIEQYSGLKHADDTNDAFFLAELLRLNILPTGHIYDPDLRPVRDLLRRRMMLVHQRTALMLSFKSLYARTTGLEMGLGRLKELGVKEAQKLYENPANQLIAGMQIQHIDYLSQSIEKIEKVVLDCARHLPFYSKLTTLPGVGKILGMTITMEVGDIKRFASAGEFASYCRTVEAQRTSNDKKKAENNSKCGNKYLAWAFVEAANFARRFSPECRAWFDRKAAKTSNVIATKALACKLAKAAWYVMADGTDYQGTRMFGPTGKGE

SEQ ID NO: 209132 - protein, 358 aa, unidentified
MKKQREHILGNEGVFVGLEDSKKTWKLCVRSGGMVVHETSMPARYEVLRNYLNNKFPECQIIVMYEAGFSGFNLYDQLEADGWECVVTPPHTVTQEKVQRKKNDRTDCRRLAKNLENRDYSRCFVPDKELREDRQISRTCGQVQADITRVCNRIRRMLEFHGLDKDLPAGPWGSGSAYTRLKQRLGETEMSDSLRFSFDVMFKELGQVRQLKKELLQQLRKLARSDRYRESVRLLMSAPGIGKLTAIRLVLEWGDVSRFGRKEEFASFLGLVPSDYSSGEEEHRGHITKQGNRRVRSWLVECSWVAIRYDPVLLEKFRRVLRNCGSKKKAIVAVARKLALRLRRLLLSKELYIVGVVE

SEQ ID NO: 209133 - protein, 406 aa, unidentified
MNMNAVGIDVSKRKSTVAILRPGGRVVVKPFDIPHLSANFQSLEKLIRELDGETRIVMECTGRYYEPVARELSQAGFFVSAVNPQIIRNFQGLDNPLRKVKTDKADSVKIARYTLDSWANLKQYSLMDGLRSQLKTMNRQFDFYMKHKTAMKNNLIGLIDQTYPGANTYFDSPAREDGNQKWVDFIDTYWHVDCVRKMSLSSFTDHYQKWCIRRKYNFSKLKAEEIYGKAKELIPVLPKDSFTKRIIKQAVDQLNAASQTVEQLRTLMNETASKLPEYPVVMAMKGAGPSLGPQLIAEIGDVTRFTHKSAITAFAGVDPGVNDSGDYSQKSVHASKHGSPVLRKTLFQIMNVLIKTKPDDAVYRFMDKKRSEGKPYYVYMTAGANKFLRIYYGRVKEYLSSLPESE

SEQ ID NO: 209134 - protein, 321 aa, unidentified
MAMPVVPFEAGVDVAKDELVIQSGPDTKPFAIPNTPKSIKTWLKTVPKGSALAIEATSSYHMELAEQAHGAGLSVYVVDGLRLSRYRDSLGVRAKTDANDATLLARFLNRERASLKVWIPAPPGHRELQMLLRRRAKIVEMRGMMRMSLSGEKLFEEELGILEKTFKRLERLFEMRLHEVVKEAGLKDQLRRLRQLPGVGFLTAAGLVMSFMRGEFANSDAFVAYLGMDVITAQSGKWVGRGRLSKRGDSEVRRLLHNAAMSGSRTQTWKQFYAHHLERGKKTTQALVILSRKLARLAYGLMKSQTDWKPQVYTGGAKPVG

SEQ ID NO: 209135 - protein, 412 aa, unidentified
MQVIIERSAGLDVHQETVVACLLVGVPGARPHKEVRTFRTVTRELEALRDWLQAAQVTHVGMESTGIYWRPVYAILEGHFDLIVGNARHIRNVPGRKTDVKDSEWIADLVRHGLVAKSFVPPHPLRDLRELLRYRRKLVESQAAERNRLLKLLETANIKLASVATDVFGVSGRAMLKALIAGTASAEEIANLAKGRLRLKRADLILALEGRVEEHHRFLLTLQLRRLEAAEQDISALDERIDFRLEPYRAEHALLTQIPGVDWLVAAVLIAEIGVDMSVFLSAYHLAAWAGVCPGNHESAGKQRSGRARKGNVHLRTTLVCAATSAARTKGSYLKDKFYRLKARRGAMRAALAIAHKILVAAYHMLAKGLGYKELGEAYLDQIGRTKTVANLKRRIERLGYRVTLEPTANAA

SEQ ID NO: 209136 - protein, 337 aa, unidentified
MKRYVGVDLHRTQFTVCLLEEAGRKSRKQWKIEQLPEFVAQLQAEDELAVEATGTTALFYEAVVRHVARVVVVNPYQFRVISESVKKTDRRDAEALALYLSKGLLPEVRMKNRQQRELQHLAETRDLLVKQRSALKSKINNLLAANGIYLKREALSSVKGLEGVLTTQVSALVKAELRVLVDQIRSLSGSLAELDELLEDEGRRLPGHANLTSIKGIGSLSATILLTTVGDVRDFADEGKLAAYLGLVPKVQNSNEMERSGGITKRGNKLARTALVQCGLVAQRYSPYLKRFYERIKSRRGGGKAKIALARKLVKLVYDTLKNNWVFSDFPSFTLAA

SEQ ID NO: 209137 - protein, 400 aa, unidentified
MHLTANISIPQKNFIAIDLHSDNAVICVRRNALNKAGELVGKNIWCGRVSIRDGLDNFIKVLVPHCQDFDHVAVVESTYNWYCLADAFEERGWLLRVADPSTVSQANLKSSDDRTDAQYLAERLRVGSLKHYLPLNYSSRALRDLCRYRMAMVQDCASLKIKLINLYRNQLSKNVRVAALLERCQPHMQPNYRFNSDILGEFKDPNIRLRVAFEISRIAMLEEMIEEYNAEIQKQCKDQELVKLCKTIPVCGPVLSAVICTEIGTMQRFKSAGDFVSYCRLCSTSKLSNGKSKGLGNAKNGNAYLSWAFTEVAQYASRNPVIREILQRLLRKYGGLRVKAIRTLAAKIARVTFYVLKNKQPFNAAKCFGMELTKSIVKKLPHKPLREDAAVVLPTVAGQA

SEQ ID NO: 209138 - protein, 398 aa, unidentified
MKSNTQNAKIEAITEKTLVLGIDVGSETHYVRAFDYRGIEYSKKPFKFSNTEVGFATFKEWILDLKERHEKDKVVPGMEPTGHYWFNLGKFLQDNEMKPVLVNPHHVKKSKELDDNNPTKNDRKDPKVIAGLVREGRYMIPYLPDGVYADLRTASNIRFQLQAELTRIQNRISRWFNIYFPEYKTVYGKPDAKSGILILKAAPLPEDILTLGIDGVNQIWRDAKLRAVGKARAKTLIEAAEHSVGSKEGAVAARMEIRMLLEDYESRSIRLQEVMTLIEGLVKQIPMAEKLLEIKGVGIRTVSGFLAEVGDISRFNNPKELQKLAGLALVENSSGKHKGETTISRRGRKRLRYLLFEVAMSLVAKNPEFRELHNYYTTRRQNPLKKMQSLMAIAAKLI

SEQ ID NO: 209139 - protein, 444 aa, unidentified
MARKSRKQPLKIVHPRCAGIDIGSREHWIAVDPDSDDKPIRCFSAFSDDLYAMAEWLQALDVEVVAMEATGVYWIPLYEVLDARGFQVNLVNSRATRQVSGRKSDVLDCQWIWQLMTYGLLKGAFRPANEICSLRSIVRQRAAKVQEQSRCVQHMQKALTQMNIQLDNVVSNLTGKTGLAILRQIVAGERDPHKLATLRDRRLRASEQTVARSLHGNWRAEHLFALTQALAHYDFLGHQIAECDQTIGEALQSLPTLTDQTCAPVKAMRNPHRTSAQQAQLHRALNEVLGVDLTRVPTLGIDTVLVLASEIGPDLSRFASSRHFCSWLGLAPPTHISGGKTLAGPKPKVFNRAGQALRQAALNARRSRTFIGAAHRARLARMDTAKAVKATAHQLARLIYAMLTQGQAYVERGIEEFEVLSRGRQLRSIQRKAKQFGLTLTEVA

SEQ ID NO: 209140 - protein, 350 aa, unidentified
MLIIGCDYHPGFQQIAYVDSETGEFQERRLKHPEEAEKFYRTLWEQGVKVRVGMEASGHARWFERLLEELSFELWTGDAAKIRAKRVRKKKTDREDARHILELLLENRFPKIWVATWQNRDLRQLLWHRHRMVQTRTRIMNQLQAVAINEGVRYKKRLWREAGRKQLESLPLAPWASRRRKDLLEVLDRINPTIAELTRSIEEEAEKCPPARRLMTHPGVGALTAVAFVLIIGEAHRFDCGKQIAAYLGLVPEEDSSGERRRLGHISKQGNSLLRFLLVEAAQATARCDQRWRNQFFHLAQRRGRKIAKVAMARRLAVRLYWMWRREWNYEQLQSFGSHVGQPGHLHGVQ

SEQ ID NO: 209141 - protein, 459 aa, unidentified
MQRPIEVEVEEDEQIVERVAAVDVAKASGMVCTRMPHESVPGKRVTKVWQVPSMTRALVELADHLRCQGTQRVILESTSDYWRPFYYLLEAAGLTVWLVNAAQAKNVPGRPKTDKIDAVWLAKLAERSMVSPSLVPTEPMRQVRDLARARFDLVEDRARVKQRIEKLLEDALIKISSVLTDIHGVSGRAMIEALIAGQRSPTALTELAKGRARARRGDLHEALQGRFTDHHARLARMLLDQLDDLTARITEVTELLDAAIAAVPAGSPRTDPATDTHDLTEGEGTPRPGPTPTSYASAIARLCAIPGAGPDSVRAVIGEIGLDMTVFGRHQRLCSWAKVCPRTVQSGRKKGRARTGKGNPYLKAALAQMATGAAKTDTFLGERYRRLVKRMPKAKALVALQRSILIIIFHLLADPTAEFTDLGPDFYTRRINLARRTDHLTRQLRALGYNVQLTPADAA

SEQ ID NO: 209142 - protein, 443 aa, unidentified
MGSYAGVDWASEKHDVLIEDEAGEELFAGSFAHDEAGLRSLCRTLVRFKVRLVAIERPDGLLVERLLDAGLRLLALHPNQVAAARARFRVSGGKSDRFDSFVLCELARTDHHRFRVLESDSDQTKALRALTRAREDLVGQRVALANQLRAELERFWPGPIGLFSALDSRISLAFLKRYPTPKDAKSLAAKRMQAFLAGQHYSGGKQPAALVAKLRRAPEGRAGELECDARRAVVLSLVAALEPIVAAIGQLERQIATTVRAHPDGEIFTSLFKHPDSVLTAAIMVAEIGDCRARYPNRDALCGDAGQAAVAIESGKRKVACFRWACNKRLREAFCTLADSTRHWHPWAADHYARSIAKGHDHQRAIRTLGRAWCRIVWRCWQDRVPYDPDRHRGLQQHITVIIPSPAGPGVVDQAATARMAAPLLVNNTKRPHRGTKRSVAAG

SEQ ID NO: 209143 - protein, 380 aa, unidentified
MEKACGLDVHKGSVFACILDEQGKKVLEKRYGTLTPNLTELRDMLVEQGCGRVAMESTSIYWMPIWRVLESDFSLSLANPYFIKQLPGRKSDFKDAQWIAECLQKNSIKSSFVAGEIQQQMRQYTRQYRRLTKSRVRLEQQMDNQLQRCNIRFSNYVSNQGNNVSVRKIIKSIIAGERDPVKLCYLVHGRTLNRHGKDVITDSLDGIIGCADIEMLRQCMEQIDLLEKQQAACLNHLEELANRYFAEEISLLCTIPGIQKLSAMCILAEIGNDMSVFQKANHLVGWSGLRPRNEETAEKIKSRKILHGNKYLRQILVEISWSAARSGKSFLGKKFNILSLRMKSQKALIAITRKILVIIYNVLKTKQPFDPKRNLQALVA

SEQ ID NO: 209144 - protein, 424 aa, unidentified
MRFIGLDVHRDFCEVAIAEAGVVRLAGRVQTEPAALELFAQSLGGDDQVALEVTGNALEIARIIEPHVGRVVLANPKAVKGITRTGAKTDKIDARTLAKLLAGGFLPAVWPPDEQTRILRRRISARAQLVRQRTRAKNQVHATLIRNLKGKPPVSDLFGARGRRWLAAQDLPADEQETVAACLRQIAFLDGEVALVERALAEQVLASAEMRRLLTLPGVNFVTAAALLAAVGEIGRFPTARQLVSYLGLDPRVRQSGTEPARHGRISKQGPGETRHVLVEAAWHATRTPGPLRAFHQRIAARRGGNIATVAVARKLAVIAWHMLSRSEDYAFARPSLTREKIRRLELITGAEHQKGKRIGVFATREQHRLDKELAAQAELAYRRLVQDWQPAINKGTGAAPGRASCGPSSGQAARQETAPPPAL

SEQ ID NO: 209145 - protein, 346 aa, unidentified
MKIVSLDVHSEASQLVAVSEEGEIFLEMKVATDMALLRQIIRGIPGRKRVVFEEGPLSGRLTDALRDVADDVVSCDPSQNALIALAENGNDERDARGLVLLARTNALRPVFVPPEPYRTLRSLLGHDRNLQQGVTRAKNRIKALCRRVGIRYRGNGAYSTANRPEVLGQISESGLRWQMNSVYRELDLLRRERCGVRRVVKGMARQLKVIDRLQSAPGVGPITARTVVAWVVDPARFRSRKALSSYAGLGLGQGWTNWKPTGPAKASRRGQRELKRVLFLAANAAVKGKNALARRYQARRDAGWEHSKAIRDTARTLLYTLVKMWKTGEDYDDNRVSVPCSKERPA

SEQ ID NO: 209146 - protein, 365 aa, unidentified
MRESSAKYVGMDVHKESIDIAVAAGGEVRHYGTVGGSLADVDRALRRIVALGGELHVVYEAGPCGYALYRHLRARGIDCTVVAPSRIPKRPGDRVKTDRRDAEMLARLHHAGELEAVYVPCADDEAMRDLTRAREDAKGAQTRARHQLKAFLLRNGIAYAGKTAWTPGHVRWLASVKLPEPVQQIVFQEYVAAVTAAGERLARIEAALRETVTRWRLYPAVQALQALRGVQRVIAATLVAEIGDIGRFDHPRQLMAYLGLVPSEHSSGPSIHRGAITKCGNSHARRMLTEAARSYRLPARVTPIIARRQDGLAREVREIAWKAQVRLCGRYRQLRARGKEPNKVVVAVARELAGFVWAIARTVRT

SEQ ID NO: 209147 - protein, 336 aa, unidentified
MSTLPVIVGLDYSDRSVQVCVLNEQGQVLGNRGCANDWQAIKEFAESRGTVVRAAIESCSGAADLADELVTRAGWHVDLAHPGYVARMKQSPDKTDYQDARMVADLERVGYLPRVWLAPEPIRELRHLVRYRQQLVEQRKAVKLRIRALLRVQRCRPPASVNPWTRAWLTWVSKDALLGDHSRWIMERHLEELRRVADALKHVEKRLHEATAKDPVVVTLQEQPGIGPVTSWTLRAEIGRFERFRTGKQLARFCGTSPRNASSGERVADAGLIRAASPTLRATIIEAAHRLIRTQATWAQMAARLRARGKPKCVAVAAVANRWVRKLYHQMVQQAA

SEQ ID NO: 209148 - protein, 412 aa, unidentified
MNNPQDYLFVGVDTHKAQHTAVVINCFHQKIGYAQTPNNPADFDSFLNRLKTLIHNNENLVFGLEDTQGLGHSLAQWLIKKDYTVKEVNPVQTKRERKQSTSPDKSDKIDAEAIANVLLAEYDKLPTIKNDANFKAIRQLNNQRKSLVKEQTKVKNRLHNLIHQQYPEYKKFFSDPFGKTALAFWKKYPHPGELKHIGEKRLNNFLKKQVKSISNDKAAHILSLVDKDKDKNISTKTRKTLIPMLIKQLKLIRQNLEEINQLLEKAVEDSQYKLTTMPGIDFRLAAIFISNIKNIDRFDLADQLARYAGIAPVEYSSGKSRNTTSKTYGCRDLNHAFYILALQQIGKYKNGKVKNPVAYNYYQKKLKEGKSKKTALTCLQRRLVDIIYAMMRDRSAYELPEIPNYEILNKAV

SEQ ID NO: 209149 - protein, 356 aa, unidentified
MTNVKTNFAEQTIYVGLDVHKRSWNAALYLNDQYLRNVHQPPSPQSLYKFLRTNYPGAHYVCAYEGGKFGYWIQRQLSSKGIKCIVVNPADIPATHKDEVSKTDARDARGIAMALQCGQLRGIYIPPVQQESDRSLVRHRKKIWRDLVRCKNRIKGFLDYTGVELPDKFSNSNWSKNFLTWLKEIKFEYNSSRTTLDYMIREAELLRKELLSISNDIRKLMRSKEYKKLYYLLRTITGIGPLTAALLITEIGDMKRFPSFYELNSFIGLLPSEHSSGERESKGRLTIRRHRQLRSDLIECAWTAKRTDPALSLFYSEQLKRGKEPKLIIVKIARKLLSRIRYVWLTEKAYERGVVK

SEQ ID NO: 209150 - protein, 367 aa, unidentified
MKKISTAAMKQGRNISEQKLTIGFDLGDGSSWYCVLDEAGNVLLEQRVSTTPKAMKEVFGGMPRSRIALETGMHSPWVSRALSELGHEVIVAHARNVRLIGESRKKDDRIDAQTLARLARIDPQLLSPVKHRSAKAQADLTVIRARAGLVRARTALVNTARGLAKSYGERLRGCNVRNMNPEKAEGLSPELQRALEPLLAAIESLSERIRECNERIEQLAEQSYPQVALLKQVKGVGTLIALTFLLTLEDAQRFRKSRDVGCYLGLQPGRRNSGQSEPQMHISKEGDPYLRTLLVQGAHHILGPFGADSDLRRWGLKLAERGGKSGKKRAIIAVARKLAVLLHRLWVSGEVYEPLRNSNQRAMPAAA

SEQ ID NO: 209151 - protein, 312 aa, unidentified
MKNDTIGVDVSKDHLDAHRLADGASRRFVNDTSRRKAFLKWLAEKPVERVVFEPTGPYHRAFESALGAAGVPFAKVNPRQARRFAEATGKLAKTDRLDAAMLARMGALLELEARPARSNALLELKELHIAREALVKDRTAAKNRAKTLTLSLLRKHNAQRLDQIERQIQAIETAILAAIEADADLASRFAILTTIPGVSAVTAFALLIAMPELGALDAGQAASLAGLAPIARQSGRWTGRSLIRGGRADVRQALYMPALVAARFNPDMKAKYTHLIDTGKPAKVALTAIMRKLVVLANALLKANRPWTPRIA

SEQ ID NO: 209152 - protein, 401 aa, unidentified
MTVPTHEQIEVFLGVDVGKGQHHAVAVSRTGTILFDRTLPNDETRVRELIDTLTQHGPTILVVDQPATIGALAVAVAQDMGIAVGYLPGLAMRRIADLYPGEAKTDKKDAAIIADAARTLPHAIRHLKATDTQVAELSILSGFDDDLAMQITATSNRLHGLLTQIHPALERAIGRHIAHPAILDLLEHYPTPAQIRRLGYARLATRLSKNAPRMGARLADDITTAISEQNVVVIGTSAAETVIPKLAEQLSSLQRQRSDVAAKVEALVEAHPLYPVLTSMPGVGIRTTARIITETSGKHFATAGHLAAYAGLAPVTRRSGSSIRGEHRSRRGNKKLKRVLYLSAFAALQDPDSRDYYDRKRAQGKSYNQALVALARRRCDVLFAMLRDGTTYQAHPRPSAA

SEQ ID NO: 209153 - protein, 342 aa, unidentified
MKKLAVDESALLKLLNRWREEAEQAGHGIKRIAVVFEAGRDGFWLARWLRARDIEAHVIHASSVAVSREHRRAKTDRLDTELLKRAFLGWLRGERDHCKMVAIPTTNDEDAKRPNRERESLVGEQSRIVNRMKATLTRLGIRGFNPKLKKAAERLDGLRTPEGEPIPPNTLAELRRDMVRRRLVSDQIRQIEDARLERLEHAPGDGPHAMVRLLARVIGVGIETADMLVQEVLSRNMRDRRAVARYAGLTGSPDESGRKRREKGLARSGNARVRRGMIQLAWRFLMFQKDSALAQWFRSRTENVRGTRKTMIVALARKLLISLWRLVRDGVLPDGVILRPAH

SEQ ID NO: 209154 - protein, 464 aa, unidentified
MRAGKQLWRNGKEKKEWGRRLQSEDPGLEVVHPHAAGIDVGNSTHYVAVRPDRDPEPVRRFECFTADLHRLADWLQSCGVKTVAMQSTGVYWIPLYEILEEHGLEVYLVNARHTKNLPGRKTDVQESQWLLKLHTYGLLNNSFQPVSEIRVLRTYWRQRGEHVRGAATCIQRMQKALTQMNVQLANVISDISGLTGQAIIRAIVAGERNPLKLAMLSDPRVHASHEEIAKSLEGNWRPELLFVLHQELDMYDTYQKRIAECDQRLQKHLASFTRPLPIQPPTQKLKTKKPAAKNAPRFDLSSELQRVTGVDLTRIDGIDVMVAQTLLSEVGLDMSRWTTESHFASWLGLCPDNRISGDKVLSRGTRRVVNRAATALRQAANTLMRSRSYLGAQYRRLRTKLGAPKAITAMAHRLARLVYRMLKYGQTYVDKGTDYYEERSRQQQIQLLRKRAAKLGLQVAEIHA

SEQ ID NO: 209155 - protein, 385 aa, unidentified
MRGQTFIPRNYEVFAGLDVDKRSISVTFTDHQGFLKSLRLPYSVEHLLNHVRKHFSDQKVAFAYEAGPTGYGLYDGLAAHAYPCLVVAPSMIPKAPGQRVKTNRLDSRSLSENLRGGQLTSIHVPSQSYRELRHLTQLRDTFVSEVVAMKLRIKSLLLLEGITFPPAPAGSQWSLLVKAELRKLPCSGTVRFKLDQLLDSLEFGEKQAVKTTKEIRRFCQHEPELAQCLKYLLTIPGIGWIVASQLLARIGDWRELQNVRQLAGFLGVVPTEHSTGERTERGSITHTGDGRLRSKLIQASWSAIRQDGELREFYRSVCRTHPRERAARVAIVAVARKLTTRIAAVLMEQRPYVVRKEVHPTPLTIEETRPQGATRRLREPGESNS

SEQ ID NO: 209156 - protein, 344 aa, unidentified
MEQYVGIDVSLELSSVCVVDASGKILRELKVPSAPEALVQFFQHLEPAPVRIGLEAGPLSQWLFAGLVSAGLDVVLLETRHVKAALSAMPVKTDRKDARGIAQMVRMGWYRPVHCKTLAAQEIRALLVARKQLQAKLLDLELCIRGILRGFGLKLGVVTRSGFEARVRELVDGHPMLEQVAGPMLKARDALRTQFNTLHKQMLAFARRDAVCNRLMTVPGVGPQVALTFRSAVDDPSRFTRSKAVGAHFGLTPKKHQSGETDVTGSITRAGDAMVRTALYEAANVMLSHAARFSTLKRWAVDVAQRRGIRRAKVALARKLATVLHRIWVDGTTFRWGKEAARAA

SEQ ID NO: 209157 - protein, 415 aa, unidentified
MVERCAGLDVHRDNVVATTRVPGQGRRRFEQHTQTFKTTLPGLSELAGWLAEAGVTLVGMEATGIYWRTVFQALEDQFECWLLNAHHLRNVPGRKTDVKDSEWICQLVQHGLVRPSFVPPPEIRRLRDLTRLRTAQSNERTRTIQRLEKVLQDAGIKLSSVASTSYSKSARAMLEALLSGVSDPEQLAELSKGKMRSKIPQLREALQSRFTIEHHGVMVAQLLAHIDTLDTELQHLTERIELVTAPHAHTIELLSTIPGVQAKAAQVLIAECGLDMSVFPTVGHFASWAGACPGHHQSAGRRRSGRTRPGPGWLTSQLTECARAAVRTKETYLASHFAQLRGRRGEQKAIGAIRHDLLVAYFHIVRDQVPYRDLGPTWQRKRYSVEHRARRLQRQLEALGYAVTLDKVDPEEQAA

SEQ ID NO: 209158 - protein, 310 aa, unidentified
MEQIYVGVDVSKDRLDVHVRPAGEAFAVARNGEGLEELNRRLGGLGASLVAVEATGGFETVVSASLLGVKLPVVVVNPAQVRSYAQALGKRAKSDPIDAEVIARFAEATKPEIRVLPDEQTQALADLVARRRQIVQMIAAERQREKRTRLRRVLRSIKTVIAALEKALNDVDQQIDDSIRSSPAWREKEDLLASVPGIGPVTARTLLAEMPELGRLDRREVASLAGLAPWTRQSGQWKGKSFIGGGRRDVRTALFMAALTAARHNPVLKVFHQRLIAAGKPKMVALIAVARKLLTILNAILRDKQPWQIA

SEQ ID NO: 209159 - protein, 377 aa, unidentified
MREKLRFLGLDVHAETIAVAVAEPDGEVRSLGTIANREDSIRKLIRKLGSPEQLRACYEAGPTGFVLYWQLTQSGVECAVVAPSLVPKKPGDRVKTDRRDALKLARSHRSGDLTAVWVPDEDSEALRDLVRQREAAKQDQLRARHRLTKLLLRTGQRPPLGLKAWTERYMRWLAQVRYRQVAQEVTRLDCMNEVEHMSARVKRLEEAILEVVKQAPQAMQEVIRGLQTLRGVAHISAVTIASELGNISARFQSARKLMGYCGVFPSEDSSGKRIRRGGITKAGNAHLRRIVVESAWCYRHLPRVGEKLRKRHQGVPAEIIEIAWKAQHRLHKRYRTMMNAGKDQRKVMTAIGRELLGFIWAIGIKAEAAACKQQIAA

SEQ ID NO: 209160 - protein, 312 aa, unidentified
MERIFVGIDIAKDQVDVHVRPTDERFQLSRTDAGLAGLVARLQPLGPRLVVLEATGGYEIPVAAALASAGVPVAVVNPRQIRDYARATGQLAKTDALDARLLARFAEAVQPEVRPLPTPAAQALGDLVTRRRQLVDMLGAERNRHHQARDLRLQRRIATHIRWLTKALAEIEADLGTHIRSSPIWRERDDLLHSVPGVGDVTAHTLIADLPELGHLGRRKIAGLVGVAPMNRDSGHWRGRRTIAGGRPAVRSVLYMATLTAVRFNPAIAQFYQRLVAAGRPKKVALTAAMRKLLTILNAMLRDQRPWHPQTA

SEQ ID NO: 209161 - protein, 399 aa, unidentified
MKRVAGLDVHKDIIFACVTKGKYQSQVKEFDTTTSGLEELFHWLIGERVSKVAMESTSIYWMPVWRALEQEFTLYLVNPYFIKQMPGRKSDVKDAQWIATLLDKDLLRSSVVPDKTIRVLRSYLRRYAQLQGQTTRCIQSLERQLSQCNIKIASLTSTIASKTTLNIVEAIINGEHSVDVLMEKVHGRIIKSKGKEKVRKALQGIIEEHDIFLLRQIYQDYLHIERQCAELLAQAEIIADEHYSEQIALLQTIPGIKKLSAVIIFAELGGNIGLFKSASHLSGWCGLRPKNDESAGKIKSTSIGKGNKYLRRILVQTAWAASRTKECYLKEKFETLSVRKGRKKALIAIARKQLVITWNVLSKEEVYKEPTIILSSKQIEQKRKYYQTKLEKLSTHKVG

SEQ ID NO: 209162 - protein, 338 aa, unidentified
MELYAAIDLHSNNSVVMVLDAQDRRVFAMRLPNDVGAIVAALRSCAGEVRGVAVESTFNWYWLVDGLQDAGFTVHLVNTAAVKQYDGLKHGGDFSDAHHLAHLLRLGILPVGHIYPREQRAVRDLLRKRSQLVRQRSTQILCVHNLIARNLGTLTKGDAIKRMEPEDVESMELLEEQKQAMKANLAVMDCLDEQVHKLERSVLAKFKLREEFKALKTVSGIGDILALTIALETGDIGRFAGPGNFASYARMVDSRRESNGKKKGQGNTKCGNKFLSWAFIEAAHFAVRFDATIKRWYQKKCASSLSVVAIKAVAHKLARACYHVIKDGQPFDVAKAFG

SEQ ID NO: 209163 - protein, 343 aa, unidentified
MEKDTMIGVDLAKRVFQLHGASMAGHVKFRKKLSRPQFERFMAEHPPAVVVMEACSGAHFWCRTFARMGHEVRLIAPQYVKPFVKRQKNDAADAEAIVIAAQRPEMRFVEPKNEAAQARAVIFRSRARLVRQRTELVNALRSHLYEFGHAFPQGITQLKRIAALLEDPANDLPDLVRTECRDLLEQIAETTVRIDTRMKRIRALAAGTDTARRLQTMPGVGPMTALALEAFVPDMTLFRRGRDFAAWLGLVPRQHSSGGKERLGRITKSGQSDVRRLLIIGAMSRLNWLGRKSIPENSWLARMMERKPKMLVAIALANKMARAIWVMLTKGEDYRDPAMTTAA

SEQ ID NO: 209164 - protein, 341 aa, unidentified
MSQITTFGLDTSKQAFHVIGVNQVGKMIERKQLRRSRVVRYFAQRPACIIGIEACGGSHHWARQLQQLGHSVRMVPPRDVKALVRGQKNDYNDALAIAEAVQRPQQRFVAIKTEAEHDLQALHRLRRGYIRERTALSNRMRGLLMEYGVIMPKGMATLRRRIPELLEDGDNALSAVVRDLLYQALQHLYQLDALIAHGDRQLKTQVARDETAQRLLTIPGFGPVVTSTWRARFGNCHQFRRGRDASAACGMVPRQHTTGGRPQLLGITKQGDKELRTLLIHGARAVVSRAHKKDDPLSQWVCQVQARRGRHKATVALANKMARMAWAITVNQTEYAPRRAN

SEQ ID NO: 209165 - protein, 337 aa, unidentified
MKHTKSLLQSFLKFIGMTKVNKIIGIDISKEKFDACFSFQPCGYSSRTYTYNEEGIRSFLAEVPSDCICIMEATGVYHLRLAYALTKAAIYVSVVNPLSVKNFSRAVMCRTKTDKADARQLVDYARRMELVEWKPTSENYIRIQQIYRTIELFVTNITQLENQLEAISNSPVQDRMLCRILKRSITIQKRRIERLEKQIEELIAEDDKTVVKRLCSIPGIGKKTAVAVLTATKGMHGFNNYRQVSSYFGLCPRIYDSGKSVHGKAHICKMGMGWIRRLLYMCSISAAKHNEACKDLYLRLTERGKPIKVVLIAIANKLIKQIFAIVKNNSLYHKTFA

SEQ ID NO: 209166 - protein, 341 aa, unidentified
MSEISVVGVDLGKNVIHVHGADERGKPLFQKALRRNRFEQFMANVGPCTVGMEACSGSHHWARVMRSHGHEVRLLSPRYARAYVKTNKNDWRDAEAIVEAMSRPTMRYVREKPVEAQAWQMVHRVRRRIVKQRSALASQARGFLMEFGVFIARGIGVLRRRLPEVLEDGANELPGRARRVLHELYEELCALDERVAALDVELEEHGREDPLCQRLREVPGIGVVTASALVAAVGDARQFSSGRDLAAWLGLVPRQHSTGGRTVLGGISKRGDRYLRTLLVHGARAALARVNENSDPRLRWAAALRARRGHNVAVVALANKLARAAWAVLSRQEPYRGAMAS

SEQ ID NO: 209167 - protein, 412 aa, unidentified
MEVLHECCCGLDVHAKTVVACLSKKGRKELRTFSTMTDELLKLADWLTSAGCTHVAIESTGVYWKPVFNILEGVVSVILVNARHIKAVPGRKTDVRDCEWLADLLRHGLLKASFIPPLEIRELRELTRYRQTLVTEHTAVANRLQKLLESANIKLGQVASDVLGLSGRLMLRALAEGEQDAEKLAELAQGKLKSKKAELRRALEGRLTQAQRWVLAELLARLAELEAALTRVETRLGEEVANCSDPFVQEAVELLDSIPGVGERTAQTIIAEIGVDMGRFPSAKHLASWAGVCPGNNESAGKRKSGQTTKGSKSLRTALVEAAWAATRTKGTYLRARYQRLVKRMPKKKALVAVAHTMLVIVYHLLSRRVAYAELGSDYVDRQQVERQRRRLVERLEALGVKVTIEEVAEAA

SEQ ID NO: 209168 - protein, 326 aa, unidentified
MTLSHLRDNIFVGIDVGGAGLDVAWHRGDSAHYANRPDAIATLVERLRTGPEVTRIVIEPTGGYEKALLKALRQAQLPVELIHTTRFSAYRALVGVKAKSDTSDAKLLASYAAAPDEVRGRKAGHVELPEDAVRDELSELASRRDQLKHMIHAENCRLSTMRNAELRRMVTTHLEALRAEDKQVHRMMLELVRQRTDLRRDQQLLKTIKGIGVKSALSLLASVPELGRVDNKAAAALIGVAPFVRQSGTTKAPARIHGGRASVRSILYMAAVTASKHNPLLRPFYERLIAKGKPPKVALIAVLRRLVVFANAVLRSGQPWKGASAT

SEQ ID NO: 209169 - protein, 377 aa, unidentified
MDNDSTVYVGLDVHKESITVAYAIDAGEVELMGKIGTTPTEIDRLCKRLRSKGRHIRVVYEAGPCGYGLYRRLVKQGFDCMVCAPSLIPRKPGERVKTDRRDAIKLARSLRAGDLSAVYVPSVEDEAFRDLARAWASARDDLRHARQRLKSFLLSHGVHYVGRADWGAAHRRWLSKYSFETAWRQLAFEEHRRTIEDRLAQCERLEVALREAVVEWGFYPAVLALQAMRGIQFITAVGMISELGDLSRFEHPRQLMAWLGITPSEHSSGGTRRQGGVTKAGNSYARKLLVEAAWSYRHPARVGKTLQPRHEGIPKAIIDLAWDAQLRLCKKYRKLATRGKNVNVAVVAVARELAGFIWDIGRLAMSLALPRRAAQQA

SEQ ID NO: 209170 - protein, 526 aa, unidentified
MVIKTKKRKSTGSKKRFIGKPTGQIQQRVQAAGPEHFGIVVVDCAKRRSKWMLCNFFGKVLIEPTTVEHTNGGLRAMTQLVADACQAEGLSDTIVAVEMTGIYHKPVQRAFRKAKFDTRIVHPFASNHYRRPLHPDEKTDDNDLEAIFHATVNGYGLATLPVGEVYQSLQAVSRHRHNLVKQRARLMIQIRRLLHQTMPGFADLWEEGKLFHKSIALPVALQFSSADAIREAGVDGIAKHLRKTKVRFQSRTIERIVAWAGTAAEPSELAPMHTRQWQQLNEIRQLLGQQIVAAEQEMAGFLVKTPYVLLLSVTGINVVSAARLAGEAGPIEHYATARAINGRAGLYPSRYQSDEVDHADGSLVRQCNRKLRGAAMLVAENLIKCHAYYRGLSELWKQQKVDPRDRRCRIANRAMRMVYQLVGGRQLWRGRGVDREYLLAKLQEFHRVHKTPIEQSIRDMNEAFAWLPKSAYAEEAKPLEQLARKKHRGPKRIGDLMIPLLIRLGVGIEEEDKEVESNTSEARSSD

SEQ ID NO: 209171 - protein, 336 aa, unidentified
MTIIRVGLDTSKHVFQMHGVDENEQPVLRRQIRRGAVEKFFAKLPSTRIGIEACGASHHWARLLRGLGHEVLLMPPQYIKAYVKRGKNDKIDAEAICEAMSRPTMRFVPVKTAEQQAALTMLGVRDLLVKQRTMLINAIRGHAAEFGVTTAKGPKQIAELLARLASDEDVPVLAREMIGVLASQLNGLDIKLKAIEARLMTWHRQDQTSQCLATIPGIGPIGGVSFALKVPDAKAFRSGRRFAAWLGITPREDSTAGRQKLGRISRAGDADLRRLLVIGATAVIRAAKPGRTAPWLMGLLARKPKKLAAVALANKMARIVWAMMVSGETYRRPAQA

SEQ ID NO: 209172 - protein, 388 aa, unidentified
MGQVIIGMDPHKRSATIEVMAGDETVLGGGRYATDLAGYRTMLAYAKRFPQRTWAIEGCRGIGRHIANRLLADGEQIVDVPPKLSARARVFATGQGRKTDATDAHSVALVGTRMSGLRSVIDDEQLTVLRVLVDRRRSLGEDHTRMVSQLHRLLLELIPGGAKKDLSAAQAKALLAKVRPRDVAGKTRRRVAAELIADLERIYARKKAANKELNELLKATGTTLTNLHGVGPSGAARLLVEVGDITRFPSKAHFASWNGTAPLDASSGDQVRHRLSRKGNRQINRVLHIMATVQLRNPAEGRAYYDRKKAAGKTSMEAMRCLKRRLSDVVYRQLLADAMRPCTTGPGGHSGTTLQSSVADSHPDIDTSDQSLPGPAKPKPRTALLALS

SEQ ID NO: 209173 - protein, 367 aa, unidentified
MIINSIAKDFENIIAIDTAKTSFQVYVVNQKTNRRRNDKVTRKKFVEHITKLGTGLIFMESCSASQYWAREFEKLGFTVKLIAAQHVKAFLYNKKIKNDAKDAEAIFKCGMQPDTKFVRVKSVEEQTVALLHTLRKGEIKHRVQLCNRIRGVLAEFGIITDKGRNNFDKNMSELRAQCENEISNLHLKSAIDALFDEYKESLEREDKYTQQILQNRQDELNKLAMSCPCVGEITASAIVAEVGNAKQFKNGREMSAWLGLVPSQHSTGGRSTLGGITKTGNKYIRGLLDQCANSIYRNAKTHLDKGTDNQLDRFALRLKSKGKPAGKIAMALANKIVRILWAVLSSGNEFKSNINFQDKDRDVLCLE

SEQ ID NO: 209174 - protein, 367 aa, unidentified
MKKISTAAVKQSKNFSQQKLTIGLDLGDRNSWYCVVDEVGQIQLEQRVRTTAKALQEVFGTMPRSRIALEIGTHSPWISRLLSELGHEVIVANARKVRLIGESRKKDDRLDAQTLARLARIDSELLFPVKHRSAQAQADLTVIRARAGLVRARTGLVNSARGLAKSYGERLRGCNVRNMNPEKAESLSPELQSALEPLLNAIDSLSERIVEYNERIENLAQQDYPQVALLKQVKGVGTLIALTFLLTLEDPHRFGKSRDVGCYLGLQPGRRNSGRSEPQLHISKAGDPYLRTLLVQGAQHILGPFGIDCDLRRWGLRLAERGGKSGKKRAIVATARKLAVLLHHLWVSGEAYEPLHNSSRTAVAAAA

SEQ ID NO: 209175 - protein, 356 aa, unidentified
MTSIPHPVAPQLTIGVDTHLELHVAHANDQLGRPLATLQIPTTPAGYAQLLAWAHGLGVPVAWGVEGTGSYGAALARFLAANDQVVVEVNRPDRATRRLKGKSDPLDAQAAARAVQAGQARVVPKAGWGQVEMIRCLRVARATAMRARTQTINTLKGLLVTAPAELRQQLRGRTATRLVQAAAALQPGPITSPLAAAAFALGSLARRHQALSAEIDGLTSELERLVATAAPELVARFGVGHDSAGALLVAAGDNSDRLRSEAAFSMLCGASPIPASSGKTIRHRLNRGCDRQANAALHRIVIVRLRYHQPTRDYMTTRLAQGKTKKEIIRCLKRYVAREVFAVLHQLHHDNPIPAA

SEQ ID NO: 209176 - protein, 338 aa, unidentified
MLVIGVDISKDDFHVLAKEKMQNGDIKIKGSRSFTNDGKGFTEFALWVSKRKKEGHELSYVMEATGTYYEDLAYYLYETGNKVSVVLANKIKHFSKSLNVKTKTDKVDASIIAEMGIQRELMAWKPMSANYKQLRDLCREMLSLKKEKSRAMCQLHAMNYGHEKTECVLKLKKQQIEFYETSICQIEIEIERIINTDTELKPRVENIMKVKGLGLMTIVVVLCETNGFETFNNIRQVVSYAGLDVVMKESGTFKGKTRISKKGNARIRQCLFMPALSATMCNEKIKDLYTRINEKNPDIKRKGIVAGMRKLLILIFVLWTKNEEYDPKYQWKSTDIGK

SEQ ID NO: 209177 - protein, 343 aa, unidentified
MQVSTIGLDLAKNVFQAHGVSAEGKVVLKKQLRRGQVLSTFAKLPPCLVGMEACAGAHYWARELRKLGHDVRLMPARDVKAYVKRDKTDAADAAAICEAVSRPSMRFVALKTPEQQGRLMQHRVRDLLLRQRTQTINALRAHMAELGLVAATGRQGLGLLLAILADAKDERLPQDARASLKLLASQITALQAQIDTLDKRLHAQHRQCPASRRLETIPGIGVIGATALAATITDPKAFKSGRDLAAFIGLVPRNNSSGGKQRLGPISKQGDRYLRRILVVGAHSILKQGRTRPDKHPWLARLMARKPGKLAAVALANKTARIAWAVLARGETYRAPTAPAAAG

SEQ ID NO: 209178 - protein, 429 aa, unidentified
MNYTQNEKIEQVTDSTMVVGVDIGSQIHYARAFDNRGRELTKRIFSFHNDLEGFNSFNLWAETLKTENEKTAVLIGCEPTGHYWFAFAKYVNDHQKRLVMVNPFSVKKIKELDDNSPKKTDSKDPKTIAKLVVDGRYSIPYMPEGIYAEIRDLVYSRDRIMKQHNISANRIQRWLAIYFPEYLGLYTRFDAISGLAVLEKAPLPKDVIALGVNGIRKIWHDKKMRGRGVTEERAKTLVEAAHNSVGLDGGIGTKSELYMLLEEHRLWTSQLEAVNKVLEEMILKVPHVEKLLAIKGVGSITIAGFIAEVGDIRRFDSPKQIQKYAGLELVENSSGKHKGRTRISKRGRRKLRKILYQVMVPLLARNKEFRGIYDYYVTRVKNPLKRRQAMVAVSCKLIRVFYAVLTKGVEYDRFKMMSDIHRKSDIIAA

SEQ ID NO: 209179 - protein, 341 aa, unidentified
MQITTIGLDIAKNVFQIHGIDAAEKVIVRKQLRRGQVTAFFEALAPCLVGMEACATSHHWARELTKLGHEVRLMPAKDVKAYVKRNKNDAADAEAICEAVRRPTMRFVRIKSAEQQSQLMLHRARDLLMRQRTQVINALRAHSAEFGITAAQGREGIKELLAMVAHEEGSRLPSDAHASLTVLATQLQAVQTMIGSLEKRIVAQHRSNEASKRLETIPGIGVIGATTIAAVVPDPRVFRSGRDFAAWIGIVPRQDSTGGKQKLGPISKQGDQYLRRILIVGAHAVLRRARQQPETYPWLTQLLARRPFKVVAVALANKMARIAWALLAKGGTYRAPQLVAA

SEQ ID NO: 209180 - protein, 368 aa, unidentified
MRNNSKKASLAVTGKTTVGLDVGDRHSYYYTLDAAGENVESGRVKTSQEGLEKRFGGQEAARVVIEAGTHSPWVSRLLAGLGHEVIVANPRKVRLISDNEGKDDPVDAELLARLGRVDVKLLSPIQHRGAEAQADLAVIRARDALVGARTQLVNHVRGAVKSLGSRLEKSSTRSFGDKMGEQVPEALRAALEPVLEVIAELTSQIGGYDQQIRHSCQEKYPETALLTAVPGVGALTALGYVLTLEDPHRFASSRAVGSFLGLRPGKDKSGQQDPELRITKAGSPLLRRLLVGSAQYILGPFGPDTDLRRWGLKLAGRGRKNAKKRAVVAVARKLGVLLHRLWVNGEVYQPLYQAERAVAATAVAGARS

SEQ ID NO: 209181 - protein, 315 aa, unidentified
MAMLVCASKPIVGVDVAKDELVIYHAERDLQEAIPNTKAAIKKWLKALPAKVAIAIEATNVYHLLFADMAHESGCVVYMVGGYELSHYRKGVNVRAKTDALDARLLARYLKNEAEELHPWTPPSPLYRQLLSLFRRRAALVQARTSLTQSWANEPLLKTSFAAQVKSMQRLEALVEKMIRSLLEKAGLLGALKRCMQVEGVGFLTAARLLTTFERGTFRGSDAFIAFLGMDLRVSKSGQKDGRRSLTKRGDSEARRLLYNAAMSASRTAAWKPFYEQQRARGFSTTQALVILGRKLARVVFALLKSQSEYQSKAV

SEQ ID NO: 209182 - protein, 364 aa, unidentified
MDELTHIGLDVHKDTIAVAVLRSGTTTCDERVIPNTPEAVRKLFARYPDRSVLRTCYEAGPTGYDTQRLISSLGIACDVIAPSLIPRRSGVRVKTDRSDARNLARLHRAGELTAVRVPMPAEEALRDLVRAREDLKNDRRIARQRIRSFLLRYGKRYPSPGARWSFRFEVWMRALRFDEPASQAAFDHLVSAYSVRDAQLAAIDKQIEEATLCDPLADAVARLRAFRGIDTLTAVTLLTETCDFQRFATAGSFMAFTGLVPSEHSSGASRHQGSITKTGNAHVRRVLVEAAWAYRHRPAVRGAHAKRLEGQSPEVAAYSWAAQCRLNSTYRKLAARKGPNKAVVAVARELSGFVWGAMTERMAV

SEQ ID NO: 209183 - protein, 344 aa, unidentified
MKITTIGLDLAKSVFQVHGVDATGQAAVRKSLRRSQMLPFFAKLPSCLVGMEACGTSHYWARELIKLGHEVRLMPPAYVKPYVKRGKTDAADAEAVCEAVTRPTMRFVPVKSPEQQAALSMHRTRDLLVKQRTQVINMIRGLLAEFGVDIPKGIERALLMARQIVDGKAPEVPFEAAKIVVTLSQQALDTHVRLREIDRDLAVWLRGNDVARRLMTIPGIGPVGATALAASVTDPHQFRSGRQFAAWLGLTPLQKSSGGKERLGRITKMGDKYLRKLLIVGMTSLVRRAKQNPGKIDPRLADLLARKPTRVATVAMANKTARIIWAIMARGETYRTGHRPALAA

SEQ ID NO: 209184 - protein, 403 aa, unidentified
MNNVVGIDVSKGKSMVSVLRPFGEVVAKPFSVGHTGSELKELADYLKSLDGETRVVMEHTGRYYEPVARFLHDEGVFVSAVNPKLIKDYGNNTLRKVKTDKADSRKIARYGIDNWAELRQHTPMDTIRMQLKTLNRQQSLYSKTKTMMKNNLIALLDQTYPGVNALFDSPVREDGSQKWVDFATTFWHVDCVRNMSLTAFAERYRKWCKRHGYNFSQSKAVEVHAGAQDLIAMLPRDALTKTMVRQAIDALNAVSASLERLKAEMRTLAAQLPEYPVVMAMHGAGDSLGPQLMAELGDVTRFTHRNAITAFAGVDPGADQSGTHEAKSTRVSKSGPPELRRALFLVMDCLLKTQPQDDPVYRFMDKKRAEGKPYLVYMTAGANKFLRIYYGRVKEYLASLEGN

SEQ ID NO: 209185 - protein, 319 aa, unidentified
MQTPRVVSTFIGVDVSKDTLVTCVHDSGARRTVPNQRSAILVWLKSLPSGSAIGMEATGTYHELLADLAYSHGVLVYVLNPKHVHRYAKGVGLRTKTDRVDAAVIARYLVRERSDLHPYHPASPELRQLQRLLLRRAKLSRSRAGLQQSLHGLNGLTRPLNQLLKHFDALIAQIDARIKLLIDACPQRQAANLRLRTIKGVGPVVAPALLYLLQRFAFLNADSFVAYTGYDLCVDDSGKRVGRRRLSKEGPSELRRLLYNAAMAAVSSPAWKPIYQHYLAKGLSRTAALVVIARKIARTAWSIYTHNTTFDPTRITRQA

SEQ ID NO: 209186 - protein, 322 aa, unidentified
MAMLSFAGIDVSKDRLDVMVLPEEQRSSVSNDPTSWAELVEQLRALSIAAIGIEASGGYERGVMRALLSAGMPVRHVNPFKLRQFAKASGVLAKNDPLYARMIASFVAIMPTRPAQSRPPAVERLLEVLAVRRQLSAEKVAAENASRLLENAMLQRLSRRRIARLAADIEMLDERLVEIVAADAALAHRYRMLTSMPGVGPVLACTLIALLPELGRMSRKQVAALVGVAPYAFESGKLKGKRCVWGGRAPVRHVLYMAAMSASNWNPVLKRFHDRLKAAGKLPKVIIVAVMRKMITMLNAMVRDGVVWADRYSGRHSVPTTR

SEQ ID NO: 209187 - protein, 347 aa, unidentified
MSITMIGLDTAKSVFQIHAVDETGRAVLKRKLQRSELVAFFEKQEACTVALESCGSAHHWARVLAGLGHEVRLIAPEAVKRFVKKGRKNDAADAAALCTAATRPDVKFVAPKTLDQPGILALHTARSLLVKQQTMLGNAMRGLASEFGVIVPKGIGKRKELMELVDADESFPAKARQAVSGLFDHCDDLAESILTLEAEIIAHARRDDTARRLATIPGIGSITASLIAATVGDIGLFKSARHFAAWLGLVPRQHSTGGETRLGRITKTGNREIRTLLVLGATSMVYRAPQWNSTTGAWIRGVMERRPARLATVALANKTARIAWALMTRKEVYRPKGHVATAAAAAV

SEQ ID NO: 209188 - protein, 338 aa, unidentified
METYAGIDLHSSNNYIGIMDQDHKRLFGKRLPNRLDKILTVLEPFKADLKGVVVESTYNWYWLVDGLQEHGHRVHLANPSAIKQYEGIKHTDDKWDSFWLAHMKHLNILPEGYIYPKEQRAVRDLLRRRLFFVRHRTANILSLQSTITRNLGIRMSSNQIKKLDMDDACDLFDSSNLVFMAQNNISTIKHLAKIISGIEKQVKPQVQLRKEFEMLTTIPGIGLILGLTIMLEVGDVGRFFKVGNYASYCRCVDSKRLSNGKKKGENNKKNGNKYLAWAYVEAAHFAKRYIPKAQRFYQHKMAKANGAVATKALANKLARASFFIMRDQVPFDEDMLFR

SEQ ID NO: 209189 - protein, 434 aa, unidentified
MLVQEPDGTKVLAATFAHDERGLRQLCRTLVRLRVELVAIERPDGLLIERLLDAGIRVMAIHPNQVAATRPRFRTSGGKSDRFDAFVLCELARTDSQRFRALTPDSDQTKALRALTRAREDLVETRVALANQLRAELERYWPGAAVIFKDIDSPIALAFIKRYPSPNDAHGLGAQRLGWFLARHAYSGRKTPGQLIKKLRAAPEGRAGGHEIEARRQTALAFITALEPLVTKITELTSEIGHCLRQHPDGPIFLSLFKGPKSVITAAELLAEIGDCRERYPTPDALAADAGMSAVAIESGKRKVASFRWGCDKRLRAAFCVLADTTRRWHPWAGDHYARAITRGHDHPRAIRTLGRAWCRVIWRCWQDRTPYDPARHRGLQQHVLVTIPGASGSLPDTTATQRMLGAAVTGTAARRAEREALDGKPTSAISPGG

SEQ ID NO: 209190 - protein, 355 aa, unidentified
MSQEKYIGMDVHQATISVAVMDAGGKLIMECLLETKAATMVEFIRGLHGTLSLTFEEGTSAAWLHDLLKPHVSRLVVCDPRKNALLKDGNKSDRIDARKLAELLRGGQLHPVYHGEHGVRTLKELGRSYLTITQDVTRVMNRIKALYRSWAIPCAGTTVYAPRHRAEWLGKIAEPGVRVRAERLYQQLDLLQPVRLEARRELLAESHKHSSVKLLRQIPSIGPIRSALLVALLQTPHRFRTKRQLWAYSGFAVETHDSGEYRSVRGKLQRNRERMTVRGLNNNHNRDLKNLFKSAAISASTRPGPLRDFYVARVEKGMRPTMARLTLARKIAAISLTIWKKGVEFDAQQLQRQAA

SEQ ID NO: 209191 - protein, 417 aa, unidentified
MEPFAAFVAIDWSDTKHAVCLLDVATGKTESGILTHPPEALEAWATALRTRFAGQPIAVCLEQSRGPLIYALLKYDFLVLYPINPATLAQYREAFSPSRAKDDPQDADYLLELLFHHRDRLKPWRPDNAKTRTLQYLAEHRRRLVNDRTRISNRMTALLKAYFPQVLQWFDDIRTTLVCEFLLHWPTLEAVQKVRPATLEKFFREHNSVRKETLAHRIAAIKAAVPLTTDPAVLHSSVLMIKALATQMKATIEAIRAFEHEIEQLCRTHEDSPLFASLPGAGPVYAARLTAALGTDRNRGITVEELLCFSGVAPVLERRGKSSWIRWRYFCPKFLRQSFHEYAGESINHAFWAKAYYMSQRARGKSHQAAVRALACKWIRIIYKCWQTRTPYSEVRYLESLRKKGAPLLAYAANNPL

SEQ ID NO: 209192 - protein, 400 aa, unidentified
MLSIGIDVSKGKSTVCGMKPGGEIVYTPFEVQHTREGMSELVSLLRGSGEEVRAVLESTGSYHCPVVAALLENGIFVSVVNSLRMKRFCSQSIRKVKTDRIDAMQIALYGLAYWQELQPTKLPEDTYRELQLLARQYYQMTSLLIKAKVDFNAICDQVLPGMQELMSDHAGRHKLSDFVLRYRHTTRILEMGETRFRKDYCKWAEKKGYRNCERMAALIFATAQNGIPVLPNAPSTQIVITEAIRVLHTVEASRDAILTQMQALAKTLPEYSLVREMPCIGDTLAPRLIAEIGDVRRFHSKRALIAYAGIDAPPYQSGKFCANNRHISKRGNRYLRKTGYEVMQSYVMHKPANDPIFTFIEKKRGEGKSGKLAMVAGLNKFLRVYYGKVTELYRSLPAIE

SEQ ID NO: 209193 - protein, 377 aa, unidentified
MGTTRQALINDTSVVLMLYMALELSASKWKVALADGQRAASQHTLEAGDVGGLLKLIEKAKKRCGLQGRLKVKSCYEAGRDGFWLHRWLLEQGIENVVVDSSSIEVNRRARRAKSDGLDAVKLYEMLVRHVGGDKRMWRVVRVPSVQQEDERRVHRELERLKRERTAHVNRMRSLAVLHNVRLQRVGGRGWSERLEQLKGQLPGALWAEIERESVREKLVCEQIVALEQERKEQLQAMLEQGGPLVALLKLRAIGLQTAWVLVRELFGWRHFNNRRELAACVGLNPSPYDSGASQREQGISKAGNRRVRALVVEIGWYWLRYQPHSALSEWFNRRFGAGGKRMRRIGVVALARRLLIALWRYVEHGIVPAGAQLKKA

SEQ ID NO: 209194 - protein, 369 aa, unidentified
MNATTAPATLTTVVGVDLAKSVFQLAVANGSWKVMASHRLTRVQFERWFVNRQVDLVVMEACGSAHHWARWLNALGITVKLLPAAYIRAYIKRNKTDAADACALLEAARCADIVPVRVKSIEQQALQGLHRTRSLWMGTRTSRINALRGFCREFGIAIAQGSRLGVEQISRVLADPQSTVPTLIRRTMLLLVEEIRLLETRIGQLERELTLLARLSAACTTLLSIPGVGLLTATAMVAATSGTVRHFRDARHFASWFGLTPKEYSSGSSRHLGRISKRGDRYLRMLLTHGARAVLRAATVALRAGKTVDPLRQWALAVQGRSNHNKATCALANKLARICYATLRDAQPYGQPAPRRNQKIERSAFALAT

SEQ ID NO: 209195 - protein, 350 aa, unidentified
MKKRNTVGLDMGDKSHTICVLDAAGKVVERDEVANTAQAIRKRFAKMKSCLVALEAGTHSGWVSRILEELGHEVLVGNPRKLRAIWDNDQKNDVRDAEMLARIARFDPQLLHPIRHRGPEAQCDLAAIKARDELVRVRTALIAHVRGLVKTAGERLPKCSPECFHLRAAKAMPSELAPALEPVIASIAELTVRIRHCDRLVERLSEDKYPETEALRAIPGVGPVTALAYVLTLEDRARFEKSRDVGPFLGLTPRRDQSGQTDKQLRITKAGNAYLRRLLVQCANYILGRHGPDCDLRRFGLKLAERGGKNAKRRAVVAVARKLGVLLHCLWKTGAAYEPNHRPPRAKKAA

SEQ ID NO: 209196 - protein, 329 aa, unidentified
MQITTIGFDIAKNVFQIHGIDAAEKVVIRKQLRRGQVLKFFAALPPCLVGTEACATAHYWARELTKLGHEVRLMPAKDVKAYVKRNKNDAADAEATCEAVRRPTMRFVPVKSAEQQAQLMQHRARDLLIRQRTQVINALRAHLAELGITAAQGRDGIRDLLAIIADEADARLPIDARASLMVLAAQLQALQTLIGSIEKRIVARHRSSEASKRLQTIPGVGILGASAIATIVTEPKAFRSGRDFAAWVGLVPRQDSTGGKRKLGPISKQGDRYLRRILVVGAHAVLKRARLHPQKYPWLTQLLAPAKISVAHTAAGTASVQGRRHRAGQ

SEQ ID NO: 209197 - protein, 371 aa, unidentified
MSELPAETRPARLRVEASPRPPGARKPETELGAVSTTAVPHPDSRSGPSPHLQGRVMDEQRTVFVGIDVSKDRLDVHLRPSGEAFCVPREGKGMDDLVIRLQGLSVALVVLEATGGFEATVAAALAGVGLPLCVVNPRQIRDFARAMGRLAKTDTLDAEVIALFAERVRPQARPLREPERVHLAELVGRRRQIIEMIGMETNRGRQAIDKPLARRLARHVAYLQKELDAIDHDIGDAIKHSPAWREAEALLKSVPCIGDVTARTLLAELPELGTVSRHQVAALVGVAPINRDSGLMRGRRAIAGGRTSVRAVLYMAALTAIRRRSPFRAFYDQLTAHGRPKKVALVAVMRKLLTILNAILRDHTPWRPLNA

SEQ ID NO: 209198 - protein, 374 aa, unidentified
MQLLAIDLGKQKSLACWFNTDDQTHRLQTVPTSPQAFHDLLVQEPVDRVVIEVCDIAGWVADLCRALSIPILVANAAGEGWRWRNVKNKTDRTDVLKLSRLAAGNELTAVHVPIRPIRFWRGLILYRHRLIERRTRIKNAIHALLVAEGRAMPAGRETWSAASLAKLNALAKPIEQCQTLEDLWAGHLHLELQQLDHLQQQIDLLDRKLDALGSADHRVIRLQTIPGVGPRLSELVVAVLDDPQRFASVRQVSAYAGLVPRRYQSGQMDRQGRISRAGCGKLRKLLVEIAWGMLQHNARGREVFNRISKQQRTRRKQAAVALGRRVLGWCWAMLRDGSDWREPPREAASPHEAKPREARQREARPPRRRTPALA

SEQ ID NO: 209199 - protein, 325 aa, unidentified
MNVLGIDVAKATLVVVLLVGERQQRAEFANTPAGHAKLRSWLAKRGASPVHACLEATGTYADALAQALYDAGHTVSVVNPARIAAYAKVQAARHKTDQADAALIARYCQREQPVAWQPPAPELRELRALVRHLDTLQQQRQAEQNRLEAGGHPAAVTQAIQAHLTFLTEQSRTVEQQIEAHFDQHPDLKRQRELLDSIKGIAVRTATRLLAELGDWKQFTNARAVVAYVGLNPRHYRSGSSVQRRTRLSKSGNAAIRAALYFPAIVAKQHNPRIQALCARLSARGLCPKAVIGAAMRKLLQIAYGVLKSGQPFDPNYAQAANGQA

SEQ ID NO: 209200 - protein, 363 aa, unidentified
MRFYKNQHQFYIGIDLHARTMYICVINNIGETVFHKNMECSRDNLELVTNTFGKDIVVGVECIFTWYWVADFCAENGIDFALGHAYYMKSIHGGKTKSDKIDSEKIANLLRGGMFPIAYAYPKEKRAVRDLLRRRLFFVRQRAELSVHLQNTNHQYNINEPLTSSRMRSEVYRNTIPQKFSDPATLKMVNADLAMFQSYHDIITKLEFQIEDSMEVQDPVSYSIINSVPGLGFILSLTILYEIDDIHRFSDVGKFISYCRLVKCSHESAGKKEKGGHNKIGNVHLKWAFSEGAVLFLRNNERGQRWHDKLVQRYGKAKAMSIIAQKLGRTVYYMLKRREAFNPDKFYGDKKIENKDSGGEHLA

SEQ ID NO: 209201 - protein, 441 aa, unidentified
MLCNGNGHILRKPFSVKNSPEGIEYLIEQVTRSCNHRQIDLKHVFFGGEDVGSYAENFVNTLRSGGWIVAGVNAHDAKEQRTNMQASTDRLDLMGIASMLLNRRSNCSPAQSGIYRNLRTVVRHRKKLVAMSTEVRNRMHTVVDRLFPGFLDEKKSGIYSFSKSSLYLMEDRFSPRQIRRRKRQKLIEILKRCGTAKPESTAAKLQEYAARVLNTPNEYITTLQLSLTQHVKHLRCLQDSIDQLEHEIAVWLAQTQGAFLTTFRGIGIVLAAGVSAEIGNPHDQEPLNNLVSYSGIIPRVKQTGGSEGKTYTGKVAKRCNHILKDYVVQSGNHMGLHGPEELMADYKRREAAGQHADFGIGRRYLRTAMCLMRTSQIYMPEQLRNTKVQPEERAGYYLTIWPYLRKKWKKAGALDAAFEKDRPLGQWRCMVQELYEIKLKL

SEQ ID NO: 209202 - protein, 356 aa, unidentified
MSEKLNSAIAVIGIDIGKNSFHVVGQDSRGAIVLRQKWSRGQVEARLANLSQCLIGMEACVGAHHLSRKLQALGHDARLMPAKYVRPYSKGEKNDYRDAEAIAEAVQRPTMKFVATKTADQLDLQALHRVRERLVGQRTGIINQIRAFLLERGIAVRQGLHFLRAELPAILAKRTDVLSPRMLRIIEDLASDWRRLDDRIEGVTGEIGTLARQDKACERLMTVPGIGPIISSAIVAAIGAGDAFSKGRDFGAWLGLVPKQMSTGDRTILGSISKRGNRYLRCLFVQAAWVVLVKIGPEGWERYGLNSWIEAAKKRLHRNVLAIALANKLARIAWAVLNKGRAFECVKTNATASQSA

SEQ ID NO: 209203 - protein, 451 aa, unidentified
MAETKKHRRKRDISPTHPNAAAIDIGATLHVAAVGPDQDPEPVRSFGTFTGDLHRLADWFQQCGVRTVAMESTGVYWIPAFEILDQRGFEVILVNARDAKHVPGRKTDISDAQWLQRLHEYGLLRASFRLKGEVAVLRGYLRQRERLLDYAGSHIQHMQKALTQMNLQLHHVVTDITGTTGMAIIRAIVAGERDPAVLAAHRDRRCHASTETIRQALVGNDREEHVFALTQALELYDVYQAKVALCDVRIEAVLKRLRKASSCPAGKPPPVRTPKKQANAMAFDVHAALHGLLGCDVTQIHGLGPYLALKLVGECGTNLSAWPNAKHFTSWLCLSPSNKISGGKVLSSRTRRSGSRAAALLRLAAVAVGRTETALGAFYRRLSARVGKAKAVTATARKIAVLFYNTLRHGMEYSDPGASHYEERYRRRVLTNLERRAKSLGYVLQEAPVPA

SEQ ID NO: 209204 - protein, 316 aa, unidentified
MAITLEEYVGIDVAKDKLDVAVLGEKAASEAMNTKRGISALVKKMCQLNPKLIVVEATGGYEEELVLSLFEAGMPVALVSPQRVRQYAKARGLLAKTDKLDAQNLAEYGKNIQPRLFVAKSEEGRRLSAIIGRRRQLGDMQKAEKNRFRTAYVEMQHSIQRVIDCLEVEIKSLDAEILNFMKAHENFGEQEKLLRSAKSIGPVTAATLLADLPELGKLDRKQIAALVGVAPMNHDSGRKRGYRKTKGGRPEVRSVLYMSALSAIRYNPVIKAQYAQLVKRGKEKKVAITACMRKMLTILNAMMRDQKTFHTTVLMS

SEQ ID NO: 209205 - protein, 344 aa, unidentified
MNSITIGMDIGDKNNVIYVLNTDGKLMDNVIVENTDKSLRSFFKRYQGAVVAIEAGTHSPWISRLLTLMECKVLVGNPRKLRAIWDNDQKSDDRDAEMLARIARFDPDLLYPINHREEQAQIDMELLQARDLLVRNRASMINFVRSSVKSVGERLPSCSAASFHRKAEQHLPVKLQEFLKPVLEVIGQLTMQIKEFDQKIEQVSSQRYPETELLRSIQGVGPLTALAYVVTLGNPDRFSKSRQVGSFAGLTPRRDQSGETDKQLRITKAGNPYLRRLLVGSAQYILGHFGKDSNLRRFGLRLAERGGKNAKRRAVVAVARKLSVLMHRLWQRGEIYVPLYSPAR

SEQ ID NO: 209206 - protein, 352 aa, unidentified
MEIIGLDLHKRETQLCRQQPDGRIVDERIPTSRVRFTQTFGGVAPARILLEASTESEWVATHLEQLGHTVIVADPNFAPMYATRSRRIKTDKRDARALMQACALGAYRPAYRLSAPRVHARAALAVRDTLVRTRARMITLIKTLVRRDGLRVPTGTSRTVVQRVATLELATTAPALGAELAPLLAMLPVLNGQIAMLDATLAAVAADDPVVARLATAPGVGVVTAVAVVATLDDITRFHSAHAVEAYLGLVPSEDSSADRRHLGHITKAGNARPRWLLVEAGWRILRSKQPETAALRAWGRAIAARRGARIAAVAVARRLAGVLYAMWRDAVPYDAAKLQRRPRRSGAPQTT

SEQ ID NO: 209207 - protein, 371 aa, unidentified
MNNNNTLYVGLDVHKESITVAYAINSEPVELMGKIGTSPTDIQNLCKRLRSKSSQVSIVYEAGPCGYGLYRRLVKSGFDCMVCAPSLIPKKPGERVKTDRRDAIRLVRSLRAGDLSAVYVPGIEDEAFRDLARAWASARDDLRHARQRLKSFLLVHGVHYVGRADWGPAHRRWLSKYSFESPWRQLAFDEHRRTIEDRQAQCERLESALKEAVTEWRLYPVVEALQAMRGIQFITAVGLISELGDLTRFEHPRQLMSWFGITPSEYSSGGSRHQGSITKAGNSYARKLLVEAAWSYRHPARISPAIQKRQENLPRPVIDRAWDAQLRLCKRYRKLQAKGKNVNITIVAVARELAGFIWDMGRIAMSEVYWQ

SEQ ID NO: 209208 - protein, 377 aa, unidentified
MKKELYLGLDVHKDCIITAVAEEGRKGEVRESGAISNDLHAVEKWIARLRQAHDKETLLRACYEAGPCGFGLARRLRQLGVECHVVAPSLTPTRSGERVKTDKRDARKLARLLRAGELTPVYIPEPTDEAIRDLCRARSDAVDDRRRSRHRLKGFLLRHGYRYQGKSSWSAAHERYLRELVLPHPAMKVILEEYLQAIAAAGERIERSEEAMRVVLEQWRLAPAVRALMAMKGFQTVAAMILVSELGEVHRFAHPRQVMAYLGLVPTENSSSERRRQGHITKCGNAHARWLLVECAQHYALPPKVSKELSRRQEGQSHEVRAISWRAQNRLHNRYRRLLARRLQRNKAIVAIARELCGFIWELLRTQLCYQAQSTPV

SEQ ID NO: 209209 - protein, 373 aa, unidentified
MPKYSTAFGMDVHLRSTTVCALDADTGEAVTRRFPGNPWGEIAGWMDGFPGPSLAAYESGYLGFAPQRELAGLGVECVVAAVSKIPRSAADSASKNDRNDAARMAKAILAHDISPVWVPSPEIEGIRDLAGAYDGATARLATAKQRLLAFLGKRGYAYGGTTPAGNPRKYWTYDFLRWLDKVRPEDDGGVRTLAALRNEVEAAAEARSDLLSEYRAAVDASPIAAEVAALQSIKGCAFALAAAFSAEVGDFTRFRSGRQVTAYFGLAPSQRSSGDSVRLGGISGAGNALVRKLAVEGSWCYAAARHQPKLMPRDTGVPLEIRMHGRKGSERLLRRREEMLARGMPAAKANAATAAELVRWLWALGMMCREGAE

SEQ ID NO: 209210 - protein, 411 aa, unidentified
MIKENYIYVGIDLHKETHTAVMIDCYNQKLGEITFPNRPADFPKLVAKVKKCNTDGKTIVFGLENAYGYGRALAVWLIDKGYLVKDVNTAISHRQAKHRGAMYRKSDSDDAEAIALATLNMLDKLPDAYPNDAYWSLGQLVHRRDNIMKQRTRLVNQLHEQLCIAYPSYKQFFNDISRPTALYFWEHYPSRKYLKGKSVEDLRAELVPVSHNKCSTKTCEKILDAVASDKVKNNAYQDARDMVTLSIVSDLQHYDKQLAEVDKMLEQMYKMLGCTLTTIPGVNVITAVKILAEIGDIKRFSNANKLAQFAGIAPLHLSSSGKGKDVATKQGNRRLQATIYFLAIQMVQVSSKGTPRNPVVRAYYEKRKAEGKTSQQALICISRRLISVIYGMLKNGTEYRMPVVENAGEKL

SEQ ID NO: 209211 - protein, 418 aa, unidentified
MIDDVQWFVGIDWATRSHRACLLDVEGRHVSEHDFAHDGAGLTELRDWLLEKTKAAPGRIAVAIETPHGPVVETLLDHAFQVFAINPKQLDRFRDRFTVAGAKDDSRDARVLGSGLRTDRQAFRRLVVDDPLVIELREWSRMAEELQQERTRLANRVRQQLWRYYPQAAELTDDVADDWFLTLWQQVPTPATAATASEEAITRILKDHRIRRLDAATVLQTLRKTPLFVAPGTTEAACAHIRAVAARLHLVNQQIKEAHRALDGLCAKLEAATESPSGQNREQHDVTILRSWPGIGRTVLATLLTEATEPLRARDYHALRALAGTAPVTRRSGKQCFVIRRLACNKRLQNAVYHWSRVAIQHDTAARRRYDALRQRGHGHARALRTVGDRLLYALCTTLNRQTPYNPNCQTAQVPAGL

SEQ ID NO: 209212 - protein, 352 aa, unidentified
MESGVSVTVGVDTHADAHVGVALDEVGRRLGEVAVPNDEAGYRRLLRWAHGFGELAGFGVEGTGSYGAGLSRFLRASGVRVVEVNRTSRQHRWKHGKYDAADAEAAARAVLSGEATGEPKAADGHVEMLRALKIARRSAVKAKTQAANQLHALVSTAPESLKGGLRGLMVKRLAEKTSRFRCDAELHDPTAATKFALRSVARRYAGLAKEIADLDEQIGRLVKRASPSLTELDGVGSDTAATLLVVAGDNPDRLKSEGAFAHLCGTAPIPASSGKVVRHRLNPNGNREANRALYVVGLNRMRRDPRTQAYVARRTEEGKSKREIMRCLKRYIAREIYRVLIATQPGLVPASA

SEQ ID NO: 209213 - protein, 364 aa, unidentified
MREQDKRGRITIGLDLGDRRHRFCALDKEGHVLEEGTLGNTRECLNELSCRYGGALIVMEAGCHSPWISRHLEQAGCEVIVSNPRKTRAIYQHERKSDRRDALMLARIARMEPALLYPVRHGSQEAQQDLLRIKLRDSLVRARVGLINSLRFTLKSLGYTMANPSTECFHKVVQRALPESVVQMIAPSVQAIEELSLRIKLLDREIRTLAHAKYPETSWLEQIPGVGPITALYFVLKIGDPARFERVRDVGAFIGLCPRRDQSGENDPQLRISKRGDAYLRRLLVSSAQYILGPFAPPSALRQYGLALAAGATARAKKRAVVAVARKLAVLLLTVWKNKSPYQAFPQQREKMRTHDLERLRCIA

SEQ ID NO: 209214 - protein, 353 aa, unidentified
MAHPGTPRITVGVDTHLDVHVAHANDQLGRRVDTVQVPTTPTGYHDLLAWARGLGEPVAWGVEGTGSYGAALARFLVAGGQVVLEVNRPDRSARRRRGKSDPVDAQAAARAVQAGEVTVVPKAGDGHVEMIRSLRVARQTAMRARTQTINALKALLVTAPTGLREQLRGLSASRLVRAAAELEPGKITSPLAAAMLALRTLAHRHQALSAEISSLTTELDRLTAKAAPKLVALFGVGQDSAGALLVAAGDNPDRLRSDAAFSMLCGVSPIEASSGKTTRHRLNRGGDRQANAALYRIVMVRLCYDPATKDYMARRLKEGKSKKEVIRCLKRYVAREVFAVLHQMGHDTPTAAA

SEQ ID NO: 209215 - protein, 327 aa, unidentified
MNDRQVVYVGIDVSKDSLSVDAGALFKGDVPNTPAGIRSLVRKIRKRAGDGCVPHFCFESTGPYSESLFIECCGAGAAASVLNPVKVRRYAEAMSESAKTDPIDARVIRLFAEAKKPEPTPPPSASEIALRKLVLARDALTKCVVQLSGTMEGASGGDAGSVLKSTVVQLRGKIKKLDRLIAEALKGDARLAGLADALTGIAGVGVLSAAKIVALVPELGTLGRRRSAAIAGLAPFTRDSGRYKGKTFISGGRAEVRRALFMPATVAIKHNPVLKAAYQNLRKSGKAYKVAITAIMRRLFAHMDAVAAKWLRETAAAASSAALTALP

SEQ ID NO: 209216 - protein, 339 aa, unidentified
MKYTPVGVDIAKHLIQVHFINEHTGEVVDKQLRSKDFLTFFSNREPCLIGMEACGGSQHWARELTKQGHKVRLMQARFVKAFVMGNKNDVMDSRAIWMAVQQSGQEIAVKTEEQQSVLVLHRSRRQLVKFRTAQINSLHGTLLEFGETIHKSRAALERELPAALGRMKARLPPYLIAVLEEQYNRLSELDSLIGGLEKQLNSLAQQNETCKRLMEIPGVGPLIATAAVATMGEASAFKSGRAFAAYIGLVPKQTGSGGKVRLLGISKRGDTYLRTLFIHGARAASLCAKEPGAWITELRKRRPTSVAIVAMANKLARTVWAIAAHECRYDKNYVSIRPY

SEQ ID NO: 209217 - protein, 410 aa, unidentified
MRIIALDVHRSFAQTAILESGKLRDAGKIDLEYSRLLRFARKLKPDDEIVIEATGNTSAIVRVLLPFVGRVVIANPILVRAIAWAKVKTDKIDAAVLAKLHASGFLPEVWMPDEETEARRRVVAERTQLVSQMTRLKNRIQSVLHANLIPPYKGVLFSQRGRAWLEAQPLAEDQRRVIVRHAGELDRLGAELAEVDKSLAQKALDEPQVKRLMTITGVNATVAMSVLAAIGDIHRFSSPEKLVSYFGLNPRVRQSGDKPAYHGRITKQGRAHARSMLVEAAWVISGAPGPLRAFFIRIRDKRGKHVAAVATARKLAAIVWHILTKDEDYTWNRPALLQWKLRKLELKAGHLSRRGGRQKGSAAAYSNKSVRDSERETIANAEDEYRRFVATWKQQSPKGRSGATNEVRRS

SEQ ID NO: 209218 - protein, 319 aa, unidentified
MTTSSIVVGVDVAKERLDVAVRPSGEVWSAANDEAGVTALVARLRPLNPVLIVCEATGGFERAAIAALAAVGLPVVVANPRQVRDFARATGQLAKTDALDAGILALFAERVRPTPRPLPDAAAQLLDAVLTRRRQLLEMLVAEKNRLGFAPQPLHRGIQAHIRWLERQLDDVTKELAALIEASPVWRAQDDLLQSVPGIGPIVSYTLLGELPELGTLSHKQIAALVGVAPLARDSGTLRGKRMIWGGRASVRTALFMAALCGRRWNPALKVFYERLKAAGKPTKVALIACARKLLTMLNAMVRNNTRWMNQRATIQYSC

SEQ ID NO: 209219 - protein, 412 aa, unidentified
MKQQKIKRIFNNSAGIDIGSEKNFIGIEGKEVKSFNTFTEGHLKAIEYLKENNISTVAMEATGVYWFSFYELLEEAGIEVYLVNGREAKNVPGRKSDVADCQWLQQLHSYGLLKRCFIPDDITRQLRTYIRLRRDHIELSSQHILHMQKAFNLMNIKLHNVISDIKGVSGMKIIKALISGIHNPEELVLLCDKSILKVKRNEVIASLKGNIKEEYIFSLKQALEAYEFYQSKIEECDKKIEKLLELINQDKESIPDITQAKHSNSRNSLQVDNLHEHLMKLTGGKDPSQITGLSDKTLMELIAETGVDLTKWKTAKHFTSWLCLSPGKNQSGKSNRRGKSYKAHSKAGQIFRNCANSISGSRHTALKGFYNRVKSRRGPMIAMKATARKLAVLYYNIMVYGAAYVEQGVMHP

SEQ ID NO: 209220 - protein, 413 aa, unidentified
MPQKTDYVYVGMDIHKETHTAVLMTYMEERLGKIKITNNIAGYRRLQAYVEKYRRNLIPIYGLEDVSHYGRDLAIYLLDQDYTVKEVNSALSFMERNSYATVKKSDEWDAQCISAVLSRRSETLPDANPQDYYWTMKHLVGRRDALVKNTASLIQQFHEQIQKQYPGYKQFFHDIECRTSLAFFERYPSAGHLQGVTVEELGAFLREKSHNTCSDKRAELILNLVEQEQTKEREYQSGRDLILQSISRQIYFNQQEMKQLERMQGELLEELGYHLETIPGISTVTASALVAHIGDIKRFKNADKLANYAGVAPICHSSAGKGKDLQNKSLGNRNLYNVLYLLTMQQIQINRDGKARNPLLRAYFECKVSHGKTKIQAMICIMRRLVSIIYSMMKNRTPYRIPEIEESKDQVIS

SEQ ID NO: 209221 - protein, 342 aa, unidentified
MKQKYVIGIDISKSKLDCAVIDFEYKIHYEMIIENTQKSIESFFKSMLKLLRIKGDELLICCENTGIYNRPLEKTASQSEILLWVEHPVKIKKATTDLRGKDNKKDALRIAQYAVRYRDKLIAYEEPSSVIIQMNILTKSRDSLLLQKTALENQLREAKSHDCLEFKILNESYSKVIKTFKTSIKKIENQLFKLMETQEEVKKNMDLLTSIPGIGTQCAINFIIVTNNFKSFENAKHLACYAGVVPFKNQSGTIVKKERISKIAHQKLKKLLHMSAMASIDKEIKAYFKRKVEEGKNKMSVLNAVRNKLVHRIMAVINRKQPFLQREEFLSLKNSNSSCILT

SEQ ID NO: 209222 - protein, 356 aa, unidentified
MTSNAKYIGMDVHKESISIAVRNSAGKIVMECVIETKASIILQFIDGLRGDLQVTFEEGTSAAWLYDLLKPHVTKLVVCDPRKNKSMREGNQNDKIDARRLAELLRLNHLTPVYHGEHGLRTLKELVRSYLTITKDLARVMTRVKAIYRSWAIPCTGKQVYARCHRAEWLGKITEPGVRRRAEFYYLQLDALRVLRQDARRDLLAESKKHKACKRLCAIPAIGPIRAAVLLGILQTPHRFRSKRPLWNYGGLAIEMHSSADHRCVDGHLQRAKKQVLVRGLNRNCNHDLKNLFKGAAVVASSKPGPFQEFYTALLAKGMRPEMARLTLARKIATIVLIVWKKGVCFDAQHLKPQTA

SEQ ID NO: 209223 - protein, 421 aa, unidentified
MNQLTDTEYTAYVGIDWAAAKHDICVQAVDGGSREFACISSQPEGIEAWARDLYERFGGPIAVALELSKGPIVTALQKYDFFVLYPINPLQLARYRETFTPSGAKDDPTDAELAVDLITCHAEHFTPLKPQSVTMRKLIGLVELRDKFVSDQGRVVNRLGHALKQYYPQVLEWFSERNTVVFCDFLSRWPTLNQVKCARKASLERFFRSHHVNSAELIEKRITAIKAAMPLTADPAVIEPHRLQVEILIEQLRITIKALKRFDDEIATTANKLPDYDMLFSPLPGAAHILAPRLLAAFGEDRQRYPQADALQKYSGIAPVTKRSGKTTYVHWRWQCPTFVRQTFVDWAAQTINKSAWAGAYYRQQRAKGCSYQVAVRALAFKWIRILHRCWQNRTPYDESKYLEALRRRGSPLLKYLAEPV

SEQ ID NO: 209224 - protein, 316 aa, unidentified
MKAKPEELFAGIDVAKSTLDLRLEPLGESLHVIYDEPGIDAIRRRLQALSPTVIVMEATGGLETRLASELAACGLPVAVINPRQARDFAKATGQLAKTDRIDAAVLCAFARAIRPAVRPMKDKETRELDDLVTRRRQLIAMRVQETLRAGTAGSKGIKKSLKMHIAWLDRQIGALDIDLTRRLRTSEVWRVKDDLLQSIPGVGKVTTLTMLAKCPELGQLDRREIAKLVGVAPLANDSGAHRGKRFVWGGRADVRAALYMATLSAIRCNPAIKAFADRLKLKGKPAKVIIVACMRKLLTIMNVMVRSNASWNPNLA

SEQ ID NO: 209225 - protein, 403 aa, unidentified
MIGNHESIDVFIGLDVGKGEHHAVAVDRAGKKLFDKALPNDEGRLREILTSLSRHGRVLLVVDQPATIGALPVAVAQAAGVTVGYLPGLAMRRIADLHPGEAKTDARDAFIIAEAARTMPHTLRSIQIADEQLAELTMLCGFDDDLAKQATATSNRIRGLLTQIHPALERVLGPRLDHPAVLDLLRTWPTPEALRHAGSRRIGNRLKKLAPRMGERLAGEIIDALDQQTVTVVGTNAATIVLPQLARMLADIRESRDAVFTQVEALVEAHPLHPVLTSLPAVGVRTAARILTEVVGKDFASAGHLASYAGLAPVTWRSGSSIRGDHPSRKGNKILKRALFLSAFAALKDPLSRAYYDRKRAEGKRHNQALIALARRRCDTLHAMLRDGTFYEPRTSSATWPKP

SEQ ID NO: 209226 - protein, 349 aa, unidentified
MIIVGCDFHTRFQQVAMLNPGTGEVVERRLEHETGEARSFYASLPAPARVGIEATVNAQWFEKVLRENHHELWVGDAAEIRAMRVRKQKTDSRDALHILNLLVTNRFPRIWIPSAGERDVRQLVRHRHKLVRIRTSVMNQLHALAIGQGLCRKQKLWSKAGRMEALVLDPWAQRRRHDLLELLDQLNPWIAELDRAVTEEVQSRPEAVHLMREPGVGPVTALAFVLTIGPVGRFQRSKEVVSYLGLNPSEESSGGRQRLGSISKQGNAMVRHLLVEAAQAASKFDPELRRDYERLRFRRGNSGVAKVAIARKLAVRLYWKLREAAQSNTVARMQGSPANPVVDASLSPK

SEQ ID NO: 209227 - protein, 344 aa, unidentified
MKNSNVIGIDLAKNVMQVCIIDKHGELLSNNAISPSKLKILLANKTQSIVAMEACGACHYWARLAQKYGHDVRVISPKKVKAFLQGHKTDANDALAIAIASTQFGMNFSQIKSEEQQSLQTLESSRKFLSKELVAINNHIRAYLYEYGITMNKGQKGLREAIVVVLDDGDTRLPMCLKNTLRLLWERFQLTVEQFKNTEKYKAHLVNQLEPCKRLMDLEGIGKVCASMLYVNIGDGREFKNGRQASVYIGLTPKQHSSGGKTYMRGIDKHGGNKELRAALYQGALSIISKLPCEPRTVKEAWLIELVKRTGVKRACIAMANKTVRTAWALLATGKSYQPVLLNK

SEQ ID NO: 209228 - protein, 384 aa, unidentified
MPKINILFIGMDTHKEFCQIAYCEDSRESVPTSFGRIKTTKQAITKFARQMLSKYPGVTLHFVYEAGPCGYWIYRLLTKLGHECHIVSPANIAKPSNDRVKTDKRDAMMLTRALKNADITPIYVPEPEDEAVRDLSRTREIAMRDLKKAKQRIKLFLLRNHIQYAGSERWGPKHRRWLTELILPHPAQQIVMQEYISTLNERFERLNRLDNELKHQVHRWRYFPVVKALQSMRGVKLLTAAGLIAELGDLGRFDHPRKLMAYLGLVPSEHTSSNRRRLGAITKTGNTHARRLLVEAAHSYRHTARISTEIQTRQEGLPDCVNTIAWNAQLRLCRRYQRLLQRGKHRNVVVTAIARELSAYIWDIAKHTSLPAIDPKLRLARVPR

SEQ ID NO: 209229 - protein, 320 aa, unidentified
MSRKRAKLFIGIDVSKQLLEVAAHQHDYQFRCANKASAFGELIAELITLRPALIVLEATGGLERTVAAALRSAGLPVAIVNPRQVRDFARALGQLAKTDRLDACVLAAFGAAIKPPLRPLKASDELELDALTGRREQLTGMLADEKNRRASAASDSVRDEIQEHIDWLTERIAELDQQLKKLLQASAHWQIKDQILQSTPGIGPVVSYSLLAQLPELGNLNRQQISKLVGVAPLNRDSGQQRGRRHIYGGRAQVRRVLYMAALTASRCNPVIKVFYERLRARQKPFKVAITACMRKLLTIINFMVRDGSQWKSAPSNISA

SEQ ID NO: 209230 - protein, 437 aa, unidentified
MSDEKLVEIRVSVDVGYRRHSVAIGLPSGEVLEEFEIAHRPEGFAEFFTRIEKHQKIRDCEVAVAMEGFNGCARPLDAMVRGRGYRLYNINNLKLARFKEIFPGAAKSDRIDARKGLELFQLSDHLPLAKEVLQEVKGTPRENEVLKRLTRRRRRLVDERVRVISNLQTDLQAVCPGLLEITKNAGNQWFLNFLLSADTLPQLARLRPATLRKVPAVGRKYASLIEHWQKRAHFSEEVEWVSEMIQEDAQRCLELDEKIKALRAKIKELAKDSKIAKTLLSIPGFGTICTAELAAEIGTVERFSKEGSLALYIGMSTLDNSSGKYQGSKQPKHVNTRAKAAMMVALDRHRKYVPQSQRYYEKKRSEGKKHNQAIRALGRHLCRIIYKLLKEEREYEIRPEKGNTKSKASPRSLIKTQIRKPKISVKGKNNKIYQQSA

SEQ ID NO: 209231 - protein, 420 aa, unidentified
MQVIYERCAGVDVGKDEIAVAVRVPGRGRDRRKTEKRTYRAFYGVLREMAKWLESQGVTHVAMEATGSYSMPVYHALMESGFEQVLVCNAGHVKNVPGRKTDLADAEWLAQLLECGLLRGSFIPPAEVKAVRDLVRYRAKVAQQRVSEIARLGDVLQDAGIKIDSVASSIATKSGREMIEALIDGERRGAVLAELAKGKMRSKIPDLSMALEGRFGEHHAMLCRLHLDHIAYLEKAIAEIEARIEAMMQPFRAARDLLITIPGISFLAAASVISEIGPSPREHFPTAGHLASWAGLCPGNHESAGKRHSGKHRHGNPYLQPILVEIAWAAVRHDGYLKSLYHRHVMRNGGYRSAAARAKAIFTVAHAILVIIWNILTTGKPYDDLGSGYFDRRADPDREAQRLIARLEALGKHVTVEDAA

SEQ ID NO: 209232 - protein, 432 aa, unidentified
MNESIPAASLQGVAAYIGIDWADQKHDVVLRSAAEPNKVEYRVIEQKPGALMEWIGQLEQRFGGQGQILVCLEQSRGALIYHLMGYEFFELYPVNPLQLARYRETFSPGGAKDDRPDAGLLCELLYCHRDRLRAWKADSEPTRKLAFFNEGRREAVDQRTRLSNAIKSQLKVYFPLALELLNQDTSTALAADLLLRWPSLEALQKQTPHQLRKFFYAHNCRGESTMLERLQLVQQAQALTQDSAVIEPAAFRVQMLARQLKNLLPDIARYDQKIAELFAAHPDRFLFENLPGAGRVLAPRLLSALGSDLNRWESAQEIATLYGVAPVRRASGKKSGKKGEKKASVHFRQACPKFLRQSFHEFAGCSIRYCGWARAHYEAQRAQGKGHHAALRALAFKWIRILFACWKQRIPYDPQRYLQALQQRASPYANAC

SEQ ID NO: 209233 - protein, 418 aa, unidentified
MLLAGIDWSDQALDYHLRTAGGRVLADGQVAVSPEGLAELFVSLETHAPPDQIGIAIETAQGAWMQSLLDRGYRIYPVNPKAVERFREAMSANGDKSDRIDRRVLAMFLAVFHERLRPLKPDDPEIISLRIACQDRLRLVEERTAKLTELGAILKVHYPAFGPLFGDLSSRVALEFLEQFPTQKQMQKLTGRRLRNWLRRQQYTCPQRIDAMVAILKQPALPVADHLQTVKAPLIQYLASSLIALKAEIAQREEQITRQFEQLPEADWIGSLPGAGPNLRPALLACLGRDRDRFAATSDAQAFMGTAPVTKASGRSRSVKFRRGCWKFARRTLQLFAEMSRRCCGWAQAFYHKQRASGHTHHQALRALAHKWLKILLAMQRNGTPYNKAVFLNSQRAYLLKTPEIRTPAKAFFVAPLT

SEQ ID NO: 209234 - protein, 341 aa, unidentified
MKNKSFIGIDISKNVIDASIFCEGTPIKDFSHDVFNNSRKGFGEMCTWLKKNHVVLSNCLFGMEFTGSYSMELEKFLNARNYQFCMLSTHVVKHYPMGPKDKSDKIDSAKIADFLYRYNGTECVKPYNMPDKTMQRLKALMNERKFLVEQRTCFMNRRQLCITKEDAQLYDGYIKKFSRDIENIELEEQKLLATDDSLLSTYKNLLTIPGIGFVNAINVIVITRNFTAFETARQYASYVGVAPHFRTSGTSVKWRPRPSARCDGQAKADLSMAATVVVQYDAELQSFYNRKLGGKQDSDTKRKALNAVKFKLVLRMFAIGKQNRKWEPLDSKSSNEKLAIS

SEQ ID NO: 209235 - protein, 423 aa, unidentified
MCYRIAGIDVHKRMLAVVVADVATEGDYEFERRQFGANPDELRRLADWLVAQNVQEVVMESTAQYWRPVWNTLERYWSAQCRGAEGAGPMSGSLLLALAQSNRGPRGRKRDFVDAERLLKRLVAQELVLSFVPDAEQRMWRTVVRRKYQLTRDRVRLQNQLESLLEEAQVKLSSLVSDLFGLSARRMLRALADGETDPAALAALGDRRLHASQEQLCDALGAATTLKSTYRRLVGMALDELQLLERHMSKLDQEMADLLSSHQDAVQRLAEVPGLGVESAHQIIAEIGAAARTFPSEKHLASWIGVCPGEQESAGVSASNRSPKGNRLMRRLLNQCAHAAVKVKGSIFEIVFRRLLPRLGFKQAIWAIAHRLSRLIWKILHQGVRYDERGPAVNQKSRSARTAKMIKELKNLGYRVELTQDPA

SEQ ID NO: 209236 - protein, 357 aa, unidentified
MRFYTKQHQFYCGIDLHARTMYVCILDHHGEILLHRNMPARPETFLKAIAPYRDDIVVAVECIFTWYWLADLCARESIPFVLGHALYMKAIHGGKAKNDKIDSHKIAVLLRGGMLPQAYVYPAAMRATRDLLRRRMHLMRKRAELLAHIQNTNSQYNLPEIGKKLAYKGNRDGVAERFLDPAVQKSVEVDLALIDHYDRLLRDVELTIVQTAKQHNAQALYRLQSVPGIGKILSLVLLYEIHDITRFPRVQDFVSYCRLVKCAKESAGKRYGTLGKKIGNAYLKWAFSEAAVLFLRNNPQGQKWLARLEKKHGQGKALTILAHKLARAVYYMLTRDTVFEMDRFLNGYGSRVGEPAA

SEQ ID NO: 209237 - protein, 326 aa, unidentified
MQTPSVVLNIGADVAKDEIVVACSEGSFAVRKVANQRLAVLTFLKGLPAGSRIGVESTGSYHELFADAAHELGFLVFLLNPKDTRHYAKAVGLRGKTDRVDAELIARMIAHEYTKLHAWIPPTAQQRELDRLIKRRATLISLREAVAMSLHGLGGLADELKALRTRFNQLITRLDARVKALVEASPERKQNFTRMCTITGVGPVVGIALVNALERVPLKSADAFVAFTGLDPRPDDSGQHRGKRRLSKRGPAELRRLLYLAAISAVKTKTWRPLYERYRAKGLSSTATLVILARRIARTAWSMHTHKTTFDVERLTKQPSRRSPQG

SEQ ID NO: 209238 - protein, 455 aa, unidentified
MYLPDWKWIPIRKGLLLMSNKVIFNLDELFISVGIDVGADFSWMSIALPNQQFVGKPYKILHNSIDSLTTAVSKIKEAEELYSLESRIFLESTGIYHYPLFCYLRDKGFNCSVINPIITKNSTNINIRKVHNDRFDSKKAALVGLKPDLKVSLMPSDLALNCRNLCREYYDLMDNRSAYVNKLQGELRIAFPQYLGIFSKVTINTSLTLLETYTSPSAFLKADKQEIIDIIKSTARFGLTYAQNKYNAIIQAATDANQFGYIIDSNIKRIRLYISFIRKYDEEINNILESLHELVDANEDADFVKQIHLIETFKGAGFLSAVSIMGEIGDFSAFSKPKQLFAYFGLDPAVKQSGKFEGTKVQMSKRGSAIARRVIHTLTLQSISISRNREAKNPVLREYYLKKCDSKPKLVAMGAVSHKVCNMIFAILRDNKPFKIIAPQEHIKQYNSAKCDIAA

SEQ ID NO: 209239 - protein, 397 aa, unidentified
MYIVGIDIAKRKHEAAVIDGEGAVIIKPFSFTNNCSGYNRLLAMLTKAKLPLDEVSFAMEATGHYWLALFTRLQKEGFRVQVINPVQTNSIRSFYIRQAKTDPRDALLIAEVIRFGHFSESTLHPENIYELRELCRGRHAIVSMQADVKRKVVALLDQVFPEYETAFTNLFGDTSMAILQTCPTPKELSEMPLEDLCHLIEVSSRKRFRMAKAQELQELARNSFGFAMAGDVFSTMIRLYAKHLDFLKQQVREMDRKIAEIMETLDTPITTITGIGPTLGAYILSEIGDISRFSSAAKLAAYAGIDPTMRQSGEYNGVRNRMSKRGSPYLRHAIWLAASSAVLHDPALKLYFQKKRDEGKPYMASVGHACRKMVSIIYAVMRDNKAYTPCIPNEISA

SEQ ID NO: 209240 - protein, 336 aa, unidentified
MTIVMVNVGLDYHEDSIRVCVVDEQGEVLVNRDVENHPAAVQDLILQWGHPAGIAIEACCGAASFAHEFEKLFEWKIQMAHPGYVKQLKQGPDKTDYGDAHLLADLVRVNYLPEVWIADQFTRQLRRLVRYREGLASQRRDTKLRIRALLREERIRSPQARPWTKAWLAWLDEASLGEHSRWVMSELQQQLQRLEEDLKRVEQHMEAAIADDAVSQKLLEQPGIGLVTAITLRAEVGRFDRFRSGKQLSRYCGVTPRNASSGKRQADAGLVGRSNRNLRAVVIQAAQRLPRHEDRWRELKNRLRKTKPASVATAAIANRWLRWLYHQMLESYEQAA

SEQ ID NO: 209241 - protein, 391 aa, unidentified
MIIKPFPFNSSIGGFKKLINNIKSLNCDKSDITIAMEATGLLFENLYRYLKDLNYNVILLNPYQTAQYRNMLTMKYVKNDNIDSLVISLLIKSGRYSKGYVNEEQLQSLKVLFRHKENIKEKLKSLKRETSSLFAVVFPELDKVIKDPYNVTGLILLDTYPTAKHFEHVTVKMILKLFRKVKGNNFNEAKAQLLLSYTKDTIYSGVAKDARAFFIRSNITLIRALQEQIKSLEDEMVKIFDKPIESIEETKEDEEYISSVLDNLRTIPGVSDKTLLAVIAECGNLDRFKDAKSLIGYLGLYPTQEQSGKSLKYGHLAKRGARYAKKALYLASVAAIRHNSELKQIFVNQVSSGRAKKEALIIVARKLAYIIWAIYNHNKPYDPTRVFVAHP

SEQ ID NO: 209242 - protein, 324 aa, unidentified
MRPRSGDPPEVLRCVANEDGEVVAEKRFRTSEKSYRRALKRYDEGDVVLEAVGFYRPVADWLDGLGYDVHLAHAGRVPKSRQKTDRKDARRLLTLWRGDAVPEAYLPPEEVQRLRDIARHRHFLGQESRRLKTKLKHDLYKHEHFVDENPIETEKGRAWLRTLDAPEIRSTLGLWERLDEEIRAFQERIESETTELPEALLLVSVPGIGAYTALLILAEVGDFSRFPTGDRLAAYAGLVPSQHQSGDADRMGSITKEGNPTLRWALVEAARNHVRLCPDSSIARRYVRLAQTKGHGKAMTATARQLCTVLWSMMARREPFQVNP

SEQ ID NO: 209243 - protein, 348 aa, unidentified
MIAIGADVHKQQCTLAVQRPDGKLSMLPSMDNTRENWLDLLTQLPPEAQIALEVSTSGHFVMSVLEEAGWRDRAHWVHTAGIDSLRKQKTDRLDAKRLARKLSVMEQDPLPEAWFPPRPIRELRLRARQRCWVAVLRTRVKNRVRSLLQMSGRCAGTNPFTASGRTWLKEQKLSEATRESVEQLLRFHDFLTTEREKSETSLRGMEKDFPEIARLQTLPGLGHILSAVIWSEIGELKRFDSPRALVNYTGLAPSLYESGERSVRGGITRQGPVWLRWALITAVNAATRGDNAFARRYRRLRRHKLPNVAKTAVARSIARCAYGVLKHGVDYQEQRWGRKAGIEMEQEA

SEQ ID NO: 209244 - protein, 356 aa, unidentified
MSMLAGQVDYVIGVDTHRDTNTAAVLTAAGAVLAHHQCSTDAMGYRRVVAFADEYASGRRVWAIEGSGSFGSGLTTHLLERGEWVVEIDRPARPARRNGAKSDDLDAVRAAREALTRDHLAAPRARGDREAMRVMLAARQGAVVARTKAIGQLKALIVNAPEALREQLRRGTTDQQLDKCSRLRTLPTHSVEHRATVRAIRAVARRALFLEAEAAEHESELEQLVVTACPELLAKPGVGAITAAQFLVSWSHTGRIRNEAAFAALGGVAPIPASSGQTVRHRLNRSGDRQLNRALHTVALSRLQHHPETKAYATRRTAEGKTRRDIKRCLKRAIAREIYRLLEAHAKAEKKINQAA

SEQ ID NO: 209245 - protein, 334 aa, unidentified
MLYAGLDYHLRSSDLCILNQDGKVVKQLHVKGPQEQVVEELARVGEPLEVVFEATGGYGPLHQKLSGVAKRVVMAHPASLRLIWGSKRKNDRVDAQKLAKLLYLDAIPQAHVPCEQTRQWRRLIELRRSLVRRRAAVKNQLYALLRGVGLACPCPLFSKSGTKWLDEQAMDGASSLERSLLLEQMRGLRTQIKEVDKALRTMGSGDPRVTLLMTVPGVGMRTAEAFCAYVDRVERFSRVKKVGSYFGMVPCQDASAGKERLGHITKQGPATMRQLLVEAAWVGIRRSPTLRKRFEALCRQKPGRRKIAIVAISRHLCEVMAAMLRENRPWREQE

SEQ ID NO: 209246 - protein, 378 aa, unidentified
MPSENTVHIAIELSFSSWLVAVRLPSAKKSALHRIEGGNTGALLALIAELRSRTLIKLGRAVEVACCFEAGRDGFWLHRLLTARGVLVYVLEPTSILVNRRSRRAKTDRLDAEGMLRVLAAWLGGDREVCSMVRVPTPDEEDAKRPHREREHLVQEKLRIENRIEALLFTQGIRARPSLRSWERELTELRTGDGRTLPALLRAELDRMRRRLVLILELIRELEAERSAALAAAPDEAMAQKITSLQLIRGIGANFSAVLVREVLYRSFTNRRQLASYVGVAPMPYQSGGMDRDRRISRAGNPRARTTLIQLAWLWLRYQPGSALAAWFRERVGTLQGRTRRIAIVALARKLLIALWRYVEAGVLPAGVEIRTGTVPAA

SEQ ID NO: 209247 - protein, 392 aa, unidentified
MIYVGIDVAKDKHDCFISNSDGEVLYKSFTISNNREGFETLFQRIVSVAEDLNNVKVGLEATGHYNYNLLGFLLDKGLPTYVINPLHTNLYRKSLSLRKTKTDKVDSRTIATMIMSDLNLKSYSDISYHNEELKSLTRYRFDKVKERAKLKSSVARLINILFPELEKLVPSLHMVSVYALLSEFPGASHVASAHLTRLTNLLSQASKGHYGKDTAILFRETAKTSIGSLMPAKSLELKHTIKLIQELTSEIDEIESAIKQIMVEEIQSPILTIPGISYRMGAMIIAEIGDFSRFDSPDKILAYAGMSPSTYQSGQLDNCYSHMEKRGSRYLRYALYNATKYVCHWDENFGAYLAKKRAEGKHYNVALSHATKKLVRTIFAMEKSEQAYIPTV

SEQ ID NO: 209248 - protein, 521 aa, unidentified
MAAKTKSTRKAKKASSNRRYIGKPNGVIQARVRDVGPERFAVISVDCAKRRSKWMLCDYFGRVIIEPTNVEHNSGAFKAMVNSAMAACQAEGIVDSIAAVEMTGVYHRPVQAALRRAGFDTRVVHPFASSHYRKPLHPGNKTDDTDLEAIFHAAINGYGLASLPVSETYLSLQRLSRHRRNLVKQRARLQVQIRALMHQSMPGYADLWEEDKLFNKSIAMPIAKHFSSAEAVKKAKQTGLVKYLHSIKVRFQERTLDKTHAWSLQAADAPPLQKLLTEQWKQLAENHSLMTSQIIDIEQKTAHFRVQTPYVLLLSVTGINVVSAGELAGEAGPIEHYGSATALNGRALLYPSRYQSDEVDRSDSIARHGNRKLRAACILVAKNLIKCHPYYRGLAAVWAKRNIVTVDRQCRMANRANRMIFQIVSGRQVWRGKGIDREYLLAKLREFHRRHGTTLEATVADMKRAFEWLPKSTYADEAKPLAKLSKKRRGKTASIGDLLIPLLVRLGVGQSSEVESETSEA

SEQ ID NO: 209249 - protein, 349 aa, unidentified
MHRNAPRAAAVYGVDLGKNLFHVVGLDERGAVVQRVKFRRDTVLAFFTRALPSLVGMEACPGSQWLARKLQAMGHTVRIAPAQFVKPFVKSQKNDTIDAEAIAEAVTRPTMRFTQVRTTEQIDLQALHRIRDQLVRSRTRLINQARAFCLEYGVAIRQGTGVFRSDLPRVLADDTNDLTPAMRVMLSELFEDVERVDQRIASVTRQIEALADREDKARRLMTIPGIGPLAATALLAAVGDGHQFRRARELAAWLGLTPREHSTGGKTTLLGISKRGNRYVRKLLVHGARSCVTHLNRTRDRIGHWLDALQSRMHVNKVTVALAAKITRMAWAIITRPGVIYEGHDPVVA

SEQ ID NO: 209250 - protein, 365 aa, unidentified
MTTQEKQRTMFIGVDVHKDTHTAIGLSPFGEKVFEMTIGNEAEDFISLVEKTKVEANKTGLIPSFGLEDVHSWGERLSSFLVEVGLPVRAVAPILVDHRRQKTTHPEKSDPLDAQGVAEVMIQKIDTLPIYTITEDAKKAKNIRELSLEREWLVKERARLKNQLHILLHRIHNTEYKTKFKDPFSLKAMRYWMKSMPKSTDSILAGRMKRAIRRIRDLRSEILEIESELDILIKNSGHTITTANGCGIIIAAEIIGEIGDIVRFKTPGALAKYAGCAPRQHSSGKTIRFRKTRSGNRRLNRAFHRMALSQISRMGNDAGREYFKRKISEGKTKAQALVCLRRQMVNIVWMMMKHKTVYVYPQKNN

SEQ ID NO: 209251 - protein, 360 aa, unidentified
MQTQSTELNFEGQNLFVGIDVHLKSWTVSIVTDHLMHKTFTQPASAKVLSNYLNRNFPGGVYNSVYEAGFSGFWSHYMLKEMGINNIVTNPADVPTTQKEHLQKDDPTDSRKLARSLRSGELKAIYIPDPSTLEDRSLVRMRATLIKDMTRFKQRIKSFLYFYGIAYPQEFEKSGSHWSKRFMTWLNEEVSLQHDSGTQTIKILVQEAGQQRKLLLEVLHKIRSLARSEKYAKNIVLLRTIPGIGFITAITFLTEIEKIDRFENTDHFAGFVGLVPNRHSSGEKNNNGEMTFRGQSALRKMLIESSWMAARFDPALMMSYNSYIKRMEPNKAIIRIARKVLNRIYFVLKNKVEYVSGVVK

SEQ ID NO: 209252 - protein, 338 aa, unidentified
MKLYCGIDLHSNNSVFAIKDENGEIKARKKLPNDLNMIFQFLGSFENELVGLVVESTFNWYWLVDALMDAGFCVHLANTTAIQQYSGLKYADDNSDAAWLAEMLRLNILPEGYIYPKAERAVRDLMRKRMQLVQQATKNLLSIQGLYMRHLSYKLSNNKIKQLSAEDIEKDFLSTNVSQATVCNLAVMNCLKTQIKTIERVILEQVKLRAQFQQLTSIDGIGNILALTIMLETGDINRFDKVGNYASYCRCVSGARYSNGKKKGSTNSKNGNKYLAWVFVEAASFAIRYNKTVKSYYQRKAAKTNQTVAIKTVAHKLARACFYVLRDDVPFEAKKAFC

SEQ ID NO: 209253 - protein, 514 aa, unidentified
MFKKPDSNQGLNVKSNRLSLLAFEFNGDTFIVIPIGIISKLVVTFLGAYFIIFKKQTIMKRKQISLEVVNPNAAGIDIGSRSHWVAVGQNAQDVKEFGVYSQDHQELCEWLKKHKVTTIAMESTGTYWQNLFSSLVVFGFDVILVNGRQTKNIKGQKTDILDCQWIQKLHTLGLLSSSFLPDSTTAVIRSYSRHRQNILKQSASAILKMQKYLRLMNMRLDVVVKDIVGLTGTKIITAFIAGEKSGKVLAQNRHYNCRKSEEEISKALQYNGREDYYFALKQEWETYLHLQKQIDQVDVQIKRHLEKVIDTDDDKKQHIASNKPYKRKNKNTIRNTDMNQLYYQYFEGVDLMAIEGVNDALLMAFISEIGLEGIKKFESSKQFTSWLRLAPNNKISGGRVLSHHLPKGSNRLKVALRQAANTIGNLKDGHLSDFFRRINYKKGRATAISATARKLAVIIWNMLTKGIPYHPPTEYLFLDQKRKLKMLSRIKKNIVKFDIRPEDIGLSKILNIST

SEQ ID NO: 209254 - protein, 461 aa, unidentified
MPDGGGENSSTRKKKQIEGLPVVRYNVAGIDLGSERHWVCAPVADGTSREVADFGATTPELIRMTKWLQARGVESVAMESTGVYWIAPHEVLEAAGLEVLLVDTRQLARVPGRDKKTDPTDCEWIQRLHSCGLLRGSFRPREEVCMLRTLVRDKANLVAECGDWLRRMQKSLDQMNVRVHRAVSDIDGVTGMAILRAIVKGERDARKLAKLRDTRCHKSEEEIAEQLSGHWRGDHLFSLGQSLKMYDAIQQRLADYDLEILQRLAAMQREESRQQPVPPVKNPQKAKNMKKRREEPMREALFRMSGVDLTGIDAIGVETVQVVLSEYGPDLSRFPTEKQFVSHVNLVPHKPMSGGKPVRKKRRSSASTRVAAALRMAAVTLRNSATALGAYYRKIARRLGGDVAVFATARKLATLIYRLLRWGQPYVDEGAEAFERRYQQARLKNLKAKAKELGYELVTSN

SEQ ID NO: 209255 - protein, 401 aa, unidentified
MTKVLYVGLDVHKESIVAATAVAGDRPAELYGKIGGTLEALDKLIKKLSKPGLELRFVYEAGPCGYVIYRHLTNRDYHCQVIAPSLIPTKASDRVKTDRRDARQLARLFRAGELTAIYVPDEEDEAVRDLVRARDRAMTDQCKARLRLKAFLLRLGHRYLGKGNWSDAHLRYLSSLSFAHAAQQIAFQEYLEAVTVASERLERLSKAMEAALPSWKREAVVRALMSLRGVALLSAMTLVAEAGDMTRFDSPTQLMSYFGLTPSEYSSGEKRHQGGITKAGNGACRRALVEAAHHYRVAPRVTPAIQKRQEGQSQEVRAIALKAQQRLNGRFRLLTARRKKSVVIIAALARELCGFVWAIACQVNAPDRLKAQAAARSAAASKSSPAKSRVYVLNSRKNYKN

SEQ ID NO: 209256 - protein, 349 aa, unidentified
MLADELDYVVGVDTHRDEHVLAVVAAATGAVLARQVVPANERGYQAALRFAGEAAHGARAWAVEGTGSYGAGLARYLAGRGESVLEVSRSPRSERRVRGKDDALDAVRTARAALAGEELALPRNGERREALRLLLVARRSAVDVRREALGQLRGVIVTAPDRLREELRVLPTGRLLERCSRLRRSSRAGADELATRLVLRSLARRIDAATREAAELEREILAHVRALAPALLDEPGVGPIVAAQVIVAWSHRGRLRSEAAFARLAGVAPVPASSGQTTRHRLSRGGDRQLNRALHTVVLHRRQHDAATKHYIARRLAEGKSRREATRLLKRYLARHLYRLLQNQEPLLA

SEQ ID NO: 209257 - protein, 343 aa, unidentified
MKLHVLGIDLGKTVFHLVGVDSTGRVVIRKRCSRRQLLAFTANLEVQLIGMEACSGAHFLGRALREQGHEVRLMPAQYVKPYVQTNKSDYLDAEAIAEAVQRPRMRFVPIKTEEQLDLQALHRVRERWVMRRTAVVNQIRSLLLERGLTLPKGRRHLDEQLPRILEDAELNLSGSFRVLLAQLQLELEQLAARIEEMDRVIQKMAKENEACQRLTEIPGVGPVTATALIGAVGNGSTFKKGRNLAAWMGVVPGEYSTGGKQKLLGISKRGNKYLRRLFVQGARSVLQQRHKQAPGLSSWLAQLLGRTHQNVVVVALANKLVRMAWAVLCKNQRYRTPVLGVSA

SEQ ID NO: 209258 - protein, 365 aa, unidentified
MSSVASPAGLVHLGMDTSKKTIVIATLWPGEEIPVTERIANEEAAVRRFFGRLGDPLVLRSCYEAGPGGYDLYRLLTSMGVACDVVAPSLIPKGGSDKVKTDKRDACRQARLHRAGELTPVRVPAQAEEAVRDLVRVRAALVDDRKRAQQRLTAVLMRHGSVWTGSYWTAAHRAWIDAQRFGEPALAAAIAHYRGTLATREAELAAIEAELAPWARRDPLAGPVARLGCYRGIAELGGLTLTAEIVDWRRFPAARAFMSYTGLVPSEYSSGERTRRGSITKAGSEPVRTTLIEAAWAYQHAPAIGATLRRRQAGADPGTLARSWKAQRRLNGRYRHLTSHGKARGEAITAVARELAGFVWAEMTA

SEQ ID NO: 209259 - protein, 365 aa, unidentified
MEHYAGIDVSLELSSVCVVDAQGKIVKEAKVASEPEALVSFFEGLGFSVKQIGLEAGPLSQWLHAGLKRAGFETVLLETRHVKAALSAMTVKTDRKDARGLAQLIRMGWFRPVHAKSMGSQEVRALLVVRKQLLGRLIDVELSIRGILRGFGLKVGPVTRKGFETRIRELAAGQATLERIAGAMLSARAALKAEYEKLHKAVLAIVREDSVCRRLMTVPGVGPVVAVTYKSAMDDPSRITKSKAAGALFGLTPRKYQSGEKDITGGITRAGDEMVRTVLYEAANALLVRQRSIKAVDATLGWLVDYLSPAAVLVVWVDSQKPTGKQNLHSALERRGFRVEAGTVHEYGLAISARRLQATPMSKAA

SEQ ID NO: 209260 - protein, 391 aa, unidentified
MFLLGIDIAKLNHVASCIDSSTNEVIFSNFKFKNDFKGFSALLNKIKSFDAKNLIIGLESTSHYGENLINFLFRHDFKVALINPLQTSHLRKANIRDAKNDNLDSLNIAKSLLFTKLNFVSEKNIECFSLKKLTRFRSNLIKQRSKAKIQLTSLLDLLFPELQYLFKSKIHNKAIYSLLKKYPSTEEIAALKDDEISNLLYASSKGHFKKEKSIELKSLAKTTVGIKDTSISLHLIQLIELIELYTKQIKDIEIKITDTVNKLDTTLLSVPGISIIACAIILGETNNFENFSSSKKLLAFAGLDPKIRQSGNFNASSCRMSKKGSPYLRYVLIFTAWNIVRHSEKFNKYYSLKRSQGKSHYNALGHVAHKLVRILFTLIKKNISYQEEKLE

SEQ ID NO: 209261 - protein, 338 aa, unidentified
MSSKHNGAIASVIGIDIGKNSFHIIGQDQHGAIVLRQKWSRGQLEARLANVPPCLIGMEACVGAHHLSRKLHALGHDARLMPAKYVRPYSKGQKNDFRDAEAIAEAVQRPTMKFVATKTADQLDLQALHRVRERLVSQRTGITNQIRAFLLERGIAVRQGLRFLRAELPRILATRADVLSPRMLRLVEDLAGDWHRLDERIEGLSAEIEALARQDKGCERLMTVPGIGPIISSAMVAAIGTGDAFSKGRDFGAWLGLVPKQISTGDRTILGSISKRGNRYLRALFVQAAWGRAGQAQARPVAELWAQVVDRGGQEEATPQRARHCARQQARPHRLGGS

SEQ ID NO: 209262 - protein, 370 aa, unidentified
MGNASTLHVGLDVHKDSIAVAYAPTDGGVAPIPFGTIGTRQCDIDALVRKLQSKGARLVFVYEAGPCGYWLYRYLTKKELPCFVVAPSLIPRKPGDHVKTDKRDALTLARLARSGDLTPVYVPAVPDEAIRDLARAREDALHDLNAGRFCLKAMLLRNDIRYTGRANWSAEHLRWLARLVLATPAQQIVFQEYVRTVTERTELLQRLEAELLEQAKAWRLAPVVSALQALRGVQFTVAITTIAELGDLTRFDTPRQLMSYLGLTPSEYSSGDRRRLGGITKAGNSHARRVLIEAAKAYRHRAKVSEAIQARQQQLPAAIRDLAWRAQVRLCGRYRRLLARGKHPNTVAAAIARELAAFMWAIAKAQPLPA

SEQ ID NO: 209263 - protein, 391 aa, unidentified
MRKDTLYVGLDTDKKHIDVAVAEPLPGGEVRYWGKIANAAPSVDRLIRKLGQDGRPLVVCYEAGPFGYGIYRQLLGKPGVTCEVVAPSMIPRRSGDRVKTNRRDALALARLRRAEELTAVWVPDEAHEAVRDLVRARAAAVTAVVRCRQQIGSFLLRQQIAYVGGKPWTKKHRQWLGTLTFEQAAHRLMVAEALLALDQATARRQRLGEHIEELVASWSLAWLVQALQALRGYQLINAAVLVSEIGDPRRFESPRQLMGFLGMNVSEHSTGDTIRHGHLTKTGSKRGRKALIEAAWTYRTAARHPKAAAARQPAAVQQIADKASHRLNRRYRHLVARGKPTQLATAAVARESLGFIWAITHAAAPTPHQAAARTAVGLQGMRKSSTSSSRP

SEQ ID NO: 209264 - protein, 335 aa, unidentified
MQIYGIDLAKEKFDVSFFDLTSKKVSNHPSHKVVKNNFKSIGRFLETLPSDAVLVAEHTGVYGDTLLKCCMDSNVKIAFVGGYVIHRYRATPDRAKTDVLDCAQLRDFGERYPDKLKYKTFPEEALYELRQLARHREMLVEQRKQLITADRSEDCRPIRSLAVKRSMDRIKEMLDTEIAETEKEMLKVINGHESIHHNYELVKSVDGVGLITAVELLVKTENFTKITTARQYAAYAGTAPYEKSSGKMDKGTHISKIGNRRSKTLLYICAESARLHNKEIKLYYERRTLIDKKPRHYVLNAIANKLLRIIFTLVEKGEYYDANFIRQDPRVVKYN

SEQ ID NO: 209265 - protein, 330 aa, unidentified
MSATAWLGLDIAKETFAACLLLEKRSAQGEFANTPAGFRQLDRWLKKHKVGQGHACLEATGRYSEGLAEHLHAGGHTVSVINPARLKAFGQATLVRTKTDQTDAALLAEFCRRQQPEPWTPPDPETRALRALVRRRESLLNVRQQEANRLSSGEDDPWVVTSLQTVLKCLDEQLAQVEQAITDHLAAHAQLQQRVELVDSIQGIGRTTAAALLAEIDFGAYPSARQVAAQAGLTPRQRQSGTSVHGKPRLSKQGASQLRKILYFPAISAMQHNPVVTAFAKRLAERGKAKMAIVCACMRKLLHLVYGVLKTGLPFDPNYHSPRAKQPQPA

SEQ ID NO: 209266 - protein, 416 aa, unidentified
MNAVGIDVSSRKSTVAVLRPLGEVVCLPFDVTHDIAGLASLVEKLKALDGETRVVMEHTGRYYEAVAKALHEAGFFVCAVNPLLIKEYGANSLRRVKTDKADAIKIARYALDNWADLRDFTPMDAIRYDLKTLNRQFQLASKQRTASANNLIALLEQSFPGIRKCFDSPVRSDGTQKWVDFAHSFWHVDCVRKQPFPAFCERYRKWCKLHAYFFKLSNAEEVYALAKRAVVLTPKSKVVKVLVQEAANQLSSISRSVEVYRAEMDRLAAMLPEYPVVMAMYGVGKSYGPQLMAEIGDVRRFERKQALVAFAGIDPMPNQSGDKNVRSNKSSKRGSPYLRKTLFNVIRTYLQCAPQDEPVFQFLNRKRAEGKPFYVYMLAAANKFLRRYYAKLRDYFASLDTLQPVAPIPTILKAAL

SEQ ID NO: 209267 - protein, 333 aa, unidentified
MDIAKSVFQLHGLDGAGAIVLQKRLTRARLLPFFEKLPPCLVGIEACATSHYWAREIARLGHEVKLMPAQYVKPYVKRQKNDMADAEAIAEAVTRPNVRFVATKEPDDQSAMMLHKVRLMLNRQVVMLSNAIRAHMAEFGIIAPVGRGGVDRLLAVIDDDADPRIPAEARRCLQTLTVQLGLVKRQILDNDRQLLALTRSSELSRRLMEIPGIGPLVASALVACVPNPSMFRCGRNMAAWIGLVPRQNSSGGKQRLGSITKAGNRYLRQMLFTGAMAVIRRAMQSTRRPWIARLLERRKPKIAAMALANKNARIAWAMMMTGDHHRELSATVA

SEQ ID NO: 209268 - protein, 355 aa, unidentified
MSRIKDIKTFVIGGAVFCGIDVHKNHWNLCFVCDGEIVQKTRMDVNFTRLQFLLQNYSRCRTLKFVYEAGFSGFWLYRSLVDSGYDCIITPPNKMQNSGDKVKTDKRDAQKLATYLAAGLLKSVYVPSKDIEGDRRVIRRRRQLSKMQTRAKNHIRSFLNLYGITMPSFIKRAWSLQYMSWLENLELEHPSEKFTFLQLIKGYRRIREDLLEVTRFIRSLARSNKYIKNFKLLTSVRGVGLITAMTFLLEIFDFRRFSNERKFSSYLGLTPSQFSTGDKVRLGHITRQGNAHLRHLLVESAWTVIRHDPFLQQKYDRIKARGTNGKKAIVGVARSLAIRLRRCLLDNSKYVIGCC

SEQ ID NO: 209269 - protein, 416 aa, unidentified
MTDQHQWYAGVDWASESHHVFLTDSSGKKIGERVFKHDGEGLAAMASWLTAASGSKDPIQIQIAIEIPHGPVVETLIERGFRVHSINPKQMDRFRDRFTLAGAKDDSRDAEVMASSLRTDPSCYRELAGADPVITELREWSRMAEDLGTERNRLTNRMREQLWRYFPAILELDSDLGAEWLLDLWEAVPTPTKAMRVREKTIAALLRRHRIRRFDAAHVIAVMRKLPISVAAGTTEAASAHIASLIARIRLLNQQLGEAHHQIDRLTMHLVPDDGKEPGQRKLHDVEILASLPGVGRIVLATLLAEAFDALQRRDYAALRSLTGVAPVTKRSGKSYIVLRRQACHNRLANAMYHWARVAIQHDIKSRTKYAALRGRGHSHGRSLRSVADRLLNVACSMLKSGSAFNSSPKAQNATC

SEQ ID NO: 209270 - protein, 316 aa, unidentified
MSVETWFVGIDVAKDRLDVAVHPTDERWTGSNDPAGIEALSEQLVRLAPQLVVLEATGGFEVPLVGALGARGLPVVVVNPRHVRDFAKALGRLAKTDRIDATVLAECAARVRPVVRPLPDEEARELHAWLARRRQWVEMITADENRRQQAAAPIRRQIEGHLRWRRCQLAALERELTTRVRRSPVWRESETLRRSTPAVGPVLARTLLADVPDLGRLTGQQIAALVGVAPFNRDSGPRQGHRSLWGGRAPVRGVLDLAALVATPHNPVIRAFSQRRVAAGKPWKVVLTACMRKLLTILNARMKHRTAWKPVPALGA

SEQ ID NO: 209271 - protein, 399 aa, unidentified
MGEGMVAGIDWASEVHVACVMDGDGAVASRFSFTHDGAAIRAMAGQLRAAGVAGVAIERGDGPVVEELLSAGLAVFVVPSRQIKGLRTRYGSAGNKDDRFDAYVLADTLRTDGHRWKPLRPDTGPTRALRAACRSRKDLVETRVQVLGQLRANLELAFPGTIGLFTKLYSTISLAFLQRFPTAAKAAWLSPKRLASWLASVGYTGGVSAGILYDRLATAAPGLTGAEGEARGQITLALVSVIGALNTQIAALDAEIGRLLAAHPDRHIFASLPRSGTIRAATLLAEIGDCRQRFPTDDALAALAGACPSTRQSGKRTQAVFRWSCSKKLRAAVMDFANGSRMADPWAAAIYAAAIARGCRHPHAIRILARAWLRIIWRCWQDGAAFDPALHRSRQTATA

SEQ ID NO: 209272 - protein, 398 aa, unidentified
MICVGVDVSKGKSTVAVIDKDGEILMRASEYEHTETGMTKLIQRLKMLKEEPRIVVENTGYYHWPLVNSLMDNGFFVCVVNSIIVSKFAKVQMRSGKTDRLDAMMLCRFGLAYWSELVRCQPDEERRTLLRLYSREYSHAVHLVVEQKVHFTSLLDKVMPGIKTLLEDKGGRSKLSDFALEFWHFEKISKQKPDSFTKRYCKWAKEKGYHANESKAAQIYALSQNGIPTLPCTDAVKQLVQEAARVLKHLEESVNSILAQMNALASTFPEFEVVSEMKGVGKHTASRLIAEIGDVRRFHSAKALTAYAGLDAPPYQSGKFESHNRKISKRGNKYLRKVGYEVMASLVSTKPVEDHAVYSFICRKKAEGKYYLSAYMAGLNKFLHIYYARVCEAMKEPT

SEQ ID NO: 209273 - protein, 360 aa, unidentified
MINLTTTTSPIVVGGVDTHKELHVVAVVDAHDVVIGTESFSTTRAGYRALLRWMRTYGDITRVGVECTGSYGAGLMRHLDAAGIDVLEVTAGDKADRRKRGKDDTIDAEQAAHAAYARVRTVTPRAHDGMVESLRALKIARSSAISARRVALQLIHATIISAPEELRDQLRNMTRMQLIRTLAGWRPDLSGYRDPVTATKISLKSLARRYLELHDEIADLQVPMHALVDELAPDLLARVGIGYESAAQLLITAGDNPERLASEASFAMLCGAAPLPASSGMTTRHRLNRGGDRAANSALHMIAISRWRMDPTTQAYVARKKTEQHSNPEILRCLKRYIAREVYYLLRNQQRAVHQIAPAA

SEQ ID NO: 209274 - protein, 317 aa, unidentified
MPAASVFVGIDVAKAELVIAVRPSGERWTAANDEASIQGLLKRLRRHAPTLVVLEATGGYERTAVAALAAARLPLVVANPRQVRDFARATGQLAKTDRIDADTLALFAERVRPEPRPLPDEAAHALDGLLTRRRQILGMLVAERNRLEHAVPAVRHGILQHIRWLERQLRDVDQDLDRNIHASPVWREKENLLRSVPGVGPVVSRTLIGDLPELGTLPRKQIAALVGVAPMARDSGTLKGKRLVWGGRAPVRAALYMAALVATRCNPVIREFYQRLLTAGKPKKLALTACMRKLLTILNAMIRANTVWRHLDQTETA

SEQ ID NO: 209275 - protein, 471 aa, unidentified
MHKEKQKNPERVERKKVIIKMKEGLPVEHPHAAGIDVGDTEFSVAIRSKEGGYEVRNYGAFTEDLDLIVRDLKENGITTVAIESTGVYYVPLFLKIQEAGIEPYLVNARHAKNVTGRKQDDTDAIWLQKLHTCGLLQKSFQPTGDGRAFRDYVRQRRTLVSTGADWVQRMQKALELMNVKIHTVISDLLGKTGMKMVKAIIQGEQDAEKLAAFKDNRIKASHQSIVLSLQGIWRDEHVFALKQAYEAYEFTQKQLSECDEQIKMQLDKLTAIVKDGEICSDQDKIKVLVDNKSKRGKRGKNIAVKNQYRFDVRSYMAKLLGVDLCDLEGISEITVMELIAEIGTDISQWINEKRFTGWLNLCPNTKISGGKIISSRIMKKKNHAGLCLRMAAMTVARSKTPLGDYYRRMRGKLGGKGAVVATANKMARIIYAMLKEKKPYDKTIYEKATEKNNVKKIEHYERMIAKLKKVA

SEQ ID NO: 209276 - protein, 396 aa, unidentified
MKSYILRSTQTVQSQITTVPAGSKPSVLFIGLDVHNDSIAVSIAPSDSSEVRRYGIIGGEHDDVLKLVKKLQAAHPGAVLKFCYEAGPRGFALCRCLRWHGLDCILVCPSKVPRKPGERVKTDRRDADQLARLFRAGELTGLYVPEPEDEAMRDLIRARFQVGKAQHRARQQLKMYLLRHNLRYGGQTPWTPAHLRYLAKIKMPFAVQQIVFEEMLEVISEATERLERYDTEIERAVPGWRWEPVVRALMSLRGLALLHAATLVAELGDFHRFDHPGQLMNYLGLVPSEHTTGKDRQQGGITKMGNGPARRALVEAAWQYRAPARISPHLKQRQEGLSKAVTDISWEAQRRLHHRYHHLTRVGKKKSQVAVTAVARELSGFVWAIARQVKPRDAKP

SEQ ID NO: 209277 - protein, 324 aa, unidentified
MTEPALGIDVSKDTLDVSIIIRSKTRTLQFANSPDGWRSLGAWLKQYKIPRVHAGLEATGPYSLGVALALHDAGHVVSVVNPAQIRDFVRSKLGRNKTDKVDSTYIRDYVAACAPPAWTPPSPALRRLCDLRTMRDGFVASHVEWRNRGASAGADPTAHQLAQATIAHLQLQIAAVDKAIAQTIDDDDELRGKRDLLLSINGVGETLAAIILAELPGPEVLKSSAQAVAYAGLNPRKFQSGTSINLPTRISKIGNAKLRTALFMPAMAAMRYNPVIAAVVARLRAKGRLKGKQIVIAAMRKLLVICFGVLKTRKPFDPNFQIAN

SEQ ID NO: 209278 - protein, 466 aa, unidentified
MVQKRKKAKSQKHKQTVQALKTIQPNAAGIDLGSKEHVVAGPPREDQTPNVERFGTTTPELNRLADWLAQEGVETVAMESTGVYWIPLFEILDSRGFEVVLANARQVKNVPGRKTDLLDCQWLQLLHACGLLRGSFRPCDDMCRLRALIRERNTMVEQRSDWIRRMQKYLDQMNIRVHQAVSDITGVTGMAIIRAIIAGERDPSALARLRDPRCRKTQEQIAEELTGNWRSEHLFNLRQALKMYDQLCAVIEDYDFEILNYLRMLQTDGSDDTSVPPASSPSKARNIAKRGQEPLRQGLYRLSGFDMTSIDGIGVDTASVVISELGLDYSMFPDEGHFVSYLRLAPNLSISAGKKVPNKFKATTCTRVATALRMAAITLRNSKSALGAFYRRIAWRKGASVAVFATARKLAQLIYRLVCYGQVYVDTGAEMYENRFKQRRLYQYTQVLKNMGYKVEPLTTTISPVT

SEQ ID NO: 209279 - protein, 417 aa, unidentified
MWNKATRVKSSVESASNKHIGGILMVCVGIDVAKDKHDCFIISSEGEILADVFTIPNNAEGFDTLLQAIRRSTRPEDKIKVGLEATGHYSYNILGFLLNEGLDTYVINPLHTNLYRKSLSLRKTKTDRVDARTIAAMLMSDVDLKSYTDTAYHNEELKSLTSNRFDKVRERAKLKQSVSRLVTILFPELEKLVSTLHMASVYALLSEFHGAKQVSEAHLTHLKAVLYDASKGRYGSDMATTLRDAARCSVGSVMPAKSLELRHTIRLIHELDAQIEDIEAAIQSMMGEIQSPITTIPGMGVRMGAMILAEIGDFSLFDSPDKILAYAGMSPSTYQSGQLSLSGAYSHMEKRGSRYLRYALYNATKYVCLWNPTFAAYLAKKRAEGKHYNVALSHATKKLVRLIYALEKSKRPYSTAA

SEQ ID NO: 209280 - protein, 484 aa, unidentified
MKENHRRCCGIDIHKSSVTVCVLPPVGQTHLEVKKRKFRTFTRDLRQLRAWLKDCQVTEIAMESTGQYWRPLWNLLEGQFTKVILVNPQHIKGLNGYKTDPKDAQWIADLLESGKLKGSWVPPRPIRELRDLTRQRVHILEDLNRAKNRIEQLCQTGNIKVSSVASDLFGVSGRKMLKAIVEGKRDPGWMADYAKGRLRDKRRELELALEGTFTDEQRWLLEKELRQVEWLEGQVQTLEEEIERRVEIFEEPIQRLLTIPGIDRKTAWTIAAEVGADMNAFTDARHLASWAGLCPGNRESGGKRFSGRTRKANRYVKRAMCQAAWAASHTKNTYLSAFYRRMSVRKGAPKAVMALAHHMLVVIYQVLSRNEEYVEFGGDYYDQRNKPKVVARLVTRLMKLGYKVDIQPAEGIGEPAAVAAEPETGAESVPKSSDSSTEASEGAVKPKRRGRPCKCAARGIICKHRTSPETNSMIFRTLPAGKFS

SEQ ID NO: 209281 - protein, 425 aa, unidentified
MDFKQNQKINQVTEKTLVVGIDIAKRTHYVCFVDDRGRVLQKSFSVSQSHDGFEHFYHRILTAMKENGKTEVIVGVEPTGPYWLNLAYFLDERGIPLVVVNPMHVKRSKELDDNLPTKHDRKDALVIARLVKDGRFSYPRILKEIEAELRVGSTFRSKLTEELGAVKNKMIRWLDRYFPEFTQVFPSFGKMALAALKCTPFPSDLYLKQPDELLEEYRKVEGMKAPQRPKTVQLIDVAANSIGITEGLEMARFEIATLVRRYHQLEQEIQTLTEQLVELVKTSVEYEWLSTVPGLGDITIVDLLAEIGSFSHYEDPRQLIKLAGLTLRENSSGLHKGQKRISKRGRRKLRALLFRVMMPMIRHNEAFRKLHEYYTNRQVNPLRKKQSIVVLCGKLLKVLHGISTKHKTFDVQRMMRDIPSLVEAA

SEQ ID NO: 209282 - protein, 323 aa, unidentified
MDSVMMTYLGLDVSKAKVDCALLLDGKVKSKVVSNNQDGFETLTQWLAKHGASRVHACCEATGAYSDAIALFLHEQGHVVSVVNPAQIAAYAQSQLARAKTDALDARLIARYCEREQPAAWGPPPAEERLLLALLRDLQDLQSMQRAESNRLATAHPGVRERIERHLEFLQREIEQLRQKIEKHIDHHDQLRGRRELLDSVPGLGEHTIPWLIAYLGDGKRFPGSKCAVAFFGLCPKPRQSGSSVHGKARIAKSGHADLRHALYMPAMVAYSRCKAFASFVKRLKAAGKPPKVIIVALMRKLVAIAQAILKSGKPFDPSLHYA

SEQ ID NO: 209283 - protein, 331 aa, unidentified
MSNVTTVGIDLAKNVFSLHGVDANGAVVLRKTVSRARLMEVVAQQPACLIGVEACSGAHEWARRFQALGHTVKLMAPRFVAPYRKNGKNDGNDAEAICEAVSRPSMRFVPVKTLEQQAVLCLHRVRQGFIEERTATINRLRGLLAEFGFVLPQKATEVRRRATDWLEQLPTHAAGAIRDLREHLRVLDARVKEYERSIEAHAREHASTKFVQQRLGIGPMTASAIVASVGDVREFKNGRQFSAWLGLVPRQHSTGGKQRLGHITGRGDPYLRTLLVMGARSVLQRASSQTDPLSRWALAVRVRRGYHRACIAVAAKNARVVWAMLNQHACT

SEQ ID NO: 209284 - protein, 397 aa, unidentified
MYIVGIDIAKRKHEAAVIDGEGAVIIKPFSFTNNCSGYNRLLAMLTKAKLPLDEVSFAMEATGHYWLALFTRLQKEGFRVQVINPVQTNSIRSFYIRQAKTDPRDALLIAEVIRFGHFSESTLHPENIYELRELCRGRHAIVSMQADIKRKVVALLDQVFPEYETAFTNLFGDTSMAILQACPTPKELSEMPLEEFCHLIEVPSRKRFRTEKAQELQALARNSFGFAMAGDVFSTMIRLYAKHLDFLKQQVREMDCKIAEIMDTLDTPITTITGIGPTLGAYILSEIGDINRFSSAAKLAAYAGIDPTMRQSGEYNGVRNRMSKRGSPYLRHAIWLATSSAVLHDPALKLYFQKKRDEGKPYMASVGHACRKMVSIIYAVMRDNKAYTPYIPNEISA

SEQ ID NO: 209285 - protein, 391 aa, unidentified
MIFVGIDVAKDTHYAAVSDDSGAVLVKPFAFQNNAEGFCLLLKKLSEFDRSKLLIGLESTGIYSENLICFLYESGFRLAVINPIQTATLRKTAIRKTKTDKVDTMLIIKSLMVNSYRLYSQRDAYSLKLRTLCRFRQYLKKSKARLKIQLAGYVNLVFPEFGKFFKSGIHIAASYALLKKYSSPKEIAALRTSTLCTLLSKASHGRFGKDTAEALKSLALSSVGVKNPYISIQIAQTIAQIELLEQQIKDLNSAIEEAMKSINSVLMTVPGIGAVNAACILGEIGDIRRFSKPCKLLAYAGLDPTVRQSGQFTAKSTRMSKRGSALLRFALINSAWQLTLNDTTFKAYYDLKRSQGLNHYGALGHVAHKLTRVIFKLLTSDTPFNPAKLLA

SEQ ID NO: 209286 - protein, 345 aa, unidentified
MEITTIGLDLAKNVFQVHAINGAGEVVVRKTMRRAQVLRFFERLDPCLVGIEACGTSHYWAREISKFGHQVRLMPPAYVKPYVKRGKTDASDAEAICEAVSRPTMRYVAIKSCEQQAALTVHRTRDLFVKQRTQLVNMIRGLLAEFGIEIRRGITHALSLAERIAAGEMPDIPALAAKMIASLAGQVLDLQTRLREIERELLAWHRSSDIACRLATIPGVGTVCATAFAASVTDPHQFRSGRQFAAWLGLTPLQHSSGGKERLGRISKMGDKYLRRLLVVGMTSLVRRAKYKPDAVDRWLSALLSRKPARVVTVALANKAARVIWAIMARGGIYRAPQPAGAGIA

SEQ ID NO: 209287 - protein, 349 aa, unidentified
MQDITTVGVDLAKEVFAVCALDATGAVVYGKVLKRDAFMAWAEALPPCSVAMEACGSAHHWGRWFAARGHTARLIAAEFVQPFRKSVAAKNDRNDAEAIAIASRQPTMRYVAIKSVEQQSTLAWHRMREGWKEERTALLNRLRGLLGEFGIWPARSSDKLIRALPGLSEDERLPIGVRAMVIEVREQLTALHARLARCDLEIARHAQEHPGAKRMKEIVGIGTLTASAAAATVVDARSFSCGRQFAAWLGLVPRQMSSGGKTRLGRISRRGDAYLRSLLVQGAKSALQAALRQPPDKANRLQRWIVEVYGRVGYHKTLVAIANKHARMIWAMLAKDERYDPSAWQRLSL

SEQ ID NO: 209288 - protein, 400 aa, unidentified
MLSIGIDVSKGKSTVCGMKPGGEIVYTPFEVQHTREGMSELVSLLRGSGEEVRAVLESTGSYHCPVVAALLENGIFVSVVNSLRMKRFCSQSIRKVKTDRIDAMQIALYGLAYWQELQPTRLPENTYRELQLLARQYYQMTSMLIKAKVDFNALCDQVLPGMQELMNDHAGRHKLSDFVLRYHHTTHILEMGETRFRKDYCKWAEKKGYRNCERMAVLIFATAQNGIPVLPNAPSTQIVITEAIRVLHTVEASRDAILTQMQALAKTLPEYSLVREMPCIGDTLAPRLIAEIGDVRRFHSKRALIAYAGIDAPPYQSGKFCANNRHISKRGNRYLRKTGYEVMQSYVMHKPANDPIFTFIEKKRGEGKSGKLAMVAGLNKFLRVYYGKVTELYRSLPTIE

SEQ ID NO: 209289 - protein, 358 aa, unidentified
MQLQRKELSFKNEKIYVGFDVHAKSWKVTILTEHLLHKTFVMPPSPEKLHEYLTKHFPDAHYYSAYEAGFCGLWIHYRLTALGVNNIVVNPADIPTTQKEIAQKEDLRDSRKIAKSLRNDSLNGIYIPKDSTLSERSIVRMRSQIVKDLNRCRCRLKSYLYFHGIEYPERFTKVQSHWSRAFIAWIELLQMPNESGEKVLSLLLSEVKELRKLLLETNTHIRNLSRSEKYCQSSNILLSIPGIGITTAMNILTEVEDINRFKNFDCFCSFVGLIPSTCSSGEKETVRGITFRGHRLRRIIVESAWIAARRDSALSHSFSLYSRRMESNKAIIRIARKLLSRIYSTLKNKQPYQTGKVA

SEQ ID NO: 209290 - protein, 367 aa, unidentified
MKQQTSAASETYTKGRNIIDFTGKPIYVGIDVHQKNYQVAKVCNGICLSNHHMNANDDTLIEHLRSHYPGADFHCVYESSAWGFNLQRRLTAEGMECIVVHAADVSTTDKERKRKTDPVDALKLARSLAAGDLKAIHVPDETIQKERNLIRYRAKVVGFITKSKNQLKSLLKFQGIKVPVQYEKNNWSNNFLNWVEEQGSKDPLLGDTLLLMLEQIRLLRQHLLKVEKKLRGLRKGKYASKVKLATSVAGIGPTNAMVFLLEVGDITRFKGFDALNDFVGLCPDTDNSGETERNQGITKRRHKRLRTALIESAWDAIHTDPALMDSYQVLTKRMKGTHAIIRIARKLLRRLRAVLLSGVPYQKGVVA

SEQ ID NO: 209291 - protein, 338 aa, unidentified
MTQHKIIGIDLAKNIFFLFEINHKGKNLSRKKLQRSKLLNYVASQSPCIIAMEACSGAHYWAREFVKFGHEVLLYPPQHVKSQRRKQKNDYNDAEAIAELALYQRHPAVPHKSIEQQDIQSLIRMRRLCVTERTRLINQVRGLIAEYGIVLPKGKASFRKAIPEVLEDAENQLSPILRELLSRQYERYLYIDEQISCFEDKLNQTVKQFDNAKRLMSIPGFGPLTSQAVAVWLGSGKQFKTGRDASAAMGLVPRQDTTGGNVTLLGITKQGNTYIRSLLVHGARAALRRAKFKSDKLSKWMLELQERRGPNRAAVALANKLMRIAWAVIAKNEEYQPA

SEQ ID NO: 209292 - protein, 427 aa, unidentified
MQPENIRLEKFRKLKKEVRGSAQYLLIGIDVAKEKHIAFFGTATGKTLVKGLVFDNNKQGFAKLLTEAEAVKAKNKLGTVVFGLEPTANYHKPLGQYLINQDQEVVLVSGTAVRRNRELLDGRWDKHDLKDAANVADLISQGKFQYYEHPRIEIRELRGLLSLKKKLKRQQQGLRIRIRNNLLSQYFPEMEPYYNCCERDNLAIIKNCLRPAVIGGMDYADFFKAVVSRKTGLRQDKHLHRIWQLAGESIGCEADDGTDGEARVVVEQLKSTREAIEQVEDTILKLCGSFTEYEVLISIPGFGPDISSKVLAYIGDQYRFEKASQVLKMAGFDLSAARSGKSSQDARPVISKKGKADLRYGLYQAALVASTCNKGFKKYFEEKVHGREKEKGIKTKMRVKLAAKMLVIAWTLMKKKEPFNPTYLTTN

SEQ ID NO: 209293 - protein, 428 aa, unidentified
MSNQEIIRRGKFCQIVKEIRGSNKYLVVGIDVAKDKHHAFMGMATGKSLLRRLIFENNIEGFARLLTTADAIKSQNGLSKIVYGLEPTGNYHKPLARHLIRCDCDVVLVTGQAVKKNRYLLDGRWDKNDIKDAANIADLVSRGRCLYYDCPSPSIIEIRSLLSLRRRLKREEHGLRMRIRNNLLAQYFPEFDMFYSACESESLSIIKYFLDPDTISAMEFGEFFHLVTRTRRGTAQTLRLRKIHGLAIESVGCPMGPAGEYEADLLVEKLNQVRQQIKKTADLIKDFCLEFYEYSYLLTIPGFGPYISARVLASIGDPFRFENRKQLIKMAGYDLCANRSGRTSDKAIPVISKKGNGELRYALYQAAMVASARVDLFRTYFTKLLRGRERERGIKTKMCVKLAAKMLVIAWTLMKKREPFDPSYLNIE

SEQ ID NO: 209294 - protein, 411 aa, unidentified
MLHPKMKYIYCGIDSHKNSHTAVIINCFNEKLGEITFDNKPSKFNNLLLEVKKYTPKKISCVFGMEDIGLYGRQLTAFLLSKNNSVKHINATLTCNERKKYPILNKTDSVDSECLAKILLDNLDTLPNATSIDLNWTLTTLSRRRSHIVKTNVSCKNQLHNNLSQHYPSYRKFFRVFDCNTALAFWKKYPSPSILEGTTAEKLGEFLHIHSSGFFSTDKAKSILECIDKDGDTETLYQERRNLLIEINVSQIEQNKKEISKIDKEVSLILEEMGCTLQTMIGIDDVTAGAIIAETGDIQRFSTAAKFAKFAGISPVTYASGETSKNFANRNGNRVLYRIIHDLAARNISQGRNKDKPVNAIFFEYYQKKIAEGKTKKQALKCVMRRISNIIYGLMKNKTSYVHPKLEKIKP

SEQ ID NO: 209295 - protein, 347 aa, unidentified
MNHVGVDLHKEHSWFHVLDANGNKLNSKNISNNQESLKRYFQQIPKPFEIAVEATYNWYFFVDIAEEHAEKVYLANSYELKAFAKRHKKTDKIDARLIAYLLHKGFLPVVTIADKQTRQTRELLRCRLSVVTDRSRNIFRLKALLDKLGLDSTGDFTTYKRLNEMQNHNVLGIYSTIISNYTAEIIHLSEKLYTLRKEIIALVEKDTEILYLMSIPGISYFSGALIKSELIDISRFKSFNRLCAYAGLAPRVSCSANKTFHGPLNNNRRKNLQWILLENVYHYIRLIPQKRLRYEEVKQRKGHNTAKVVLARDMLKIIYHILKEKRPFYYDKEKQIQSVATSALCGV

SEQ ID NO: 209296 - protein, 418 aa, unidentified
MPTAQFAAYVGLDWGDQKHALAWTADTVKTAPQTGTLANSPEVLHTWLQELGRRFAGRPVALAVETSRGPLIHLFGAYPWLTVYPIHPATSARYRTAFKPSGAKDDLPDALLLLELVRDLRHKLRPLQMPEAATRQLAALVQLRRDLVDRRTQALLQLLALLKSYFPQAVELVGQDLTSGLALAFLRRWPDPLALKAARPGSLKRFYYQHFVRSETLVTQRLARVQQLRPLTTEEAVLMPARLHLAALLEQLRTLAKHIDLVEQKSHTLFQEHSEAYLFRELPGAGKALQPRLLVAFGEDRSLYLDPGSLQKYGGLAPVVERSGRQAWVHWRWHAPRFLRQTFVEWAGQTVVYSAWAKEYYQHMKAKGKSHHVILRALAFKWIRILWKCWQSRIPYDEARYLKQLLARRSPHAIKLNP

SEQ ID NO: 209297 - protein, 340 aa, unidentified
MNATTYGLDIAKRVFQLYWVDAQTGEIANRKFGRDDLIVFLAQRPAGRVALEACGSAHWWARKIRALGHEVVLLHAQFIRPFVQTNKTDAADARAIWTAVQQPGMRTVATKTEEQQVMLSLHRMRSLLVKFRTMQINQLRGLLYEFGVTFRAGRVAGLDEIRERMAELEDALPRSIVLNLLEQLRRINLFEEDINQLEKRIGAWQKHEAACRAISEVPGIGRLTATALVATIGDAKTFRSGREFAAFLGLVPRQNGTGGKIRLGSISRRGDPYLRTLLIHGARSVLCHTKVPTAWQKAMQVRRPANVVAVALANKMARTAWAILAHGTSYEVHHVSNRPV

SEQ ID NO: 209298 - protein, 406 aa, unidentified
MADIFALDVSMGKSYCVWYRGKHCLKEFSLVHTKAGVNALRDMIKKAQKPIIYFEATGIYSRVIEHFCETNGLRFCRLNPLELHLKSESLRRVKTDQKDAHRIALTVQENTFRLTVPWKKDYLQLHELSRFYNQLNADWNYRLNHLHTALEQVFPELKQLFVNRTSKLALNIVELFPHPALVRPYSRVKLKNILMASTDKRISKMKAYKYADRLIDLAQKSYPAVSGDAIQVDEVRYYARQLIALTRKKEEVIKRMESIAQRLPEYILYCSFPGIGKQTAAQLMGELGDISRFDNANQLNAFVGIDIRRYQSGTYLGQDHINKRGNPIARKLLYFTVGNMIRQQHANSNHIVDYYYRLKEKRPHPKLNKVAMVACMNKTLKCLLSMIKHHEKYHYRYTDSMVPVKA

SEQ ID NO: 209299 - protein, 423 aa, unidentified
MPYRIAGIDVHKKKLAVVVADVEVEDEYQFERRWYGSNPEQLQLLALWLIQQQVEEVVMESTAHYWKPVWGGLEQYWKPSCEKREGAGRMSGTLHLAQALSNRGRRGRKKDFRDAERLLKRLVSQELTLSFVPHAEQRLWRTVTRTKYQLRRNKVRLHNQLEALLEEAHIKLSSLVSDLLGASARRMLQALAEGETDPAALAALADQRLRATPTQLRDALGACTELNPVYRRLVKMALEELQWIEHQIGQLDQEMASLLHQHQDAVQRLAEVPGLGVDSAQQIIAEVGAKAATFASAKNLSSWVGACPGEEESAGVNYSPRSPKGNRHMRRLLNQAANAAVKRKGSIFEILYRRLVPRLGHNKTIGAIAHRICQLIWMILYKGVRYEERGPAVCEQSKRVRTLRMIRTLRKFGYRVELQADPA

SEQ ID NO: 209300 - protein, 363 aa, unidentified
MSVQYVGMDVDKQKIVLARLGAGRDSRPVEQVIANTPSAVKKYFTSLQGAAEVHATYEAGCFGFGLYRQLSAMGVTVVLAAPGLIPRKPADRIKTDRRDAHSLALALRAGQLTGIYIPTEADESVRDYLRMYESLRGDLRVCKQRVLQFLLRRGISYDGGGPWTVKHRHWLSALQFPQARDRQTLDMYLSQMQELEAKCEEAAAEVESIAAQDCYRQQTKKLTAFKGIKTLIALSFVTDIGDFRRFSSARQFMAYLGLVPSERSSGNKRRQGGITKAGNCHLRRLLVEAAWHYRSYHPSSRDLTERRRGVDPAVISYANRAGRRLNRKYLHMLLRGKRSQVAVTAVSRELAGFLWGAMTNQVA

SEQ ID NO: 209301 - protein, 465 aa, unidentified
MARKSKNVKSKGHKRLPRSLKTIYANAAGIDLGSREHWVCGPPREDGTPNVQRFGTTTPELFRLADWLEEQGVKTVAMESTGVYWIPLFELLDSRGLEVVLVNARHISNVPGRKTDMIDCQWIQLLHSCGLLRGSFRPSDDICRLRALIRERNTMVEQRSDWVRRMQKALDQMNICVHHAVSDITGVTGMAIIRAIVEGERDPLALARLRDARCRKSEKQIAEELTGHWRPEHLFNLRQALKMYDQLCAVIEDYDTEILTYITKHQPEQAASHPAPAHNSKSKARTLAKRGQEPLRQALYAFSGFDLTTIDGIGVDTASVILSELGLNFSMFPDESHFVSYLRLAPNLSISAGKKVPSKFKPTTCTRVSTALRMAALTLRNSKSALGGLYRRIAWRKGASVAIFSTARKLAQLIYRLVRYGQAYVDTGTEAYDARFNQRRLKFYTKALKEMGYTLQPLTENTLAA

SEQ ID NO: 209302 - protein, 379 aa, unidentified
MQTIIKQCVGIDISKGSFTACVCRKLLSGEALLSSVESFENNRTGYNQFIKWSRKITNPAVEVLFLMEATGIYYEGIAYHLHKLRQSVCVILPNKVKHYAKSLNVKTKTDIVDARIIAQMGAERDLPHWQPPSAILKQLRDLTRLYTDLKKERTVYLNRLESENASAAALPFVIKSNRMILKELEKQIKQCEKEIEKTLFSEEWLAEKVNKVMTINGVGLLTLAIIIAETQGFALVSSRKQLASYAGYDIVQVESGTSVKGKTHISKKGNSRIRAALYFPALAASRYNQELKEDYQRINIAKASKMVGATALQRKLLLLVYTLWKNNDVFRTSGDQETKLLLRRDEVPKKVGNPKELPTQDELPYDQSSEVLLRQLQRS

SEQ ID NO: 209303 - protein, 343 aa, unidentified
MKYYVGLDVSLKQTSICVVNETGSVVREGVVDSDPEMIAAFVRSKAPDAIRVGLETGPTATWLWTELKRLGLPVICIDARHAKAVLKMQINKSDRNDAAGIARIMQTGWFKEVRVKDIHSHALKALLAGRALLVKIKRDLENHIRGLLKNLGLVIGRAKFNVFSVRAGELIEDRPELMAVVGPLLKAREAIEQQIDDLDGKVLKLARHDAQVRRFMTVPGVGPITALCFKATIDDPTRFKRSRSVGAYIGLTSRRHASGEMDWSGRISKCGDAMLRSYLFEAAGVLLTRVPKWSVLKAWRMRLAKRNGLSKAKVAVARKLAVILHRMWIDGTEFNWSKKQAAA

SEQ ID NO: 209304 - protein, 413 aa, unidentified
MEGLSPLYRRVAGIDVHKMLHVVTLIIEEPDGTIKQQSREFGGFKRDCCALTTWLLESNVELVVMESTGIYWKSLYAHLERAGIQAWVVNAHLVKHVPGRKTDMNDSQWLAVLARFGLVRGSFIPPQDLRELRLVSRYRRKLTAMRASEINRLHKILDDGGIKLGGVVSDINGLSARAMVTGLIEGRSITALLDMARGRLKLRRDDLQAALDGELSARHRLVLEHIHEHIEILEHSLAELDAYILAAMAPYQWAHRLLQTIPGIDQIASALILIEIGDDMTRFGSPERLAAWAALCPGNNESAGKRKSARIGKGSSVIRYIMCECANSAWKTKSSLAAKYRSLMVRKTHKTAIIALAHKMIRLIFLLLTRKVAYHDPQIDYEAISAKKNAPRWIKQLKVIGQWPNNASTSATT

SEQ ID NO: 209305 - protein, 344 aa, unidentified
MGSMHFIGLDIHKKTISYCIKDRHGSVQGEGMVAATRQDLDAWMKSLPQPWTVAMEATMFTSWIYDYLLPHAAAVKVAHPLMLRAIAAAKKKNDRIDAAKIADCLRCDFLPEAYMVPAAIRQRRRTLRYRKLLIRQNVQLKNKIAQMLMESGVSYNKQKLHQQGYFHQVLPTNREIDPSLWPLLKLSREMIEHTHKTEQALLRSLERDPLLIDRVKRLMTIPAVGPVMALTWVLELGDIHRFRSIKQVISYCGLCSAEKSSAGHSLRMPISKQRNKHLQTVLIEAAHISLRHHPEMVELYDRERTRGNCNQAILAVARKMAGYLLAIDRGERAFVRREKQSVAA

SEQ ID NO: 209306 - protein, 429 aa, unidentified
MTENNHTPQGLTLVAIDIAKDHHDVLIEPPAPARRRRLRVANQREDFEHFARYLRGLKSAVLIGFEATGNYHRPLAYFLHCQGFALRLIPTLALARTREAMHNSWDKNDPKDAQVILHLLKTGLTQIWHDPVVNRINDMRELSKTHCQITLARVRVWHTLRNHYLALYFPEIDRFIRSNYNVWVVQLLAAFPTPASIIAMHEQEFQAQAWNLAGRKVNKQALLAEIYAAAKQSIGVPVALDSAAITMFRLVLEQYLALNRLRERIAEQAATLLADNPDSRRLMTVPGIGPANALTILAEAGDLRRFRHHRQFLSFCGLNLSTRQSGKSRGQSHISKYGNARLRTALWMAAQSAVRMRENSFRRKFEHYVRGNPLDADLRRKAYTAVTAKLARVVFGLIKQQTDYRPFFEHQFQVEEPSRARAVGAAVTP

SEQ ID NO: 209307 - protein, 438 aa, unidentified
MLDNQSMLPIPVIQRTYRFRKGFSMALKIVYQICCGIDVHKTFVVACIASTNPSGITVYKSHRFSTYTQGLRELLQWLKYNNCQDVCMESTGKYWIPVFNILENSCNIVLAHPKYVKAIRGKKTDKKDAKWIADLFKHDLVASSFMPPADIRQLRDLMRYRFKLTCFMASEKNRLQNCLTVSNIQLGNVVSDTFGKSSQKILDKILENPLDTSFDIKPLIHSSMEKKLSELELAVDGYITPEQAGKLKIIKRHFEDLESRKAELEKLILALASPYQQELDLILTAPSFKNIFSAITVIAEIGVNMEAFPSAKHLCSWAGLTPTNNESAGKKKSVRVSKAGCYIKPLLVQCATAVVKSEKHPEIRNRYLRIKKRRGHKKAIIAIARMLLTALYNMLKKKEPYNAELYKKSDVFPVEREITVEQAILLAQHQGYKIKSAT

SEQ ID NO: 209308 - protein, 419 aa, unidentified
MNATQWNEQPYFAALDWARSHHDVVIIDRLGQIKETIRFDHTAEGWQSFQRLARQHPHLPVAVETSHGTVVEQLFAAGVSVYPINPKAAERYRERQAPSGVKDDQLDAWSLADALRLDGHMWRALAMRDPIVAELQLLCRDEIALIEQRTAFVNQLKQALHEYFPAALEAFDDWVSPSAWNFVLTFPTPSQLQHAGRRRWEKFLHVHKLWRPDTVETRIAIFGRATALSGSAPTVAAKSLLAVTLARLLRQLEGQLDAYRERIGAVFASHPDHDLFGSLPGVGPKLAPRLLSEIGDDRARFFDAEGLQCVAGTAPVTFQSGKRLRYQKIRHACDDTLRATVHLWANLSRPQCAWAEAYYQAHRKKGQSHACALRCLGQRWLKILWKMWQSRTPYDEALHTRNQTQHGSWVLALSSPQSS

SEQ ID NO: 209309 - protein, 392 aa, unidentified
MYIVGIDIGKNHHEASIVSPEGKQIGRSLRFATTHKGADSLMSFIFKNIGNSPCVFGMEATGHYWYPIYSFLKAKGYTIYVINPIQSDSLRKMYIRQTKNDSIDSFLIAEVIRFGQFGTTSMADENILAMRQLCRYRDSVISSRTEIKLRIGTIMEQIFPEYEKQFSSLWVSTSMGILEKYLTPENIENAPIDELFEIIKDKSHNRLTRAKAISIKEAAADTFGIKIAQDAFSFQLKQLIDRMNFLDKQIEALDCQILEYYEKFDCYLHTIPGIGMIAAATILAEIGDINRFKSSSALVAFAGIDPTVRQSGEFSSTHNHMSKRGSPYLRHAIFLAATTCSFHISPLNAYYKKKRDQGKHHLTATGAVARKLTSVIYAVLRDSKPYEPKSFC

SEQ ID NO: 209310 - protein, 320 aa, unidentified
MTILDSQVVVGVDVAKDEIVIYRSDLEKTLNIANKRSTLKQWLKTLPAHSAIALEATNIYHLDTTEMAHEMGHDVYVIDGSRLNKYRDGIGMRAKTDTLDAELLARYLSRESDRLRIWNPPPKAYTQMKSLLRRRAQLVRACVALKQSWKNESLLKEHFNQLLAAIAQFEKMIQKTLKEIAEEGGIDDQVKRCQAIEGVGLLTATAATTAFMRGEFANSDEYVAFLGMDPRVRQSGQKDQKRRLSKRGDSEFRRLFHNSAMAASRSPTWKPYYERYLARGLKGTQALVILARKLARVMFALMKNQTEYKPNSMFGCSPQT

SEQ ID NO: 209311 - protein, 355 aa, unidentified
MRTYYVGMDVHLASIVIVVLNGAGKIVEQIVLETSAARVRSYLKQLHGRVYVTFEEGTQAQWLYDVVHPLVTKVIVCDARQNKLLAVGNKSDRIDAHKLAELLRNGALKAVDHADHGVRALKELVRNYDCLVGDTTRVMLRLKAMFRGRAIACSGHEIYRQDRRERWLAKLTERGAKRRATYLYNQLKALKELRHEAKLEMLREARRQAAYPYLLSVPRLGAVSVAQLMAIVGTPHRFRSKRQFWTYVGLAVVTRTSAEQEMVNGSWRRKRRPIATRGLNRNHNHLLKRVFKSAATSACHSAPFQTAYQARLKQGMDPALARLTIARQIAALTLSIWKREQLFEAERMKQPEVLS

SEQ ID NO: 209312 - protein, 316 aa, unidentified
MTQSTKSVAGIDVAKSHLDLALGPEGEVRRFPNTLAGWRAIAELVDRHGVERVGLEATGGHEAGVAAHLRAAEIAVTILQPIQVRAFARVRLRRAKNDRLDARLIAAFLAEVDPPQRVHHPKTAALLARLTFLEQTEDDMARLKIRREHVVEDDLKALVAEDLARLKARRAALLADLVTRLQDDPDLARRLELLVSIPGIGRRTAVALIVRLPELGDVSREEIAALAGLAPYDRDSGASSGARHIAGGRARVRKSLFAATMPAAYRWNEALVTFRDRLLARNKPPKVALIACARKLLVFANAVIARGSPWTQKIPA

SEQ ID NO: 209313 - protein, 309 aa, unidentified
METIVGIDVSKDRLDVAVLPQGEAFAVDNDDAGIGELTGRLKAIGADAIALEATGGFEMQAVAGLSSAGLTVLVVNPAQVRAYANAIGRKAKTDPIDAAVIAAFVLATKPEIRPLRDAETQALSELVARRRQIVQMIVAEENRLRMVLARQAQKSIKRLLAALRRELESLDADLDDHIRKSPIWRVRESLLVSVPGVGPTTARKLLAELPELGSLDRRQIASLAGLAPWTRQSGKWKGKSFIGGGRGKVRAVLFMAALVASRHNPGLKAFRDRLVAAGKPKIVAIVATMRKLLTILNAIIRDAKPWQNA

SEQ ID NO: 209314 - protein, 337 aa, unidentified
MKFCGIDLHSNNSVVVITDETDRILVSRRSPNDLSKIIQLLEPHRIELQGVVVESTYNWYWLVDGLKDAGFDVMLANTVAMKRYDGLKHSDDQDDAAFLAHLLRLGILPTGYIHPPQERALRDLARKRVQLVRSRTQHVLAVENIIARQLGSRISSAAVKRLSATSVAALGLPDDVALSIKANVAVIETLNLQIRCLEERLLRGARLRPEYALLKSMPGVGEVLATVIMLETGNIERFADVGKFASYARCVNSGHYSNGKKKGEGNTKNGNAYLVWAFVEAANFARRFNEEAERFFDRKKAKTNNVIATKALAHKLARASYHILKEKQPFDAKRCFA

SEQ ID NO: 209315 - protein, 364 aa, unidentified
MKEEKTKTRYVGIDLGKRTYQMAVVGKGGKVTMSNGTTYPAGRQGLYKKLCPDDIVALEACSLAFTMAKEIETAVGCKVHVLNPGRLSIIYKSMKKTDREDALKLAHILQDFAEERLPVVAVPSDKEMKRRKILANSRRVQSNRNRLINLLHALFVAQGITSKVRKDLATEGARKEAIKELGGIELDEAEYLVQCLDLCEKRIEKLDKMIAEESAGDEEIERLQSIPGVGPKVAFGFASHVGAARFENAGQLSNFLGLVPRVYMSGDTVRYGPITKRGNSHIRALLVQAAWALVRSKTGGKLKEMYEYMTIEKSKNKKKAIVAVARRLAEMMYTMMRDKTWYARRKFKSGKDVAAELAQQAMSA

SEQ ID NO: 209316 - protein, 331 aa, unidentified
MSNIIGIDVSKANLDCAYLRDPDQDKAKRKSCPNKVHSFAALITWATARSGLPIQALAFIIEPTHVYHEQLVHFLFNAGATVYLVNPGRVRKFAEGIGILSKNDLVDADLLVRYGLMSRNLIAYQPVAQEVNDLRSLLNRLDALEHNLRSELNRQEKVGKTIVFHRLEQQSIARSVKRLRAEIITFKRAIRECVKSTPSLQQDFKLLRTIPGIGAKTAWIMIVILASRSFMSAPEVASFLGLNPIEKRSGKSQYRRPRLSKSGSGHYRQKLYFPAMVATRKNPDIKALYERLLAADKTKMCALGAAMRKLVHICYGVVKNQTPYQAQTISS

SEQ ID NO: 209317 - protein, 412 aa, unidentified
MRVIVERCCGLDVHQETVVACLLIGAPGDRPTKETRTFRTVTRDLEALRDWLAAAGVTHVGMESTGVYWRPVYAVLEGHFDLIVGNARHIRNVPGRKTDVKDAEWIADLVRHGLIAKSFVPPRPLREMRELLRYRRKLTESQAAERNRLLKLLETANIKLASIMSDVFGVSGRAMLRALIDGQASVEAMADLARGQLRRKRSDLILALEGRMEEHHRFLLATQLRRLEAIEQDIAALDLRINERLEPYRMPHALLTQIPGVDWLVAAVIIAEIGVDMSVFLSVYHLSAWAGVCPGSHESAGRQKSGRARKGNVHLRTMLVGAAISAARKRGSYLKDKFHRLKARRGAMRAALAIAHKILVSAYHMLAKGLAYHDLGEAYLDQIGQSRTVANLKRRLERLGYHVTLERTTQAA

SEQ ID NO: 209318 - protein, 417 aa, unidentified
MANKIAGIDVHKKVLMVVVVDRATPDEKPERRRFPTMPTELRHLSIWLQERGVEEVVMESTAQYWRSVWLELEPHMSLHLAQAFSNKAPRGRKHDFKDAERLARRFLAKELIMSFVPDGEQRIWRNLTRMKLQLIRDRVRLHGQIECLLEEMRIKLSVVVTDLFGASGLRILHALAQDETDPKNLALLGDDRLKCSEEQLIEAVTGRSHPVHRQMLGLQLERLRHMNEQIATLNTMIAQAMKQHQDAVIRLAEVPGFGIDSAQQVIAEVGANAAKFSSAAEFTSWVGTCPGKEESAEENRSSRCAKGNKYMRRILNQVAHAAVRSKGTHFQAVFRRLLPRLGYLSAVWAIAHRLCRLVWKILHEGVRYIEQGTDYEPQLLIHRARYLAKQLRKFGYDLRVTPTNSDPVSIARGSYSG

SEQ ID NO: 209319 - protein, 343 aa, unidentified
MKYIGLDLHKKSIFATVLDGDGKILSKTKIGSNSRDIFYYLKNQGKKDELSVAMEASYNWQYFYRAVEEVADNIVLAHPLKTRIIGEAKIKTDKIDSSILAHMLKADMLPAAYVPKKSTMQDKMLLRSRISLVRIRTAIKNKIHAIIDKNRDSYSGLENISDIFGKAGCQILRDTKINSIDYHILIGYLDLICQINKKIKDLESLIDKRSIEDSQTLLLKTIPGIGTFTAFLIKTEIDDIARFCSKEKLCCYAGLVPSTHGSADKLYHGRIVKQGNKFLRWALTEAAQVSIRYSEYFRYYYSKVRSKKNANSATIAVARRMLEVIYIMLKENRAYIEKPVDIK

SEQ ID NO: 209320 - protein, 340 aa, unidentified
MEITTIGLDLAKNVFQVHGVNERGKAVLRKQLKRDQVAPFFANLPPCLIGIEACASAHHWARKLQALGHTVRLMAPQFVKPYVKSNKNDAADAEAICEAVTRPSMRFVPVKNVEQQSVLSLHRVRQGFVKARTAQANQIRGLLGEYGLVVPQGIAYIAQRVPALIEDAENELPGSFRLLIQRLLDHLKALQQQVDEIEAQIKAWHRASEASQRLEKVPGIGPLTATVLVASVGDAKNFDNGRQFAAWLGVVPRQHSSGGKPTLLGMSKRGDAYLRTMLIHGARSVIYRATQRADADSWLVKLTTRRNKNVAAVAMANKTARTVWALLAHGREFKPGYAAA

SEQ ID NO: 209321 - protein, 401 aa, unidentified
MQVVYEQCAGLDVHKKSVVACVLTSSSRGKVQQEVRTFGTMTRDLEAMSAWLVAAGVEQVALESTGVYGWPVYNLLEEAKLVVTLVNPQHTKQVPGRKTDVGDAVWLAELLRHGLVRASFIPPADIRALRELTRYRATQVRARAKEATQLLKTLESANLKLASVATDPMGVSGRAMLAAVAAGEEDPETLAQLAKAGLRKKLDDLEHAFIGRVKPHHRTLIQVSLDHLRFLERSIAQLDQAVAEAMAPFAQAQALLRTVPGIGADMDRFPSAAHLASWAGLCPGNKQSGGRRLSSKTTKGDVWLRRILGEVAWAAIHERGSVFRARYYRLKPRLGAQQALVAIMHQRLKVIYHLLKTGEPYQELGSDSSQPADPQRTARRLTKRLERLGFTVTLAPAPAAA

SEQ ID NO: 209322 - protein, 314 aa, unidentified
MAEGNVYVGIDVSKACLDVAVEPSGEYWRVANSDQAITDLSARLARLKPACIVVEATGGYEAKLVQHLCEANLPVARVNPGRVRRFAQGLNWLAKTDKIDAKLLARFAEKANPRLTKLPTEQERRLAALVKRRKQVLEMLVSEHNRLETADPDVLPFIQDSITMLQKQLNVLDQAIRSLIDNTPDLKSKKDLLLSVPGVGEVTASTLSSQLPELGTCNRKEIATLVGVAPFSHDSGKKRGKRVIKGGRPAIRSVLYMATLSAARYNPVIRKFYHRLIQYGKETKVAIVACMRKLLTILNAMIRDGQPWNPVFSS

SEQ ID NO: 209323 - protein, 366 aa, unidentified
MTGAESSWFSPRRDWKPAAASDVRPRMSLVLQSLLPDPHSCQGTSPHQQGWDTKMAMLSFCGIDVSKDRLDVVVLPEGWFFSVSNGTAGWAELVVRLRPLTVSAIGLEPSGGYERGIIRALLAAGLSVRRINPNKLRQFARARGVLAKNDRLDARLIAEYVAIMPTRVVQRDAAVERLAEIVTMRRQLCDEHVAAENQAAHLEDAMLRRLSKRRQMRLEADIRLLDKRLAEMVAANVALAQRYELLTSMPGVGPVLAVTLIALLPELGKMSRKQIAALVGLAPYDFDSGKLKGHRSIYGGRMPVRNVLYMAALSASRYSPALKAFHNRLADADKKSKVIIVAVMRKMITTLNAMLRDNAVWQPRSA

SEQ ID NO: 209324 - protein, 313 aa, unidentified
MAQILPTVGIDVSKDWLDVAVHPTKVQFRVANDAAGWRELCRRLAAIAPRAIGVEASGGYERGLTHALLAADLPVRMVNAWKLRQFAKAAGLLAKNDRVDAYAIAWFTATLPSRAVRYDPAREHLAELVRARRQLVDARQAFANQLEHMRDALLRRQMARRIRQLEADEARLDQRIVQTIAAEPDFAARQELVCSMRGVGPVFGSTLVALLPELGHVTNRQIAALVGVVPYDFDSGKMRGLRCIFGGRADVRRVLFMAAQAAAIWNPDLKAFKQRLRAAGKKPKVAIVAVMRKLIVTLNAMLHSGTKWQPKTV

SEQ ID NO: 209325 - protein, 375 aa, unidentified
MQKKVRFLGLDVHAETIAVAVAEQDGEVRSLGVIPNRAESVRKLIRKLGTGEHLQACYEAGPTGYVLYWQLTELGVECTVVAPTLVPVKAGDRVKTDRRDAAKLARCHRAGDLTGVWVPDASAEALRDLVRTREAAKQDQLRARHRLSKFLLRTGRRPVIGVKAWSQPYMAWLRQLGYEQAAQEWTRLDLLHEVEHMAERVKRLEEAIREAVKLAPAAMQEVIRGLQALRGVAEISAVTVVAELGRISRFESARQLMGYSGAVPSENSSGLRQQRGTITRTGNAHLRRIAIEAAWSYRLRPAVGPALRKRQEGVPEEIKEMAWKAQLRLHKRYAKLAAAGKEQCKISTAVGRELLGFIWAIGVKTETAASRTMAA

SEQ ID NO: 209326 - protein, 412 aa, unidentified
MNAVGIDVSKGKSMVAILRPLGVVVAKPYEVSHTAPELQKLADFLKSLEGETKVIMEHTGRYYEAVAQVIHDRGLFVSAVNPLLIREYGGNSLRRVKTDKADAKKIARYGLDNWTELRQHTPMDTIRYVLKTLNRQFHLTSRNKTACANNLIALLDQSFPGVRSWFLSPVRPDGSQKWVDFARTFWHVDCVRSVSQAAFAERYRKWCKRNSYVFARAKAEQMYREAKDMIALVPRSATTKLLIGEAASQLLSISRTAEVLRAEMNRLAAQLPEYPAVMGMFGVGESLGPQLMAEIGDIRRFAGKQSLVAFAGVHPMPNQSGMKESRSNRSSKRGSPYLRKSLFNLMTMLLLLAPPDEPVYQFLDRKRAEGKPYYVYMTAGANKFLRIYFGRVRDYLAASAAPSHNIPSADPQ

SEQ ID NO: 209327 - protein, 336 aa, unidentified
MAVTIVETRAITGGVDTHADVHVAAALDPVGGLLGVQEFAVSAAGYARLLGWLGGFGTVCLVGIEGTGSYGAGLSRHVTAAGVRVVEVDRSDRQDRRRQGKSDPLDAVSAARAAQSGRARGAPKGRDGAVEAIRALMVAKRSARSGRTQTINQARALIVTGPDDLRARFSRHATADLVAELTLLRPRPGAVVGYATRIALRELGRRAEFLDAQLGRLDDLIALHGVGTDTAALLLVAAGDHPERLRSEAAWAHLCAVAPIPASSGKTVRRRLNPAGDRQANHALWRIVITRMSSHPPTHAYVERRTKEGLSKKEIMRCLKRYVAREVYPHLRAAAD

SEQ ID NO: 209328 - protein, 344 aa, unidentified
MGEVSTIGLDIAKSVFQVHGVDDAGAVVMRKRVSRAKVLDFCGGLSPCLIGIEACPSAHHWSRELQVLGHTVRLMPPSYVKAYLKRSKNDANDAAAICEAVTRPSMRFVPIKTKEQQTGLMLHRSRQLLVRQRTMLSNAIRGHMAELGIISAKGRNGTAELLKVIANSEDARIPPIARFCLDLLAGQYTSLTAEIGSIDKRIHAWHRACEDSRRLEEIPGVGPIVATALVAEIGDWKQFRSGRNLAAWIGLVPKQHSTGGKERLGSITKQGNRYLRWLLVAGAMAVIRYARQHGTKRAWLTRLMARRPAKVAAVALANKIARMAWAIMARGERFTEPRLLQAAV

SEQ ID NO: 209329 - protein, 327 aa, unidentified
MMFIGIDISKEKIDLSWLRDQLTNKIKTKVFKNKRQDFVTIEKWLLNTTKSAANELVITLEPTGVYHEALMYFLHEQGFNIILANPSKAKKYADALNIIHKTDKSDATMLAHYGCAKHAVVNYWQPEALAIRELKALIRRLDALESNRQREANRLEASEFSNVSARVCQSIKVTIAFLDDEIKQLKSDIDNHIDNEPDLKRNRKLLESISGIGPVLSRELTYLFAAKKFNKAKEAAAYCGLIPRHNESGKLKGRTSISKLGPARIRCKLYMAAVVAGQWNKTIKRHKLTLINNGKTPMQAVCANMRKLIHICFGVIKNQEAFKLQES

SEQ ID NO: 209330 - protein, 349 aa, unidentified
MVMIGVDSHKRTHTVVAVDETGRKLGEKTAPATPDGHLELRAWAGRFATRTWALEDCRHLSRRLESDLLRAGERVLRVPPKLMAGARRAGREPGKSDPIDALAVARAALREPDLPVAFLDGPERDLRLLVDHRDDLVAERTRDMARLRWHLHELDPGNEPSPRSLDRTKVLAALEARLADLPGTVARLARALVARIRALTAEIDALEREITELVRVLAPSLLALRGCGPLSAAKLVGEAGGIARFRSRAAFARHNGSAPLPVWSGNTVRHRLSRGGNRQLNAALHRIAITQVRIGAEGRRYFEQRITAGDTKTEAYRALRRRLSDEVYRRMRDDDSLQVTARASLAAAA

SEQ ID NO: 209331 - protein, 349 aa, unidentified
MQRPKYFVGLDVAAETFVASAGVEPWQLTVKPHEFANHLDGFTKFLGWLQEHRLEKARTVMCMEATGVYGEALAYFLYANGYSIAVEPPLEVKRAFKPYGPKTDPVDSCQITEYTCRHWDELHLWQPRSAILEQIKVLLTTREQFVAQSTAHQNALKTLRRKVMRTPLAEQIHLEALHQIKMHLRTLEQEIRRLIDQDPSFGQMVGLLVTIPGVGLLLAAHFLVLFHSAPEPPNHKQLAAHLGICPHEHRSGSSGHPYATSRHFGPSAMRRLLYLAAMSVRAHQPTFRHYFERKLAQGKPGKLVVNNIANKLLKIMCAVLRNQTPFIPNYHSVNPIVFRKALTMSSYSQ

SEQ ID NO: 209332 - protein, 432 aa, unidentified
MNTPPYDLVIGLDRSDRKADLHLIRVADQHRQLQTIDTSPEALWEWLLQLRQEYPQGRIALCLEQPAAHLMAYLEAYAWITLYPINPLTLQKYREAFVTSRAKDDTKDARYLAELLLAHHDKLKVWAPEDEPTRAIQQLVYHRRSVVNERVGLTNRLKDLLKQYFPQALVLCGEDLWRPLATRFLLKWPSLQAVQKAKTEKLKEFYYLNGSRSAKLMEQRLALIEKAVPVTDQAAVLDSFILRVQLICRQLQDVVATIKTFDLRITEAFKAHEDHEIFSSLPGAGPVLAPRLLATMGSQRERFESAAKLQNYTGIAPVTKQSGGKCYIHRRYLCPKFHRQSFHEYAKESILWSRWAAAFYLQQRTKGCYHHASVRALAYKWQRIIWRCWQSRKPYEEKTYEAALRKGKSPLVKLFDQVELGKSPLKKKLKKN

SEQ ID NO: 209333 - protein, 346 aa, unidentified
MTIVEDARAITGGVDTHADTHVAAALDRLGGLLGVREFPATAAGYAALLGWLGGFGTVALVGVEGTGSYGAGLARYLAAAGVRVVEVDRADRQDRRRAGKSDPLDAISAARAAQCGRAAGAPKGRDGAVEAIRALMVARRSARAERTQAINQARALLVTGPEELRTRFARHAPAPLVAGLAALRPRPGDVPGYATRVALRELGRRARFPDAQIARLDELIVPLAAARAPGLLGLHGVGPGTAALLLIAAGDHPERLRSEAAWAHLCAVAPIPASSGKVTRHRLNRGGDRQANHALWRIVITRMSSHAPTRAYVARRTAEGLSKKEIIRCLKRYVAREVYHHLRAGA

SEQ ID NO: 209334 - protein, 315 aa, unidentified
MDERPTIFVGNDVSKDRLDVHLRPLNEAFHVPRDTKGLEALARRLGDLPVALVVRKATGGFEATVAAALAAAGLPLRIVNPRQIRDFARAMGRLAKTDTLDAEVIALFAERIRPPVGPLPERERSYFAELVSRRRQIIGMINMETNRRDQAVDKQLTRRLSRHIAFLEKELAELDGDIGQTIEASPVWCETEALLGSVPGVGDLTARTLLAQLPELGTIGRHRLAALVGIAPIDRASGLMRGRRSIAGGRTSVRGVLYMAALTAIRRGSPFRPFYERRTQRGRPRKVALVAVMRKLLATLNAIVRDRTPWRPLTA

SEQ ID NO: 209335 - protein, 404 aa, unidentified
MYYVGIDVAKEKHYVCILDDTKEIAVKPFWVYTDILGLRDLLAKLAGLSLNNDDFIIGVESTGAFSENLYEYLTDATYKVVLLNSYQTAKYRDFSTMKKIKNDSIDALVIAELLASDKYKESYISNDDYQSLKVLGRLKKSLADKIKTLQREISTVMATVNPEIGKIFPNIFTKTALAIIKAYPTAVDIQKATPKKLTKIFRHIKGNNFNDEKAKFLIELSKSSIYGGRAHESRALMIRTNIRILELLCQEKDEIEVQINSLLYNKIETIDASIENIKTIPGVSDKTISAVLGECGNIKRFPSVKSFIGYLGLYPTQYQSGNSMRVGRLAKRGIPIAKHALYMAAVASVIHNEQLRKIFRDKVSTGKSKKEALIIISKKLAAIIYSVFKYNKPYDENRVFIPHK

SEQ ID NO: 209336 - protein, 345 aa, unidentified
MPIVGGLDIHRKQLTFDYLDTVTGEVKRGQIAPADRAHLRAWLGRFGGRHDVAFAMEGCTGWRYVAEELAAAGIAAHVGEPADTAAARGRKRHPKTDKTDSRHLRTLLAEGRLPGCWVPPAHILEYRALLETYHDLRTAHTAWVQRIHAVFFHQGAPALGEGALRTEADLARLRAAAAAHLSAAGQLQVATALEMIAAVEARMDVPRHQLRQAARQLRGAKVLAERLYGVGPVTALALTCWLGGEGRFSSSRKAVRFTGLDITVWSSDRKGPPGRLSRQGPPVLRWAVYEAGKTHARASAPDHGYYAQVKDRKNGKRAALSEARKIVRQACHILAELGDDALTAV

SEQ ID NO: 209337 - protein, 447 aa, unidentified
MGEPISAGKRRARLKVINPRSAGIDVGSRFHVVAVPVELDPNPVRKFSSFTKDLIALAEWLLAVGISTIAMESTGIYWVPLYEILSGKGIDVFLVNARHAKNVPGRKTDINDAQWLQQLHSYGLVRASFRPDQKITELRSYLRQRDQLVRYRSSHQQHIQKALMLMNLQLHHVVRDISGLTGRRIIDAILSGERDPERLASLRDRRCKESAATIAAALEGNYQDDHLFSLKIAVELFDTYSEKIRACELAAQSLMTELAGSDYQDPGSQPGDWKICGHGFAFNPTHLIQALSGHNLLRLPGLGPTTVLTLISECGLDMKRWPSAQHFVSWLGLSPQNRISGGKVLSSRTRQDTTRAGSAFWMAAVPLGRTNTALGAFQRRLAARAGKSKALIATARKLAILYYKTLRDGLVYQDPGAAAYQEESRDRQIRGLQRRAIALGFQLVASA

SEQ ID NO: 209338 - protein, 322 aa, unidentified
MASFLGIDVSGLSLDALVRPEGIKISVPNNLAGFVALEKSLRGLNIKRILLEATGGYEREVMRFLQDAGYKVLRVNPRRARSFADSMGIKAKTDAIDAEVLAHFAEVIPDKPALQISPDRALLRELLQQRDRLVQQRDDDRRRLKQTQSMVVAHFLKANLQHFRLQIKLVEQAIKQQAAILNDERIAQLIQVKGIGLVTAGKLVALLPELGRVESREIASLVGVAPFNHDSGKSVGKRSISGGRFEVRRALYMACLVAVKHNPALKARYEALRGRGKFAKVAIVACMRIFIVRLNAMLRTGTPWRDLALPVPENTAQLQGTA

SEQ ID NO: 209339 - protein, 340 aa, unidentified
MEHIAAVDLHSDNGYYGIIEPDGKRVYQKRLPNDLSIVLHELEPYRETIRCIVIESTYNWYWLGDGLREQGYRVKLANPAKFEKYNDLKYTDDKTDTFFLTEMERLNILPTGHIYPREERGLRDLLRRRMLLVQQKTSHILSFQSLISRQTGGSITSNDIKKLETEDVEKLLEGQEKHVVFAGQSNLSVIGFLQERIRLLEKMVLASARLRTEYEKLQSIPGIGKILALVIMYETGAIGRFKAAGNYVSYCRCVKSNHLSNGKKKGSGNRKNGNKYLSWAYVEAANYSRRYCEEAKKYYQRKLAKGNSAIATKALAAKLCRAAYFIMRDQVEFDVTRMFG

SEQ ID NO: 209340 - protein, 467 aa, unidentified
MKRRPNATSKKKRQTHRKRVANFLEKIHLNAAGIDIGSASHWVAVPEDRDDQAVREFKSFTPDLHALADWLDACDIETVAMESTGVYWIPLFEILQERGFEVLLVNARHVKGVPGRKTDVVDCQWLQQLHTFGLLRGSFRPDAEITALRTLVRHRGTLVREAAAYIQRMHKTMTLMNIQLHNVITDVTGVTGMAILRDIVQGHTDPTLLARHRDYRCKASKKEFIASLTGHYRPELVFALRQCIELYDVYQDKIRVCDEQIEILFRTLQAHCPTPTQELSTRPSTKKPRKNEPHFDIRSPLFALAGGVDITEVPGIGPYAALQLISEIGFDMSRWPSPAHFTSWLTLAPHNKISGGKLLGSATQPSSNRAAKTLRLAVMSFTRSDHALAAFYRRLAGRIGKPQAITATARKLAIIIYCMLRDHTPYRDQPAAVYDQRQRKRVIHGLRKRAQSLGFDLVQLDTGLVLQ

SEQ ID NO: 209341 - protein, 413 aa, unidentified
MSSGVVIGMDPHKRSATIEVMDGEETILGGGRFATDVAGYQAMVKFGQQFEQRTWAIEGCNGIGKHIATRLLADGEQIVDVPPKLSARVRVFATGQGRKTDATDAHSVALVGTRMSGLRPVVADEQLAVLRLLIDRRQSLGDDHTRMVSQLHRLLLELIPGGAKKHLSAAQAKALLGKVRPRDTAGKTRRRVAAELVADLERIYERTKSADKELKVLLAATGTTLMQLHGIGPSGAARLLVEVADITRFPSRAHFASWTGTAPIDVSSGDHVRHRLSRGGNRQINRVLHIMAVVQLRSPTEGRAYYDRKKAAGKAPMEAMRCLKRRLSDVVYRQLLADAIRPTKTGPGGHSGATLDSSAVDSNPDIDASKKSLPGPASHHATRPNSPRPDRSSTRSRRPETAPTRSRRQAQSA

SEQ ID NO: 209342 - protein, 407 aa, unidentified
MTAVMIGVDPHKGSHTAVAVGTDERQLGRLRVRASAGQAEQLVEWAAAWPERTWAVEGAAGLGHLVAQQLVAAGERVLDVQPKLAARVRLLAAGDTNKTDPNDAQSVAVAALRSAGCRQVRPDDHSAVLQVWSKRHRDLARSRNQVACRLHAVICELVPGGVRKEITAAHTARLLEEAVPSGPVTLARWELARDFLEDLRRIDTQLSQVKKKLTAAVKASGTTLTEVFGVGPVIAGIVLGEVEDVSRFPGRDHFAAYNGTAPVEVSSGNRKVHRLSRRGNRRVNHAIHMAAITQIRHPHSEGRAYYDKKIAEGKTPKEALRALKRRISDALFRRLRADARRAAASAQVTGPGGQPGNDTDASAAGFHPEHRLFGAATPGPEPTLRPPSGGRPEKPSSPASKKMPRIS

SEQ ID NO: 209343 - protein, 342 aa, unidentified
MKEVSIIGLDLSKRSFQAHGALADGSGAFRKKLTREKVLGFLAEQPRCIVAMEACGSAHHWGRAIRDAGHEVRLIPPAYVKPFVKRQKNDAADAEAIAEAASRPTMRFVAVKTEEQQARAMLFRTRDLLVRQRTQLINALRGQLSEHGVVAPQGPANVAILAQAIDDMTPSLPLLVVELARVYLDQIDGLSEKVAGLEKAIACEAKRGAMTRRLQTMPGVGPITAMAIETFAPPMEVFRRGRDFAAWLGLVPVQHSTGGKQVLGKTSKMGQRDIRRLLITGAMVIVRWACRKGAQEGTWLHRMLGRKPRMLVAIALANKMARSIWAMLTKGEDYRGPVAATL

SEQ ID NO: 209344 - protein, 319 aa, unidentified
MMKKLHVGIDVAKKFFDLHLLETRKDQHYDYNELGISLCLKHLKEEEAKAGVKIQLVTMEATGGYELKLAGRLQAQGMPVAIINPRRIRDYAKAAGKLAKTDKIDARVIAAFGEALAPPANELLDENALKLHSLVARRRQLVGMRVAESNRMEHADDQASARSIGVIVQALQQEISEIEKQIAEHIRQQPELQKKTELLKSVPGVGETTAAMLVTELPELGRANRQEIAALVGVAPLNRDSGLHRGKRMTGGGRRTVRSRFYMSVVVAIQHNPVIRRFYRHLLEQGKAKMTALVAAMRKLLVILNTMLKKNQAWTPRIA

SEQ ID NO: 209345 - protein, 321 aa, unidentified
MNYVGIDVSKATFVVAYSSAKGSETKTFENTTKGVHKFIQTITPEDTHCVMEATGNYSMLLVYLLSKAGITVSMENPLKIKNFARVMLSVVKTDKIDARMIAMYGEKMNPAPFKLRSDSLMVLKQKRTVLRQLKKQLNANTNLQESMEALPFIDSVCKKILDKTVKFLRKQIQEMEEELSSLANIEYKKQMDLLTSIKGIGVTLATALIVATGGFTYFDNAKQLTRYLGLSPTYQQSGTSVNLKGHINRNGDSYLRSQLYVAAFSSLRCNTECKACFDRLRANGKPGKVAVVAVANKLVRQAFAVVTQGKEYVDGFISAKK

SEQ ID NO: 209346 - protein, 319 aa, unidentified
MHCIGVDVSKQELVTFDGSKERIFPNTSGLVEFGRFLKRSKEALVVFEPTSTYSRRLEALCRAQHVSCCQLNPRVVPHLRLVGKGRSKTDSTDAELLYRYGVERGHSEAAPLENDVLAESIQAQLACYRVAQKARVAYQNVLEALSQDPATSRDLLAELEVEISELKKKEKQQLDATQQLVERDEETSQRLGALLSIPGVGPITALTLLALFRKYPDANRSQIVALAGFDPIQIQSGTSVHGKSRISKRGNREVRKRLFEATLSAARYNPSIRSIYRRLKEAGKPEKVARIAAARKLLLIAHAIYTSGVPFRDPTEKEG

SEQ ID NO: 209347 - protein, 352 aa, unidentified
MRTSHQNAPETISTIGIDVGKNTFHLVGLDKRGVIVLQQKVTRHQLGRRLSNIPRCLIGMEACSGTHYLARQLTALGHDVRLIPAQYVKPFLKGHKNDYRDAEAIAEAVQRPTMHFVSIKTPEQMDLLALHRVRSRLVGQRTGVINQIRGFLLERGITVRQGPMPLRKALPEILSASSDALSPRMINLIGELIQDWRRLDERIAAVSSEIEALAKQDASCQRLMSVPGIGPIISSAVVAAIGNGAGFKQGRDFAAWLGLIPRQESTGDRTILGKISKRGNKYVRTLFVQAAHVVLARRPSTAMQGLWPWIERASKRLHRNMLAIALANKLARIAWAVLARGQAYQPRITANA

SEQ ID NO: 209348 - protein, 356 aa, unidentified
MLYLGIDQHARQLTVSLRNESGDVVLARQVSTEPDRVRAFFDQLTRDRLRDGESFAAVLEVCGFNDWLIRMLHDYRCAKVVLIQPDDRKKRKTDRRDAAALSELLWANRDRLLHGKPVRGLRQIELTSATDQENRRLTTLRKEAGAGRARLINKVRWVLRRHNLQWGLPTKTFPTAKAVAWLKGLALPEVDRLEMDHLLADLEQADRRLKDLEQAIARRSAGSPTVAVLASMPGVGRGFTALSLACRVGRVERFPRAHSLANYWVLTPGCRNSGENDQRLGRITKAGSATARWLLAQLVHKVLRRDARLREWFKRVKRRRGPTVARVAVMRKLATVIWHMLSKGKTYAECREPAVA

SEQ ID NO: 209349 - protein, 337 aa, unidentified
MEVRIGEYPVCIGLDVHKKYSYAAVVDELGEIKEETRIENTKQSLERFASKYQGAEAVIEAAGNYRFIYDILENYMDVKLAHPYKTRVIAEARIKNDRLDAKMLAHLLRANLIAESYVPPKEVRELRDLTRTRKALIEDRTRIKNRVHAILARNGIMDYPNPFTKKGREYLEKIDLPEIDRKLLEINLSIIDKINEEIKEIDKIIQEKAREDNDAILLTTIPGISYYSALLIKAEIGDVNRFPNKFKLISYAGLCPSIRQSGNKEIKGHITKQGSRMLRWILIQCANIAIKHDEYLRSFYLRIKRRRGHNIAIVATARKMLVCIYFMLKRGEVYNPR

SEQ ID NO: 209350 - protein, 344 aa, unidentified
MDTIGLDLHKRESQLCIGSDDGRIEERRIVTSRERFTAVVGGRPRARILLEASTESEWVARHLEQLGHEVIVADPNFAAMYATRSRRTKTDRRDARTLMEACRLGAYRPAYRLSDARRHVRAELAVREALVRTRTRYIALAKALVRRDGLRVAASESHLVGARIAALELSDALRQELAPLFALLAPLTAQIGQADDRIAALTAADPVVALLTTAPTIGPITAAAIVATIDDVTRFRSAHQFEAFLGVVPSERSSGEQRRVGRITKAGNARARYLLVEAAWRILRSKGDDTAALRAWALGIAARRGKRIAVVALARRLAGILYAMWRDQRPYDATRLHRPRARAA

SEQ ID NO: 209351 - protein, 311 aa, unidentified
MYYIGIDVSKKDLAVFNGKDLNFINQEGLKSFKKYLKKKYSLSEIVIIFEPTGIYSQYLKEFCAENSIKAYIINPKRSHNFARSLGIRPKTDKIDARTLYQFHKLIDLKDIKVPKIDQQAKTLASYLVSYEFAVKQRVALSNHLESLRDKQLITLIKKELKRAQELEDKIFNDIKKYVSKNQNLKEDYQRLLTISGVGEKTAIALLTLFKTYPGTNRSQITALVGLDPTRRESGTSVKGKVKISKNGKGIYRKIFYLPTVCATVHNQKIRIFYQRLLANHKTKKLAIIASMRKILLIAHAMYRDKTEYVAA

SEQ ID NO: 209352 - protein, 411 aa, unidentified
MQVVVERCAFLDVHRDTVMACARVPDGDGGRREEVAEFRTTVSQLLVLSDWLVERAVTLVGMEATGVYWKPVHWVLEDAIDQVWVINARHMRNVPGRKTDVADACWGAQLLEHGLVRPSFIPPRPTREQRDLTRYRKSVIEERGRETQRLHKVLEDAGVKLSSVASSVLTKSGREMIDALVAGQRDPAVLAEMAKGRMRAKIPELTDALAGRFNAHHALLCRAMLARIDQADATIDELTKRIEELLDPHEAAVTLLVGIPGVSNRTAQVILAEIGTDMSRFPTPEHLASWAGMCPGNNESAGKHRSGRTRYGSKWLRIALVEAAQAAGRSKDTYLSAQYARIRGRRGPGRAAVAVGHSILVITWHLLSTGETYTDLGGDYFDKRRNSTAHQKRLVAQLEAMGHRVTLEPAA

SEQ ID NO: 209353 - protein, 420 aa, unidentified
MHSSRLDVLVGKGGGGVIFVGIDWSEHHHDVCLVDERGTQLAKGRVPEGMQGVVRLHEMIADHAQEPEEVIVGIEIDRGLLVGALVAAGYRVFAINPMSVDRYRDRRATSGAKSDPGDAKVLADLVRTDRHNHRPVAGDSELAESIKLIARTHQSFVWERQRHVNRLRSALREFYPHALQAFGTELASADAIAVLGVAPTPELGRRLSRSKIAAALARAGRQRNLEAKAEQIQRALRSEQLRASEGLERTYGVIVSSLVGLIDGLNDQIADLQEELEGSFEQHPSAEVLRSLPGLGIVLGARVLGEFGDDPTRYADARARRNYAGTSPITRASGTRRVVLARFARNERLFDACYLWAFSSLTKSPGARRHYDLQRARGKTHSQALRALANRLVGILHGCLRHGTIYREDVAWSGREQLVA

SEQ ID NO: 209354 - protein, 463 aa, unidentified
MKGQQRRGGKKGAGDQGANLPAIQSNVAGIDIGSREMYVCGPPQQDGRREIRVFATTTQEIQTCARWLQQCNVRSVAMESTGVYWIPVLEILESYGLETLLVDTRPLSRVPGRKTDVEDCQWLQTLHSHGLLQSSYRPTEAISELRSVVRQKAVLVREQADWVRRMHKCLDQMNVRVHHAVKDTQGTTGMLILRAIVNGERDPKKLAQHRDPRCHKSKEQIAEFLTGHWRSDHLFNLREGLKMYDTIDERIQAYEQEIQRRMEQLTPAGQQTAEAPPLKNPEKRKAMKRRDQEGKRQALYRMVGADLTTIDGVGVETAEVIISEYGIDVSKFPTEGEFVSHLQLSPHRPVSGGKVLKKPRQKPKGTRTGAALRHAAVAVRNSHSALGAYFRRIARRKDASVAVFSTARKIATLVYRMLRWGQAYVDIGQEAYEQQHQAVRLRTLISTAAQMGYKVIKETAASC

SEQ ID NO: 209355 - protein, 320 aa, unidentified
MQTPTEVLNIGADVAMDEIVVACSQASFPARTLANQRTALRAFLKGLPAGSRIGMESTGTHHELFANLAHQLGFVVFVLNPKDARHYAKGVGQRGKTDRVDAELIARMIAHEHAKLHVWIPPTPEQREMARLLKRRAKLSSLRQALGMSLKGLDGFAADLKALRARFDQVIARIDQRVKALVEANPDRQQHATHMRTIYGVGAVVSAALVNTLERAPLKSADAFVAFTGLDPRPDDSGQHRGKRRLSKRGPSELRRLLYVAAMSAKKTKTWKPLFEHYRAKGLSTTASLVILARRIARTAWSMYTYKTEFDPARITKCLT

SEQ ID NO: 209356 - protein, 331 aa, unidentified
MSPELVSTRLSLLLTSYPMSLPIVQYIGLDVAKRSLDVDLLGSPLHLAHDGAGCKTLVAKLRALPHPVHVVCEATGGWERPVVGALHAAGITVSVVNPRQVRDYARGIGKLAKTDKIDAKVLSAFGASVKDLHPTSPPQAQQSELAAWVTRREQLQSMLQAEVRRQIPGMPKPVAKHLQASIARLQKELKSVAQKMAKIIEANESMAAAAKRLQAFQGVGPGTAATLLGHLPELGTLEDNAIAALIGVAPINNDSGPKTGKRFIRGGRSSVRSALYMAAVCACRCNPVLKHFYKRLRDKGKPFKVALIATARKLLIALNTALKNPQFQPVQ

SEQ ID NO: 209357 - protein, 378 aa, unidentified
MELTPMHKRVIALDVHQSKITACALIEQEDGSVEADKREFGAFRRDRRALAQWALEVGPEVVVMESTGVYWKSPFAALEAVGIIAWVVNARHVKAVPGRKTDMADAQWLATLARAGLLRAPFIPVADFRQLRLVARQRQKLVGMCSAEKNRLHKVLVDAGIRINVVVSDVHGSSARAMIKALIAGNPLHEVLDCKGRLRASREELFEALSTDQLSAAHRFVAEEIMAHIEQLELRIQRMDAYLLEGLQAWQPQLNLLQTIPGMDVQGAAMLLVEIGADMGAFGSAERLASWVGMCPGNNESAGKRKSGRIRKGNAWVRRLLCEFAQAAARTRCALKARVRCAVHPQGPQEIHRRAGPQDAANHLRHAGQRSPLPGQER

SEQ ID NO: 209358 - protein, 370 aa, unidentified
MSIKRILVNTIDTDLEYEVIGIDLAKNCVSAILLTTDGEIFGIDRLDYQELEKSAQELSPTIFAMEPCTEMNYMVQKLEDWGHHCIVISGKNVKDYVESHFSNQKTDLNDAQALAFLTKDTQLRTVKAKDPEQLKYASLTTLREQYVKQYRQTMVSLKGICQVWGLSISKGISGKARLKDMIENHAAFPAELRTALVGMVAHAQAVQKDLKSVTKILEELAKKDKACQLIQTVPGLGTICSCRLRATVGDIQRFKHPKDFPAYYGLVPRSMATGHNKKKGKITHRGDKTMRSLMVQGAGIVINQATKGNLHSKQLTKWILKKQKEKMPWGKLVCAVAAKLLRIVRAILISGKPYNPKIAGVAKCSLPKAS

SEQ ID NO: 209359 - protein, 428 aa, unidentified
MRGCRCSMIMGFTKPIEHFNLQRKKVITMNTLYVGIDVSSKSNVIYLMLPNGDKHSNFSVANSHEGSTQLVKRILSALTSHSLDTVLIGLEATSVYGDNLVYFLREDATLAPFNRKIHVLNPKQVKKFHDAYNDLPKNDYVDSFVIADCLRFGRINKEVYMGDYRYKALQNLTRARFFAVQNLVKEKQRFMNVLFKKYSTMTQEKVFSDTFSTTALAVYDEFESAEALANMDLHELTDFIIEKGKNRFPDPDAVAKAIQKAARSSYRLPKTVNDSVNQVLSISITSMKALESQIKEFDKAIKAQMELLPNVLISIPGIGPVYSAGIMAEIGDINRFNSQAALAKYAGLAWKQHQSGGFESEVTRLIPSGNRFLKYYLCEAAFSLVRCDKEYSDFYRLKYKEVNRCQHKRALALTARLLKDNRLYCPAK

SEQ ID NO: 209360 - protein, 338 aa, unidentified
MAIVMGLDQHRAQITADWLNTETGEVSRARVTPAHRDRVRQFVGRFAGQDLEVALEATTGWRFVVEELQAIGADVHLAEPAETSTLRGSKKRAKTDRADARHLRELLMVGRLPEAWIAPGHLLDLRARVRLRHTLVDQRGEWQQRIQAVLYHHGVAQRRDLLTAGKRQWLEGLELPAAAREQITVALTVIDALDAESAPLTRELRAYGRRQPGCRALMRHYGIGALTAVTILAELGDARRFSSSRHAVRYAGLDITVHQSDQRRAPGHLSRQGPPALRWALYEAAQLARRPGSPDHAYYEQAAARLGGNRACLAVARKLLKRSYHTLRELGDEALQPA

SEQ ID NO: 209361 - protein, 354 aa, unidentified
MRIIGAFDVHRKQITYKWLDTETGEIQRGRIMPGVRKAVREFLVPFEGLDAHFALEATTGWRFVAEELSRVGLVAHLAEPADTAALRGSKRRAKTDRRDCDHMMDLLGTGRLPESWLPPAHVLEIRTLVRLRKALTDTRREWQQRVQAQLFHQGVPRIPAITTQGRAQLAAVDLSAAGRQVVTTGLAVIDHLDYQFAPLDTYLVRFAKVRPGCRALKQRLFGVGDLTAVFIWAELGDCVRFSSSNDAVRYAGLDITVYESADKRPPGHLSRQGPEALRWALYEVAQSAARSSSPDYAYYLAVKRRLNHKRACLSVARKVCRRAHHLLRSFGDDAFAPVKGSVLPSFDRPAMATA

SEQ ID NO: 209362 - protein, 335 aa, unidentified
MSVYVGIDVHRKRSQVAVVDESGKVLANRNVPNAVEPFLKVIGGLPPGTPAAFEAAYGTSWLVELLESYGFTPHLVHASRCKAIASARLKNDKVGASILAQLLRVDLLPEAWIAPPEVRQLRALLRHRVALVRLRTLLRNRIHAIVADHGYDRPAGEYWSGPGRAWLASLELPAVSRELAGDDLALIGALETVIDRLDWEIRQRGRSGPRVKVLTQLPGVGPFTALVILAEVGDVSRFGSARKLASWAGPTTGRARQRPRRPLRAHLENRARCCCAGRCARRRRPPSARRSSPPASRPSPDGAGRRSPPPRSPASCSPAPGTCSPTPGTQSRNPP

SEQ ID NO: 209363 - protein, 366 aa, unidentified
MKKIITVARNRSEIFKQQQLTIGVDLGDRISYYCILDETGNVILEQSVPTTPKGMQQVFSKISHCRIALETGTHSPWVSRLLTQLGHDAIVAHARNVRLITESSRKDDRLDARTLAKLARIDPELLGPVRHRSAKAQIHLTAIRARATLVSARTALVNAARGLTKSYGERLPKCGTEQMNREIAKGLSPELRDVLEPLLREIESLKERIAEYDRRIEQIAKEGYPEVALLKQVKGVGTLIALTYVLTLDDPHRFRRSRDAGCFLGLRPGRRNSGRSEPQMHISKEGDAYLRTLMVQGAHYILGPFGQDSDLRRWGLKLAERGGKNAKKRAVIAVARKLAVLLHKLWVSGEVYEPLRNNHKVVSAVA

SEQ ID NO: 209364 - protein, 343 aa, unidentified
MEQNAGIDVSLESASICVVDAGGRIVREAKVASEPEALIGWFGRLEVTLARIGLEAGPLSQWLHAGMREAGLPVELLETRHVRDAFKAMPVKTDRTDARGIAQLMRLGWFRPVHCKSLPAQEVRAILTARKLVQSKRHDLEMSLRGILRGFGLKVGQTTPRSFELRVRELINGHATLLVVADALLSARGVLAEQLGKLQKRLVSLAQQDTRARLLMSTPGVGALVALTYAAAIDDPARFRSSKAAGAHFGLTPKKHQSGETDVTGRISKIGDAGVRTALYEAANVILTRPVKGSSLKSWAMRVAKRAGMRKAKVALARKLAVVLHRMLVDGTEFVAGKAAAKA

SEQ ID NO: 209365 - protein, 355 aa, unidentified
MNQEKYIGLDVHQATISAAVMDCGGKLLMECLLETKADTILEFIQGLRGTLSLTFEEGTSAAWLHDLVKPHVSRLVVCDPRKAALLKEGNKSDRIDARKLAELLRTNQLKPVYHGEHGLRTLKELGRSYLSLSKDVTRTMNRIKSLYRSWAIPCSGSSVYAPRHRAEWLAKLVEPGVQMRAEHLYQQLDSLQPLRLEARCQLLRESQNHAAVQRLRQIPSIGPIRAALLVALLQTPHRFRTKRQLWAYSGFAIETHDSGEYRMVRGKVQRNRERMTVRGLNDNHNKDLKNLFKGAAISASTRPGPLRDFYLARVEKGMRPTMARLTLARKIATMALTMWKKGVSFDPKQLQPRAA

SEQ ID NO: 209366 - protein, 432 aa, unidentified
MHEAEDEPLFAERAAGIDIAKAGIEVTVRVPSDTRRGGRQQETRAFRTTRKDLLALADWLRCWQVTKVGMESTGDYWKPVYFLLEREGLDCVLYHAAQVKALPGRPKTDKLDSVWLAKITERGALPGSFVPPEEIRRLRTHTRYRRHLTQARTAEKQRVEKLLEDAHLKLSSVISDIHGVSGRAMLEAIAAGERNPTTLAQLARGTMRGKIARLEEALDCAFVTEEHAAVLAMMLATIDYYTARIGELTAKINVLCEPYARQIAQLDAVPGTGVITAQDIIAEIGTDMTVFPAAAHLVSWAKWCPQVAQSGGKRKGANATGRGNRYLSAALGEAAVSAGRTQSFPGTKYRRLVRRMPKKKALVATGNSLLTIYHALLSDPGAVYTDLGTDYYERRANIRRQARNHVRGLERLGYKVTIQPIDPGTGELQPAS

SEQ ID NO: 209367 - protein, 380 aa, unidentified
MSDVSSPEPARVSRFIALDVHKLSIVAALLPAGGGEPEIVQTENTERAVRRLVRGLGGPEGLAACYEAGPCGDDLYRLLSEMGVPCWIVAPSLTPVRPGDRVKTDRRDARKLVRLFRAGELSFVSPPSPEQEGLRDLVRCREDLRRARLSARHRVAKQLLRYGRVFRGGSLSWTKAHQAWVRAQQLPDPQAQRALEHMRAHLEALDAQIGALDAELDEIATQEPWREPVAWLCCFRGIGTHTALGLLAEIGDFRRFPSPRELMSFLGLTPSEYSSGQQRHRGHITKSGNQHARRLVIEAAWHYRHPPRSSARTRRAARVAGPEVAARAWAAQIRLHRRQRDLLGRGKRSTVVNVAVARELLGFLWAAMTERPLREETLAA

SEQ ID NO: 209368 - protein, 341 aa, unidentified
MTVIIGIDPHKATHVAVAIDGDELAIARLEVTADRAQTQRLLAWAAPLGDRRMWAVESADGLGKLLSQELLAAGEHVVDVPPTLSARVRLLGSAKAAKNDGNDALSTAIAGLRHCGLRMVRGDDHSTVLRLLAGRYDDLVSLRTQAACRLHAVLRELVAGGAPRRLSADRAAKLLRSVHPEGLVADERKRLAAELLADVRRLDRELVAIKTRIRDAVDTSATTLLELHGVGPIVAGLILAYVGDPARFPTPERFASYNGTAPIEASSGPRKRHRLNPRGNRKLNHAMHLIAVTQIAHNTTGRVYYQRKLVEGKTKKEALRALKRRISDAVWRQLRVDVTTR

SEQ ID NO: 209369 - protein, 363 aa, unidentified
MNYGSKGATKMTAGIDLGDKYSYLFVLDNDGGEVVEEGRLRTTPEDLRRRFDSAERMKIAIEVGTHSTWVSRLLEECGHEVLIANPRKTRLIYGEKRKTDKLDAQKLARLARADPELLYPVKHRGAQSQAHLALIHSRDALMRSRTQLINHVRGTVKSFGARLPKCSAQSFHKKVAGQLPDELAETLEDIVVTIASLTERIRNYDRRIEHLSKEHYPQETELLRQVPGVGPLTSLTFVLTLEDPGRFEKSRSVGAYLGLVPGKDQSGESDPGKGISGEGDQMTRRLLVSSAHYILGPFAPDSDLRRHGQKIASGGGKNAKKRAVVAVGRKLAVLLHHLWVSREVYEPLHNARLWGTLGGEEVA

SEQ ID NO: 209370 - protein, 367 aa, unidentified
MDNSKVLYVGMDVDKEKIAMAALERNSNEFVSEQLVRNIPTAVAKYFHKLMAAETEVIACYEAGCFGFRLARQLSDLGIGCAVAAPGMLPKKPSDRVKTDRRDARTLARALRNGDVHEVYVPTKQDEAVRDYLRMYEDVKGNLKRAKQRVLHFLLRRGTRYTESGNWTAGHWRWLRTLQMEQPVAQETLEEYLAHVSELEETCQRIAARIEQIALEERHAEPVAQLKAFKGIATLIALSLVVEIGDFRRFATAQQFMAFLGLVPSENSSGSRRRQGSITKAGNSHLRKLLVEAGWQYRSYHPGSKRLAKRRQGLPPQLVAYAHRAGRRLNKKYLRLLFSGRPSQVAATAVARELSGFIWGAMTGKTT

SEQ ID NO: 209371 - protein, 404 aa, unidentified
MKGPIVSIDVSKGKSDYQAFKNLNVKYTGSRSIKHTKEGFDEIVNLVREMEKKLETEVCVVYEATGVYHRVLKKVLEDNNIKQFIINPLLSAKTRKNDSLRSPKTDKLDPKSIAKTYYSHSLHNSHKPETIYHELRELSRYYEDILVHIRKDKVAFRAQLDIVFPGYDALYDDLYGPVALAVIEKYPHPEMLQKKKINTVSKVIQSKTCHRQASSDTMADKAIEYSKTIYSGCDKDDIEVLILQRFIKKLKEDMAEAERAIGEMIKLAQELPDFSIIKSIPGIGDNLAARIIAELGDMTRFKKKNELVAFAGLDPRISESGQNDGDHMHITKKGNKRLRCLLYLAVTCSIRLKRDDNSIKEFYIKKKQQSNPMCSKAAKTACASKLVRIIYSMCKTGELYQYNK

SEQ ID NO: 209372 - protein, 337 aa, unidentified
MGLYCGIALHSNNHVVTVINEEDRRLYERRLPNDLAITKAALEPFRTQLVAVAVESTFNWYWLVDGLMDAGYQVRLAHTGAVVQYEGLKHTDDEHDAFWLAHLMRLGILPTGYIYPKSERGLRDLARQRMRLVQHRTSHITSVQSQVWRSTAVRLRSETIKGKGQQPWPELLDPDVALSVETGRAAIDALTAQIERLEELLLKRVGLSPQFQVLKTVTGIGPILALTIALEVGDLKRFPGVGEFASYCRCVDSRRLSNTKKKGEAHRKNGNPYLAWAFMEAAHFAIRNLPAAQRFYERKRRQRNALLAVKALAHKLARACYYILRDQVPFAPDRLFA

SEQ ID NO: 209373 - protein, 341 aa, unidentified
MEQYVGLDVSMRETSVAVRQNGKRVWRGKCPSDPKALADVIRQRAPDAVRVVLETGPLSTWLYHALKAEALPVVCIDARHAKAALDMAPNKTDANDAAGLAQIAEVGFYREVRVKGYAPMLARALVGARGRLLRISIQLSNQIRGVMKTFGLIVPKGAGRVFETHARALLGTNEAVARVVLPLLEAWRAVRARAAELDRRLIAAARTSPACRRLMTIPGVGAVTAASFVAAVEAPENFGTSRAVGAWLGLTPRRHQSGEADYDGHISRRGDGHLRALVYEAAAAVLTRTRTDSALRSWGLELKEKVGFKRAAVAVARKLAVIMHAMLKTGAAFDPAPNTTA

SEQ ID NO: 209374 - protein, 459 aa, unidentified
MRGKRSKKTASGERDWTLNLDVVHPHAAGIDIGNESHYVAVPPHRDAEPVRQFACFTEDLQRMAAWLKSCGIDTVAMQSTGVYWLPVYEILTEHGLRVFLVNARHTKNLPGRKTDVQECQWLLQLHTFGVLNNSFRPPEEICVLRAYWRQRAEHVASASACIQRMQKVLTEMNVQLANVISDISGLTGLAIIQAILEGERDRYKLADLADVRIQASREEIARSLEGNWRKELLFILQQERNLYQIYQQQIAECDTALAAHLQTLEHKVEPGSQPPAAKANKRAGSNAPTSFDLRGELYRISGTDLTQIDGINIMNAQTIIAEVGIDMSRFPSEAHFASFLGLCPDNQITGGKVLHRGTKHVENRAATALRMAATSLWRSKTYLGAKFRRLRARLGAPKAITAMAHMLARLVYRMLRYGEQYVDKGMKYYEQKYRAQPIRSIEKKAKQLGFVIALTPALT

SEQ ID NO: 209375 - protein, 320 aa, unidentified
MLSFCGIDVSKDRLDVMVLPDEYSSSVPNDPAGWAILVEQLRGFSITAIGIEASGGYERGAVRSLQAAGMPVRQVNPFKLRQFAKASGVLAKNDPLDARMIASFVGIMPTRPALRTTPAAEQLVEMLAVRRQLSAEKTAADNASRLLEDLMLQRLSRRRIARLAADIELLDKRLVEIVATDATLAHRYRLLTSMPGVGPVLACTLIALLPELGGMSRKQVAALVGVAPYAFESGTLKGRRCIWGGRANVRQVLYMAAMSASNWNPVLKLFHDRLKGAGKLPKVVIVAVMRKMITTLNAMVRDDIAWADRLSGRHSVTTAR

SEQ ID NO: 209376 - protein, 347 aa, unidentified
MDLLKQVSGIDVSQKELVVTLAELKADLTKEFKGYKVFYNTEKGMNLLLKWVDQNTQGNLPVHYVMEATGVYHERFAYFLESKGKHISIVLPNKISNYMRSLDTKTITDKTSSQAIALFGLDRKLDKWTKPAEVFKRLKQLTRERDQLVAERVMVKNQLHAEQTEALSNASSIKRLNTRIKFLSKQESEIKQDINSLIKDNPKVKEIIDRITTITGIGDLTAIIVLAETNGFELIRNKKQLVSYAGLDVREKESGTSVKAKPRISKKGNRSIRKAMHLPSLSAVKHDNHFKEIYVRLVSKHGIKKKALVAIQRKLLELIYIIYKNETVYQIDFETKKREQPLNVASL

SEQ ID NO: 209377 - protein, 467 aa, unidentified
MSSKKIQIKKRAGRKKKGFSFGDRPLVEPNAAGVDVGAREMYVAVGPDRDPEPVRVFPTFTADLEALADWLLDRGITTVAMESTGVYWIPLYQILEDRGIRPCLVSARHMKNVPGRRTDWHECQWLQYLHSTGLLRAAFRPDQEVCAVRTLLRHRNELVQMASQHVLHMQKALTQMNFQIQHVISDIMGVTGSAIVEAILAGERDPVVLANLRHSNIKADAETIRKSLEGDWRQEHLFTLRQSRDLNNAYRKCIEDCDREIAERLSRFESKVDIERNPLPKISGLSQKRRTKRTGDFRFDVRKEAYQLYGIDVTQIPGLSGLVIPLFSEVGRDLASRFGNSARFASWLGLCPDNDKSGGKVLWKAVRRIKNRAGHMFRMAAAALHHSHSPLGDFLRRMKAKLGPAAGITATAHKIAQIFYTLVTRQIEYDDSAWAARDTQRNQRFEQKIKRQARDLGYQLVPLQPEA

SEQ ID NO: 209378 - protein, 315 aa, unidentified
MRMAQISPKVGIDCSDARLDIHIFPLDIVFSVANDQEGWNALDRRIAAVNAEIVGLEASGGCERDVIRFLQERGYCVRLLDPFRVRQFAKAAGKLAKNDRIDAAIIAEFVAVMRTRPLVRHKHLEKLTELVTARAQLMEQATVAQNQARRREHTLLRRLDARRAKTIQADVKSIDAQIAKLVDADDALKAKSTILRSMKCVGPVLAHTLLALLPELGQLTRKQIAALVGVAPFEDQSGKRQGVRYIQGGRPAVRAPLYMAALVAGNHNPVFKALKERLRANGKKPKVAITAVMRKIITTLNAMLRDAKKWKNAQA

SEQ ID NO: 209379 - protein, 343 aa, unidentified
MQVVTTVGLDIAKSVFQVHGIDAAGQMVIRRQLKRRYVLAFFEKLPPCLVGIEACASSHHWSRELKALGHTVRLMPPAYVKPYVKRQKNDAADAEAICEAVTRANMRFVATKTPEQQSGLTLHRTRHLFIRQQTAVINVIRAHLAEFGIVAPVGRRGVEALLNVVTDASDQRVPVVARMCLAALGAQLRRLKEQILEFDRMIMAWHRSHEASRRLDAIPGVGPVLATALVASIADPKAFRSGRNFSAWIGLVPKQHSSGGKDRLGSISKQGDRYLRSLFMAGALAVIRYARIHGTKHRPWLTALLARRPTKIAAIALANKMARMVWAMMARGEHYKEPVVLAA

SEQ ID NO: 209380 - protein, 340 aa, unidentified
MQTPRHIGIDLHRNQFTCCVRLENGRNYLTEWKLEDLPRFVKKLRPADEIAVEVTGNTRLFYEAVAPSVARVVAVDPNQFKVISHSVKKTDPNDARNLALYLEKDLLPEVRMKDKRQAQLASLTQTRDTMVKLRTALKNKINNILSAHGINLEKEALSSDKKLHEILAMKFDPMVGIELKIIVEQIRSLNQSIAELEKTIAEEGSKLEGHKNLTSIKGIGPLTGSILLSVIGDINDFDDEGKLAAYFGIVPRVSKSNETERSGRITKRGSKLGRTALVQCALIAQRYSPYLKRHYEKVKARRGTGKAIIALARKLLGIIYRTLKNKWVFEDFPNFVLAEA

SEQ ID NO: 209381 - protein, 430 aa, unidentified
MKSNTQNAKIEAITEKTLVLGIDVGSETHYARAFDYRGIEYSKKPFKFSNTEAGFVTFKEWILDLKERHEKDKVVPGMEPTGHYWFNLGKFLQDNEMKPVLVNPHHVKKSKELDDNNPTKNDRKDPKVIAGLVREGRYMIPYLPDGVYADLRTASNIRFQLQAELTRIQNRISRWFNIYFPEYKTVYGKPDAKSGMLILKAAPLPEDILTLGIDGVNQIWRDAKLRAVGKARAKTLIEAAEHSVGSKEGAVSARMEIRMLLEDYESRNTRLQEVMVLIEELVKGIPMAEKLLEIKGVGIRTVSGFLAEVGDISRFNNPKELQKLAGLALVENSSGKHKGETTISRRGRKRLRYLLFEVAMSLVAKNPEFRELHNYYTTRRLNPLKKMQSLMAIAAKLIRVFYVMLTKGVNYDPKKMVNDIKRPAVYLQTA

SEQ ID NO: 209382 - protein, 362 aa, unidentified
MEKYIGMDIDNKKIICCTKQPNEKEKYQTIKPTIPAMKAFIKEQKSDGSQVHIVYEISGQAGYIYDSLLDCADSITVANPSKMTWIYRTAKKNDRLDARKMAVLLSIGEIPWVHMPSQEVRKWRQMILHRKKIVQKVTQTKNRIRALLKNEGFREPYNKGSWWKKANRFWMEQLVKEGGEISSFDLWRMQLSNLLEELYTLESQLKRVTDYLDKYLSEKSEADLLLSIPGVGPRTTEAILAYTDNLNRFDNYKQYCSYFGLTPKLDESGSTRRIGHINKRGPSAVRWVLCESAWKVIRKSKGMREFYERVKSGQDSRKKIAIVAVCRKMLCIMRAMLRDNERFNEKLVCRICDKNQQKKNVA

SEQ ID NO: 209383 - protein, 349 aa, unidentified
MIIIGVDFHPEFQQIALVDTDTGELREQRLTHREEAERFYRTLAAAGQQVRVGMEASGYGRWFERFLAQLQLELWIGDAAQIQRKRVRKQKTDRQDAQLILKLMLKDDFPRIWVPSWENRDLRQLLWHRHRMVQARSRIMNQLQAVALNEGLRCKKRLWRSRRPQLESFPLAPWANRRRHDLLELLDRLNPTIAELSQEVAQEVERCPEAQRLATHPGVGPLTAMAFVLIIGKAERFRCGKQVASYLGLVPLEDSSGNQRRLGHITKQGSSLLRFLLVEAAQVTVRSLPQWRSRYFHLMMRRGRKIAKVAMARRLAVHLYWMMREGWDYQQLVKFGSHVGQPGNRHGVQ

SEQ ID NO: 209384 - protein, 359 aa, unidentified
MAKRSTRHEGEVGGLDLGDRYSRLCILDGATGEVVEEGRVATTEAALRQRFGSVGPMRIAIEVGTHSPWVSRLLSECGHEVIVANPRKVRLIYKNRRKNDAIDAMYLARLARTDPALLSPIRHRGQEAQKNLAMLRGRDALVKSRTQLINHVRGAVKATGKRLPRWGSDAFARRAAGALPPELVTALGPVVEAIASLTAQIRSCDRALEALAGAYPETSLLRQVKGVGPITSLAFVLTLEDPTRFAKSRAVGPYLGLVPAQRDSGDSKPQMRISKEGDAFLRRLLVGSAQYILGPFGEDCDLRRHGMKLGASGSKKDKKRAVVAVARKLAVLLHRLWQSQATYEPLYNAKRAIRTTLAA

SEQ ID NO: 209385 - protein, 443 aa, unidentified
MTGVKFVGVDPDSKGCEFYLLGGARDESRRFGMDYASMKDCIRWLKKTGNVVVGIEGKGNYSRPLEEALDSEGIRYENFSADKLYHFRQSMIGANKSNRNDAMAAALFLKNLYENMPDEPERLISLESDLRELTREIARKSKQATFLTNRLWKQLRRASQDLYMWLSGSDEDSGGEKRADKLCILRLIAARPDVSGWKTLTEAEFLEAAESRKTKNWQVILEGLRKSTAHAVPAKALQKILLKQTAEELLSLKKQMSELEKALEEVAQDYPDVLRISANRGIGIRLASAFVAEIADIRRFANDDKLASYAGFGRREYSTGDTKRMIRSRKFNHYLKDSVMQMSLRYVQWNPDSVLGRYCHALIKKGMKKMEAYRRVGRALIRQFYREMKSMAAEKEKGKETMASRPSGNDLNDQVSNMAPSRLSVQVRPKYSRTARKMQENYA

SEQ ID NO: 209386 - protein, 332 aa, unidentified
MYQLGIDISKAKFDVALLLANGKYATKVFVNTIDGFKQLLEWLSAYKNESIHVCMEGTGRLWEPLAEFLYSHEIRVSVANPAKVKGFAQSELRRSKSDKIDSKIIARFCRAQNPAVWVAPPPEIKAIRDRQRYLDVLKDHRVQELNRLQSGELDSVVRASILRHIEYLDSQIKTLGTELLKYIQTHPDVSEKFKLLTSIIGVGQNTAIAFLGEVSAARLFTKSREIEVFCGIAPRLYESGSSIKSRSRISKVGNSRIRRALYMPAVCAIRTNPVLREFALRLKLAGKPGKVIVCAVMRKLLRLMFTVLKSGKPYDVNFKSVKPSFNAAAVVV

SEQ ID NO: 209387 - protein, 340 aa, unidentified
MTITTVGIDLAKNVFAVHGVDQNGRTVLVKPKVSRAALPELIASLPPCVIGMEACSGAHYWARLFRQYGHEPRLMAAKFVSPYRMAGKSGKNDAVDAQAICEAVRRPHMRFVPVKDESQQAMQCLHRTRQGFIEEKTATYNRLRGLISEFGVIAPQSADALRHMVSVQKSSLPLQVQQCVDDLMEHVDRIEANITEYDRILSHIAKTDHRSQRLMELKGVGPTTACALVASIGNAHDFKNGRQLAAWLGLTPSQYSSGGKSKLGRITKAGDSYLRTLLVQGARSVLIGAGKRTDSFSRWVCMLVERRGYWRAVVAIAAKNARLCWASLHYGDDFRLYSVN

SEQ ID NO: 209388 - protein, 399 aa, unidentified
MAAPSLWAGIDAGKLDHHCVAIDASGRRLLSRRVRNDEAALVALIEDVIALADGSSVQWAIDLNAGGAALAIALLLVRDQDLLYIPGRIVHHAAAAYRGDGKTDAKDAAIIADQARMRTDLPEFRHRDETTVELRTLCARRADVSADRNRALNRLRAQLLEYFPALERAFDYSHRKAALILLTGYQTPEALRRIGRTRLENWLRDRHAYNPGAIVSRAMEAANAQHIVVTGQHLAAVMVARIAQQILDIDAELADLDDMIEERFSRHHQASVIRSMPGFGPLLGAELVAATNGALDSFPSADRLAAVAGLAPVPKDSGRITGNLKRPRRYDRRLLRVFYLAATNSIKTCPESRAYYDRKRAEGKHHRQAVLSLARRRVNVLWAMHRDNTTYKSTTKTAA

SEQ ID NO: 209389 - protein, 407 aa, unidentified
MRLFVGDDWAEDHHDVELMNEQGRVLARKRLPEGVAGMARLHELIGEQLGEGADDAEVVIGTETDRGPWVAALVAAGYTVYGVNPLQASRYRERHGVSGAKSDTGDAHMLTDMVRTDSHQLRAVAGDSPGAGAVKVVARTHKTLIWERTRQVQRLRHQLREYFPAALEAFDDLDAPDALELLARAPDPARAARLTRAQISAALKRARRRDIPGKATAILTALRGAQLGQPPAITAAYAATVRSLIAVIITLNEQVKILQGQVGTDFRQHPDAEIYLSQPGLGPVVGARVLGEFGDDPHRYASGKARKNYAGTSPITRASGKKKMVMARFIRNDRLIDALMAQALSALGSSPGARAFYDAQRAAGVEHNAALRKLASRLVGILHGCLKTRTPYDESTAWSHRENKLTA

SEQ ID NO: 209390 - protein, 366 aa, unidentified
MKKISTVAMERIDIFKQNQLTIGLDLGDRISHYCVIEEAGQVILESKLPTTPKGIEEVFGRIPRSRVALETGTHSPWISRQMSQLGHEVIVAHARNVQMISESSRKDDRLDARTLARLARIDPALLGPVRHRSAKAQIHLTVIRARATLVGARTALVNTARGLTKSYGARLPKCGSEQMGREIAKELSQELRDALDPLLAEIESLNERIAEYDRRIARVAKEVYPQVALLQQVKGVGTLIALTYILTLDDPHRFRHSRDAGCFVGLRPGRRNSGMSEPQMHISKEGDRYLRTLLVQGAHYILGPFGQDSDLRRWGLKLAERGGKNAKKRAVVAVARKLAVLLHKLWVSGEVYEPLRNNHKVESAAA

SEQ ID NO: 209391 - protein, 349 aa, unidentified
MTLVGCDLHTRKQQVAVLDTETGEMDERQLSHAGDAVEQFYRALPGPVTVGIESTGYALWFHELMQRLGHTLLVGEAAKIRAMVVRKTKTDRRDALHLLDLLKHERFPLVWIPDPATRDLRALVTHRMRLVRMRTMVKNGLHAIAMNRRLTLGPSLWSQRGLAQLQGLALAPHTTQRRDESLQLLTWLTARIEALDDRVAAAAQADPGARLLLSHPGVGPLTALTTVVVLGPVARFPDSKHVVSYTGLAPAVHASADTCRLGQITKQGSPLLRFVLGQAGLIAAHAEVDLKRHYRTLLRRRGRPKAIVAIARKLLVRLYIMLRDQIDYEEFRRRGRTPRGQEVPPPALA

SEQ ID NO: 209392 - protein, 422 aa, unidentified
MSKTYTHYVGIDCGNRSHHMYVVDEAGAGVHHQSFDHNRAGLSALIDALLACTPDLSSVVASLEAPVGGLVEELQSWGVTVVTINPKQLDRFRDRFTVSGAKDDRLDALVLAQSLRTDRHLFREVHPLPPMVAELWEYSREEEVTQRERRRVTNRLYAKVQTLYPSLLDLCPGADEPWLWALLSRLNPTRRTRRPGQAELDRLLRKHRIRRISAATVSTAVTEGPMRLPSGRARGLWVSIEELLTRLVALDAQHRAQRGRIRRMVRQLSKTEGDDGRVVRQLLSLPGVGEQLAAMILSEAYHLLHSRDLKRLRSYSGAAPVTRQSGGRTVHVMRKACSRRLRRAIHMFALGSIRLDDAARAYYQDLRSRGKRVGQALRSLSERFLRILIQMLKTQTLYDPKRLKCWNNLNNFNIVQGQNALA

SEQ ID NO: 209393 - protein, 373 aa, unidentified
MLIKIVRVAVITAFATFKQPYKDMKKFIIGIDFSKETVDASIVQKEQPETLIAYTKFRNNLKGVDGLIAWAKSKVAQDGEIIFCGENTGTYSTLFSDELTDRGFIIWIEHSMNIVRGMGDVRGKDDKTDSLRIASYAARFYDKMKPYVRPKDETRVLKTLLAKRDRLKSFLKAEITNTKENPLMLQDSNIASSINEFFKRLEESLRKELKELERMILDVVMSSSEYAKNFNILTSMKGIGLINAVALIVYTDNFTKFNFNHRKIATYWGVVPFKNESGTSVRRGTHVSPKCNSWLKALLTEATLCAIRYNSRIKAYHDRLMARGKAIGIVFNNCKNKMLKILVAMVRDSKIYSDMDVSKDPHTTTTTSSIVVC

SEQ ID NO: 209394 - protein, 462 aa, unidentified
MTLRIIGIDLAVHAAHKAVILDQASQRFLSGLISFRANPAEMDCLLQQARAGATDEVQLIAVLEATGMSWFTVGTYLVRHGVRVYRVSGQLTADQRRVIQRHAKSDRIDARVLVSLYLACPERLRPLFLPSGPQLELQRACRELQRLTRQIASIKNRLLATDALAWLGLADVLPPYGPQARWVRTHWYDPWRVREAGYATLAQAWQDAAPQQPADTAWIEGLLRKAKEVVALYGQPQRLDYQCLQLGLQREQARLESAEEQAQTLRLGTIRPLYRQLHPQRHLETLRGVGQDSAAVYVAFIGDIHRFPSLADFRGWSGLIPYSRQSGTAQAQGLRITQAGPDLVKSTAFLDANVARLYDPQIAAIYQAQMLRGKHHLQALCACATHLLDRVYTVLRENRPYELRDPRGQPLDKEQARRLCTQVYRVPPEVRRRNNYRLRKARAEQRVEQRYQSRALKERSKG

SEQ ID NO: 209395 - protein, 355 aa, unidentified
MLYLGIDQHARQITISLRDEQGDVLQARQVSTQPERIQAFFAKLTQDCARDGESFIAVVEVCGFNDWLITLLEEVGCHKVILIQPEERKQRKTDRRDAAALSELLWVNRDRFLAGKPVRGLRQVEIASQTDQENRRLTTLRKEASQARTRLVNKIKHILRRHNRQWELPTKTFPTKRALAWLKELELPEMDRLEMNYLLTDLEQAEQRLGELEQLIVKRCGDSEDAQLLRSMPGVSYFTATSLSCRIGRVERFPRARSLANYWGLTPGCRNSGENHQRLGHITKAGSNLARWLLAQVAHQALRKDARLREWYKRIRRRRGSTIARVAVMRKLATIIWQMLSKRQTYAECRALAAA

SEQ ID NO: 209396 - protein, 407 aa, unidentified
MIFVGDDWAEDHHDLYVMDEAGNRLAGRRLPEGLAGVGQLHELIAERVNEPDQVVIGIETDRGLWVTALIAAGYQVYAVNPLAVARYRDRHHVSGAKSDTSDAKLLADLVHTDRHNHRPIAGDSADAEAIKVLARTHQSLIWARNRQTNTLRSALREYYPAALEAFEDLAHGDALGVLDRAPTPEQGTRLSLPALQSALKRGGRQRNIAARARQIQAALRAEQLAAPAQVTVAFAATTRATVGIIAELNRQISQLETALTEHFETHPDADIYRSLPGIGVILGARVLGEFGDDPDRFTDAKSRKNYAGTSPLTVASGKKRAVLARHVRNRRLYDAIDQWAFCAICTSPGARLFYDQHRAAGDTHHQALRALGNRLVGILHGCLRHHSPYNEHTAWAHRATANTEHAA

SEQ ID NO: 209397 - protein, 347 aa, unidentified
MQILSLDLGKNKTVGCDYERESGQHRFKTAFSTRAGLAQLVKEVKPDRVVIEVCSIAGWVCDLLREMGIEVQVANTSDDAWRWRKVRKKNDRRDALKAAQLSAVNQIREVHIPTIDVRQWRALIAFRQQLVRRRTRVKNHVRDLLLREGQILPRGGKCWTQLGVAELEAMAQPLSEVGMNELWRGELAIELRQLQAVQAEIEVAEEKLDAIGAADPRVRLLRTIPGVGPRLAEAIVALLDRPERFRKASEVSAYIGMVPKELDSGETQRRGKITRHGSRVVRSLLVEVAWAGLRHNPWVRETYQRISGGKKSRKKIAIVAVGRRLFVRCWAMLRDGTSWQWPAAKVT

SEQ ID NO: 209398 - protein, 461 aa, unidentified
MAHPMVQVKPSRRQRDMSPVHPNAAAIDIGARMHVAAVGPDRDPEPVRTFNTFTDDLHRLADWFEQCGVKTVVMESTGVYWIPIYEILEQRGFAVSLVNARDAKHVPGRKTDVSDAQWLQRLHEYGLLRSSFRPQGEIATLRAYLRQRERLLDNAAAHIQHMQKALTQMNLQLHHVVSDITGVTGMRIIRAIVNGERDPDVLASYRDRGCHASVETIRQALIGNDREEHIFALSQALELYDTYQAKVVECDKRIAVVLKRLKEASPTPADPLPAARHKGRSSNPLTFDVREALYAVIGIDLTQIHGLGPYLALKLVGECGTDLSAWPSAKHFTSWLGLAPHNKISGGKVLSSRTRRSGNRAASLLRLAAVTVGRTDTALGAFYRRLSARVGKAKAVTATARKIAVLFYNALRHGMDYADPGASYYEERYQQRVLANLQRRAKSLGYVLQQADAAPVANGVS

SEQ ID NO: 209399 - protein, 369 aa, unidentified
MLFQSFSTQKGALTVNSSKYVAMDVHTATISVAVRDAAGKLIMESVIETKSSTILQFIQGLRGDLYVTFEEGTWAAWLYDLLRPHVTNIVVCDPRRNALLNEGSKSDRIDARKLSELLRANLLRSVYHGENGLRTVKELSRAYLTIGKDLTRVMNRVKAIYRGWGIPCAGKSVYHPRHREEWLRKITQASVRRRAELYYEQLDVLVVLRKQARQELLAESKKHKAWKLLRSIPALGPIRVAVLMAIVQTPHRFRAKRPLWKYSGFGVVTHTSADHRYVNGQLERSKRPVSVRGLDPGHNHQLKYLFKSAAIQASTAKGPFQEFYEALVAKGMRPEMARLTLARKIAVITLTVWKKGAAFDAKYLKSQTA

SEQ ID NO: 209400 - protein, 458 aa, unidentified
MNQKRPKPKIDRTMPMVHPNAAAIDIGATMHMAAVRADRTPEPVRSFGTFTTDLHRLVDWFKECGVETVVMESTSVYWIPIFELLDARGFTVFLVNARDAKHVPGRKTDVSDAQWLQRLHSYGLLRASFRPKGQIAELRAYVRQRERLLEYAASHIQHMQKALTEMNLQLHHVIADITSATGLRIIRAVLAGERDPKVLTHLRDYRCHSSAETIEKALTGTYRAEHLFALEQALALYDVYHEKASACDTRIEAVLKELSIGRGHRSDSLPSSGRPRSDQANALAFDVRAALFALLGKDITQIDGLGPYLSLKLIAECGNDLSAWPSAKHFTSWLGLAPSNKISGGKILSSRTRRCGSRAAALLRLAAVTVGRTDTALGAFFRRLSARIGKAKAVTATARKIAVLFYNAVRHGIEYVDPGASYYETRYRTRVVNNLHRRAKAFGFVLKPMEPAPGVAVS

SEQ ID NO: 209401 - protein, 343 aa, unidentified
MQTMTTIGLDIAKSVFQVHGVDAGGQVIVRRQLKRRYVLTFFQKLSPCLVGIEACGSAHHWSRELQALGHTVRLMPPAYVKPYVKRQKNDATDAEAICEAVTRVNMRFVPTKTAEQQSGLVLHRARHLFVRQQTSVINAIRAHLAEFGIVAPVGRHGVEELLDVVTDPNDKRVPDIARACLSALGDQLQSIKKHILEFDRLIRAWHRSNEMSMRLEAAPGVGPVLATALVAAVADPKSFRSGRNFSAWIGMVPKQHSSGGKNRLGNISKQGDRYLRGLFVAGALSVIRYAKVHGTKHRPWLTALLARRPTKVAAIALANKIARMVWAMMATGERYKEPVALAR

SEQ ID NO: 209402 - protein, 343 aa, unidentified
MELYVGLDVSLKETSICVVDGKGKIVSEGTVKSDPVAIADFIGSKAKGAVRIGLETGPTTTWLWHALRALGLPVICIDARHAKAALSMQINKSDRNDAVGLARIMQAGWYKEVRVKSLACHEVRAVLNSRAQLVKIKRDLENQVRGLLKNLGLMIGKVADKAFGQRVEELVVDHPLLQEAVRPLIGVREIVRREIAVLTRNLLALARDNEESRRLMTVPGIGAINALAFCAAVGEPGRFQRSRSVGAYFGLTPRRYASGEVDWTGRISKCGDGLVRTYLFEAAGVLMTRVAHWSKLKAWAHRLWKRIGFKKAKIALARKLAVILHRMWCDRTDFIWSTKEAAA

SEQ ID NO: 209403 - protein, 338 aa, unidentified
MKLYGGMDLHSTNVVTQLINEEDKVIYRKKQSCDLDQILQGLEPFKDRIEGLAVESTYNWYWLVDGLMDAGYRVHLVNTAAVKQYEGLKYTDDDSDAFWLAHLLRLGILPTGHIYPKQSRAVRDLLRKRGQLVRQRTAHIVSIENLYTRNTGNRLSCNATKCLTQAQIQQQFDDPNVALAIDSNRAIMNALDQQIKVLEQAILKQAKLDDRYHCLLSIGGIGEILALTIMLETGDIERFAHVGNFTSYCRCVGSEKLSNSKKKGQGNTKNGNKYLAWAFIEAANFAIRFNEQAKRFYQRKAAKRSRVVALKAVAHKLARASFYVMRDQVPFDSAKLFV

SEQ ID NO: 209404 - protein, 352 aa, unidentified
MEKSNKLDFGGQHIYVGMDVHKKSWSVSIHTEQFEHKTFTQPPEVEKLTYYLERTFPGATYHTVYEAGFSGFWLHDQLRAKGIDCLVVNPADVPTKDKERAGKRDRVDCRKLARGLRNGEINGIYVPPRVKVEDRTLVRTRQSMVRKQTRCKNQITSILFFYGIVIPEEGRWSRRFINWIESIRMERTSGDFALKAHLEELKHLRQIIANLNRAILSLSRTEEYRSDVLLLKSVPGISTLTAMILLTELADLSRFSSLDKLASYAGLVPDIRSSGETEYSTGITFRRNAALRALLIESSWIAVRKDPALTMAFNKLSTRMKKTKAVVHIARKLLNRIRFVLKNRQEYVPAIV

SEQ ID NO: 209405 - protein, 361 aa, unidentified
MNATTAAIDLAKNVFQVVLVDANYRVLEQHRLTRAQFERFFDNRKVSRIVMEACGSAHHWARVFGARGIEVILLPAMYVRAYVRRSKTDAADALALLEALRCADIVAVKVKSVEQQSLQALHRTRSLWMGTRTSRINALRGFCRELGLHVPIGARTGLEAMGRAVADEQSPITPLLRPIMLQLLDEIRLLETRVAQLERQLAQLARESHACKLLMSIPGIGLLTATAILAATAGSVAHFKSARHFASWFGLTPKENSSGTMRRMGRISKMGDRYLRMLLTHGARSVLRAAKVAQLKGIELIGLRHWALALQARSNHNKSACALANKMARICYAVLRDQTPFGQPAARLAKKMQRQSFELAY

SEQ ID NO: 209406 - protein, 373 aa, unidentified
METTFNAIKQGVGIDMGKDEFHACMMAIDGSQRLKIRATRKFFNTPKGCAELVSWVDHHTKDRTLTIHYLMEATGVYSEQLALYLHKQGAYVCVVLPQKTAYYIKALGIKTKTDKVDAQALATMACQQSLDAWHPISEAMYKLRQTTRQHTHLQEFKTQLGNQLHALEIGMYQSDMVRKQLVKLISEIDKQLAECAKQIQKTVEQNPEWKRKVEQICVIKGVGLLTVAQVIAETNEFSLFENQRQLISYAGYDVVENQSGGRVGKTRISKRGNSRLRRAMYMSAFQVVQYEQKPFVSLYERVFERTKIKMKGYVAVQRKLLQLIYALWKNDAKYDESYVAELQKEVAPTEGATLHQPQAIVLEKANIEELVES

SEQ ID NO: 209407 - protein, 408 aa, unidentified
MLFIGDDWAEDHHDVELQDEEGRVLRRARLPEGMAGITGFGELVGTFLPDDGQPEDVLVCIEIDRGPWVNALIAAGYRVFGVDPKQAHRHREILSSSGAKSDKGDAHALADMVRTRRLQLREAGGDSDIAAAVKVVARAHQSMIWERTRHMSRLRAALREYFPAILLICSELDLPLTSRPILSMLSKAPTPEQAAKLTARHILPMLKGYRSKDAKADRIQQILRDEHLGQPAMVASAYAASVRSSIAVLSVIITEADRLEGEVKTHFGRHPAADIIASQPGLGEILGARVLAEFGDAPGRYRSAKARKNYAATSPITRQSGKSRIVAARFIHNDRLVDALQLQASCALMHDPHAKAYYDQQRARGVKHNAALRQLANRLVGILHGCLASGTQYDQTVAWSHHQQAVAA

SEQ ID NO: 209408 - protein, 419 aa, unidentified
MSFKILKFKCCGLDVHKTWIYACIGITDSNNRTEYKQARFSSFTKGLNELCDWLAKYNCKDVCMESTGKYWIPVFNILEQHNLWVTLSHPKYTKPMKGNKTDRKDAKWICDLYMCGMVKPSFIPPADIRELRDLVRYRFKLTCMITGEKNRAQNCLTVSNLKLDDVFSDVFGKSSRSITEQILQHPGEKFDVAPFVHGRCKTPIEEIQAAVDGAISKEQAVKLRQCLDHIDELNKHISELEQEILRLSDKYEAALNLIRTVPGFDKNPMTAVQILSEIGGDMSVFPTAKHLVSWAGCCPRNDQSNQKIKSTRISRAGSYFKPVLVQVANALIKSKKHLEFTNRYKRIKARRGHKKAIIAICRMILTAIWHILSDLKPYTPEGFLESHPVKEGKVLSSSQALNFFKQRGYIIKDEPLSVS

SEQ ID NO: 209409 - protein, 398 aa, unidentified
MLVGWDWASETHDVTVLDEAGMVVDRWVLRHTERELEEALRRLARHGRPGELPVAIERTTGLVVERLLRAGHPVVPVHPNAFHAARSRWGASKAKSDPGDSYKLADYLRTDGHRLRRLRPLDARTRELQALCRMRDDHVAARTAATNQLGALLEAHWPGAKAIFSRLGSEIALAFLEDYPTPEAAGRLGEARLAMFCRRHSYRGGRAPAELLERLRSAPVAPVGISPETLAELVRAQVRLVRATLSTIAELDQALGAALLGHPNAPLLAPLPRVGEVSLAQLVGEVGPILERSSHVEQASAEAGAVPVTKESGKAKSVQFRLATNRHARKALTAFADNSRHASPWAAALYADARRRGKRHPHAVRILARAWMRVIWACWHNDTPYDPSQHGGERRLVA

SEQ ID NO: 209410 - protein, 484 aa, unidentified
MHLPSPVRLLGIDLGITSDHTAVVVDDAGSICARRRARSTVASLAALEATALAAAPDAHLVVVVEPTGPAWLPVAVFFGRRGHTVLRVTSAKAADLRRFLSRHAKSNGIDAETLARLPLVAPSGLVPVEFGSPARASLDRRVRAVARLTADIGRRKNRIRALAQAMVPTIGVALSEGLNHTDLAVLERYADPRALLAAGPARLTRLVATTSRGQLGQAKAQALRTAAAEAVTLWDGDSAAALDDLAAEVASEVRLVRAAEAERARHEHARDAALGHVDPAGLAASLPGLGPVGTAQLVAVMGRPGRFPNAGAFKAFTGLTPRASETGQTDRKHQPMTKAGPRALRSQLIQSADTARKLDPQLAAVYHTQMTERGATHRKALCVVGARLAERAWLTMARTEPYVVCDLQGRPVTPEQAKRLIAERFTVTPEVRRRRRSTKKAGKAPHMALKAQVKSQREAGHEATFPAASLKAQPSTVNLASRPI

SEQ ID NO: 209411 - protein, 346 aa, unidentified
MMIIGCDFHPSWQQVSWVDTKTGDCGERKLVHASGDAKFFYQQLTAPVLIGMEATGNSQWFVELVEDLGHEIWIGDAAQIRASYVRKQKTDKRDAAHILKLVVEGRFPRLWSPDREQRDQRQLVLHRHKLGEIGSRVKNELQHLSMNKGMQKKRTLWSQAGQKMLRELPLKPWAACRREDLLGLLGMLNQQIGKLDTAVQTAAEENPQAKLLMTQPGVGPNTALAYVLTIGDVNRFRRGKQVASYLGLIPREESSGGRQKLGAITKQGNRMLRSLLVEAAQIAVRYDPGFRKQYLHRCHQKPKGVAKVAAARKLAVRLYWMLRTQVGYPEIVRIESSPRVPLVGAS

SEQ ID NO: 209412 - protein, 335 aa, unidentified
MENKQSYVGIDVSKDTLDYCLVSEGQQIFHLQTENNIKGIKAFIKELLKGKIKDLNDIIFCLEHTGIYSHHLTTFLSKNNLKVWLESSIQIKKSLGVHRGKNDKIDAIRIAMYAYKNRDEVRLWEPQRKELQKLKHLTNVRKRILKTINILTAMFTEKSFYDVDIMKLAKNSTNASVKALRADLKEINKTILEIIKSDERLNHLFKLVSSVHCIGEVTATQIIISTNEFKNITEGKKFACYCGVVPFEHRSGTSVRGKTRVSKMANMDLKKALHMAALSAVHYKGELQDFFLRKVAEGKNKMSVVNAIRNKLVLRVFACVRDNRLYDRTYDYKAA

SEQ ID NO: 209413 - protein, 320 aa, unidentified
MTAFTPVGIDIASKKFDAAIWIEEKKYKNKVFANTPAGFHAFLQWLAPYGSCHICMEATGAYSLPLATYLYDAGYPVSVENAARIHAFGQSELIRNKTDKGDAKMIARYCFLHKPPEWKPAPLNERQLQALVNRLNALKEMKHMEENRALTTEAIVQDSIQKVIAALEQQIKETEQAIKEHIDNDPDLKKNKALLESIPGVGEVLSTTLLGYVGDMSRFSSNKALVAYAGLNPMLRESGCWKGQTRLSKKGNGVLRKALYMPALTALRYNPVITALCNRLRDKGKRGKFLVCAAMKKLLQLAYGVLKSGKPFMAEIPLAR

SEQ ID NO: 209414 - protein, 349 aa, unidentified
MSEYDGKQFVGIDLHRHRSVIVRQDADGNRLSVRRIVNDPVRLAEEIGQAGREPEVVVEATYGWYWAADVLAAAGARVHLAHPLGIKGMSQRRVKTDIRDATDLADLLRLGRLPEAWIAPPALRQLRELVRHRCKLVNQRSGLKASVHAVLAKQGLRIPVSDLFGVTGQALVAAAPLDAAYRARVNALGRLIESYDFEIEVAGKLISTQVGRDPLYGPGYRVIQQIPGIGPILAAVLVVEIGDVHRFAGARQLCSWAGLTPKHRESDTHVRRGRVTKQGSRLVRWAVVEAAQKVPASCAWIAGARAGITVRRGRNIATVAVARKLLTLVFYGLRDGHIRALEQAGRAVG

SEQ ID NO: 209415 - protein, 408 aa, unidentified
MEVLHPRCAGLDVHKDTVVAAVRCVSPPVHHEVQSFSTTTRGLFALADWLGSHGCTHVAMEATGVYWKPVWHVLEERFELVLANAQHVRNVPGRKTDVGDAVWIADLLAHGLIRSSFVPPAPIQELRDLTRTRKQLVREIAQHSLRIQKVLEDANIKLGSVLSDVLGHSGRAMLESIIAGEEDPVRLAELAQGTARRKTAALVEALRGRVTPHHRAMLRLHLGLVDALESALEEVDRHVGKALEPIRDLARLLTTMPGVGDLVAQVILAEIGIDMSRFPTSGHLISWAGLCPRNDESAGKRRSTRVRKSGTWLKTTLVTAAWAGVRVKDSYLHALFLRIKSRRGAKKAILAVAASMLTAAYFMLRDGVEYHDLGPDHFDRRDRSKVIHRLVRRLRDLGCAVQITEEAA

SEQ ID NO: 209416 - protein, 412 aa, unidentified
METIHERVAGLDVHKDTVVACVRVPGGRGRRESHVHEFSTTTPGLMALRDWLVSHQVGLVGMEATGNCWKPVYYALEDASECWLLNGRHLRNVPGRRTDLADAAWIAQLLEHGLVHPSFVPPPEIRELRDLTRYRKAQIEERGREAQRLDKVLQDAGIKLSLVASHLMGVSAQAMLRAMVAGERDPEILAELAKGKLRRKLPELAEALEGRFRGHHALLVGEILAKLDHLDEAIERLSDEIERVLGPFAPQVELLRTIPGVDRRMAEALIAEIGVDTSRFGSSARLASWAGVCPGQHESAGRQRHGTTRKGSKWLRMHLTQAAKAAARTKGTDLAAQYARLRGRRGGSRATIAVAHSILVAAFHILERGTPYEDLGADWFIRRHSPERHARKLVHQLETLGFDVRLEERAAA

SEQ ID NO: 209417 - protein, 340 aa, unidentified
MSEITRVAIDTSKSVFTLHAVDAQDRPVLRRNLRRQDLVPFFAKLPPVDVSMEACGGSHYWGRTLQALGHRVRLIPAQYVKPFVKRSKNDRNDAQAISEAAARPGMQAVAVKSADAQARAMLLTVRELLVRQRTQLVNALRGHATEMGLVAPVGGKGLAALRSEIEADATLPEAAAEALQLLGREIDRLEARLAQIDKNLLAQHKTDPDSRRLSAIPGVGPMSALSFSRMVDATQFKSGRHFAAWLGLVPREISTGGKQRLGGISRAGNERLRQLLVLGATAVIRFAKPGHPGASAWLLALLERKPRKLAAVALANKMARIIWAMLTRGEDYRAVKPVVA

SEQ ID NO: 209418 - protein, 350 aa, unidentified
MLIGVDYHPSFQTIAFLIEETGEYEERELNHSDGQAEKFYRDLKQRGICVRVGMEATGHSRWFERLLAELGFELWIGDPAEIKAKRVKKQKFDREDARLLLRLLRENNFPQIWVPDAENRDLRQLLWHRHRLVQMRTRIMNQLHALAMNEGFCWKKKLFSEKGRAQLEKLALAPWAGRRRQGLLELLDRMNPTIEELTAAVEREARKRPEAMRLMTHPGVGPLTALAYVLIIGTPTRFQRGKQIGTYVGMIPCEESSARKQRLGHISKQGNSLLRFLLVEAAQAAARVNPHWRRRYMHLAMRRHKSIAKVAMGRRLAVRLYWMWRNGCEYSPSLEFGSYAGQLGLGNGVK

SEQ ID NO: 209419 - protein, 459 aa, unidentified
MNRKQRREAMRKIQSEEISLEVVHPNAAGIDIGNESHYVAIPPSRDSQPVQRFGCTTAELKAMAAWLKQCGIRTVAMQSTGVYWIAVYDILEQAGLEVYLVNARDTKNLPGRKSDVQESQWLMKLHTYGLLRNSFRPAQQIRTMRTYWRQRNDLVQSTGRHIQRMQKALTQMNLQLANVLSDVSGVTGQAIIKAILGGERDPHKLAEFRDPRVKASEEQIAQSLEGNWQEDLLFVLKQEQDGYEFCRKQMAECDRQLAQYLQQREDRSQGAPLPEEKRKTRLKKKKGNAPQFDLREGLFRLIGTDLTQIDCIDVMTAMTVISEAGWDMSKWKTEDHFVSWLRLCPDNRISGDKIIGKGRLPTNNRVSIALKMAASSLRLNNTYLGAQFRRLRTRLGAPIAIKAMAAKLARLVYRMLRYGMKYVDRGAAFYEVQNRQLQIKRLKSKAAKLGLQIVQAPAA

SEQ ID NO: 209420 - protein, 366 aa, unidentified
MSEITRAPIVRVGVDLAKQVIQVHAVDVSGRRVAARAFKRDQFLAWCAQLPAGCLVAMEACSSAHYWSRKLRALGLDARLIAAHFVTPYRMEGKNDANDAAAICEAASRPCMRFVPVKTCEQQGVMSLHRVREGLKEERTACINQIRGVLTEFGLVFGKSPKVLRAVLADVIEDASNELSAMARLVMQRAFEHWRELDEHLRWCDRQVGQHVRASPQAKRAVKVFGIGELGASALTAGVGDFKQFKSGHQFGAWLGLAPKQDSSGGKTRLGRITKRGDDYLRTLLIQGAKAAVMSADKRDDPTSRWLAQLTARAGWQKACVAMANKNARILWAVMTREEGFDPNHVSVKPRNPVAVAPSDPAACAA

SEQ ID NO: 209421 - protein, 482 aa, unidentified
MAKRKMSTFERLRSGKMNRQERKEWQQRLCAEDAGLEVVHPDAAGIDVGNASHFVAVPPDRDEPPVREFGSWTADLRRMAEWLKRCRIRTVAMQSTGVYWVALQEILEHEGFEVYLVNARGTKNLPGRKSDVQECQWLMKLHTYGLLRNSFHPPEQIRAVRTIWRQRDRLVKEAGREVQQMQKALTTMNVQLANAISDVSGLTGQAIIRAILQGERDPQQLAKLRDWRIAASEAEIAHSLEGNWREDVLFELQQVVDAYDFHQKQIAACDVQLQRYLSAVPMRSRLGAGEPSTADAPSEKPKKQRKHKWQKNQPVFDLAVELQRTMGVDMTAIDGVDVMTTQVILSELGPDLSMSFPSESHFTSWLELAPRRDVSGGKVIRQKSRKSNNRVATALRMAAQSLWRSDSYLGARYRHLKARLGGQKAIKAMARYLACLIYRLLTKGQEYVDRGAAHFASKRTERELLALQRKAAGLGMQLVAIS

SEQ ID NO: 209422 - protein, 313 aa, unidentified
MKKTICGVDVSKAQLDACIEPGHRFASFDNDTAGVAKLAAFCREHAVELVVMEASGGYERRPFVELWERGISCALTNPRSVRRYAEAMGILEKTDRIDASVIARFADAKNLAPTPLPSRAQQRLKALVARLRQVTDDLIVQKQRRASLLDNTEMRESIDEVIALLKRQSRKLEGEIASMIDDDPLWAKLAETWREVKGVAGRTVARLHAELPEIGILSNKAIAKLTGLAPIANDSGKRKGKRPTRGGREGVRSILFLVAATAARYDKSLKDFRDRLVAAGKEKMVIRIALARKLLVRLNAKARDARTAYANAT

SEQ ID NO: 209423 - protein, 350 aa, unidentified
MEQISRIGMDTSKHLFQLHGVDAAEKPVLRRTLRRRDMITFFERLAPTRVAIEACGASHHWARLLRGFGHEVQLIAPQLVKPYVKRGKNDAADAEALCEAMSRPTMRFVPVKTADQQAALMLVKLRDRLIRNRTQLVNAIRGYAAEFGIAGAKGIAHVTTLLARLQADVTLPALARELFAMQAGEYAQVQAKIAVVEAKLLAWHRADPCSQRLAGVPGIGPIGATMLTMKTPAPQAFRSGRQFAAWIGLTPKDHSTAGKARPGVITRAGDEGLRSVLVVGATALIRRVREGRCRDGDRFAAWVGKLLERKPPKLVAVALANKLARVAWKLMITGEAYAVKPASTGAASAL

SEQ ID NO: 209424 - protein, 458 aa, unidentified
MVQTKRPRSRREMPAVHPDAAAIDVGATMHVVAVPPDRDPEPVRTFGTFTADLHRLADWLRACRIKTVVMESTGVYWIPIFEILEQKGFDVQLVNARDAKHVPGRKTDVSDAEWLQRLHEHGLLRGSFQPKGEVKALRSYLRQRERLLDSAATYIQHMQKALTQMNVQLHHVVSDITGVTGMRIVRAIVAGERDAATLAAFRDSRCKEPVETIREALIGNYREEHVFALTQALELYDIHQKKVAECDKRIETVLEQLKATRPTPAKPLPAPRHKTKQSNAPNFAARDALYAVLGIDLTQIHGLGPYLALKLVGECGTDLSAWPSSKHFTSWLSLAPRNKISGGKILSSATRRSNNRAASLLRLAAVAVGRTETALGAFFRRLSARIGKAKAITATARKIAVLFYNALRHGMKYTDPGAAYYEERYRQRVLSNLQRRAKAFGYVLQAAAPQAPQAVGVS

SEQ ID NO: 209425 - protein, 322 aa, unidentified
MRYIGIDVSKATFVVAYSSDKGGEIRTFNNTTAGIRQFIGTLPKDGSIHCVMEATGNYSALLLYMLNVAGITVSMENPLKVKNFAKAMLSTVKTDKSDARLITLYGEKMNPRPFKVQGEAILRLRQKRTVIRQLTKQITAMSNLRGSLACLPVPDKGATHTVDETIKFLEKKRDRLQAELTDLVEVEFSRQLALLTTIKGIGITLATALIITTGGFTYFQNAKQVSRYLGICPTYEQSGTSVNIKGHINRNGDAYTRGLLYIAAWPASRFNAQCKETYTRLRQNGKSGKLAMIAVANKLIRQAFAVVAHDKEYIDGFVSNRP

SEQ ID NO: 209426 - protein, 385 aa, unidentified
MSELNDLSRSLTSLEQDKTIIAVIEMSQSSWFVAGIIPGIERHPLKKLEPSEEELVRLLMRWRTEATKNGHTITRFAVAFEAGRDGFWLARWLRSRGIETYVIHPTSVAVSREHRRAKTDRLDTGLLKRVFIGWLRGEPDHCHMAAIPTLAEEDAKRPNREREGLVRERTRIVNRMKSCLARFGIRNFKPTLRKAPERLATLATPEGVPLPPNTLLELRRDMARLRFVMDQIKEVEEARAQRLEQAPQEKTHAMVRLIARVIGVGIETADMLVHEILSRQLRDRRAVARYAGLTGAPDESGNKRREKGLAKAGNARVRRGMIQLAWRFLVFQKDSALARWYRTRTESAGKKRKTMIVALARKLLIALWRLVTIGEVPAGVVLRAA

SEQ ID NO: 209427 - protein, 396 aa, unidentified
MNTKLHAICDSQGRPLNLFVIAGQVRWSGCRPPETASIVPRLWCRKPHNEEDGKMKDMMIGVDLAKNVFQIHGALRAGEIQFRKKLTRKQFTAFMARQDPCLVIFEACGSAHYWAREMASLGHVVKLIAPQYARPFVKRQKNDAADAEAIVIAARQPEMRFVAPKTVEQQSQAAVFRGRERLVHQRTADVNALRALLYEHGYLFPAGIRYLDRMTALVEDEASDLPALIREECQDLLAQIAEKTARIIERTAKLKTLAAQSDRARRLQTMPGVGPLTAIAVEAFGPDMAQFKTGRAFAAWLGLVPRQHSTGGKVRLGRMTKAGQADIRRLLIIGAMSRLNWLGQRTIMEGSWLSRMLARKPRMLVAIALANKMARQVWAMLTKSEDYKVPALAVAA

SEQ ID NO: 209428 - protein, 335 aa, unidentified
MDFKVFIGIDVSKETLDFIPTSEGKRLFHEHVSNDNKGIVRLYRRLAKTVDSSPEQWLFCMEHTGVYCNPMLEFAVEKDLAIWLESAAKIKAHHALERGKNDTLDALRIAEYAFAKKDKIKLWEAPREVMIRLKSLIKLRERLITSKKRFLDPLREEKQFCNKEWVREHEKLLKPVIAKIEKQTKEVEQEIQQLINEDDDLKRLYGLITSVRGVGQIVAINTLVVTNEFKQITNPKEMACNCGVVPFKYDSGKTIRSRAKVSHRANKTMKVLFHLAAMSAISTKGELRDYYLRKVEEGKNKMAVINAVRNKIIHRIFACVRDQRKYEENYIHSLA

SEQ ID NO: 209429 - protein, 414 aa, unidentified
MNSWNEITHYAGFDWAKDHHEVVIVDRLGQIVADFQIEHNAQGWQRWREQLVALGPGVAACVETSQGTVVECLLDSDATVYPVSPVSAKRYRERKVPSGNKTDHVDAWSLADALRVDGHGWKALAREDPLVAELRLLCRDEVALIEERTALINQLQQALYEYYPAVLEAFEDWTKPAAWAFVEAFPTPQALAAAGKRKWEKFLHSHKLARPETYQKRMEIFGRACQFLSGQALTRAKSRLALARARMLRVLQNQIDAYRAEIEKLFAKHPDHDLFGSLPGAGPKLAPRLLGEIGSDRARFEDPTGLQCLAGTAPVSYQSGQIHKVNIRRHCNKPLRYAVHLWADLSRRSCPWAAAYYQALRQRGKSHACALRCLGQRWLKILWKMWQSGTRYDPDLHTKNQIKHGSWVLKIQPA

SEQ ID NO: 209430 - protein, 326 aa, unidentified
MSAMQGTAWIGIDVGKTSLDVVRHPNGLPWQVANDAAGWQALVADCQTTPPAGIVLEATGGYETGVVVALDAAGFTPVVANPTSARRFAQSLGRRAKSDRLDAAMLGEYGARLQPVAQPVRSETARQLRALIDRREQLTKQLVEEQNRLQQAEPVVRDSIQAHLVWLRDARDEVTRTLDALVQSDPFWQHRVALLETVPGMGRWTATVYAVELPELADRTGKQLASLVGVAPHPRESGRCRGQRFISGGRAHLRRAGYQAVHAAQRSRDPVLRRHVAQLMARGKSRKQAIVASLRRLLGILHVMVRDDLTWDQTRVGKGGYLPATP

SEQ ID NO: 209431 - protein, 424 aa, unidentified
MENTAARKRRQVPEGYLIVGVDPHKKRHAAVVITQDFTTQAKFKFDNTREGLEMMLDSARTEMVKSGCRGVMFAIETGGHYWRNIAYYLDERGIPFRFINQYTLKRRREGKDINRRKNDYRDSEVAAQLLCTGEFVESVIPQGVYAELRTSHNAYQRLVKERTRITNLIKGLLDALFPEFTHVFKDPCGLTALSILSTGTIPRVIAGMTEDEFVATIEVRHKGRRLMRKKLKALHYSATTSIGIDAGARSVSSEIAFLVDKLELIKRQICVMEGTLVRLVDETEEGKYLLSIRGLNYIAVAGLLAELGCFKLYRSAKQMIKMAGSNPTESESAGKRRVKTPMSKQGRPLLRYCAWTSVIPMLRVNNDFRAWAKQRRERPAHANPLNGREIVGAALNRLLRLSFALVKNKTYYRDVKPALTPVAV

SEQ ID NO: 209432 - protein, 388 aa, unidentified
MPQTPNDLSRSLTALEQTATLVAVVEMSQASWLVAGMIPGLERQPLKKIAPNEAALLSLLQRWQEEAIKICQTIRRITVAYEAGRDGFWLARWLCSRGIEAHVIHPTSVAVSREHKRAKTDRLDTAMLIRVFLGWLRGERGHCGMVAVPTLEEEDAKRPSRERENLVGERTRIINRMKSALVRLGIRGFKPELRRAPQHLEKLRTPENVPIPLRTLEELRRDMARLAMVRAQIEAIEQIRLQRLEQAPQDVAHAMVRMLANIIGVGVETADMLVREILAKELRDRRALARYAGLTGSPNESGSKRREKGLAKSGNARVRRGLIQLAWRFLRFQKDSALAQWYRTRTEGAKGARKTSLIVALARKLLIALWRLVTIGEVPQGIVLRQAT

SEQ ID NO: 209433 - protein, 373 aa, unidentified
MNNNNTLYVGLDVHKESITVAYTINSEPVELMGKIGTTPTDIQRLCKRLGPKSSWVSIVYEAGPCGYGLYRRLVKSGFDCMVCAPSLIPKKLGERVKTDRRDAIRLVRSLRAGDLSAVYVPVVEDEAFRDLARVSARDDLRHARQRLKSFLLVHGIHYVGRADWGPAHRHWFSKYSFESPWRQLAFDEHRRTIEDRLAQCERLESALREAVTEWRLYPVVEALQAMRGIQFITAVGLISELGDLTRFEHPRQLMSWFGITPSEYSSGGSRHQGSITKAGNSYARKLLVEAAWSYRHPARISPAIQKRQENLPRPVIDRAWDAQLRLCKRYRKLQAKGKHVNITIVAVALELSGFIWDMGRIAMSVAQQPQCHK

SEQ ID NO: 209434 - protein, 327 aa, unidentified
MNYLGIDVSKARLDCTLLDPATDKRKSKAVSNDLRGFEALSAWLDKQGIAAGEVHGVMEATGVYHEQAALWLTDAGMRLSVVNPAQLRDFARGLAMRTKTDGTDSVALARYGALTQPEPWEAPPPEIRELKALITRLEALEMDARRELNRREKALVAQAPALVRESLDIHLAALNREIARLQQAIDDHINRHPGLKADRERLLSIPAVGDKTANRMLAVLHSRKFRSADQVAAFLGLVPVEHQSGSSIQKRPRLAKNGDARTRAVLYMAAIVATQYNPHIRALYARLCAKGKAKMAAIGAAMRKLVHLCFGVIKHQTTYQPNWQQGG

SEQ ID NO: 209435 - protein, 454 aa, unidentified
MRKPQVVPDEDHEVMYERVAAVDVAKASGVVCLRTPDPARPGRFVNRIWDNVPATRAQIAGLGRELLRCQVQMVTLESTSDYWRIWYYVLETAGLAVQLVSPSQAKNLKGRPKTDKLDAMWLARLTQQGMLRPSFVPPAAIRRVRDFTRARQDLVAERTRCLQRLEKLLEDAMIKITSVAADGMKAKSVVAMVAALAAGERDPRTLADLAKGPLRAKRDALAEALDGMFDSHHGVIARMLLGQVAFLEQQITRMEDQAIAALAEVPGSWGVDASGQTGPGCGVTPGSPVLAAAHRLAEIPGISVWLAIVIIAEIGLNMAAFPTPAHLVSWMGLCRSAAQSGTRHGKGKPKKGNSYARAAAGQAAIGAARTATFLGERYARIARRRGKAIAQAAVARSIMIIVWHLLADPAARYRDLGPDFYASRINRDKKIRNHLRGLQALGVTVTITDDEQAA

SEQ ID NO: 209436 - protein, 375 aa, unidentified
MDEGIKVFVGLDVHKDSIAIAAAEAGRSAARLVGQITHDVPKVIKTLARLGEPGALHVVYEAGPTGYGLQRALAAKGYRCEVIAPSLIPRRAGDRIKTDGRDCRRLAELARAGELRAVWIPDAGDEAIRDLSRAREDTVDARTQARHQLKAFLLRHGIRYSGKTAWTKSFYRWLGELRFGDASSQTAFTEYHLAVQAADQRLQRLTTALTASVAGWRFEPVVQALRALRGIDAVSAIGLVAEIGDIARFDHPRKLMAYLGLVPSEQSSGDRVRKGSITKTGNGHARRLLTEAAWNYRFTPRIGRAAQARQEQLAEPIKAIAWKAQLRLSGRFARLNGRGLHYNKVCVAVARELTGFVWAIAQASSAQPGDKQVMA

SEQ ID NO: 209437 - protein, 421 aa, unidentified
MENTAARKRKQVPEGYLIIGIDPHKKKHAAVAITQDFTIRDKFKFDNTREGLETMLRRTRTEMVKADCRGVMFAIETGGHYWRNIAYFLDEQGIPFRFINQYTLKRRREGKDLNHKKNDYRDSEVAAQLLCTGEFTESTIPQGVYAELRTAHNAYRRLVKERTRITNLVKGLLDGLFPEFTRVFKDPCGLTALSVLSACAIPGVIAGMMEDEFVAAIEAKHQGRLMRKKLRELHYKAKTSIGIAAGARSVSSEISFLVEKHELIREHICIIERTLVSLVDETEEGKYLLSIRGLNYIAVAGLLAELGCFKSYRSAKQMIKMAGSNPTESESAGKRGAHTPMSKQGRPVLRYCAWTSVIPMLRFNSDFRAWAKQRRERPAHANPLNGREVVGAALNRLFRLAFALVKNQTYYLSPQLVQVTG

SEQ ID NO: 209438 - protein, 396 aa, unidentified
MPQIWAGVDMGKEHHHCVVINPDGERLLSRRVLNDETALLELIGDVLALDADVLWAVDLNHGGAALLVGLLLNHDQPMVYITGLTVHRASASYRGEGKTDAKDAFVIADQARMRRDLGLLRPGDEIAVDLRTLTGRRTDLMCDRTRQINRLRAQLLGIFPALERELELPNKGPVVPLTGYRTPAAIRRSGVKRIETWLRNRKVRSAAALARTAAEAAEAQHTALPGEKPAAAMVVRLAKGVMALDEEIAEVDALIEARFREHPHAEVILSLPGMGKHLGAVFLAATGGDMDAFGSADRLAGFAVLAPAPRDSGRVSGNLRRPRRFHRALLNAMYLSALSSLKNCPASKSYYARKRAEGKGHKQALPALARRRINVLWTMIRDGVYYQAAPAVTAAA

SEQ ID NO: 209439 - protein, 347 aa, unidentified
MLIIGCDLHTRTQQIAMLDTETGVVVERRLEHENGEAKRFYEGLKEAALVGMESTGYALWFAALLAELGHELVVGDAAKIRAMEPRKQKHDRRDAAHLLNLLVRGDFPRLWLPSVEERDVRVLLEHRHQLVELRTRAKNGLQAIALNYDLARRSRLWSEAGQQALQKLPLREGMARRREDLLCLRAQLDQWVKELDQRIAQEVARRPDAQRLMTHPGVGPLTALGTVLVLGPVERFPDARHVTSYVGLIPQEESSGGRQRFGHLTKQGNRLLRFLLVEAAQSASRLDPGLRRGYRRLAFRKGHALAKVAVARKLLIRLYIMLRDEIDYAEFVRRGSHAGMLGEVALA

SEQ ID NO: 209440 - protein, 346 aa, unidentified
MKILSLDLGKYKTVGCDYEGESGRHSFRGTLTTPAALRQLVSEVKPDRVVIEVCSLAGWVCDLLRELGVEVQVANTNEDAWRWRKVKRKNDRSDALKVARLSAVNQLREVHIPQIEVRQWRALIGYRQQLVWRRVKVKNHIRDLIMREGQLLPRGRSCWTQVGMAALEAMARPMSELGLSELWRGELGLELQQLRALQQEIAVVEEKLDAIAAADPRVQLLRTIPGVGPRLSEAIVALLDRPERFRKASQVSAYIGMVPKEFDSGETERRGRITRHGSRLVRSLLVEVAWAGLRYNPWVRETYRRISGGKKSRRKIAIVAVGRKLLVRCWSMLRHGTAWQWSPGIT

SEQ ID NO: 209441 - protein, 426 aa, unidentified
MRVLYDRVAAIDVHKDMVKVAIRVPGAKRGTRKTDVLEFRTFYGVLQAMARELRRRGVTHVVMEASGVYTDPVYYALRELDFTEVMVINPAHAKALKGHKTDAKDAIRLLDLYECGLLSGSYMPDADLREVRDLARYRMKTVQARTSEIQRLQKALETAGIKLGSVVSEITGGSATAMIEALISGERRGSVMADLAQSRLRTAGKMADLSMALTGRFTDHHALMCRLHRDRIKLFDDAVQDLDATIAPLVARYAREAELLKTLPGFGDVIVAGWLGAIGPAPHQHFATASRLASWATICPGNYMSAKKSKGGRTGNGGAYIKPLLIQAAWAAVRVPGRLQARFRRLVRKFGGPRNKGAQKRAITAIAHTLLKIAYSVLKTGKPYADLGADFYTRRESPDARQDYLVRQLQKLNPGCVITITPAEAA

SEQ ID NO: 209442 - protein, 393 aa, unidentified
MFNPLKVRLMRAVCGLDVHKDSVFLCILNEDGELIERVFGVLTFQLQQMRDLLLTHHVDEVSMESTSIYWIPIWRILAPHFHLRLVNPYFIKQLPGHKSDVADAQWIAECTMKNLVSSSFVPPEDIQQLRQYDRRIFDLDEEIVRKLSKLDAVMQRCNIRLSNYVSNVDCKSYKDVVRKISEGVTDPEVLIEEIHGRIIKHHGRETILASLTGVISQAETDVLRQLREELDMAEKHKQECLEKMLEICQEKYPDELRRLQTIPGVKERTATSLIAEIGTDMSKFETANHLAAWSGLRPRNDESNKKFKSRRITHGNVYLRKNVIQCAWAASRTKDCFFSRFSYHQTQVRKKNRMKVIVAVARKLLVATWHVIHDKTDYVDFQKQDRQASVTNG

SEQ ID NO: 209443 - protein, 367 aa, unidentified
MKKVSTVAAKPGKKISQQKLTVGLDLGDRNSWYCVLDEAGSIVLEQRLSTTPKAMREVFGGMPRSRVALEIGTHSPWISRLLSELGHEVIVANARKVRLIGESRRKDDRLDAQTLARLARIDPELLYPVKHRSAQAQADLMMIRARAGLVRARTGLVNTARGLAKSYGERLRGCNVRNMNREKAESLSPELQAALQPLLAAIESVSERIAEYNERIEKLAQESYPQVALLKQIKGVGTLIALTFLLTLEDPHRFRKSRDVGCYLGLQPGRRNSGKSEPQLHISKEGDPYLRTLLVQGAQHILGPFGVDCDLRRWGLKLAERGGKNGKKRAIVATARKLAVLLHHLWVSGEVYEPLHTGIRVPVATAA

SEQ ID NO: 209444 - protein, 330 aa, unidentified
MTSFIGIDISAKSFDLVVRQHNKPNKSKSFEQSFDGHQSCLNMLKKLKPTLIVMEATGVYYLDLAVHLYNAGLPIAVINPASFKRFAELMLKQSKTDSIDAALLAEFAQRMEPRLWVAPSEQCLALKDLGRQVQRLTADKAKAKNRLHAFQSKKTTLRILIQDMVKSIKHYEKRISLLTDAALEIIHQDEALSRQFQSMMSAKGIGQTSAIAILAEFSILPKEMKAKQVSRYAGLDVKLSQSGTSVNGASRISKAGNAYLRAALFMPAMSAVRHDENAEAFKEALVSRGKKKIQAIIAVMRKYLTGLWSVYLSGEIFDSSKLFSPEHKKA

SEQ ID NO: 209445 - protein, 340 aa, unidentified
MNIKRIGLDLAKNVFQIHAVDHREHVVLRKTLRRDRMAAFFTQLSPCLIGIEACGSAHYWARELTRMGHTVRIIPPRLVKPYLKGQKNDANDAEAICEAVSRPGMRFVAIRTERQQTLQAEHRVRARLIRARTALSNEIRDLLGEFGVVLPAGIAQLRKALPEIVSQQVQWDECFIRLLCELSEELQGLDERVARHDRRLQQSARDDIRIKRLLAIEGMGPVVASALVAAVGDGRQFRSGREMAAYLGLVPRQHSSGGKARLGHISKRGDRYVRTLIIHGARAVLNACQNKTDRRSQWLQGVSERRNRNIATVALANKNARIAWALLSREEDYHGIQVTG

SEQ ID NO: 209446 - protein, 326 aa, unidentified
MNNIGIDISKHKLDCLWLKDPELNKVKTKVFKNTSKEHQLLGRWLLEQTQADASDIRIVLEATGVYHEAVAYSLHQQGFIVCVVNPARAKEFAKSLGHQHKTDTKDSLALALFGQAMKPDVWEPEPLEIKELRSLISRLQALEMDYQREFNRLEKAQVSQESNRIIESLGLMMKHLKDEKLRLEQDIDGHINRRPHLKKNQELLCSIPAIGPVLSRIMVSIIHSDRFKSAGQVSAFLGLIPKIQESGLWKGRSRLSKRGPAKVRSKLYMAAIVAIRYNPDIKNQYERLLANGKTKMQALGAAMRKLVQICFGVIRHQNEYYPQLKN

SEQ ID NO: 209447 - protein, 350 aa, unidentified
MRILALDLGKSKSVFVDCVTGGGERKFGKIGSNAHELRKLLERCAPDELVIEACPAAGWVCDLAESMKVPVQVANGNDERWRWKTVKEKSDRKDALKLAQLFEMGSLPTVHVPKGAGRQWRSLIQYRHELVDRRTAIKNSIRSIYERQGLALPSARRAWTKPAVEELKKEAWAAQAEELWLFQVGCELQQLEMVEQRIEQVEGRLEELAKEKESVRLLKTAPCVGPRLSEAVAAILDDPHRFKNGRQVGCYVGLTPRRWQSGQSDRQGRISKAGNPLLRELLVEIAWLGVRNKTWMLEVYERVRRGSDKRKKIAIVAVARRLLVKLWAMLRDCTEWKEPACKPVAALAVG

SEQ ID NO: 209448 - protein, 385 aa, unidentified
MAPPRMPEAVIGLDVGKLSHWACVATRDGEILLSAPVANREGDLDSLFGRFPDALVVVDQSRNIGALALARAKAAGMSAAYLPGLAAHGAARLFAGDAKTDERDAMVIAKTALGIPDALLPVRDPGPTVAAARALAAQRNFLNCENTRSKNRLRSILLESCPAFEALVDLSDGPQLRLMASLGGAWSVADAGPRRAAALTRGAARGKIEALVRSTASSTRPDAAAIAAEDRAVRLLARRISENSAEIDVITAEISALLEGDDTYRCLLTVPGIGPKTASELAISIDIEDFPSHDRLASYCGLAPRNRQSGTSISSVTVSRQGNKRLKNLLIFSCNCLTRTEGRWGDYYARCRERGMPHGKALKALARKRLKVIYAIMRDRVPYAA

SEQ ID NO: 209449 - protein, 553 aa, unidentified
MSTPYRFFQTKRLVITLRVMRTLFEHCRMQIPPYRINYSPLRERRFGARLRLTAMQQNKSLCLSDFIRNPDSVIKDFNEIPDGDDVEYVKEYGIGIDCHSKFIEVCIRYRNGTVIQKSQSRFSTSWNDLVSGREWCLETLKTNADPVPDLSEPLHYLVESTANYHMPVCMAWGGNPTIINPTIAGATKRKTDVLDSRLLALHDQLNIWRECFIPSEEVKSLRVMISQRDRCIQDATVTGNRINSIITRFGFTIGRDGSVVKNPAVRAIVEDQISDHPSEIEGVCPIPIPMDVRIVLRAEYGKFDRLTAQAEEWKEKIIAKARSIEWETDTGTLPGPEMIRILSTAPQVGEMTAITWLARVVTPRRFRNAKALSAYCGLDPSLKISAGKVTSTTMRGGSKPLHKALNMSAHRLIHRHNEMFGIWGYNLQQQTGKKKKAANAVARKLSVAMYYMMKTGTEFSYEKYRSIRSIDVFDIPVEELVLINPDFKRYIRILKESNINTTVDLATAYVTCSLGSCRGLGKKFYGLLKDFLDHHVTYKQIYDELQEQSIVRR

SEQ ID NO: 209450 - protein, 355 aa, unidentified
MSIVILGIDLGKNACSVVGVDAAGAVVVRRSMRRQTLIDYVAKLPACVVAMEACCGAHNLGRVFAAQGHEIRLMSPEYVRPYIKAQKNDDRDAEGIAEAASRPTMRFVELKTQEQLDIQTLHRVRSRLVAERRSLINQLRAILLERGTMFPVGRRKLELGIDAMLATEDTTLSPRLRRLVGELRAEWRELDARIEALNGEFVELARNDAAARRLTSIPGVGVLNATALIAAVGDARSFAKARDLGAWLGLVPRQHTTGGKPRLLGISKRGNTYLRTLLIHGARAALPSLAHSETPLGRWLTGMIERGVHRNAIVVALANKLARICYATLRDKVPFGEETVRLSKKVSRESFAMPA

SEQ ID NO: 209451 - protein, 326 aa, unidentified
MEHELHYIGIDTAKEKLDVDVLRPDGRHRTKKFANTTKGHDELVSWLKGHKIDHAHICIEATGTYMEPVAECLYDAGYIVSVINPALGKAFAQSEGLRNKTDTVDARMLAEFCRQKRPAAWEAPHPLERALRALVVRHQALTDMHTQELNRTETAREVQRPSIDAHLLWLEAELKRLEKQIKDLTDDDPDMKHRRKLLESIPGIGEKTSAVLLAYIGLKDRFAHARQFAAFAGLTPRRYESGSSVRGASRLSKAGHVSLRRALYMPAMVATSKTEWGRMFRDRLTANGKKGKVILGAMMRKLAQVAYGVLKSGVPFDASRHNPVAA

SEQ ID NO: 209452 - protein, 433 aa, unidentified
MIKINYMSTLFVGIDVSSKSNVVYAMNFDEDNYINSSFSNNQPGADELAEMIAACMYKHPNLNTMIVALESTSVYSIHIANFLSSCELLMPYKPYVYCINPKMTANYRKSYVAMDKTDSLDARLIADFARVGRTKKCEPWRGSQYLALKRLTRHRLHLAECISREKTYMVSNLYLKFSELQLLEDDRRPFSNIYGATASAVLTEFLSLQEIIDATEEELLEFLADKSRNRIADISKTSELLRKAARDSYRLDQCMYEPLNVSLASSFNCIQTYQKEMKLIDQAIEKCINGMNPNAFLILKSIPGIGPVWAAGILSEIGGITAFHSSDALAKYAGLTWLKNDSGDFTSEDNRISKAGNTYLRYYIGEAANSVRRHVPEYANYYSKKYAEVTKHQHKRALALTSRKFVRLVFGLLVKNQLYTGEKLDTEFNTKTE

SEQ ID NO: 209453 - protein, 427 aa, unidentified
MRSIALDVHRDFCEVAIKDESGLRLAGRVRSSVSELELFAQSLAPDDEVALEATGGALAIARILEGHVARVVIANTRKLSAIAESKVKTDKVDAKTLCELLAAGFLPAVWSPDEFTRALRRRLQRRSKLVRSRTRAKNECHAVLARNLKGRPPMSDVFGKQGRRWLAALQLPEDERETLEGCVREVDFLDSEVGLIERELARQALTSQEIRRLITVPGVSLVSAATFVAVAGDIHRFSSPRKLVSYVGLDPRVRQSGEAPARHGRISKQGSAEARHMLCEAAWVAVRTPGPLRAFHERIRARRGAQIALVATARKLGVLFWHLLTREEDYAFGRPSLTRRKLRALELKTQEGWRRGRYSGPRVNESRKEREREAEFAEQMESAYRRLVQDWQPKPPRSGAGATRGRASSKPSSGQQRGRASVPNSAL

SEQ ID NO: 209454 - protein, 302 aa, unidentified
MNRFDTIANTEKAIKSFLKQFVKRQNILIGMENTGRFNILLYNVLIQHSFAVYVINPLHLKKSMGLVRGKNDKIDSERIAVFLLKNYMDLQQWKPNSKVIEKIKLLNAERKHRVKIRAGLLAQAKDEQFLKSTMDKAVLRLNTKLIDVLTKQINEIEERIYQLINEDEQLHNHYKRIQSIPGVGKVLAFNMLIKTDGFTTINTPRQMACYAGIAPFDFQSGTSIRRKPKVSSMADKDLKKLLHLAAMSAIRLDNDLAIYYHRKVEEGKNKMSVLNAVRNKIIHRIYALIKNQNIYKNNLVLS

SEQ ID NO: 209455 - protein, 464 aa, unidentified
MGWTLGIDLACRAAHVASLAGSDGTLVWSGRTFFTQAKDLERLWRDVDCDPAELTVVMEPTRNAWTPVAAWFKRRGVKVVLVPTTQSADLRAYYSKHTQNDRLDSALLARLPLLHPEGLREHCGDGPADPLRRVVKQRSSVMKRRAAVFARIDALLGLLGPGWYEELGTDYGNASLHLLARYANPHDLVRLGPSRLARFLIRYSHGQWRQAKAFALIQVARDSLALWGEDGMDFAALAADVAVEADQALMFTAQVRALDVRIAALYREADPDQIVRTAPGGGPVLAAAIIGRLGDPHRFTSLSAIRSYSDLVPKVRQSGQAEHDGGITKAGDPMLREAAWMAADMARRADPQLAAKYVRLMNTGRHHDSAICHVATVLLTRISSCLRAGQPYIIRDLDGTPITEAQGRHIVQTHHQVDPAIRAKNAGTRKTQRLKHRTSRVSQKSQSAPTSRPATHQPMSRQVA

SEQ ID NO: 209456 - protein, 343 aa, unidentified
MKLTRVGVDLAKNIFQLHEVDRAECPVWCKRLKRNRWIKEIEQNLEPGVEIGMEACGGAHHWARLLQSKGYRVRLIAPQFVKPYVKSNKTDANDAQAVCEAMSRPSMRYVAVKSIEQQDIQAVHRVRASLISERCAKANQLRGLAYEYGLVAPREIAALRIAVPAWLEDASNGLTVRLRALLSGLYADLRALDERVRELDKEIRAIGGENEAVGRVQQIRGIGPLIASALVAMIGDARQFKNGRQVAVALGLTPRQHSSGNKERILGISKRGDSYVRTLLIHGARSALRTAPGKNDRMSRWALALAKRSHVNVAVTALANKMARVAWAMLRHGTTYEPNGLAA

SEQ ID NO: 209457 - protein, 431 aa, unidentified
MKNSLNKKLEAITPGTLVVGVDVAKSLHWARFVDYRGQEIGKAMSFKNNRQGIDNILASIGEISKLRTLRHPIEKVIIGMEPTGHYWKALTNQLLNKGYIVVGVNPYHTKKAKELDDNSQTKNDRKDAITIARLVKDGRYFEVYLPREVYGELRVLTNERMNVNKRLNAVKNTITAILDEYFPEINTVFKKPLDGKASRQILRGCPFPLIIIAMGEVEILAEIRKAVKKTVGIKKVRQLINAAQSSIGVTYGLQSAQRRLRRLVDEMTMLDEHLTQIEQEMDTRLRETGYAEQLLSIKGIGIVSAASFLGEIGDPLRFQSARQIARLAGYNLIEDSSGKSKSGTSISKRGRKQLRSILYRMALIMVSKNDEMKVFYKHLTNRGTNPLRRKQALVVVSKKIITIIFSMVKKREEYKPELVFGAVRKEMLEAA

SEQ ID NO: 209458 - protein, 433 aa, unidentified
MTVNVCTSFSQRRLLFMRIVRPICCGADIHKDLIVATIATTNQDGITEYIQSSFSSQNFDLNRLKAWLKEHHCFEFAMESTGKYWIPVFNVLEDEIKVFVVHPKYTKAIKGKKTDKKDSKWIADLFKHDLLKFSFIPPKEIRELRELSRYRIKLIAMRSSERNRYQNSMTISNIGLASILSDPFGKSSRAVMKEVIRSSSVTEEKISKLLERNAKKKVKEVLQSLEGSHIESDQRLKMSIASQHMDQIDSHVKRLETEMAIRCIPYATQINLLLDIPGISYLSAMTIIAEIGTDMSVFETSKQLACWAGLAPANNESANKKKSVRISKAGSYLKPLLVQCALAAINSKSNLYYRIKYNRIKKRRGHKKAIIAIARMILVNIYHILSTGEAYNPCDMEQIINPKPVKKVMTIQNAIEFLQSQGFDTSKLISSSS

SEQ ID NO: 209459 - protein, 356 aa, unidentified
MQKQCVGIDISKANFSVLMCSRSATDELRYSVRRKFDNDRKGFNQLTKWAAKESDKSVPLVFLMEATGVYHENLAHHLHGIGKTVHVILPNTSKNYFRSLNIKTKTDDVDARVLAQFGVERTHKVWQPPTKIFREMRDLSRYRIQLQEQKTALANIAHSKEYSHEVSAEIKKSNKKLIKVLDKEINAIKSKLEALVATDENVAERIRKICTTKGLGIQSVAGLVAETNGFEGFHNGKQLASFAGYDIVHKESGTSVRGKTRISKKGNRYIRHLMYLPAMSASKHVPEFKALRDRILKKTGIPMKAQGAVQRKLLLLTFTLWKNEKEYEPQYHKKKIARAKAQATQDKLKMSFPLEA

SEQ ID NO: 209460 - protein, 359 aa, unidentified
MNEVITERTVVDAAVGLDLSDRRVQMAIVEMRSGQCVEEGRLALSQTALARRFASARRMRVVLEVGTHSPWVSRLLEAWGHEVLVANPRQVQLIAKSRRKTDRVDALVLARLARLDPELLHPIRHRSEGAQTDLARVRVRAALVRTRTALIQHVRGALKSLGYRLPSCSVEVFARRAGSALAPALAPALEPLVETIELLTRQIRLFDRTLEELARTKYPETDCLRQVDGVGWLTALTYVLTLEDAGRFSRSRTVGAYLGLTPRLEQSGSRNPQRGITKHGDPYLRTLLVQCAQYILGPFGKPSDLRSHGQRIAERGGANAKKRAVIAVARKLAVLLHHLWRSGATYQPLRTQLDTELAA

SEQ ID NO: 209461 - protein, 456 aa, unidentified
MQTDRANQQQYAAYIGLDWGDQQHAIALQAAGADQVEAYTVKQTPESLHDWVLSLRTRFGGRDVIIAIEQSRGAVINVLLGYRFVHVLRVPPKSLARYREAFYPSGAKDDIPDASLLLEWARDHRDKVKVWIPDKPEIRALQKLTEFRRGTVGRRIAITNMLTQSLKEYFPQALSWAGELDTPMACDFLDKWPTLEKLQKAKPAQIRKFYQEHGCRRTEVVQQRLEEIGSARPLTEDSAVISTSITVLETLVPQLRCLIDAIDRIDAQIHKLFNKHEDRDIFDSFPGAGRVMAPRLLAAMGSDRNRYDTALEVQQYSGIAPVTERSGKSKWVHRRFACPKFFRQSFHEFAGLSIRYSSWARAYYQMQINKGKNHHAAVRALAYKWIRIIYRCWQKRVPYNEEIYLEALRRKNAPLLERKSIWKRFDARTRLFWNCWNQLLRSPAVHRKKFNKNLTE

SEQ ID NO: 209462 - protein, 343 aa, unidentified
MKIIRVGVDLAKNVFQVHGVDRCEKVVWRKKLSRAEWLTALLEKIEPGCEIGMEACGGAHHWARQLQKRGFTVKLIAPQFVKPYVKSNKNDANDAEAICEAMSRPSMRFVAVKSVEQQDLQAIHRIRAELCSQRTAKGNQIRGLCSEYGLVAPREMIQLRGAIPCWLDDLENGLTQRFRRMLRGLWLDLLKLELRVKELDQEIEIAAATDPVATRLQQLRGVGPIIATAIVANVGDAKQFSSGRQMAASLGLTPRQNSSGGKERLLGITKRGDAQLRTLLIHGARSVLRTAASKNDRMSRWVTHIAETRHHNIAAVALANKTARIAWAMITKGTDYQPSAVAV

SEQ ID NO: 209463 - protein, 319 aa, unidentified
MDNIILGIDISKNTFDTALLCNNKITTKKFTNTVKGFSELKQWLENKSIYIAHVCMEATGGYELSLAQYLYDNNFQVSVINPARIKGFAMSKLSRVKTDKADCKLIAYFCQAMQPNLWQPTPKHIQELQQWVRRLDSLIANKNQETNRLDKSNDVIAINIRTHIEFLDKQIKEIEEIISKHIKEHKDLNDKSKLLDSIPGIGQKTIGVILAFLTLENFDSAKQVVAFVGLNPKPRQSGSSVQGIGKISKTGDVELRKAFYMPSVSAIRFNPIIKDFSKRLSSKGKSKMIIVIAAMRKLLHIIYGVIKNKTLFDANIKTI

SEQ ID NO: 209464 - protein, 474 aa, unidentified
MSKSIFKFASNDLKNLLAICKPEQLLYAPIDVAKYNHSAMIVNLLGEVITPKFDFPYNLHGIDFLINKLQSACDISHAKKLFLALESTGHYHENLVASLVDSGYDIAVIRPIDSKNERDNVHAKTDAIDLAAIARVIISNKGTRSNMPDTVYYNLQRASRTHRQLTWQETRVKNIITMLIDKTFNGLWNPENAIFADKWGKASLLFVSHYPTPQQAIKMGAKRLAEFFKKHNTKLGIDTADKIIALAKNTPARPLETMESDILALKANISVLETLISAIQQQKRQMVKYLVQTPGTYLLSIPGISVVYAGDFTAEVGDIHRFAYAGQVVSLAGTAPRKYQSGELDKANLPTSHKGKNLLRMTVNQIALSLNTHCPEYHKYYSDKLFHYKDAPPKARTATANKFIKLAYAMMKNETLYCPKTGNPLTKLDEYYQSVWSKVKEKLADYLTDDIPQDNYLSKIQHQLEEKYDITQKL

SEQ ID NO: 209465 - protein, 411 aa, unidentified
MHNRQNYLYVGVDLHKEQHTAVIINCWQEKLGEIQFDNKPSAFSEFLLEVETYVSDGLSVVFGLEDVGGYGRALAKYLVDHERVVKEVNPALSFLERKSHVTTQKSNSWDAECVARILINKLNQLPDAKPNDLFWSIQQLVSRRNALVKAQSALKNQLHIQLNHHYPSYKKFFSELDGKTALAFWQQYPSPFCLEGANIKQLTAFLLDVSNNTCSVKKASEILKLVKEDGHTMKEYQETRDFLVRSIVRDIEFKKTEMKYIERELKQLVKLLDYQLETMPGIELVTASALIAEIGDVRRFPNANKLARFAGIAPVYFGSGGKGKTHKSKQGNRALHALFYNLAVQQVQVAKGSKMPRNPVFHAYYQKKLKEGKTKGQVLVCIMRRLVNIIYGMMKHKTAYELPVVQEKEVI

SEQ ID NO: 209466 - protein, 403 aa, unidentified
MNAVGIDVSKGKSMVAALRPFGEIVAKPFEVPHTSSGFHQLVDQLNSLDGSTRIIMEHTGRYYEPMARWLSDSGFFVSTVNPKLIKDYGNNTLRKVKTDKADSVKIARYALDNWQDLRQYTSMDIIRNQLKTMNHQFSFYMKQKTSYKNNLISLLDQAYPGINDFFDSPARSDGSQKWVDFVSSFWHVDCVRSLGLATFTERYQKWCKRHGYNFQPEKPAQIYSFSKELISVFTKDSVTKFLVKQAVEQLNTVSFTVEQLRLEMNRLAAQLPEYQVVMAMKGVGPSLGPQLMAEIGDLSRFSHREALTAFAGVDPGVNQSGTYEARSVRTSKRGSPQLRKTLFQIMDVLIKSAPSDDAVYRFLDKKRLEGKPYYVYMTAGANKFLRIYYGRVKEYLAALPKPE

SEQ ID NO: 209467 - protein, 405 aa, unidentified
MIRLLRSPGGPEACKTWTVQVRLAADAGAFREADAGRSYPGRLMSSQDLWVGIDTGFDQSHLCVIDDELNLIADCTLTTSAAAVIEVLATNEMARIQSIALEATACSTELVRGLREAGYPAVMYDAGQVSKYLRIRSNKTDRNDALGLAEVAKFGLPALSAVHLKSPEIQRVRAILQLRHKLIEQRIASENMVRSLLRMHGGRLPHVGSAVAFERNLVAEVDRLKLEGKIDLEDQLLPLGHVCINQRRAAQALSRALERWAKQNEQCERFREIPGVGVICAVSFFTAIEDPHRFEKPETVGAYFGLTPDIRQSGKSLSRGRISRRGNKLTRTHLRAAAKTVLSSRTKSSAMKEWGARLAARIGTGKAQIAVARKLAITMLAMWKDNTKFRQPNLEVFEAIEIPSA

SEQ ID NO: 209468 - protein, 427 aa, unidentified
MKSNTQNKKIEAITEKTLVIGIDVGSETHYARAFDYRGIEFSKKPFKFSNSEAGFEMFKAWILDIKEKHEKDKVVPGMEPTGHYWFNLGKFLQDNEMKPVLVNPHHVKKSKELDDNNPTKNDRKDPKVIAGLVKEGRYMIPYLPDGIYADLRTASNMRFQIQSELTRVQNRISRWFNIYFPEYKTVYGKPDAISGMMILKKAPLPEDILTLGVEGVNQIWRDAKIRAVGKKRAQTLVEAARHSVGTKEGATAARIEIRMLLEDYESRNNRLQEVMFLIEELVKQIPMAEKLMEIKGVGIKTVSGFLAEVGAITRFSSPKELQKLAGLALVENSSGKHKGQTTISRRGRKRLRYLLFEVAMSLVGKNPEFGTLHHYYTTRKVNPLKKMQSLMAVATKLIRVFYAMLTKGVEYDSAKMLGDIKRPAVYM

SEQ ID NO: 209469 - protein, 389 aa, unidentified
MFFIGIDVGKFNHCCAVLNSEGEVLVEPFFFQNNSDGFDLLLHNIKSFHSSRHMCGLESTGHYGDNLLRFLLDNHFEVGLINPISTDAKRKEKIRKTKNDKKDSLTVCAVLQSREYTHMTKNKLSLREGKQLTRYHHDLTRSLHQAKNKLQKCIDIVFPEFNDVFATKYSKTYMAVLKECGSAKAVRNTHLTHLKKIISDASNGKLNSVYPARLKESAKTSIGEDNAVITLEIKQLIDSIELILNQLSIVDKKIEELARQLNSPIFTIPGISWITGMSILCELGPIDHFSSPSKVIAYTGLDCTVYQSGQYNADKTAITKRGSPHIRLSLYQAALPVCRLNTTFNVYYNRKRSEGKSHRCAQGHVVRKLLRVIFKLLTENICFDPALLK

SEQ ID NO: 209470 - protein, 356 aa, unidentified
MSVYLGVDFHARTQTVCWCDTADGLIHQRTLDHEHDDVRGFCTQFTVPAVVGLEATGYARWFHRLLEALGHRLLVGDAYVIRKCALRRQKNDRRDAELLLDLLLHGDFPAVHIPPIASQAVLRLLRYRQRLVEIQTKLRNGIQALALNHQLRLGPKLWSKQGQQQLLAIELDDTDVLQRENSLELLGQIRTRIRTLEKELTSRADQDARVRLLRTHPGVGLLTSLAVVHTLEPVTRFDRARRIAAYCGLDPRETSSGETVRMGHISKQGNRLLRHLLVEAAHRAVHSKADADLRNFYFRLMERKKNAAVAITAVARKLVLRLYRMLREDIDYTEFRRRGREARRARKTPSPTAGGC

SEQ ID NO: 209471 - protein, 335 aa, unidentified
MKNHLFHIGIDISKLKLDVVVIEKETPNVSDHFIVENNLKGIKRIVSVLKKKKIDLESVLFCFENTGVYTFPLSCFCSETKLDYWIVPAVEIKRSKGISRGKNDKTDAKDIAFYSIRNIDKLKLSILPETEIQQLKLLFAEREKLMKSLLMFESTKENKNYTPKAVYKSVQDVNLKTIQFLKRALKNIEKQMKEIIINQKELKQQFELMKTIPGVGERTATYFIIITKGFTAFDSARKLACYAGVAPFEYSSGSSIRARTKVSHMADKKMKSLLQMCALSAVKYDSQIKEYYIKKQKEGKNKMLVLNNIRSKIISRIFAVINRQSPFINTYKFAN

SEQ ID NO: 209472 - protein, 386 aa, unidentified
MRHMEHIEAALTGTVVFVAMELSKSSWVLAAQASPSGKTSSHRLDGGNVDELLALLRRLAAREQRGVGEKVQIVLGYEAGYDGFWLHRCLTAEGITCWVMDPGSLQVDRRARRAKTDRLDAAMLLRSLMAWCRGDRAACHMVQVPSVEREDVRRTHRERQRLITERVQHVNRIKGLLATQGVHDFPPLRRDRRERLAELRTGDGRALPPCLRREIEREFLRLELVLEQIAAVEAERDAAVAAPAADDADAAKVALLAKLGGIGTELATVLVREALYRPFANRKEVAAYAGLTPSPFASGDRNREQGISKAGNPLLRKSMVELAWLWLRYQPDTALARWFTGRVGEIRGRIRKITAVALARKLLVALWRYVTTGLVPEGARLKPSAT

SEQ ID NO: 209473 - protein, 423 aa, unidentified
MMKLKYSICCGLDVHKNVIVATIVTTNKDGISEYLQKSFSTINSDIQRFHNWLIENNCYHVCMESTGKYWIPIFNYLENDIDVCLTHPKYVKAIKGKKTDKKDSKWIADLYKFDLVRCSFIPPKDFRQLRELSRYRFKLVCMKSSEKNRIQNCMTISNVGIASVLSDPFGKTATEIISYLLEHTADSMDEKAVRKLIKKGAKSKSDEIIEAIKGYNIETDQAKKLELAQGHLEYLDDMITQTEVELYVRIKPYYEFVEFVSTMPGMTELSSTIVLAETGVDMDIFDDAKHLCSWCGLSPANNESAGKKKSVRIAKAGDYLKPMMVQCALAAIKSKKQPYFAIKYGRIKKRRGHKKAIIAIARMMMVCIYHMVSEKKPFTPTDYEELMDPQNHVESVVLNENNVFAYLESLGYDSSKLVKRNDN

SEQ ID NO: 209474 - protein, 316 aa, unidentified
MVPSPLFVGIDVAKATLDIAVRPTAETWSVSNDATGLDALVLRLGAWAPTLIVLEATGGSQGPLVAALVAAALPVVVVNPRHIRALAQAVGILATTDRMDARVMAHCAEAVQPAPRPLPDAETQELRALLVRRRQLVEMVSAERARLDTVPPSIQDAIQAHIAWLTTQVAGLDDALTRASQTHPVWQAKDDVLQSIPGVGPVLARTMLGQVPELGTLGPKPLAALIGVAPFNRDSGTLRGRRTVYGGRAEVRAVLYMGALVATRHNPVIKTFYERLLAAGKAKKVALTACMHKLLTIMNAMVRALKPWQPQEVPSA

SEQ ID NO: 209475 - protein, 348 aa, unidentified
MEQVTRIGMDTSKHVFQLHGVNAAETPLLRQRLRRQDMVAFFAKLAPTVIAIEAGGASHHWARLLRSMGHEVKLIAPQLVKPYVQRGKNDAADAAALCEAMSRPTMRFVPVKTVEQQAALMLVGHRERLVRQRTQLGNAIRGYAAEFGLTAAKGMAHLEPLLERLQADEQLPDLARELFAAHAEEYAQLQAHICRVEAKLMAWHQAHACSQRLARIPGIGPIGAVLLLMKTPAPELFRSGRDFAAWIGLTPKDHSTGGKIRQGGITRAGDEGLRSVLVTGATAVIRTVRNGKSRSALSPWLEQLLQRKPPKLVAVALANKLARIAWKLMATGATYAGRPAPTAAAGPI

SEQ ID NO: 209476 - protein, 356 aa, unidentified
MSVYLGVDFHARTQTVCWCDQADGLVHLRTLDHEHDDVRGFYTQFAVPAIVGLEATGYARWFHRLLESLGHRLLVGDAYVIRKCALRRQKNDRRDAELLLDLLLHGDFPAVHIPPTASQAVLRLLRYRQRLVEIQTKLRNGIQALALNHQLRLGPKLWSKQGQQELLALELDDTDVLQREHSLELLGQIRTRVRAIEKDLTLRADQDARVRLLRTHPGVGLLTSLTVVHTLEPVTRFDRARRIAAYCGLDPRETSSGDTVRMGHISKQGNRLLRHLLVEAAHRAVQSKADADLRNFYFRLVERKKNAAVAITAVARKLVLRLYRMLRENIDYTEFRRRGREARCARKTASPATGGC

SEQ ID NO: 209477 - protein, 341 aa, unidentified
MLHSGIDLHKRTVVIATVDADGRPVRDVQLPTRREAITRYFAALDGGPGAQRAVVESTSTWYWLRDLLAAQGVDLRLGHSKHVKAISYAKVKTDAVDAATLAQLLRSDLVPEAHMVSAEWREARDLLRARLQLVRQQVRCKNAFDGLLAQYNVTAPAALPPLVQLRVRLLQEQLTLLGAQAKQLAAELNPVLIPTPDVQRLLWIPGIGRIVAFTIWLEIDGIARFPSARDFVSYCRLVPGAGNSGGKTRHKRTKDGNRYLTLAFSHAAVRAIQYFPEIGAFYRALARRKPPAVARALVAKELARIVYYVLTKQEAFNGTFKGKPLSRTKQPKWPRLASPSV

SEQ ID NO: 209478 - protein, 373 aa, unidentified
MEAKNVRYVGIDLAKRSYVAKMDDPAKGKIETWYGKTSEAGIEKLLGKLSADDRVAMECCSFAFHLAKRIKNEVGCEVYVLNAGQLAIIYKSTKKTDLEDAAKITWLLHRFPVEELPTVTLPTEEEEHRRAQVSELRSKKSQRTALVNRLHSVFVRIGITGLEKKDLKTETIRADRIEKYLTGYTRTEALRIQEELGILEKHIEAIEEEMTEDLKTEPLAKNLLSIPGIGKATAMAFLAHVGNGSRFSNGRQVAYFVGITPRVDNSGESVKLGNITKRGCSAIRALIVQSAWAAMHSKADNPLKGIYKDLSARRGKGIAIVAIARRLLELMWIVVSRNELYRYTTEEELNLKLRRLGLIPNLKKKKGKMEPAA

SEQ ID NO: 209479 - protein, 328 aa, unidentified
MLNYIGIDISMQSLKLFDGKKEYEVPNERGLKNLEESLKVIYGKDWNNVLFIYEPTGPYSNFLKEFSLKHRIEVYEINPKKSSNFAKAIGNRSKTDSIDAKMLYSYHLLIREDKFKVPLIDPITEKLASFLRSYKLIQKMKTMLSNHIHSQKFVDKDNSVTNLSKFIEKELERFSETEAKLEKKIENWVRNTDEIKEDFNNLLSIKGIGVISAIVLLYMFRKYPDTNRAQITALCGLDPVKKESGNSVKGEKRISKAGNPLLRKILYFACMNAIKHNDRINLYYNRLINNRKPGKVALIACMRKLVLIAHQIYVKKEKYRPLVINENI

SEQ ID NO: 209480 - protein, 401 aa, unidentified
MSKKNTRNALDTSLSYAVIGLDLAKADCAVAAVPCSDDDLGLIDRMDYESLFEQAEKLKPTLFAMEPCCGYSQISLRLQNMGHEVKVISGHAVKNWIATHKSNQKTDLNDATALAKLALYDHDLQPIRVKNVEECRIASVQAIRIQLRTQATKSLVCFKSLCQCWGIVIRRGSLNTKKMAEAVAAVEKLLGAEVASSLMILRDAYKFTMKQINALDKLLDALVEANEQARTMKTVLGIGTQTAARLAVTTGDIKRFPMPRSYVAYFGLAPRNIITGHSGTPSPSKRGALKPVSSSGQGKVSRRGDRVARSFIIQGAATIYMLYCKDMLPECQLRRWLHEQIKRGKPYGKIIVSLAAKLLRIVWALLTYGEKFDSHKAGVPRSVLAAMEKPLKHDAAAESAA

SEQ ID NO: 209481 - protein, 408 aa, unidentified
MEVLYPRCAGLDVHKDSVVACIRCVTAPTHREVRTFGTTTRSLFELAEWLEKHNVTHVAMEATGVYWKPVWHLLEGSFELVLANAQHIRNVPGRKTDVNDATWIADLLAHGLIRSSFVPPTRIQELRDLTRTRKQLVREVAQHTLRIQKTLEDANIKVASVLSNVLGTSGRAMLDALIAGEEDPERLADLAVGTARKKKADLIEALRGRVTPHHRAMLRLHLGVIASLESALVEIDAAAGKALEPIRARAEILTTMPGVSDIVARVIVAEIGVDMSRFPSAGHLVSWAGLCPRNDESAGKRRSTRVRKSANWLKTTLVTSAWAAVRTKESYLRAQFLRLKSRRGAKKAILAVAASMLTAAFYMLRDGAPYRDLGPQHFDRRDQNKTIRRLVRRLTDLGCEVEIKPHAA

SEQ ID NO: 209482 - protein, 337 aa, unidentified
MDNYIGIDVAKSTLQVYIPKNDLNIEIQNSLYGLKKLYNKLTKLYKKTLNDIVFVYESTGSYSTILERYCQSNKIKCFKVGAYQSSSFSKVIKNRSKTDKIDAKMLSQMNILVKEKDIKIPVRDDSAHQIRSLIKYYHSLIKEEGRFANYLEAATFNLEDKYVLKRVKNKIANIQKEQLLIVEKAMNLIKSNDNYYEAYTNITSIKGVGQKSAIILLYLFLKYPNASRQHITALSGLDPIQRSSGTSVNRKQRISKQGLSLLRAIMYMPVLTTIQHNEEMRSFYNRLIERGKPKMLAQMAVMRKMILLAHSLYKNKKQYDSKRYLNFTQIKKEIEME

SEQ ID NO: 209483 - protein, 390 aa, unidentified
MFYAGIDVAMDKHDCVVLDSDGNVVFEVFTFENNRNGFKTLKKVLQSCSKNPKKIKVGLESTGHYSDNLLAFLNSIGYDPVLFNPLHTNLFRKGLSLRKTKTDHVDAHTIATMLRTEDIKSYSQQSYHLSELKSLTRYRSTLVFDCSRHKISLVRLCQILFPELKTIVPSLHISSVYTLLSELPSAEKIAKCNLTHLTALLSSASKGHYGRDKAVEIREQARTSIGIRSIVKELELQQTIEMIRILQQQIEAVENEINELMESIDSPITSIPGIANRMAAVIIAETNNFKDFERAEQVLAFAGLDPSVYQSGQLTSTHSKMVKRGSKYLRFAIFNATKYVCHWDPTFRAYLAKKRAEGKPYNVAVSHAAKKLTRVMFHLAKTNKEFVPQA

SEQ ID NO: 209484 - protein, 316 aa, unidentified
MKQGKYNTKIAGIDVGKRQLDIAVHGGEMSQVANDKAGIGALIAWLEARGVVRVGLEPSGGYERAVREALAAAGFEVVMHHASEVRLFARFKRIKIKNDRADAVLIAVATAQVDTVKASADPRFAELAERLTAYEQVTERLAQMKTGLEHVTLKDLAKALRAEIRATELLKAKLIGKVVAFIKTHADLAARLKLLRSLPGFGPVVAVGALVRMPELGAMARGQAASLLGVAPFDRDSGQYKGLRFIAGGRERPRRMLYIAALAARRCDPGFKTFAKHLAAKGKPPKVILVAIMRKLIEAANLVLARGAVWERRPAR

SEQ ID NO: 209485 - protein, 404 aa, unidentified
MYNAVGIDVSKAKSTVAVLQPGGTVLRKPFDVSHTSQSLHELSDYLGSLDGNTKIVMECTGRYHEPVVKVLSEAGLFVSVVNPHLIKNFGNNSLRKVKSDPADAKKIARYTLDNWAELRQYSGMDNTRTQLKTLNSQFSFFMKQKVAAKANLIALLDNTYPSVNKLFDSPVREDGSEKWVDYAYSFWHVDCVRRIGLKAFTERYRAFCKKHHYIFQPDKPEKLFNASKELVAVFPKEKTYKLLIQQSIQQLNPASEHVERLRKEMDELASTLPEYSTVMGIYGVGKTYGPQLIAEIGDVSRFTHREALTAFAGVDPGVDESGQHKSKSNRASKVGSARLRKTLFQIMTTLLQNAPQDDPVYRFLDKKRSQGKPYYVYMTAGANKFLRIYYGKVKECLRNLEQAE

SEQ ID NO: 209486 - protein, 418 aa, unidentified
MKIVFPTCCGVDVHKSFLVATIIKTPQNSLQQSYQKKRFSTFNSDLNRFADWLRENDCLDVCMESTGKYWVPVFNILEKQGVRVVIANPKWVKAVKGNKDDTKDSKWIGDLFRIGLVKSSFIPNKEIRILRELTRYRYKLISMKSSEKNRFQNAFTVCNVALDSVVSDMFGKSATAITDYLTSDVEFDAQHCISLLQRSLKKKAPAVLAAVEGHEIAPEQKTRIGIVRDHLHYIDKLLERVDDCVEGMVQKYEGAITLLRTIPGVDRSSAITILSEIGIDMAQFGSSKRLCCWAGLTPGNNESAGKKKSVRISRAGVYLKPALVQAAHAAVKDKSSTYYAVKYERISKRRGKKRAIIAIARMILTAVFCMLSTGEVWNPVDLYKVDMPEHLKEKQLAKAVKQAVHFLETQGLTVLDSA

SEQ ID NO: 209487 - protein, 422 aa, unidentified
MNYLSDNAFTAYVGIDWADSKHDICVQAAGGQQRELDCIPHQVDQIEEWAQSLHKRFGGVIAVALELSKGPIVYALQKYDFFVIFPVNPSTLAKYREAFTPSRAKDDPTDAELALDLLVRHPDRFKPLNPQSVEIRTLACLVEQRRNLVNDKTRITNRLRSALKQYYPQMLEWFEQLDTVLVCDFIARWPTLKQVKRARKSTLEKFFHEHNMRFSHVLDVRLKSIKAATPLTFDVAVVTPYSLQALVLTDQLRVSLQAIRRYDDEIAALAPKHPDYGLFSALPGAGPSLAPRLLVAFGEQRERFASAAALQKYAGIAPVTERSGKKHWVHWRWQCPTFLRQTFVEWAAQTINKSFWAGAYYRQQRDKGCTYQAAVRALAFKWIRILYRCWQTRTPYNESVYLKALKRRGSPLLNPSTAVKMT

SEQ ID NO: 209488 - protein, 372 aa, unidentified
MHRPSRLACSARTEETMRYLGLDVHAKATVFELVDGAGAVLDVGRIPTTASGLAALVRRLSRVDDVVAGQEVGGMTYYVHDGLTGLGVKVLSFNAQQLRMICSSRKKTDRRDAHWIAKALQTGMTPHPVYVPDVSVRQLRSLLSQREAVAGERRRWLLRARSYLRGAGYQLPVRARTAGRLLEQVGGGPEGMDEHLSQALEMCAGHELALLAELRRLDAVIAERTAGVDAITRLKTIPGIGDRVATAIYAWIGDVRRFPNARALASYVGLVPSVWASAEVTRLGRITKQGSPELRRLLVQAAHILLTRCAGEAAAPLQAIGRRLQRSGSRRKVAVVAAARHLLRVAYYVLRDGTTYDATRLHPPATSQTQVA

SEQ ID NO: 209489 - protein, 440 aa, unidentified
MEQVIIGVDPHKLSATIEVVDEHERVLGSGRFSTDRAGYAAMRRYAKSWPDRVWAVEGANGVGRPLAQRLLEAGERVLDVPAKLAARVRLFDTGHNRKTDALDAHSIAVVAVRTANLRVLRVDGELEALRLLSDRREALTRRRVQTVDRLQALLAELLPGQAKRDITTGQAKAMLARVRPRDIAGKTRRRIAAEELAELVVVEAKIKKASAELKSMVLARDSRLMNLPGVGPVVAARVLADVGDVARFADRNRFASWAGTAPLDASSGEQNRHRLSRAGNRRMNHMIHIAAVTQLRCNTEGRAYYRRKRADGKKPMEAMRCLKRRISDAIYRQLVADAQRAVAADAVEEIGAGPGGHCGATQESSAVDLPPHIDTSDQPLPGPAYATLPRAPGLANPHAASAPQPPRRRAGAVKVERPTGRTTLTATSAGAPSSKPKPRP

SEQ ID NO: 209490 - protein, 465 aa, unidentified
MAKAHKSRSKSRAKQNHRAKLKPQDCTLGLQVVNPQAAGIDVGNGEHWVAVPPDLDPEPVRRFGCFTSDLLEMADWLVRCGIETAVMQSTGVYGTALYDILAERGIRVFVVNARDTKNLPGRKTDIQECQWLLKLHVYGLLRNSFRPEEEILMMRTYWRQRQQHIGDASRCIQHMQKALTQMNVQLANAISDISGTTGQAILSAILAGERDPQTLATLRDPRVKASEATVARSLEGNWRPELLFVLRQEVESYRAFQTKIAECDQQLHRHYETMEAKADPKQLPPVPRDKRPHGNVPAGFDLREELYRATGVDLTAIDGLNVLTVQTLIAEVGSDMNRFATEAHFVSFLGLSPRNKISGGKVVGREKCKTKNRAGTALRLAAGTLLESRTYLGAQYRRLRTKLGAPKARKAMANKLARIVYRMLKYGEEYVDKGKEFYEQKYRQLQIRMLTKKATELGLQLVQST

SEQ ID NO: 209491 - protein, 348 aa, unidentified
MLADQLDYIVGVDPHRDSHALAIVHVVSGAVVFESTVIANNDGYARALELAEQHAPSRRAFAIEGTGSFGAGLTRFLTGRDERVLEVGRLRRERRSGGKTDALDAVRAARSVLTQQRPATPRAGGERQALQALVAAREGAVNAKRAGLCQLRDLLITTPEPLRSQLRPLTRAQLLHRLAATRPHSRPDAELRGSLLALRSIARRVLALTAEERELAHEIETITRKLAPQLLDQPGVGPHAAAQLVLSWSHRGRIESEAAFARLAGTAPIPASSGKTIRYRLDRSGDRKLNRALHMILVTRKRTHPATIAYIERRLQEGKTRREANPCLKRYLARSLYRVLEHGPPMTA

SEQ ID NO: 209492 - protein, 344 aa, unidentified
MDHFAGLDVSVKETSVCIVDDTGKIVREVKVASEPDALLPVLTSPTYRFKRIGLEAGPLSQWLFSALAEAGLPMICVETRHMRAALKAQINKTDRNDARGIAQMMRAGLYRPVHVKTLRSQKLRMLLTHRKLLQSKAIAIDNDLRGTLRNFGLKVGMVGTVRFEARIRELVENLPDLAALVEPLLIVRRTLREQFCILHRRLLTIVRDDEVCRRLMTTPGVGPVVSLTYRATVDVPARFHKSKSVGAVFGLTCAKYQSGEVDWSGRISRCGDEMMRVMLYEAAQSMMRSKKWSWLKAWAMQIARRRGMKKAIVALARRLAVIMHRIWVDGTEFRWTREQVAAAA

SEQ ID NO: 209493 - protein, 323 aa, unidentified
MMGLPNSLCVGIDVSKNSLDIASNQTISPFSVSNDVDGFDAIIAELKQHSIALVLMEATGGLEAAVACSLQAQGFDVAIINPRQARDFARSMGYLAKTDRIDAAMLAQMAEVINRHPERVRFIRNLPDAEREVLTAMVVRRRQLITMLTAERNRLHPSHPQSRKSISTIIDALKDELKRINKSMEAHISTHFKTLAEILGGVKGIGAATIATLLAEVPELGHLSRREISALIGLAPFNRDSGNMRGRRTIFGGRANVRSALYMATVVATAHNPVIKQFYGRLVDSGKVKKVALVACMRKLLTILNAMLRKEEEWDPKYHSVNS

SEQ ID NO: 209494 - protein, 386 aa, unidentified
MKKSNDLSKSLAPFDPDTSLVVVVELSESSWLVAGKAASIDRQPIKKLTPDENALLSLLHRWRDEASGKGQKIERIALAYEAGRDGFWLARWLRRNGIDVHVMHPTSVAVSREHRRAKTDRLDTALLMRAFLGWLRGESGHCTMVAVPTLAEEDLKRPSREHETLAGECARTINRLKSALVRLGIRGFNPKLRRAQGRLEALRTPDGEPVPPNMLREMNHDLARLAFIRAQMKATEQARLERIKDDPSAEGHPTVLMLARIVGIGIETADMLVRELLSRDLRDRRAVARFAGLTGSPDESGSRRREKGLSKAGSARVRRGMIELAWRFLQHQRESALAIWFRKRVDAPGVRKKKMIVALARKLLIGLWRLVHTGEVPQGVVLRPTE

SEQ ID NO: 209495 - protein, 455 aa, unidentified
MYLPDWKWIPIRKGLLLMSNKVIFNLDELFISVGIDVGADFSWMSIALPNQQFVGKPYKILHNSIDSLTTAVSKIKEAEELYSLESRIFLESTGIYHYPLFCYLRDKGFNCSVINPIITKNSTNINIRKVHNDRFDSKKAALVGLKPDLKVSLMPSDLALNCRNLCREYFDLMDNRSAYVNKLQGELRMAFPQYLGIFSKVTINTSLTLLETYTSPSAFLEADKQEIIDIIRSTARFGLTYAQNKYNAIIQAATDANQFGYIIDSNIKRIRLYISFIRKYDEEINNILESLHELVDANEDADFVKQIHLIETFKGAGFLSAVSIMGEIGDFSAFSKPKQLFAYFGLDPAVKQSGKFEGTKVQMSKRGSAIARRVIHTLTLQSISISRNREAKNPVLREYYLKKCDSKPKLVAMGAVSHKVCNMIFAILRDNKPFKIIAPQEHIKQYNSAKCDIAA

SEQ ID NO: 209496 - protein, 390 aa, unidentified
MRTIALDLGKASIDWCEVEQGKVIGRGRVQDLQGLQPILNRESGAVRVGFEACREALHAHDVMSSWGHVPYVFDTTCVRSFAGIGQHGRKNDRIDAERLALALERDHAKFSHVLGQDARRLRELQEQHRALVETRKRLVIHVRGILRGRGVDLPSCAIESFVSNLRKAQREGTVTTSWVDPLLTPLEALEPEIAKVDLQIHELCTHQKDPVIERLASVPGVSLLVAASFISVIDKADRFDNASQVSSYLGLCPGENSTGGRRKLGSITKQGNPYARGLLVQAAWCILRSRDTKDQLVRWAHKTSQRRGRMRAAVAVARRLSRILYSLWKHGTYYDPRGAVPLGQDDADEAKGLKALKRAAKSGTLKLARQKRVHQRTLEAAKLSEGQSAN

SEQ ID NO: 209497 - protein, 341 aa, unidentified
METYAGIDLHSSNNYIVVIDENDKKLFEKRLPNNIEIIVAELNNFKKTLKGVVVESTFNWYWLVDGLEEAGFKMHLANPAAIQQYNGLKHTDDKWDSFWLAHMLRLGILPEGYIYPKSKRPVRDLLRRRVLFVRQRTTQILSLQSMITRNLGIKMNGSQIKKIKPDEIEKILGDHYLAFTAKQNLITINTLKNVIRDIEKKVLEMAELSPEYIKLITFPGIGKILGLTIMLEVGDINRFSKVGCYSSYCRCVKSERLSNTKKKGENNRKNGNKYLSWAYVEAANFAIRHCQYAQSFYHRKKAKRNGIVAIKALSNKLARASYYVMRDQVDYNPKQLFRNQV

SEQ ID NO: 209498 - protein, 349 aa, unidentified
MTIVTDAYTYVVGVDTHAATHQYAIVQAATGGLIDQAEFPTSAAGLARAVDWIGRRTGGEVGATLISAEGTRSYGSRLTALLVQTGYRVVDAPSPKRDRGSGKNDQIDAVTAARGALPKQVDRLADARCGELQATLQTLLTARESMCGERTRAVNGLNALLRVHDLGIDARRKVSRPTIRTIASWRTRRESLSLLTARAEAIRLARRVLELDTAVRQNTIGLRTVITEAHQAVLLDLPGVGPVNAGVVLAAWSHPGRIRNEAAFAKLGGVCPLEVSSGKSEEHRLNRTGDRQLNRALHSIAKTRMRYDPGTRAYVERRTNEGLTTPRIRRCLKRYIARQLHRHLEQTAA

SEQ ID NO: 209499 - protein, 347 aa, unidentified
MKEQNNGSEFTIGLDLGERRHRFCALNGKGEVVEEATLGNERASLARLTARYHGALAVMEAGAHSPWISRYLEGLGWEVIVSNPRKVRAIYQHERKSDRRDALMLARIGRMDCALLYPVRHGSEEAQQDLLRIKLRDSLVRARVALINSVRFSLKSLGYAVSNPSSERFHKVAMESLPEVVREIIAPSAQALAELSARIAVLEREISALARTKYPQTIWLQQVPGVGAITALYFVLKIEDPKRFKKVRDVGAYTGLCPRRDQSGESDPQLRISKRGDGYLRRLLVSAAQYIVGPFGPQSALREYGLRLAADGTPRAKKRAVVAVARKLCVLLLSLWKNQTPYQPYPA

SEQ ID NO: 209500 - protein, 394 aa, unidentified
MKLVGIDVGKNSHHFCVMDKETGELNVTPSSFSNNKEGFDFLINSLKPYSKKSILLGMEDTGHYHVALLKFLLSNGYTVALINPKTTDLTRKMEGGITKNDKLDTITICDVLDTPERKKQYRITKVDRFDLYEQRQLTRHHHNLKEELNIYCNRLQKSIDLVFPEFNTLFGSKYGVVYMNLLKTFGSAEAIASTDIRTIRKCFEIKGRGGRISLTPEKLKECAKNSIGISSEVETIQIKHLVSQIMLIKEQIAEIDKKIEEFSIKNNSPILSIPGISHFSGTSILAELGDIGNYSKPSQIIKFAGVAPYHYESSQYNAQHTGITKKGSKYLRKTLYQIILPVIKYNPVFKKYYLLKISQGKGHRCAQGHCIRKLLRIIYHLLETGQSFDPALLR

SEQ ID NO: 209501 - protein, 368 aa, unidentified
MPQQNDLSRSLIPFEQASTLVAVIELSQSSWLIAGTIPGIERQPLKKIAPDETDLLRVLHRWRDEATRSGRTVTRIAVGFEAGRDGFWLARWLTGYGIETHVIHSSSVAVSREHKRAKTDRLDTAMLMRVFLGWLRGERGHCGVVAIPTIEEEDAKRPSRERETLVGERTRIINRIESALARLGVRGFKPQLRKAPQLLESLRTAEDSPIPPNTLDEIRRDLTRLALLREQINAIEQARLARLEQAPQVGPNAMVQMLASIRGVGIETADMLVQEVLSRTLRDRRAVGRYAGLTGAPDESGSKRREKGLAKSGNARVRRGLIQLAWRFLLFQKDSALAQWFRSRTDGVKGARKTKMIVALARKLLIAL

SEQ ID NO: 209502 - protein, 346 aa, unidentified
MENIALDVHKHYTWARVENREGQQLYGSRLAHSRGNIKNFIERWTPGSSVAVETVGNWYWVVDEIEGGGGKPQLVNARLAKLMIGNVNKSDKLDAKGLNMLQRTGTLPTVWIPPSGVRDARELPRTRMVFSRQRTQLKNRVHATLSKYGYVVDEVSDAFGKRGRQIIEELSRKLPPHTKQALDHVLDQLDEVMGNLKAIETDMINAFVPCSQTTWLESAPGIGKILAVVVWTEIGSIERFGRAEQLASYSGLVAREHSSGGKFHYGPIRRDVNVYLKWAFVEAAGSAIQNRDRCGYQHIGRLYQRIKVRRGHNRAKVAVARHLAEASFWMLKKGEPYREPVLSTQR

SEQ ID NO: 209503 - protein, 362 aa, unidentified
MTNRDYPFTQFVGVDVSKAKLDFAFDDGKASQEIKNTEKQIVDQLIGKIADPQQTIVVMEATGGYEDLLVSLLHRHNIALAVVNPLRVNRFAKGIGRDAKTDPIDAGVITRFGQVVQPNAQVAKSEASKKLRSLVERRRQLLDLINQERNRLQQTTDEELLGYLRQTLETLRKQLKTVDRRLEKCLREDSQNARRIEIMNNVQGLGPVAVGTFVAELPELGRFNRGQIAKLVGVAPMNNDSGQRIGRRRIYGGRSYVRRVLYMATLVAARHNPRIKAFYQRLLAKGKPKKVALVAAMRKLITILNTLIKNDEMWSDGPRDEKKERLRGTSDAQNGAVGAPSPRISLEELRPRSAPLCVSESP

SEQ ID NO: 209504 - protein, 478 aa, unidentified
MESSVVMRKPAEILDADHELVIERVCAIDVAKASGMVCTRLPQTGAAGRRVSRVWEVVATTRAITELADHLVAVGIEQVTVESTSDYWRIWFYLLEARGLAVQLVNARDVKNLPGRPKTDKLDAVWLAKLTEKGLLRPSFVPPAQIRVLRDYTRLRVDLTRERTRHWQRLEKLLEDALIKVSSVASKLDTRSVRDMLEALIAGDRDPRRLAELARGRMKTKRAALVEALSGRFDEHHAEIARILLDQIDGLSAAIEKLTTRAELLLQTLLAARADDQQTSGASGAVPAPGASDPRQALAATSVPADGTLADGGGDGLSTSQRLDEIAGIGPLAAQVIIAEIGLEMSRFPTAGHLVSWAKLCPRTIQSGATRRGGAAGKGNPYLKGVLGEAAAAAAKTNTFLGERYRRLVKRRGKLKALVAIARSILVIVWHLLSDPTARFYDLGPDYHTHRIDTTRKIRNHVSGLTALGFRVTLEPAA

SEQ ID NO: 209505 - protein, 416 aa, unidentified
MKIVRPICCGMDVHKNIIVATIGITNKKTRITEYIQETFSTLNHDLLNLKQWLINHKCFDACMESTGKYWIPVFNILEDEINIYLTHPKYVKAIKGKKTDKKDSKWICDLFKHDLIKFSFIPPKEIRALREISRYRYKLVGMRSSERNRYQNCMTVSNIGIGSVFSDPFGKSAQAIMKEVLESDIIKDEKILKCIHGSCKNKDKILDSIKHCNIETDQRFKMNESMTHMEELQVHIDNCEIEMMKRAAPMFDQFMHITQLPGISTLSAILIISEIGVDMKQFESDKQLACWAGLAPANNESANKKKSVRISKAGQYLKPLLVQCALGAIKDKEGYFGIKYSRIKKRRGHKKAIIAIARMMLVSIYHMILTGETFNPSDYESFRNPKPPIKQQVLTEESAIEFLKKSGFDVSKLTKP

SEQ ID NO: 209506 - protein, 442 aa, unidentified
MAAARVMAGTEPTASKKQTRGTARPRAVETKREVTGSCRNVALSKGDDGGAKPPKNAGWRSKRQSRIRKEPVMVEGITFVGLDAHKASISVAMLLPNAVTPVEWQLANEASAVRRMVHKIEREAPGEVRICYEAGPCGYALQRQITEAGDASCMVVAPSLIPRKPGERIKTDRRDARKLAGLFRAGLLTEVQPPSERDEAVRDLCRAREDARDDQVRCRHRLSKMLLRRGLIYSGRTRWGQAHRLWLRALRFEDPVDQAVLDDYLLAIDHLVDRLKALSQKLEELSRATPYAEPVAALRCFRGIDTLTAMTIVAELHTFGRFTSPRGLMAFLGLVPSEHSSGASKRQGGITKAGNSHVRRVLVEAAWNYRYRPGTAALKKRREGQSPRVIAIADRAMTRLYRRYSRMTSARVPSPKAVVAVARELVGFIWAVLYPMSIPAAN

SEQ ID NO: 209507 - protein, 340 aa, unidentified
MSKVTLLSVDLAKNIFQVAGFSNKLKLQFNRRFKRDELLEFIAQHNQVSIAMEACYSSHYWARTFESMGHKVKLLPAQFVSPFLVGNKSDKNDVVAIAEASQREHIHAVPVKTIEQQNIQSLHRIRDRYVSTRTALMNQVQGLISEYGIALAPGHKSFRAFLNSLSEEKYSSLSVILKHEIGHIADEYYWLADRIDAINLQFKQAVTNSPLCQIIQSVPGIGVLNASALYSAIGNGSQFKSARELSVWLGLTPKQSSSGEKLHTQGITKRGNPYLRKQLIHGARAAVSRCKTKEDRLSVWAQQLIERRGIHKATVAFASKMARLIWTLLQKNEHYKVQPV

SEQ ID NO: 209508 - protein, 367 aa, unidentified
MKQVTTFVGIDAHKKDLFIAMLIGDQSTPVTWQLANEPNAVRRLVRKLEREAPGPVRACYEAGPCGYALQRQMTTTRVRCQVIAPALVPRKPGERVKTNRRDARKLVELLRAGLLTEVRPPTPEEEAVRDLCRARDDARTDLQRCRHRLGKLLLRRGLHYSGRNWTRAHRQWMASLTWTHAAERVVVDDYLLAIDQVEARLRELDAHLTEMAQTDPYREPVAWLRCFRGIDTLTAIVILAELHDFRRFQSPRAFMAYLGLVPGEDSSGEKHRRGRITRTGNTLVRRLLVETAWHYQHRPTVGIALTRRRKGQPGRVIAIADKAQQRLCRRFRKLAAEHKPAPKIAVAIARELAGFLWAALQPPVVAN

SEQ ID NO: 209509 - protein, 404 aa, unidentified
MNNVAGIDVSKGKSMVSVLRPFGEVLAKPFSIGHTGSELKELADYLKSLDGETRVVMEHTGRYYEPVARFLHEEGIFVSAVNPKLVKDYGNNTLRKVKTDKADARKIARYGLDNWMELRQHTPMDTIRMQLKTLNRQQGLYSKMKTMMKNNLIALLDQTYPGVNSLFDSPVREDGSQKWVDFAASFWHVDCVRSMSLAAFTERYRKWCKRHGYNFSQSRAIEVHTKAQDLIAMLPRDALTKTMIRQAIDALNAVSASLERLKNEMRTLAAQLPEYPVVMAMRGVGNSLGPQLMAELGDVTRFTHRNAITAFAGVDPGADQSGTHEAKSTRASKSGPPELRKALFLLMDCLLKTMPSDDPVYRFMDKKRAEGKPYLVYMTAGANKFLRIYYGRVKEYLASLESAD

SEQ ID NO: 209510 - protein, 417 aa, unidentified
MAMIQAKKLKSVNRNTLLVTVDMGKDSFSGYARCPDRSEVTSSDFTNNLSGFTRFWDILVRTQQARSLEQMVLGFESTGPYAEPLMHFFKDKPVRLVQVNPMHTKRVKELNGNSPNKTDKKDPKVIADIIELGHALTVVIPEGAAAELRRLTHARERTIKRRTALYNQLHDLVFLSFPEFLQVMKDIKTKSAQYLLRHHLGPADVMALNLAQLTRVLKRVSRGKLGADRAQALFEAAHSSVGICEGRLSVHLEIQTILEAIESCNRFVEQLEGEMTRYLEEISYSHLLLSMKGLGTVTVAGLIGEVADFAHFDTQKELLKYAGLDLFEISSGKHRGQRRISKRGRPLLRKLLYFAALNTIRKGGIMHVHYQKHLAKGMLPIKALIAIARKLLGIMLALVRTQSEYVADQQEELANAA

SEQ ID NO: 209511 - protein, 361 aa, unidentified
MAKARTLVGLDVHAAKVVAAILDAETGELRFQRLGGESGPVVELCRVLPGPVRATYEAGPTGYGLARGLAAAEVQCLVAAPGKIPRGATDRVKTDRRDAEHLVRLLLAGKLSAVRVPGPAEEAMRDLVRAREDLRVDLMRARHRLSKLLLRHEIRFEGPGKNWTERHLAWLATLEFADLAAQATFDDYRGAVEALLHRRGELERQIEGLIPASAWATEVGRLRCLRGIDTLTAIGLCVEVGDFARFGKAGQLMSYLGLVPSEHSSGESRRLGSITKSGSRHARRLLVEAAWHYRNPPRVGREIERRQQGQPAAAVAVAWSAQRRLHRTHSQMRKRNKRSTVTTVAVARELAGFCWAIAQIE

SEQ ID NO: 209512 - protein, 438 aa, unidentified
MSNKVIFNLDDLFISVGIDVGADFSWMSIALPNQQFVGKPYKILHSSIDSLTTAVSKIKEAEELYSLESRIFLESTGIYHYPLFCYLRDKGFNCSVINPIITKNSTNMNIRKVHNDRFDSKKASLVGLKPDLKVSLMPSDLALNCRNLCREYYDLMDNRSAYVNKLQGELRMAFPQYLGIFSKVTINTSLTLLETYTSPSAFLEADKQEIIDIIKSTARFGLTYAQNKYNAIIQAATDANQFGYIIDSNIKRIRLYISFIRKYDEEINNILESLHELVDANEDADFVKQIHLIETFKGAGFLSAVSIMGEIGDFSAFSKPKQLFAYFGLDPAVKQSGKFEGTKVQMSKRGSAIARRVIHTLTLQSISISRNGEAKNPVLREYYLKKCDSKPKLVAMGAVSHKVCNMIFAILRDNKSFEIITPQEHIKQYNASKCDMAA

SEQ ID NO: 209513 - protein, 356 aa, unidentified
MTSNIKYIGMDVHKESISACVRNSVGKVVMECVIETKASMILQFIDGLRGDLQVTFEEGTSAAWLYDLMKPHVTKLVVCDPRKNKSMREGNQNDKIDARRLAELLRLDHLTPVYHGEHGLRTLKELVRSYLTITKDLGRVMTRVKAIYRSWAIPCTGKQVYARRHRTEWLGKINEPGVRRRAEFYYQQLDALRVLRQEARRDLLAESKKHKAWKRLCGIPSIGPIRAAVLLGILQTPHRFRSKRPLWNYGGLAIEMHSSADHRSVDGQLQRSRKNVLVRGLNRNCNHDLKNLFKGAAVVASSKPGPFQEFYTALVAKGMRPEMARLTLARKIATIVLIVWKKGVCFDANHLKPQTA

SEQ ID NO: 209514 - protein, 388 aa, unidentified
MQVAADRPDALTAIQTDLPAIFVSLELSRSTWLITSLSPGAGEKMSKHSIRAGDVAGLLMRLAQLKEKARGRTGRDFPIIAIQEAGLDGFWIHRVLQSEGIESHVVDAASILTSRRRRRAKTDGIDGETLVRTLLAYKRGEPRVCAMVKAPTPEEEDRRRICRERKTLVGERVEHVNRIKGLLFAQGVSDYEPLKRNRRARLEELKTGDGRPLPAHLKAQISRELDRLELVLPQLKAVEAERDALLKPVSEGCPTPVAMLAQLKGMGPEFTAILWSEGLFRSFSNRRQLAAYAGLAPTPWQSGSVAHEQGVSKAGNPRLRTTMIQLAWLWLRHQPISALSVWFQERVQSNGGKMRKTTIVALARKLLVALWKYSTSGVVIEGAVMKTI

SEQ ID NO: 209515 - protein, 331 aa, unidentified
MKKVEETVGIDVSKLTLDVHLHKAGLHQQFGNDEAGFKKILAWVKSKVLKQDEMLFCFEHTGWYCILLGHFLHEKGMDYCCVNPTEIKRSMGLKRGKSDKADAKEIAYYAWLRREDLVPSKPAAANLIELQRMMSLREQLVKQAVALKNLRCGMEQLTGKGSNDFSVLSITESIEHLETQAKKVEKAMEALIKADDQMQTNYKLSKTVKGVGLVLAVQMLLHTHNYTRFDNWRQFSSYCGLVPFPYQSGTSIHGRSKIHPISDRKMKSLLSMSAISAIQHDKELKMYYAKRVGEGKPKMLVLNIIRNKIVSRVFATVNRGTPFVELNQFIA

SEQ ID NO: 209516 - protein, 340 aa, unidentified
MRQLYVASDLHGNNNLLGIIDGEGKRIFKKKLPNDPLLINDILKPFKEEIVGIVVESTYNWYWLVDALMEEGYKVHLANPAAIQQYSGLKHADDKHDAFWLAEMLRLGILPEGYIYPKEERPVRDLLRKRGHLVKLRTSLILSLENIISRNFGRKLPVNDVKGLRKDRVTPLFEGKEDLALAGKVSKETIDFLTHQIRQIEGVVEKRVMLKEAYRNLLTLHGVGKILGLTIMLETGPIGRFETVGDYTSYCRKVPSQWISNGKRKGSGNRKNGNKYLSWAYAEASDFARRFHPESRAYYNRKMQQSNPAVAHSALSHKLARAAYYIMRDQVAFRPEKLFG

SEQ ID NO: 209517 - protein, 417 aa, unidentified
MDTLFAKVAGLDVHLKGIQCAIRCRQDSGKLLAAVRSFGTMTRDLRALADYLQALGVTHVAMEATGVLWKPVWNVLEGRFTLLLVNPRHLKKVPGRKTDVTDAEWIAQLLQCGLLRGSFVPPRAVRDLRDLTRLRAQLAGEHTRIANRLHKLLEDANIQLAAVASDLLGKSGRKMLRALLAGETDVEKLADLALKRWRAKIPQLRLALEGHCTEHHRYLLGRLLSHLGYLERQTEELSRRIAERLDALLPEEAQQRLDRIPGINRKTIENVLAETGMDMAVFPDEHHLASWCGMCPGNEESAGRRLRSRTRKGNRWLRRALTEAAWAASAVKTSYLRAQYRRLAARRGRKRALVAVGHSLLVIIYHVLKDHVEYTDLGPDYFDRLEPERLRRYLVKRLQALGYDVALSPKDPHDTAA

SEQ ID NO: 209518 - protein, 356 aa, unidentified
MEKIIFAPCDLHDKNMLLRIAVDREAPVTRVFENDSTGRATMIAELRERARKAGAARIVFAYETSGLGFGLYDELTAEGIACHVLATSRMTPSPKQRRSKTDAKDATRILEVLRGHYLAGNELPDVWIPGEQIRDDREPVRARLDAQEKCTQLKEQIVTLLKRNHVEKPAGLGGNWTKKHRAWLIKMRDCTVPLRSGARTHLASLLRQLAAMEGEVDALNGAVAELAAAERYVQRVTLLQKIKSVGILTALVFLTEMGDLERFKNRKQVGSYVGLTPSSDESGETDDRKGHITRQGSARIRFVLNQAVWNILRFDPGEREVYERIAAKNPQHKKIAVVALMRRLAIRMWHAARAAA

SEQ ID NO: 209519 - protein, 412 aa, unidentified
MRLFAGDDWAEDHHDIEVMDEAGKVLARRRLPEGVAGMAQLHGLLGQFLPEEDPDSVEVIIGIETDRGPWVAALVAAGYTVFPVNPLQASRYRERHGVSGAKSDAGDAHMLADMVRTDSHQLRAAAGDSPEAAGIKVLARTHKTLIWERTRAVQRLRHQLREYFPAAIEAFDDLDAADTLELLGKAPDPARAAKLTRAQVSAALKRARRRNIPDKATAILAALRSEQLRQPEALTAAYAATVRSLIAVITTLNEQVKILQGQVEEHFGRHPDAEVYLSQPGIGAILGARVPGEFGDDPSRYRDGKARRNYAATSPLTRASGKKKVVAARFIHNDRLVDALNAQAFAALNASPGARAYYDELRTRKIEHNDALRRLANRLVGILHGCLKTGTLYDEATAWGHRENLPQSSAAA

SEQ ID NO: 209520 - protein, 335 aa, unidentified
MQVYGIDLSMEKFDVNFIDVKGKESNKEVKNGVVSISKFLSTVPKEGKLCAEHTGVYGDLLVSLCNQANIPIALVPGYSIKHSLGLVKGKSDPLDSRRIREYGERFTDKLAFTEYDKESIVELKQLYTLRSQLVKARKALLTSEKGRCHLPMQNVSVHNHLQSVLSGLDTEIVAVEEEIEALIKADQDLDENYELVKSIKGIGPVIATDLLIKTGNFKNIDTARKAASYAGVCPFPNTSGKMVGKSRTSPFADRKLKSLLFMGAKSAVKHNKEYRLYYQKKELEGKPYYLIMNNISNKMLRTIYSVVKSKTPYCKDHICLDPRERNINSSTKKVS

SEQ ID NO: 209521 - protein, 367 aa, unidentified
MKQQTSAATETSAKGRVIIDFTGKTIYVGIDVHQKDYQVAKVHNGICLGNHRMKADDDAVIEHLRSYYPGAAFKCVYESCAWGFTLQRRLQQAGIDCIVVHAADVSSTDKEKRRKTDKVDALKLARNLEAKELTAIHVPDEDLQKERNLIRFRKRLKGDLNRSKNRLKSLLKYQGINIPASFGKACWSYKFMNWVEEEAKKDILLQDTLLLMLEEVKQLRQLLLKAEKKLQELMKGKYEQKATLLMSTPGVGCTLAMLFVLEIGDIRRFKGFDSLNDLVGFCPDTDSSGDTERDRGITTRRHKQLRSGLLQAAWRAIRIDPALLEAYEQLTKRMKPHQAIIRIARKLLRRMRAILISGIPYQKGVIA

SEQ ID NO: 209522 - protein, 322 aa, unidentified
MAVIGVDIAKRSFDLAVLQSNGKHRTKGKLSNDPSGFAVFADWLQQHAEPGAWIVMEATGTYHEALAEHFHALGYRIAVLNPAQIARYAQSQLQRSKTDKLDAKLIATYGQRHEDSLRAWHPEPVSIRTLRALTRRLEDLQSLRQMELNRLEVSPEKVQNSIQAVVQRLDEQIAWTLEQIKRHIDDDPDLSGKRDLLVSIDGIADKTAALILAELGDIGRFADARAVTAFAGLNPRLQESGLYRGHTGISRMGSVRLRSALYLPAVVALTYNPAIKAQAERLKTRGKKGKQTVCAAMRKLLTIAYGVLKSGKPFDPALAIAH

SEQ ID NO: 209523 - protein, 343 aa, unidentified
MQYVGWDIGKKWHYVVVMDALGQIRQQTRLPNDPPVMRRFCETLDGPSRVVVEATGHWMAVYDAIEPHVQEVVLAHPLKVKAIASARIKTDKIDATTLAHLLRADLIPRAYIPPPHVREWRELVRHQAFLVRLQTRVKNRLHALLAKRGVTPPLVSDLFGKTGLTWLAGLELVEPYGAMRTRYLAVLDRLRQQVREAEATIDQTVAATLEARLLETIPGVGRYLALLILAEIGEIHRFGRPAQLVSYAGLCPGTYASGATVRHGRLTKQGSPWLRWALVEAATHVHHVPQSRIARLFHRLASRLDAKTARVAVARDLCTAIFHMLRKQEPYREPSSAPMRTGR

SEQ ID NO: 209524 - protein, 434 aa, unidentified
METDFAAYVAIDWADQRHAWMLQAPGSVTREAGNTDHTPEAVDVWAAELRLRFGGQPIAVALEQSRGPLVFMLAKYEHLVIFPVHPTTLANYRKSFRPSGAKDDPSDAGLLLDVLMLHRDKLRRLNPDTPETRTLQFLVEERRKLVHEKTRYSNRLTSHLKMYFPQVLDWFDEIGSNIVAEFLERWPDLDKLQRARPATIERFLIDHNSRNAESIAKRLDQIRKAVPATTDAAVLASCSAAVVAWAGLLKQLLVAIVVYDEKIDDLARQHPDYALMKSFPGAGPALAPRLIAALGSRRDRYRSAHEIQCYSGIAPVVASSGKQRWVHWRWSCPKFLRQTFHEWALHSVGYSQWAREYYDQQRAKGKRRNTAIRSLAFKWIRILFRCWKDGTPYDEIAYQQARARRRQNLPTEEAAVQLQWKTVAGFSKIVASGT

SEQ ID NO: 209525 - protein, 340 aa, unidentified
MSIVGGLDVHRAQITYDYLDVDTGEVEAGRIVPATRLVLRDWLARFDGLEAGFATEGCTGWRFVVEELRRAGVEAHLAEPADTATLRGRKRRAKTDRADARHLRQLLSQDRLPESWIAPPHVLETRIKGRLYVTLMDQRRAWQQRIHAQLFHQGVEKRRNLLAADQRAWLLEADLSDAGRQLIEVALRVTDSLDTEIEPLRAELGGLARRLPGPRALRQGIWGIGPLTAPIIWAEMGDTRRFSSTDQAVRHTGLDVTVWDSDGKRSPGHLSRQGPPVLRWALFEAAFLAAKKISPDHNYYLSVKERLGANRAALSVARKLARRVHHILRQLGDQAWQEAA

SEQ ID NO: 209526 - protein, 408 aa, unidentified
MEVLYPRCAGLDVHRDTVVACARIMTEGRIEQHVETFGTTTSELLRLLEWLSRHRLTHAAMEATGVYWKPVWHVLEGHFELVLANAMHIKKVPGRKTDVNDAMWIADLLAHGLIRGSFVPPTPIQELRGLTRTRKQLVREKASHVQRIDKVLQDANFKLGSVLSDIMGASGRAILEAIVRGESDPERLVELVDRRVRAGRDLIVEALRGRPGGHHRFLLKLHLTQVDALDTAIAEVDLEVGESLRPFRVAAAQLTSIPGVSDIAAAAIVSEIGVDMSRFPTPGHLISWAGLCPRSDESAGKRRSTRLRKGAPWLKTMLVQAAWTTARAQGTNLRAQFLRLKSRRGPKKAIVAVAASMLTAAYFILKRGVRYADLGPDYFDRTDRVRTANRLVRKLSELGFEVKIHQAA

SEQ ID NO: 209527 - protein, 401 aa, unidentified
MINGCLATAHNRALAGTRRIEKIRKEVNMNACLTPKSTVVGVDVHKYSHTAVAMDCFGQEKARLDFSNERLNDYVLWLRELGDKEDIIVALEDVNGYGFHIVERLSKEKISMRYVPAILTERERKKSIHREKSDYEDAKRVGKVILTKFDETLPAKESIADDQERELSANLDLLTAERRILVQEKTILKNQLHAMLHQIYGDHYGEGFPKVFHKKAIKSFRQKLTQTKFDNPIRVALAGSSIRRFDRLALVEKQLKEIDGSINNIGQKSEAVLALSDNIHGCGIITAASIIAEVTTISRFCDKSRFARYSGIAPIDKSSGRHQRLYTSPFGNRKMNRALHTIALCQIACKGDDRGKIYFKKKLSEGKTKLWALRCLKRQISNKVFQALKEQKRRERTIQNG

SEQ ID NO: 209528 - protein, 400 aa, unidentified
MTKDETVDVYLGLDVGKGEHHATALTPAGKKAFDKPLPNTEPKLRELFAKLQARHGTVLVVVDQPASIGALPLAVARDMGCQVAYLPGLTMRRIADLYPGEAKTDARDAYVIADAARSMPHTLRAIDPADETTAELQMITGFDDDLTTETTRIKNRLRGLLTQIHPSLEQVLGPRLDHPAVLALLERFGSPAQIRKAGRRRLVTLLRPKAPRMAERLVDDIFTALDEQTVVVPGTEAAALIVPSLASSLAAVLDQRKVLAIRIEQLLEAHPLSQVLTSMPGVGVRTAARILIDVGDGTAFPTAGHLAAYAGLAPVTRSSGSSIRGEHPARRGNRQLKRALYLAAFASLKQPESRAYYDKKRKEGKHHVAAVIALARRRIDVLFAMLRDGTFYQAPAVTSA

SEQ ID NO: 209529 - protein, 416 aa, unidentified
MNAVGIDVSSRKSTVAVLRPLGEVVCLPFDVTHDIAGLASLAEKLKAIDGETRVVMEHTGRYYEAVEKALHEAGLFVCAVNPLLIKEYGANSLRRVKTDKADAVKIARYALDNWADLRDFTPMDAIRYDLKTLNRQFQLASKQRTASANNLIALLEQSFPGIRKCFDSPVRSDGTQKWVDFAHSFWHVDCVRKQPFAAFCERYRKWCKRHAYLFKLSNAEEVYALAKRAVVLTPKSKVVKVLVQEAANQLISISRSVEVYRAEMDRLAAMLPEYPVVMAMYGVGKSYGPQLMAEIGDVRRFERKQALVAFAGIDPMPNQSGDKNVRSNKSSKRGSPYLRKTLFNVIRTYLQCAPQDEPVFQFLNRKRAEGKPFYVYMLAAANKFLRRYYAKLRDYFASLDTLQPVAPIPTILKATL

SEQ ID NO: 209530 - protein, 402 aa, unidentified
MRFFVGIDWASRAHAVCIIDQLGRVRWQGSVPHTAEGLTELVGRLRRLRGRGRLRIALERPSGLLVDTLVDAGFEVVPIHPNALKATRPRYSAAGGKSDPGDAFILADVLRTDGHRFRALRPPSDETRALRALVRGRDDLVALRIALANQLRALLERFWPGAAAIFADVDSPIALAFLARFPTPHSAARLGEKRLAQFLGQHAYCGRRPVVELLARLRTAPASQVGDAEAEASGDVVRALVAVLTPLVAQLQQLSAAVEATLAQHPDGPLVQSLPRSGAVNAAQILAELGDDRARFPTDEQFAAEGGLAPITQASGQHHAVLFRWACNKRLRRALTTFADNSRHASRWAALVYQRARARGCRHQHAIRILARAWARILWRCWQDRAPYDVSRHRAAQALAAA

SEQ ID NO: 209531 - protein, 425 aa, unidentified
MREYDTEAEAGTVNTPGKGTMFDTEDVGVFLGLDVGKSSHHGHGLTPAGKKVFDKQLPNSEPRLRAVFDKLTAKFGTVLVIVDQPASIGALPLTVARDAGCQVAYLPGLAMRRIADLYPGEAKTDAKDAAVIADAARTMPHTLRTLELTDEITAELTVLVGFDQDLAAEATRTSNRIRGLLTQFHPSLERVLGPRLDHQAVTWLLERYGSPAALRKAGRRRLVELIRPKAPRMAQRLIDDVFDALDEQSVVVPGTGTLDIVIPSLAASLAAVHTQRRALEAQITTLLEAHPLSPVLTSMPGVGVRTAAVLLVTVGDGTSFPTAAHLASYAGLAPATKSSGTSIHGEHAPRSGNRQLKRAMFLSAFACMNADPASRTYYDKQRARGKTHTQALLRLARQRISVLFAMLRDGTFYEPRIPDDVELAA

SEQ ID NO: 209532 - protein, 381 aa, unidentified
MTTAATHNEQRNTTAATLFVAFELSEKTWKLGFTTGHGQKPRERTVTARQQERVLDEIAQAKHRLGLPAAAPVVSCYEAGREGFWLHRFLQGHGITNHVVDSSSIEVNRRRRRAKSDGLDVRKLLSMLMRYEQGERHVWQVVKVPSVEAEDQRHLHRDLETLKQERASTMTRIEGLLSSQGLRVPSLTKLPEQLEALRLWDGSPMPPGLRRRVLRVYAHYTFLSEQIAAVEAERRALLQTSPDASIDKVRQLMQLTGIGINGAWLLVMAFFGWRAFKNRREVGGVAGFTPTPYQSGDSAREQGITKSGNRHVRWMTTELAWSWLRFQPDSALSCWFRQRFGGGGKRLRRIGIVAVARKLLIALWRFLETGVLPAGAVLKEG

SEQ ID NO: 209533 - protein, 345 aa, unidentified
MKIVGCDLHTRYQQIAMLDEETGELIERRLEHANGEAREFYTSLSGPVRVGIEATGHTRWFERLLAELKQELWMGDAARIRAAEVRKQKTDARDAALLLELLVSGRFPRLWRPSSGERDLRQLLWHRQKLVWMRNAVGNQLHALAMSEGICRKKQLFSKKGRIALEGLNLDPWASRRRQELLHLLDQLDASLKTFNQAVSEQAAQRRDAERLMTHPGIGPVTSLAFVLIVGPVTRFQRSKQLVSYLGLNPQEHSSGGRQRLGAISKQGNPMLRGLLVEAGHTAARLDAELRQDYQRLRLRRGGSVAKVAIARKLAVRMYWMLRREINYTQLVRMQGSSRATLVQP

SEQ ID NO: 209534 - protein, 368 aa, unidentified
MTTEDGDVIGGVDTHKHTHYAAVIDTLGRLRGHQQFPATDRGYAALLSWMRAFGPLRAIGVESTGSFGATLTRALTAAGEHVVEVNRPNRVARRMDGKSDRLDAENIARAVLGRTSTAIPKAKSGMVEVIRTLRVTRASAVKARTQAFNNLFGVMIGAPSPLRDDLVDLTKRTLVNRCLHLRPETDDLATLASDPDRLLLAGVKIALRDLARRWKVLDTEIKSLNQQIAAMVGLAAPKLVELFGVGTELAGQFLVTAGDNPDRIRNEAAFAKLCGVAPQPASSGRTTGRHRLSRSGDRQANSALYIVTIVRMRHHEPTRTYVERRTNEGLSKREIIRCLKRYIAREIYANLPRPEPESRAATAQPAAA

SEQ ID NO: 209535 - protein, 361 aa, unidentified
MTGTMTWAGLDVHARSTHAAAINVMTGELVRAKFGAGLEQPLAWLAGLPGPVKACYEAGPTGYGLYRAARAAGVEMVVIAPGKTPRGPSDRVKTDKKDAELLARLLLAGSLTAVKVPPPELEAARDLMRAHDACRRDLMDARHRVSKLLLRHGRVYPEKATWTVRHRGWLGRQQFTEIGTELAFVDALACVDAITARKVALAVKLSELALDERWWPTVARLRSFHGIDTLTAFALHLELGGDWRRFERAPQLASWLGLTPTLSQSGESSRQGHITKTGSTLARRLLVEAAWHYARTPGPGVALAARQAGQPAHVLQISHRARQRLHRTHRKMRARGKPGNVCVVACARELSCFLWAAAVAD

SEQ ID NO: 209536 - protein, 379 aa, unidentified
MTETTRTAECNAAPAPLMMALELGSTKWTLGVTTGPGQRPRVRTIPAGDLLTLEKEILVAKARFGLPLDAAVWSCYEAGRDGFWLHRWLIAHGGQNVVVDSSSIEVNRRARRAKTDRLDVGKLLALLLRWCGGERTVWSVVHAPSPEAEAQRQLTREIATVREDRKRVRNRIQALLATQGIRLELGARFVEHLATAQTGDGRGLPAAYRLRLEREWAHLEAITARMTAVTAARDAAIAGGTDRVATVARQLCTVRGVAETSAAVFSAELFGTRTFRNGRQLGAVLGLVPVPYRSDQRVQDQGISRAGRADLRRIALQLAWCWVRWQPDSSLTQWFQRRFVAAGGRSKRIGIVAVARKLAIALWRYVEHGVVPEGARLKA

SEQ ID NO: 209537 - protein, 340 aa, unidentified
MFTVGLDVHQRQSTMCVLNQDGRIVNERKVEGSFVAVAEALRGIEAPIQVCYEASCGAGKLHDLLAGVAGRVVVAHPGQVRLIFRSKKKNDRVDARKLAKLLYLDEVPPVYVPGVDVRAWRGLIEHRRRLIDKRTRTKNSLRAIVRSHGVLPPRRPGLWTAKGRAWLAGLPLPTETESLKRDMLLEELVYFDGAVARVDAALNRIATGQPGVALLRTIPGIGARTAEAVAAYIDRPERFGRIKAIGAYFGIVPSQDASGPVNRLGHITREGPATVRKLVVEAAWHSIRCSTRVRGYFERIHGGDRERRKIALVATAHYLLRVMLAMLKSGEAWRPEDQTA

SEQ ID NO: 209538 - protein, 313 aa, unidentified
MSLNVGIDVSKRHLDIATNLNTHTERIDYNTKCLRDLVRSLKRQKPQRIIVEATASLERRLISSLADAGLPVVLINPLQSRRFAQAMGTLAKTDPIDAHMLALYGERINPPIRQLPNASQRQLALLIDRRRQLNQMIVSEKNRIHTSPTFLHRPIRAHIRFLQKQLSTIDAKTDQLLLDDPRHRHTNHILQSVPAIGPVIAKTLMIDLPELGSLSNKQIAALAGLAPISHDSGTMRGKRRIRAGRASVRTALYLAAMTGARFNPVLKNFYQRLRAAGKPPKVAFIAVAHKLLVILNAMVRDQTTWQLQEVVLG

SEQ ID NO: 209539 - protein, 397 aa, unidentified
MSAVVGIDVGAYKLAAAVCRSGERDAERSVLRISANRVGFDELERWLERQGPVERVVLESSGHYYWPLASHLHRRGYQVAVVNPLRAKYFAKSRLQRSKSDPADARTLAALGMSEEPRVKDPLLGAEAKEAARFWGGLVKEQGQVRQKLLRLVEIGFPELKECFEDPLCETALAVLREAPTARAAARRRVATLADTKKPGGRRRLGETKARRLHDLAKQTIAPPELDAQMGFEVGMQIQQFDLLDKQIEIAEQRVAEVLDSELARRLQTIPGVGPALAATFIAEIGDIWRFDDFDQLASYAGVHPKEQSSGNKGLKTETSWRMAKTGNSYLRAAAYQMAVVGTVHNPVIRAHYLRKRAEGKSAMNALGHCMSKALSIVWGVWRSGLDFDPTLGRPRT

SEQ ID NO: 209540 - protein, 347 aa, unidentified
MVTLGSDSHKRSHTLLAVDGNGCPLEERKVPATPAGHMEALAWARRWPERRWALENCRHLSRLLERDLLTAGEAVVQVSPKLMGKARRSGRELGKSDPIDALAVARAGLREAHLPVAQLEGKSRELKLLVDHREDLVGERTRIQNRLLWHLHELEPGFEVAASGLLRAVVLAEVRRRLERHTGVVAEIAVDLVGRLTELTTSAKRLQSRIESLAGELAPSLLSLPGCAGLSAAKLVAETADVNRFHSSAAFAMHNGTAPIPVWSGNHERHRLNRGGNRQLNVALHRIAVTQIRLGGEARVYVNRRMSLGNTKTEAIRALRRQISDEVYRRLRRDSSERLTAPNAVAA

SEQ ID NO: 209541 - protein, 426 aa, unidentified
MWDAKRRVLKIKSLKHGIIQDKRGNVMRAVFGIDVSKTSSEVAILVNGEKVHGYSILNDAIGFNRLLGDLKTIHNPEIIFEATGVYSRRLQAFLEECGYAYTRLNPLEAKKQLDSLRVRKTDKIDAEKLAKSQLVHNRKPTYVQEEVYQHLRDLSRFYQNMTEDLVRAKNRLHKVLQVTFPELENLLSTPTGEQYWNLVMAFPCKEFVLSLSQSDLYEIIRQSTSKRISEKRIAYLTDKLIKLAKQSFCAVKKTSPMLEEVRYYAQELLRLSERRQVVLNDMVALDQPLPEYDILRSIPGIAETTATSIIGKLGDIRRFHSANQINAFIGIDLRHYESGNFLAKEHITKRGNPYARKILFKCIHNIASASHTNPCHIADFYEKRKRQSTIASTKPHTIASIHRLIRTMYYLITHNKLYDYSLTQNR

SEQ ID NO: 209542 - protein, 337 aa, unidentified
MKYIGLDVHKDCTVACAISAGGKAVMSAEVRTNASGLQELHERMHGTEYAVMMESSTYSYVVYRFFSKLGVEAYVVHARSLKMITDTDKKTDRLDAEWIGRCLRLWKNGEIELSMSYFPTEREAELKDLCRYKEELSNKLGDEVRRIRSHMHRNCLELPPQFQDISTKKSREFLLTSYGHDYTLMRRVDGYAALLKESERVAREIERRGSNDRNVELLESIPGIGRQTAVQLMSMIIDVSRFQGPEKLCAYFGMVPRVRDSGGKEHHGRMTKNGDPMMRSIIEGITLSHIRFCDSTITEYFKRKSREMGVKKALMSAARKMLAVIHAVLVRGTPFTP

SEQ ID NO: 209543 - protein, 340 aa, unidentified
MGSVTTIGLDLAKNVFQVHGVDAEGVAVVRQRLTRGRMLKFFAKLPPCLVGIEACATSHYWARELVALGHDVKLMPAQYVKPYVKRGKNDAADAEAICEAVTRPTMRFVGIKSPEQQSAMMLHRVRLILNRQRTQLSNAMRAHLAEFGIAAPIGRNGIEQLLDVIADSTDERVPVDARFCLEMLAAQLRIVKEQILENDRRILASARETELGRRLMEIPGVGPLLASAIVATVPDPAIFRSGRNLAAWIGLVPRQNSSGGKERLGGITKAGHQYLRQMLIVGAMAVVRYAERNGAKRPWLVQLLARRKTKVAAVALANKNARMIWAMMASGERYREPQVA

SEQ ID NO: 209544 - protein, 413 aa, unidentified
MQKERGMELMYKRCAGLDVHQRSVMACVRVVEDGTSAEEINSFETTTSGLLALSSWLKEKQCTHVAMEATGVYWKPVWHILEADFELVLANAAHIKNVPGRKTDVKDAVWIADLLAHGLIRGSFVPPTPVQDLRALMRTRKQLVREVTRNTQRLQKNLEDANIKITSVVTNILGKSGRAILDALARGETDPQRLADLTKGLKAPRDKIVEALRGNVRDHHRFLIKLHLEQIDTLDKAVRELEARVGEQLEPFRKNVELLMTIPGISETGARVIISEIGHDLARFPTSAHLISWAGLCPRCDESAGKRRSSRIRYGAPWLKTMLVQCAWAAIRTKDSYLRAQFYRLKTRVGSRKAIVAVAASMLVAVFHMLRTGSVYNDLGAAHFDKRDATKLTKRLVRRLEGLGHKVTLENAA

SEQ ID NO: 209545 - protein, 344 aa, unidentified
MKIKLLGIDLAKYVFQLCALNQANKVLFNRTVRRAQFRSTIARLEPTTIAMEACSSAHYWGRTFEAMGHKVLLVPAQHVTPFVRGGKSDARDALAICEAAQRPGLHPVPIKSIEQQDIQLLHRLRQRQVQHSTALANQIRSLGREYGVIVPAGIKSLISRLPEALEDGSNELSPVARYALADQHRCLIDVRKAMTTFLNQIEQLAAQHPAYINLLPLPGIGPMIASAYIAAIGNGHQFKCGRQVSAWLGLVPRQYGTGGKIQLKSITKNGDRYLRTLMIHGARAVITRGLKNRPELAQWIQPIIDRQGFNKAVVALANKLTRISWVIVTTGEPFDMKQAFKPAT

SEQ ID NO: 209546 - protein, 364 aa, unidentified
MKAVKGRVGRYVGIDLGKRSYEAAFVEKGAVKKSGGKTYTEGRQALYKKLKSSDKVALEACSMAFVMAKEMEAAVGCRVYVLNPHRLAVIYMSMKKTDKEDSLKMAHMLEDFQEERLPVVPVPSDKEVRRRKILAGYRRGQQSRTREINRLHSLFLAQGITTMVRTDLKTEEQRKEAVKLLTGLELEEAEYLLDCLERHDKRIAYLKKQMEEESRGDEVIERLQSVPGVGPMVSFAFAAHVAAERFENSGQLSNYIGLVPKVYMSGDTVRYGRITKRGNSYVRALLVQAAWAMMRCKNGGSLKELFMYMTLERSISKKKAIVAVARRIGELLYTLMRDGTRYKDRPFFRSRRELEKLVESAASA

SEQ ID NO: 209547 - protein, 379 aa, unidentified
MNRIEQGWVGIDAGKGHHHVVLIDRDGRQLLSRRVDNDELALTGLIETVRDRVMEPTWAIDLADGAAALVIGLLLHRDQPVFYLPGIAVNRASAGYRGEGKTDAKDAAIIADQARMRRDLRRLQVLDEDIAELRLMTAYRADLAADRTRCINRLRNLLLGVFPALERVLDFTCHGPLVLISGFQTPTAIRRLGATRLLRWLERRGVRRPGRLATAAAEAAGQQTIQLPGEAAAASLVARLAQTILELDRQLADVDRKVAASFHTQQDAAIITSLTGIGDVLGAQFLAAVGGSLSGFASADHLAGYAGLAPTPRDSGYRTGNLHRPQRYNRQLQRVFYTSAMISIQRSPASRAFYDGKRAQGKRHTQAVLALARRRVNVL

SEQ ID NO: 209548 - protein, 463 aa, unidentified
MARNKKSKKQKMPVRSLKTIQPDAAGIDLGSREHWVACPPLEDNTPNVQRFGTTTPELVRLADWLKEQKVKTVAMESTGVYWIPLFEILDSRGFEVILANARQVSHVPGRKTDMLDCQWLQLLHACGLLRGSFRPSDDICRLRALFRERNTMIDQRSDWVRRMQKSLDQMNVCVHHAVSDITGATGMAIIRAIVDGERDPRTLAKMRDRRCKKSEEQIAEELTGNWRPEHLFNLRQALKMYDQFCQIITEYDAEIFAYIKTLQPGADDDQCVPPPASKSKARNIAKKGQEPMRQALYQLTGFDMTIIDGIGVDTACVVISELGFDYSAFPDENHFVSYLRLAPNLSISAGKKVPSKLKGTTTSRVATALRMAALSLRNSKTALGAFYRRISRRKGASVAVFATARKLAQIIYRFVYHGQAYIDIGAKAYEAQFNNRRLKYYTLALKNMGYKVKPLHAAEAQTA

SEQ ID NO: 209549 - protein, 385 aa, unidentified
MLKIVYPICCGMDVHKSFLVACIASTNECGVTTYKSRRFSTFTKDLRLCADWLSANNCKDVCMESTGKYWIPIYNILEASCKIVLAHPKYVKAIRGKKTDKKDAKWIADIFKHDLVSGSFIPPADIRQLRDLVRYRWKLNNFIVGEKNRAQNCLTVSNYKLDDVFSDVFGKAATQITSYLLEHLNEPLSDVSNFRTKGMKATDAEIRDAADGNICAEQAEKYTSQLSLVMSVPGIQTFSAISVIAEIGVDMSVFPSSKHLCSWAGLTPQNNESAGKKKTTRISRAGAYIKPLLVQCALCAIRAKRNPEIRNRYLSIKKRRGHKKAIIAIARMLLTAIYNILKKNEPYNAALSHKVDVPPAHRSVTIEEAVFILQRQGYLITPCTS

SEQ ID NO: 209550 - protein, 429 aa, unidentified
MNYNTQNAKIASITEKSLIVGIDVGSETHYARAFDWRNYEYSKKPFAFNNDEAGFAAFKAWMEDIAEKHGKELVIPGMEPTGHYWLNLGAYLQEQGMKPVHVNPHHVKKSKELDDNNPNKNDRKDPKTIAGLVNEGRFSYPYIPTGIYAEIRNLSNLRIQTQEELTRIKNRIARWFSIYFPEIKDVYKNPDAVSGMMVIKKAPLPCDIKELGVDGVNQVWRDAKLKGAGLKRARTLVSAAEHSIGSTEAPESARIEIRNLLNDYEVYKNRMEDLMREIEAKLSEIPYIDKLMEINGIGLKTVSCFIAEVGDIRRFDNPKQLQKLAGYAIVADSSGKHNGESRISHRGRKRLRYALYEAAISVIGKNKEFREIHDYYRTRKQNPLKKMQSVIAIACKLIRIFYTILTKGIDYDGQKMLSDIVRPETVMAA

SEQ ID NO: 209551 - protein, 402 aa, unidentified
MTAVMIGVDPHKASHTAVAIDAAEAVLGELRVRASAAQAGKLVDWAAGWPDRTWAVEGAGGLGHVLAQQLVAAGERVLDVQPKLGARVRLLSTGTTNKNDPNDARSVAVAALRSPACQPVQADDHAVVLRVWSRRHRQLSSLRTQAACRLHAVLCEITPGGVGKDITASRAAAILGAHEPAGAVDQAWHDLAAEHLDDLRRIDAKLAGARTKITAAVKASGTTLTGVFGVGPVIAATVIGDVTDIARFPTTDKFASYNGTAPIEVSSGNRKIYRLSMRGNRRLNHAIHMAAVTQIAHKHSNGHAYYQRKLKEGKTPAEARRALKRKISNAIYARLRADARRAAPAPAAGLGGQPGNGSVSSATGSHPERQLFGQATPRPATTLRPPAQPSRQKTPRTPRRPT

SEQ ID NO: 209552 - protein, 338 aa, unidentified
MEHQQQYVGIDLHRRRSVIVRMTEDGEVLECVRIVNDPVALSLELAKAGPDPEVALEATYGWYWAADLLAADGAGVHLVHPLGLHWDARRVKNDERDATELAHRLRRGDLPESWIAPPEVRELRELIRYRAKLAALRTSAKAQIHAVMAKLGILPTMSDMFGPTGQALLDGMPFEGAYAIRVDSLRGLLERYEAELVLVERELHGRLADHKGYTAIQALNGVGRITAAIMVAEIGDVTRFPDARHLCSWAGLTPTHRESDTKVHRGHITKQGSTLVRWAAIEAVARYHGGAPIAPAFTRIAKRRGVMIARVAAARKLLSLIFYGLRDGEIRCLAREAG

SEQ ID NO: 209553 - protein, 341 aa, unidentified
MKTFIRIGVDLAKNFFQVHAIEQEGGAAVARKLTRTKFREFFKGVAPCRVGMEACGSAHYWARELRAMGHDVVLMPPAYTKPYVKRGKNDAADAGAICEAMSRPEMRFVPVKSVAQQAVLMLHKTRDLLVKQRTMNVNALRGHLAEFGLIVAKGIHRLEELIALARAETTLPDEALAAVEMLALQTEQLDTRIASLAKSIGKTNAKSPTSQLLLEVPGVGPLIASAMTASYPDPGVFKSGRDFSASLGITPNQYSSGGKEKLGVITKKGNRDLRKMLAVGCTSVLRVAAKYKGGLAEWIVSMRSKKPERVVAVALANKLARICWAIMSTGEGFREELFTRA

SEQ ID NO: 209554 - protein, 356 aa, unidentified
MSHDVKYIGMDVHKEAIVIAVLNGSGKLVMETILETKASSILQFIHGLRGELHVTWEEGTWAAWLYDLLQPQVQQVLVCDPRRNALLKEGSKSDKVDARKLAELLRTGMLRPVYHGENGLRTLRELARSYQTISKDLTPVMNRLKALYRGWGIPCAGTQVYAPRYREEWLSKIPQVGVRRRAELLYQQLDGLQALRRNVRGEFLAESRKHKAAKLLRQIPCIGPIRAGLLIALIQTPHRFRSKRQLWTYSGLGIETHDSAQYRYVGGQLQRSKKPQQLRGLNQNHNHGMKEIFKSAATRASCGTGPFRDFYAALLDKGMKPEMARLTLARKIAAITLTLWKRGERFDAEQLKTQAA

SEQ ID NO: 209555 - protein, 321 aa, unidentified
MAKRTTICAGIDTGKRKLDVALDGNSLQLQVENTAEGHKVLLEWLRHHKVKRIGIEASGGYEQPVVAELRRKRFVVVVFQPAQVRAYAKFHLQRAKNDKIDAALIAACTAAVKKIHPAPDPRLQPFAEHLTMIEQIGEDIKLYKNRLETCRDPRIQKVWKEEIARLAKRERAELKALVAAIREHRDLAQRLDLIYSVGGAGLPTAVAILVRMPEIGQLSREQVAALAGLAPYDDDSGEQVGARHIHGGRKRLRRALYAAALPASFRWNPQLIALYTRLKAAGKEHKRCLIACARKLLIFVNTVVARGTPWQDEPLPTAATG

SEQ ID NO: 209556 - protein, 345 aa, unidentified
MSSMNFIGLDIHKKTISYCVKDISGKVLSEGKIPATRQGLRDWVATLTKPWTVAMEATMFTGWIYDYLRPHAAAMKVAHPLMLRAIAVAKKKNDRIDAGRIADCLRCDFLPECYMAPMEIRQRRRTLRYRKLLVRQNVQLKNKIAQLLMESGVSYNKEKLHQQGYFHQVLPANPEIDPSLWPLLKLTREMIERTQKTERALLRSLEADPLLAARIERLMTIPAIGHVTALTWVLEVGEVERFHSIKQVISYCGPCSGEKTSADSSRRMPISKQRNRHLQTMLLEAAHLAPRLNPELAVLYEREAAQSNHNQATIAVARKLAAYLLAIDRGERAFVTHQVQSSVAA

SEQ ID NO: 209557 - protein, 392 aa, unidentified
MVVSVGIDVSKDKHDCFIQSSEGEVLADVFTIPNNMDGFNILLEKIQGCATSQDKIKVGLEATGHYSYNLLGFLLDNGLATYVLNPLRTNLYRKSLSLRKTKTDRVDARTIASMLLSDTGLKPYTDTAYHNEELKSLTRYRFDKVKERAKLKSSLSRLVCILFPELEKLVPTLHMASVYALLEEFPGAKQVAAAHLTRLKALLETASKGRYKRDMALEIRDAARNSIGSRMPAKSLELQHTIRLIRELDAEIAEIEEQIQSLMEELDSPITTIPGLGFRMAAMILAEVGDFTRFDSPDKLLAYAGMSPSTYQSGQLKNRYPHMEKRGSRYLRYALYNAAKYVCRWDPTFAAYLARKRAEGKHYNVALSHAAKKLVRLIFAMEKSGTPHHLAV

SEQ ID NO: 209558 - protein, 367 aa, unidentified
MKKVSTAATMQSRNISQQKLTIGLDLGDRNCWYCVVDEAGQIRLEQRVRTNAKGLRGVFGAMPRSRIALEIGTHSPWISRLLSELGHEVIVANARKVRLIGESRKKDDRLDAQTLARLARIDPELLYPVKHRSAQAQADLTLIRARAGLVRARTALVNAARGLAKSYGERLRGCNVRNMNPEKAEGLSPELQSALEPLLAGIEAVSERICEYNERIEQLAQQSYPQTALLKQVKGVGTLIALTYMLTLEDPHRFQKSRDVGCYLGLQPGRRNSGRSEPQLHISKEGDPYLRTLLVQGAQHILGPFGIDCDLRRWGLRLAERGGKSGKKRAIVATARKLAVLLHHLWVSGEAYEPLHNSSRTTVAAAA

SEQ ID NO: 209559 - protein, 361 aa, unidentified
MVRNRMSVGLDVHARSVVACGLDGQTGELFERRLTPDHGEIRAWIRSLPGPVAVTYEAGPTGFGLARFLAAEGIECQVGAPSKLQRPVGDRVKTDVRDARHLARLLHLGEIVAVAVPSVGQEAARDLVRAREDVRGDLMSARHRLSKLLLRQGIVYYQGKPWTGVHDRWLRSQSFTLPGLQLAFDIAYDTVLTTVARRDRLDAAITTMAGSSEFTAVVTRLGCLRGVSTLTSFGLAVEIGDWTRLSGRSIGAYLGLVPTESSSGGSRSQGSITKTGNGHARQLLIEAAWHHRQPYRRPGVDLRRRQQRATPAARDRGEQANRRLAARWAAFDARHKRAVVANTALARELAGWCWSLAVLGG

SEQ ID NO: 209560 - protein, 354 aa, unidentified
MKHLQLKDGDRLRRQCIGVDISKKKFTFCLCQSTDQDLHFYTKPKEFDNSETGFRHLLEWSGKEVDSSVPYSFLMETTGCYHESLALFLARKGMTVIIVHANKAKNFARLNGQRTKTDPIDSKMLATMGCDTPGLKPWPIPDEKYLQLRDMSRLSEQLEKTHAQVLCRMEATTHSGYVTKSVLRAHKSLLRSIEKVQAANEQHMAELVNGDPVIKAGVDNMESIKCIGKKTAVLVTAETLGFHQMTSAKQVASYAGLDVKKEQSGDAEKKGHMTKRGNAHLRAGLYLPAMVASWSNPQLMEDYKRICASHPQSKNIALVALERKLLCLMYSLWKSGREWDPEYGQDKKQEEAMS

SEQ ID NO: 209561 - protein, 376 aa, unidentified
MALKIVYKICCGIDVHKTFVVACIASTNDKGITSYESHRFSTYTSGLKTLLQWLLDRNCKDVCMESTGKYWIPVYNILESDCSIVLAHPKYVKAIRGKKTDKKDAKWIADLFKHDLVAGSFMPPADIRQLRDLMRYRFKLTCFKSSEKNRLQNCLTVSNIQLGNVVSDTFGKSAQAILDKLLENPADTSFDLEPLVYKSLKKKLPELRDAIDGYITPEQAGKLKVIKAHYENLESRKAELEELILALAAPYQQELTILQTAPGISSPFTAIGIISEIGTNMEAFPSAKHLCSWAGLTPTNNESAGKKKSVRVSKAGCYIKPLLVQCANAVVKSTKHPEMRNRYLRLKKRRGHKKAIIAIARMLLTALYHMLKNGEN

SEQ ID NO: 209562 - protein, 510 aa, unidentified
MDPADATPQPTLPVNGLASPGITPIGVGIDTSRYGHYATFLRPDLQPAAADLAFVESAQGYAQLRQRLGGIAAKYGQVHFHFRVDVAGRYADNLLAFLWALPEPKTVSCGDPQRNKNYRAALFGHKKSDPVESAAAARYALTEKPQPMPVVSPQIRLLGHLASRLEAQARQVTRLVNQLHNLLARAFPELALVVADISAGWVLELLDRYPTAAKLARARRSALERIPYLPDQHIPHLLDSARISVASLSGPVAEELVRAQVRQVREAHVRQKSLEKMLAKAYRQLPEPNQLDTIIGFGEVTAAILTAKIVDPQRFVEPGKLVSYFGIFPVEAASGIDREGKPRAPKRMVMCPRGNDLVRRYLYMAALSAAQHNPAVRPLYQRARAKHPNHPGIAVGHAMRKLLHLALAVWKTGKAFNPEHYPWDQAAHLEGSAQPEPATAAATSTQAAGHNPETVPESSVVTAACATANVAAQPVVGNFTSAEADSASAPADGPALPPADAASPWIDFDH

SEQ ID NO: 209563 - protein, 469 aa, unidentified
MGFEPGHTRWPPLRLARVSRELVSVVVVSPLLLQEFTQPEEDEVRSAGRALGLDVHRDFCEVAIAHDGEVSSSGRVDTTPEALELFGGSLDPRDRVALEVSGGAWEVARILERHVARVVVVSPADTGIRQARAKTDRLDARTLARLLAAGELDGVWSPDERCRVMRRRLSRREQLVRARSRSKNEIHAVLVRRLVGRPPTSDLFGVKGRRWLAGLELPVEESETIEACLRHIEFLDSEIGAVERHIAAAALDSPEIRRLMTVPGVNVICAATFMAAVGDIRRFSDPRALVGYLGLDPRVYQSGSAPATGGHISKQGSASTRWALVEAAWSVVRQPGPQHAFYQRVRARRGHGIAIVASARKLACLFWFLLTREEDYAHQQPSLTAKKLRLLEIRAGAPTQRGKRTGTWATRQGMREGERRLAEQAEASYQQMVSDWQAGAPKKVGASVTPGRASQKPSRGKVARQTTSP

SEQ ID NO: 209564 - protein, 375 aa, unidentified
MEHHSEAFVALDTAKLRNAVAIADAGRNGEIRYLGEFDNTEAATRKLVAKLASKHARLTFCYEAGPTGYGLYRLIKSLGHDCMVVAPSLIPSKPGDRVKTNRRDAVNLVKLLRAGELTAVWVPDERHEAMRDLVRARDAAAKDYRIKRQNVSSLLLRLGHHYPGKKTWGRAHINWLASLKLEHREQRIAFEEMLLAVRQVRERIERFEQAMREAVADWTLAPVIEAVQAMRGIDLVGAVAFLAELGDLSRFENPRQLMAYLGLTPSERSTGESVKRGGITKAGNTRARRLLIEAAWSYRFPPRVSKDMQTRIGAAPRTAREIAWKAQMRLCGRFRTLTRKGKRPTIVVTAIARELSAFIWAINREVVGSHATANQ

SEQ ID NO: 209565 - protein, 322 aa, unidentified
MQDKVMTEAAMAAVYVGIDVCKERLDVYLHPAARHLAVANDAGGWRRLKRVLAEQPVARVVMESTSKYHRAAHRSLWAAGLAVAVVNPLRARLFAEAAGALAKTDAIDARILALMAERLDPAAVQPLRESVEAVQELARARRAAVDERVALAQRRSTALSPFLRRELASRARTLESHIERLETELQRIIAADPVLARRQTILRSIPGIARTIAVTLLATLDEIGQLTGKQVAALAGLAPFARDSGPRKGARYTRGGRRDLRSALYMAALSAARFNPDLAAFKQRLRDNGKPPKVALVAVARKLIELANTLVREDRTWTPRTP

SEQ ID NO: 209566 - protein, 347 aa, unidentified
MNDVNTYGLDLAKRVFQLHWVDGETGEVHRKTLPRAQVSAFFARAPRGVIAMEACGSAHHWGRLLQTLGHAVKLIAAQFVRPFVKTNKTDAADAQAIWEAAQRPEMRFVAVKSAQQQSVLSLHRLRTQWVKTRTQQANQIRGLLYEFGVVVPLGWRTLLKAATEQLTEPAACPVPELLRGELLEQLQALRDATARIVALEKQLTSWQRTEPECQRIMAIPGVGPLTATAVVASVTDARQFRSGREFAAYLGLVPRQSGTGGRVKLLGISKRGDTYLRTLFIHGARSVLLSHSRKQGDGPLQTWLNGLLQRRPSNVVVVALANKMARTIWALLAQGRTFDAGWVSKRP

SEQ ID NO: 209567 - protein, 474 aa, unidentified
MARTRNKPASPPVPGDAGTEVTDEPVQVISRAAAIDVAKGSGMVCLRLPHESRAGRRTQKVWEVTATFAAVVALMDHLVCQGVERLVLESTSDYWRIWYYLAEAAGLEVWLVNARDVKHLPGRSKSDRLDCVWLCKLNEWGMLRRSFVPPEPVRDLRALTRLRANLTHDRVRHQNRIEKILEDALLKVSSLISDLMGGSGRRFLQALVDGERSPAALAALGDYRLHASKAELQEALTGRFRDIHGFEIGMLLKLIDDLSAKITELDERIEAQLENVPGLGGVCTSCGQPGPDGPCTGCGEPVLGVIARPGEITGIGRGAAQVIVAGLGTGMTWFPAPGQAASWAKLTPRAIQSGATSKAGRTGKGNPYLRGATGVAVMTAARTETFLGARYRRHARRRGKQKAIVAGCRTIIEIAWRVIAGPGFRYTELGPDYHDQLDPGRKTRDKIRQLEKLNPGMTVTLTPRPEPGGQAPAA

SEQ ID NO: 209568 - protein, 343 aa, unidentified
MQAVKTIGLDIAKSGFQVHGVDADGQVVFRRQLKRRYVLAFFQKVPSCLVGMEACATSHHWSRELQALGHTVRLMPPAYVKPYVKRQKNDATDAEAICEAVTRANMRFVATKTPEQQSGLVLHRTRHLFIRQQTAVINAIRAHLAEFGIVAPVGRNGIEQLLNVIADAGDKRLPEVARTCLMALGTQLRALKAQLLELDRMITAWHRSNETSKRLDAIPGVGHVLATALVASIADPKVFRSGRDFSAWIGLVPKQHSSGGKDRLGGISKQGDRYLRSLFTAGALAVIRYAKIYGTKHRPWLTALLARRPTKVAAIALANKLARMAWAMMTRGERYKEPVALAA

SEQ ID NO: 209569 - protein, 334 aa, unidentified
MGKITTVGIDLAKNVFSVHAIDESGQVVFRKTIARARLMPTVAQWPLCSIGMEACSGAHDWARRFQALGHTVRIMAARFVTPYRRNGKNDGNDAEAICEAMQRPAMRFVPVKSAEQQAVLTVHRVRQGFVEERTAMINRIRGLLAEFGQVLPQRASEIRRGAAAASEALPVLARDAIDELLAHLRTLDQRIAGYDRQLEQLARSNETTQRLMSLPGVGPLTALATVASVGHAHEFTNGRQFAAWLGLVPRQWSTGGKARLGRITKRGDAYLRTLLIMGARAALQMAVGREDKLSRWAIALKERRGYHKAVVALAAKNARIIWALLAHGTQFSQA

SEQ ID NO: 209570 - protein, 449 aa, unidentified
MTRKSKKQRLEIIHPRCAGIDIGSREHWVAVDPSQDDEPVRSFSTFSDDLYALADWLESMNVEMVAMEATGVYWIPLYEILDERGLEVRIGNSRATRQVSGRKSDVLDCQWIWQLMSYGLLRGAFRPADQVCVLRSLVRQRATKVQEQARCLLHMQKALTQMNVQLANVVSDLAGKTGMAILRSIVAGERDPKQLAKLRDGRLRADEATVARSLYGNWRKEHLFALTQALAHYDFEIEQIRECDQAISQTLIELPTRSQGEVPAPVKPLRSPQRTRAEQTALHQALCAVLGLDLTVVPTLGIETVLVVASEIGPDLSRFPSSNHFCSWLSLAPPTRISGGKSLPGKTPRVLNRAGQALRMAAANARHSDSFIGAAHRARLSRMDTAKAVKATAHQLARLIYAMLTQGQPYVEQGIEAFEARSQARQLSRFWSMAHIHCSGVWRCLADLV

SEQ ID NO: 209571 - protein, 345 aa, unidentified
MQAEYDGRQIVGIDLHRRRSVIVRMTETGDKLETVRIDNDPVALGLEIAKAGPDPEVVLEATYGWYWAVDVLAAAGAQVHLAHPLGVKAFAYRRVKNDARDAADLADLLRMGRLPEAYVAPPAVRELRELVRHRAKLVAWRSGLKASVHAVLAKQGVHIAVSDLFGVGGRELLSRAPLDGAYRGRVDSLCRLIDAVDFEIDAVTGPIRARLAGHRGYTAIQAIPGVGPVLAAVFVAEIGEVDRFPGPAQLTSWAGLTPRHRESDTVVHRGRITKQGATLVRWAAVEAAHSVPHRAGWLVSRRAAIAERRGRNIATVAVARKLLTLVYYGLRDGRIRALAPAAPAA

SEQ ID NO: 209572 - protein, 402 aa, unidentified
MKKVCGLDVHKDNIFCAIYNGESHSQVKEYATLTPAIYSMGEYLQSEEVEEVALESTGIYWIAVWDIFYEMGFKLTLVNPYLIKQMPGRKSDIKDAQWIASLLHKGMMRGSFVPAPLIQELRVYSRKYGKLRQQVTRVLTCMDAILVKAGIRASSCLSSISTKSFMGILEALIAGWTDPGYLVSLVYGNRKNKQSGKLKEALRGNIRAHHRQELSWAKQEYDIYQLQISECLSQMERICGLHFALPVNLLQTIPGISRIAAMTIIAETGGDMSVFENSGKIVGWAGLRPRNDESAGKYKSTATTKGNKYLRSILVQVSWAASRSKGSFFKEKFQRMTMRKPRKKALVAIARKLLVVIWNVLKHTRQYDPRLAPVYDPVKMKARLAYYKKEYEKTANILNINL

SEQ ID NO: 209573 - protein, 413 aa, unidentified
MVIGIDVGSETHYARAFDYRGIEYSKKPFKFSNTEAGFVTFKEWILDLKEKHEKDKVVPGMEPTGHYWFNLGKYLQDNEMKPVLVNPHHVKKSKELDDNNQTKNDRKDPKVIAGLVREGRYMIPYLPDGVYADLRTASNIRFQLQSELTRIQNRISRWFNIYFPEYKTVYGKPDAKSGMLILKEAPLPEDILTLGIDGVDQIWRDAKMRAVGKARAKTLIEAAEHSVGSKEGAVSARMEIRMLLEDYESRNMRLQEVMVLIEELVKQIPMAEKLLEIKGVGIKTVSGFLAEVGDISRFNSPKELQKLAGLALVENSSGKHKGETTISRRGRKRLRYLLFEVAMSLVAKNPEFRELHNYYTTRRLNPLKKMQSLMAIAAKLIRVFYVMLTKGVNYDPKKMVNDIKRPAVYLQTA

SEQ ID NO: 209574 - protein, 373 aa, unidentified
MDERINFFVGLDAHKDSTSIAACEAGREAARFVGTIGPDVHALLRLLGKAGDPAQVSVVYEAGPTGYGLYRELSRRGYRCQIVAPSLIPRRPGERVKNDRRDCGRLAELSRAGELKPIWVPDEAHEAMRNLWRAREDAVGMRLKARQQLKAFLLRHARRYPGKTSWTKSHECWIAGLHFEHQGDRIALAEYQLAAQAAEQRVQRLTNALSETVKGWRFEPVVAALRALRGIDTVGAIGLVSEIGDIGRFSSARQLMGYLGLVPSEHSSGNSIHRGSITKTGNAHARRLLTEAAWSYRFPARMSQQLRQRSSSLHEAIRNRAWKAQLRLCTRFARLSARGVQINKVCVAVARELAGFIWAIARDATTARTAAAH

SEQ ID NO: 209575 - protein, 273 aa, unidentified
MNVTTIGIDLAKTVFSIHGTNQYGKVVVRKRLNRPKLLAFFAQLSPCLIGMEACSGAHYWARELTRFGHDARIIAPRFVAPYRKSSKNDDNDAEAICEAVGRPNMRFVPTKTVDQQAVLCLHRIRRGLTKERTAQINQIRGLLAEFGLTVPQGRYQARHRIPDILEDAENGLPMLARRLLNNINQRILQLDEEILAYDREIEAMARRDERAKRLMAIPGIGPQTATAILASAPDPRQFKSGRHFAAWLGLVPRQYSTGGKPRLGRITKRCQQQ

SEQ ID NO: 209576 - protein, 357 aa, unidentified
MNRKANSKPVAVATLGIDIGKNVFHLIGLDKRGAIVLRERLSRGQVEPRLANMPVCLVGMEACVGAHHLGRRLKALGHDVRLMAAKYVRPFCRKQKNDFNDAEAIAEAVTRPTVRFVALKSPEQLDLQALHRVRERLMSHRTGVINQIRAFLLERGIAIRQGREALRKELPRALASSEKLTPRMVHIIEDLALDWRHLDERIAAISTEIEELAEADEGAVRLMTVPGIGPIISSATVAGIGKGEVFSRGRDFGAWLGLVPKQTTTGGKPILGRISKRGNKYLRQMFVQAARVVLLKRSSWERYGLKPWIEAALERRLHHNKLAIALANKLARIAWSVLFHGRKYDMHVEDGHAAQPA

SEQ ID NO: 209577 - protein, 348 aa, unidentified
MDIVKQSVGIDVSQKELVVCLGKMDSEFNPELYAFKVFKNTEHGHKSLLIWVKAHTLEEVKLRFVMEATGVYHESFAYFLDEKGYDLSVVLPNKISNYIRTLNLNTKTDKSDSKAIAMFGLERKLDKWHQPKKIFREMKQLTRERDQVVHERTKVKNQSHAEKAEARPNKKSLERLNERLLLLNKQEIEIKQEIEDLIKEDKELHKTINEICTTPGIGLLTVSIVLAESNGFELVKNKRQLVSYAGYDIRERQSGTSIKGKARISKRGNKHIRKAMYFPGWTAIRHDEHFKTIFSRHISKHGIKMKAGVVIQRKLLEMIYTIYKTGVPYDKDYHKQYEGEIKEEIVNI

SEQ ID NO: 209578 - protein, 402 aa, unidentified
MNCVGIDISKGKSMIAVMRPFGEVVVSPFEVLHTDSELSKLARLLKSLDGETRVVMESTGNYHAPVAWLLHDAGLYVSVVNAMLVHDYGNNSLRRAKTDKKDAVKLANYGLDHWLTLPRYVPEEDTRLMLKSCYRQYQQYSKVRTMLKNNLISLLDTAFPDANRLFTSPPRADGSEKWVDFVAAFWHCECVCGLSEKAFTAKYQKWCKKHGYNFSEDKALDIYASACGHFGVMPKTDTTKLLVEQAISQLRATSAALAALKQEMQSLAASLPEYPVVMEMFGVGPALGPQLMAEIGDVRRFHSKKSLVAFAGIDAPPYQSGQMDIRSRSISKRGSASLRRTLFLVMGVLLQCAPMDEPVYQFMNKKRSEGKPYRVYMMASANKFLRIYYASVKAYLDSLEHN

SEQ ID NO: 209579 - protein, 360 aa, unidentified
MKRRHFIGMDSHCPFCEIAVVDALGQVVKRDRTETAIPALVQVIETVPRPRELVIEEGPLAGWLWRSLRNAVDRLVVSQPRRNRLICAEGDKDDPIDAEKLAQLLRGGYLKEVHQTESLERAVFKQQVALYHFRVRQRVRESLRLSSLFKQHGVMVREKHYAAGEDRPALLVRLPENAVLREAVQQLWLAYDELVEREEDWRKRLERLARQEEVVQRFADLPGISWIRGASLYAYLDTPWRFRNKSALWKYLGIGLERRRSGNGPEHLGVPLLAHRLLKSTILGAALSAVVSGNNPFADLYGRWTEQGLTAKLARRNVARALAATLWGMWKNGSAYRPEWVGVPLAAELAAKCPREDGRN

SEQ ID NO: 209580 - protein, 416 aa, unidentified
MTHDPQWFAGIDWASEAHQVCLVDINGKVVGERSFAHGGAGLEELCRWLASMTQAVPAIIAVAIEVPHGPIVDTLLERGFQVYSVNPKQLDRFRDRFTVAGAKDDRRDARVLGDSLRTDRHCFRSLRAEEALVVELRQWTRIAEELKQERIRLTNRMREQLWRYYPQMLEIGQDLGAEWFLELWAAAPTPAKGARLGEARIERILKRHRIRRITAAEAVAILRKTPLVLVPGVVEAASAHIRTLLPRLKLVNRQLKDADQHLDAVCAKLEGDGADPAGQTSEQRDVTILRSSPGLGRTVLATLLGEAPEPLRRRDYHALRSLSGAAPVTRRSGKQCVVLMRQACNIRLRNAVYHWARVAIQHDQLSRRRYDELRKRGHSHGRALRGVADRLLAMICAMLRNGTLYDPDYAINHLAA

SEQ ID NO: 209581 - protein, 410 aa, unidentified
MDSEPLVFVGIDWASTEHQVCLTGKGNPVQRVFPHDAGGIGAMVDWLCKQAESPGQIAAAIETPHGPIVEALMDRGIAVFAINPKQLDRFRDRLSPAGAKDDRRDALVLASSLRTDRHCFRRVDALDPVVVELREWSRMAEELKQERGRLTNRIRQQLWRYYPQVLDLADDPGADWVLALWDKAPEPARTVQLTEKKVARVLAAHRIRRITAAEALAILKRPPLTVAPGTTEAAKAHIATIAERLRLVNRQIKDVSRRIDSLVDQLAEPETEPGQDGEQRDATILRSLPGVGKIVLATLLAEAPQAVNERNYQALRSLTGVAPVTKRSGKSCHVEMRQACSHRLRNAVYHWARVATQQDDLSRYRYAALRARGHSHGRALRTVADRLLGIACVMLKTRTLFDPSKAPAAA

SEQ ID NO: 209582 - protein, 448 aa, unidentified
MSKGKTKNEKVKKISQLTVINPTAAGIDVSDTEMMVAYPTNSEQLEIRAFGCFTRDLYLIANCLKENGVTTIAMESTGVYWVPLFLLLQEYGFEVYLVNAKHVKNVTGRKDDESDAEWIQKLHSCGLLSASFQPDNMERTLRSMIRHRKNLVQTSSTYLNRMQKALELMNIKLHTVISDIDGKTGLLIIDAIMNGERNPEVLADLRDRRIKASREEIIKSLEGHWTTEHLFELRQCYHLYCTHRQMIEECESEIEKQLVEQIASKNEGLIPDLPKVKRKVSGKHKAPFNLTAYLKELLCVDVTEVFGISELSALTILSEVGTDMSKWKTEHHFTSWLNLVPNTKISGGKIISSRIRKKKHHAGQAFRIAANSLYNSKSPLGDYYRRIRARAGAAKAVVATARKLAIIYYKMVSNKEAFNPKALEVYQKKYKEKKINQLKKKIALLEAA

SEQ ID NO: 209583 - protein, 336 aa, unidentified
MDQRNYVGIDVSARSLEAALVGPSHRSTTASFANSPAGHRQLIKWATKRGHLAQVCLEATGVYSLEIALALHHHPKTKVMVINPKAIHNYAGATMQRAKTDQVDARLILDYGQRMPFACWQPPSKEVLQLQAITRRVSQLKVELNREANRLHAEGHRTSTTDLIARDIQVNLRHLERRMAHLEEKAVALVLSVQHLSALFQRLLSIPGIGETSALRLLAELAVLPEGMKPPQWVAHAGLDPRPHDSGQSVHRPRAITKAGNKYLRAALYMPALVAIRHQPNVKAFYDQLIAAGKKPLQAITAVMRKLLHAIWVYGNMTRISTAKNFTRWPHKSLDF

SEQ ID NO: 209584 - protein, 346 aa, unidentified
MKITTIGVDLAKEVFQIHGVDAHGKAVLRKQLRRGEMAKLFANMEPCLIGMEACGSAHHWARKLGEFGHTVKLMAPQFVKPYVKTNKNDIADAEAICEAVSRPNMRFVPTKNIEQQAILSVHRARQGFVKARTAQANQIRGLLSEFGIVIPQGIKSIAKRMPDLLEDGENSLPGTMRKLLERLNDNLKEMDRQVAELELQIKLWHHDNEASRKLEAIPGIGPVTASAIVATIGNATEFKNGRQLAAWLGLVPKQHSSGGKQTLLGISKRGDTYLRTLLIHGARAVIRFAENKVEPNKWLCKLIGRRNKNVAAVALANKNARIIWALLAKGKAYEQDYIPTAKTVGA

SEQ ID NO: 209585 - protein, 761 aa, unidentified
MDTRFAVVVGLDVGKSSHHACALDPAGNKLFDKPLPQDESELRELFTQLQNHGEVLMVVDQPNTIGALPIAVARDVGCSVAYLPGLAMRKAADLYPGRSKTDARDAFIIADTARTMPHTLRQVDRDSDVLSALKVLAGFDEDLAHETTRALNRIRSLLTQIHPALERVFVGGTLSTGLVLDLLEKFGGPTGFKSAGRSRVLRFARTHSRRNPEVLIDQIFTALAEQTVIVPATAAVELVIPRVAGQVKELKEQRATVAREVETMLEDFPLASVLMSMPGIGIKTAAQILLTIGDASAFETPGHLAAYAGIAPVTRRSGTSIRGEFPARSGNKRLKNALFYSAWVASHSDPISKAYYDRKRAEGQAPQRRRDLPGPPPLQRHLRDAPRRHLLPAPDHHPDPRAGRSCGLTQNIGTPPCIPGRPGGPAVPQPSRVVVAAATYRRPETLAALLPALQTQARAVMRSGDPAPRVELLVVDNDPEASARTAVEAAAAATAVPLRYVHEPRPGISHARNRILTEAAGADVLVLLDDDERPRPGWLTGLLATASRHEATAVAGPVHPVFLGGEDPWIAAGGVSRREERPGLPTGYPLSRAATNNLLLDLAFVQAHGLRFDPALGLSGGEDSLLTGQLTAAGGRILWCAEAGVEETIPPERNTRAFHLARRRAQSATHVLVDRLLAPDLVARWGQQARWVLIGLRQLAAGTLQTLLGRVRGSLPLRARGEIRQASGLGVLAGCLGFVAAPYARSGPRWQRAPRRATRGA

SEQ ID NO: 209586 - protein, 435 aa, unidentified
MEKLFKNSAGIDIGAKKVFVYVDGESVVSFFTFTEDFERARDYLKSKNVTSVAMEATGVYWTILYEMLTESGIDVWLVDGRQTRQVPGRKTDVKDCQWIQQLHSYGLLTRCFVAEADIKELRSYVRLREDHIRSQSMHINHMQKALTLMNIRLGEVIDQVHGKSGMAIIEAILSGERNPEKLVALCHSSILKKKAAEVKKSLNGKYTNSGLFALKQAYDAYRFYQSQIDQCDEKINLVINKMGKVYKKDGVSKMKRKPIRHHKPMVDNLGQNMLNIFKDRDATLISGITDYTWIQLLSEVGTDLSKWPTEKHFTSWLGLAPGQNQTGSKNRRAKKKGRPKAGQIFRIISQGLINSKNIAIGAFGRRLRARKGPSTAIKAMARKIAEFYWRVMVKGLEFAENGIKHYEALLLQKKKNAFIRLAAELNKTIENVEFA

SEQ ID NO: 209587 - protein, 395 aa, unidentified
MRRPVSGRDAERSQVIDVLKAQIKRRPARKKVSTVGTQQTRNISQQKLTIGLDLGDRNSWYCVLDEAGQIQLEQRVRTSAKTLGEVFGAMPRCRITLEIGTHSPWISRLLSELGHEVIVANARKVRLIGESRKRDDRLDAQTLARLARIDPQLLCPVKHRSAQAQADLMMIRARAGLVRARTGLVNAARGLAKSYGERLRGCKVRNMNPEKAEGLSPELQRALEPLLSAIEELNERICEYNDRIGALAQQSYPQVALLKQIKGVGTLIAPTFLLTLEDPHRFGKSRDVGCYLGLQPGRRNSGQSEPQRPISKEGDPYLRTLLVQGAQHILGPFGVDCDLRRWGLKLAERGGRKGKKRAIVATARKLAVLLHHLWVSGEVYEPLHNSRQTTVAAAA

SEQ ID NO: 209588 - protein, 345 aa, unidentified
MDYYAGLDVSLEETAICIVDGCGRIVKEARAASEPAALVAALRGVALPLERIGLEACSLTAWLHDALQDAGLSAICIETRQANAAMKTMPNKTDRNDARALAQIMRTGWYRQVHVKSRQCRLWRSLLVARRTVMNEMRTIENVARAILREAGIKLGTPSRAGFAGRVRELAGGDTLVMGLVDPLLTILATMLEQFSRLTKQVLDLVRQEEVCRRLMSVPGVGPITALAFRATIDRPDRFKRSRDVGAHLGLTPARYQSGETDIQGKISRCGDELARTALYEAAHSLLVRSKKWSSLRAWGMNIAKRRGMARARVAVARKLAVILHRMWSDGTAFRFGKEAGPVGA

SEQ ID NO: 209589 - protein, 318 aa, unidentified
MARIICGVDVSSISLEAFVAPKGATGSFNNTVEGITALLEFCQQQQVELVAMEATGGYEKRAVQMLWAEGVGVAVLNPRGVREFAKSLGLLEKTDRIDAQVIARFAEVKKCAASVPASAEQQRLKALSRRLQQLSRLAADQKNQRHLVDEPRVLRTFDAVLKVAQQQMREVEAEIAGLLASDPLWQKLEEALRSIKGVAGRTVARVLADLPEIGTLSNKAVSKLAGVAPLAQDSGKREGKRAVRGGRRNVRAILYVVAGVVRRYNPDFAAFAERMAAKGKPRRVIRVALAHKLLVRLNARAREARAAFRCAGLVAQNA

SEQ ID NO: 209590 - protein, 400 aa, unidentified
MTSMPQTEMTPNLPVAVSSPVVLGGIDTHKDLHVAAVIDAGEKVLGTHSFSTTRAGYRALIRWLRSFGDVRRVGVEGTGSYGAGIARYLVDAGIEVVEVDRPDRSERRRKGKDDDLDAISAARAALHNRRTSTPKSKDGPVESLRVLRVTRATAIRARRNALQLLRMTIVAAPEELRDQVRNLTRMQLIRTCAAWRPDTTNVTDPVSATRIALKSLARRILELGDEIAMLDELIKPIVTALAPQLLARPGIGVEIAGQLLVTAGDNTQRLRGEAGFAMLCGVAPLPASSGMTQRHRLNRGGDRQANSALHLAVISRLRIDERTQAYLARKTAEGHSKLEIIRCLKRYLAREVYYLLNPAASTSKGGALAPGGQAPSLPATPCPRPVRGPRVKARPPGRPR

SEQ ID NO: 209591 - protein, 312 aa, unidentified
MIPELLFVGIDVSKTRFDVFVYPAGKRWSTGSSPTQIGALANRLLGLGPVVVGLEASGGYERRLADSLHAAGLKVHILPPARVRNFAKAMGQLAKTDMIDAAVIARYLATVHAHLTPYEPNPVRSRLSALAAHRRRLVAEKSGLTSQLDTIEEPLVRDMLEVRLRIIDTDIATLDRAMRDLLKATPGLRKRHDRMCKVTGVGPVLATALIADLPELGTVSSKVIAALVGVAPHARQSGSSNRQGKCSGGRKHLRDIAYMAALSAIKVKDPVLGAFYQRLRSKGKPFKLAIVATIRKLVTILNAIARTDPAFA

SEQ ID NO: 209592 - protein, 364 aa, unidentified
MKKIRTAKIKSQAVNKKVTIGMDLGDRTSRYCLLDEEGVVIAEASTPTTKAGIAKVFGAMARCRVALEVGGHSPWVSRQLETFGHEVIVANPRNVRLIGESTRKDDRLDARTLARLARIDPMLLSPVRHRGAEAQADLAVIRARRVLVRARTMLINAARGLTKSFGERLRKCGAGQVAPTLAAELSAEVRAAVVPLLAEVEALNQRIAAYDRQLEQLVKEHYPEVERLTQVKGVGTQIALTFVLTVDDPNRFQRSREVGCYMGLRPGRRNSGKSEPQLHISKEGDCYMRSLLVQGAHYILGPFGIDCDLRRWGLKMSERGGKNAKKRAVVAVARKLAVLLHKLWVSGEAYDPLRNSRPLVARAA

SEQ ID NO: 209593 - protein, 407 aa, unidentified
MQILYPRCAGLDVHKDIIVACVRCVSAPTHQEVRSFGSTTAGLLALSDWLTEHACTHVAMEATGVYWKPVWHILEGHFELILANAQHIRNVPGRKTDVNDAMWIADLLAHGLIRASFVPPAATQELRDLTRTRKQLVREIAQHCQRIQKVLEDANLKLGSVLSDVLGKSGRAMLQAIIAGEDDPERLAALAQGSARRKTSELREALHGRITAHHRTLLKLHLDIVLALEHTVAELDAALGKALAPIRQCVRLLTTMPGVSDVTAQVILAEVGADMTRFPDAGHLISWAGLCPGNDESAGKRRSTRVRKGGTWLKTTLVTAAWAAVRVRSTYLHVQFLRIKARRGSRKAILAVAASMLTAAYHMLRNGVEYADLGADHFIRHDTSKTIQRLLKRLNDLGCEVQPVLAP

SEQ ID NO: 209594 - protein, 401 aa, unidentified
MYYAGIDISKRSFTVSILDDTGEMVESPSTFPVNQKGLAKLLTILTGISEDKKKIQVGMEATGSLWENIYSFLEEKGYTLALINPHQSKKFHEFARCKAKTDKVDSVVIAGLLRSGETIGSYVPEDDVQVLRELVRLRYSLQKTKKSYQRRALSLLEVVFPEYTQLVKNPFGEVSCMILTKYPTAYHMREAKVSNLVKISRRIQGNNYSGELAYRLIEAAKQSIYSGKAYRVRGENLRILLEEIRGLKEKIERIDKRIDDILSSKEPASPERRLLEIPGVGPKTVAAFRGEVGDVTRFSRATELIGFIGWHPKIYESGEKKSQHPKMSKKGSPTLRVALYMASVSCIKHNRELRSLYLRKISQGKEAKQALICVGKKLICIMYGMLKNGTSYDPQRVFIQA

SEQ ID NO: 209595 - protein, 346 aa, unidentified
MLYAGLDLSRKRLDFHLLDGEGATVERGATPPDADGLLRLSERVAGHGAPVRAAIESMNGARFVHDRLELAGWQVEIADAQKVKGLAPLACKTDRIDAWVLAELARRDLVPAIWLPDPLVRAERERARWRLHLVRHRSSLKQRVHAVLLTHGKPCPVSDLFGVRGRQLLARLDLPDPWKGTIEGSLRLIDELDREIGECERELRRLGADHRYVLLLCTVPGISWVLAYTIAAELGDINRFPTPRNLAGYSGLCPRVYQSGQRDLRGPLSKQGPRYLRWALVEAATHACTHPAYRDRYQQTKARIGKQRGAKVAQIDLARRLSEAIWHMLIRNQPFAPKGATDPLAA

SEQ ID NO: 209596 - protein, 325 aa, unidentified
MDCHDGHSQVAVMASDGTILDERRVTDSALAEFAREYAGSPVAIEATGFYRHVYETLDEYTDVTLVNPKKTRVIAEASVKTDKIDAQMLAHLLRANLVAESYVPPRKIRENRDLVRTRKTLVEDRTRVKSRVRAVLKRTGNQYRSELFGPTGREFLAELSLADTDRVIVETYLDVVDTYDEQIATLDREIEAVAKENPEAKLLQTIPSVGAFSAVLLTAEIGEIERFPSHEKLVSYAGLNPTVRQSSNHETRGGISKEGSAAMRWVLTQCVNTAVNCGNEYLTEFYGRLKQRKNHQIAVVATARKLLVSIYYMLTREEKYAPPVS

SEQ ID NO: 209597 - protein, 419 aa, unidentified
MPAKGNYFKQRGVIMDIVVERGAGLDVHKHSVVACIMGTGIKKEIRTYSTMTNDLIRLKAWLKEHGITHVAMESTGVYWKPVFNILEDAFEVILVNARHVKHVPGRKTDVQDSEWLCRLLRSGLVRGSFIPPKEVRELRDLTRYKRKLIQTITAEKQRVEKVLEDANIKLSSIASNTFGMSGSLIIQELLKGDLDAEAMAELSKGRLRNRKEELKEALVGKVEEHHKRMIRTSLEHIKAMEGILITVEQKIQQQIDLHFKEEFKLLKTVPPVKDSASVIIAEMGVNMDLFPTEDHLSSWAGMSPGNNESPGKKKSGATTHGNLYLKTILTEFAWIASKMKGTYLHSKYQSLIGRKGKKKTLVAVGHKILISCYQILKYKVPYKELGATYLDERKKERIARSYIKRLTSLGYAVTVKEAT

SEQ ID NO: 209598 - protein, 443 aa, unidentified
MKPKRRTHLRGPRGQAFADRIRGVCPEHILCVSIDISKDFHVVLLHNGLGEIVTASFEIDIFRSGFDRFCQAVDEAIARTQAQVILVGMEPTGHYYENLARHIQATKQDVTLINSYSVKENRNQQMMAKEKDDDIDTAAIGDLLRRGEGTPFRPPTGIYLQLQQLDRARLGEVKIQTMLKNRVIGHLDRIFPGLILTKAAAKERYQPLFATDFWECQTLQHLVRVCPDPRALAAMSPAELRAAFHEQGYRLGPLTAQRIIAYAQKVLWPDPEVVAIRRQLLATDLQTLDEVSARIAHYTEQLHRLVAQTPYHILTHVKGLTPTQVASLAAAAGDPANYTHAGQLFRRSGLVSGRNDSGARQRRGKGQGIIKSGDVYLRRALNAMLNGLVLHQPVLGRYYLRLKQSKPVGVARVATIRRITGILWATVRDQRADTLIGRGDNMT

SEQ ID NO: 209599 - protein, 316 aa, unidentified
MSKLVAQITLGIDVSKDELVICDWDTEELTTLPNQRSTIKAWLKSLYGPVRIAIEPTSIYHLEFVEQAHGLGFTVYLINPRQLLHYREAVNVRNKTDPQDAWLLARYVARESGLLRPFKPQCARAQQLWALLKRRAVVVRVRTQLEQSFSDLKFSTKALSTQIQHLLSRIDQRIRALVRKLGWWVDYQRCLSIPGIGPLNAAALVAVFHRGAFAGADAFVAFLGLDIRVRESGKFKGQRKLTKRGEAEIRRLLYCAAQPARSYRPFDIYYQQQLDKGLSKIAAKVALARKLARIAFALITNQQSFKKQEIAYSQGP

SEQ ID NO: 209600 - protein, 413 aa, unidentified
MAIDTVVQRSAGLDIAKASLVACIRIPGPDGGWRVIKRKFTTMTAELLALQDWLAGHNIARVGMESTSDYWRPVFYLLEQRFDCWLLNARHMRAVPGRKTDMTDAEWICDLVALGLVRPSFVPPPPIRRLRDLTRRRAILLAERTREKQRMEKLLEDAGVKLSVVATDIFGKSGRAMLDALIAGERDPKVLAELAMGRLRKKIPALAEALVGRFDDHHAFLARMICDHIDTISRMVAELNTRIDTEIEPYRTEVELLGSLPGVDTRTAEVILAEIGTDMSRFPTAAHLASWAGACPGNNKTGGKSKPSHTRPGDRWLKAALGTAAMGAIRTRQSYANALFRRVAARRGGKRAQTAVAHCLLVAAWHVLATRTPYHDLGGDYFLNRDNPDHRRRRAIAQLERLGYQVTLEPRAA

SEQ ID NO: 209601 - protein, 341 aa, unidentified
MHATTIGLDLAKNVFQVHGVDAVGKVVLRKKLRRSEVIAFFKALPPCLIGMEACGTAHYWGRELSALGHDAKLMPAGYVKPYIKRGKNDEVDAEAICEAVTRPTMRFVPVKSTEQQSVLMLHRVRDLLVRQRTMLVNSLRGHLAEFGLIVPQGIWRLRELHDLAQNAADTKLPEVARVCAALIVSQIDALHEQIRTIERTIMARHRANELSKRLETIPGIGVITATAMVATVVDASAFKSGRHFAAWIGLVPRQNGTGGKVHLGKISKKGEPYLRRLLVLGATTVVRYARDKPELAGWVNALLARRPARVVTVAVANKLARIVWAIMRRGGTFGERPFSIA

SEQ ID NO: 209602 - protein, 422 aa, unidentified
MNSNTDSKRRQVPDDYLVAGIDPHKKTHVMVIMTRKEKVLTRLKFDNSKSGFELAVKQVDDQISRSSSKGVIFAMEAGGHYWRNLAYFLNKKGMRFCLVNPFTAKRLREGKDINRAKNDMRDARVMAELVISNGLPQTNLPQGIYAELRAVYNAYQRLIKERSRIKNRVKSLIDQLFPEFCLVFNNVCSKTAMQVLSCCLVPADIARMQEDQFIARIRGGFTGRALKIQSLQKLYRLGKTSIGAEAGARGIALELSLMTQQLLLLSEQIEQTKHILQDLLLSIPESRCILSIQGVGHVAAAGILAETGPLQAYRNAGQLIKLAGTNPAVWESAGKRHSITHMSKKGRPKLRSCLWIAAIGLLRSNPDFKEWARVRRERELHMHPLKPRETVGAAANRLLRIVYALVKNGSLYCLPQANEVLV

SEQ ID NO: 209603 - protein, 320 aa, unidentified
MSKKKSKGFIGIDVSKNLLEVAAHESDYQFRCANKAQAFGELIVELIALRPALIVLEATGGLEIPVVAALHAAGLPVVVVNPRQVRDFAKALGQLAKTDRLDARVLAHFAAAIKPPLRPIKSADELELDALVGRRGQLVEMLTAEKNRRGSAATDTVRDQIKEHIDWLEDRIAELDQQLKAQLKNSTLWQGRDDILQSVPGIGPVVSYSLIADLPELGRLNRQKISKLVGVAPLNNDSGQQRGTRHIYGGRTRVRSMLYMAALTATRFNPVIKEFYERLLANKKLFQVAITACMRKLLCIINVMVRDSTLWKIKNDPVSA

SEQ ID NO: 209604 - protein, 400 aa, unidentified
MMTPDDIDVWVGLDVGKSAHHAHALDHDGNTLYDKPLKQDEKAIRTMLGKLSKHGRVLLVVDQPNTIGSLPLTVARNMGIAVAYLPGTAMRRTAQLLPGDAKTDRRDAHVIAWAALKLPETLRDAGPDDETLAALKLLAGHDEDLAHESTRHVNRLRSLLLQTHPAFERALKGERITRDATLALLERYGGPMGVKRAGIEDVKDWAKSNGLRAGRIIDDMFKAIGEQTVTVPGTLMAETIIPSIAHDIKTIRDRRREVGRQVEKLLEDHPLLTVLTSMPGIGVRTASNILLGIGGDIANFKSSAHLAAYAGISPVTSQSGTSIKGERPSRRGNKRLKNALWQTAFVASTKHPPSVAYYKRKREQGKHHNAAIICLARRRCDVIYSMLKNGTLYQEPALVA

SEQ ID NO: 209605 - protein, 278 aa, unidentified
MEYYLGIDLHKQFAYWHLIDDRGEILWTGKVPSTEADTKARLRQLDVPLGTVTAAIESVEHYGWYADLLTKYGVGTVHLANPHKLRLIAENPLKNDKKDAEIIAQYLRSGTLPLSYLAPEEIRNLRELVRTRMYLAKHRTAAKVRIRNALAKHGLSCRYKDIDGEKAKAWLKTVDISPDHRREIESLLSVMSTLTKEIDSFEAEMKRRGQSYPEVQILKTVPGIADVRALIIMAEVGDFTRFKRPEQLAAFAGLVPRSFSSGGQGATRGGSLNAVRRF

SEQ ID NO: 209606 - protein, 386 aa, unidentified
MQASTVGTPTASRYGTIFITIELSQKSWLVTLHSPDQDKLSRHQLAGGDHAGLVALIDRIRDRAARALGGVPAVASCYEAGYDGFWLHRLLLAAGITNYVFDPASIAVDQRARRVKTDRIDGETMLRTLMAFLRGEPRVVRIVRVPSAEQEDARRASRERDRLVKEQTAHTNRIKALLRLLGMAIGNPRRRDWLSWLATQRDWQGQAVPPQMLGEIRHEHARLMLVRERLDALAKTPAQADPTPAAAQMTERSELLLRLKCLGPAFATTLTNEVFYKDFRNRREVASYFGLTPSPWRSGGIDRDQGISKAGNPRARCAAIELAWLWLRHQPDSKLTQEYRRRTLDAGKRIKRVAIVALARKLVVALWRYLTTGLVPDGAVLKAVKV

SEQ ID NO: 209607 - protein, 461 aa, unidentified
MPKRRGKEIQKDKRAKNWEEGLPPINKNAAGIDVGNAEHHVAVPPGRDAEPVQKFGSFTADLHRLARWLKACGVETVAMQATGVYWVALYQILEEYELQVNVVNAHHTKTLPGRKTDVLECQWLQKLHTFGLLNNSFQPAEEIRVLRTYMRQREKLVAAASTCIQHMQKALTEMNIQLANVISDISGMTGIAILRAIVNGERNPHTLAGLKNERIHASRQEIAQSLEGNWRPELLFVLEQSLALYDTYHQKIAECDQKIETHLKTMESNENTEQQLTQVRIRRSHHKQTSWVDLHMHLHRIAGVDLTQIDGINVQTAQTVISEVGVDMTRWRSEKQFASWLGLCPDNRISGGKVLKRGTRRVVNRAATAFRMAAWSLFRSQSALGANFRRLRRKLGAPKAVTAMAHKLAKLVYRMLKFGQAYVDKGAEHYEAKYRQQTIKWLAKTAAALNLQLTPSPQLLE

SEQ ID NO: 209608 - protein, 411 aa, unidentified
MVKENFIYVGIDLHKETHTAVMIDCYNQKLGEITFPNRPAAFPKLVTKVKKCNTDGKEVVYGLENAYGYGRALAVWLIDKGYLVKDVNTAISHRQAKHRGAMYRKSDSDDAEAIALATLNMLDKLPDAYPNDAYWSLGQLVHRRDNIMKQRTRLVNQLHEQLCIAYPSYKQFFNDISRPTALYFWEHYPSRKYLKGKSVEDLRAELVPVSHNKCSTKTCEKILDAVASDKVKNNAYQDARDMVTLSIVSDLQYYDKQLAEVDKMLEQMYKMLGCTLTTIPGVNVITAVKILAEIGDIKRFSNANKLAQFAGIAPLHLSSSGKGKDVATKQGNRRLQATIYFLAIQMVQLSSKGTPRNPVVRAYYEKRKAEGKTSQQALICISRRLISIIYGMLKNGTEYRMPVVENAGEKL

SEQ ID NO: 209609 - protein, 334 aa, unidentified
MENIALIGIDLGKNSFHIHCQDRRGKAIYRKKFTRPKLIEFLATCPATTIAMEACGGSHFMARKLEELGHSPKLISPQFVRPFVKSNKNDFVDAEAICEAASRPSMRFVQPRTESQQAMRALHRVRESLVQDKVKTTNQMHAFLLEFGISVPRGAAVISRLSTILEDNSLPLYLSQLLLKLQQHYHYLVEQIKDLESQLKRKLDEDEVGQRLLSIPCVGTLTASTISTEIGDGKQYASSRDFAAATGLVPRQYSTGGRTTLLGISKRGNKKIRTLLVQCARVFIQKLEHQSGKLADWVRDLLCRKSNFVVTCALANKLARIAWALTARQQTYVA

SEQ ID NO: 209610 - protein, 391 aa, unidentified
MSVYFVGIDISKYKHDCCIISAADQQVVSKFTFKNNKDGFSELLTALHSLSSPEDIRIGFESTAHYALNLELFLEKAHHSFMEVNPVLISEYKKSTTLRRTKTDRVDCESIARWLMTVEYKPHSKGFYHAYSLKSLTRLRDKLIRQRSFYLVKITNVLDHTFPEFKPFFNERFSKTALYLLENYGSAEKMARMNTASYEKLRSLSRGKFSPQQFLTLKSLAANTVGVNNSIFDTELNSLLTLYKATAEQICILETQITELIEEVHPHYMSIPGIGPISAAVIYAEYGDISNFSTPSQMLAFAGLEPGVNDSGTESHGGRMVKRGSSQLRYVLMNCALPLIRFDMTFAAYYARKRAEGKPHRVALSHVVKKLVRVIFALERQNTDFVAQALR

SEQ ID NO: 209611 - protein, 336 aa, unidentified
MKLYCGMDLHSTNTMAVVIDEEDRRLVEQRLPNDLVAILEQLEPYREQLVGIAVESTYNWYWLVDGLMDHGYSVQLVNTTAAAENYSGLKYAGDRHDAFWLAHLMRLKILPTGYIYPRPLRWQRDLLRQRLNLVRERARHRLALQSLWALHRGRRLSYRQLHRDLAQLRLGEPALDLALEAHRRTIRLLDDLVEELESAVYRQLKPTAADQLLHTVNGIGPVLAATINLETGSIARFARVGQYSSYCRLVKSERRSNAKKKGEGNRKCGNKYLSWAYSEAAHFAVRYDDRARRFYDRKKAQRNGIVAIRAVAHKLARACYFILRDQVPYRSDKVFA

SEQ ID NO: 209612 - protein, 346 aa, unidentified
MEHHAGIDVSLELSSVCVVDAKGKIVKEAKVASEPDALVSFLQGLGFPVQRIGLEAGPLSQWLHAGLARAGFETVLLETRHVKAALSAMTVKTDRKDARGLAQLLRMGWFRPVHAKSIGSQEMRALLVARKQLLGKLIDVELSIRGILRGFGLKVGQVTRKEFEVRIWELVAGQATLERIAGAMLSARATLKAEYEKLHKAVLAIVREDAVCRKLMTVPGVGPLVAVTFKSAVDDPRRITKSKAVGALFGLTPKKYQSGEKDITGGITRAGDGMVRTALYEAANVLLSRTTRFSKLKRWGMDVAKRRGSKRAKVALARKIGVILHRMWVDGTTYRWRETKLIAARA

SEQ ID NO: 209613 - protein, 408 aa, unidentified
METLHRRCAGLDVHQKEIVACRRVVSGRKARSELARFPTTTRGLMELSAWLCEAKVTHVGMEATGIYWKPVWHVLCHDFKLILANASHIRNVPGRKSDANDATWIADLLAHGLIRASFVPPQPIQELRDLTRTRRELTREIVRHTQRIQATLEEANIKLTSVISDILGLSGRRILSAIVAGETNPHALAGLRHPRLACPHEELVAALDGRLRDHHRFLIGQHLKTIEQIEATIAEFDARLETALAPFCDAIERLKGIPGVGDNVAQTLIAEIGAEMSAFPTADHLVSWAGMCPRLDESAGRKRSKGLRKGAPWLKPVLVQAALSATKVKSSSMRARYLSLKPRLGHKKAIIAVAAAMLRTIYHMLKDGTFYQDLGPDYRRPRSPLRAANNLAKRIRALGFAVELKAAA

SEQ ID NO: 209614 - protein, 350 aa, unidentified
MRFYTGQHRFHCGVDLHAHTMYVCVLDATGEIVLERNLATTPEAFLEAIAPYRGDLVVACECLFTWYWLADLCAREQIPFVLGHALYMKAIHGGKAKNDRIDARKIAVLLRGGMLPQAYVYPPGMRETRDLLRRRLHLVRKRGQLLAHLQNLRHTYNRGAFEKRIAYPSNRAGVVAHFAGEPMVQANAALDLSLLDHYDQLLVDLERRLVRQAKREAPRGFHLLLSIPGIGKVLAMTIVYELHDVKRFERVQQFASYARLVKCAKESAGKRKGTSGAKMGNVHLKWAFSEAAVLFVRHSAEAKALLARLTKRHGKGKALSILAHKIGRAAYYVLLREKPFDAAKFFAHAS

SEQ ID NO: 209615 - protein, 403 aa, unidentified
MNNVVGIDVSKGKSMVSVLRPFGEVVAKPFSVGHTGSELKELADYLKSLDGETRVVMEHTGRYYEPVARFLHDEGVFVSAVNPKLIKDYGNNTLRKVKTDKADSRKIARYGIDNWAELRQHTPMDTIRMQLKTLNRQQSLYSKTKTMMKNNLIALLDQTYPGVNALFDSPVREDGSQKWVDFATAFWHVDCVRSMSLTAFAERYRKWCKRHGYNFSQSKAVEVHAGAQDLIAMLPRDALTKTMVRQAIDALNAISASLERLKAEMQALAAQLPEYPVVMTMHGVGDSLGPQLMAELGDVTRFTHRNAITAFAGVDPGADQSGTHEAKSTRVSKSGPPELRRALFLVMDCLLKTQPQDDPVYRFMDKKRAEGKPYLVYMTAGANKFLRIYYGRVKEYLASLEGN

SEQ ID NO: 209616 - protein, 343 aa, unidentified
MQVHTIGIDLAKNVFQVHGVDEQDEVVVARQLRRKQVIAFFEKLEPCLVGMEACATAHHWARELIKLGHTVRLIPPIYVKAYVKRSKNDAADAAAICEAVTRPSMRFVPVKTEEQQAAMAVHRARSLLIRQRTQLTNALRAHLAELGIVAEKGREGLGQLVEIVADARSSGSLPAQMIEALGAIIDQVMSLEQQIRELDGCLKQQHRASDVSQRLEAIPGIGIVGATALAAAVTDPGQFKSGRDLAAWIGLVPKQHSTGGKVRLGSISKQGDRYLRRLLVVGGTSVVKLAKVFPWKYPWVAKLLERKPAKVVAIAVANKLARIAWALMSTGEVYRPRVRRVRL

SEQ ID NO: 209617 - protein, 320 aa, unidentified
MQAFLGIDVGKADFHVSLLQDDRSWSRSFPNSPAGLSQLRSWLRNRKVKHVHACLESTGGFEETAALDLHENGHTVSVVNPARIKAFAQSELLRTKTDRVDAALIARFCKAHAPDPWIPPAPEIRALQALVRRHAHLQEMHTAETNRLGSARTASSVERSLRAHIDYLTAEIQALEVEIHDLVDRHPPLRKQRDLLTSIPGLAKLTASRILGEMPNITEYRGAGAVAAFAGLAPCEHQSGAFHGRTRLAKVGNARLRKMLYFPAMAATQCNPVLKALYSRLVAAGKPKLVALAAVMRKLLVLAYGVLKSGKPFDVEYRTA

SEQ ID NO: 209618 - protein, 339 aa, unidentified
MQLYAGLDLHSRNTYIGIMDKEFKRIFNKRVVNKLPVILDTLKPFQDQLKGIVVESTFNWYWLIDGLMDVGYDCLHLANPSAMKQYEGIKHTDDQHDAFFLAQMLILGILPQGYIYPKEDRPVRDLARKRLFLVRHKTAHILSLQSLIARCCGKRVSANEIRKFTVEDLQQLLQQEYIVLSAQANLDTIVFLKQQILQMEKAIKNKVKLSKQFQQLLTVPGIGLILAMTIMLEVGDIGRFHQVGNFASYSRCVSSQRLSDGKKKGQGNRKNGNRYLSWAFTEAAHLSRRYNEDFRSYYNRKVAQANTSLATKALSNKLARICYYIMRDQVPFRTELLSH

SEQ ID NO: 209619 - protein, 358 aa, unidentified
MRQSKGLDFKGQNIYVGIDVHLKSWAVAILSESSVLKKFSQDPQPEALHRFLVTNYPGATYYSVYEAGFSGFWTHHKLTELGINNIVVNPADVPTMSREKLRKTDAVDCGKLARGLRAGDLRGIYVPRAEILEIRSLIRLRNLIVKDTTREKNRIKSLLRFHGIKIPEEFTRHTMGNWSKRFLQWLDKVEMSTEYGRKTLELHIEQFDRLREMLLQETRAIRELSRREVFAEPLRLLMTVPGIGITTGITLLMEIDDIGRFKNADQLASYIGLIPMCHSSGEKEGVGNITLRKHAILRCYFIEAAWMAIRKDPTMTMAYEEYRKRMNGNKAIVKIARRLVNRVFFVLKRKQEYVNCVV

SEQ ID NO: 209620 - protein, 338 aa, unidentified
MGNVTTCGIDLAKNVFSVHAVDGSGTVVLRKTVNRARLVALIAQLPPCLIGLEACSGAHDWARRFAQFGHQVRLMAPKFVAPYRRSGKNDSNDAAAICEAVSRPTMRFVPVKSIEQQAVLTLHRVRLGFVEERTATINRIRGLLSEFGVVIAQRAIEVRRNAASSLNGLPCQAARAVRDLLEHLQVLDSRVAEYERELEQHARHDEQAKRIQQLSGIGPISASAVVASVADAHEFKNGRQFAAWLGLTPKQYSTGGKTRLGRITANGDPYLRTLLIMGARSMLQTAMRRTDRLARWALNVRARRGYHRACVAIAAKHARIVWAMLAKNEPLRLVRSEG

SEQ ID NO: 209621 - protein, 411 aa, unidentified
MLYCGIDWGEQALEYHLRTPDSEVLTQGSVKPDAAGIAELFATLDGHARPDQIAVGIETAHGAWVQALLDRGYLVYALNPKTVDAFREALSAAGNKSDRIDAGVIARFLAACQKDLHPLRPDAPEIIALRIACQDRVRLVQERTAKLNELRSVLKIVYPAFIGFFADIESQIALEFLQQFPTQDQMRTLSGRRLQGWLSRHGYTATSRIPEMKIRLEQPVLPVPAHLQSAKVPLITYLARSLLALQAEIAECDGRIREMFEAMPEADWVSSLPGAGPVLSACLLACIGRDPQRFADVDDARALMGTAPVTKASGKSRVVLVRRGCWKFARRSLHLFADHSRRTCAWAQAFYERQISRGSRHHAAIRALAHKWLKIILAMKRTGARYEEARFTHSQRRYLLKAAELKIGTPA

SEQ ID NO: 209622 - protein, 408 aa, unidentified
MNTLYVGIDVSSKSNVVYLMLPNGDKHSNFSVANSHEGSTLLVKKIYSALTSHSLDTVLIGLEATSVYGDNLVYFLREDATLAPFNRKIHVLNPKQVKKFHDTYNDLPKNDYVDSFVIADCLRFGRINKEVYMGDYRYKALQNLTRARFFAVQNLVKEKQRFMNVLFKKYSTMTQEKVFSDAFSTTALAVYDEFESAEALANMDLHELTDFIIEKGKNRFPDPDAVAKAIQKAARSSYRLPKTVNDSVNQVLSISITSMKALESQIKEFDKAIKALMELLPNVLISIPSIGPVYSAGIMAEIGDINRFDNQASLAKYAGLAWKQHQSGGFEAEVTRLIPSGNRFLKYYLCEAAFSLVRCDKEYSDFYHLKYKEVNRCQHKRALALTARKFVRLVFRLLKDNRLYCPAK

SEQ ID NO: 209623 - protein, 344 aa, unidentified
MKKSNVIGIDLAKNVLQVIKISKHGELVTNKAVSPSKLKQILAKSTPSIVVMEGCGSCHYWGRLALSFGHEVRIINPKKVKGFLQGQKTDANDALAIATAATQASVKFSQVKSEEQQTLQTLETSRKFLDRELTALNNHIRAYLYEYGITMRRGRKSLRETIALVLDHLDTRLPQCLKNTLSLLWERYLSTLVQLKEAKAYKATLVKQVEPCKRLLALESVGEVGAAMLYANIGDGKEFKNGRGASACIGLTPQQHSSGGKTIMLGINKKGGNKELRAVLYQGALSVISRLPDEPQTVKQAWLIELVKRVGVKRACIALANKTVRTAWALLATGESYKPILLSK

SEQ ID NO: 209624 - protein, 360 aa, unidentified
MIVVEATHLKGAPSMGKSITDLSSVTTVGLDLAKHIFQVHGVDGLGRVIVAKAIRRSKLLEFFASLPPCLVGLEACGSAHHWARELIKLGHDARMMPPAYVKPYVRRQKNDAADAAAICEAVTRPSMRFVEARSLENQAALMRHKTREMLVSQRTQLINGLRGHLTEVGVIAAQGPRYARELADRIEAGDETIPLAVCEALAPLVVQLRNLDEAIARLDRAIAKMAQKDETARRLMSIPGFGPITASAMAASVQDASSFDGPREFAAFLGLTPKQNSSGGKQRLGRISKMGNRYLRKLLVVGAHAVLFHRKPHTDPLRMWAKKLIEKKPFKLVAVALANKMARIAFAILRGKTTYREIPA

SEQ ID NO: 209625 - protein, 325 aa, unidentified
MYYVGVDLHKETSWFYIVDSQSKKYDSKNIQNKPEILKKYFEQIPKPFTLAVEATYNWYFFVDLAEQYAQKVFLANSYELKAFAKRHKKTDKIDARLIAHILQKGFLPVVAIADQETRQVRELLRYRLNLVTDRSRNIFRLKALLDKLGLNSQLDFTTYKGLKSVVIEKLPGIYTRLIKNYIERITGLAQKLTGIEKEIGTVSSLDHDMVNLMSIPGVGHFSAALIKSEIIDIARFASFNRLCAYAGLAPRVSASANKTFHGPLNTNRRKNLQWILLENVYHFIRAVPEMKERYGILKQRKGHNTAKVVLARDMLKICSRSFTMC

SEQ ID NO: 209626 - protein, 412 aa, unidentified
MEVLYPHCAGLDVHKDTVVACVRHMVNGTVKREVRTFKTTTKELLALSEWLAAEKCTHIAMEATGVYWKPVWHILSDGDFALVLANAAHVKNVPGRKTDVNDATWLADLLAHGLIRGSFVPDPQTQEMRDLLRTRKQLVRERSRHVQRLQKTLEDANIKLDSVISDVMGLSGRKMIEALIAGESDPEQLAQLAHRRIKAPREELCEALRGRVTRHHRFLLSLHLQQIDAIDAAIDAIDEEVDAQVEPFRTTVHLLTTIPGVDQLSACVILAEIGRDMSRFPTAGHLISWAGLCPRNDESAGKRRSTRMRKGAAWLKTTLVQCAAAAARRKASYLQAQFHRLRARRGAKKALGGIAASILTAAYEMLKSGALYEDLGPDHFDKRGKSRHIHRLVHRLQNLGFAVQITPLPTAA

SEQ ID NO: 209627 - protein, 380 aa, unidentified
MEAGMEQIITYVGLDVHKESIDVAIAEAGRRGEVRHYGAIGGDVNAVGRLVKKLDTAGKKLCFVYESGPCGYVLYRYLKQKGYECTVVSPAHIPRSKCDRIKTDRRDAMKLARLHRAGELTEVYVPGENDEAIRDLVRAREDAVKAKRVARQQLKAMLLRLGIRYEGKGTWGPKFFAWLSDVKMPTRVQQIVFQEYINTIHQTTERVDRLTQQIAEIVPLWSLYEVVKALQALRGISLVAAVTVLAELGDLGRFDNPKQLMAYLGLVPSEHSSGEKKRRGGITKTGNRRVRQVLIEASQSYRYPARVSPLLLKRQVGLPQNVLDIAWKCQLRLSNRFTKLKNNGKHHNTVVTATARELVGFIWAISKEITIPAIQKETKI

SEQ ID NO: 209628 - protein, 353 aa, unidentified
MRKMQEYIVKGNKIFVGLEDSKKTWKVCVRCDRMIVQETSMPAEYEILQAYLMNRYPECTITVMYEAGFQGFWLHDLLEEDGIDCIVTPANKVTCAKDDRVKTDKRDARRLAQNLENGDYVSCHVPDRVRREDRQISRTLSQVQKDITVEKNRIRRFLEYHGLDRGLPAGAWTDRNYLKLKEMHLDLSLKVSLDAYLRILAELLAIKKDLRKELRALCNKERYKAGVSAKKSCPGIGWLTAIRLTLEWGELRRFPTGKHIASFAGLTSREYSSGDTVHRGRITGQSSEYVRSWLIECTWRAIRKDPVLLAKFNAVWRNSGSRKKAIVAVARKMSVRLWALETTGKPYCIGVVE

SEQ ID NO: 209629 - protein, 413 aa, unidentified
MDVVHPRCAGIDCSKKDAKVCVRIAGQGRKRASSTVTTWGATTSQILALREHLVAEKVTCVVIESTSDYWKPFYYLLDDALDMMLVNASRVRNVPGRKTDVSDAGWLADLGAHGLMTASLVPPPPIRALRDLTRARTHITRERSREVQRLEKLLEDAGIKLSSVASDITGVSGRAMLEALIAGQRDPAVLADLARRRMRSKIPALTEALTGRFNDHHAFMARLFLDRIDAHTADIGRLDERIEEAMEPFRPARDLLMSIPGFSRIVAEVFIAETGGDMTVFPTAGHLASWAGVSPGSNESAGRVKSTKTRPGNRYLKGVLGIAALSAARSKNTYFAAKYKRIATRRGPMRAIVAIEHAMIIAAHNMLTNGDFYRDPGANYYTAHQPARTKSRAINQLESLGYRVTLEPLTESA

SEQ ID NO: 209630 - protein, 363 aa, unidentified
MSTRCIANPNTANQEEDNVVVGVDLGKTVFQLCIADGAWRIVDTQRLSRPQFERFFVNRKVALVVMEACGTSHHWARWLQGLGIQALLIPAQYVRAYVRRNKTDAADAAALLEAARCADIKPVRVKGIEQQALQSLHRTRSLWVATRTARINALRGFCREFGVNFARCSRRVIEQIGRTVEDLDSPLPHMLRGAMRLMIDEVRQLEARIGQLERELAELARRSPACVTLLSIPGIGLITATAMVAATGGDVSSFKSARHFGSWVGLTPRESSSAQTRHLSGISKRGDSYLRMLLTHCGRSVLRTANVAAGAGKPLDRLRGWALSLQVRSNHNKAACALANKLARICFATLRDQEPYKARAVIA

SEQ ID NO: 209631 - protein, 359 aa, unidentified
MTVIEGKERRIVGGVDTHKDLHVAAVVDERDRVIGTRSFATTRQGYRQMLAWMCSLGDLQRVGVESTGSYGAGLLRFMQQAGIAVLEVTTPDRHDRRRRGKNDDLDAQNAAHAAFAGKRTVTPRSRDGMIESLRVLMACRKTAVTARRVALQLIHNTVVCAPDGLRDQLRNMTRMQLIRTLASWRPDLTAYRDVEMAYRITLKSLARRYLELHDEIADLDAMIAAIVDELAPNLVARNSVGHAGAAQLLLTAGDNPERLRSEAGFASLCGVSPVPASSGKTVRHRLNRGGDRAANSALHIIAIGRLRTDQRTKDYVARRIAEGHSKPAAIRALKRYIAREVFTLITQRRKEINATQIAA

SEQ ID NO: 209632 - protein, 353 aa, unidentified
MQQFTYHLGIDLHKRTSYWTLIDAERRVLFRKNMETSEAAVDASLRAIGLNPREIEAAIEPVSQWGWYGDLLEARGLRVRLVDGYKAKLIAGSKLKHDKVDSRILADLMRSDFLPEAYRAPRETRNLREFMRGRAFLVRMRTRVRNRIIGILGKHGILCPWTDLFGKGGREWLAGQSLGAPHDGEVRSLLAVFTELTLHIGSLDRRCAELVSGSEDLEILTSIPGIGPITSLMIMAEVGDFSRFRTSGKLASFAGLVASSRSSGGRDRYGNITRRGSVWLRAALVESTGKVSPKWGYLHGFYRRIKEKKGTGVARVALARKVLVLAWHLLRTRQHFNPSGSGDSVKTGSSDIS

SEQ ID NO: 209633 - protein, 387 aa, unidentified
MPQPNDLSRSLVALDHNSTIIAVVELSQSSWLVGGVLPGIERQPRKKLEPSPERLLAVLHRWRDEAIRAGCNITRIALAFEAGRDGFWLARWLAARGVEAHVIHPSSVAVSREHRRAKTDRLDTELLKRGFLGWLRGERGHCSMVRVPTLAEEDAKRPNRERECLVKERTRLVNRMKGALARLGIRNFRPTLRNAAEHLAGLYTPEGSPLPPNVAAELERDIARLGLVIGQIKQLEAARRQRLEEQPESRPHAMVRLLVRVVGIGTETADMLVNEVLSRPLRDRRAVARYAGLTGAPDESGAKRREQGLAKAGNARVRRGMIPLAWRFLRFQQNSALARWYQARTADRRAGTRKTMIVALARKLLIALWRFVTTGETLEGVVLRPAA

SEQ ID NO: 209634 - protein, 454 aa, unidentified
MRKPRVIPDEDHEVVYERVAAVDVAKASGVVCMRLPDPARPGRYANQIWDNVPAARARIAELGRELLRHQVQMVTLESTSDYWRIWYYVLESVGLAVQLVSASQAKNLKGRPKTDKLDAMWLARLTQWGMLRPSFVPPAAIRAVRDFTRARTDLVHERTRCLQRLEKLLEDAMVKITSVVSDGMKAKSAVAMVQALIAGERDPRAIADLAKGSLRRKRGALAEALDGMFDSHHGVIAQALLDQVAFLDQRITQMEAGAIAALAQVEESWGVDADGETGPGRGTGPDSRVLAAVYRLAEIPGVSVWLAIVIIAEIGLNMALFPTPAHLVSWMGLCRSAASSGTRHGKGKPKKGNSYARAAAGQAAIGAAGTATFPGERSGRIARRRGGAIAQVAVARSIMIIVWQLLADPAARYRDLGPDWHATHVNRDKKIRNHIRGLQAPGLTVTVADDEHAA

SEQ ID NO: 209635 - protein, 327 aa, unidentified
MMFIGIDISKEKIDLSWLRDQLTNKIKTKVFKNKHQDFEKIEKWLLNTTKSVASELVITLEPTGVYHEALMYFLHEQGFNIILANTGKAKKYADALNIIHKTDKSDATMLAHYGCAKHAVVDYWQPEALEVRELKALIRRLDALESNRQREANRLDANEFSNVSARVCQSIKVTIAFLDDEIKQLKSDIDNHIDNEPGLKRNRKLLESILGIGHVLSRELTYLFAAKKFNKAKEAAAYCGLIPRHNESGKLKGRTTISKLGPARIRCKLYMAAIVAGQWNKRIKRHKLTLINNGKTPMQAVCANMRKLIHICFGVIKNQEEFKLQES

SEQ ID NO: 209636 - protein, 339 aa, unidentified
MNVTAIGVDIAKNVFQVHYVDMETGEIINKPIKRANFLEFFANRPPSLIGMEACGGAHHWARKMREQGHQVRLMQARFVKAFNVGNKSDAADARAIWLAVQQPGKDVAVKTEAQQAVLAMHRMRQQLIKFRTMQMNGLRGLLTEYGEVMGKSRGALDRAVPEVLARLENRLPKMLIDSLREQWENLAAIDQKIHEIERRLKQWKKGEASVKAISEIPGVGLLTATAAVATMGEANAFKSGREFAAWLGLVPRQTGSGGKIKLHGISKRGDSYLRTLLVHGARVVHHHHGETNPWLKQMGARRPTNVVIVALANKMARQIWAVLAKDQAFQPGHINVRPA

SEQ ID NO: 209637 - protein, 370 aa, unidentified
MQALIERCCGLDVHQETVVACLLIGAAGARARKEVRTFRTVRRELEALRDWLKAAGVTHVGMESTGVYWRPVYAVLEGHVELIVGNARHIRNVPGRKTDVKDAEWIADLVRHGLIARSFVPPPPLRELRELVRYRRKLIEAQAAERNRLLRLLETANIKLASVMSDVFGVSGRAMLKALIAGSAAPEEMAALARGQLRRKRAALIEALTGGIEEHHRFLLAMQLGRIEAIEADIAALDARIGERLLPYGAEMALLMTIPGVNWLVAAVIIAEIGTDMSVFLSVHHLAAWAGVCPGSYESAGKQKSGRARKGNVHLRTILVGAAISAARTKGSYLRDKFHRLKARRGALRAALAIAHKIVNRHGIRTPFSG

SEQ ID NO: 209638 - protein, 356 aa, unidentified
MSRDIKYIGMDVHKEATVIAVLNGSGKLVMESIVETKASSILQFIHGLRGELHVTWEEGTWASWLYDLLQPQAAQVLVCDPRRNALLKEGNKSDKIDARKLADLLRTGMLRPVYHGEHGLRTLRELGRSYQTLSQDLNRVMNRIKALYRGWSIPCAGTQVYAPRYREEWLQKIEHAGVRRRAELLYQQLDGLQALRRTLRPELLAESRKHKASKLLRQIPCIGPIRAARLLALMQTPHRFRSKRQLWTYCGLGIETRDSAQYRFVRGQLQRAKKPQQIRGLNRNHNHEMKEIFKGAATRASCGVGPLRDFYVALLAKGMRPEMARLTLARKIAAIALTLWKKEERFDAEQLKLQAA

SEQ ID NO: 209639 - protein, 365 aa, unidentified
MKKIAYVGIDYHLNSLSIAVMVKGKTEFFDMIRLKNDDKIIRKYMSKLSEKFAIKACYEASSNGYSFHRKMAAWGYPCEVIAPSLIPRKPGDHRKNDFRDARDLAQNYAHGMLSIVHVPTEEEESVRSLVRCRITFKETAKRVKQQINSFLLAQDQHWSQSKWTLKHRKWLWNLRMPHAYLQQVLDEHLAHLDYLETRIKYLDEQIEQIAASAVYAPAVKKLAAMKGIKTLTAMLLIAEITDFRRFPNPSALMAFLGLIPSEDSSGDKRNDGAITSAGNKRCRSALIESVQHYARIPHISAQMKSDLSQLDAHSAGIAVKCLKRLHKRYWALILKGKLRPVAITAIARELAGFIWAMMQPQPVIA

SEQ ID NO: 209640 - protein, 418 aa, unidentified
MKAMYQCCCGLDVHKKQVVACLKKVQPSGEIHQEVRRYPTMTGDLRQMSEWLREQGCTHVAMESTGVYWRPIYNILEGGFELLVVNAQHLKAVPGRKTDVKDAQWIAQLLLYGLLKGSFVPGREQRELRELTRYRRSLVEERARVANRLQKSLESANIKLASVVSDVLGISAREMLEALVRGDSDPAAMAQLARGKMRKKIPELEQALTGEVTDHTRFLVVEQLRHVDSLDELVLSVSAEISKRMLRYAEQVRHLDTIHGVNQRTAEELIAEVGAGMGRFQSASRLASWAAIGPGNHESAGKRYSGRTRKGSPWLRSTLIEAAHGASHSKNTYLSAQYHRIAARRGKKRALVAVAHTILRVVYYMLLRGEDYRDLGSNYFDERGRQAAADRLLRRLEKLGYEVALKSPAQPASAPRAA

SEQ ID NO: 209641 - protein, 409 aa, unidentified
MDIMYERCCGLDVHKQTVVACVLLPGSGRQPAKEIRTFGTMTADLLELADWLSEKGVTHVALESTGVYWHPVWNLLEGHVELLLVNAQHIKQVPGRKTDVRDCEWIANLLRHGLLRASFVPESPQRELRQLTRYRTSLVRERAAEINRIQKTLEGANIKLGDVASDILGVSARRMLEALIGGTTDPKELADLAVHKLRNKLPQLERALAGQFGTHHRFLLAQQLVHLDGLDELIERLGSEIAERVRPVEPVVERIDAIPGFGRRTAEIVIAEIGTDLSRFPSFKHLASWVGLCPGNNESAGKRMSGKTRKGDVWLRTALIEAAHAASRSKDTYLAAHYHRIAARRGKKKAIVALAHTLLTIIYYLLTRDCDYKDLGPDYLNERDREQTERRLIQRLRGFGYTVTRETAA

SEQ ID NO: 209642 - protein, 341 aa, unidentified
MMMIGIDPHKGSHTAVVVDRDERVVDEIRVRASADQMLELREWASAYDERCWAVESARGMGYLVSQQLVAAGERVIDVPAMMASRVRVLGSGKSQKTDPNDARSVAIAALRHSGLAMVRADDHARVLGLLAKRHRDVARLKNKVACRLHALLMELTAGGLASEMTVNKATTLLEQVNVADEVTRQRVVIATELIDDMTRLETQMKASKKRIRVAVAASGTTLCDIRGIGPIGAAIILGSVGDIARFPTAGHFASYNATAPIEASSGDRRRHRLNPRGNRKLNHAIHIAAVTQLRYPSQGRVYYQKKIAEGKTTKEAIRALKRRISDVVYRRLVADARRRIS

SEQ ID NO: 209643 - protein, 344 aa, unidentified
MTITTIGLDLAKNVFQVHGVDGRGMTALRKQLRRDQVAAYFARLQPCLVGIEACGGAHYWAAKLTALGHTVKMMAPQFVKPYVKTNKNDCLDAEAICEAVARPNMRFVPVKSPEQQSVLALHTAREGFVHARSAQANQIRGLLLEFGLAIPQGMRPLYDRVPELIEDATNELPLRFRHLIDRLYRHLKELDRQVQEIEREIELWHRSNEVSRRLETIPGIGPLTASALVASAGDPRNFKNARQFAAWIGLVPHQNSSGGKTQLLGISKRGNVYLRTLLIHGGRALVQLARTRPDWSTTWLGRLVARRHHNVAAVAMANKNARRAWAMLMSGAGYEPRHVPVPNA

SEQ ID NO: 209644 - protein, 345 aa, unidentified
MSEFYEGRQFVGMDLHRRRSVLVRMSETGEHLETVRILNDREVLADVMSRAGESPEVVLEATYGWYWAADALAELGATVHLAHPLGVKAFSYRRVKNDQRDAADLADLLRMGRLPHAWIAPPETRELRELVRHRAKLVAMRSQCKAHVHAILAKGGIWVPMSDLFGVEGNLLLDNVTMPAPYKARIASLRRFIEAFDAEIDLFTGLAQRRLTHHAGYTAIQQIPGIGAVLAAVFVAEIGDVHRFPGPAQLTCWAGLTPSHHESDTTVRRGRITKQGSCLVRWAAIESVKSLPDTSHIGAIRDQVAHRRGNRNIGAVAAARRQPELVFYGLRDHHIRALHHPPRAA

SEQ ID NO: 209645 - protein, 400 aa, unidentified
MDEKQEFRGFLGIDVSKETFDACCINFKGERLFSLSTSMNRKGFEELIKRLSCLSVSQESVLVGMESTACYHVNLYSFLISLGYSVMVMNPLLISNFVKLQLRKTKTDKKDASVIAQFLLLHRDSLCQTLISSDFSELRDLSRQRESLVDQMSSIKSDVKRLLSVTFPELEQMAGVFSKSMLRLLCHYPSAISIRQLKRSQIAKILIPGSYGKQTAASVERIIKAAQGSIGTTSPAKEIILKQKASLLMQLEQHLQELTDILKELCQAKIQQDTGILTSMKGIGEKSAMNFLIEMGGDIKQFKRHQKLIAMAGLDPALYQSGKIDRKGKISKRGNRHLRRIIWLMTTKVIQFNERFKQYYLKRIKDGLPYKMAVLATAHKLIRVMFAMLMNKTLFNPMMN

SEQ ID NO: 209646 - protein, 367 aa, unidentified
MSNYVTAIGLDVHARSISACAFDPMTGEVSRARFGYDPASVAEWALGFESPKAVYESGPTGFRLCRALRALGVDRAVGAVSKMHRPAADRGRKNDRRDAEWLAGLLACRNVVEAWVPDERTEAARDLSRALEDARDDPQRARQRMSKFLLRHGLVFDETTPTGRRRSNWTEAYWRWARSIEFDGAGDAAAYEHYTDAVDRCGEAKRELERRVVEAASRPEWAPTVDALRPVKGVDVATAFLLAAEAGDFSRFPSAPSFAAWCGLAPSERSSGETESRGGITRAGNSHVRRALVEASWHVPMSTRHPKRPRPGHGVAPAASRHAAKCNRRLRDRRDAMSQAGKRPCVANCATAREMACWVWAIAPMVR

SEQ ID NO: 209647 - protein, 402 aa, unidentified
MNSVGIDVSKGKSMIAVMRPFGEVVVSPFEVRHTANELNELAGLLKSLDGETRVVMESTGNYHAPVAWLLHDAGLYVSVVNAMLVHDYGNNSLRRGKTDKKDAVKLANYGLDHWLTLPKYVPEEDTRLMLKTCYRQYQQYSKVRTMLKNNLISLLDTAFPDANRLFTSPPRADGSEKWVDFVAAFWHCECVCGLSKKAFTTQYQKWCRKHGYNFSEDKALDIYASARGHFGVMPKTDTAKLLVEQAVSQLRATSAALAALKQEMQSLAVSLPEYPVVMEMFGVGPTLGPQLIAEIGDVRRFHSKKALVAFAGIDAPPYQSGQVDVRSRNISKRGSASLRRTLFLVMGVLLQCAPMDEPVYQFMNKKRSEGKPYRVYMMASANKFLRIYYASVKAYLDSLEHG

SEQ ID NO: 209648 - protein, 338 aa, unidentified
MKKYSGIDLHSNNNVVVVIDEADRVVYRRRLPNELGKVLEALEPYREELAGVAVESTYNWYWLVDGLQAAGYKVDLANPAAMKRYDGLKHSGDDTDAVQLAHLLRLGILPTGYIYPVAERGLRDLGRRRLQLVRHRTMHVLAVENVQARQTGARMTGDRVKRLSAQEVQALGLPEDVTLGLQANVAVIGTLNEEIAKLEKHLLERLKPQPEYALLSTAPGIGRILGPIILLETGSIERFAAVGNYASYARCVDSARLSNGKKKGEGNVRNGNKYLAWAFVEAANMARRWCPEARRFHDRKRAKTNTIVATKALAHKLARACYHMLKTQQPFDMKRCFG

SEQ ID NO: 209649 - protein, 358 aa, unidentified
MADQHTPVETRVEVTGGVDTHKDTHVAAAKDGLGRVLGTQAFPTTAAGYVALLEWLQGWGLVVAVGVEGTGSYGAGLARYLTRQNVRVVEVNRPDRAKRRQKGKSDPQDAINAAAAVQSGDATAVPKAGIGVVEAIRALRTARVSAVKSRTVALNQLKSLIVTAPAALRETLTGLTSTALVTHCARLRPSSDLTDPTHATKTALRRLARRAQLLTDEITDADTELRALTTQAAPRTLARTGVGPDTAAQLLTTAGDNPDRLFSDAAFAHLCGTAPIHASSGHTTRHRLNRGGDRHANAALHRIVIVRLRYCTQTQAYLAKRTAQGLSTRDTIRCLKRYVAREIYNTIRADLNNLTNTP

SEQ ID NO: 209650 - protein, 328 aa, unidentified
MTNAATRESAPLDFVGVDIAQEALEWALHGVRDTHSASNNETGFQALLEALKDRRIGLIVIEATGGLERALAGFLLRHGLPVAVVNPRAAREFARSMGHLAKTDAIDAVALAHLAQTLAAKADQAGVAFVAPSVEVEALQAMVARRVQLLNMRTAEKNRLGGAMRVLHKSIEAVIKTLDKEIAKLERDIDAHLERHFKAQAQCFEAIKSLGPITCATLLAFMPELGTISNARAAKLAGVAPLNRDSRKERGKRHIWGGRRVVRCALHMAVLSAVRFNPVIKAFYERLIAAGKPKKVALTACSHKLLRILNAMARTGQPWNEKFHAVTP

SEQ ID NO: 209651 - protein, 366 aa, unidentified
MCPTLPLESSLAVRQEVVLGVDTHRDQNTAAVVAIDGRLCGSGEFPTTTQGYADLLAWASALGEVERAGVECTGSYGASVSRLLQSQGIEVLEVNQPDKRARRSRGKTDAVDAEAAARAVLSGRASAIAKTGDGPVEALRVLKMMRDSAVHARTKAVNQLKATMVTADPALREALSGLGAKALVRRCSTLAEPTQDGISQRATVYVLRGLSQRILALTAEANQAEAHMNELLQQHAPDLIARTGIGPDSAAALLIVAGDNHDRIRTEASFAALCGVSPVEASSGNTQRRRLNRGGDRRANAALYRIVLSRLRWDTRTQAYMTRRLAEGRTRREIVRCLKRYVAREVFALIAGSTLPVASTTQPRAA

SEQ ID NO: 209652 - protein, 387 aa, unidentified
MYFVGIDISKFKHDCAIIDELGGTITPSWSFSNDREGFSLLKEVLDGLEGEKKIGLESTGHYGQNLKLFLESNGFTFMEFNPLLVSRFVRSKSLRNTKTDSIDARSIAHYVMTVEYKPYPPSFYHLDKLKSLTRFRDSLVRQRSRQLVDLTNVLDQLFPEFKPFFKGRFSATALYILVHYQTPERIANMNARSYESLRKLSRGRFTMRDFVQLKALAKNTVGVPNDYLLDQMNILLELYSQLDSKVDELDSQIKECVQGIDPPCLSLPGIGELSVAVILSEFGDFSKFQSPSKMLSFAGLEPGYFQSGQSEFTGHMVKHGSSQLRYALMNCCLPLITNEPVFAEYYAKKRAEGKPYRVALTHVAKKLLRVIYTMQTKNIRYDPTMIR

SEQ ID NO: 209653 - protein, 341 aa, unidentified
MNQVSTVGLDLAKHIFQLHGAESAGAVVFRKKLRRGQVLAFLATLPPCTVAMEACGSAHFWGREIAKLGHTVKLIAPAYVKPFVKRQKNDMADAEAICEAAQRPTMRFVALKSANQQADAVVFRTRDLLVRQRTQTINALRGHLAEFGVIAAKGPVHTCKLIAALEDPASDLPQAARGILAVLVEELRSLDERIAVLDREIARHATENSVARRLMTIPGIGAVTAAALTALAPPAETFQRGRDFAAWLGLTPVQRSSGGKERLGRTSRMGERTLRRLLIIGASAVARWAARKGVPAGSWLGRMLARKPPMLVRVALANKMARIVWALLARGGVYRAPVAAV

SEQ ID NO: 209654 - protein, 368 aa, unidentified
MSDAITWAGLDAHKKFIQVAVRVPGGAQPKEWRIAHTVKEVQKLARKLVRMSPGEVRCCYEAGPSGFALQRRLEAAGREMLTCAVIAPTLIPKKSGDRIKTDRRDALKLCDYLRSDLLTEVRPPSEEEESVRDLCRARDAARKDLGSARHRLGKMLLRRGIVYGQGRAWTQRHRQWLNTLGWDTVDKFVFDNYLLAIEQIEARMITLVAAIEEAAQDGLYAERVGWLRCFRGIDTISAMTILAELHDFRRFESPRQLMSYLGLTPSEHSSGGEARRGGITKAGNSHVRRVLIEAAWHYRHRPKVGVRLQKRRENQPSKVIAIADKAQLRLNRRYTRLSLGLGKPPNKVVVALARELVGFLWAALQVPA

SEQ ID NO: 209655 - protein, 339 aa, unidentified
MYPFYLGIDLHLKRTYMVLINAKGEVIDKERISNKEIKDFLEEKVPRETYAVLEATRNRPFMYDLLNEHVQQVDLVHAKGVRAIANAAVKTDQIDASTLAHLARMNYIPKVYAAPQDIRDLRQILRHREWMVNQRSKAKNRIHAVLAAYNLISPVTDLFGAAVREYLHEVMEKELRLSAQQVIEDHLAMIDHLTERIQAIVKNISLSEKQNHIVNLLKSMPGVGKLIALILLAEIGDISRFHSSKALCSWAGLTPKVHSSDAVVQHGHITKEGSRYLRSSMVQAATTACRVSPKWYQVHENMAFRCGRRAARVAVARRLLTVIYFMWKKDQPYQEDYGQ

SEQ ID NO: 209656 - protein, 428 aa, unidentified
MRSIALDVHPSFCEVAIAEGGEVRSAGRVKTAPAELELFAQSLDPSDEVVLEATGPAMEVARIIEPHVARVVVANAAEVRAISHARVKSDRCDARTLARLLAADMLVSVWVPDQPTGALRRRVARRSALVRQRTRAKNEVHAALQRRLIGPPEASDLFGKRGREWLAALELPAEEQETVSSCLRQVGFLDAEIEACERELATWASTSADARRLMTIPGVDVVSAAALMSAIGDVRRFRGPRQLVGYLGLDPTSRQSGEGEARGGRISKRGNSHARHVLVEAAWKAAEAPGPLRAFWLRLQAGKGKQKATVAVARKLAVISWSMLTRGEDYAYGRPSLSRHKLRRAELLAGAPKCSTRHRGQRISATPEEREAEQALQRQAEAAYRRLIADWKASGPKKGAGATPGRASSRPSKRQAARQASEPQRPAL

SEQ ID NO: 209657 - protein, 340 aa, unidentified
MLVSVLGVDLGKNSCSAVGLDSAGKVVLRRRVSRDALAALLAKLPKCVVAMEACCGAHFVGRAAQAHGHQVRLMPPEYVRPYVKAQKNDDRDAEAIAEAATRPTMRFVPLKAEEQLDMQALHRARDRLVAERTALINQLRALLLERGVVLPQRRRALLTWLDAPVAGEPDPLSPRLRLLVADMRAEWAELDRRIGVFDDEFAACARTDEAARRVATIPGIGPVNATALVAAIGDATAFARARDLAAWLGLVPKQATTGGKPKLLGITKRGSRYLRKNLIHGARAVMPRLAATETRLGCWLRALLARAHKNTVVVALANKLARIVWAVLARGDCYQTAAKG

SEQ ID NO: 209658 - protein, 397 aa, unidentified
MIYVGIDVAKNKHDCCILDSEGKIASAFTFENNKSGYEKLIAEIAKFSKSKSYADVKIGLESTGCYSLNLANYLNHKRLSVKVFNPLLVNLRRKAESLRKTKTDKSDCKFLASMLFSEESEPYLQAVLPISELKILTRNRSRLIHMRSKLKQSISRLVDILFPELPSLVYSLHQKSSYALLLEYPTAKSIASAHIVKLTNLLSSNSKGKYGRARALQIRELASNSIGFDSVATGFELRQAIRLIQNLDGEIAVLDDEIKAIMDGLNSPILSIPGIGYTLGAIILSEIGDIRNFSNPAKLLKFAGLEPSVYESGRYRASDTPMVKRGSPYLRWALLQAARLIAMHNPAFRSYQDKKRAEGKHFFVVQSHLAKKLVRVLHKLLSTDTTFDAEALHQVAA

SEQ ID NO: 209659 - protein, 378 aa, unidentified
MDVIYPRCAGLDVHAETIVACALWEEDGHIQKDIQTFSTFSKGLGDLLEWLEEHGVTHVAMESTGVYWKPVFAFLEGYVDLTLANPQRIKNVPGRKTDVSDAEWIAKLLRHGLVEKSFVPPADIRELRDFTRLRKKWVGQLTSEKNRIQKVLESSNVKLGSVLSDLFGVSGKDILARLLEKGYVDKDELDQCLRGRLKKKKQAVYDSLLGTLAEHELRLLRLLWKHVEELEQLIEEVDQHIDRLLEPYREEVELLMTMPGVKKQTAAVIIAEMGTDMSVFETPERAASWTGLSPGNHESAGKRKSTRTTKGNPHLRSALCEAAWSAARSKTHPLSRKFWSLAARCGKKKALIAIARRMLVIIFCMISRKEPFRQPQLI

SEQ ID NO: 209660 - protein, 413 aa, unidentified
MELSRWVGRAIGLDVHRDFCVVAICEEGEVRTGARVPSTPEGLMVLAESLLASDRVALEVSGGEWAIVALLDPHLAQTVVVSPGDTGIAQARAKTDRLDARTLARLLWAGELEGVWAPDELTRLLRRRLARREQLVRARSRAKNEIHAVLMRCLVGKPPVSDLFGKNGRRWLRRLELPVEEAETVEACMRHIEFLDAEIADVERVVARYALSCSDARRLMSVPGVNVICAATFLAAVGDISRFRTSRQLVGYLGLDPKVRQSGNSPAKSGRISKRGAGSVRWALVEAAASVIRQPGPMHAYYQRLRARRGHQIAVVAVARKLAVLSWCLLTRHEQYAHQQPSLTAKKMRLLEIRAGAPTRKGQRTGTFATREKMRQAEKALALQAEASYVRSVRDWQAAAPKKVGASVTPGHA

SEQ ID NO: 209661 - protein, 307 aa, unidentified
MNTPQIAALDIAGSEHVGYYCGRLFNLVNDPKSIKAWLRTLTPDTIVAMESTGGHGVLLAEMAVQRGLTVYVLSPRQVSCYRRSLGRRVKSDRADAKLIHDHVASNLEHLRPYVPWAEPWKSLRNLVRERCKLMNSMGAMRQSLRARGRSKQEIAAVLDSVRAHTDELTKQIRKVVMQSEEGRALLQIPGVGPIVAGAALAVLKQIPFKHKDAFVAWIGNDLVVDESGKRKNVRRISSWGDKWLRSAFFNGGRSAIRTALWKDYYQAQLEKGLTKTGAICAVARKLQRKVYGVYHEANAIALTRVDM

SEQ ID NO: 209662 - protein, 354 aa, unidentified
MRACEPSQTDEEDGSVNEITTLAIDLAKNVFQLHGVDSRGACQLRKRLRRGQLLGFVAQRPPCLVAMEACASAHYWGREFIKLGHRVKLIPPQYVKPFVRGNKTDSNDAEGICEAALRPKMPSVAVKSVEQQAVLCEHRIRQLLESQRKQLSNHLRGLLAEFGIVIPKSSAVLKKGLAEAIERAPARLRPVLNEAHQRLRDLQRQCQEQTRRIEQLAADTPLCQRFMKERGVGPIIASAYAATVGSPRHYHNGRQVSASLGLVPKQYSSGEEPQLLGISKRGDKYLRTLLIHGARSVVSRIDGRTDPLSVWLQGVVTRRGKNKAAVALANKTARRLWAIWRDEAAELAPLVAMS

SEQ ID NO: 209663 - protein, 356 aa, unidentified
MNKRSKLNFSGQPIYIGLDVHKKSWSVSIFTQHGEYKTFSQVPEAETLSQYLHHHFPGAQYRSVYEAGYCGFWIHDQLKDQGIDNIVVNPADIPTQDKERRRKRDRVDCRKLARGLRGDEIQGIYTPARWKLEDRSLIRTRLSMGRKQARCKNQIKSMLLFYGVTIPERREMGHWSRPFIRWIEGIRMERASGELALQIHVEELCHMRQIIAKLNRAILALARTEPYRSWVSLLKTIPGIGTLTAMILLTELYEITRFPSVDELCSYVGLIPDTRSTGEKEHVGGVTQRHHSQLRWLLIEASWMAVRKDPVMMEAFQEYCKRMRKTKAIIKIARKLLNRIRYVLKNQAEYVTGVIE

SEQ ID NO: 209664 - protein, 375 aa, unidentified
MGHHSEAFIGIDTAKLRNAVAIAEAGRKGEVRYLGEVDTSEVATRKLVARVAAKYRKLTFCYEAGPTGYGLQRLIESLGHTCLVVAPSLIPRKAGDRVKTNRRDAEGLARLLRAGELTSVWVPDARHEAMRELTRARDAARQDLTRKRQQVSSMMLRLGKIYPGIKTWNARHRSWLANLKLEHREQRFVIEEMLQAERQAGERIGRLEQAIREAVAGWSLAPIVPALMAMRGIDLVAAVTILAEVGDLSRFESPRQLMAYLGLVPSERSTGESVRRGGITKAGNGRARRVLVEAAWSYRHPPRVGVEKQVLVPAAPEAAREIAWKAQVRLTKRFRTLSRKGKKSTVVATAIARELAAFIWAIAREIPGARPARTA

SEQ ID NO: 209665 - protein, 327 aa, unidentified
MNSSFLGIDIAKDKFDVHLIRDHETSSGQFDNNSQGFKQLQKWLKKRRVDQLHACMEATGSYGEALTYFLHEQGYQVSVVNPKIIKHYGLSKMQRNKTDKLDARLIAQYCQKEAPRLWQPPSEAERTLQALTRRLDALMADRTREKNRLTAKTHPDAVKQSIEETIAFYTQQIEKLEAQIQDHIDHHPNELKEKQQLLTSIPGIGDKTAAILLAELPDIALFQSAKQVTAFAGLTPKQLQSGKMNRTGGIYKLGSRRLRTALYFPALSGKIHNPILRQMADRLAERGLTGMSAVAALMRKLLQLVYGVLKSERPFDPDYVVNVQVTA

SEQ ID NO: 209666 - protein, 329 aa, unidentified
MKKLFVGIDVSKDVFDFCALNENGDIETSKEVFENSKKGILEFCKSLKRWDDYDVWICLEHTGHYGYLLASEFTERTIKYTLLNPLEIKNSIGMTRGKNDAIDAYRIAYYGFTHVRKLKRHIIPINDIQKLKTLMSMRDGYVKINVQLKNSFKALEIIHQSINIRPQLNDHKLLIKRQEKSIDKVEMQIMEIINNNEELKKTFKKVNTVIGVGMLTAVKCIIETDNFTKFNDGRKFSCHCGLAPFDYQSGSSVRGKTRTSPLSNKGLKSILFKAAATAIQHDPQLKNYYSRKVGEGKHKLSVLNAVANKIVLRIFAVAYRDEPFVKLAA

SEQ ID NO: 209667 - protein, 394 aa, unidentified
MTAAYTGNVSTPGGVLHLAFELGWTHWKLAFTIVYGQKPGQRTIAARDLAALDQEIAKAKKRFQLADAAPVVSCYEAGRDGFWLHRYLTTRGITNVIVDSASIEVNRRKRRVKSDKLDADKLVNMLMRYRAGERKVWSVVWVPSVADEDQRQLHRELQELKDDQTRHNNRIKGLLASQGLALEVVDELLPSWLGAARLWDGTALGVDLQRRLVREYERWQFVHRQVLELTRERRRRMLCDATAHVDKVRRLLGLAGIGVNGAWLLVYEFFAWRKLQNRKQAGALVGLTGTPYQSGDRACEQGISKAGSKRMRKMLVELAWCWLRWQPESVLSQWYARRFGTGQGAARKIGIVAVARKLVIALWKYLERGEIPAGAKLVAWRSKLIRHKVKKPAA

SEQ ID NO: 209668 - protein, 325 aa, unidentified
MTYIGIDISKATFVAAFPVERGYRTETFQNDAKGIRRFISKLSSDTHHCVMEATGNYCFLLLYLLDKAGIRASLVNPKKIKNYARVMLSVTKTDAKDACLIADFGERFKPEPYKFPSEQIMLLKQKKTVIRQLQKQLTATKNLHTSLEPLPVKDKKCIQSLKQTTAFLEKQIKYMQQEMEEVVSEVFARQLKALTSIKGIGVTLASALIIATGGFTYFDNAKQLSRFAGICPTIERSGTSINIRGHINRNGDENLRSMLYVAAWSASRHNKACRECYQRLRSNGKSGKLAMIAVANKLIRQAFAVVTSNSSYIDGYISTKPNADI

SEQ ID NO: 209669 - protein, 344 aa, unidentified
MDHFAGLDVSVKETSVCIVDDMGRIVKEVKVASEPEALLKVLGNPIYRFKRIGLEAGPLSQWLFSGLAEAGLAVVCVETRHMQAALKAQINKTDRNDARGIAQMMRVGLYRPVHVKTLRSQKLRMLLTHRKLLQSKAIAIENDLRGTLRNFGLKVGMVGKVRFEARIQELVENIPDMAVLVESLLIVRRALREQIVVLHRRLLAIVRDDEVCRRLMTIPGVGPVVALTYRATVDVPARFRKSKSVGAVFGLTCARYQSGEIDWSGKISRCGDEMMRAMLYEAAQNMLRSKKWSWLKAWAMQIARRRGMKKAIVALARRLAVIMHRIWIDGTEFRWTREQAAAAA

SEQ ID NO: 209670 - protein, 396 aa, unidentified
MLYLGIDIGKNNHVASLINEKGKIIFKAFSFSNTTDGGESLIAKLNNFITSVNDVEIGMEATGHYWLSIYSFLAQKGFIIHVVNPIQTDGWRKGIEIRKRKTDIIDSVLIADLIRYGDFLETSLADENTMSLRNLSRFRNYLISSIGDLKRKTICVLDQVFPEYQFVFSDVFGQTSKEILLHFSTPSDFESISSEKLDKVLSEITMKKFATNKIKQLSSVAKQSFGISFCLDSFTLQLKLLIEQINFIENQVKDVEEQIGILLGKINSPITTIPGIGNVTAATILGEIGDISKFSNPSKLVAYAGIDASVSQSGEYQSTNNKMSKRGSPYLRKALFSAALVASNCDPVFKAFYQKKRAEGKHHLTAIGAVARKLCYTIHAILKNNCPYEVRLPNNE

SEQ ID NO: 209671 - protein, 347 aa, unidentified
MNFYTNTHSYYCGIDLHARLLYVCIIDDKGEVLVHKKIQDSPEQLLALLSPYLGNIVLGVECMHCWYWISDLCRQHDIDFILGHALYMKAIHGGKTKNDKVDSFKIAKLIRGGNFPLAYNYPNELRATRDLLRRRSKLVRFGADLKAHVSNTVSQYNHPAHSLNLRYPKSRAQMANVFDDISVQRNIDIDLNIVGHIETELRQVEWFIEKQAKQHNAKDYYLLKSIAGVGQILALTILYEIGNISRFDSVQKFASYSRLVKCKAESAGKTYGTQGNKIGNAHLKWAFSEMAVLYLRGNDKAKAYLNKLQKRMSKAKALSALAHKLGRCVYFMLKNQKVFDESRFLTG

SEQ ID NO: 209672 - protein, 353 aa, unidentified
MIAIGVDAHKTIHVAVAVDDVGQEISTWSGPNHAAGWRSMFMWAASLDEQRLWGIEGSGGYGRGLAQQLVAGEELVYEVNARWTALGRRGSRKAGKTDRLDARAVALFVRQETSSLPQVLPEDNTAILGLLATEREAGLAEATRLRNQIHALLLQVEPEYRSRLANLRSRASLDTLEAYTPAEKGPVHEYRAASIRRLARRLRLVFGQVDELAEQIEELAAANFVPLTRLCGVNLLTAGALAGILGPGKRFSSDAQLAAYAGAAPLEASSAGAVRHRLNRGGNRRLNAVLYRIALTQAHHLPEARAYLDRRVAEGKTRREARRALTRYIVRAVWRLWQECTPASASVSLGEAA

SEQ ID NO: 209673 - protein, 419 aa, unidentified
MRVHRNCCGLDVHKKMIAACLIREDAEGNSVTEKRLFGSMTRELHALAQWLCAAQVTAVAMEATGVYWMPVWNVLEPYGLELLLINPEHYKAVRGMKTDLKDGTRIAELLQDGRLEGSYVPPVAIRVLRDLTRYRTKLVQYQSSIANRIQKLLEQGNIKLASVVSDALGVSAMAMLRALAQGETDAARMADMAKRQLRKKIPELQLALEGCLLPHHRWLLSEMIEDLDHVGAKIARIEETIEQQMRPFQHAVNRWLTVPGIKHRVAWTLVAEVGPTVEAFPSAADMVSWAGVCPGNNQTAGKRKSGTTRAGNPWLRRALCEAAWAASRSKGTYLQAQFRRLAALRGPKRALIAVACSILTAGYYMLQRGTTYQELGPDHFDKRNSLRATRRLVKRLEALGHRVILEPRFTAFPLQASSS

SEQ ID NO: 209674 - protein, 355 aa, unidentified
MNKINSNFAGQTIFVGMDVHKSSWNLGIHLNDMFVKNVHQKPNPSTMANYLKQHYPGANYKAAYEAGKFGFWIQRQLTVLGIECLVVNPADIPKSQKDSLQKTDPRDARNLALRLQSGVLHGIHIPDEQQEVDRLFFRHRKRIWKDLCRCKNRIKGMLAFSGIDIPEQYDNASWSHNFINWLKALDCKQQSRRRALDYMIMQMEYLRKELLTISNEIRKMMRELRYKTNYYLLRTIPGIGPLTAASILVEIGDVKRFETFYHLNSFVGLLPMEHSSGQSENKLSLTVRKHRQLRSDLVESAWTARRTDPAMALYFQEQIKRKDSKIVIIKIARKLLNRIRFVLINQQPYEFGIVK

SEQ ID NO: 209675 - protein, 276 aa, unidentified
MTIHTLGIDIAKNVFQLHGVSQTGAVVLKRRVMRDSLMQVIAQIAPCTIAIEACTGAFYWQRRLEDYGHTVKIISPQYVKPFVRRQKNDGNDAEAICTAARQPHMRFVPKKTLEQQDIQTLHRARQRLVNHRTALVSQIRGMLLDRGIAIGVSITRARRALPEILSGQQPELTELAREVISELYDLFQDLDRRIRAFDQRIERVFRASEPCQRIARIKGVGPKTATAMVAAIGDGSEFQNGRHLAAWLGLVPRQHSSGERRVLMGISKRGSQPLRP

SEQ ID NO: 209676 - protein, 325 aa, unidentified
MSRTFKSSVKVNVALDVSKSKLDVHVGDISLRTFPNNTRGLSTLKGILSRYNVSLVLLESTGGYESLAVSYLQACGYDVCVINPRHARDFARAMGRMAKTDKIDAEMLCRFADIIDSRPDRARFVKPLTDERREYLNALVRRRRQLVELKITEKQHKSAPAISSFCVSDINEVIDYLNSRISDIDREIDNHVKSCFSDVSDILISFKGVGSSVVSAIVGELPELGKVNRRQISALVGVAPYNRDSGNMRGRRSVSGGRSGVRNILFMSALSAIRFNPVIKSFYTRLVNAGKPKKVAIVACMRRIVCILNAMLRDGTRFNQEFCHV

SEQ ID NO: 209677 - protein, 422 aa, unidentified
MPVVQTTQSSIVLVAIDIAKLRHEVLIEAPGWKSRKRLVLPNTAVEFRRFADYLHGLKHAVRVGFEATGNYHRPLAHFLMGEGFHLELVPSLAVARTREAMHNSWDKNDPKDAQVLLHLLRTGLTQHYHDPLVNQIHDFQELSLTYAQVSLEKTRMQHRLLTHYLPLYFPEIERYYHASRSQWLLELLRAFPTPALITSLAMKDFVEQAWPIAGRKISKQRLLEDIYRTSQSSIGLPVEQDSEAVAMFRTVLDEMIHLCKLRQQLEQRAELHLKDNADFLRLQKIPGIGPILALTILAEAGDLRRFGHHRQFLKFCGLDLSTQQSGQFRGTTKLSKYGNARLRCAFWMAATIAVRQTENSFRDKFERYLRRDPASVDRKRMAYVAVAAKMARVTYGIIKSGTDYRCFHEAAAPSGRAASVGP

SEQ ID NO: 209678 - protein, 387 aa, unidentified
MLCLKKKDISSENFNLVITKSQNQSFKLMSTKIKQLDFSGQKIYVGIDVHRKHFTVSIQGEELFYKTFNQPPKAEILTDYLKRHYPGASYLAAYEAGFSGFWLHEELEKQGIKCIVVNACDIPTTDREKKQKRDPLDSRKISRSLKNGELQALHVPEKWNQEDRGLLRIREKIVGDQTRCRNRIKAQLYFYGIEYPEQFLHSGTHWSQRFMDWLDQLKFGQESGTTTLKLLLKEATGLRELLLESNKSILKLSQQERYRENVKLLLSVPGVGRLTAMILLTELGDITRFRDLDHLCAYLGLMPNVYASGDKEIVGDMTKRGNKHLRSSIIESSWVAIRNDPALSLKYHQLCGRMDGNKAIIRIARKLLNRIRYVLLNKEEYKFALAA

SEQ ID NO: 209679 - protein, 412 aa, unidentified
MAITCGIDWAENYHDVALVDEAGKLVAKRHISDDRQGYRHLLELLADAGDSAGEPIPVAVETARGLLISCLRTTGRKVYSINPMAVARYRERHTVARAKSDHADAMVLANILRTAAAAHRPLPADSELAQVIAVLARAQQDAAWTRGQLSNQLRSHLKQYFPAALAAFQVKGVGLDSREARAVLAVAPDPAAAARLSAARLGSVLRKAGRQRNIEAWVMRLRTIFAGEYLHQPPAVEQAMGRQALALVLQLDAACRAADDLAEAAAAAFAEHPDAAILSSFPGIGPITGARVLAEIGDDRTRFRDARGLKSYAGSAPVTIASGKSRIVRNRKVKNQRLAAAGYVWIFGALPSPQVKDLYDRRRAAGDRHAAAMRNVFNRLLGCLHHCLQTGQAFDPAKAFPLPESHSEPAAA

SEQ ID NO: 209680 - protein, 343 aa, unidentified
MQTVTTVGLDIAKSVFQVHGVDAAGQVVIRRQLKRRYVLAFFQKFPPCLIGIEACASSHHWSRELQALGHTVRLMPPAYVKPYVKRQKNDATDAEAICEAVTRANMRFVPTKTPEQQSGLVLHRTRHLFIRQQTSVINAIRAHLAEFGIVAPVGRKGVEELLHVVADPTDNRIPAIARVCLAAFGAQLRRFKEQILEFDRLITAWHRSNEMSMRLDEAPGVGPVLATAVVATVADPKAFRSGRNFSAWIGLVPKQHSSGGKDRLGSITKQGDRYLRGLFVAGALAVIRYAKIHGTKHRPWLTALLARRPTKVAAIALANKIARMVWAMMAKGERYKEPVALAA

SEQ ID NO: 209681 - protein, 391 aa, unidentified
MYSDGSKHSSFSVPNNRNGAKIIVDRVTSVLLLQDIPQVVIGMEATSVYGDNLMRFLRESGSLGRFERSLHMLNPKQVKKFRDAYSDLPKNDHVDSYVIADHLRFGRINKEVYMDDYKYQALKMYTRARHQLVQELTREKQRFLNTVFISFSGLTQEKIFSNKFGATSMALIEEFSSLDELAYMSTDELVDYIRKKGKNHFENPEEIAEAVQRAAKNSYRPPQVIADAAKQMLAISMNTIRLLQKQIKEYDKAIEKMLEAFPQTLTSVKGIGNIYAAGIIAEIGDINRFPSQASLAKYAGLVWTQHQSSDFEAEDKRMIQGGNHHLKYYLCEAANALRRCDPEFKRFYALKYKEANKHNHKRALALTARKLVRLVYTLLKTNRLYIPPEEY

SEQ ID NO: 209682 - protein, 347 aa, unidentified
MRFYTTQHPFYCGIDLHARTMYVCILDQSGEIVLHRNMKTDPETFLKAIAPYREGTVVAVECMFTWYWLADLCADAGIPFVLGHALYMKAIHGGKAKNDKIDAHKIAVLLRGGMLPQAYVYPAPMRATRDLLRRRMHLAHKRAELLAHVQNTNSQYNLPAIGKKIAYKANRDGVAERFADPAVQKSIEVDLALITYYDELLGDVERTIVNTAKHHDANTLYLLQTVPGIGKILSLVLLYEIHDITRFPRVQDFLSYCRLVKCAKESAGKRLGTSGAKIGNAHLKWAFSEAAVLFLRDHPAAQKYLARLERKHAKGKALTVLAQKLARAVYYMLQHQGAFEREKFFQR

SEQ ID NO: 209683 - protein, 338 aa, unidentified
MAKARTLVGLDVHATKIVAAVLDGETGELEWFTLGGDVGQAAGLCAGLPRPVRAAYEAGPTGYTLARELARRGVDCVVAAPSKIPRAAGDRIKTDRRDAEHLVRLLLAGKLHPVRVPGAEEEALRDLVRARDTVRADLMRCRHRLSKLLLRHGHRFDDGPTWNQRHRDWLAELVLPHAAAQATLSDAIGAIDALVHRRDQLERGIVALLPESAWASQVGRLRCLRGVDTLTAAGLCAEIGDFERFARAEQLMSYVGLVPSEATTGQQRRLGAITKTGSGHARRLLVEAAWHYRKHPRIAKALTDRQTASPPRRSRSPGQPSSACTAPGHGSSSAPSGA

SEQ ID NO: 209684 - protein, 426 aa, unidentified
MGKRMYRSVPVKRVDVERVAREAGGKVIVAIDVAKTKQFVGFGGVDGEMLVVGRWSHPEETLEFFSICEAIRNRGLVVEAAMEPSGTYGDPLRAGLLERGIDTYRVSGKRVKDASEFWDGVPSQHDVKSVHIIARLQAQGLSKRWPLRDEAQRDMAAARQDLDDASSDHMRLSNQVDALLGRHWPELSQSLSFGTATLVAVLAEIGGPAEVAGQPEKAKALMRRVGRSFLAEETISAVVESAKDTLGLEMSSGEFGRLRRLAVKAQRARAECRKAEHRIRELADEQVPQEALKMVGPAATTALIAHNVTPSKCDSAGALLKGLGLNLREKSSGKHEGILRITKRGPGIPRQLLYMAALRLINTDPIVRAWYTAKRRRDGGGRNAPKAIVAVERKLVLALWHVWRKDEPFDARRLFDVSRLDVREAA

SEQ ID NO: 209685 - protein, 341 aa, unidentified
METQRHIGIDLHRNQFTCCMRLENGRNYLTEWKLEELPRFVKKLRPNDAIAVEVTGNTRLFRDAVAPHVARVVAVDPNQFKVISHSVKKTDSNDARNLALYLEKDLLPEVRMKDKAEAQLASLTQTRDTLVKLRTALKNKINNILSAHGINLQKEALTSEKQLHEVLAMKFDAMVKIELEVIVEEIRSLNQKVAKLEKTIGDEGRKLKGHKNLTSIKGIGPLTGSILLSVIGDINDFADEGKLAAYFGIVPRVSRSNETDHSGRITKRGSKLGRTALVQCALVAQRYSPYLKRYYEKIKARRGTGKAIIALARKLLGIIYRTLKNNWVFEDFANFVLAEAA

SEQ ID NO: 209686 - protein, 440 aa, unidentified
MSKLLVVDPRAAFVDVGSERMHVSVGGERPEVFGAVTLQLYALRDWLLAQEVRSVAMEATGVYWLPLYAVLEAAGLEVIMVNGRHMRNVPGRKTDMSDAQWGSTLHMHGLLRAGFVPPAHIRRLQDYMRLRAEHITAAGAHVQHMHKAFERMNIKLHDELSDLTGVSGMAVVRAILDGERDPARLLALCHKQVQRRKGEGIIESLRGTWADEHLFALRQAVQSWDHYQSQIKECDRRIELLLQEYDADDAEPPAASNGNRRKAPGKNAPDIPQLREILRHICGGHDLTTLPAHTEYSVLQLVSEVGTDLTKWNTEKHFTSWLNLAPGTHQSGKRKRPVKRKRNRAGRLFCVIARSLAKSKDIALGGFYRRIAGRRGGLVANVALARKLATLFWRVMVKGLDYVEHGLQDYEAKVLQGKQRALERLAKQLGVTIVPATATP

SEQ ID NO: 209687 - protein, 346 aa, unidentified
MYYAGIDIHKRYQTLCVLDSSGKVVMEHRRLSTEGLLAVLDELDRPISVALEATLHWAWLHDRLSERGCTVEVAHPADVKLISKARCKTDPIDARKLADLLRSDLLPTIWVPDAVTRANRKLLRGYAFQVRTRTRFKNRIHAYLAELNLTSPKTDLFGKAGRQWLESLELPTEVGYQVEVLIELLDALEVRIRRTSKRITERVELTPEAQLLKTVPGIGDKTAMLMWAEIGDIERFATAHQLTSFAGLVPTTRSSGGRTTHGSLPRTGSPWLRWALVETTQTLKMKPGPVRTHFTRLARAKGNSKATVAAARKLCNYLYWMLKDNVTYDEWLKRRSHAEVLEVRPR

SEQ ID NO: 209688 - protein, 369 aa, unidentified
MNECITYIGLDVHKETIAVALAEGSRRGEVREYGQISNTPAALTRLSIKLSRPGSVLRFCYEAGPCGYGIQRQLAAAGHDCVVVAPSLIPRKPGDRIKTDRRDAINLAGLHRAGALTAVWVPDPAHEAVRDLVRARLAAVRSLRQARQQLSGFLLRHGRHYSRPAWTLMHRRWLAGLRFEQPAHHIVLEDCIATIEAATARRDRLTAQIEAMLADWALAPVVHALQSLRGIALVSAATVIAELGDITRFANPRQLMAYLGLVPSEHSSGGTRRQGGVTKAGNSTARRMLIEAAWSYRFPARISREQLLRQEALPKPIRDTAWKAQVRLCGRYRKLSRAGKPATTVTTAIARELAGFVWAIACQLPRPTN

SEQ ID NO: 209689 - protein, 318 aa, unidentified
MQVIYERCCGLDVHKRTITACVLKWLGGDWKKEIRQFGTMTHDLLALSDWLVREGCTHVAMESTGVYWKPVYNILEGQFELLVVNAQHLKAVPGRKTDVRDAEWIAELLAHGLLRGSFVPPVRVRELRELTRYRTSLVCDCARTINRLQKVLEGANLKLASVVSDIRGVSARLMLEALVAGERDSSQLANLAKGRLKEKHAQLVEALSCRLQPHQSFLIAEHLAQIDYLEGAIERLSRQIEEKLRPFEQEMAWLDTIPGVNRRTAEVLWAETGGDMARFASARHLASWAGGCVPETTSRQLSGVPAARAKAVLGCATA

SEQ ID NO: 209690 - protein, 456 aa, unidentified
MSKRRGKAKRVQKASNQEPENLPVLNRDAAAIDIGSEQHCVAVPPGRDTESVRSFGAFTIDLHAMAHWLKQCGIKSVVMESTGVYWIAPFQVLEQYGLEVLLIDARLAKNLPGRKSDVLDCQWHQQLHTFGLLRGCFLPVAEIMPLRSYLRLRDELVKASTQAVQHIQKALFEMNVQLANVISDITGETGLAIIEAILAGECDGKKLAELKHRRIVASKETIAKSLEGNWRPELLFALQTALDRYKFYQQQLAQCDDQIAQALAQLPTRELKVQTEPEKKTETSVRGQKLTPLEAELKRIAGVDLTSIDGIGEQIAQIILSELGPDLERSFQSEKHFSSYLGLCPGTKISGGKVLKRRSRKVKHRVATALRLAARSLPSSDSALGANFRRLKARLGAPKAITAMANKLAKLVYRLLVYGKDYFDRGSQMYEQKFRLQQIRRLQKQAKMLNLKLVPA

SEQ ID NO: 209691 - protein, 435 aa, unidentified
MPVMRADAAGIDVGATELFVAVPVDRDAEPVRSFPTFTQDLYALAAWLQRCGIKTVAMESTSVYWIPVFQILEARGFEVYLVNARHVKNVPGRKTDVSDCQWLQFLHSVGLLRASFRPEQAVCSVRSLLRHRESLVQRAGTHVHHMQKALDQMNLRLHHVISDITGVTGLAIVDAVLAGERDPMVLAKLRHQRIKATEETIAKSLVGDYRAEHIFTLRQSLFAYRSYEKLIADCGGEIQRALEEIDSKNDAPPTEGENANAEKEPFQLSQELERILGVDLTEVPGLGPLNIQILIGEIGPDLTKFPNASAFASWLGLCPANEVSGGAILRTRTRKVNSRAAKLLRLAAQTLYRSETALGHFYRRMRAKLGGPKAVTATAHKLSRIIYHLITTGQSYDETVFAQQQARYRKYQEAKLHSKAREFGFQLIPLTANPE

SEQ ID NO: 209692 - protein, 331 aa, unidentified
MNVKETVGIDVGKITNEVFIHIAKKSKSFNNTEKGITSMVKWVLASTEYSKEEILFVFEHTGLYSYILAAHLTEQGYLYTMLPGLEIKRSMGIVRGKDDKIDAKKIALYAYRRKDEIKTYQLPSDNIKEIRSLISLRERLVKQRSGYKASLGESKIFLKRKGNSTLFSVQERMLKELTKQIDKVEKKITDIVNKDENLKRLYKLITSIKGVGEQTALLMIGLTDGFTRFKTWRQFATYCGIAPFPNTSGINIRGKTKVSNLANKRMKTLLDLCAKCSIQHNNEMKLYYERRLSEGKSKMSTINIIRNKLLSRIFAVVNRGTPYVDTLAYCS

SEQ ID NO: 209693 - protein, 368 aa, unidentified
MGESEFPNTKTGYLKLTKWVKNTSELGRSFDSSLVLFCGEHTGTCSIGLCEYLYAKGMKIWLESALKIKYGSGLKRIKDDKADAEMIAYYAKRFYEPGSCALFEPDSADLKTLRTLYQFRNRVVCDRVAIGNRISSGAFDCSTLVRNRMVKHHKEAQKDEKDIEKEMVKLMETSEELASNYQILISFKGIGPITAAALIIYTSNFKKFDNPRKFACYCGIAPFGKQSGTSINTKPHVSRFAHIGIKAAMVQACKSAMQHNAVIKAYAQRLYAKGKHEGIVMNNVKNKVMHIIFKMIQTQTLWEQEYQQKHMKECKAIPGKNGIGATEAAPIINATLKTSSSVVECTFLEEHSFQKNCKKTSSFSCVET

SEQ ID NO: 209694 - protein, 329 aa, unidentified
MSDTYSFLGIDIAKATFEAVLQVGPRQNSRGFDNDPAGFRALSRWLDKNGAGRVWAVQEATGRYGEALAHYLSQQGHAVSVVNPARIKAYGASKLRRAKTDRLDAALILDFGRTQRPALWTPPTAEQQELCALVRRVADVQHMHQQERNRLTAGSHPPIVQASLQAILAVLEAQIVALQKAIEAHLQAHPALRHTCQLLRSIPGIGLLTAVRLMVELPNIHAFDNPRQLVAHAGLAPSVCQSGTSVYGRGHTSRKGNAVLRAQLYMPALVALRHNPVIQAMQQRLQRAGKPKMVIVVAAMRKLLHLAFGVLKSGRPFDPAFALSPALGT

SEQ ID NO: 209695 - protein, 329 aa, unidentified
MLNEEAEVVERGKLKTTPAALQPWIEALAAGTRVVLETGTHSSWISRLIEQAGQEALVAQPRKIPQIYACKRKNDRRDAEKLARTGRLDPNSMGPIRHRSAEQQADLAVIQARDALVRARTQLINTVRGLVKSTGERLTGCSARSFARQAEEQIPQRLRAALLPLLSQIAALSEQIERYDVHVEQLAQRKYPETELLRQVSGVGPVTSLAFVLTVADRWRFRHSRDVGPFLGLVPGQDESGESSPQLGISKAGNGYLRRLLIGSANYILGPFGPDCELRRWGMKLSERGGKNGRQRAKVAVARRLAVLLHKLWVSGEVYEPLPEKRAAA

SEQ ID NO: 209696 - protein, 314 aa, unidentified
MAMHATRPVIGIDTAKEELVIQHDDEKRHLAVDNNPAAIRQWLAGLPKGCDIAIEATSTYHMEITERAHAKGHHVYVVDGYRLKNYREGVGGRAKTDLTDAQLLARYLRKEKDELRRWMPPPKAYRTLQSLLRRRAALVKARTALRQSLSAEPLLKTALATLLKQIDRIDHLIQKRLREAVHAAGLRDQVQRCQAIDGIGELTATALVMAFLRGDFRNSDAFVAFLGLDVRVRDSGKLKGKRRLTKQGDTEVRRLLHCSAMSGARHPTWKAFYQRYRDRGLKTTQALVILARKLARVAFALMKHQENYCAPRLS

SEQ ID NO: 209697 - protein, 470 aa, unidentified
MPKQRKQKTPGKLKVAPLENLQPVNLQAAGLDIGASEIYAAITPDGSNESVRMFPTFTVDLYALAEWLAHCGVTSVAMESTGVYWIPVYEILESKGFTVHLVNARHVHQTGSPKTDVLDCQRIQQLHSYGLLRGSFHPSEDIRAIRALVRHRENLLQSRATHIQHMQKALHLMNVQLTNVLSDITGVTGMNIIRAILAGRHDPLDLARFRDPRCAKSEEEIVKSLQGNYRHEHLFALRQAVELYDFYTLQMTACDREIEQLYAAMQAQVDPEQTPLPPAKRSGATSKNSPDYDLRTALYRTAGVDLTAIDGLNVLSVQTILSEIGVDMTRWPTSKHFCTWLGLAPNNEISGGKRLRTDTKPVKSRANLAFRQAAQALANSKSALGSYYRKMRARNGPPLANVATAHKLARIVYAMLKTKKPYLPASADAYEAAQQAHQLRNLEHKARQFGLALVPSSPAIPIAESKAIAT

SEQ ID NO: 209698 - protein, 350 aa, unidentified
MKKGTTIGMDVGDKTHEVCVLDEAGVVKVRRSIVNTKAALVKFFKEYEGALVALEVGTHSPWIARELEALGCEVLVGNARKLRAIWAAQNKSDVRDAEMLARIARVDRALLYPVHHRGIEAQQDLAVLKARDALVAARSALVNHVRSTVKTVGCRIPKCSTDSFARRARESLPEGWEPALLPVLEQIEALTTRIRVYDQQIPELIEQRHPEAKRLSQVPGVGPVTSLGFVLSLEEPGRFKKSRTVGAFLGLTAKRDQSGQTDKQLRITKTGDEFLRRLLVGCAQYTLGPFGPDCDLRRFGQKLATRGGKNAKRRAVVAVARKLSVLLHRLWVTGAPYDPDYRENAVKQAA

SEQ ID NO: 209699 - protein, 397 aa, unidentified
MTCVKLIPGVMWMEAILERCAGLDVHQENVVACILYGELERKPKQEIRTFSTTTKGLLALHDWLNDWECTHVAMESTGVYWKPVWNILEGQFTLILANARRIKNVPGRKTDVADATWIAQLLRSGLITPSFVPPADIRNLRDLTRYRRKLLRDATAEKNRVHKILQDANLKLTTYISDIFGISGRALLESVINGEVLVAEEIRDKVKTSLKRKIPELLEALDGRMRKHHRMMLGLHLDHLTYVENQLATVESEIDLLLEPHLTSVDLLVTIPGIQKDAAAVILAEIGNDMSCFGGDPQIAAWAGLSPGNNESAGKKKSSKIAKGNFYRIQKRRGQKKATIATAHLILRMIYHMLKDSRTYREEGWDYLTSSKSSVDYWVKKIEAQGFIVKVESVETL

SEQ ID NO: 209700 - protein, 408 aa, unidentified
MTVVGIDVSKGKSMVAAMKPGGELVAAPYEVRHSDIELSHLALDVLCMEPDTRVVMEATGRYHEPVAALLHSEGIFVSILNPLLIKQSGAGSLRKVKSDPKDALKIAKYGLDNWSTLREYTPMEAIRQQLKLCARQCDLYNKNIVMLTNNLISLSDKTFPRVNELFSSPEKADGHLKWVDFYRSFWHCDCINRMSPDAFGERYKKWCKRKGYHFSTDAADALYAASCGSYTTLPRDNNAKLLVTVAADQLIALRENQSKLEAEMLNVCKQLPEYETVMAMYGVGKSTGPHLMAELGDVRRFPHRSSIVAFAGVDPGVVGSGKMQLSSVATSKRGSPQLRKALFQVVSTYVKCKSENEAVYQFYTKKRDEGKPFFVCTTAAANKFLRIYYAHVKECLNAAESATQVEEG

SEQ ID NO: 209701 - protein, 431 aa, unidentified
MNRSVEFLSVGIDVGADFSLMAFALPSQELLGKPYKIIHSSQRSLNGAVEKIKTLSQKYQLPARVFMESTGIYHYPLYHKMKDAGFDVFVLNPLVTHAGRDLNVRNIHNDKYDSQKIALLGLRPGLKTSLIPSDQVISMKVILREYYAVKKEISMYICRLKNQLRQAFPQFLPLFSKVNGVTAMAILCEYPNPESLLNAGEHAVADFMKSVSHNGPLKVQKKAAALIQAAQDARSFGHWNHGISILIRHYIEMIRLLDIRAKTLLAQAKALLAEQDSKTLAHQTELLQTIPGIGFLSALTLICELGDFSAFKRPKQLFSYFGLDPIVRQSGNYNGTNLKLSKRGSPFARRCIFVIALQSISLNIHKESKNPVLRTFYEEKCMCKAKMTAIGAVMHKICNLIFAVLRNDAPFVLQTPEQHNAAYLSKTHSVA

SEQ ID NO: 209702 - protein, 328 aa, unidentified
MIQLGIDVGKSKIDLCLRPDGPKGRKKTKILTNGPDVAVSVLEWLAKQKVAPTDVQVVMESTGTYHEHLAYGLYERAVRVVIANPARVRAFAQGMGILTKNDTVDADVLAQYGAMRQPDVWQPPSPAIHELKALLSRRDALVHDVGREKSRLEKLLSTRCSLLVEASVRKMLQVLNNELQVVQALIDNHIDNHPDLKRDMEYLTSIKGIGSAVGSTMLVVLRGNHFISAEQAASWVGVVPKEKRSGSSVRGRTRLSKNGPPEVRAKLFMAAIVAVKHNPLLKQFYDRLLAAGKAKMSALGGVMRKLVHICYGVVMKQQKYDENYATAA

SEQ ID NO: 209703 - protein, 334 aa, unidentified
MSLAMGCDPHLDSFTVAVIDSHGRDLEHRRCPNNREGYVQAARLCRRYRIERVGIEGASGHGLGLAVYLFEHGFDVDQVSTRVTASGRDRDGKTDPGDAVVVARATAAGRGHQWSYDPTLEALRVVVHRREALIRAQTADINQLRALLAEIDPHRAATLGRLRSVRTFQQLSRVRYRGNPHRSTVAGLIRDIARTCLRRRHQITQLTRQLPQLLPEAGHRLTQQIPGCGVVTAATLLAELAGTGPITSHTKFAAWTGTAPIPVASGRTDRYRLNRGGNRQANRALHTIILTQHRTHGEAHHYIQRRIQEGKTRKEAIRAAKRHLARRIWKLIHN

SEQ ID NO: 209704 - protein, 370 aa, unidentified
MKETITSYVGLDVHKDSIAIALAEAGRSAPRFIGTAPPEPAVLCKALTRCTKRSNTLVVYEAGPCGYGWARYLNSQGWHCEVISPAHITRKASEKLHKTDRLDALLLARESRAGNLVRVVVPDERDEAMRELARAREDASAARLRARLQLKAMLLRHGRAYQGKTSWNAAHERHLAGIKFDLPAQQIAFDEYRQAAKDAHERLERLTRALGEQCEHWRMKGVVKALMCLRGLDLVAATIFIAEIGDLSRFAHPKALMKYLGLTPSEHSSGNTRRQGPITKAGNKQARRILVEAAWTYRFNPRVSRPIEVRQQGQPKAIRDIAWRAQLRLAYRFRKLNAGRKMTQNKCCVAVARELAGFIWDIARQVQIPA

SEQ ID NO: 209705 - protein, 418 aa, unidentified
MASNQWREGELLFVGIDWGSEEHAVDIHDVAGRKVSSFMVKHSEEGFEKLVSRLRGAGDPAEMPIAIERPDGRLVDRLLEAGHPVVPVSSNAIKAWREAEVVSGAKSDPGDADVIAEYLRLRFQLLQPMQPFSDRTRALRAAVRARRDLVDQRTGVRNQLEATLDAFWPGAKEVFYDLTSLVALAFLKRYPTPASAAKLGEKQMAAFCKKQGYSGRRTPAELVERLRKPPSGIGAGAEMAARKAALLAYVSVIASLNAAIKDLDKEVATRLGEHPDGAIFSSLPRSGSINAAQMLAEWGDCRQAYDGPESVAALAGMAPVTRRSGKHKAVHFRWACNKRFRNAMHTFADHSRHESEWAADVYARALARGADHPHAVRILARAWIRVIYRCWIDGVAYDPAKHKAAATLSKSSDARMAA

SEQ ID NO: 209706 - protein, 364 aa, unidentified
MTAAQAGRQAASSTVEVVGGVDTHKDTHTAAAVDTAGRVLGSAQFPTDAAGYRALLRWLRGFGTLLLVGVEGTGVYGAGLARSLAAQGVAMVEVDRPDRKARRWQGKSDPVDAEAAARAALARVRTGVPKQRDGRVEALRALRVARRSAVGQRADVQRQIKALIVTAPESLRAQLRKLPDRELIEVCADLRPDRANADDPGTATKIALRSLARRHRRLSVEVADLDELLGPLVAQINPGLLALKGVGAEVAGQLLVTAGENADRLTNEAAFAMLCGVAPLPASSGKTTRHRLNRGGDRAANCALWRIVITRMGTDQRTKKYVARRTTEGLAKPEIIRCLKRYVAREVFLALQSASTEKRPANAA

SEQ ID NO: 209707 - protein, 404 aa, unidentified
MAVVCAGIDWASEEHAVCVLTDDGELLHEGTTSHDEAGLAELCGLLCGLGTDRVAIERPDGVLVERLMTAGLCVYALHPNQVKAARARFRTAGGKSDRFDAFVLAELARTDHHRFRPLQGDGDETRALRALTRAREDLVAARVKLANQLRAELEGSWPGAACIFAAVDSPIALAFLERYPGPGDARGLGERRLAAFLSRHSYCGRRAAAELLARLRQAPVAVLGELEAEAHRGVVLALVAALKVLVERIRLLGSEISGAVRAHPDGALFLSLFRDRKSTVTAARLAAEIGDRRDRYPSAEALAADAGMCPVAVESGKRKVATFRWACDKRLRDAVATLCDSTRHWHPWARSVYARARDRGCDHPHAIRVLGRAWLRIIWRMWQDRVPYDPALHGSLQALRVTGG

SEQ ID NO: 209708 - protein, 375 aa, unidentified
MKEKVRFLGLDVHAETIAVAIAEPDGEVRSLGTIANRAESLRKLVKKLGPVEHLRACYEAGPTGYVLYWHLAELGVACEVIAPTLVPMKAGDRVKTDRRDAERLARSYRSGDLTAVWVPDEGSEALRDLVRAREAAKQDQLRARHRLSKFLLRSGQRPAAGMKAWTLGYMAWVRQLGFKQVAQESARLDYLHEVEHMAERVKRLEQAITEAVRLASPTLQEVICGLQALRGVAQISAVTIAAELGNISRFNTPRQLMGYSGAVPSEDSSGQRTRRGSITKTGNAHLRRIAIEAAWSYRLRPGVGPALRKRQEGVAEEIKEIAWKAQLRLHKRYMRLAAAGKDQRNIITAVGRELLGFIWAIGIKAEAASALRMAA

SEQ ID NO: 209709 - protein, 332 aa, unidentified
MSVYVGIDVHRKRSQVAVIDEGGKVLANRNVPNGVKPVLSVIGELPAGTPAAYEAAFGWGWLLELLEDYGFEPHMAHPLQCKAIASARLKNDKVDAATLAQLLRADLLPEAWIAPPEVRQLRAMLRHRAQLVRLRTLLRNRVHAVLADHGHGRPAGCWSGVGRRWLASLELPPVSREVIDDGLALMDALQQPIDRLDAEVRQRAKTDPRVKVLTQLPGVGMFTALVLLAEIGDITRFGSARKLASWAGLTPTVRGSDRTVHHGHISKQGPTWVRWVLCEAAQTAKRHPDFAPGYEALARRRGKKIATTAVARKLITRAYHLLTDASATGEPR

SEQ ID NO: 209710 - protein, 460 aa, unidentified
MSQRKRQNHKRKKLAAAQIPLGATHHPDAAGIDVGAEELVAAVPLGRSDGPSVRTFSAFTAGLHALRDWLVQCRIQTVAMESTGNYWLCACALLEDAGIEVCLVNARHVKGVPGKKTDVCDAAWLQQLHAAGLLRGSFRPQKEILPLRYLLRHRADLVAQSGQQVQLMQKVLTEMNLHIQHVFSDVDGVSAQAIITAILKGERNATKLAALRDRRCRAALDKIHAALVGDYREEYLFVLQQVQARWQQINVSLTECDAEIAVRTAAVAGVTDAALPAAPATQRRVQKNMTGSMPVYEEAHRLLGVDLSGVPGISGGVLCVLMGELGTAPHIKAKFRSAEAFASWLGLCPDNRISGGRVLKAGTRKVTNRIANILRMAANAVSRANGPMGEYVRRYKGRLGKAEGIVAGAHKLARIVWAMVVSGQAYDEKKAFAITPASTGKRLKNLQNQAKALNMTLVPA

SEQ ID NO: 209711 - protein, 445 aa, unidentified
MEIVNPHAAGIDVGSRSHYVAVGQSKEDVRVFGVYNEDLQSIVRWLYENEIATVAMESTGTYWQALYTVLQDSGFQVILCNGKFTKNIKGRKTDVQDCQWIQKLHTIGLLSGSFLPDEVTEQLRTYCRHRSNLISQSSDTTRKMQKYLRLLNLRLDVVVKDITGLTGLSIIDAVCKGEKNPQKLASLRNGNCKKTEEEIAKALQNNGRKDYLFGLNQEYRMYLYIQEQIKKCDHEIEQMLNEQISSNDNKREHYIDKKSHKKVNKNTPKNIDLNLMSYQYFEGVDLLAIEGLSYSTVLSLMSEVGLDGIKQFSSAKKFACWLRLSPNNKISGGKVLSSRIPKGSSRLKIALRNAANAIGNLKDTPLSDFFRRINCRKGRTAAISATARKLAVIIWNMVVKNQPYKNEYGYEFLAQKRKRKVSEAKRIIQKFNINTEELSLNTNAI

SEQ ID NO: 209712 - protein, 379 aa, unidentified
MKASMQPKGDESEGMINVGIDVHKRRCQACLKDEKGRLIGEVSFARDHDGITSFHRLLQNHGEARIVLESTGNLWVPIYDTLTDDPANRVILANPRKTRIIAEAKIKNDRMDARVLADLVRADLVAESYVPSKEIREQRALLRQRRSFVEDTVAIKNRIHSLLDRHNLQPQYSDLFGKHGREWLCSIELPSTEKTILDVELKQLESLEAGIRTLTEKIAVEAAEEPRVRLLMGFTGIDYYSAMLLLAEIGDIKRFSSPKKLVAYAGLAPGMRSAGKTVRGHITKEGNKYLRWILIEAAQHASRFDPKLQGFYQRVSVRRGRQRAIVGVARKLLVSIYHVLNRNETYHGQRTELLERKIRNLQRIVDSSLQEGRDNQTDD

SEQ ID NO: 209713 - protein, 360 aa, unidentified
MRIIGCDLHARQQSVAMLDTETGEVVNRTLMHEGDEVREFYSELPRPVLVGIEAIGPMQWFLDLLAQLGIECQVGDAAKIRAAEPRKQKHDRRDAELILKLLVEKRFPVIWRPSKELLDLRALLLHRHQWVRLRTQVQNALQAIALANGLRRGPGLWSYDGQAKIAFLPLPPHASLRRSSLQAQYRHMDEEIEKLTVQVAEQSEHRSGAQLLMTHPGVGPVTALATEVFLGDPQRFADGKALASYTGLIPQERSSGRRRRLGRISKQGNPLLRFLWNEAGAHAARRDPELRRFYRRKLVQKGMGKARVAVARKLGIRLWIMLRDQIDYQEFCRRGQKQSGAVCAGMPEVGNGANRHRPVE

SEQ ID NO: 209714 - protein, 468 aa, unidentified
MPAGQRVEVDEHEEIVGRVAAIDVAKASGMVCTRVPHATRAGKRVTKVWQVASTTNAILELADQLAGEGIERVVVESTSDYWRPFLYLLEARGLVVWLVNAHDVKHLPGRPKTDRLDAVWLAKLNERGMLRPSFVPPAQIRRLRDYTRLRADLTADRSRHKQRLEKLLEDALIKLGTVATDILGVSGRAMLEALIAGQRDPKMLAELARGRLRDKHAALVQALTGRFDDHHAELARMLLDQIDALSGQIDQLTSRIEQTIAAIPAAQPSASGPGGGPDAAVQAASQSAQSAPGAVDPETGELLAAPLPVVDRLDEVAGIGRHAAQVIIAEVGLDMGQFSTPAHLVSWARLSPRTIQSGTTRRAGATGKGNPYLKSVLGEAATAAAKTDTFLGERYRRLVRRIGKRKALVAVARSILVIVWHLLADPTARFHDLGADYHASRIDRDRRTRNLVHQLQALGHKVTLQPAA

SEQ ID NO: 209715 - protein, 318 aa, unidentified
MTAPACFVGIDVAKATLDVAVRPAGEAWSARNDDAGIAALVQRLRSLAPALIVLEATGGFETAVAAALAATGLTVVVANPRQVRDFAKATGQLAKTDALDAAVLALFAERVRPEPRPLPDEAARGLDALLTRRRQLLEMRTAEQNRLGFAAAAAVRRDITQHIHWLERRLRDVDSDLEQAVRSSPVWRLKEDLLCSVPGVGPVVSRTLLGELPELGTLTRQQIAALVGVAPRARDSGTLRGKRMVWGGRAPVRAALYMSALVASRRNPVIRAFYVRLRAAGKPAKVALVACMRKLLTILNAMLRTGSRWHTLDAGATA

SEQ ID NO: 209716 - protein, 420 aa, unidentified
MPNIEIGVDSMVKENFIYVGIDLHKETHTAVMIDCYNQKLGEITFPNRPAAFPKLVTKVKKCNTDGKEVVYGLENAYGYGRALAVWLIDKGYLVKDVNTAISHRQAKHRGAMYRKSDSDDAKAIALATLNMLDKLPDACPNDAYWSLGQLVHRRDNIMKQRTRLVNQLHEQLCIAYPSYKQFFNDISRPTALYFWEHYPSRKYLKGKSVEDLRAELVPVSHNKCSTKTCEKILDAVASDKVKNNAYQDARDMVTLSIVSDLQHYDSQLTEVDKMLEQMYKMLSCTLTTIPGVNVITAVKILAEIGDIKRFSNANKLAQFAGIAPLHLSSSGKGKDVATKQGNRRLQATIYFLAIQMVQISSKGTPRNPVVRAYYEKRKAEGKTSQQALICISRRLISIIYGMLKSGTEYRMPVVENAGEK

SEQ ID NO: 209717 - protein, 341 aa, unidentified
MEYYAGIDVSLESSSVCVMDATGRIVREGKVASEPEALVRFLADLGLAIVRIGLEAGPLSQWLHAGMTAAGLEVVLVETRHVKAALSAMTVKTDRKDARGIAHLIRMGWYRPVHCKSVSAQEVRALLAGRKLLQDKLLDIEASLRGLLRGFGLKVGKVSKGHFATRIRELVGGQRMLEEIAEPMLRARDTLRTEFARLHRQMLALAKADDVCRRFMTVSGVGALVALTFRTAIDDPGRFRRSKDVGAHFGLTPKRYQSGETDVTGGITRVGDARVRAALYEAANAILTRDTRFSTLKHWALAVAKRRGLRRAKVALARKLAVVLHRIWVDGTTFRWTKEAA

SEQ ID NO: 209718 - protein, 408 aa, unidentified
MEVIHERCASLDVHKETVVGCLRVRERGQVRREVRRWATTTAELLELGDWLRQAGCTHVAMEATGVYWKPVWHVLEGEFELILANPAHIRNVPGRKSDVNDATWIADLLAHGLIRASLVPPGPIQELRDLTRTRKQLMREIVQHKQRIQKVLEDANVKLASVVSDVFGESGRRMLKAISAGQTDARQLAALGDGRLSASRETLAAALQGKVTTHHRFLLSQHLRMIEHLEQTVTAFEGQIEAAVQPFRAAREHLVTIPGVSATAAHVIIAEIGVDMSRFATVGHLRSWAGLCPELHESAGKVMSRRLRHGAPWLKTVLVQCAWAATRNKNNYLQAQFVRLRARRGSKKAIIAVAASILTTAYFLLRNQVPYRDPGALYFARIDQERTAQRLARRIKELGYEVQIRKAA

SEQ ID NO: 209719 - protein, 360 aa, unidentified
MFTERTSVGLDVHARSVAAAAIDGVTGELVQAKLTPSHEHIRSWLGDLPGPVAVAYEAGPTGFGLSRALNAAGIRCEVVAPSKLQRPSGDRVKTDAKDAVHLARLLRLDEYVAVSVPSLEQENARDLVRAREDARGDLMRARHRLSKLLLRQGIVYCDGKAWTGAHDAWLRRQHFDAAALQMTFESDYDAVLSVKARRDRLDTAIAVMAADSEFTPLVHRLGCLRGIGTLTGFALAVEIGDWHRFTGNTIGSFVGLVPSEYSSGASRIQGSITKTGNTHVRRLLVEAAWHHRAGYVVGKTMRDRWELASPAARARGDAGNRRLHARWDTFRARRKRHVVANVAIARELAGWCWSLAVLEE

SEQ ID NO: 209720 - protein, 440 aa, unidentified
METEIDINHQDEFAAFIGIDWAARKHVFALCDGTADRIEVSEIEHTPEAVDAWAMELSRRFGERPIAVALEQVRGALVFMLAKYQHLVIFPIHPATLANYRKSFRPSGAKGDPHDARLLLDFLLRHRDKLRRIQPDTPETRTLRFLVEERRKFVDERIRFTQRLCAHLKLYFPQVLNWFCDMSSQIAEDFLERWPTLEELQKARTSTIQRFFIDHNSRNAGKIGSRVEDIRRAVPATQDSAVIIASSSAALALVGVLRQLRLAISAYDSQIEKLARAHPDFAIFDSFPGAGAALVPRLIAALGTHRDRYRTAHEIQCYSGIAPVVESSGKQHWVHYRRSCPKFLRQTFHEWALHSIAGSAWAKDYYRQHRASGQSHHSAVRALAFKWIRILFRCWQDRTLYDEAMHGTARRRRARNEGDSAVQLQWKTCAGFSKLSLQIP

SEQ ID NO: 209721 - protein, 343 aa, unidentified
MKHFAGLDVSLQETAICIVDEDGIVISEGKTTSEPDELARWIAATGLTITRVGLEAGPLSPWLHTELRAAGLPAICIETRRMKKGATAAVKTDRNDARAIAHAMRVGWFTIVHVKTAESQELRLLLSNRRTLLEKRIAIDNEIRGTLKAFGLKLGPVTVASFEARVLELLASRSRLLGMVKPMLAARAALRQQCDVLHRMVLKTVRANAVCRRLLSVPGVGPIVALTYATGVDDPARFAHARDLGPHFGLTPRKYASGEIDRNGSITKAGDGAVREALVQAALTLLTRVQRWSVLKAWGMAIAKRRGLRRAIVAVARKLAIVMHRIWVDGTTFTWSRETAASA

SEQ ID NO: 209722 - protein, 326 aa, unidentified
MQDKELSEQATKAACYAGIDVSKDWLDICVLPAGETRRMANSAAGIRALGQWLKARRPRAIVLEATGKWHRPAHRSLHAGGLPVAVADPYRVRQFAKASGIVAKTDRLDARVLARFAEVMAPPVRPPAPQAREDLAELVTAREAAVAEQTALKNQRVAAASAFLRAQLGRRINALDRHVAALERECLRCAQADDAMARRFEILVSIPAIGPITALTLIAELGELGACTSKQIGQLTGLAPIANESGQRQGVRVIRGGRPKLRRVLYLAAIAAARCNPDLAALYKRLRASAKPPKLALVAVARKLAILANTLISQGRNWTPKPPKHA

SEQ ID NO: 209723 - protein, 339 aa, unidentified
MSKLLKNFVGIDISKTYFDVVVVKTQPTEEMIHHQFPQKQEGFLKMLEWLQQYNVTLNEATLFCMEYTGLYNTGLVNYLVKNKAQLWVEMRLRIKKAGGFERGSNDKTAAVKIALYALRYQDRMQLWQPIDSNIEKIKSLIAQRDRILNAINQLRVLVDELKEYGNIAEAKEIEKLQAPALKGLQKARLSVEHQITKTVQSDEKISKKVQQVQSIKGIGPITAVALLAYTKGFTSFNNGKQLACYCGVVPFKKESGTSVRFKATISPFANKKLKKLLHLCALSAIKNDNEIKLYFERKVAEGKNKMSVINAVRNKLVHRVFAVVRDERLFEENYVRKCA

SEQ ID NO: 209724 - protein, 422 aa, unidentified
MLAETHDEEQIIARVAALDLGKAELVCCVRIPATEGRKKRLQEVSTHSTMTRSLTELANRLVELRIERVVTEATSDYWKPVFYLLEAHGLNPWLVNARDVKHLPGRPKTDVLDAVWLCKVAERQMLRPSFVPPWPIRRLRDLTRYRTDLVAARTAEKNRVEKLLEDACIKLSVVASDIFGVSGRAMMAAMIAGERDPKVLAQTARARMRTKISQLEEAFNGHFRDHHRFLLARMLARIDGIDADIAALDDQIEAELAPFAAAAARLDEIPGIGPVAAAAILAEIGVDMSRFPPAGHLCSWAKFSPGINSSAGKTKGNGSTGHGNRYLARSLGEAAVNAGRTDTFLGARCRRIARRRGKKRAIVAIGRSILVIIWHLLQNPDTRFHDLGADHFTRHVNPDTKKRNHIRQLEALGYTVTLTPAA

SEQ ID NO: 209725 - protein, 387 aa, unidentified
MPQVDDLSRSFVAFDQTASLVVVVEMSQSSWLVAGMVPGVVRQPLKKLEPDPDELHRLLERWRAEAMKSGQTIERIVLAYEAGRDGFWLARWLQARGIEVHVIHSTSVAVSREHRRAKTDRLDTAMLMRVFLGWLRGERGHCGMVAIPAIEEEDAKRPSRERESLVEERSRITNRMKSTLARLGIRGFKPALRKAPERLAALRTPEGSAIPPNTLDELRRDMARLAVVRGQIKEIEQARLERLEQAPAAGPNAIVRLLARIVGVGVETADMLVREVLSRNLRDRRAVARYAGLTGSPDESGSKRREKGLAKAGNARVRRGLIQLAWRFLMFQKESRLAQWFRARTEGPKGARKTTMIVALARKLLIALWRMVTTGVVPEGVVLRPVA

SEQ ID NO: 209726 - protein, 312 aa, unidentified
MDAIVVGIDVSKDRLDVAVRPTGESFVFKRTGVGIEDLIVRLEALSPKMVAIEATGGFEAVVAASLAGAGLPVVVVNPAQVRAFAQALGKRAKTDPIDAAVIAHFAEATKPKLRHMPDEMTRHLAGLVARRRQIVEMIAAEGQRARRMSDKRLIKSIARLRKALEKELSALDVLIGDQIRGLPVWAEKEDLLASVPGVGKTIARTLIADLPELGSLNRRQIAALVGLAPWTRQSGQWRGKSFIGGGRKSVRNSLFVGAMVAARYNPQLKSFRDKLVAAGKPKLVALVAVARKLITILNAILRDRRSWRQIST

SEQ ID NO: 209727 - protein, 354 aa, unidentified
MKRDPKFTGLDVHAATIVATVERQAGEPLLRSVLPTETGAVLEFFRGMRGPVHVAFEEGTQAQWLYDLLLPVVDEVVVCNRRGQRRQGNHGDFVDSDRLADDLRKGNLKAVYHGSSGRETLKELVRLYGSLVQDAQRVMQRTKAVYRARAIPTPGTSVYGAKKREEWLGKLENRGARTRVEVLLTELDLLRELRPRAKAAMVAEARRDPAFKGLDAIPFLGPVRVAQLLAVLQTPWRFREKHNLWAYAGFAVVTHETAQFVIRDGKVLRRRRPPMTRGLNRNHNAVVKGVFKDMAKDAARRPGPFQDWYRQRLAQGMDPDLALVTLARKIASVVLRLWKTGEAFDPSKLTVQAS

SEQ ID NO: 209728 - protein, 355 aa, unidentified
MDSKKYIGMDVHKESISIAVMNGAGKIVMECVIETKASMILQFIDGLRGDLQVTFEEGTSAAWLYDLLKPHVTKLLVCDPRKNASMREGNQSDKIDARRLAELLRLNHLNPVYHGEHGLRSLKELVRSYLTITKDLGRVMSRVKAIYRSWAIPCTGKQVYAPRHRAEWLGKIGEPGVRRRAEFYYQQLDALRTVRQEVRRELLAEGKKHKAWKRLCQIPSIGPIRSAVLLGILQTPHRFRTKRQLWTYSGFGIETQSSADHRSVDGQLERAKKQISIRGLNRNCNHDLKNLFKGAAIVASSKPGPFQEFYTALLTKGIRPEMARLTLARKIATIVLIVWKRGACFDAQHLKPQTA

SEQ ID NO: 209729 - protein, 381 aa, unidentified
MQASTEITPTAGHIDTVFVAIELSQKTWLVTLHSPDRDRISRHKIEGGDHAELLAQIEKVRARATAKLGSAPRVVSCYEAGYDGFWLHRLLQAAGIANFVFDAASIAVEQRSRRVKTDRIDGELMLRTLMAYLRGEPRVVRIVRVPSVAEEDARRASRERDRLVEEQTGHTNRIKALLRLVGMAVGNPRRGDWLAWLERQRDWQGQPVPPHLLAEVKREHARLMLLRDQLAALEQAQAADATVPAAMVDRRNQLQRLKALGPAFTTTLVDEVFYKDFRNRREVASYNGLAPSPWKSGGIDREQGISKAGNRRARHKAIELAWLWLRHQPDSALSRWFRTRTANAGKRAKRIAIVALARKLIVALWRYLTTGLIPEQATMKA

SEQ ID NO: 209730 - protein, 325 aa, unidentified
MAKRITVCAGIDTGKRKLDVAIDGSCEQLQVENTAEGHKVLLEWLQRHKVKRIGIEASGGYEQPVVAALRRKRFVVVVFQPAQVRAYAKFHLQRAKNDKIDAALIAACTAAVKQIYPAPDPRLSPFAEQLTMIDQIGEDIMKLKNRIETCRNERIRAVWKEDIARLAKRERTELKALVAAIRQYPDLAERLELIHSVGGAGLPTAVAILVRMPEIGQLTREQAAALAGLAPYDDDSGDQVGARHIDGGRERLRRALYLAALPASFRWNPQLIALYQRLRAAGKEHKRALIACARKLLIFVNTVVARGTPWQGEPPAARTTNPSTA

SEQ ID NO: 209731 - protein, 405 aa, unidentified
MSDIEQHDSVQVFVGLDVGKGAHHGVALDRKGKRLLDSALPNDEMKLRALIRKLKEHGPILLVVDQPATIGALPVAVARDEGVLVAYLPGLAMRRIADLHAGEAKTDARDAYIIAEAARTLPHTLRSLKLADSQVAELTMLCGFDEDLAGQITQVSNRIRGLLTQIHPALERVIGPHLDHPAMLDLLERYPSPAQLAALTQKQLANRLVKLAPRMGKTWATEILQALSEQTVVVLGTQAASIVLPRLAQQLSALRIQRDEVAKEVERLVLAHPLHPVLTSMPGVGVRTAARLLIDVVSRAFASAGHLAAYAGLAPVTRRSGSSIRGELPSRRGNKQLKRAMFLSAFAALRDPVSRAYYARKISQGKRHNQALIALARRRCDVLFAMLRDGTLYSPPGPQKPLTTT

SEQ ID NO: 209732 - protein, 346 aa, unidentified
MEHYAAIDVSLEWSSICIVDPSGRIVREAKVRSEREAVVDFFQARGLTFARIGLEAGPLSQWLHAGLVEAGLPAICIETRHVKAALKAMTVKTDKNDARGMAQLMRLGWFRPVHVKTLVAQEVRALLTARRLLLAKLCDLETSLRGILRGFGLKVGTVSKLRFESRIRELAAGQTMLERVVEPVLRVHAVLRAEYAILHRTLLAAVRDDQVCRRLMTVPGVGAVVAMTFKSAIDQPERFQHSKAVGAHFGLTPRKYQSGEVDRTGRISKVGDAAVRAALYEAANILLTRAARWSSLKAWAMRVATRQGMKKAKVALARKLAVVLHRMWLDGTQFRWGSQAAPEAVA

SEQ ID NO: 209733 - protein, 355 aa, unidentified
MKRGSSAVPKLTTGLDVGDRWTALCAVDETGAAIERGRIATTPAGVERRFRQGPVQRIVLEAGKQSPWMSRLLASWGHEVIVANPRRVRLIAAAANKDDPRDAETLARLGRLDPQLLRPITHRSAEAQQDLAVVRARDALVRSRTLLINHVRGVVKSLGSRVPRCSAPAFARQADRVVPDALRPALAPMIAIIEQLTGEIRRQTRAIEALGQTRYPEALPLQQVQGVGPITALAYVLVLEDPTRFATARSVGPYLGLVPRRRQSSRADPQLRITKTGDGLLRRLLVQSAHYILGPFGPDCDLRRYGERISARGGKNAKKRAVVAVARKLSAVLYHLWVTGEVYEPLHRARAQVAA

SEQ ID NO: 209734 - protein, 341 aa, unidentified
MHMRKVTPRTTNGKISESPVFDHCVSLDWAERSVSIGHLRRRDKDPVVSEHPSDVSLLRAYLKTLRGTIVLTFEETTTAQWLYLEFCDCVDRIIVCNPYRNHLLNEGPKTDKIDAAKLVLLLRAGLLKEVFHTKDELYDLRLLVSAYTDLIRAGVRLQNQRSALERGHGDGSTHASFILDHLDKDIEHYRQSKHEYTTLFEQFCRRLDLLKLILPVTGIGTIGAVTILAIVVDARRFARTGKYLSYCGLVTLEKSSGGRSYGRRKPQFSRPLKAVYKTAALSALKGNNPVREYYESLLTKGLAEHHARHQVARYLATVTYGILKTGTPYDPYRWRKSISIA

SEQ ID NO: 209735 - protein, 355 aa, unidentified
MNDAKYIGLDVHQATISVAVLDSAGKLVMEAILETKAETILQFIHGLHGSLHVTFEEGTCAAWLHDLLKPHVTQVLVCDPRKNALIKAGNKSDRIDARKLADLLYLDKLHPVFHGETGNRVLKELARSYLALTRDTTRVMNRLKALYRSWAIPCAGQRVYAPRYRSEWLAKITEAGVHRRAEIYYQQLDALRSLREQVRRDLLAEGRKHSAMNLLRQIPSIGPIRAVLLIALMQTPHRFRTKRQLWAYCGLALKTSTSGEYRIVEGQLKRSKKFLAIRGLNANHNHDLKNIFKGAATRAAAVPGPFQEFHAGLVARGMKPTMARLTLARKIAAITLIVWKKGVRFDAEHLKQQAA

SEQ ID NO: 209736 - protein, 346 aa, unidentified
MKHYVGMDVSLKLTAICVVDQTGSVIREGVVDSDPEMIAEFVRSNAPSVVRIGLESGPTATWLWTELKQLGLPVICIDARHAKAVLKMQINKSDRNDAAGIARIMQTGWFREVRVKDLDSHSVRALLASRALLVKIKRDLENQVRGLLKNLGLVIGRAKLNVFAVRAEELIEGRPELMAAVRPLLAARHAIERQVDDLDHKVMRLARNNAQVRRFMTAPGIGPITALCFLATVDDPTRFKRSRSVGAYVGLTTRRYASGEIDWTGRISKCGDKMLRSYLYEAANVLLTRVAKWSTLKSWGVRLAKRSGLRKAKVAVARKLAVILHRMWIEGTEFKWSSKEVANQPA

SEQ ID NO: 209737 - protein, 356 aa, unidentified
MSHDVKYIGMDVHKEAIVIAVLNESGKLVMESVIETKASSILQFLHGLRGELHVTWEEGTWAAWLYDLLQPQVQHIVVCNPRRNALLKEGSKSDKVDAHKLADLLRTGMLRPVYHGENGLRTLRELGRSYQTISKDLTRVMNRLKALYRGWGIPCAGTQVYAARGREEWLSKLPQAGVRRRAELLYQQLDGLQALRREVRPEFLAESRKHQAAKLLRQIPCIGPIRAARLIALMQTPHRFRSKRQLWTYSGLGIETHDSAQYRFVRGQLQLSKKPQQIRGLNRNHNHEMKEIFKSAATRASCGRGPFYDFYAALLAKGMKPEMARLTLARKIAAITLTLWKKEERFDVEQLKTQAA

SEQ ID NO: 209738 - protein, 365 aa, unidentified
MASVSHLGPIHLGLDVHKDTISVAILAPDRDGPDVERIPHDEASVRRLVGRLGDPRWLRACYEAGPTGYELARLLHRMGVRCEVIAPSLIPKAPGDKVKTDRRDCRRLARLHRAGELVAIRIPTVAEEAVRDLCRARADMVEDRTRARHRLGKFLLRHGRPWRGGNAWTLTHERWLLSQRFDEPALAATYGHYRAVLAARDAQLEAIQADLAVWYDIPPFAEAVHRLSAYRGVTRLGALTLASEVCDWRRFPRAAAFTGFCGLVPSEYSSGPSTWRGHITKCGNAHLRAQLVESAWAYQHRPAVGLELHARQQGLDPQVVARAWAAQLRLCGRFRRLAARKDSKNVVATAIARELAGFLWAEMAA

SEQ ID NO: 209739 - protein, 429 aa, unidentified
MKIIYPRVCGIDVHKKFIVAVICISESVEPVYLKKRFSTFHNDLIRFRDWLIQNDCQNVCMESTGKYYIPVYNVLESHISNIVVANPKWVCAVKGEKDDDKDAKWIADLFKLGIVKSSFIPQKDFRILRELTRYKYKLVNMRSSEKNRYQNALTSGNCKLDMVFTDVFGKSASNIIDLILSDNPYTDEDILSKVHKNCKASPDMILNSINGTDLTPVQKSRIELVNNHIKQLSSNIQRLDKLIDLMIEPYEDYISFLCQIPGVSRNSAITILSEIGVDMNQFTSTRRLTSWAGLTPSSNQSAGKKKSVRISRAGVYLKPCLVEVAHAAVKDKNHSYYANKFNKISKRRGKKRAYIAIARKILVAAYHMLLTGEIWNPADLAEVETPVEQRIKYVKNNLKSDIKQLLDIGLTVEELTLMIQQNTNNIAIQ

SEQ ID NO: 209740 - protein, 340 aa, unidentified
MPLYGAFDLHAKTNHLGIIDGSGKRVLMKKLPNEASVILEALKSMKRRIVGLVVESTYNWYWLVDLLMEAGYKVHLANPSAIQKYSGLKHADDVHDAFWLAEQLRLGVLPVGYIYPREERPIRDLLRKRGHLVRLRTSLIISLQNIITRNIGLQVNVNEVKRLREDRITPLLGMNEDLALAGRTSKETIDFLTRQIKHIEKVVEDRVQFKEPYRYLLTLPGVGKILGLTIMLETGTIGRFPGVGDYASYCRKVTSKWTSDGKAKGKGNKKNGNKYLAWAFSEAAECARRYDEQARAYYNRKARKSNFMVAHSALAHKLARAAYYVMRDQVPFIPEKLFAL

SEQ ID NO: 209741 - protein, 433 aa, unidentified
MTPSSVSMENPMVAYVGLDWADQQHVMCWRAADSTQAHTAVVRQSPEELQAWVAQLRQRFPQGLIAIALEQSRGPVIAALMHYDFLRLYPINPKSLARYRETFSTSGAKDDPHDAALLLDLLVKHREQFAPWVPDDVLSRQLALRVEHRRHLVDLRTALTHQLSSHLKLYFPQALDWAGALDSLQACDFLQRWPTLPAVQKARPAQLEQFYHHHQCRRRQLIQQRIEQIQQARSLTEDRALVEAYSHMVLALVAQLRVLIATLHQWEAEISQLFAQHPDAFIFASFPAAGPVFAPRLQTAFGSRRDRFSAAQDMVQFSGVAPVTQRSGKSLQVHRRWARPKFLHQSLVEYAALSIPHCGWARALYHQLRARGHRHWAAIRVIAYKWVRILFRCWKERVPYDESKYLQALQRRNPRLWLASQQPPPPRSKKPAA

SEQ ID NO: 209742 - protein, 370 aa, unidentified
MKQFFGCDAHKKYSVFVAMDETGQKTKPIRVPHDLDAYRRFLAQLPEHSHIAIEATGNWYWMVDEMERARHIPHLTDALEAKKRVGKTHKSDPIDAGGLSLLLRCGTLPEVWIPPAALRDQRELLRTRMALRDLRTSLKHRIHAAIDRYNLYTTTISDLFGLHGREYLQQCLAKLPPVTASMIVVQLDALDQLDMKIDALEKRIRAEIARTPAVRRLMTLPGVAEIIGTVLAFEIGDISRFSRAECLASYAGLVPKLISSGDRIRHGRTPERKINPFLKWAFVEAAVCSLHHSGPLYSHVRALFGRLLPTKGFGRAVVAVARHLAEASFWVLAKNQDYRPPQPPKQIPRSAGNASAHGGFVATLDSSTNG

SEQ ID NO: 209743 - protein, 330 aa, unidentified
MKKWKFTLGVDVSKHTLDISCSELQQHIRINNGSEGFSHFLKWCRKLKIDLADCFLVLEYTGGYEYKLLQFCEAKEIVYARIPGLAIKNSMGITRGKNDKVDALRIAQYGEEKHKSLQASKPLNAAIIRLKELLSYRKRLIRENAGYKTSVAERVHIYGLNKKDIIVKSLQQKQEVNSKIIDKVEGEMMKIVAQDELMNTNFSLITSIKGIGKVNALMTIAYTENFTSFINPRSYAVYVGVIPFDHSSGISIRGRKRVSHIANKELKQELNQAARSAIAWDKELNAYAVNKMKTKCYKIVLNNVKFKLILRMFAVVKKGEMYVDYYKKVA

SEQ ID NO: 209744 - protein, 344 aa, unidentified
MNVLRQVLGVDVAQKELVVTLGRLNQELSAELYLRRKFANKETGFEALLKWLKKNTIENVPLRVVMEATGVYHQKFAYYLEDNGIDLSIVLPNKISNYMRTLSVNTITDETCADAITMFGLERKLENWKRPNKTYKTLQQLVRERDQIVSERVVIKNQIHAEESGAEPHDRSLVRLNERLRLMNKQEKEIKLDIDQCLKNNAAVKEIVDRICTIPGIGTLTAATILGETNGFELIRNKKQLTSYAGLDVKEKQSGTSVKGKPKISKKGNRHLRKAMHLPALTAIKHDQGHKDLFVRLVARHGIKMKAIVAVQRKLLELTYILFKNQDNYDPQKTAKSEKERQLQ

SEQ ID NO: 209745 - protein, 339 aa, unidentified
MSNTKLMAVDLAKNVFQVCGLNEHNQVVFNKKLRRNQLVEFIAQQPPSPIYMEACYSSNYWARRFNQMSHQSFLIPAQHVTPFVRGNKNDANDALAIAECSKRPNLRFVPIKTQRQQEIISAHRIRRRLVKNKTQITNQAHGLLADFGIIFPMGIKGFKKAMNEIEANENLSSEFKQNILSLREEYQFVSDKIKQIDKYLNHYFETDPDCQIVSSIPGFGLITTTLLIAMIDKGQAFSKASDIGVWVGLTPKQYASGDKSKLGRITKRGDRYLRTLLVQAAQTAINWSNKRDDQYSLWIKQLVLRLGRKKASVAVAHKMLRLAWVLLQKQERFKVKMSH

SEQ ID NO: 209746 - protein, 396 aa, unidentified
MISVGIDVSKGKSTVCIMKPCGEILESPFDIGHTADELDSLISLIKSFDEETRVVMEDTGHYHLPVATYLSSHNIFVCCVNALRMKKFCSQSIRRAKTDKIDSIKIASFGITYWNELVKAYPSNVIYDELKFLARQYYQVTGMLVKSKVNFSNLLDQVMPKINDVLSNQGENHKLTEFVSRYIHFQNILDMGEMKFTSDYCKWAKKKGYRLNERKATEILALAQNGIPTLPNSQSVKIAVSEAVKLIHSIEESRNTILAQMQDLCNTLPEYSVVKEMDCIGDTLAPRIIAEIGDVRRFKNKHSLIAYAGIDAPPYQSGAFHASERHISKRGNSYLRKTGYEIMQSLIKHKPADNAVYNFIQKKRSEGKCGKEAMIAGLNKFLRVYYGKVMEFYSEH

SEQ ID NO: 209747 - protein, 423 aa, unidentified
MEVLYPRCAGLDVHKKSVTACVCISEDGKRPSKQIRSFSTMLDGLQELATWLTDNGVTHVAMESTGVYWKPIWNVLEGDFTLLLVNAHHIKTVPGRKTDVKDCEWIADLLRHGLLKGSFVPPQSQQDVRELTRYRTSLLQEKSAEVNRLQKTLEGANIKLASVASNVMGVSGREMLAALVAGTTDPAVLAALARGKLREKMPELQRALAGRFRAHHRFLVAQQLAHIDDLDALIAQLDREIAERLRPFEDMIVRLDTIPGIGRRLAEILIAEIGVDMSRFPTAAHLASWAGMCPGNNESAGKRHSGKTRKGNRHLRAALTEAAQAAAHKKDSYLAAQARRLAARRGKKRATLAVGHSILVIVYHVLAHADSTYRDLGHTYFDRRDSDALERRLVRRLESLGNRVTVEKVVAPEPAVASKGEAA

SEQ ID NO: 209748 - protein, 366 aa, unidentified
MDHFAGLDVSVKETSVCIVDDTGKIVREVKVASEPKALLAVLKNPAYRFKRIGLEAGPLSQWLFSALAEAELAVVCVETRHMQAVLKAQINKTDRNDARGIAQMMRVGLYRPVHVKTLRSQKLRMLLTHRKLLQSKAIAIENDLRGTLRNFGLKVGMIGKVKFEARINELVESLPDLAGLVEPLLIVRRALREQIVVLHRRLLAIVRDDEVCRRLMTTPGVGPVVALTYRATVDVPARFHKSKAVGAVFGLTCSKYQSGEIDRSGRISRCGDQMMRVMLYEAAQSMLRSKKWCWLKAWAMQIARRRGMKKAIVALARRLAVIMHRIYGAAVRCKGIRTEWSFWSALIYPASRGSSCSGPSWLSAHT

SEQ ID NO: 209749 - protein, 293 aa, unidentified
MKIMVGIDLHSNNALCGLMDESGRRLVHKKLPCDLAAILQLLDPYKDRIATVAVESTFNWYWLVDGLQDHGYHVVLANPAGMQPYSGMKYTDDVSDAYFLAELLRLNLLPTGHIHDRKTRPVRDLLRRRLLLVRQRTMLILSFKSLNERTLGQRVSLARVKSMKVEEAQARFTAPADQLLSGTEIELMGHLTAAITKLEQHLLGVAGKWPAYQRLQELPGIGKILGLTIALETGDAKRFADAGNFASYCRCVKSLRTSNGKKKGENNRKCGNKYLAWVPHLRDGSGALCLSLR

SEQ ID NO: 209750 - protein, 412 aa, unidentified
MDVIHPRCAGLDISKKDAKVCVRINGAGRRKTSETVTTFGATTRQIMALRDHLAAQQVTCVVMEATGDYWKPFYYLLEDLPGVEVMLVNARHVKNLPGRKTDVADATWLAQLGAHGLVRGSFVPPEPIRQLRDLTRTRTAVTRERTREIQRLEKLLEDAGIKLSSVAADLNGASSRAMLEALLAGETDPAAIADLAKKRMRVKIPQLTEALYGRFTSHHAFLTRMHLDLIDQHTAAIEQLTDRIEVVMEPFRSFRDLICTIPGIGGYTADVVVAETGADMTRFPTAQHLASWAGTTPGNNESAGKVKSRRTRPGNPYLQGALGTAAMSISHTRDTYLAAKYRRIATRRGPMRANVAVQRALLVAIWNIATTNTAYHDPGGDYFTRLNPQKARNNAVRQLEAMGYRVTLDQAS

SEQ ID NO: 209751 - protein, 337 aa, unidentified
MQVTHFIGIDVSKDKLDISLVLGGQIKVHQTVVNRQKEIHRVMKHLMKEHGATVENTVFCMEYTGIYNLPLIRCLTQMLAVIWMESGVQIRRSLGMVRGKNDQVDSQRIALYAYTHQHQIKRWKAPRALIEKMAALLSQRALMVKTKKQLTTALGEQMLFLDKEVCHSLNSHGMRAVQELEKQIKLIEAEIRKLVASDEKLNRLYEVITSIPGIGFVTAAYVITTTNEFVSFTNPKKYACYCGVVPFEHTSGTSVRGKTRVSHLANKNVKALLHLAALGAIKSPGELREYYVRKVEEGKNKMCVLNAIRNKLVQRIFSCVNQNRLYEKNFTLDLVLS

SEQ ID NO: 209752 - protein, 412 aa, unidentified
MKEFNAEAVRIETASALETVRPAQAEGRYPAYIGLDVHKETIAVAVARAGRAAPESRGEIANKPKAVAKLVERLNQEFDGEVLLFCYEAGPCGYGLYRQLLALGHDCQVVAPSLIPKKPGERIKTDRRDARKLAQALRSGDLTAVWVPDEEQEAMRDLTRARDDLKAQERKARQQLNAYVLRYGHAWPSNKTRWTQTHYNWLESLKFAHDWQQVVLQEYIDAAKAGSQRVADITAQMERVLPQWSLAPVVDSLVALRGIDKLAAMVLLAELGDISRFDSPKQLMAYLGLVPSEHSSGGRRRQGAITKTGNSHARRMLVESAWSYRFPARQTAHLKRKAAKASDEGQGDRLAGTEAAVRSLPHPAAGGQEHQADDGGHCPGAGGLYLGYRVPRDAEGAADHTIIRRRIILSRT

SEQ ID NO: 209753 - protein, 410 aa, unidentified
MFRAIGMDVHRDFCEVAIAQAGTVRLAGRIETTPEALEVFAASLAASDVVALEVTGNAGEIARILSAHVARVVVVSPHDTGISRARAKTDRLDARALAKLLAAGELDAVWMPDEWTRAMRRRLARRSQLVRAHTRAKNEIHAVLIRRLAGRPPVSDVFGVSGRRWLSELELPADERETIAGCLRHVDFLDGEVRALDQAIAREALRKPEVLRLMTVPGVSAITASTFVAAIGDIRRFRSARQLVGYLGLDPRVRQSRPGPARHGRITKQGSAAVRHVLVEAVWTAVRAPGPLRAFYERVRARRGAQVAAVATARKLASLCWCLLTREQDYAFGQPSLTRKKIRRLELAAGAASRKGQVRPGDGLRNKSIRDAERALALQAEDAYRRTISDWKATRPGEGGRERDTGTRIK

SEQ ID NO: 209754 - protein, 400 aa, unidentified
MIDTGDIDVFLGLDVGKGEHHATAVTRAGKKAFDKRLPNTEPKLRELFAKLQAKHGTVLVVVDQPASIGALPLAVARDMGCPVAYLPGLTMRRIADLYPGEAKTDAKDAFIIADAARAMPHTLRAIDGEDETIAELEMIVGFDDDLAGEATRVANRLHGLLTQVHPSLERVLGPRLQHPAVLTLLERFGSPAQIRKAGRRRLVTLLRPKAPRMAERLVEEIFAALDEQTVTVPGTEAAALIVPSLAGSLATVLDQRKLLAGRIEELLEAHPLSKVLTSMPGVGVRTGARILIEVGDGSTFPTAGHLAAYAGLAPATRSSGSSIRGEQPSRRGNKQLKRAFFLSAFAALGDPASRAYYDKKIAQGKHHTQALLCLARRRADVLFAMLRDATFYEPQPAGAR

SEQ ID NO: 209755 - protein, 341 aa, unidentified
MQTITTIGLDIAKSVFQVHGADAEGVVIRRQLKRRYVLAFFQKLPPCLVGIEACASSHHWSRELQALGHTVRLMPPAYVKPYVKRHKNDAVDAEAICEAVTRPNMRFVATKTREQQSCLTLHRTRHLFIRHQTSVINAIRAHMAEFGIVAPVGRNGVEELLAVVADASDKRLPEIARASVAALGAQLRALKAQILQFDRLIMAWHRSNQASRRLDDIPGVGPALATALVATVADPRAFRSGRNFSAWIGIVPKQHSSGGKDRLGSISKRGDRYLRGLFVAGALAVIRYAKIHGTKRPWLTALLARRPTKVAAIALANKIARMAWAMMAKGERYKEPVALAT

SEQ ID NO: 209756 - protein, 341 aa, unidentified
MKNKSFIGIDISKNVIDASIFCKGAPIKDFPHAVFNNSHKGFGEMCTWLKKNHVVLSNSLFGMEFTGSYSMELEKFLNARKYQFCMLSTHVVKHYPMGPKDKSDKIDSAKIADFLYRYDGTECVKPYKMPDKTMQRLKALTKERKFLVEQRTCFMNRRQLCTTKEAAQLYDGYIKEFSHDIENIELKMQNLLETDDSLSTTYKNLLTIPGIGFVNAMNVIVITRNFTAFETARQYASYIGVAPHFHTSGTSVKWRPRPSARCDGQAKADLSMAASVAVQCDAELQSFYNRKLGGKQDSDTKRKALNAVKFKLVLRMFAIGKQNRKWEPLDSKSSNEKLAIS

SEQ ID NO: 209757 - protein, 311 aa, unidentified
MANEPVSVGVDVAKKTLDVAASNSSEVRRFENDEEGISTAVGYIASLKPDSIIIEATGGLEMALVATLQSACLPVVIINPRQVRDFARATGILAKTDTIDAKILALFGTQVRPQIRPLPDKESREMSCLLTRRCQLIEMLTSERNRFLQSSGDIRQGVQDHINWLEQALSKVNNDLEDRIKGSPSWRDKDDLLKTVPGIGNVVSSTILVELPELGRLNRRKIAALAGVAPFNRDSGNMHGKRAVWGGRARLRAVLYMAALVASRHNSVIATFYQRLIASGKAKKTALVACMRKLLTILNAMIRTKTAWQEV

SEQ ID NO: 209758 - protein, 351 aa, unidentified
MSEISIVGLDLAKQVFQVHAADEAGRCLLRKQLKRREVLGFFAGFAPCVVAMEACGSAHYFAREIAKLGHAARLVPPAYVKPYVKRGKSDRIDAEAICEAASRPTMRFVPVKTVEQQSLATLHRCRDLLVKNRTMLVNALRAHLAEFGFVAAKGIGKLPELIEIVSEAPAEALPEMARAPLSGFLDAIALINRRLDDIEKRLRAWHKGNAQSKRLETIPGVGLIGATALCALVPDPKLFKNGRHFAAWIGITPRLDGTGGKTRLGPISKAGDGALRRLFVLGATALLRTLENKATPLALWLQGLLARRSKRAAAVALANKLARIAWAVMASGEAFKPLSAAQLASVAGARA

SEQ ID NO: 209759 - protein, 422 aa, unidentified
MRIIYPKAAGFDVHKKVVVAAITVLGPDGQSYQEKRTFETMTVDLLALSDWLMSHGVTHVAMESTGDYWKPVFNILENNFTVLVVNAQHVSKVPGRKTDQSDAEWLAELMQFGMLKASFIPPLEQRELRELTRYRSTFVRERVNLVNRIQKLLESANIKLGSVATDVMGMSGRAMLEAIIVGQASPEAMAELAKGRLREKREQLVKALEGRVKPHHRFVLSELLCQIDSLDETIARFDEQIEAYCRPFEEAVQLLDTIPGVSRRAAEVIVSEIGTDMSRFETADHLAAWAGVAPGNNESAGKRRSGKTRSGNKPLGTTLNQVAHAAAHTKNTYLSAQYHRLAGRIGKKKAIVAVEHSILVICRPSTHRGQIFRLSARRTFNTSWTACCSIFLMRLRCPFLPKSSAKCPKTRPFVENLLSTML

SEQ ID NO: 209760 - protein, 424 aa, unidentified
MNLTQNDRLKQVTSDTLIVGVDVGSQTHFCRAFDWRGFELSRRVFKFSNTGMGFLTFLRWTEEIMNKTEMKKVIVGCEPIGCYWLTFQKFLQDHDVQLVTVNPFTVNRSMELDDNSPEKSDLKDPKTIALLVKDGRFSTSYLPSGVYAEIREASVCRDQIMKQHVRLSNQIQGWLQKFFPEYFECYADWDSTSGLMLLREAPLPQDILKIGAGGINQIWRDAKVRAAGIKRAQTLVEAAQNSVGLEAGEAARLEIWVLVNDYILKAEQLKRLDEYLEEKVKEVPNVEKLLAIKGVGMSTVIGFIAEVGDIGRFTDPKQIQKLAGLEIVKKSSGKKKGQPRISKRGRRKLRRTMYESAKALMLWNPAFQDVFLYYRNRTKNPLGGMQAKIAVACKAIRVFYVVLQTGCDFDEEKFRKDIIRPEAA

SEQ ID NO: 209761 - protein, 424 aa, unidentified
MKVTYQTCCGVDVHKSFLVATIVKTTGGIEPSYQKKRFSTFNNSILEFKQWLLDNHCHDVCMESTGKYWVPVFNLLEDKINVVIANPKWVKAVKGNKDDTKDSKWIGDLFRLGLVKGSYIPCKKVRILREYTRYRYKLVSCRSSEKNRYQNALTVCNVALDSIVSDIFGKSSTSIIDYLLEQSGTSINHEEIASKLLRSLKSKEDAVIESVEGYQMTDSQKYRMRLVRAHMDYITAEINDVDKMIENMISSNPDFENAVQFLCTIPGVKRDSAITIISETGTDMSQFSSSKRLCCWAGLTPGSNESAGKKKSVRITRAGVYLKPALVQCAHAAVKSDKSPYYKKKYESLVKRRGKKRAIIAIARMILTAIYQMLSTGEQWNPSDLYKIDMPVALVEKQKAKAIKQAKKLLQREGLLPPDEPLAS

SEQ ID NO: 209762 - protein, 315 aa, unidentified
MAMLVPVSKPIVGVDVAKNELVIYHAERDLLETIANTKAAIKKWLKALPGTVTIAIEATNIYHVLFADLAYEAGCDIYMIGGYELSHYRKGVNVRAKTDALDARLLARYLKNEAEELHPWTPPSPLYRQLLSLFRRRAALVQARTSLVQSWANEPLLKTSFAAQVRSMQRLETLVEKMIKDLLEKAGLMGQLKRCMKVEGIGFLTAARLLATFQRGEFRGGDAFIAFLGMDLRVSKSGQKDGRRSLTKRGDSEARRLLHNAAMSASRTATWKPLYEELRARGFSTTQALVILARKLARVVFALLKNQSEYQSKVA

SEQ ID NO: 209763 - protein, 475 aa, unidentified
MNLKGTKKKNQVSNVNIFEQQEFLKKIEVVRENLTASTWHELETKGKFDKNAKLSFICDDMLILGCDVGSETHYLRAIDTRGRELSKSAFSFSNNADGFSKAKEWAVKIAAEYDKKQIVLGLEPTGHYWFCLATWMISNGLSVVQVNPYAVKQTKELEDNSQLKDDTKDPKLIANLVKDGNFGMPYLPEQLYADLRRLSMFRDQLNEDRIRSINRLHRELKIYFPEYKEALGKTEGTFSLELLKQAPFPDELTALKEDGIRQIWHNAKLRGRGYSRAGEILEYAKASVGIREGKETGKLVVQWFVQKILELDAELALIETQINQKCLEIPHTDKVLEICGIGENTLSGMMAEMGDISRFDDVKEIQKLSGLGLVASSSGKHKGESKISHRGRKRLRYWLFQAAKSAVAHAEEFRELHVYYTTREKNPLKKMQSLIAIACKLLRIIFTILKKGIQYDPRKMLKDIRRESRQESLAA

SEQ ID NO: 209764 - protein, 341 aa, unidentified
MDISVLGIDLGKNSCSVVGLDVTGKVVVRRRMRRETVITYAASLPACVVAMEACCGAHHMGRALARQGHAVRLMSPEYVRPYVKAQKNDDRDAEAIAEAATRPTMRFVELKTEEQLDMQTLHRIRDQLVGDRTSLMNQIRSLLLERGYIVPQGRAKLAARLGEMLDDDEPVLGPRIHRLVSDMRLRWIALDERIADLDAEFTEAARSDERMRRLLSIPGIGALNATALVAAVGDARTFGRGRDLAAWLGLVPRQATTGGKPRLLGITKRGSRYLRKNLIQGARSSLPTMSKSDTRLGAWLRGLLSRSHPNTVVVALAAKMARIVWALLRHERTYEPVAQAA

SEQ ID NO: 209765 - protein, 455 aa, unidentified
MAKQKTERPPTIETVNIGAAAVDIGSREHMAAVNPDVTDAPVRAFGTFTHDLHDLAYWFKSHGVTSVAMESTGVYWIPAYEILEQHGFEVILVNARYAKNVPGRKTDVSDASWLRQLHSYGLLRGSFRPTAEIATLRAYLRQRERLVEYAAAHIQHMQKALMEMNLQLHHVVSDITGVTGMKIIRAIVAGERDLDVLAAYRDVRCKASTETIKAALNGNDRPEHIFALTQSLELYDFYQAKMLECDRHLEATLAALGAVTEHDPSELPRPRTKTKQVSTPSFDVRAALFGVLGVDLTQIHGMGPSLSLKLVGECGTDLRAWPSAKHFTSWLCLAPGNKISGGKVLSSRTRRSSSRAAALLRLAAVTIGRSDTALGAFYRRLAARAGKAKAVTATARKIAVLFYNTLRHGMTYKDPGASHYEERYRNRVLGNLKRRAKSFGYDLQELPLEADMAVS

SEQ ID NO: 209766 - protein, 419 aa, unidentified
MLTAQWFVGIDWAAEAHEVCVLDREGRVCERRQAKHTATALQAFVDALLERAHGDPTTVAIGIEVPRGALVELLVERGFAVYAINPKQLDRFRDRFTAAGAKDDRRDALVVGDSLRTDPQAYRRVRLDDPLVIQLREWARVDEDLGIELTRLTNQLRDLVYRIAPGLLVLCPAADEPWFWTLLREAPTPAAQRRLSGRRLERLLRAQRIRRLEATQVHQVLQQPHVYTAPGVVEAVAEHIELLVPRVELVAMQRREAERRLARLLDTLEAEAPPAGDQREHSDVAIVRSMPGVGTRVAARMLAEASQPLVDRAYHVLRACMGVAPVTKQSGRRRTVSMRYACNVRLRNAAYHWARTGAQKDPTSRAYYAKLRARGHSHGRALRSVADRLLRILMTLLTRGQLFDSAHRQHSPLAVAEGA

SEQ ID NO: 209767 - protein, 328 aa, unidentified
MDPISVEEMSVKGKIIIGFDVSKDWIDCAIAGDAKVVRIANDEVAIANWLAEIGIARIALAAFEPTGGYELVLRRCLRQAEIAFVRVHPNEVCAFRVRRGVKAKTDRIDARLIADFAAEELTRRGIAVAIEGDEVLRELAARRRQIADLLHAERCRRDVVTTTAVRKSLTTTIRTLERGLAAIEEAIAAHIAHNPQLAAMARRLQSFRGVGPIIAATLLAELPELGRLSAKEIAALVGLAPRTRQSGKRQGYAPTGHGRPRVRAVLFNGARVAIQHNPVMAAFYRRLVERGRPGKVALTAVMRKILVVLNAMARDHQDWRPALPAAAA

SEQ ID NO: 209768 - protein, 370 aa, unidentified
MNRLSVGMDVHKEKVVMVGLPERGDTPVMRETFRGDNISGIVKRLRTLSRAWAVESCYEAGPSGYGLARVLTEAGISCRVVAPSLMPRRPGNLVKTDIRDAKELAAALRAQTLEFVRIPSCEEEEVRGLVRCREDIARQLRSFKQIVSHWLLSHGYRPPAKVNRWSPVFWRWVRGLPLPPLERMVLDHYLDVLLMLEDRRKQVESQICELADREEYRERVCRLGSLRGFSKLAAMRLIAEVMDFNRFPKASAFMKFTGLVPSEHSSSDRIRRGKITKGGNSHIRHVLVEAVQRAHVSARPGRSLLKRQEGAAGEFRQIALKCLLRLYRKFWAYTKRGVPVGKVRVAMARELAGFVWALMVHPAPVLTAAA

SEQ ID NO: 209769 - protein, 370 aa, unidentified
MGKSVLYVGLDVHKMSIDVAIAEAGPGAEVRFYGQIGGDLDSLDRVIRKLQATGAQLQFAYEAGPCGYVVYRHLTAQGWSCLVAAPSLIPRRPGDRIKCDRRDALSLARLFRAGELTSVKVPDADDEAMRDLTRAREDAVSVERRAKQRTGALLLRHGRRYPGKTTWGRGHWRWLLQQVMDHPAQQIVLQEYLDAVREASARVQRLTGQIQELLPQWRRAPFVAAYQALRGVSLIVAATVVAELGDLSRFKNPKELMAYLGLVPSEHSSGASVRRGRITKTGNGHARRVLVEAAWAYRLRARVTRPLLQRQEGLPENIRQISWQAQVRLCARYRRFLARGKHKNTIVTAIARELAAYIWAIGQAVEPLTA

SEQ ID NO: 209770 - protein, 373 aa, unidentified
MKKELYIGLDVHKDCIITAVAEEGRKGEVREGSALSNDLHAVEKWIGRLRKAVILRACYEAGPCGFGLARRLRQLGVECQVVAPSLTPTRSGERVKTDRRDGRKLARLLRAGELSPVYIPEPTDEAMRDLCRARSDAVDDRRRSRHRLKGFLLRHGYRYQGKSSWSAAHERYLRELVLPHPAMKVILEEYLQGIGAASERIERCEATMGDLLEQWRLAPAVRALMAMKGFQTVAAMILVSELGEVHRFTHPRQVMAYLGLVPTENSSSERRRQGHITKCGNAHARWLLVECAQHYATPPKVSNELSRRQQGQSAEVRAISWRAQNRLHRRYTRLLARRLQRNKAIVAIARELCGFIWELLRTQPCYQAQSPPV

SEQ ID NO: 209771 - protein, 411 aa, unidentified
MENIFPCCAGLDVHRDSVEACVRRIEPNGRWHQQTHHWGTMTRDLLAMADWMAAQGVTQVAMESTGVFWKPIYNILESRFTMLLVNARHLKQVPGRKSDVRDCQWIAQLLQYGLLKGSFIPPRSQRELRDLTRHRTQLVEQKTRTANRIHKVLQDTNIKLSSVATDVLGVSGRAMLEALITGEEDPVKLAHLAQRKLRSKIPELEKALEGHLTEHHRFMLQLLWKQLAQQEELIAELDRKIEEQTRPFAAEIDRLDAVPGVDRRVAEVVLAEVGADMKPFPAHENLASWAGMCPGNEESAGKRRRRRITPGNPWLKPTLAQAAWAASHTKNSYLASQYRRLAGHRGRKRALIAVGHSILVIFYHMLKTGTSYTDLGGDFFDRLQPERLTRYYVKRLERLGHKVTLESRAAA

SEQ ID NO: 209772 - protein, 452 aa, unidentified
MGQGSNGLSRGDVNRNARLAALRAVLPAGHAVLGIDLAQSRQAAVLTDHDSRVLARWRPRCSPWQLGDLLQQALQTARAAGFAGITVACEPTGHRWMIVQQLAAGRDIPLVCVQPLVVARAREAEDYTRGKNDDRDAVLIARQATQLHCYLPERADTRWARLRHLGARRTRLITDSTTCKLQLRDLLEVAWPAVLDTAGQPLKSATWLACLHAALDGGDGDLDTVHARGHQAFCDAVRAALPAWGATRVYGRITDAVYATLPDRAGVLTQRPGALERALAVLRGWKIVRDELAAVETAMLDLLDQLDIRALAGSIRGVSAISVAAILAETGDPARFPTARAMVKHAGLAPIDNSSGNHNGTAKISRRGRPHLRLAAWRAVWGALRHNDVYATRHTHLTTRTTGKLTAQQASTAIAAALIRQIHAIITHRTPWNADIAAGRTRPNQEGTTKAA

SEQ ID NO: 209773 - protein, 353 aa, unidentified
MEQFIGCDAHKKFSVFVAVNEKGQAGEALRVAHDRQLYREFLAQLPAHSAIAVEASGSYSWLVDEMERSGHHPRLCNPLEAKRRMGLTNKTDKLDARGLAILLRNGTLPEVWIPPAEVRDQRELLRLRIFLVRLRTRVKNRIHGTLARHNVQVPGADLFGVAARLELVARLPELPMHSREAVEQKLTTLDFLETQIESAERRLESIMKVSVEADLLKTLPCVGKILSMVLMLEIGRIDRFPTAAHLASYAGLVPRVRSSGGRTHMGQVCGNVNRNLKWAFVETGNLIVVNQRRFAGTHVVRLYQRIKRAKNHQKAVVAVARHLAEAAWWILTQQEVYREPHGPRQQALSSTHG

SEQ ID NO: 209774 - protein, 403 aa, unidentified
MNSVGIDISKGRSTVAVMRPFGEVVISPFEVHHTDSELSALARRLKSLNGETRVVMEATGNYHAPVAKLLHDAGLYVSVVNAKLVHGYGNNELRHVKTDKKDAVKLANYGLDRWLTLPRYVPEEGARLLLKNCYRQYRQYSKVQTVLKNNLISLLDTVFPNVNRLFSSPIRGDGSEKWVDFVAEFWHCRCVSEKSEKAFANKYQRWCKKHGYNFSVAKAHTIHAEASGHIGVMPKSETTKLLVEQAVAQLRATSVALTALKREMLTLAAQLPEYPVVMGMFGVGPTLGPQLIAEIGDVRRFYSKKALVAYAGLDAPPNDSGDVTGKHKSMSKIGASSLRRTLFLVMSVYLRSAPLDESVYQFMDRKRAEGKPYHVYMMASANKFLRIYYATVKAYLESLEHTT

SEQ ID NO: 209775 - protein, 409 aa, unidentified
MMKQNIIFGIDVSSKSSTVCVVIDRIKQGETFKITNDSFGYQDLLDRLNQYLITPLVVFEATGVYSLSLQAFLEDYHIKYLKLNPLKAKKLMDNNLRHNKTDKVDAYRLALIQFNAPQKLRAPQPKEYHELQNASRYYEELTQALIINKNQLHRNLQSTFPQIESILSTSSGRVYWTIVSLFPHAQYVLNHNENQVFQSLLAISGIGRQRAHYLTTRLYALARQAYPYDNESSITIRAIQRNIANLLSLSAERDNVINYMEKLAMQANARSLNIYESIPGIAKTTAVRLVAELGDLSRFDTSAQIDAFVGIDPGRYQSGEKDSHLGITKHGNHLARKILYRTIIQMETVKATQPCHITDYYDKKKRSSNSRGYKKIAIASVHKLIRTMFALIKHDQLYDYNVATHNQRL

SEQ ID NO: 209776 - protein, 347 aa, unidentified
MRKIAYLSMDVHARNCVLGDMDGNGKFRGNRSFITCENNIINALKAVKAKRKYLVIEAGPLANWVAQTASAYLTQVFISDPRENALIYKSSQKYDKVDTKKLCRLLRLNEFKEVYRPESDQRAIFKAAAQHYLDLRDQLTALKNKIKAKYRQWGVIDVFTDSVYSVSGRDKFLKQVEHHPICLQLKRLYELMDHIAAIKQDAQKAMISLGRNYPEIKEFKKIPGMGPIGAHTFDAYIQSPHRFAKRNRLWRYCRLAVTDRSSDGKPLGYKRLDKSGVGELKALSHRAFMSAMKGDNEVKRFYLQSLQRTHNHKHARLNTQRKILSVMRSIWKKGKAYRAELFLDPSI

SEQ ID NO: 209777 - protein, 370 aa, unidentified
MKEYSEAFIGFDTAKKKHAVAIADVGREGEIRSLGEIDSSPLTIERMIRKLAGRYEKLHFCYEAGPTGYGLYRQVRGLGHDCTVVAPSLIPKKSGERVKTNRRDAVTLARLFRAGELTSVWVPDTVHEAVRDLVRARETASQDLRRKRQQLLSFLLRHGRIFGGRQHWSRAHLHWLAQQKFDHPAQQIVFQDGVDAIDDAAARLRRLDEQVAAIVPSWSMAPVVEAYQAMRGVSFVVAVTFVAEIGDLRRFDNPRQLMAFLGLVPSERSTGERVRRAGLTLAGNKRARRVLIEGAWSYRYPARVSQTLQARLEGLPKAVREIAWKAQIRLCARYRRLNAAGKKLPVVIAAIAREMAAFLWAIARHVAPAA

SEQ ID NO: 209778 - protein, 362 aa, unidentified
MEFFGGLDVSIDQTAVCVVDDKGPVHLQTSVATDAGAIMKALKPFLPRLRRVGHEAGSLSPWLHPELTALGLPAACLETRHVHAAMSAQRNKTDATDALGIAHIVRTSWFKAAFIKSELCYRMRLLLTQRRNLKRKFLDIENTIRHSLKAFGVRLKGTSRGEFEQAVRAAVANDPLTRELMEAMLTARAVLWKQYCKLHDLVVKFVSRSELCRRFMAIPGVGPVTALSFMTAIDDPSRFRRSRDVAAYFGLTSRRHQSGTSIDVQGRISKAGDPEMRRALFEAAGVMLTRFKGKDKLKAWGSMLAKRGCRRKATVAVARKMAVVMHAMWRDGAAYVGDATTREEDVAARAAVKNRKLLGAHA

SEQ ID NO: 209779 - protein, 387 aa, unidentified
MSATASGVAQTAIDVTLAAIFVSLELSRDRWMITSLSPGKGEKMSKHSVDSCDVTGLLSHFKTLRAKAQARTGKSVPIVVIYEAGLDGFWIHRVLEREGIESHVVDAASVLTSRRRRKAKTDRIDGEALLRTLLAYKRGEPRVCAMVRPPSPEDEDRRRLCRERKTLVAERVAHVNRVKGLLFAQGISDYEPCRRDRRERLEQLATGDGRPLAAHLKAQLSRELDRLELTLQQLKAVEAERDALLAPKGEAAPAPVAALAGLRGIGPEFAAVLWLECFFRSFGNRRQVAAYAGLAPTPWQSGSVRHEQGVAQSGNPTLRSTMVQLAWLWLRHQPTSALSRWFRERMKQNSGRGKKATIVALARKLLVALWKFVSSGVVIEGAVMKAA

SEQ ID NO: 209780 - protein, 346 aa, unidentified
MAAFAALDVSKKSTSIHIVDEKGVCLWRGKTLTNPDALAEALSPFSDDLALVGLETGSWTTWLWHELTERGFPMVCMDARQAHAALSVTINKTDANDAQGLAHLLRTGLFRKVRVKGWEDVQKRTLLRARSTMLRCVLDLANAIRGALRTFGISLPAGTGNGGAKTFERRVVTCLTARADLAIIIGPLLEAWRAGRTQVARHERAIRAIVRSDPRCQLMMTVPGVGYLTALGFVGAVGDPETFRSGRTAAAWIGLTPRRYQSGTINQQGRISRQGDKLLRAYLYEAAAHILTRSSKDCALRRWGLKLRDRIGFKRANVAVARKLAVVLHAMWRSGRPFEAEGCATG

SEQ ID NO: 209781 - protein, 450 aa, unidentified
MARRTNRFDEVQRYVAGIDLAGHADHYVCGPRKDDGTNDIEHFGTTTNEILRMVAWLKERKVVSVAMESTSVYWIYVYDMLEKAGIRCLLVDTRTVKMVPGRKSDVKDCQWLQKLHSCGLLRGAFRPPEEFNAVRSVIRESENVRQMRTQSIQSIQKSLDQMNVRVHHAVSDIDGVTGMRILAAIVGGERDPRVLAKLRDKRCRKSEAEIVEELTGNWREEHLFNLKQAYDTLCFLDERIADYDRQVRDMYAKIAAKFPPVEPPPGGTGPKKPKDKDDAKAKADLARICGGFDMTKIDGIGYDNAAAILSELGPCLDAFPTESHFVSYVGVAPALGKSAGKNVSSRKKHKNTSRVGLVLKLAASTLTRSESSLGARLRCTRSRTCSRTAIKDVAREMAKRIYRGLRFGQAYVDEGEQAYLEHTRERTIKSMKKKILKLGISAKELGIFAA

SEQ ID NO: 209782 - protein, 347 aa, unidentified
MNKPVTTPTATVFCGIDVSAATLAVAVIEQDQPFQQREFANRASGHKALIGWLAKRKAQVRVSLEATGIYSLDLALALDAAPQLEVAVLNPKMVNHFAQTLRRSKTDTADAQVLAEYSRRMPFTAWQPPSLNGLRLRVVGRHIAALVAQHTREQNRLHAVAGSQAVSRCVLQDLKRSLVSLQQRIVKMRRAARELIRADAQIEQRFRLLTSIPGIAETSAVQILGELVLLAPQLTVRQWVAHSGLDPVHQDSGTSVHKRSRISRCGNRHLRRALYMPALSAVRWDPHMKAFYEALQLRHKTKLQAIIAVARKLLHAIYGIFKCRTPYDGCKLFPQLILTTELQSASR

SEQ ID NO: 209783 - protein, 337 aa, unidentified
MRYIGLDVHKTNTTACVLSAGGKVVRTFEVRSNASGLQALHDYMRKTDYVVMMESSTYSYVAYRFFSDRGVETHVVHARSLRTITDSDKKTDRKDAEAIARYLRLWKKGDLDLSISFIPDREQAELKDLCRYREEISRKLGDDVRRIRAHMRRNCQELPPEFENLATKKAREMIIRSWPHDYTLVDRVHEYSRMLEHSKQIAREVESRGRDDGNIELLAQIPGVGMQTAVQIMSMIVDINRFPDAERLCAYFGLVPRVRDTGGKEIHGRMTKAGDSMMRSVMERVTLSHINHCDSTVTQYYRRKEKEMGRKKALVTASRKMLVVIHSVLKGQRPFTA

SEQ ID NO: 209784 - protein, 350 aa, unidentified
MLIIGCDFHTRYQQIAMLDQATGELTERRLQHENGEAEAFYRSLAQPVRVGIEATGPVHWFEHLLAECGHELWIGDSAKIRASETRKQKTDERDAALILDLLLSKRFPRIWVPTPAERDLRQLLWHRHKLVRMRTMLGNQLHFLAMSQGLCRKKKLFSKSGRMELTCLHLGPWASRRREELLKLLDGLDPAIAELDRAVLQAAKQREDAVLLMTHPGIGPNTALAFLLAVGPVSRFACSKKIVSYFGLNPSEESSGGRRRLGAISKQGNTMVRWLLIETAHLAVRQDPELRQDYQRLKFRRGHAVAKVAIARKLAVRLYWMLRSGAVYAQLVRRQGSPGATLMNASSPLG

SEQ ID NO: 209785 - protein, 413 aa, unidentified
MDRVIERCCGLDVHKASVTACLRVPGEAGEPHQEIREFAATTPGLLQLRDWLASFGIELVGMEATGVYWKPIYYLLEDDFECWLLNAHHLKNVPGRKTDIKDAEWICQLLEHGLVRPSFVPPKEIRELRNLTRYRKTQVEERTREVQRLEKILQEAGIKLSSVASRVLGASGRVMLDALVEGTTDPEVLAELARGRLRSKLPTLREALQGRFSSHHALMVGKMLAHIDYLDESIAELSTEVERVIAPFSYEVELLDTIPGVNRKLAETIIAEIGVQMSQFPTHRHLASWAGMCPGNDESAGKRRSGKTRKGSKWLRSALVEAAHAASRSKGTHLSAQYARLRGRRGPKKAAVAVGHSILVIAYHILEREVPYEELGEDHFDQRRSNEAYTKRLVRQLERLGHQVALEPLSQPA

SEQ ID NO: 209786 - protein, 353 aa, unidentified
MDPIYTSCAGLDVHKRSLTACVRRLRPGRSIFQETRTFGTMTRDILEMADWLASEEVTRVVLESTGVYWKPIYNLLEGRFTVLLVNAKHVKHVPGRKTDVQDCQWLAQLLQAGLLKGSFIPERPQRELRDLTRHRAQLVAEKTKVTNRLHKVLEDTNIKIGAVASDLLGASGRAMLRALITGQQTPQEMANLARGLLREKIPQLVLALEGKVTEHHRFVLEELLDHLEDLERRIERFSRRLEEVSGPFDQAIQALMRLPGIERRGAENVVAEIGATLEAFPPAAHLASWAGMCPGNNESAGKRKSGKTTKGSRWLRAALCQAAWAATRKRTPTSRPNTVAWPDAGARNGPWLR

SEQ ID NO: 209787 - protein, 355 aa, unidentified
MTASYDYHIGVDYHKSYSHLVVQDSSGKTLRSGRVKNDRQSLGGFLERYRENSHAVVEATRNWMVMYDWLDDICDDVVLAHPLKVKAIADAKIKTDKIDATVLAHLLRADLVPQAWAPSERSRDLRIALRERMFYVRLRTMTKNRIVTVFDRYPEQTAQLKKLGDLFGKAGRVQLAQVNVSEIDRIQIDRGLEFIGDIDVRIKQSEATIRAMTKANANVKLLKTIPGIGEFFARLIDAEIDDISRFRNPKKLAAYAGLVPSTYSSGGKTFHGKIIRQGNKWLRWAFVEAVSPAIASDAQLRVQYEHLKIRGTNKARVAIARKLLTIAFQVLRDQRAYEPRGESTMGGASTISRLS

SEQ ID NO: 209788 - protein, 409 aa, unidentified
MQPILQSCCGLDVHKSMVMACIAHGPLDKPPIFEIRKFSTMTNDLRSLSEWMKEYAVTAVAMESTGIYWKPIFNILEDDFDVVLANAQHIKNVPGRKTDVKDCQWIAHLFRNGLISGSFIPPREIRELRDLTRTRRKLVGAMTSEKNRVQKVLEDANIKISSVVSKVFGVSSLAMICALLEKDELSADEIAKMARGKLKKKVDQLVEALNGNVTDHHRFLLKQHLGHIDFLVEEIKEFDEEIQRRLMPYQKEFKDIQSVTGIKGISAASAIAEIGVDMSRFPDAAHISSWAGVCPGNNESAGKKKSGKTRRGNNYLKATLTEAAWAASRTKDTAFSAMYRNIAGRRGKKRALVAVGHQILIEVYRVLKTGDQYQDAGAAAVTERRLQNREQRMIRELKRCGYGISKVVA

SEQ ID NO: 209789 - protein, 339 aa, unidentified
MNVMIGIDPHKASHTAVAIGRDEDQVASVKVRATSHQVDQLLCWADVFEKRTWAIESVGGMGYLLAQQLVARGEDVLDVPATLASRVRVLATGRSNKNDPNDAHSIAIAALRAPALRQVEPADHGEVLRLLSKRNWDLGRQRARVVCRLHSLFSEVAPGGISKQMYVSDAETLLARVVPETPAQQMRVDLILELLDDVRRLDVQTKESHRRIRLAVKASGTTVTEVYGIGPVHAASLIGYSGDIRRFANRDAYASYNGTAPIEFSSGGRTVHRLSMRGSRRLNNTLHMAAVTQIRNPGTEGRIYFERKVAEGKTKKEALRSLKRQVSNAVYRQLVLDAR

SEQ ID NO: 209790 - protein, 434 aa, unidentified
MTSDSAAVRATKGKIVKPWMETTHFAGFDWARDHHDVVIVNRQGQIVAELRFQHSLEGWQQFKSQVKDYPALAVALETSQGAAVDQLLQLDTSIYPVNPLSAKSYRERKAPSGNKTDRLDAWSLAEALRLDGEHWKALQPLDPLTQQLQLLCRDEIGLIEQRTALVNQLQQALCEYYPAALEAFEDWTQPFCWDFILQFPTSERLVTAGRRRWEKFLHTQKLWRPETAAKRLEIFQRACRFCGSPAVTAAKSLLALSLAKLLKALQLQLDQYRQQIEALFKQHPDHDLFGSLPGAAQTLAPRLLGEIGGPPRRFEDTEGLQCVAGTAPVSFQSGQIHRVRIRYQCNKILRHTVHLWTQCCVRVCPWAEVYYRQKRAEGKSHACALRCLGQRLLKILWKMLQTRKTYDADLHARNQKQHGSWVLTLMKPDTKTCQ

SEQ ID NO: 209791 - protein, 346 aa, unidentified
MEYIALDVHKKYTWARVENTEGEKLYESRLQHAHGSIKNFISRWERQSPVAVETVGNWYWIVDEIEEGGGKPQLVNARLAKLMMGSVNKSDKLDAKGMNRLQRTGTLPTVWIPPSSVRDARELPRTRMVFSRQRTQLKNRVHATLAKYGFVVEEASDAFGKKGRAIVEGILVKLPPYTEQAVRRVLGQLDHVNENLKVIEAQMMEAFAPCAETNLLKSLPGVGDILAVVIWTEIGTMERFARAEQFASYCGLVAREHSSGGKFHYGAVRRDVNVYLKWAFVEAANSSILNRERCGYDHISRLYQRIKSRRGHGKAKVAVARHLSEASFWMLKKGESYREPVSSTQR

SEQ ID NO: 209792 - protein, 360 aa, unidentified
MNKHKYVAMDVDSANIVAGVYDDKGKTVMQCCLRNEGKAIQEFLKLLPGSVHVTFEEGTQAAWLYELIRPLVAEVVVCNPRENKLLKAGNKSDRIDVAKLGKLLRLGELRPVYQGPSSGQGLKQLVHSYEALVDDATRVKNRLKALYRGRGLNTKGETVYGQEQRQQWLTQLETKELQTRAASLYEELDCVLRLRAEAEKVMCRAARKHEAYKSISSAPGLGAIRTAQVLAMAITPHRFRGKRQFWPYCGLAVVTRTSSDYEWVDGSARRKRKPVQTRGLNQNYNRTLKAVFKGAAVSALQQHPEFKEYYQRLWAKGMRPEMAQLTVARKLAAIVLILWKKGERYDSKRLNQAAPGTDQQ

SEQ ID NO: 209793 - protein, 371 aa, unidentified
MYIVGIDIGKNHHEASIVSPEGKQIGRSLRFATTHKGADSLMNFIFKNIGNSPCVFGMEATGHYWYPIYSFLKARGYTIYVINPIQSDSLRKMYIRQTKNDSIDSFLIAEVIRFGQFTTTSMADENILAMRQLCRYRDSVISSRTEIKLRISTIIEQIFPEYEKQFSSLWLSTSMGILEKYLTPENIENAPIDELFEIIKDKSHNRLTKAKAISIKGAAADTFGIKIAQDTFSFQLKQLIDRMNFLDKQIEALDIEIMKYYEQFDCYLHTIPGIGIIGAATILAEIGDISRFKNSSALVAFAGIDPTVRQSGEFNSTHNHMSKRGSPYLRHAIFLAATTCSFHNSPLNAYYKKKRDQGKHHLTATGAVARL

SEQ ID NO: 209794 - protein, 332 aa, unidentified
MENFYFIGVDVSKKKLDFCVMFEGKVVHEEETANHQGAIIALLHQLEEEYGIAGGQMLVCAEHTGQYTFPLACACKAVECKLWLENPAEIKYSSGVQRGKNDKVDAKRIAIYAKRFQDRVQYYERPTEDIERLKQLEAERTLYVTDLAKYKGQLKDQKDYMPRKLYECKMKRLQALMDDLEEAIQAITDEMDEVIASCPVLSRQRELLMSIDGVGCVVATNMIITTEAFTRFDDPRKFNCYAGVAPFSYSSGSSQHSKARVSHRADKVMKRLLHLAAVAVTHRVGGELKKYYERKVAEGKNKMSVINALRAKIVARMFAVIKRNEKYKPILS

SEQ ID NO: 209795 - protein, 362 aa, unidentified
MRIIGCDLHTRQQTIAMLDTTTGEVVNLTLTHEGNNVREFYSTLPRPVRVGIEATGSMMWFVNLMEELGIECQVGHPAKIRAAEPRKQKHDRRDADLILTLLVENRFPAIWLPSKELLDLRSLLRHRHQWVRMRTRVQNALQAIALANGLRRGPSLWSHDGQNTIASLPLTPHTAYRRSELQALYAKFEAEIEKLNQRVEEQACGRPGARLLMTHPGVGPVTALATEVFLGDAARFADSKALASYVGMIPREYSSGGRQRLGGLSKQGNPLLRFLWGEAGAHAVRRDPELKRFYRRKLNQKGFGKASVAVARKLGIRLWIMLRDQIEYKEFCRRGQKQQKSSDACAGMPETRYGATSHRPVD

SEQ ID NO: 209796 - protein, 448 aa, unidentified
MDVLQLDVEDEEEVLARVAAIDVAKATGMVCTRVPHENSPGRRVTKVWQVSATTNAIIDLADHLVCAGIERVVVESTSDYWRPFFYLLEARGVRVWLVNARDVKNVPGRPKTDKLDAIWLAKLNERGMLRPSFVPPVQIRHLRDYTRLRLDLTTERSRHAQRLEKLLEDALIKISTVATDIMGVSGRAMIEALIAGQRDPHALADLAKGRMRVKHDALVQALTGQFDHHHGELAQILLDQVDALSAQIDHLTARIDELIAAIPAAQGVDADGTTGPHAGTGPDAAVLPAIARLDEVPGIGARAAQIIIAEIGLDMNQFPTAGHLASWAKLCPRANQSGAKNRSGATGKGNRYLKGVLGEVAAAAAKTNTFLGHRYRRLVKRCGKLKALVAVARSILVIIWHLLSDPASRFHDLGPDFHDNRLGPERTKRNHIRQLEALGYKVTLEPAA

SEQ ID NO: 209797 - protein, 387 aa, unidentified
MEARIVNTPSAALDNEPARCFFAIELSKTNWLVAAQGPAGNVSRYQLPGCDANALLELIERIRARVKRETGRPVEMVSCYEAGYDGFWLHRFLVARGVRNCVIDPASLQVDRRARRAKTDRIDAERMLRALIRYLRGEPDACSVVRVPSVEEEDAKRPHRERHRLVAERVQHVNRIKSLCALQGIYDYQPLRPDRMERLDHLRTGNGQALPVRLKAEIERELERLQLVLEMIVSLEAERNAITKDKAPTAHLHADKIRKLVRLKAIGPEFSTALVGEVFYRQFANRRQIGSYVGLTPSPFSSGAIARDQGISKAGNPKARTMMIELAWMWRRHQPGSALTVWFNERVGNLKGRPRRIAIVAMARKLLVALWRYLETGLVPTGAILKA

SEQ ID NO: 209798 - protein, 400 aa, unidentified
MNAVGIDVSKGKSTVAVLRPFGEVAVSPFDVIHNDSDLKQLAELIKALPGESKIVMEYTGTYFEPIAQFLHNNGIFVSVVNALLVHDHGGNSLRKVKTDKKDALKLASYTLDRWTELEEYVPADEQRKTLKILNRQYNQSNKIQTMMKNNLISLTDSVFPGINKLFTSPERQSDGHEKWVDFLNAFPHKDCIAGLYLSVFKTKYKSWCKKNKYNYSDSKAEEIHTFAKSIIAVLPLNYSVKLLVTQAVMQLNTILETVSSIRKEMDRIASSLPEYKTLMAMYGVGKVYGPQLMAEIGDTRRFRNRRAITAFAGLDAPPYQSGQLDITSRHISKRGSAALRKVLFQITQVFILNKPENEPVYQFIDKKRSEGKHYYSYRIAAANKFLRIYYAKVNQTLKLL

SEQ ID NO: 209799 - protein, 347 aa, unidentified
MSKQYKTYVGADLHKTFTYFIAQDPSGKEKACEKMKNHGEYFRDFLSAQAQPVKVVVESTSNWAWFCEEVGKGGFDVMVAHAAETSAKSGTREKSDAGDARLLATLLRGNLIEKQSWQAPDEIRRLRERMRYMQFLNRHKTAMKNRVHSVLIRLNIKTPQRDAFCKRGRIFLRNLDIAPEYKTTITRCLDTMEKMEEMLKEDLAFCMRQVKEDPLAGLLTTIPGISAQLACMIRYETGDIDRFERHEAYVNYTGIVPGKRESADTCQDIGITKEGSFWLRWAFMQAAQTADRQRRGRISNFYWRHFRRTRNRNKAVTATARELAVIAFYIMKRRRKYFDETRVCVDR

SEQ ID NO: 209800 - protein, 369 aa, unidentified
MNSIVYVGMDVHKEQYTLCCYSYDTDKVEYKQTIPSDYKLVLKYMEQIRSRYEGEVSFVCGYEAGCLGYSLYHQLKDHAVDCKILAPSTMAITNTHHVKTDKRDAANIARCLAFHTYSEVYVPDNDDNDVKEYIRMRDDQKLYLKKVKQQILAFVLRQGKRFEGGKTYWTIAHLKWLKTLELSDLQREALDEYLLTYEYLTEKISRFDERIEELASVERYEEKVKHMSCLLGIKTHTALSMIVEVGDFERFEKAPKFASFLGLVPSEDSSDTRVNRYSITKAGNSHLRRLLVEAAQSYTRGNVGHKSVALKQRQKGNPPEVIAYADKANERLRRRFYKMTLNKGVNRNVAAIARELACFIWGMMTEPVS

SEQ ID NO: 209801 - protein, 361 aa, unidentified
MEHTRFVGLDIHKERISISVAESGRSCAVEYLGEISNDPVAIGRLCDRLERPGKTLAFCYEAGPCGYGVHRQLISLGHRCDVVAPSLIPTRPGDRVKTNRRDATMLARLHRAGELTPVWVPDVDHEAMRDLIRLRSVVRQIVSRARQHLQGFLLRHGRKHGRGTAWRMAYRRWLSTLAFEHPAQQIAFQDYVDAVMDAERRLQRVEEQISGLLPEWNLRPVVDALQAMRGIALITAVELVAEVGDFTRFANPRQLMAYFGLIPGEQSSGETIRRGGITKTGNAHARRALVEGAWAYRMKARIGRHKVDRIEALPKVVRDIAWRAQLRLCTRYRSQLSLAPSRQCLIFYVAGMGRYQPSRTS

SEQ ID NO: 209802 - protein, 310 aa, unidentified
MMASLDVFVGIDVSKDRLDVHVRPLGVGFSVSNETTGHAALIARLRPLRAKRIVLEATGGYERALWLALSEAGLVAAVVNPRQVREFARAAGRLAKTDRLDAAVIAHFAETFVPRPGKPDAVADRLGEHVRYRRSLQEEIVALEHQRRRLETPALRERAERRHAALRAEVKEIEREMRAIVDGDPGKKALFACLTALKGVGLVLACTLIANMRELGTLTRHQAAALIGVAPLNHDSGVRRGYRAIAGGRRRVRNVLYVATLSAVRSNPVIREFYRRLSADGKPAKVALVACMRKMLVMLNGRVRDHLATA

SEQ ID NO: 209803 - protein, 353 aa, unidentified
MRGKHIDSEVILGVDTHLDIHVAAAINGAGILLGTRSISVSSTGYLDLIDWASSLGHIRRAGVEGTGTYGAALADALKGHGITVFEVNRSDRAKRRLQGKSDPTDAENAARAVLSGTATATPKNHSGACEAMRIASVARRSAVKARTQAINQIRALLVSAPQDVREKLWRVKAQDCVNACLRMRGLGITPHLSTLAVALKSIAKRWQFLSKEVAHLDAELDRLTRIHASKLRSRFGVGPNTAATLLSVAGDNPDRLKSEASLAALCGVNPLPASSGKTVRHRLNRGGSRAANNALWTIAMVRMRSDPRTRVYVQRRTGEGLSTKEIHRCLKRYIARELYPIITAELSELQAVS

SEQ ID NO: 209804 - protein, 399 aa, unidentified
MSVVGWDWASQAHDVTVLNDAGGVLDRWAFPHTEAGWVMTLDRLRRHGEPGDLPVIIEKTSGLVVDRLLAAGHPVVPVHPTAFYAARPRWGASGAKSDPGDSYKLADYLRTDGHRLRRLEPADPGLRELQALVRLREDQVRARTAATNQLWAMLGNYWPGPRDLFCSLASPIALAFLTAYPTPQSAARLGEARMAAFLRRNSYRGGKEPAVLLARLRAAPQASVVLPAATLAAMVGAHVQQLRSLQAAITGIERLIASRVAAHPRAQLLGKLPGVGMINLAQLLAEVGPILDRASSAEQAASECGAAPVTRASGKTTGVYFRWAASTRARKAITAFAHNARMQSPWAAKLYADARARGKHNPNTNRIVARAWSRVICACWHTAGPYDPAIHHARQRFTA

SEQ ID NO: 209805 - protein, 411 aa, unidentified
MERVCDNCGGMDLHKKLIVVCLKQGHKQEIREFGATTRELLELCDWLKQGNCQKVAMESTASYWKPVYNILEASGIEAIVVNARHMKNVPGRKTDVKDAEWIADLLQHGLLEASYIPDKDQRELRELVRYRKSLTGERARELNRLQKMLEGGNIKLSGTVRNINGKSARNILELILSGKKFDSATYDELYEKNIIAHNLKASKEQIIDDLNGFLSPLQRRMMKELLNHLDELNTHIRNLDDEIDNFMKPEEKKAASAIQNIPGIADSSAKSIISVIGYDMKRFPTARHLASWAGISPGNNESAHNRKSGKTTKGNTLLRETLVICAHSAARVKTSYFHAQFQRLRLRRGAKKAYVAVAHSMLIAIYHILNEGVAFKDLGAEYYNKFNKERKINSYLKKLKELGYEMPAVVA

SEQ ID NO: 209806 - protein, 342 aa, unidentified
MAERVTDYRLSVGIDIAATTFTAAWLSPGGAPTPPVTHPQTPQGFAALQRQFAATGSAPDTTLVVLEATGSYWIALAVTLHAAGYAVSVINPLQAHHFAKAQLRRAKTDPLDAQNLAQLAAALRPAVWTPPPAVYHEVRQRLTARDALVTMRQQTRNQRHALVQWPVVVASVHNHLDAVIAMLDARIADLEAEIATVLQASDWAESLACLMSAPGIGMLTAAWLLVSTMNFTLCATPEAATAYAGLAPMPHTSGTSVRGRTGIGHGGQSRLRTALYMATLAAVRHNPALHVFYTRLRAAGKPHKVARCAAARKLLHLAWALVTKQQRYQSNHRIVAPALAAA

SEQ ID NO: 209807 - protein, 437 aa, unidentified
MVPHAGGAVEEEKTMDILHERVSGLDVHKNTVVACARIMTGKETTRECRTFATTTDGLLALRAWLSECQCTHVAMEATGVYWTPVWRILNEGDFELIVANAAHIKNVPGRKTDMNDAMWLADLLAFGLIKASFVPTEPMHELRSLTRTRKQLVREQTRHVQRIQKTLAEANIRLDSVISDIMGASGRRIIEAMIAGVRQPHKLADLAGKQIKATPKELYDALHGRLTDHHRFLLDLHLRQWDGLDTTIRTIDLEIDQRIDRMDKDRAAGEPPFRSLIGNADTVPGVSAVSAPAILSEIGCDMSRFPSAGHLLAWAGMCPGQNESAGKRKPSRLRKGAPWLKTMLVQCAWAAIRKKGSYYQAQFLRLRHRRGPQKAICAVAASILTAIYHMLKDGTEHHDLGADYFDRRSTETKAKHLVARLTKLGFTVQLQPSAKAA

SEQ ID NO: 209808 - protein, 430 aa, unidentified
MPYRIAGIDVHKKMLAVVVADVEVDEEFHFERQKVGTTPADLRRLADWLVEHEVEEVVMESTAQYWRPVWEALEQHWRPRRRARDGAPRLAGTLHLAQAQSNRGPGGRKRDFPDAERLLKRLVAQELTLSFVPDVEQRLWRTVMRRKYQVTRNRVQLQNRLEALLEEAHIKVSSVVSDLLGISARRMLQALADGETDPAALATLAAPRLRATPAILCDAFQACPTLHPVYRRLLKLTLEELRVIEDHLGQLDQQMADLLAAHHDAVQRLAEVPGLGVDSAQQIIAEVGATAAPFPSAKHLASWMGACPGNEESAGVNYSHRCPKGNRQMRRVLNQAANAAVKAKGTIFAVVYRRIVPRLGHAQAIGAITHRLCRLIWKILHQRIRYEERGPAVSTEAKKVRARKMIRELRSLGYRVELPTPPLGHPAGCR

SEQ ID NO: 209809 - protein, 316 aa, unidentified
MKREQFITDVAGVDIGKLKLDVAFAVSEDHQSIANKAEAFPALITWLHDHGVQRVGMEASGDYERDVREALEDAGFEVIVHQPQEIKAYARFRRVLAKSDKIDARVIAQATQHWEGVVARRDPELTELAEMLTLYEFIADKAAETKTLAEHQRLAEVKALNTATIHHLVQQKQKILAIILQRLRARPDLCRRFELLQSLPGIGPVIAAVLVVRMPELGHLEHGQAAALLGVAPFDRDSGMMTAKRFIKGGRQRPRDFVYLAALAAKRWAAHFKTFADRLIANGKPPKVAIVAVMRKLIEAANLVLKRQTPWTTVQP

SEQ ID NO: 209810 - protein, 398 aa, unidentified
MRFAGIDIGGERHAVAVVNEGGAVVVKSTFFGEDAAGYQRVRDLVGDPHDCVVAMEATGHYWRNLFAFLVGQGFKVALLNPLRTRRFAEEELERTKTDSVDALGIARFAAQKRPVPTPVADEVTAELRELVRLRTRYVDEHSDRMRQLHRAVDLGFPEFTCHVRMNTVLATAILARYPTARSYSGVSVRKLARLAYDGRHQVGEILARALIETAKISVGSHHSEAYGLQVKYTCSDMELLRNRVKQLDQEIEGKLQTHEVGKLLTTIDGIGSRTAACLIAELGDPSRFRDAAALASYVGVVPRLRQSGKRAFSGARGLPLGNARLRHRLWMPTLVAVRKNPWLRAHYDRLLAAGKRPKVAIVACMRKLLGAIYSVARNRRPFVPRLATAGHEQPMTAS

SEQ ID NO: 209811 - protein, 296 aa, unidentified
MTSMPQPVGDDQDSRVRTEEIILGADTHKDLHVAAVITALGVLRDTETFPASAAGYQALLGWAGTFGILRRAGVECTGSYGAALARHLQQAGIEVIEVNQPDKASRRRQGKTDSLDAESAARAVLSGRACGSAKTGDGPVEMLRMFKLAKSSAIKARTQTINQLKAVLVAADPHLRETLSGLSNVLLIRRCTQLEVEAPCDTTSAAAAYTLRLLARRILALTSEIRELEQQITAAVTSHTPRLLTRCGIGPDNAAALLIAAGDNPDRLRSEASFAALCGVSPLEASSGKTRRRRLM

SEQ ID NO: 209812 - protein, 363 aa, unidentified
MRFYKNQHQFYIGIDLHARTMYICVINNIGETVFHKNMECSRDNLELVTNTFGKDIVVGVECIFTWYWVADFCAENGIDFALGHAYYMKSIHGGKTKSDKIDSEKIANLLRGGMFPIAYAYPKEKRAVRDLLRRRLFFVRQRAELSVHLQNTNHQYNINEPLTSSRMRSEVYRNTIPQKFTDPATLKMVNADLAMFQSYHDIITKLEFQIEDSMEVQDPVSYSIINSVPGLGFILSLTILYEIDDIHRFSDVGKFISYCRLVKCSHESAGKKEKGGHNKIGNVHLKWAFSEGAVLFLRNNERGQRWHDKLVQRYGKAKAMSIIAQKLGRTVYYMLKRRESFYPDKFYGDKKIENKDSGGEHLA

SEQ ID NO: 209813 - protein, 409 aa, unidentified
MYFIGIDIAKSFHVAAVLNIDSDKVLHTLKFNNDEEGFKKLFLLLSSLDEISNFTVAMEATGLFFENLYLYLKEIGFKVVLLNPYQTNRFREMDTMKKVKNDNIDALMIAALIKSGRYSKAYVSEDSYQSIKSLYRHKSSLQDELKKHKRQVSTLLAVVFPEMEQVIKDPFNVTGLALLEKYPTARHYHHASVDRILKTFRGIKGNNFNEAKATKLLELAKCSIYQGNGVDERAFVILSHIRQIRFINSEIEQCETQMLALFNQQPKLDDTEEQEIMNIIDNLRTIPGVSDKTIFALMSECGDLSRFTNQNSFIGYLGLYPTLEQSGNKTVHGSIAKRGARLAKKALYQAAIASVRHNKELNKLFHDKVSLGRAKKEAIVIVARKLAHIILAIYKNNVAYNPNRVFVAS

SEQ ID NO: 209814 - protein, 334 aa, unidentified
MNNDAPVAVGIDVAKATLSVCIRHPDGSEHALTLRNIEADIKGKLLPSLAGCSGKVVMESTGHYQWRAALALTDAGVDVRVVNPILAKQYTAGNVRKVKTDPADAQGLCRMAAVADNLPERFRSSRGNLSIRKKIGVIASLKHSLQAMRASLASLAEARDILGSVASPAEKAILRSVKSLQRSLAKLEAEVVAATEATKGADVDRLAAIPGVSRMTASVALACFAERPSMTPKSWIAFAGLDVSSRESGIWRGQCHLTKRGNAYLRSRLFCAAWGAMLHDEGAKSYYDRLRREGRSYAEALVIIARKIVRTMFVMMRDQSKYDPAKFFPIAATA

SEQ ID NO: 209815 - protein, 369 aa, unidentified
MNSLTDLREVVDVVIGVDTHVLTHSAAVIDAATGGVLGEITVEATAQGYVELVAFADEHATLRAWAIEGTGGHGAGLSRHLTGRQEIVVELDRPKRAKRRNGAKSDPLDAIRAGREALARTRLGTPRSGGDRQALSVLLAARRSAVQAATEAQLQVFSLVIAAPEPIRARFRGQKLPGMLTTAAGLRVHPSWDVETTTTVIALRSLARRFRVLTKEAAEHQKAILAIVRSWRPDLLEQLGVGPIVAATVLCAWSHPGRIHSEAAFAMLAGVAPIPANRGQVTNRYRLNRYGDRQLNRALHTVVQSRIRYHDPTRDYVARRTSEGKTGREIKRCLSLHRPRPLPPPRKRPQPGLTDHRSVALTLRRMVNK

SEQ ID NO: 209816 - protein, 392 aa, unidentified
MVCVGIDVAKDKHDCFILSSEGEILENVFTIANNRDGFETLLQTIRSCTSPTDNIKVGLEATGHYSYNILGFLLNKGLTTYVINPLHTNLYRKSLSLRKTKTDRIDARTIAAMLMSDVDLKSYSASAYHNEELKSLTRYRFNKVQERAALKQSVSRLVNILFPELEALVPTLHMTSVYAILNEFPGSRQIADAHLTHFKTVLSDASRGRYGREKAVEIREAARRSIGSAMPAKSLELRHTIRLIRELDQEIEDVEDAIQTILVEMAPPILTIPGMGYRMGAMILAEIGDFSRFDSPDKMLAYAGLSPSTYESGKLKATGAYAHMEKRGSRYLRYALFNAAKCVCQWEPSFSAYLAKKRAEGKHYNVAISHAVKKLVRLIFALQTSGKAFQPN

SEQ ID NO: 209817 - protein, 380 aa, unidentified
MMIATTRPEMSVSEPTLYVAFELGKKEWKLAMTSGFGVAPWLRSVVSGDWRGVDRALAQGRARFGLAAAVPVVSCYEAGRDGFWIHRALQQRGIRNRVVDSASIEVNRRARRAKTDRLDALKLVTMLVRVCWGERRVWSEVHVPSVAAEAARQVSRERTALTQEQTRLTNQLKGWLATWGATLPRRRPSGWWTTVSDWAGAPLPVEVQARVARAEARRAVLEGQIAELDAQQRAAVTTAAPGSAVRQLVQLKGVATTSASVLLDEGLVWRAFQNRRQIGGFLGFAPTPYESGESAREQGISRAGNNRLQSISIQLAWNWVRWQPHSALTVWYREQFGKGKRSRRIGIVAVARKLVIALWRYVTTGVVPAGAILKGARPVA

SEQ ID NO: 209818 - protein, 405 aa, unidentified
MKQPATRHYAGVDWASRTHAVCVVDQHGAIRARFDIPNTGKRFTGLCKRLAKLKVAGVAIERPDGPLVEAMLDAGLKVVVITPRQVKALRSRYGASGAKSDPADAYLLADVLRTDGHRLAPLTPDSDPTKILRALSRTRKDLQEARVALCNQLTAQLERCFPGAIGLFADLHSPVAVAFLRRYPTSHAAAGLTQAKLAAFLRRLHYPGRTPVAILLGRIQTAPVSGIGPAEAAGRAVCVLALLDAIQVTARQERELEAEIIERLEVHADAKVFTSLPKAGHGVRAAALLGELGDVRARFPDNDCLAALAGAAPVTITSGKRRVVKFRWACDKKLRAALIDFADDSRHASPWAAKVYADALARTGRHPHAVRILARAWIRVIWRIWQDGMAYDPAKHRGAVRLLAA

SEQ ID NO: 209819 - protein, 340 aa, unidentified
MQVTTIGVDLAKNVFQVHGITATEEVVFNKPMRRAQFLTFFAKLPPCLVGMESCSSAHHWARELTALGHDVRLIPPMYVKPYVKRGKSDAIDAAAICEAVTRPTMRFVAIKTVEQQSLLSLHRARDLLVRQRTQIINNLRGLVAEFGVFIPRGLARVMGFAENITLGEEQDLPDIANEVIHNLCERLMALHKRVRWYEDRVKQVAREDARVRLLRTIPGVGAVTASAIIASIGDGHQFRNGREFAAWLGLTPANKSSGGKEKLGRITKMGDQYLRSLLGVGMTSLVRQTRSHPERASKWLTSLLERKPARVATVAMANKTARIVWAVLTRNEPYSPRAAV

SEQ ID NO: 209820 - protein, 389 aa, unidentified
MIAVMRPFGEVVVSPFEVLHTDSELSKLAGLLKSLDGETRVVMESTGNYHAPVAWLLHDAGLYVSVINAMLVHDYGNNSLRRAKTDKKDAVKLANYGLDHWLTLPRYVPEEDTRLMLKTCYRQYQQYSKVQTMLKNNLISLLDIAFPDANRLFTSPPRADGSEKWVDFVAAFWHCECVCGLSEKAFTAKYHKWCRKHGYNFSEDKALDIYASACGHFGVMPKTDTAKLLVEQAIFQLRATSATLAALKQEMQSLAASLPEYPVVMGMFGVGPVLGPQLMAEIGDVRRFHSKKALVAFAGIDAPPYQSGQMAIRSRSISKRGSASLRRTLFLVMSVILQRAPMNEPVYQFMNKKRSEGKPYRVYMMASANKFLRIYYASVKAYLASLDHD

SEQ ID NO: 209821 - protein, 331 aa, unidentified
MNIIEVIGIDVGKLENDARIHTNQKNYSFENNPAGFKKLENWMLKNINCPKQQLLIAFEHTGLYSHPLSVYLTENQYSYIVIPGLELKRSMGITRGKDDKIDAKRIAQYAYEKRDDLVPYQLPSEEIIQIKRLLSIREKLVKQRAGYMGTLKEYKHFLKRKDNEMLFDVHEKMIAQLSKHIARIETQLDDVIKGDDQIKKMYELITGIKGIGPQTALFIIAFTNGFTQFKNWRKFASYCGIAPFPNRSGISVRGRTKVSNLANKKIKSLLDLCAKTSIQYNMEMKIYYEKRVSEGKSKMSTINIIRNKLLSRVFAVVERETPYVNTVRYFK

SEQ ID NO: 209822 - protein, 387 aa, unidentified
MQAETPATVVATTTPSDVDTLFASLELSKSKWLLTVNSPGGEKFSKHQLGGGDSGSLLGLLARLRTKAEQRCGRPVRVMAIQEAGLDGFWLHRLLVDNGVESTVVDPASIAVDRRHRRVKTDSVDGETLLRTLMAFARGERRVCSMVRAPSPEEEDRRRLTRERGTLLKERIQHTNRIKGLLNGQGVRDYDPLARDRIARLEAVRTGDGRALPQMLKAEIRRELERIEMATAQLAIVERARDAQLRTQAEGGENPAAMLLEIKGIGAEFASLLWLEALFRNFANRRQVAAYAGLAPSPWQSGAIDRDQGISKAGDRRLRRTMIELAWFWLRHQPSSALSRWFQERVGAGRGRIRRIAIVALARKLLVALWRYVTQGIVPKGAVLKAA

SEQ ID NO: 209823 - protein, 422 aa, unidentified
MPTNLEIAAFIGLDWADQQHVIRLRVAGSETVEAQRLDQKPETLRTWIGQLRQRFGARPVAIALEHSRGSLLYALMNVDFLLLYPVNPQSLAQYRKAFYPSGAKDDPQDALLLLEMLEKHRDRLRVWVPDDADTRCLRLLAENRRKLVNRRTALTNQLTSLLKESFPQALDWAGSLDSEWACDFLQNWPNLHLLQTTSTSRLRRFYRDHTRLDSQAIQQRLQQISQAQPLTSDPAVLAAAELIIPALARQLRCLLESIQQFDQQLKDRFQLHDDYTLFHSFPGAGPALGPRLLSAFGSNRNRFECAAEVQMLSGIAPVTERSGKSRWIHWRLACPKFLRQSFHEFAAQSILVSPWARAFYDQLRARGVSHQAAVRTLAFKWIRILFRCWKNRTPYDEQIYLASLRRRRSPLCAVLSSTPTGA

SEQ ID NO: 209824 - protein, 385 aa, unidentified
MLYVGIDIAKNKHDLACIDETGETVIINFRFANSYQGFYQLKQKLEQLSPITQGVQIALESTGHYNYNIVTFLRDWGYNVFAYNPLIIKEFAKSQSLRKTKTDRKDALLIARKLRSDVTPERYQTDRVLDELKELTRYQNRLIQSRSKCKNLYIRLLDIIFPELHRIVSNLHNHFVYDLLTNYPSPQKIARARFSSLLKIKRLTADKAHQIQETAKQTIGNASTALSLELVQLIESIKHYDKQINQTQEEINRLMTGLDSPITSIPGIGSRLGAIILAEIKTIHNFKNPNQLQAFAGLDPAIYQSGQMDNTGHMVKRGSSYLRYALIQAAKLISIYSPHFKAYLRLKISQGKHYNVAVTHVAKKLTRIIYHLLKANQLFDETKLR

SEQ ID NO: 209825 - protein, 336 aa, unidentified
MTLYCGIDLHSNNHVVCVIDDKDRRILEKKLDNDPELTIRILSGYKKRLQAVSIESTFNWYWLADALMEAGYQVELVNTAKVVQYSGLKRTNDRYDAFHLAHLMRLGILPTGYIYPKQERGLRDLLRKRIQLVQDRSSHLIRFKFQVQMHTGQTIRTDRIKARKFQLPEIGDANVQLALSSHLAMIRALTVQIKILEKSILSQVEPVAGFEWLKTAPGIGDILAEVILLETGDIFRFKAPGNYASYCRCVDSRRESNGKKKGENNRKNGNRYLAWAFIEAANFAIRRSEKAKRFYLKKEKATNAIVARKALAHKLARGCYWVMRKQQAFDQDRVFG

SEQ ID NO: 209826 - protein, 482 aa, unidentified
MKKTNIYQNQSQELLHLFEEAGSGEKVMCVPMDYAKKDHLVMFCNGYGDILRKPFSVKNTPEGIAYIDDQVSRSCRRRGIAKKHVFFGGEDANSFAKNFVSTLRSKGYVVANVNAHDAKKQRVNLQASTDRIDLMGIATMLLNCRANCCPAQSGIYRNLRTLVRHRRRLVQMLTEVKNRVHGIVDELFPGFLNENSSGIVPFTQSSLYLMEDRFSPKQIRRRRREKLIEILKQLGTSKAEDTAAKLQQYAAKVLHAPVEYVDTMQLSLAQHVKHIRCLKQSVAQMDKEIALNLAKTQGGFLTSVRGIGLVLAAGVTGEIGDVNEQKPLNNLASYSGIVPRVKQTGGCDGKTYTGPVAKRCNRILKDYVVKSAYHLGLHGPPDLMADYKRRDASGQHADFGIGRRYLRMAISLMRTSQVYLPPILRKDDCTREQRAGYYLMSWPYLREKWQKVGALEAAFANNRPLGLWRQIVQDIYDIKLKL

SEQ ID NO: 209827 - protein, 466 aa, unidentified
MARKRKSDKSKKRNHPIRSLETIQANAAGIDLGSREHWVAGPPQEDKKPNVQRFGTTTPELLHLADWLTQQGVKTVAMESTGVYWIPLFEILDSKGFEVLLANARQVTHVPGRKTDMLDCQWLQLLHACGLLRGSFRPSDDVCRLRALIRERNTMVEQRSDWVRRMQKSLNQMNICVHHAVSDITGVTGMRIIRAIVDGERDPQILAQMRDRRCQKSEEQIADELTGNWRPEHLFNLHQALKMYDQLCTVVADYDSEILSYVQTLQPEDNNDTDVPPPPSKAKARGIAKRGQEPLRQALYRFSGFDLTTIDGIGVDTASDIISELGLDFTVFPSENHFVSYLRLAPNLSISAGKKVASKSKASTCTRVATALRMAALTLRHSKTALGAFYRRVAWRKGASVAVFATARKLAQLVYRLVRYGQAYVDAGEKAYETRFNQRRLKFYTKALKNMGYNVRPLSTAEAGTL

SEQ ID NO: 209828 - protein, 344 aa, unidentified
MEHIGIDVHKVESQICILTESGEVVERRIRTQRERFAAVLGERPQAKVLIEASTESEWVARCLEELGQEVVVADPNFAAMYATRSRKVKTDLRDARTLAEACKLGAYRAAHRTSDRQRHVRAQLSVRDALVQTRARYISLIGALLRREGLRVASGSAASFVRRVAKLALPGQLKSEIAPLLAVFVSVDRQLVWIDARLEHLAQSDETVERLCTAPSVGPVTAAAFSSTVDDPSRFNSAHQVEAYLGLTPSEWSSGEKQNKGHITKAGNNRMRKLLVQVAVSILRLRSPRTEALRKWATGIAARRGKKIAIVALARRMTGVLFAMMRDRTCYLQAALPEPSAQIA

SEQ ID NO: 209829 - protein, 343 aa, unidentified
MEKITTIGVDLAKSVFQVHAVDAAGRVVVTKALRRRDMEPFFSRLAPCLIGLEACASAHHWGRLLSLMGHEVRLIPPAYVKPYVRRQKNDAADAAAICEAVTRPNMRFVPIKSEDQQAALMLHRARSLLTSQRTAMICALRGHMAELGLVAPRAVRNLRPLLEILADDEDDSLPALARAALRPLAQQLTSLEQQIAQLDQQLLEWHRITEVSQRLAGIPGVGPVTATALAASVTDPSMFASGREFAAFLGLAPRQNSSGGKTRLGRVSKMGDRYLRTLLVTGATAVLSHSKTRTGRLDMWARALLEKGKPTKLVALALANKMARIAWAIMRRGEPFRLGPAEA

SEQ ID NO: 209830 - protein, 409 aa, unidentified
MEKTLFVGCDVSSTDFVVCFMNHQGDELGYKTYSNNLPGAREFEALLLKMMGQYSFISLKIATEATSFYDLHLVEFLSSSVSLEKFQTQIFQLNPKIVSNFKRAYIDKDKTDINDSFVIADRLRFGRISEPYENNKPYLPLRRLTRYRFHLVETIAREKTYFFTHLYLKYSNFSLENPFTSVFGTTSLSIITEFSPEELAQMTVEELMDFIVKKGRNHFSEPQKIVKAIKSMVSNSYRLKPGLSSSVDIILTTCLHTIKTLEHSLKDIDKAIEREFKAFPNTLQSIKGIGPVYSAALFSEIGDVNKYDNQAALAKQAGLTWRKFQSGNFNAQETTMTKTGNKYLRYYLVQAANMLRVHNKEYKDFYSKKFKEVNKHQHKRAIVLTARKFVRLLYALLKKGQLYLHNYQQ

SEQ ID NO: 209831 - protein, 466 aa, unidentified
MTAGNKLWRNRKERKAWVRRLRSEDPGLEVVHPHAAGIDVGNSAHYAAVRPDRDPEPVRRFECFTADLYRLAEWLQSCGVKTVALQSTGVYWIPLYEILEDRGFEVYLVNARHTKNLPGRKSDVQESQWLLKLHTYGLLNNSFQPPAEIRVLRTCWRQRAEHVSGAATCIQRMQKALTQMNLQLANVISDLSGLTGQAIVRAIIAGERNPQKLAELSHPRIEASREEIAKSLEGNWRPELVFVLRQEVEMYDTYQRRIAECDQQLQKHLASFGDTVLPQSPEAEPRERKAKPTKNAPRFDLGSELKRITGVDLTRIDGIDVMVAQTLLSEVGMDMSRWNTEAHFSSWLGLCPDNRISGDKLLGKGTRRVVNRAATALRLAARNLIRSRSYLGAQYRRLRTKLGAPKAITAMAHRLARLVYRMLKYGQRYVDKGTEYYESRYRQQQIHLLQKKAAKLGLQITVAVQS

SEQ ID NO: 209832 - protein, 414 aa, unidentified
MDIVHYRCAGLDISKRDVKVCVRVQEPTRARASATVTTWSAMTSHILALREHLIDQKVTLVVMEATGDFWKSFYYVLEDGPFEIMLVNPRHVKNLPGRKTDVSDAAWLAQLGAHGLVRGSFVPPPPIRQLRDLTRTRTTIVRERAREIQRLEKILEDAGIQLSSVVTDLHGVSGRAMLDALVAGERRPEVLADMAKRRLRAKIPELTEALTGRFKAHHAFLVRVQLDLIDQRTRIIDELAAHIEEEMIPFQVARDLMATIPGISTKIADVIIAETGADMSRFPTAGHLASWAGTCPGSNESAGRVKSTHTRPGNPYLKGALGTAAMAAAHSHDTYYSAKYRRIASRRGPIKAVVALEHAMLVAIWHMIQTGETYNDPGDDFYVRRRPDQTKTRALNQLRDLGYRVTLEPAAEVA

SEQ ID NO: 209833 - protein, 466 aa, unidentified
MAAREKRQKRMSAQLVEDEDYQLRYDRVAGIDVAKESAAVCVRLPPAEGKARRTSSLQAVPATVPAVEALAAELTAAGVQAVSLESTSDYWRVWFLVLEDAGLQVQLVSSSQARNLPGRPKTDKEDARWIARLTEMGLLRPSFVPPPEIRSLRLLTRHIADLTADRTRYWQRLEKLLEDALCKLAAVTSKLAGHQTARAIIEAIIAGERDPLVLAALGRGRMSGDRLPALAEALTGMRFTPQHAQAAASVLRAIDLLDAEITAMHEQVTAHLDTIPASWGVDADGTAGPGAGLDGDPAVLPAAERLDEIPGISRQAAIALIAEIGLDMSRFPTPGALVSWAGLTPTAQQSGPRKSRGKKGHGNTYAKRITVLAANGAASTDTFLGERFRRISARPGGGGRRKAGCAVARSILIIVWHLLADPADRYRDLGPDWHARHTDRSRKARNAQRQLEALGYDVIITLREAA

SEQ ID NO: 209834 - protein, 342 aa, unidentified
MNIKQIGIDIGKMTFHMVALNGENEIVIRRQFTRSQLITFFTKRTGQDLNVAFEACSGAHWLAHQLIALGHKVRLLTPESVKPFAKAQKNDWNDALAIAEAANRPGRHVVGVKSQEQLDMQALHRVRQRLVTSRTALINQIRGLLRERGLVFRSGRAQFEAFVRDKLVTGDVDLNPLCRTLFAALIAEYEAMKSRLDEINQELEEFAKSNEVCRALLPVPGVGVIVATALFSAIANISDFKTGRDLAAFLGLVPRQRSTGGKTVLLGISKRGNTYVRTLLIHGMRSAFYHRQKRNDRMAAFMERLSARGMHTNKIVVASANKTARIIWAILSKNTYYQSQPV

SEQ ID NO: 209835 - protein, 343 aa, unidentified
MDHSAGLDVSVKETSVCIVDDTGRIVREVKVASEPEALLSVLTNPGYHFKRIGLEAGPLSQWLYSALAEAGLPVICVETRHMRAVLKAQINKTDRNDARGMAQMMRVGLYRPVHVKTLRSQKLRMLLTHRKLLQSKAIAIENDLRGTLRNFGLKVGMVGKVKFEARIKELVENLPDLAELVEPLLVVRRVLREQFVIQHRRLLAIVRADEVCRRLMTTPGVGPVVALTYRATVDVPARFRKSKAVGAVFGLTCSKYQSGESERSGRISRCGDEMMRVMLYEAAQSMLLHSKKWSWLKAWAMQIARRRGMKKAIVALARRLAVIMHRIWVDGTEFRWTREAAVA

SEQ ID NO: 209836 - protein, 334 aa, unidentified
MENIALIGIDLGKNSFHIHCQDHRGKAVYRKKFTRPKLIEFLATCPATTIAMEACGGSHFMARKLAELGHFPKLISPQFVRPFVKSNKNDFVDAEAICEAASRPSMRFVQPRTESQQAMRALHRVRESLVQDKVKTTNQMHAFLLEFGISVPRGAAVISRLSTLLEDSSLPLYLSQLLLKLQQHYHYLVEQIKDLESQLKRKLDEDEVGQRLLSIPCVGTLTASTISTEIGDGKQYASSRDFPAATGLVPRQYSTGGRTTLLGISKRGNKKIRTLLVQCARVFIQKLEHQSGKLADWVRELLCRKSNFVVTCALANKLARIAWALTARQQTYEA

SEQ ID NO: 209837 - protein, 429 aa, unidentified
MEGSSVRLDLFREMKSTIRGSEKYLLVGIDVAKNNHHAFFGTPNGNTLRKNLVFDNSIKGFESLRSLVCDIQNQHGLVEVVYGLEPTASYHKPLAEYLIRLDEHVVYVSNVAVAKNRALLDGRWDKNDKKDAANVADLVGQGRCLYYDVPEESLLELRSLIAFRIRLKKGEHALRMRLRNNVFAQYFPELDKLYIKAGQPDDLVLAIAEHCLDPREIAGMEFDAFLKLITTRKIRIEQERRLRELWEFAKNSAGCQVHDAARWEAKSLVNQLKSVRETVKANEQRMEAAARKFPEYECLLSIPGFGPIVSAMVLAAIGNPSRFNSRKQVLRLAGLDLSAERSGKDSDRAKPVISKQGKSALRYALVQAAMVASALNPGIRGYFSNLLKGRELERGIKLKMKVKLAAKLLVVAWTLMKRREQFKPSCFSG

SEQ ID NO: 209838 - protein, 430 aa, unidentified
MAPINGECMMDKERRWFVGIDWAAQEHVVSLYDDAGNKIGQRKFSHGGTGLTDMIAWLLKASGGEPGEIHVGIETPHGPIVEALLERRFNVYSINPKQLDRFRDRFTVAGAKDDSRDADVLSDSLRTDMRAFRKLSIADPLIVELREWSRIDEELKVEHGRLTNRLKHQLWRYYPQMLELADDVGAKWFLELFEAVPTPEKAANVREKTIARILKNHRIRRFDAAHVLAELCKPALAVAPGTIEAATAHIRSLIGRIRIINGQLADAGQQLDRLCKKLSEPVADEDGEAAPGQKPEQRDAAILDSLPGVARTVLATLLAEAPDTLQRRDYHALRALCGSAPVTRRSGKSRMVVRRYACNHRLRNATYHWAQNAIQHDHTSREKYDALRARGHGHARALRSIIDRLLSVACAMLDSGTLFDPEFASKRATG

SEQ ID NO: 209839 - protein, 431 aa, unidentified
MSSELVYVGLDVAKATLDVALRPSGESWQTANDDAGVADLVARLRALTPTLIVCEATGGFERPAVAACAAVGLPIVVANPRQVRDFARSTGQLAKTDALDAAILALFAERVRPTPRPLPSDAAQLLDALLTRRRQLLEMLVAEKNRLGFAPRPLHRGIRQHIRWLERQLDDVTGELAALIKASPVWQAKSDLLQSVPGIGPIVSAVLLGELPELGALSHKQIATLAGVAPLARDSGTLRGKRMVWGGRGGVRTALYLAALSGRRWNPQLRVFYERLRAAGKPKKVALIACARKLLTILNAMVRDQARWAIPTSGIQYSCLRIAPKLRRHTVHCTNAMLPQTTGAASFRRMLGGHVGYAELRPLNDCLTRRRHHPSVKTRRRFVMFLRGFLQRSVAVILLSGQLSACMGRRTAHLSPADVVERQRPGAVRVQ

SEQ ID NO: 209840 - protein, 463 aa, unidentified
MAARKQKRMTAQVAEDEDYQLRHERVAGIDVAKASGMVCLRLPPAEGKSRRTSRTWEVAATVPAVEALAGELKAAGAELVSMESTSDYWRIWFVVLEAAGLRVQLVNSSQARNLPGRPKTDREDAQWIARLTEMGLLRPSFVPPPEIRALRQCTRQLTHLTQDRTRYWQRLEKLLESALCKLSSVVAKMAGSASVLAMIEAMINGERDPRVLADLARTRMRGKLGELEEAFTGMQFGEEHAFAAASHLRMIKMLDDEIRALEDRVRERIAAIPAAWGVDADGATGPEAGRGPDAAVLPAVARLAEVPGLTENSAAALIAEIGLDMSAFATPGALVSWTGLAPVPHQSGPRKGRGKKGQGDNYAKRIAGGAGNGAARTATFLGERHRRIRSRPGSGWNKASCAVGRSILVIVWHLLKDPSARYRDLGPDHYAKHTDRNRKARGHIRQLQALGLDVVVTPREEAA

SEQ ID NO: 209841 - protein, 341 aa, unidentified
MNPPKYFVGFDIAADDFAATIGTYPWRITASPQTFANTLAGFEQMLSWLVQHEATVEQSVCCLEATGVYGEAVAHYLVARNYRVAIEPPLKVKRAFHPTGHKNDPVDSQQIAAYACRFFDELSFWQPPSERIEQIRVLLTTREQLTKETTMHKNALTALKRKVASTPLAERIHTETIQQLQGRQKEIDTEIKRLIDQDDTWRGWKKIILSSPGVGLMLAAHTLVLTDGFTQLFSSKQFSAYLGICPYEYQSGKSVYRPARSRGYGPSAVRRLLHLAARSLAHHHPDFRSYFERKRAEGKPKRLIYNNIENKIVKIMCAVLKSKTPYDRNYRPALASVSTTT

SEQ ID NO: 209842 - protein, 369 aa, unidentified
MNKFSKYVGLDVHQETIAVAVADMGGEVRYMGEIVNTPEAIAKVVTRLKRGTDRLTFCYEAGPCGYTICRQLRELKQDCQVVAPSLIPKKPGERVKTDRRDALSLARLHRADELSPVWIPDEAQEALRDLTRAREDMKHLQRQAKQRLLSFLSRHGHRYTGRSRWTQPHWRWLEGIRFARPEQQIVLQEYIDTVQACGKRVASLDREVETAAHASTLWPVIEALMALRGISLLAAVTVVAELGDLTRFANAPQLMAYLGLVPSEHSSGKRERRGGITKTGNGHVRRVLIEAAWTYRHAARKTAILQRRAERTAPEVQEIAWSAQKRLCQRFRNLMARGKLKNQVCTAIARELVGFIWAIGQQVAPLSRA

SEQ ID NO: 209843 - protein, 358 aa, unidentified
MSTLAQLVDGVIGVDSHRDTLAAAALSPVGGLLGQTAARANTAGYRELLGFARSHVPGRRCWAIEGAGSYGAGLAAFLGANGEQLVEAARPKRPPRRSGAKTDAIDAVRAARDALGQQVHELAAPRQRGDREALRVLLTTRRTAMAARTAAVNQLEALIVGALEELRAELRSLPTRRQIAVCAALRDRPTRSLEHQMTVRVLRSTARRIHALHAEAEELHAQLQRLTAAIAPWLLELFGVGPVSAAQLLVSWSHAGRFRSEAAFAALAGASPIPASSGKVTRHRLNRGGDRQLNQALHTIALVRLRDDLETRAYATRRTTEGKSPRDVKRCLKRIIARQLFRLLERYDQPGVEVLMAA

SEQ ID NO: 209844 - protein, 340 aa, unidentified
MGEITTVGIDLAKNVFSVHGVDAHGKTVLRKTVSRGALLELMAQLPRCLVGMEACSGAHQLARDLQPLGHLPRIMMPKFIIPYRRNQKNDGNDAEAICEAVARPNMRFVPIKSVEQQAVLVVHRVRKELVELRNGQINQARSLLAEFGVVIAVGRYRFRQQIGAALDDPRVPELARQVLHEVNARIRALDEDILAYDRRISAQVRDSAAMQRIVAVCGVGPVTASAVVASVGDAKLFRNGRQFAAWLGLVPRQFSTGGKPVLGRITKQGDVYLRTLLIHGARSALLTLTRRDDKLSRWASALIARRGFKKACVALAAKNARVIWALLAKGEAFQLDRAAA

SEQ ID NO: 209845 - protein, 356 aa, unidentified
MSYDVKYIGMDVHKEAVVIAVLNDSGKLVMETIVETKASSILQFIHGLRGELHVTWEEGTWAAWLYDLLQPQVPHIVVCNPRRNALLKEGSKSDKVDAQKLADLLRTGMLRPVYHGENGLRTLRELARSYQTISKDLTRVMNRMKALYRGWGIPCAGTQVYAARSREEWLSKLPQVGVRRRAELLYQQLDGLQALRREVRPEFLAEGRKHKAAKLLRQIPCIGPIRAARLIALMQTPQRFRSKRQLWTYSGLGIETHDSAQYRFVSGQLQRSRKPQQLRGLNRNHNHEMKEIFKSAATRASCSRGPFHDFYAALLAKGMRPEMARLTLARKIAAITLTLWKKEERFDVEQLKTQAA

SEQ ID NO: 209846 - protein, 345 aa, unidentified
MNKVMAGIDLHSNNLVIGIMDMDGKRVASQKLSCKLKEVVEFLSPFKTRLEQVAVESTYNWYWLVDGLQTLRYPVVLANPAGMEQYSGIKHADDTNDAFFLAELLRLKILPTGHIYEAQLRPVRDLLRRRLTLVHHRTALMLSFKSLYTRTTGQEMSLGELKELEIKAAQELYDHPANQLIAGMQIKHIEQLSESIEKIEKAVLGCARELPLYAKLTTLPGVGTILGMTITMEVGDIKRFAEAGHFASYCRTVEAKRTSNNKKKGANNSKCGNKYLAWAFVEAANFARRYDEQCRKWSERKAARRGKVIASKALACKLAKAAWYLMALGTDYDAKRMFGQPATAQ

SEQ ID NO: 209847 - protein, 307 aa, unidentified
MTVSVGIDVSKHSLEWVAGAQGAIHHLRNEPRPIAGLVHRLRSLAPERVLVESTGGYERLLVAKLAEAGLPVVVVNPRRVRSFGEGMGMLAKTDCIDARLLALFGEKVRPPIRPISQGRDRLLADFVARRRQVMALIVAEKNRRDTASDPVRRLMAPLLRQLEQHLEKLDDRIETLLLEDPERAELHDLLQTVPGVGPGVARTLLVDLPELGHLGRREIAALVGVAPFARDSGTFRGIRRIRGGRASVRTVLYLAAMSAARFNPVLRAVYQRLRNAGKPPKLAFVAIARKLLTILNAVAREKTAWQN

SEQ ID NO: 209848 - protein, 346 aa, unidentified
MLIIGCDFHPGFQQVAIFDKRTGEIQEKRLQHRAEAEEFYRSLAGQPVGVGMEACGHYPWFERLLEELGFELWFGDPARVRAAVVRKQKTDRRDAEHLMHLLIEERFPRIWVPSLEVRDVRQLLVHRHKQVQARTRTKNQLQAMALGQGVQKKRRLWTKAGREELEQLPLLPYAAERRRRLLEALDGLEAEISELDRRVAEEAGQRPEAARLMTHPGVGPVTALAMVLTLGPAERFGSAKQVSSYFGLIPSEESSGGKQRLGRISKQGSSFLRFLLVEAGQTAARLDPQLQRFYQRLAVRKNRSLAKVAVARKLATRLYLMLREDWNYAQLCQAVMQVSPSHSVAG

SEQ ID NO: 209849 - protein, 335 aa, unidentified
MQIYGIDLAKEKFDVSFFDLTSKKVSNQPSHKVVKNNFKSIGRFLETLPSDAVLVAEHTGVYGDTLLKCCMDSNVKIAFVGGYVIHRYRATPDRAKTDVLDCALLRDFGERYPDKLKYKTFPEEALYELRQLARHREMLVEQRKQLITADRSEDCRPIRSLAVKRSMDRIKEMLDTEIAETEKEMLKVINGHDSIHHNYEIVKSVNGVGLVTAVELLVKTDNFTKITTARQYAAYAGTAPYEKSSGKMDKGAHISKIGNRRSKTLLYICAESARLHNKEIKLYYERRTLIDKKPRHYVLNAIANKLLRIIFTLVEKGEYYDANFIRQDPRVVKYN

SEQ ID NO: 209850 - protein, 457 aa, unidentified
MNRKTTKSKIDRTMPMVHPNAAAIDVGATMHMAAVSADRTPEPVRSFGTFTTDLYRLVNWLKECGVETVVMESTSVYWIPIFEMLDARGFTVFLVNARDAKHVPGRKTDVSDAQWLQRLHSYGLLRASFRPKGQIAELRAYVRQRERLLEYAASHIQHMQKALTEMNLQLHHVVADITGATGLRIIRAILAGEHDPRELTHLRDYRCHASAETIEKALTGSYRAEHLFALEQALALFDAYHEKVSACDVRIEAVLKELSTGRGRGSGLLPSSRRRTVQTNAMAFDVRAALFALLGKDLTQIDGLGPYLSLKLIAECGDDLSAWPSAKHFTSWLCLAPSNKISGGKVLSSRTRRSGSRAAAQLRLAAATVGRTDTALGALYRRLSARIGKAKAVTATARKIAVLFYNAVQHGMEYVDPGASVYETRYRARVVDNLHRRAKAFGFVLQPAEPTPSVAVS

SEQ ID NO: 209851 - protein, 454 aa, unidentified
MCLEGRPVLEPNAAGIDVGAREMFVAVPPGRDENPVRVFPTFTEDLEQLANWLLQCGVTTVAMESTGVYWIPLYDVLEQRGIRPCLVNARHMKNVPGRRTDWHECQWLQFLHSVGLLRPAFRPEENICAVRTLLRHRNELVQAATQHVQHMQKAMTQMNLQIHHVISDITGVTGLAIVDAILAGERNPTELSKLRNSRIKADQETIRKSLVGNWRLEHLFTLRQSRELYRTYQQRIVECDLEIEKLLTRFEPRVDPTERPLPRDQKRNRAGRKRRKKMGHPNPGFDLRTEAYKLFGVDVTQIPGVEESALPLFSEVGRDMSQWPTAGHFASWLNLCPDNDISGGKTLWRGMRTVKNRAGHLFRLAASSLHHSPTPMGNYLRRMKAKLGPSPAITATAHKIAVIFYTLVKNQTEYDETIWATRDTEREKRLERRLKRQAKQLGYELVPIQEKPAA

SEQ ID NO: 209852 - protein, 418 aa, unidentified
MAMKIVRFNCCGMDVHKDLVVATIGITDRQSNITEYFQQSFSTLNSDLYRLKDWLNSYHCCDVCMESTGKYWIPIFNILEGEINVHLTHPKYVKAIKGKKTDKKDSKWICDLFKHDLIKFSFIPPKEIRELREIARYRYKLVCMRSSERNRYQNCMTVSNIGLASVVSDPFGKTASNIMKEVMKPNVIDDDKILKLIHKNCKNKDKILDSLHGYHIEADQRFKMEKSLNHMEYLDQLINSCEAELVKRAYPLRESFQHITQIKGISSLSAILIISEIGIDMSQFESDKQLVSWAGLSPANNESAGKKKSVRISKAGQYLKPLLVQCALSTIKDKTSYFGRKYSNIKKRRGHKKAIIAIARMMLGSIYHMILTGEVFQPTDYESFMNPQSDTKQSLTVEEALNFLKQSGIDISSIQINL

SEQ ID NO: 209853 - protein, 329 aa, unidentified
MVTASLLPVVGLDVSKATLAVCYHVNELVKHLEVSNNKAGFQQLVKACGAHCRFVMEATGTYNLALAYYLHEQGGEVAVLNPLVIKRFIQMHLSKGKSDRKDAQWLLRYGQQQPVKVWQPDETVLVECRQLEQVNEQLLKQKTMVSNSLEALQRQPVISKLALKRLQQMLKTLTQQVALVEAELLALLEQRFAAQMTLLCSIPGIGRKTAGMLLLFAGGFTGLDNYRQLIALAGLSPREHTSGTSIRGKVRITKMGGGLIRGKLFMCSFSAKKTNAACAALFDRLVAKGKNKKLALIAVCNKLLKQAFAIVKSGVPYQADFSSKLAPIA

SEQ ID NO: 209854 - protein, 350 aa, unidentified
MSQNLNSAVAVIGIDIGKNSFHIVGLDYRGAIVLRQKWSRGQVEARLANTPPCLIGMEACVGAHHLSRKLKALGHDARLMPAKYVRPYSKGQKNDFRDAEAIAEAVQRPTMKFVATKTAEQLDLQALHRVRERLVSQRTGIINQIRAFLLERGVPVRQGLRFLRAELPRILAAPPDVLSARMVRVISDLAEDWRRLDERIDHLSTEISVLARQDAGCERLMSVPGVGPIISSAVVAAIGTGDAFAKGRDFAAWLGLVPKQISTGDRTILGKISKRGNRYLRVLFVQAAWVVLIKPQSWERHGLKRWIEAAKKRLHRNVLAVALANKLARIAWSVLARGRTFEARSAMAPA

SEQ ID NO: 209855 - protein, 472 aa, unidentified
MGKGSGGNGMTRGDRRRNARRERLRGLLPRGGAVIGIDLAEDKQALAVIDHDVRVLARKTVRVKAFRLGQALDWAAAQAKVKGFERVTVACEPTGPRWMQVQRLCAERGLPLVCVQPLVSHIAREQQDYTPHKTDESDCVLIGRLATELHCYVPEELDETWAHLRHLGRRRAQLITAATASVQRTRDFLSVAWPTVTEACAGPFESVTWLAALQVVTARCGGDPARLAAMGPEEFTALVRGNVPAWGGKKGWGTICGRVFAALTDTEGVVAWSRRGLLRRVADELGDLQRTRAQLRAVAADMVMVLGELGLSRLGDIPGLTAVGAAAILAETGDPRRYDSSSSLVKHAGLSPADNASGAFEGQAHISRRGRPGLRLTAWRAVWPMLQFNPVMAAKYAAMTQAADAAAADAGSRRARAAAAARARRARARVACAASLLRWIYSMVVHGTSWDAAVASGAAACQHAPRCQPEAA

SEQ ID NO: 209856 - protein, 372 aa, unidentified
MDQLSKIHLGLDVHKDSITIGRADPGREPARVVGKVPHDVSKLLKLLGKQGRAEQLHLVYEAGPTGFGLQRRLSELGYCCEVIAPSKMPRKPGVRVKTDGRDAMELAQASRAGDLCAVWVPDAADEAIRDLSRVREDAVKACTQAKQQLGGFLLRRDLRFEGKSAWTKAHFAWLAQLKFDAAAAQVSLTEYLLAVQAAIARVQRLDKALVDSIVGWRFESVVAALQALRGVAHVTAIGLVAEIGDLSRFAHPRQLMAYLGLVPSEHSSGERVRHGSITKTGNSHARRLLTEAAWCYRHPARIGRDALRRQDPLSQPVREMAWKAQLRLTKRFASLNSRGLQPNKACTAIARELAGFVWAVGMQALREKPTAP

SEQ ID NO: 209857 - protein, 352 aa, unidentified
MIIGCDFHPSFQQIAFVDQETGEYGERRLGHREEAERFYRSLAGRQVVVGMEATGNDRWLRKLLGELGEELRIGDASAIHASAPREQRTDKRDARHILRLLVENRFPSVWQPPAGNEEQRQLLMHRCRLVRMRTRIKNQLDSIAKSEGLTGSRRWSAERRGQIEALPLAGWYARRRADLLGMLDGLEERIKPLDVAVETAARQDAQARLLMTHPGVGPVISLAYVLVVGDWRRFPRGKQVGSYLGLIPSEASSGKRQQQMGHITKQGNTLLRWLLVEAATTAQRHDPGWHRQYVRLSMAKHHGVAKVAIAHKLAVRLYWMLRSGQDYGQMMERGSHARQSECPVGRSRRPIE

SEQ ID NO: 209858 - protein, 343 aa, unidentified
MDHFAGLDVSVKETSVCIVDDTGKIVREVKVASEPDALLAVLTNPAYRFKRIGLEAGPLSQWLFSALAEAGLPAICVETRHMRAALKAQINKTDRNDARGIAQMMRAGLYRPVHVKTLRSQKLRMLLTHRKLLQSKAIAIENDLRATLRNFGLKVGGVGTVKFEARIKELVEKAPDLMMLVEPLLVVRRALREQIGILHRRLLAIVRDDDVCRRLMTVPGVGPVVALTYRATVDVPVRFRNSKAVGAVFGLTPSKYQSGEINRTGAISKCGDEMMRAMLYEAAHILLVRSAKWSWLKVWAMQIARRRGLKKAIVALARRLAVIMHRIWVDGTEFRWTREAAAA

SEQ ID NO: 209859 - protein, 336 aa, unidentified
MRYIGLDVHKNNTTACIIANNGKPVTTMDVRSDEAGLQKILDHMDGQEFCVMMESSTYSYKIYRFFSKHDVESHVVHARSLKIVTESDKKTDSKDAEAIGRYLRLWKRGDIGLSMSYIPTEEECALKDLCRLKEEYSRKLADESRRIKSHMSRNLEEFNRNSDLNTNYVRDYLRNTYSKDFVLMARLDEYDRLKVQGNELKRLVERQKVNEGYVDLLESIPGVGRQTAVQLMSMIVDPNRFPDSERFCAYFGMVPRVRDSGGKEHHGKLTKTGDRMMRSIMERVTSSHVRFCDSSVTRYFKAKEAEMGTKKAMVTASRKMMTMILAILKRGTPFRA

SEQ ID NO: 209860 - protein, 413 aa, unidentified
MLKIVYPICCGMDIHKNFVVACIATTDDQGVTTYKKKRFSTFTNDLRRCASWLAENNCTDICMESTGKYWIPIYNALESSCRIVLAHPKYVKAIPGKKTDEKDAKWIADIFKHDLVAGSFIPPADIRQLRDLMRYRWKLTNCTVGEKNRAQNCLTVSNIKLDDVFSDVFGKTASAITDRLLKSNKPFDVTPYLSRRIKTPVEKIQAAVDGEMCAEQAEKLRIIRSHMNSLDLCKANLESLILSTAQKFLPQLELVMTVPGIQSYSAIGIISEIGVDMSVFPTSKHLCSWAGLTPQNNESAGKKKTTRISRAGAYIKPLLVQCALAVCKSNKHPEIKNRYLSLKKRRGHKKAIIAIARMLLTAIYNILKKNEPYNPELYLRCNNTPPEHRAVSVEEAIFILQRQGYLVTPSAPG

SEQ ID NO: 209861 - protein, 400 aa, unidentified
MRVLIGVDPHKRSHTAVAVDGDDVELDRMEVRASRVQVDELLAWAARFEERTWAIESVDGLGYLLGQQLVAVGEQVVDVPAKLAARVRVLASGRSNKNDAKDGYSIAVAARHAPGLRTVERADHAAVLRLLAKRNKQLGSTRTAAACRLHALLAELVPGGIPTEITVNRAARLLDSVTPADPVESTRHALALEHLDDVRRLDDQLRVLHRRMADAVKASGTSVTELFGFGPVGAAIAVGHTRNVARFASRDRFAAYNGTAPIEVSSGGRIVHRLSRRGNRQLNHAIHIAAITQIRHAHSPGRAYYERKIAEGKTKKEATRALKRRISDALYERLVADAAAQAGPGGQAGTTEQASVTGLTPQQPALGNSHSRTHNERTTRPAAATTTRRRRPHQRARNRT

SEQ ID NO: 209862 - protein, 430 aa, unidentified
MQVTTLGVDLAKNVFRVHGCDAGGKVAVSRSLTRRQLRVFVTNLPPCLVGMEACATAHYWAREIQKHGHEVRLMAPQYVRPYVKTNKSDTRDAEAICEAVRRPTMRFVAVKSPGQQDVQALHRVRQQLVKEQTALSNQVRGLLAEYGLVIPRGIAALRPALSKIVAEQDNGLSGLMRELVLDLSERLDRTQQRVRWYNQRIVQLLHHDERCQRLAALPGVGPLTATAVVAAVGNARDFKSGRELAAYLGLVPRHRASGGRTVMLGISKRGDCYLRTLLVHGARAAMRNLECRRDPRSVWADRLKLRRGTNIATVALANKSVWSDRLRFAVCVDYAADRKEHVAQSYRRKEPANGQSYQIRGSGRACTDDHRCGSGTKWGGAFAGRDRKPTGRVAQAAQEARARGAATSVLRSGTDRLCTLLGTGSARHNV

SEQ ID NO: 209863 - protein, 412 aa, unidentified
MVPHNTSTSASEVFAGIDWGGSFHQVCLINAHGEVIVQQRVQHDLAGLAELDRLLLVHRNAAGRLRVAIERADGLLVEHLHTIEVEVFCVSPKISARARERYRLAATKSDAFDAFVLADTLRHEHRHWRPLSPASPALAELRAISRDRDRVVIAQQATENRLRAVLEAYHPAPLHLFSSLDRDITLDFVTDYPTPEQAARVGEARMQQFCRRHGYSGRTDPTVLVERLRPHLLSAAEGTEAGKAFSASMFTEELRLLNAHLRAYDKRLVELLDQHPDTPIFTSFPGIGPVVAAALISEMGEDRGRFPAPEALLAEAGLSPVTRASGRTRQVRFRYAANRRMRHMIDWWAFVAAREDAWSRRIYDDARARRQGKYRALRGLGSRWTRILWRCWTDHTTYDPAIHHKQQEPAQA

SEQ ID NO: 209864 - protein, 372 aa, unidentified
MNYNTVYVGMDVHKESFTLCSMTIEDEKASHYQKTEADYKKVLKYLEFLRTIYGDNAKFICGYEAGCLGYTLYHQLMSQHVECVILAPTTMLEQRSRKRIKTDKRDAEIIAKCLAQHNYSPVHIPTATDEQTKEFLRMRDDHKLALKKIKQQILAFCLRHNYRYDGNSHWTAAHLRWLKSLHPEALYKEILDEYLLTYATLSDKLERLDKRIEELASKDEYKEAVKKLCCLIGVKTHTALSVLVEVGDFNRFASAKNFASYLGLVPGENTSSDDRNLLGITKAGNRHVRLLLTEAAQSYARGQIGYKSKDLKSRQSGNSAQVIGYADKANERLRRRYYKMVLGQSKKHNVAKVAIARELACFMWGIMTDHIA

SEQ ID NO: 209865 - protein, 311 aa, unidentified
MKEPERFVGIDISKEELVVAVRPSAELQSFPNTEEGLATLVGFLQPLGAHAIVLEATGGFARAAVNAMALAALPVVVVNPRQIRDFARSVGLLAKTDAIDARIIARFAEAVRPELRPLKDLETQKLEDLNNRRRQIVEMITAEKNRLVMAPPWSQKDIRSHIAWLEKRLKRINDDIDDLIKQSPIWRQKEKILTSVLGVGPVVTTTLLCGLPELGSLSARKLSALVGVAPFNRDSGQSRGKRSCWGGRAHVRAALYMAALTASRCNPVIRAFYLRLRLAGKPAKVALVACMRKLLVILNAMVKNNTCWQQA

SEQ ID NO: 209866 - protein, 457 aa, unidentified
MAKPKRRKHRKLDRSLPEMRPNAGGIDLGATEIFVGVPADRDSDSVRSFPTFTEDLHQLADWLQRCRVDTVAMESTGVYWIPLFQILQARGIEVHLVNAQHVHHVPGRKSDVLDCQWLQYLHSVGLLRASFRPEQAVCEIRSLMRHRENLVEMSCVHVLHMHKSLDQMNLQIHHVISDITGVTGLAIVDAIVAGKTNPKELAKLRDHRIKASIETVTKSLVGDYRPEHIFTLKQSLTAYRYYQQLIADCDHEIQQRIEAFDSKDQGPTAPADATSTETSKESGFNLHSHLERIFGVDLTLMPGFECLRIQTILSELGADLSKSPTDDRFCSWLNLCPKDGSSAGRRIRAPRIKTKNRVAQTFRLAAQSLHNNQSYLGDYYRSQRARYGAPKAIKNTAHKLARIFYRLVTTRQPYDETVLAKLEMHNQKRRLHKLQSLAKQMGYSLVPHEEGNFRSRL

SEQ ID NO: 209867 - protein, 367 aa, unidentified
MTVTIVDAARPVTGGVDARLDLNVASRLVTGGVDTHLDLNVAAALDPVGGLLGVAEFPTTAAGHRELLGWLSGFGPVARVGVEGTGSYGAGLARFLRASGVEIVEVDRPNRQARRRSGKSDPLDAVEAARAALSGRASGAAKSRDGNVEAIRALVVAKRSARSAKIQALNQIRHLSFTAPEQLRQRLAGVSRHHLAARAAGLRPATGAGADPVIAATKTALRILGRRVLALDEEKARIDALLTGLVTQTAPQLLAVFGVGVDTAAALLVTAGDNPGRLRSEAAWAHLCGTAPIPASSGKVTRYRLNRGGDRQANCALWGIVITRLGNDPRTRAYMTRRLAEGRSKPEVIRVLKRYVAREVYHRLPRT

SEQ ID NO: 209868 - protein, 408 aa, unidentified
MTTTEYELYVGIDWATQEHRVVVLDAARRPLHDRGVRQEGAALDAFATWLVTLVAGRGDAVAVGLEVPRGALIDTLLARGCHVFAINPKQLDRFRDRYTVAGAKDDRRDAHVLAAALATDRPAFRQLAPEDARIIELRELSRLDEELGQEVRRLTNRLREQLSRFYTQVLQLAPAADEPWIWALLQRAPTPAAARTVPRAVIQRLLTRHRIRRVSADDVRATLRAPALPVAAGTIAGAQTQVGMLVARLHLAHEQRATCGARLEALLEALAESQEHRDVPILRSLPGVGSRVSATMLAEASRLLAGRDYHALRAHSGLAPVTKQSGKRTVVMMRYACNRRLRDAAHYWGQSAVRHDPHSAAHYQRLRARGHSHGRALRGVVDRLLRVLMAMLKTQTLYDATRRPALSA

SEQ ID NO: 209869 - protein, 461 aa, unidentified
MSKKAPKGKEKKSAGKSVDWKALEIMHPDAAGIDVGGTEHRVAVSPDRDAEPVRCFGCFTADVRKMAEWLVEKGVRSVAMQSTGVYWMPVFEVLEQHGFEVYLVNARHTKNLPGRKSDIQECQWLLKLHAFGLLNNSFQPTDEIRVARSLWRQRGNLTAAASSSIQRMQKVLIEMNIQLSTVLSDLSGVSGMKMLREILAGERDPWKLAALARPEVEASRAQIAKSLEGNWREELLFILRQEVETYEFYQHKIADCDRQLRQHLQSFGSKVDPTAQPMGPKPKGKKDSKNAPKFDLRSELYRITGIDWAQVNGLNVLTAQTVITEAGADLKAFPSEKQFTSWLGLCPTNETSGGKVLNRRTRKVVNRAANAFRNAASTLRSSQSYLGAQYRRLRTRLGAPKAVTAMARKLACLFYRLIKHGQQYVDKGLEYYETKYREQQIQALSKRAHKLGLQLVMPQTA

SEQ ID NO: 209870 - protein, 475 aa, unidentified
MKQLNQKSKLKANLQARQVEVPKLESLQQINLNAAGIDIGASEMYVCVPEDRSSSSVRVFSSFTADLQALADWLSECQVTTVAMESTGVYWIPIFQLLEARGFEVYLVNAQYIKNVTGKKTDILDCQWIQQLLTYGLLHKSFRPDDATCVLRSLVRHRDMLLRYRASHSQHIQKALQQMNLKLTNVLSDIMGQTGMRIIRDILAGVRDPQQLAEHRDHRCGKTSAEIAKSLEGDYRAEHLFALQQAVELYDIYTEKLRVCDVEIEQQMGQFQPRIDIATHPLPPATRPRAIRPKNDPATDLRPALYQMAGVDLTQIDGLNILSIQAILSEIGTDMSKWKTVKHFTSWLGLSPHNQKTGGKIIRSRTKKTDNRANLAFRLAAATLGHSKSGLGVFYRRMKAKLGTPKAVVATAHKLARIVYHLLKYQVPFSGLLPEQEDARYRERALRNLQRKALKLGARLVVEPSSDVPSAGLVF

SEQ ID NO: 209871 - protein, 348 aa, unidentified
MTVTTIGIDLAKNVFQVHGVDERGITALRKQLKRAQVAEFFANIPPCVVGMEACGSAHYWARKLQAFGHTACLMAPQFVKPYVKTNKNDVADAEAICEAVARPNMRFVPIKNVEQQAVLSLHRARQGFVKARTAQANQIRGLLAEFGLVVAQGITHIAKQVPELIEDATNELPSTFRLLVQRLMEHLKELHRQVDEIGAQIEAWHRSCELSCKLAQVPGIGPITASALTATIGNARNFSSGRQLAAWLGLVPRQNSSGGKNVLLGISKRGDPYLRTLLIHGARAVIYRAKLKGATGSWLQTLLARRNVNVTAVALANKNARIIWALLAHNRDFRSDYMSAEARPATQT

SEQ ID NO: 209872 - protein, 343 aa, unidentified
MDYFAGLDVSVKDTSVCIVDGTGQIVREAKVASEPDALLQIMRNPAYCFKRIGLEAGPLSQWLFSALGEANLPVICVETRHMRAVLKAQINKTDRNDARGIAQMMRVGLYRPVHVKTLRSQKLRMLLTHRKLLQSKAIAIENDLRGTLRNFGLKVGIAGWTKFEARIEELVEDVPDLAVLVESLLVVRRVLREQIAVLHRRLLTIVRDDEVCRRLMTIPGVGPVVALTYRATVDVPARFRKSKSVGAVFGLTCSRDQSGERDRPGAISRCGDEMMRAMLYEAAQAMLLRSAKWSWLKAWAMQIARRRGMKRAIVALARRLAVIMHRMWVDGAEFRWTKEAAAA

SEQ ID NO: 209873 - protein, 338 aa, unidentified
MAILTVGIDTAKSVFAVHGVDEAGKVQLRQPKVARAKLNALIASLPACTIGIEACTGAHHWARQFQAHGHQVRLMAPKLVSPYRMSGKRGKNDAADAAAICEAVGRANMRFVPVKSLEQQSRLMVHRARQGYVTARTATLNRIRGLLAEFGVVLPLKAEVVRRQAAAELEALPGYANLVIGDLLSEVHHLDERIKQYDVHIRAMARQCTAAQQLMRLMGVGEVTATAIVATVGNAREFDSARQFAAWLGLVPAQYSSGGKTRLGGITKAGDAYLRGLLVIGARAVLNAAKSKKDSLSRWAVQLEQRRGYWKAVVAIAAKNARMAWAALTKGEAFKLPA

SEQ ID NO: 209874 - protein, 423 aa, unidentified
MPNRIAGIDVHKRMLAIVVADAAAEGEFQFERRQFSSSPDQLQSLAAWLIEREVQEVVMESTAQYWKPVWRVLERRWKPACQQRDTPLRGALHLAQAKSNRAPGGRKHDFGDAERLVRRLVAQELVLSFVPDAEQRLWRTVTRRKQQLTRDRVRLQNQLEAFLEEAHIKLSSLVSDLLGVSGRRMLKALAEGEKDPAALAALADRRLRATPAQLCDALGACTELNVIYRRLLKMSLQELQLIEGQMDQLDQEISGLLQQHQDAVRRIAEVPGLGVESAHQIIAEIGPAVATFPSAKQLASWVGVCPGQEESAGVSHSSRSPKGNQNMRRILNQAAHAAIKVKGSIFEVVFQRLTRGLKYKEAIWAIAHRLCRLIWKLLHDRVDYVERGPSVHAKSKRTRAARMAKQLRAMGYRVVPPLGILPA

SEQ ID NO: 209875 - protein, 341 aa, unidentified
MQITTIGLDIAKNVFQVHSIDAAEKVVVRKQLRRGQVMKFFAALPPCLIGMEACATAHHWARELTKLGHEVRLMPAKDVKAYVKRNKNDAADAEAICEAVRRPTMRFVGAKSAEQQGRLMQHRTRDLLMRQRTQVINALRGHLAELGIVAAQGREGLKQLLTIIADEKDARLPIDARASLIVLAAQLQALHTMIGSIEKRLTVQHRANESSKRLESVPGIGIIGASAIAATVTDPNAFRSGRDFAAWIGLVPRQDSTGGKQKLGPISKQGDRYLRRILVVGAHSVLRRARQAPEKYPWLTQLLARRPFKVVAIALANKMARVAWALLARGGTYRVPALAAA

SEQ ID NO: 209876 - protein, 417 aa, unidentified
MKTMTMQPYAAFVGIDWADTKHDVCIQSADSLRREFAVIPHKAEEIDEWAQSLHRRFCGPIAIALELSKGPIVYAIQKYDYFVIFPINPSTLAKYREAFQPSRAKDDPTDAELALDLILRHPERFEPMQSQSVEIRKLTVLVEQRRRLVSDRVRLTNRLRNTLKQYYPQSLEWFDRINTKLFCDFIQRWPTLMQVKRARTTTLTTFFRAGHTRNPALLETRLASIRSSQHLTLDEAVIAPNKLHALMLVDMLQVILDAIKTYDQTIAELAPKHDDYDLFSSLPGAGPSLAPRLLVAFGEQRNRFKNAAELQKYSGIAPVTERSGTKHWVHWRWRCPNFVRQTFVEWAAQTINKSYWAGEYYRQQREKGSAHQPALRALAFKWIRILYRCWQTRTPYDEATYLKALQRRGSPLVAKAV

SEQ ID NO: 209877 - protein, 409 aa, unidentified
MIAAVIERCAGIDVGKKRVAACVMTGDAAAEPQWELQEFGTTVAELRRLRAWVVACGCTHAAVESTGVYWQPVFNHLEDALTVVLAQPQQVKARKGHKTDRQDAGWLAHLLRHAMIRPSFIPPPAVRELRDLTRLRRGVLEQATQERNRVEKVLEKANVKLSSVLSDLFGVSGQRMLEALLEGRASAAEIADLARHTARKKIPALVAALEQHQLNDHHRLLIRLHVDHLAFLENEIHTIDEAIAKQIRDHGWHPHQELLTTIPGVGPTSAAAILAEVGPDMSVFGSEKKISAWAGACPGNAVSAGVSGSTRRPQGNAHLKTTLSMCAIAASHTTAGALRDQFNRIAPRGRAKAAAAVAHTILVHAFHVLQSQTPYREPQRLLSHRRKARLIRHHIRRLGKLGVAVKPAG

SEQ ID NO: 209878 - protein, 391 aa, unidentified
MIYIGIDVAKDKHDCFINNSDSEVLFKAFTIFNNLDGFNDLYQKIESVMDDVTKVKVGLEATGHYSYNLLGYLIDKGLPTYVINPLHTNLYRKSLSLRQTKTDKVDARTIASMLMSDVNLKSYSDTSYHNEELKSLTRYRFDKVKERAKLKTSVSRLVCILFPELEKLVPTLHMASVYALLSEFPSAKHVATAHLTRLTNLLSESSKGRYGKDTAITFRDSARASIGSNMPAKSLELKHTIKLIQELDSEIDEIENEIKIIMDEINSPILSIPGINYRMGSMIIAEIGDFNRFDSPDKILAYAGFSPSTYQSGQLDGAYAHMEKRGSRYLRYALYNATKYVCHWDPTFAAYLAKKRAEGKHYNVAISHAVKKLVRVIYHLEKTKQQYIKAA

SEQ ID NO: 209879 - protein, 318 aa, unidentified
MNHQLNQNEINIGVDTGKSQLDIFIHPINIHFTVTNDVSGIRDAVKTIKPHHPTRIVIEATGRLEHAFVLACAKAKLPIVVANPVHIKRFAQATGRLTKTDKLDAQLIAYYAEKIQPPLTTLSSKTITHMKDLVVCRSQLLGMQTMQKNRLQIMPKETQSLIKPILTAVKKQIERVEEKLEKLINSCDEYKTKSEIIQSVPGVGKVMGVTLISHLPELGMMNNKQAAALIGVAPINKESGQYQGRRSIRGGRYQVRTVMFMAMMSAIQCNPVMKKKYHSLLEQGKPKKVAIIACVRKMIVLLNAMVRDGTAWQENMVT

SEQ ID NO: 209880 - protein, 413 aa, unidentified
MKYEIITAVGIDVSKGKSTVAVRRPGGEVVLTPFQVTHDAAGLSGLVRTLRDVGGDIRIVMEHTGMYWRPIALALKEAGFFISVVNAMLIHDFSDNSLRKVKTDRADSMKIANYALSFWAELRDYSPEDETRQMLKMQNRLYLRTQKSSVTLRNGLISLLDQIFPGVNTLFDTQPKRSNGHFKWVDFVKRFWHKDCVAGISLTAFSDAYRKWCAKSGYRFSQSDAEKLHTAARNAVATFPKNDSTKLLIAQAVDSLNAVYDALYILRGEMLRLASLLPEFDVVMAMQGAGEVTGPQLIAEIGDVRRFTHKGALVAFAGMDAPPFQSGTFDSKSRRISKRGSPNLRKTLFMVVSTILQHSDPANPIFQFMDKKRAEGKHFYVYMVAGAAKFLRIYYARVKAHLMALEADANTAA

SEQ ID NO: 209881 - protein, 412 aa, unidentified
MKYYTSTTEFNCGIDLHARQMYVCVMDRQGKKLVHTNVLNNDFQFFLKLVEPYQHSLTVCSECMFGWYWLSDACQEAGLTFVLAHALYVKAIHGGKNKNDRIDSEKLTHLLRSNLIPPAYVYPADKRPLRALLRQRIFFVWRRSELLARIYSHQLAHNRTPAKQTRRVRDSWEEQLLAAEDNPLRQIALKNDLAMIKHFDQQIFQLDEELQRQTKKVAGRDYELLQTVPGIGETLGLTILHEIGDIERFPTVKDFVSYCRLVKGTVASAGKIKGLRGAKLGNPYLRWAFGEAAVIAKRDHYLVGPLSQRLEVQMGGNKFKANTVVAIKLARAVYFMLKNKTVFDPERLVASMQKCFSPGRRQPEGPTGCAKKTRPLPAADHASCASSTPVCVGPASNPADLIGTCGQALPPI

SEQ ID NO: 209882 - protein, 337 aa, unidentified
MHTRYQQIAMLDQETGELIERRLEHANGEARAFYAALAAPVRIGVEATGYTRWFERMLAELGHELWIGDAAQIRASMVRKQKTDVRDAAHLLELLLSERFPRIWRPTLEERDLRQLVWHRQKLVWMRNAVGNQLHALAMGEGVYRKKKLFTKKGRVELEGLQLGRWASHRRQELLRLLDQLQASLQELDHAVAEQAGQNPAAVLLMTHPGVGPVTSLALVLTLGPVERFARSKQVVSYLGLNPREHSSGGRQRLGSISKQGSPLMRSLLVEAGHTAARLDRELRQDYQRLKLRRGSGVAKVATARKLAVRMYWMLRSQANYAQLVRMQDSPWATLVE

SEQ ID NO: 209883 - protein, 400 aa, unidentified
MLSIGIDVSKGKSTVCGMKPGGEIVYTPFEIQHTREGMSELLSLLRGSGEEVRVVLESTGSYHCPVVAALLENGIFVSVVNSLRMKRFCSQSIRRVKTDQIDAMQIALYGLAYWQELQPTRLPENTYRELQLLARQYYQMTSILIKAKVDFNALCDQVLPGMQELMNDHAGRHKLSDFVLRYHHTAHILKMGETRFRKDYCKWAEKKGYRNRERMAALIFATAQNGIPVLPNAPSTQIVITEAIRVLHTVEASRDAILTQMQALAKTLPEYSLVREMPCIGDTLAPRLIAEIGDVRRFHSKRALIAYAGIDAPPYQSGKFCANNRHISKRGNRYLRKTGYEVMQSYVMHKPANDPIFTFIEKKRGEGKSGKLAMVAGLNKFLRVYYGKVTELYRSLPAIK

SEQ ID NO: 209884 - protein, 482 aa, unidentified
MKKRTIFFYQSQELNSLFEEAGNNAKVMCIPIDYAKKEHVVMFCNGHGNILRKPFSIKNSPKGIEYLTQQVLSSCHHQGIDPKYAFFGGEDVGSYAENFINTLRSGGWIVAGVNAHDAKKQRPNVQASTDKLDLMGIASMLLNRRANCSPAQTGIYRNLRDLTRHRKKLVDMSTEEKNRIYTVVDQIFPGFLDEKNTGILPFSNSSLYLMADRFSPAQIRRRKRQKLIDTLRRYGTVKPEVGADKLQLYAAHVLNTPAEYLSALQISLAQHIKHFKCLKESIEQLEKEMALWLAQTQGAFLTTLPGIGIVLAAGATAEIGDPTKQRPVANLVSYSGIIPRVKQTGGPEGQTRTGKVSKRCNRILKNYVVQSAHHIGLHGPEDLMADYKRRDANGQHADFGIGRRYIRTAMCLMRNAQIYIPKRLRSKGINPEERAGYFLMIWPSLRDKWAKLGALEIAFTNDNPLGRWRNMVQELYEIKLKL

SEQ ID NO: 209885 - protein, 310 aa, unidentified
MDRLSPVTRIRKVGFTMENELHFIGIDVAKAKLDVDILRPDGRHRCKKFDNTLSGHEALVRWLRGHDVNRAHVCMESTSTYMEDAAAHLSDAGYTVSVINPALSKAFAQSEGLRSKTDKVDARMLAHFCREKRPPAWEAPHPTERALKALVLRHQALTEMQTQEKNRRETAPEVQLTSIDILLGCLSAELARIEKQIKDLTDNDPDMKQRRKLLNSIPGIGEKTAAVLLAYTGLKLKFGTARQFAAYAGLTPVQHESGSSVMRASRMSKAGRFICAKRYTCQRYRRCTIRRGEKRSGKGWKGMVSVRKSS

SEQ ID NO: 209886 - protein, 354 aa, unidentified
MSSQPTVTVGIDLSDRHSQLCALETASGEILEESRVPTSPKGFERCFSGCEKMRIAIEAGTHSPWVSRLLEGYGHEVLVANARRLRLIYADGRKTDQIDAQKLARLARLDPELLAPLKHRGEDSQVHLALIHSRDALVGTRTKLVNHVRATVKSLGHRLPACSAQGFPKKAAEHLPKPLRPVFEPILQTISALTTQIRDYDRKIEAVAGEPYPETKLLRQVKGVGPLTALAFVLTLEDPYRFRDSRTVGAYLGLVPSKDQSGGRDPQQHISKRGDEMLRRLLVSCAHYILGPFGEDSDLRRHGEKIASRGGKNAKKRAIVAGARKLSVLMHRLWITGEEYEPLFNANRYGGEAA

SEQ ID NO: 209887 - protein, 429 aa, unidentified
MTRISAGVDVSKNRSTVCIIDQDGKFIMRPFLVWHSTEELDFLADTLKRLNGEVRVIMESTSVYQYPIALQLKERGLFISIVNAYEMKQFANIDFRGGKTDKKDSRTIASYGISYWDKLVEWQIPKDTYFNLDLLNRTYMNAKKHRQIILQELQHYIDCAMPGMDKELHSLNLSTKKDFMLDFVEKFWHRDEIVNMTEAEFTEVFTAWAKKKGYRPVEGKAAKIYAIAKSCIPYYPANPTVKTILQCIVDKLSGVNRTLVTIVTQMIEEAKKLPEYQIVREMPGVGDPLAARFFGSAGDIRRFKNSKALVAYAGIDSPPDESGDFSSTHRHITKKGSKVFRDTGYEIMMALRAQKRTWEKGRKNPEVYDYMLRKEAEEKPRKVAKIAALNKSLRIVYARIKELYDNMALAERAKAKTRSKTKAKTKATA

SEQ ID NO: 209888 - protein, 362 aa, unidentified
MAAKTRPVTGGADTHGQFHHAAVVNRVGEVLGTKPFPATANGYRQMLAWMRGFGRVVKVGVEGTGSYGAGLARYLADQHVAVVEVDRPDRKTRRRQGKSDPIDAIAAALAVLSGRATGAPKARTGPVEAIRVLHVARRGAVKARTAAINQLKGLIVTAPEPLRKQLRGLATPALVTTCVNLPADESDLSDPQHAINAALHAIATRIQQLTAEITQASNRLGPLVATTAPRLSALRGVGPDVAGRLLTAAGDNPDRLRSEAAFAHLCGVAPIPASSGKTQRHRLNRGGDRAANSALYTATLSRLRHDPTTRAYAQRRTAEGKTTKETIRCLKRYLARDVYTAIMADLAALNPGLTTIGASLTS

SEQ ID NO: 209889 - protein, 429 aa, unidentified
MNYNQNQKLSQLDEKILIIGIDISKKFHVARAQDFRGVEYKKGIKFDNTIEGFTKFCEWKKLLMTEQKKSKVIIGMEPTGPYWLPFARWLQMEEYWTVTVNPAHVKKSKELDDNNPAKTDYRDARVIAQLVKDARFSEPNLLMGIYEELRNVKNIRKVMVNDLKRIKNMMANWLDRYFPEYTKGYAKWESESFIYLLGKYKLPQILEKQNPKELYQEVKKNFPRGVGIRKIENLVKASQKSIGIKEGTGMAIKELEYLLKRYKGIILDIDEIESIRDNLCEELPEVQKIIQIKGVGMTTASGIIAELGEIKKYQTSKQMIKMAGLSLTENSSGQKKGKMSISKRGRKDLRKILYQAVVGMIRTNTAFKKLYEYYRYRAKNQLIGKQAIIVLVTKLLRIIHTIVVKNIDYDEEKMLNSIHHPKEFINPVV

SEQ ID NO: 209890 - protein, 410 aa, unidentified
MDAVRMCCAGLDVHQETVVACVLKGPIEQKPQCHLKTFGTTTRELLGLQDWLSEHGCLEVVMESTGVFWKPVWNILEGSCDLVLANAQRVKNMPGRKSDMQDARWLAQLHRCGLIEGSMVPEQDIRDLRDLTRYRSKMVQAVTAEKNRIHKILQDANIKLTTFMSDLYGVSGRGLLQKIMDGEVVDEVTVKNLVKTRLKKKVPQLLDALNGKLRRHHREMIRDHWDHLVYLEKRITELEARIEAKAEPYLERIEQIDSIPGIERTSAVTIFAEVGPHVAEMFPSDAQFASWAGVCPGNNESAGKRKKSKTMQGNKHLKGALCQAAWANSRSSNRIGQFFRRIRKRRGDKKANVATAHLLIRILHALMREKRSYQEIDVSLGDETSKKNPLDRYVKYIQQLGYSVQLNPIQ

SEQ ID NO: 209891 - protein, 387 aa, unidentified
MSCNIDHLDRNETAAQDHRATILVSLELSRRSWLVTALVPGSEKLSQHGLAGGDGGALLELLARLKGKAEQRLGGPVGVMVIQEAGLDGFWIHRLLEKHGLASHVVEPASIAVPRRHRRAKTDRIDGEALIRALAAWRRGEPRVCSMVRPPSPEEEDRRRLTRERSALVKERVQHANRIKGLLFGQGITGYEPLHRDPRPRLEALTTGDGRPLPARLKAEIRRELDRLELVNAQIKAVEQERDALLGAASADPAQPVGVLLGLNGIGPEIGARIWLEALFRRFANRRQVAAYAGLAPSPWQSGGTEREQGIAKSGNPRLRTTMVELAWLWLRHQPDSALSAWFRRRVGQGRGRGRRIAIVAMARKLLVALWRYTNHGIVPEGAVLKA

SEQ ID NO: 209892 - protein, 452 aa, unidentified
MTARKKQISLKPGKNRDALTITHPNAAGIDIGSATHFVAVPPDRDDEPVRAFPSFTVDLYALADWLKVCKIDYVAMESTGVYWIPLFEILEARGFKVFLVNARHIKNVSGRKSDVLDCQWIQQLMTYGLLGAAFRPTEEVCVLRALWRQRTMLLKSQARSIQHMQKALIQMNIQLANVISEIAGETGLKILRAILAGERDGQVLAGMRNSRIQASPEEIAKSLQGNWRAEHLFALKQALDSFDFLGTQLAEVDQELEKQMQVLKTKDGEPGKGKRGRTRNAPKFDLRSHLFKVCGVDLTRIDGIEVTTALAVICETGTDMTRFPKVGNFTSWMGLCPGTKITGGKVMSGKTKRCANRAAQALRLAAAALRTSDSALGAYFRRMCARMDKPKAIAAAAHKLARLVYTMLTKGEEYTDLGQDYYEKRYREQVMKTLSQRAAKLGMMMVPLEQAI

SEQ ID NO: 209893 - protein, 342 aa, unidentified
MNKDKLYCGIDLHKNFSMVCVMRQDGILVDQKKLQNTGEELKSYFTKRESMECVLEPVDNWGWLSDYLMERGHNVHLANVYKVRLIAESRMKTDQVDAKVLADLLRTGYLPEAYVAPKELRDTRTYLRYRITLTRERARLKNQIKKLLRVENIKDPFKDTFGKKGSEWLRNLKLRSIHNRIKEERMSAIEYYSALISKIDSELKENSKTDENIKLLMTVPGIGKIGAHLIMAEAGDIKRFKYPAKFAGYTGLVSSLRSSADKFYRGHITKQGSAYLRWILVEAAQKAKTADYNLNRFFNRIAFRRGKSIATVALARKLAEICWHILVDHVPYNTNKVCSRFG

SEQ ID NO: 209894 - protein, 411 aa, unidentified
MEQIHDRVAGLDVHRDTVAVCVRTPGPRGGAQTEKARFDTTTAGLAALAEWLAGHAVALAAMEATGVYWKPVYYALEGRFELWLCNAHHVKNVPGRKTDMSDAEWLADVAAHGMVRPSFVPPPPIRELRELTRYRKTQIDVRAAEIARLEKVLQDAGIKLTSVASKVLTQSGRAMIEALIAGQRDPVALAELAKGKLRPKIPQLTAALRGHFGAHHAIIAARILAHLDFLDETIGALDARIAARVAERYQSAARLLADVPGLERRSVEVIIAETGADMSRFPSPAHLASWAGLCPGNHESAGKRRRVATTPGNQWLRRTLIESARAAARTKDSYFGAQYRQIARRRGPNKAAVAVAHSLLDVIWHLLTTGEVFTDLGADYFISRQDKEHQARRLMRQLEKLGFTVQLTDAG

SEQ ID NO: 209895 - protein, 373 aa, unidentified
MPRYSTAFGMDVHLRSTTVCALDAETGEAVTRRFRGNPWGEVAEWMSGFPGPSLAAYESGYLGFAPQRELSGLGVDCVVAAVSRVPRSAADLSSKNDRNDAARMAKAILSHDISPVWVPSPEIEGLRDLAGAHDAATARLAAAKQRLLAFLARRGYAYGGTTPAGNPRRYWTYDFLRWLDKVRPADDGGIRALAALRNEVEAADETREALLAEYRAAVAAGPLSAEVEALQSIKGCGFALAAAFASEVGDFSRFRSGRQVTAYFGLAPKQRSSADSVRLGGISGAGNALVRRLAVEGSWSYVQASHQPKLMPKGSGVPLEVRMHGRKGSERLLRRREEMLARGMPQAKANAATAAELVRWLWALGAMCREATE

SEQ ID NO: 209896 - protein, 350 aa, unidentified
MEIIAFDSHKRYTQSLVEDALGRVVAEDRITHEQGAIWQYLKRFTPGSTVAVETIGNWYWIVTEIEEAGMKALLVHARKAKVMTGNVNKTDRLDVRGLNRLQRTGTLPTVWIPPGELRDKRDIARTRMFLVSQRTQLKNRIHATLDKYALEVKEVTDIFGVRGRQLLEERCRLLPPYTHFTVEQQLVQVDGLEGAIEALEKRMEEVFAETEEVRLLRTLPGIGFLLAVVISLEVGEVSRFGRAEQLASYAGTTPRVHASGGKIRYGKLRSDVNHYLKWAYVEAANAICLNRSHWPKRHVCCLYERLRAKKGHAVAIGAVARHLAEATYWVLTKKEQYQDPQSSRRSSTEA

SEQ ID NO: 209897 - protein, 408 aa, unidentified
MEVLYPRCAGLDVHKDTIVACVRCVSPPVHHEVRSFDSTTRGLLELADWLASHDCTHVAMEATGVYWKPVWHVLEAGFALVLANAQHIRNVPGRKTDVNDAMWIADLLAHGLIRSSFVPPAAIQELRDLTRTRKQLVREISQHSLRIQKVLEDANLKLGSVLSNVLGRSGRAMLDAIIAGESDPQRLAELALGNARKKTAELREALRGRITAHHRMLLKLHLDVIKALERTLAELDAAVGKALTPIRQGCRLLTTIPGISDVTAQVMVAEIGVDMTRFPGAGHLVSWAGLCPRNDESAGKRRSTRVRKSGTWLKTALVTAAWSAVRVKNSYLHAQFLRLKARRGAKKSILAVAASMLTAAYFMLRDGVEYEDLGSDHFDRHDKTKTIHRLLKRLADLGCNIEPIPHPA

SEQ ID NO: 209898 - protein, 403 aa, unidentified
MQHVIAFDVSMGKSYMVIYNAQKQCVFESEINHSKPDFEELRKRIDQLMNENKKSPHIVFEATGVYSRQLERFMQDNKFEYFLLNPLEAKLQCDSLRIHKTDRSDAHQLALTHFTASRREKTGTDNLFYQLKSLSRFYNELDDELSLIRSRMHKVIQLTFPELEQIFITKSDLFLNFVQLFPHPDFVQNLSKTVMKNQIRKNTNKNISIRIAEKKAMEVLEAARYSYPAVRQDDVLCEQLKSYAKRYQELLHQKEQCITKMVRLAESRTEYPIILSFPGIGPNTAIRLLAEIGDITRFKNNKQLNAFAGIDIRRFQSGKTFFKDKINKRGNKHLRKLLFLIIQNMIKLRRYGQNHIVEYYDKLKTQPYNKCHKVASIACVNKLLKLLFYLITHNIHYDYRLTA

SEQ ID NO: 209899 - protein, 407 aa, unidentified
MICVGIDVSKRKSTVCFMAPGDKIIRRPFDVKHTKEELQPLVDEIRVQAKYDEIKVVMESTGVYHLSIAYFLQQNGIFVSVANALKVANFNKAENFRHTKTDSIDSTNIARYGIAYWAKLPQFDLNGDKYFLLKRLCDAYLNFSEERSRILLQLQSQLEQTMPGIFDLFGGFDINSGKDKLLDFLEKYCHIEDIIAKPEAEFVASYCGWAKEKGYRSNESKAATIYAQAKNGIPSIPNNPIVRETIMWYVGLLRRADEALMASLTRMEDIAKDLPEYELVGEMGGVGRVTRVALIAQIGDVRRFKNKHSLICFAGLTPSIHESGKFRASQNHIVKKGPARLRKVLYQVMMSLVMHKIPKDDAVYRFIKKKEAEGKYKKVAKVAGMAKFLRIYYGRVMHLYRDLGLAA

SEQ ID NO: 209900 - protein, 427 aa, unidentified
MKKADLLSTLFVGIDISSRENVVALMDFESTKPIASFAVPNNEPGAEKMAKKISEFFTPESGLRRLVISLESTSFYGVHIANYLSTCRILMPFHTEVYCLNPKSIANYKKSYIGLGKNDYVDAFIIADFARVGRITTKPWRGCQYLALQRLTRHRLHLVKALTREKTYMLSNIFLKFSEFTMLDAEEQPFSNEFGATASAVLTEFLSTEEIVDMPMEKLVEFICEKGRNRFTDPQKTANLLQAAARNSYRLDKCLYEPLTVAIASSFTMISTYNAEIKKVNKAIETTIKGLNPNAFLSLQSIPGVGPVMAAGIMAEIGDIHIFKSQESLAKYAGLVWRENQSGQFKADDTPMSKAGNSYLRYYLLEATSHIRIHCPEYGEYYSKKYAEVKTHQHKRALALTARKAIKLIFGLLARNQLYSRNRVGQA

SEQ ID NO: 209901 - protein, 342 aa, unidentified
MEKVSIIGLDLAKNVFQVHGASSDGMVVFRKKIARTKLIEFFSGVPACIVAMEACGASHHWAREIGALGHEVRLIAPIYVKPFVKRSKSDVADAEAIAEAASRPTMRFVAVKGEEQQAAGMAFKIRDLLVRQRTQTINALRGHMAEYGIVAPNGPVHVARLAQSIDSRDQRLPSTVIDLCSMLLSQIASLGEQINLLERQIRERARHDEIARRLMTIPGIGVICATALPALAPTAGSFRRGRDFAAWLGLTPRQKSSGGKTRLGATTKMGQRDLRRLLICGAVAVVRWARRKGAQEGSWLARMLGRKPPLLVAVALANRTARIAWALMAKGGVYRVPEPKPA

SEQ ID NO: 209902 - protein, 452 aa, unidentified
MAKHREKKKAHGLVAAPVMEPNAAGVDIGASEIYIAVPPDRDMQPVRRFAAFTEDLKAAADWLEHCRIETVAMESTGEYWIPLFQILEARGMKVCLVNARHVKNVPGRKTDVSDCQWLQYLHAVGLLRASFRPSGQVCAVRSLMRYRESLVGMAAVHLQHMQKALDQMNLQLHHVISDLSGTTGMAILDAILGGERNPLKLAQLRDPRIKASPETIAKSLVGDYRREHLFTLRQSVTAYRSYQQLLACCDVEIEQMLGEFSDGAGPDTPVLADPKDRHRPRRNEMKFDLRGHLYRIFGVDLTEVPGLNALTAHTLLTEVGPDLSAFPNVGAFASWMGLCPDNRVSGGKVLSSHTRKVNNRAARALRMAAQSLFRSQSWLGQYYRRMRAKLGAPQAITAAAHKLARIVFHMLTNRHAYDETVFAQQEIQNQHRLQQKLMQQAKKYGFQLIPIT

SEQ ID NO: 209903 - protein, 331 aa, unidentified
MTNANHEIKCDSQPIEYIGVDMAKERFEWAVHQAGSSQGTTNDRAGFEVFLADLRRRRVGLIVIEATGGLERALACVLLQEGFPVSVVNPRAAREFARSMGHLAKTDAIDALALAHYAHTLAHKANQAGVRLTALPAHLEQLQTMALRRKQLIDMRVAESNRRGGPMRVLRKSIDAVIKTLDKQIDSLDKDIAAHLDEHFKDLDRRFEAIKGVGPNTCAVIIAFMPELGRVNHARAAKLAGLAPLNNDSGKARGKRSTWGGRSVVRCALYMATLSAVRYNPVIKAFYLRLIAAGKPKKVALIACAHKLLRILNAMARTGQPWEPKYHGITR

SEQ ID NO: 209904 - protein, 354 aa, unidentified
MLIIGCDFHTRYQQIAMAREETAEMIVERRLDHARGEAQAFYRSLQSFEEPVRVGIEATGPIHWFERLLTELGHELWIGDSAKIRASEVRKQKTDERDARLILDLLLSKRFPKIWVPTPAERDLRQLLWHRHKLVCLRTMLGNQLHALAMSQGLCRKRKLFTKKGRVELQGLGLAPWASRRREELLKLLDHLETPIAELDRAASEEAKRREDAVRLMTHPGIGPINALAFVLAIGPVTRFPRSRKLVSYLGLNPIEESSGGRRRLGGISKQGNTMVRWLLVEAAQQAMRFDPALRQDYLRLKFRRGHAVAKVATARKLAVRMYWMLRSGADYARLVRRQGSPGGTLMNASSSLA

SEQ ID NO: 209905 - protein, 398 aa, unidentified
MKVCGLDVHKDSIFCAVYNGKEYSEVKEYETTMPKIRQMGEYLRSEGVTKVAMESTATYWVPVWDVLLEMGFELMLVNPFLIKQMPGRKSDIKDSQWIACLLHKGMLRGSMIPSPAIQQLRTYSRKYSKLQEQMTRSLQKMDRVMVMCGFRIGSCMSKLGTKSMMSIIDALITGETNPDVLCKLVYGNTANKKSGKLREALTGTLKEHFRQQLEWEKEEYDLFEKQTQKCLTQMWRICQEHYQQELALIKTIPGVSDVSAMIIIAETGGDMSVFENSGKITGWAGLRPRNDESAGKYKSTATTKGNKYLRSVLVQVSWAASRMKNGWFKEKFNQLAIRKSRKKALIAIARKLLTVTWNVLYYKKPYDPQMVHIYDPVKVEAKINYHQREVERIQKFLN

SEQ ID NO: 209906 - protein, 444 aa, unidentified
MHFSGEVEEREERLNKQKVVAWIGIDWADEGHEVWEYTVQTDSATCYAIKHTAESLQEWVNQLRIRHGGKPVAVVLEQARGGLIYALMNTGFMEIYPVNPESLAKFRKALYPSGAKSDPTDAELLGQMVRQNPGRFRAWVPGDEQTRSLQLLAEGRRKLVEDMTALTNQLTSVLKTYYPQALNWAGDLSSEQACSFLEKWPTLADLQKSRAFRIREFYEKYGRPPRQVLDERVTQMEKAQPLTADPAVVMAGKMMVNAVVAQIRPLRAAIEKYDVEIERIFRQHPDRAVFESFPGAGKVLAPRLLAAFGADRDRFEAALEVQQFSGIAPVTERSGKTIWVHRRLACPKFVLQTFHEFDNQSRRFCVWSKLYYQQQRARGKQHNAAVRALAYKWIRILFRCWKDRRLYDDSRYEKSLIKRGVSLAPLLGGTTELGMKSSSYNPST

SEQ ID NO: 209907 - protein, 376 aa, unidentified
MREKLRFLGMDVHAETIAVAIAEPDGEIRSLGTIANREDSIRKFIRKLGTPEQLRACYEAGPTGFVLYWQLTQLGVDCAVIAPTLVPKKPGDRVKTDRRDALKLARSHRSGDLTAVWVPDEDSEALRDLVRQREAAKQDQLRARHRLTKFLLRTGQRPPLGLKAWTERYMRWLAQVRYTQPAQEVTRLDCMNEVEHMSARVKRLEEAILEVVKLAPQPMQDVIRGLQALRGVAHISAVTIASELGNICSRFQSARKLMGYCGVFPSEDSSGNRVRRGGITKAGNAHLRRIVVESAWCYRHLPRVGEKLRKRHEGVPPAIIEIAWKAQNRLHKRYMRLSMAGKDQRKIMTAVARELLGFIWAIAIKAEASCRQPIAA

SEQ ID NO: 209908 - protein, 480 aa, unidentified
MIKSVGVDLAGNGEHKVRCLDEKAEVCDSFSFETTPVGLEKLEERIFRDGPNPIVVFEPTGLAWVAMAVYLRARHPGCRLVRTQSRNVAALRRYLRHSSKSDKIDAITLAKMPFVDAERLNEVYLPPAKLYAIQRLARQRKRLENDMASRKKRIISIIDGYLPCVHAAFSSRWSLQAKAFLSCRLNPLAVVRDGEKALDRFLTGARYRHQKDANESHMVYLACQAAAMIYERSREAGMIDDEFFAALQDEIGRELRLMEAEEVESQSITQRLTELYQELHPSDNLSTIPGVGPHTAPIFLAVVGDPSRFPSQSAFANYNGVVPNSKQSSDTETKGLNMTKAGPSVMKWALYQSGQIARRYDPQLAHLYYREIVHGGKNHKQAMGAVMSHLGARILAVLRDDKPYELQDIEGNPITWRDARGLVLSKYQVPEEIKQDRRRRGTLKNSGRKQSRRRREMVTHKAYEAAKAPQPVAAIASPGN

SEQ ID NO: 209909 - protein, 354 aa, unidentified
MMIIGCDYHPGFQQIAFVDTETGELQERRLEHREEAEKFYRDLAAQGMKVRVGMEASGHARWFERLLSELQFELWTGDAAAIRAKRVRKQKTDRQDAQLILRLMLKDDFPQIWVPSWENRDLRQLLWHRHRMVQARTRIMNQLQAVALNEGLRCKKRLWREAGREQLETFKLAPWASRRRHDLLALLDRLPPTIAELTAAIEQEVERCPAARRLQTHPGVGALTALAFVLIIGRAERFQCGKQIASYLGLVPLEDSSGQRRRLGHITKQGNSLLRFLLVEAAQVSVRSLPEWRSEYCHMALRRGRKIAKVAMARKLAVRLYWMMRKEWDYAQLNKFGSHAGKPGYRDGVKQNTE

SEQ ID NO: 209910 - protein, 405 aa, unidentified
MYYVGVDIAKDKHYVCILDESKELACKPFWIYSDILGLRELLKRLADLSLDNDDFIIGIESTGAFSENFYSYITDADYKVVLLNSYQTAKYRDFSTLKKIKNDSIDAYVIAELIASGKYKASYISNEEYHNLKVLNRLKKSLDDKIKTIKREISTVVATVNPEIEKVFPNIFTKTAIVIIKAYPTALDISRATPEKLTKLFRHIKGNNFSDEKAKYLIDLAKSSIYTGRANESRALMIKTNIKILELYIQEKDEIEKQIQDLINNQLDNDSTNIANVKSIPGVADKTIAAILGECGDLRRFESAKAFIGFLGLYPTLYQSGKSSSTGTLAKRGIPIAKHALYLAAVSSVRHNSELHKLFRDKVSSGKSKKEALIIVAKKLASIIYSLFKYNQEYNPSRVLIQHKR

SEQ ID NO: 209911 - protein, 360 aa, unidentified
MRAQRNELNFEGQNIYVGMDVHLKSWTVCIMTEKLEHKKFTQPPRADVLYNYLTRNFPGATYYSAYESGFSGFWAHRQLEALGIKSMVTNAADVPTGQKEKIQKDDARDSRKIARSLRGKELEAIYVPEESTLEERSLLRTRTSLVKDMIRFKQRIKSFLYFFGIPYPERFNKSGSHWSRNFLKWLKEEVQLTQESGKDTLNIMVQEVEEQRQLLLQVSRKIKQLSESGKYASNVKLLKTVPGIGLLTAMHFLTEMETIERFEDTDHFAAYVGLVPDRHDSGDKKNDGEMTFRGQSILKKCVIESAWIAARKDPVLSLAYNRYVARMEPNKAIIRIARKLLNRIYFVLKNKKEYVICVAK

SEQ ID NO: 209912 - protein, 351 aa, unidentified
MKTIAKAIPATIGLDIAKTFFQVHAVDGSGQVVLRRKLSRGEVLGFFETQPKVLVGIEACGTGHYWAREIAALGHEVKLLPPTYVKAYVKRGKTDAADAEAICEAVTRPNMHVVPIKTPEQQAALMMHRSRELLVGQRTALVNALRGHLAELGIVTAKGIHRVADLLAELVGVENTKIPPLARASLRCLAAQIEAVETQIDELEALIIEWHKANEASKRLAKIPGVGPITASAVVATIGDASNFTSARHLSAALGLTPKQNSSGGKPKQGGISKAGNTYLRRLLFIGAIAVIRSKRAQEAGSWLARLLERRPAKVVAIALANKSARIIWAMLRRGEAYRAPTIHAVAAAAA

SEQ ID NO: 209913 - protein, 388 aa, unidentified
MQTAADHPEAPTAIRHDLGAILISLELSRSTWLITSLSPGGGEKMSKHSVRGGNVAGLLERFAQLQEKARARTGRTFPIIVIQEAGLDGFWIHRVLQNEGIESHVVDPASVATSRRRRRAKTDRIDGEALLRTLLAYKRGEPRVCAMVKATTPEEEDRRRLCRERKVLTNERVQHVNRIKGLLFGQGVSGYEPLRRNRRQQLNELRTGDGRPLPKHLKTQISRELDRLELLLEQIKAVETERDALLAAQKVALPGPAAMLLDFNGIGPEFTAVLWSEGLFRHFDNRRQVASYAGLAPTPWQSGSVDHEQGVSKAGNPRLRTTLIQLAWLWLRHQPQSALALWFKERVARNGGRHKKTTVVALARKLLVALWKYVTAGVVIEGAVMKTA

SEQ ID NO: 209914 - protein, 376 aa, unidentified
MGEYSEAFVAFDVAKKKHAVAIAEGGRTGEVRFVGEVENSPAAFENSPAAIERTIKKLGKKYDRLHVCFEAGPTGYGLCRQVRDLGHDCMVVAPALIPKRSGERIKTNRRDAVTLARLHRAGELTGVWVPDVVHEAVRDLVRARETAGDDLRRKRQQLLSFLLRHGRIYEGGGHWTLAHRRWLARQSFEHMAQQIVFQEKIDAIEDAAQRLRRLDEQLRTIVPTWSMARVVEAYQAMRGASFLVAVIFAAEIGDVRRFDTPPQLMAFLGLVPGERSTGDTVRRSSLTLAGNRRARRALVEAAWTYRYPARVSEALRLRLEGLPKAVRDIAWKAQIRLCTRYRRLNAAGKKPPAVVAAIAREMAAFLWAIGREVAPS

SEQ ID NO: 209915 - protein, 371 aa, unidentified
MIFVGADVHVRNSYLYATDESGRRLMHGRVNNVPDELAWFCKFAREKAGDAERSIRFALESTTNSRAMQRAFRDAARTNGFEEIHADVLDARKLRIIAESVCKCDAVDANKINELARSNLKLPTCYMPDDEEFALREHLRARTDLVRNRTMVKNRIHAVLHRRGILTPTGGLFTQAGQAFLASASLDDAGRAIVERYQQLLNEIDRHIADSMRDLRAVMRRDRWAKPAALLQTMPGIGILTSLTILAELGDLGRFKSRASVANYAGLTPIVRDSNTKHYSGGITRRGSSHLRHMLAEAAWIAVNRVPRYQEMFERIAGRRGKLVGIVAVARRMLEDGVTMLWKQEAFRYESAKKDADSPRSDRKIASSVAG

SEQ ID NO: 209916 - protein, 351 aa, unidentified
MHATTVAIDLAKEVFELAFADGQGRVIERKRLSRRAFARVLERRPPLRVLMEACGSAHYWGRRFERQGHAVRLIPARDVRPYVRGNKTDRHDVAGILEADRCGDIHPVPVKTPGQQGIQAQHRLREHLKRERTATINLLRGILREFGLAIPLGASRVPAAVRDALEDGDNELPMALRHSVADQVQRLAQLTADMTAIESRLAESASRDVAVQRYRSVPGIGLLTATALRASAGDLSRFRNGRQFAAWLGLTPREHSSGHKRRLGGLTKRGDVYLRTLLIHGARAVLQAARVKQRRGQALDPLRQWALAVQDTRGHNVAACALANKLARRLWAMEHHGHAFDPGHVSQRPAT

SEQ ID NO: 209917 - protein, 333 aa, unidentified
MKDLSTFQHFVGCDVSKNTLDFAIYERGKDYRLFEHICVPNSAEGFQAMRKWLRSFKINIKDAVIAMEHTGSYSTELAEWCFKKQIAFVLLHPLDVKNAGARGRNKTDKIDAQFIADYVHTLREKLTPSLPEAPVIKRLRQLRNERQLAVRARAAYLTQIKLITDKATLKRMENVTDSFNAQIKAIEACIKAVTESDPQLAKNYNLLISIPGIGMINALTTIISTGNFTRFQTARQYAKFSCVSPLARQSGTSVRGGDHVSHAGHNEIKSVLTEGARCAICHDPSMKAYYQRKRDQGKTHGCVLNAIKFKLICRMFAVIHRQTPYVNTERYRQ

SEQ ID NO: 209918 - protein, 465 aa, unidentified
MKTKLMGPKKQSKKARKIQKVRIDDPWPLINPNAAGVDLGSREHWVAVPADRSPQPVRRFGTFTSDLEALADWLQECRITSVAMEATGVYWIPLFQILERRGFTVLLVNARQIKNVSGRKSDVADCQWIQRLHAYGLLGGSFRPADPYCVFRSYLRYRDELIAGRTTQVQHMQKALLQMNVQLHQVIAQIHGVSGLAIIEAILQGERNPLKLAVLVDRRVRSSTVQIAKALVGDYRVEHLFELKTAFDLYHTFQGKILRCEEALAQELEQLPDKVNIQTKPVPSKAPKKQADEVLREALCRKFGVDLTAIEGIGTGVALTVLGEVGPDLRCFPSEKHFTSWLGLCPDNRISGGKVLRSRTRRVINRLSDALRLAATALERSQTALGAYYRRMKAKLGAAEGVTATAHKLARLLYRLIKHGEAYVRQGLEDYEKKHQLRKLKGLKKAAASIGYELVERQAFASAVS

SEQ ID NO: 209919 - protein, 361 aa, unidentified
MNATTAAIDLAKNVFQVALADANARVLEQHRLTRAQFERFFDNRKVARIVLEACGSAHHWARVFTARGIEVMLLPAHYVRAYVRRSKTDAADALALLEAARCADIVAVKVKSVEQQSLQAVHRTRSLWMGTRTSRINALRGFCRELGLHVPVGARTGLEAMARAVADDQSPIPALLRPIMQQLLEEIRVLEVRIAQLERQLAQLARECSACRLLMSIPGVGLLSATAILAATSGNVAHFKSARHFASWFGLTPKESSSGGTRRLGRISKIGDKYLRMLLTHGARSVMRAATVAKLRGQELLGVRHWALQLQGRSNHNKAACALANKMARICYAVLRDQTPFGQPATRLSKKMQRQSFELAH

SEQ ID NO: 209920 - protein, 337 aa, unidentified
MSVYVGIDVHRKRSQVAVVTEEGQVQLNKNVVNGSEPFLRLIGDLPSGTPVAFEAAFGWSWLADLLEEYGFDAHLVHPLRCKAIASARLKNDKVDAAILAQLLRADLLPEAWIAPPPVRQLRAVLRHRIGLVRLGTQLRNRIHAVAADHGYDRPASYWTGPGRGWLAELDLPAASREIVTDCLAVIDGLAPLTDRIDGELHTHAKTDPRVKILRTLPGVGEFTALVMLAEIGDITRFGSARKLASWAGLTPTVRGSDLTVRHGHISKQGSAWLRWVLNQAAQTAKRSPAFAATYSNIAKRRGKKIATIAISRKLLTRAWHLLADMQATSTNEPPRRP

SEQ ID NO: 209921 - protein, 345 aa, unidentified
MSQQHFVGLDVSVKETAICILDPQGRVVHRACVESDPKVIRAHLIGLSLAFGRIGLEAGPLSPWLYAGLVEAGLPAICVETRHMHAALSARINKTDRNDAQGIAQMMRVGLFKPVHVKTPASQQRRLLLTSRKLLQRKVHDIENDLRGQLRNFGLKVGVVGAAGFEARVRELVEDLPGVAAVVIPLLVAREALREQLAKLHKMLLDTVRTDPVCRRLMTAPGVGPIVALTYRACVDNPARFSRSSCVGAHYGLTPRLYQSGETARMGRVSRCGDAMMRAALYEAALVLLTSPHGRWSTLKAWGMGVAKRRGVQKAVVAVARKLAIVLHRMWRDGTDFRWLAAQAA

SEQ ID NO: 209922 - protein, 445 aa, unidentified
MHYKRLLTLIDSVSSYLSVGLDVGADFTWMSIALPNGSFIGKPFKILHSDPSSRDLAVTKIKEAQEAYSLKSRCFLESTGIYHIPLLYFLRDKGFDCSVINPIITKNSTNINIRKLHNDKFDSKKAALVGLNVSLKTSILPDDSVVDLRNLVRDYYYFKDLQSAVVLKLTAELKLSFPSYAKVFSKITTQSSLKLLSSYPLAADMLTAPKADIVKIIRNTAHFGEAYALCKYDAILAAAQDAAVFGRALPSNAVRIRLYVDTYQQYQKHLDELLKTLHETVEKLQDTPIYNQICLLQSLRGIGFLSAVVLIAEMGDFKLFSSPKKLYAYFGLDPAVKQSGKLNGDKVHMSKRGSSLARRILHMIALNNVKIDKGSGTPVNPAVYDYYTRKCSSKKKTVAMGAVMHKICNIIFAMLRDSKPFEVITPEEHCRRFAAEHPDKVRKTA

SEQ ID NO: 209923 - protein, 346 aa, unidentified
MKKIFIGIDFSKEKFDATVIKAEGVEECAERQHEVFDNKVSGFRRLIRWVKSVVDEQDTGLWLFCGENTGGYSRALCNYLYGSGYDMWLENALSIKRSSALQRTKSDKADAGVIAEYAMRNYDQMRLYKPLDKNLERLREVFLYRHNLVKLKASMTVRKGEKKLTQEKSDISRFMAMSSKHLISEFNKKIAECDMRIEKIIHEDEDLRRNFEIITSVPGVGTQNAVCLMVYTDNFSRFDFDSRKIACYYGVAPFGRQSGTSVNTPPHVSPFANKLIKALLTQAALASVNFCPQMAIYYHRLVEAGKKKPVAVNNVKNKLLHVITAMVRKGEKYNPDHDYYAALNAA

SEQ ID NO: 209924 - protein, 358 aa, unidentified
MNKRTRMSGLDKVFDAMDCRGAFVGLDVHKKTIHAALWLDGRVAAGWVMPAETTKVAAMLRPHRDRIARVVYEAGPTGYGLARALRQVGVVVEVVAPGRSPRPATQRTKADRLDAEQLAQYAAKGLLVAVAVPTETEEADRQLMRLREQLVNKRRRVKQQIKSFLLQHGVGEPHGLARWSRAAVAALRELALGSRLRLCLDVLLEQLEQLVAHVGRIEGALRELAATARHAEAAAIARTHPGVGPVVAMSYLVEVYRSGRFDTPRQVASYIGLAPRVRQSGQMRRDGPIVRTGRASVRALLVEAAWRWRMHDPAARRLFARLVANTGSAKKAIVALARRLAINLWAMLTRREPYRAAA

SEQ ID NO: 209925 - protein, 341 aa, unidentified
MPIVTIGLDLAKSVFQLHAIDEQGAIIMRKRLTRGQVLPTLEKIPPCLIGMEACGSAHHWAREIQALGHEVRLMPAQYVKPYVKQNKTDAADAEAICEAVRRPTMRFVAVKSIEQQAVMLNHRGRELLVKQRTMLANAIRAHFAEFGIVTAQGTQNLCKLKTAAEQGALSKTALDVLTLLFNQLDALNKSIKALEVRIHAWHKSNKTSLRLTSIPGIGPLTASAIVASVGTAGCFGSARSFAAWLGLTPREHSSGGKQMLGGISKRGDGYIRKLLVHGARAVVRMRSLKNAEPMPWLDGLLERKHRNAATVALAHKNARVVWALLNTGKVFEKGVSQVQTS

SEQ ID NO: 209926 - protein, 415 aa, unidentified
MLILGCDVGSETHYMRAIDTRGRELSKSAFPFDNDSEGFQSAKEWAVKIVAEHNKSQIVLGLEPTGHYWFCLAAWMISNGISVVQVNPYAVKQTKEVEDNSQLKDDTKDPKLIANLVKDGNFGMPYLPEKLYAELRRLSMFRDQLNEDRVRTINRMHREMKIYFPEYKDALGKADGAFSLELLKQAPFPDDLISLGEDGIRQNWHDAKLRGRGYSRAGEILRYAETSVGIKDGAVAGKTAVTWFVQIILELDAELAVIEDQINQKCQEIPYASNILEISGIGENTLFEILAEMGDISRFDDVKEIQKLSGLGLVACSSGKHKGETKNSHRGRKRLRYWLFQAAKSAVAHAEEFKELHKYYTTRTDNPLKKMQSLIVIACKLLRIVYTVLKNGTAYDPKKMLMDIRRAEKKEEAAA

SEQ ID NO: 209927 - protein, 313 aa, unidentified
MHLGIDVSKQTLDCCLISDGIFYERKFTNDSSGIDKLQTWLQEHGADSNLHCCCEATGTYYEESAKALARRYKMSVVNPRTIKGFGTAVMNRSKTDRQDARLIARYCQTMNPEEWKLPESSHRQLQELVRYIARTKHQRASEQTKYKTAPDFIKPHIKETINHFTKLIASLEKELQEYYRDNPEQDKRRKTLKSIDGIGENSAAVLCSIITEQFKHAKQLVAYLGLDPKEHQSGKSVKGRTRISKIGKSETRAALYMPALVAYRMGAFPNFTARLEAKGKPPKLIIVAIMRKLVVIAFHLLKNGENFDRRRYR

SEQ ID NO: 209928 - protein, 452 aa, unidentified
MVKKKKSGRKKAIKYLHVLQPNSAGIDIGATEIYIAVPEDRSSKPVRRFDTFTDDLHDAAKWLKECGIESIAMESTGVYWIPIFQILDIYGFEVILVNARHVKNVPGRKTDVIDCQWLQYLHSVGLLRGSFRPAQDICAVRSLLRHRNNLVKAASSHIQHLQKSLTQMNLQIHNVISDITGVTGLAIIDAILSGERNPKILAELRDPRIKADKKTIVKSLTGDFRSEHVFTLKQTLQSYRNYRQLIQDCDGEIENHLNEFESSIDLDDSPPIPPSTPKRKPKGNELNFDLRKHMYRLLGTDLTQIDGISSLTAHVIFTEIGPDLSKFKNVKHFCSWLGLCPNNKISGGKILSSHTRPGSNRAAQALRISANSLWNSKSYLGNYFRRMRSRHGAPKAITATAHKLARVIYHLVKNQKLFDDTIFAEQEKNHQKRFEKKIITQAKSLGFKLIPV

SEQ ID NO: 209929 - protein, 490 aa, unidentified
MAKRKQQSTFERLTSGKLNRKQRKELIRKIEVEDPGLQIIHRNVAGIDVGNESHMVSVPPDRDPQPVREFGSWTKGLQDMADWLKGCDIESVVMQSTGVYWVALYDVLEQRGFTVCLSNARDTKNLSGRKSDVQEAQWLRKLHCYGLLRNSFRPPEEIRELRSLWRLRDRHVKDVAQEIQHMQKTLTQMNLQLGNTISDVSGVTGQAIIRAILGGERDAYKLAELKDYRIQASREEIARSLEGTWREDMLFELQQVVDRYDFYQRQIQECDRRLQVLLAAIPSRPMAPAKPEEQKPDSQANESQKGGKKKPRGVKKARKNQPSGFDLQAELKRICGVDLTRIDGVKVMTIQTFVSEVGTDMSAFKTEGHLVSFLGLAPNRKVSGGKLIRHERRKNKNRAAAALRMAASTLEKSDSYLGGRFRYLRARLGPGKTIKAMAAYLARLIYRMLTMGEEWVDRGAAEFEKRRKFRQEQSLRRIAKDLGYTLTPAA

SEQ ID NO: 209930 - protein, 388 aa, unidentified
MIYVGIDIAKLNHFASAISSDGEELIKPFKFTNDNDGFQLLISKLAPLDKDSLIIGLVSTAHYGDNLVRYLVAKNYKVCVLNPIKTSTMRKNNIRKTKTDKVDTYIICKTLMMQESLRFVTFYDLDLMDLKALGRFRQKTIKQRTRLKIQLTSYVDEIFPELQYFFKSGLHQKSVYALLKEAPTPEAIASMHMTHLAHLLKVNSHGRFDKEMAQQLRVLAQKSVGASDSSLSIQVTHTIQQIELLDSQLERVEAEMTEIMKFNDSVIMTIPGIGYINGGMILGEIGDIHRFSSPNKLLAYAGLDPSVYQSGNFQAKKTRMSKRGSKVLSYTLVNAAHNVVKNNATFKAYYDAKMAEGRTHYNALGHCAGKLVRIIWKMMTDNLEFNLD

SEQ ID NO: 209931 - protein, 419 aa, unidentified
MKNMTSEKSFAAFIGIDWADQEHTYSLAVAGSSRIERGRLQHTPEALHAWAEQLHKRFAGRPVAILLEQKRGALVWALQEHPFITLFPINPLTSAKLRQAFFPSGAKSDPLDSDLLLDILRHHRDRLRPFQLDEVQTRLLERLTQDRRGAVEQRKSCVQQITAALKEYFPLALEVLGKLECNLAARFLLKWATLEELQAAQPHRARKFFHGNNGRFQIEQRLKRIQQAQPLTSDPAIIEAGRRKVQMLAQLIITLNQYIADYQKRIETLFQRHPDRHIFQSFPGAGAALAPRLIAAFGMDRSAFADALSVQNRSGIAPVRVSSGKTAIEKMRVVCPKFLRQTFHEFAATSVRYCAWARTYYQAKVAAGKKHHTIVRALAFKWIRIMWACWQNQEAYEETRYLRALTRSGSPFAVTLKKT

SEQ ID NO: 209932 - protein, 376 aa, unidentified
MAQTDVQYPTIHLAIELSRSAWLVAARLPGVEKPSLHRIEGGDTAALLALAAALRARAAARLGTPVRVACCFEAGRDGFWLHRLLTAEGIAAYVLEPTSILVNRRARRAKTDRLDASGMLRVLAAYLGGDRQACSMVRVPTPEEEDAKRPHREREELVRERVRLENRIAALLATQGVRERPSLRSWERDLAALRTGDGRPLPPHLRAELDRLRRRLVLTLGLIREVEAERDAALAAGPRDAAGRKIAALCRLRGVGANFAGVLTREVFYRAFDNRRQLAGYVGLAPVPHQSGEADRDRRISRAGNARARTTLIQLAWLWLRYQPDSAPARWFRDRVGALRGRTRRIAIVAMARKLLVALWRYVETGLVPEGVEVAA

SEQ ID NO: 209933 - protein, 346 aa, unidentified
MEQYVGLDVSLKLTAICIVDRTGKIEREGVVTSDPETIAAFVRSHAPHVARVGLEAGATSTWLWTELNKMGVPVICIDARHAKAVLKMQINKSDRNDAVGIARIMQCGWYKEVRVKDLDSHATKALLVSRALLVKIRRDIENQIRGLLKNLGLVIGRAKMNVFATRAAELAEARPELAAAVEPLLKAREAVGRQIADLDRKVMRLARNDAQVRRFMTAPGVGSITALCFLATIDDPTRFKRSRSVGAYVGLTTRRYASGEIDWTGRISKCGDVMLRSYLYEAANVLLTRVARWSTLKAWGIRIAKRSGLRKAKVAVARKLAVILHRMWIEGTEFKWSSKEAANQPA

SEQ ID NO: 209934 - protein, 392 aa, unidentified
MIYVGIDVAKDKHDCFITNSNGEVLYKPFTISNNREGFDTLFQRIESVSDDFTKVKVGLEATGHYSYNLLGFLLDKGLPTYVINPLHTNLYRKSLSLRKTKTDKVDSRTIATMIMSDMNLKSYSDISYHNEELKSLTRYRFDKVKERAKLKTSISRLVNILFPELEELVPSLHLSSVYALLSEFPGAAQIAASHLTKLSNLLSQASKGRYGKETAILFRETARSSIGSVMPAKSLELKHTIKLIQELTAEIDEIEAAIKQIMDEEIHSPILTIPGISYRMGAMILAEIGDFSRFDSADQILAYAGMSPSTYQSGQLDNCHSHMEKRGSRYLRYALYNATKYVCHWDNSFGAYLQKKRSEGKHYNVALSHAAKKLVRLIFAMEKSGRTYQPAA

SEQ ID NO: 209935 - protein, 407 aa, unidentified
MELPAIFACVVGLDVHQAKISACAMIEQPDGTLTVEHREFGAFKRDRRALAEWVRTLGPDVVVMESTGIYWKSPYAALEQVGIAAWVVNARHVKNVPGRKTDVADAQWLATLARAGLLRASFVPPADIRHLRLIARQRQKLSGMLASEKNRLHKLLADAGIRLNVLVSDIHGQAGRAMVKALIEGQPLPEILDLAGRLRASREELFEALQPEQLSDAHRFVLSEIMAHIEELEARMGRFEQTLLAGLAAWEPQLVLLQTLPGVDRIGAAMLLVEIGTDMASFASAEKLASWVGICPGNHESAGKRKSGKTRKGNAWVRRLLCEFAQAASRSRCGLKEKFQALSIRKGHKKAIVALAHKMLRILFAMLKNHTPYQDQAVDYEALLVQRNAPRWIKMLAKHGFISPAST

SEQ ID NO: 209936 - protein, 303 aa, unidentified
MAHPAPPRVTIGVDTHLDVHVAHAKDQLGRRLATVSIPTTPAGYRDLLAWARGLGEVEAFGIEGTGSYGAALARFLRAHGQVVVEVNRPDRQARRRRGKSDPLDAEAAARTVQAGEATVVPKAGTGVVEMLRCLRVARSTAVKARTQAGNAIKALLVTAPAELREQLRGLPTAKLVHTAAAFTSAKPTTPTAAAMLALRTLAARHQALSAEITTLDTELARLTAKAAPGLVALFGVGPDSAGALLVAAGDNPDRLRSEAAFSMLCGASPVEASSGKTVRHRLNRGGDRQANAALHRVVIVRLR

SEQ ID NO: 209937 - protein, 354 aa, unidentified
MRIVCALDVHRRQITYAIVDVRSGELSRGRITPATRESVREWLARFDSLHDVHIALEGTTGWRFVAEQVARAGHRAHLADPAETAVKRGRKRRAKTDRADCDLLLRLLSARELPESWIPPAQILELRTRVRLRKTLVDERTAWQQRLQAQLFHQGVPAGVRPRTRAGREALASVELSPAGRELVALALRMIDRIERELEPLDRALSLYARRQPGCRELITRLYGVGPVTATAIVAELGDARRFACSDDAVRHCGLDVTVHQSDRKRAPGHLSHEGPELLRWALFEAAQQACRPASPDYDYYRQVARRIDHNRACLSVARKLCRRAFHILRELGAEALAPIEPAPPGEEVTPAAA

SEQ ID NO: 209938 - protein, 664 aa, unidentified
MSRSCQNRRRAAARTATNQDAGCAVHTAAMPTEGPVPSTTDPRTSRSSAAPGDTPAATPVAIGIGIDTSRYGHHAIFLDADLQSAAPELKFVESAQGYQQLQSRLAALRHKHGPVHFHFRLDVAGSYADNLLAFLHGLPEPRTISCGDPQRNKNYRAAIFGHKKSDATEANATARYALTEKPKPMPVVAPAVQQLCQIASRLESQARHCTRVVNQLHNLLGRTFPELALLVKDLSAGWVLTLLDRYPTAAKLAAARPSSLEKIPYLPHEHIARLLEQARTSIASLTGPVTEELVRELVGQLQDAHVRHQALEKLLVSAYRQLPEPNHLDSIIGFGAVTAAILTAKMVTTGRFVEPAKLTGYFGIYPVEASSGIDRDGQSRLPLRMVMSRRGNDLVRRYLWMAALSAAQHNPAVRPLYQRVRAKHPDQPGIAIGHAMRKLLHLALAVWQTGKPFDPEHYPWDQAAHLPGSQQPATAEPVAPSPTHERTGPNAQAAGHKNPVTTPVRSVVTAACVPTSVTEAASAGNDSARSVASEHPEATACDMPMSQDAQAEATALAWIDFAHLKTQLPLQRVLEHLNLLTDLRGRSRQRKGPCPVHAASGKSRTFSVNLDKNLFQCFDPHCGSKGDVIDLWAALHKLSLRDAAADLIQTFNLEPASRTEKRHG

SEQ ID NO: 209939 - protein, 354 aa, unidentified
MGSANNSSVFHPEGEVMAIIAIGIDLAKNVFAVHGVDATGKAVLVRPAVRRDALLELIAKLPPCLIGMEACSGAHHWARQFQQFGHQVRIIAAKFVAPYRLSGKRGKNDAADAQAICEAVQRPQMRFVPIKSEDAQGRLSIHRVRQGFIEQRTATINRIRGLLSEYGHVLPQRAEVVRREAGLCLEDLPGWANTAIGDLLSELHRLDERVAEYDRHIEVMAKADDRCRKLMAMPGIGDKTATALMASIGSAHDFKCGKQLAAWLGLVPSQYSSGGKQRLGRITKAGDSYLRMLLILGARAVVANAKKKDDRLSRWVADLAERRGYWKAVVAVAAKNARMAWAMLSKGEAFRPMT

SEQ ID NO: 209940 - protein, 353 aa, unidentified
MSDYYVGLDVHKASICIAVLNVDGKLVMESVIETSASTILDFLKGLRGQIQVTFEEGTHAAWLYDVLKKTKAKVIVCDPRKNRLLQDGNKSDQVDARKLAQLLRAGLLSAVYHGEHGTRDLKELVRSYEYLVEDSTRVMNRIKALYRGRAIACARVDVYKLRQREVWLAKLPEAGARARAQRLFSELDHLAGLRREARQALVVECRRHPATKLLLAVPTLGIIRIAQLISSVVTPHRFRSKRQFWSYCGLAVVTKSSADYRVVGADVRRTRKAATTRGLTRSHNRTLKYVFKSAALTASRCEPFKAWYAELVERGLRPELARVTIARRIAAITLAVWKRGESFDANKLLKHPT

SEQ ID NO: 209941 - protein, 450 aa, unidentified
MKIFIGIDIGKEVNVASFLNEKGVEIDKRFKFKNNHLGFLSFKDNIDKLKYDYNFQYDDVLIGFESTGHYWINADWFITEKLNIRTVMVRNDAVKHIRALNSQGKGKNDSLDSRTIAECLRNDYYFEVKGRKEDYIVFRRLTRERTEFEKEIARYKNRFRAWLDVNNQIFLEVFSNIFSTGALTLLKLYPSPLDIIQDSYLEVREKLREAGYNRSNNTFKMYYEEAKTHKNHINGISYADRLEIIDYIETLEIYMKKKESLDEKIETLIKILEGKIFTSLSEIKGMPVAQVASLLAEIGNVDNFKSARHLLSYAGLNVQGEGSGKNKGYSWISKTGNRKIRKELYVITFNLVRHNDYFRGLYCYYKSYKRANEKSNKEMLIALSCKILRIIYGMLKYNKEFDLNEMIKNYDFRNINKEKFIDEFLGNSEKRQKIIPQEIEEIFLNNRKSN

SEQ ID NO: 209942 - protein, 452 aa, unidentified
MREEKISMSVVNPCAAGIDVGSRSHWVAIGQGAGDFKEFGVYNEDMYKISAWLKENEIETVAMESTGTYWQSLFSVLVAEGFKVILCNGKFTKNVKGKKTDILDCQWIQKLHSIGLLSGSFLPDDATEHLRTLCRHRSNLIDSATSTSNKMQKYLRLLNLRLDVVVNDVCGQTGLSIIRAICGGETDPNKLSSYRHPNCRKSAEEIAKALQTNGRKDYLFALQQELEMYEMFQSKLQQCDVEIEKLLTDTIDNDPDKKQHFIEKNPYKKVNKNAPKNIDLNLFSYQYFEGVDLMAIEGLSHATILSLMSEVGLDGIRQFPSAKHFASWLRLAPNNKISGGKVLSSRIPKGSNRLKIALRSAANAIGNLKDSTPLSDFFKRINFRKGRVSAISATARKLAVIIWNMVVKGIPYKNPEGYMYLDEKRKLGVVKRMRRQIEKYGVTSEDLSFVTT

SEQ ID NO: 209943 - protein, 395 aa, unidentified
MFIVGIDIAKRSHEAIIIAEDGQVVRKAFSFRNNCTGYNLLLEQVRRLTLVKSQIVFAMESTAHYWLALYARLLKDGYTVMVLNPIQSHSLRELYIRKAKTDARDSLIIADLVRFGRCKASNVPQDKILALRELCRSRAYLVDMAADLKRKLIALLDRIFPEYEFLFDSVFSKASIAVLSKYSTPQKVKNANLRKLTDILMESSNGHFGEWKAHQLKEAACSSFGIDDSDGVYSTLLGMFLEQILPLTAQADSLEKQISVFFQEFNNPLNSIPGVGTVLAATILSEIGDITRFSSADKLLAYAGLDPSVKQSGEFKSNQNRMSKRGSPYLRRAIWLASTVAVHRDPMFQTYYEKKISEGLHYMNVIGHVSRKMTAVIFAVLRDGQPYQPVLQTAD

SEQ ID NO: 209944 - protein, 345 aa, unidentified
MKHYVGLDVSMKNTSICIVNEQGKIVHESEVKTDPHALADAIEKTGLKIELVGFESGSLGHYLTQGFKERALPAVCMDARKMSAILSVRVNKTDKNDARGIADALRAGMFTRVHEKPQDAIDRGAVLSMRRCLVNQRTDIKNHVRGILKTYGIRLGAVGPTKFNEAVTRRIQELNHLVQQTMKDTLEIFDMLTQKIMRLDQELLKIANEDKDARLLMTAQGIGPITALTYKAEIFDPSRFPNSRTVGAYLGMTPTQYSSGETQKQGRISKCGSMELRSLLTEAGVVILTRSQKWSKLKAWGLKLMRKKGLKKASLAVGRKLAVIMHRMLLEQKEFVWGEAPAKVA

SEQ ID NO: 209945 - protein, 348 aa, unidentified
MAVTIVETRAITGGAGTHAGTHVAAALDPVGGLLGVREFPATSAGYTGLLGWLGGFGTVCLAGVEGTGSYGAGLARHVTAAGVRVVEAGRPDRQDRRRQGKSDPLDAVSAARAAQSGRARGAPKGRDGAVGAIRALMVARRSAGGERTRTTSQARALVLTGPGDLRTRFARHTPAALVTGLASLRPRPGDVVGYATRIALRELGRRAEFPGGQLERLDELIVPLVTARAPGLLALFGVGPNTAALLLIAAGDHPGRLRSEAAWAHLCGAAPIPASSGKTVRHRLNPGGDRQANHALWRIVFTRLGAHPATRAYAERRTAEGKSKAEIIRCLKRYVAREVYPHLRTPAG

SEQ ID NO: 209946 - protein, 450 aa, unidentified
MPANSTTRFVGLDVHKRQITACFVDGEGRKLETRTFELTRAKLAYFAQHVLRPNDQVALEATTNCWAVARILQDHVTRVVVSNPLVTKAIAQAKVKTDKVDAHVLAQLLRCDFLPEVWHPDTTTQQLRELTGRRAALVQQRTALRNRIHSALAMRLIETPESLFNSAGQDWLAKLLPGLDAQGRLLITSDQRLIQALQQEIDALEQQLASQGWQDQRVRLLMTLPGVDLTVAEAVLAALGDIERFTTPEQAAAYLGLVPSTRQSADKCYHGPITKRGNNQARWMLIQAAHHVGKHPGPLGHFFRRLKQRKNYNVAVVATARKLVMIAWHMLRKNEPYRYAMPRTTETKLATLRVQATGQSRKKCSAKRTKLTAKLPGGSRIIKSLDRVYASEGLPVRQPLTVGEGRTIAATQSVQFVADLAHDHVVPRKQKTPRVAEPLSTDGAAVQPAS

SEQ ID NO: 209947 - protein, 466 aa, unidentified
MEKKSVAVFEELRRNAAGIDLASRGDNYVCGPRREDGEREVVSFGTTTPELHKMVAWLKERQVESVAMESTSVYWIPAADLLEAAGIEAVLVDPREVRMVPGRKSDVKDCQWLQKLHSCGLLRGAFRPPEGVAAVRSVLREKDNLTAMRTQAIQQMQKSLDQMNIRVHHAVSDIDGATGTAIIKAIVEGERDPAKLAALRDRRCKKTEKEIAEHLTGTWRDGHLFNLGQAFKTLQFLDERIAEYDLKVSQMFASLAAAAPAPGASGNRPPPPSPPEKKLTARVLAAIKEASSIFTFMGFNLLGIPGIGYTTAAVIASELGSNFDRFPDEHHFASYIGLAPSLGKSAGKNVRQKKRCKNTSRVGKALRMAASTLYRSRTGLGAYLQNVARHSDKKTAIKATARRMAHMIYRGVRYGIEFIDRGAKEYEERLRAKKVYAANMLIKAFDIQISELTATPEGIAALAALV

SEQ ID NO: 209948 - protein, 362 aa, unidentified
MNSIAMKTIGVDLHKTSLTATVLDPAGLVLERKDIPTKCRNQIAAYFTSHGPNVQVAVESVGFYHWFWDTVKPTVTKLHLADPAGVRAAAGRRTKTDRNDSLLLAQLLRENRLPMAYVPDEPIRALRELCRHRHRLARQLALARRHLRWLALKNNLPGPDTFTSDRAQKWVLAQDAKLSAVHRLSARQFIDQILSLERQLADVELVLKDTVATHAELAPTLALIQSVPGIGFITAITIVCECGDITRFDCIDELSAYAGLCPRVTQSGESAHHGHISKQGPPQLRWVLQQAAWVAIRTDSNARRIFARIAKRSGSKKAATALARKLLSYAWSLCRRGQPFVWPNTQTSVASRPVVPVWSFEI

SEQ ID NO: 209949 - protein, 381 aa, unidentified
MLYVGIDVAKNKHDVTVIDNTGKMVLKPITITNRKQGFELLHNTLKQLNQNCLIAMEDTGHYALNLLTFLHQNNYQIYTYNPLLIKEFTKSLSLRKTKTDKKDARTIALKLLSDPNRALFMHDNRQEELKIMTRHMNRLKKHQSDWKVQYTKCLDIIFPELHQVVTKHSDYVYELLKRFPSPEKMVTAGFDKLIEIKRLTAKHALDILELAPNSIGTTSLAREFELIEIIENIQHYEKLIKQTEKKIDELMAELNSVITTVPGISNRLGSVILAEIRNINTFNHSDQLQAFAGLEPAIYQSGQLDAQGKMVKRGSSHLRWALIQAAIKVARYSPAFKAYFKTKLAQGKHYNVAISHVAKKLIRVLFYLLKNNETFDEDKLR

SEQ ID NO: 209950 - protein, 356 aa, unidentified
METAYDGRQVVGMDLHRRRSVLVRMTEDGRRLGTAKITNSPAELRRAIARAGKHPRVVLEATYGWYWAADVLAAAGAEVHLAHPLGVKAFTYRRVKDDVRDSADLADLLRMGRLPEAWIAPHEVRELRELTRYRIKLVRMRTSCKDQVHGVLAKLGVPVTCSDIFGVAGSAWLDGLRLPQPYAGKVTSLRHLAGELTTEITMLSEVIASLLAGDRGYQVIQQLPGIGPVLAAVITAEIGDVTRFSNAGQLCSQSGLTPRHRESDTKVARGHVTKQGSRLLRWALIEAIQRIPRDSVIGAVKDGIIGRRGKEAKNIAKVAAARRLLTLIYYGMRDGQIRCLSRPPAGPPVTETARAA

SEQ ID NO: 209951 - protein, 433 aa, unidentified
MQDVQDEPLFAQRVAGLDIAKAEIEVTIRVPSDTSPGRRQQETRTFGTTRRELESLADWLRSWGVTKIGMEATGDYWKPVFFLLEARGFDCQLYNAAQVKALPGRPETDRADSVWLARITERGMIASSFVPPEPIRRLRTHTRYRRHLTQARTAEKQRVEKLLEDGHLKLSSVISDIHGVSGRDMLDAIAAGQRDPKTLAQLARGTMRGKIRRLEEALDCSLFTDEHAGVLAMMLVTIDHYTAQIGALTTKIEKLAEPYLRQVEQLDAVDGIGIICAQDIIAEIGVDMTVFPDAAHLVSWAKWSPQVRQSAGKRKGSNATGRGNPYLGAALGEAASSAGRTQSFLGAKYRRLTRRMPKKKALVATGNSMLTIVHALLSDPQACYTDLGADYYEQRMHVRRQARNHVKSLERLGYKVIIQAINADTGELPATAG

SEQ ID NO: 209952 - protein, 418 aa, unidentified
MSKINERCAGIDVGKRFLLCCVLTAAANEEPSPRTLRFDTTVAALIRLREWLVTERITHVVMESTGSYWIPIFNILEDHFVVALANPEEVKNRKGHKTDRKDAEHLADLLRHNHLRASYIPPKAVRELRDLTRRRLQLTQDATRERNRVEKLLEHVNVKIGNVLSDVFGASGQSMLLALIDGNATPEQIARLARGQAKRKIPQLTEALNGHGMSDHERFLIRSCLRHLACLEEELEEVDGEILRRMQTPLFQRPFLLLQTVPGIGQLAAATILAETGADLSSFPTVEQIASWAGLCPGNRESAGIRKGSQTTHGNPYLRTALVQCAWAAVRKQGSVFQARFHQLLSRRGPKRAIVAVAHQILTILYWMLKRGVPFRGSETAPQQRRRQRRAHHHLKCLRRLGLAVQILAGTDILSENG

SEQ ID NO: 209953 - protein, 435 aa, unidentified
MLILIKLQNTNLQPLLSVSSVACMFKTRSKGSTTARRARVTTSVARSHASTTTGPRPIVARSCSTVTEQGPSQSRAFSPEQPTELPTRVKSPPARSHLQGRDTRVTTTTPLASQTLCSSCVFAGIDVAKHKLDLARSDSGELITVCNDAEGIACILELLGQAKPKCIVVESTGGLERPLLEALLEANLPVALVNPGRVRYFAIGCGILAKTDPIDAAVLVKFAQLAEPRLSQKRSANQSELDALITCRRQLSLMRSQQTNCRLATRSKNAIKSIDAVLATLDKQIQQLDKKIRQLIDSDDDFKHLDQQLQSVPGVGPILSATLIAELRELGDANRRSIGALVGVAPFNHDSGAFKGKRSIRGGRTQVRCVLYMAALAAMRFNPVLRRFAQRLSRCGKSPKVVIVACMRKLLTLLNAMIRNNLMWHDLNVVKMLDT

SEQ ID NO: 209954 - protein, 400 aa, unidentified
MRVVFGIDVSKASSEVAILVNGEKVHGYTISNDALGFARLLGDLRTVHKPEIIFEATGVYSRRLQTFLEDNGYAYTRLNPLEAKKQLDSLRVRKTDQIDAEKLAQSQFVLNRKSTYVQEEIYQNLRDLSRFYQNLTEDIVRAKNRLHKALQVTFPELENILSTPSGEQYWNLVIAFPCKDFVLELSKDKLSESIRQSTSKRISDKRVAYLAEKLIALANQSYCAVKKNSPMLEEVRYYTKELLRLSEQRQAVLDEMVELAQPLPEYDILRSIPGIAETTATSIIGELGDIRRFQSANQINAFIGIDLRHYESGNFLAKEHITKRGNPYARKILFKCIHNIASASHTNPCHIADFYEKRKRQSQTTSTKPHTIASIHRLIRTMYYLIMHNKLYDYASTQNR

SEQ ID NO: 209955 - protein, 412 aa, unidentified
MTATNQFAAHVGLDWADKKHDVCVQFKNGERTFHVIEHTPEALDVWLTELHQKVKGRIAIAVELKKGPVVYALQKYPFITVFPVHALSLARYRQAFSPSGAKDDPQDAELALELMLRYPQKIKAIEPDNADIRLLQQLVEQRRQLVEDKRRFVNRLINSLKQYYPQPLEWFSHRGSLLLCELIIRWPSLQQLKRARRDTIRNFLNAKGGRAMALTEQRVVSIDNAIPLTTDPSVIEANALMATALATQIKVVSEIIKTYDERIETLFDTLPDAGLFKSLPGMGPCMGPRMLAALGDNRDRFNSAEEIQNYAGIAPVTERSGQKSWVHWRWQCAKFVRQTFVEWTAKTVNSSYWARLYYLGQREKGKSHQSAIRALAFKWIRIIYRCWKTRTQYDEAKYLLALEARRSPLLKP

SEQ ID NO: 209956 - protein, 399 aa, unidentified
MISVGIDVSKGKSTICILKPYGEIVKSPFDVQHTNSGLESLVQILEGLDEEFRIAMEATGAYHYPILYYLKEKGYFVTLVNPLEMKRYRCQGLRNPKTDRIDAKIIATYVLDYWNSIKDYAVSDESYAELRLLTRQYRKYMDFRVGAMTSLTDILDMTMPGIRTVLIDWNKYSNHDPLSDFSYDFWHYDNVKKFSKEEFVEEYAKWAKEKGFHRSEAKAVALYELAHEEIPTLPSGTPSTKMLVQEAVQLVRKINASLYEILTRMQKLAKEFPEYQTVRNMSGVGDTLAPRLIGEIGDVRRFPNASALIAYAGIDAPPYQSGRFIGTERHISKRGSSNLRKIGFETMTCANVAKKPDDPVYLYMQKKKAEGKPGKVAKIAGMNKFLRIYYARVKELYQE

SEQ ID NO: 209957 - protein, 368 aa, unidentified
MNSEYYTTIGMDVSDRTTKVCVMAKERGARRILEETTIPTTVDGLRTYLSGKCADWPVVFETGSHSRWMKREVESLGMKAIVANPSRLRMVTESNTKNDRNDARELARFALADVGLLHPVRLRGERCQQVLRLMKARDMLVKVRTMHVNELRGFAKSMGFRLPGCPANKVHALDKAGWPDDFESLAWPLMDMLETIDLKIRAYESQIRSLAESGELRDKIDRVREVYGIGLLSGAALVASIDADPGRFRKARDAGAYFGLVPKQRQSGEMDVQCHITRAGSGFVRRLMIEAAQIAMRESARDTDIKLKGLRICARGGKIAKKRALVAVARCLVVTAVALLKKPDADYVPLSERARLEFEAMRSAETAA

SEQ ID NO: 209958 - protein, 355 aa, unidentified
MQKYNISFKGQNIFVGIDVHLKTWHVTTLTESGYKYSFAQHADARELFERLNKKYPEAHFKSAYEAGFCGFSVHYALTEHGIENIVVNAADIPTTGKEKAMKTDAVDSEKIAWALKRGELTGIYIKDKRFMDDTNLMRLRQRFIKDLSRQKNRTKHLLYTQGVTYPKRFLNSKTHWSRNFMQWLREEVELLSEEKLTLTLLCEQVENTRKAILKVTREIRRLSMTEKYKGNFDLLISVPGFGLIMAMTMLTEFDNNIKRFPNERKFVSMLGLIPTCHDSGEKKTNGEKSFRGNKQLGPLVVESSWVAIQRDCELASYYSKCCQCMRPPRAIIKVARKLACKAYAVLKNQKAYVHS

SEQ ID NO: 209959 - protein, 441 aa, unidentified
MAMRVSKVLNIQYPNAAGIDIGSRSHFVAVPADRATESVREFGCYTEDLNALALWLLDCGITIAALESTGVYWIPVFEVLEAHGIQVMLVNARSVKNVSGRKSDVLDCQWLQQLMSFGLLSSAFRPPADVCALRAVSRQRDTLLQDQARCVQRMQKALTQMNLQLTNVITDITGQTGLNIIRAIVAGERNPIELAKHRNYRIKASEVEIAKSLEGTWKAEHLFCLSQALSLYDTYRALIAEADAKLETLIAPLRRQDVQTAKGKTKRGGKNAPGFDVQEALREWAGVDLTQIGGIDVCTALKVLVELGTDLSKFKTAKHFCSWLGLCPGTRISGGKRLSGASKRIPNRVARALKLAAQGLHRSQCGLGAYYRKTAARLGKGKAITATAHKLARLIYAMLTKGTEYVQQSQAEYEAKFHDRTLKYLQLKAKTLGFDLVPQAV

SEQ ID NO: 209960 - protein, 427 aa, unidentified
MSERKSLEIRVSVDVGSRSHQVAIGLSSGEVLEEFEIAHRVEGFEDLFSRIERHRKGNSYRVAVAMEGFNGWARPLDSMVRGRGYRLYNINNLKLARFKEIFPGAAKSDRIDARKGLELFQLRDHLPLAKEVLQEVVGTPHENEVLKRLSRRRRRLVDERVRVVNNLQADLQAVCPGLLEITKEAGNRWFLNFLISADTLPQLARLRRTTLLKIPSVGVKYARLIQDWQERAHFSEEVEWVSAMIQEDARRILELDETIKALEVKTAEVAETSTIAKLLRSIPGYGAICTSELAGEIGTIERFNKEGSLALYLGMATLDNSSGKYQGTKRPKHINTRAKAAMMTALDRHRKYVPQSQKYYEKKRAQGKSHNQAIRALGRHLCRIIYKMLKEKREYEVRPPKRDTQAKVTSRSSRIGQIGKKKISAKG

SEQ ID NO: 209961 - protein, 423 aa, unidentified
MKFKAQDKQNQLIEKITPQHLVVGIDIAQLTHVARAVNFRGIAIGNPLSFSNDEEGFQALLRWIQSLQEAHNLNFAIIGMEPTGHYWLSISRWLFEKQFEVVLVNPHLVKKNKENRDNTPSKSDKKDALVIADMVKNGYYSFIRSTPEAFEELRVYLSNRDSVVTRLVSAKNQIHRWVDVVFPELRQVFKNLLCRGALATLRLFPTPEELRRLAPQDVVSGWKSIMQRQPGNKKAQTLIALARHSVGSKQATHAYKLHLTQLLAEYDLACQQLQVVEAEITAVLDRIPFAKSMLAVKGISAISLAGILGEAGDLSGFTHGNALLRHAGLNLAEASSGKWTGQMKISKRGRSRLRRFIFMMTISLVGNNPEFKAMHAYNVQVKKMKKMRSLMKLCGKLARILVGMARSNEAYHPHKTMPIQLAA

SEQ ID NO: 209962 - protein, 345 aa, unidentified
MSIVGGLDIHRKQITFDYLDTVTGEVERGQIAPADRAHLAGWLARRFPGGQVADFALEGCTGWRYVAEELAAAGITAHVGEPADTAALRGRKRHAKTDKADSRHLRQVLADGRLPECWIPPPHVLECRALLELYHDLRTEHTAWVQRVHAVLFHQGAQRLDEGLRTGEGVAALRHITQTQLSPAGQCQVATALDILAALDSRLDMVRRRLLHDARHLTGARVLADRLYGVGPVTALALTCWLGGAGRFSSARKAVRFAGLDVTVYSSAGKRSPGHLSRQGPAVLRWCVYEAGKTHARASAPDHAYYTQVKDRTDGKRAAISEARKIIRQACHILSGLGDDALTTT

SEQ ID NO: 209963 - protein, 436 aa, unidentified
MPKCVAAQSLPLSNDEGRVVMKLTYPICCGVDVHKTFLVATIIKTDGLVPKYHKKRFSTFSRDLLAFKQWLLDNNCKDVCMESTGKYWIPVWNILEDAVHVVVANPKWVSAVKGNKDDTKDSRWIGDLFRMGLVPGSFVPNKKIRVLREFTRYRYKLISMRSSERNRFQNAFTVCNSTLDAVLSDMFGKSATAIQNYLLDTDVVNPAYCASLLQRTAKKKSADVMAAVEGFKMSAEQKERVRIIQEHFSDINARVARLDAEINKMVSEYESQISLLCTIPGVDRNLAITIISEIGTDMSEFGSSKRLCRWAGLTPGNNESAGKKKSVRITRAGVYLKPALVQAAHAAVKSTKSVYFKSKYERHKKAIIAIARMILTAVFAMLKTGEVFNPCDLQKYDMPEQLKRKQIVSSAKDAVKFLVSLGVLQEDTVSLAALTG

SEQ ID NO: 209964 - protein, 487 aa, unidentified
MVVCSHRVDIPFKRVSNTTYPMRCRIPYRIMEEPLAQRKRNVCLKPGKSRQTLSITHPNAAGIDIGSASHFVAVPPDRDDEPVREFASFTAELHALADWLAACGIDTVAMESTGVYWIPLFELLESRGFVVLLVNARHVKNVSGRKSDVLDCQWLQQLMTYGLLRGAFRPAEEVCVLRALYRQRGTLLRSQARHVQHMQKALAQMNIQLTNVLADVVGETGQKILRAIVAGERDGQVLAAMRNVRVRASADEIAKSLQGNWRAEHLFALKQALDAFDFVGTQLAECDREIERQLQSLQVHDGDPAKGKKRGRARNAPKFDLRTQLFRMCGVDLTRIDGVDVTTALAVVSEIGTDMSRFLTVKHFTSWLGLCPGTKITGGKVMSGKTKRVVNRAAQALRLAAAALRSSKSALGAYFRRLCSRMDKPKAVTAAAHKLARLIYTMLTKGEEYTDQGQDYYEQRYRERVLRALSQRAATLGMKMVPAENPA

SEQ ID NO: 209965 - protein, 343 aa, unidentified
MEIRTLGLDLGKTSFHAVGFDGQSHVVLRRRFSRLQLLRFMATLPPCLVGMEACCGAHHLGRTFQAHGHEVRLMPPQYVRPFVKAQKNDYLDAEAIGEAVQRPTMRFVPLKTVDQLDLQALHRVRDRLVGRRTGVINQLRAFLLERGLTPRTGRQHLARILPELLADAGDVLSPSMQQIIERLREEWRSLEDAIRDLTRQITAIARQDAACTRLIEIPGFGALSATALVAAIGKGTTFRKGRDLAAWLGLVPLQKTTGGKPTLLGISKRGNGYLRRLLLQGARSVHRLANRSRLGFGPWLDALDARAHPNIVAVALANKLVRIAWAVLTREEAYRPPVLATAS

SEQ ID NO: 209966 - protein, 356 aa, unidentified
MEDYDGRQVVGMDLHRRRSVLVRMTEDGRRLGTARITNSPVALRKEIARAGKSPRVVLEATYGWYWAADTLAEAGAEVHLAHPLGVKAFTYRRVKNDERDSADLADLLRMGRLPEAWIAPPRVRELRELTRYRHKLVGLRTSCKAQVHAVLAKLGIPVTCSDVFGAAGSAWLDGLRLPQPYAGKVTSLRQLAGELTTEITMLTEVTADLLAGERGYQVIQQLPGVGPVLAAVIIAEIGDVTRFKTAAQLCSWAGLTPRHRESDTKVTRGHVTKQGSRMLRWALIEAIQRVPRDSVIGSVKEAIIGRRGKEARNIAKVAAARRLVTLVFYGLRDGQIRCLAESGGPPLTQSPAQAAA

SEQ ID NO: 209967 - protein, 397 aa, unidentified
MYIVGIDIAKRKHEAAVIDGEGTVIIKPFSFTNNCSGYNRLLAMLTKAKLPLDEVSFAMEATGHYWLALFTRLQKEGFRVQVINPVQTNSIRNFYIRQAKTDPRDALLIAEVIRFGHFSESTLHPENIYELRELCRGRHAIVSMQADVKRKVVALLDQVFPEYETAFTNMFSDTSMAILQTCPTPKELSEMPLEELCHLIEVSSHKRFRMAKAQELQALARNSFGFAMAGDVFSTMIRLYAKHLDFLKQQVREMDRKIAEIMDTLDTPITTITGIGPTLGAYILSEIGDISRFSSAAKLAAYAGIDPTMRQSGEYNGVRNRMSKRGSPYLRHAIWLAASSAVLHDPALKLYFQKKRDEGKPYMASVGHACRKMVSIIYAVMRDNKAYTPCIPNEISA

SEQ ID NO: 209968 - protein, 349 aa, unidentified
MTEAYDGRQVVGMDLHRRRSVLVRMTEDGRKLETVRITNSPAALRAVIARAGTNPRVVIEATYGWYWAVDVLEAAGAEVHLAHPLGVKAYSYRRVKNDERDSADLADLLRMGRLPEAWIAPPEIRELREITRYRHKLVKARTSYKDQVHGVLAKLGVPVTHSDIFGVHGQDWLDELPMPQPYAGKVASLRQLAGALTAEITLLDKVLADLLDGHEGYHAIQALPGIGPVLAAVIVAEIGDIRRFPGPGQLGSWAGLTPRHYESDTKVIRGHVTKQGSRMLRWAVTEAIQRQPAGSRPREVKDAIIARRGKEAKNIAKIAAARELLTLVYYGMRDGRVRRLARQQPRPAA

SEQ ID NO: 209969 - protein, 351 aa, unidentified
MSTAGDVDLIVGVDTHRDTHTAAVCDGRGRVLSQLKVPAAPAGYGELLAWARATGKGRRLVWAIEGTRHYGLGLARHLAAAGEQVAEIDSTPHVGKRRAGKSDPIDAVRAARELLARPRPGQMRADGDREALRLLMVDRDNAVQSGKTARTVLTSVIVTAPAQLREELRHLPAERRARACAALACPRGADQLTRVVHQTLIRLGQRATALTEVADDLEAQIAAIVEGMAPGLVAAEFGLGALSAAQILLSWSHAGRIASEQAFAMLSGTAPVPVSSGRTDRHRLNRLGDRQLNRALHVIAVSRIRSHPPTLAYVQRRQAEGKTDREIRRCIKRYLARHFYRTLSHGTLSRA

SEQ ID NO: 209970 - protein, 315 aa, unidentified
MAMLVAQTKPVVGVDVAKNELVIYQDQSDRLEAIPNTKASISKWLRTLAGTASIAVEATNTYHVLFADMAYEAGCTIYMIDGYQLSHYRKGVNVRAKTDALDARLLARYLKKEADELHPWVPPCPLYRQLLSLFRRRAALVQVRTGLVQSWSNEPLLKTAFAAQINSMKRLEALVEKKIKDVLQRAELMGQVSRCMKVEGIGFLTAARLVTTFQRGEFSNANAFIAFLGLDLRVSKSGQSDGPRRLTKRGDPEARRLLHNAAMSGSRTAAWKPFYEEQRKRGFSTTQALVMLARKMARVVFALLKTQSEYQSKAA

SEQ ID NO: 209971 - protein, 311 aa, unidentified
MNSKTQEEINIGIDTSQSQLDIYVRPIGDYFSVENSPKGARKAARKLRQYHPTRVLIEATGRLEMQFVCAAHEVGLPVVVCNAGQVRQFARSTGRLAKTDRLDAQDIAHFGEALHPPLTLLKPEKLREISDLIIVRRQCLDMSTMQKNRLLRMPKSVQRPIQRILKAIQKEIERIDLKLDKLVDAIPQWRDQRDLLMSAKGVGKVVAYTLMSELPELGKLNRKEIASLVGVAPMNRDSGTYRGKRRITGGRSQVRTVLYISMWSAIQYDPKIKAMYERLVGAGKPKKVALVACMRKQLTYVDSPVSTTICQ

SEQ ID NO: 209972 - protein, 358 aa, unidentified
MNDVKSSRLDFTGQPIYIGLDVHKKSWSVSIFSNYGEYKTFNQPPEVDKLLHYLRHHFPGGEYRSVYEAGYCGFWIHDHLREQGIQCLVANPADIPTKNKERRTKRDRIDCRKLGRTLRNGEIKGIYVPSRSKLEDRTLIRTRLSMGRKQTRCKNQIKGMLFFYGVVIPEEREMGHWSRRFIQWIEGIRMERASGDIALKAHLEELSHLRQLIASLNGAILHLARTEEYRPLVHLLKTVPGISTLTAMILLTELGEITRFPSLDELSCYVGLIPDTQQSGEKEYVGSMTQRRHSQLRWLLIEASWVAIRKDPALLMAFQEYCKRMRKTKAIVKVARKLLNRIRYVLKNQAEYVPCVIE

SEQ ID NO: 209973 - protein, 422 aa, unidentified
MRILEPLQIFILEEPVMLNAVGIDVSKERSTVAVLHPGGVIVHKPFDVPHKSRNLHDLAQYLGSLEGDTRVVMESTGHYHEPIRNALSKAGLFVCTVNPHLIKNYGNNTIRKVKTDSADAKKIARYTLDNWAELREYTSMDTTRTQLKTLNSQFSFFMKQKTAAKTNLIALLDTTYPGVNKLFDSPVRADGSEKWVDFAYSFWHVDCVRKAGITAFTDRYKRFCKHHGYEFQEAKANAIYKDSKELIATLPKEAVYKELIQESIRQLNLLSENVEHIRKTMNELASTLPEYNTVMSMYGVGPTFGPQLMAEIGDISKFQHREALTAYAGVDPGKNDSGQEVHNSSHASKCGSSRLRHTLFQIMTTMLQTGGKEDDAVSSFLFKKKAENKPYLVYMTAGANKFLRVYYGKVKECLRNQEQAEE

SEQ ID NO: 209974 - protein, 356 aa, unidentified
MTTTILAIDLGKFNSVLCWYEPISRSTTFRTVKTTPEDLRRELTRHPVLVVVFEACSQAGWTHDLCEALKLPTLVACTNGAAWQWKRIKRKTDHDDALKLARMAAVGEIDGVFVPPRAVRQWRSLIGLRKRLVSERVRGQNRIRALLVCQGLPAPMGAKAWTVLGLAGIAQFAGPITECEDDDLWRGELHTLLERLRFLDTQIRQIETRLDAIAKSDPRVTLLESVPGIGARTAEVIAAYVLDPHRFRSAAEVNAYAGLVPRQFQSGETDRRGRITRRGPKVLRAALVECAWCSLRYNHWARDTWLRLQDNGLSKKKAVVALARKILVRCWAILRKGESWKNPGDSAEPIPAAAVG

SEQ ID NO: 209975 - protein, 309 aa, unidentified
MLTAEADKCKTKVVVNTAAGVQALLAWCAKHGAQPAQLHAILEPTGLYHEQAATALPQVRVSLVNPAQARDFAKALALRSKNDALDSYVLARYGQTLSPALWHPAPLHAHQLRALLTRREALSKDLLRELNRKEKSQFSPSAPLVDGSIDKAIAFLREQIKQIERAIDQHIDNHPDLKQDCELLNSIPAIGPQAGNAILAVMHNRHIDSAQSLAAYLGVVPVQRQSGSSLNSCARLSKAGPSQVRATLYMAALVGTRHNPHIRALYQRLLKAGKSKKAALGAAMRKQVHLCFGVLKNRIPYQPNYAMNG

SEQ ID NO: 209976 - protein, 328 aa, unidentified
MTKHTTICAGIDTGKRKLDVAIEGRREQLQVDNTPEGHKALVAWLRQYRVKRVGIEASGGYEQPVVAELRRDRFVVVVFQPAQVRAYAKFQLQRAKNDKIDAALIAACTAAVRKIHAAPDPRLQPFAERLTMIDQIGEDIARLKNRIESCRNATIIKLWQEDIARLEQREKAEFKVLVALIRKHRDLASRLELIHSVDGIGLPTAVAILVRLPEIGEITREQAVALAGLAPYDDDSGKHIGVRHIGGGRKRLRRALYTAALAASFRWNRQLIQLYQRLIAAGKEHKRALVACARKMLIFANTVVARGTPWCEEPPARNASPTGTLSVS

SEQ ID NO: 209977 - protein, 428 aa, unidentified
MSRKQSRVQRGCGIDIDKQWLWASLYTVTPKGNVKEKFKQFSNDAPGIEELKGWLSSHKVVDVAFESTGVYWQLLFDKLECEFNPMVGNPCKMKGMRGYKTDRGDGRWIATLLRLGAIEPSFVPPRSIRELRLLTRQYQTMTCDRTKVKNRIKKTLRQVGITIDLCMKNLYSKTGRAMLEALIACKDAVAVASLGIRLKTSYSDLLKALEGAPLTPKLGRVLARYYRMMTYLDSELEMLWSEIEDAAKQYDEQISLLESVPGIGRKTAIFLIAEMGADMSVFKSVKNLASWGGLCSGNNSSGGQRKKSKATKGNKYLRTALVQAAWAAIRTQGSSYRDWYYSNKARLGHPNKAAFAVAHQLLRACYSVLSTGSEYTKSCSEAVERRARRIKKQLRAIPTEELEQELEDRRRKLEMLEGQPLVSVPLPV

SEQ ID NO: 209978 - protein, 335 aa, unidentified
MRGAKATVGVDLSKEYFTAYLLSRDEEISAGPKNFQRDRRGLKEFKQWVEGHGFRAEDVIVVTESTNNYWETVAVKLFEEGFRVSVVNPRVIKDFGRSLQRKTKTDAIDAEVIALYGVRMKPRQWDRSRYEKMLRLRHLVRTREFLLRERLRLRNHLDMLKGSEFAPEEAIKVVEGSLREIERGIEETEEKIKEEIRADKEIEEGVRILRSIPGIGVINALVILSEAKGFEGFSRSREVVSYAGICPRVEESGKRRVDKGITREGNRRLRTAAYFAAMASLRHRSKVFRSYYERLLSRGKSKKAALMALGGKILRISFALVKKGEVFTPELCMSR

SEQ ID NO: 209979 - protein, 354 aa, unidentified
MPRKSNRLEAVATLGIDIGKNTFHLIGLDRKGAIVLRQKLSRGQVQARLANIPACLIGMEACVGAHHLSRQLKAHGHEARLMPARYVRPYSKGQKNDFRDAEAIAEAVLRPTMKFVATKTVEQLDLQGLHRVRERLVCQRTSVINQIRAFLLERGIAVRQGLRALRTEMPIVLAMTDKLSPRMIHMLEDLCTDWRYLDERIETVSNEIETLSEQDVGAKRLMTVPGIGPIISTATVAAIGSGDVFSKGRDFGAWLGLVPRQMSTGGRTVLGPISKRGNRYLRMLCVQAARAVLLRPQSWEKHGLKSWIEAAARRLNRFKLAIALANKIARMAWGVLHGGRNFEVRPMKPAPQAA

SEQ ID NO: 209980 - protein, 304 aa, unidentified
MEISTLGIDLSKTTFHVIGFDARGEIVLRRKFSRKQLLQFTSNRQQMLIGLEACGGAHFLGRALQAQGHDARLMPAQFVKPFRKSNKNDYLDAEAIAEAVQRPTMRFVPIKTDDQLDLQALHRVRDRWVARRTAVMNQIRGFLMERGITIRKGPSHLTTQLQGILEDADSLLSGRLRLLVFELKHEWDELDKRIENSNAELQRIAKQDDACHRLMEIPGFGPLVSTALVAAIGNGITFRKSRDLSAWLGLVPRQHSTGGKTRLLGISKRGNEYLRRMFLHKARSVVAQIGRNPSALGKRGFLAV

SEQ ID NO: 209981 - protein, 366 aa, unidentified
MQKISTVQARESQIFKARQLTIGVDLGDRSSCYCVLDDMGEVILERSLATTPKALPQVFGRMPRSRMALETGTHSPRVSRLLTQLGHEVIVAHARNVRLIGESRRKDDRIDALTLARLARIDPQLLSPVQHRSAKAQIHLTVIRARAGLVSVRTALVNTARGLVKSYGERLRGCGTSQVNRELAAGLSAELREALEPLLREVESLNERIKEYDRRIEEMTKKTYPEVAVLKQVKGVGNLIALAFILTIEDPHRFRKSRDVGCFLGLRPGRRNSGQSQPQMHISKEGDRYLRTLMVQGAHYILGPFGEDSDLRRWGLRLAGRGGKNAKKRAVVAVARKLAVLLHRLWVTGEVYEPLRNSQKAMRAVA

SEQ ID NO: 209982 - protein, 391 aa, unidentified
MDRVWVGIDAGKEVHWAHVLDASGEKLLSRKVENDEADLAKLIDEALSFADEVVWAIDQPGGGATLLLGLLWEREQRVLYIPGLTVERSRDTYPGESKTDARDAHVIADQARMRPDLEELTAGEGELAELQILLARRRDLVTDQTRTINPLRDALLSSFPALERALDLNNRGALTLVSHYQVPAQIRRAGRKRIATYLRNRGVKGADALSGQALTAAKAQSVTLPAEDVTARIVAELAAEVLCLKESLKTLDEELEKRFFARKEARVLTSLPGVGVILGAEFLVRAGDLSAFESADKLAAYAGLVPAAHDSGKRVGNDRRMRGGNKALKYVFYQSAFASLRSSPESRAFYDRKRAEGKRHTQALIALARRRVNVLWAMLRDGTTFEARFVA

SEQ ID NO: 209983 - protein, 411 aa, unidentified
MEHQNYVFVGVDTHKNQHTACILSCFHQKLGLTQTPNNPANFESFIQNINSFKSPDKKLVFGLEDTQGLGHSLAQWLLEQGYIVKEINPALTKRERHHSANPDKSDKIDAEAIANVLLTDFNKLPDALYDANFKAIRQLNNQRQTLVKERTILKNRFHNLIHQQYPEYTKFFSDHFGKTAMAFYEKFPHPVDLNYYGEDRLQKFLNNQAKSIGNDKAATILSLVDKDKKKTVDAEARNIIIIGIIEQLRILSKSLEKIDDQLEKAVKESQYQLTTMPGIGFKLAALFISNIKNIDRFESASKLARYAGLAPVEHSSGTSKNLGYKKYGCRNLNHAFYLLAFQQIGGTRNGKIKNPISYKYYQKKIKEGKSQKVALTCLERRLVDIIYAMMRDRSAYKLPENIDYEVVDKAG

SEQ ID NO: 209984 - protein, 343 aa, unidentified
MYFIGVDHHKQASQLTVLAEDGRELRTGRVLNLRRELERFLEGFHPFTAVLEAGRSSYVMADLLRELGGAVKMANALQVKAIAHARIKTDKRDSRTLAQLLRADLIPEIYQRGEANRQAQRVMRARAYWVSKQTEIKNKIRALLAQQKEEIRIEVDKRTGGLFSGRGIEFVLRLPLEGTDKMVLDDLVQGYQETQAHIKASDGRVQALYGTIEEASRIDTIPGFAATLAVLVAVEIADIHRFSSPAHLHSYAGVIPSTYASGERTYHGRITKQGSAWLRWAALEAVYPAIKKDLGLRVLYTRLAKRKGPNAAKIAVARRLLTIIYRILTENRTYLPDMNRSAA

SEQ ID NO: 209985 - protein, 404 aa, unidentified
MIFVGIDWAEAHHDVCVLDHAGEVLATRRIPEGLEGVARLHALLGEHADEPADVIVGIETDRGLLVGALLAAGYTVHAVNPLAASRYRERHTTSRAKSDRGDARMLADLVRTDRHNHRTVAPDSELHAGIKILARSHQNLIWTRQRQLNALRSALREYYPGALAAFPELGHPDALAVLAVAPDPERGRRLSEARIVTALRRGGRQRNLERRASEIRAALRQPQLAAPALVVEAQAANTSALVAVITTLHEQIARLEAELTDAFDRHPDAEILRSLPGLGDILGARVLAEFGDAPDRYVDARARRNYAGTAPITRASGTSHVVVARLVRNRRLFDACYQWAFCALAQSPGVRAYYDDHDPGPRTSKVARRKLANKLVGILHGCLVHRTMYDEDLAWHRAAEELAA

SEQ ID NO: 209986 - protein, 397 aa, unidentified
MYIVGIDIAKRKHEAAVIDGEGTVIIKPFSFTNNCSGYNRLLAMLTKAKLPLDEVSFAMEATGHYWLALFTRLQKEGFRVQVINPVQTNSIRSFYIRQAKTDPRDALLIAEVIRFGHFSESTLHPENIYELRELCRGRHAIVSMQADVKRKVIALLDQVFPEYETAFTNMFSDTSMAILQTCPTPKELSGMPLEELCHLIEVSSHKRFRMAKARELQELARNSFGFAMAGDVFSTMIRLYAKHLNFLKQQVREMDRKIAEIMDTLDTPITTITGIGPTLGAYILSEIGDISRFSSAAKLAAYAGIDPTMRQSGEYNGVRNRMSKRGSPYLRHAIWLAASSAVLHDPALKLYFQKKRDEGKPYMASVGHACRKMVSIIYAVMRDNKAYTPCIPNEISA

SEQ ID NO: 209987 - protein, 594 aa, unidentified
MVTSMPTEAFLGVDWGGSEHQLCAVDDTGEVLIRRRVGHTADGLAVLDDTLAELSVLRVRVAIERGEGLLVEHLQAAGITVYCVSPKLSSRARERYRLADTKSDAFDAFVLADTLRQQHDQWRPLAARSEQTALVASLSRDRERITLMQRAVESRLRATLEAYHPAPLHLFSSLDRDIALAFIRDYPNPVAASRMTVDRMARFCRRHHYSGRVDPAVLLARMQPHLLAGSPGTTAGKQIMALHLVDQLEMLNQQERDFNVHLAAAVAAHPDGALFTSFPGIASVIAGVMIGEMGDDRARFPAPGALLAESGLAPVTRASGRTRQVRFRYAANKHLRHAIDWWMTVAAREDPWSKQVYDQARAAGHSRYRAYRGLGAAGPGSCGAPGPTTNPSTPIADTTSPQATKTGHLKPRRPRVVEAPPSATVQGGTRPPRLTAGVCVIHLLRNTFKYAARQNWDAIARDIKPVYTAPTAAAAEARFAEFADIWGTRYPAAIGLWRSAWEEFIPFLAYDVEIRRVICTTNAIESLNARFRRAVRARGHFPTDQAALKCLYLVARSLDPTGTAKKRWMNRWKPALNAFAITFPGRLDPAGNNQ

SEQ ID NO: 209988 - protein, 393 aa, unidentified
MYLVGIDIGKLKHSFCLLEKETGEILVEPVFFENSRDGFNVLLSSFKHLPQKDILIGMEDTGHYNLALLKFLLDRNYQVALINPIATNLTRKMQGGISKNDKLDTLTICDVLSSNQRVKSYCISKYSSFDLYEQKQLTREHHNLKEEENQLTNRLQKCIDVVFPEFNSLFKSKYGIVYMNILKEFGSADAIAHADIRTIRKCFDTGRGKHISLTAEELKEAARNSIGFPSSSEATQIKHLVARIELIKEQIAEIDKKIEEFSIQNNSPILSIPGISHFSGTSILAELGDIHNYSKPSQIIKFAGVAPLTYESSQFTAQHTAITKKGCKYLRKTLYQIITPVIQYNPVFRKFYLLKIAQGKGHRCAQGHCVRKLMRVIYHLLSTGTQFDPALLR

SEQ ID NO: 209989 - protein, 416 aa, unidentified
MSQKLKEQRLKELAFVGVDTHKDEHTACIANCFGQSLGVFTSENRPKELKGLLEKVDETAKSHNLKPVFGLEDVMGLGQHLARSLISGGYHLKEVNPIETERKRLKNAHPDKSDPLDALAISRVLITDFDKLPTIQSLNEIYLAIHELSNRRDSLVKEKTRIKNKLHILLHREYPYYQTMFKNTFSKAALAFWERFPIASLLKGIGVERLAQYLRANSNNTVSTKKALSILKLVDKDSVPSCLNLVHSSIIRNLVKHLRFIEEQIVIVEKELEPLVDETGMKLSTLTGVDLVTAAKLIAEIGDVNRFSSSDKLAKCAGIAPQQKSSGKKLKFKKSNRGRRQLNTAIYHIALSQISRDRSGKPRNSKARDYFLRKISEGKTKKEALTCLQRRLCDIIYAMMKNKTEYRFQRTTNLVT

SEQ ID NO: 209990 - protein, 355 aa, unidentified
MSQTPNTAIAVIGIDIGKNSFHVVGHDARGAIVLRQKWSRGQVEARLANIPPCLIGMEACVGAHHLSRKLASLGHDARLMPAKYVRPYSKGQKNDFNDAEAIAEAVQRPTMKFVATKTAEQLDLQALHRVRERLVSQRTGIINQIRAFMLERGIAVRQGIGFLRTELPTILATRTDALSPRMLRVIEELASDWRRLDQRVDGLSGEIEVLARQDQACSRLMTVPGIGPIISSAMVAAIGTGDVFSKGRDFGAWLGLVPKQISTGDRTILGKISRRGNRYLRVLFVQAAWIVLVKIKNWERYGLKSWIEAAKRRLHHNVLAIALANKLARIAWAVLAKGRAFELTRTDDAGVVQPA

SEQ ID NO: 209991 - protein, 324 aa, unidentified
MHCVDAAGQVVIRRQLKRRYVLAFFQKLPRCLIGIEACASSHYWSRELQALGHNVRLMPAAYVKPYVKRQKNDATDAEAICEAVTRANMRFVETKTPEQQSCLMLHRTRHLLIRQQTAVINAIRAHLAEFGIVAPLGRLGVEELLGVVADPKDERVPDVARACLAALGSQLRVLKKQILEFDRMINAWHRSNETSKRLDEIPGVGPALATALVASVANPRVFRSGRDFSAWIGLVPRQHSSGGKDKLGSISKQGDRYLRSLFTAGALAVIRYAKIHGTKHRPWLTALLARRPTKVAAIALANKIARMAWAVMAKGERYNVALAA

SEQ ID NO: 209992 - protein, 420 aa, unidentified
MKAYNVDNFAALIGIDWADKKYDICEHPTSTNKYHYTVVKHRPEALHEWAMDIKQRYPDQKIAIVCELKKGPLIYALAKYDHLTLFTVNPCAVAKYRQAFTPSGAKDDPSDAFLQVEILKLHMDKLSVIEPESAAMRTLSQLVEYRRSLVQDSVDLSNKITATLKNYYPQALEWFKEKDTYIFCDFIQKWPSLIAVKKARKQTLLDFFESHNSHYCTVNNARLDSIKNAMPLTLDEGVIVPNQMLVEVLITQFKVLLKGIEKLDKAIKSAYKAQQDKKIFDSLPGAGPQLAPRLLVAFGSNRARYNDAAELQKYAGIAPVIERSGQKMWTHWRYSCPTFLRQTFVEWAGFSIRYSFWAKAYYEQQKAKGKPHNSIIRSLAFKWIRIVFRCWKTNTPYDESTYLAALKRRGSPLLKFAINS

SEQ ID NO: 209993 - protein, 343 aa, unidentified
MQAITTIGLDIAKSVFQVHGIDAEGKVVIRRQLKRRYVLAFFQKLPPCLVGIEACASSHHWSRELQALGHTVRLMPPAYVKPYVKRHKNDAVDAEAICEAVTRANMRFVATKSCEQQSCLTLHRTRHLFIRQQTSVINAIRAHLAEFGIVAPVGRNGVEQLLGVVADANDKRLPEVARACVAALGAQLRMLKAQILEFDRMIMAWHRSSEASRRLDDIPGIGPALATALVASVADPKVFRSGRDFSAWIGLVPKQNSSGGKNRLGGISKRGDRYLRSLFTTGALAVIRYAKIHGTRHRPWLTALLARRPTKVAAIALANKIARMAWAIMTKGERYKEPAALAA

SEQ ID NO: 209994 - protein, 346 aa, unidentified
MLYVGLDLSRKRIDFHALGEDGELVERGAVPPDRDGLARLVFRLGEHDREVLAVIESMNGARFVHDQLELAGLEVEIADAQRVKGLAPLACKTDRIDAWVLAELARRDLVPAVWLPDPAVREERERARFRLHLVRKRTALKNRVHATLIAHGHACPVSDLFGQKGRALLRRMAIPEPWAGTLAASLRLIDILEGEITACERELRRLGAEHRYVPLLLTCPGIAWVLGYTIAAELGDVARFASPRKLTGYTGLCPRVEQSGERDWRGPLTKNGPRYLRWALIEAAQHAGRSPAYRGLYQRKKAQHPGPRGSKIATVSVARKLAEAIWHMLSHNTPFAPAGATLDLAA

SEQ ID NO: 209995 - protein, 374 aa, unidentified
MKNVCGLDVHKDSIFMCIIKKNGDKVEEKFGVLTPELDRLRDLLVYHSVGDIAMESTSIYWVPIWRVLYSDFNIKIVNPYFIKQLPGRKTDVKDAQWIATVLQKELIKGSFIPDPIIQELRLYDRRIFYLNRNLQHAEQNIDLILQRCNIRLSNYVSDIGGKSIQKVIDSIIEGKTDPDILLLLVHKRTRNKHGDEVIKAALTGVISKTDRMMLKLSREETCMYERQIEECYVEMNSICQTYFSQEIELLQTIPGIKKDSAMRIVAEIGVDMKAFITASAIVGWAGLKPRNDESAGKIKGRKTLHGNKFLRVLLVQCAWAACRTKGSRFFYKYQTLTKRMNHNKALLANARKILVIIWNILSKKQPFTTTYIAA

SEQ ID NO: 209996 - protein, 400 aa, unidentified
MDERQRFRWFLGIDVSKETFDACCIPSHGERLLNLSASMDRKGFEELIKQLSTLSIPQEFVLVGMESTACYHINLYSFLVSLGYTVMVINPLLISNFVKLQLRKTKTDKKDAYVIAQFLVLNRDSLSQTILSSDISDLRDLSRQRESLVDQMSSIKSEIKRLLTITFPELEQTAGVFSKSMLRLLCQYPSAASIKQAKRSKIAKVLIPGSYGKQTDASVDRIVKAAQVSVGTSSATKEIILRQKASLLIQLEEHLQELTDILIELCQGKIQGDMDILTSMKGIGEKSAMNFLVEMGGEIKQFESHKKLIAMAGLDPALYQSGKIDRKGKISKRGNRHLRRVIWQMTTRVIQFNERFKQYYLKRIKDGLPYKKAVLATAHKLIRVMFAMLRNKTLFDPRTN

SEQ ID NO: 209997 - protein, 340 aa, unidentified
MVHVGVDLDKRSSQIAVLTEDGEVAQQRLPNDVARLEKFFAELPPHTPVAIEASGTWWWLVDLLEHLGHDPILSHPKQTKAIAAARLKNDRVDAERLALLLRGDLLPTVWIPSAALREARELVRHRVQLVWLRGIVRNRLHAMLARRNLQPVSTKTWLTQRGQRELQRLPLADTPSRIREDCSALLPLLDAQIRRLDSELGARWGGDPRVQRLTTIPGIGPFIAIVLVLELGDIARFPSAKQVASYVGLTPRIRASAGRIRAGHISKEGNRLLRWVLVLAATQAVRRPGPLRTWFHAVKKRRGKKVARVALARRLAEIVFHVWKHECDYFTVVRHGVVRG

SEQ ID NO: 209998 - protein, 559 aa, unidentified
MAAKTFRFAGRHRLPRREALSLREPKCRQPGKTQRRSQPVVDRDGPTNSRHRSDQQVQALRTCGGGVTDRQTVAETSLRCVFPNSVGPPTARCAGRLPAPDMESSTEYRASQVVAAFAGRSPGKPVLSRSCSRCARTRLTGETSRVAGREDTMQADQQRARDMKTGRRGKLLTSCVPITHKEEFMSPTTRHEESIAAALYVSLELGGTTWLVVSTTGVGQRPRRTKVRADDTTALATEIARARARFHLAAAAPVDSCYEAGGDGFWLHRWLVAQGVQNVIVDSASIRVRRRRREAKTDRFDAEALVGMLIRSVGREGHVWRVVHVPTPEAEDRRQLNREWESVKADRKRVRNRIGSLLATQGIRRVLPHDLVATLSVMRTGDGRALGPLLQARLVRECAHLAAVEERCATLAAVRQQIRTGDDPMSECARRLIAVKGVGDVGAEMLSAELFASRAFHNGRELGALVGLVPTPYRSDQKMQEQGHSRAGRGALRGVMTQLAWGWLRFQPHSALAQWFHARFATGPRLRRIGIIAVARKLLIALWHYVAHGIVPEGATLRA

SEQ ID NO: 209999 - protein, 402 aa, unidentified
MIFINCLGIDIGKSESVVAHYKDEVLVKEMVIQNNQNGYRYLKNYIKHLDSLFILFESTGIYSRGMKRFCEIHKIDYLEMNPLEAKFKTSSLRSWKTDKSDAHKLALLAFRMKDSKVQRQSEEIYFELRERARFHLEMETNQNRLKVELVETLHQTFPGLEKLFTNRYSKIALSIAKAFPHPDFVSTLTHDELVEKVLHSTDKGISVNKAHKYVQKLIEIQINSFPNVDKSSFLLQKVQYLCDKLLIGIEEMKEFDQEMIDLAKNTTEFENIISIPGIGELTAALLIGELGNIREFKTNKQLNAFVGIDIKRYQSGTSKSRDTINKRGNKKARRLLYLIIMNIIRGRNHYQSHIVDYYYKLREQPHGKTHKTAVIASINRLLKTIHYLIVNNKLYDYQKAPH

SEQ ID NO: 210000 - protein, 418 aa, unidentified
MEVEHDEQEIIQRVAALDIGKAELVCCVRVPGPGRRRMQEVRTFLTMTQSLLVLSDWLRSLGVTRVVMEATSDYWRPPFYLLEDSFETWLVNAGDVKHLPGRPKTDRLDAVWLCKVAERQMLQPSFVPPPPIRVLRDLTRYRVDLVTARTAEKQRVEKLLEDAQIKLSVVVSDIFGVSGREMMAALIAGERDSRVLAEMARGRMRSKTTRLVEAFIGRFSDHHGFLLTTMLARIDALSADIDAVQHRTEQELVPFASAVARLDEIPGIGATAAAVIIAEIGVDMTRFPTPAHLSSWAKFAPGVKESAGHKKGNGATGHGNRYLARVLGDAAVNAGRTDTFLGERYRRIARRRGKKRAIVAVGRSILVIAWHLLSDDNAQFRDLGPGYYDSRVNLNRKMRNHVRELQALGYKVTLEAAA

SEQ ID NO: 210001 - protein, 514 aa, unidentified
MNLIELAPCFDAGSSVAVIVLWCLVPGGKTGSGGGLLRILVRPEWVFPLERFVFSRTPPGFRRWGQTMTTPFLPVLDPLAAFVDVGSEQMFVSLAGGPPEVFGTVTHELHRLRDWLQERKVKSVAMEATGVYWLPLYGVLEAAGFKVVMVNGKQTRNLPGRKTDMKDCQWGATLHAHGLLQAGFVPPAQIRRLQDYLRLRADHLVSAAANVQHQQKALERMNVKLHDVISSLVGTSGSKVIAAILAGERNPDRLLALCDVQIQKKKAERVKESLRGTWAEEHLFALRQAVENWEHYQRQIAACDQRIEAVLREINGPDQPANPPPPIASSKRAGANAPEIDDLHSLLVKLCGGKDLTVLPAHTDYSLLQLIGEVGTDLTQWATEKHFTAWAGLAPGSHQSGKRKGSVRRKRNRAGRLFCVMARSLARSKHIALGGFYRRMAARRGGLVANIALGRKLAVLFWRVMVKGLSFAEAGLKAYEEQVLETKRRALCRLAKQLGRVVMPSLAEMQTKPA

SEQ ID NO: 210002 - protein, 350 aa, unidentified
MTDTGSIAWLGLDAHSQNCVLAHLDDDGTQRRWWRFPTGAQALQKHVSAIAAPDKRLVLEESNLARWISQLLRPLVQQLVVSDPRHNRLISAHPNKHDQRDAFNLARLFRLAEIKGVWQPQEDQRALFRSAAQAYEDAVLRQTRLKLQLKCLFQHWGLFPLGSAVYSRTGRQGWLKQLPQEGLRAQALLLYALLDQALQSQSQARRLMVQAGRAFPEIARLRTVPGVGVIGSHLFVAYVAEPARFTDFAQLTRYCRLAIRDRSSDGKPLGFQQLDRQGHGVLKALSYRAWLQATKKKSGPIWEFFQASKKRTGSSTHARLNTQRKLLLTLWTLWLEGREFDPKEFSRTAT

SEQ ID NO: 210003 - protein, 354 aa, unidentified
MRFYNYQHQFYAGIDLHARKMYICVIDNLGKKIFHKNMDADPLHLMQALEPYKADIIVGVECVFTWYWMADCCEDNDIPFILGHALYMKAIHGGKTKNDKIDSFKLATMLRGEMFPIAYVYPGKMRAARDLLRRRQYFIHHQSALLAHIQNTNTQYNFPLFEKNILHASNRVNISDRFDNQFARKSIETDMALLDSYHRILLDIEADIRKQAIHHDPISYQLLRSIHGVGPILSLVILYEINDIDRFPGVGNFISYARLVKCSHESAGKRVKGGHNKIGNAHLKWAFSEAAVLFLRKNEPAKKMQQRLTSRYGKGKAISLIAQKLGRTVYYMLKRKELFDAKRFFKDSVHELAI

SEQ ID NO: 210004 - protein, 368 aa, unidentified
MHESITGFIGLDAHAESTAIGVAELGRAPPRFVGTVGAKFAELTKALAKLGNRSKLLIVYEAGPCGFALARELKGAGYHCEVVAPSKIPRRPGDRVKTDRRDALTLAGLARAGELTFVTVPDERDEAIRDLSRTRVDAARARLKARQQLKALLLRHGRRYTGKTSWNAAHERYLATVSFDHHAQNIAFVEYRQAVSEAQARVERLGEALTRELEHWRMRPLVQALMTLRGVDQLVATTLVAELGELKRFAHPSELMGYLGLVPSEHTTGDKRRLGAITKTGNTHVRRVLIEAAWNYRFPPRITMPLQKRQERQPADIRSIAWRAQLRLNYRYRRLKARGVHHNKICVAIARELTGFLWSIGQQVTIPA

SEQ ID NO: 210005 - protein, 388 aa, unidentified
MFFLGIDVGKNTHVASLLDEKAKVIFKAHSFANTLDAAEALLVKLEPYKDSLEIGMEATGHYWLSLYSFLTEHNFIVHVINPIQTDGWRKGIEIRKRKTDVIDSVLIADLIRYGDFLETSLADEDILSLRNLTRFRAYLVNSVSDLKRKAIAVLDQIFPEYASVFSNVFGQTSKELLKSLSLPSDYENLSATKIEEVLSNITQKKKASETISTLSDKASHSFGISFCKDSFAFQLKLIIEQICFIEEQIASVELEIEQLMSKLGTNIKTIPGVGNVIGAVILGEIGDIERFDNPSKLVAYAGLDASVSQSGEYEASSGKLSKRGSPYLRKALYMAAQRAEFCDPVFQAYYEKKRNEGKHHLVATNAVARKLCHTIYAILKKDIPYEVQ

SEQ ID NO: 210006 - protein, 486 aa, unidentified
MSVRKTKPKPRQNRPKDPAARVVAQARREAQECAELGSLPVQHSHAAGIDVGDASHWVCVDTTPDGSDTVREFPAHTPGLRELVAWLRHCGVTTVALEASGVYGHVLFLTLIEAGFTTVMTSPSFTRQIKGRPKTDRRDCQWIQRLHKHGLLPSVFQPDEATQTLRSYVRQRANHVRLSGQHIQRMQKALQLMNLKLTKVLGDITGVTGLKIIRAILKGERDPQALAKLRDRRCKKAEPEIAQALDGRYRPEHLSELHGCLTMWEAYQDVIAELDKVIAGQLRTMRRSTSLPPLLPKPRVRGKKPHDPKFDVRTALYYVTGVDLTAIEGIDALHALTLVGELGWDFTKWPTVKHFASWLGLCPNWKKTGGKVKSSQTRKGKNRAAGALRLAAWSLMRSKSYLGAYLRRQRSRLGAPKAITATAHKLARILYNLMRYGSAYVQKEEAAYAEQVRQRTEKQLHRRAKEMGYELKKIAPPTKAEPPEPC

SEQ ID NO: 210007 - protein, 354 aa, unidentified
MLIIGCDYHPSFQQIAFVDTDTGELQERRLEQREEAEKFYRELAVQGIKVRVGMEASGQARWFERLLGELKFELWVGDATEIARKRERKQKTDRQDAQHILKLMLKDDFPQIWVPSWENRDLRQLLWHRHRMVQARTRIMNQLQAVALNEGVRCNKRLWREKGREQLESFRLAPWASRRRHDLLEWLDRLNPTIGALSQAIEQEVEKCPEAQRLRTHPGVGPLTALAFVSIIGKPDRFQCGKQIASYLGLVPLEDSSGNRRRLGHITKQGNSLLRFLLVEAAQVTVRSLPEWRRKYVHLTMRRGRKIAKVAMARKLAVRLYWMMRKQWDYEQLKKFGSHAGQPGNRDGVKQNIE

SEQ ID NO: 210008 - protein, 327 aa, unidentified
MNEVTTIGLDLAKNVFQIHGVDASGRIVVRRQLRRSQVLPFFEKQAPCLVGIEACATSHHWARQIAKFGHEVRLMPARYVKPYVKRNKNDAADAEAICEAVTRPTMRFVEVKTEEQQSVLMLHRTRQLFVRQRTTLINAIRAHMAEFGIVAGIGRNGVERLLRLIDEGSDGRVPAVARECLQALRAQLVLVKRQILEADRRILAWHRSNELSRRLETIPGVGPLIATALVASIPDPHAFGSARDVPAWIGLVPKQNSTGGKARLGSISKAGNRYLRSMLVVGALSVIRRAKQVGYTRRAWLAELMARRPTKIAAMPWPTRSPALPGR

SEQ ID NO: 210009 - protein, 374 aa, unidentified
MADRGFQLRITAEHKPVSRAGELLQNRSQTSAFMSQNKSISIPQNQSPSLPAESSPVLGIDVSKLTLDTCLLQGGKVRHQRFANSQEGISTMLAMLQRDGASKALVAMEATGPYSLAAATACTAAGHPVAVINPRRVLDYAKACGRRNKTDRVDAALIARFASKEPLPLWRPLPAEQSMLRDLLRRQDDLQSQLHAEQRRLEMATSAGALKASLQRSITWLRAELGRLEKALGQHVKGHGSLLTDIENLQTVPGFGEKSARLLAAEIPRHFANARAISAWLRVVPQQTDSGTSGHKPSRIGHDAPSLRSKLYFAALTAMRCSPRFQALAERLHAKGHCKMSIIMAVLHKLVRTAFAILQSGKPYDPNHVVTLAT

SEQ ID NO: 210010 - protein, 443 aa, unidentified
MSRKKRTHLRGTRGQAFADKIRGIPLDRILCVSLDIHKYFHVVMLHNALGEIVTPTFEIDIFQTGFDQLGQAIGTAVTQTHAQVVLLGMEPSSHYFENLARHLLERPQPVTLINSFAVKQNRDQQMMQREKDDEIDTAAIGDLLRRGEGSPYRPASGVYLQLQQLDRVRLGKVKIRTMLQNQILGHLDRIFPGLVILGDEATERYTPLFKMNFWACQTLQHLIRVCPDPRQLATLPPQALVKMFHAQGYRMGRLAAAKIITYAKTILLPDAELIAIRTELLQHDLALLEEVERHIAKLEERLVALVAETPYQVLTKLKGLAAVQVASLAAAIGDPSHYQYAGQVFRRAGLVCGRDDSGTRQRKGKGKHVVKVGDVYLRRALLSALATLILHQPILRTYYHQLKKSKPNGVARVATARRAIGILWATLRDQRPATLVLKRGATL

SEQ ID NO: 210011 - protein, 445 aa, unidentified
MHYKRLLALIDSVSSYLSVGLDVGADFTWMSIALPNGSFIGKPFKIVHSDPGARDLAVAKIKEAQETYSLKSRCFLESTGIYHIPLLCFLRDKGFDCSVINPIITKNSTNISIRKLHNDKFDSKKAALVGLNVSLKTSIIPDDSVVDLRNLIRDYYYFKDLQSAVALKLTAELKVSFPAYAKIFSKVTTQSSLKLLSSYPLAEDMLTAPKDDIVKIIRSTARFGEAYALRKYDAIIAAAQDAAVFGRALPSNAVRIRLYIDTYQEYQKHLDALLKALHETVEKLQDTLIYDQICLLQSLRGIGFLTAAVLIAEMGDFKLFSSPKKLYAYFGLDPAVKQSGKLNGDKVHMSKRGSSLARRVLHMVALNNIKIDKGSGTPVNPVVYDYYTRKCSGKKKPVAMGAVMHKICNIIFAMLRDNRPFEVITPEEHCRRFAAEHPDKIQKAA

SEQ ID NO: 210012 - protein, 344 aa, unidentified
MNYTQNEKIEQVTESTLVLGVDIGSSEHYVRAFDYRGRELTKKVFRFSTDINGFNSFYDWVTQICIKHGKNEAMIGCEPTGHYWYTFYQFVKDHGMKLAFVNPASVKKAKELDDNSPKKTDLKDPKTIAKLVIDGRYSFPYVPEGIYAEIREVVSSRDRIMKELNAASNRIQRWLKIYFPEYLTVYKKFDTTTGMMILEKAPLPDMVKALGADHIVKIWRQQKVRGKGASLNRAKTLVDAAHDSVGKPGGQGAVMEIQMLLEDYKVKKQQLEMVTSVMEELTMQIPNADKMLSVNGIGLVTVAGFISEVGDISRFKNPKQIQKYAGFELVENSSGKHKGRTTIK

SEQ ID NO: 210013 - protein, 344 aa, unidentified
MVYIGMDVHQSSTTFCLFDPAKEKAGRYRTVTRPTTAEALTEVLAPFERQCQVVFEVGTQAQWIARIVRPLAGEVQVANASRMPWLFREGRKNDKLDARKLATLLYLKQVPTVHLPSADISAWRALINHRRTLVKRRTILKNQIRSIVRAFGYRCPHKSCWTRIGQVWLRSLTFDAARDWMVTSLLDEVRLADARIAGLEKQLDAIAQTQANVALLQTIPGIGPRTAEAIVAFADGAERFPSRKHFTSYFGMTPTEDSSGRIQRYGHISKRGPSVVRWLVGEAAHRVIARCPALRRFFDRIQRGKKDRYKKAMVATGRKVLSICYGMMRNQCSFDPEKLLQPAA

SEQ ID NO: 210014 - protein, 395 aa, unidentified
MIVIGTDTHKGQHALAAVDEGTGRVRGQRQIDADEPGHLAAVRWARELDEEGVWAIEDCRHVSRRLEQALLAAGERVVRVPPHRMGDSRKGEREPGKSDQIDALAVARAVVKDGVESFAVAFLDERAMEIRLVLDHRGQLVAERTRTINRLRWHLLQLCPELERQLKRRAFNNARGLGRVDRQLRKVQAHARVRIAREQLAQIRRLNRDIDRLKSELHELVMAHRPKLLAEQGCGALVAAILIGHTAGVQRFGSEASFALLSGTAPIPCSSGKRTGHRLNRGGDRQLNHALHIIATTRAQHDPATKEYLARKEAEGKTTKGALRCLKRYLARCFHQLLAEPPADQRPAAEPERTPEPQAPVDGRLPEIPKRPESDGDTIAVQGGPNIMPCLSMAQ

SEQ ID NO: 210015 - protein, 412 aa, unidentified
MRRVIGIDIHRTFGEVVIWENGVLRHAGRVDMTRTGLEGFGKRLQATDEVVIEATGNCMAVSRVLSPFVARVIIANPLQVKAIAHAHVKTDKVDAGTLASLHAAGFMPEIWTPDPATERTRRLVARRYQVVRHRTRIKNEVHSILHAHLIPRCPHSDLFSARGRAWLGRQPLPDDERAAVERHVRELDRLAEDLEELDREIAKGALDDPAVKRLLTITGVNLAVATGLMAAIGDIGRFKSPQKLVSYFGLNPRVRQSGLGAAYHGRISKVGRSHARAMLVEAAWGAAQTPGPLHAFFVRIRAKRGAQIAAVALARKLAVLCWHLLTKEEDYLWARPALVANKTRAMELQAGLPQKKGNRRGPAYAYNVKELRNQEKLLAERAERTYERFVKNWMARRPRNTVRERLNSAGHE

SEQ ID NO: 210016 - protein, 351 aa, unidentified
MHYIGVDYHKKYSYVVVKDREGKVEQRGTVNNTKEEFRQLLKPYHSGKAVLEATRNWGLVYDWLDEILDGVALAHPLKVRAIAEARIKTDKISADILCDLLRSNLLPEAYVPNKETREAKNILRQRMFFVRVQTMVKNRIYTILDRHPEIVSLAPNVSDLFGASGMKWLRQTALPGHDNHLLASELELLQVLKQKISERNGIVRELARGDKRVKLLRSIPGLGPFFSVLVAKEIDDISRFRDEKKLCAYAGLVPSTYASGGKVFHGRIIKMGNKWLRWAFIEAVQPAISCDADLFAYYQRLKMKKGANAAKVATARRLLTIVYRVLSQERLYERRNRRAIRRSVPAALITS

SEQ ID NO: 210017 - protein, 344 aa, unidentified
MSMKLMAGIDLHSNNLFCAIVDMDGKRVFEKKLPCDLESVLQALQPFKKRLEKIAVESTYNWYWLVDGLQDHGYPVVLANPAAMQQYDGLKHADDKSDGFFLAEMLRLNILPTGNICDRAVRPVRDLLRRRMGLVHKRTSLILSLKSLHTRMTGRDLGTGRIKALEPKDAEKLFDHPADQLITRLDLALVEQLGQSIKTIEAAILATVKSLPDYQVLQTMPGVGKILGLTITLETVDPRRFASPGDYASYCRCVDSRRLSNGKKKGENNGKCGNKYLAWAFVEAANFAQRHDTACRKFYDRKKAQVNGIVATKALACKLAKAAWHMMSQNTDYEAGRMFPGVKK

SEQ ID NO: 210018 - protein, 343 aa, unidentified
MQTVSTIGLDIAKSVFQVHGVDADGLVVIRRQLKRRYVLAFFEKLPPCLVGIEACASSHHWSRELQALGHTVRLMPPAYVKPYVKRQKNDMADAEAICEAVTRANMRFVPTKTPEQQSGLVLHRTRHLFIRQQTSVINAIRAHLAEFGVTAPVGRNGVEELLNVVGNPNDKRVPEIARRCLLALGAQLRRLKEQILEFDCLIRAWHRSSEMSMRLDDCPGVGPALATALVATVADAKAFRSGRNFSAWIGIVPKQHSSGGKDRLGSISKQGDRYLRSLFVAGALAVIRYAKIHGTKHRPWLAALLARRPTKVAAIALANKIARMAWAIMAKGERYKEPGALAA

SEQ ID NO: 210019 - protein, 344 aa, unidentified
MSEVIIIGLDIAKHVFHAHGADERGRAVFSKKIGRGKLLDFFATQPSCTVALEACGGAHHWARQLTQLGHEVRLIPPAYVKPFVKRQKNDAIDAEAICEAAQRPSMRFVAVKSEQQQAAGLVFRTRDLLVRQRTQLINAIRGHLTEYGWIAPKGPSHVTMLADLLEEEKMANSLPEAARAMFRLMLDLLAGLNGKIAALDKEIARRAREDEVSRRLMTVPGIGPISATAIAALAPPAETFAKGRDFAAWLGLTPLQRSTGGKQRLGATSKMGERTLRRLLIIGSSTVVLQASKRGAPKGSWLEQMLARKPRMLVIVALANKMARIIWALLVKQENYRAPVAAEA

SEQ ID NO: 210020 - protein, 316 aa, unidentified
MDHKQTVYGVDVSKATLAIAQYEGETVVEIANTPEAIAAWLASVPADSAVAMEATGVYHRMLAQLAHAAGLVVYVLNPQVLKHYARAIGQRGKTDGCDARMIARYLVHERSKLRAWQPPVAAVDTLSRLLVRRRALVSARQTLTQSLSGMPMLKAPRQALLASFKRTIATLDLLIRRELARIPEMAALHRRLKSIVGIGEVVAAQLVAALSTLCFTRAAAFIAYTGLDPRPDESGQHRGRRRLSKRGPALLRCLLYNAAMSAAKSKVFKPVYMRLRERGLQSTEAIVILARKLARIAFALYKSGETFDVQKHLKTT

SEQ ID NO: 210021 - protein, 356 aa, unidentified
MSRISQLEPIRVTVGVDRHRDVHVAVALDQLGRRLDQIELATTRAGYERLLAWAERLGVVEAFGVEGTGCYGAALARHLRAREMLVVEVMRPNRQTRRRKGKSDPTDAEAAARAVLSAEAAGSPKAGDDLVEMIRVLRVARGTAIKARTQAINALRSLLVTAPPELREQPRALSTSRLVGKAAQLRPGALGSPLAASKLALRHLARRCQTLEVEIRSLDGQLARLTTTASPQLIEAFGVGADTAGALLVAAGDNPDRLRSEAAFSMLCGSSPIKACSGKTNRHRLNRGGNRQANAALHPIVLVRLRYHQATKDYIQRRTSEGKSKRETIRCLKRYLAREVYAALTQNNEGKLARAA

SEQ ID NO: 210022 - protein, 353 aa, unidentified
MSKRNVSAVKPTASVNQSAHGDPARVFCGVDVSAETLAVAVLTREGAPQQREFSNTASGHRALIGWLTKGQGRARVSLEATGIYSMDLALALDEAEGIEVAVLNPKRIHDFARTIRRSKTDKADAQVLAEFSLRMDFVAWQRPSRSALELRAISRHIEALGVDRTRAHNRLQAARGSGSTPRCVLDDLKRSLERLAERILKLRRAAQALIEADERMREQFRLLTGMPGIAQISAVQILGELVLLAPDLKARQWVARSGLDPVQQDSGTSVHKPARISRQGSRHLRRALYMPALTAVRWDPHLKAFYQSLLARHKRKLQALMAVARKMLHAIYGIFKTKTAYDGGKLFPQLKIA

SEQ ID NO: 210023 - protein, 356 aa, unidentified
MSRDIKYIGMDVHKEAIVIAVLNGSGKLVMETILETKASSILEFLHGLRGELHVTWEEGTWAAWLYDLLQPQVQEVVVCNPRRNALLKEGSKSDKVDARKLADLLRTGMLRPVYHGENGLRTLRELARSYQTISKDLTRVMNRLKALYRGWGIPCAGTQVYAPRYREQWLHKIAQAGVRRRAELLYQQLDGLQALRRNLRPEFLAESRKHKAAKLLRQIPCIGPIRAARLIALMQTPHRFRSKRQLWTYSGLGIETHDSAQYRYVGGQVQRSKKPQQIRGLNQNHNHDMKEIFKGAATRASCASGPFRDFYAALLAQGMKPEMARLTLARKIAAITLTLWKRGERFDAEQLKTQAA

SEQ ID NO: 210024 - protein, 340 aa, unidentified
MEIDRVVSQCVGIDVSKKKLVATMCMFSQAEQAVYSRAAEFDNDKTGFNQLVKWSRKEAVKELPLRYVMEATGVYHEHLANHLVRIGCTAVVMMPTKAREFAYWEGMISKNDTIDSRVLALVGCVKRSMRPWNPTNPLYRELRTMSRFSQDAKKLRTEMKNHLEALEHSHEAERSVIKHYESLVASLDRRIEKNLENMKKKVASDEELSKKVENIMTAPSVGFLSAITVIAETDGFALIQNRRQLTSYAGLDVRDSQSGTVNGVSRISKRGNSRIRAILYMPAVQCRLHNKHLRKAYDRIIAKHPDKKMIAVTAMERRLLLLIYALWKGDRPYSEDYDKE

SEQ ID NO: 210025 - protein, 352 aa, unidentified
MITIGVDAHKRVHVALALDEAGREIGQWQGENSRAGWDDLQRWALSVGTARQWGIENAWGYGRGLAQHLVASGEAVYDVNPRWTALRRRSARRPEKTDRLDARAVALFVRQESPSLPQVQADDETAVLDLLTAERNSALIEATRLRNQIHALLLQLDPQYKARVPTLKSRAGLAVLESYTCPDNTSLSIARAAAVRRLAQRLRLALGQAAELAVQIKEAAARFSSLTELCGINLLTAGAIAGILGPGRRFETDAQLAYYAGAAPLEASSAGIVRHRLNRGGNRRLNAILYRIALTQAHHSEEARTYLDRKTSEGKSKREAMRALKRYIARAIWRLWQGCCTVGFTRQDALVA

SEQ ID NO: 210026 - protein, 391 aa, unidentified
MLICGIDIGKNNHEASIIDQTGRLLAKSLRFANSTPGGQSLLDYINTHNTEKSVVVIGMEATGHYWLSLYCFLHDAGFQVNVINPIQSDAIRNLFLRKTKNDAKDSFLIAETIRIGRFSNTTLADEDILSLRQICRHRTDLVDYIADQKRKIIGVLDRVFPEYQRFFSDTFGKTSTELLNKAVTPEEILALPTDELCRILRENSRERFGEAKAEEIRTAAKTSFGITIGTTAFTMQLRHLLDMIRLLEEQIVELETEIEEYLRKLNTPITTCPGIGNVLGAVIVSEIGDISRFSEPKKLVAFVGIDPSVKQSGEFTGTQNKMSKRGSPHLRRAIWLAANVAAFHDPVLSVYYQKKRGEGKHHFTAIGAVARKLTFIIFAVLRDNKPYVPLC

SEQ ID NO: 210027 - protein, 412 aa, unidentified
MQDILTCAMGLDVHRDIIVACLVKGAVDAEPEAETRTFSTLIPEMQKLRDWVIEAECRNIAMESTGIYWQPIYEMLESCFDGEVSILVVNARHMKNVPGRKTDMKDAQWIATLLRAGLLKGSFIPDKTFRELRHLTRYRKSVVHDITAQKNRIDKFLQSSGFRFTAFLSDTFGASGRNIIRHLIERGSIDREALDKCLKTKTRNRIDEILVALNGSLSVHQRRFLNIVFLHLEDLEAHKHTIEDEITEEVLKHTDALNLLCSIPGIDVTAAAAIVAEIGTDMSAFPDSQHICSWAGLSPGNNESAGKRKSVHINKGNPYLKSMLCETAWIMASHRKLYLSGWYWKVKQRKGAKRATIALARKVLSIIYTMLKTGTPYSEECFEQRRQRCERKRANRMVNELQKLGYTVVAPD

SEQ ID NO: 210028 - protein, 346 aa, unidentified
MILIGCDFHPSWQQVCWLDSETGETGEQKLVHRLGETEKFYRRFAAPARIGIESTGNCQWFVELVTGLGHQVWIGDAAKIRASEVRQQKHDRRDAALLLRLLAEGRFPRIWVPTAQERDLRQLLIHRHKLVRLRAQVKNGLQHLALNRGVQKKRKLWSQAGQKALLAIALPPWASQRREDLLKLLDTLDEQIAGLDQAVSEAAAKNEKAQLLMTQPGVGPITSLAFVLTMGDVRRFPRGKQVASYLGLIPREYSSGGKQRFGSISKQGNRFMRMLLVEAAQVAVRCDPQMRKEYLHRCHEKAKGIAKVAAARKLAIRLYWMLRTQTRYPEIVHVESSSRVPVASAS

SEQ ID NO: 210029 - protein, 376 aa, unidentified
MTDRSRRVVAGVDAHTDEHHAAVLDESGRLLGTAAFPATRQGYEQLIAWVAEHGLITRIGVESTGSFAAGLVRALAERAIVTVEVNQPHAHTRHRRGKSDPIDAELAARAVLSAVASAIPKQTAGIVEAIRQLSVTRESAVKARSAALNQLENLIITAPDELRAELKRRKTLPARARLCRKLRPDLRRLHEPAQAAKLALRSLARRVRVLDLEITELERQLDRLTRTAAPRTTRLLGVGSVHTSQLLTTAGQNIERLRSEAAFARICAAAPIPASSGRTSRHRLDRGGDRRANRTLHMIAVCRLRHCPRTRAYAARRSAEGLSKRDIIRCLKRYIARELYHSLRADLTSLLPPPTPPRRAITIACGGPTGISRRRH

SEQ ID NO: 210030 - protein, 339 aa, unidentified
MNNSVIGLDIAKHIFHLFIMLADGKTMKKKLKRSELLAFFANHPVSTIGIEACGSAHHWARELTKLGHEVILLNARYVKGFVVGNKNDFNDAAAICDAVSRPNKRTVAIKTVAQQDIQLVHRIRKELVDKRTALVNQTRGLLSERGIIINQGITQVRQQLPLILEDAENGLTTLSRELFAEQYEKLKALDDEIKAQDQRINRLCNANELSKRLLDVPGIGPLTATIVAADMGDTGKGYESSRDYAASLGVVPKQHSSGGKQVYLGISKRGNRYIRTLLIHGARSVLKNCLKKTDKLSLWLQALINRRGFNKAAVALANKNARICWAMAHSNKAYGALTA

SEQ ID NO: 210031 - protein, 367 aa, unidentified
MKKVSTILAKQSRKSSQRELIVGLDLGDRNSWYCVLDEAGHIQLEQRVRTTVKALGEVFSGMPSSRVALETGTHSPWISRLLRELGHEVIVANARKVRLIGESRKKDDRLDAQTLARLARIDPELLCPVKHRSAQAQADLMMIRARAGLVRARTGLVNTARGLAKSYGERLRGCNVRNMNPEKAEGLSAELQAALEPLLAAIESVSERIAEYNQRIEKLAQESYPQVAVLKQVKGVGTLIALTFLLTLEDPHRFDKSRDVGCYLGLQPGRRNSGQSEPQLHISKEGDPYLRTLLVQGAQHILGPFGVDCDLRRWGLKLADRGGRNGKKRAIVATARKLAVLLHHLWVSGEVYEPLHNNSRVAVTAAA

SEQ ID NO: 210032 - protein, 395 aa, unidentified
MIMAKKAKKIKTNKGIKLEVVNPNAAGIDVSSREMQVCVPEDRDGENNRCFGTFTEDLHLISDWLKTCGITTVAMESTGVYRVQLYMRLEEDGFDVLLVNAKAIKNIGEKKTDEADAQWIMLLHSYGLLKAGFQPDNQARRIRNLSRHKDKMLKSSSREVLHMQKAMELMNIKPVNVISDILGKSGIAIIEAILGGERDACQPAALADPRCKASPQTIEKSLVAKWDEDLIFMLEQSYRLYQFYQKQMQECDRKIESIGKEYLAQINSTSSTFEYLPSGKKNRHKNAIAFDVEPYACALWGVNPMRVPGISDVTALKLVGELGYNFTDKFETYKQFCRWCNVSPNNKISGGKVLSSKIPKRKNPVGIILRTTANNLRASKYPRVVGRNSDHIFYV

SEQ ID NO: 210033 - protein, 360 aa, unidentified
MQKVQEYVLQDKVIFVGLEDSKSTWRICVRSERMIVDQTGMPSEYENLRNYLRSRYPGCTIRLMYEAGFGGFWLHDKLEADGIDCIVTPPNKVTEEKVNRVKTDRVDARRLSKNLENGDYRSCHVPDRELRDDRQISRTLVMIQKDIIRTKNRIRRFLDFHGLNGLVKSGRWQASDYKRIRALELPGSLGISFGVILSELDMLLEYRTQLKRQLFALTKKARYCQTFRHFESSPGIGWLTAIRLVLEWGEDLSRFYSGKAFSSFLGLTASEYSTGKAIRRGRITGQGHGFVRAWLIQSSWIAVRKDPVLLKKFQNVRKNTGSQKKAIVAVARKLSVRLWHLANFNEDYQRGLLEEQWVTA

SEQ ID NO: 210034 - protein, 349 aa, unidentified
MTSQNSIPADAVLVAIDIAKVRNEVLIEAPGHKRRRRLSVLNTRAEHDHLIAILQSYDRPVVCAFEATGNYHRPIAWRLVEAGFETRLVSSLALARTREALHNSWDKNDPKDAQVILHMLRIHSTQVYHDPLRAGINDVQELSKTHEAIANAKTEIQHRILTHYLPLYFPEIERFRGNSRSDWFFAFLDAFPTPSSITTLTKEKFVEAAWDVVGRKVSKSQILMDIYETARTSIGLPLPLDAPAIRMFRMVVAEARSLIRQRNEIEAQADDLLRNSRDYQILRQIPGIGPINALTIIAEAGDLRRFHHHRQFLKFCGLDLSTQQSGQYRGQTRRHRYLNLSVSMSGDNG

SEQ ID NO: 210035 - protein, 343 aa, unidentified
MQTITTIGLDIAKSVFQVHGVDAGGQVVVRRQIKRRYVLAFFQKLTPCLVGIEACASSHHWSRELQELGHTVRLIPPAYVKPYVKRQKNDAADAEAICEAVTRANMRFVPTKTPEQQSGLVLHRARHLFIRQQTSVINAIRAHLAEFGIVAPVGRHGVEELLNVVADPSDRRVPEMARVCLLAFGAQLRRIKEQILEFDRLIRAWHRSNEMSMRLEEAPGVGPVLATALVAAVADPKSFRSGRNFSAWIGIVPKQHSSGGKNRLGNISKQGDRYLRGLFVAGALSVIRYAKIHGTKHRPWLTALLARRPTKVAAIALANKIARMVWAMMARGERYKEPVALAR

SEQ ID NO: 210036 - protein, 323 aa, unidentified
MKSQIVICVGIDVSKGRLDVAVGTEQGVEGFANDSSGHEALTARMLEVRPALIVMEATGGYEFDAASALQLAALPVVVVNPRQARDFARGMGLLAKTDAIDARSLARFAAVLVQREDLHLKPMADAELQQLQALVLRRRQLVAMLAAERQRLAMSHAAARPSLEAMIVFIKQQLRDVEGELTRHLERHHAALSQLLRSATGIGPTTAATLIAELTELGHISRREISALVGIAPLNRDSGQMRGRRGTWGGRKTVRRVLYMATLSGVRHNPILRECYAHLLAVGKPKKVALVACMRKLLTILNAMVRDGQPFQEGHMPAWHRPA

SEQ ID NO: 210037 - protein, 327 aa, unidentified
MLGIDVSKASLAYTLLDDQTRHVQAAGTVPNTKAGITRLLRRIPAAHAWVAEPTGPYSQAVVATGHDAGRIVLLAQPRQAKAFLRSVSPRAKTDRLDSRGLAQYALAVPLRPFPVKTEVVVQLEQLLAARKSLSHSLAQLRQQRQVLPYAADVLDDAIAGLRRQQQTLDAQIATLTREPDLAVARHLDEIPGVGPVTAAALAACFASHDFAHPDQFVAYIGLDVRVRDSGQRSGQRALSKRGDAELRRLLYCCAQANRRSTDPTNPFTQQYERERAKGLSSTAALNAVARKLARTAWSIATHGTPYDPDRVHWQSARETPDALDSKP

SEQ ID NO: 210038 - protein, 412 aa, unidentified
MELLHRRCCGLDVHKETVVACLRLVSDGKVTTEVCTFQTTTADLLRLSEWLAANECTHVAMEATGVYWKPVWHILDDGEFALVLANAAHVKNVPGRKTDVNDAMWLAELLAHGLIRASFVPDAQTQEMRNLLRTRKQLVREQSSHVLRVQKTLEDANIKLDSVLTDLMGKSGRAMIEALIAGETNPAKLASLASRRVKASPEDLREALRGRVTKHHRFLLRLHLNQIDALDAAMATLDAQVEADLGPFRTAVEQIISIPGVKNLGAHVIVSEIGIDMSRFPSAAHLISWTGICPRNDESAGKRRSNRVRKGGTWLKTTLVQCAWAAVKKKDSYLQAQFYRIKARRGPKKAIMAVVASILTTIYHMLKDGTMYKDLGRNHFDRRSSDQQKNRLVKRLADLGYAVEIKPLAATA

SEQ ID NO: 210039 - protein, 398 aa, unidentified
MDLPVYYELETNNGNRDYRIQIGGHYMNYNTVYVGMDVHKESFTLCSCKYEDEKASHYQRTPASYKNVLRYLAFLRTIYGEDTRFVCGYEAGCLGYSLYHQLENFNVECVILAPTTMLEQRSKRRIKTDKRDAEIIARSLAQHNYSPVHIPTETDNQTKEFIRMRDDHKAELKKIKQQILSFCLRQGYQYDGSGNWTAKHVKWLRSLKTEGLYKEILDEYLLTYTILTDKLNRLDQRIEELASEEEYKEPVSKLTCFLGIKTHTALSVIVEVGDFQRFASARKFAGYLGLVPGQHSSGDDRNGLGITKAGNTHVRRLLVESAQSYTRGKIGYKSRVLRSRQAGNSPQIINYADRANERLRRRYYQMVLKDGKKYNIAKIAVARELACFIWGMMTDNIY

SEQ ID NO: 210040 - protein, 339 aa, unidentified
MELYAAFDLHATNSFLGIIEEHGTRVFKKKVYNDRELVLDILRPRKEDIVGIVVESTYNWYWMVDALMGEGYRVHLANPSEIQKYEGLKHADDEHDAFWLAEMLRLGILPEGYIYPKEERPVRDLLRKRGHLVKIRTSLILSLQNIITRNYGVRLNVNDVKRLRENRVTPLLEENDDLALAGMVSKETIDFLTHKIHQIERAIQGKVELKEPYRHLLTLPGVGKVLGLTIMLETGPISRFAKVGNYVSYCRKVSTKWTSNGKKKGKGNKKNGNKYLAWAFSEAAELARRYNSQARAYYNRKMQKTNFMVAHSALAHKLARAAYYVMRDQVPFKPDKLFG

SEQ ID NO: 210041 - protein, 321 aa, unidentified
MVYIGIDISKSSFIAAYPSVNGCHTKAYPNTTAGVRKFIGTLAVAEHHCVMEATGNYGFLLLYLLHQSGIAVSLVNPKQIKHFARMMMAVTKTDEKDACMIAMYGEKMNPPIYKMPSQAILLFKQKKTVIRQLRKQLVASKNLRESLVVLPYRDKACLRALDKTIDFLTRQIKQLEAELAEIASEEFDKQLKALTSIKGIGIMLATALILTTGGFTYFDNAKQLSRFIGICPTYQQSGTSINIKGHINRNGDEHLRALLYVASWSALRSNAACRECYFRLKANGKPSKVALIAVANKLVRQAFAIATTDSIYIDGFVSTKK

SEQ ID NO: 210042 - protein, 346 aa, unidentified
MEHYVGLDVSLKLTAICIVDRTGKIQREGVVPSDPEAIAAFIESHAPHVTRIGLETGATSTWLWTELNRLGLPVICIDARHAKAALKMQINKSDRNDAVGIARIMQCGWYKEVRVKALDSHAVKALLVSRALLVKIKRDLENQIRGLLKNLGLVIGPAKMNVFALRAAELTADRPELAAAVTPLLNARVGIAQQIADLDRKVMKLARNNAQVQQFMTAPGIGPVTALCFLATIDDPRRFRRSRSVGAYVGLTTRRFASGEIDWTGRISKCGDKMLRSYLYEAANVLLTRVAKWSALKAWGIRLAKRSGLRKAKVAVARKLAVILHRMWIDGTEFKWSSKEAANQTG

SEQ ID NO: 210043 - protein, 344 aa, unidentified
MNTIKVVGIDIAKSVFQVCVWMADGSVAWNRKISRQKLLHTLRQFPPQTLIAMEACSTSHFWGRTLISMGYDVKLIPTQHVKAFTRHQKNDANDALAICETACRPGIHFVSVKTTEQQDIKALRSARQLIVEQRTALANQLRALLAEYGVIIPAGLQRLQQQLPEVLEDGDNTITFTLRRLLSLLREDMQMLTERIDALDKELAELSSQQVAYHHLLTIPGVGPLIAAAVVSEVDAAQFSSGRELSAWCGLVPRQHSSGGKQRLSSMTKNGNRNLRTLIIHGARAVMRCVQKRDDSLGRWVKAIELRRGFLKATVALANKLTRIIWRVLTDSVDFSMSRAFAGS

SEQ ID NO: 210044 - protein, 376 aa, unidentified
MQNDSTLFVGLDVHKDSITVAYALDGGELQTLGKIATTQIEIDRLCKRLQPKARHIKVVYEAGPCGYGLQRRLAAKGFECMVCAPSLIPRKPGERVKTDQRDAIKLTRLLRAGDLTAVHVPTVEDEAFRDLARAWARARDDLKCARQQLKAFLLSHGVRYTGSANWGPAHRRWISAFSFDSHWQDVAFAEYRRAIEDHLARCERLETALREAVQQWRFYPAVLALQAMRGIQFTTAVGLLSELGDLTRFAHPRQLMAWVGVTPTEHSSGSKRRQGSISKTGNSYARKLLVESAWNYRHAAKVSPEIQRRQEGLPKAIVDRAWDAQLRLCRRFRKLVARGKNTNVAVIAVARELAAFVWDIGRLGMACAIPIPQASA

SEQ ID NO: 210045 - protein, 343 aa, unidentified
MQAITVVGLDIAKSVFQVHGVNALGSVVVRRQIKRRYVLAFFKKLQPCLVGIEACATSHHWSRELQALGHTVRLIPPAYVKPYVKRQKNDAADAEAICEAVQRPSMRFVPTKTPQQQSCLMLHRTRHLFIRQQTAVINTIRAHLAELGIVAPVGRNGVEQLLYAVADTKDDRIPDVARACLESLGALLGKLKAQILEFDRQINAWHRSNETSRRLDELPGVGPALATALVASVADPKAFRSGRDFSAWIGLVPKQSSSGGREKLGSITKQGDRYLRSLFCAGALAVIRYAKIHGTKHRPWLAKLLERRPTKVAAIALANKLARMAWAMMAKGERYREPFALAR

SEQ ID NO: 210046 - protein, 339 aa, unidentified
MKIVVLGIDLAKNVFALHGVDEHGKAVLVQPSVRRDKLLETVAKLPPCLIGMEACSGAHHWAREFSRFGHSVRLMAPKFVVPYRLSGKRGKNDAADAAAICEAVQRPAMRFVPVKDEAQQAHLTLHRVRQGFVTERTAMINRLRGLLAEFGHVLPLRASVVRRQARAAIETLPSLAREALEDLLVTIAQLDERITAYDTKLRQIARQDRRITRLMTLPGVGETSAGALVASIGNGHEFKNGRQFAAWLGLVPGQYSSGGKSRLGRITKAGDAYLRSLLVMGARAVLALAAQREDRISRWARALALRRGYWRAVIAVAAKNARLAWACLARGEAFELKSE

SEQ ID NO: 210047 - protein, 325 aa, unidentified
MNSHFLGIDVAKTKLDVALRRPDDKWRQKVIDNTLAGFHILAEWLTAQGVTELHACMEATGTYWEDVAEFLAAQGFTVSVINPAQIKAFGASRLVRTKTDRVDAKLIAEFCRERRPEAWCAPPLSEQTLRALVLRLNALQAMQTQENNRLQVARAAVMPGIEKHLDWLDKEIQALIKAIRDHIDSHPDLKQKRDLLDSIPGLGERTIAVLLAFLGSPERFKNARQAAAFAGLDPRQFESGSSVKAKPRLSKVGHAFLRRAMYMPAMVTLYKTAWGKLFFSRLKSAGKPPMLIIGAMMRKLIHVAFGVLKSGLPFDEKHHPRSASA

SEQ ID NO: 210048 - protein, 413 aa, unidentified
MTDLLVGIDPHRRTNTAQMMDDHGQLLGQAFQFANNRPGAEAFIQEVTAQMETDDYQTLCIATEATGWYWFHFFQKLSQDPLLNRNPLELYAINPRLTAKFKETFNEPDKSDPIDAFVVADRLRLGRDLPPAFQGADAYLALRLLTRYRFWVIHHLAKEKAYCQSILYLKYSEYTLKHKRPFADIFGAASRAVIEEFASIEDIAALPFDDLVEFIDAKGKRRFANPQHTAQKLQQVIASSYLLPEILQQPVNDILHLSLQHIAFLQRQQKRLNTAIARQLTTIPNTLQTIPGIGPVFAAGIIAEIGNLRRFEDDEAKVAKYAGFKWRQSTSGDTRSEYTPLTKKRNRFLRYYFCEAANLVRQREREYTAYYERKFHEVTKHQHKRALVLTARKLVRLVVRLLATNQPFQSRRR

SEQ ID NO: 210049 - protein, 430 aa, unidentified
MDQVEPVGAGSVESFGSLTHFGGFDWAMNEHQFAMVDREGKVLMNLRFADDAEGWASLREAIAPYPRLGVAIETSTGPAVERLLELGVVLYPMNPKAAERFRDRKAPSGVKSDFLDAWCFADALRTDGHGWRQLRQSDPLTMELRILCRDQISLIGQRTALVLQLKAALHEYYPVALEAFDDWTKQGPWEFVLQFPDPHRLASASKHKWEKFLHTHKLYRPETAAKRLELFKKAKAFASPSQAVTSAKTLLAVSLAKSLCTLADQLEMYRKRIGELFNNHPDRDCFGSLPGAGEKIAPRLLAELGSDRARFESHESLQMYAGTAPRTRQSGNSSVTCIRWLCNKTLRNTVHHWANLSRPGCAWAEAYYQQKKKSGMSHAAALRCLGQRWLKILWKMWQTRTTYDEALHTRNQIKQGSWVITLKQSPATAG

SEQ ID NO: 210050 - protein, 505 aa, unidentified
MERLCKGRRPGRAELNSLWKNRMKSKQPHKNKKAICRPMQNNWHQMNRKQRREMTRKIQSEDLSLEVVHPDAAGIDIGNESHYVAVPLRRDSQPVRRFGCTTSELKGMGVWLKQCGIQTIALQSTGVYWIAVYDILEEAGFEVYLVNAKETKNLPGRKSDVQESQWLMKLHTYGLLRNSFRPSQEIRTMRTYWRQRNDLVRAAGRHIQRMQKALTQMNIQLANVLSDVSGMTGQAIVKAILAGDRDPYQLAALRNWRVKASEEEIARSLEGNWQEDLLFVLQQEQDGYEFCQRQMAECDQRLQQYLQQLEDRSQGVGLPEEKRKERLRKKKKGNAPQFDLRAELFRMTGTDLTQIDGIDVTTTMTILSEAGWDMSKWKTEHHFVSWLRLCPDNRISGDKIIGKGRLPTNNRVTNALRMAASTLRLSNTYLGAQFRRLRAKLGAPVAIKAMAAKLARLVYRMLRYGMTFVDRGAEFYDAQHRTLQINYLKRKAANLGFQIIEAPAA

SEQ ID NO: 210051 - protein, 400 aa, unidentified
MRAVFGIDVSKTSSEVAILVNGEKVHGYTILNDAIGFNRLLGDLKTVHNPEIIFEATGVYSRRLQAFLEEYSYAYTRLNPLEAKKQLDSLRVRKTDKIDAEKLAKSQLVHNRKPTYVQEEVYQHLRDLSRFYQNMTEDLVRTKNRLHKVLQVTFPELENLLSTPTGGQYWNLVMAFPCKEFVLSLSQSNLCEIIRQSTSKRISEKRVTYLVDKLTKLANQSYCAVKKTSPMLEEVRYYAQELLRLSERRQVVLSDMVALAQPLPEYDILRSIPGIAETTATSIIGELGNIRRFQSTNQINAFIGIDLKHYESGNFLAKEHITKRGNPYARKILFKCIHNIASASHTNPCHIADFYEKRKRQSTIASTKPHTIASIHRLIRTMYYLITHNKLYDYSLTQNR

SEQ ID NO: 210052 - protein, 428 aa, unidentified
MTNQEIIRREQYCQIVKEITGSDQYLVVGIDVGKDKHHAFMGSATGKSLFRKLIFENNLDGFSRLLKTADEIKSQNSLSKIVYGVEPTGNYHKPLARHLIRCNCNVVLVSGVAVKRNRELLNGRWDKNDTKDAANIADLVSRKRCLYYDCPSPSIMELRSLLSLRRRLKREEHGLRMRIRNNLLAQYFPELDRFYSACESESLAIVRWCPNPDTISAMEFGEFFNMVTTTRRGIAQTLRLRKIHGLATESVGCPMGPAAEFEADLLVKKLKQVRQQVKKTNDLIEYFCLEFAEYSYLLTIPGFGPYISARVLASIADPFRFENRKQLIKLAGYDLCAKRSGKTSAKAVPVISKKGNGELRYALYQAANVAAANVDLFRTYFTRLLRGRERERGIKTKMRVKLAVKMLVIAWTLMKKREVFDPAHLNIE

SEQ ID NO: 210053 - protein, 466 aa, unidentified
MTSFYMGIDVSKGYADFVILNQQKQPVMENFQLDDTFQGHSQLYEILERFLAEHKKATLYAAVESTGGFENNWYQALIGFQVLLPIQTARLNPKGVMHSSKADLKRNKTDKISAQSVAEYLISHPEKVRYQQEESLAGLRKQWSFVQMLTKQCTQLLNQLHSLLYTANPELLSFCRDGIPDWVMKLLLQYPTAKRLARAHEKTLVKIPYVTIERAQTLITAAKNSVASSGDDISAQLVISMATQILHLKKTIAAQTKLMVTQCDLPEVRLLKTFIGIGDTLAIGLMIEIQNIVRFKSAKKLASFWGVHPVYKISGDGSGSFKMSKQGRVQPRRLLFLVALTAINHNPVIKSLYEHHVKQGREKMDAIGICMHKILRIIYGMLKNNTAFDPQIDDRNRKRTIRSKNSGPKKDKNRRFQKYDAGAPVSGRQNKKRMEREQSQSIKNTKCGISAPVPLGSILADVLNKL

SEQ ID NO: 210054 - protein, 341 aa, unidentified
MGRYIGVDLHKNSFTSCGYKSDDDYKLKTHSVSVKGLAAFKESLARGDEVAVESTGNTAFFVREIESKVKRVRIVNPIQFKVISSSVKKTDEADALTIAKFLSKDMIPEVRMRTKEQSQIASLIGTRDKFVKLRTALKNKIHNILNANGIVSRPEMFSSEKGLEKVTGIELESSYRFEVDLLVTEIRNLNQAIDKINEELKSRGENIEGHKNLTSIKGISDIGATIFLNTIGDIHDFKSDKQLAAYFGIVPRVYMSNKTVQYGRITKMGNKIARTALVQSTLVAIRYSPYLRRFYEKLKAKKGAGKAIIATSRKMLGIIYNTLKNNWVFEDFTQFKLAECA

SEQ ID NO: 210055 - protein, 343 aa, unidentified
MEITTIGLDLAKNVFQIHAVTSAGEVVVRRALRRAQVLPFFSKLPPCLVGMEACGTSHHWARELARLGHEVRQMPPAYVKPYVKRGKTDAGDAEAICEAVSRPTMRFVAVKSVAQQAALSLHRTRDLLVRQRTQLVNMIRGLLAEFGIDIPKGITHALAFVRRVVAGEAREVPPLAARVISALAEQALEGQARIRQLERDLLAWFRSSALARRIATVPGVGLLGATALAATVTDPTQFRSGRQFAAWLGLTPLQNSSGGKERLGRISKMGDQYLRRLLIIGMTSLVRRNLHRPDAADPRITALLARKSVRVATVAMANHAARAIWAIMVRGEAYRALAPVAAA

SEQ ID NO: 210056 - protein, 398 aa, unidentified
MIYVGVDIGKDRHAAAAVNEAGESAVPPFYFTQDAGGFAALFGALEKLGGPGAVAVGMEATGHYWKVLRHALAKRGYRADVINPLITSRDASADVRGRKSDKLDAIAIANVMRKGGYSPAPAAGAADALKTLARYRRALVARRSDAKNRLAAALDVAFPEAAKTLGGLSGAAAMAAVRAFPSARLAAKADIRTVTSVFKKASGGRLGREDAKKFREAARHSLSLGMDTGGEEFVIPQTVDEIRALDSQIDRVERRMQEEPRPELAARLMSIKGACRIQPLAIAAEIGDPARFAGAGMAGKVLAYAGCDPRVRESGKWKGRTKMSKRGSPTLRNALYLMATTVRLHTPHFNEIYKKHADKGKHHNVALSHVIRKIVDVMCGMYKTNTDFVPPKTKVKPC

SEQ ID NO: 210057 - protein, 344 aa, unidentified
MSKVTIGLDIAKSVFHLVFMNQSGRVLRKKKLRRHQMLSYFSQLEPCIVVMEACGSCHYWCRELTKAGHEVKAIAPQYVVAYRKGNKHDYNDAEAIAEASQREGMRFVPFKSQDQQDIQLMHRIRERMIAQQTALSNQIRGLLSEYGIVYARGVATLVKELPFTLEEADNGLSMLARRQFQGLLNDLRELREHIKEMDKELKAFSQSQPVCERLMSMTGIGPLIATALYAGIGQGQAFNSGRHLAAWLGVVPKQHTTGDNPRLLGISKRGNTYLRTQIINGARAALRHIGDKTDKVSEWCRACLARMSFNKACVALANKMVRMAWAMLHYQQDYQPGLINKAAA

SEQ ID NO: 210058 - protein, 345 aa, unidentified
MNKLSVVGLDLAKNVFQVHGISTDGEVVVRKQLRRSEVRKYFAKLESCLIGMEACGGAHFWSRELTRLGHTIRMMAPAFVKPYLKSNKNDRNDAEAICEAVQRPSMRFVQPKLPEQQAVLHLHHGRQLLVRQRVALSNHMRGVLSEYGIVLPQGVKVLSRQLPEILEDAENTLPMLARHLLAELKVEHDQLIGRVGRFEKQLKAWHANSLVSQRLASIPGIGVLTATALAATVGEGEDFKNGRQLAAYLGLVPRQASSGGKDRLLGISKRGDGYLRSLLIHGARAVIHHIRRRLKAGRPGGNPWVEQLLLRCHVNEAAVALANKMARTAWVLLARNETYCLARPI

SEQ ID NO: 210059 - protein, 465 aa, unidentified
MKKTARRPRRLKAQVPPLVARDDAAGVDLGATLVTAALPPSRAGLTVRTFATFTPDLQALVAWFQQNGIRTVAMEATSVYWIPLYTMLEDAGIDVCLVNARHLKNVPGRKTDVADAQWLQQLHAVGLLHASFHPPAAIRRLRTLWRQRDSLVREAARQVQLMHKALDQMNLHVHHVLSDLMGDSGSRMVAAILAGERDAAALARLRDHRVKASEATLIKALTGDYRPEYLFCLQQAHESFAHFQTQIAACDRQLAAALGELDAVTDAAPPAPARVTRGKKDKTARKDSNQPKFDLRTQLYRVCGVDLTAVPGINLGVATTIIAEVGPKFTGFETSKRFCSWLRVAPDPRVSGGQVIGGKVPRGSPKAARAFRLAAHSLHSSHSPLGDVFRRFRAKLGAAAAITALAHKLARIVYHLLTTRQPYDESKVLATTESYRVRQEASLRKKARSLGYQIVPIQTSINAVP

SEQ ID NO: 210060 - protein, 351 aa, unidentified
MKRIVKQAVGIDVAQKELVVCLGRMYDDWTPQLYASKTFDNTAKGFAALTLWVKKLTEESSPVRYVMEATGVYHESLAYYLEGKGFEVSIVLPNKISNYFRTLEVKTITDKTASETIARFGLERKLDTWKRPAEIFRKLKQKTRERDQLVGERTLVKNQLHAEQSEAYPGKESITRMKARINLLNKQVMQIKEEMNTLVKGDKGVKKSVELISSIPGVGTLTAVTVLAETNAFELIRNKRQLTSYAGLDVKEKLSGTSVKGKPRISKKGNRYLRKAMYMPALTAIRYDGRFKVLFTRLVSRHGIKMKAAVAVQRKLLEMIYTLYKTNTAFDKDYLKEEVMALSTQAAYGNY

SEQ ID NO: 210061 - protein, 425 aa, unidentified
MNSKWNEKLNQVTENTLIVGMDIAKRTHYACFVDERGRVLEKSFAVHQSKEGFEALYENVLHAMKVYEKTDVIVGIEPTGHYWMNLAYFLDKYGIPLVMVNPMHVKKAKELDDNLQTKNDKKDAVVIARLMKDGRFSYPRILKNIEAEFRNGSTLRSKMTEDLSGIKNRIVRWLDRYFPEFTQVYPTFGKMALATLEKTPFPRDIVGKTAEELVFLYRQVEGMRAPQLPKAKLLINVANNSIGLREGLQMARLEIATLLRQYRLLEEEIEMINSHLAELAKSTEEYVYLTSVPGLGDATIVDLLSEVGSFSQYENPRQLIKLAGLTLRENSSGQHQGHKHISKRGRKRLRSVLFKVIVPLVRHNIAFKHLHEYYTSRQRNPLRGKQSMVVLCGKLLKVLHGICKKKVQFNEQHMMNDLHCLSTAA

SEQ ID NO: 210062 - protein, 355 aa, unidentified
MDYGAIDLHKKESQIRIVTEMGEIIDRRIATARDRFSATFLGRPRMRILLEASTESEWVAQHLETLGHEVIVADPNYAPMYGQRSRRVKTDRRDVAALTEACQRGIYRPAHRRSARQHAVQSQLNVRQELVQARTRAISLARAITRAAGFRIRSGRTETFLTRLDALDLPSPMKVTLLPLRSVIEVLDDELASADDQFAAMVAADVIVKRLTTLPSIGPITATAFVAALDDVSRFAGAGQVTSYLGLVPREYSSGERQYRGRILRSAHPHVQSLLVQAAWRLSRSSSPDTAGLRTWALGITRRRGKKVAMVALARRLARILYAMWRDESEYHANRIHTMQVDPEAITSREARAAM

SEQ ID NO: 210063 - protein, 315 aa, unidentified
MNETPVFVGIDVAKATLEVAVRPSGAQWASANDEAGIQTLLGQLRALTPALVVLEATGGYEHAVAATLATAGVPIVIANPRQIRAFARATGQLAKTDAIDAQILALFAERVRPTPRPLPDDATQALEALLTRRRQLLEMLVAEKNRLGVARASLRRDIGQHIRWLERRVTDLDRELHAGVRASPVWRAQDDLLQSVPGVGPVLSYTLLAALPELGTLGRKQIAALVGVAPLARDSGTHRGRRTSWGGRAPVRTVLYMATLTATQWNPVLRHCYQRLRAAGKPHKVALTACMRRLLLILNAIVRTQTPWRATPTAA

SEQ ID NO: 210064 - protein, 323 aa, unidentified
MQGKVSFQEDAMPVVYAGVDVSKEWLDVHLHPLGESRRFSNDKTGIRQLKRLLARHQPKSIVMEATGKFHRPAHRSLWLDGFAVAVVDPLRARMFARACGYLAKTDRLDARFLALLAESLRPPADTPPSPHVEALQELVNARSAAKCDITALQNRSKTATTALLRGELNRLVSRLEQHVERLDKEIERRVGEDPQLSRRAEILTSIPGIGRVTALALMAGMGELGSCSGKQAAMLAGLAPIANDSGARTGRRSIRAGRPAPRRALYMAALSACRYNPALARFADTLKAAGKPAKVILVAVMRKLLVLANCLLSHDRLWTPNPP

SEQ ID NO: 210065 - protein, 348 aa, unidentified
MQSLYYVGLDVHKKTVSACVKLADGTIVNEAKLAARPSALIEWARTLDRPWKGGMEATLFTGWIYDTLNPLASGLVVGNPLMMRAIGASKKKNDRLDARKIADLVRCGLMPACYMPPPEFRELRRVLRYRNFLVRQAVKMKNKTAGLLMETGCEYNKKRLHGKKYFEELLGTLDTIPGSVKEMMRFNREMMVTFDRCQQKLLDALENKPLIAERVERLQSIRGVGQVVALTWVLEIADPKRFSSIDRAQSYCGLTSAQKESAGKSARGPISKQRNPHLQHILIEAAHLAPRWNEGLKEVKEREEKRGNKNRAALAVARKMVAYLLAVDKSGKPFEDRRAKKDDASEKK

SEQ ID NO: 210066 - protein, 347 aa, unidentified
MTIVEDKRAVTGGVDTHADMHVAAALDPIGGLLGVQEFPATAAGYAGLLGWLAGFGPVALVGIEGTGSYGAGLARHMAAAGIRVVEVDRSDRQDRRRQGKSDPLDAVSAARAAQSGRAAGAPKGRDGAVEAIRALMVAKRSARNERTQAINQARSLIVTGPDDLRARFARHTPAQLVAGLAAMRPRPGEVPGYATRIALRELGRRAQFLDTQIARLDELIVPLVTGRAPSLLALYGVGPDTAALLLVAAGDHPQRLRSEAAWAHLCGVAPIPASSGKITRRRLNPGGDREANHALWRIVITRMSAHPATRAYVGRRSKEGLSKKEIIRCLKRYVAREVYRHLRTPAG

SEQ ID NO: 210067 - protein, 381 aa, unidentified
MKQDNKAKQNKGNEVSVEAPQDTCDLGRRRWKVQRVGLTVGLDVGDKMSHYCALNEEAEVVERGKLKTTPAALHPWLEALPAGTRVVLETGTHSSWISRLIEQAGQDALVAQPRKIPQIYRSKRKNDRRDAEKLARTGRLDPNSMGPIGHRSVEQQADLAVIQARDALVQVRTQLINTVRGLVKGTGERLMGCSSRSFARQVEEQIPQRLRGALLPLVSQIRSLSEQIERYDAEVEKLAQKKYPETELLRQVSGVGPVTSLAFVLTVGDRWRFRHSRDVGPFLGLVPEQDESGESSPQLGISKAGNTYLRRLLVGSANYILGPFGPDCELRRWGKKLSERGDKNARKRAKVAVARRLAVLLHKLWVSGEVYEPLPEKRAAA

SEQ ID NO: 210068 - protein, 345 aa, unidentified
MELHTIGIDLGKTVFHLVGLNLRGEVAVRKKFSRIQLLRFTANIHVELIGMEACGGAHFLGRALREQGHEVRLIPAQYVKPYVKTNKSDYIDAEAIAEAVARPTMRFVPIKTDDQLDLQSLHRVRERWVMRRTAVINQIRGLLLERGITLRKGRHHVHAALPLILEDADANLSGAVRMLLAQLKLDLDQLAVRIDEADAVIQKTAYENEACRRLVAIPGIGPVTATALIVAIGNGGAFHKGREFAAWMGVVPGEHSTGGQQKLLGISKRGNSYLRRLFVQGARAVLQQRTKQSSGLSTWLAQLTSRTHRNVAAVALANKLARIAWAVLAKGEQYRPSVLADVAAA

SEQ ID NO: 210069 - protein, 402 aa, unidentified
MNAVGIDVSKGKSMVAIMRPFGEIVSAPFEIKHTASDINSLVELINSVEGESRIVMEHTGRYYEVLAHQLSAANLFVSAINPKLIKDFDNDSLRKVKSDKADAVKIARYALDKWQNLKQYSVMDELRNQLKTMNRQFGFYMKHKTAMKNNLIGILDQTYPGVNTYFDSPARSDGSQKWVDFASTYWHVDCVRKMSLNAFIDHYQNWCKRKKYNFSQSKAEEIYGKAKELVPVLPKDAITKLIIKQAVDQLNSASTTVESLRTLMNETASKLPEYPVIMAMKGVGTSLGPQLMAEIGDVSRFTHKSAITAFAGVDPGVNESGTYAQKSVPTSKRGSSDLRKTLFQVMDVLIKTHPEDDPVYQFLDKKRAQGKPYYVYMTAGANKFLRIYYGRVKEYLSSLPES

SEQ ID NO: 210070 - protein, 344 aa, unidentified
MQITTIGLDLAKSVFQVHGIDAAGQVVVRKSVRRAQMLAFFSKLPPCLVGIEACGTSHYWARELIKLGHEVRLMPPAYVKPYVKRGKTDAADAEAVCEAVTRPTMRFVPVKSPEQQAALSMHRARDLLVKQRTQLINMLRGLLAEFGVDIPKGLERALLMARQVIEGNAPEVPIEAARIATTLSQQALDIHVRLRQIDRDLAIWLRGNDVARRLMTIPGIGTVGATALVASVTDPLQFRSGRQFAAWLGLTPLQKSSGGKERLGRISKMGDKYLRKLLIVGMTSLVRRAKYTPDKIDPRLADLLARKPTRVATVAMANKTARVIWAIMARGETYRTGHQPALAA

SEQ ID NO: 210071 - protein, 428 aa, unidentified
MNHNDTTNTNHTKDPSAQPPQAWIGLDWGDKQHSFALQEHGGQTQTGTLDHSAENLHRWLQELEQRFGGRPVRLAIETSRGAVVAVLLQYPWLEIYPINPITSARYRSAFTPSGAKDDLPDALVCLELVRDHAAKLRRLEPQDPQTLKLAGLVEARRDMVDRCTAVLNQQTSLLKSYFPQALSLLDNLNTPLAVAFLKRWPDLTRLKAAKPATVKRFFYQHHVRSKDLVKQRLELIAQAVALTTEEARLSVAVLQLHQLLDQLEVFHKHIGRLDAQIKSTFAAHPEAYLFRDLPGAGAQLAPRLCAAFGTDRLVYPDPASLQKYAGLAPVREKSGSQLWTHWRWNAPRFLRQSFVEWAGQTVRYCEWARVYYQRMTRKGKKHAVIIRALAFKWIRILWKCWQQRSPYDEARYLKQLTHRKSPNAVAAQ

SEQ ID NO: 210072 - protein, 340 aa, unidentified
MTQVVTIGLDIAKSVFQLHGVDAAGAVLLRKRLPRSRMLAFFEKLAPCLIGIEACGSAHYWGRELSRLGHDVRLIPPSYVKPYVKRQKNDAADAEAICEAVTRPSMRFVPIKAPEQQSTMVAHRTRSILTRQRTQLSNAIRGHMAEFGLVAPVGRNGLEILISAINDTSDERVPSAARTSLLMLVTQLRLVNQQILESDRCIIASARSTEVGKRLMGIPGVGPVLASALVATITDPKSFSSGRNLAAWIGLVPRQNSSGGKERLGGITKQGDRYLRQLLVVGAVAVIRHAQRNGARRPWLVQLLARRTPKVAAVALANKNARMVWAIMTSGERYRDPLAA

SEQ ID NO: 210073 - protein, 345 aa, unidentified
MEITTIGLDIAKRVFQAHGVDAAGCAVLRRRLGRSEVLDFFRALPPCLVGMEACGTAHHWARELQALGHQVRLIPAAYVKPYVKRGKTDAADAEAICEAVTRPTMRFVPVKTAEQQAVLVLHRTRDLLVRQRTALVNALRGHLAEFGIVAPQGMSRVADLLAVLLGEDETTLPPLARQALRGLAAELEALGKRVEEIEAAILVWHKESDASRRLAAIPGIGPITASAIVATVGEEVSNFASARHFAAWIGLVPKQNSTGGKPRQGSISKAGDRYLRRLLVLGATAVIRHTRIKAREGWLADLIERRPTMVAAVAQANKTARIVWALLARGESYRSQQGCPQPAGA

SEQ ID NO: 210074 - protein, 350 aa, unidentified
MTTMPLRVTAGVDTHLDVHVAAALDHRGALLGVESFATTPAGYRGLLGWLRGFGALELVGVEGTGSFGAGLTRQLHSEGVCVVEVDRPNRQRRRRRGKSDPQDAVSAARAAQSGDARGEAKTRDGNVEAMRVLRVARSSARKARTQALNQMRSIIATGPEPIRAELRDLNVYRLLERTAAYRPDRRHDVMSLTKRTLRMLARRAQALEAEVAELDAILKLLVAETAPALAARPGVGTECASVLLVAAGDNPQRLRNEATFAHLCGAAPIDASSGKQQRHRLNRGGDRQANAALWRIVITRMVYDPRTRAYIDRRTKDGLTKKEAFRCLKRYIAREVYNHLPHQRLALDNP

SEQ ID NO: 210075 - protein, 351 aa, unidentified
MPNVKRQPLKKLRSDPDALLGLLLRWRDQATKAGGRIKRIVLAFEAGRDGFWLARWLRARGIEAYVIHPASIPVSREHRRAKTDRLDAGLLMRAVLGWLRGEPKHCSMAAIPTVAEEDARRPTRERETLVGEQTRAVNRIKSTLIRFGIRAFKARLRQASKHLGELRSPEGEPLPPNTMAELRRDLVRLQVIREQIRAIERARLERLKRAPRQGTHPMMRMLARILGIGIETADLLVHEVLTRKLRDQRAVARYGGLTGSPDESGTKRRERGLARAGNARVRHGMIQLAWRWLKFQNKSALAQWYGARTTGGKPGLRKTMIVALARKLLIALWRYVTIGEVPAGAVLRPAT

SEQ ID NO: 210076 - protein, 437 aa, unidentified
MTENINSSHTSDQSCEFVALIGLDWATEHHDFCLLDPTNNKTEFGRFDHSPEKIGEWVIGLVERFGQGKIAICLEQSRGPLIYALLGYENLVLFPVNPKTISKLRSALYPNEPKDDRLDAKLALKMLILHREVLRPLQPLDAESNKLNLLSERRRELVDLQADQSNRLQSFLKHSYPQAIEMIGINPTSRMATAFLQRWPTLESLQRAKPQQLRKFYYKQNCRKEECIQKRLELAKNALPLTEDAAIIETYKLMVLGVVNIIIVLNDSIDQIEEVLSELVESHQDSHIFQSLKGAGPAFVPRMIGAFGTDRDRFPQASDIQCFSGIAPVTRQTGKAPPIVVKRWQCPRFLRQTFHEFAKCSVNFNGWAKCYYDDQRAKGKKKHVAYRALAYKWLRIIWKCWHDKVPYDEAKYIRALQKKGLKIYSHLQVEQQITKCE

SEQ ID NO: 210077 - protein, 384 aa, unidentified
MNKHSILFIGLDTHKEFNEVAYIEEHRGAKPVHLGRVSSSKVAVQKLVRQFESKYPGATLHFVYEAGPCGYWIYRLITSLGHCCYVVAPSLIPKKPDEKIKTDKRDALKLAKLLKSEDLTPIYVPEPEDEAVRDLSRAREVAMKDLKDAKYQLKALLLRNNINYKGTANWSQKHLRWLTELVLPHPAQHIVLQEFLHTITERISRLERLDNELTHHVHQWRYYPVVKAIQAMRGVRLLVATGVVAELGDLSRFDHPRKLMSYLGLVPSEHSSGGKRHIGAITKCGNGRARRLLVEGAHTYRYAANISTDMQKRQEGLPKDIIDIAWKAQIRLCKRYKKMIAKGKHYNLVVTAIAREMIAYIWAIAKEVVLTPVNTKLRLARVPA

SEQ ID NO: 210078 - protein, 362 aa, unidentified
MAQPKSVVGLDVHATKTQAAVLHPETGELRSRRLSGPPRRALDFLTEPPAPVLAVYEAGPTGYGLARGAAECGLDVRVCAPGSIPRAPGDRVKTDRRDAERLARLLLAGELSFVRVPSPEEESFRDLARAREAIRADLMRARHRVGKLLLRRELRWEGPGSAWTQAHWRWLEGIDLEDRASREVLADYLGAVRSLEARRAVAERAIEETWASSPWAETIARLRCLRGIGTLSALGLCAEAGELRRFARPASLVSYFGIVPREHSSGEQVRRGPITKAGSPHARRLLVEAAHHYRHSPAVGAALERRQRGADPRAVEIGWRAQRRLHQRWRRLRLERGKPGNVVRIALARELGCFVWEVGRLG

SEQ ID NO: 210079 - protein, 461 aa, unidentified
MARRNPGIPTPASPSSRGPALRITHPHAAGIDIGGSSHFVAVPPDRDDEPVREFRAFTADLIALTDWLRACRVDTVAMESTGVYWIPLFELLSSRGFEVLLVNARHVKNVSGRKSDVLDCQWLQQLHSYGLLRGAFRPGDGVVALRAFARQRHALLRTQARAVQHQQKALVQMNLQLTSVIADVAGATGQAIVRAIISGERDPMRLAALRNCRIKASEEEIALALQGNWRCEHLFALKQALEAFDFCGQQLAELDAQIEAQLQRLQVTDDEPAKGRKRSVARNAPKFDLRARLFSMCGVDLTAIPGVDVTTALAVVSETGADLTAFPTGKHFASWLGLAPGTKISGGKKLSGRTLPSSNRAAQALRLAAAALRTSQSALGAYYRRLCARMDKPKAVTAAAHKLARLIYAMLTRGQQYTDQGQAYYEERYRERVVANLTRRAQQLGLQLVPLAGASPQTTTA

SEQ ID NO: 210080 - protein, 368 aa, unidentified
MPSTNLQNSVDFSGQKFYVGLDVHKKSWSVTVRSLGIQVAHFTQPPSAEALVATLKRKFPGGIFSSAYEAGFCGTVSHEQICKLGIDNIIVHAADIPLTDKEKKNRTDLHDSRSIAQRLEKNDLHGIHVLSREQQELRSLFRLRESKVQDVTRANNRLKGYLMYFGIEIPDTISQKEFLSKRVLEWLDNLELASEAGAISLKQHLETLRYQRTKLYQITKLLRNQIQTIHDQAYLRLLTVPGIGGVVAMGLLAEIADFTRFDDPDNYCSYLGLMPWNYSSGESIRTKGIQPRCNKHLRPLIIQASWTAIRHAPELLSYYSKHAAKNNKHAITKVARRLALIARGVVLKNQDYQPDYLQKNKKQQKEAQ

SEQ ID NO: 210081 - protein, 322 aa, unidentified
MSLPNPLCVGIDVSKATLDIATTSEFAQFTTGNDADGFDAIVAELRKHSVALILMEATGGLEAAVACSLQAEGFDVAVVNPRQARDFARAMGYLAKTDRIDARVLAQMAEVINRHPERERFIRALPDAERQVLAAMVVRRRQLITMLVAERNRLHPAHPQSRKSINIIIQALENELARIDEDMNRHIQSHFKELTERLSSIKGVGTMTAAALLAEVPELGNLSRREISALIGVAPVNRDSGTMRGRRTIFGGRAGARAALYMAALVATRFNPVIKAFYMRLLAAGKAQKVALVACMRKLLTILNAMLRKNEEWNESFHHVAP

SEQ ID NO: 210082 - protein, 370 aa, unidentified
MDSITYVGLDVHKTTISVAVADGARSGEVRQLGAFANRADVVRKVVERLERPGRQLRFCYEAGPCGYGLHRFLTRLGHACTVVAPSLVPIKAGDRIKTDRRDAVMLARLHRAGELTAVWVPDVAHEAMRDLVRARATAMKVLSKARQHLGGFLLRHGKIYSGVRTWTQAYRRWLTTVRFDHPAQQIVLQDYIDAVTDAERRVDRLTRQITEHLPGWSMAPVATAIQAMRGVALINAVTIVAEVGDFSRFSNPRQLMAYLGLVPSEHSSGSTVRRGGITKAGNLHARRALIEGAWTYRMQARVSRKLYDRLEAVPQNVRDIAWKAQVRLCGRWRRLAASGKPKVVVTTAIAREMAGFIWAIARQLQPQATG

SEQ ID NO: 210083 - protein, 350 aa, unidentified
MVTLGGDSHKQTHTLVAVDDNGRQLAQKTSPATKTGHLEVLQWARRWPERRWALEDCRHVSRRFEADLLVAGEVVVRVPSKLTGGARKVARTSGKSDPIDALAVARAALREPDLPVAKLEGPGRDVRLLLDHREDLVGERTRIQNRLRWHLHELEPEAAIPARMLSRYHSLAEIEQRLGRHRGVVAEIALELVVRVRDLTRRINELEADIEHRVGGLAPTLMNLSGCGALCAAKVVGEAAGVSRFRSRAAFAMNNGTAPVQASSGNQKRHRLNRGGNRQLNVAMHRIAITQLSRPGPAKDYVAKRLAAGNTKTEAIRALKRRISDEVYRRLLQDERASLTNNVSSSDAAA

SEQ ID NO: 210084 - protein, 444 aa, unidentified
MGNLEKIHDNAAGIDIGSEKIFVATDKQPVKSYRTFTNTLQLCVKDLQSQNIRTVAMEATGVYWVTIYDMLEKAGMDVWLVNPADSKNLPGRKTDVQDCQWIQQLHSYGLLRRSFIPDETFRQLRTYNRIREDHIQMASSHVQHMQKALISMNIRLPEVISQIHGKSGMQMIEAILEGNTDAKHLLSLCDARLRKNKREEILQALQGFYSEEHLFELKQAYDAYHFYQFQIAECDKKMEKLLEKMSSEKEIHDEDILLKANKETKRVRHHNPQINNLHYKLVCITNGRDATTLPGFTDYNYLRVLSEIGDDISRWPTEKHFTSWLGLAPGQNRSGKINKRAKKRSSTRAGQIFKQAAQTLLISKHIALGAFAKRIKAKRGPAIAIKATARKLAVMYYNLMKYGADYVEEGTKKYEEKYRNQLIKFMQKKAIELDLQLIEIQHNN

SEQ ID NO: 210085 - protein, 340 aa, unidentified
MSTINIIGIDIGKSTFHLVGHDSSGREVCRKKFSRPKLIQFLSTIELTTIAMEACGGCHWLARKCQEFGHKVLLIPPQYVKPYVKTNKNDFIDADAIAEAAIRPTMRFVSVKAESSQVISVIQRIRSSYLKDRTACMSRIGSILLEFGMSFPKSHAKMKALLQWLAEHGEPIPPMLLLELRDHHDYYLKLNQLILTQDKKLKEIVDHDERAQLLKTIPGVGNLTASRCLSDISNVADFKNGRHLAAWIGLVPRQFSTGGKPTLLGISKRGNKGLRELFVHGARAVLVRPEKAVAIFGNWILELLSRKPFNIVVVALANKLARIAWSVLSTKQAFEVRVQA

SEQ ID NO: 210086 - protein, 316 aa, unidentified
MDHFVGVDISKLTFDAEWLEEGQRRHQQFDNNESGCIDFIAKISSEAHVTMEATGTYYLTLATFLYENEIKVSVVNPVQTRYFAQMQLKRAKTDPVDAGICRTFGASYQPSLWVPPSKVISELKQLDSYLQGLVQERTRVLNRLEAIHQRPDICQYVLMDLESNLKGIGERIKACEDLIADSIQAHYARQYELLVSVKGIGPRIATMLIVLTEGFLRFTDAKKFSSFIGLSTFIRQSGTSLSTSSITKMGQSRLRHLLYMGSMPAMRWNRGCKEFSTRLLANGKPYKVVRIAVANKLIRQAFAVINKGEKYSAEYT

SEQ ID NO: 210087 - protein, 381 aa, unidentified
MKPTKKLTPTSHQQTEATAEVIKLGIDIHKTKYVVIRQIDNLAAQSPQSFSPDEFIVWVQRQRLLAKRVVSCYEAGCFGFVLHRKLAEVGVDNFVVRPRNWDEYGSSVKTDARDARELCGHLDRYLAGNERALCVVRVPTEEQEQARSLSRQRETLAKERKRLQNVGTSSGLYHGVDVPANWWKPKVFTKLCTEIPEFMKLILDPFQQVLEIIDKQLRETTAREERKANRKIPVGLGALTTSILDQEFVDYSRFTNRGQVSSFTGLCPGESSSGNKRQQGSINKHGNPRIRHMLLEAVWRMIQFQPDYKPVLHWKARMANEPFGAAKKKKMAVAIARQFAVDWWRIQTGRITPEDVGLRVDFPSAYSTRALREGRVSKVYA

SEQ ID NO: 210088 - protein, 390 aa, unidentified
MSAAPRWHVRSAGKWLNSPALMKNTIVHHEGAASLEAARTKVKRCGSIIKIGLDVHARIYVAVAQYDQLLPKPARRLTPSEFVAWVEALLRAGHTVHVVYEACGFGFNLYRGLKALGAHCYVIAPRQLDEQCTRIKTDPRDATTLCQRLSRYVEGNTRELAVIRVPSEQEELDRHVSRQREQLVRHRQKLEAQGRSLLINHALPAPAHWWKQQTWSRLGKHLPAWIRLRLEVARPALLSLQEQINALTSELEAAAPASIPAGLGKLTSVVLTREICNWHRFHNRRTISSYTGLCPGERSSGSKRVPGSVTKRGNPRLRAALVECAWRMVRFQPNYPPVKKRLGVVAKGARATGAQRKKAIVAVARRLAVDLWRVHTGRCSAQQLGLNISN

SEQ ID NO: 210089 - protein, 344 aa, unidentified
MVISYIGADVDCKTVDLAVEQRKVIINRYRVPTSITALRDVLRGIPGKKNLVFEEGPLAHWLYHNLKQDVDTLVVCDPRRNAYIAKDGDKDDSIDAAKLAELLRGGFLKEVYHSDDDRQVLLKRWVALYHDRVHEGVRQVNKLRGCCRHYGVRPPRSAVLDPVIRKQWIEELPDRDLQSLLAMLWPGLDMAKTQVKDCKQKLRQLSKAYRIIEYWQKLPGIGLIRATTLYAYLDTPWRFRTKTKLCKYCGVGLVRSSSGKDRFGKLKVGLLQLAWMVNKRLKDAVMGATISAISQGNNPFAVKYERLVRNGITPPNARHTVARKLLTVMWGMWKSNRPYDPGLV

SEQ ID NO: 210090 - protein, 358 aa, unidentified
MKIVGCDLHARQQSIAMLNTESGEFTEKVIRHEGNAVREFYAALEGRVVVGIEATGSMQWFLQLLEELGIQYRVGHPARIRAAETRKQKHDRRDARLILDLLVMEDRFPEIWMPSMEQRDLRTLLRDRHQWVKMRARLQHTMQSIALNHGLRQGSGLWSVAGQSALQALPLAHYTSHRRNALLSLYAQLQKRIQELDKVVEAEAQSRPQACRLLTHPGVGPVTALATEVFLGDPKRFRTGKQVASYIGMIPGEHSSGKRQRLGKLSKEGNALLRYLWTEATMHAAGKDPELKRFYRRKLIQKGMGKARVAAARKLGIRLWIMLRDQIDYQQFCRRGKLRQEGEAHVGRPGFNSGPALQ

SEQ ID NO: 210091 - protein, 367 aa, unidentified
MKKISTATTKKVEKNASQKLTIGLDLGDRFSWYCVLDEAGEVVLEQKVATTPKAMKEVFGGMPRSRMALETGTHSPWVSRLLSELGHEVIVAHARNVRLIGESRKKDDRLDARMLARLVRIDPQLLAPVKHRSAQAQADLMAIRARAGLVRARTALINTARGVTKSYGERLRGCNPRNMNAEKAQELSPELQAALGPLLGEIESLSERIREYSERIEEIAKRSYPEVGRLKQVKGVGTLIALTYVLTLEDAHRFGKSRDVGCYVGLQPGRRNSGQSEPQLHISKEGDAYLRTLLVQGAHHILGPFGADSDLRRWGLKLAERGGKNGKKRAVIAVARKLAVLLHRLWVSGEAYEPLRNQREVALPAVA

SEQ ID NO: 210092 - protein, 360 aa, unidentified
MLAETSRSGLAQKPGQEDRTTTIDYIGFDIHKKTISFCVKAQDGTILEEGTIPALRKTLLAWAKARPRPWTGAMEATLFTGWIYDLLKPLAREVKVALRKAIAAAKKKNDKVDARMIADLLRCNLLPECYMAPVAIRDLRRLLRYRNLVVRQTTRMKNRIAGLLMETGVAYNKERLHGKAYFRELLGSLQEVPDSVVELLQLSRGQVEFFVGIQRRLLKGLTEHPELSQRVQRLQSIPGVGEILALSGALEVGEKGRLPWIARAVSYCGLTRAQRNSAGKEQRGPISKQRNRHLQTILIEAAKLAPRYNSQLAAVHDRELQRGNRNRATLAVARKLVAYLMVVDKSGQPFQMRASEQEAA

SEQ ID NO: 210093 - protein, 420 aa, unidentified
MKERSVMNNPSRKDLPVLPLGRHVVGIDIGQKVHAAAGITTAGQDFGRIISFDNTRAGVHRLEQLVLTPLGDPAGLLIGMEATGHYWMPLFFELKRRGYDVIVINPIQTRGQFRSRIRKTKTDKLDARSIARLVLKGEAKAARIPSESTFELRLLTRHRWRLTSLCGDIQRFAYSLVERIFPEYTDVFWKPLLPTGCALINELGLSPRLLASQPDEVSALIARASRNRVSADTVRTLLARAEQSIGIGRAEPVIVDQLRSVIALLNTIQSQIVALDEELTRRVEGLCSPLLSLGLHAPLVATIHAESDPIADFRHPWQYAAYAGLDPSTYDSGNFKGSHAHISKRGSPYLRSALYLAASTLYRRHRELRRLYQRSRNAGHHHTDALVVVAHKLARIIWRLLTDNRPFRAKAPKPALETVR

SEQ ID NO: 210094 - protein, 317 aa, unidentified
MSQPLSIGIDIAKDSFQVASWPPQVQGTWLNTRQGHRAFRDRLQGVPIARIIMEATGGYEKTLAAELTQAGYPVVVVNPRQVRDFARGLGQCAKTDSIDADVLARFGDLVQPSCKPPVDPETEALAELVTRRRQLTDLLTQETNRAGMIHHVKVRKSIRKMIHTIEHQIRELDDLIQDHIQGDGDFQQKDRLLRSVPGVGPQTSAMLLSHLPKLGRLNRHQIAALAGLAPYDCKSGKQARASHIAGGRKPVRSLLYMAALTARRCNPVIRHFAELLEDQGKSFKVILTACMRKLLIILNAIIRDQQIWTPKKFLKNT

SEQ ID NO: 210095 - protein, 463 aa, unidentified
MRTDKKLWRNRKARKELARRLQSENPGLEVVHPHAAGIDVGNSAHYVAVRPDRDSQPVRRFECFTADLHRLADWLRSCGVKTVALQSTGVYWIPLYDILEERGFEVYLVNAQHTKNLPGRKSDVQESQWLLKLHTYGLLNNSFQPPSKIRTLRTYWRQRLQHVTGAATCVQRMQKALTQMNIQLANVISDLSGVTGQLIMRAIIFGERDSWRLAELSHPRIQASRAEIAKSLEGTWRSELIFVLQQELEMYDTYQRRIAECDQQLQKHLAAFADTVTPPAKEELPPKKKKKQNKNSPHFHLADELQRISGVDLTRIDGVDVFVAQKVISEVGLDMGRWKTEAHFASWLGLCPDNRISGDKVLARGTRHVLNRAATALRLGASTLLKSQTYLGAQYRRLRSKLGAPKAITAMAHRLARLVYRMLKYGQQYVDKGAECYEQRNRQQQVEFLRKKAARLGLQIIPA

SEQ ID NO: 210096 - protein, 426 aa, unidentified
MKVLWERVAGIDVHKDMIKVAIRSPGDKPWTRKTEVLEYRTFYGVLQHMAIELVRRGVTHVVMEASGVYTEPVYYALCEQDFTRIAVINPAHAKALKGHKTDAKDCARLAELFECGLLRGSYIPAPELKEVRDLTRYRIKTVQARTSEIQRLGKSLESAGIKLGSVASEITGVSATAMIEALIDGERRGAVLADLARGRMREAGKLADLSMALAGRFTGHHSLMCRLHLDRIAVFNTAVAGLQEQITTRAAPWQREQDLLKSLPGFGDTVAQAWLAEIGPAPHLHFSSHGKLASWVTLCPGNNISARKRKHGRTGDAGTYIKPMLIQAAWSAIKGRGRLQARYNRLVRRFGGEKNPAAKKKAITAIAHTLLKIAYQVLKSGTPYQDLGADFYTRRESPAQRQAYLLRQLEKLNPGCTITISPPEAA

SEQ ID NO: 210097 - protein, 313 aa, unidentified
MDKSFVGIDVSRDRLEVYVRPLGDRWWVPNTTQGRAVLVERLAALAPELVVLESTGGLERAVARTLQEAGIPTAVVNPRQIRDFAKATGRLAKTDALDAEVLARFAEVIRPEARPLADEGTAQLRELVVRRQQLIKMATAERNRLKRASPKMKLRIRRHLEWLEEEIARLDGEIEGMKLKREEWANRDRLLRSVPGVGPVLSATLIGCLPELGELRGKEIAALVGVAPFNRDSGRWRGKRGIWGGRATVRAVLYMAAVAATRWNPVIREFYLRLIEAGKPVKVALVACMRKLIVILNAIVRDGRPWRYNPALT

SEQ ID NO: 210098 - protein, 350 aa, unidentified
MRIIGCDYHPGFQQIAFVDTDTGDCEERRLEHREEAEKFYRDLAARGVKVRVGMEASGHARWFERLLSELQFELWIGDAAEIRTKRVRKQKTDRQDAQLILRLMMEDRFPQIWVANWENRDLRQLLWHRHRMVQARTRIMNQLQAVALNEGLRCKKRLWREAGREQLESFQLAPWASRRRRDLLELLDRLTPTITELRQAIEQEAEKCPEAGRLRTHPGVGSLTALAFVLIIGEADRFQCGKQIASYLGLVPSEESSGDRRRLGHISKQGNVLLRFLLVEAAQVTVRSLPEWRSKYFHLAMRRGRKIAKVAMARKLAVQLFWMMRKEWDYEQVRRFGPHAGQPENRRGVQ

SEQ ID NO: 210099 - protein, 348 aa, unidentified
MDMTIVETGRTIVGGVDTHLDAHVAAALDPIGGVLGVQSFVATPGGYKALLEWMGAFGTISKVGVEGTGAYGAGLGRFLRRAGVEVIEVDRPNRQARRTKGKSDPADAVEAARAVLSGRVTGAPKTRDGNVEAIRALLVAKRSAREARLRALHQMRQLSYTGPDQLRSRLKGLSITELVAATAAMRTRASGDPVVYATKVSLTSLGRRVLCLEHELAGIDELLSHLVTTCAPEMLRLFGVGIDTAATLLVTAGDNPERLRSEAAWAHLCGVAPIQASSGKVTRHRLDRGGDRHANQALWRIVMTRLATDPRTREYMERRTKEGRSKREVIRILKRYVAREVFKQLRHT

SEQ ID NO: 210100 - protein, 330 aa, unidentified
MPTYYLGIDVAKQKLDVVLLLEPDTLKKRQKTVPNTPAGYEALELWYHQQTGAAPAACHVILEATGPYHEAAALALHEAGFVVSVANPKVIKDFAKGLGVKAKNDGLDALTLARFGSLIKPARWQPDPPEYRRLTVLLRRLEALETDRQRELNRLEKARVSQPADADVVASLERSVQFLEAEQERLLVTINDHIDQHPTLCQDRHYLLSIPGIGPVLSVLMVALLQHGQRFQSAAQFVSYLGVIPTEHQSGSSVRDKPHLSKTGPARVRGKLYMAALVAIRHNPDVRAFYERLLAKGKSKMAALGAAMRKLAQICFGVIKHQTPYQSQVA

SEQ ID NO: 210101 - protein, 352 aa, unidentified
MPKRTRVVIGGVDTHGRTHHAAAIDQQGRLLGDREFPADSGGYRQLLGWLGRHGNLDMVGVEGTGSYGAGLTRFLLDRGINVVEVDRPDRRTRRQRGKSDPIDAEAAARAVLAGTATAPAKRRDGIVESIRALRAARSGAIKARTAAINQLKGLLVTAPASLREALEGRSTAALAAACARLRPQETALAGPLDATKAALRVVACRIHQLDEEIGVADQRLATLVGRAAPRLLKLHAIGVDHAGQLLTTTGQRPERLRNEAAFAHLCGVAPIPASSGKTHRHRLHRGGDRDANRALHLAVVVRMRWCPRTRAYAERRTKQGMSKPEIMRCVKRYLAREVYHALVADFEALNGT

SEQ ID NO: 210102 - protein, 385 aa, unidentified
MQKLNDLSRSLAILEPDVTLVAVIEMSLSSWLVAGIVPGVERQPLKKLAVDESALLKLLQRWREEAEKAAHRIGRIVVAFEAGRDGFWLARWLKARGIEAYVIHAASIAVSREHRRAKTDRLDTELLKRAVLGWLRGERDHCKMVAIPTIKDEDAKRPNRERDNLIGERSRIVNRMKAALVRLGIRGFNPKLKRAAGRLDGLRTPEGEPIPPNMQAELRRDMERRRLVSNQIRQIEEARLERFEQAPNDGPHAMVRLLARVIGVGIETADMLVHEVLSRNMRDRRAVARYAGLTGSPDESGRRRREKGLARSGNARVRRGMIQLAWRFLLHQKNGALTQWFRARTENARGTRKPMIVALARKLLIALWRFVREGVVPDGVVLRPA

SEQ ID NO: 210103 - protein, 400 aa, unidentified
MSERRAQVWAGIDAGKGHHWAAVVDESGPTVWSKKIDNDETAILAALGEILDLAEKVHWAVDISGTSSALLLALLAAHGQQAVYVPGRTVNRMSGAYRGEAKTDARDAYVIAETARHRRDLAAIDVPVQLAAHLALLTGHRTDLVADRVRMINRLRDVLTGIFPALERAFDYSAHKGALVLLTGYQTPAAIRRRGRTRLTAWLANRGVRGADAVAATALEAAEAQHTALPGEDIAAAIVADLAAQILALDDRLKRIDKQIRDTFRAHPQAEIIESLPGMGPILGAEFVVAAGDLTAYADAGHLASAAGLVPVPRDSGRRTGNLHRPKRYSRRLRRVFYLSAQTSIIREGPNRDFYLKKRGEGCKHVQAIIALARRRASVLWALLRDGRAFTSAPPAAQAA

SEQ ID NO: 210104 - protein, 451 aa, unidentified
MSKRQTVKPAPVAAPAPEFAARIGLDWADQKHFWTMLGGDGKKTRGQLDNTPEAIQVWAAELAQRFGGRPVALALEQSRGAVIAVLSKYAHLALFPVHPTSLANYRKSFSPSGAKCDSVDGDLILDYLVKHPEQLRCLRPDTVETRSLQFLTEERRKLVDAHTAVLQSLIHWLKQVFPQMVRWFDDPATPLVADFLLRWPTLQELQKVQPKILRKFFHAHNCRSEERTQERLDQIRQAVPATHDPALLQTGTLSIQNACRILTSMRQGIAEFDQQIAATYQAHPDHFITESLPGAGPALEPRLLAAVGSQRDRFASAYNMVCCFGVAPVTESSGNSLWIHWRWACSKFVRQTFHEWAACSIRTCDWARAYYDRQRAKGNGHHAAVRSLAFKWIRIFFRCWRDRVAYSDQRYEQALRTRAAKSKLPQTDTDVAPTVGWKSCGGFSKLVKVSS

SEQ ID NO: 210105 - protein, 453 aa, unidentified
MAQRNRSTPLKPGKSRAALMITHPNAAGIDIGNASHFVAVPPDRDDEPVREFPSFTVDLNALADWLTACAVDTVAMESTGVYWIPLFELLESRGFTVLLVNARHVKNVSGRKSDVLDCQWLQQLMTYGLLSGAFRPADAVCALRSLWRQRGMLLRSQGRHVQHMQKALTQMNVQLANVISDVVGETGQKILRAIIAGERDGHVLAAMKNVRIRASAEEIAKSLQGNWRAEHLFALKQALDAFDFIGGQVADCDREIEAQLDALQSHDGLPAKSKKRSRNRNAPKFDLRTQLFQMCGVDLTRIDGIDVTTALAVISETGTDMSRFATVKHFTCWLGLCPGTKITGGKVMSGKTKRCANRAAQALRLAAAALRSSQSALGAYFRRMCARMDKPKAVTAAAHKLARLVYTMLTKGEEYTDQGQDYYEERYRERVLRQLTQRAEKMGMKLVENEQPA

SEQ ID NO: 210106 - protein, 421 aa, unidentified
MKNSAAKKVRQVPAGYMVVGVDPHKKRHAAVAITQDFAVHGKFKFNNSREGLEYLLQRVKAEMVKSDCRGIMFAIETGGHYWRNLAYFLDEVGIPFRFINQFTLKRRREGKDLNHRKNDYRDSEVAAQLLCTGEFIETRLQQGVYAELRAAYNAYRRLVKERTRITNLIKGLLDGLFPEFTQVFKDPCGLTALSVLSTCPIPGVIAEMTEEEFASTIKASHQGRLMRKKLCALRYAAETSIGIKAGAQPVSTELFFLVEKMQLIRCHIRSIDGTLVKLVDKAEEGKYLLSIIGVNYISVAGLLAELGSFRSYRSAKQLIKMAGSNPTESESGGKRGSHTPMSRQGRPALRNCAWTAVIPMLRFNPDFRAWVKELRERPVHKNPLAKREVVGAALNRLLRLAFTLVKKQTFYQAPHPVQVTS

SEQ ID NO: 210107 - protein, 419 aa, unidentified
MSFKILKFNCCGLDVHKTWIYACIGITDSNNRTEYKQARFSSFTKGLNELCDWLAKYNCKDVCMESTGKYWIPVFNILEQHNLWVTLSHPKYTKPMKGNKTDRKDAKWICDLYMCGMVKPSFIPPADIRELRDLVRYRFKLTCMITGEKNRAQNCLTVSNLKLDDVFSDVFGKSSRSITEQILKHPGETFDVTPFVDGRCKTPIEEIQAAVDGAISKEQAVKLRQCLDHIDELNKHISEVEQEILRLSDKYEIALNLIRTVPGFNKNPLTAIQVLSEIGGDMSVFPTAKHLVSWAGCCPRNDQSNQKIKSTRISRAGSYFKPVLVQVANALIKSKKHLEFTNRYKRIKARRGHKKAIIAICRMILTAIWHILSDLKPYTPEGFLESRPVKEEKILSTSQALNLLRQRGYVIKDEPLTVS

SEQ ID NO: 210108 - protein, 320 aa, unidentified
MMAQNDLVVAGIDVAKDKVDVCIRSLSLKRTFASTAEGRRELASWLRRQKVGKAVMEASGGYEREWAKALRDAKIEVRIVDPKRVRSFAQSAGRLAKNDTIDAEMIAWFAETFDEARGQAYDETREQLRQMVHARQALKDMQAKLQNQGEHALPATVQRMHARIAKAIAVELVKIEAAILAVVQATPRFTELAEIIESVPGIGRTTAATLIAAMPELGQANNKIVAALLGVAPYDDDSGRRRGERHIKGGRRRTRNVFYMACLGAATQHNPVLKAFYDRLLAKGKEKKVALVACMRKLISILNIMIERRQKWDASRYAVS

SEQ ID NO: 210109 - protein, 368 aa, unidentified
MNEVITYVGMDAHKKDLFIAMLIGREKTPVTWQLANEPGAVRRLIRKLEREAPGRVEMCYEAGPCGYALQRQLTTARVSCQVIAPALIPRKPGERIKTNRRDARKLAELLRAGLLTEVRPPTPDEEAVRDLCRARDDVREDVQRCRHRLGKLLLRRGLHSSGRNWTRAHRRWIDSLEWAHPAERVVVDDYLLAIDQQEARLVELDARLTEIAQTEPYREPVAWLRCFRGIDTLTAILILAELHDVRRFPSAPELMAYLGLVPGEDSTGEKQRRGRITRTGNALVRRLLVETAWHYQHRPGVGVALARRRKGQPSRVIAIADKAQQRLCRRFRKLAAEHKPAPKIAVAIARELAGFLWAALQPASVSAS

SEQ ID NO: 210110 - protein, 343 aa, unidentified
MKISRVGVDLAKNVFQLHGVDRHGETVLKRRLSRDKWIRVLVNSAEPGCEIGMEACGGAHHWARLLMKKGFRVKLIPPQFVTPYVKSNKNDAKDAEAICEAMSRPTMHFVKAKTVEQQDIQATHRIRRELMCHRTAKANQIRGLVTEYGLVAPLQMASLRVAIPRWLEDAENGLTERFRTLLHGLWDDLLTLDQRIEILNKEIDCIAKNDPVAQRLQQLRGVGPLVATALIATVGNGDQFSKGRQMAASVGLTPRQHSSGGKDRLLGISKRGDAYLRSILIHGARAVVAQAKHKEDRLSRWVTGLAERRHPNVAAVALANKTVRMAWAMMNHDADYDPEFAVS

SEQ ID NO: 210111 - protein, 389 aa, unidentified
MLGEKQVEHSGDGIRECIDWLLQLAGGDASSIAVAIEVPHGAVVESLIENNLAVFAINPKQMDRFRDRHTVAGAKDDDLDAFVMADSLRTDQRCFHRVELDEPAILRLREWSRMEQDLQTDGNRLANQLWEQLRRYYPQMLKLSPAANEAWLWDLLASAPLPGDAAKLKLAKVKAILRAHRIRRVTAEEVLEQLRQPALRLAPGAAEAAGEHVLMLLPRLRLLDEQQAAAAKRIRGILEELCAAPPEGEGREHRDAEILLSLPGIGPVVAATMLAEASQPLRDRDYQALRHYAGAAPVTRRSGKRKVIVMRYACNERLRNALYHWSRCSMQNDARAKQHYAELRQRGHSHGRALRGLADRNMAMLVSMLKSGRLYDPARRGGAVVAEAS

SEQ ID NO: 210112 - protein, 341 aa, unidentified
MGEVSTIGLDLAKSVFQAHGADASGAVVFRKKLRRDQVLAFFAGQPRCLVAMEACASAHFWSRELAVLGHEVRLIPPAYVKPFVKRQKNDMADAEAICEAAQRPTMRFVATKSAEAQGAAVVFRTRDLLVRQRTQLINALRGHLAEFGFVVRQGAGHVSKLIDLVGDPSSELPAEARPVLAVIAESLQSVQAQIVVLDRAIAARAKADPVAKRLMTIPGVGPVVATALVALAPPASAFRRGRDFAAWLGLTPKQHSSGGKERLGRTSKMGERSLRRLLILGASSAARVAARDGSRASPWLAGMLARKPRMLVTVALANKMARIVWALMAHGGSYRAPATAV

SEQ ID NO: 210113 - protein, 343 aa, unidentified
MKLTRVGVDLAKQVFQVHGVDRAERPVWCQRLKRGRWITELERSVEPGCEIGMEACGGAHHWARLLQSKGYLVKLIAPQFVKPYVKSNKTDATDAQAICEAMSRPSMRYVAVKTVEQQDIQAVHRVRASLIGERTAKANQLRGLVYEYGLVAPRELCSLRRAVPDWLEDATNGLSARFRALLGALYRDLQWLDERVHELDREIAALARENEAVRRIEQVRGIGPLSASALVAMVGDGRQFKNGRQLAVALGLTPRQHSSGGKEKLLGISKRGDKYIRTLLIHGARSALRTAPGKTDRLSRWALALAARSHPNVATTALANKMARVAWAMLRHGTNYEPERMMA

SEQ ID NO: 210114 - protein, 455 aa, unidentified
MQVIFERCAGLDVHKKTVVACRVRATAAGQAVREKRTFGTTTAELLQMLDWLVEWDCTHVAMESTGEFWKPVYNVLEGNLEVWLVNAQHAKAVPGRKTDVGDAEWLSDLMRHGLVRPSFIPPRPQRDLRDLTRTRCSLVRERASVVNRVQKVLEGANIKLSSVASDVLGLSGRAMLEALVAGQADPALLANLARGKLRSKLPQLEQALVGRVREHHRFLLAHHLAHIDFLDEQIDSFSQEIHARLETALPPLPPADSPTPPTPPTTPSTDAPDAPPSAASSAPPPLPPLTWSQAVTLVDTSPGFDVRSAQNILAEIGIDMKRFFDADHLASWAGVAPGNNESGGKHRSGRTPPGDRPVRRILLQAAWTATRTKGSYLSALYHRLALRRGKKRAILAVAHSLIVSLYHMLTRQKPYRDLGANYFDERKRESVTNNLVRRLEKLGYQVKLETKPAAT

SEQ ID NO: 210115 - protein, 317 aa, unidentified
MKQVSTIAAGIDVAKEQLDVAVHGIKQAWRVPNTPDGFGGLVRLMRQHHVERIGLEASGGYERDLVEYLRAAGLTVIVLQPQQVRAYAVMKLRRAKTDRIDAELIAAFTAEYAVVRDAPDPRLAGLAERLTCLEQTEEDMVRLKVRLEHVRDADVKLGWKADLARLKQRRANMIAKLVSTLRSHDDLAARYALVLSVDGIGPRTALALLIRMPELGRLSRGEAASLAGLAPFNNDSGKRVRQRSIAGGRTRLRTSLYAAALPAAFQWNAACKTLYARLREAGKPHKLALVACARKLILFANAVLARGTPWTKSAAAT

SEQ ID NO: 210116 - protein, 356 aa, unidentified
MGLYAGCDLHAKSNFWGIINGEGKRVFKRKLGNDPEGILEALRPFQGDLEGVVVESTFNWYWLVDLLVGQGYRVHLANPGAMQKYSGLKYMDDEDDAFWLAEMLRLGVLPEGYIYPKGERPVRDLLRKRAHLVRLRTSVLLSLKNIVSRNCGMQVRAYILKGRKGVGELLGGNDDLALAGQVSKEVMDYVSRKIEEVEEAILQRVEMQESYRGLLSIPGVGKILALTIMLETGPIGRFAEVGHYVSYCRKVPSRWVSDGKAKGGGNKKNGNKYLAWAFSEAAELARRFHAEPRAYYQRKMAKTNAMVAHSALAHKLARAAYYIMRDGVFFQSEKLFGLQRAGAESLKGGLVKNHET

SEQ ID NO: 210117 - protein, 441 aa, unidentified
MAMRKRDDDLVFPNAAGIDVGGSSHWVAVPRHAADEAVREFGAMTDDLNAMADWLLACGVDTVALESTGVYWIPVYEVLEQRGLKVFLVDARQMKYVPGRKSDVQDCQWLQRLMSQGYLRAAFRPGDEVCVVRAVARQRDVLLVEQASWVQRMQKALVQMNIQLTEVLTDVMGTTGQAIIRAIVAGERDAKTLARHRHSRVKASEQDIAKALTGNWRDEHLFVLRQALAMYDDIARHLVECDAKLQGLLSALGSAKVDLGRTPRVGSKSRAEFDTRQILANWAGVDLTRINGLGLAAVMKILSEIGPDFSRFANVKHFCSWLGLCPGTKISGGKVLSAKTKRSANRVRQALKMAAMSLSHSDSALGAFYRRMSARMDKPRANTATAHKLARMVYFMLTRGEAYVDEGQQHYEEQQRQRSIAALRRRAAALGFAVTPTATPA

SEQ ID NO: 210118 - protein, 407 aa, unidentified
MEVIYPRCAGLDVHKQTVVACVRIAGGGSPSQEVRTFATTTSGLLALADWLESFGVEHVAMEATGVYWKPVWHVLEGHFELVLANAAHVKNVPGRKTDVNDAMWLADLLAHGLIRASFVPPVAVQELRALTRTRKQFVRERSAHVLRIDKVLEDANLKLSVVLTDIMGKSGRAVLQAIVDGHDDPQYLAACVNTRVKASRAEVLEALRGRISGHHRFMLKLHLGHIDALDKAIADIEKEVGLGLEPFRQAAKLLSTMPGLSDVSAHVIVAEIGIDMSRFATPGHLLSWACMCPRNDESAGKRRSTRLRRGGKWLKTTLVQAAWSAVKVKGSYLQAQFHRLRARRGAKKAIIGVAASMLTAAWHMLRDGTPWHDLGAAHFDRADAHKTANRLIRRLQQIGYTVQVTPA

SEQ ID NO: 210119 - protein, 458 aa, unidentified
MLKKKMEMEIINSNAAGIDVGSKSHYVAVGQSLEDVKEFGVYSEDLTGLCQWLLSYGITSVAMESTGDYWQNLYVELVKHGFDVVLCNGKFTKNAKGKKTDVKDCRWIQKLHALGLLTGSFLPDETTEILRTYCRQRSNWIDLSSAASRKMQKFLKLLNFRLDVVVKDVCGLTGLKIIDDICKGNLDPYSLAEHRHYNCRKSKEEIAKALHGNNRNDYLFGLKQEYSSYLYFQKMLKQCDKEIEKFIKLELRKNPALSKLTTTNKPYKRVNKNAPEIQNFNQVAFQYFGGIDFMAIEGLSHSTIMTLMSELGPEGFFKFSTSKEFTSWLRLAPNNKISGGKILSNRIPKGSNRLKIAIRQAANSIGNLKDTHLSDFFHRIAYKKGRQAAVSATARKLAVIIWTMATKKVPYNPPAEYLFLDQKRKMKLVTRIKKNIAKFDIKPYEIGFCNSLNLSINI

SEQ ID NO: 210120 - protein, 430 aa, unidentified
MRNILHVGMDISGRYNDVCALNVLGEVIVPHRRFRYDMSGFEALVAWLLEVARAGEFDAVQVGAEATGLLWFHILWQLQQDEDLSAIDFATFLYNARDVKKGKGAFGRQDKTDRKDAHAIAELLRVRHHVTHALDLDARYLALQRLTRYRYHLAHVLAGEKAYARLVPLHLKMNTYRPKAPFADPFAKSGLWALTNYITIDDLVRADPDELAAALEAVSRGRLDDPNDSAARLQTLAAEAFPLPDAMVEPVNILLEAMLTHIQALQQIMADLDKPIKALAQDLPGYDHLLSIPGIGPVYAAGVLAEVQDGDRFMTDPRGRPRRQHDGQAALARFAGLWWPRKESGDFKGEDRRLAKTGNRYLRYYFIEAANRVRQFEPEYTAFYARKYASANRHHHRRAVTLTARKLVRLVFSLLLNDRDYQPRGGRSRA

SEQ ID NO: 210121 - protein, 344 aa, unidentified
MTLVGCDLHTRSQHIAVLDTETGEILERQLAHDGTAVEAFYAALPGPVTVGIESTGYAVWFHALMQRLGHTVLVGDAAKIRAMVVRKTKTDRRDALHILDLLRHHRFPTIWIPDPATRDLRALLTHRLRLVRIQTMLKNGLHAIALNQRLARGSKLLSRAGVAALQNLAWPPDTAQRRDQSLDLLATVHAQIVQLDAAIETAALAHPDAPRLLSHPGVGPLTALATIAVLGPATRFPDSKHVVSYVGLAPSLNASAEKYHLGRITKQGSTLLRWVLGQAGRHAARLDLDLKRTYFTVLHRRGRAKAKVAVARKLLVRLFIMLRDHIDYEEFRRRGHARTVAPAT

SEQ ID NO: 210122 - protein, 391 aa, unidentified
MDEEGNEIGYPVFPNTLPGAKALESQLLQLIQEKGFSALKIATEATSFLDLHLVDFLASSQVLAPFHPSIYQVNPKLVRNFKRAYPDQDKTDKIDAFVIADRLRFGRLPEPYETHRPYLPLRRLTRYRFHLIKTISREKAYFITHLYLKFSAFSVEKPFASLFGATSLALITEFSPDELVHLPLEDLTQFIIKNGKNRFKDPDKIVEALQRAARESYRLRPALSSSIDLILATILQTLRALGEALKEVNKAIAKEFEAFPNTLQSIRGIGPVYSAGIFSEIGDIARFPTEEAIAKMAGLTWKRYQSGNFEAEETHMSKTGNEYLRYYLIEAANALRVHNAEYKAYYETKVQEVTKHQHKRALALTARKLVRLVFALLKKGQLYQANYQQEA

SEQ ID NO: 210123 - protein, 322 aa, unidentified
MSVAVLGIDIAKQKFDVALLLEGKTKHKACKNSAEGFETLRLWLEKQGIQKVHACLEATGNYGEDLAIYLHEAGHTVSIVNPARIKGFGQSELIRTKTDKIDAALIARFCLVMTPGPWSPPSPEIRALRALVRRVDSLVDMRSQEKNRISTAHESVCLLIREHIAYLDQEIKKIRQQIADLIGENPNLKQKKDLLDSIPALGKVTIPAILAELDDLNKFNHVGELVAFIGLAPKEMLSGSSIKGKPRLCKIGHARLRKALYMPALVSIQCNPVMIAFYNRLKDKGKNGKVIVCAIMRKLVHVIFGVLKSGKMYDPNFKPISA

SEQ ID NO: 210124 - protein, 352 aa, unidentified
MKISRVGIDLAKNVFQVHGVDGRGKVVWKRQLKRSNWLRVLVERIDTDCEIGMEACGGAHHWARELRSRGYQVKLMPPQFVKPYLKGNKNDASDASAICEAMGREDMTYVAMKTVEQQDIQAVHRVRASIMGRRTASSNQIRGLVAEYGLVAPKDLGPLRRAIPDWLEDAENGLTERFRRLLHELWTELLRLDERVVALDREIEVIAETHADAKRLLKLRGVGPLVATALVARFGDGSHFKRGRQAAASVGLTPRHHGTGGKNRIYGLSKEGDRYLRSILIHGARAVVSQAKRRDDRLSLWVTDLKERSHMNVAAVALANKTVRMAWSMLRNGTDYEPELAAGERYRGWVIA

SEQ ID NO: 210125 - protein, 403 aa, unidentified
MYQNTCITIDVSQNISHIQGFIGPNKPLCKARTMRHSNQGFQFILTLKDIIESKSNETPLIIFEFTGIYHKSLEKFLISQNLKYHIVAPLRAAKARNSEIREQKTDARDCLTLSKLFYTHSLGIFYSENQTYSSLRKLNRYYDTCMKHLIKIKVNFRETLAVIYPNYNKLFTSVYSDESLTFLKLFPHPSLYTSKSEDEILTILNEKWNHLESWSSSKVKKITPLVDETISGCSITEPETLILLSYITQIEYYLNQIKATIIKMNQLASKLPLYNLVHSLPGIQDILTCKFIAELGDISRFTNYKQIVAYAGIDPMIRQSGDKDGLHLKMSKKGNKRLRTILHLMVSSLIKANRKPNAIKTKYQKKTHQLNPLKPKVASMACANQLVRIIFYMHKTSSTYQYK

SEQ ID NO: 210126 - protein, 361 aa, unidentified
MTPGSSTRREKHVQYLGIDVHSAASVWCLLDDCGQQVATGRSDTTFPALRNLACELAADDELLAGQEVGTQAYLVHDAFTNAGVPIQSFNAAHLRMIAASRRKTDRRDAYWIARSLQAGMTPHPVYIATGEVREVRKLLNRRRIVQRDRNRWQYRARAMLRSHGLRTRTGGHYLRKYIDRLLEHPDGVHTELLESLGLCERFITMLGEELAHVDATLVCRTEGNEVIERLQTIPGVGHVVAVMLYATIGDIHRFPNARRLSAYAGLVPTVRQSGDSASHGRITKEGSKHLRAALVQAAHIVARSKSSEAEPLRKVFDRIRGTRGRRKIALVALARHLLRIAFHVWREGTAYDPDKVGCPTD

SEQ ID NO: 210127 - protein, 319 aa, unidentified
MNTTNQKHINSNDRNVGIDVGKATLDVCVYETDLHWQDSNTDEGVHRLVKRLKRYQLTRVLVEATGGYERRFVEAACEHDLPVIIVQPIQVRQFARAQGVFAKTDKMDARLIAEYGVKLQPPTKVLASKKVRLIKDLLARKRQLTAMRTMEINRHHKAAKHLCSSHRRLIKWLDNDIESVTVRLVKEVSGVEAWQHNKKIISSVPGIGDGVAYTLLGELPELGQLSNRQIAALCGLAPFNRDSGKMKGKRRIRGGRASIRTVLFIAMLSAIQHNSVVKQFYKHLVDQGKNKKVAITACMRKIITILNTMVRNDQEWQMN

SEQ ID NO: 210128 - protein, 360 aa, unidentified
MGVFGISATEHEEVPMPSIVGGLDIHRKQITFDYLDVVTGEMSCGQIAPADRAHLRAWLAGRFAEPAGVAFAVEACTGWRYVAEELAAAGVTVHLAEPADTATLRGRKKRAKTDRADARLQRDLLAQGRLPECWIPPAHVLECRALLECYYDLRREHTAWIQRVHAVLFHQGAPVFHDLSRADAPAELAALAASHLSRAGQAQAATCLRMLAVLEAELAAARRRLLAAARQLRGAKVLAESLYGVGPVTALALTCWLGGAGRFSSARKAVRFTGLDITVYSSDGKRTPGHLSRQGPPVLRWALYEAGKTHARPAAPDHPYYAQVKDRKDGKRAALSEARKIVRQACHILAELGDDALALV

SEQ ID NO: 210129 - protein, 374 aa, unidentified
MSTHDITFVGMDAHKKAINVAMLLPGKNEPVEWQVANESAAIKRLAKKLEREALGEVRCCYEAGPCGYVLMRQLEAAGGVVCEVVAPSLIPVKPGERIKTDRRDARKLARLLRSDDLTMVHPPTAADEAVRDLCRCREDARRDLLRTRHRLATFLLRRACLYTLTRRTWGQPYRAWLQGLKFEQAPDQVTLEDYVTGIEQLEQRLASLDQQLAALAEQAPYREPVAWLRCFRGIDTVTAIALVSELHDFRRFETARALMAYLGLVPSEYSSGEHRRQGAITKAGNTHVRRLLIEAAWHYRHRPHVGVGLRQRRQGQPSAIIAIADRAQHRLYHRFHKLMNRGKPSPKVVVAIARELVGFVWAALYPAASEGSAR

SEQ ID NO: 210130 - protein, 350 aa, unidentified
MMIIGCDYHPGFEQIAFVDTETGELQERRLEHREEAEKFYRDLAAQGMKVRVGMEASGHARWFERLLAELQFELWIGDAAAINAKRVRKQKTDRQDAQLILRLMLKDDFPQIWVPSWENRDLRQLLWHRHRMVQARTRIMNQLQAVALNEGLRCKKKLWREAGRGQLEAFKLAPWASQRRVDLLELLDRLNPTIGKLTQAIDMEVEKCPAARRLKTHPGVGSLTALAFVLIIGKADRFQCGKQIASYLGLVPLEKSSGNQRRLGHITKQGNSLLRFLLVEAAQVTVRSLPEWRSKYCHLTIRRGRKIAKVAMARKLAVRLYWMLRKEWDYEQLRKFGSYAGKPGHRDGVK

SEQ ID NO: 210131 - protein, 355 aa, unidentified
MNSIKYIGLDVHQSTISAAVLDREGKLIQQAILATHASAILDFFAGLRGELHVTCEEGTHSAWLYDLLARRVAKLVVCNPRKNALLKAGNKSDAIDAHKLAELLRAGLLSPVYHGQNSTQTVKQLGRSYSALTEDTTRTMGRLKALYRSQAIACRGQKPYGRRHRADYLEQLRGPGLRRRAERLYAQLDSLQQLRREARRDLILECRKHADARILRQVPLLGPIRVATLIGRVQTPHRFRSKRQFWAYCGLALETRSSADYQMVNGQLQRRTKPGFIRGLNLNHNHDLKNLFKSAATSASAHSGALREFYENLLRKGMKPELARLTLARKLAAITLHVWKKGERFDVNFVKPQAA

SEQ ID NO: 210132 - protein, 315 aa, unidentified
MSESKVEMFVGIDVSKATLEVRIEPPGESFQVANDDEGIKALCARVQKFDVTLIVMEATGGLEMRAASELGARGLPLAVVNPRQVRDFAKASGQLAKSDRIDTQVLCGFGRAIRPAARPIKDELTQQLDDLVTRRRQLVDMRVQETARLHSASKVQAKSLKAHIAWLDKRIKQIESDLGTSLRNSDAWRVKDDLLQSIPGVGEITSRSVLSRCPEIGQLTRRQIAKLVGIAPLNNDSGKHRGQRHIWGGRADVRSVLYMATVSAKRCNPVIRAFAEKLERAGKRYKVLMVACMRKLLTIMNAMIKDNTPWSPKTT

SEQ ID NO: 210133 - protein, 347 aa, unidentified
MNFYHSTHQYYCGIDLHARSLYVCILDQSNETLLHKEIPANPEALCRLIEPYRTDLVIGVECMHCWYWVADFCEDNGITFILGHALYMRAIHGGKTKNDRIDSYKIAALMRGGNFPLAYVYPRVMRATRDLLRRRTHIVRHGAELKAHVINTTSQYNLPPNKVNLKTAGARKQLRSTFDQPEVQRNIDLDMTILDCYSQELYRLERFIEQQAKQHNPLYLQVLRTVPGIGRVLALTILYEIGDIQRFDSVQKFASYARLVKCKAESTGKSYGTQGNKIGNAHLKWAFSEAAVLYLKGNPKAQRYLQRLQKRMSKAKALSALAHKLGRAVYFMLKNGTVFNEQRFLAG

SEQ ID NO: 210134 - protein, 408 aa, unidentified
MKVIWQRCAGLDVHKATVVACLRVQQGREVRHEVRRFSTMTQDLLALGDWLDGQGCTHVGMEATGVYWKPVWHLLEGRVELVLANAAHIRNVPGRKSDTNDATWIADLLAHGLIRSSFVPPEPIQELRELTRTRKQLTREIVAHTQRIQRVLEEANVKLDSVISNVLGVSGRRMLRAMIDGQTDPRVLAALGSPRLECSSKALVEALRGRVTAHHRFLLGQHLGLIEQLERTVAAFDAQLERVIQPFRGIVQRLTTIPGISRVSAQGLVAEIGVEMERFPTVGHLVSWAGLCPRLDESAGKHRSTRVRKASCWLKPMLVQCAWAAMRSKDTYLQAQYLRLKARRGPKKAVVAVAASILTAAYHLIRDGQEYRDLGHDYFTRRDSDRVAQRLAKRIRELGYEVQIIKAA

SEQ ID NO: 210135 - protein, 403 aa, unidentified
MDTTVSDFMKGRYNLMIYVGIDIAKLNHFAAAISSDGEILIEPFKFTNDYDGFYLLLSKLAPLDQNSIIIGLESTAHYGDNLVRFLISKDFKVCVLNPIQTSSMRKNNVRKTKTDKVDTFVIAKTLMMQDSLRFMTLDDLDYIELKELGRFRQKLVKQRTRLKIQLTSYVDQVFPELQYFFKSGLHQNSVYALLKEAPTPTAIASMHMTHLAHLLEVASHGHFGKEKARELRVLAQKSVGVNDSSLSIQITHTIEQIELLDSQLFHTELEMANLVTCLHSVIMTIPGIGFINGGMILGEIGDIHRFSEPKKLLAFAGLDPSVHQSGNFQAQRTRMSKRGSRVLRYALINAAHNVVKNNATFKAYYDAKRAEGRTHYNALGHCAGKLVRVIWKMLTDEVEFNLE

SEQ ID NO: 210136 - protein, 314 aa, unidentified
MAVLRPGQEIPVVDRIPADEESVRRLIARCPDRRLLSACYEAGPGGYELHRLLTSMGVACDVVAPSLIPKGASDRVKTDRRDSVRLALTHRAGLLTPVRVPSPAEEAVRDLVRARGDLLDDRKRMQQRLNAMLLRHGRIWRGGKKWGYAHRAWVDRQVFDEPALAEAFSLYRGGLEAREAELAAAGARLAAWAAREPLAGPVARLGGYRGIAQLTGLTLAAEVVDWRRFASARAFMGFAGLIPTEYSSGSRSRRGHITKAGPEGCAPPWSRRRGPTGTGRRSGPRSGAGRPACRRRRWPGRGRRSSGCTPSTRR

SEQ ID NO: 210137 - protein, 342 aa, unidentified
MEYYAGIDVSLECSSVCVVDASGKIIREGKVASEPDALISWLKSRGYELIRVGLEAGPLSQWLFAAMREAGLAVELLETRHVRKAFEAMPVKSDRNDARGIAQLMRLGWFRPVHCKSMGAQEVRAVLTARKLIQTKLQDVENSLRGILRGFGLKVGKTTDRSFSGRIQELVKGQPSLEAIGEALLSVRAGLLREFNAFEKRVRAMARLNARTRLLMSTPAVGPIVALTYASAIDDPARFKSSKQTGPHFGLTPKRYQSGETDYSGRISKVGDASVREALYQAAHVMLTKPVKGCPQLKSWAMRIARRAGMSKAKVALARKLAVILHRMLANGTPFNAAAAAA

SEQ ID NO: 210138 - protein, 416 aa, unidentified
MHQAAANELPLNELRVAVDIGSTRHRVAIGGGNGKLIDEFDITHDGPGIADFFARIARHEKRQAATAVHVAMEGYGGYARPLDARVLTRGWHLYNVNNLKLARFKEIFPAPAKTDAIDARRMLELFSLRERVPMARAVLQEIAPVGESEERLKALTRRRKQLVEDRMRVSMRMQADLQAACPGLLAITGQADNLWFLSLLSLRDDLVKLQGLRQTTLLAVPGIGKRYAAKVRDWQAEAIFSPGADYLGPMIIADARHMLELRAQILALEAQIEQLSQASAMAQRIRTIPGFGLISAAELAGEIGSIDRFAKADSLAMYLGSAPLDHSSGKRNASKVPRQINFRARDALMIATVHHVAAVPASKAYFEKKRAAGKTHQQAVRATARILAKVLFSMLKHDKDYQPRFASDPLPHADAA

SEQ ID NO: 210139 - protein, 334 aa, unidentified
MYRIIKIGMDVHSKNYTLCAMEPLIGEEDRIFANIQVTADYKNILMFIEQLKMKLGMSDEYDIQCGYEAGCLGYSLYNQLTAAGVKCVILAPTTMLTQQGKRVKTDARDALMIAQCLSYGGYHAVYIPTQEDDSVKEYLRMRDDHKEALKKIKQQINALCLRHGHHYEGTTWTIKHVTWLRKLELPSLYRETLDEYMASFDEQTAKIERFDQRIEELSSQEQYWEKVKKLCCFLGIKTHTALSLIVETGDFSRFAKGNTYAAFLGLAPGEHSSGEKTNRTGISKAGNRHLRQLLIEASRGICKGAVGHKSKELRARQNGNTAEVIEYAEIPNTR

SEQ ID NO: 210140 - protein, 345 aa, unidentified
MNKISVIGLDLAKNVFQVHGINLNGEVVVRKQLKRSQIRQFFAKLEPCLIGMEACGGAHYWSRELTGLGHTVRMMAPIFVKPYLKSNKNDRNDAEAICEAVQRPSMRFVQPKTPEQQAVLHLHHGRRLLVRQRIALSNHMRGVLSEYGIVLPQGAKAILQRLPELLEDADNDLPMLARHLLAELKAEHNQLIERIERIEARIKDWHANNNVSQRLASIPGIGVLTASALAATVGEGQDFRNGRQLAAYLGLVPRQLSSGGKERLLGISKRGDSYLRGLLIHGARAVIYHIQRRLKASQPGGNPWVEQLLLRCHPNEVAVALANKMARIAWVLMARNETGCAAQSV

SEQ ID NO: 210141 - protein, 356 aa, unidentified
MEQLTTVGLDLAKDVIAACVLDVHGVVIERRVLRRGAFERWAEQLPSCKVAMEACGSAHHWGRWFAAHGHTALLIAAEFVVPFRKGGKNDTADAEAVAIAARQPTMRFVPIKTVDQQAILAWHSVREGWKEERTALLNRVRGLLAEFGIVIGRSSDRLLTELPRLTEDSRLPDAIRAMLLEAREQFVALHARLARCDAKIAAHARNSSAAQRASELLGVGPVTASALAATVPDAKVFKSGRQFGAWLGLTPRQHSSGGRTRLGRISLRGNVYLRTLLIQGARSTLQSAINAEPSRASRLQRWIIELYGRKGYHKTLIAIANKHARILWAMLAKDERYDAAAWQRHPMHELLLAGNA

SEQ ID NO: 210142 - protein, 430 aa, unidentified
MISPSPCLAPDASVFAAFVGLDWADQKHDVMLYDQRGGEAERSQLTHTPEAIEEWACGLRQRFGGRPIAVCFEQSRGAIAYALLKYDFLMLFPLPPARLAAYRESFSNSGAKDDPTDAALLLDYVLRHRDQVRVWQPDTPATRELQLLAEARRDAVDQRTRFSNQLTAVLKRYFPQALALVGCDVDTPLACDFLAKWPTLAAVQATAPSTLRKFYYAHRCRQEERIAERLQLARAAVPLTNDVALIQAGVLQVQYLVGQLRAIIRAIKNFEARLEQLMDEHPDAGFFLALPGAGAALAPRLLVAFGSDRERFQTAAELQTLSGVAPVTKRSGKRCTIHRRWACPKFLLQTFHEFAKCSCKKSTWAKAFYLQQRSHGKGHHAALRSLAFKWIRVLFRCWKTKTPYSEERYLQSLQRRNAPLLAFLSAPAGA

SEQ ID NO: 210143 - protein, 343 aa, unidentified
MNVMIGVDPHKGSHTATMLDRDERELKRIRVRASAGQVAELVAWADGVKARTWAVESAQGMGYLLAQQLVAAGETVLDVPATLASRVRVLGSGRSTKTDPNDARAVAVAALRAPSLPVVHTADHTVVCRLVVRRHGDLARWRNKLCCRLHALVAELVAGGIAKEVVVNQARSLLENITPDTPAGWERHRQAHELTAEIAELDHLLHETRARVATAVTASGTTLTEIFGIGPVIAAMLIGYSGDPTRFTTPGRYAAYTGTAPVEFSSGGRVVHRLSRRGNRRLNHAIHMAAVTQIRHRHSPGRGYYERKLEQGHTPREALRVLKRRLSDVIWRHLTADARAAGQ

SEQ ID NO: 210144 - protein, 321 aa, unidentified
MFMDSTSHAFVGIDVAKDSLDVCLLPTERQFTVTNDPDGFGQLVRQLPAAGSCLVVVEATGGYQRPLVAALVAAGHRVAVVNPRQVRDFARGLGILAKTDRLDARVIARFGQQAEPRPIELGSEKQAELAQLVTRRRQLVEFRTAEQNRLETATAKTVRKNIRHMIDQLDRQIRQLEEQISKLLQSDPQLASKAALLQTVPGVGTVTITSLLVDVPELGRLGRQQIAALVGVAPFNRDSGKFHGRRAIWGGRAAVRSVLYMAALTARRCNSVIREFANRLEAAGKPFKVVLTACMRKLLVILNTMVKFGLPWNPTRQPRGG

SEQ ID NO: 210145 - protein, 359 aa, unidentified
MERKIKELNFSGQKIFIGIDVHLTSWKVTIMLEDTPFKTFSQDPDAKTLRNYLDKNFPEGEYFSAYEAGFCGFSVHRNLESNGIKNIVVNPADIPTTDKEKKQKEDQRDSRKIARSLKNGQLDAIYVPSRKMEEFRGLVRYRKSLVKEISRNKARVKAFLHHNGIDIPFELNSSSQHWSSNFTKWLETINLTTDFGHIVLQKTLETINHLRKTLLSVTKDLKRIVAQNEKYSTLINNLKSIPGIGFVVALTILTEIEDINRFKNLDCFCSFIGLVPSTNSSGDQDRTGNITRRSNKPLRGVLIESAWVAIRSDSSMSLAYSNLCKRMKPTRAIIRVTKKMLNRIRFVLINNKEYGYEKV

SEQ ID NO: 210146 - protein, 416 aa, unidentified
MPPSSYAFYVGIDWGSERHHVCVLDPERRMQGERTVEHSGPGLAALADWLVAFAPSEPERVAVALEVPRGALVDILLSRGVHVFAINPKQLDRFRDRHSVAGAKDDRRDAWVAAEALRTDGWAFRQLEADHPLIIQLREVTRLDEDLQQELTRLANRLRDQLLRYYPAVLRLAPAANELWLWALLELAPTPAVGAQLPRARVARLLERHHLRRHTPDEVLAALRAPALQLTSGTVEAAVRHVTLLLPRLRLVHAQRADCAAHIDRLLAALQTEIPPGPHREHHDVEILCSLPGVGRLVAATVLAEAAPLLAARAYHGLRTLAGCAPVTRQSGKFRGVRMRYGCNHRLQHATYHWARVSAQCDPHSRAHYTTLRQHGHSHPRALRGVADRLLAIFVAMLKTDTLYDATRPRRRELAA

SEQ ID NO: 210147 - protein, 385 aa, unidentified
MQASNVSTPIADHTGTIFVAIELSKRSWLVTMHSPDRKRFSRHGVDGGDASKLLGLIECIRRRATQALGSQPRVVSCYEAGFEGFWLHRRLMAQGITNFVFDPASIAVDQRARRAKTDRIDGELLLRTLMAYCRGEPRVVRIVRVPSPEQEDARRATRERERLIQEQTGHTNRIKSLLRLWGVAAGHPRRRDWVSWLKAQRDGNGRPLQPRQVAELTREHARLMLVGEQLRELGEQASQAPASADAAEMVRRSAMLERLKSLGAVFAASLTNEAFYKDFHNRREVAGYFGLAPSPWCSGGTNREQGISKAGNPRARAKAIELAWLWLKHQPDSALSRWFRERTAHGRGRIRRIAIVALARKLMVALWRFLTTGLVPEGAVLKAAA

SEQ ID NO: 210148 - protein, 428 aa, unidentified
MTQSIYTTENQVLVAIDIAKASNDVLIQWPDGRKRKFKVANRLQDYKDFVSYLKSLGIPCLIGFEATGNYHRPLAYCLVKEGFSVRQVSSLAAARTREALYNSWDKNDPKDAQVILHMLRTGVSQTYCDPMIHNFNDEQELSKTYYQISLQKVKVQHSMFTHYLPLYFPEAQKYFHCSRAEWFSSFLLRFPVPAAVLKYTKEEFIAAAWDTTGRKVNKTAWLTDFYETAKQSIGIPISEDSQAIKMFRLILQEHVDLCKMRQQIEQQADRYMEQNEDYRRLQHIPGIGPIIALIILAEVGDIRRFSHYKKFLKYCGLNLSTEQSGRFRGITRLSKRGNSRLRTAFWLAATVAIRMRENTFRQKYENYIRMDPTNKDLKRKAYTAVAAKVARVVYSTMKFGTDYRCLYESAVPSGKIPSHRAVEALLTS

SEQ ID NO: 210149 - protein, 414 aa, unidentified
MQTNQCVAGIDVHKKMLAVVVGRVQERTLDVERAKFGTTTRDLKLLSDWLQACGVEDVVMESTGQYHKPVWLQLEEQFRLHLAQAQSNRGPKGRKRDFADALRLIKRFLSEDLILSYVPDAEQRLWRRLTRTKVSLGDQRKRLQSQVEGLLEEMMIKLSSVVSDLFGLSGRRMLAAIAAGEQDPVKLASLGDDRLKASEEQLQEALTGRVRSVHRMLLGLYLKQVELIDEQIAALEREISQVMLPYKSNIERLGEIPGLGADSAQQIIAEMGPEAAAFPSAGQAASWVGVCPGREESAGESHNNRSPKGNRPMRRLLNQLAWAAVRTKGSYFQDLFRRLVVRKGPKVAIWAIAHRLLRLIWKVLHQKVHYLEHGPRGSYPQAIQKRKRALVRQLQRLGYSVQINPIQDTARAEG

SEQ ID NO: 210150 - protein, 343 aa, unidentified
MDATTVGIDLAKNVFEIALADERGHIVDRQRLSRARFDRFFDNRATCRIVMEACGSAHHHARRLSSQGHSVVLLPAQYARAYVRRNKTDAADAAALIEASRCPDIRPVPIKSVDQQAIQQLHRLRSQWTAARTSRINFLRGCLREFGVSIPVGAKRAIQAVRDTLSSCNGAVPALLHSSLLELLAEIDALEQRCKQIDRDLARLNENDPVVERLLQIPGVGPLTATALRASVVDVERFSSARHFASWLGLTSREHSSGERRRLGRISKQGDPYLRTLLIHGARAVLLAARSSQRRGSSLDRLRTWALDLQERRGHNKAAVALANKLARIVWATWRFERDFSSN

SEQ ID NO: 210151 - protein, 315 aa, unidentified
MTNLTKSKSVVNVGIDVGKFELDVCIYEKQIHWRDENTEDGVKRILKRLAYYHIERIVMEATGRYEFKLAQAAYLKNIPVCIVKPLRVRRFAGAIEQLAKTDKLDAELIAEFAAKVKPEVTPKKSKNLIAIKELIARRRQLMTMRTQELNRAQTADKSLDSSYKRLLKTFDQEIKRIENRLSKHVEAQTEWTEKQLILKSAPGVGDTLVFTLLADLPELGSLNRKQVSKLVGVAPINRDSGKMKGKRRVQGGRHSVRTILYMATLSATQCNPVIKDFYQQLVAQGKHKKVALTACMRKFITMLNAMVRDKCEWAY

SEQ ID NO: 210152 - protein, 394 aa, unidentified
MFYLGIDQHKAQITIDLRNEQGDIILQRQVSTDHAKIDEFFVALKKQTARTKGFMAILEVCGFNDWLIKKLNDYGCKEIVLMQPDKTSNKKTDRRDATALCELLWNNRKRLQNGERPNGIRRVVLPKPEEAAVRQAAHLRQHLVRQRTKCINKIRSVLRKHNMEQDCPSKQYKTKKAKEWLKTLKFTEQIDRMEIDVHLKIWETLDEQILKLEHEMAKQAETNEDVMLLISIPGITAMGAITLLSRIGDIERFQTPDSLANYFGLTPGCRNSGETNRSGSITKAGSQIARHVLNFAVIHAVRKDKAMRDWHKSIKKRRGAKIARVAVMRKLATTVWHILKRQTTFQFRFDPMTKPKKKSASGFLRDGNNAVRVVKNKITKTPSPPKRQTKAKSP

SEQ ID NO: 210153 - protein, 355 aa, unidentified
MSQEKYIGMDVHQATISVAVMDASGKLIMECLLETKAATIVEFIQGLHGTLSLTFEEGTSAAWLHDLLKPHVNRLVVCDPRKAALLKDGNKSDRIDARKLAEMLRTNQLKPVYHGEHGIRTLKELGRSYLTITKDVTRSMNRIKALYRSWAIPCAGTSVYAPSHRAEWLAKIEQPGVRVRAERLYQQLDSLQPVRLQARCELLRESHQHAAVQLLRQIPSIGPIRSALLVALLQTPHRFRTKRQLWAYSGFAVETHDSGEYRSVRGKLQRNRERITLRGLNDNHNKDLKNLFKSAAISASTRPGPLQDFYVALVAKGIRPTMARLTLARKIAAITLTMWKKGVSFDPKQLNRQAA

SEQ ID NO: 210154 - protein, 329 aa, unidentified
MSEHPTTPIIFGADVGSTEIVIACADSNQAVKTIANNRREIEAWLAHLPGNSIIGMEATGRYHCTLADCAAQRGFRVYVINPKRLSLYAKGVGQRGKTDPLDARVIARYVVREGDRLHPYAIPTAVQRTLRNLLTQRANIVRHCGAIRQCLLATESIDSQTLKRAHKKALQSLQNLIAEIDIQLRKTVKQDAALEQKCMKLQTIIGVGPLNALALTHRFDRTPFANSDAVVAAYGLDPRPKDSGNKVGRRCLTKQGNAEDRRLIYLAAQSAAKTKTFRPMYVALRAKGFATTEAIVVIARKLLCVAFAVWTSNQPFNPEKLGFQACRKP

SEQ ID NO: 210155 - protein, 340 aa, unidentified
MEEVSIIGIDLAKRSFQLHGAAADGSVAFRKKLSRARLLGFLAAHPKCKVAMEACAGAHYWGRQIVALGHEVRLVPPIYVKPFVKRQKNDAADAEAITEAAQRPTMHFVAVKTEVQQAQGMLFRTRDLLVRQRTQTINALRGHLAEYGVVAPQGRARIRQLAGVLEDGACGLPEAVVELGWLLLGRIDEADEKIERLDRKIRSSARELEETVRLMTIPGIGPITALALQAYAPPMESFRRGRDFSAWLGLVPRQHTTGGKPRLGKISKMGQRDLRRLLITGAMTVVRHASRGGENTDPWLAGMLERKPKKVVAVALANRMARRVWVLATRKETYRAHAAA

SEQ ID NO: 210156 - protein, 336 aa, unidentified
MDIIKQVVGVDVSKDTLAVCYGTADLQQNQEITEPVTFTNNPNGFQELMSFAKKKRGQLKAALYFVMEATGVYYENLAYFLNEKHQKVIVLLPNKAKNYSKTLSIKSKTDPLDAKMLTQFGLERQMQPWSVPSPLMKAIKTLSREYQSKKDLASKIKNQMHAEEYSHKPLKESLKRNRAILFFIEKQLMEIELQIKELVIQDDDLNDRINKVDKIEGVGFMTIVSIISETNGFALIENAKQLASYAGLDVVYNESGIKRHKTTISKKGNKHLRKAIYMPAISACKYNPKLKAVYSRIVSRRGVKKIALIAVARKLLLLIYTIFTKNVEYIPDYKPA

SEQ ID NO: 210157 - protein, 455 aa, unidentified
MKHEPEEIPDAEHELVIERVAAVDVAKASGKVCVRVPGKAGRRVSRVWDVAATTAAVTELAEDLVELGVERVTVESTSDYWRIWYYLLEAAGLEVQLVNARDVKHVPGRAKTDKLDAVWLAKLTEKGLLRPSFVPPAPIRRLRDYTRLRTDLTHDRSRQVQRLEKLLEDALIKLSTVATDIIGVSGRAMIEALLAGQRDAKVLAGLARGRMKTKRAALIEALSGRFDDHHAELARMLLDQIDALTAQIDTLTARIEQLLAAMPEAQPVDPRRDGPTSGHPVGVTADTLAECARLTTVERLDEIAGIGEHNAQVIIAEIGLDMIRFPTPAHLVSWAKLCPRTIQSGPVTRGGRTGKGNPYLKGVLGDAAAAAAKTSTFLGERYRRIVKRRGKLKALVAVARSILVIVWNLLNDPTARFHDLGPDYHTNRIATERRMRNHIAQLTAMGYRVTLEPAA

SEQ ID NO: 210158 - protein, 339 aa, unidentified
MSIIGCDLHSRYQVIALVETETGEMVTRRLEHENGEARAFYTTLPKPSLIGTEATGYTQWFERLVAELGHELWVGDPAEIRARAVRRQKTDTRDAEHLLDLLLTKRFPRVWVPTPEERDVRQLLKHRDKLVRMQTSVRNQLHFLAMSQGVCRKQKLWSARGRAELEGLSLGPWASQRRKELLELLDGLRPRIAELDQAVKAEAERRPEAVELMKHKGVGPVTALAFVLTVGPVERFANSRKLVSYLGLNPGEDSSGGHQRLGHISKQGNQMLRWLLVEAGHSAAQFDPELRRKYQRLVFRRGRNVAKVALARHLTVRLYWTLRQASSATLPAHTPGSPR

SEQ ID NO: 210159 - protein, 414 aa, unidentified
MVWGRRRGMVHHRRWKQPMERTMQQSNDQSRSLVALEQDSTLIAVIEMSQSSWLVTAIVPGVTREPLKQLAPEPDLLRRQLQRWGEQARKAGCPIKRVTVAFEAGRDGFWLARWLRAREVEAHVIHPTSVAVSREHRRAKTDRLDLRLLRRAFLGWLRGEAAHCRMAAVPSLQAEDARRPSRERETLAGETTRIVNRLKGALARLGIRGFKPTLRGAAARLAELRTPEGAPVPANSLAELRRDMARLRLVKEQIKEIEAARLERLERAPASEPHAMVRLLARVHGLGIETADMLVHEVLTRRLRDRRAVARFAGLTGSPDESGKRRREQGLARAGSARVRRGMIQLAWRFLMFQKDSELAKWFATRTQNTKGARKTMIVALARKLLIALWRLATTGVVPAGVVLRAEPHAAGQA

SEQ ID NO: 210160 - protein, 351 aa, unidentified
MLIIGCDFHPGFQQVAIFDNRTGELQERRLPHREEAEQFYRSLSGAVRVGMEACGHYPWFERLLQELGFELWLGDAAEVRASVVRKQKTDRRDAEHLLHLLLENRFPKIWVPSLEVRDGRQLRVHRHKQVQARTRTKNQLQAMALSQGVQKKWKLWTKLGRAELEQLPLLPYAAERRQRLLETLDGLEADLVELNRQVEEEVRKRPEAMRLRTHPGVGPVTALAMVLTLGPAERFASGKEVGSYFGLIPREDSSGGKQRLGKISKQGSSFLRFLLVEAGPTAARYDPQLKRFYRRLAMRKHRGVAKVAVARKLATRLYLMLREQWTYPQLCQAVMQVSPSHSVVEPEKPTA

SEQ ID NO: 210161 - protein, 341 aa, unidentified
MMIIGCDFHPRFQQIAFIDQETGEFGERRLSHPDEAEEFYRSLAGRQVRIGAESTGNFRWFRRLMEELGHEFLLGDPSTIRAASPRRQKTDKRDARHILNMLVEDRFPAVWQPPVENEDMRQLLLHRCRMVRMRTRIKNQLDAMAKNEGLLSKRVWCAMRRQQIEALPLSGWNVERRRDLLALLEELNKRIEPLDEAVLKAAEENPEARCLMTHPGVGPVVSLFYVLTIGDWQRFPRGKHVASYLGLIPAEESSSDKRRLGHISKQGNTLLRWLLVEAASKAQSSDPSWHRQYVRLSMNKRHGVAKVAIAHKLAVRLYWMLRSGQNYKQVMERGSHAGQSV

SEQ ID NO: 210162 - protein, 313 aa, unidentified
MKAEKKVFVGVDVSKETLDIALGKNGEYKVIRNNLKAIRKFVSSHSPEDIALVVVESTGGLEQKLLEELASASIPVALVNPSRARNFARSTGQYAKTDQLDARILAEYGEKVELRLYRVPSADERRLSDLTTRRSQLLEMIVAEKNRYQAMPRLQEKLQKHLDWLREELEETNTEIKELLESSPQWKEKRDILTSCKGVGEVTAFTLLAELPELGEVNRKEIASLVGVAPLNRDSGKRSRKRTTYGGRSKVRTVLYMATMSAIRFNPALKKFYNRLIENGKKKMVAIVAAMRKLLTILNAMIKNKQLWQAPTP

SEQ ID NO: 210163 - protein, 346 aa, unidentified
MEYIALDVHKNYTWARVENPQGERVYESRLAHRHGTIKNFVRRWSSGSVVAVETVGNWYWVVDEIELGGGKPQLVNARLAKLMMGNANKSDKLDCKGMNRLQRTGTLPTVWIAPSRVRDTRELPRTRMVLSRQRTQLKNRVHATLAKYGYRVEGASDAFGKHGRQIVQELLSKLPPHTEQALRRILDQLDHVTENLKGIEGQMVEVFSPCPQTQWLKSLPGVGDILAVVIWTEIGIVERFGSAEQFASYCGLVPRENSSGGKIRFGAVRRDVNVYLKWGFVEAANSSVLNRERCGYDHISRLYQPIKSRRGHGKAKVAVARHLSEACFWMLKKGEPYREPMPSTQR

SEQ ID NO: 210164 - protein, 348 aa, unidentified
MALTIVETRAITGGVDTHADTHVAAALDPIGGLLGVREFPVTPAGYAGLLDWLGGFGTVALVGIEGTGSYGAGLARHVAAAGVRVVEIDRSDRQDRRRQGKSDPLDAVSAARAAQSGRACGAPKGRDGAVEAIRALMVARRSAAGGRTQTINQARALILTGPDDLRARFTRHTPAALVAGMTALRPRPGDVTGYATRIALRELGRRAEFLDGQLERPGELIVPLVTARAPGLLALYGIGPHTAALLLIAAGDHPGRLRSEAAWAHLCAAAPIPASSGKVTRHRLNPGGDRQANHALWRIVFTRMGSDAATRAYVERRTSEGKSKPEIIRCLKRYVAREVYPHLRPPAG

SEQ ID NO: 210165 - protein, 431 aa, unidentified
MNNQLLSTLFVGIDVSLRSHYAVILDFFGNQLDAFPFRNNLSGAKVVTEKITAAATNANATHVVVAMESTSFYSFHICNYLFSDSTLAALCPKVYCLNPKITSAYQKTFVDEDKSDPGDAYGIADFARCGKIKSEPFNGSAFVALQRLTRARLHLVESLAREKSYVLTNIFIKFSELAVLNPRDKEDSLFSNRFGATGVAVLTDYLSPDEIAYAPLGELIDFLCEKGKNHFPDPQAKAKLLQRAARDSYRLDKAQYEPLNAAIAASFNCIKAFEKEIKTIDAAIEKAVKGLSDNGYRCLLSVHGFGSVLSAGIIAEIGFIDRFSSEAKLAKFAGLTWRKKQSGNLTSDITYMTKSGNKYLRYYIGEAVMSLLKNHNLEYTAFYQKKRSEATRFQHKRALALTSRKLVRLIYALLRNNQLYTKSKGDVALAN

SEQ ID NO: 210166 - protein, 451 aa, unidentified
MRKPRVIPDEDHEVVYERVAAVDVAKASGVVCMRLPDPARPGRYSNQIWDNVPAARARITELGRELLRHQVQMVTLESTSDYWRIWYYVLESIGLALQLVSASQARNLKGRPKTDKLDAMWLARLTQWGMLRPSFVPPAAIRQVRDFTRARTDLVHERTRCLQRLEKLLEDAMVKITSVVSDGMKAKSAVAMVAALVAGERDPRTIADLAKGSLRGKRDALAEALDGMFDSHHGVIAQALLDQVAFLDQRITQMEAGAIAALAQVEQSWGVDVTGETGPARGTGPDSRVLAAVYRLAEIPGVSVWLAIVIIAEIGLNMALFPTPAHLVSWVGLCRSAAQSGTRRGKGKPKKGNSYARAAAGQAAIGTAGTATFLGERYARIARRRGGAIAQVAVARSIMIIVWHLLAARYRDLGPDWHASHVNRDKKIRNHIRGLQALGLTVTVADDEHAA

SEQ ID NO: 210167 - protein, 453 aa, unidentified
MTSKKIKKKGARTPSALVAINRLAAGVDIGSRFHVVAVPADMDAEPVRSFQSFTGDLNRLADWLAGLGITTVAMESTGIYWVPVFEILEARGLEVVLVNARDAKNVPGRKTDVNDAQWIQQLHTYGLLRASFRPGAAIVALRAYMRHRERMLEYAASHVQHMQKALMQMNLQLHHVVSDITGVTGMRILRAIVSGERDAEVLVTFRDVRCKSSVETIREALTGNYQPEHVFALRQAIELYDAYQTKVQDCDAEIERCLRALPTDAAASPPPPPRSRASQKNEPAFDVRPVLHALLGVDLTQINGIGPYSALRIIAECGTDMSRWRTAKHFTSWLTLAPGSKISGGKVLSSRTRRSTNRAAVLLRLAATSVGRTDTALGAFFRRLAVRAGKAKAVTATARKIAVLIYNTLRHGMAYVDPGADYYEERYRKRTIDNLRRRADALGFSLVQASTPG

SEQ ID NO: 210168 - protein, 345 aa, unidentified
MYRTKVGVDLAKEVIQVCIYRNKKVQSNIEMTPNEFLCWLVNAKPVTIIFEACGTSNYWKQKAISAGHDARLISAKLVATVRQNQKTDKNDALAIVQAASLPDVIFIGGKTVEQQQLQTIKRLRELAVKHQGACQKQLVSLLLELNIRISNRKGGIISAIDGVLEDATNGLSAECRIAIDTAKVYLKVSIEAVQHYDDCLEKSVTTHADCKKLLKLEGVGTMNAINLYLALGCSDIGVFSKGKDASACIGLTPIQHSSGGFVKLGSIGKHCKNSMLRSQLICGAMAAVNQAVIREAKTRKDVWLKGLVERRGKKCAAVALANKTVRTAFAMLTQGTEYKAELLVA

SEQ ID NO: 210169 - protein, 370 aa, unidentified
MKVTRIGLDIAKQIYELHGVDRRGRVVVRKTLRRERVLEYFSQLPACEVALEACGGARYWQREIGKLGHTVRLLPTNKVKPYLDGNKNNAHDAAAICEASSRPSMRWVEPKTIAQQDLQSLHRVRQVTVRQSTLLANHSRGLLLEYGIAVARGAAALQRARAELLEPDEQRLSPLLKQLLAAQWRMLKLHQQQVKVHHRRISSIAQHDAGCRALLKVEGIGPLTATALVAAAGNGRQFKNGRHLSAYLGLGPGHSNSGNKTVMLPITKRGNRYVRTLLVHGARATLYHARKKADPRSLWLQRLQAQRGHNVAAVALANKNARLAWALLRFGQAYRPNLAHAPTAERGATPCTARLPPIQNPAFFRPALKG

SEQ ID NO: 210170 - protein, 462 aa, unidentified
MNRNRSKSRVDRTMPMVHPNAAAIDIGATMHMVAVRADRTPEPVRSFGTFTADLHRLVDWFTECGVETVVMESTSVYWIPIFELLDARGFTVFLVNARDAKHVPGRKTDVSDAQWLQRLHSFGLLRASFRPKGQIAELRAYVRQRERLLEYAASHIQHMQKALTEMNLQLHHVVADITGATGLRIIRAILAGERDPETLAGLRHYSCHSSAETIAKALTGSYRAEHLFALEQALALYNAYHEKASACDVRIEAVLKELSIHRGRGHGSVPPTSRRRNRTDQANALAFDVRAALFALLGKDITAIDGLGPYLSLKLIAECGDDLSSWPSAKHFTSWLGLAPSNKISGGKILSSRTRRSGGRAAALLRLAAVTVGRTDTALGAFYRRLSSRIGKAKAVTATARKVAVLFYNAVRHGMEYVDPGASSYETRYRARVVNNLHRRAKAFGFVLQPVEPKADAGAAVS

SEQ ID NO: 210171 - protein, 342 aa, unidentified
MQISTIGLDIAKNVFQVHGIDAAEKVVVRKRLRRRQVLEFFKALPPCLIGMEACATAHHWARELTKLGHRVRLMPAKDVKAYVKRNKNDTADAEAICEAVRRPTMRFVQIKSAEQQGRLMLHRTRDLLMRQRTQVINALRAHLAELGIVAAQGREGIKELLNIIASEHDARLPVDAHTSLVVLAAALRAMQTLIGSIEKRIMAQHRGNEASQRLESIPGIGVIGATAIAATVPDPKVFRSGRDFAAWIGIVPREDSTGGKQKLGPISKQGDRYLRRILVVGACAVLRYARHRPEKYPWLTQLLARKPFKVVAVALANKMARTAWALLAKGGTYRAPALAAAA

SEQ ID NO: 210172 - protein, 408 aa, unidentified
MNPLYVGIDVSSKSNVVYLMLPDGSKYSNFSVANSHDGSTQLVKHILSAITSHSLDTVIIGLEATSVYGDNLVYFLREDATLAQFDKKIHVLNPKQVKNFKEAYNDLPKNDYVDSYVIADCLRFGRINKEVYQGDYRYKALQNLTRARFFAVQNLVKEKQRFINVLFKKYSTMTQEKVFSDTFSTTALAVYEEFESAEALASMDLQELTDFIMEKGKKRFPDPDAVAKAIQKAARSSYRLPKTVNDSVNQLLSISITSIKALDAQIKEFDKAIKAQMELLPNVLTSIPGIGPVYSAGIIAEIGDINRFPSQAQLGKYAGLAWTQNQSGDFEAENTKLIKSGNRFLKYYLCEGALSLVRCDTEYSNFYHSKYKEVNRHQHKRALALTARKFVRLVFRLLKDNRLYRAAE

SEQ ID NO: 210173 - protein, 328 aa, unidentified
MIMLGIDVSKTKIDCCIFPQGLTGKRKNKIFTNTESGFGSLLKWLITLKIEPDQVTAIMEATSVYHENLGYYLYDAGVKVCVANPSRVRAFAKGMSMLNKTDKADSEALSRYGYTAKLIIWQPEPENVRLLKALLGRRDVYLGSLLQEKNRLEKAQSTHTSVVVIKLLEENIEYLNQQLENIDKLINNHIDQDPTLKQDLKLLQTIPSIGERSGLLLLGLFHSHKFEKASQAAAYVGLVPVHQLSGSSVNKQSHLSKAGDSKIRSVLYMSALTAIKYNPHIEALYQRLLSQGKNKMCALGAAMRKLIHLCYGVLKHQTAYQRDYLLVE

SEQ ID NO: 210174 - protein, 347 aa, unidentified
MTIVEDARVITGGVDTHADLHVAAALDRIGGLLGVQEFPATAAGYASLLGWLSGFGDIALVGVEGTGSYGAGLARHLAAAGVRVVEVDRADRQDRHRQGKSDPLDAVSAARAAQSGRASGAPKGRDGAVEAVRALMVAKRSARHERTQAINQARALIMTGPDELRARLAGHTPAALAAAIAALRPRPGGVPGYATQVALRELGRRVQFLDAQLHRLGELIGPLVTARAPGLLALHGVGPDTAALLLVAAGDHPERLRSESSWAHLCGVAPIPASSGKVAGRYRLNRGGNREANQALWRIVITRMRSDPATRAYVERRTKEGLSKREIIRCLKRYVAREVYRHLRDGA

SEQ ID NO: 210175 - protein, 385 aa, unidentified
MGHQTFIPRDYDVFAGLDVDKRSISVTFTDHQGLLKSLRIPNNVEHLVNHVRKHFPNQRVAFAYEAGPTGYGLYDGLVAQEFRCLIASPSMIPKAPGQRVKTNRLDSVGLSENLRGGQLKGIHVPSPLYRELRHLTQLRDTFVNEMVGMKQRIKSLLLMEGVEFPPAPAGSQWSFMVKDKLRKLPCSSTVRFELDQLLDSLEFNEKQVLKTTREIRRFCQNDPELSQCIKYMMSVSGIGWIVASQLLARIGDWRELRNIRQLGRFLGLVPTEHSTGERTDRGSITRTGDERLRSKMIQASWSAIRKDAELREFFRLICHRHPRREGPRVAIVAVARKLSVRISVVLMQQRPYVVREKVHSAPLTQEETSPQGTTRRQAEPGDKDS

SEQ ID NO: 210176 - protein, 413 aa, unidentified
MVIERIVERPGALDVHKASVTACVRIWHDRRLEELVQEFPTTVRGLLTLADWLAAHDVKTVVMEATGVYWKPIWAVLEERFELMLVNARHVKQVPGRKTDVLDAQWLCQLLEAGLLRASFVPPKPIRTLRNITRYRKTQIQTRQRETLRLHKILEDTGIKLGCVATDIMGKSGRAMLDALVSGTKDPDVLADLARGQLRKKLPALREALEGRFDAEHRLVIGQILAHIDFLDEAIDRLSEAIEEQIVPFAAARDLLMTIPGVKQRTAEVLIAEIGVDMTAFPSAAHLASWAGVCPGNDLSAGKRRSGTTRKGSKWLRATLTEASLAATRKKDTYLSARYQRLRGRRGHSKALTAVSHSILTAAWHMLTTGETYREAGADYYTRQNPDRATRALVRRLEALGHSVTIEPREAAA

SEQ ID NO: 210177 - protein, 417 aa, unidentified
MNTVFARVAGLDVHLKSIQAAVRCRQESGKLLATVRSFGTMTRDLRALADYLQALGVTHVALEATGVLWKPVWNVLEGRFTLLLVNPRHLKKVPGRKSDVSDAEWLAQLLQCGLLRGSFVPPRAVRELRDLTRHRAQLAGEQTRTANRIHKVLEDANIKLGAVASRVLGKSGRAMLRAMLQGQEDPKKLAELALGRLRGKIPQLRLALEGNCTEHHRYLLGRLLSHLSYLEHQADQFSARIAHRLSELLPSVAAERLDRIPGMNRTTIENVVAEIGIDMAVFPDEHHLSSWCGVCPGNEESAGKRLRSRTRKGNRWLRRALTEAAWAASHTQDSYFAAQYRRLAARRGKKRALLAVGHSLLVIIYHVLKRQMEYQDLGPDYFDRLEPERLRRYLVRRLQGLGFDVALSPKKPDDCAA

SEQ ID NO: 210178 - protein, 412 aa, unidentified
MTDVVAYIGLDWADERHSVHLQPASGRIEHCQLEQKPAVLHEWVAQLQRRFGGGKIAVALEQRKGAVIHALLMYDCFVLYPINPKALARYREAFTTSGAKDDPMDSELLLDLVVRHRDKLRAWVPDTVESRTLQTLCEQRRKLVNQRVALTNRLTSLLKQYFPQALEWVGDLASVQACDFLTTWSTLAAVQAARPSTLRRFYQDHNCRKTAVIDARLRAMRDARALTTDRAVIAPLSLSVQTYAAQLRVLIGAIQTFDEHIAAVFATHADVDLFTSFPGAGTVMAPRLAAAFGTDRSRWDSAAEVQAHSGIAPVTERSGKSLWVHHRLACPKFVKQTFHEFADQSIRFSRWARAYYDQQRARGNDHHAALRALAYKWIRILFRCWQERRPYDEQTYVDALRRRGSPLAKHFA

SEQ ID NO: 210179 - protein, 407 aa, unidentified
MAKVIIGVDPHKLSATIEVVDSHEKLLGSGRFSTDQPGYTAMRAYAKTWPERIWAIEGSNGAGRPLAQRLLEAGEHVVDVPAKLAARVRLFDTGHNRKTDALDAHSIAIVAVRTKTLRVLRPDGELEALRMLCDRREELTRLRVQTVNRLHRLLAELVPGKAKKDLTALQAKAILATVRPRDIAGKTRRKIAAEELADLLTVEAKMKKATAELKVLVKARDSRLMDLHGVGPVVAARTLADVGDIARFADRNRFASWTGTAPLDASSGEQNRHRLSRAGNRRMNHMIHIAAVSQIRLDTDGRAYYRRKQAAGKTKLEALRCLKRRISDALYRQLLADAEQAQLLCAAEPVDTGPGGHCGASQESSAVDLPPHIDTSDQPLPGPATQTLQPAGPTGKTSQPRTPQTTG

SEQ ID NO: 210180 - protein, 381 aa, unidentified
MSLFVGIDVSSSDFKVRILDERGNEPVKKLRALNDQPGCEQVTRYLSEACAKENEDRLVIGLEATSVYSWPLQMFLAEDPCLAPLQPQIYSFNPKVVANFKKAYVDLPKNDWIDAWVIAERLRFGRLPEGSQVDFRYLPLQRLTRFRCHMIEMISREKNYFLTNLFLKFSTLAQGTVFSNTFGATSESLTLEFFSPEEVAARPLDELIDFLMEKGKSHFEDPEAKARELKEAARKAHRLRGSLLQPINLILATSIETIHTLEKQVKKIDKAIEAEIRHFSNTLITVPGIGPVLSAGIIAEIGDIRRFPNEGALAKFIGLTWRSHQSGDFTADDTPLTRTGNTYLRSYIIQAANLVRQKEPEYKAFYHVNSRKVRLTIIAVL

SEQ ID NO: 210181 - protein, 326 aa, unidentified
MRLVQNQTNLAVQLTPNIVGVDTHKETLACWCNGKFKEFPTTLKGFVEALKFFPNCIWAIEGAYCFGQAFSNFLIQNGCEVYEVNPKLTKAWRGALAVTEPKNDYGDAKVISLYAKPEKLQTVVLDFLKLKELATERRFAVKERTRIINNIKMIAYTRGKTLPFNDLTTQKAIKWLINNDDIIYRNQGKILQLTIDNIKEYEKELEKNMPEKAKRLMTLKGISAVRAVELFVEVKGKVMSEGQLANYAGIAPIPDSSGKKDRYKTNKMGNRKLNSIFYSLSIAQVRYDENAKKYYQKKISEGKTPRRARKAVARQLVKIVFNLLKD

SEQ ID NO: 210182 - protein, 316 aa, unidentified
MESVVAGIDVSARALDVHVAPVGLNHQVPNTTTGLQRLASWLREQNVEMVVMEATGGYEVRAHVTLSEHGCQVAVVNPRQIRDYAKAIGLLEKNDRIDATVLSRYGIKERPTPVRPASTEECAFRALVSRRQQLVAMITQESNRIAHPEHGPTDSYERVLALLRDEKRVLEARIAKLIRESPEWRSRVRRLQSAPGIGPTLAAVLLTYLPELGTLSKPEITKLAGLAPLVRDSGRYRGQRRIGGGRSEARGALYMAVLVGLRHQLPIAAHFKRLVARGKPGSVAIVACMRKLLVQLNAMERDGVEWDSSRLQPLPA

SEQ ID NO: 210183 - protein, 419 aa, unidentified
MDLTDLTSTDTEPASPAPPPGLVAGVDTHQDTHTLAVLTAQGAVIATRSFPADQQGYDDLTAHLDRIGPLTAVGVESTSSYGAGLTRTLRQAGYNTVEVLRPSRRVRRHHGKSDPIDAIAAARTVLSGDGVSQAKDTTGPAEQLRLLLAARTRLISAATAITNSIHSLLTTAPEPLRERYRRLDTPALITRLARTRPTRTITTPQQAATSALHHMARTHQDLHHRAERLNQQMHHILTTHYPGLLAVYGAGTTVAAQLAVTAGGNPGRIHNEAAFAHLCATAPIPASSGKTTRHRLNPGGDRRANAALHRIALVRLRHDPTTKNYADRRTQEGKTTKEIIRCLKRAIAREVYRALTQPPPTDTTSTLAAHRKRHHLTQTDVAHALNTYPARISDIENHRRPLPQLTHRYHQYLTTLDTQ

SEQ ID NO: 210184 - protein, 263 aa, unidentified
MDKLIRIGMDTSKSVFQLHGVNEAEQPVLRKKLRRNQVLTFFAGLAPLKVGMEACGAAHYWARELRALGHEVLLMPAQHVKPYVQRSKSDAADADATCEAMNRPRMRFVAVKSADQQAAQMLAKLRAQFIDRRTQLSNSIRGFAAEFGLIAPKGLSRLGDLLADIRADATIPDMARDMFETLARDYAHISAEVAVLDEKLLAFHGQNEVSRRLAAIPAVGPVGATLLAIKVTDAHGFKSGRDFAAWLGLTPKNHSTAGKNRLG

SEQ ID NO: 210185 - protein, 347 aa, unidentified
MDRYVGLDAHAKTCTLAVLSRSGKRLRSMVVETNGRALVEAVKGIAGDIHLCLEEGTQSAWLHEILSPHTRELVVSVPEKRRGPKDDLRDAWSRAEDIRVGRVQTRVYKAPKHLAGLRSAACAYRLATRDVVRTKNRLKAVFRSRGIRSNSGVYEAASRDRWLNQLPSGSRELADWLGQELDDLVPLRDKAEEWLRKEAKSHPIIRKLRTGPGMGPIRTAQLVAIVGTPHRFRTRRQFWSYSGLAVVTRSSSDWVQSRDGNWVRGRTYQTRGLTRQRQPVLKAIFKGAATSVIEQLPQDPLTSTTSGCWPQGSSPTWPSSRWRGRWPRPCWRCGSTRRCTTRRSIWS

SEQ ID NO: 210186 - protein, 343 aa, unidentified
MREVTTVGLDIAKSVFQVHGIDVEGEVVVRQQLRRSRVLGFFKKCSPCLVGIEACASSHHWSRELQALGHTVRLMPPAYVKPYVKRQKNDAADAEAICEAVQRPNMRFVPTKTPDQQACLMLHRTRHLLIRQQTAVINAIRAHFAEFGIVAPVGRNGVKELLDVVAKSDDERLPMIARQCLEVLGHQLQELKAQILKFDQCINAWHRSNEMSRHLDDLPGVGPALATALVASVPDPKAFRSGRDFSAWIGLVPKQNSSGGKERLGSITKQGDRYLRSLFCAGALAVIRYAKIHGTKYRPWLAKLLERRPTKVAAIALANKIARMAWAMMATGDSYREPVALAR

SEQ ID NO: 210187 - protein, 346 aa, unidentified
MLYTGLDLSRRRLDVHVLDEDGRTIEVTAVRPDADALRTLAVHILRHGQEVSAAIESMTGARFVHDTLEFAGWDVAIADAAKVKGIAPLAAKTDKIDARVLAELARRDLVPEIWLPTPDVRAERERARFRLHLVHHRTALKNRIHATLMTFGHPVSVADLFGVAGRELLAGFALPEPWTETLRTSLRMVDQLGAEIDACEEDLRRLGADHPSIPLLLTVPGIGPVLAYTIASEIGDIRRFSSPKKLAGYTGLCPLVRQSGNRDVRGPLAKNGPKYLRWALIEAATHAARDARYRERYERMKGRLGRQRGAKVARIDLARKLAEAIWHILTKNEPFAPAGPTMLLVA

SEQ ID NO: 210188 - protein, 351 aa, unidentified
MNNITIGMDLGDKKHIVCVMGKTGRVLHEGSLNNNKETLGELFSKYKGATVAIEAGTHSPWISRLLSSLGCKVLVGNPRKLRAIWDSNDKSDVRDAEMLARIARFDPDLLYPINHRGEQAQIDLELLQARDILVRNRSNMINHVRGSVKAVGNRLPSCSAACFHRKVSEHLPERLYNTLKPILDIIEQTTCQIKAFDIQIEQISTERYPETELLRAIKGVGPVTSLGFVLTLEDPTRFDKSRQVGKFVGLTPRRDQSGELDKQLRITKAGNPYLRRLLVGAGQYILGPFGEECDLRRFGLRLSEQGGKNAKRRAVVAVARKLAVLMHRLWLHGEVYDPCYNSKPRVLAKAA

SEQ ID NO: 210189 - protein, 426 aa, unidentified
MWDARRRVLKIKSLKHGIIQDKRGNIMRTVFGIDVSKASSEVAILVNGEKIHGYTMLNDAIGFNRLLNNLKTVHNPEIIFEATGVYSRRLRAFLEEYGYAYTQLNPLEAKKQLDSLRVRKTDKIDAEKLAHSQFILNRKPTYAQEEVYQHLRDLSRFYQNLTEDIVRAKNRLHKVLQVTFPELENLLSTPTGEQYWNLVMAFPCKEFVLNLSQNELCKIIRQSTSKRISEKRIAYLTDKLIKLAKQSFCAVKKISPMLEEVRYYAQELLRLSEHRQVVLDDMVALAQPLPEYDILRSIPGIAEITATSIIGELGDIRRFQSTNQINAFIGIDLRHYESGNFLAKEHITKRGNPYARKILFKCIHNIASASHTNPCHIADFYEKRKRQSTIASTKPHAIASIHRLIRTMYYLITHNKLYDYSLTQNR

SEQ ID NO: 210190 - protein, 383 aa, unidentified
MIVIGADTHKRSHALAAVDEGTGRVRGQREFKADEPDHLAAVRWARGLDEERVWAIEDCRHVSRRLEQALLAAGERVVRVAPHRMGASRKGEREPGKSDQIDALAIARAVVKDGIEKFPLAYLDEAAMEIRLLLDHRNDLVAERTRAVNRLRWHLLQLCPELERSLGRGSLNQSRVLDRVDRRLRKLAAGARVRVAREQVAQIRRLTRRADALKSELAELVEAHRPELLAETGCGPLTAAILIGRTAGAERFRSDASFAMQSGTAPIPCSSGQRQQHRLNRGGDRQLNHALHIIAMTRANHDPATKEYLARKEAEGNTTKGALRCLKRALARRFHGLLSLPAQTPPADHVTSKEIPRHPRGRERSDVDGTIVGAAPNPMPCTT

SEQ ID NO: 210191 - protein, 402 aa, unidentified
MNPAALIAQLRSVPTTLGQPESGPYRVARPRMTRDDRRLPRNAARHLQRDAYPEDEPMTPLTNRPPYQLFVGIDIAATTFTAVWTTDGPPRERARPFAQTPAGFAALQDQLRATGVAPAHILIVVEATGSYWVALAVCLHQAGYVVSVVNPAQAHNYAKSLPRRAKTDVLDAPVLAQFAAERKPAPWTPPPAVYHELRQRLVARDALLEMRQQARNQRHALLQWPIVIESVKTHLDGVIMELDQRVAALDAEVAQVLVDGAWAESATLLLSITGIGLVTTAWLLVGTLNFAGCASVASAAAYVGLVPLAHESGSSVRGRAQIGHGGHKRLRTALYLATLTAARFNPIIKAHYERLRAAGKPMKVARCAAARKLLHLAWAVVTKRQPFDPAYRERMMEERLAA

SEQ ID NO: 210192 - protein, 368 aa, unidentified
MLFKAFTITNNLDGFNDLYQKIETVMKDITKVKVGLEATGHYSYNLLGYLIDKGLPTYVINPLHTNLYRKSLSLRQTKTDKVDARTIASMLMSDVNLKSYSDTSYHNEELKSLTRYRFDKVKERAKLKTSVSRLVCILFPELEKLVPTLHMASVYALLSEFPSAKHVATAHLTRLTNLLSKSSKGRYGKDTAITFRDSARASIGSNMPAKSLELKHTIKLIQELDSEIDEIENEIKIIMDEINSPILSIPGINYRMGAMIIAEIGDFNRFDSPDKILAYAGFSPSTYQSGQLDGAYAHMEKRGSRYLRYALYNATKYVCHWDPTFAAYLAKKRAEGKHYNVAISHAVKKLVRVIYHLEKTKQQYIKAA

SEQ ID NO: 210193 - protein, 331 aa, unidentified
MEQKEQMIMGCDISKDKIDLCLLEKATGKIIISKSYANNSSGHQRIVKQLSDKDNCLVVLEATGNYHLRFISCLAAYNLCFAVINPLVLKRFAQMKMLRTKTDKLDAFIIAQYGKEQSPKAHQMPSKEQQELKALITVLNNLLKQRTQTKNLLHSQLLLPGNSIEFQKPIKKVLFTLNKQIQAIQKSIDKIIVNNFEHLKELITSIKGIGDKTAQGVIAYLGDLKSYGSYKQVASYVGINPAIKQSGQSLNKTSGISKQGNAVLRTLFYMSALSAIRVNKACKAFYIRLLQKGKKKKTALIAVANKLIKQLFAIIKKNIFYLDDYYHPKFT

SEQ ID NO: 210194 - protein, 347 aa, unidentified
MKKVTVIGMDLGDKNHKAVGLSDSGEEVDRAEVVCTPEGVRAYLERHPGAMLAIETGAHCRWVARLAEELGHEVLVGNARKLRMIWQSSRKDDWRDAEMLARVARADRKLFHPVKLRDAGNQRLMRLVKARDVLVRNRTAIINQVRGFCKAEGARLPRCSAEAFVNLKASLPPEVMDVASHLFKMLRDLNDLIKRYDRILAKALKRLRGEDAALLEPIAGVGPMTAAAYLAAVGDVVTFGSAREAGPYFGLAPRRDQSGATDKQLRISKEGNEIVRRLLVTAANYIMGPFGKESDLRRHGMRIAERGGKNARKRAKVAVARKLAVVMLAVLRNRTAYRPLANVEAVA

SEQ ID NO: 210195 - protein, 394 aa, unidentified
MPTTHPYDLVIGLDRSDRKADLHLIDTRTGQTQKQTVATSPEALHDWLARLRQDRPQDRVGLCLEQPAANLIVFLETYSWITLYPINPISLQKFRETFVTSRAKDDGKDAEYLAELLLSHHDKLKPWQPDDSQTRQLQQLVLHRRAVVDQRTGLTNRLKALLKQYFPQALDLCGEELWRPLATALLLKWPTLQSLKKARKESLKQFYYLQGSRSQKLIDQRLECIDQAVPLTDELALLQSYTLRVQLICKELQLLLKTLEQFDQQIAKVFEQHPDREIFAALPGAGPVLAPRLLAGMGSERERFAGPANLQAFSGVAPVTKQSGGKRHVHRRYLCPKFLRQSFQEYAKESILHSRWAAAYYGQLLDQIELGKSPVKTREKILKKIPCWITSEVS

SEQ ID NO: 210196 - protein, 413 aa, unidentified
MAVFCGIDWAEDHHDIALVDQDGALLAKRRIGDDAAGFAALLQLLAEAGDDPDAPIPVAIETSHGLLVACLRATGRPVFPINPLSVSRYRDRHSVARRKSDAGDALVLANILRTDLAAHRPLPADSELAQAIAVLARAQQDAVWARTDAHNKLRSLLREYYPAILLAFATKRGGLLRPEARALLRAAPTPRAAARLTLSQLRALLHRAGLQRGIDTEALRLQQLLRADYLHHPTLVEEAFGRQALALLRQLDTACGNAEDLADAATEHFAQHPDAAIITSMPGLAALTGARILAEIGDDRARFADARGLKAYAGSAPVTRASGKTTAVMHRRVKNQRLASVGYVWAFAALTASPGARAHYDRRKAAGDRHVAAQRNLFNRLLGCLHHCLHTRQTYDEATAFPTTSSTPAARAA

SEQ ID NO: 210197 - protein, 316 aa, unidentified
MVPPPLFVGIDVAKETLDVAVRPTAETWSVANDEAGITALVAQGGALAPTLVVLEATGSFHGPLTAAVAAAGLPVVVVNPRQVRAFAQATGLLAKTDRLDARVLAHFADAVRPTPRPLPDTATQELRAVLLRRRQLVEMLTAERTRLAMAPRRIHAAIQQHLTWLTHPLTALDHELTRLIQASPLWRATDDVLRSIPGVGPVLAHTLLAQGPELGTLGQKQIAALIGVAPFNRESGTLRGRRMGYGGRAEVRAVLYMGTLVATRHKPVIKAFSARLCAAGKAKKVALTACMRKLLIIMHAMVRDLKPWQPREVPIA

SEQ ID NO: 210198 - protein, 305 aa, unidentified
MIAVGVDVGKALLEVAIHGEVKLQRFDNTPAGVRRLVGLLKARGAQRIVVEATGGYEEAVLDACAEAGLWVARINPRQARNFARATGQLAKTDGLDARMLAEMAAVFHARLRQHSVAEPWQVELKSWLRRRNQVTEAISCTRQQMAMSLSAISALMKRTLAALQRERTVIDATLKRLLQQYATPALRSSKGMGPMFQAAALALLPELGQLNRQQLAKLVGVAPLNRDSGQSQGKRKIYGGRGQMRVALYMATLSAVRWDPNLRAHYQQLRARGKVAKVALVACMRKLLTILNARRREELRGACAM

SEQ ID NO: 210199 - protein, 371 aa, unidentified
MVKIAKYVGLDVHKDTIALASCTGGPMAEAKDEGTVPHDLPRLLRKLLSLAPAEHLRVVYEAGPTGFGLCRELRARGVACIVVAPNRVPQLPGPRIKTDKRDARYLAWQLRMGSLSGIAIPDEELEALRDLIRAREDLLHARRRTRQQLAGLLLRHGMPWRGKSSWGIQHVRWIQGLRLGSEAQELAKKHYLQAIAHFDERIDELTADIERLTPELRGVHGRLYRWLQALRGVSTIVAATLVCELGDLRRFKTASRLMSYVGMVPREHSSGPRVWRGSITKAGNPHVRRVLIEACWSGRLRPTRSKALLRRQAGVDPAVVDIAWRTQKRLHDRYRRMRARGKPQNVTIIALAREMLGFIWSIGQHVEQQPA

SEQ ID NO: 210200 - protein, 366 aa, unidentified
MKQQHQDSEVTIGLDLGDRRHRFCALDSRGEVLEEGSLLNDRASLARLTARYRGALAVMEAGAHSPWVSRYLKRLGWEVIVSNPRKVRAIYQHERKSDQRDALMLARIGRMDRALLYPVCHGSEQAQQDLLRIKLRDSLVRARVALINSVRFSLKSLGYAVCNPSSERFHKVAMERLPERVQQMIAPSVQALAELSMRIAVLEREINVLARTKYPQTPWLQQVPGVGALTALYFVLKIEDPQRFENVRDVGAYAGLCPRRDQSGQSDPQLRISKRGDPYLRRLLVTAAQYILGPFGPQSALRAYGLMLAADGSARARKRAVVAVARKLAVLLLSLWKNRSHYEAFPHWQTIEDKRSGTIAMHRVEA

SEQ ID NO: 210201 - protein, 343 aa, unidentified
MNATTYAVDTAKNVMQLHWVDASSGEIARRKLTRARFIEFFGSLKPARVAMEACGGAHHWARSLGALGHQVELLPARQVRAFVRGNKDDAADARAIWLASQHGDIRRVAVKSAQQQAVLSLHRLRAHWVSVRTATINALRGLLYEFGVVLPQGKVVGLKALVARRTEIDALLPVLMQRLLDQQLAALRQLEQEVVSIEAELVLVQKTEANAQRLRRVPGIGLLGATGLAAALGDGSGWRNGREFSCSLGLTPRHSGTGGKVTMGGINKRGDPYLRTLLVSGARSLANAPSAPEWVRKLMQRRPANVAVVALANKLARTAWALVAHQSEFEQQWVSSSPGRTAT

SEQ ID NO: 210202 - protein, 401 aa, unidentified
MVESPNVVTADAGHTHKPVVTAKAGHKGRKGESTVKIYRLKTPIIASEVAVNIGLDVAADDIALCALGPGLEVLAREKIAHTEAAVKGLLAQLPGCTVTVAYEAGPTGYRLLRWLRSNGCHQAFMVAPSRIPVANGDRVKTDKRDALKLATLLATGQLHDLSVHDLTDEQYADRQLMRSREQMARKKTAICLQIKSLLLLHQIQLPPGIKPTWNKRMLTWLSCVETGHVALNQALREQLVWLDDATRAIKRLDRLCVELSRQPRYAANLKLLRSIPGFGLLTGMVFLTELPDLVGRFEAGESLVRYLGLVPVEHSTGKSQGRRGHLTHDGNVLVRTALVEAGWRVISRDDVLRRRYEELKKRCGGKKAIVAIARHMAMTVYAMFRDNKPYRRSKEEVLQAA

SEQ ID NO: 210203 - protein, 342 aa, unidentified
MSEIITVGLDLAKNVFQVHGADGVGRAVLRKKLRRAQVLEFFSQLPPCVVAMEACGGAHFWGREIGKLGHDVRLIPPAYVKPFVKRQKNDSADAEAICEAAQRPTMRFVPVKSEETQGAAMVFRVREMLIRQRTQAINALRGHLTEFGQIVPQGAANAKRLVAIVEDPDSGLPAAAIAALKVLITTLSHLEAEIEMLDAEITRRAKANDVARRLMTVPGIGPLIATAIAVLAPPPETFHKARDFAAWLGLVPRQHSTGGKQRLGATTRMGERSLRRLLIIGANSVIIKRHVHAVAKPGTWLGRMLTRKPPMLVRVALANKMARIVWALMARGGVYQSPVAAA

SEQ ID NO: 210204 - protein, 387 aa, unidentified
MYFVGIDISKYKHDCFITTETGTVITQNLSFQNNKDGFNELLNLLKSLDNSQEIRIGFEATGHYHFNLMLFLEENGYSFMEFNPALVKKFISTTTLRRTKTDKKDASSIAKYLMSINYKPYPKQFYHKYALKSLTRRREAFVHQRSYFKVELTNILDIIFPEFKPFFSNSFSATALFILSTYKSAEAIANMNDYDSIRKVSRGKFSYAKFLKLKELANNTIGLDSDIYTFQLDSLLSLIDAMDKQISLIEDKISEIIDLLNPRCLSIKGIGNILCASIVAEFGDFNRFKSADACLAFAGLEPSTIQSGCAEHNGKMVKHGSPHLRASIMNAADFVFMHEPTFTIYYYKKRNEGKAHRVALSHVAKKLVRVIYKLETSDIPFDSSKLK

SEQ ID NO: 210205 - protein, 367 aa, unidentified
MSLRFQGQSETIQGRGAGTKAYSTEAFMDKFDPCGIEVSAQELIVALSRDGREERLRSFPNTAEGHAALRRFLESGGRRVRVVLESTGLYGLDLACALCQAPQIEVMVANPRAVRHFASALMRRSKNDWLDAVVLREFAARMPFQPWTPPAASAFALCALARRLETLTEQATAEKNRQHAAQLSVAVPLAVRRDLQRSLRSIQRAILRLTREALRLLQGDPLLHGSYHLLLSVKGIGPTSALRLLAETALLSQDLDVRQWVAYAGLDPREYQSGTSVHRKTRISKTGNRHLRRALYMPALVAAQHEPHLRAFYQHLLARGKCKMQALIAVMRKLLHAVYGMLKNRQPYDGAKLYTLPAPKLSVPEAA

SEQ ID NO: 210206 - protein, 373 aa, unidentified
MENTITYVAMDTHKKEHKVALHYPGQEEIVNLTVRNSSYEISKMVRKILRKASGEVQFCYEAGVCGFDLKRRIEAFGSKCIVIAPSLTPIKPGERIKTDKRDAIKLLAMFKSGLLTEVYAPDSQQEAARELTRLRQTARENLMRVHHQLLKFLTRHGYIYTDGNHWTGKHLRWLRSLEFEEPLLREVFDNYFTQMQQSMQRLASLDKQVVQLADSEPYKEVVGLLRCFHGIDTLTAITIITEIFDFGRFSNPRELMSYLGLTPSESSSGEKQKKGSITKTGNKRVRRLLLEVSWHYRHTYNISKELRQRREGQPQWAIDIADRAGQRLRKRYWYLINRGKIPCKAATAVARELAGFIWSVFREYELRNMEKAA

SEQ ID NO: 210207 - protein, 421 aa, unidentified
MIDHETFAWFAAIDWGTEKHQACVVDVRGGIVGERAFSHDGAGLALLCDWILSIAGNATIVAVAVEVPHGPVVDALLDRGLAVYAINPKQLDRLRDRFSVSGAKDDRRDAHVAADGLRTDRHLFRRLQIADPRLIQLREWSRLAEELQQERVRLSNRLYSQLWRYYPQMLGLSDDLAAGWVLDLWTMAPTPAKAMHLRKTSVAQLLKRNRIRRIDAETVLRALRGPAINVADGVVEAATIHIGSLITRLRVVGRELHDAVRKLDELCACLDEPSPTAAEHGGSGRHDVKILKSMPGIGKIILAILLAEASGPLSRRDYQALRTLSGVAPVTKQSGKSRIVVRRYAAHVRLRDAVYHWARVAIQHDPTSRSRYVALRQRGHSHGRAIRGVADRLLALACTLLQRQTVFDRDFSRAEELTAVP

SEQ ID NO: 210208 - protein, 423 aa, unidentified
MKNNAANKLKQVPTECLVIGIDPHKSKHAAVAMTQDYNICCKFKFDNSRAGFIMAVERLRDEMIKAGCKNIMFAIETGGHYWRNFAYFLDENDIPFRFINQYSLKRRREGKDLNRRKNDYRDSEVAAEMLCTGEFTESKLRQGIYAELLATHNNYRRLIKERTRTINLIKGLLDGLFPEFTRVFKDPCGKTALGVLAACPIPREIACMTDKDFMIKVRTNYSGRLGKNKLFALKLVANTSSGVAAGAKAVSIELKFLVEKLRLIQCQLQRVEEALVELVDQSEEGKYLLSVRGLSYIAIAGLIAELGCFKVYRCAKQMIKMAGSNPSEKESGGKRSSHTPMSKHGRPGLRYVGWIAVIPMLRLNADFQAWAKQRRERPVNANPLSGREVLGAALNRLLRLVFALVKNKAYYRDSRPELALAGV

SEQ ID NO: 210209 - protein, 464 aa, unidentified
MKSRSPRVGRAADRLLVGDDVSSVRNDVRFLSASGDVLLGHQPFANDLPGYHALRECVLELLEQQGSAGVDFAGEATGWYWFHTCYALAHDPELAHVDVRLNLYNPRLTHAFKKALGSLEHSDPLDAHVIAERLRFARTQHAPVLDDVWLGRRLLTRHYFHLSHTLAAEKTYFSAFLFLKASAYRQLKPFSEVFGTTSTAILTQYSTIQQLAALPILELEARLRDLSHNHLPQVEKNATRLHAVATHSFPVPPGMVAPLNRLLSSTLDHIRFLEAQLDTLQAAIADAFVGVPELDWLMSIPGIGLIIAACLLAEISPWERFLEGDLVDRHTGRRRPKNARDAEAALAKWVGLWWPRNQSGAFTGEITRLRHEGNRYARYALTQAANCLKEHSADYAAFYSRKFAESTTHAHKRALVLTARKAIGLFVALLHTGQSYRVPEPYRNVLSPHQARQLADDPTPPDDT

SEQ ID NO: 210210 - protein, 349 aa, unidentified
MKQYYAGLDVSMEETAICTVDEKGVIAYEEMVPTKPKLIDMCLKAKGLPIEKISLESGSLSHWLVKELMSFGWRVVCIDARSISAVLALNTNKTDRNDARGIAEALRSQCKYSREVYHKSQGSIELGTLLGARRTLVEQRTATNNTIRGLLKAYGICLGVGGNEKISQFVRDKIINQQEVTKLGFEPLLVIFETLNKEIEKTEETLLKIAKEDAVVKRLMTIPGVGFITALTYKVTIDDPSRFKQSNTVGAYLGMAPKQRSSGAMKRQGRISKCGSKELRTLLAGAGLSLLMRCKKESALKTWGLKIQEHHGNKKACMAIGRKMAIIMHRIWSNNTVFDPGISKETSNK

SEQ ID NO: 210211 - protein, 396 aa, unidentified
MYFIGIDISKYKHDCCIISAADQKVVSKVTIKNNKAGFNELLTIIHSLANPADIRIGFESTAHYALNLELFLENSLLTVMEVNPVLISEYKKSKTLRRTKTDSVDCESIARWLMTVEYKPHSKGFYHAYSLKSLTRLRDKLIRQRSFYLVKITNVLDHTFPEFKPFFNERLSKTALYLLEKYGSAEKMARMNSASYEKLRSVSRGKFSPQQFLRLKELAANTVGVNNSIFDVELNSLLSLYKSLVKEIDTIEKEINKLIEEVHPHYMSVPGIGPLSAAVIYSEYGDISNFTNPGQMLAFAGIEPGINESGTESHGGKMVKRGSSQLRYTLINWNLLSIIPIADLILQIVRKLFYINACINDEKSLKISVLSQIRKAINMLKVLKLYDFQICQFFNK

SEQ ID NO: 210212 - protein, 410 aa, unidentified
MKVLNRRCAGLDVHKVEVVACARVFAGRKVVHDVRRFGTTTRELTALGDWLESLHVTQVAMEATGVYWKPVWHMLDERFALILANAQQVRNVPGRKSDVNDATWIADLLAHGLIAASFVPPRPIRELRDLTRTRRQAVGEVVRHKHRIDKILQDANIKLSSVLSDPMGPSGRRMLAAIVAGESDAGKIAELGSARLECPRGALIEALSGRVSEHHRYLLGWELRLIGEIEARIDELDQRIEAQIAPFRAAVERLMGVPGVKGAAAPAIIAEIGADMSVFPSAGHLLSWARIVPRLDESAGKKRSRRVKKGGAWLKPVLVQCARAAVRKRGSYYGAQYRRLKARVGDKKAIVAVAASILTAIYHMLRDATDHRDLGAGYLQHRAGDKQALAQRLARHIRALGYQVDLRVAA

SEQ ID NO: 210213 - protein, 388 aa, unidentified
MNRIIKIGMDVHSTNYTLCAMEPTIGAEDRIFGEVQVAPDYKEIISFIASLKKKLGLDNDYSIECGYEAGCLGYTLYHQLNGAGIKCVILAPTTMLTQQGKRVKTDKRDAYLIAQCLCYGGYHPVYIPTGKDDSVKEYLRMRDDHKIALKKLKQQINAFVLRHGHKYIGTTWTIKHVTWLKNLQLDPMYRETLNEYMASYDEQEAKIERFDKRIKEIASEENYKENVEKLGCLLGMRTHTALSLIVETGDFMRFAKGNIYGAFLGMAPGEHSSSTNLNRLGVSKAGNSHLRRLLVEASKGICKGVIGYKSKELRSRQKGQSADVIAYADRANTRLRSKYYKMIRHGKKKNVAVSAVARELACFVWGMMTGNILPTSLAGASAPVVCQG

SEQ ID NO: 210214 - protein, 387 aa, unidentified
MQSVTPATGVASTVRANDITLFASLELSKSKWVVTINSPGSEKFSKHVVEGGDGAGLLDLLSRSRAKAEQRYGVQVKAIVIQEAGLDGFWIHRLLLANGIESHVVDAASIAVDRRHRRAKTDAIDGETLLRTLMAWARGERRVCSMVRAPSPEDEDRRRLTRERGTLLKERIQHTNRVRGLLSGQGVRDYNPLRRDRFERLEALRTGDGRELPPLLKAEIRRELDRIALVTTQLAAVERARDALIRTDAEERNNPAALLLKLKGLGPEFASLLWLESLFRSFGNRRQVAAYAGLAPSPWQSGGVERDQGISKSGNRRLRKTMIELAWFWLRHQPDSALSRWFQARVGAAKGRIRRIAIVALARKLLVALWRYVTQGVVPEGAVFKPA

SEQ ID NO: 210215 - protein, 349 aa, unidentified
MTLTIVDEARAVTGGVDTHADTHMAAALDAVGGLLGVQEFPATLAGYARLLAWLRGFGVVHLVGIEGTGSYGAGLARHVAAAGIRVVEVDRSDRQDRRRKGKSDPLDAISAARAAQSGRASGAPRGRDGAVEAIRALMVAKRTARAQRTQTINQARALILTGPDDVRARFAHQTPAGLVAGLAALRPRPGSMVRYHTLLSLRELGRRAQFLDAQLARLDELIVPLVTARAPRLLQLYGVGSDTAATLLIAAGDHPRRLRSEAAWAHLCASAPIPASSGKVTRHRLNRGGDRQANHALWRIVITRMGSHPPTRAYVARRSKEGLSKPEIIRCLKRYAAREVYPHLRPGPG

SEQ ID NO: 210216 - protein, 370 aa, unidentified
MAQSTPLFVGLDVHKDSIAVAHAAGGGSEPPVFVGAIGTRQADMDRLIHRLQSKASALTFAYEAGPCGYVLYRYLTGKGLTCQVVAPSLIPKKPGDKVKTDRRDAIELARLLRSGDLTAVYVPSIEDEAVRDLCRARDAARVTGKDAKLRLKAFLLRLGLHYVGRATWNDAHRRYLAKVVCPTPTQQIVFQESVRAVDEQVDRRQRLDAELLERAPAWRLAPVVDALQALRGVQFLVAITVVAELGDLTRFDNPRQLAAFVGLIPSEYSSGSSRRQGGITKAGNGRARRALIEAAWAYRHPAKVSLHIQQRIDHLPKALQDLGWKAQVRLCKRFRRLVARGKHPNIAVTAVARELIAFMWAIAKAVPVPA

SEQ ID NO: 210217 - protein, 331 aa, unidentified
MKITETVGIDVGKMKNEVRIHTNQKNKSFDNTKKGITSMVKWAMSSSKCTKEEMLFAFEHTGIYSQQLAVYLSENSFNYVMLPGLEIRRSMGITRGKDDKIDAKKIALYAYRRKEELQTYKLQAKNVMEIKKLLHLREKLVKQRSGYKATIGEYKLFLKRKENALLFTIHEKLIKELTKQITKIDNNLIDIVNNDENLKKLYKLITSIKGIGNQTALFMIAYTGGFTRFDTWRKFASYCGIAPFPNTSGISIYGRTEVSNLANKKIKSLLDLCAKSSIQWNSEMKLYYEKRIAEGKPKMSTINIIRNKLLSRIFATVKRGTPYVSTLNYCS

SEQ ID NO: 210218 - protein, 342 aa, unidentified
MKFYCGIDLSARDSSLCVIDESLSIILRQKVRNELPRIIHLLEPFKPNIKIVVESTFNWYWLIDGLQTAGFEVHLAHSLGLAMITAAKVKTDARDAFTLAKLLLAGLIPKAYIYPSHSRPVRDLLRRRRLLVQLRAREYGSLRHLLLREGILSSSRNEIKEAAEQDLVEWFNHPLLLLHARQELERIKLFSVQIDKLEDAILQIAQLQPPYYKLLEISGIGKTLALTILYEVGEITRFENVRRFCSYCRLIPGVAQSGEVNRRGRGSKQGNHYLKSAFSQAAVAAVRCYPKIRRCYERHLKNRRGSAGKLIALNIIAHKLAQAVYFVLKAQTDFRPELLFGS

SEQ ID NO: 210219 - protein, 365 aa, unidentified
MNKCIVKSVICGMDVHEGTITTCTAAHNGEAEVKTFSNSVEGRNSLIRHLRGLAKTHCCQKIATAYEACALGFCLHDELSDAGMVNFVLAPSLMRKSRKDMTHKTDPADARMIFETLRGHLLAGNGLPTVWIPPPELREDRDVVRARLELGNKTTKIKEQIQMLLKKHEVRKPSGMGAAWTMLHRKWLHGLLTCGGPALPPGGKIVLSSLLRQLAMLEGEIKTLDEEVKALSRKPRYQVACQALVKRIKGVGLLTAMVFLTEVGDLNRFRNRRKLGAFLGLAPTSNESGKVTDRKGHINRSGAGRVRWALCQATWVRLQHDEAECAVFDRIRKSSKKLTRVAQTACMRRLAVLMWHTAKDALAAA

SEQ ID NO: 210220 - protein, 362 aa, unidentified
MAQVRSWVGLDVHRASVVAAVMDRDTGQLRVRRLTGETREVVAFCAALPGPTRVAYEAGPTGFALARALLAAGVQCVIAAPGKIERPCSDRVKTDQRDAERLLRLLMIDGLHAVRVPSIEEEALRDLVRAREDIRGDLMRARHRMSKLLLRHDVRFDGTAAAWTTHHRAWLAKVNLGERGAQVTLLDYLGAIDALLVRRDTLEATIGELIPGSPWAQSIARLRCLRGIDTLSAVGLCAEIGDWARFPRAGHLMSYLGLVPSEDSTGSTRRQGAITKTGSGHGRRLLVEAAWHYRRAPRKGDVLKRRQAGQPAHVIAISWQAQQRLYRTWQRLDTERGKRRTIVAVAVARELAGFCWATANAD

SEQ ID NO: 210221 - protein, 316 aa, unidentified
MTQLCAAGVDVGRDFFDVGLAPSGRVFRAPNAPSGIEAVVSRLKREGAGRVVLESIGGYAARLVRGLADAGFEVGVIDPKRIRALRIAEGKRAKTDALDAKLIARFALMMNDAARPIPSAKTFEIRALSTRRRQVVEMIAMEKVRLKQTLDEAVADSIRFVINTLNQERDRVERALQEELLAQEQGKAHAELLQTIPGVGPAVSLTLLADLPELGRLDRKAVASLAGLAPHPDSSGTHIGKARISGGRPCVRAALYMAAVSAARTDKGFKREYMAMRSAGKPAKVALIAIARKIVVAANGIIRTRQPWQKLAASKG

SEQ ID NO: 210222 - protein, 355 aa, unidentified
MKILAIDMGWSNSVSCLFDSSTGEVQYQTLVSGKEPFGKLLVKINPDQVVIEAGPMAGWVRDLCEQLKLKLLVLNTNDEPWRWRNVKKKTDRKDAYKLTRVVALGEANLVHVPEHSVRQWRQLIYYRQTLVDEMVAIKNRLRAVLLQEDLHLPSGQKAWESASWQKLSEMAKELGECGKDDLWRGMVKLELRRLEELAAHLAAVEKKLDGLAREDERVKRLKQVPGVGTRTAELVVALIDDPKRFGRGRKLSSYAGLSPRKHQSGKMDRDGHISRCGNGLLRKLLVQAAWSGKRNSLRMSRIYERVRKNTPKRTKQAIVAVARHLLVWLWAMLRDGSSWQVGHQPAPQKELSAVT

SEQ ID NO: 210223 - protein, 339 aa, unidentified
MELYVGMDLHSNNTYVGILDKETQGKVYHKRLPNELPKIVYELEPFRKDIRAITVESTFNWYWLVDGLMDSGYEVCLANPAANQQYKGLKHSNDKSDAFWLAHMLSLGVLKKGYIYPKEERPLRDLFRKRTFFVHQRTSNILSLQGLINRSLGRRINSNSIKTLTQEKIDELFKDDHSRLIATSGVNTIKSLDREIKSIEKAVLEKAKLRKEFENLLSVPGIGKVLALTIMYEVGDISRFEKVGNFSSYSRCISGKWTSNDKVKGKGNSKNGNKHLAWAFVEAANIARRYNKKLNAFYQRKESSKNNLVATKALAHKLSRACYYIMKDQVPYKEELLVS

SEQ ID NO: 210224 - protein, 407 aa, unidentified
MDLLKTVFGIDVSSRKSNVCIMVNGQKVNDYAISNDMVGFNQLLGDLKQVTNPQIIFEATGVYSRRLQAFLDMHELRYVMMNPLEAKRKTKDDLHQNKTDKLDALYLAKLQSEHPQRLAYVQSKEYQELMANNRIYEQASHDLITNKNRLHKAVQLTFPEIEHLLANPRGKNYWSIALRFPHPDIVLETKEADIIDFLKGLSGIGKKRANDITQSLIRLAKVACPAVKKNSAHVRGLKMAINNILSAEEECQTALQEMAKLAPKRDLEILTSIPGIGENTALRIISELGDIRRFNNPSQLNAFVGVDPQVYESGNLTAHLSISKRGTAIGRKVLYLAINQIQSAKKAGNPCHIADYYEKRKRSSETASHKKAAIASIHKLLRTIFALIKNDQLYSYDVAKHNQRLLS

SEQ ID NO: 210225 - protein, 407 aa, unidentified
MNAVGIDVSKGKSMMMALQPMNQVVLKPREYSHTKAGLGQMAHDILRLGEEMWVIMEATGRYHDPVAAALHEYGIRVTVMNPLFIKQSGGGSIRKVKTDKADAKKIAKYGLDNWMDLREYAPVEAIREQLKLVSRQFNLYMKNVVALQNNLISLTDKVFPGVNEVFSSKDRADGSQKWVDFITTFWHCECIALVSEAVFTERYRKWCKRKGYHFSGTKAAELYIGSIGHITTLPKNSNTKLIITTAAKELASAKSTLAVLRAEMDRLARQLPEYDTVRAMYGVGEKTAPQLIAEIGDVRRFPRRSSIVSFAGVDPAVDESGKHISKSNPTTKRGSPHLRKTLYQIVCTYLKKSPTDEPVYQFLDKKRAEGKPYFVYMTAAQNKFLRIYYARVKECLIMASVQESSES

SEQ ID NO: 210226 - protein, 343 aa, unidentified
MDHFAGLDVSVKDTSVCIVDDTGRIVREVKVASEPDALLAVLTNPSYHFKRIGLEAGPLSQWLFSALAEASLPVICVETRHMRAVLKAQINKTDRNDARGIAQMMRVGLYRPVHVKTLRSQKLRVLLTHRKLLQSKAIAVDNDLRATLRNFGLKVGIVGTAKFEARIKELVENLPDLTILIEPLLIVRRAIREQIGVLHRRVLAVVRDDDVCRRLMTVPGVGPVVALTYRVTVDVPARFRKSKSVGAVFGLTCAKHQSGENDRPGAISRCGDEMMRMMLYEAAQILLVRSTKWSWLKAWAMKIARHRGMKKAIVALARRLAVIMHRIWVDGTEFRWTREAAAA

SEQ ID NO: 210227 - protein, 346 aa, unidentified
MNFYTGQHKFYCGIDLHARKMYLCILDAKGEVKLHRNMNTDRDAFLRAIEPYREDLVVAVECMFAWYWIADLCRKEGIPFVLGHALYMKAIHGGKAKNDKIDSHKIAVLLKGGMIPMSYVYPEKLRATRDLMRRRNHLVRKRAELLTHIQNTNSQYNLDESFGCIAKPYQRGNIVGAFENPSVKKSMEVDLKVIETYDTTLLDLERTILKLANSHDPVSYALLQSVYGIGKICALTILYEIEDIRRFPTVQDFVSYARLVKCAHESNGKKYGMGGSKIGNAHLKWAFSEAAALFLRGNEPAKKWFERLTRKHGKSKALSILAHKLGRAVYFMLKNKEAFDMHKFLR

SEQ ID NO: 210228 - protein, 399 aa, unidentified
MRNFQSLQLRVGVDVGAQRHSVAVGLTDGRLLDEFEIPHTAAGFEDFFTRIEGHARCYPDPIAVAMEGYNGHVRPLDSLVKVRGWRLFNVNNLKLARFKEIFPAAAKSDRIDSAKTLELFQLRDHLPLARDVLQEVMATPAENDILKRLSRRRRRLVNERTRVINSLHADLQAVAPGLLQITRYVGNLWFLSFLTCRKDIRKLARLRRASLLKLPAIGPTYADRIQAWQQSACFGPNALLVGDMIRQDAERILELNRQIRALEDDMARVAATSAIACQLASIPGYGSVCSAELAGEIGTIARFQSEASLALYLGMATLDNSSGKFRGSKAPKHVNARAKAAMMAAVDHHRKRVPQSQRYYERKRAEGKKHNQAIRALGRHLCRVIFKMLTQERPYRIDP

SEQ ID NO: 210229 - protein, 315 aa, unidentified
MLYVAIDQHAKQITVAIRNDQGEDVLKRQASTRREKIEQFFDSVVAMDSEFMAILESCGFNDWLLEELRNRKCREIVLIHPEKPSKKKTDRRDARKLCDLLWLNRERLAAGKPVHGLRRIYIATKGEKDDRQITSLRQGLGRRRTRVLNKIQRILHRYNLMWDYPTKSFQTVAGKNWLKKLSVPEIDRFELDLLLEEWTSIEVQIKQVDAKIVERASRREPGKVLYATQILMTAPGVSFYSGLGLSSRIGPVERFPRPRSLANYFGLTPSSKNSGESKDRLGSITKEGSRFARFLLGQLVLHFLKKDRCTSSSFT

SEQ ID NO: 210230 - protein, 394 aa, unidentified
MPELFVGIDVAKDTSSTQGINSSGKGLFSLTVAMDSEGFMQLWKAITQHSKDLSEVLVAVESTACYHINLYSFLTAKGVPTVVINPLLIANFAKLSLRKTKTDKKDAMTIAQFILVHQNTISQLSLSQDLQDFRDIARERESVCNMLSAHKVEVKRLLQSTFPELERIGDLSTRVMQEFIAVFPSARLVKMAKPKAIQKILQRKGVGTRLTYTAEDLIQAAKQSVATISPAKELILQGKVRTLQHLRERNEELTKILTEYCKSSMLEDFEIITSIDGISKCTATTFLAEIGCIGNFASYKKLIAFAGIDPTVYQSGKFKGSSRISKRGNRHLRRVIWLMTTHVIEHNATFRAYYMKKRGEGQPFKKAVFATAHKLIRLIFAMLTQRTMFREVCP

SEQ ID NO: 210231 - protein, 363 aa, unidentified
MQSPVRIFGKSQSKVLDQATIYHSLKLKKMKDKVIISCDIAKDKLDFYCNESNEYFTLPNSKVGLKTFDKWKKQRKYSNDSFVLAFENTGSYGRLLATFASESGIVFYKIPALEIKRSMGISRGKDDKIDAKRIADYMFEKGYKLKPSKLDSPAIDRLKQIRSTRDFLVKQKTSASVNLKNLEEVLKLNPYDTCVVALQGIINEYTNSIKKIETEIDEILAKEKEINNSYQLLITIVGVGKVIAIDTILSTDNFTKFDDWRNYASYCGCAPFSNESGKMVLNKRISNLARKDLKANLTSGAKSAMVFDQELKIYKERKLEEGKSKKCITNVIRCKLISRMFAVIRKNEPFKRNYQHNLEFQQT

SEQ ID NO: 210232 - protein, 415 aa, unidentified
MEPVYGKGGRVAGIDVHKRMLAVVVADRVDPEQTRKEHKFGTEWRSLRQLREWLQSEQVEEVAMESTAQYWKPVLLELEGHMKVQLAQPRSTTARQGRKSDFRDARRIVKRLLADDLTLSYIPGPEQRLERFVSRARIQLVEDRTRIQNQMECLLEEGRIKLAAVVSDLLGVTSRRLLWALAKGEEQVEEMAALAAKHLEASEEVLRDALHGQMNATHRRLLEMSLRRIESLDRDIEELDRELARLQSVHQEAIERVCGVPGMSLIAAEQTVAEAGVAAAAFPSAGQFASWIGACPGREESAEKSNSNRSPKGNRVLRRVLTQAAWAAVKMKGCVFQKQFQRLVPRLGKYKAIWAVAHKMARLIWKILHDNVSYQERGNLPPDAKSVQRRKQRLTRQLRDLGFKVELTPRSLNMA

SEQ ID NO: 210233 - protein, 350 aa, unidentified
MLIIGCDYHPSFQQIAFVDTETGELGEQRLIHPKEAEQFYGELKERNIAVRVGMEASGHARWFERLLRQLQFELWIGDAAEIRTKRVRKQKTDRQDAQLLLRLIMEDRFPRIWVADAENRDLRQLLWHRHRLVQMRTRVMNQLHVVALNEGLRRRKALWRPGGRKELELIALAPWAGRRRQDLLDLFDQLTPKIQELTRALEQEVEKRPVTRRLMTHPGVGPLTALAYELVIGTPERFHNGKQIASYVGLVPEEKSSGDRRRLGHISKQGNALLRFLLVEAAQVTIRSQAQWRSKFFHLAMRRGRKIAKVAMARKLAVHLYWMWRQGWDYGQFKRFGSYAGEPGHPDGKQ

SEQ ID NO: 210234 - protein, 377 aa, unidentified
MSKLRFVGLDVHADTIAVAVAETDGEVRSFGIIPNRLESIRKMIGKLAPIGTLKCCYEAGPTGYVLYWQLTQLGVECEVIAPSLIPTKAGDRVKTDRRDAEKLARCYRAGERTPVWVPDANHEALRDLVRAREAAKKDQLRHRHRLGKFLLRHGKRPIGAGKAWTQKYLDWIRIHIQFEQPALEATLKHYREEVDHIAERIAKLEQAIDEAVKQAPAEIRVVIEALQALRGVAQTTAATVVAELGSLLRFPHPSELMGYSGLVSSEHTTGNRVQRGAITKSGNAHLRRVLVEAAWTYRHRPNVQGRVLRRQKSLALSEEAKHIAWKAQQRLYKRFTALVARGKQNNVIAIAIARELLGFMWAIAVHTESQSKPAKAA

SEQ ID NO: 210235 - protein, 367 aa, unidentified
MPAYIGVDLHHDQLTFHKILKDSQGKITHENGVVLTSKIGEKFIPLLDKNSHVCVEASSCTYTFIKNLNEFKPLVHVVNPQSFKELYCSGKKTDKIDAKKLSNRLKTHIEDNDPEDGFPEVYIPDNESQQLRYLFSTDKFISKNIVSLKNRIKGFFRSRFIVIKSSQLLKDLTVLFDVVAATRTERMQIMLLCDELKLLEAHKKEIRREIIDLGNSRFPSEIRILTSIQGIGEFTACALMSDIVDIRRFKNQKKLVSYLRSAPRVDSSGSVTKVGMINKRGRKTSFNNLLQGISYFRRTNPILGDFYDKKCNGKSKGKVRAAVVRKVIVTIYFMLKNEELYKFCDNELHLRKMKKNSQKNKKSQVAA

SEQ ID NO: 210236 - protein, 390 aa, unidentified
MEVRLENTASATTNNDPAHCFVAIELSKSSWVLGFQTPLAKQTSRYQVKACDAKALLELIERVRSRMARELGRPVEVMSCYEAGYDGFWLHRVLEAHGIHNHVLDPASLQVNRRARRPKTDRIDADRMVRALIRHLRGEPEACSVIRVPSPEQEDARRLHRERDRLIAERVAHVNRVKGLCATQGIYDYEPLRSDRLKRLEKLRTGDGRALAPRLKAEIVREIKRLEVVLEMISTVEAERDAILTEKKSTHLNADKIKMLAKLKAIGAVFSTTLVGEVFYREFANRRQLGSYVGLASSPFCSGSLDRDQGISKAGNPKARVMMIELAWTWLRYQPESALSRWFRERVGNLKGRPRRIAIVAMARKLLVALWRYLQTGVVPTGAELKAQSN

SEQ ID NO: 210237 - protein, 339 aa, unidentified
MNVIYLGIDLAKNVFQLCGLNQAGKPVYKKRTDRKTLLQTVANIPACLIGVEASTGAFYWQREFEKLGHKVKVISPQYVKPFVRGQKNDGNDAQAIAIALMQPTMQFVPPKSPEQQDIQALHRARQRIVNHRTATVCQIRGLLLDRGITIGAAVSRVRRAVPLILGDAENGLSVRMRRTIAELYDLFNDLGRRINFFDKEIDAVFRQSEACQRIAKVKGIGPKTATAVVAAIGKGTEFKNGRHFAAWLGLVPRQHSSGDRQVLMNMTKKGDKHLRTLFIHGARAVVRVAANNNDSYLNQWVNQLKERRGFNKTTVAVANKNARIIWSILHNETEYRPAV

SEQ ID NO: 210238 - protein, 414 aa, unidentified
MDVVVERCAGLDVHRDSVVATVRVPGKGKSRRRRAQQTRSFGTTIRQLEQLANWLQGFGVTLVGMEATGIYWKPVFWVLERRFECWLLNAQHLHNVPGRKSDLIDSAWCCQLLEHGLVRPSFVPPPEIRRLRDLTRLRSSQMEERSRAIQRLEKVLQDAGIKLSSVASKTYSVSARAMLEALLGGVSDPAILAELAKGKLRAKIPQLQEALANRFELAHHGVLVAQLLAHIDALDETVANLDGRIIEATDPHAELITLLSTIPGVGRYIAEVLIAECGVDMTVFPNAEHLVSWAGICPGTNQSGGKRRSGKTRHGDRWLRTALSEAARAAARTKNTYLASHYWQIRGRRGEKKAIGATRHDILIAYYHITRDQVPFRELGPDWLARRHSVEHRTHRLVKQLEALGHAVTLEAAA

SEQ ID NO: 210239 - protein, 336 aa, unidentified
MAVDIAKNTFQLWGVNSAGRCVFKKKVSRSHFLPALAKLKTCTVVMEACGGANHWSREITRTLEHEVKLISAQFVKPYVKTNKNDLRDAEAIAEAASRPNMRFVSPKSLEQQDWQSLLRMRDHCVSTRTRLSNHLRGLMTEYGVVLPQGIAQLRKALPSLIAAEADNGLTPMIKALIASQYEQLLALDEMIKAYTRQIDQLGQQHDVLKRLQTIPGVGPITALSLYVIGGNGSAFKNGRHFAAFLGLVPRQHSSGGREKHLGISKRGDGHTRKVLVHGARAALKYAKHKNDQQSRWVMSLAARKHVNTACVALANKNARIAWAILRFGDQYRVQAA

SEQ ID NO: 210240 - protein, 423 aa, unidentified
MDILYERVAGLDVHKDTVVACVRIVVDGKTKRECRTFATTTEQLAELRAWLEECRCTDVAMEATGVYWMPVFRILGEGKFELTVANAAHIKNVPGRKTDMNDAMWIADLLACGLIKASFVPPEELQELRALTRTRKQLVREQTRHVQRIEKTLAEANIRLDSVISDIMGASGRRIIEAMIAGVRQPRKLADLAGKQIKATPKELYDALHGRLTDHHRFLLELHLRQWDGLDETIRKIDREIDQRIGRMDVKAGASQVPFRSLIELMYTHPGISTVAAPAILSEIGCDMSRFPTAGHLVAWSGLCPGQNESAGKRKSSRLRKGAPWLKTMLVQCAWAAKRKKDSYYRAQFFRLQARRGPQKAICAVAASILTAIYHILKNGTEHHDLGQDYFDRRPTEVKASRLVTRLNKLGFTVQLQPIAEAA

SEQ ID NO: 210241 - protein, 425 aa, unidentified
MNYKQNEKINQVKESTLVVGIDIGSTTQYARAFDWRGIELGKVFPFSNSREGFESFKAWMQHLQDKYKKLDAIVGIEPTGHYWFDLGAYLEDEGILLVMVNPYAVKQTKEPDDNSQSKNDRKDPKVIAKLVTEGRYSAPYTPDGVYADLRIMVANRKRLIREMTQIKNRFARWFAIYFPEYTDVFGDYEAQSSMLLLKKVCTPEAIVELGAEKINQIWRDAKLRAVGMKRATTLCETAKRSIGLKKGSSAARYEMKLLLEDYEYKKAQLDAVMEEIEKLCRKIPESEQMLAIKGIGVITVAGFLAEVGDVRRFESPRQIQKLAGLSLRENSSGKHKGQTSISKRGRSKLRAVLFNAAIPLIAKNPEFKSLHEYYTTRANNPLKKKQSVIAISCKLIRVFYAILANGVTYDAQKMLSDIHRQPQAA

SEQ ID NO: 210242 - protein, 352 aa, unidentified
MYGLKHQKEKRSMDHFAGLDVSVKETSVCVVDETGKIVREVKVASEPQGLLAVLANPAYHFKRIGLEAGPLSQWLYSALAEAGLPVICVETRHMRAVLKAQINKTDRNDARGMAQMMRVGLYRPVHVKTLRSQKLRMLLTHRKLLQSKAIAIDNDLRGTLRNFGLKVGMVGAARFEARIKELIENIPDLAVLVEPLLVVRRVLREQLGILHRRLLAVVRDDDVCRRLMTVPGVGPVVALTYRATVDVPARFRKSKSVVGLTCAKYQSGEIDRRGAISRCGDEMMRTMLYEAAQSMLFHSTRWSWLKAWAMKIARHRGMKKAVVALARRLAVIMHRIWVDGTEFYWTREAVPA

SEQ ID NO: 210243 - protein, 343 aa, unidentified
MSIMILGIDLGKNSCSVVGVDATGAIVTRRTMRRQTLIDYVTKLPACIVAMEACCGAHHLGRLFTGRGHEVRLMSPEYVRPYIKAQKNDDRDAEGIAEAASRPTMRFVDLKSQEQLDIQTLHRVRSRLVAERTNLINQLRAILLERGVIFPAGRRKLELGVDSMLAEDVKLLSSRVQQLVRELRAEWQELDTKIGALNTELIQLARNDAATRRLTTIPGIGVLNATALVAAVGNASSFAKARDLGAWLGLVPRQYSTGGKPRLLGISKRGNTYLRTLLIHGARASLPSLSKSDTPTGRWLKAMMERGVHRNVMVVALANKLARIAWAVLRKETGFDRSCPAVA

SEQ ID NO: 210244 - protein, 346 aa, unidentified
MPSLGIVPNSRLNRLQPSSLRQEWESPMTTPVYIGIDISKRTLDIATSDRYLGQVPNTPTGHAQLLEQLATLDAEQNNVHLAMEASGGYERPLLQHLLTAGSHVSVVQPACVRHFAKSLKLHAKTDRIDAMLIARFAATTKPNPAEKTCKTSEKLRALRDRRDQIIDDRVREQNRLECCDNTTIARMIKQSIVRLRKLESQLDDQITRCLSRSKSLSAKADRLTQVVGIAQQTAVTLLAHLPELGTVNRQQIAALAGLAPYAHDSGAMRGKRRIFGGRAVVRRALYMASLSAVRHDAVLRTFYQRLLAAGKAKKVALCACARKLLVHVNSLCAQVQALPGKKAAGA

SEQ ID NO: 210245 - protein, 489 aa, unidentified
MEPKKYRRCCGIDVHKKSVTVCILPPAGKMEVEIRKRTFRTFTRDLKQLRTWLKNLKVTEIAMESTGQYWRAVWNILEDHFEKLILVNPQHIKGLAGHKTDPKDAQWIASLLETGKLKGSLVPPREIRELRDLTRQRVNLLEDLNRAKNRIEQLCQAGNIKITSVASDLFGLSGRTMLKALVEGRRDPGWMADYARGSLRGKRRELELALEGSFTDNQRWLLSKGLTQVEWLEIQVQVLEQEIVRRMVSFEEPMRRVMTIPGIEYKTAWTIIAEIGVDMSVFEDTRHLASWAGLCPGNRESGGKRMSGRTRKANRYVRRAMCQAAWAAARTKNTFLSAFYRRMQIRKGPQKAVMALAHHMVLIVYNVLKRGEEYVEVGGDFYDRRNKPKVVSRMVSRLMKLGYQVTLTPVVPEDSVEPPDEPPASEGSALLEFRPDLLPEEEIAVQVPIEKRKRGRPCKCAERGIICKHQIGLRLNLLESQGLERGEFS

SEQ ID NO: 210246 - protein, 332 aa, unidentified
MQISTIGIDIGKNSFHFVAFDARGGIVIRRQCSRTQLIRALANLPPCLVGMEACCGAHHLGRILVAQGHDVRLIPPQYVKPFVKSHKNDLLDAEAIGEAVQRPTMRFVPLKTMEQLDLQAIHRLRTRLVRRRTAVINQLRGFLLERGVTFPIGRRVLIERFPEVLDNPALGLSVRFCRLLQQLRDEWRLLDGSIQDVDQEILSLARDDEACERLMQVPGIGPLTATALVAAVGNGAAFAKGRDLAAWLGLVPRQHSTGGKTVLRGISKRGNAYLRCLFIHGARAVCRHHRQRPHRLGRWLANLEARAHPNVVTAWAVLQRNTHYDGRLLANA

SEQ ID NO: 210247 - protein, 414 aa, unidentified
MDLVHPRCAGIDISKRDAKVCVRIASSGRARAISSVTTWGAVTSQILALRDHLVAAEVTLVVMEATSDYWKPFYYLLEDGPFEVMLVNARQVKGIPGRKTDVSDAAWLAQLGAHGLVRGSFVPPEPIRQLRDLTRTRTAITRERGSEIQRLEKLLEDAGIKLSSVASDITGVSGRAMLEAMIEGERDPAGLADLAKRRLRAKIPQLTEALTGRFAEHHGFLARIHLDLIDNHTRAIEELTARIELVMQPFRATRDLIVTIPGISTLVADVIIAETGGDMSRFPSAGHLASWAGTCPGSNESAGRIKSTRTRPGNPYLKGALGAAALSVACSKNTYFAAKFRRITARRGPMKAFVALQHAMLVAIWNMCSTGSYYEDPGEDFFTRLDPDRAKNRALAQLRRMGYVVTLEPLPTAG

SEQ ID NO: 210248 - protein, 337 aa, unidentified
MKVTLIGIDLAKTIFQVCGVNQAGKSVFNRQVRRNKLMAWLIQYPEATFAMEACSGSNYWGRELEKMGFSVMLIPPQHVKPFVKGNKNDRNDAFAICEAARRPSIQCVRPRSLAQTDTMLVHKILERRIRGRTTLTNQLRGLLNEYGLVLARGKERLRDELPYILEDAENGLTPTARHLLHQQLQEWRVLDAAIAELERTIAQQVKYSEQAKRLTQIKGVGNKIASAAEAFMGNGSSYRNGRHFAANLGLVPKEHSSGGKQRLGRITKRGNVYLRRLLIQGAWSVIRYADRGNDRLSRWAKQLIERRGKHKAAIAVANKLARMIWAISYHQTEYRPG

SEQ ID NO: 210249 - protein, 412 aa, unidentified
MLFVGDDWAEDHHDVEIVGQDGRRLVTKRLPEGLDGITRLHGLIAGCMPEEWADLPPGEAAALVKVGIETDRGPWVAALVAAGYEVFAINPKSSAHYRELHSSSGAKSDRGDAHVLAEIVRLDRAHHRPVAADSAQGESLKLVARAHQSMVWERTRHVLRLRSALREFFPAALAAYGDLDEPDTLQLLLIAPDPEAAARLSAAKISAVLARAHRRNVAARALQMQAVLRAPALRQPGAVQSAFAAIAASEVRMITAISTEIAVLGQVVADHFGRHRDAEVYLSQPGLGVILASRVLGEFGDDPDRYADAKARRNYAGTSPITRASGTKKVVLARYARNTRIADATQQWAFGSLRGSPGARAYYDELKARKIGHRAALRQLGNRWVGILHGCLKTNTLYDENTAWGHRNTTAA

SEQ ID NO: 210250 - protein, 390 aa, unidentified
MQAYEGCAGVPAPSLMHRRRVLGKIITYIGLDVHKDTIAVALAEAGVRSDGREYGKIANTPAAVKALAAKLSRVGSELRFCYEAGPCGYGIQRQLTLAGHECVVVAPSLIPRKPGDRIKTDRRDAISLAKLHRAGELTAVWVPDPAHEAIRDLARARLAAVRSLRQARQQLSGFLLRHGRHYHRPAWTLMHRRWMAGLRFEQAAHHIVLEDCIAAVEAATARRDRLEAHIEAALPDWSLAPVVRALQALRGMALVAAATVVAELGDITRFANPRQLMAYLGLVPSEHSSGATRRQGGITKAGNGAARRMLIEAAWSYRFPAPISREQLLRQEGLAKPIRDTAWKAQERLCRRYRKLSRAGKSPTVVTTAIARELAGFAWAIAKHVQIAGA

SEQ ID NO: 210251 - protein, 339 aa, unidentified
MQQQRQYVGIDLHRRRSVIVRMTEDGEVLDTVRIVNDPVALSLELAKAGPDPEVALESTYGWYWAADLLEADGARVHLVHPLGLHWDARRVKNDERDATELANRLRRGDLPESWIAPPELRELRELIRYRAKLTALRTSAKAQAHAVMAKVGILPTLDDMFGPGGQRLLDAMPFEGAYAVRVESLRDLLEIYERELAMVGRELQRRLAGNRGYGAIQAIKGVGPIMAAIFVAEIGDVTRFPDARHLCSWAGLTPSHRESDTKVQRGHITKQGSSLVRWAAVEAVVRYHGGDPIAPAFMRIAKRRGQMIGRVAAARKLLTLVFYGLRDGEIRCLAEKEAS

SEQ ID NO: 210252 - protein, 339 aa, unidentified
MLYVGIDVAKNKHDVTALNVRGKTVLKPLTFSNNKAGFELLDLSLRQLNQDCLIALENTGHYAFNLLNFLHEQGYKVYTYTPLLIKEFAKSLSLRKTKTNKKDAHGIALKLLSDPNREQFQHDNRQVELKILARHIHRLKKKQSDWKVQYTRCLDIIFPELDKIVEKHSEYTYQLLTCYPNPQKRLEAGFDKLIEIKRLTASKIQDILSVAPRSIGTTSPAREFEIIKHYKRLIDKAEKCVNDLMAEFNSVITTVTGIENRLGAVILAEIRNIHAFDNPAQLQAFAGLDSSIYQSGQIDLAGRMIKRGSPHLRWALIQAAKACPRFSPAFKAYLKTKLE

SEQ ID NO: 210253 - protein, 341 aa, unidentified
MTAIGIDTHKATLAVCAVDGLGLALDERTFRNDPAGHRALAVWATEVAAGGPIGIEGSSTYGAALARFLVAAGFAVREVPPQLTRRSRTESRRPGKSDPGDALTIARVTAREPALPPVRLADRTRELGLLLDTREALVHEATRRRNRLHAHLQVLVPGYGERIHRLVSGAALDRARRLLRGLTGLEPELARALVVDLRRLDRQINGMTDRIATVVGDDPLLRLPGIGVVTAARLLAETGDVTRFRSPDAFAALAGVAPIPASSGQIQRVRLSRGGNRQLNRALYVIALTQVWHHPPAKAYVARKRAEGKTWREAIRCLKRQLVRPVFRLLQEGQLGLQAAA

SEQ ID NO: 210254 - protein, 347 aa, unidentified
MGTVHMQITTIGLDIAKNVFQVHGIDSNETVVVRKQLRRGKLLAFFEALAPCRVGIEACATAHHWARELTKLGHEVYLMPAKDVKAYVKRNKNDAADAAAICEAVRRPTMRFVRIKSAEQQCQLMQHRTRDLMMRQRTQLINALRAHLAELGIVAAMGDKGVTELLAIVANEGDVRLPVEARATLALLAAQLNALQMLIGSLEKRIKMQHRANPASKRLETIPGIGIIGATAIAATVVDPKVFRSGRDFAAWIGLVPRQESSGGKQKLGSISKRGDPYLRRILIVGAHSVLRWAMKNPERYPWLTQLLARRPFKVVAVALANKMARMAWALLAYGGTYRPPRLSIAP

SEQ ID NO: 210255 - protein, 428 aa, unidentified
MTLYNKHDEIIVEVKDLGSKRGSRWIILKTVLSVDVAKNKSMIMLMNSDGEILIDTKEIKHNLEDFEKAKEEIKEISPENLTVFMESTGTYHLPVERYFKENGFNTLVINSLTTKNNYDTIRKTKTDKKDCYRLAKLFFVNEVEYHELSKKDLYANLKAMTRQYFYLLQQNVSCKNRYKRLLNICFPELEKIFKSTRIYDDTALNFIKEFPHAEIVKEKRIDALYNNLYKTNGRNLNFYKRLSETIKIASANSYPGVDKEHKDVKNLSDMAKIVQNNNNVINELRDKMIETAKKSPYYEIINSFYGIGEILTAEILGELGDITRFDSPKQLIAFCGLDPTIKQSGKSINVKGAISKRGNKYARYILFNCSQMVVKLGASNYPEHPVYIYYQNKKAEGKHYYESLTACSTKILRMLYSMCKNNKQFLEN

SEQ ID NO: 210256 - protein, 369 aa, unidentified
MEKDTIYVALDDSKRKLVVAILQAGATEPEAREIPKDPLHIQRLFRRLQREGPGQACYEAGVSGYDLYRQITACGVTCQVIAPALTPRRPGQRIKTDRRDARKLVRLFRAGELTPIHVPDEAEEAARDLVRCREAVRRDVVRWRHRLLKLLDRHGRLWVTEKNWTQRHWTWIRAQRFALPALQRAFEATVFALEQALARQAELDREIEALADTAPYRDPVGWLRCFRGIGTLSAMVLLAEIVDFQRFRRPRELMAYLGLVPSEYSSGETQRRGGLTKAGNTHARRVLVEAAWHYRHRPAVGRALASRSQAQPEEVVGQAWRAQQRLHRRYRHLVGHGKRPPVAVAAIARELVGFLWAAMTRRETRRQVA

SEQ ID NO: 210257 - protein, 347 aa, unidentified
MNFYNNIYPYYCGIDLHARLLYVCILDQDGNTCLHKEIPANPEKLHQFIDPYIGNIVVGVECMHCWYWVSDFCEDLGVDFILGHALYMKAIHGGKAKNDRIDSYKIVNLIRGGNFPLAYVYPKKMRATRDLLRRRMKIVRHGADLKAHVVNTTSQYNLPPNKVNLKDVAAREQLRSTFPERSVQKNIDLDISILDCYAEQLAKVEWYIQQQAKQHNPKHFYLLKSVWGIGPILALTIIYEIGDIQRFESVQKFASYCRLVKCKAESAGKSYGTQGNKIGNAHLKWAFSEAAVLYLRGNKKAQAYLLTLQKRMSKAKALSALAHKLGRCVYFMLKNETVFDESKFLKS

SEQ ID NO: 210258 - protein, 404 aa, unidentified
MIIIGLDWSRYKHDFAIMDAQGNVVQRGTVAHNTEALEELAATIQHQVNSVEEVRVGLELNDGALLAWLVSKGYTIFGIQPKSAQRARDIYRPSGSKDDGIDAFVLAEFIRVNTNRLRPWHPPSAITLELRELLRWREQLIHQRTAAYQRLGALLAEWSPQLAELCDDLGRIWQLDLLSQFPTQARLHQAHGNRIRCFARKHRLRATTYQKIEKARRSTPMPIPTGRVRPVERQTHFLIEQVQLLNSEIKDVEAELDRLTAQHPDVNVFDSLPVHGTVTTASLLAIFGDEHERPLSADELAALCGVAPVTIASGKSKKVRQRRACDHTFRQALVHFAFNTAFRSGCWAEQFYRRKRDEGATHHAALRCLAKRWLRIILRIWKDHATYDEALHRSNQRSNQSHAA

SEQ ID NO: 210259 - protein, 338 aa, unidentified
MKKYIGIDLHSNNSVVVVTDEDDRIIYQKRLANKLDEILMALAPHKEEIIGVVVESTYNWYWLVDGLMDAGYQVHLANPSAIKKYEGLKYSGDFADAAYLAHLLRLGLLPEGYIYPRELRSVRDLAGKRMQLVRCRTAQILSIEGILIRETGGRMRSEKVKAMTAETVEALGLMPDVTLAMESNRVICQALQQQIKILEERLESQVKLQPGYQLIKTIPGIGQVLATTIMLEAGPMTRFADVGNFSSYCRCVDSLRESNGKKKGSGNTKNGNKYLAWAFMEAANFALRYCPEAKRFYDRKKNRTNRVVALKSVAHKLARACYHILREQQPFDVQRCFV

SEQ ID NO: 210260 - protein, 428 aa, unidentified
MDEVHEQDGFVERVAAIDVGKNELKVCVRVPDESPGRRRQQVRTYPARTAAIFELSDWLRAERVELVVMEATGDYWKPPFYLLEDDVECWLLDAKQVKHLPGRPKTDREDAIWLAKVAERGMARPSFVPPKPIRRLRDLTRYRRALTQDRTRNKQRLEKVLEDAQIKLSSVVADVYGVSGRAMIQALIDGQRDPKALAQLAKGRMRAKITDLEEALTGHFAEHHALICQMMLSTIDSLTAQVDQLTAQIERAIAPFQHQVDQLDEVSGIGRVGAQDIIAEIGVEMAVFATSAHLVSWAKFCPQTTQSGGKPARNGAAGRGDPWLAAALGEAAVNAGRTHTFLGERYRRLSRRRGKKKALVAVGNSLLTIIWHLLADPASSYRDLGPDFYESHVNQRRRERTLIRQLEEVTGRKVTLHRKPEQPAPATG

SEQ ID NO: 210261 - protein, 385 aa, unidentified
MQKHHDDSKACLTAFVQDNTAIAVIEMSLASWVVAGLIPGVNREPLKKIAADPEELLRLLYRWRDQAIKAGKDITRIAVAYETGRDSFWLARWLRDRGIDAHVIHATSVAISREHRRAKTDRIDTAMLRRGFLGWLRGERGHCSMAVVPTIAEEDAKRPHRERESLLKERTSTINRMKAILAQFGVRNFKPSLRKAAEKIDAVRTPEGVPLPPNAAAALRRQIERFRLINEQIKTVEKTRMQRLRQNPTGKYNTMVFLLVRIIGLGVETAEQLVHEMLSRNLRDRKAVARYAGVTGSPDESGASRREKGLSRSGNGRVRKILIQLSWRMLQFQPDSRLARWFKNRTANSQRSRKPMIVALARKLIIALWRYVNTGVVPDGFKLAK

SEQ ID NO: 210262 - protein, 357 aa, unidentified
MTIVAQTRPFVIGVDCHARTHTYVIVEASTGQRVACEQFPTTPAGISRALAWVGRRTNGDMACLWAIEGVGSYGARLARGATDAGYDVAEAPRMNARGRRGIGKSDPLDAAAIGTAVLNLEESQLRAPRRDEGTRAGLRILSAARDQLTRDRTVNVNALIALLRAHDLGIDARKPLVPAQIATIIRWRERQEQIELSIAREEAIRLARRVLEVTTQLAANQKRMTELIQQSPAAPLLEMVGAGAVTVATVLTAWSHPGRIRSEAAFASLAGVNPLPASSGNTVRHRLNRGGDRRLNRALHTITMTRMVHHPGTREYVAKRTQEGRSYREIRRSLKRYIARTLYRQLNTLYATGEATQ

SEQ ID NO: 210263 - protein, 322 aa, unidentified
MAMLSFAGIDVSKDRLDVMVLPEEQFSSVSNDPTGWAKLVEQLRGSSIAAIGLEASGGYERGVMRSLLAAGMSVRQVNPFKLRQFAKASGVLAKNDPLDARMIASFVAIMPTRPAQPRAPALERLVEMLAVRRQLSAEKVAAENASRLLENAMLQRLSRRRIARLAADIDMLDERLVEIVVADAALAHRYRLLTSMPGVGPVLACTLIALLPELGRMSRKQVAALVGVAPYAFESGKLKGKRCVWGGRAPIRHVLFMAAMSASNWNPLLKRFHDRLAATGKLPKVVIVAVMRKMITTLNAMVRDDVVWADRHRGRHIAPTAR

SEQ ID NO: 210264 - protein, 347 aa, unidentified
MVYVGIDLHRNRSQIAVLDREGNELLSRRIVNKPETFLELLQGLGDEAQVALEATYGWEWLADLLEEAGYELHLAHPLRTKAIAAARVKTDAVDARTLAHLLRTDLLPEAYIAPRELRDLRDLLRHRVALTRMRSALKQRVGAILAKHGIARPYSNLFGVGGSRFLAELELREAPRRRLDSLLTLIAAFDRQIETTTKEIEQRAQADPYVDVLCQIRGVGRYIAMLVIAEVGDISRFPSARHLCAWAGLTPTVRSSDGKARLGHISGQGSPALRWALVEAAQHAPTGGGPLRAAYERIAKRRGKQVAKVAVARKILTLCYYGVRDGEIRCLAPRAKARTIRTTAVTR

SEQ ID NO: 210265 - protein, 423 aa, unidentified
MDFKTVLDAERIIGLDISKVDFTSCTLLLEENYSKRHIVKPTVKNKDKKGKSTTKHIPDHQMSAKGRSLFISQLKKGDIVALEGGTSSANFAREIEEKSEAIVVLLNPGKLHNYLKSMNKSDTKDAMKIAEYIRDVRPLGWCKIPIPTREESEARTLQKQHINTKKLRTAAVNQLHGLFNEYGFPLITKTDLKTDTNRVKLICETFEDGSPVRICAEMMNDLICKYDDMLKTIEALIVEYILEKHPEETVAWMSMHRVGIHTTAACIAYAGDCTRFSGPDQFRNYVGLIPYKEQSGKSVDYTGGVVRHGCMPIRRNIMQAAWGSILTGGKKRKLFEEEGIISHYNRFEDIYLENYAKGTKGQKIAVKIANKIITIGWTLVRSKQLWSECNIDDLNKKLKTNNINIKIKAIDEGGHPILEGSND

SEQ ID NO: 210266 - protein, 343 aa, unidentified
MLHAGLDLSRKRLDVCLLTEHGELIDHVTAPPDGDGLCALARRVAPFGVPVRGVIESMNGARFVRDTLEEHGWEVLIADAQRVKGLAPLACKTDRIDARVLAELSWRDLVPAIWLPDPTIRRERELARFRLHLVRHRTSLKNRVHATLITFGTPCPVSDLFGHAGRELLDRLAIPDPWRRTVDASLALIDELELQIAQLTVELRRLGADHRYVPLLVTVPGVGWVIAFTIASEIGDINRFASPTKLCGYTGLCPRVMQSGNTDRRGPITKHGPKYLRWALFEVALHACTHPLYRDRYERTKKRLGRQRGPKVAQIDLSRKITEAIWHMLTRNQPFAPAGANFV

SEQ ID NO: 210267 - protein, 381 aa, unidentified
MPYEGGHPHRAGMVQTVSTRMFSIVLEFGRSSYSRDLNGYRGMASTHANKPRIDKKRATAMKKLYTTHGVTASYVGIDISKNGLDVHVHPSGSSRYFNNRGEGFRALGKWLDSISIALIIFEATGRYHHDLHVFLDSIGYSVCIINPYRSRRFAQALGYLAKTDKADAQMLAQYGAMIKPDPTPLCDKDIKALKELTVARRALLKRMTQITNHMQDCHSSLLKCQSQQAIKQCERHLAQIDLEMEKLTQKKTILKQRFDILTSIPAIGPATAFTLIAEMPELGKMTAKQASSLIGLAPVAQDSGMYRGRRKIKAGRRGPRMALYMAAVAALRFNQDMAKLYMRLKGNGKPSKVALITVMRKMIVLANTLIGQQRKWQANCP

SEQ ID NO: 210268 - protein, 312 aa, unidentified
MNIPVRIGMDTSKSVFQLHGVDENEVVVVRRQFRRAEMIRYFEKLPPVLVAIESCGSSHHWARLLQSFGHKVKLIPPQYVKPYVKRGKNDATDAEALCEAVTRPSMRFVPVKSKERQAACMLMTVRERLVGVKSQLSNAFRSYAAEFGIIGPAGRQNISTLIKRVLEDDTLPEMARDLFQFQAREYAAVEARLDEIETKLMKWHREDDVSRRLSTIPGVGPIGSIMLSMKAPPPETFRSGRDFAAWIGLTPKDHSTGGRQKHGGITKAGDSVLRSTLIVGATALLRHIRKGRHKPTPWPPRFWRESRRNWWL

SEQ ID NO: 210269 - protein, 391 aa, unidentified
MICVGIDVAKDKHDCCILDSEGTTLADCFTIPNNLDGFKRLLQTIKDCTQKSDKIKVGLEATGHYSCNILGFLLDNDLPVYVMNPLHTNLYRKSLSLRKTKTDRVDAKTIATMLLSDVDLKSYTDTAYHNEELKSLTRYRFDKVRERAKLKQSVSRLVTILFPELEKIVPSLHIASVYALLSEYPGAKQISEIHLTKLTNLLATASKGRYGKDKAIQIRDAARTSIGSVMPAKFLELKHTIKLIRELTSEIDEIEVSIQKIMDELNPPILSIPGVGIQSAAMILAEIGDFSNFESPDKILAYAGCSPSTYQSGKLTNCYAHMEKRGSRYLRYALYNATKYVCHWNPVFAEYLAKKRAEGKHYNVALSHATKKLVRLIYALQKSGKAYLVAA

SEQ ID NO: 210270 - protein, 346 aa, unidentified
MTQYKRIGIDTSKAVFTLHGIDQRDQPTLRINLRRAQMISFFKKLPPVEVAMEACGGAHHWARELAVLGHAVLLIPPQYVKPYVKRGKNDRNDAEAICEAAGRPGMHFVPAKSLSQQAQGMVLKVRDTLIGQRTLLVNTLRGHASEFGVVAGKGVGRVGSLLAAIEQDATIPAEARDMIALLGQQIEHLDIKIKALEARLNAAHKANAVSRRLATIPGLGPVTALTLATEIDPAAFASGRHMAAWIGLTPKEHSTGGKQRLVGISRAGNERLRSLLVVCATSVIKAATMPASKQMTGWLQGLLQRKSRKVAAVALANKIARVAWAVMTYGTVYRRSPTNVEVSYAA

SEQ ID NO: 210271 - protein, 346 aa, unidentified
MKYYAGLDVSLKEISICVVDQDGEIAMRGNAPADAEAVAGWFRNRSLQPETIVHESGQLSIWLQRGMAEIGLPAICIDARKAHKSLSARLNKSDAADAEGLAQLARTNWFTPVHIRSEDADRLRSLIGARERLIRLRKDLEGHIRGMLKTFGIRMIGVGQGRQRQGFRDQLAAAGETDPILRTIADGFIAAHSTLCEAATDLERAVKAKAKSHPVARRLMTIPGVGPIVSLSFLALVDDPNRFSKTSDVGAFLGLTPRRHQSGEMDWSGRVSKCGDAAMRGLLFEAASCVIRQVKRFCSLKSWAVRLAGRRGFRKAAVATARKIAVLMLTLWKSEADYQWTKEATA

SEQ ID NO: 210272 - protein, 353 aa, unidentified
MAQSTEGREVILGVDTHLDAHVGVVIDGVGKVLGTLIAPAGLHGYQQLLQWSGSFGACTRAGVEGTGTYGAGLARVLRGAGIEVLEVNRADRSKRRLRGKSDPTDAENAARAVLSGEATAIPKLQSGVVEAMRAITVARRSAVKAKTQAINQLRALLVTAPDPVRAKLMKSKPEHCVQACIRMRALGRTPLLEALTRTLRILAKRWTVLAAELRELDAMLEALARRAAHRMLAKFGVGPYTAATLMVVAGDNPERLRNDAALAALCGASPLPASSGKTQRHRLNRGGSREANNALWTIAMVRMRSDARTRAYVARRTAEGLSSKEIQRCLKRYIVRELYPLILADLRDAVATS

SEQ ID NO: 210273 - protein, 476 aa, unidentified
MNCAAQPFRWRQQEELEMNPKRSKSRHGRKMPMVHPNAAAIDVGATMHMAAVRADRTPEPVRSFGTFTADLHRLVDWFTQCGVESVVMESTSVYWIPVFELLDARGFTVFLVNARDAKHVPGRKTDVSDAQWLQRLHSYGLLRASFRPKGQIAELRSYVRQRERLLEYAASHIQHMQKALTEMNLQLHHVVADITGATGLRIIRAILAGERDPQALATLRHYSCHSSAETIAKALTGSYRAEHLFALEQALALYTAYREKASACDVRIEAVLKELSIHRGRDHGAVPPPRRRHRTDQVNALAFDVRAALFALLGKDITAIDGLGAYLSLKLIAECGDDLSSWPSAKHFTSWLGLAPSNKVSGGKMLSSRTRRSGGRAAALLRLAAVAVGRTDTALGAFYRRLSSRIGKAKAVTATARKVAVLFYNAVRHGMEYVDPGASSYETRYRTRVVNNLHRRAKAFGFALQPLEPKADAVVS

SEQ ID NO: 210274 - protein, 342 aa, unidentified
MDEYDGRQFVGIDLHRRRSVIVRQSESGEQLSAVRIVNDPVALGLQLEQAGSDPEVVLEATYGWYWAVDVLQACGAHVHLAHPLGVKGFRYRRVKNDVRDAADLADLLRMGRLPEAWIAPPQTRELRELVRYRAKLVAIRSGLKAQIHAVLAKAGVLIAASDLFGVTGRQRLAKVPLGAAYAQRIGSLLQLIDIFDSHEARFAAMIAEQLDTHTGYHAIQQVPGIGPVLAAVFVAEIGDVDRFTDPAHLCSWAGLTPTHRESDTVVHRGHITKQGSKAVRWAAIEAVQRHPTTAKIAADKHRIEARRGKNIAKVAAARKLLTLVYYGLRDGHIRALDRTRAA

SEQ ID NO: 210275 - protein, 356 aa, unidentified
MGGLKHQKEKRSMDHFAGLDVSVKDTSVCIVDDTGKIIREVKVASEPHALLAVLTNPAYHFKRIGLEAGPLSQWLFSALAEAGLPAICVETRHMRAVLKAQINKTDRNDARGIAQMMRVGLYRPVHVKTLRSQKLRMLLTHRKLLQSKAIAVDNDLRASLRNFGLKVGVVGAVKFEGRIKELVEDLPDLAVLIEPLLVVRRVLRGQIDVLHRRLLAVVRDDDVCRRLMTVPGVGPVVALTYRATVDVPARFRKSKSVGAVFGLTPSRDQSGERDRPGTISRCGDEMMRTTLYEAAQIMLMHSAKWSWLKAWAMKIARHRGRKKAIVALARRLAVIMHRIWVDGSEFRWTREVIAAA

SEQ ID NO: 210276 - protein, 446 aa, unidentified
MADTGDSGGVEEIEQAEELVARVAAIDIAKASGMVCVRVPHEDKPGKRVQRVFNTVATSGAILDLADHLVCQGVTRVVMEATSTYWKPYFFLLESRGLECWLVNARDVKNVPGRPKTDRLDAVWLAKLTERGMLRPSFVPPKPVRELRDLTRARAVMTHERTRHKQRTEKLLEDAQIKLSTVIADIFGVSGRAMLEALIAGERSPKALADLAHGTIKASHATLAEALTGRFEEHHAFMCRMLLDTVDYLTVQIDKLTARITLRLTELSTTEDDEGPGQGTLMPITDTERLDEIPGVGPGTAQVILAEIGLDMSVFPTAGHLVSWAKLSPRTLQSGNKNTSGPTGKGNPWLRGALGEAAISAARTDTFLGARYRRIIKRRGHMKALVAVARSILVSVWHLMNDPTARYRDLGADFHTRNLDPGRKSRDLVRQLTALGHDVTLTPATA

SEQ ID NO: 210277 - protein, 411 aa, unidentified
MMEAILKCVAGFDVHSATVAVCLRRVIDGEVFKEIRTFKTMTRDLLALGDWLTSEGVTHIAMESTGVFWKPIYNVLEGQFEILLVNARHIKNVPGRKTDVKDCEWIAQLLQCGLLRGSFIPPKPQRELRDLTRMRTQLTHEMASVANRIHKILEDANVKLGLVATDALGVSGRKMIMALINGETDTAKMADLARGRLRDKIPLLEQALQGKVTDHHRFLLKALMDHLLYLESQIERFNQRIEEAARPFEKAITVLVPIPGYDRVSAQNVIAEIGPDMTVFPTDAHLCSWAKVCPGNNESAGKRRSGTTGHGNRWLEATLVQVAWAASRKKRSYFQAQYRRLAGRRGKKRAIVAVAHSILTDTYHILKEGVSYRELGGDHFDRLHHDRIRRYHVRRLQDLGYPVALGERKAA

SEQ ID NO: 210278 - protein, 420 aa, unidentified
MRYIGLDIHRDFAEVAVLEPGRPVRSWGRIVARPAELRAFAETLRADDAVALEVTINTWAIAHLLGEHAGRVVVSNPYRTRAIAEAKIKTDKVDAAVLAQLLAADYLPEVWQPDERTQMLRRLVGRRARLVQQRTRLRNQVHAVLHRNLVGGAPVTDIFGVRGQAWLRALLLPADERAAIESALRLLETLETELHAADAELARLGRPDPAVAHLLTIPGVDAAVALGVLATIGDIGRFPTPQRLVSYLGLDPRVRQSGNQPAHTGHISKQGRAHARGLLTEAAWAAAKYPGPLHAFYARVRARRGPQIAAIATARKLTVLVWYLLTRDEDFAWAGASLTATKLRKLELAAGAPSRRGGRRSWAASTATIRAQERAVAAGAEEQYRRFVSAWRVRPARERDAGAATGERLSGAEAPAARQG

SEQ ID NO: 210279 - protein, 367 aa, unidentified
MWRDPLGTEASVPSGTRPWFLMVLEEVPMAIVGGLDLHRKQITFDVLDTVSGEVRRGRISPADRQLFRGWLAGWAGQHVELAVEGCTGWRFVIEECQAAGVVAHLAEPAEVAGLRGRRRHAKTDRIDSRHLRDLLLQGRLPECWIPPQLVLETRAKVRLYKDLADQRTGWQQRMHATLYHLGAPAQRDLLAGDRDRLTRIEGLSPAARQAITVALAMIEALDAQIGPLRAELIGFARRQPGCRAIAAEYGIGALTSVVIWSEMGDARRFAHSRDAVRHAGLDITVYSSDGKRSPGRLSRQGSPLLRWALYEAARCSARTASPDHDYYRQVADRLGGQRAALSVARKLARRCHHRLRALGDHALAPPS

SEQ ID NO: 210280 - protein, 335 aa, unidentified
MNNIALIGIDLGKHSFHVHCQDNSGRALIRKKYTRAKLFEFLANTPSSKVVMEACAGSHFMARRISSLGHEARLISPQFVRPFVKTNKNDYVDAEAICEAASRPSMRFVQPKTENQQAMQAMHCIRDSLIRDKVKTTNQMHAFLLEFGIGLPKGTAVIKRLSTVLTENELPPYLVQMLTRLHAHYCYLESQIKELDQLLQQELKHDDTGQRLLTMPGIGPITASILSSQLGDGKQYASSKDFAASTGLVPRQYSTGGKNTLLGISKRGNKNLRRLLVQCARSIMIHLDKYSGSLANWIRNQLCRKHSCVVACALANKLARIAWAITTNKTDFKFS

SEQ ID NO: 210281 - protein, 378 aa, unidentified
MHNNNNYFNGSSQDFFVGLDVHKKNWTVCIRNSGLFLRKFSMDPSPEGLYNYMKKNYPGGIYNSVYEAGYCGYWIDRELKKLGINNIIVSPSDVPTSSRDKYEKTDPRDARNLAMHLQNGTIKGIYIPDNLQLHLRSISRLRCQLIKQQTRLKNQIKAYLYFYGINLPENSVMLHWTGKFIEHLRTFEFSHPSGKEQLEIYITSLLEVRKQILNTVRLLRRILKENHLNEIILKLCKIPGIGFTTAATLYTELMDIKRFSSFDKLVSFVGLSPSKRSSAETEKILGISFHYNKYLRSLLVESSWIAVRKDPSLTDLYGQYIRRMSKQEAIIRIAKKLLSRIRYVWINNKEYQNYCDRLEIVNKEQKKILSKRIKLKIK

SEQ ID NO: 210282 - protein, 309 aa, unidentified
MKQSIVYIGIDVAKAHLDVAWQEQSRRFANDKCGQAALIKWLKQSAFPVQLICEASGGYEQALVESLEHTDIAASVVQANRVRQYARAAGILAKTDKVDARVLAAFGAAMQPKPTAPLCPEQKRLRQYEAQRRHLSAVLVAEQNRLAQLSYAELRVLSRSLISKIKKQIATIDARINGLIAQDKQLCQKAQKLTSITGVGARTAALVLAQMPELGQLNRRQAAALGGLAPFNRESGTLRGKRTIFGGRRALRSGLYMAAMVAARRNPILCSFYQRLRAKGKPHKLALTAVMRKLLLVLNQNLKPITSPA

SEQ ID NO: 210283 - protein, 360 aa, unidentified
MRIIGCDLHARQQTLAMLDTVSGEVVNRTLQHEGNEVREFYSELPRPVLVGVEAIGPMQWFLNLLEELGIECQVGDATKIRAAEPRKQKHDRRDAELILKLLVERRFPAIWRPSKEQLDLRALLLHRHHWVRLRTQIQNALQAIALANGLRRGPGLWSYDGQAKIAFLPLPPHASYRRSLLQALYRKMEEEIEQLSAQVAEQAERRSGAQLLMTHPGVGPVTALATDVFLGDPQRFADGKALASYVGLIPREYSSGARQRLGALTKQGSPLLRFLWNEAGAHAARHDPELQRFYRRKLVHKGLGKARVAVARKLGIRLWIMLRDQIDYQEFCRRGQKHSGAACAGMPETGFGTYRHRPVD

SEQ ID NO: 210284 - protein, 391 aa, unidentified
MICVGIDVAKDKHDCFIISSEGVVLADVFTIPNNREGFNCLLGRIQACAMPGNKIKVGLEATGHYSCNILGFLLDNGLDSFVINPLHTNLYRKSLSLRKTKTDRVDARTIAAMLMSDVGLKPYTDTAYHNEELKSLTRYRFDKVKERAQLKQSVARLVCILFPELEKLVPTLHMASVYALLDEFPGAQQIADAHLTHLKAVLHDASKGRYGRDRAIELREAARASIGSRMPAKSLELRHTIRLIRELDAEIDEIESAIQQIMDDIHSPITTIPGIGTRMGAMILAEVGDFSRFDSPDKILAYAGLSPSTYQSGQLTNCYAHMEKRGSRYLRFAIFNAAKYVCLWDPTFAAYLAKKRAQGKHYNVAISHAAKKLVRLIYALEKSREPYHQAA

SEQ ID NO: 210285 - protein, 347 aa, unidentified
MDNVIIGVDTHKDNHIAVAINAQGARLGSTTISTTRKGYQDLEVWAAQFGQVKAFGVEGTGSFGAGLSRDLLAKGHEVLDVMRPNRQLRYLHGKSDSLDAESAARSVLNGQATAVAKTQTGSSEMIRHLKVARDSAVKAKSQAMITLKALIVNAPAELRDMLDGIRGRVALVRHVAAWRPGEITSPTASAKAAMRAIARRWLALHEEINAHDQELERLVREKAPELMKSHGISTMTVAEMLILVGDNPERIQSEAALAKLCGVCPIPASSGKTNRMRLNRGGNRQANAALYRVAIVRMRDDERTKAYAMRRTAEGKTRREIVRCIKRYIVREIYRALCASPALVPTA

SEQ ID NO: 210286 - protein, 343 aa, unidentified
MAYFAGLDVSVKETSICIVDDAGKIVREVRVASEPEALLQVLANNTYRFKRIGLEAGPLSQWLYSVLAEAGLPVICVETRHMRAVLKAQINKTDRNDARGIAQMMRVGLYRPVHVKTLRSQKLRVLLTHRKLLQSKAIAIENDLRATLRNFGLKVGMIGTVKFEARIRELVENLPDLAVLVEPLLIVRRVVREQLGILHRRVLAIVRDDDVCRRLMTIPGVGPVVALTYRVTVDVPARFKNSKAVGAVFGLTPAKYQSGENDRTGAISRCGDEMMRMMLYEAAQIMLVRSTKWSWLRAWAMKIARHRGMKKAIVGLARRLAVIMHRIWVDGTDFRWTREVAAA

SEQ ID NO: 210287 - protein, 338 aa, unidentified
MNSVTILGIDIGKNCFHLHGQDAQGHQVLRKKLNRSQLLPLLAQIPPCKIAMESCGGSQFLAREITKLGHQIQLIAPQHVKAYVTGNKNDFIDAEAICEAASRPRTRSVQIKSVDQQVLSTVHKLRKSLVSPRTGVINQVHGFLLEFGVIFPAGYAALDRVPALMDEHNLPLRLRQAITRMLDDIRQLTSEIKALDTEIKQQINGSDAGKRLQSIPGIGPLIASALVADVGDASIYKSSRDFSASLGLVPRQYSTGGQTTLLGISKRGDRYLRTLLMQGAQALLYRIDKRNDALGVWARSLLARKPLNKVACALANKMARIVWALLTKGGTYNGHFTA

SEQ ID NO: 210288 - protein, 412 aa, unidentified
MEVLYRSCCGIDIHTKTAVACLLKDGVKLTRTYSTMTADLLEMLDWLESEDCTHVAIESTGVYWRPVFNLLEGHLEVILVNARHVKAVPGRKTDVKDCEWLAELLCHGLLKASFIPPVEIRELRELTRYRQTLVKTRGTIANRIQRLIEGANIKLSQVASDALGVSGRLMLRALCEGETDAEKLSTLARGSLKRKQDQLQRALTGRLSSAQRFVLTELMNCYEENDLAILRINQEIERETANCPDPFVPDAVTLLQTIPGVGQKIAEVIVSEIGVDMNRFPADRHLASWAGMCPGNNESAGKRKSGKTTKGSVYLRTALVQAAWSATHMKTTYLASQYKRLVKRRGRTRALVAVGHSIIVMAYHILQKRQSYQELGVNYFDKQNTERQQARLVRQLESLGLQVSIQSMPAAA

SEQ ID NO: 210289 - protein, 352 aa, unidentified
MKIIGCDFHPSFQQISMLDEETKQRVRKKLHHASGEAEQFYRSLQGQSVRVGIEACGNTRWFERLLRQLGHELLIGDAARIRAAAVRKQKNDERDADHLLELLEIGKFPAIWVPSPEERDLRQLLLHRHKLVQMRTRIKNQLQHVALDQGLQKKRQLWTERGRQWLLQLQLQPWTERRRGDLLLLLEGLEPAIVELSQAVEAAAQRDPRAQLLRTHPGVGPITALAFVLVIGDVQRFAHSKQLASYLGLIPSEDSSAGRRRLGAISKQGNTLLRTLLVEAGQSAARWDPQLKRAYQRCCHRKSHTGIGKVMVARKLAVRLYWMLRSNQPYPPARMQGSPSHPVSTRSGSSIV

SEQ ID NO: 210290 - protein, 442 aa, unidentified
MDTSRIVTAFAELTHFAGFDWASEKHDVVVVDRQGGVVLALEFGDTAEGWSTLRSKLVALAAPQQEVGRIGVAIETSCGPAVERLLEMGLAVYPINPKAAERFRERKAPSGIKDDQLDAWSMGDALRTDGQDWRRLLPDDPATQELRILCRDEISLIEERTALVLRFQATLHEYYPAVLEAFDDTTLPAAWEFVARFPTPAALARKGQRAWEKFLHSHRLGHPETYAKRMAIFARAGEFASPSSAVTNAKSFLAVSIVRQLQALQGQLDAYRARIEEAFAKHPDRDTFDSLPGAGPKLAPRLLGELGANREVFGCAQDLQCYAGTAPVTKKSGKHRLVKIRRACNLTLRATVHYWANLSRQSCAWAEAYYQKKREQGHSHAQALRCLGQRWLKILWKMWQDHASYDEARHSLDQTRHGSWVIDLLPQAQPSAHTPVPVPACG

SEQ ID NO: 210291 - protein, 421 aa, unidentified
MIEAVLECCAGIDVGKRFVIVCVMTGPADGEALEQTRKYGTNTGNLENLRDWLKACGCTHVVMESTGSYWKPIFNVLEPTPGMQVVLANSKLVKNLRGHKTDPSDSRWLAHLLRHGMIRPSFIPPLAIRELRKFTRRRKQLIRAGTQERNRVQKILEDANIKIGNVLSDIFGLSGQLMLEALVEGKATAGQIAQLAQKTARRKIPQIQAAIESHRMTDTQCILIRFSMAHLAFLEEQIAELDQQIVRHIEQTNLQRPYALLQTIPGVKKLAAAAIVAELGTNMDVFGTSRRCSSWAGLCPGNNESAGKRKRSPVLRGNPWLRTTLIECAWAASGKRRSAFQARYQRLAPRIGHKRAIVAVAHSLVLTVFDVLSRDQPYTGSGADNMPATQLQRLIRHHSKREATLRRWLLRTSKNSAFRVT

SEQ ID NO: 210292 - protein, 349 aa, unidentified
MERFCVGVDVSAKKFDVAVRVGKGRVDSQSFANDGVGHRAFVKYMKKRCKSIRVVMESTGIYGLDLALALHEARVEVMVVNPRAAANFAKAVLQRSKTDRLDAATLLLFAERMPFIAWQRPTAQQLELRAISRRVQALLETQRAEKNRLHAAMHVTATGVVRKSIRASLKSLNKHIGDLRAAALRVIKSDALLARRNELLLTCKGIGQISAISILAELSVLPNDMTNRQWVAHAGLDPRCFESGTSVHAAPRISKRGNRHLRAVLYLPARVASRFESNASRYSARLRAHGKTPLQIHVAVMRKLLHGIHAMFRDDRPFNGASLFPAIDAVGTSGIAMSAISEVSTAFSS

SEQ ID NO: 210293 - protein, 423 aa, unidentified
MEVLHERVAGLDVHKDNVVGCVRTMSAGRAKREFQTFATTTDGLLALLAWLTSHQCELVAMEATGVFWMPVWRILSDGAFKLIVVNAAHIKAVPGRKTDMKDAEWLAELAAFGLIKASFVPDEEQHELRALMRTRKQLVREQTRHVQRIQKTMTEANIRLDSVISDIMGVNGRRIVEAMIRGVRDPRKLAALADKRLKAKPKELYDALHGRLTDHHRFLLQLHLGQWDTLDATIRDLDREVETRVLRMDQEVMADKAKFSDLIDQLATIPGVSRLSALTILSEIGTDMSRFATAGHLVAWAGMCPGQNESAGKRKRTRLRKGAPWLKTTMVQCAWAAKRKKDSYYKAQFFRLQSRRGPQKAICAVAASLLTAIYHMLKDGTLHQDLGSGYFDKRTPDLKVKRLVNQITKLGFEVTLQPIAKAA

SEQ ID NO: 210294 - protein, 403 aa, unidentified
MVTQIENYDQVDVFVGLDVGKGEHHAVALDRAGKKLYDRALPNDERKLRAVLIDLQKNGGVLLIVDQPATIGALPVAVAQAAGALVGYLPGLAMRRIADLHPGEAKTDARDAAIIAETARTMPHTLRSIQVTDEQVAELSMLCGFDDDLAAQITQVGNRVRGLLTQIHPALERAMGPRLDHPAILDLLQRYPSPAAMRAAGEKRIATRMLKLAPRKGRDWAHEIIAALGEQTVVVTGTNAAALVLPRLAAQLASLRKQRDEVAAEVEKMVDAHPLQPVLTSMPGVGVRTAARLLTEVAGKHFPTAGHLAAYAGLAPVTRRSGSSIRGEYSSRRGNKILKNAMFLSAFAALRDPESRAYYDRKISQGKRHNQALLALARRRSDVLYAMLRDGSLYQPSPTRLVA

SEQ ID NO: 210295 - protein, 344 aa, unidentified
MEYYVGLDVSLRSCALCIVDNKGKVQLERELPCEITDIAECLVRFGYPIERVGFEAGAMSQHLFFGLQGEGFDVVCMEARQVSAALSAMRNKTDRTDAKGIAQILRTGWFSPVHMKSREAHGMRALLSTRKALLKKAMDLANEVRGLLKIFGVRLPRTVKHGSFDALVRPMIEMDEILAHAIIPLLDARVVLFQHYLELDRRVKRAASQDDVCMRMMTVPGVGPIAAHTFKAAVDDPTRFKKSRTVAAHFGLTPRRFQSGEHDNPGRISKAGDRDVRATLYAAANALLMRTMAGSQIKSWGMRLMRTKGRRRAVVAVARKLAVLLHRIWIDGSEFRQEQVGGTT

SEQ ID NO: 210296 - protein, 349 aa, unidentified
MKIVGCDLHARQQSIAMVDTETGEFTEKTLCHEGNAVRAFYASLEGPVVVGIEATGAMQWFLELLDELGIEGRVGHPAKIRAQETRKQKHDRRDARLLLQLLSEDRFPEIWMPSTEQRDLRTLLRDRDQWVRMRTRVQHTLQAIALNHALRQGRALWSATGQTALEALPLPPYTRQRRDELLALYAQLQKRIQELNKEVEAQARQRPQARRLLTHPGVGPVTALATDVFLGDPSRFATGNQVASYIGMIPSERTSGKRQRLGKMSKQGNALLRYLWTEAAMSTVRKDPELQRFYRRKLIQKGMGKARIAAARKLGIRLWIMMRDQSDYQEFCRRGKLRQTGETHAGMPA

SEQ ID NO: 210297 - protein, 320 aa, unidentified
MEVVYARCAGLDVHKATVVACVRVPGPRHGERRGETKTFATTTRGLTELSDWLRAHGVTDVAMESTGVYWRPVYAVLETTVRVVLVNARHVKMVPGRKTDVRDCEWLAQLLECGLLRASFVPPRAVRDLRDLTRLRKTLIRERGHHVNRIEKTLELAQIKIGCVITDLMGKTGRAILQALSAGLDDPERLAEYAQGLLRKKRAALREALVGRLTPHYAFLLQQHLALIDALDHHIATLDARIDEVMAPFAEAAALAQTMPGVATRAAQAILAETGVDMAAFPTAAHFASWARLCPGNHESAGKRQPATTGKGATWLRATL

SEQ ID NO: 210298 - protein, 330 aa, unidentified
MSQNNITNNNLTIIYAGVDVAKATLELHLGGVIHNLANETKDHTRILKLLADAEKAQAGTKVHVILEATGGYEAALVRALHEAGQPVSVIQPSRVRHFAYAKNQRAKSDPIDARILTQFGEAIRPAPTAPPSAAQIHLGVIVSRRAQLIETRIAELNRAAHYTDKMLCRQSRGLLALLDRQIGACDKAIAAQIAADETMKARAQRVRQVAGVGPVVAAVLQAGIPELGTLTPCEAAALAGLAPYDCDSGPRKGSRRIWGGRAPVRCALYMAAMTAIRHDPILKAFYIKLRTAGKKPMVALTAVMRKLVVLLNHLLKNPKFELASARAGTN

SEQ ID NO: 210299 - protein, 385 aa, unidentified
MQKLNDLSQCRIVLQQDSTLIAVIEMSLSSWLVAGIVPGVERQPLKKLAVDESVLLKLLHRWREEAEKAGRRIERIAVAFEAGRDGFWLARWLRARGIEAHVIHASSVAVSREHRRAKTDRLDTGLLKRVFLGWLRGERDHCKMVAIPTTKDEDAKRPNRERESLVGEQTRIVNRMKAALSRLGIRGFNPKLKKAAARLEDLRTPEEEPIPPNTLAELRRDMERRRLISDQIRQIEDARLERMERMPNDGPHAMVRLLARVIGVGIETADMLVQEVLSRTMRDRRAVARYAGLTGAPDESGAKRREKGLARSGNARVRRGMIQLAWRFLMFQKDSALAQWFQARTENARGTRKTMIVAMARKLLIALWRLVTTGEVPAGVVLRAA

SEQ ID NO: 210300 - protein, 316 aa, unidentified
MKIIGCDFHPSYQQIAVLDLASGEMVEKALSHEGKEEVRAFYAGLEGSVRVGLEASGQSQWFERMLAELGHEVWIGDAAKIRASCERKQKTDRRDAELLLRLLAEDRFPRIWVPTAAERDDRQLLLHRHKLVRMRTQVKNQLQALALNQGVQRKWKLWSKVGRKQLESLPLLPWASRRRAELLQLLDQLEASISELDRAAAEQASARPAARRLMRHPGVGAVTALAFALTMGPAERFQRGNQVASYLGLIPSGHSSGERQQRLGHISQAVHSCAGCWWKRRRVRCGMSRRCVAPINDWLSGSVVRWQKWPWHGSWR

SEQ ID NO: 210301 - protein, 393 aa, unidentified
MICVGIDVAKDKYDCFILSSEGEVLADVFTIPNNAEGFDTLLQTIRRCARPEDKIKAGLEATGHYSYNILGFLLNEGLDTYVINPLHTNLYRKSLSLRKTKTDRVDARTIAAMLMSDVDLKSYTDTAYHNEELKSLTRYRFDKVRERAKLKQSVSRLVTILFPELEKLVSTLHMASVYALLSEFPGAKQVSEAHLTHLKAVLYDASKGRYGSDMATTLRDAARCSVGSVMSAKSLELRHTIRLIHELDAEIEDIEAAIQSMMGEIQSPITTIPGMGVRMGAMILAEIGDFSRFDSPDKILAYAGMSPSTYQSGQLSLSGAYSHMEKRGSRYLRYALYNATKYVCLWNPTFAAYLAKKRAEDKHYNVALSHAAKKLVRLIYALEKSKRPYSTAA

SEQ ID NO: 210302 - protein, 419 aa, unidentified
MSKSMFCGCDVSLENNTAWLMLDDGSQPAKLFNADNNQLGAEALVERIYSIAKEHCVSDILIGTEATSMYDWHLLEYLAKSKLALEFNLKLYRFNAKWIKNFKKSLAPRGKTDPIDSFAIAERLRMGRLPKEYIPDTKYQPLRKLTRFRFHLMQQIAREKNFFLANLFLKASAYSRVSPFGSTFSATSLSVINDFFSVDELAAMPVEELTEFILEKGKSHFSKPAEIVDNLKRVARESYRLKPELAPTVNLILASTFNNIRCYKEQVKLVDEAIAENLKAFRHTLDSISGIGPVYAAGILAEIGDVHRFLNDSSLAQFTGLTWPKHQSGRFQAEETRMSHAGNQYLRYYLVEAANSVKRCDATYKAFYEKKYAEATKHHHKRALVLTARKLVRLVWTLLTRQTLYQPGYCSFEDLSKIG

SEQ ID NO: 210303 - protein, 305 aa, unidentified
MLPSIDHALNEQTATVALTLCASLELSRSTWLVTCLLPERDRMSKYSTPGGDGGALLGLLERMRTRAQQLTGRPVKIVVIQEAGLDGFWVHRLLEANGIESHVVDPASIAVPRRRRRAKTDAIDGETLLRTLAAWRRGEPRVCAMVVPPTPEEEDRRRICRERAILLRERIRHTNRIKGLLAGQGITGFNPLHKDRRQLLDAARTGDGRPLPNQLRAEILREIELIDLLVRQIADVEAERELLVGLKASKTPSPIMLLQQLKGIGPEIASVLYLEGLFRSFGNRRQLAAYAGLAPTPWRSGTASS

SEQ ID NO: 210304 - protein, 353 aa, unidentified
MSTKSNKAIANVAVIGIDIGKNFFHIIGQDKRGAIVLRQKWSRSQLAARLVNLPPCLIGMEACVGAHHLAHRLTALGHDARMMPAKYVRPYAMGQKNDFNDAEAIAEAVQRPTMKFVPIKSADQLDLQAMHRIRERAVSQRTRVVNQIRAFLLERGIAVRQGMRFLRSELPIILATRDDVLSPRMMRLIEDLSADWRQLDERIENLSDEIEGLAKQDACCTRAMTVPGIGPIISSAVVSAIGNGAAFSKGRDFGAWLELVPRQMSTGDRTILGKISKRGNRYLRKLFVQAAWVVLIKPMSWERHGLKQWIEAAKKRLHHNVLAIALANKLARITWAVLNGEHTFHARVERHAT

SEQ ID NO: 210305 - protein, 410 aa, unidentified
MELLHRRCCGLDVHKETVVACLRLVSNGKVTTEVRTFQTTTADLLRLSEWLAANDCTHVAMEATGVYWKPVWHILDDAEFELVLANAAHVKNVPGRKTDVNDAMWLAELLAHGLIRASFVPDTQTQEMRNLLRTRKQLVREQSSHVLRVQKTLEDANIKLDSVLSDLMGKSGRAMIEALIAGETNPAKLAALADRRVKASHEEFREALRGRVTKHHRFLLRLHLNQIDALHAAMATLDAQVEANLGPFRTAVELIMSIPGIKNLGAHVIVSEIGIDMSRFPSDAHLISWAGICPRNDESAGKRRSNRLRKGAPWLKTTLVQCAWAAVKKKNSYLQAQFYRIKARRGPKKAIMAVAASILTAIYHMLKDGTIYKDLGCNHFDRRSTDKQKQRLVKRLAELGYVVEIKPIAA

SEQ ID NO: 210306 - protein, 344 aa, unidentified
MVTTIGIDPHKATHTAVAIDDDETVLAEITILADKDQTRKLIDWAQSVDGDGRVWAVEAATGLGHLLSQQLVSRGEPVVDVPPVLASRIRVLSSGKSQKNDPNDARSVAIAALRRESLAEVRREDEAAILRMLAKRHRELTALRTQAVCRLHAMLAVLRPGGMGHRLSAKQATRMLQGLRGLDAVGEQRRLMAKTHIVDIRRLDRDLEAVKAQIRRAVAAADTTVTDIYGVGPVVAAFLVGYTPPIGRFATADRYAAYNGTAPIEVSSGGKVRHRLSRRGNRTLNHAIHTAAVTQISHHTEGRVYYDKKLDEGKTTKEALRALKRRISNAVYRRLITDAQRHSS

SEQ ID NO: 210307 - protein, 354 aa, unidentified
MKRTTKYVAFDVHQATTVASVREESGRVIARSVLPTDRGALTEFVRGMRGARHVTFEEGTQAQWLYDLLAPLVDRVVVCDRRGAPRQGNKGDQVDADQLSELLRRGALRAVYHGSADRATLKELTRTYRNLVEDATRVMLRLKALFRARAIPTRGTNVYQARARGQWLAQLVDRGARFRAEALYAELDVLRTLRPKAKAAMVTEARRDPAWPVLRTIPFLGPVRVALLLATMQTPWRFRTKRQLWAYAGLAVVTRSSADYTLVAGAPVRRRRAPMTRGLNRNHNRVLKDVFKGAATAATARSGPLQDFYHSVIARGTREELARLTLTRKLAALTLRLWKKGERYDPTKLTTPAR

SEQ ID NO: 210308 - protein, 342 aa, unidentified
MNKVAIAAIDLGKKSFHLHAQDERGHEIYRKKLTRAALVQHLANLEPCTVVMEACGGAHFMAQQAAKFGHTAKLIAPHLVRPYVKSNKNDFADAEAICEAATRPTMRFVPVKTQAQQALAMLNSTRDSFIKDRTATVNRIHAALLEFGISLPAGFKSINELTTQLEASSLPDPVRKLLTRMHDHFDYLHEQIKSLDKELECQAAEDDLAARLMTIPCVGPITSSALAAELGDGKQFKCGRGYSASIGLVPKQHSTGGKTVLLGISKRGDRNQRRLLIQCARVYLMHLDRQKGVLAEWVRHLIATHHHSNHVVCALANKLARIAWAIAAHHTEFDAGPSAMNA

SEQ ID NO: 210309 - protein, 419 aa, unidentified
MEIVNPHAAGVDVGSRSHWVAVGQQEKDIREFGVFNQDLFEMADWLHEKQVKTIAMESTGTYWQNLYAVLISKGFHVILCNGKFTKNIKGKKTDVKDCQWIQKLHSLGLLSSSFLPEGKTEELRTYCRQRANLLHQTASTSRKMQKNLRLLNLRLDVVVKDICGLTVLLIIRAICNGETNPQQLAALRHGNCRKSEEEIAKALQSNGRKDYLFALRQELDTYDHLQKKIQQCDEEIEKMLDQIINSDDNKRQHHIEPKPHKRINKNTPGNIDLNLKSYQMFEGADLLAIEGVSFSTVLALMSEVGVEGIRKFPSAKHFCSWLRLAPNNKISGGKVLSSKVPKGSNRLKIALRNAANAIGNLKESTPLRDFFQRINFRKGRVSAISATARKLAVIIWNMVVKGTPYNNPAGYLFLDQNLC

SEQ ID NO: 210310 - protein, 404 aa, unidentified
MKVTYQTCCGVDVHTSFLVATIVKTTGDIEPSYQKKRFSTFNNSILEFKQWLLDNDCHDVCMESTGKYWVPVFNLLEDDINVVIANPKWVKAVKGNKDDTKDSKWIGDLFRLGLVKGSYIPCKKVRILREYTRYRYKLVSCRSSEKNRYQNALTVCNVALDSVVSDIFGKSSTSIIDYLLEQSGSSINHEEIASKLLRSLKSKEDAVIESVEGYQMTDAQKYRMRLVRAHMDYITAEINDVDKMIENMISSNTDFENAVQFLCTIPGVKRDSAITIISEIGTDMSQFSSSRRLCCWAGLTPGSNESAGKKKSVRFTRAGVYLKPALVQCAHAAVKSDKSPYYKKKYESLVKRRGKKRAIIAIARMILTAIYQMLSTGEQWNPSDLYKIDMPVALVEKQKAKAIK

SEQ ID NO: 210311 - protein, 483 aa, unidentified
MKSKSEEQNKRATNHPTQHHWHEMNRKQRREMMRKMQTEDLSLDVIHPDAAGIDIGNESHYVAVPPGRDSQSVREFGCTTAELKAMAAWLQQCRIRTVAMQSTGVYWVAVYDILEQAGLEVYLVNARDTKNLPGRKSDVQESQWLMKLHTYGLLRNSFRPSQEIRVMRTYWRQRNDLVQSAGRHILRMQKALTQMNLQLANVLTDISGATGQAIIKAILAGEHDAHKLAEFRDPRVKASEEQIAQSLEGNWQEDLLFVLKQEHEGYEFCQKQMAECDRQLQQYLQQREDRSHGAPLPEEKRKGRLKKKKGNAPQFDLREGLFRMTGTDLTRIDGIDVMTATTVISEAGYDMGKWQTENHFVSWLRLCPDNRISGNKVIGKGRLPTNNPISIALKMAASTLRESKTYLGAQFRRLRTRLGAPIAIKAMGAKLARLVYRMLRYGMKYVDQGAAFYELRHRELQIKRLKSKAEKLGYRVTPIPAAA

SEQ ID NO: 210312 - protein, 351 aa, unidentified
MNYVGVDIHKRYSVLVAVDERGRELGRSRINGNTAFGFAQFFGGLEGKSKVVLEACWNWGRIYDLLSEIGQVEEVVLAHPLKTRLIADAQIKTDGLDAYALATLLRGDLIARAHVPAKPTRQRKEVLRQRLYWARLRTRIRNRIHALIDRQRELKMPQCSDLFGRKGLSALNKLVLSEPDATLLREELGLLELIQGQIKAQEARIVEFNSNDEMTLRLQSIPGMGKILAAVAAAEIDSIERFSSAAKLCAYAGLVPRTHASGGKVYQGHLLKSRNKWLQWAFIEAAWVAVGCSAYFGGLYRQHRARGKNANIAITIIARRMCQICWTLLKERRDFIETFPGRSVVRLTAAA

SEQ ID NO: 210313 - protein, 341 aa, unidentified
MWIIGCDYHPSVQQIACMETETGQLRELRLAHCAEAEAFYRELKGSGVGVRVGMEATGHARWFERLLSELKFELWVGDPAEIRAKRVRKQRNDRMDAAHILKLMLEDNFPRIWMPSSENRDLRQLVLHRHRMVGMRTRVMNQLQAIAMNEGVRRKRALWSQKGRTQLESLSLPPWTTRRRQELLHFVDEFDPTIDELSEAIKEEAERWPEVQRLMTHPGVGPITALAFVLVLGTPDRFHCGKQVGSYLGLIPCEESSADRWRLGHISKQGNAVLRYLLGQAALSAAHCDEQWRHQYAHLAMRRNRSIAKVAMARKQAVRLFWMWRRSWDYEQLNKFGSHVG

SEQ ID NO: 210314 - protein, 330 aa, unidentified
MSPRPQFAGIDVSKNSLHVHIAKHLMDNDGPFRVFSFDHKGLSLLKAWLLEHHVQHTVFEASGGYENTLRDFLLEHHLPCTRLQPERARAFAVGIGAIEKTDKLDARVLARMACVRTQHKEVLRSETQRELVTLMDFRLQLREDLTRLKTQRQKQTNAWIKETQDERIRDLEVRRDALDKRIQTLVDGDQEMSALCELMCQLKGVSCVTAWSLLAYLPELGELSKRELAKLVGVAPMAKESGDFTGKRRCSRGRGKVKACLWMASLSVATHEEPFKQFYQRLKEKGKPPAVARVAVCRKLLTALNAIARDGEAYKPELLMPRPGSLEKVS

SEQ ID NO: 210315 - protein, 339 aa, unidentified
MSRHIGIDLHRNQFTCCVRLENGRNYLSEWKLEDLPRFVNKLRPNDEIAVEMTGNTRLFYEAVAPHVARVVAVDSNQFKVISHSVKKTDPNDARSLALYLEKDLLPEVRIKDKTQAQLASLTQTRDTLVKLRTSLKNKVNNILSAHGINLEKEALSSEKKLNEVLAMKFDPMVKIELEVIVEEIRSLNQKVAKLEKTIAEEGSKLEGHKNLTSIKGIGPLTGSILLSVIGDINDFEDEGKLAAYFGIVPRVSRSNQTGHSGRITKRGSKLGRTALVQCALVAQRYSPYLKQYYEKIKTRRGTGKAIIALARKLLGIIYRTLKNKWVFQDFPNFVLAEAT

SEQ ID NO: 210316 - protein, 341 aa, unidentified
MENKYILGVVVGKIRLEFCLLFGDKVLKQVEVMNETTAIRQAFSLLLNEFHISNDQLLICAEHAGQYNYPLIYTCESGLYKLWLENPGRMKYYCSGLQPAKNYKLNCKQIAVYASRNADKIAMCQPPDSEVEHLKQVYNELNMLEGDSAKLQSQLFEMKNYMSEEVFDVNAKRLVDLIKGLEAAIITVENEIKCIFAGNSHLARQMELLISIEAIGRDVAIKMIVDTDAFTRFENSRQFCSHASMAPVHKDLKAVQHLQPNGVVTRDKSIRLLLNQAVEFILKKDDSELKNYYIRKVNEGKDEKVVINAIRVKLVARMFAVIKNNQVYQPVIQEELQCHHQ

SEQ ID NO: 210317 - protein, 374 aa, unidentified
MPQSRTLYVGLDVHKESIAVAYVAQDHGAEVISLGTVGTRQCDIDKLLRHLQSKSPQLVFVYEAGPCGYWLSRSLMKKGYVCWVVAPSLIPKKPGDRVKTDRRDARQLARLMRSGDLTPVYVPAVDDEAIRDLSRAREDTLRDLKAAKLRLKAFVLRHDIRSTGRANWSPAHLRWLSEVVCPTPAQQMVFQEYVQTVTEQTERLQRLEHELHEQVKTWRFQPVVEALQALRGVQFTVAVTTVAELGDLTRFANPRQLMNYLGLTPSEYASGARRQQGSITKTGNTHARRALVEGAWAYRYPAKVSRHLQLRLENLPKAIQAISWKAQVRLCKRYRQLLAKGKNANQVVVAIARELSAFMWAIAKQVTMAPKDQS

SEQ ID NO: 210318 - protein, 336 aa, unidentified
MKHWIGIDVSKATLDVALLDERGTLAAEIKVENTTRSVKALLRRWTKEFTLVKGEYLVCLEPTGYYGHALLEVLVELEIPTWLAHPNDIKQSIGMTRGKSDRVDALRIADYARRFQDKSRLFTADQLKMNKLKQLLSKRQNYVMRKTMHQRQIKDMNKLMDKDLRGPFTRFDKAQIKALDKVIKELEGMIEDTINAEPELSKRFELLRSVEGVGLILGSHLLALTDGFTRFTSPRQLACHAGCAPFENRSGTSIRGRTRVSHNANHTLKALLHVSVVGLIRFPGEFRAYYDRKVAEGKHKMLVFNAMRNKLIHRVCAVIRKGVPYEIRTPLANVIE

SEQ ID NO: 210319 - protein, 401 aa, unidentified
MISVGIDVSKGKSTVCMLKPYGEVVASPFEVVHTESSVQKLVEQIQAQEGEVKIVMEATGAYHLPLLDSFKQAGLFVSTVNPLAMKKYASIGLRKGKTDKLDALRIANYGIDNWFKLEDYTAPEEVYAQLRILGRQYYHYINMKVQSKLSLTHLVDRTMPGIKKLIKSNNSDEPTKDKFGDFIEEYWHYNNITKKSERRFITSYCSWAKKKGYHASEAKAKAIYDVARDGIPTLPSDAASTKMLTLEAVRILKEINRTLDTILTQMQELATALPEYGVVRAMKGVGNVLASKLIAEIGDVRRFHSGSALVAYAGIDSPPFQSGMFTGTRRKISKRGSALLRKTGYEVMRCVKTTKPTEDAAVYLFMMKKEEEGKPKKVAKIAALNKFLRIYYARVMEVYRS

SEQ ID NO: 210320 - protein, 343 aa, unidentified
MNAFVGLDVAQKNTSVCIVNDDGKVVRQGVIETRPELIKEFLETKGYSSVKVGMETGPLSVWLFHSLKRLNVDIDCIHARHVHAALTVQLNKTDQNDARGIANLVRTGWYRPAYVKTLECHNRRLILTERDRLVRVRVVINNQIRGLLKTFGVVLSPGRNEVFRQEVLTADPSVEAVKSVALMLLDTWRHVSRQIREFGKMLEKQAARDPVCKALMSIPGVGVLTAMSFKTAIDDPSRFRRVADVGPYLGLTPRKYQSGEVDRNGGISKQGNRQTRSLLYEAASCLLSRYGKETSLARWASTIRQAKGYKKAVVALARKLSTVMLSIWKSGELYKDKSVVLSA

SEQ ID NO: 210321 - protein, 352 aa, unidentified
MNNSKYIGMDVHKATTVIAVLNSIGKLVAEAIIETKSSTILDFLKSQRGTVHVTFEEGTQAAWLYDLIHPHVAQVLVCDPRKIAARDSKTDKTDARHLAELLRTNALKAVYHGEHSTQALKELVRSYGALLTDSTRVKNRLKGLFRGRGIACAGSTVYSKKNRDQWLEKLDNAPIRSRALILWKELDCLTELRDEIENDLLVEARKHPATKILRSIPGIGPMRAAVILGFTITPHRFQTKNQFWKYCGLAVMSEVTGEYTLIAGRVSRSNKRPLVRGLNRSYNRALKDAFKGAATTAALGPWRSHFDAMVANGTRAPLALLTLARKISSVTLALWKKGERYDNKKLKCMHAG

SEQ ID NO: 210322 - protein, 371 aa, unidentified
MKKITTFVAIDEHKMTSVIAFADTKSIEVRLYGEIDNTPEALDKVVKKLESQNRTLQFVYEAGPCGYQTYRHLASKGYECMVAAPSLIPKKSGDRIKNDRRDAVNLARLFRAGELTAVHVPDATDEAMRDLVRARTDSKIAERKAKQQLGAFLLRSGLRYDGKVAWTATHFRWLATLAFNQPAQQIVFQEYVNAIQETDQRVGRLTEQIKKLIPDWSLAPVVKAIQALRGVSLIVAVTTVAELGDIAKRFTHPKLLMAYLGLIPSEHSSGGSIHRGGITKTGNQHVRRALVEGAWAYRASARVSKKIFERHLGLPPAVCEIAWKAQVRLCDRYRHLMARGKKKQQVIVAIARELAAFIWAIAQIVPVPVKP

SEQ ID NO: 210323 - protein, 331 aa, unidentified
MNYSHFVGLDVGKKTFDASLMSADEKELSHKSFDNTPEGIQSLLDWIAGYHLSLSKLLFCAENMGSYVTELSVSSVSMGFSLALVCPLTIKKSIGLQRGKNDRIDAKRIANYAVLHYRKLELYKLPNKDLVRLRGWIIIRDNLVKQKVSSIKLLETFSQMAKLADVTESISFLEEQLKSIKERILEVEEDMEQLIAASTSLYTNYLLLRSIKGIGIINAIVLLCVTDNFQRFDNPRKFACYCGVAPFEHTSGISIRGKTQTSSLANKEVKVYLTRAAITAISWDPQMKAYYKRKIAEGKHKASVINAVRAKIIARSFAVIRRQTPFVTLAV

SEQ ID NO: 210324 - protein, 349 aa, unidentified
MTMTIVEAARGVTGGVDTHLDVHVAAALDPLGVLLGSRSFATTPAGYQSLLAWLESFGSVTKVGVEGTGSYGAGLARFLRRSHIEVIEVDRPNRAERRRSGRSDPLDAVEAARAALGGRATSISKSKDGAVEAIRVLVVAKRSARGARIKALTQMRHLVITAPDQLRCRFTGVTIGALVSEGARLRPSRTGDEVMAAYKASLSSLAHRIQELDDEIAELDVRIETLLMETAPELLSLFGVGPDTAAALSISAGDNPERLHSEAAWAHLCGVAPIPASSGKSAGRYRLDRGGDRQANAALWRIVIVRIAHDPRTTAYFERKVKERRTKRDVIRLLKRYVARETYHYLPRG

SEQ ID NO: 210325 - protein, 387 aa, unidentified
MQKPHDESKACLTAFVQDSTLTVVIEMSLANWLVAGMIPGVDRQPLKKIVPNPEVLLQLLHRWRDEAIKAGKEITRIAVAYETGRDGFWLARWLRARGIDAHVIHATSVAVSREHRRAKTDRIDTAVLQRGFLGWLRGERGHCSMAYVPTVEEEDAKRPHRDRESLLKLRTSTVNRMKSILIQFGVRNFNPILRKAPENLASVRTPEGIPLPPNSVTALRRHMERFRVIKEQIKAIERTRLERLQRDPAEKLNAMVFLLVRIVGLGIETAEQLVHEILSRNLRDRKAVARYARLTGAPDESGSKRRDKGLSRSGNRRVRNILIQLSWRLLRFQPESDLVLWFKKRTANAQGSRKPMIVAFARKLIIALWRYVNTGLVPEGFQLRSAT

SEQ ID NO: 210326 - protein, 387 aa, unidentified
MEVRMVNTPSADSNNEPVACYVAIELSKSGWLVGFLTPLSDKTGRYQVKAGDAQALLDLIERVHARVARQLNRPVEVMSCYEAGYDGFWLHRVLEAHGIHNHVLDPASLQVNRRARRAKTDRIDVDRMLRALIRYLRGEPEACSVAQVPRVEEEDAKRLHRERKRLVVERVQHVNRIKGLCAAQGIYNYAPLRPDRWSQLDKLRTGDGRSLPARLKSEIVRELKRLELVLEMIETVEAERDAIIKDPRSRHLNADKIKMLARLRAIGPEFATSLTGEVFYRKFANRRKLGRYVGLDGSPFRSGSVERDQGISKAGNPVARSMMVELAWTWLRYQPDSALSIWFRERVGNLKGRPRRIAIVAMARKLLVALWRYLETGVIPTGAVLKA

SEQ ID NO: 210327 - protein, 343 aa, unidentified
MDQHIGLDVSLKDTSISVRENGKRVWRGKCPSDPKLLAELIRKRAPHAKRVVFETGPLSVWFYHALTAEGLPAICIDARHAKAALDMAANKTDANDADGLAHLAEVGFYREVRVKGFDSMLMRTLISGRRQLMKMRVQMSNQIRGLLKTFGLVVPKGTGSVFERNVVSLLDGEEGLARIILPLLKAWSDIRLRVAELTKQLVVMAGADQRCRLLTSVPGVGTVTATAFAAAVEDSINFKNSRAVGAWVGLTPKRYQSGEVDYEGHISRRGDAKLRTLLYEAASVILNRSSDTNALRTWALALKERVGFKRAAVALARKLAVIMHSMLKTGELFDPNAGAAGTA

SEQ ID NO: 210328 - protein, 354 aa, unidentified
MNTIIGCDAHRRYSVFAVFDTSTLSVEQVRVNHQPGAIKEFLSDFPEGTPVALETVGNYYWIVDEIEQAGCVPQLAHAAKAKVIMGNVNKTDKLDAKGLATLVHLGSLPTVWLPPGEIRDERELHRTRMALSKVRTALKNRILATLAKYALNTTEHADVFVGKGRAWLDRSLNKLPQETGRCLDQELALLDSTMQQIAILEERILQRIQLSPDMQRLKTIPGVGNILAIVIAREIGTIDRFPSAGHLAAYAGVVPKVHSSGGKTRFGRMRKQANNYLKWAFIEAANVIVAHRHHPSWRQKKVAQVYERICRRKGHATAVGAVARHLAESAFWILKKGEDYQDPALSRQGSPKLV

SEQ ID NO: 210329 - protein, 420 aa, unidentified
MNKEVRAWIGIDWADEKHDVSLYEVATGRQERLEVKQSPEALAEWIGQLRTRYGNAGQVAVVLEQGRGALLNVLMGCEFLVLYVINPKSLSCYREAFYGSGAKSDPVDAELMREMVRQNPERFRAWHPDDVLTRSLRLMTEGRRDLVNQTTAVTNQLTALLKGYYPQALRWIGALDTHWACDFLDQWPTLQALQSSSRRQILRFYEKHPRHHLDLEQQIQQFHQTLPLTGDEAVLEYSTLMVQALIPQLRALLDSIDEFDRKIAEVFRKHPDRPIFESFPGAGAALAPRLTAAFGADRDRYAAASEMQQFSGIAPVTEKSGKQHWVHWRMACPKFIRQTFHEFADHSRRWSAWAKAYYQLQIERGKKHNAAIRALAYKWIRILFRCWKQRVPYNEQVYLASLLKHQSALLLKAAPAVEKL

SEQ ID NO: 210330 - protein, 352 aa, unidentified
MEYVGIDWAYRRAAWCALGEGGAVSGEGVVAADEDGLARLVVTLGIEVRACVEMMSGAVWVRDRLAAVGWRIDVAHARKVRDIAPLACKTDKVDARVLAELCRRDLVPALWVPSLEERALREQLRRRMHLVRLRASAMNRIFGLLTQWGLRVSLARLRASDAMELLADRGVDATWRRSIAEALAVIELLDERIAALERELRQAARDDQRVVLLETIPGVGDLLGLTLASEIGDVARFATPRKLVGYAGLAPRVHQSGERSHTGALSKAGSRTLRWAAVEAAHAAWRPTNPWHELYSDIAKRTGKNPAKSAVARKILIACWHILSRQQPFKAARSQTSGATDVSASSRCFLAA

SEQ ID NO: 210331 - protein, 400 aa, unidentified
MVSIGIDISKEKSTVCMLRPYGEVVEPPYDVAHNESELNALIEHIQSFDEDVKVVLEATGGYHHVVVSKLISVGIFTVVVNPYIMKKYCAATLRKAKTDKIDSVKIAHYGIDHWFSMTAYCPPDEVYAELKLLGRQYEQYVRLKVGCKIHLADLLDGVMPGIKKILAGNVPAFSTKDKLCDFVEKYWHYDNIKKLSEKQFLASYEKWSKKKGYRYNESQAIAIYQLSKNNIPTLKSSTPSTKMLVLQAVKSVRDAELTLSLIISQMQEIASALPEYSVVNKMKGVGTVLSVRLIAEIGDVRRFHNGSALVAFAGIDAPPYESGAFVGTNRHISKRGSATLRKIGYEIMHALKVTKPTEDSAVYDFMIKKENEGKPKRVAKIAGLNKFLRIYYARVMEVYC

SEQ ID NO: 210332 - protein, 354 aa, unidentified
MPERAKARVTVVGIDIGKNSFHVVGLDRRGAIVLRQRWSRGQVEERFANMPRCLIGMEACVGAHHLARRLRALGHDARLMPPKYVRPYSKGQKNDFRDAEAIAEAVQRPTMRFVVTKTPDQLDLQSLHRVRERLVSQRTGVTNQIRAFLLDRGVAARQGLRFLRCQLPIILATRSDVLSPRMMRVIEELAGDWRRLDERIDGLSQEIEALARQDPACERLMTVPGIGPIISSAVVAAIGNGAVFTKGRDFGAWLGLVPKQISTGDRTILGAISRHGNRYLRALFVQAAWVVLVRIKDWDRYGLKAWIDAAKKRLHHNVLAIALANKLARIAWAVLNKERVFECVRTRATTSQPA

SEQ ID NO: 210333 - protein, 357 aa, unidentified
MDHIGIDVHKRESQICILAEGGELIEQRIRTEPERFAAVLGPRPRARILIEASTDSEWVARCLERLGHEVIVANPNFAPMYATRTRRIKTDRRDARALADANLLGAYRPAHRLSDAQRQVRGRLGVREALVRTRTRYISLIRALLRQHGYRVPSGGAEGFIDRVAAMPLPGQLRSLIAPLLAVMLPLNRQLAYSDQVIEHLAAHDPRVKRLRTVPTIGPVTAAAFIASLDDAQRFRHAHQVEAYLGLVPREFSSGDTQRRGPITKAGPGRTRWLLIQAAVSLLRRRPAEAEALYTWALRIAARRGKHVAVVALARRLAGILYALLRDGSVFQPRRAGGGAHAPAPPPTVTRRAARAR

SEQ ID NO: 210334 - protein, 430 aa, unidentified
MKQFELLHSLFVGIDVSMKENVVHAMPFSPEDHPGHAHLRFSAPNTPAGSAEIVEKVGDFLKFYPDVTQVVIALEATSVYSFHLATFLSVAQFNGHIPAIVYSVNPKEIHAYKKTFTDVGKDDYVDAMVIADYARSNKIRSRPWKGPELLGLRILTRLRFRIARLIGILKNSTGNSIYLECSGLMTGENPFCNVWTATCQQLLTTFQGPDEILSLSDEELLNFITEKGHGRFSHPLDVVEKVKKAARNSYRLDKRVYEPLTSGLSVSFFIIHSLEAAIKKLDKSIETMAKSFSSDSYQILLSIDGVGPVIAGGLLAEIGDIKRFKTDDALAKYIGLTWREKQSGQSESPVKHLSKAGDVYLRYYVLLATGQIINYSAKYREAYERIRSRKTLFPYRAALNLVARKIVRLIFTLLNKHQLYSDNKVMVTLE

SEQ ID NO: 210335 - protein, 320 aa, unidentified
MEANLGIDVAKAKFVVALLTADGKVRHKSCANTPAGFADLAAWLQRQRVSPVHACLEATGTYGDALATWLHDQGHVVSVVNPAIIHAYARTQLARSKTDRIDAELIARFTATQHPPAWTPPAPEIRALQALVRRLDALHGMRTQELNRLAAGVTVAEVRASIDVVVTQLDAQIAHVQQLIRDHLDRHPGLRAQRELLTTIPGIGEATAAVLIAELFDKPYTSARQAAAFAGLVPRIVESGTLRGRSRLSKIGPGRLRKALYFPAVAALRWNPTIRAVRTRLHAAGKPPMVIIGAAMRKLIHLAYGVLKSGRAYEPTCAHP

SEQ ID NO: 210336 - protein, 354 aa, unidentified
MPSNAETAVARTIGIDTGKNTLHMIGLDEKGAIVLREKVSRTRIAARFVNLPPCLVGIEAGMASHYVARELVALGHEVKQVPPTYCKPFRQSHKNDFRDAHAVAEAVERPSTRCVPIKTDGQLDLQALHRLRSRLIGNRTAAINQTRGFLLEHGIPVRQGHHFLRQQLPQILATRTDVLSPRMVRIIGDLMTDWKYLDERIEGVTDEIEALAHADEGCQQLITVPGIGPIISSAMVAAIGNGAAFCKGRDFAAWLGLVPKQRSTGDRTILGRITKRGNRYLRMLFIQGARAVLLRPASWAKHGFGSWLTAATRRLHRNVLAVALANKLARIAWTVLAQGRRYEARVEPRVEAAA

SEQ ID NO: 210337 - protein, 316 aa, unidentified
MLYVGIDVAKNKHDVTALNVPGKTVLKPLTFSNNKAGFELLDLSLRQLNQDCLIALANTGHYAFNLLNFLHEQGYKVYTCNPLLIKEFAKSLSLRKTKTDKKDAHGIALKLLSDPNREQFQHDNRQVELKILARHIHRLKKKQSDWKVQYTRCLDIIFPELDKIVGKHSEYTYQLLTRYPNPQKRLEAGFDKLIEIKRLTASKIQDILSVAPRSIGTTSPAREFEIIEIIKHYKRLIDKAETCVNDLMAEFNSIITTVTGIGGRLGAVILAEIRNIHAFDNPAQLQAFAGLDSSIYQSGQIDLAGRMVKRGSPHLR

SEQ ID NO: 210338 - protein, 349 aa, unidentified
MTIVGTNPDAVIGGVDTHADVHVAAVVNHVGGVLGIESFPTTIKGYRQLVSWLASHGELTLVGVEGTGSYGVGVARYLARAGIDVVEVDRPNRQTRHRKGKSDPVDAVAAARAALSGTASGLPKTRDGNVEAIRVLMIARRSAVDTRIETLNQLRHVIFTASPKIRAKFSGLTAIGLTNTAAALKPRHNDSDQVRHITLVTIRTLGRRVQYLREETKSINRMLRPLIRATAPGLLEVYGVGFNTAAKLLIAVGDNPQRIRSEAAFAHLCGAAPIPASSGKTIRHRLNRGGNRQANSALYHIVLTRMKHHQPTRDYVARRLAEGKTMGEIARILKRYVAREVFKHLPRPA

SEQ ID NO: 210339 - protein, 319 aa, unidentified
MHCIGVDVSKQELVTFDGTKERTFPNANGLPEFGRFVKRSKDVVVVFEPTSTYSRKLETLCRTQRILCCQLNPRVVPHLRLVGKGRSKTDSTDAELLYRYGIERGQKEATQLNSDALAESIQARLACYRVAQKARVAYHNVLEALSQDPTASRELLTELSVEIGELKAKEKQHLDVAQQLVERDEEASRRLDCLLSIPGLGPITGLTLLALFRKYPDANRSQIVALAGFDPIWIQSRTSVHGKSRISKRGNREVRKRLFEATLSAARYNPSVRAIYQRLKGAGKPEKVARIAAARKLLLIAHAIYENGSTYRDPNEKEA

SEQ ID NO: 210340 - protein, 395 aa, unidentified
MISCAPCRFAAERARYEAQRAERRYRAVDAENRLVAPSWLVGGMLPGIERQPRKKLEPSPERLLAVLHRWRDEAVRTGRTITRIAVAFEAGRDGFWLARWLEARGVEAHVIHPSSVAVSREHRRAKTDRLDSELLKRGFLGWLRGERGHCSMVRVPTIAEEDAKRPNRERECLVKERTRLVNRMKGTLARLGIRNFRPTLRQAAEHLAALSTPEGSPLPPNVWGELQRDMARLGLVIGQIQEIEKARQKRLEQQPETTPHAMVRLLARVVGIGIETADMLVNEVLSRPMRDRRAVARYAGLTGVPDESGARRREQGLARAGNARARRGMIQLAWRFLRFQRQSTLALWYRARTADSRIGTRKTMIVALARKLVIALWRFVTIGEPLEGVVLRPAV

SEQ ID NO: 210341 - protein, 347 aa, unidentified
MNFYTIQHKHYCGVDLHARTMYICILSQQGVVLLHRNLPCNPQSFLLAIQPFREDLVVAVECIYSWYWLADLCGKEGIAFVLGHALYMRAIHGAKAKNDRIDSHKTAVLLRGGLMPRAYVYPAEMRATRDLMRRRLHFVRQRGSLLAHIQMTHHQYNLDSPGKRISYRSNRDGLGQDFADASVRDSIAADLALIDHYELVIGELELAVLRQARVHDANAFRLLTTLPGIGRVLGLTILYEIHDIRRFPSVQDFASYSRLVKCEKNSAGKKLGTSGDKIGNAHLKWAFSEAAVLFVAKCAQGRTILARLERKHRNSKALSILAHKLGRAVYFMLARNQAFDLERFARS

SEQ ID NO: 210342 - protein, 339 aa, unidentified
MRLYVGVDLHANNNFVAMVDQEGKRIAHKKLSNDLLVIRDFLKPRQTELVGVVVESTYNWYWLVDGLMDSGYPVHLANPLAIQQYRGLKHADDRHDAYWLAQMLRLGILPQGYIYPKEERPVRDLLRKRRHLVKLRTSLILSLQNIVSRNCGVRCSVNRVIRLKEDGVSPLLAGKEDLALAGQSSKEMIDQLTRQIRKIEGVIVKRIEMKDTYRYLLSLPGVGKILALTIMLETGPIARFAQVGDYASYCRKVPSRWTSNDKSKGKGNQKNGNKYLAWAFSEAAEFARRYDEQARSYYTRKMRKTNVVVAHSALAHKLSRAAYYLMRDQVPFMPERLFC

SEQ ID NO: 210343 - protein, 415 aa, unidentified
MKANIRTHYAALIGLDWADKKHDVCLMLPNTGKFEYSQFTHTPEAIEDWALALHKRFPRQPISICLELKSGPIVYALLKYPWFDLYPVEPATLAKYREAFTHSGAKDDPSDAFLMVDFTRRHNDKLRIITADDEETRILLRQVEQRRLLISEKVRLTNRITRALKDYYPQPLSWFNDIDTVMFCDFIKRWPNQSKVCRAHKSTLVKFFHEHHVRSQSRIDKRLEGIRASMPLTEDNAVIEPSQHYVLCLIEMLKRILNTISEYNQQIAERFEAHPDYEIFHSFPGAGAVYGPRLLTAMGSRRDRFESSDEVVRQIGVAPVVKRSGQSTWIHWRYNCPKFVRQTFVEWANQSIHYSYWARLYYEKQQAKGKAHQTILRGLAFKWARIIFRCWKNHEPYNEARYLLALKEKGSPLVT

SEQ ID NO: 210344 - protein, 361 aa, unidentified
MQRIAFDSHKHYTLASVEGEDGRLICERQIPHERGALQEFLRRCDPGSPAVETTGNWYWIVDEIEGAGCRPRLVHARKAKLMLGMINKTDKLDARGLNRLQRAGTLPAVWIPPSALRDQRDLPRTRMVLVRQRTRLKNRIHAALAKYAMSLPDVSDLFGRQGTRWLQEHLGQLPPQTAHAAQRVLEQIETLDRQGAQREQRMSELFAPTAALEWLRSVPGVGFILGVVIRLEVGDVSRFPRSAQLAAYAGTTPRVHPSGGRTRYGPLRPDVNRYLKGAFGEAANVICRRRARWPDRHVTHLYQRIARRRGHQTAIGAVARHLAEATYWILTKEQPSREPRPQPPQRRETRVVHGGVSAPMP

SEQ ID NO: 210345 - protein, 348 aa, unidentified
MRIIGCDFHPSWQQVAWLDAATGETGECKLVNGDGEAEQFYRSMAEPALVGVEACGNSQWFVELLQQLGHEVWIGDAAQIRASYVRKQKTDKRDAAHILRLLLENRFPRLWMPSAEQRDVRQLLIHRHKLVEIRTRVKNGLQHLAMNRGMQKKSRLWSAAGQQALRELPLAGWAGRRRQDLLGLLQSLDQQIGELDQAVEETAQRDKMAQLLMTQPGVGPITALAFVVTIGEVSRFRRGKQVASYLGLIPREHSSGGRQRLGAISKQGNRFVRMLLVEAAHSANRLDEGFRKTYQQRCHRMAKGVAKVAAARKLAVRLYWMLRTNTGYPEIVRIESSPRVPLVVRHGG

SEQ ID NO: 210346 - protein, 370 aa, unidentified
MDDITYVGLDVHKATVCVAVAENGRGGEVRQIGVFENRPEILIKLAARLSKGGRPLSFCYEAGPCGYGLHRLLSGHGHDCIVVAPSLIPIKAGDRVKTDRRDALMLAKLHRAGELTPIWIPDAAHEAMRDLVRARATAGRVLSKARQHLQGFLLRHDQIYRGARAWTLAYRRWLTTVRFAHPAQQIVLQDYIHAVQDAEARLDRLTRQIEELLPNWSMAPVVTALQAMRGVALVVAVTVVAEVGDFRRFANARQLMAYLGLVPSEHSSGATVRRGGITKAGNVLARRVLIEGAWTYRTAARVSRKLHDRNEGLSPTVRDIAWKAQIRLCSRYRRLAAAGKPKVVVTTAIAREMVGFIWAIAGIAQPTLQA

SEQ ID NO: 210347 - protein, 345 aa, unidentified
MEYFVGIDVSLDQSSICVVDATGKLVREAKAASDPDVLARTLVEFGCGDARVGLEAGALSEWLYAGLTGAGIDAVLLETRHVQAALSAMAVKTDRNDARGIAQLLRLGWYKSVHAKSAGAQEIRMLLTGRKLLQRKLIDLELGMRGMLRAFGLKVGKVSRGRFEARLRALIDGNAMLETVIGGMLNARAALIAEFARLHRAVLKLVRVDDVCRRLMTTPGVGAIAAVTFKAAVDDPARFRSSKALGAHFGLTPRKYQSGETDFTGHITKAGDASVRTVLYEAANAIITLKVRPSSLKTWALGVVKRRGAKRAKVALARKLSVILHRMWVDGTEFRSGREEMLAAA

SEQ ID NO: 210348 - protein, 354 aa, unidentified
MEYIALDSHKRYSFASVEEHTGAILREARIEHQRGAIAEFLSAWKPGTAVAVETIGNWYWIVDEIEAAGMVPQLVHPLRAKLMLASVNKTDKLDCHGLNRLQRTGTLATVWIPPAEIRDLRDLPRTRMVLCAERTKLKNRIHATLAKYCISIDGASDAFGKRGLEELEKKLELLPQHSRFCVERLLSILEKLQDEITHFEARMKKVFRTSRPLELLQTLPGVGFILAVVILLEVGEVGRFTNAQRLAAYSGTTPRVHASGGKVRYGQVRSEVNRYLKWAFVEAANSIALNSRRLSCRHVSELYLKIRQRKGHQKAVGAVARHLAEATYWILKKGEAYREPRKEPRKSVVSSTKG

SEQ ID NO: 210349 - protein, 361 aa, unidentified
MAHPSAYLEPAQPGGQAPVTIGIDPHKGSHTAAALDAQHRVLAQVRVAPTRDGYRQLRAWAARWPRRRWAVENAAGLGRSLAQRLLGDGEPVLDVPPKLSARVRVLSTGHGRKTDEADAASTALAACGPAELQPAALEGHAATLRLLSDRRDDLVARRTQTLNRLHALLAELAPGQVPPGLSADRAAAVLRRLRPPAGPQRTRRLLAGDLVREVRRLDAAVAALERRIAAAVKDSGSTLAELFGIGAILAAKILGRVGDIRRFASAARFASYCGVAPIEASSGDVVRHRLSRAGDRQLNFALHVMATCQARQRSPGRAYYLRKRAEGHSDKEALRCLKRRLADVVYRQLIRDARAAPGLGA

SEQ ID NO: 210350 - protein, 283 aa, unidentified
MPVYAALDVSKASTQVHLVDETGTCLWRGKSLTHPEALAAALAPFASDLVKVGLETCCLSTWLGHELRGRGLPVVCMDARQAHAALSVTMNKTDANDARGLAHLLRTGLYREVRLKGWDDVRMRTLIHARRALLRAQIDIANALRGALRTFGLMLAAGPGNGGARAFERRVREHLASRPDLVPIVMPMLEAWQAVRSQVVQHDRAIRAAVRADPRCRLLMTAPGVGHLTALGFVAAIGDPEAFRSGRTAAAWIGLTPRRYQSGTIDMQGRISRHGNKLLRSYL

SEQ ID NO: 210351 - protein, 347 aa, unidentified
MTEAYDGRQVVGIDLHRRRSVIVRMTEDGRKLETVRITNSPAALRAVIAKAGKNPKVVIEATYGWYWAVDVLEAAGAEVHLAHPLGVKAFSYRRVKNDERDAADLADLLRMGRLPEAWIAPPEIRELREITRYRHQLVKARTSVKDQVHGVLAKLGIPVTHSDIFGVHGQAWLDELKLPQPYAGKVASLRQLAGGLTAEIGLLEQVLGDLLAGHEGYAAIQQLPGIGPVLAAVIVAEIGDIRRFPGPGQLASWAGLTPRHYESDTKVIRGHVTKQGSRVLRWAVVEAIQRQPAGSRPRQVRDAIIARRGKEAKNIAKVAAARELLTLVFYGMRDGHVRRALQRGQAA

SEQ ID NO: 210352 - protein, 414 aa, unidentified
MERPAALDVHNESVMACVRTPVQNGRREQFVEEFKTTARGLLALHDWLGAHQVTQVAMEATGTYWKPVWAVLEDDFQCVLVNARDVKQVPGRKTDVKDAEWLCQLLEAGLLKACLVPPKPIRTLRNLTRYRKSLIRDRQREANRLHKVMQETGIKLDTVASKLLGKSGRSMLDALLSGTTDPKVLADLAQGRLRAKIPALQEALEGSFTPEHALVVRQILAHLDFLDGSIATLSEQIEERIRPFASAVELLQTIPGVGQVTAEVIIAETGGDMSAFPTAKHLVSWAGVCPGNDKSAGKRRSGKTTKGSKWLRGALIEASKSAARTKNTYLSSQYARLRVRRGGNKASVAVANSILTAAWHMLSTGELYHDLGGDYFARRDPERTTRRLVAQLEKLGHLVTLQTATSTTPDVVAA

SEQ ID NO: 210353 - protein, 341 aa, unidentified
MEQATTIGLDIAKHVFQLHGADAAGHVLFRKRITRVKLLGFLAAQTRCVVAMEACAGAHYWAREIAKLGHHVRLIAPAYVKPFIKRQKNDAADAEAICEAAQRPSMRFVPVKTEEQQANGIVFRARDLLVRQRTQCVNALRGHLMEYGYVFPKGITHVTTLVALVEDPQSSLPDSVRVILKLLVDTFTALEAQIAVLDTEINQRSKSDPTARRLMTIPGVGPIASTAITALVPAPEGFPAGRDFAAWLGLTPLQKSTGGKQKLGAVSKRGERTIRRLLIIGASAVVQQASRRGAPNGSWLAQMLARKPKMLVTVALANKMARIIWALLVKGGIYRTPIAAA

SEQ ID NO: 210354 - protein, 343 aa, unidentified
MRKYAALDVSMEQTAICVVDESGKKIIEGKVQTDPDTVTTWLAEKAGSLEKVGMETGPLAVWLWNELRARGLSIVCLDARHASAALAMMPNKTDRHDAAGLAQIVRTGWYKEVRIKSHAAYVVRALLSARDALVGIRGKIENEIRGLLKTFGVMFGRKVGGFTRRAEEIVAGELAASPEIKRIIEALLEARRAILDRIKLLDSRVRSVAKANATARLFMTAPGVGAVTALSVASAYDDPARFSRSSSAGAYLGLTPRRYESGEISRNGRISKRGSKLTRKHLFEAANALLTRVGKFSSLKAWGLRLAKIAGFKKAKVAVARKLAVILHAMWNARTPFRWSAAV

SEQ ID NO: 210355 - protein, 338 aa, unidentified
MPLYGGIDLHANNSVVVLLNEQDQRIYHKRLPNALATIVEQLAPYHADIEGLVVESTYNWYWLVDGLMDAGYRLHLANPAAIQQYSGLKYTDDHSDARWLAHLLRLGVLPEGYIYPKAQRPVRDLLRKRAHLVEQQTANVLSVQNIILRNTGARLSANRIKSVSQAEVDTLLPNADQALAVSSALAVLHCLAEQIKTVETRVRTRIQSTPLYELLQTVDGIGPILAQTILLETGDIGRFPSVGDYASYCRCVDSTKVSNGKRKGQGNVKNGNPYLAWAYAEAAHFARRFNLKVQRYYQRKQAQTNVTVAHKTVAHKLARACYHMMRHQAPFDAAKAFG

SEQ ID NO: 210356 - protein, 324 aa, unidentified
MIDGILGIDVSKNTLDVSISSSTKVRTKSFANTSDGWHHLLDWLIAHKIRRVHACLESTGRYSLGIACALHEAGHVVSIINPAQIRDFVRTKLGRNKTDGVDASHIREYCELFKPQPWVPPSEAHRRLGELQTIRAGIIASLTAWKNRKNSGIVDAEAQALADATISHFTSQLGTVDQAIALTIENDSHLRSKRDLLLSINGVGETLAGVVLAELPGPDVLHSSAEVVAYAGLNPRQHQSGTSVDRATRISKIGNAVLRAALYMPALSAMRYNPAIVALVTRLKSRGRLKPKQIVVAAMRKLLVLCFGVLKTGKPFDPTIAMGC

SEQ ID NO: 210357 - protein, 339 aa, unidentified
MTVKTVGLDLAKDVFQVHGISENGRVIFKKTIRRAKLLTFFETLPRCTVGMEACGSAHYWGRELRKLGHDVRLMPAFYVKPYVKRGKTDAVDAEAICEAVRRPSMRFVEIKSKDQQAFLTVHRTRDLVVRQRTQVVNTIRSILREFGHVLPTGVEAVNRFSQSHMDGDQLDMPELANGILGTLCYQLLGLNARIDGYTQLIKRHALLDANCRRLTRIPGVGPITASAMVATIGDGHQFRTGRDLAAWLGLTPRNKSSGGKQKLGKITKMGDRYLRKLLVVGMTSRALQAKTHPERADRWTANILVQKPFRLATIAMANKSARVIWAILTKKQNYRQPVA

SEQ ID NO: 210358 - protein, 282 aa, unidentified
MSSTGKVLKRKQLSRQKVADYFANLEACTVVMEACGSTHYWSRVISRCGHEVKAIAPQFVSAYRKGNKNDYNDAEAIAEAAQRQNMRFVPLKSLEQQDIQMLHRIRERLIKNRTVLSNQIRGLLPEYGLVMPKGISHLTAHLPRFLEDTPNELSTPARRYFLGLSEELDEISVQIKSVDSEVLGINKQYEVCQRLSTMTGIGPVVATAFYAGIGDGKAFNNGRHVSAWLGLVLGQHSTGGKLTFLGISKRGNTYLRTQLINGARAALRHCENKTDQVSVWAR

SEQ ID NO: 210359 - protein, 459 aa, unidentified
MRRDKPAVSTWEGLKVIHPNAAGLDIGSEEIWAAVAPGRTAEPVRKFGTFTPDLHALADWLTACGVDTVVMESTGVYWIPVYEILAARGFQVQVVNARHVKNVPGRKSDIQDCQWLQGLHSVGLLRGSFRPEGEIVALRAYLRHRAALIEHRAAHIQHMQKALQQMNVQLTQVIADISGVTGLAIIRAILAGERDPQQLATLRQPGCKKSAEQIAKALTGNYRAEHLFALKQALALYDFYTAQLTDCDAEIERQFANLKPVSDDLPPLPPSAKRDSHSKNAPSYDARSLLYRLTGVDLVAISGLNESTVQTIISEVSTDLRAFPSAKHFCSWLGLAPHNDISGGKRLRSRTLKTDNRAGQAFRLAAQSVAKSPESAFGTFYRRMKARLGAKQALVATAHKIARAFYHMLTHRTPFHDLGGEEYERRARERELKNLEKRAAKLGCSVIKNPADVALVGSF

SEQ ID NO: 210360 - protein, 475 aa, unidentified
MNVKGKTKKNQVATANIFEQQELLKKAEVIRENLTASTWHELEANGKFDKNEKLSFVSDDMLILGCDVGSETHYMRAIDTRGRELSKSAFPFNNDSEGFQSAKEWALRIAAGHDKRQIVLGLEPTGHYWFCLATWMVSNGISVVQVNPYAVKQTKEVEDNSQLKDDRKDPKLIANLVKDGNFGMPYLPEKLYAELRRLSMFREQLNEDRIRSINRMHREMKIYFPEYKDALGKVDGAFSLELLKQAPFPDDLIAIGADGIRQIWHDAKLRGRGYGRAGEILQYAEESVGIKDGAAAGKTAVKWFVRKILELDAELAVIENQINQKCQEIPYAGNILEIAGIGENTLSGILAEMGDISRFDDVKEIQKLSGLGLVACSSGKHKGETRISHRGRKRLRYWLFQAAKSAVAHAEEFKELHTYYTTRADNPLKKMQSLIVIACKLLRIIYTILKKGAVYDPKKMLMDIRRPEKKEATAA

SEQ ID NO: 210361 - protein, 337 aa, unidentified
MTLYCGIDLHAYNSVISVIDDHDTIVYEKRHANDLREIEGVLEPFRDDLFACVVESTYNWYWLVDGLMDAGFDVRLAHTGAIPQYAGIKHSNDQTDARHLAHLLRLGILPEGHIQPREQRAIRDLLRRRLLLVRQKTLHHLSLQSLIVRQTGERLSANQIKALDNDAIADKLTDPVRLGGQITHLARCWHEQAIEMLEDEVLKHLKPRKEYQLLTSMPGVGKVLASTIVLETGTIERFPDPGHYASYARCVNTAKVSNGKLKGRGNKRNGNKYLAWAFMEAAHYAAIWSPEIKRFYQKRQAKRHILVAKKTVANKLAKACYHMLKRQEPFDVKRAFS

SEQ ID NO: 210362 - protein, 370 aa, unidentified
MEFNSYIGLDVHKETIAVAIADAGRNGEVRFFGEIANNPDAVANLLKKLGGRRSKLHFVYEAGPCGYGLYRQILAAGHACDVISPAHTPKRAGDHVKTDRRDAAMLARLSRAGELTSVWVPDETHEAMRDLIRAREVTTKDVRQARQRIQGFLLRYGRRYVGAVWKKRHRVWLANQSFDHPAQQIAFQTYLNAMDQAIARKDLVEAQIEALVPEWSLGPVVEALQALRGVALVVAAGVVAEIGDMRRFDNPRQLMAFVGLVPGEHSSGNRRKLTGITKAGSVVARRLIVESAWAYRMPAKIGQAMLLRQQSIAVPIREIAWKAQIRLCGRYRRMLARGKKAPIVITAIARELLGFIWAIARQVEPKTIAA

SEQ ID NO: 210363 - protein, 341 aa, unidentified
MDEYIGLDVSLKETAISVRRDGERVWRGKCPSDPRLLAEVIRKRAPQAKRVVFETGPLSVWFFHALSAEGLPAICIDARHAKAALDMAANKTDANDADGLAHLAEVGFFREVRVKGYNSMLVRTLVAARLRLVQVTTELSNQIRGLMKTFGLVIPAGKGGAFESNARALLEDYDELARIILPILEAWRAARRQATELGRQLVAAARQSQACQLLMSIPGVGVVTATSFATAIEDPANFKTSRAVGAWLGLTTRRYQSGEVDYDGHISRRGDAHLRGLLYEAAAVILTRVSADSGLRRWGVKLREKVGFKRAAVAVARKLAVIMHSMLKSGESFDRSVGPAA

SEQ ID NO: 210364 - protein, 336 aa, unidentified
MPEIPRTRTVDRVNQTRIVQGRDNGRKMSEVYTGIDVSKEFLDIAVLPSGERKRYGNDEAGIGKLTARLKKLSPVLVVMEPTGGLEMPLAAALTLEGVKIAVVNARQVRDYARATGKLAKADKIDALVMAEFASVIKPPVREFRDEETAEIKSIMSRLRQLLEMLTAEKNRLAIACKILKPKILSHIEWLKKEIADLDNELRQRIEDSPIWRVKDNLLQSIPGVGKVLSATLLAELPELGKLNRRQIAALVGVAPYNRDSGKMRGKRSVWGGRVSVRSVLYMATLVSTRFNPVITSFYQRLLEKGKAKKVAIVACMRRLLIIMNAILKTQKAWNYA

SEQ ID NO: 210365 - protein, 375 aa, unidentified
MKEKVRFIGLDVHAETIAVAIAEPDGEVRSLGTIPNRSESLRKLVRKLGPAEKLRACYEAGPTGYVVYWQLTELGVPCQVVAPTLVPVKAGDRVKTDRRDAEKLARCYRSGDLTAVWVPDEGSEALRDLVRAREAAKQDQMRARHRLSKFLLRSGQRPPTGVRPWTRPYLIWIAQLRFTQIAQESTRQDYLHEVEHMRERVARLEQAITEAVKLASPALQHVINDLQALRGIADISAVTIAAELGQVSRFHSARQLMGYCGAVPSEDSSGKRTRRGGITKTGNAHLRRIVVEAAWSYRRPPCIWYGLRRRQESISEEAKEIAWKAQHRLHKRYMRLGAAGKDQRKIAVAIARELLGFIWAIGARAETIVRHRVAA

SEQ ID NO: 210366 - protein, 350 aa, unidentified
MAYLRADLHRKVSHVVALDESGEAILSRRFEHSREAFRRVFGELEPEPISVAFEATYGWGWFADLLADAGIEAHMAHPLATKAIGAGRVKNDAVDAATLAHLLRTNLLPEAPIAPPKVRELRRLVRMRASLVRIRSRLKCQVHAICADAGVPVTASDLFGRMGRATLETLTLPPRPASRLAANLRLIDDIAREIVAADREIVAAFRDDDRVRRLLPIPGIGILTAATIVAEVWDVGRFPSADHLASWAVLPRPNAARPTTSGAATSASKAAAGCAGRWSRPPRRSGPPGRPGSTGSPTRSRIDAAPRSRGWPSPAGSSPSPSMPSATSGAAGSTRRSRARRAGRSRRARV

SEQ ID NO: 210367 - protein, 314 aa, unidentified
MSTAPVYLGADISKPSIDLFATGVTVPHAIANTPAGHQHLIKSLSRSSAPVHVICEATGVYHQPLVAALHQAGLPVSVVNPRQVRDFARSRNELAKTDAIDARILAEYGRSAQPAPTPRPDPQFVRLQQLVARRAQLVGDRAAERTRESEQQMVPREVRASLQRNLRHLDREIEKIQDLIDHLVEQSPALRDRVRLLVAVQGVGRLTAVAVLAAMPELGTLSENQTAALAGLAPFNRDSGAFRGTRSIRGGRLSVRSALYMAAFSASQINPVLKPFYQKLRAKGKAHNLALVAVMRKLLIHLNRILKKHLAPSI

SEQ ID NO: 210368 - protein, 364 aa, unidentified
MGVGSRHRPRLDWKPAAASADRPRMSLALQSFLPFPNSCQGTSPHQQGRGTKMTEHCYCGIDVAKDRLDAQVLPHRQRFSVDNNATGWAELVERLHALPIAAVGIEPSGGYERGIIRILLAAGLSVRRINPSKLRQFARARGILAKNDRLDAQLIAEYVSIIPTRVVQRVATAERLAEVVTMRRQLCDQHVTIENQAAHVEDAILRRLNKRRLARLKADIHLLDKRLAEIVAADVILAQRYELLTSMRGVGPTLAFTLIALLPELGQISRKQIAALVGLAPYDFDSGKLKGHRCIYGGRMPVRNILYMAALSAARYNPALKVFHNRLAAINKKPKVIIVAVMRKMITTLNAMVRDNAAWQPRAA

SEQ ID NO: 210369 - protein, 433 aa, unidentified
MTDSGTPQIAAFIGIDWADEKHRWALQVAGPPGPRTPVEQGEVAHTPEALEAWICALGARYPGRSLAIALEQSRGALLFALSKYAHVVLYPIHPNTLDHYRKSFYPSGAKSDPGDAALILELLVKHPERLRRFQPDTVETRTLQFLVEARREAVDEKTRCLNRLTSQLKMYFPQLLDWFEVDQVLLSELLLEWPTWEHWRQARPSAVAKWLRQRHLSQARVAQLQADLAAALPATHDAAVIEAGVLTAQRVARQLQLLRDSIAQLDRRLAELTQAHPDRAIFQSLPGAGPVMVPRLIAAFGTQRERYATAAQMQCYAGIAPVTERSGKHTWVHWRWACPKFLRQTFHEWAWLSTRTSAWARAFYQRQREKGKSHHAAVRALAFKWLRVVFRCWKDAKPYDQTRYSQALQKRAKPVEIPVKKTSGLTSIKDLLA

SEQ ID NO: 210370 - protein, 389 aa, unidentified
MDEYDGRQFVGIDLHRRRSVIVRQSESGEQLSAVRIVNDPVALGLQLEQAGSDPEVVLEATYGWYWAVDVLQACGAHVHLAHPLGVKGFRYRRVKNDVRDAADLADLLRMGRLPEAWIAPPQTRELRELVRYRAKLVAIRSGLKAQIHAVLAKAGVLIAASDLFGVTGRQRLAKVPLGAAYAQRIGSLLQLIDIFDSHEARFAAMIAEQLDTHTGYHAIQQVPGIGPVLAAVFVAEIGDVDRFTDPAHLCSWAGLTPTHRESDTVVHRGHITKQGSKAVRWAAIEAVQRHPTTAKIAADKPTNTASKPAAARTSPKSPRHANCSRWSTTVCATATSARSTAPGRREPSGRNPRAAAVLSDPRTIGVVVRLIDPACCHRTAPCPSSWAKG

SEQ ID NO: 210371 - protein, 413 aa, unidentified
MLFAGDDWAEDHHDVEIQDETGRKLAARRLPEGAAGIAALHELIAGHLGHNGDPGQVVVAIETDRGLWVQALVAAGYQVYGLNPKQVARFKERYSLSGAKSDAADAHALADMVRTERHQLRAVAADTPEAEAIKVIARAHQTLVWERTRHTLRLRSALLEFFPAALAAYAGLGLTGADTLELLVKAPDPASAARLSAAQITAALKRARRHNAAVKAGAIKDALRMQHLIQPTAITAAYAASIRATASALITLNEQISELERQVEAHFRQHPDAAIYLSQPGIGTVNGARVLAEFGDADGRYSSARARKNYAGSSPITRASGRSKIVLARYVRNDRLADALQSQALSALTGSPGARAYYDKQRERGLGHNAALRQVSNRLVGILHGCLKTGTLYDEATAWPDHHATRHASRLAA

SEQ ID NO: 210372 - protein, 387 aa, unidentified
MGRAEPHTRGRVMEHHSEAFVALDTAKLRNAVAIADAGRNGEIRYLGEFDNTEVGTRKLVAQLASKHARLTFCYEAGPTGYGLHRLIKSLGHDCMVVAPSLIPSKPGDRVKTNRRDAVNLAKLLRAGELTAVWVPDERHEAMRDLVRARDAAAKDYRIKRQNVSSLLLRVGRHYPGKKTWGRAHTNWLTSLKLEHREQRIAFEEMLLAVRQVRERIERLEQAMREAVADWSLAPVVEAVQALRGIDMVGAVAFLAELGDLSRFENPRQLMAYLGLTPSERSTGESVKRGGITKAGNTRARRLLIEAAWSYRFPPRVSKDMQTRIGAAPRTAREIAWKAQMRLCGRFRILTRKGKRPTIVVTAIARELSAFIWAIGREVVGSHATANQ

SEQ ID NO: 210373 - protein, 316 aa, unidentified
MAMHVSKSIVGVDVAKFELVIYEPDQDLLTSITNDKPAIKRWLKTLPRPTAIAVEATNVYHIDLVELAYEAGLDVYIIDGYQLSNYRKSVGVRSKTDASDARLLARYLKNEGEDLRPWTPPPAVYGKLQSLLRRRASLVQAKTSLTQSWANDASLKAVFATFLKSVERLDLLVQKKLKDVLREAGLLEEVARCQAIEGIGFLTATALVMAYNRGDFKSGDSFIAFLGMDLRVSDSGQKNGRRSLTKRGCSEVRRLLHNAAMSACRSSAWKGFYNEHLSSGKATTQVLVMLGRKLARIAFSLMKNQSEYQPKGGILA

SEQ ID NO: 210374 - protein, 327 aa, unidentified
MFQVHGADASGGVLVRKKLRRDQVLKFLAAQPACTVAMEACASSHYWAREIAKLGHEVRLIAPDYVKPFVRRQKNDAADAEAICEAAQRPTMRFVAVKSEEQQAAAVVFRARDLVVRQRTQTINAVRGHLAEFGIVAAKGPFHVAKLVAAIEDDRSGIPEMARPILRLLVEQLRSLDERVALLDRELARRAKEDADAKRLMTIPGIGPITATALAALAPTAQAFKRGRDFAAWLGLTPLQRSTGGKQKLGETSRMGERTLRRLLIIGASATVRWAMRKGSTADPWLARMLNRKPPMLVIVALANKTARIVWALIARGGTYRAPAAAK

SEQ ID NO: 210375 - protein, 426 aa, unidentified
MKNPTSTKLAADSVFIGLDWAKEKHDTCLLAEDGTLEYGRIEQNAIKLQQWLDKLCERFKGRRIAICMEAGRDPLLWRLEGQAQVDLFVVNTTTAARYRKTFAPSGDKNDPRDAAALLDLIQRHPEKVKPHVAACARDRAMDQLTKARRQSINELTAVVSSLREVLELYYPIASKMFDDLSTQLAINFLRRWPDPAHLLKAREATLVKFFHQHNCRSQACVEKRLELVRGCTVETQAPELLGVGRLRIEAHLKQIESLNLSIKAYEEALEAAFEKHEKRHLFDGLPGAAKALAPRLLAAFSILDPKDANEMQLVCGIAPIRVQSGQRSYTFMRQRCPKFLRQSFHEFAGASVKSSAWAKAYYERQTKERKSGSNAAKRALAYKWIRILTACWINNTPYNEMKYIAQLQKRNTKLAELIFQNNACTE

SEQ ID NO: 210376 - protein, 383 aa, unidentified
MRIVCGLDVHKDSVFVCILNEKGEKFEAKYGVLTPELEELHQLLLTHEVKEVTMESTSIYWYPIWRILSDIECMKLVNPYFIKQLPGRKSDVRDAAWIAECTMKDLIRGSFVPDEIVQRMRQYNRRIFDLNKEKVYKLTKLDALLQRCNIRISNYVSSTDSKSYKDVVKLLSEGIVNAEKLTEAIHGRTVNRVGKEVITAALTGVVNEVDIDLIRQYREEILMDDKHLKECQEKLTEICRKEFPREFDNLQTIPGVKERSATSILSELGADMKMFITAAALVSWCGLKPRNEESAGKIKSRRITHGNKYIRKTMIECAWGASRTQNCFYSNFSYTQTVVRRKNAMKVKVAIARKMLVVIWHVLSDGVPYNDYKKPEAIAEGNS

SEQ ID NO: 210377 - protein, 364 aa, unidentified
MAQDTMIEAAVTGGLDVSDRYTYVCVLNFSGGVVDEGRVPTTPEALRRRFSGHGPMRLVLETGTHSPWISRLLEACGHEVLVANARQLRLIAQSDSKNDRADAETLARVGRLDPALLKPIRHRGAEAQLDLALIRARDALVQARTQLVNHVRGAVKAVGGRLPACSTASFPMKVGEAIPEGLRPALGPVLDVIAAVGKELGRYERLVEDLATTRYPETAALRQVPGVGALTALSYVLTLEDPARFAKSRAVGSYLGLRPKQRDSGAGAPQLRITKTGDAYLRRLLVGSAHYVLGPFGPDSDLRHWGSALAARGGKNAKKRAVVAVARKLAVLLHRLWVTGAVYEPLRVAEQRPAATPVLTASNC

SEQ ID NO: 210378 - protein, 410 aa, unidentified
MQVLYQRCCGLDVHKETVVACLRIVSGGEVLREVRTFETTTASLMALSEWLAENGCTHVAMEATGVYWKPVWHILDDGDFQLILANASHVKNVPGRKTDVNDATWLADLLAHGLIRASFVPDAQTQEMRNLLRTRKQLVREKSSHILRVQKTLEDANIKLDSVVTDVMGMSGRAMIEALVAGESDPAKLARLANYRLKASQETLREALRGRVTKHHRFLLRLHLNQIDALDASIAMIDEQVEAGIAPFRAAVGQVMTIPGIREIGAQVIVSEIGTDMSRFPSEGHLISWVGLCPRNDESAGKRRSNRLRKGAPWLKTTLVQCAWAAVRKKDSYLKAQFLRIKARRGPKKAIMAVAASILTAIYHMLKDGTLYQDLGPNHFQTRSKGQQTKRLVKRLADLGYDVALTPLTG

SEQ ID NO: 210379 - protein, 460 aa, unidentified
MGSDNRSKTGMPAAGGGMPVLRTDVAGIDVGSEQHWVCAPALTTDGREVAVVGATTPEWHRLAGWLQARRVTSVALESTGVYWIAPQEVLEAAGLEVWLVDTRARARVPGRPKSACRDCEWLPRLHRCGWLRGAFRPAEPVCLLRTLVRDRATLIAERSDWVRRMPKRLDQMNVRVHRAVADLDGVTGLAIVRAIVAGERDPQRLAARRDPRCRHSEAEIAEQLSGHWRADHLFSLQQALHLYDAIVERRAAYDREILRQLEAMTPDAHRGDEAPRPPKPEKAKDFRKRGVDPLRHALDRISGVDLTTIDALGPETVSVVLSEYGADLTRFPTEKQFVPHVGLAPHRPISGGKPIRRRKKPGSASARVGAALRMAATSLRRSRSALGAYYRRIAQRAGRDVAVFATARKLAQYIYRVLRWGQPSVDEGAATYEQRYHEARVRRLSATAHQLGYTLVAADA

SEQ ID NO: 210380 - protein, 341 aa, unidentified
MTQFYAGLDVSLEMTSICVVDEGGHICLETKVASDPTSLAQSLVALEGEFVRVGLEAGPLSQWLYFGLQDAGLPAVCIETRHLKGAIGAMAASKTDRNDARAMAQVVRSGWFKAVHVKSTESQELRTLLTAREFLVNKVRDHENEMRGVLRPFGLKVGRVGPAGFEARVRELVADRPGLALCMEALLRAREGLRRELNVLHLALLRVVKNDELCRRFMTIPGVGPVTALAFKTAIDRPDRFRRSADVGAHLGLTPRQHQSGEVDRRGRITRCGDAFTRTALFGAANVMLSRTTQWTALKAWGVRLAARSSMKKAKIAVARKLAVIMHRMWRDETPFRWTAA

SEQ ID NO: 210381 - protein, 341 aa, unidentified
MKDTMIGVDLAKRVFQLHGATMTGELKFRKKLTREQFRAFMAAQPTALVVLEACGSASYWAREIAALGHGVRLIAPQYVRPFVKRQKNDAADAEALVIAARQPEMRFVAPKTLEQQAKAVLFRGRDRLVRQRTELVNALRAVFYEYGHVFPTEICHVRRMVAVLQDPHCDLPALVITECRDLVAQIAEKTERIEAKTKDLKALSAETDTARRLQTMPGVGPLTALAVEAFAPDMGQFKSGRDFAAWLGLVPRQHSTGGKARLGRISKAGQSDIRRLLIIGAMTRIMGRARHNVPAESWLGRKLASKPKMLVGIALANRMARQIWAMLKKNEDYRDPALATA

SEQ ID NO: 210382 - protein, 337 aa, unidentified
MERQYVGIDFHRRRSVIVRLNPAGERLAVTRVANDPLAISVAVAEAGPEPEVVIEATYGWYWVVDLLQANGATVHLANPNALNWGERRVKNDVIDATDLADMLRLNRLPEAWIAPPAIRELRELVRYRAKLVRLRSGLKAQVHAVMAKEGVLPTVSDMFCAAGNAQLDAMELARNYGLRVESLRDLIALYDREVAMLERDIHRHLRHHRGYGAVQAINGIGRTIAAVLVAEIGEVERFPHPEALCSWAGLTPKHRESDVKARRGEITKQGSRLVRWCLIEGIARYHGGPTLSKSYHRIAKRRGVNKARVAIARKVLTLVYYGLRDGEIRCLAPAAAA

SEQ ID NO: 210383 - protein, 335 aa, unidentified
MQIKHFIGIDVSRDTLDLSVVVDGISLQHYCITNRSIEIGSTINKIMKSLGASVNDTIFCMEHTGIYNLPLVNWLQRHQGKIWMESGVHIRKTLGLVRGKNDKVDSIRIAMYAFINRHQIKLWKASRKIIERIAALLSQRLRLNKAKKQLNTANQEQRLFMDKDIMRNLNRYTQKTVVVINKQIEAIENEILGLIKEDEKLNHMYQIITSVHGIGFVTASYILVTTNEFINFNNPKKYACYSGVVPFEHSSGSSVRGKTRVSHMANKNIKTLLHLAALSTIRKQGELQEYYYRRVAEGKNKMSVLNAIRNKLILRVFACVIQNREYEKNYQYKFA

SEQ ID NO: 210384 - protein, 321 aa, unidentified
METWVGIDISKDSFDAAWLLDGKKNHLKLENNVKGFKRLLTEVPTESHFAMEATGEYHLNCARYLSSCGKPVAVLNPFAVKMHMQSDLRRCKNDKADSYSIAKFAAEKKTDCWTCPTDDEIKLKHLDAVVDGLQKQIRQSKNILHSLTQVSLRDDLAVSIIKKTISGLESLMERARSRQLEIIEANKKEEVALACSIPGIGLETSLQFFTHVGDVNRFESSRSLISWIGLTPRNAQSGTSIHKNGCISRMGCTRLRGQFYMCAVVAIKYNPDCKAFYNRLKESGKPSKVALIAVANKLIRQLYAVLTKKEAYVPNFCTKAS

SEQ ID NO: 210385 - protein, 313 aa, unidentified
MAIVAGFDVHRAQITFDALDQETGEVERGRILATPGAVRGWAARFPGEEVHVAVEACTGWLFVCEALVGAGAAPHLAEPVETSALRGKKRRAKTDREDARWLRTLLCEGRLPEAWIAPAHVLEWRTRARLRKTLVDERTTWLQRVQATLFHHGVSGAPDKLLSAQGREFLAGLELPEAARERIEVSLQMIEALDRQLAPLERGLRQLARRQTGCRALMAHYGIGELTAPTILCELGDVTRLSVSRKAVRCAGLDIGVHRSDRRSRAGKLTRQGSPQLRWARYESAQAACRPTSPTAANTSRSRRAGSRTPGRR

SEQ ID NO: 210386 - protein, 343 aa, unidentified
MHFKFKLGTDISKGWLDFCMLNNKLDQLIQQRIDNDCDTIQKFIDELIESNQIDSIDEILLVAEHTGIYSNHLIRTWIANGGQLCLVPADKISEGLNGTSSFEEKTDPMDAHRIAEYACRFSDKLKLHSLCTFNLDSIKLLRSQRSRIVKVINILEVPVNEIKSFELKEHSDLVEKLQEVPIEALKTSLKNVEKEIKQIINQDSGLKELMRILCSVAGIGKVTACELIITTNGFTDFAPNQAKSYARNCAVVPLPKSSGKYKRKGRISKKGNSKMKSLLTVCALSLINTNTDLGRYYKRKRESGKKHMSVLNAMRNKLILRAFAVVRNNSMYKRNMNVSLVLP

SEQ ID NO: 210387 - protein, 439 aa, unidentified
MNKRRDRVCGADVHKDLIVATITGDDVLPIQENFGTTKAELKRFRNWLVANKCEQVAFEATGVYWMPIYDALSKTIDTIVANPLQIKTIPNDKSDSKDSNRIATLCLNGQIKRSRVFTDEDRDLRMMTRARSGYVKTRTQFRNRIHKYLSSSGITLSSTMDDMFCKSGRYILDGLAKEKPLEEILKGIPSGKIRKKKDEIRAALENVLNDTNRMLLTDALEILDNLESKMEKLSLEVLKKVQQKSKDLAIVMSIPGIGFVSGSVILSEIGDYHDFKTPDQLAKWCGLNPGENESAGKKKKCGITKRGSKHIRVVLVQAAQTISNMNKTAMSRFFQRLIKKKEHNVAIVAVARKLICLIYHLLINQELYQEGECRKRGSSQDKSCQAPSFKEEHLTDRVAAIVDASYHLNERGRKNALMREIADISGIKVGQKRPSKGGG

SEQ ID NO: 210388 - protein, 340 aa, unidentified
MKNMHFVGLDVHKKIIAFCVKQMDGKIISQGTIKANRNALRLWVHSLPKPWVVALEATLFTGWVYDLLQNYALEVKVAHPQMLEAITVAKKKNDLCDAEKIADLLRCNLLPECYMQPKEIRELRRVLRYRSLIVREIVRMKNKISGLLMEAGIEYDFRKLHGQKYFHQLLDQIEISDELSQILKMSRECLEFLKSIEKRIVDGLKIHPEIKQRMERLTTIPGVGQITALTWILEIGDPHRFSSIKKAVSYCGLCSDQRESGGKQYRGPISKKRNKRLQTILIEAAKLAPLWNPQLREVYEREKQKGNKNRATLAVARKLVAYLLAVDKNKRPFKMKEFCK

SEQ ID NO: 210389 - protein, 403 aa, unidentified
MEGPLISLDVSKGKSNYRFFENGTDRKGKKGVIRHDIQGFDSIRDEAEKMEERLRIKPSVIFESTGVYSDVVEKYFTDKGFDVYVISPLLSASMRKEGVRPAKNDSLDTLSIAKVFYSKDDLRKCSGNDKKAERLREMSYELDMMNRRIRPMKCQFLRLLDKVWPCLDEVSDYSSRFMLDFIIAFGHPENIKTVKGVLSVIRKSEMGTAGRKDKIAQDLFDYCHTHLSAVSKDSSYVELLKRMAIELKAMAKKKSELIDRMAEEARNKEEFARLLTIPAVAKTTALKIMARVGDISRFRNAEALVAYCGLDPRVYQSGKMTGEHRTITKKGDCILRSTLFLAVKLMVMLYPDTKVARFVAAKAKNGLSYKQAVVAGSAKLARIIYSMLTHHENYVEFNADIVA

SEQ ID NO: 210390 - protein, 394 aa, unidentified
MRFIGIDVGSETHVVAVVDESGKVVFKATSFSEDADGYAKFRQILGAPGDAMCALEATGHYWQNLFAFLAAEGFPVALLNPLRTHHFAAEDLRRAKTDAIDALSIARFAQQKRPAVTVLPDEATLELREMVRLRDRMMEDLGDRIRQLHRTLDLTFPEFPRLVRDLSSYKATALLLRFPTATAFREASSGNIAELRYDGRHRIGPELAAALCDTAGRSVGRHEGPSYRLQTQYACEDISTLRERLKTLDDDIHCSLGQHRVGQLLTTIDGIGPNTAARVIAEVNLLEFRDAGALAAYVGVAPSVNQSGKRVPQRGGLHSVGHARLRAKLWMPTLRAVRNNAWLRHFYEGLVARGKPKKLALVAALRKLLSAMLSVARSGKPFEPRLPEAAISLA

SEQ ID NO: 210391 - protein, 347 aa, unidentified
MNFYTKQHQYYCGIDLHAKSMYLCIIKQEGDIVLQRNIRTDQEVFLKTIERYRDDIVVAVECIFTWYWIADLCVKEGIPFVLGHALYMKAIHGGKAKNDKIDAHKIAVLLRGGMIPMAYVYPQEMRSTRDLLRRRMHLTRKRAELLAHIQNTNYQYNLPDIEKKVAYKANREGVAERFPDESVRKSIELDLKLLDYYDQLLPRLEHEISLIAKIHDADSYFRIRSIPGIGRILGLVILYEIHEIRRFPRVQDFVSYCRLVKSAKESAGKRLGSSGKKIGNVHLKWAFSEAAVLFLRRNPEARKYRDKLQKKHGKAKSMTILAHKLARATYYILKRKEVFHMNTFFER

SEQ ID NO: 210392 - protein, 338 aa, unidentified
MTPLYCGIDLHSNNSVISIIDDHDDVKYEKRLPNDLPTIVGKLEPHRSQLYACVVESTYNWYWLVDGLQDAGFDVRLAHASAIPQYAGLKHGNDETDARHLAHLLRLGILPQGHIMPRAERALRDLLRRRLAMVRQQTANHLSLQSLIVRHTGQRLSANQIKSLDEQAIAERLSSPICLSGLISHQTRSWCADAIKRFETEVAKGLKPNPAYPLLRTIPGVGKILAATIVLETGNVERFPSAGNYASYARCVDSKRLSNDKLKGRGNKRNGNKYLAWAFMEAAHYAAINSPQIKRFYEKRKAKRHLLVAKKTVANKLAKACYHMLKRHEPFDVKRAFG

SEQ ID NO: 210393 - protein, 457 aa, unidentified
MKWYLGIDVSKGYADFALLSELLVQQEETFQLDDTKLGQEQLKIWLDALFKQHPNLEIDCGVESTGGFENNWHALIIKLSSSMPIRISRLNPSVVKNASRATLNANKTDAESAREIAAYLKRFEDQIDFSIRDNQYASFRSLQNHLELVTKQKTQLINELKQILYSSFPELQRFCKQGIPSWVLELLMLYPSPEKLVRQKPLKLAKIKGITVEKAKSLIEKAQTTIASRSNSTYEFLIVQLATEVKHKQEKIKQLKQYLEDHCKGKEKEWLESIIGIGSYSAAAIMIQIEDIRRFASTKELASYFGLHPLIKMSGDKRMVSRMSKQGRPAMRALLFMCANSAVRSDEHMRSIYARHRAKGKNHKQALGAIMHKMIRVIWGVLTHEKPYDSNIDLANQAKNIQNPVRDELKETENKRRMQQFDGDAPISRMASKKRKVHAMSQVGEAELVRDLVHEPR

SEQ ID NO: 210394 - protein, 421 aa, unidentified
MRGLRAKRMRTVKEGTLIATVDIGAVTNTGYCTSMDGRDIKVFRFANTKEGFEKFWHMIVSSKNRFECSEVAVGFESTGPYAEPLVHYLKAKPVRIVQVNPMHTKRLKEVNDNSPGKTDDKDPRVIADVLRLGHALSVIVPEGDAAYLRRLNNARERHVRERTALLNQMQQLVFLIFPEFNTVVKQMRGRTVRFILRHYTTPDKIGSLDREAFGVELRKRSRGRFGIKEAERLIDLAQKTVGIKEGLHGIVLDIQHIIAQLDVVDRFTSDIEVEMASTLERIPASVRLLSIKGLGVISVAGLIGEVGDFSKFRTQSEIMKLAGLDLYEVSSGKRKGQKRISKRGRSLMRKILYFAAIQMIGTRGIMHDYYERLTARGMLKMRALVAVMRKLLRIIHAIMRDDRNYMGEYCAPKRRVIKKAA

SEQ ID NO: 210395 - protein, 352 aa, unidentified
MQHFIGCDVHTRNQMVAWIEEETGEIKKRRLEHEGQEVKEFYALFPRGTVVGIEATFPVYWFERLLGELGHELWVGDAARIRASEVRYQKTDSRDAEGILDLLRTERFPRIWVPSLGERDLRQLLVHRMKQVRARTQVKNQLHALAISQGVCRKGKLWSAKGRKELESLALLPWAARRRKELLESLDRLDEQVRELDRAVEEAGRERAEVALLRTHPGVGMVVGLAFVLTVGPIERFSNSRKLVSYWGLNPRENSSGGRQRLGAISKQGNTMMRWLLVEAAQTAARLDPQLRRIYQRLKKQKTSAVAKIAVARRLAVRLFWMLRTRNNYAQLVHMSGSPSSAVVPPPAEPTV

SEQ ID NO: 210396 - protein, 493 aa, unidentified
MEDQDLNPGIFQMKSKRHIHIKYQYGAGLDIHNHYVTARVAVKRGNDIMPVATQEFKRSPEGMENMCRFLGKYLLGTVVMEATTQTAYVLDVLESFTGWGGIKPDIRVINSGLLKKYAGDLHEDGRDALMLAELGISGLARGSYIPLDIIRQLRAVTREIQFVDRDCTRVKNRIKRILTTWGLPMKNFKLHAAWANDVLQAFLQSNGDFGKAIASILEGKVPASKSTIGAIKRREGTFKEYASITLPSPILVTLKSYMLELSFNAGIVERVSREVVSIIDKEPLLQRLVKKLAVVPGLTESSAAQIIAEVGNIDRFHDVKGFLKYVGCAPSQHISGEERYAGHLAKRINHFSRNVFITAGKILTESVQKDSDLKEQARKILNAHFNDKRLVYTNVAVKIARVVYAILYKGAEYTPFYSSQPKGSFENSAPKSHKALTSGQIQRKIRNKTRALVNCMERLLDDKADPIYHQLSEFFKELHDSSEERKSKRKTIT

SEQ ID NO: 210397 - protein, 452 aa, unidentified
MSRRKRSKESGKAATLPLLRPNAAGVDIGAREIFVAVPPDRDPEPVRSYATFTEDLHRLADWLKSCGIETVAMESTGVYWIPLFQILEARGFEVCLVNARYYQNVPGRRTDVSDCQWLQYLHCVGLLRASFRPEQQVCALRSLLRHRESLIETASEQVLRMQKALDQMNLQIHHVISDVTGLTGLSILDAILAGERDPAVLAKLKDPRVKASDETIVKSLVGDYRSEHVFTLRQSLAAYRYFQRLIAECDGEIDKQLGQFEANVDVKARPLPPPKVRRKKIYSNEPNFDLRQHLYRIFGVDLTAVPGINVLTAHSLLAEVGPDLSKFRSASAFASWLGLCPDNDVSGGKVLSVRTRKVSSRAALAFRMAANALFKSKSWLGNFFRRMRARLGAPKAITAAAHKLARIVYHLLTTRQPYDETIFAKHEQISRARTEAKLRAQAKELGLRLVRA

SEQ ID NO: 210398 - protein, 351 aa, unidentified
MKVTTIGIDLAKSVFQIHGIDERGNVVLRRQLRRAQMVLFFSKLETCLIGLEACGSSHYWARKLAALGHTVRLMAPQFVKPYRKNDKNDGNDAAAVCEAVGRPSMRFVPVKSPEQQAELSVHRVRHRLMRQRTALINQLRGLLAEYGLVLAQGATHVRSQLPALLENSSDSLPPLALELFQDLYEELCQLEQRLADYDRRVERLYRGNPLCQKLGELDGIGALTATAFVATVAHAAQFHNGRQCAAWLGLTPKQDSSGGKTRLLGISKRGDVYLRTLLVHGARSIMRHTPKRDDPKSRWVEQLRKRRGENIAAVALAAKHARILWALMVRSEPSAQLIAAHRIEPPAQPNL

SEQ ID NO: 210399 - protein, 412 aa, unidentified
MQTMMERGCGLDVHQATVVVCLLIVLQNGKVQKQVRTFGTTTRELLALREWLLSEGCTHVAMESTGVYWKPVYAILEGTLEIVVANAQHVKKVPGRKTDVKDAEWLADLLCHGLLRSSFVPPKPIRQLRDLTRYRRKLVESQTAERNRLLKLLETANIKLASVATDGFGVSGRLMLKALAKGEATPQQMAELAKRSLRSKIPQLELALEGKMEEHHRFLLQLQLDRLEAVENDLELLERRLQEHLKPYAKQLALLDEIPGVDRTLAAAIIAELGVDMSVFQSVSQLASWAGVCPGNNESAGKRKSSRIPKGNVYLKTALVEAANAAARAKGTYLRDKFYRLKARRGYKRAAVAIAHKILVSTYHMLSEQVSYNDLGDLYLDKLNKSHLTRNLVHRLERLGYAVTLTLEQKAA

SEQ ID NO: 210400 - protein, 475 aa, unidentified
MAITPRSRSNRKQRKELARRLQSADPGLDIVHPHAAGIDVGNSVHYVAVRPDRDPQPVRRFECFTADLHRLADWLAQCGVTTVALQSTGVYWLPLYDILDARGLDVYLVNARHTKNLPGRKTDVQESQWLLKLHTYGLLRNSFYPSADIRVVRTYWRQRADHVHAVSTCIQRMQKALTQMNIQLANVISDLSGWTGMRIVRAMLAGERDPQALAALSHPGIHANRDTIAKSLEGTWRVDLLFVLQQEVTTYDAYLQRITECDQALEQHLHSMSDKVEDTGEMPVASAIDHRQAPTKRRRKAGSHTPQFDLGHELQRISGVDLTRIDGIDVSVAQTVISEVGLDMSRWQDEHHFASWLGLCPDNRITGGNVIRRGTRRVVHRAATALRIAATTLLRSQSYLGAQYRRFRSKLGAPKAITAMAHKLAVLVYRMLRWGHEYVDKGLQYYEERHREQQVQLLKKRAAKLGLQIVGPDPA

SEQ ID NO: 210401 - protein, 314 aa, unidentified
MNATAALPIVGVDLAKSVFQLAVADGCWKVVALHRLTRTQFERWFVNRAVGLVVMEACGSAHHWARWLKGLGIEVRLLPAAYLRAYVKRNKTDAADACALLEAARCAEIVPVRVKSIEQQALQGLHRTRSLWMGTRTSRINALRGFCREFGIVIAQGSRLGVEQIGRTLADPHAAVPTLIRGTMALLVEEIRLLEVRIAQLERELTALVRTSPACTTLLSIPGVGLLTATAMVAATSGEVSHFRDARHFASWFGLTPKEHSSANTRHLGRISQARGPLPAHAAHPRRSLSTTCSKRGSACGQDRRWPTTMGIGR

SEQ ID NO: 210402 - protein, 401 aa, unidentified
MNAVGIDVSKGKSMVCVMRPFGEVVLEPFEVLHTAQSLNDLAGKLKALDGETRVVMEATGNYHKPVAFVLHDAGLFVSVVNPVLIHDYDNNSLRRVETDRKDAVKIANYTLDKWTRLRQYLPEDDTRLALKNCYRQYQQAVAVRTMLKNNLISSLDLTFPDANKLFSSPAKSNGCEKWVDFIGDFWHSECVSSLSSDAFAKKYLKWCQKHGYNFTRSKSDTIYACAVNAASLPKSPTSKLLIQQQVAQLKAVSQSVAAFQQEMLRLSQQLPEFDTVMEMYGVGPSLGPQLMAEIGDIRRFSSKKLLIAFAGIEPQPNDSGKIVGNDSGISKVGSAVLRRTLFLIMTVILKTQPQDEPVFQFMNKKRSEGKPYKVYMMASANKFLRIYYARVKAVMDSKHSK

SEQ ID NO: 210403 - protein, 343 aa, unidentified
MEYGAIDLHTKESQIRIIDGDGAVVLERRVATTRARLTDVFGERAPMRILLESGTGSEWVARHLEDLRHEVVVADPNYAPMYGQRTRRIKTDRRDVAALAEANRLGVYRQAHRVSAPQRDVRRRLRVRDQLVHMRRQAINLMRAQLRSEGVRVPTGAAESFAGRFTRSDVSEAVRGAMAPLLDLLAAIAPLIAQAEQWTRHAAKADPVARRLMTAPGVGPVVALAFQATVDDVGRFATPGAVTSYLGLVPREHSSGERQQKGAITKAGPRRMRVLLIQSAWHLWRSPAGSATLHAWARRLGDRRGRRIAVVALARRLARILWAMWRDGRDFEPARVGRLAVAA

SEQ ID NO: 210404 - protein, 357 aa, unidentified
MGKSIKNLSSVTIVGLDIAKNVFQVHGVDAKGAAIVARSVRRGGLLKFFASLPPCLVGMEACSSSHHWARALSELGHQVKLIPPAYVKPYVRRNKNDAVDAAAICEAVGRPNMRFVPVRSVENQAELMRHRARELLAGNRVAMLNALRGHLAEIGVVAAQGVQHAYALKRLVADGFDDDGEVVVADGVRRALAPLVRQIDAIDEEIAAIDEEIEALVKADETARRLTTIPGVGPLTAQAIVATVRETSAFANGREFAAFLGLTPRQSSSGGKARLGRITKMGDRYLRKLLVIGACATLSHRKGHNDALRVWASSLLERKAVKYKFKLTAVALANKVARIVFALMTRGGEYDDRPLAA

SEQ ID NO: 210405 - protein, 335 aa, unidentified
MHYLYYVGLDVSKETFDASLVAFEDANEMAHRKFANSRKGICSCLHWVEKRHGIRLVDVIFCAEDMGSYISEMAVCASDRTLNFNFSLISPLVIKYSMGIARGKTDRVDARRIAEYAITHYRKIALYLPAEKELCQLRTWLILRAHLAKQRVAKLVLLEKLDYKEKFADVSIQRSMLQEEIAYAEIHMKTIEREMKELIAADSNICRNYKLLTSIKGVGPITAIVMLCSTLNFTKITDHRKFACYCGLAPFEHSSGTSVRGGCHTSSMANRDIKVQLNRSALIAIRCDPQLKAYYERKVAEGKHKFSVLNAVRAKIAARCFAVVRRGTPYVALQI

SEQ ID NO: 210406 - protein, 355 aa, unidentified
MSQEKYIGMDVHQATVSAAVRDRNGNLLMECVLETKADTLLEFVQGLHGTLSLAFEEGTLAAWLHDLLKAHVNQVVVCDPRKAALLRNGNKNDRIDARNLSELLRTNQLKPVYHGEHGLRTLKELGRSYLTVSKEMTRTMNRIKSLYRSWAIPCAGTTVYAPRHRREWLAKMAEPGARVRAEHLYEQLDHLQPIRVRARRELLQESHKHDVVKRLRQIPSIGQIRAALLVALLQTPHRFRSKRQIWAYSGFAIETHDSGEYRYVRGKIQRNRERITVRGLNRNHNPDLKNIFKGAAISASRRPGPLQDFYETRVAMGMRPTMARLTLARKIAAITLTLWKKGANFDPQQLRRQAA

SEQ ID NO: 210407 - protein, 416 aa, unidentified
MAPPRMPEAVIGLDVGKLSHWACVATRDGEILLSAPVANREGDLDSLFGRFPDALVVVDQSRNIGALALARAKAAGMSAAYLPGLAAHGAARLFAGDAKTDERDAMVIAKTALGIPDALLPVGDPGPTIAAARALAAQRNFLTCENTRNKNRLRSILLESCPAFEALVDLSDGPQLRLMASLGGAWSVADAGPRRAAALTRGAARGKIEALVRSTTSSTRPDASVVAAEDRAVKLLARRISENSAEIEAITAEISALLEGDDTYRCLLTVPGIGPKTASELAISIDIEDFPSHDRLASYCGLAPRNRQSGTSISSVTASRQGNKRLKNLLIFSCNCLTRTEGRWGDYYARCRERGMPHGKALKALARKRLKVIYAIMRDRVPYAAQSKRSEQIGAHRPKGLALACRDSISKTALPS

SEQ ID NO: 210408 - protein, 431 aa, unidentified
MPNEVPIEQEIVAYVGLDWADQQHVICWQAAGSARVQSAVVQQRPEELQAWVAELRQRFPQGLVAIALEQSRGAVIAALMHFDFLRLYPINPKSLARYREAFASSGAKDDPDDAGLLLELLVKHRDRLTPWVPDDALSRELALRVEHRRQLVNLQTKLIQQLRSHLKVYFPQALDWVGELDSLQACDFLQRWPTLAAVQKARPSQLEKFYHQHHCRRPQLIQQRLEQIRQAQPLTQDSAIVQAYSQMVLALVAQLRVLIPTLQQWQQQISQLFAQHPDAALFASFPTAGPVFAPRLQAAFGSRRDRFGSAAEVLQFSGVAPVTKRSGKSRQVQRRWARPKFLHQSFVEFTGLSIPHCCWARALYQQLRARGHRHWAAIRVVAYKWIRILFRCWQDRVPYDEQKYLKSLERRNPTLWAAIQQLPAQPSRKEV

SEQ ID NO: 210409 - protein, 384 aa, unidentified
MRKHSIIFIGLDTHKEFIEVAYAEDGREHSPVHLGRIPSNKAQLRKLARQFESKYPQATLHFVYEAGPCGYWVYRFLTSLGHCCYVVAPSLIPKKPGERVKTDKRDALKLAQLIKNGDISPIYVPEPDDEAVRDLSRARETAMKDLKDAKYQLKAMLLRNNINCKINDNWSKQHLRWLTELVLPHPCQQIVLQEAIHTITERMKRLQRLDNELEYQVKLWRYYPVVKAVQAMRGVRLLVAVGVIAELGDLHRFDHPRKLMSYVGLVPSEHSSGGHRRQGAITKCGNSRARRLLVEGAHSYRYAANISTELQKRQESLSKEVVDIAWQAQLRLCRRYQRLMQRGKHYNVIVTAIAREMIAFIWAISREVVLSPVDPKQRIARMPA

SEQ ID NO: 210410 - protein, 398 aa, unidentified
MNLNIGIDIAKNVHEACLVNENGEQIGKYIRLKNSKKSIEKFIKHIESVSKELNAKPRIGMEATGIYWYSLFSELSKKYTIHIYNPSQISGFASVNIRESKTDKIDAKTIANMLRFGESPKTNYSDTQRLELREYGRFYFKLVSIKINLKKRLRRNLHLIFPGYDEIFKNLYTATSKEIITNITTPEKVLEMGEKKLLELMKTKSKNHIDPEKAKILIEKAEDTIPSEIIKESSLFEFQMMLEMIEYYEKQIASIENKMMSIWNKVRDKHYIQTITGVSELRAAMIWAEMGNVDDFKHPDQIVAFSGYDPKVRQSGNKEVIGGPNKRGSKILRWVLGWTVHEAKCSNPVIGQYFDKKIEQGKHYNNARCAAAKKLIRIIWSVEKNKKSFQIPNNLQSS

SEQ ID NO: 210411 - protein, 408 aa, unidentified
MNPLFVGIDVSSKNNVVCLMKPDGSKLSTFSVQNNLGGARILSERIVSALDKLQLSEVTIGMEATSIYGDSLVYALREDGSLGRYQRHIHVLNPKQVRKFKDAYPDLPKNDYVDAFVIADHLRFGRIASEVYMDDYRYRSLQTLTRSRFDAVQNLTREKQRFANYLFLKCSGIAQDKDIPNTSATTLALMEHFETVDELANCDLKTLTDFVSAAGRGRFADPEATAKAVQAAARGSYRLPKTVNDSINQAMSVSIASMRALEGQIKVLEKAIEQQFEIIPNTLTSIPGIGKVYSAGIIAEIGDIRRFESQASVAKYAGLVWTQHQSGDFEAQNTRMIKSGNRYLRYYLLEAANSVRRCDPEFRRYYDLKFHEVNKFQHKRALALTARKLVRVVFRLLKDNRLYIVPES

SEQ ID NO: 210412 - protein, 328 aa, unidentified
MKALRKPMRDDGVLYVGVDVAKDTLAVFAEGVFEGEVENTRKGIGRLVRTVRKAVGKDADVRFAIESTGAYSLPVHLELDRLGEKACILNPAQIRHFAKSYGVLAKTDRIDARMIARFAAERSCKPTPVPSATRLALRDLVRTRGLLVKVRTMIATLRQTPLVGPTSRAILGEIDRFIGSRIRRLEREMAEKVKADPVILRVCRELEKVQGVGPVTATAIAVLVPELGTLGRRQAAALAGLAPQPRDSGPFRGQRKIGGGRGELRRTLFMAAFSATQWNPTIKACYRHLRDVKGKKHKVALVACMRKLFIHMDRVVAQLNKTSPETAS

SEQ ID NO: 210413 - protein, 342 aa, unidentified
MQQSIFVGLDLGSSRCHQTVINADGTIIRSRSVPTGEHHLRSAFADLHGDVHVHAEASELSDWVRVIIKPMVTRFVISHPRSLAWIAKDSVKDDAVDARKLAELLRLGRVHEVYYEDRADRRSFKQLVVHHENLSREQARLKSKIKARLRTLGIIRKDARLFSLTGQDELFASITDPLIKQMIRQSFAVLNQMLTSLAEAKTAMIEFSRRLPEVRLLQSAPGVGTITSCRFVAYIQTPQRFSNKRKLWRYARLGITRRESNGKRLSHPHLDPAGCGSLKDCSRKIFEAARRTKKDNSFKRFYEQSLDNTKNAVHARLSTQRKILACLRAMWQANQPYRDDGG

SEQ ID NO: 210414 - protein, 430 aa, unidentified
MSYKIAGIDVHKKMLAVVVSDVEVDGEFHFEQRRFGSNPEQLRSLAAWLLEQEAEEVVMESTAQYWQPVWEALERYWKPLREKREAARRTSGMLHLAQAQSNRGRRGRKRDFPDAERLVKRLVARELTLSFVPDAEQRLWRTVTRRKYQLTRDHVRLQNQLESLLEEAHIKLSSLVSNLLGASARRMLKALADGETNPAALAALADQNLRATPEQLCDALGACTDLKPVYRRLLKMALEQLQFLEQQIGQLDQEMASLLRQHHDAVQRLAEVPGLGVDSAQQIIAEVGPTAATFPSEKCLSSWVGACPGDDESAGVNYSHRSPQGNRHLRRLLNQSANAAARTKGSIFEIVYRRSVLRLGHNQAIGAIAHRQCRLIWLILHQGIRYEERGPAVTKRSKQKRTAKMIRQLRSLGYRVELSNSQLAAPGQAQ

SEQ ID NO: 210415 - protein, 347 aa, unidentified
MKRIAIDLAKSVYQVAESIHVGRVDRRRRLDPEAFWRYVQEQPEPVEWVMEACGTAHHWGRLMQAAGHRVVLLHPRYVRAYRRRSKTDRNDCDAILEAARCEGIRPVPVKSVQQQQVQQLHKMREAWKKTRVQRINLLRGILREMGVAAPNGTQAFLRQACELIERPEVCALRGALQVLLAEISLYEQSMRECEEQLARWHADDEIVHRLDEVSGIGLLTASALKTAVGKPERFASGRHLSAWLGMTPNEYSSGERRRLGRISCKGNVYVRTLLIHGARAALLAAKRCQARTPQRLTQLQRWALQTAERIGHNKAAVALANKLVRICWAVWCHERRFSGDWQSARPA

SEQ ID NO: 210416 - protein, 425 aa, unidentified
MSIIQNTGPETSDFAAFVGIDWSDEKHDICLLAVGNSQPEASIIASTPEAIQEWVQQIQKRFGNRPVAVCLEQSRGPLIYALMEHAFITLFPINPNQSAKYREAFAPSGAKDDPVDAGLLLDMLCRHRERLTPWKPDDVLTRTIRGLSEDRRHAVNLRTTCAQRLTARLKAYFPQVVAWFDNDLTSLMACDFLLRWPTVANTKKAKPAALRAFFHSHNCRSEALIDQRLDAIAKAVPLTEDLGVVTPAVLTVQTLARMIRELTCAIATFDQQLAEAFAAHPDAHIFNSFPGAGAVMAPRLLAAFGSDRKRWRDAGSLQSFSGIAPVTERSGKSAWVHRRWKCPKFYLQTFFEYAQHSIPFSVWAGAYYRQEIAKGKGRNAVIRSLAFKWMRIQMACWQQKVPYDESRYLQSLIQRGSPLAKLIQT

SEQ ID NO: 210417 - protein, 406 aa, unidentified
MAVMIGIDPHKGSHTAVAVTATEEPLGKVRVRACPAQAEQLVAWAAAWSERTWAVEGAPGLGRLLAQQLVAAGERVLDVQPKLAARVRLLQTENTGKSDPNDALSVAVAALRSKGQRPVLADDHATVLKVWAKRHRDLSRAHNQVACRLHAVLCDLVPGGVADEITAGHAAKILGQITPADPAAEARKELAAELLADIRHLDAQRREIKKKLATAVKASGTSTTQIFGVGPVIAATVIGDVVTVARFPRRDHFAAYNGTAPVEVFSGEKKIYRLSLRGNRRLNHAIHMAAITQIRYKHSDGRGYYERKIAEGKTHKEALRCLKRRISDALYARLRADARNAAAASTRDPGGQPGNDSVSSAAGSHPEHRLFGSATPGPAPSLRSATALPQAMRPSEPSAKKTRRDP

SEQ ID NO: 210418 - protein, 370 aa, unidentified
MSQSSTLFIGMDVHKDTIAVAYVAQEHGAEVTSLGTIGTRQCDIDQLSRKMQSKAKHLIFVYEAGPCGYWLYRYLSKKGYDCWVVAPSLIPKKAGDRVKTDRRDAMQLARLARSGDLTAVYVPKVQDEAIRDLTRAREDAISDLKDAKFRLKAFLLRHDIRYTGRANWGPAHLRWLSEVVCPTPTQQIVFQEYVRAVHEHTERLQRLEQELHEHVKAWRLYPVVEALQALRGVQFTVAVTLVAEMGDLTRFDTPRELMKFLGLIPSEYSSGEQRRQGSITKAGNTHARRVLVEGAWAYRYSAKVSRHLQLRLETQPKIIQDISWKAQVRLCKRYRRLVSRGKHANVVTVAIARELAGFMWAIAREVPITP

SEQ ID NO: 210419 - protein, 355 aa, unidentified
MSQEKYIGMDVHQATISVAVMNSSGKLTMECLLETKAATILEFIQGLQGTLSVTFEEGSSAAWLHDLLQPHVHRLVVCDPRKNALLKDGSKSDRIDARKLAELLRGNQLHPVYHGEHGVRTLKELGRSYLTLTQDVTRVMNRIKALYRSWAIPCSGTTIYAPRHRAEWLSKLVEPGVHRRGERLYQQLDLLQSVRQQARHDLLVESRQHHAVKRLRQIPSIGPIRAALLVAWLQTPHRFRTKRQLWAYSGFAVETHDSGEFRYVRGKLQRNRERITVRGLSDNYNKDLKNLFKGAAISASTRPGPLHDFYVALIAKGMRPTMARLTLARKIVTITLTIWKKGVDFDAKQLDQQAA

SEQ ID NO: 210420 - protein, 379 aa, unidentified
MTLGEFFRQCIGIDISKNKFTACLYMYDRASDVGCCTKSIDFDNTKSGFNQMVKWSRKEAVKGYPLTYLMEPTGVYYERLAYHLHKIGQTVYVVLPNKARKFCESEGVKTKTDAIDARCLALMGCASRKLKPWVPPAAIYRELRQMTRFHADLCVIRRSVANRMEALDHMEGVSKTVRKHCEKLIEEIDTLTEKNDKDIMKKAAEDKELLERVKRIATARGLGVTTIVCVIAETEGFHLIENRKQLTSYAGLDVKAKQSGKEDPKHRISKEGNAHIRAALYMPALVAVRHNRQIREAYGRICQKHPKEKMIGVAAAMRRLLMLIYTLWKNGEEYDETCDKTHTPKKKELEPEYTREDCIETSQEPIDWDAMDENGEPPF

SEQ ID NO: 210421 - protein, 428 aa, unidentified
MNTTNTTKFAATIGLDWADQKHDLWIRPAGQAKAEHLRLDQTPEALHQWVAKLRERFPNQRVAIAIETSRGPVISALMAYDFIVLFPVNPKALKDYRAAFCVSGAKDDRTDAMLLEEMIRLHRDKLNPLEPDTELTRKLAGLVENRRHLVDERTRLVNQQHSTLKTYFPLALDLLEDQMNTLLAAEFLLRWPSLAALQKETPKALRAFFYQHNSRNAKRIEQRIQAVPTAKPLTTDGAIIEPACALVSARAAMLRPLLKAIQHLDKAIAQAMDQHPDAAIFRSFPGAGPALAPRLLVAFGTNRERFASAAEVAQFYGIAPVVQQSGNSKTVRVRYRCPKFGRQSFHENAACALKKEPWARCYYEAHKKKHDDKHHPACRALAFKLTRIYFACWRDKRTYQPDLYLQALQKNGSPLHQTLKTQPAPSCE

SEQ ID NO: 210422 - protein, 403 aa, unidentified
MGAICGIDWASDWHDVHITDEHGALLAAEQFSHDETGVSALIGLLIGHRVECCAIERPDGLLVGRLLGAGIPVLAIHPNQVKAARDRFRAAAGKNDRFDAFVLCELARTDRHRFPVLAPSGDETLALKVLVRTREDLVDARVALANQLRAQLQAFWPGAERVFADVDSPIGLAFLQRYPSPADTRGLGEKRLEGFLARHRYCGRRTSAELLARLRSAPNAIVGELEGDARRSAVIGLVAALAPIVEQIGQLTSQIAGAMRAHPDGAIFLAFFRDPKSVVTAAGLLAEIGDNRARYPTNDSLAADAGQAPVTIQSGKRSNATFRWACDKRLRRHMCVLADSTRHWHPWAGEVYQRARSRGCDHPHAVRILGRAWTRVLWRCWQDRAPYDPARHNALNKLLIAGG

SEQ ID NO: 210423 - protein, 359 aa, unidentified
MKIIGCDFHPSWQQVAVFDAETGEVTEQKLVNGDGEAERFYGALPVPALVGVEACGNSQWFIDLLERLGHEVWVGDAAQIRASYVRKQKTDKRDASHMLKLLMEGRFPRLWTPSAEQRDLRQLLIHRHKLVEIRSRVKNGLQHLALNRGVQKKSRLWSVRGRACLEKLPLQGWTARRRKDLLQLLAELDRQIGELDRAVGDAAEQHAQARLLMTQPGVGPITALAFVLTIGDVGRFKHSKQVASYLGLIPREHSSGGKQRLGAISKQGNRFMRQLLVEAAQTANRLDEGFRKQYQARCHHKPKGVAKVAAARKLTVRLYWMLRQNVGYPEIARIESSPRVALVDASHTEELIGRSRIQQ

SEQ ID NO: 210424 - protein, 371 aa, unidentified
MNSIVYVGMDVHKEQYTICCYSYETDKVEYKQTIPSDYKLVLKYIEQVRSRYDGEVTFVCGYEAGCLGYSLYHQLKEYAVDCKILAPSTMAVTNTHHVKTDKRDAANIARCLAFHTYSEVYVPDNDDNDVKEYIRMRDDQKLYLKKVKQQILAFVLRQGKHFEGGKTYWTIAHLKWLKTLELSDLQRETLNEYLLTYEYLTEKISRFDERIEELASVERYEEKVKHMSCLLGIKTHTALSMIVEVGDFERFEKAPKFASFLGLVPSEDSSDTRVNRYSITKAGNSHLRRLLVEAAQSYTRGNVGHKSVALKQRQKGNPPEVIAYADKANERLRRRFYKMTLNKGVNRNVATTAIARELACFIWGMMTEHVS

SEQ ID NO: 210425 - protein, 354 aa, unidentified
MSRMHFMGLDAHCTSSELKVVTASGRLIHSWRGPTTIPALTAAIQAVRRPRRLAIEEGAISDWLWRNLSPGVDQLIVCEPRRNHLIAKEGEKDDPLDAEKLAQLPRGGYLKPVHHPASFERMVFKQYVGLYHDFVRQRVRQANRVMAYVRHYGVFIQEKAFAEKLGRDEVMAQLPNHRLVRLNMMLLWEGYQTAAEQVDRSRRRLVQVARREAQIRRFTQLPGISWIRAATVFVYLDTPWRFKSKSALWKYLGIGLERYRSGSGPGQLHVVRRANRLLKYVILGAAKSAVAAGNNPFADLYQRWIDQGISPRNARRNVARSLAATLWGMWKTGSGYRPEWVGVSMASNPSVVAG

SEQ ID NO: 210426 - protein, 337 aa, unidentified
MEYYAGLDVSMKETHVCVVDRDGDVALETNTSTLPEAIAAALAKAPDCQRVVLETGRMAPTLYHGLAALGVPVICIESRQAHLALKSLATHKTDRNDARGLAQLARTGFFKPVHVKSLPAHAVRALILARKKLVGQRVTLENQIRGLAVVFGVRLPRGLSPAFAKQVTSSSQGVAGLACAMTGLLAARNAVLEAITAIDRDMKRLARSSEACRRLMTIPGVGQLTALAFIAAIDDPERFRRSRDVGAYLGLVPRRYQSGEVDYTGSISKCGDRRVRTLLYEAANVMLTRYKGKLALKDWAIDIGRRSTMRKARIALARRLAIIMHAMLRHGTEFRPA

SEQ ID NO: 210427 - protein, 351 aa, unidentified
MVIIGVDYHPSDQYIAFVDTETGEYGERQLNHSDREAEKFYRELATRGVSLRVGMEATGYSRWFERLLAELGIEVWIGDAAEIKTKRVRKQKTDREDARLMLRLMRENNFPRIWVPSPENRDLRQLLWHRHRLVQMRTRIMNQLQAIAMNEGQRRKKKLWNEQGRAQLEKLPLATWASRRRKDLLELLDRMNPTIEELTAAIEREAKKWPEVLRLMTHPGVGPLTALAFVLIIGTPERFKCGKQIGSYVGLIPCEDSSAGHQRLGHITKQGSSLLRFLLGEAAQSAARWDSDWRRRYVHLAMRRQRNIAKVAMARRLAVRMYWMWRNGWEYSEWIKFGSHAGQLGHRHGVN

SEQ ID NO: 210428 - protein, 391 aa, unidentified
MSLYFVGIDISKYKHDCCIISAADQKVISKFTFKNDKAGFEELLTVLNSLSNPEDIKIGFESTAHYALNLELFLENAHHSFMEVNPVLIKEYKKSTTLRRTKTDSVDCESIARWLMTVEYKPHSKGFYHAYSLKSLTRLRDRLVRQRSFYLVKITNVLDHTFPEFKPFFHERLSKTALYLLENYGSAEKIARMNSASYEKLRSISRGKFSPQQFIRLKELAANTVGVNNSIFDVELNSLLTLYKSLVDEIKTLESEINRLVDEVHPHYMSIPGIGPISAAIIYAEYGDISNFSSPNQMLAFAGIEPSVHESGTEAYNGKMVKHGSSQLRYVLINCCLPLIRFDVTFATYYARKRSENKPHRVAITHVAKKLVRVIYALESQDIDFDPKKLR

SEQ ID NO: 210429 - protein, 397 aa, unidentified
MYIVGIDIAKRKHEAAVIDGEGTVIIKPFSFTNNCSGYNRLLAMLTKAKLPLDEVSFAMEATGHYWLALFTRLQKEGFRVQVINPVQTNSIRSFYIRQAKTDPRDALLIAEVIRFGHFSESTLHPENIYELRELCRGRHAIVSMQADVKRKVVALLDQVFPEYETAFTNLFGDTSMAILQTCPTPKELSEMPFEELCHLIEVSSHKRFRMAKAQELQELARNSFGFAMAGDVFSTMIRLYAKHLVFLKQQVQEMDRKIAEIMDTMDTPITTITGIGPTLGAYILSEIGDISRFSSAAKLAAYAGIDPTMRQSGEYNGVRNRMSKRGSPYLRHAIWLAASSAVLHDPALKLYFQKKRDEGKPYMASVGHACRKMVSIIYAVMRDNKEYVPCIPNEISA

SEQ ID NO: 210430 - protein, 379 aa, unidentified
MVENITHVALDDHKKRHQVAVLLPGIDREEAVTWRIENTRAGIRKMVRKVLKMAPGDVRFCYEAGPNGYVLLRQISEFDRVSCVVVAPSKTPRRSGDRIKTDRRDAKKLVGLFRAGELKSIVPPLKEEEAVRDLCRCRKAAQKRVTASRHQVDKFLMRNGYVYRDGKNWTRRYREWLRSLKFDDWRRERTFQAYLFGIEQDEDRVKRLDVEIVRAAEEEPYRTLVGFVRCFRGLDTLSAMILTSELYAIGRFTTAPSLMGFVGMVPSEDTTGWDPHRGPITKAGNEHVRRILVEAAKHYRHPARVSKALTQRRKGQPDWVIAIADKAQTRLHQKYWRLVMGKGKHPNVAAIAVARELVGFIWAVLIQAATTTNVEELVA

SEQ ID NO: 210431 - protein, 342 aa, unidentified
MAKIIGCDFHPRFQQIAFLEQETGEFGERRLSHPEEAERFYRSLAGQAVRIGVEATGNLGWFQRLMQELGHEVLLGDATEIRASNPRKQKTDKRDARHILSLLVQDRFPAIWQPPVENDEMRQLLLHRCRMVRMRTRIKNQLDGMAKNEGWLSPRVWSPRRREQIEGLPLTGWRAERRRDLVALLEDLNRRIGPLDEAVRAAAEANGEARLLMTHPGVGPVVSLAYVLVIGDWRRFARGKQVGSYLGLIPVEESSGSKRRLGQVSKQGNSLLRWLLVEAAATAQRYDASWHRQYVRLSMTKHHGVAKVAIAHKLAVRLYWMLRSGENYEQVVERGSHAGRSE

SEQ ID NO: 210432 - protein, 343 aa, unidentified
MDQYIGLDVSLKDTAISIREDGKRIWRGKCPSDPKLLAEMIRKHAPHARRVVFETGPLSTWFYHALTAEGMPAICIEARHAQKVLDETLNKTDANDADGLAQLAEAGFYKVVRVKSFDSMLTRTLVGARNQLLNISTQLSNQIRGLMKTFGLIVPKGTGRVFDGNVRELLAGNNDLARIILPLLEAWRDIRKRAADLDRQLLAVARQSQSTKLLMTIPGIGAVTAVSYIAAIEDPENFRTSRSVGAWLGLTTRRYQSGEVDYNGHISRRGDNHLRGLLYEAATVLLTRASVRTESSLKTWGLKLRERLGFKRAAVAVARKLAVIMHSMLRTGEVFNASVGATA

SEQ ID NO: 210433 - protein, 317 aa, unidentified
MEVTSIFVGIDVSKARLDVAIRPTGERESVANDKAGIKDLVKRLAKIQPALIVLEATGGLERPVTHALAGAELPVVVVNPRQVRDFAKATGQLAKTDSIDADVLARFAEAVRPALRPLPDAVTLELRALTARRRQIIEMIGAERNRLATASKAVRKRIDAHLGWLEQELERADKDLDRSIQHSPIWKENEDLLLSVPGIGPVTSHTLLAELPELGELDRKQISALAGLAPFNRDSGSLKGRRSIWGGRAPVRSALYMATLVATRRNSVIRDFYKRLRAKGKVFKVALVACMRKLLPILNSMIKHKTRWSETFSFHTT

SEQ ID NO: 210434 - protein, 347 aa, unidentified
MRFYNRQHRHYCGIDLHVKTMYVCILDAAGRVLVHRNVKSTPEAFLEIVAPYRDDLVVAAECMFTWYWLADVCAAEGIAFVLGHALAMKAIHGGKSKNDKIDSHKIASLLRGGLLPQSYVYPATMRSTRDLLRRRLHLVRKRGQLLAHIQNTRAQYNLPDFERRLAYPANRDGVADHFPDCSVRKSIEVDLALLERYDTLINDLELTLVRDAKRHDGDAFHRLRSVPGIGKVLALTILYEIHDIRRFDRVQEFASYARLVKGRKQSGGKMLGTSGAKMGNVHLKWAFSEAAVLFLRHATGGKKFLATIEKKHGKGKALSILAHKIGRAVFYMLSRDTVFSLEKFMAA

SEQ ID NO: 210435 - protein, 341 aa, unidentified
MLYVGVDAHSETSWITVMDEKGKVLKRREISSSRKAVKETLGRYRQPMKATLEASYSWAPIYDWLDEVTDDVVLAHPAKVRAIAEARIKTDKIDSETLAHLLRADLIPQAYAPSKDVRAVKRVLRQRMFFVRVRTMLKNRIKALLAQHSIQTPEVSDLYGKSGLQWLRDLKLPDPDGRLLFEDLELLAVLNERIGATESLIKDLSAGDEAVNWLSSLPGIGEFFSVLVRYEVDQMARFGSAKKFTGYTGLVPSTYASGNRMVHGRLTKQGNKWLRWAFIEAVTPAIRKSPSLRRYYEKIKVRRGAKDARTATARKLAELTWTVWTERRSYVESARPRKGKN

SEQ ID NO: 210436 - protein, 370 aa, unidentified
MKKKILYVGLDVHKKSIDVAITDARVNGKVRSYGKIDGTLQALDKLVHKLKSPGTDLHFVYEAGPCGYPIYRHLTSKGHSCSVVAPSLVPKRSGDRIKTDRRDALNLVRLFRAGELTSIYVPTAEDEAIRDLLRCRVDIRRIERKTRQQLLAFLLRHGHYYPGKKNWTKGHMNWLAELKPAHRAQQIVLQEYIDAANECTRRIQRITEQIQDLVAQWSRAPFVRAYQALRGVSLIVATTVVAEIGDMNRFKNPKQLMAYLGLVPSEHSSGNRIRRGSITKTGNSHVRRALIEAAWTYNLRARKTKPILKRQQGLDDRICEISWKAQLRLCGKYRRLFARGKSKQAITTAIARELSAFIWAIDQQVQQLSA

SEQ ID NO: 210437 - protein, 372 aa, unidentified
MYIVGIDIGKRNHEASIMNAAGKQYGKPIRFANSHTGFNKLMDWVKNISGADDVVFGMEATGHYWLALYTHLCHEGYAVHVINAVQSDALRGMYIRQAKNDSRDSFIIAEVIRFGRFCETAVSAPELHALRELCRHRFWIVDSVSDLKRKVIALLDQVFPEYENLFTNTFGKTSLQLLSEYTTPEELLAVDTAKLAETIYTASRGHHGIEKAQESQNTARNSFGILLASDSIALLIRQYIEQIRFVEKQVDRIDTEIARLLSAFDNQLTTITGIGPTLAATILSEIGDIRKFASPGKLAAFAGIDPTMKQSGNFVGSHVHMSKRGSPYLRRAIWLAATIAAFKDPSISVYYQRKRSEGKSHLTALDMFPAKW

SEQ ID NO: 210438 - protein, 347 aa, unidentified
MRFYTKQHQFYCGIDLHARTMYVCILSQDGEVVLHRNMPASPDTLLKAIAPYRDDMVIAVECIFTWYWLADLCAQEGLPFVLGHALYMKAIHGGKAKNDKIDSQKIAVLLRGGMLPQAYVYPAKMRATRDLLRRRMHLMRKRAELLAHIQNTNSQYNLPEIGKKIAYKANRVGVAERFPDPAVQKSIEVDLALIDHYDRLLRDVELSILHTAKQYDANTLYLLRTVPGIGEMLSLVLLYEIHDIQRFPRVQDFVSYCRLVKCAKESAGKRYGTSGTKIGNAYLKWAFSEAAVLFLRNNPQGQKYLTRLEKKHGKGKALTVLAHKLARAVYYMLQRKTAFDMQHFLQS

SEQ ID NO: 210439 - protein, 386 aa, unidentified
MRGETFIPRDYDIFAGLDVDKRSISVTFADHQGLLKSLRMPYGLEHLVNHVRKHFPDQRVAFVYEAGPTGYGLYDGLEAQAYRCLIASPSMIPKAPGQRVKTNRLDSRRLAENLRGGQLKGIHVPTGVYRELRHLTQLRDTFVGEMVGMKLRIKSLLLFEGIEFPPAPPGSQWSFSVKAKLRRLACSATVRFKLDELLDSLEFHEKRILKITQEIRRFCKQDPELSRCMGYLMSIPGIGWIVASQLLARIGDWRELKNIRELAGFLGLVPTEHSTGERTDRGSITHSGDPRLRSKLIQGAWSAIRQDGELREFFRSVCRRHPRNVASRIAITAVARKLTVRISVVLMKQRPYEVREKVQSAPLTQEETVPQGTTRRLREPAGTDNC

SEQ ID NO: 210440 - protein, 357 aa, unidentified
MPADEPPRRIIVGVDTHKHVHVAVAIDTLGVRLADRSFAADSGGYRELAEWAESLGRIDSFGIEGTGSYGVGLTSALRRRGHRIVEVNRGNRQARRANGKSDTADAEIAARQVLAGVAMAVPKTADGQVEMIRQLKVARDTAVKARTTAMITLKQVVVNTPPELREELSLLSDKALINRCGGFRVPRLVDTTTSAKYTLRALARRWLALNAEIADADRYLDELTTDVAPTMRQAFGVGPDTAAEMLVVFGDNPDRIRSDAAFAKLCGACPVPASSGMTSGRHRLYTGGHRQANAALYRSVIVRMRFHEPTIEYVKRRTAEGLGKREIIRCLKRFLAREIYQHMMTDHRARQAHLSAA

SEQ ID NO: 210441 - protein, 359 aa, unidentified
MFTESNDDEQIIERVAALDIGKAEIVCCVRLPGADGQRRVQEVSTHSTMVPSLCELANRLVGLGVERVVMEATSDYWRPPFYLFEAHGLEPWLVNAKDVKHLPGRPKTDRLDAVWLCKVAERQMLRPSFVPPGEIRRLRDLTRYRVDLVGVRTAEKNRVEKLLEDACLKLSVVASDIFGVSGRAMLAALIAGERDPKVLAELARTRMRLKIPLLEEAFAGLRLGTFDEHHRFLLARMLGRIDAVDTDIAAVDTQIGQHLAPFADAAARLDEIPGIGPTAAAIIIAEIGLDMTRFPTPAHLTSWAKFAPGINSSAGKTKGNGSTGHGNRYLARTLGEAVVCIGRTDWGVYLCPDSGRMGQ

SEQ ID NO: 210442 - protein, 366 aa, unidentified
MFTERTSVGLDVHARSVAAAAIDGVTGELVQSKLTPSYDHIRSWIADLPGPVAVTYEAGPTGFGLQRVLSAAGIRCEVAAPSKLQKPSGDRVKTDAKDAVHLARLLRLDEITAVAIPSVDQEAARDLVRAREDCRGDLMRARHRLSKLLLRHGIVYYGGDAWTGKHDTWLRHDAAPQLRTRATRLAFDSDYETVLMVKRAATDSTAIGEMASDSEFTELVRRLGCLRGVSTLTGFALAVEIGDWHRFTGNTIGSFVGLVPSEYSSGSSRVQGSITKTGNTHVRRLLVEAAWHHRARYTVGKTMRDRWELAPAAARVRGDEGNRRLHQRWAKFIERRKRHTIANVAIARELAGWCWSLAVLEEHPQH

SEQ ID NO: 210443 - protein, 402 aa, unidentified
MNDRQAHIWVGIDAGKAHHWVTAIDDQGAMLWSRKVSNDESAILDPLAEVLTLGENFTWAVDIVGTTSALLLALLASHGQSALYVPGRIVNRMAGAYRGEAKTDARDAYVIAETARHRHDLTPIRLPVEIIADLKLLIAHRGDLVADRVRMLNRLRDVLTGIFPRLDRAFDYAKHKGALTLLTCYQTPTALRRMGQVRLTKWLARRGVQGAPAVAEAALEAASGQQTQIGNETIAAQIIADIATQILALDKRLRTLENQITTMFHAHPQAEIIESMPGMGPILGAEFLAAAGPLDNYADDGHLAAAAGLIPVPRDSGRRTGNMHRPKRYNRHLRRSLYLSAQTSVIREGPNRDLYLKKRSEGYKHTQALLALSRRRVSVLWALLRDNRTFTPAPPIRSAQMS

SEQ ID NO: 210444 - protein, 318 aa, unidentified
MPEAIVVGIDVAKQTFDAAIGIAGSIETFANDDGGHEALLARLAGQTVDLIVMEATGGLERDLACACQAAGFAVAVINPRQARDFAKAMGYLAKTDRIDAKVLAELAQVLSRHPERDRFIRALPTPEQQTLQALVARRRQLVAMRVAEHQRLSVSHAAARKSIEAMIEAIRAQLDEVEAELAKHIDTHHADLSRQLASVRGIGPATCASLIAEVPELGRLSRREISALIGVAPFNRDSGQMRGKRAIFGGRGQVRRSLYMAALVAIRFNEVIKRFYSRLVAAGKPKKVAIVACMRKLLTILNAMVRTRKSWDDSLHIA

SEQ ID NO: 210445 - protein, 554 aa, unidentified
MSGHLGVIPTPREDTRSRRVMMKHRVLGLDLGIRAPSVAMVADTDGTIIGNAVRFELGIDELERVEAAALEGAKEGTKLHVVMEQTYPTSEYVTAFFLARGHKVSFAKPNQVKEFRKCLSPKVKTDDVDAYVMARLPWLDPKQLARTYVPPPEIRELKIQVSQRASMVKQLVDLKNQLIAYANAVWPGASRAFGDLDSAHARSFLREQMPKSIATLQIDELAELLKDRGRIQQSYAKRLAGKLLAIAKRTLGLHQLLPEEQIESTRAHTIELVEMVEELELRLHTKEKRLDEAYLRCDPERLLMSIPGIAEKTAPTIFSYFGEPERFASTRKAQGFVGLFPETDASGTSDRKGTRITKNGPALLRRDLFLAADHFRRVDPHGAQMYHDLMVHRGKHHNSALCIIANRSLIPRILVVLREQRPYELQDLEGNALTKPEARELAAQWKVTQEVRKRLRNRKTLAHERREESPSVTSEPKAPRNGQPSRPADRNPATLPEAKDQLAEPNPVTLSVTKDQLKMLVFKSLEQMLNAGGNVEEIRLQLKEEAANFFQERA

SEQ ID NO: 210446 - protein, 408 aa, unidentified
MEVIYSRCAALDVHKKSVVAHAITPRHRETRTFGTVTKDLLELKKWLLDLKVTHVAMESAGVYWKPIYNLLEDSFTLVLANARYIKAVPGHKTDVKDAEWIADLLRHGLLRGSYVPDRPHRELREVTRYRRILIRERSRVICRIQKILEGANIKLSSVASDVVGVSGRMILQAMINGIEDPKELAAMAKGKLRQKMQSLEEALLGLMGTHQRRLIESELEHLDFLDQKIVKLDDDIAERMRPYESIIARIDTIPGIGRRGAEEILAEIGPDVVSRFPDAHHLASWAKICPGNNESAGKRKSGKTGHGNPWLHSVLVEVAWAATRVKRGYYSSLYHRLAGRRGKKRAIVAVAHSILVTIYSMLKNNTVYHDLGECFHDLLNPEQVVRRAIKRIERLGYKVSVQTPALVT

SEQ ID NO: 210447 - protein, 414 aa, unidentified
MDVLHPRCAGLDVSKRDAKVCVRIQAPGRTRATTTVTTWGAVTNRILALRDHLIAEEVTLVVMEATSDYWKPFYYLLEDGPFVVMLVNARHVKNIPGRKSDVSDATWLAQLGAHGLVRGSFVPPAPIRQLRDLTRARTTITRQRAREIQRLEKLLEDAGIKLSSVASDITGVSGRAMLEALVAGQRDPAELAELAKRRMRSKIPELTEALTGRFSEHHAFLVKVHLDLIDQNTRAIDELTARIEVVIAPFQSARDLMATIPGISIGVADVLIAETGADMAQFPTAGHLASWAGTCPGSNESAGRIKSTETRPGNPYLKGALGVAALSASRSHDTYLAAKYRRIASRRGPMKALVALEHAMLIAIWNMLQTGEIYTDPGGDFYTRRNPEQAKNRAVDQLRRMGYAVTLQPLPAAG

SEQ ID NO: 210448 - protein, 386 aa, unidentified
MMTMTRTNESTAPTITSPSNLLLAFELGERVWKLGFTTGVGQRPRIRQIAAGAVDRLVEEIARAKGRLRLAADVPVIICYEAGRDGFWLHRYLVAHGITNHVVDSSSIEVNRRARRAKTDRLDLAGLLTLLARYLQGDRRTWRVVRVPSVSEEDARHLHRAWTTVQQDRTRLINRLKGLLTSVGVRLRLDDDFERRLATAHLWDETPVPDGMRQRLTRVWTQLEFLNGQLEELEAARTALAPVRETTTGRYVAALPTLRGIGPIGAWVLATEIFGWREIRNGRQLGALVGLVPAPFQSGETSHDQGITRAGNKHVRRLMVQLAWSWLRYQPTSALSRWYHERVGGGGKRRRRIGIVALARKLLIALWRYVDTGTVPEGAQLKASAV

SEQ ID NO: 210449 - protein, 394 aa, unidentified
MKLIGIDIGKNKHFFCVMDQQTGEIISQPVSFSNDKEGFDFLVQKIKSCPKDSILIGMEDTGHYHFALLKYLLDLQYTVALINPKTTDFNRKMQGGITKNDKLDTINICDVLDTPERKKQYRITKVNSFDLYEQKQLTRHHHNLKEEENVYKNRLQKCIDIVFPEFNKLFNSKYGIVYMNILKMFGSAENIANTDIRTIRKCFEIEGRGNRISLTPERLKECARSSIGISSSAEVIQIKHLTAQIEPIEEQLTEIDKKIEEFSIQNNSPILSIPGISHFSGTSILAELGDISNYSKPSQIIKFAGVAPLHYESSQFNAQHTAITKKGSKYLRKTLYQIILPVIRHNPVFNKYYQLKISQGKGHRCAQGHCVRKLLRIIYHLLKTNQQFDPQLLR

SEQ ID NO: 210450 - protein, 311 aa, unidentified
MHDTIGIDISKDTLDTFWLSKRRHKQFANSKAGLSTLIGWIQRANVSLVVFEATGIYHWLLETNLAAYGIPFSRVNPRQARRFAEGAGTLAKTDRVDAAMLARMGALLELKADKPRSETLHNLKELGTARQALIKDRTAARARLKTAFYPLLKRQISRRLQQIERDFARIDAAIEAIITADKALSQKADILISIPSIAKITAYAMLTEMPELGNLSGKQAASLAGLAPISRQSGKWQGKERIQGGRACLRKAIYLPAVVATRCNPDMKAKYHALIASGKCKKLAITAVMRKLVVMANALLRDDRIWAEIRT

SEQ ID NO: 210451 - protein, 318 aa, unidentified
MANISYKFHIGIDVSKSKLDVALTEDESVLQFTNDKAGIDDLIKGLPSPKDSLVILEASGGYEKFVFNLLNKSKFNVSIVNAKRVREFAKAGGKLAKTDCIDACVIRRFGQTFNPGPQARVSKEEEQRTEMLTRRRQLVRNIALEKQQAEHASKDIKKRIEKHIRFLEEELEWIRNKLKMLFNKDAVLKAKLEKLDKIKGVGEVTAMDILIDMPELGTLSPKEASALAGVAPFNKDSGQYKGKREIAGGRASVRSALYMAILTAKKFNPQIKEFYDRLILKGKLKKVAMVACMRKLIIIMNAMIRDDSEWQAAETKSF

SEQ ID NO: 210452 - protein, 397 aa, unidentified
MYIVGIDIAKRKHEAAVIDGEGAVIIKPFSFTNNCSGYNRLLAMLTKAKLPLDEVSFAMEATGHYWLALFTRLQKEGFRVQVINPVQTNSIRSFYIRQAKTDPRDALLIAEVIRFGHFSESTLHPENIYELRELCRGRHAIVSMQADVKRKVVALLDQVFPEYETAFTNMFSDTSMAILQTCPTPKELSEMPLEELCHLIEVSSRKRFRMAKAQELQELARNSFGFAMAGDVFSTMIRLYAKHLDFLKQQVREMDRKIAEIMETLDTPITTITGIGLTLGAYILSEIGDISRFSSAAKLAAYAGIDPTMRQSGEYNGVRNRMSKRGSPYLRHAIWLAASSAVLHDPALKLYFQKKRDEGKPYMASVGHACRKMVSIIYAVMRDNKAYTPYIPNEISA

SEQ ID NO: 210453 - protein, 425 aa, unidentified
MREPREIEDREDELAVARVAAVDVAKASAVVCTRVPREGGPGRFVTRVWPVGATTNEIIELAAYLAGQQVEKVVLESTSGYWRPFFYLMEAAGLHVELVNARDVKNAPGRPKTDRLDAVWLAKLAGWGMLRPSFVPPAEIRQLRDYTRLRTDLTRERTRHWQRLEKLLEDALIKVTAVASRIDTMSVRDMVEALIAGQRDPRKLADLARGRMKAKRAALIEALTGRFDAHHGELAAILLAQIDVDADGTTGPQAGRGPDAAALPAIDRLQEIPGISRHAAQVIIAEIGLDMTRFPTAGRLVSWARLCPRTIQSGASERPGKTAKGNPYLKGVLGDAAAAAGKTTTFPGQRYRRLARRRGKLKALVAVARTLLVIIWHLLADRAARFEDLGDDYYLNTIDTDRRARSHIRQLQALGFTVTITPAAA

SEQ ID NO: 210454 - protein, 414 aa, unidentified
MLDPAVRCVVGIDVAKRSHVVAAVDAPTGTVRQKALKIEATAAGYGGLCAQLARWGPPPEVLVGLEATGCLWEPLHDAVTRAGYRVVVLNPRQTAAWAAGLGLRAKTDGLDALTLARGLLAGYGRASVLPSETVQALRELTRARRDLVQSRTAARQRLLDELVVVFPELPEHTPDRCDLATPALLSLLGTYGSAQALAAAPLAEVATLLAERSGGRWGEPQAGALQARAAGSAASTRAVAARGIVVRTFARHRLDLQPRIAELEAAIAAVLADDADGRRLRQLPGIGPIHAATIRAELGDVARFAAVDEVVAYAGLDPRTRQSGQFVGQRKLSKRGPGALRHALYLAALVATRYAPEWHARYQRLLDRGRSKKEALTILSRALLKVIYHVLRTGARYDPARLQPRPASSPAGGA

SEQ ID NO: 210455 - protein, 316 aa, unidentified
MQSILNLGADVDSRTVMVACSAGSFKPHRIANERNAIQAWLRTVPRGSRLAMESTGSYHELLADLAHQAGLQVFIVNARDLRRYGQGIRRRGKTDRIDAEVIARYIAREHQELHAYVPSTDAQRLLARLIGRRAKLVQAKDSIRQSLRGVPALQSEACRLIGHIDRVIASLDLLMQRTVQQIPAAREAAGHIATIPGIGVLTSTFLGHRFTRLPYATSDAVVAATGLDPRPEDSGQKEGRRRLSKRGPAEARRLLFNCARSAAQRKPWRPYYDAQLAKGLSKTAATVVLARKMLRVAFAVYKHHQPFNPLLIGSGT

SEQ ID NO: 210456 - protein, 408 aa, unidentified
MEAIVEFPQIVERGCGLDVHKQTIVASIKGQGIEEETRTFGTFTEDIDTLLQWLQSHGITHVAMESTGIYWRPVFNIIEEYFRVILVNARHIKYVPGHKTDKKDSAWIAKLLLSGLLKGSFIPPQWQRELRELYRYKRKLISQTVAEQNRMQKILEDANIKLSSVITDIGGVSGKLMINAIIEGESNAQVLASLAKGSLKKKKELLAQSLTGRITAHHRFMLKTIRKSLENIESLIAEVDQEIENYLKEFSREVELLKTIPGVGQQTAAGILAEVGADMHPFPNQHHLASWAGICPGNNESAGKKKSERTTHGNKILKTVLTEAAWAASHTKETYLKRKYNSLAARRGKKRALIAIGHKILIAAYFILKNKEIYKEPDDLSLEIKRKQAQVKRHIQRLHELGVELRIN

SEQ ID NO: 210457 - protein, 355 aa, unidentified
MIIIGVDFHPEFQQIASLDTDTGELQEGRLVHREEAEKFYRTLAAAGQKVRVGMEASGYARWFERLLAELQLELWIGDAAEIQSKRARKQKTDRQDAQHILKLMLKDDFPRIWVASWENRDLRQLLWHRHRMVQTRTRIMNQLQAVALNEGLRSKKRLWRAGGRQQLESFRLAPWASRRRHDLLQLLDRLNPTIAELNQAIEQEAEKCPEARRLMTHPGVGALTALAFVLIIGNAERFPCGKQIASYLGLVPLEKSSGNRRRLGHITKQGNSLVRFLLVEAAQVTVRSLPEWRSRYFHLMVRRGRKTAKVAMARRLAIRLYWMWRQGWDYQQWRSSVRTQESPEIAMVCTRTPSN

SEQ ID NO: 210458 - protein, 350 aa, unidentified
MLIIGCDFHSRFQQVAMVDTETGELIERRLEHGKGEAKKFYAELHPPVRVGMEATGYAQWFERMLAGLGHELWVGDAAEIRAAMVRKQKTDSRDALHILDLLLANRFPRIWIPSPAERDLRQLLRHRHKMVCLRTSLRNQLHALAMGQGVYRKRKLWTAGGRTELDALGLDPWASRRRRELLAILDQLDPSLAELDRAVGKEAEQRPAARSLMEQPGVGPVTALMFVLTIGPVERFRTSKQVVSYLGLNPRESSSGGRQRLGSISKQGNSMARFLLVEAAQTASRNDEELRRDYQRLKFRRGTAVAKVAIARKLAVRLYWKLRKHSSTVPPARMQGSSEHPVVDESLSSN

SEQ ID NO: 210459 - protein, 408 aa, unidentified
MQVLYPRCAGLDVHKDTIVACVRCVSAPEHHEVRSFDSTTSGLLTLADWVALHGCTHVAMEATGVYWKPVWHILEGNFELVLANAQHIRNVPGRKTDVNDAMWIADLLAHGLIRSSFVPPTATQELRDLTRTRKQLVREISQHSLRIQKVLEDANLKLGSVLSDVLGRSGRAMLKAIVHGDVDPERLAALAQGSARKKHAELREALNGRITEHHRTLLKLHLDIIGALEHTLAELDAVVGKALAPIRQRARLLTTIPGVSDLTAQVLLAEIGVDMTRFPDAGHLVSWAGLCPRNDESAGKRRSTRVRKSGTWLKTALVTAAWAAVRVKTSYLHAQFLRIKARRGGKKAILAVAASMLTAAYHMLRDGVEYADLGSDHFNRHDVNKTIRRLLKRLADLGCQVDPMPHAL

SEQ ID NO: 210460 - protein, 433 aa, unidentified
MKAKMYPQTIPVMGIDVSKDKSDYCILDTDNRVVRRGVVKHTLDSMNKFLNMLSVTCSELDAKPVCIMEATAHYHRILYKQLVDNGYTVMVINPIQSGSIKNVDIRNIKNDKVDAYRLAYLYRLGKLKASNLPEGVLSQLRSLSRFHMTLTDDIADHIIRLRACVEQSFPGFEEVFSKLKGKTPLAVLEKYPTPAAVLSASDDELIELMSKASRKGVCYAKPRVKNLKSAAETALKIGLDRPEDEILIPALIAIIHQLQESLNKADAEIAELIKNNDHLKEQTDLLKSIPGVGDHSAAALLAEIGDISLFSNAKQLTAYFGLDPAQRQSGKFNGTRTKLSKRGSSYLRRVISMVAVKNAFKQKNGTYVNPVLAEYYKNKCEYKEKKTALCAVMRKLVHIIFAVLRDRKPFELRTPEEHERLIFEKNRMLGLSA

SEQ ID NO: 210461 - protein, 374 aa, unidentified
MNQVHKFVGLDTHKDTIAVAVSEANGGPTRYYGEISNTPKALAKLVKTLTAQGDTVSFCYEAGPCGYGIYRQLTKLGQACAVVAPSLIPTKPGDRVKTDRRDSESLSRLHRAGELTAVWVPDQEQEAMRDLTRAREDMKGLERITKQRLNAFLLRHGRNYDRGKCRWTQAHSRWLAGLKFEHTVQQIVFQEYIEAVKQAAGRVAGLEHEMAHALKTWKLAPVVAALMALRGVKLITAMTVLAELGDLSRFTSPSQLMAYLGLVPREYSSGQTRRRGGITKTGNGHVRRVLVEAAWGYRFPARKTAHLQRRATQTSAAVQAIAWKAQKRLCGRYRHLLAAGKLTVQACTAVARELAGFIWAIACEVLNQPAVTTR

SEQ ID NO: 210462 - protein, 416 aa, unidentified
MEVMFKCCAGLDVHKRIIVACALVSSAEGVQRHIKTLPTTLAGLEALAAWLTGLGVTHVAMESTGVYWKPVFNVLAPLFEVWIINASHLKQVPGRKTDVKDAEWIAQLMRLGLLKRSFIPEVAQRDLRDLTRYRTRLLGERASAANRLQKILEDANIKLASVASDVQGVSARAMLEALIQGETDAAVLADLALGRLRSKLPELEAALAGRIREHHRFMWRQLLHHLDTLNQELATLAAQIRVLTAPQAAIIERLDAIPGIDRRTAEVILAEIGPDVTLFPTAQHLASWACLCPGNNITGGKRRSGRTRRGQNWLRAALVEAAWGAARTKDCYFSAQFHRLRARRGDKRAAVAVAHSILIVVYHLLAEPEAVYQELGGDYFLKRNPAQEQRRAVRKLETLGFTVTLAPGPAAAPAPS

SEQ ID NO: 210463 - protein, 404 aa, unidentified
MAYVLALDVSMGKSYKVLYEEELCFSEGEVLHTRAGFEHLLQEIQQLPEAPSIVFESTGIYSRVIETFCQNNHLSYCLLNPLEAKKQLDNGLRILKTDKHDAHRLAQTHWQYERKIKQHQSTIYEDSHDFARFYQEIEAEIKRLRMYLHTALQLCFPELENLFSSRLSKLSLNLIELFPHPEYLAGFSQTQVKNILKKSTDKRLSDKKALEKAQQLLSLASNSYPATTKTSIQVQKVQYYAQKLKELIQSKETLSKQLIEQTKPLPEFVLYQSVPGIGEVSAALLIGEIGDIRRFENHKKVNAFVGIDTRRYQSGKYLAQDHINKRGNPKARKILYFTVKNMIRQQAAASNHIVDYYYKLKTQPIPKKDKVATVACINKLLKCLYSMVENKTKYDYAYTVSKDQ

SEQ ID NO: 210464 - protein, 343 aa, unidentified
MQTVTTIGLDIAKSVFQVHGVDAAGQVVIRRQLKRRQVLAFFQKLPPCLIGIEACASSHYWSRELQVLGHTVRLMPPAYVKPYVKRQKNDAADAEAICEAVARANMRFVPTKTPEQQSCLMLHRTRHLFIRQQTAVINSIRAHLAEFGIVAPVGRKGVTELLHVVADPGDKRVPEVARACLAALGAQLLSLKEQILEFDRLIMAWHRSSQTSKRLHCIPGVGPMLATALVASVVDPRTFRSGRNFSAWIGLVPKQHSSGGKDRLGSISKQGDRYLRSLFVAGALAVIRYAKIHGTGHRPWLTALLARRPTKVAAIALANKIARMAWAMMAKGECYKQPVALAA

SEQ ID NO: 210465 - protein, 476 aa, unidentified
MLELPRALNLVVMQDDARLSRTTVNVATSVYFLILNHRLAPRCGGFFTNHGRPSTRAGSEEISGPFAERIVSATKLYLTEMPVFCVAQSYCDWLCDGDRFSQRNLNVRFLTFGVMGWSVALPDQLWNDFKTSEGGSPMTTHICGIDIGKTVFHLVGLSKEGYIVVKKRFNRKQLLTYTVNLPACLIGIEACAGAHFLARALVAQGHDVKLMPAEYVRPFVKSNKNDYVDAEAIAEAVQRPTMRFVPIKNEAQLDLQALHRVRDRWIGRRTAVINQLRGFLLEHGITITAGPAHLKRQLPFILEDAGNLLSTRMRTLLMELREEWEKLEEQIEATNRELAQSAKKDDRCQRLLTIPGIGPLTATALTAAIGNGAAFRKSRDLAAWLGLVPRQHSTGGKARLFGISKRGNPYLRRLFIHGGRAVLARVKRENHTFGSWLDRLEGRSPRNVAVVAMANKLARIAWSVLTRGRPYCATVA

SEQ ID NO: 210466 - protein, 320 aa, unidentified
MMPQSDLVVVGIDVAKDKVDACIRTLTERKTCPTTAPGQRSLIAWLRKHRVAKAVMEASGGYERVWARALRQAGIEVRIVDPKRVRSFAESAGRLAKNDKIDAEMIAWFAETFNEAPSQVDDPAHEEMKALVKGLRSLIDVRARLEMQKEHEAPVLVRKARARLLKKLAGEIAMIDTAIGAKIKATPAFAERAEIIRSVPGFAEATAMTLLAGLPELGQVSNEIAAALLGVAPYDDDSGKRHGQRCIKGGRRWVRNALYMPCVGAATLNNPVFKAFYERLIAKGKAPKVALVACMRKLIVILNTMIARGEKWDPKRYQVV

SEQ ID NO: 210467 - protein, 371 aa, unidentified
MSKNITFIGLDVHKNSIDVALADAGRDGDVRFYGTIGGDLDSLHKVVRKLQSTGSELRFAYEAGPCGYDIYRSLKSQGLDCIVAAPSKIPRKSGDRIKNDRRDALNLARLHRSGDLTEVYVPTVEDEAMRDLSRGREDAVKALRVARQVLLAFLLRHGHRYSGQSYWSKTHNSWIAGVKMPHRAQQIALQEYVHAAQEQLERVQRLTRQIQELVPQWQLAPLVKALQALRGVSLIVATTTVSELGDLTRFDSPKQLMSCLGLVPSEHSSGGTVRRGGITKTGNGHVRRALTEAAHTYCHPARESRNLLVRMDGLPQKVRKVAWKAQVRLCARFRKLMARGKNRKTVITATARELAAFMWAIACALLPEPMV

SEQ ID NO: 210468 - protein, 386 aa, unidentified
MAHSINASRCLIPFDQGATLVAVVEMGQASWLVAGLVPGLERQPLKKLPVDQDGLLQLLHRWRLEAVRNGCPIQRIAVAFEAGRDGFWLARWLQARTVEAYVIHASSVPVSREHRRAKTDRLDTELLKRAFVGWLRGEPNHCSMASIPSQEDEDARRPSRERETLVSECTRIVNRIKSNLARLGIRGFKVTLRRAAERLETLRTPEGTAVPVNTIAEMKRAFARLESLKQQIKEIENVRGAHLEQSSDTDRGTMVRQLRQVVGVGVESADMLVQEVFLRPLRDRKAVARYAGLTGAPDESGQKRRERGLAKGGNARVRRAMIQLAWGHLVHQPNGPLAVWYRKRTADARGGTRKTMVVALARKLLITLWRLATSGVVPEGLALRAA

SEQ ID NO: 210469 - protein, 424 aa, unidentified
MNHLTDNSFSAYVGIDWADLKHDICVQAAGDQQREFDCIPHQVVKIEQWAQSLHKRFGGVIAIALELSKGPIVSALQKYDFFVIFPINPSTLAKYREAFKPSRAKDDPTDAELALDLLLRHPDRFNPLKPQSVEMRTLISLVEQRRGLVNDRIRITNRLRNTLKQYYPQTLEWFDHIDTPIFCDFILRWPTLIQVKRARKTTLETFFHEHNVRFEHVLQARIKSIKAATALTLDEAVVTPHRLQALVLVDLLRVTLQAIQRFDDAIVELAPRHADYTLFSSLPGAGPHLAPRLLVAFGEQRERFKNAAEMQKYSGVAPVTERSGKKHWVHWRWQCPTFLRQTFVEWAAQTINKSFWAGAYYRQQRAKGCSYQAALRALAFKWIRILYRCWETRTPYNEAVYLRALERRGSTLLKQFAAPKDLTE

SEQ ID NO: 210470 - protein, 376 aa, unidentified
MNNLRFVGLDVHAETIAVAVAESDGEVRSLGIVPNRAESVGRLIRKLGKAESLRVCYEAGPTGYVLYWQLSELGVKCEVVAPTLIPVKAGDRVKTDRRDAEKLARCYRAGDLTAVWVPDAAHEALRDLVRARLAAKRDQLRARHRLGKFLLRHGRRATEGMSAWSEKHLAWVRTQHFEHSAQETTLLDYLHEVEHAAERIARLERSIDAAIETLPVKMRTVIEALQSLRGIAQLSAVSIMAELGELSRFEHPRQLMGYSGAVAREHSSGERIRRGAISKAGNAHLRRIVVEAAWAYRHRPAVGKTLAVRQRHCSAAVTALAWKAQHRLHQRYVRLMARGKCKQQTVTAVGRELLGFIWDIGVQVERDVKVRLRQAA

SEQ ID NO: 210471 - protein, 344 aa, unidentified
MYFIGVDHHKQVSVMTVLDEDGQERKNGRVANLRSHVERFLEGYRPFTAVVEAGRASYVMADLLRELGGEVKMANPLQVKAIAHARIKTDKRDSRTLAQLLRADLIPEVYQRGEWNRRAQRVMRMRAYWVGKQTEVRNKIRALLAQQREEIRLEVEKREGKLFSSSGAEFLSRLALEGQDKMVLDDLLQGHREIQAHVKMTDGLVKALYGELEDAARIDTVPGFATTLSVLVAVEIADIRRFARPADLHSYAGVIPSTYSSGGRTAHGRITKQGSAWLRWAVIEAVYPAIRKDLSLGVLYKRLARRKGPNVAKIAVARRLLTIVYRVLSERRDYIPGLMKQSAA

SEQ ID NO: 210472 - protein, 361 aa, unidentified
MRKVALDLGVRKTAYCEVRDGAVVQRATVTSVESLRSLLGPEQTPAVVAIEACREAWHVHDLLRSWDNDVVLVDTTRSRRLGIGQHGRKTDRIDAEVLALALERGGIPMAHVLSPHRRELRRWLGVRRALVESRANIVTTCRGLAREQGVMLPKCTTPMFARKARLAAGVALEVLEPLLKQLDAINPQIAAADAKLAELSETEPVVKLLMTAPGVGPIIAACFVSVIDDAKRFRSPHQVESYVGLVPSEDSSGGKRRLGAITKKGNPYLRSLLVEGAWGIIIHGDRHEPLRVWAEAVAERRSRKIAVTALARRLVGVLWAMWRDSKPYDPNILAAASSRGTRRLAHALQAQARTLEVHIQP

SEQ ID NO: 210473 - protein, 430 aa, unidentified
MDYNTQNKKIEAITEKTLVIGIDVGSETHFARAFDHRGIEFSKKPFKFSNDEAGFAEFKTWILEHMKAHDKEKVIPGMEPTGHYWFNLGKFLQDNDMKPVLVNPHHVKKSKELDDNTQNKNDRKDPKVIAGLVREGRYMIPYLPDGVYADLRTASNMRFQVQSELTRILNRISRWFSINFPEYKTVYGKLDAASGLLVLKKAPLPEDILTLGVDGINKIWRDAKMRAVGKKRAQTLVDAAEHSIGSKEGATSARMEIRMLLEDYESRKARLQEIMILIEELVAKIPMAEKLMEIKGVGLKTVSGFLAEVGDISRFKNPKELQKLAGLALVENSSGKHKGETTISRRGRKRLRYLLFEVAMSLVAKNYEFAELHHYYTTRKQNPLKKMQSLMVVAEKLIRVFYVILTKGVDYDPKKMIGDIKRPQDSSQAA

SEQ ID NO: 210474 - protein, 402 aa, unidentified
MNAVGIDVSKGKSMVAIMRPFGEIVSAPFEIKHTASGINSLVELINSVEGESRIVMEHTGRYYEVLAHQLSEANLFVSAINPKLIKDFDNDSLRKVKSDKADAVKIARYTLDKWQNLKQYNVMDELRNQLKTMNRQFGFYIKHKTAMKNNLIGILDQTYPGVNTYFDSPARSDGSQKWVDFASTYWHVDCVRKMSLNAFIDHYQNWCKRKKYNFSQSKAEEIYGKAKELVPVLSKDAITKLIIKQAVDQLNSASTTVESLRTLMNETASKLPEYPVVMAMKGVGTSLGPQLIAEIGDVSRFTHKSAITAFAGVDPGVNESGTYEQKSVPTSKRGSADLRKTLFQVMDVLIKTHPQDDPVYQFLDKKRAQGKPYYVYMTAGANKFLRIYYGRVKEYLSSLPES

SEQ ID NO: 210475 - protein, 369 aa, unidentified
MTNLQVKADFTGRIMFIGIDIHLKNWHVSLYYEQKLIKSFRQEGCPKTLSNYLNEHYPGAKYVCAYESGFSGFWAQRQLEQLGIECIVVHAADVPQTNKGKHFKTDKMDSKRIGAALGSGMLRGIYIPEAEAESDRQLVRCNVKLGNDVTACKHRIKSMLYQLGISIPQQYNNGNWSNKFMTWLKDLRFENESTRLALDLYFQTLLNLRQEKLNALRQIRRLQNKDRYSKLFKLLTSIPGIGPMTAITLLTEIVDMKRFNNFDELNSFIGFCPNEYSSGDKERKGRMSFRQHKRLRSLLIENAWIAIRNDPALLLYYSETKAKLGEKRAIVKIARKLVSRIRMVWNNEKPYEIGVVATNKIKKHNQIKQ

SEQ ID NO: 210476 - protein, 334 aa, unidentified
MGKVTTVGIDLAKNVFSVHAVDESGAVVLRKTVTRVRLLPLAAQWPACVIGMEACSGAHEWARRFQALGHTVRIMAARFVAPYRRSGKNDGNDAEAICEAVQRPSMRFVPVKSAEQQAILSLHRVRQGFVGERTATINRTRGLLAEFGLVLPNRAVEVRRGAAASAMHLPELAQRAVADLLAHLHVLDDRIAQYDRELEALARKSEAATRLMTVPGVGPLTALATVATVGRAHEFSNGRQFAAWLGLVPRQWSTGGKVRLGRITRRGDAYLRTLLILGARAALQMAARRSDKLTRWAISVKERRGYHKAVVALAAKNARILWALLVRGLTFHPG

SEQ ID NO: 210477 - protein, 342 aa, unidentified
MYYIGLDVHKKTISYCVKDASGQVHQEGKVGATRWELDDWMNTLPQPWTVAMEATIFTGWIYDHLLPHAQQVKVAHPLMLRAIAAAKKKNDRIDAGKIADCLRCDFLPECHMASTAIRDRRRTLRYRHLLVRQMVQMKNRISGLLMETGVSHNKKRLHKVGYFRELLTANEEVQESIRPLLRVSRDTIVRLQKTEYALVSSLQRDPLLAERIKRLRTVPGVGPITALTWALEMGDVSRFPSIREAISYCGLCGDEKSSADKVMRTPLSKQRNKHIQRVLVEAAKLAPRQDHNLALVYEREKQKGNANRATLAVARKMVAYLLAVDRGQRDFVPFPDSQSAAA

SEQ ID NO: 210478 - protein, 356 aa, unidentified
MSEKLNSAIAVIGIDIGKNSFHIVGQDGRGAIVLRQKWSRGQVEARLANLPACLIGMEACVGAHHLSRKLQLLGHDARLMPAKYVRPYSKGQKNDFRDAEAIAEAVQRPTMKFVATKTAEQLDLQALHRVRQRLVSQRTGIINQIRAFLLERGIAVRQGWRFLRAELPRILATRSDVLSPRMLRLVEDLAEDWRRLDARIEGLSGEIEALARQDQACVRLMTVPGIGPIISSAMVAAIGTGDVFCKGRDFGAWLGLVPKQISTGDRTILGGISKRGNRYLRALFVQAAWVVLVKLGPKHWELYGLKSWIEAAKKRLHHNVLAIALANKLARIAWAVLNKGRAFACVKTDAMASRPA

SEQ ID NO: 210479 - protein, 321 aa, unidentified
MSWIGIDVAKHSFTAAQRSGQRFAIETFPMSVAGWRRFCQWAPEDSFQVCLEATGPYWLRLAQWLEQAAIPYSVANPRKVRRFAQASEQRSKTDPIDATILVRFAETFELAPVSPETGPNRMLRALSRRILQLQIELNRERDRLEKSQADPATPESVLSSYAVLHNELQRLIDDLEHQAKRLILQHSTLEPAYQLLLSIPGIGDKTARTLMAEYGQRLLSASPKQMTRFAGLDVVIYESGSSVRKQPRISKQGNWRVRRALYLAALSAIRYNPTLAPYYQRKRQQGLQPKQALVAVMRRLLHLVYGVLKHQQPYNPDYKMT

SEQ ID NO: 210480 - protein, 315 aa, unidentified
MAMRVSQEKMIIGVDVAKNELVIYHEQYDRLEAIPNTKVAIAKWLKTLAGTSAIAIEATNVYHVLFADMAYEAGSEVYVLDGYQLSSYRKSVNIRAKTDAKDARLLARYLKNEFDELRPWIPPSPLYRQLLSLFRRRAALVQARTGLVQSWANEPLLKTAFANQINSMKRLEALVEKKIRDVLQEAGLMGQVNRCMKVEGIGFLTAARLVTSYQRGEFSGANAFIAFLGLDLRVSKSGQRDGPRRLTKRGDPEARRLLHNAAMSGSRTPAWKPFYEEQRKRGFSTTQALVMLARKMARVVFALLKNQSEYQTKAA

SEQ ID NO: 210481 - protein, 474 aa, unidentified
MKEHKKTKAKTKSQANKSIREHQPNAAGIDLGAEEIWVAVPAERDQNPVRRLEAFTQDLKAIAKWLVDCGVQSVAMEASNVYWIPLYQLLEEAGLKVCLVNARHVKNVPGRKSDLSDCQWLQYLHSVGLLLGSFRPAQVICATRCIYRYRQNLLSLAGQHLQHMQAALDQMNIKLHHVIDDLSGLTGQSIIEAILKGQRDPVQLAKLRDKRIQASEEKIVKSLEGDWRKEHLFVLAKAWAQHQEVQKQIQDCDRELLEYTQQLEACTTLSKPLKVMHLKAELLGAQPLSTPVPKKKARKKTSKNQPLGPWQQELERFFGVDLTLIPGISVLTGLTLMTELGNDLSAFKTQHHFASWLCLCPDNETSASKILRRHTRRSQNRVRQALRMAASSLHHDKSFLGDKYRRLRARLGPPKAITAMAHQLARLIWTLITHRVAFDLSFFAHQQKLNDQRRLKRLAASARQMGYQLTPVAA

SEQ ID NO: 210482 - protein, 351 aa, unidentified
MEEYIAFDSHKRYTWVEHQEANTGKTRAYRLEHGTGAIRQALAGCARGTAVAVEATANWYWIIDEIEQASCVPKLVHPRKAKLMMGLINKTDKLDAHGFNTLQRNGTLPTVWIPPGVLRELRELTRTRLVLVAQRTRWKNRITATLAKWGMPPSAYSDPYGKKARVELEQQLERLPEQTRWATQQMLAQLDSLSEQAQQFEKRLEELVEVTPMMQWLMTLPGVGVILGATIALEIGEIERFANAERLASYSGTTPRVHSSGDRTRHGRTRPDVNRYLKWAFAEAANSVAVNHRRNPERHVSRLYTRLRASKGHARAVGAVARHLAEAAFHVLQRKEVYRDPSLNPRPGKGV

SEQ ID NO: 210483 - protein, 346 aa, unidentified
MSQQHFVGLDISVKTTAICVVDPGGQVVHRESVESDPQMICESLLALKLDFGRIGLEAGPLSPWLYVGLVDAGLPAICVETRHMHAALAARINKTDRNDALGIAQMMRVGLFRPVHVKTPASQQRRLLLTSRKLLQRKAADIENDLRGQLRNFGLKVGMVGAAGFDARVRKLVADAPAIAAIVIPLLLAREALRTELAKLHKILLDAVRVDPVCRRLMTAPGVGPIVAFTYRACVDNPARFSRSKCVGAHYGLTPRLYQSGETARVGRISRCGDALMRSALYEAALVLLTNSRIPRWSSLKSWGVAVARRRGFQKAVVAVARKLAIVLHRMWRDDTEFCWSSAPAA

SEQ ID NO: 210484 - protein, 389 aa, unidentified
MFFLGIDIGKNSHVASLIDDKKKVIFKAFSFSNSTEGANSLIKKLEPFYDSLDIAMEATGHYWINLFSFLLQKNFSVHLINPIQTDGWRNSTEIRKRKNDTVDSILIADLLRYGDFVESTLSNEDYLSLKNLTRFRSYLISSTGDLKRKTIALLDQVFPEYEKCFSDVFGKTSKEILLSFTTPQEFENISSSKLTKALENITMKKFAKKKIEELSEKAKTTIGVKFCLNSFSLQIKMLIEQISFIETQVESIEEEISTIMTKLDSPITTIPGIGPVIGATILGELGDISRFSNASKVVAYAGLDSVVSQSGNYEAKSMSISKRGSSYLRKVLFQAALRAKFCDPVFSDYYQKKIAQGKHHLVATNAVARKLCYTIFAVLTKNEAYKMQQ

SEQ ID NO: 210485 - protein, 339 aa, unidentified
MLIIGCDYHPSMQQIAWVDKETGECGERRLRHRAEAEEFYRKLKGKQVQVGIEATGHSRWFERLLAEINFELWIGDPAEIRAKRVRKQRNDRFDAQHILKLMLEGTFPRIWVPTPENRDLRQLVWHRHRLVGMRTRVMNQLQAVAMNEGIRRKKGLWSEKGRQQLESLSLMPWTTRRREELLKLLDQLDPNIDELSQAIQQEAEQLPDVKLLMTHPGVGPITALAFVLVLGTPERFDNGKKVASYLGLIPCEESSSERWRLGHITKQGNKLLRFLLGQSAQSAARCEEQWHRQYAHLSMRRNKLIAKVAMARKLAVRLYWMWRRGWDYQQLKKFGSYVG

SEQ ID NO: 210486 - protein, 435 aa, unidentified
MNRPARLPAPPLPAALTTFAALVGIDWSDSKNDICLYDCASQQRELVQVPSTPEAVEAWLQALRRRFGGRPVAVVYEENRGPLTYQLMAVEFLTLYLVNPATAARYRETFTPSGAKDDPTDAADLLDLLIKHADRLRILHAHDPQTRELARLCEQRRRFVDLRTAQLQRLGRELKNYFPQASLLVGEDLATNLACDFLQRWPSLPAVQRAKTQTVRAFYYGHQCRSRAALQERLALIAVAKPVTEDASLVTPAVLTVTALAATIRTLNAAIDTFDTAIAAILAQHPEAPIFNSLPGAGPVMAARLTAFFGTDRRRYPTPGDVQQFSGIAPVLVRSGNQQWVHRRWCCPKFILQTFHEYARCSLNQSAWALKYYQRQRDRGKKHHAAIRALAFKWIRVIHACWLSRTPYDEARYVEALRRHGSPAAPALDAAIVAH

SEQ ID NO: 210487 - protein, 354 aa, unidentified
MLEVLTSSTVKEAPVSAAYDDARQFVGIDLHRRRSVISRSDQHGNVLEAVRISNDPKLLAEVMGRAGEQPEVVLEATYGWYWAADLLATIGANVHLAHPLGVKAFAYRRVKNDFRDAADLADLLRMGRLPEAWIAPPAVRELRELVRHRAKLVAVRSGCKCQVHAVVAACGIPVRMSDLFGEAGTQLLDHLQLPTVFAARVHSLRRLIDTLDAEIDLFSGMARARLARHPGYRAIQAIDGIGPVLAAVLVAEIGEVTRFPGPAQLASWVGLTPTHHESDTHVHRGRITKQGSRLARWAAIEAVQRVGTHTRLGHLRDRVAERRGRNIGVVAAARELVCLVYYGLRDGHIRRLAA

SEQ ID NO: 210488 - protein, 417 aa, unidentified
MKKKSLHFTAFVGVDWADQKHDVSVSSSDGSNPVHQVIPHTPEALNEWMLTLRQQYPEGQIALCLEQSKGALIFHLLGYDFLTLFPVNPKNLARFREAFTGSGAKGDPSDADYLRELAAVHHERLRPWKPDDEQTRTISFLVQGRRKTVDERTRLTNRLRSTLKMYFPQAIGLSGETLHKTMALDFLRKWPQLSDVQRAKNKTIQLFYSIHNSRSAELIKKRQELIRSTIPLTTDQAVIKSCLITVKMLLGQISQINSTIDEFDMELKELYSNHPDKGLFDSFPGSGEALGPRLLCAWGTDRERYDSADSMQKYSGIAPVTKASGQSKVVIRRLACPKFLLQTFHEYANSSRRSSIWAQAYYEMLRERGKSHHMAIRSLAFKWIRIMYCCWQNRTAYDEIKYIQSLKRTSSPLLKFV

SEQ ID NO: 210489 - protein, 476 aa, unidentified
MSTYAGVDWASEKHDVLIADETGEKVLAATFAHDEAGVRGLCRALVRHEVTLVAIERPDGLLVERLLDAGLRILALHPNQVAAARDRFRASGGKSDRFDAFVLCELARTDHHRFRVLEPDSDQTKALRALTRAREDLVGTRTALVNQLRAELARFWPGPLGLFTSLHSQISLAFLERYPSPTDARGLGAARLHGFLVRQHYTGRQTPAQLMAKLRRAPEARVGELELGTRRQLVLTLVTTIKTLNEQIKQLERQIATAIREHPDGAIFLSLFRKPNSVITAAELLAEIGDCRARYPTRDTLAADAGHAAVAIESGKRRAACFRWACNKRLRQAFVTLADTSRHHNPWAHDLYAAAIGRGHDHPRAIRTLGRGWCRIVWRCWQDRTPYDPARHRALQRHITVTIPTSSGPMPDLAANPADARRRCHRHGGPQGRARSAYRSSSLLPRPTAGRRPNALAPCGGPRQDQPLPAGGEVPT

SEQ ID NO: 210490 - protein, 412 aa, unidentified
MLKIVYPICCGLDVHKDFVYACIATSVNGVTTYKSHRFSTFTKGIRELLSWLLEHNCKDVCMESTGKYWIPVYNILETDCKIVLAHPKYVKAIRGKKTDKKDAKWIADIFKHDLVSGSFIPPADIRQLRDLVRYHTKLTNFTTGEKNRAQNCLTVSNLKLDSVFSDVFGKASSNIIGHILANPSEKLSDVSAFRTKHMKATDDAILEAIDGEFCPEQAEKLRIIREHMSNLDLCKLNLQSLILTTAEKYISEIELVCTVPGISTFSAISVIGEIGVDMSVFPTSKQLCSWAGLTPQNDQSAGKKKTTRISRAGAYIKPLLVQCALAAIKAKNKHPEIFNRYSALKKRRDHKKAIIAIARMLLTAIYNILKKREPYNPELYRKSDVPPEHRNVSVDEAIFILQRQGYLVSSPT

SEQ ID NO: 210491 - protein, 419 aa, unidentified
MAFKIFRFNCCGLDVHKTWIYACIGITDSNNRTEYKQARFSSFTKGLNELCDWLAKYNCKDVCMESTGKYWIPVFNILEQHGLWVTLSHPKYTKPMKGNKTDRKDAKWICDLYMCGMVKPSFIPPADIRELRDLVRYRFKLTCMITGEKNRAQNCLTVSNLKLDDVFSDVFGKSSRSITEQILQHPGEKFDVAPFVHGRCKTPIEEIQAAIDGAISKEQAVKLRQCLDHIDELQKHISEVEQEILRLSDKYEAALTLIRTVPGFDKNPMTAVQILSEIGGDMSGFPTAKHLVSWAGCCPRNDKSDRKIKSTRISRAGSYFKPVLVQVANALIKSKKHPEFTTRYKRIKARRGHKKAIIAICRMILTAIWHILTDLKPYTPEGFLESRPVNKEKVLTTSQALNLLRQRGYLIKDDPSLAS

SEQ ID NO: 210492 - protein, 356 aa, unidentified
MNKSNKLDFTGQPIYIGLDVHKKSWSVSIFTQHCEHKTFTQPPEVDKLAYYLGRNFPGAQYYSVYEAGFSGFWIHDQLRAKGIECIVVNPADVPTRDKERTKKRDPVDCRKLARSLRNGEIEGIYVPSRGKLEDRSLIRTRQSMVRKQTRCKNQIKAILFFYGVVIPEEREMGHWSRRFIQWIERIRMERTSGDIALKAHLEELSHLRQLIASLNRAILRLARTEEYRSLVRLLKSVPGISTLTAMILLSELGEVTRFPSLDELSCYIGLIPDTQGSGEKEYVGGMTQRRHSQLRWLLIEASWVAVRKDPALLMAFQEYCKRMRKTKAIVKIARKLLNRIRYVLKNQAEYVPCVIE

SEQ ID NO: 210493 - protein, 347 aa, unidentified
MDEQQPADRQIVGMDLHRRRSVLVRMNQDGERLETVRIVNDVDRLADVIARAGESPEVVLEATYGWYWAADALAELGANVHLAHPLGVKGFSYRRVKNDERDAADLADLLRMNRLPEGWIAPPATRELRELVRHRAKLVHLRTSLRQQVHALLAARGVAIPVSDLFGVAGNQLLDRVSLSPAARTRVVSLRSLLDALDVEIDAFTKLTAKRLRGDPRYKAVQTIPGIGPVLGAVFLAEIGDITRFPGPTQLASWAGLTPKHHQSDTTVHRGRITKQGSVLVRWAAIEAAQCAGKYTRTGQRRERIAQRRGRNIGVTAAARDLLQLVYYALRDGTCAAWNPRHNQHDH

SEQ ID NO: 210494 - protein, 363 aa, unidentified
MKKKNQPCGTQPQSTPKATLLPGDLVCLGIDLHADSIVVVEQINACVPRPARKFIHPGIFYRWVEERQKAGARVAACYEAGPCGYWLQRALSARSVECLVVAPKRWAENGKTKTDSRDARVLCERLFQWVNGKTNVFTLVRVPSEEEEHLRHLSRNRERLLKERKRLAQTGRGIALGQQMRLKGQWWKGTRWTELASSLEELLGPIREVLLTLEKEIDKLTTRLESHAAAREARPAGLGKLTDAVLRAEVGDFARFGNRRGAGAYFGLVPGEDSSGKRKRSLPITKTGSGTVRRYLVEAAWRLIRFQPRWWAWMKCQESYQGAPKWRRNQIAVGLARQLIVDLWRLRTGRTTMENLGWEIAPD

SEQ ID NO: 210495 - protein, 367 aa, unidentified
MGWTPPPDGIEVCQGGTSEAHTGEGASMTEVSMIGIDLAKHSFQLHGATADGSVAFRRKVGREKVLEVVGSYPRCVVAMEACASAHYWGREIGALGHEVQLIAPAFVKPFVKRQKNDAADAEAICEAAQRPTMRFVAVKSEDQQARGMLFRTRDLLVGQRTQTINALRGHLAEFGVVAAQGPAKVIRLAEVLEDPGSGLLEEVRELGRLLVRQIAGFDERIAELEKTLHRAVLEDADARRLMTIPGVGPITTMAVQAFAPPMESFRRGRDFSAWLGLVPRQHTTGGKPRLGRISKMGQRDLRRLLIIGAMSVVRHAGKRSEKANPWLAGMLARKPKKLVAMALANKMARIVWALMMTKETYRSPATA

SEQ ID NO: 210496 - protein, 412 aa, unidentified
MTESFERSLAVDLHKEYAVVGGVNPKLETVLSPRRIELNTWPRWAAANLKKTDTLVVESTSNAWDFYDQVAPLVGRMVIANPRLVKLIAASRVKTDKLDTMSLAKLLAINMIPEVWVPPLIVREARGLLAHRRRLVRNRTMVSNRLQSLLLRHIIPAPDGNIFSLANRPWWNSLPVSLTEKLRIRQDLDTLNHLAPQIAELDAEITRLSTQAPWSDQATFVMQIPGFSVLSTMTILAAIGDITRFPSAKKLVGYAGLGASVHSSGQTHKTGRITKTGRRELRWTLVEAAWSAVRYFPFWKAQFERLSRHMPENKAIVAIARKLLVAIWYVLSRRTADRNADPVRVATKLMRWSWELSNEQRNGLSSRQFIRYHLMRLNLGQDLTHITYGNMPRRIASQQEVLSVVVQVPAAQ

SEQ ID NO: 210497 - protein, 368 aa, unidentified
MSKVITSFVGLDVHKESTAIAVAEVGREGPRFIGTVGSDLLQLLKALKSLGKPETMLVVYEAGPCGYGLARQLRSRGYACEVVAAGKMARRPGKRIKTDRRDALTLARLARSGDLVTVMVPDERDEAMRDLSRAREDAVRARLKARQQLKALLLRHGHRYTGKSSWTLAHERYLATVTFAHPAQDIAFAEYRQAVREGQERVERLTQALRSQTEHWRLKPLVAALSSLRGIDFVAAVTLAAEIGDFSRFAHPAELMGFLGLVPSEYSTGDTRRQGEITKTGNGHARRVLVEAAWNYRFPARISRVLQIRQEGQSKAVREIAWRAQLRLAYRYRRLNSRKLHPNKICVAIARELAGFVWDIARQVKVTA

SEQ ID NO: 210498 - protein, 315 aa, unidentified
MIIIGVDFHPEFQQIAWVDTDTGEFQEKRLAHGDEAENFYRALAGHKVRLGMEASGHARWFERLVAELQFELWIGDAAEIRTRRVRKQKTDRQDAQLILRLLVEGRFPKIWVPSWENRDLRQLLWHRHRMVQARTRIMNQLQAVALNEGLRCKKRLWREHGRQQLESFRLAPWASRRRRDLLELLDRLNPTITELSQAIEREVEKRPEARRLMTHPGVGALTALAFVLIIGKAERFQCGKQIASYLGLVPLEESSGNRRRLGQGSSMMRFLLVEAAQVTVRSVPEWRSKYLHLMMRRGRKIAKVAMARKLAVRLY

SEQ ID NO: 210499 - protein, 411 aa, unidentified
MRRVIGMDIHRTFAEVVFWEDGKLRPAGRISMTRAGLEGFGRSLGKEDEVVIEAIGNAIAVVRVLAPYVGRVIVANPLQVKAIAHAHVKTDKIDAGVLASLRAADFLPEIWLPDANTERLRRLVARRNQVVRHRTRIKNEVHAILHAHLIPPCPHADLFGRLGRIWLTQQVIPDDERAAIERHLRELDRLGEDLGALDREIAQAAIDQPAVKRLLTITGVNLIVATGLVAAIGDVGRFPDPQKLVSYVGLNPRVRQSGLGLAQHGRISKRGRSHARAMLVEAAWAASKAPGPLRAFFLRIRARRGHQIAAVAVARKLAVLCWHLLTKDTDYQWARPALVANKLRAMELQAGQPVRKGNKRGAAYAYNIKELRDREIELARHAEQAYEQFVGKWQRRGNAKQRTGAASEERR

SEQ ID NO: 210500 - protein, 316 aa, unidentified
MKPQPNAPHQSSALYIGVDVAKATLALNFPGFKDEYPNTHKGHLAIINMLPKDAHVVMESTGGYQRAFVRALHAQSIPVSVANARQVRDFAKATGQLAKSDAIDAKIITRFAQSIKPRPDKRPTPNELKLEEIMNRRQQLVELCNIEGNRLEHYFDPQIIKAAKKLLAYLKAQIKKIEAMAKELIEADALLKTKAERLMLVPGVGLVTSASLLAFMPELGRLKRNQAAALLGVAPFVCDSGTERGRRHIWGGRAHLRALLYMSALHAMMRNRVLKEFYQRLKAAGKPSKVAITAVMRKLIVLLNHLLANPDFSLAS

SEQ ID NO: 210501 - protein, 340 aa, unidentified
MNATTYGLDIAKRVFQMYWVDADTGEVANRRFGRDELIAFLAQRPSGRVALEACGSAHWWARKIRALGHEVVLLHAQFIRPFVQTNKTDAADARAIWTAVQQPGMRTVAAKTEDQQTILSLHRMRSLLVKFRTMQVNQLRGLLYEFGATFRAGRLAGLAEIRERMAELEDTLPRPIVLNFQDQLRRINRFEEDIDQLEKRIGAWQKQEAACRAISEVPGIGRLTATALVATIGDARTFKSGREFAAFLGLVPRQNGTGGKIRLGSISKRGDPYLRTLLIHGARSVLCHAKVPTAWQKGIQERRPANIVAVALASKMARVAWAILAHESMYETNHVSVRPV

SEQ ID NO: 210502 - protein, 344 aa, unidentified
MTYYAGLDVSLRSVNICVVDDAGERVAETKLASDVQDIVAYLDDLGIELESVGLEAGTLAQYLTYGLQSAGFEVICMEARQVKAALSAMRNKTDKHDARGIAQLLRSGWYSRVHIKSMESHRIRMLLTSRKAVLSKCIDLENEIRGLFKVFGIKLPPKLGHGAYDAAVRDVIEADETLSQALLPVLDARLTLYQTFRVLDNRTRHMAHDDLICRRLMSAPGVGFITALTFKAGVDDPTRFKHSRTVAAHFGLTPRRLQSGEMDIEGHISKCGDADVRCTLYTAANAMLTRSSRWSSLKAWGMKLAKTRGHRKAVIAVARKLAVILHRMWIDDAQFQWGTERVRS

SEQ ID NO: 210503 - protein, 434 aa, unidentified
MRELSRQFLKDYSVSSGTRFLNCLAVQSLHSPRYFYGGGFVVKVVFPTCCGVDVHKSFVVATIITTPTDSSQPHYQKKRFSTFNSDLNRFATWLLEHNCLDVCMESTGKYWVPVFNVLEKRGIRVVIANPKWVKAVKGNKDDTKDSKWIGDLFRIGLVKSSFIPELKIRILREFLRYRYKLVSMKSSEKNRFQNAFTVCNVALDSVVSDMFGKSATAITDYLTSDESFDPEHCVSLLQRSLKKKAEKVLESIEGYSISDEQKARIKIIREHYDFIEKLIAKVDTCVNEMVEEYEGEINLLCTIPGIDRNSAITIISEIGTDMSQFGSSKRLCCWAGLTPGNNESAGKKKSVRISRAGVYLKPALVQVAHAAVKDKANPYYALKYERIAKRRGKKRAIIAIARMILTAVYSMFCTGEVWNPVDLYKVDMLSLIHI

SEQ ID NO: 210504 - protein, 342 aa, unidentified
MTLYIGVDIHARQQTLSYLDTSDGTTGIVELNHERDDLREYYGKFQGEVIVGIEACGYTNWFEELMEQLGHKLLVGDAAEIRRLARRRQKNDRRDANLILELLVHDQFPTLFRYSKESRELLRQLRYRHKLVKLRTMVVNSLQALAINAGLSLRAKLLTRDGRRQLRGLSLSPISQQQRDELVSLADELTQRIETVEQWLQTQAKDDGRVQRLQTHPGVGLLTSLCLVHTLGEVSRFSSLRKVAAYAGFDPMEDSSAERKAYGGISKAGSKLLRYLLVEAGQTAAKHDEQLKQFYHRLLPRRGRARAKVAVARKLLLRCFIMDRSEIDYAEFLRRGKEKETE

SEQ ID NO: 210505 - protein, 429 aa, unidentified
MRIVGLDVHKKVIEACFMTPEGQVQKRHRFDLDREKLQDFAREHLSNEDRVALEATTNTWAVVEALKPYVAEVVVSNPLKTKAIAEARIKTDKVDAEVLAHLLRSDFLPRVWEPPQETQELRRLCSRRAALVGHSVAIKNRIHSILHQRMVQAPEEDLFSEKGLAWLKTCPLDEEGRFSLESDLRLLDSIQDELRTLKSHLAPKAYADERVRLLMTLPGVDMTIALALVSALGDVSRFKEADKAASYLGLVPSTKQSAFHTYHGPITKAGNSNARWLLVQAAQKLYLHPGPLGHFFRKLAKRKNRNVAVVATARKLVVIAWHMLKSHQPYRYALPGPTQAKLQRLRVMATGEKRKGGFKPGRARTAKLGPGTRSKTLKSLPQLLADEGLPALQTPPPGESRTLAAAKARRFVRSLNKTTVLQKPRKAKP

SEQ ID NO: 210506 - protein, 406 aa, unidentified
MRLFVGDDWAEDHHDVEVMDEAGKVLAKRRLPEGAAGIAQLHGLIGRFLGEDADDADVAVGIETGRGPWVAALTAAGYLVFPVNPLQAARFRQRHGVSGAKSDAGDAHALADMVRTDSHQLRPAAGDSPEAGGIKVLARTHKTMIWERTRETQRLRHQLREYFPAALEAFEDLDAPDALELLGKAADPARAARLTRAQVSAALKRAGRRDITGRATAILTALRSGQLGQPPVLTAAYAATVRSLIEVITVLNEQVRVLQGQVEEHFGQHPDAEIILSQPGLGMILGARVLAEFGDDPRRYADGKARRNYAATSPITRASGKKKTVAARYVHNDRLAGALNAQAFAALSASPGARAFYDQQRASGHGHNDALRRLANRLVGILHGCLKTRTLYDEDTAWGHRQQQAA

SEQ ID NO: 210507 - protein, 419 aa, unidentified
MNLKLWNGKAGRLFAPVILILASKPSVVCVSMGQSGGERHHSAPRGITVNRHPQGASNHEVLHAMKYYTSTTQFNCGIDLHARQMYVCLMDRDGRKLVHTNIRNNDFDFFLKLVEPYKHDLTVCCECMFGWYWLADACQAAGLTFVLAHALYVKAIHGGKNKNDRIDSEKLTHLLRSNLIPPAYVYPADKRPLRALLRQRLYYVWHRAELLARIHSHQLAHNRPPIRQTRRTRDPWEAQLLAAEDHPLRQLALQNDLAMIKHYDHQICQLEEELQRQAKQIAARDYALLQTVPGIGENLGMTILCEIGELDRFPTVKDFLSYCRLVKGTVASAGKIKGLRGAKLGNPYLRWAFGEAAVIAKRDHKVIGPLAQRLEARMNGNKFKANTVVAIKLARAAYFMLKSKTVFDPDRLVAALSRN

SEQ ID NO: 210508 - protein, 339 aa, unidentified
MKIYAGIDLHSNNSYVVLINEEEKVIYKKRLPNDLGHLLEQLKPYQGCIEGVVVESTYNWYWLADGLQEAGYKVHLANVAENVQYSGKKHTDDESDARWLANLLRLNILSTGHIYPKEKRGVRELLRKRLILVRQQTSCLLSIQGTITRYENIRITGNDIKTLNTEKALSLVKDENVRLAILSQLKVLNCIMEQVDLLEMEIKKKIKLEPLFVLLKTVPGIGPILAMTILLETGEISRFKDVGNYSSYCRCVESKRVSNEKKKGINNRKNGNSYLCWAFIEASNCAIRSYPEIKSYYQRKLSKTMRVVAIKTIANKLSKACYFMLRDKMEFDMKKLFMH

SEQ ID NO: 210509 - protein, 381 aa, unidentified
MTTTVTHHEQSNTTEATLFVAFELSEKTWKLGFTTGHGQKPRERTVTARQHEHVLNEIAQAKRRFGLPETAPVVSCYEAGREGFWLHRFLQAQGITNHVVDSSAIEVNRRRRRAKSDGLDVRKLLSMLLRYAQGERQVWQVVKVPSVEAEDHRHLHRDLETLKQERASTTTRIKGLLSSQGLRVTSLTKLPEQLDALRLWDGSPVPPGLRCRVLRVYAHHTFLSEQIAAVEAERRAQLQASTDAKIDKVRQLMLLKGIGINGAWLLVMEFFGWRAFKNRREVGGLAGFTPTPYQSGESAREQGITKSGNRHVRWMTTELAWSWLRFQPESALSCWFRQRFGSGGKRLRRIGIVAVARKLLIALWRFLETGVVPDGAVFKEG

SEQ ID NO: 210510 - protein, 432 aa, unidentified
MKKIRENAAGIDIGAKKVFVSVEGQEVKNFFTFTEDFEQLRDYLLKHKIGTVAMEATGVYWNILYEILEEAGIDVWLVDGRQTKQVPGRKTDVKDCQWIQQLHSYGLLNRCFVVESDIKELRSYQRLREDHIRSASMHVNHMQKALTEMNIRIKEVLSQIHGTSGLAIIEAILKGERNKEKLLKMCHSSIIKNKKEEVLKSLNGKYTQAGLFALQQALESYNFYQHQIQQCDQMLDKVIKRMGDGSIEQKPHLPRKPIRHNKPDIDNLGMSLMKIFGGKDATVLSGITDYTWMQLLSETGTELSRWPTEKHFTSWLGLSPGQHSSGKTKKNKRKAGRPKAGQIFRQIAQSLLTSKHIALGAFGRKLRARKGPSIAIKAMARKLAVLYWRVMVKGLEYVENGIHKYEEQLLAQRHRSLMRLATELNVQISYNL

SEQ ID NO: 210511 - protein, 320 aa, unidentified
MHAIGIDMSKNTFHAAFDDTTVIVFANTKEGATSFFTALRARDMTPEETTIGVESTGVYHLLLCAQAKASGWRIVIVNPLEASHMIKAQSLRRMKTDRTDAFAIRMMVIAGRGYPFTDTDETLTLKALVVEREGLVTMRAMVKVQHEAHATRARAITSTLHDGSPHLVATLDHEILAIDQELRRYAPETQKLLRSIPGVGPITAASLIAYVGDINRFSSPEKLVAYTGLDCRVHESGTSIKGKGFITKRGNAHLRKVLFNAAFIAYQWNPELNAYFLKKTGEGKHYFAALCAVERKLIHLIYAVWKRGTPFKKRKLVVAG

SEQ ID NO: 210512 - protein, 312 aa, unidentified
MDNEIIIDKGCGLDVHKETVVACVMGSGIKKEIRTFSTKTNDLLRLKVWLSGIGITHIAMESTGPYWKPVFNVLEDGFTLILANARHIKNVPGRKTDVKDSEWICRLLRSGLLSASFVPPQAIRELRDLTRYRRKLTQSLSAEKNRIQKVLEDANVKISSVLSDTFGASGSQMIEAIMEGKLNEAEIADLAKGKLKSKKEEIREALVGYFQDHHRFMIKASLEHIKYLEKLISDLDQETKKKLARYQKEYDLLQTIPGVKEQGATAIIAEIGADMDVFPSEGHLSSWAGMSPGNNESAGKKKVERQPTAIRI

SEQ ID NO: 210513 - protein, 411 aa, unidentified
MVKENFIYVGIDLHKETHTAVMIDCYNQKLGEITFPNRPAAFPKLVTKVKKCNTDGKEVVYGLENAYGYGRALAVWLIDKGYLVKDVNTAISHRQAKHRGAMYRKSDSDDAKAIALATLNMLDKLPDACPNDAYWSLGQLVHRRDNIMKQRTRLVNQLHEQLCIAYPSYKQFFNDISRPTALYFWEHYPSRKYLKGKSVEDLRAELVPVSHNKCSTKTCEKILDAVASDKVKNNAYQDARDMVTLSIVSDLQHYDSQLTEVDKMLEQMYKMLGCTLTTIPGVNVITAVKILAEIGDIKRFSNANKLAQFAGIAPLHLSSSGKGKDLATKQGNRRLQATIYFLAIQMVQISSKGTPRNPVVRAYYEKRKAEGKTSQQALICISRRLISVIYGMLKNGTEYRMPVVENAGEKL

SEQ ID NO: 210514 - protein, 412 aa, unidentified
MHPRFKMPIYVGVDIGKESHMVCAVSDQEKIILHPFSVENSLSGVELFISKVKALAPIDQILVGMEATGHYWQCFFIQLQTLGFSVCLINPYQTNHFAKTNLKRAKTDKVDALNIAKFLAESKPRSTKLPDELIMVLKELTRLRDSLVKNRSALHNQLVGVLDKAFPEFVQIIKNPTSEKALTILQRYPSATALRKAKLGKLQTLTYGKKQHKIGPDLASALKNQAKRSISSDYAHTAYEIELRSIIAQIQTINEQILVIELKLKEYFSQLNLDNLLSIPGVGFVSVASLVAETEDIDKFSSPKKLVAHFGICPKEDQSGKYRNPHPHMSKMGKSRPRAVAYRVCIPAIRVNPVIKEFYLRLRAEGKPTKVAICACMRKIIHLFWALWKYQRTFDANFAQTCLSRHRSKNKL

SEQ ID NO: 210515 - protein, 437 aa, unidentified
MSQELPMLDPLAAFVDVGSEHMHVSVGGNTPEVFGTVTSQLHALRDWLLAQGVRSVAMEATGVYWLPLYGVLESAGLEVRMVNGRQTRNLPGRKTDMADSQWGATLHMHGLLHAGFVPPADIRRLQDYLRLRADHVAAAATCVQLMQKAFERMNIKLHDVISSLAGVSGLAVARAIVAGERSPEALVALCDVQIRRKKEQAVIEALRGTWADEHIFALAQALQSWDHYQKLIADCDARIATVLPPHDDTQPPLPRSTRRTGVNAPEIARLREILAQMCGGRDLTKLPALSSYGVLQLIGEVGTDLSAWPTEKHFTAWAGLAPGNHDSGKRTKGVRRGRNRTGRLFCMMAQSLVRSKDIALGGFYRRLAARRGGLVATKALARKLAAWFWRVMVKGDDYVEKGLARYEEQVRKTREHALKRLARELGRELVPLPGVSD

SEQ ID NO: 210516 - protein, 401 aa, unidentified
MKRLSGGIDVGSESHHIIILDEEDNVLYNKKVSHKLNEFAENINLFKQIEKKEGGKISFALEGKNGYSAPFDRILLDEGFTLYNVDNLKLKRFREAFAGEWKDDQRDALMLSKMLKLKDHLNSEREKVFIKIEKPSPVTESLKLLSRHQQTLIDEKIRLINRLGKKLLEVSPQILKLGKLKNKKMIAILAKYPDFSKYKRITLKSLLKIEGIGKKQAPLLLKRLNNLEYIPGLTDIYKTIILSFAKRILELQNEIKDIDKSLDELGNQSREVKHLKTIPGVAIKLASRLIGEIGDINRFPTEKQLAIYCGVACVNNNSGKITKAKAVYKANKKCKQTLITLAGCSIHFNPQSKTYYLKKRKEGKSHNHTLRCLARQLIKVIYRMLTEDRDYIIKKELKKAA

SEQ ID NO: 210517 - protein, 368 aa, unidentified
MKDVTTYVGIDAHKKDLFIAMLVGTQATPLTWTVANEPNAIRRLVRKLEREAPGPVRSCYEAGPCGYALQRRMTTTRVVCQVIAPALIPRKPGERIKTNPRDARKLAELLRAGLLTEVQPPTPEEEAVRDLCRARDDAREDLQRSHHRLGKLLLRRGLHYSGRNWTRAHRQWIDSLEWAHAAERVVVDDYLLAIDHLEARLIELDARLTAIAATEPYREPVAWLRCFRGIDTLTAILILAELHDFRRFQSPRALMAYVGLVPGEDSSGEKHRRGRITRTGNALVRRLLVETAWHYQHRPSVGVALTRRRKGQPTRVIAIADKAQQRLCRRFRRLAEHHKPAPKIAVAIARELAGFLWAVLQPASVSAS

SEQ ID NO: 210518 - protein, 338 aa, unidentified
MGYFVGIDLHGDNNYIGILDEEDRRVFKRKNRNDIKEITRVLEPYQEEIEGIVVESTFNWYWIVDGLMEAGYRVHLANTAAMQQYEGLKYVDDTRDSFWLAHMLRLEILPEGYIYPKEIRSVRDLLRKRMMLVQQRTAHILSMQTMVNRNKGIPISSEMIKKMSDEEVEGLFGDEHLVMSAQCDHEVIEVLSEQIDKIEKAVHKEVKLKKPYKKLLTVPGIGEILAMTIMLETGDIGRFREVGKYSSYCRCVSAKKVSNGKNKGKGNRKNGNKYLAWAYVEAAHFHVRYCEEARKWHQRKASKSNAILATKALSNKLARACYYIIKEQINYDKKRMFG

SEQ ID NO: 210519 - protein, 427 aa, unidentified
MNYTQNHKISQITPSTLIVGIDIAKDKHVARAQDDRGIEFGKRLIFENRMHGFQKLVNWAEDLRKENAKDHVILGVEPTGHYWFSLAYFLVAKGYDFVVVNPMHVKKSKELDDNSPTKNDTKDARVIAQLIKDGRYSVPNLLDGVYAELREGVKLRDQLTKQLMITEGRIQNHIQRYFPEFFDVFGDWEGKAAFCTLRLFPFPSQIKELSPEEVLMKWKPYVQRGVGIKRATKLVEAARKSIGIQIGIQFAKRELDYLLDQYELYKQQVEQLDTELEALVETLPGANQMMEISGLGSTTIALFFSEVGDITKYSHPQQLVNLAGLSLREHSSGKFKGQTRITKRGRSRLRRALYLAIRPLVAHNPTFKALHRYYTTRSEKPLKKQQSLIALCCKLLRVLFVIGQKQCEFDGSKLVRGLHQKQVLQVA

SEQ ID NO: 210520 - protein, 338 aa, unidentified
MHVTTLGIDLAKQVFQLHGVDARGHAVLSRRVKRSQLVAAVASLPPCVIGMEACASAHHWGRAFEQLGHTVKLMSPQYVKPYVKTNKNDCRDAEAICEAVSRPTMRFVAIKTVDQADLQAVHRSRTLLIKTRTAVINQIRGLLAEYGLVIAQSPEKVRPALVRFLDDAESGLTAFAQETFSELYEQLVELEQRITKVNQRLDRLFNTHPVCRKLAAVPGIGPLTATALLAAISRPHVFQNGRHLAAWLGLVPRQFSSGGHARLGGLSKRGNRYVRTLLIHGARAVVQRAAHKTDARARWMWALKCRKGTNVAAVALANKNARVIWALLAHDDVYRQSV

SEQ ID NO: 210521 - protein, 317 aa, unidentified
MTGIICGVDISSQSLEARIGSEGAFASFPNNPEGIAALAAFCHAHQVELVAMEATGGYEQQCFAQLSEQGLPVAILNPRAVRQFAQSMGWLEKTDRIDAGIIAWYAQVKGSHPVCLAPQNQQHLRALVTRLRQLTEVRTAQLNQQRLVTDRAVVASFKKLLAVVARQIRELEQRIAALIEQDPLWRQLDQTFRTIKGVADRTVARLMAEMPEIGTLSNKTVSKLAGVAPLARDSGKHQGKRAVRGGRASVREILFIVASVVGRYEPDFIAFQQRLRAAGKPPKVVRIALAHKLLVRLNAKARQVRQQHAALPQAAAA

SEQ ID NO: 210522 - protein, 406 aa, unidentified
MGKFDHRDIDVFVGVDMAKQDHYAQAITIAGVEAFHRPVLNDQAAIDKLLDDAGRHGRVALVIDMPSSAAQLLLTIAHNRQVPVAYVTGLQMRRAAELYAGSAKTDPRDAWVLADFARRHADQLAWIQVSDDLLSKLRILNGRDVDLAEDANRASNRCRDALTSISPALERAIGSRLGHPGVRALLAAHPTPTSLRSAGHDTIRRLIAGRSPRLADKLARDIATALAAQTVTLPGENTWGEIIAGLIADLERIHIQRNELEKQIETVFLEHPLGQVLVTLCGFGPRTGARTLAEIADPSRFKDGGRLAAYAGLAPVDKRSGKSINNASASRRGNHRLKNAMFLAAFVATQHDPHAKAYYQRKRDEGKNHNAAIICVARRRCDLIHAMLTTATPYNPQRAENLAPAA

SEQ ID NO: 210523 - protein, 332 aa, unidentified
MSVYVGIDVHRKRSQVAVVDQDGKVLANRNVNNGVTPILSVIGGLPPGTPAAFEAAYGWGWLVELLEDYGFEPHLVHPLQCKAIASARLKNDKVDAAILAQLLRADLLPEAWIAPPEVRQLRALLRHRAQLVRLRTLLQNRIHAVLADHGHDRPAGCWSGPGRAWLASLELPAVSAEVIGDALALIDALESVTGRLDAEVRQHARSDPRVKILTTLPGVGPFTALVLLAEIGDITRFASARKLASWAGLTPTVRGSDRTVRHGHISKQGSAWLRWVLCEAAQKAKRHPDFAASYQSIARRRGTKIATTAIARKLLTRAYHLLTDAASAGAPS

SEQ ID NO: 210524 - protein, 361 aa, unidentified
MKIIGVDLHTRQQTIAMLDDQTGELVEKQLSHEGEQVREFYASLPQPVLVGLEATGSMHWFLRLLEELGIEFRVGHPAKIRAAEPRKQKNDRRDARLLLTLLAEKRFPAIWMPSREQHDLQILLRHRDQFVRIRTRVQLSLQALALSHGLRRGHSLWTRGGQHTLRALPLAAHASEQRDTLLTLYPQLQGPIDDLDRQVEREAQQRLPSQRLMTHPGVGPITALATEVFLGDPQRFADGKAVASYIGMIPREHSSGGRQRFGRISKQGNSLLRFLWGEAAIHAVRRDPELRRFYRRKLAQKGMGKARVAAARKLGIRLWIMLRDQIDYTEFCRRGHQRWQGSGAACAGMLHGDSGLNGPSV

SEQ ID NO: 210525 - protein, 372 aa, unidentified
MSKSTTLFVGMDVHKETIDVAIATNRLNGKVRHYGQIRNRIDAIDKLVAKLKREATRLKFVYEAGPCGFGLYRHLTRKKHHCEVVAPSLIPKTPGDRVKTDRRDAMRLAQLYRAGDLTPVYVPAVDDEAIRDLSRAREDAMLDQKAARQRLKSFLLRHGIRYEGQANWNEAHLRWLTEVIMPTPAQQIVFQEYVNTVTERSQRMHQLEQMLKTQVKDWYFAPVVRALQAMRGMRFINAVTVVAELGDLTRFDNPRQLMCFLGLVPSQYSSGEHTKLGPITKSGNRHARRNLIEAAWAYRYPAKVSREIQIRQENLPRKFREIAWKAQVRLCARYRKLVARGKNKNVVVVAIARELVAFLWDIAHYVNLRPVR

SEQ ID NO: 210526 - protein, 357 aa, unidentified
MEKRLNADTINVNGKTVNVGIDVHKLSWHVTALVEGVIVESATIKPSYRVLKKLLAQYKGARIRIAYEAGFSGFNLYDELTADGIECIVVSPSLIPVESGNRVKTDKRDSRKLAQYLENNLLKRVYVLSKQERAHRQYVRTRRQLSNHRTDVMRQIKSLLLFHGLPSFDGNRGFWTRPVLRALRSITPDEYVSRSLNKLIDLYEYLTQQVKHMTREVRRLARTEKYARRVELLTSIPGVGVLSAMEILTELQDVSRFATADQIAAFLGLTPAQYSSGQHVRMGKITHAGNHRLRTRMVECSWIAIKKDPGLNKTYQAIKMRRGGKRAIVAVSRKLIIRIRRILLDEVTYRKECAIAA

SEQ ID NO: 210527 - protein, 411 aa, unidentified
MFVGNDWAEDHHDVEIVDEQGRRLARRRLPEGLEGITRLHALIGEFAPPEWADLPAEQAASRVKVGIETERGQWVAALIAAGYEVFAINPLSVARYRERHRASGAKSDAGDAHVLAEIVRLDRAHHRPVAGDSDLGEAIKLVARSHQSLISGRTRQVLRLRSVLREFFPAALEAFADLAAADTLELLALAPDPDRAARLTPARIRGALRRARRRNVEDKTTAIQAVLRQPGLRQPAQVQAAFASIVSSTVRLLVTLNAEIAELGKVVGEHFGRHPDAEIYASQPGLGVILAARVLAEFGDDPARFADAKARKNYAGTSPITRASGTRKIVIARYARNQRLADAMQQWAFGALKGSPGARAYYDQLRARNIGHQAALRQLANRLVGILHGCLKTGTAYDEKTAWAHHHTAAA

SEQ ID NO: 210528 - protein, 377 aa, unidentified
MAEITRALIARVGVDLAKTVIQVHAVDKAGRRVVSRALKRDQFLGWCTQLPSGCLVAMEACSGAHAWGRRLRAMGLDARLIAANFVSPYRMEGKSGKNDMTDAAAVCEAASRPTMRFVPIKTPEQQGVMALHRVREGLKEERTACINRIRGVLAEFDLVFGKSPKVLRAVLPDVVEDASNELSGRARLVVQRAFEHWRELDEHLRWCDRQIGEHVRSSVEARRAAKITGIGELGASALTASVSDFRQFKSGAQFGAWMGIVPRQNSSGGKISLGRITKRGDDYLRTLLIQGAKSAVMSAAKRDDPTSRWLQALVERVGWQKACVAMANKNARILWAVMTREQAFEPGHVSDKPAAKCAKPAGGQAQDAVARPVASVA

SEQ ID NO: 210529 - protein, 367 aa, unidentified
MQNTIVHYEGTASLEAVATKVKPRGAVIKIGLDVHARLYVAVAQYDHLLPKAARRLRPCEFVPWVEALLRQGQSVHVVYEACGFGFSLYRQLIAAGAHCYVIAPRKLDEECSRVKTDPRDATTLCQRLSRYLEGNTRELAVIRVPSQEEEQARHVSRQRTQLVCHRQKLEAQGRSLLISHALPAPAHWWKEQTWTRLGRHLPAWIMTRLQMARPALLSLQEQINALTNELEASASSNLPRGVGKLTSVMLTREICDWHRFNNRRAISSYTGLCPGERSSGNKRVPGSVTKRGNPRVRVALVECAWRMVRFQPQYPPVQKRLAVLAKGSRAIGAVRKKAIVAVARRLAVDLWRLHTGRCTAEQLGLKF

SEQ ID NO: 210530 - protein, 365 aa, unidentified
MNTNSVVYVGMDVHKESVNIVAYKDNEQRPSIIVEKKNREYELRKYFKKLKQKGSLRCCYEAGQSGFSTYRMLEEMGIVCLVAAPGLIPRKPSERIKTDRRDADMLARNLRAGQLTGVYIPTRDDEAVREYLHVRDDFKREQKRYKQKVLSLTARHGLIYREGNYWTGKHRQWLKGLTSLRPLQRETLEEYLRHLDYINDNIKRIDGRIEELAAAQRYKDKVERLMSLKGIGTFTALSLIVEISDFRRFASPGELMSYLGLVPSEHSSGGKRRTGGITKAGNSRLRRLLIEASWHYRSYIPSKRLMKRRQVVEPHISEYADKAGRRLSRRFQHLLFTGKPSQKVATAVARELCGFVWGLMREQTA

SEQ ID NO: 210531 - protein, 436 aa, unidentified
MNPNRLQVGIDFSRQRADICLLFPDGQPLLSHQAFANSQRGYQTTRQMLLDSLHAYGFDGLDVSGEATSYYWFPFFWQLAHDAQLDACDLSLFLLNPRQVRWFKKSLPPDDKTDQTDPFYIAERTRTRRPKAAWDPQDDWLPLRFYTRLRFHLAQALTREKNYYLVHLFLLHSAYRRGQPFSDLFGVTSQKVLGGELSWAELVGLPVEELAERLDAWSGGKLDDPLESAHKLQQAAQDSFPLQEPLLTPVQQLLELTGEHIRFLEAQMAQVEGWIAAEVQAHHPEVLFLDTIPGVGLVLAAGIAAEIGDLGRFFQTQKWDKKRRRYRQKTLREVEDAVAKLAGLWWPKADSGEFVAEDRPMAKTGNRYLRYYFVQAANGMRRHIPAYARFYGLKFREATRYKHKRALVLTARKSVGLFVGLLHRKEAFRSKEGGTP

SEQ ID NO: 210532 - protein, 344 aa, unidentified
MEYYVGLDVSLKSTHICVMNQDRQVVWRGSADTQPSMIADRLKKWKEVLCKVGLETGSMTPWLYHELKGLGFPVVCMDARRAADALKARPEKTDKADAQALAEMLASGWYSAVHVKTMESHRLKALLGAREQLVNVKRQLYGQVRGLLRPFGIKISARAGGKRFDEEVRSSCNRHDALYIGVAALLDTLARVEVELAGLDKKVRQITAASKPCWHLMSVPGVGPLTSLAFVATVEDPRRFGTSRSIGSYIGLTPKRYQSGDRDVTGSISKQGDEMLRHYLYEAAGCLLTTVTAPSALRSWGLKLAKRLGPKRARTAVARKLAVLLLGLWKREDHFRAAPSGKAF

SEQ ID NO: 210533 - protein, 422 aa, unidentified
MLQNTEEREEIVERVAALDIGKAELVCCTRVPRPDRAGQRMQEVTTYSTMTRSLQVMVDRLRELGVTRVVMEATSDYWKPPFYVLEAAGFETWLVNAKDVKHLPGRPKTDRLDAVWLCKVAERQMLRPSFVPPKPIRRLRDLTRYRFSLVANASAEKNRVEKLLEDAQIKLSVIATDIFGVSGRAMMAALIAGQRDPKVLAQMARARMRVKIPQLEEAFVGHFDDHHAFLLGQMLAHVDALQADISRIEERIDAEIAPFAQMVARLDEIPGVGLTAARVIIAEVGVDMTRFPTASHLCSWARFAPGVKESAGRKKGNGATGHGDRYLASALGEAAVSAGKTNTFLGERYRRIARRRGKKKAIVAVGRSILVIIWHLLNDPETRFIDLGSDFYDTRLGTQHATLNHVRRLQALGYRVTLEPAA

SEQ ID NO: 210534 - protein, 343 aa, unidentified
MQTITTIGLDIAKSVFQVHGVDASGQVVIRRQLKRRSVLTFFQKLPACLVGIEACASSHHWSRELQALGHTVRLMPPAYVKPYVKRQKNDMADAEAICEAVTRANMRFVPTKTPEQQSCLMLHRTRHLFIRQQTAVINSIRAHLAEFGIVAPVGRKGVTELLGIVADPIDKRVSEVARACLAALGTQLLALKEQIVEFDRMILAWHRSNQTSKRLHYIPGVGPMLATALVASVADPSTFRSARNFSAWIGLVPKQHSSGGKERLGSISKQGDRYLRSLFVAGALAVIRYAKIHGTGHRPWLTALLARKPTKVAAIALANKIARMAWAIMTKGERYKEPIALAR

SEQ ID NO: 210535 - protein, 390 aa, unidentified
MQPTQVQEFTRDEEVLAVSLELASKSWKVGLDDGRRKAPAVHGVDHAEPKGRLEEAIAVIEKVKKKWGVAPGVRVVVVYEAGQDGFWIQRALSERGYEALVVDPASIPVERRARRAKTDRLDAIRLVLALRAWLRGERDRMKVVRIPAAEAEGQRHVVRDRGTLQKEIGQHRDRMRKLLRTVGCWESIEGDLKRRLERGEVTGYGGSALPAWLQERLVRECVRLKLVEGQLAQLEKTLPAQLPEVVRKRIVQLMQLKAVGQVSAQRLLLELFWRQFNNRREVGACVGLVPQPYDSGESRVDQGISKAGNRRVRALLIEMAWMWLRWQPHSELAHWFAQRTRGSGSNKRSKRIAIVAVARRLVILLWRYLKDGVLPKGVALKPVKVTLKAA

SEQ ID NO: 210536 - protein, 341 aa, unidentified
MKQIIRQAIGIDISEKDFHACHYVLDLRGRAIRKGKVRVFKNTIPGFRSFLVWVEKIRSACSAELFLVMEATGVYHEQLAYFAHEQHQVVKILLPNTVKSFAKSLNSLSKTDTIDAQVMAQMGVERSLRTWQPMSPLMQELKTLSRQRQAFIKQRTVLSNQLHADMKRARPVKNNIKRDKAMIAQYNKYIDQIEKEMAELLKEDQPLKVNIKRLCTVPGVGFITAATLLAETDGLVLFNSESQLISYCGYDVKRHDSGTSVRGKTSISKSGNSHIRGALYMPSMSSMQLEGPFRDCYYRVVDRTGHGKMGLVAVQRKMLKVMFACHKKQEDYDPSYHANRA

SEQ ID NO: 210537 - protein, 378 aa, unidentified
MRFYNQPHRFYCGVDLHARTMYLCILDHAGQIVLHQEMPAEPAAFLEAIAPFRDGLVVACECLFCWYWLADLCQAENIAFVLGHALYMKAIHGGKSKDDKIDSKKIAQLLRGGNLPIAYAYPKGLRETRDLLRRRMYLVHKRAEVIAHVVNTNSQYNLPPFGKKLIYAKNRKALKIPQRFSEASVRKSIALDVALLDSLDELIGDVELYLQRTVKVDDADTFYRLRSIPGVGKILALVLLYEIHDIKRFAGEGEFLSYARLIRPLKTSAGKVTGGGGGKIGNAHLKWAFSEAACLLARESDQAKRFLARKEKKHGKPKALGILAARLGRAVYHMLRQRRAFDPKRFWNGEPKVTPAQAKKSTVKAPRRADGSRCVLQA

SEQ ID NO: 210538 - protein, 355 aa, unidentified
MMVIGVDPHKGSHTAAAADELGREKGRKTVPARRDGHRDLIAWGRALAPAGRRWAVEDVRHVASGLVRELLAAGEEVVFVPTRMMAAARSGGRERGKSDPVDALANARAALREQEFLPPARLPAAVLEVRRLADHRDDLVAQRTRAVNRLRWLVHDLDPALAPPPRALTRTARAPRQLQAALLALPASAGRRVALSLLAAVTAATAEVAQLEADLTALLSELCPQLLAVCGIGVVTAARLLGEAGDTRRFRSAAAYARHNGTAPIPASSGTGGAAGPQRLNRGGNRQANAAIHRIALSQSRYHPGARALLERRAATIRETRKAALRVLKRHLSDVIYRALLADAWRLDQPLQTAA

SEQ ID NO: 210539 - protein, 412 aa, unidentified
MEKQTIEFEQVVERGCGLDVHRDTVVATVMGKGLQTETRTFGTTTSSLKELGEWLETLKVTDGAMESTGIYWKPVLHVLREYPINLIVVNARHIKNVPGRKTDKADSQWICRLLISGLLKGSFIPPENIQELRGLHRYKKKLVGTIASEKNRIIRVLEDANVKLSSVVSDTSGVTATYLINGLIAGRKDLENLIAECYHKKLKASPEQIKEAINGRVTPHHAFILKSMQKHIASVEGQIDEIDVEIEKYIKDFEQEIGLLQTIPGVGKEGAIGIVSEIGVDMGVFPNEHHLASHSGMCPGNNESAGKKKSSRTRQGNKHLKATLTELAWGATRTKKSYYKAKYESMVPRRGKKRALIAIGHKILCASYHIIKNKEAFKELGYEYLMERKMKNRLEYLKRELKEHGYKIEKAA

SEQ ID NO: 210540 - protein, 412 aa, unidentified
MEILYKSCCGLDVHKKMIVACLRRTDEAGKVGKHVRTFGTTTSELLSLSDWLVEAGCTHLAMEATGVYWKPVYNILEGQMELLVVNAQHIKAVPGRKTDVKDAEWIAELLQHGLLKASFIPPQSQRDLRDLTRYRTTLVRERARIVNRLQKVLEDANLKLAGVATDVMGVSGRAMLEALLAGQTDTGQLAELAKGRLRKKIPQLKQALTGRVREHHRFMLSEQLSHIDYLDEAIERLSVEIGERLHPFEPELQLLDTIPGINRQTAEELVAEIGLDMSRFPDGHHLASWAGMCPGHNESGGKRRSGKTRKGNSWLRSTLVEAAHGAAHTKDTYLASQYHRLVGRRGKKRALVAVGHSLLVISHYVLKRRQAYSDLGSNYFDDLQRQRLERNLVQRLENLGYKVTLEALSPAA

SEQ ID NO: 210541 - protein, 418 aa, unidentified
MQVETDESEVIERVAALDVGKAEVVCCARVPGPGGQRMQEVRTISTMTAAVLALGDWLAGLGVTRVVMEATSDYWRAPFYLLEDRFETWLVNAHDVKHLPGRPKTDRLDAVWLCKVAERQMLRPSFVPPPAIRELRDLTRYRVDLLAVRTAEKQRVEKLLEDALIKLSVVVSDVFGVSGRAMLAALIAGERDPAVLAELARGSMRSKTARLSEALTGRFTDHHAFLLTQMLARVDAITADIATVQTRIEAQIGELAPAVARLDAIPGIGPVAAQMILAEIGTDMTRFPTPAHLTSWARFAPGVSESAGRPKGKAGTGKGNRYLARVVGEAAVSAARTDTFLGERYRRIARRRGKKRAIVAVGRSILVIIWALLSDDEAQFIDLGPDYYASRTNPERKVRNHVRELQALGYTVTLNPAA

SEQ ID NO: 210542 - protein, 308 aa, unidentified
MFDNEQSGYVDFLQWVKENTRCQKSGVLFCGEHTGYYSGNLSVFLFESGYDMWLVSGLEMKLTQGIKRTKTDRVDACKIAEHAYRYQDKVVLFQPVSKALEEIRELLSYRERLVETRKVLTTSAKEMKRVKDNASCDYIYQDSIEYIKTLNASVRDCEKRIEALLKQDISLKTNYKLVSSVVGIGLVNAALILVATDNFTKFENPRKFGCYCGVVPFEHSSGTSVRGKTRVSKMANRHLKTKLTLAAQNAVRFDPELKEYYQRKRSEGKNNWLVLNNVKNKLIHRIFAVVRDGQMYEKQYVHPLKQAA

SEQ ID NO: 210543 - protein, 411 aa, unidentified
MDVLYPVCCGLDVHKKTITACLRFPSARARAEEVRTFGTTTRELLRLADWLTAAGCTHVAMESTGVYWRPVYHILEASFEVLLVNAQHVKAVPGRKTDVKDCQWLAQLLEHGLLRGSFVPPAPLRELRELTRYRRQLVQEHAREANRVQKVLETANIKLGDVATDVLGVSGRAMLHALIAGERDPERLADLARGALRQKAEALREALVGRFTLHHAFMLQGLLDHIEFLDQQIARFDERIEEQTRPFGPAIERLDTIPGVGRRSAEQILAELGDDMRRFPTAAQAASWSGICPGNHESAGKRRSGRTRKGNAWLRSTLVESARAAVRNRGCYLSAQYHALARRRGDKKAIVAVAHSILVAAWHILRDGVEYRDLGPDHFDRLNRERLVQYHTRRLAELGLTVQLPGAQATA

SEQ ID NO: 210544 - protein, 334 aa, unidentified
MKSGIVHIGVDVSKEKLDVFVPAQKEGMRPTTKGVDNCVAGFREIRDIARKARATVCVEPTGGYELELIAFLHKFEVPVAYADALRVRQFARAEGSLSKNDTIDAALISRFADKIGVRVLAPQEVEAVELKRKAKFRQTMVDSRTAMANRLETETDPEMKALLKEQIRHMDKVIGKAERLCLDTVKKDERMNALLERFTKVGGVGDMTAMSILAGLPEIGNLTDAKLNRLVGIAPEEKQSGTREWQRRIWGGRKDVRNALYMACLASIQWNAVLGGYYRKKRAEGHPHKWAIVPTMRKLLSLLNRIARDPDFIPSPEPESTKRNATAGRKRKAA

SEQ ID NO: 210545 - protein, 408 aa, unidentified
MDRVNPRCTGLDVHKDSVWACVRIDAQPPVTEKFGTSTRELLRLGDWLLERGVTIAAMESTGVYWKPVWNLLEERLELMLVNAHHIKQVPGRKTDVKDCAWICELLEHGLLKPSFVPDRPQRELRDLTRQRTQLLGDRARVVNRIQKTLEDANIKLASVASDITGKSGRAILNALIEGKLTAEQMAELVHQRMEAKKPLLREALRGRVTEHHRFMLRQLLDQIDHLDRMVESFDTRIEAVMSHLEQEAVKKLDEVPGFDRRNGQIVIAEIGTDMSRFKTAAHLASWAGMCPGNNESAGKRRSGRTRKANRWLKAALTAAAWGASRTRRSYFAAQHRRLSTRRGVKRATIAVAHSLLLTTHHLLSDPRPYSDLGADYFVSRQTPQQKVDQLLRKLQRLGCIVEVKRHAA

SEQ ID NO: 210546 - protein, 398 aa, unidentified
MTESSDYESVQVFIGVDVGKDTHHAVAINRSGKRLFDKALPNDENKLRSLISDLKQHGQILLVVDQPATIGALPVAVARSEGVLVGYLPGLAMRRIADLHAGEAKTDARDAAIIAEAARTLPHALRTLKLADEQIAELSMLCGFNDDLAAQTTQASNRIRGLLTQIHPALERVLGPRLEHPAVLDLLQRYPSPEKLASLGEKKLAAQLCKLAPRLGKRLAADIAQALAEQTVVVPGTNAAAVVLPRLALQLITLRKQRDEVALEVEQRVLAHPLYPVLTSMPGVGVRTAARLLTEVACRAFASAAHLAAYAGLAPVTRRSGSSIRGEHPSRRGNKALKRALFLSAFAALRDPLSRAYYTRKMSQGKRHNQALIALARRRCDVLFAMMRDGTFYTPQGL

SEQ ID NO: 210547 - protein, 342 aa, unidentified
MQITTIGLDIAKNVFQVHGIDAAEKVVVRKQLRRSKVIAFFEALPPCLVGMEACASAHYWARELRKLGHEVRLMPAKDVKAYVKRNKNDAVDAEAGCEAVRRPTMRFVGVKSAEQQGRLMQHRTRDLLLRQRTQVINALRAHLAELGIVAAQGREGLKELLAVIADEKDDRLPIDAGASLMVLAAQLQALQTMIGSIEKRIIAQHRASEESKRVATIPGIGTLGASAITATVTDPSAFRSGRDFAAWIGLVPRQDSTGGKQKLGPISKQGDRYLRRILVVGAIAVLRYAKQNPEKYPWLTQLLARRPFKVVAVALANKMARMAWALLAKGGTYRAPALAAAA

SEQ ID NO: 210548 - protein, 347 aa, unidentified
MTMTIVEAARAVTGGVDTHLDVHVAAALDPVGGLLGTEGFPADPAGYKAMLSWLESFGEVTKVGMEGTGSYGAGLARFFRHQGIEVLEVDRQSRQARVRHGRSDPIDAVEAARATLAGRAGQPKSMDGAVEAIRVLVVAKRSARQARSKALTQMRHLSYTAPDQLRCQLKGLTIPVLVAKAASLRPTRSPDPVTAGTKASISSLAHRVRYLDVEIAGLDELIEPLLFATAPELLALKGVGPDTAASLLITAGDNPERLRSEAAWAHLCGVSPIQASSGKVTRHRLNRGGDRQANSALWRIVMVRIAHDPDTKAYFERRVKEGRTKREVIRILKRYVAREVYRHLPRG

SEQ ID NO: 210549 - protein, 337 aa, unidentified
MKYFAGLDVSLEETTVCVVDEEGRIVREARVPSEPEALVAFLQGLGLALERVGLEACSLSAWLYEGLTAAGLPAVCLETRHAKAAMGAMPNKTDRNDARAIAQIVRTGWFRAVHVKSPACRSWRALLAARRLVLNKMRDLENGVRALLREAGLKLGRPARKELAARVRELVGADAVLSASVEPLLAIVATMAHELAQLTRRVLAIVRDEPVCRRLMGVPGVGPLTALAFRATIDRPERFRRSRDVGAHLGLTPKRYQSGETDVQGGISRCGDELARTALYEAAHSLLVRSRRWSSLRAWGMQVARRRGMARARVAVARKLACACWTTWQTAERLSRA

SEQ ID NO: 210550 - protein, 346 aa, unidentified
MEQISRIGMDTSKRFFQLHGVNAAETVVLRKKLRRKEMVTFFEKLAPTVVGIEACGASHHWARLLQSFGHTVKLIPAQLVKPYVKRGKNDMADAEALCEAMSRPTMRFVPIKTAEQQAALMLVGLRDRLIRNRTQLCNAIRGYAAEFGFTAAKGVANVRSLLERIQADEGVPDLARELFAAQAEEYAQLEEQIAEISGKLMAWHKADECSRRLAKIPGIGPIGAALLMMKTPAPELFRLGRQFAAWIGLTPRDHSTAGKVKLGVITRAGDEALRAVLVSGATAVIRHAVGCKGRASPWLIDLLKRKPPKLAAVALANKLARIAWKLMVTGENYAATSTRIASAAAV

SEQ ID NO: 210551 - protein, 350 aa, unidentified
MKFYTKQHQFYCGVDLHAATMYVCILNASGEVVCHRNIPTRPEAFLRLIKPHRDDLVVGVECMFTWYWLADLCADEGIDFVLGHALYMRAIHGGKAKNDKIDSHKIAVLLRGGSFPVAYVYPKAMRATRDLLRRRNHLARKRAELVAHIQNTATQYNLPEPLGRVARPSERVDLLEKFPDPVVRRMVEIDLLTIDHYDQLLGSLERQMEKTAVHHDAIGLALLKSIPGVGRILGLVMLYEIGDIARFPREQDFASYCRLVKPAKESAGKHYGHSGKKIGNAHLRWAFGEAVVLMLKGNPPAQRQLQKLASKHGKGKALAILAHRLGRAVYYMLKNQTPFDEARFLRHQGA

SEQ ID NO: 210552 - protein, 337 aa, unidentified
MKYSGIDLHSNNSVVTVTDEEDRVVAEKRLPNDLSKIVGFLQPWRDELAAVVVESTYNWYWLVDGLQEAGFMVKLANTGAIKKYDGLKHSGDEADARQLAHLLRLGILPTGTILPPEHRAIRDLARKRMQLVRSRTSHILAIENIVARQRAMKVNSNQVKRLTAKDVDQMGLPADVGLAVKSNLAVITTLSEQIDLLEKRLQESMGERAEYGLLSSVPGIGRILATIILLETGPIDRFAAVGNFASYARCVDSQHMSNGKKKGEGNTKNGNKYLAWAFVEAAYYAQRFCAEAKRFYERKKARTNTAVATKALAHKLARACYHMLKENKPFDVTRCFA

SEQ ID NO: 210553 - protein, 350 aa, unidentified
MDQVEIVLGVDTHLDVHVGVVIDAVGRVKGTMSIETTTAGYERLLTWARSLGRLSRAGIEGTGSYGADLTRFLEASGVAIVEINRPNRSRRRTRGKSDPTDAESAARAVLADDATGVPKAKSGMAEALRTLSVARRSAVKAKTQAVNQLRALLVSAPSFIRDALLKVEPEHCVAACAALPDDEEKNPVLDSLKTTLRLLARRWNALHDELRELDKQLTRLTKLAAPRLLGRFGVGPQTAATLLVTAGDNPTRLRNESALAALCGVSPLEASSGKTSRHRLNRGGQRQANNALWTIAMVRMRSDARTRDYVVRRTKEGLSKKEIHRCLKRYIVRELYPLILADLADSAGST

SEQ ID NO: 210554 - protein, 348 aa, unidentified
MDHYAGIDVSLEYSSVCVVDASGKIVREGKIASEPEALVAWFASLGFELTRVGLEAGPLSQWLYAAMRQAGLAVELLETRHVHKALETMPVKTDRNDARGIAQLMRLGWFRPVHCKSLVAQETRAMLTARKLVQSKLHDIENGLRGILRGFGLKVGKTTERSFAGRIRALVAGHPNLEALAEALLSVHAVLLREFNAFEKRVRSLARSHAKTRLLMTTPAVGPIVALTYASAVDDPARFKSSKAAGAHFGLTPKKYQSGETDITGRISKIGDAAVREALYQAAHVMLTKPVKGCSELKSWAMRIARRAGMRKAKVALARKLAVILHRMLADHEPFNPTAGAKTVTAAA

SEQ ID NO: 210555 - protein, 367 aa, unidentified
MSKAETGRLCVGVDLHKTQFTICALNEDGEYLLEKQYPTKEEGYSEFAREMHRFEEQGCSIELAVETTGNARFFKNRMESEFFAVKVVNTNRFKVITMSTKKTDANDAATLAYYLMKDMLPEAHLCSQTSEEIRRLLKTRSVLVQSMVKIKNQIHGMMLGYGIETKAAQLQSKRKRQELINDLEDHNFSAYTAPSLKVMLKILDDLSAEIKGIEKLLEEMVASNEDVALLMTVPGIGINTATVIAAYTAELERFEGNYKKFASYVGIIPSVHNSNETTHYGRITKHGPQELRTAFVQAALGMIRLTNVSSEWRIIKDYQRRKGDKGSGRAIIALARKITRIVFVMLSKREGFKPELMRCEQEIQQTA

SEQ ID NO: 210556 - protein, 351 aa, unidentified
MTEATRFTVGMDLGDRFSRVCVLDSGGAVVEESRVQTTRDGLREAFARRPAALVVIEVGGHSPWVDRELRAMGHEVIVANARALPTIYASDRKNDRNDARRLAELARVDRKLLSPIQHRSEQAQVDLAVVRARDVLVRTRTQLMNSMRGVVKATGGRLGRCSSAAFVKKCEEQVPPALRAALTPMLRALDAVGEQIREYDRRIVVLASERYPATQVVGQPSGVGPVTSLAYVLTLDDPRRFAKSRQVAAWLGLVPRQDQSGAQDRQLPITKAGDRFLRRLLVTSANYILGPFGPDTALRRFGLKLCERGGSRAKKRATVAVARKLAALMHRLWVTGEIYEPLRGVPTAATA

SEQ ID NO: 210557 - protein, 409 aa, unidentified
MSTYLLRNVSKVQPQSEAATSADTGSQVLDPPVSSATGGALFVGLDVHTDSIAVSLAPSSSAEVRRYGLIGGAHDDVLRLAKKLQAAHPQTPLRFCYEAGPHGYPLCRFLRAHGYDCILVAPSKVPRRPGDRIKTNRRDADQLARLYRAGELTPIYVPAPPDEAVRDLIRARYQVQKQQHRARQQLKMFLLRHNLRYAGTTSWTPKHLRYLAAVKLPFPEQQFVFQEMLNVITEATERLARYDAQIPRVIAGWRWEPVVKALMSLRGLALLNAATLVAELGDLHRFATARQLMGYLGLVPSEDSTGDERQQGGITKMGNGIARRALIEAAWNYRQPARVSRELLLRQEGLAKEITDLSWRAQTRLHHRFKHLTTVRHKLSPVAAAALGRELSGFVWAIGQSVAPHPPKP

SEQ ID NO: 210558 - protein, 446 aa, unidentified
MKRVGVFDETRRFVAGIDLAGAADHYVCGPRKDDGSHDVEHFGTTTPELQRMLTWLKERNVESVAMESTSVFWVPVWDILESGGIEVRLVDTREVRMVPGRKSDIKDCQWLQRLHSCGLLHGCFRPPEKYNAIRSVIRERANVLSTRTQAIQGIQKSCDQMNIRIHHAVSDIDGMTGMRMLEAIVKGERDPRKLAELRDRRCKKTEEQIANELTGNWREEHLFTLKQAYLHLVFLNDMLESFDDKIKEMFAALADNSPKPNPPTSPKKKQKTDSKALYDLAKIAGFDMTSIDGISFGTASGILSELGNDLSMFPTENHFVSYIGLAPPLAKSAGKNIKTRKKHRNTHPVGQMLKNAASTLYRSKSALGALYRCVRSRSCTSFAVMATARQMAKYIYRGMKYGSVYVDIGAKQYEELHRNRTVKSMKSKIQKLSIKAEELGFLQLAS

SEQ ID NO: 210559 - protein, 391 aa, unidentified
MSMYFIGIDISKYKHDCCIISAADQKVVSKVTIKNNKAGFNELLTIIHSLANPADIRIGFESTAHYALNLELFLENSLLTFMEVNPVLISEYKKSKTLRRTKTDSVDCESIARWLMTVEYKPHSKGFYHAYSLKSLTRLRDKLIRQRSFYLVKITNVLDHTFPEFKPFFNERLSKTALYLLENYGSAEKMARMNSASYEKLRSLSRGKFSPQQFLRLKELAANTVGVNNSIFDVELNSLLSLYKSLVKEIDIIKKEINQLIEEVHPHYMSVPGIGPLSAAVIYSEYGDISNFTNPGQMLAFAGIEPGINESGTESHGGKMVKRGSSQLRYTLINCCLPLIRFDMTFATYYAKKRGEGKPHRVAITHVAKKLIRVIYALESQDIDFNAQELR

SEQ ID NO: 210560 - protein, 318 aa, unidentified
MEPSRQQQVVGLDVSKAWLDGYAPATGRRFRVSNDPAGIEDLLRSAAGRGDCLMVMEASGGYERTAHRALVAQGVPAAIVNPKRVRDFARGMGLEAKTDRVDAKVIARYGEVMRPAATPLPDPARLELREILACRRQLVEEIATRKQQLEQLTSPAVRAQVEKTLAFLHGEAKALLALWRARIAADTALAADFALLTSMPGCGPILAATLLAEMPELGSLDRRKVAALAGLAPTARDSGLREHRRVIKGGRGQVRNALYMAVLASLKTDKSPLKARYAQLTAKGKPPKLALAALMRKMLVTLNAMLKAKISWQDPRHT

SEQ ID NO: 210561 - protein, 398 aa, unidentified
MIYVGVDIGKDRHAAAAVSEAGESAMPPFYFTQDAGGFAALFGALEKLGGPGAAAVGMEATGHYWKVLRHALAKRGYRADVINPLITSREASADVRGRKSDKLDAVAVANVMRKGGHSPAPAAGAADTLKTLARHRRALVARRSDAKNRLAAALDVAFPEAAETLGGLSGAAAMAAVRAFPSARLAARADIRAVTSVFKKASGGRLGREDAKRFREAARHSLSLGMDTGGEEFVIPQTADEIRALDGQIDGVERRMQEEPRPELAARLMSIKGAGRIQPLAIAAEIGDPARFAGAGMAGKVLAYAGCDPRVRGSGKWKGKTKMSKRGSPTLRNALYLTATTVRMHTPYFNEIYKKHTAKGKHHNVALSHVIRKIVDVMCGMYKTNTDFVSPETEVKPC

SEQ ID NO: 210562 - protein, 392 aa, unidentified
MEYRLYIGVDVSKESFTVCIKNPNGKTVFQGSFPQSLEGFQDFLNTVNNLSTEPVIVGMESTSIYYLNLFSFLLENGINTVIINPSVIKNFSKLGIRDAKSDRKDAATIAEYLLYAKPELSDKEKLSDLKLLSREKEKLSKEISHLKDEILRCLFNLFPELERNFNVFSKGMLNFLLKFPSARKIRRSKRKTVEYEFNKAFEGRGKKPSFTANDIIELANRSIGIDSVALEEILVTKINMLLTIEEEIDKFDKLISERIEEIQIDKIDIITSIPGIGKSLATSFICEVPEVEMFKDGKSLVAFVGVDPVVRQSGQYIGKHGISKKGNRHLRRIIYLMAINVIRFEGRFKDFYLRLRARGKSYMEAVIAVANKLLRTIYAMLIHRTYYSPNYS

SEQ ID NO: 210563 - protein, 413 aa, unidentified
MALKIVYPICCGIGVHKSFVVAVIAHTNDEGITEYIRRRFSTFTNNLKEFAQWLEYHPCFDVCMESTGKYWIPVYNILEASCNICLAHPKYVKAIRGKKTDKKDAQWIADLYKHALVSGSFIPPLKIRQLRDLFRYQMKLTQLQTSEKNRYQNVLTWSNLQIASVVSDVFGKSAQSMITSILANPEEPLVFETFLSRAGRPMKASIEELTLATDCDITTEQANKLRVIKAHFDALTFCKNSLEQLIQELGQEYEAQQKLVQTVPGFKNPMTALRILSEIGVDMNQFPTVGKLCSWAGVVPANNESAGKKFSTRISKGGQYLKPLLAQVANAIVRSEKNPEIRNKYLQLKKRRGHKKAIMAICHRLLVAIYHVLKKNKAYNPELYNQVEYVTPNKTITLQEAARYAQSHGFKIV

SEQ ID NO: 210564 - protein, 341 aa, unidentified
MEHYAGIDVSLECSSVCVLDANGKIVREAKVASEPEALISWLGSLGYELSRIGLEAGPLSQWLFAAMREAGLAVELLETRHVHKAFEAMPVKSDRNDARGIAQLMRLGWFRPVHCKSMGAQETRSQLTARKLVPSKLRDVENSLRGILRGFGLKVGKTTELQFAARIAELVAGHPHLEMIAKSLLAVHAVLRNEFKVFEKQVRKMARSDTRTRLLMSVPAVGPIVALTYASAIDDPARFKSSKQVGAHFGLTPKKYQSGETDYTGRISKIGDSSVRTALYEAAHIMLTKPIKGCSQLKSWAMRIARRAGMSKAKVALARKLAVIMHRMLVDGKPFNAAAAA

SEQ ID NO: 210565 - protein, 313 aa, unidentified
MTEITRIAIDTSKSVFTLHGVDAAGRAVLRRNLRRRELLPFFEKLAPIEVALEACGGSHHWGRALTALGHRVRLLPPQYVKPFVKRSKNDRNDAGAISVAAAQPSIGSVPVKSAEQQAAAMLLSVRELLVRQRTQLVNAMRGHAAEMGVVAPLGAKGLAELRTEIAAADDAAVPVAAKQALALLGQEAERIEMRLRAIDTTLMQQHKANPLSRRLAAIPGIGPIAALSLALRVDARQFKSARHFAAWLGLVPRECSTAGKQRLGGISRAGDERLRQLLVLGATAVIQHAKPRVRPRAKDQPVGQLPHNGCSIC

SEQ ID NO: 210566 - protein, 346 aa, unidentified
MLYAGLDLSRQRLDVHVLDEEGRTVDVLAVHPDADALRTLANRVLCHGQEVSAAIESMTGSRFVHDTLERFGWDVMIADAVKAKGVAPLAAKTDKIDAHVLAELARRDLVPEIWLPTPGVRADRERARFRLHLVHHRSALKCRIHATLMTFGHSVPVADLFGTSGRRLLAGFELPEPWATTLATSLAMVDELDERIDECGRELIRLGADHPYIPLLLTVPGVGPLLAYTIASEIGDIHRFASPKKLTGYTGLCPLVRQSGNRDFRGPLAKNGPKYLRWALVEAATHAARDPHYRERYERNKRRLGRQRGAKVARIDIARQLAEGIWHVLTKNEPFAPASPAILLVA

SEQ ID NO: 210567 - protein, 326 aa, unidentified
MPSNGERFNRVIAFEVSKADLVVYCAPQDVSSTIPNTKSAVRRYLKKQTRTKPGPEVSDLLVVCEATGGYERFVLEAAAELGLACHRAHGSRVRAYARYRGTHAKSDAIDARLLADYGLHGENLKLYQPPSPAQDRLRALLGRRTELRRAMEAEQCRLDHALDKDIAHSIKALIAVLQRLLAGIEAKIVLLMKEDADLAEKARLLQGVKGIGPITAATLLGYVPELGSLSRGAAAALLGVAPFDRDSGKIKGKRHIFAGRGEARSCLYMAAISAMRYNPKFKEFATRLKQRGKPFKLVAAATMRKLATVVNAMLRTAAPKIAQTLA

SEQ ID NO: 210568 - protein, 354 aa, unidentified
MKRTTKYVAFDVHQATTVASVREESGRVIARSVLPTDSGALTEFVRGMRGARHVTFEEGTQAQWLYELLTPLVDRVIVCDRRGAPRQGNKGDQVDADHLSELLRRGALRAVYHGSADRATLKELTRTYRNLVEDATRVMLRLKALFRARGIATAGTAVYHPRSRARWLAQLLEGGARFRAEALYAELDVLRQLRPQAKAGMVTEARRDPAWRVLRTIPFLGPVRVALLLATMQTPWRFRTKRHLWAYAGLAVVTRSSADYTLRAGAPVRRRRAPMTRGLNRNHNRVLKDVFKGAATAATARPGPLQDFYHRVLAGGTREELARLTLTRKLAALTLRLWKKGERYDSTKLTTPAR

SEQ ID NO: 210569 - protein, 389 aa, unidentified
MEARTVNNPRPAAPHDDAVRCVLAIELSKKSWIVAVNTPLSEKISRHTLGACDWKELLKLCERIRTRIARELRKDVELVSCYEAGYDGFWLHRLLEAHGIRNYVIDPASLQVDRRARRAKTDRVDVERLLRSLMAYLRGEPKVWSVVCVPSVAEEDDRRLHRERGRLINERIQHVNRIKGLLAIHGIYDYPALRHDRMQQLERLRTADGRTLSPRLKAEILRELQRLELVIGMIKTIEAERDAIASAKIETEHSSAKRIQDLAKIKCIGPEFATTLVGEVFYRSFDNRKQLASYVGLTPAHFQSGETCRDQGISKAGNAKARRVMIELAWLWLRHQPASPLSVWFHDRVGKLKGRIRRITIVAVARKLLIALWRYLETGLAPEGAILKV

SEQ ID NO: 210570 - protein, 328 aa, unidentified
MKDFKTFVGIDVSKDTLAFSIYDGKEHIVKEIKYTKAVITKELIKPFKDKKDLVLFVMEATGIYHNKLANLLYKEGLAVSVVNPFAIKSYAKSRLKRVKTDKSDSKLISEFAYIFSRDLTLYKPKDKEQKEIDDILKSIDDINLINTTLTNQIKALKEQDVYSKDIVKLKEELLKKNNQIKERLKKLLDKKLKESFTKEYKLLKAIPGVGLMVSGSIISIFNSFKEFDSAKRACSFIGIAPAPYESGSSVKRRGSISKRGNPLIRKILYMATLSAIKHNKTVKEFYERLLQKGKTKMVALIAAMNKLLRIIFAVVKHKREFCENYVRA

SEQ ID NO: 210571 - protein, 341 aa, unidentified
MSVMIGIDPHKGSHAAVAVDEHEEAVAEVQVRATRRQTTELLGWADRFPTRSWAIESANGHGYLLAQQLIAAGEHVVDVPAALAARVRVLDSTRSQKNDPNDARSVAIVALRQPGLRVVSVEDHVAVLRMLAKRHKQLAGLKTQAASRLHAVLAVLIPGGLGKEMVPKQASQLLGRVRPATMVEEERKRIAHQLLVEVRRLEKELKASKIRLKVAVEAADTTVTNIYGVGPVVAGLLIGYTGDVSRFPTKHHYATYNGTAPIEASSGSRKRHRLNPRGNRMLNHALHLIAITQLRYPDTAGRVFYERKLAEGKTKKEAIRALKRRLSDVVYRHLVADQQNS

SEQ ID NO: 210572 - protein, 342 aa, unidentified
MDRLSPVTRIRKVGFTMENELHFIGIDVAKAKLDVDILRPDGRHRCKKFDNTLSGHEALVRWLRGHDVNRAHVCMESTSTYMEDAAAHLSDAGYTVSVINPALSKAFAQSEGLRSKTDKVDARMLAHFCREKRPPAWEAPHPTERALKALVLRHQALTEMQTQEKNRRETAPEVQLTSIDILLGCLSAELARIEKQIKDLTDNDPDMKQRRKLLNSIPGIGEKTAAVLLAYTGLKLKFGTARQFAAYAGLTPVQPESGSSVMRASRMSKAGPVHLRKALYMPALSALYHTAWGKAFRKRLEGNGKRAKVIIGAMMRKLAQVAYGVLKSGKAFDASQHELLIA

SEQ ID NO: 210573 - protein, 338 aa, unidentified
MPLYSGIDLHANNSVVVLLNEQDQVIYQRRLANHLPEILEALAPYQADVSGVVVESTYNWYWLVDGLMEAGYRVHLANPAAMQQYSGLKYTNDHSDARWLAHLLRLGVLPEGYIYPKAERAVRDLLRKRAHLVRQHTAQVLSVHNLMVRNTGVRFGAKRIEELTPSELVSMLSNPEQVLAVTSSLAVLHCLGQQITTLEKAVQKRLKHTPAYAQLQTVDGIGTILAQTIVLETGDVGRFPTVGNYASYCRCVGSTKISNGKRKGQGNVKNGHPYLEWAYMEAAQFAIRFSPTVQRFYQRKQAKSHLMIARKAVAHKLARACYYIMRDLIPFDVHKAFG

SEQ ID NO: 210574 - protein, 371 aa, unidentified
MSKSIICGMDMHDNNLVCRVAMEKAEPVTKRHKNTENGRCQLLMNLKREAGLQGCDRIVVAYEASTHGFCMYDGCRDSGIECFILAPTKMRKSKKDRKHKDDDRDAQLILETLRGHVLAGNELPSIWIPDDATRVDRETVRARLDLGVKLTEVKTQVQTLLKGRRIRKPETAGKSWTKAFRMWLKTQCMEDNPWPALATLLRQIAVLESEIDILNKEIEKLSEKPRYKEAARALVEDIVGVGLLTAMVFLTEMGDLSRFSNRQKIGAFLGLVPSSNESGENNDRKGHITREGSARLRKVLCQASWSRVLNDPVESKVYNGIVRRNPKHKKVAVVAAMRRLGIRMWHVGLAAQQMACVFPACVTDTVKKIPA

SEQ ID NO: 210575 - protein, 430 aa, unidentified
MKFNREITTNQRIDRITTKTAVVGIDIAKDVHAARITDFRKRTLTPRHLSFSNDIHGFEKLMAWIQKTQSQHGLASVIVGLEPTGHYWFNLANWLLERGIPVVLVNPVLTHRSKENRDNSPSKNDPKDALIIADLVNDGCYTEYRPQAEELERLKTLMTNREFWADHLVSVTNYITRWIDLYFPEFRRVFKDWKETERAIATLRLFPLPCDLKGRTAEEIVEAWRSQGMKRPGGARGKAIAAELLRAAERSIGYTRAPAEARQAIRDLIEEYERVKQRVEGLKEEIRGLVDLIPMARQLRSIPGLGPLIIAALLAFGGDLGLYRHGRQLLRKAGLNLAERKSGKYQGQIKISKRGDSLLRKYLYLGTCILVKDNAEFKQMHAKNLGKGMKKMASIMKCIGKLARIVVGMARHGESYRPEKWRQPPSNQAA

SEQ ID NO: 210576 - protein, 314 aa, unidentified
MRIVGIDVSKDKIDAAIVAAAARKSFGTSEQDQHQMLAWLDEHAVEKAVMEATGGYERRWAKLLQESGIEVQIVDPRRVRHYAQAAGRQAKNDRLDAEVIALFGETFGECPGQVRDEQGSEFEQLVSGRARLKTVVLQLGNWTEHEPPAAIAEAYQAVAAVLEQQVEQLDRMIAQRIGEIDRFAERAAIIESVPGLGPGSAAGLIAWLPELGLVDNKAIAALVGVAPYDDDSGKHRGPRSIRGGRAKIRQLLYLPTVGAATRHNPVIKAYYQRLIDNGKNPKVALVACMRKLIVILNTMIARGEKWDPTKHTTP

SEQ ID NO: 210577 - protein, 342 aa, unidentified
MQQSIYVGLDLGSSRCHQTVINSDGSLQMSRSIPTSEQHLRSAFTALGDHVRVHLEAGELSTWVYSIIKPMVAEVVVSHSRTLAWIGKDSQKDDSIDARKLAELLRLNRVHPVYCETADDRRLFKQLVTHHEDLSREQARLKSKIKARLRTLGIIRFDARLFSKSGNALLLGELKEPSVRQMLAQSFAVLNQLLEAETQAKQAMTAASKQFPEVSLLQSAPGVGIITACRFVAYVQTPHRFSNKRKLWRFCRLGITRRESNGKRLAHPRLDSAGVGSLKDVSRKVFEAARRTKKDNSFKRAFEYALLNTKNAVHARLSTQRKILSTLRAMWLSMQPYQGTGR

SEQ ID NO: 210578 - protein, 394 aa, unidentified
MLRRGLPGLAGQSLEQGGRVVGQHSRAFVGIDTSKLRNAVAVAEEGRDGDVRYLGEIDTAEAATRKLVVKLAAKYRQLTFCYEAGPTGYGLHRLIGKLGHDCIVAAPSLIPKKPGDRVKTNRRDAVGLAKLLRSGELTAVWVPDERHEAMRDLSRAREAARKDLKGKRQQVSSFMLRLGRHYPGKKTWGPAHMKWLMLQKLEHREQRIVLEELLGAVRQESERVERLEQAIRDAVPEWSLAEVVTAVQAMRGIDLVAAVTVLAEIGDLSRFQTPRELMAYLGLVPSESSTGDTVNRGGITKAGNGRARRILVEAAWSYRYPPRVSREKQMKVAAAPRAVREIAWKAQMRLCGRFRSLTRKGKRPTVVATAIARELAAFIWAINREVVRSHAMAN

SEQ ID NO: 210579 - protein, 323 aa, unidentified
MNKDIKYFGIDISHLVFDVTDSDGNYYQFKNNGSGFKKLVKLMDNDSHCVMEATGYYHYQLAYHLLEAGVKVSVENPLSIKRFIQMKLSKIKTDKSDSKLICEYAQQVEVKLWKGNSKDEIECLQITRALSIYTKQSTMLKNKLHGEAVLGEPSKAVVRSIKRSLKQVEKEINTLEDRLLELVKQVHQDLLTRLKTIPGIGPKTAIMLVVLTGGFDRFTSAAELCSYAGLTPVIRQSGSSVKGRPRISKIGNQKLRNLLFMCSFNACKCNKACRDLYERIVAKGKSKKLALIAVCNKLLKQAFAIAKSGLIYDDNYKSTLVRN

SEQ ID NO: 210580 - protein, 486 aa, unidentified
MVTPNEKPDKPTNPDKPTKPNQSRQRSLPVPVPVSAAALNVINPDAAGIDVHSDMHMVCVPADRDANPVRQFGANTADLQEIAAWLKKCRVRTIALESTGVYWIPLFEFLESEGFEVNLVEPGQLSRCGARPKTDVLDAQWIQRLHSYGLLRASFRPPDSVLALRAYWRQRQMQVRYAAGHVQHMQKAMEQMNVKLTEVVSDITGLTGMAIIGAILEGQRDPIQLARLRHERCHHSEEQIALALEGTWRPEHLFELRQAHELYQFHHRQITECDQQVQAELAKFPNRAGAKTHTVKPRKRGRKSNDVRFEATGPLFQALGVDLTLIEGIDVGTALVILAEIGVDVSRFPTEKHFASWLRLCPPQDESNKTKKRRGHRKGTNPVTLALRMCARSLGKTMTPLGLFYRRIRSRIGGLGAVKATAHKLACLVYRMLKYGKEYVTQSMEEYEAKMEANVLKALKRKAAAMGFELSPLPPQKVSQEAVAMA

SEQ ID NO: 210581 - protein, 325 aa, unidentified
MFYLGIDVSKAKLDCALRNADSGKVKTKVIPNTAEGFRKLLDWLKKNDAPSPHIIMEPTGVYHELAAFFFVDAGLTISLVNPVQLRQYAGGINVKTKTDKMDSQVLARFGAEQKPAPWEPPSAAARTLKALLARRDAVADDLLREKNRQEKLEATETPQLVTESVEGSIKFIEAELKRLQKCIDDVIDNDPDMRGKKELLNSIPGVGERVSNHMTCLLAGRDFKSGEQLAAYLGLIPVSWESGTSVRGQPRMSKAGPAHLRKLLYMPAIVAVKRNPHIKALYERLLGRGKSKMSAIGAAMRKLAHLCFGVVKTGRAYDEHFAIQP

SEQ ID NO: 210582 - protein, 437 aa, unidentified
MTSPCQFYDYKFQEVILLSFKIFRKNCCGLDVHKTWIYACIGITDANGRTDYKQARFSSFSKGLKELCDWLAKYNCSEVCMESTGKYWIPVFNILEKADNSIILAHPKYTKPQKGTKTDRKDAKWICDLFMCDMIKPSFIPPADIRHLRDLVRYRFKLTCMITGEKNRAQNCLTISNLKLDDVFSDVFGKSSRSITEHMLTHPGELFDVTPFVDGRCKTPVEEIQAAVDGAISPEQAIKLRQCLDHIDELDKHLEEIEREILRLSDKYQAALDLIRTVPGFDKNPITAILILSEIGGDMSVFPTAKHLVSWAGCCPRNDQSNKKIKSTRISRAGTYFKPILVQVANALLRSKKHPEITNRYKRIKAHRGHKKAIIAICRMLLTAIWHILSDLKPYTAEGFLESRPVNESKVLTTSQALNLLKQRGYIIKDDVIPAMN

SEQ ID NO: 210583 - protein, 338 aa, unidentified
MKVYVGMDLHATNTYVGMVDEENTVLHKQRFRNELPLILAALDPFKKDVQGVVVESTFNWYWLVDGLMAEGYRVHLANVSAIKQYEGLKQIDDKRSAFWLANLLRLGILPTGYIYPKEERPTRDLLRKRLQLVRHRTSHILSVKNILARNLGLRMKSEDIKKITDPEVKRFFPDREMQTMVLASVGLIRHLEDQISTIENMITKKLKVRKEFAKLMTVPGIGKILTLTIMLEVGDIRRFPTVGDYSSYCRCVKSIRTSAGKIIGYGNRKNGNKYLSWAYVEAAHAARRFHETVRSFYEKKMAKTNRIVAIKALSHKLTRASYYVLRDQVDYDPARLFR

SEQ ID NO: 210584 - protein, 346 aa, unidentified
MNSNDPRYKLYLGVDTHLELHVATLINELGQVVKSKSFSVDLAGYRELLAWCKSYGFLQKAGIEGTGSYGAELTKFLNKNGIDVYEVMRPNRMERRLKGKTDVIDSENAARSVLSGEAAVIPKSHAGPVESLRSLLMTRNSAVKARTQAMNQIRALLVSGPDELKQSLYQPKPSACATACLARCSNSSEPLMISLVLLAQRWNFLNDQVKSLDNALKKLTLNTAQSLVSRFGVGTNVAATLLVAAGDNANRLKKESSFAALCGVNPIPASSGKTTRHRLNRGGSRSANNALWTVAMVRMRSDPRTKDYVARRTAEGLSTKEITRILKRYIARELFPLILKDLASLS

SEQ ID NO: 210585 - protein, 350 aa, unidentified
MTEITTIGVDIAKRIFQFHGVDKNGKTVLKKKLMRDQVLTFIANLPKCLVGMEACGGANYWAREISKLGHEVKLMAPQFVKPYVKTNKNDQADAEAICEAVSRPNMRFVPIKSIEQQDILSIHRVRARLVKNRTALANEIRGLLHEFGMIIPQGINKITSKLTEVLDSGKLSPISQQTFSDLKEEFIENDKKIKCLESRLKIMASELDKYQQIIAIPGIGLITSTALIASIGNGNCFENGRQLSAWLGLVPRQASSGGKEKLLGISKRGDIYLRTLLIQGARAVLNTKLRFTTESQKAKKDYSKFTQWMFNLHDRSGHNKTIVAVANKLARVVFAVLSSGNDYIENKVCS

SEQ ID NO: 210586 - protein, 317 aa, unidentified
MNKSTIFVGIDISKDVFDIYNSEGGHFQYANNVSGFKSFVKVLSQSHWCVMEATACYHYRLALYLFDNNIQVSVMNPLVIKRFIQMKLNQVKTDKSDAKMICLYGQQQELQLWRPDPVYVEECKMLHTVTQLYFKQTTAIKNKLHALISKGHIKGKMIRSLKRQLKQIQKEIKLLETEMESLIKDHESELFTRITSIPGIGKKTAMLLIITTNSFKDFESSKQVASYLGLAPNERTSGSSVRGRTRISKTGNPMVRNHLFLCSFTACIHNPQCKALYERIVAKGKSKKLALIAVCNKLIKQAYGISKSGLPYDKNYV

SEQ ID NO: 210587 - protein, 346 aa, unidentified
MPIVGGLDIHRKQITFDYLDTVSGQVQRGQITPADREHLRAWLARFAGVVDVAFAVEGCTGWRYVAEELAAAGVAAHLAEPADTAFARGRKRHAKTDKTDCRHLRMLLAEGRLPECWIPPGHILEARALLELYHDLRAEHTAWVQRIHAVLFHHGAPALGAGTLRTAQGVAALRAAAAGWLSPAGQLQVATALEVLEALETRLHELRHQLTAAARQLTGAKVLAARLYGVGPVTGLAITCWLAGAGRFSSSRQAVRFAGLDVTVWSSDRKGPPGRLSRQGPPVLRWAVYEAGKTHARASAPDHRYYAQVKDRCNGKRAALSEARKILRQAHHILAELGDDALAPAA

SEQ ID NO: 210588 - protein, 417 aa, unidentified
MEELEFIVGIDWGSESHQVCLMDRQGSVLGERAFRHGGAGLAELANWILDATGAQPHAVGMAIEIPHGPVVETMMERGFMVHSLNPKQLDRFRDRFSPAGAKDDRRDARTLGDALRTDHHAFRHLDPAAPEIIELREWTRIANDLTGDRTRLVNRARQQLWRYYPQLLKIENDLTKTWIRELWGLAPTPDKARRIRVKTIASLLKRHRVRRINAETVLERLHEPAVAVAPGTTEAAVAHVEVVFAQLTVVGQQLARAYHEMDRLVTALSQTEASPEHQPEITAQRDVEILNSLPGVGRIVLATLLAEAHDPLLRRDYQALRCLSGVAPVTRRSGKSLIVVRRLAAHNRLQDAVYHWASIAVQHDAVSKTKYAALRSRGHGHARALRSVADRLLCVACAMLENQTMFNPDSSRHSRAA

SEQ ID NO: 210589 - protein, 409 aa, unidentified
MTHLYVGIDSSKRANTLAGMDDNSKWLIHPTDYNNNKTGAEKLIVKLIAICEKFHIENLWIGTEATGVYDWHLMETLNNDSQLTKYNLKLYRFNPLHINRFKKSLPRKGKTDRLDAKIIAKKLKAGELPHPYQGDEAYLPFRLLTRHRFHIQKLIAREKSYFLTRLFLKFSSYENAKAFSNIFGATSSAFLTEFMSLSEIEGASMEHLLQFIIDKGRNRFKEPEKTVEKLRYAVRESYRIRPELNQSLHLVLASSLQTIRGLKDSLKPIDEAIEKELAGFQQTLSTIPGFGLVITAGIIAEIGDISKFKDHYKLASKAGLVWHQFQSGGFKAEETRLSKEGNKYLRFYLVEAADHLRKRTIYYKKFYQKKYNEVTKHKHKRALVLTARKIVKLVFAMLSNGTIYKEITA

SEQ ID NO: 210590 - protein, 391 aa, unidentified
MTILVGIDVAKDKHDCFIMNSEGEVLAKSFTILNNKEGFDFLYKKIQSVSSSDKIKVGLEATGHYSYNIIGFLLNKDLATFILNPLHTNLYRKSLSLRKTKTDKIDSKTIAMMLLSDVSLKSYSDISYHNEDLKSLTRYRFSKVEERAKLKTSLSRLAQILFPELEKLVPTLHMTSIYQLLEEFPSASAIASAHLTRLTKLLSKASKGHYNRETAIKIREAAKNSIGSNMPAKSLELKHTIKLIRALTIDIGEIEAEISKMMDKIASPITTIPGIGNNMGAMIISEIGDFSRFSSPDKILAYAGYSPSTYQSGKLDNCYAHMEKRGSHYLRYALFQATQRVCHLDSTFSAYLAKKRAEGKHYYVAISHAVKKLVRVIFHLEKTKQAFLKAS

SEQ ID NO: 210591 - protein, 366 aa, unidentified
MESYVGLDVHSKCSVFVIEAADGRVVARGDIPTTPAGFRQLREQPALAAETPVALETGTVAFYAARELARVGLRPVVIDAHEVRVKAHRPRQKSDRRDAFELCEGLRRGQYRAIVHVPPARIGALRETLSRRRHFVAVRVAEVNAVKRLLRATGLGHLSKSLGTDAAWAKLLAALATEPALRTYVVQHQALWRCAQEQIAALETTLATQPTTITTVAARLQTVPGVGPIVSLTAVAVFSDVHRFPSAKHAASYAGLVPSTDQSGDRDTHGHITKRGSGALRTMLCEAAHHAQRPSHPLHPYFARLCAQRGYKMAVVAVAHRLCRILFALLRDGAEFDVAKLAIEEGPFRRTTVQRYRLKRGAAAHA

SEQ ID NO: 210592 - protein, 344 aa, unidentified
MMYIGMDVHQVSTTFCLFDPSAADRRRYRTLTRPTTVEAIRAVLEPYDGCCKVAFEVGTQAQWVAKIVRPLATDVEVANPSRIPWLFRDGRKNDRLDARKLVTLLYLDQLPTVHLPSEAVSAWRALINHRRTLVKRRTMIKNQIRSIVRTFGCRCPHKSCWTRVGVAWLRSQTFDEARHFMVATMLDELAFVGSQLVKMEGQLDGIAETRPNVALLRTVPGVGPRTAEAIVAFTDIVGRFSNRKQFASYFGVTPTEDSSGLIQRHGPISKRGPSVVRWLLVESSHRVIARCPALRAFFDRVHRGQKNRYKKAIVATGRKVLTICYGMMRDQTAFDARKVVRSAA

SEQ ID NO: 210593 - protein, 333 aa, unidentified
MGKKRFVGIDISKKTLDVVIYDSKKKHTDCNTYRRVTNDEEGYKILLDWFKSERIKLSELVVGLENTGAYGYDLCLFLESKQVDYCSFNPLTLKRSMGLVRGKNDKVDAERIAYFTWLHRDELKYTKLAGSTILRLRELSTERKRFVKQRAEYEGLLTERKRPGMTSTSLRAEKMRRILEEEIDDVEKEMEEVIKQDPQIHQNFQLLMSIKGIGKVNAISTIIHTNNFESFQTARQYACYLGIAPFEHSSGTSIKGKPKVSCVGAKQLKADLSQAAMSAVQWDREIRMYYVRKINEGKTYGVVLNAIKFKLVCRMFAVIRRGTPYVDLMAYKN

SEQ ID NO: 210594 - protein, 350 aa, unidentified
MKIIGCDFHPSYQQIVMWDKATGEMLERALSHERKEEVRAFYAGLQGPVRVGIEVSGQSQWFERLLAELGHEVWIGDAAKIRASCERKQKTDRRDAELLVKLLDEERFPRIWVPTPAERDARQLLLHRHKLVRMRTQLKNQLQALALNQGVQRKWKLWSETGRKQLEALPLMPWASRRRTELLVLLDQLEASIGELDGAATEQANTRAAVRRLMTHPGVGPITALAFVLTIGPAQRFRRGKQVASYLGLIPTEHSSGGRGQRLGHISKQGNPFLRGLLVEAAQSAVRHEPEMRREYQRLAQRKCRALAKVAMARKLAVRLYWMLRKEWDYEQLTKFGSHAGQPGNRHGVK

SEQ ID NO: 210595 - protein, 448 aa, unidentified
MAVIEGSAAVAVGIDAAVVANHHIVVRRPEAGRPGTVIDDFVVSPTLVGMDRLTKRLASWPGAVAVAEPTSMTWLPLSIALGDAGVELSLVGNRHSARLRSALAGKNKSDPIDAAVLSRAGEFFELCPARIPAVAELALRRAAQRRGKTITDANRCLRRVISQARWAFPDLWNAFAGSRPTALGVLGRWPHLDALARARVSSITEVVAAHTRGVTGVEERAQQIRATARAWAEFWEGHLDLDALGWETAELLADLAAAEARVDRATDQTRRYWEQLWGDDPVLLSVPGMGPVLAPTVRAFLADGAHLDDAKAAQSFVGLNPSNWSSGQMESPSRAITKEGPPVLRLAFYQAANVARTHDPQLAEFYRRLMVERGHCHTKANCAVARKLVARTWATITSGTPYQLRDLDGTPVTRRQATTLAAALAVPDDVRRRTRAHSAATHRARLTR

SEQ ID NO: 210596 - protein, 369 aa, unidentified
MGEDSTVFVGLDVAKDRHAVAVAEAGRGGEVRYLGEIGADTTSVRRLVARLAKRHGRLHFCYEAGPTGYGLYRMLTAMGHGCSVIAPSLMPRKPGDRIKTNRRDAVQLARLLRAGELTEVWVPDGAHEAMRDLVRLRDAAVNDVRRKRQAISSMMLRTGRVFEGKTSWTRKHRQWLRRQRFDYPAQDLVLQDMLVALQQAEERLEQVEDKVREFVPQWSLAPVVAALQALRGIRLVAAASIMAEVGDLGRFATARQFMGYLGLVPGEHSTGDKVRRQGITKAGNTRARRTLIESAWSYRHLPRTSPRQRRAQEGLSPAIKAIALKAQSRLCGRFRKLAAKGKRLTVANTAVARELAGFVWAIGRAALAV

SEQ ID NO: 210597 - protein, 404 aa, unidentified
MATRPQVWVGIDVGKHAHHACVVDEAGKTVFSQKFGNDQAAIEALIARAGKAAERVWWAIDLTSPMALLLITVLLATDQQVTYVPGRVVASMTGGFRGEGKTDAKDARVIAQSARLREDLNQVVMPDELVVGLTQLTSYRADLMSDWVAGINRLRALLGSIFPALEAAFDYSNRTPLILVAGMCTPSEIRSAGIDGVTTYLSENGAWRPGIGKTAAAAIGAAERQSLALPGEADTAMLVKRIAAKLLDLDREIKDTDKLITTRFRAHPWAHIIESLPGMGPGLGAEFLVETGGDLVTFSSSGRLASYAGLVPVPRDSGRVSGNLHRPKRYNRRLRRVFYMAALSSLRYENGPSRRFYDRKRRERLIHIQALLALARRLVDVLWALLRDGRAFTLDAPVPTAAVA

SEQ ID NO: 210598 - protein, 361 aa, unidentified
MSIVFYGGLDVHQKSIAAFLFSPGTGESMEEEIPNDRVRFLHAVSRWRKRGELHLCYEASSAGFVIKRWLDEVGVDCEVVAPGFIPKGSGDRIKTDRRDARRLAQLYQSGMLRAVRVPDSAEETVRSLVRHRDDLTRDMTRTKNRILKFLGLRGLRYTDGHNWTEQHRKWLHHLNLEPLQAVVLQSHLSSLDQLETQRAQIDQRIAEVAQTPAYHDKVQRLMCLRGIALYSAMVLVTEIGDVHRFRGAPELMSYLGLVPREHSSGDSRHSGRITKVGNTRGRWVLSEAAWNQTRNPGTSDRLRKQRRSQPAAVAAISRKAEQRLHHKFWKIAVRKDRNTAATAVAREMAGFVWALLTLEVA

SEQ ID NO: 210599 - protein, 314 aa, unidentified
MTLHPCCIGIDISKAMLDIFESDTGRHARIANSDDAIAAACRPWSERGATVVFEATGCYDTRLRTALDRAGIPHARVNPERARHFARYAGFSAKTDRIDARMLAEMGRRGGLVPEPPIDPSREALRALHRRRDQLVADRKAERQRSADAIDDTERGSIDRHIAFLDTEVETLERAITRQLADDPNLRRLEIRLRSIPNIGPVAATTLIALMPELGTRSPKAIACLAGLAPINRDSGTHLGARSIAGGRKRVRDALYMAAVSASRSDKAFGAFYKKLRQAGKPPKLALIAVARKILTTANAIIRDDTPYRNTSTA

SEQ ID NO: 210600 - protein, 350 aa, unidentified
MEYIAFDAHKHYTLASVVRPDGQLVREERIEHARGSLREFLERCERGSPVAVETIGNWYWIVDEIEAAGCVPKLVHARKAKLMMGEINKTDRLDVRGLNRLQQNGTLPTVWIPPGALRDQRDLPRTRMVLVRQRTQLKNRIHATLAKYALHDAEVSDIFGVRGRALLRQRLALLPPHTAYASQQLLEQVESLDRQVRAFEDRIQAAFKPTPAIQLLLTMPGVGLTLAVVIALEVGEVTRFATAEKLAAYAGTTPRVHASGGKTRFGPSRPDVNRYLKWAFVEAANAICITHGRAPQRHVSRLYVRIARRKGHAKAIGAVARHLAEATFWILSKHEPYREPKASAVFVHGG

SEQ ID NO: 210601 - protein, 421 aa, unidentified
MQVLYERCAAVDIGKDVIAVAVRLPAGGPEGRATHKRTFKTFYGVLGEAARWLNSLGVTHVAMEATGIYSMPVYHALIEHGKFEQVLVCNAGHVKNVPGRKTDLADAEWLVHLLECGLLRGSFVPPAEIKAARDVIRYRTKVVQSRTAEVQRLGNVLQDAGIKIDSVASSIATKSGRAMIEALIDGERRPRVLADLAKGKMRVKIPDLTLALEGRFGDHHALMCRLHLDHIGHLDTMIARLDTQTETMMAPFGPERDLLTTIPGIGMLAAAAVLSEIGANVTEYFPDAAHLASWAGLCPGNHESAGRRHSGKRRHGNKHLQHILVEATWAAVRHDGYLKALYHRHVMKWGGYRSPTAKKKAIIVAAHAILVIIWHVLAAGKPYDELGTDFFTRRLDPERETRRLIAKLEALGHQVSLQPAA

SEQ ID NO: 210602 - protein, 343 aa, unidentified
MQTITTIGLDIAKSVFQVHGVDAAGQVIIRRQLKRRAVLAFFEKLPPCLIGIEACASSHHWSRELKALGHTVRLMPPAYVKPYVKRQKNDAADAEAICEAVTRSNMRFVPTKTVEQQSCLMLHRTRHLFIRQQTAVINSIRAHLAEFGIVAPVGRRGAEELLDVVADSNDDRLPEVARVCLAALGAQLRRLKEQILEFDRMIMAWHRSDETSRRLRYIPGVGPMLATALVASVADPKAFRSGRNFSAWIGLVPKQHSSGGKDRLGSISKQGDRYLRGLFVAGALSVIRYAKIRGTKHRPWLTALLARKPTKVAAIALANKLARMAWAMMARGERYKEPVALAA

SEQ ID NO: 210603 - protein, 520 aa, unidentified
MGSGRLPTPTCSWAASPWVSLAPGPDLEGSRTVAASTPIRISVSLDRGPQATRHGMGGCDWRTSELKHEPEEIPDAEYELVIERVAAVDVAKASGKVCVRVPGKAGRRVSRVWDVAATTAAVTELAEDLVELGVERVTVESTSDYWRIWYYLLEAAGLEVQLVNARDVKNVPGRAKTDKLDAVWLAKLTEKGLLRPSFVPPTEIRRLRDYTRLRADLTHDRSRQVQRLEKLLEDALVKLSTVATDIMGVSGRAMIEALIAGQRDAKVLAGLARGRMKTKRAALIEALSGRFDDHHAELARMLLDQIDALTAQIDTLTARIEQLLAAMPEAQPVDPRRDGPTSGHPVGVTADTLAECARLTTVERLDEIAGIGEHNAQVIIAEIGLDMSRFPTPAHLVSWAKLCPRTIQSGPVTRGGRTGKGNPYLKGVLGDAAAAAAKTSTFLGERYRRIVKRRGKLKALVAVARSILVIVWNLLNDPTARFHDLGPDYHTNRIATERRMRNHIAQLTAMGYRVTLEPAA

SEQ ID NO: 210604 - protein, 407 aa, unidentified
MGITCGIDWSESRHDVALIDEHGTVVARTRIDTGAIGFHILLALIAEHGGSVDDTPIALETDKNLLVVALAKAGFTVYPINPRAVARYRERYGQAGGKSDPGDAAVLAHILRTDRHLHRPLPAVSEEGRAVKALARQHQEAIWALHQTVSRLRSVLLEFYPQALQAFPNLKHKAALTVLAAAPTPAAGQRLTRGRVVALLRRSGRGNHPALVEQILTDLHTPALGQPPRVEEAYGHTVRGLVAIVIAMGQAVDDLETELAREFDQHPQAAILRSVPGLGPVLAARVLGEIGDDPARFDNPQGLRAYAGTAPVTIASGRLRYVKARKVRNKRFGDACHWWAYTMLTKSAGARAHYDRRRAAGDHHNAALRNLANKLLGRLWWCLVNNQPWDEHGAWPDHGHTENPTAA

SEQ ID NO: 210605 - protein, 404 aa, unidentified
MAVVCAGIDWASEEHAVCVLTDEGELLHEGTARHDEAGLLGLCELLCALRANRVAIERPDGVLVERLLAAGLRVSAMHPNQVKAARARFRACGGKSDRFDAFVLAELARTDHHRFRMLEGDGDETRALRALTRAREDLVTTRVGLANQLRAELERSWPGAGRIFADVDSPIALAFLERYPSPADARGLGERRLAAFLARNGYCGRRAVADLLARLKEAPAVVLGELEAEACRGVVLALVADLRVLVERIRLLSSEIAGAVRQHPDGALFLSLFRDPKSTVTAARLLAEIGDQRGRYPSAEALAADAGMCPVAVESGKRKVATFRWACDKRLRDAVVTLCDATRHWHPWAHGVYERARGRGCDHPHAIRVLGRAWLRVLWRMWQDGVPYNPACHGAMQAMLCAEG

SEQ ID NO: 210606 - protein, 414 aa, unidentified
MTEQIQVAAGLDLHKSFIVATILTLAGDKIINRFDRTQSGLIALKNWIVANNVEAVGCESTSDYWVRIFDLLNPICQVIVGNARDMKALSHKKTDKIDSEFIALITLKGMIHPSRIFPAEHREYRSTVRLRHKLVQKRSSIKNEIHHILDSELFRLSSVLTDIFGKSGALIMKGILNDMSVDEILSLLPASVLKKEEALLEVLETTLSEGALARLSSCLRIIKILNQEIAELSNISTNYALTNFPREYEILKSVPGIGDITAVTLLAEIGDVKDFTTGDKLASWLGIVPRVYQSADKLYTGSITKRGSRLARWILIQAAHAAVKARDNDLKTFYLGKKDVIGTGKAIVSVARKMVIIIWHLLVNDETYKDTQYHTLKSTKKVYVKVPRKTTIEEVLKLLREASVVLQEPDPEKG

SEQ ID NO: 210607 - protein, 420 aa, unidentified
MAYRIAGIDVHKKMLAVVVADVEVQGEYQFERIRYGSNPEPLRLLAAWLIEHEVEEVVMESTAQYWKPVWGALERYWKPSCQKREGAGPMSGTLHLAQARSNRGRRGRKKDFPDAERLVKRLVADELVLSFVPDAEQRLWRTVTRRKYQLTRNKVRLQNQLEALLEEAHIKLSSLVSDLLGVSARRMLKAIADGGTDPAALADKKLRATPAQLCDALGACAELQPIYRRLLKMFLEELQLIEQQIGQLDQEMAALLSQHPDCVQRLSEIPGLGVDSAQQIIAEVGATAATFPSGKHLSSWVGACPGDEESAEVSRSHRSPKGNRHMRRILNQCANAAVKSKGTIFEIVYRRLVSRLGHNQTIGAIAHRLCRLIWIILHRGVRYEERGPSVNTKSRRQRTSRMIRELRNLGYRVEPLGTPA

SEQ ID NO: 210608 - protein, 296 aa, unidentified
MNHNTIYVGMDVHKENFSLCAYTLEAEKASYHQRTEADYKEVLKYLEFLRSIYGNDANFICGYEAGCLGYTLYHQLSANNVNCVILAPTTMLEQRSKRRIKTDKRDAEIIAKCLAQHNYSSVHIPTAKDEETKEFLRMRDDHKLALKKIKQQILAFCLRHSYRYDGKSHWTAAHLKWLRSLTPEALYKEILDEYLLTYQNLSDKLERMDKRIEEIASLEEYREAVKKLCCFIGVRTHTALSVLVEVGDFKRFASAKNFASYLGLVPGENSSGENQTRLGITKAGNRHIRLPQTSSP

SEQ ID NO: 210609 - protein, 312 aa, unidentified
MDALFVGIDVSKDRLDVALRPGGECLTVERTAAGIDRLIERLRQLSIKLIAIEATGGFESIVAAGLAGAGLPVLVVNPAQVRAFAQALGKRAKTDPIDAAVIAHFVEATKPQLRPFPDATTQLLSELVTRRRQIVEMIAAESQRARHITAPRLKKSVARLQKALQKELTELETEISDHVRGSPIWAEKEDLLASVPGIGPTIARSLIADLPELGCLDRRQIAALVGLAPWTRQSGKWRGKSFIGGGRSNVRRVLFMGAMVAARYNPELKQFRDRLVDAGKPKLVAIIAVARKLLTILNAILRDKTPWQPQNA

SEQ ID NO: 210610 - protein, 355 aa, unidentified
MQKYKVSFKGQNIYVGIDVHLKTWHVTTLTESGCKYSFSQHADAKELFDRLNKKFPEAHFKSAYEAGFCGFSAHYALTEQGIENIVVHAADIPTTGKEKALKTDAVDSEKIAWALKRGELTGIYIKDKRYMDDTNLMRLRQRFIMDLSRQKNRTKHLLYTQGVTYPERFRKNSTHWSRNFMKWLREEVELLSEQKMSLILLCEQVENTRKAILKVTREIRRLSTTDRYKENYNLLITVPGLGLITSMSVLTELDNNIMRFPNERSFVAILGLIPTCHDSGDRKVSGEKINRGNKHLGPLIVESSWIAIQRDIELSAYYSKCCQSMKPHKAIIKVARKLACRAYAVLKTKVRYALP

SEQ ID NO: 210611 - protein, 324 aa, unidentified
MLNFGIDVSRDKLDCAVLDEQGQPVKRPRTFVNDAQGVLDLITWARSIAVDQLRRFVMEATAAYHEIAATRLYDAGLLVSVVNPAQVRSLARGLGMLSKTDAIDAVLLAHYGRLAAPRPWRPVRQDLAQFNAMLMRLDCVEADLRREQNRREQASVRRSAACVLLSIDQSIEFLRGQRKSLRKLIDSLIESSPTLSENVARLRTIPAVGEKTANRMAAVLGANTFVSAKEAAAFLGLVPVKVESGVSVKGRARLSKAGNPRVRASLYMAAVVAKKVNPEIKALYERLCAQGKSKMSALGACMRKLVHLCFGVLKSGKDYAPPEQ

SEQ ID NO: 210612 - protein, 349 aa, unidentified
MNSTASVIGLDIAKNVFVAVGRDMRGKVVWKKTLARDEVLPSFANLPPTAVGIEACSGSHYWARQLKALGHEAKLIAAQHTRAYVTGNKNDHNDAAAIAEARSRAATKYVAINTQAQQDLQMLHRARQALVDEKKAMICRIRSFAHEYGKIFPRGVAKFRAGLTAWLADEGNGLSMMALETLRDLVAQLDDKERRLQSYDRRVAEAAQADIGSKRLLAAPGIGKVIATAIVATVAEPRDFNNGRDFSANLGLVPREHSSGGKQRLYGITKRGDRYLRTLLIHGARSALRCADGKDDRILRWALKLSERRGPNVAAVALANKLARIAWAMLAHGRDYQPNYVAAGRRAAR

SEQ ID NO: 210613 - protein, 408 aa, unidentified
METQSVIFEQVVERGCGMDVHRDIVVATISGVNIPSETRTFTTYTNDLIRMKDWLLEHQITHIAMESTGIYWRPIFNIIDDDFEILLVNARHIKNVPGHKTDKKDSKWITKLLLSGLLKGSFIPPRNIRELRDLFRYRRKLTQQATSERNRFEKILQDANFKLSSVITDVFGKSGSRIIDAILEGEKNVDILVKMCHGRIQSKGENLREALVGNLTEHHKFMIRAIRNSIASIDKLIADIDNQIDKQTANYSGELELLQSIPGINKLSSVAILAEIGPDMSKFPNEHHLASWAGICPGNNESAGKKMSSRITNGNKYLKPILVECAWSASKVKNSFFRKKYESLIVRRGKKRALVSVGHKILVAAYFILRDLQPFKELGYEYLDTRKREKDIQRYIEKLKKLGVDISV

SEQ ID NO: 210614 - protein, 392 aa, unidentified
MGFARAQPILVIAKSIIVVVFRKEWPAADCNPRQAAGDRIEPILSSLWLPRSVIAPAPSSDPDGCRNNLVRFTRQGRRRQTNTTTAGIDTSKLKLDIAVHQRTERWQVANALPGWRALTANLAKAGVTRVGIEATGGYERGVVEHLRAAGFTVLVLQPIQVKAFGRVHLRRAKNDALDAALIAACAATLDQPRIAPDPRLADLAGYLTFLEQTEEDIARFKTRLEHIDEPRLRRIVTSDIKRLKARKAAQTRDIAKRLRAHDDLAKRLDLVLSIPGIGERTALALIIRMPELGQISREEAAALAGLAPFDDDSGKYKGQRHIAGGRGRLRHSLFAAALPAAFRWNNALIDLYGRLIAKGKAHNAALIACARKLLIYANTVVQRGTPWTEKAA

SEQ ID NO: 210615 - protein, 413 aa, unidentified
MKKHIYRTKKINAIDWIQMKEQLQGSPVVFAIDVAKEKQYALLANADSSVSELLSWNHPEQTREVLTHLENLACPLTAVMESTGTYGDALRYQFRCSGFEVNQISAKRVSDARELYDGVPSLHDAKSATVIMRLHRDGLSIPWRESDDAERELDALRREYDLHQSQYQRNKNRLEAYLSRHWPEVLPLLPLDSVTLESLLIEYGSPEQIAKNTEEAAKNMHLWSKNQLKNEKIAVVIQSAVNTLGQPCIDAERRYLQALTAEMRHSRQQQKEVKDILEATVKADTGLSKLASVIGLITTAVLLSCRLDPRNFRNARSFQKALGLNLKEKSSGRDVGRLKITKRGCSLVRRYLYFAALRLINNDPVVKAWYQKKVDARAKNKTVIALMRKLAKALWHVARGERFDATKLLSVTA

SEQ ID NO: 210616 - protein, 355 aa, unidentified
MESTMTLYIGVDYHPYQQTVAYWETGDGEIKYRQFLHSDKAALKRFYAGCGKGSVIGVEATGSLQWFERMLFDNGIELLIGDPRLIRRKALSRHKNDFRDAETILDLLMNDQFPRVEPRSDHSQLMLQMLNYRHTLVGQRTSIANQLQAFARRKGLAKFRIKAKLAKQKLDAAVENETERLLIDSRFTLFEELNVEIKKLEDELEKEANKDEKAKLLLTHSGIGTLTAMAIVHTLGDVRRFRKSEQAVAFVGLDPLDKSSGERKRIGQISKHGSRLLRYLLGQAAAVSRDKRLKQFYSQVSRRRGKPKAKVAAARKLLVNCYVMLRDNINYQEFTRRGEVGLCGNPLGPQERSID

SEQ ID NO: 210617 - protein, 373 aa, unidentified
MPKYSTAFGMDIHLRSTTVCALDADTGEAVTRRFPGNPWGEIAGWMDGFPGPSLAAYESGYLGFAPQRELAGLGVECVVAAVSKIPRSAADSASKNDRNDAARMAKAILAHDISPVWVPSPEVEGIRDLAGAYDGATARLATAKQRLLAFLARRGFVYGGTTPAGNPRKYWTYDFLGWLDKVRPEDDGGVRALAALRNEVEAAAEARADLLSEYRAAVDASPIAAEVAALQSIKGCAFALAAAFSAEVGDFTRFRSGRQVTAYFGLAPSQRSSGDSVRLGGISGAGNALVRKLAVEGSWCYAAARHQPKLMPRDTGVPLEIRMHGRKGSERLLRRREEMLARGMPAAKANVATAAELVRWLWALGMMCREGAE

SEQ ID NO: 210618 - protein, 415 aa, unidentified
MASDWSEAVIFVGIDWAEQHHDVHVMNPDGQPLGRARVPEGIDGIARLHALVADHADDPGEVVVGIETDRGLLVTTLVAAGYQVYGINPRAVDRYRDRHAMSGAKSDGADAKVLADLVRTDRHNHRQVAGDSDLAEAIKVTARAHQNLVWARQRQVNQLRSALREYYPGALATFGTDLAHRDVVAVLVKAPTPELGRRLSTAQIAAALRRAGRVRNVDARAAAIRDGLRAPQLAAPDVVADAYGTSAKALISVIATLTAQIDELESALADRFEQHPDADILRSLPGLAVILGARVLGEFGDDPNRYTDAKARKNYAGSSPITKQSGSRKLALARYVRNRRLADAITLWAFSSLQSSPGARMLYDRRRAAGDTHHKALRALSNRWVGILHGCLRHRTPYDEHIAWGHLTDNLPTAA

SEQ ID NO: 210619 - protein, 401 aa, unidentified
MIRIIAGIDIHKKVLMAVVATVVEREVEGGVEQQIEYEGRRFGSGTREREHLVAWLRERQAGDVVMESTAQYWKPVWMDLEPHFPMLHLAQAQSNKAPKGRKHDFADARRLTRRMAAGELILSFVPGAEQRIWRTMTRGKHQLVRDRVRLQSQTEALLEEMRIKLSSVVSDLFGVSGRRILGALAEGETDPRKLADLGDDRLKCGREELVDALTGQGEPIHVQILKLSMERLRLLDRQIEALDQMAAGALKKHAHAVARLAQVPGFGVDSAQQVIAEVGFDAKTFPGAGELASWVGTIPGSDISAERNHSSRSPKGNRSLRRIFTQAAQAAVKTKGCHFQNLFRKLLLKLGYNGAIWAIANRLCRLAWKILHDGVSYIEPASETTPQAKKRRAQRLTQALR

SEQ ID NO: 210620 - protein, 367 aa, unidentified
MENHNIVWVAMDTDAKENQVALYRGWDKEPAGEWKAGMDAQGIRKLIERLQREKGELRCVYEAGPCGYELYRRLRNAGIHCDVIAPSLTPRKPGDHVKTNRRDARNLGRLYRAGELTVIDVPDQKQENLRDLTRAREDVRQDLTRRQHRLNRFLARQGCHYQEGDKWTLKHWAWIRKIRFQDDNAQTVLEESIRSVEQSKEQLKTFDSKVEENAQKHEYAKKVDRYKTLRGIATVTAMTLVAETWDMRRYRKAPQFMGSTGLVSSEYSTGERERRGKITKAGNAHLRRVLVEAAWQYRHRASASKAIKSRRKAQPSEVVSIAERADQRLNRKFWRMVDRYNKRPGTAAVAVARELAGFIWAIGQIQG

SEQ ID NO: 210621 - protein, 344 aa, unidentified
MLYIGLDVHKEFCQACVIDERGRALSNERFPSTHESLDVFLAGIKDAKFVLESTGMWEFIYEGIEKRGFEVQLAHPLKVRAIAEARVKTDKVDAETLAQLLRANLIPRSWIPSKDMRDLRQLVRQRAYLVQQSTSLKNRIHAELLRRGVRRPQNFVMPFSKKSIDWMRSLEIPTVISRLNCLESVQAQIEEMNAQLLDEYNRRPDAQLIATVPGIGFYGALLIHAEIVDIKRFSHPEKLCAYAGLVPTVRQSASSVHYGAISKDGSSYLRWMLTEAVHTHTHCEPGSRLSRFHAKVARRRGNQKATIATARKLLLIIYWMLVRHEPYHVKNWTPAFLLHVMSAT

SEQ ID NO: 210622 - protein, 363 aa, unidentified
MRTVFGIDVSKASSEVAIFVNGERVHGYTMSNDIIGFSRLLKDLKTVSNPEIISEATGVYSRRLQAFLEENSYDYTRLNPLEAKKQLDSLRVRKTDKIDAEKLASSQFVLNRKPTYVQEKVYQNLHDLSRFYQNLTEDIVRTKNRLHKVLQVAFPEIGILLSTPAGEQYWNLVSIFPTKHWVLELSEVELKETIRQSTSKRISENRVDNLAEKLVGLAKQSYSAISKTSPIIEEVKYNAQELIRLTNRREQVLEQLIELAKPLPEYEILLSIPGIAETTATSVIGELGDIRRFTSANQINAFIGIDLKHYESGDFLGQEHITKRGNPYAKKFCTNVFTISLQLAIPIPAISQISMRNEKDNRQ

SEQ ID NO: 210623 - protein, 340 aa, unidentified
MEKVSTIGLDVAKHVFQVHGVDAEGAVVVRRKLRRDDVVAFFASLPACLIGIEACATSHHWARVLMGLGHKVRLMPASYVKSYVKRQKNDATDAEAICEAVTRPSMRFVPVKSEEQQSVLMLHRVRELLVRQRTMLVNALRGHLAEFGIVTRQGIAGVGMLIGLAEDENNELVPPLARDALVPLVEQLRAAHEKVRELDHQIQDWHRSNELSRRLETIPGIGPITASAIVATVTDASLFKSGRQLAAWLGLVPRQNSSGGKDRLGRISKQGDPYIRRLLVVGAHAVLRFSRKGKAAPTRWAAELLTKKPYNVVAVALANKMARIVWALMTTGKRFADSPA

SEQ ID NO: 210624 - protein, 340 aa, unidentified
MVHVGVDLDKRSSQIAVLTEDGEIVQQRLANDAVGLSRSSSQFPPQTPIAVEASGTWWWLVDLLEQLGHRPVLSNPKQTKAIAAARLKNDRVDAERLALLLRGDLLPTVWIPPAALREARELVRHRIQLVWLRGVIRNRLQAMLARRNLQPTSGKSWLTQRGQRELKQLPLTETPSRIREDCAALLPTLDAQIRRLDVDLVTRWGQDPRVQRLMTIPGIGPFIAIVLVLELGDIHRFANAKRVASYVGLTPRVRGSAGRVRAGHITKEGNRLLRWVLVLAATQAVRRPGPLRAWFHAVKKRRGKKVARVALARRLAEIVFHVWKQECDYFTVVRHGVVRG

SEQ ID NO: 210625 - protein, 323 aa, unidentified
MSKHSMVCAGIDTGKYKLDVALKGSAEQLQIDNTVDGHAALSVWLKRHKVQRVGIEASGGYEQEGVARLRGDKFVVVVFQPAQVRAYAKFLLQRAKNDKIDAALIAACTAATKKIHAPPDPRLAPLAERMTLIDQLTDQIARFKNYREGSRDGHGRQFWKEQIALFNKQIRAELKELVAAIRQHRDLAERLDLIESVDGVGLKTAVAILVRMPEIGRLTREQAASLSGLAPFDDDSGTHAGIRHIAGGRERLRGSLYNAALSAAFHWNPQLIALYRRLIAAGKLHKVALIACARKLLIFVNTVVERGTPWVSERASSAVRAAA

SEQ ID NO: 210626 - protein, 336 aa, unidentified
MVLICHARSLYVCILDDSGKICIHKEIKASPDALLNLVAPFLDQLVIGVECMHCWYWIADWCREQGIEFILGHALYMRAIHGGKAKNDRIDSHKIALLMRGGNFPLAYVYPKEMRATRDLLRRRIKMVRYSGQFKAHVSNTATQYNLAQPGKGSLRQAQGRALMTDVFEDASVQRNVEMDLQLVAFFDQEISQVERFIEQQAKHHNARDLKLLRTIRGIGRILALAILYEVGDIDRFDTVQQFASYGRLVKCKAESAGKNYGTQGNKIGNAHLKWAFSEAVVCHLRGNPTAQAYLEKLQRRMSKGKALSVLAHKLGRCVYFMLKSKQVFDEQRFLG

SEQ ID NO: 210627 - protein, 351 aa, unidentified
MSHKSAPPTVSTIGIDLGKNSFHLVGLDQRGAIVWQLKCSRAQLERRLANIPCCLIGMEACSGAHYIARQLAALGHDVRLIPAQYVKPFLKGHKNDYRDAEAIAEAVQRPTMHFVAIKTPEQMDLLALHRVRSRLVGQRTGVINQIRGFLIERGITVRQGVVPLRKALPDILSSNNDALSPRMVNLIAELAQDWRRLDERIAAVSDEIESLAEQDEACQRVMTVPGVGPIISSAVVAAIGNGAGFTQGRDFGAWLGLVPKQESTEDRTILGKISKRGNKYLRTLFVQAAHVVLTRRPNAAMRGLWPWIEQLSRRLHRNMLAIALANKLARIVWAVLARGRSYQPRIAADVA

SEQ ID NO: 210628 - protein, 332 aa, unidentified
MSVYVGIDVHRKRSQVAVINEGGEVLANRNVPNGVKPVLSVIGGLPAGTPTAYEAAFGWGWLLERLEDYGFEPHMVHPLQCKAIASARLKNDKVDAATLAQLLRADLLPEAWIAPLEVRQLRALLRHRAQLVRLRTLLRNRAHAVLADHGHGRPAGCWSGPGRQWLASLQLPAVSREVIDDALALMDALQQPIDRLDQEVRQRAKADPRVKVLTQLPGVGMFTALVLLAEIGDITRFGSARKLASWAGLTPTVRGSDRTVHHGHISKQGPTWVRWVACEAAQTAKRHPDFAPGYEATARRRGKKIATTAVARKLITRAYHLLTDAASGGAPS

SEQ ID NO: 210629 - protein, 477 aa, unidentified
MIKSVGIDLAGAGEHKVRCLDEEAQLCDGFGFESTPEGLAKLEERIFRDGSNPVIVFEPTGLAWFMVAVYLRARHPDCRLVRTQARNVVALRKYLRRSSKSDRIDALTLAKMPFVDIERLNDVYIPPAKINAILRLSRQRQRLEGNISGRKKRILGIVDGYLPGVRQPFSNLWSPQGREFLRTHLNPLAVVRGGEEALHQFLAEARVRGKKQTNESHWLYRACQQVATVYEMSRSSGAVDDDFFADLQDEIARELRLMEMEEAESDAIAKRIEALYRELHPSDNLRTIPGVGKLTAPVFLAVVGNPTRFRSQSAFANYNGVVPDSRQSANTEAKGLRMTKAGPSIMRWALYQASQIGRRYDPQLASVYYREMVHNGKNHKQAMGAVMSHIGARVLAVLQENRPYELRDNKGNPITWGKARRLVLSNYQVPEEIKQARRRRSTEGISAKSKRKRREMVVHSTHEAAEAPQPVATTASP

SEQ ID NO: 210630 - protein, 370 aa, unidentified
MGNRSMFVGLDVHKETIDIAVADGGRQGEVRHYGTIAGDLEALDQVIRSLRAPHRVLHFVYEAGPCGFGIHRHLTTHQHDCVVVSPSMIPKRSGDRVKTDRRDSVALARLHRAGELRAIYIPDATDEAMRDLVRAREDAVVVATQAKYRLKAFLLRQGRRYPGRTGWTIPYRRWLAALSFASAAQHIALQEYRDAIDETERRVDRLTDQLRQLVPAWRWAPVVAALQALRGVSFITAVGLVAELGDLTRFGHPRELMAFLGLVPAEYSSGPSVRRGAITKAGNPHVRRLLAEAAWAYQSTPRIGRVQSIRQEALPKVVCDIAWKAQLRLTARFRRLVARGKAKPKVATAIARELAGFVWAIAREVRPAGA

SEQ ID NO: 210631 - protein, 421 aa, unidentified
MQVIYERCAAVDVGKDVIAVAVRKPGDGPDGRVTVRRTYKTFYGVLREAARWLMAEGVTHVAMEATGIYSMPVYHALLEHGGFEKVLVCNAGHVKNVPGRKTDMADAEWLAQLLECGLLAGSFIPPAEVKAARDVIRYRAKIAQQRVSEISRLGNVLQDAGIKLDSVAWSVSTKSGRLMIEALIDGERRGAVLADLAIGRMRSKIADLSMALEGRFGNHHAMLCRLHLDHLDHLDGMLAKLDAQIEAMMQPFRAARDLLTTIPGIGQLSAAAVISEIGTDVREYFPDAAHLASWAGLCPGNHESAGKHRPGKRRKGNQHLQPVLVECAWAAVRHDGYLKALYHRHVMKWGGYRSSVAKTKAIIVVAHAILVIIWHVLATGKPYDELGSDYFTRRLDPERETCRLVARLEALGHAVTLERAA

SEQ ID NO: 210632 - protein, 338 aa, unidentified
METVIKQTAGIDCGCKELVVSFGQLYINGNFYCRNTKAFANTTKGFDELVQWITTMHDEDTLVHYVMEATGVYHERLAYHLVANGYYVSIALPNKVNAFAKTCSSKKQDDCQASKVLAEIGCLKQLDAWQPPHVLYVSLKQLTREKHQLQQELTLIHNQLHAEETKAITSLSSIRRMKARSKLLEKQILEVEKEITVLLNKEESIKERIDNVCTIPGVGLQTVVTVIAETNGFNLVRNSRQLVSYAGLDIIQKISGTSVRGRAHISKRGNPHLRHCLYFPAFTAVKYNLPLQNLHNRIVEKQAIKMKGYVAVQRKLLMLIYTLWKKNEPYQLPIKFLE

SEQ ID NO: 210633 - protein, 350 aa, unidentified
MIIIGCDYHPSFQQIAFVDTETGELQERRLQHREEAEKFYRDLAAQGTKVRVGMEASGHARWFEQLLSELQFELWIGDAAEISARRVRKQKTDRQDAQLILRLMLKDDFPQIWVPSWENRDLRQLLWHRHRMVQARTRMMNQLQAVALNEGLRCKKKLWREAGREQLEAFKLAPWASQRRGDLLELLDRLNPTIAKLTQAIEEEVKKCPAARRLKTHPGVGPLTALAFVLIIGKADRFQCGKQIASYLGLVPLEKSSGNQRRLGHITKQGNSLLRFLLVEAAQVTVRSLPEWRSKYCHLTMRRGRKIAKVAMARKLAVRLYWMMRKEWDYEQLRKFGSHAGKPGNRDGVK

SEQ ID NO: 210634 - protein, 344 aa, unidentified
MNSTTIAVDVAKSVFEVAVSEYPGQVRERHRLSRGRFSRFLAEHPPATVVMEACGSAHHWAREAQSRGHRVILVPPHAARPYVLRNKTDRTDAKGLLEAFRNDDLRPVPVKSETQQALAGLHRLRSAWVATRTARLNTVRGILREFGVVIPTGAHHVVPHVRALLEDLDAGVPGLLRVALGEVIREVGELEERIRAIERQLATAAEPALIIRRLRTVPGIGVLTATALVAAVGDVQRFPSGRHFASYLGLTPREHSTGQRRHLGAISKQGDTYLRMLFIHGARSVLHHAKSKTAPTTDRLRTWALQVERLRGHNKAAVALANKLARIAWAVWRSGNDFTAAAAV

SEQ ID NO: 210635 - protein, 338 aa, unidentified
MKAYAGIDLHSSNNFIGIIDETDKRLYSKRHENRVDVVLKVLRPFKRNLQGIVVESTYNWYWLVDGLKEKGYKVHLANPSAIKQYEGLKHTDDQWDSFWLAHLLRLNILPEGYIYPKEQRALRDLLRRRLRFVRHRTSTTLSLQSMIARNRGFTMPASSIKTFTEQFVEDMFDSPHLVFAAKSDVAEIQLLNKVIKNIEKEVKTQIQLRKSFQMLLTIPGIGEILALTIMLEVGDIKRFDKVGNYCSYCRCVKSQRLSNGKKKGQGNRKNGNRYLAWAYVEAAHFATRYCSGARRLYQRKKAKSNGAVATKALANKLARASYYIMRDQVPFDEKKLFG

SEQ ID NO: 210636 - protein, 346 aa, unidentified
MEYYVGLDVSLKEISICVVDRDGKTVARGVCPADPEGVAGWFRNRELTPRRIVHESGMLSIWLQRGLAGLGLPATCIDARKAHKSLSARLNKSDAADAEGLAQLARTGWFTPVHIRSEEADRLRSLVGARERLIRLRKDLEGHIRGVLKTFGIRMIGIGQGRQRQAFRDQLAAAGEIDPDLRVIADAFIATHAKLCQVVDDLDKAVRKTAKAHPVARRLMTIPGVGPVNALSFIALVDDPGRFNRTSDVGAFLGLTPKRHQSGEMDWSGRVSKCGDGAVRGLLFEAASSVIHQVKRFSRLKSWAVRLAGRRGFRKAAVATARKIAVLMLTLWKNGTDYHWAKEATA

SEQ ID NO: 210637 - protein, 338 aa, unidentified
MTSFVGVDLHRNNFTYCIRENGEEKKIGKCEISELKGFASLLGKDTAMAVEATGNTFMFCRFLKAHVGRLVVVNPSQFKVISTSTKKTDKHDAKILAEFLEKDMLPEVRMKDDLQAKISSLTQTREKLVQLRTVLKNKVNNLLAANFIVLKREELSTETGLRKALSFHFDPITDTELFVVVEQIRSLNQSIEKLDKAIEDHGSKMDGFKNLKSIKGIGSKGAATLLSTIGNIHDFRSSKQLAAYIGIVPRVSNSNDTVCHGRITKNGSKIARTTLVQCALIAKRYSPYLHAFHESVKSRRGGAKANIALARKFLDIVYRTLKNKWMFEDFTQFKLVKN

SEQ ID NO: 210638 - protein, 350 aa, unidentified
MVVIGVDAHKRTHTLVALDEVGRKLGERTVAATSEGHFAAVRWAGQWPARRWALEDCRHLTRRLERDLLAAGERVVRVPTQLMAGARRGGRQPGKSDPIDAEAVALAALRHPGLPAAELDGPAREIKLLSDHRHDLVTERTRLCNRLRWHVHELDPGLVIPSRGLRRYCVIDRLAAAMEAFGGVVARIARELLARCRDLTAQINAIERELGHRVCQVAPSLLNIPGCGVLSAAVIIGETARASRFRSKDAYARFTGTAPIPVWSGNPVRVRLNRGGNRWINCALHMIAVTQARGIGPGKAYLDRLMARGKTRTEALRLLRRRISDTVFAALLADETPGRGTNSSPLRRAA

SEQ ID NO: 210639 - protein, 477 aa, unidentified
MAVTRPSGLNRKQRKALARRLQSADPGLAVMHPHAAGIDVGNNAHYVAVRPDRDPEPVRRFECFTADLHRLADWLQQCGVTTVALQSTGVYWLPLYDILEARGLEVYLVNARHTKNLPGRKSDVQESQWLLKLHTYGLLRNSFYPSAEIRLIRTYWRQRADHVRAVSTCIQRMQKTLTQMNIQLANVISDLSGWTGMRIVRAILGGERDPQALATLSHPGIHASRDTIAKSLEGTWRPDLLFVLQQEVTMYDAYLQRIEECDQALEQQLKAVADKTAVPPHAVGSPAAADHGQPRIKRRRKAGSHTPHFDLGPELHRISGVDLTRIDGIDVSVAQTVISEVGLDMCRWQDEHRFASWLGLCPDNRITGGKVIRRGTRRVINRAATALRIAATTLLRSQSYLGAQYRRLRGKLGAPKAITAMAHKLARLVYRMLKWGHAYVDKGLQYYEDRHRQQQVHLLQKKAAHLGLILVEADVSD

SEQ ID NO: 210640 - protein, 463 aa, unidentified
MGKGQKNTEKKQRINDFVQLPLVNANAAGIDIGDTLHVVAVPEECCKGPNVRDFGTFTDDLFSIVEWLTECGITTVAMESTGIYWKNLGLLLIERGFEVYLVNARHTRNISGKKNDQSDAQWIQKLHSCGLLKNCFLPDDQTDVLRTLVRQRRKLIRDSSTAVLRMQKALELMNLKIHTLIRDLMGKTGKAMVEAILSGERHAESFLPFVDCRIRADRSAIVSSLKGNWREEQLFLLEQYYNQYMFFQAQLVQCEQRIEGQLQQMHAKTNDGVSEPEKEIKFTPTGRILKQKKTKGQPFFDTGSYLNGIHGIDVIDIYGLSEVSALEILSETGTDLSKWPSAAHFASWLNLCPNNKISGGKLISSKLQRKKPNAASQAFRMAAGGVQKSGHLLGHFFRKMKSKGGYKYAVIATARKLACIYYKMVTEKQSFNPLNSEEHLNKQKKARIAAMEKALSALRLQVA

SEQ ID NO: 210641 - protein, 344 aa, unidentified
MQTMYYIGLDVHKRTISYCVKDASGHVYAEGSLPATRFDLDRWMKALPQPWTAAMEATVFTGWIYDHLQPHAAALKVAHPLMLRAIAAAKKKNDRIDASKICDCLRCDFLPECYMASTAIRERRRTLRYRNLLVRQMVQMKNKISGLLMEAGVSYNKQRLHRAGYFRELLATNAGIDEGLCSLLRLCRETVVRLQKTESAMVLSLERDSLLMDRVERLMTIPAVGPITALTWALEVGDAQRFSSIKKAISYCGLCGAEKSSANTVQRTPLSKQRNKHLQTTLIEAAKMAPRYSPNLAMLYDKEKQKGNANRATLAVARKLVAYLMAIDRGQRNFQAVETNCIAA

SEQ ID NO: 210642 - protein, 402 aa, unidentified
MNCVGIDVSKGKSTIAVMRPFGEVVVSPFEVCHTASELSELARLLKSLDGETRVVMESTGNYHAPVAWLLHGAGLYVSVVNAMLVHDYGNNSLRRGKTDKKDAVKLANYGLDHWLTLPRYVPEEDARLMLKTCYRQYQQYSKVQTMLKNNLISLLDTAFPDANRLFTSPPRADGSEKWVDFVAAFWHCECVCGLSKKAFTTKYQKWCRKHGYNFSEDKALDIYVSACGRFGVMPKTKTAKLLVEQAISQLQATSAALAALKQEMQSLAASLPEYPVVMGMFGVGPTLGPQLIAEIGDVRRFHSKKALVAFAGIDAPPYQSGQMDIRSRSISKRGSASLRRTLFLVMGVLLQCAPMDEPVYQFMNKKRSEGKPYRVYMMASANKFLRIYYASVKTYLDSLEHD

SEQ ID NO: 210643 - protein, 334 aa, unidentified
MIQKYVIGIDVSKSKLDCAIMDFNLLLFNEKSIANNQKSIGSFISTLIKKLAIDKNQLVICCENTGIYNRPLELVCSVLGITLWVEHALKIKRASIDMRGKDDKKDALRIAEYCIRYIDKLVPFKEPSKIVQEISHLSKSRETLLTQRVAIENQLKEAETHDNFEYKILSKTYRATLRTLTKSIKKIEALIETLIDQDDKIKETRNLLVSIPGIGKQCAIHLIITTDNFTRFDNANHLACYAGVAPFKNESGKIVKRARVSKMANKNIKRLLHMAAMAAIKSNPQLKTYFKRKVEEGKNKMSVLNAVRNKLVHRIMAVISRKTPYLPQEVFLLK

SEQ ID NO: 210644 - protein, 345 aa, unidentified
MKRYLGVDLHRQQFVVCTRQENGETSLREWRIEQLPQFVGQLQSEDEVAVEAMGTTARFYDAVVGKVARVVVVNPHQFQVISASVSKTDRKDAAALALYLSKGLLPEARMKPKRHREVAHLTETRDLLVKQRSALKNKINNLLAMQGVNLKREALSSKVALERVLALEVSALMKIELRVLVEQVRSLGGSIGELEELIEKAGEELPGYKNLTSIKGIGSLSATVLLTTIGAVNDFADENKLAAYVGLVPRVQNSSDTERSGRITKKGNKLARTALVQCGLVAKRYSPYLNQFYNRIKERRGHGKAKIALARKMVKIVYDTLKNNWVFEDFPSFTLAAQPSPTIIE

SEQ ID NO: 210645 - protein, 388 aa, unidentified
MEAQTVDTMPPVAADHDPVRCLLAIELSKKSWIVAITTALSDKISRYTLDGCDWKGLLELMERIRTRVAREVGRPVEMISCYEAGYDGFWLHRLLEHHGVRSHVIDPASVQVDRRARRAKTDHIDAKRLLRSLMAYLRGEPKVWSVLRVPSVAEEDDRRLHRERDRLIAERGQHVNRIKGLCAIHGIYDYEPMRRDRMLRLEQLHTGDGRELPPRLKAEIARELQRLELILGMLKEIEAERDAIALTEKVSAHTNAKKIQNLVKLKAIGAEIATVLTGEVFYRPFNNRLQVASYVGLTPSPFQSGSKCRDQGISKAGNPKARSTMIELAWLWLRHQPDSPLSIWFRERVGTRKGRIRRITIVAVARKLLIALWRYLETGVVPTGAVLK

SEQ ID NO: 210646 - protein, 355 aa, unidentified
MNQEKYIGMDVHQATISVAVMDGRGKLIMECILETKAATILEFIQGLHGSLSVTFEEGTSAAWLHDLLKPHVAQLIVCDPRKNALSKDGSKSDRIDARKLADLLRLNRLHPVYHGEHGVRTLKELGRSYLTISQDLTRVMNRIKALYRSWAIPCSGTTVYAPRHRAEWLAKIVEPGVRRRAERLYQQLDLLQSVRQQARHDLLGESHRHPAVKLLRQIPAIGPIRAALLVALLQTPHRFRTKRQRWAYSGFALETRDSGEYRMVRGKVRRNRERLTVLGLNDNHNHDLKNLFKGAALSASTRPGPLYDFYLGLLEKGMRPTMARLTLARKIATITLTMWKKGVDFDAQQLNRQAA

SEQ ID NO: 210647 - protein, 349 aa, unidentified
MSVRRILAKTIDTDLEYEAIGIDLAKNCVSAALLTTDGEVVCIDRLDYSELEKSAQALSSTPFAMEPCTEMNYLVQKLEAWGHRCLVIGGKNVQNYVENHYSGQKTDLNDAQALAFLAQDTQLRTIKAKDMEQQKYASLTTLREQYIKQYRQTIVSLKGICQAWGLNISKGISGKARLKDLIENHAAFPEELKESLVDMVTHAQTAQKALNKITKTLEELAKNDKVCQLIQTIPGLGTICSCRLRATIGDIKRFKNPKDFPAYYGLVPRSIATGHNEKKGKITHRGDRTMRSLMVQAAGSLVNMATKGKLKSKQLTKWILKKQKEKMPWGKLVCAVAAKLLRMSCPRKS

SEQ ID NO: 210648 - protein, 352 aa, unidentified
MAIVANTYAHVIGIDTHARTHTLTLVTAATGAVEASASFPATGAGMSRAVTWMIRRIQALTLTLVVIEGIGAYGAQLAHACRDADLRVVEPLPTPKGLRAGRGKSDPIDAELIARSVLAADTMRLREPRTDAGVRAAARILVGAREQLNAYRIATINALTALVRTVDLGIDARRPLTSVQIATIDAWRDRSEDLDIATARREARRMARVIRTTEDDLAANERDLAALVAASDAAPLRDMPGVGAITAATILTSWSHAGRIHSEAAFAAIAGVNPIPASSGNTSKHRLNRGGDRRLNRALHAITLTRMAHHQPTKDYVARRRTDGLSTKAIRRCLKRYLARQIYRTLTNPTPA

SEQ ID NO: 210649 - protein, 338 aa, unidentified
MALYGGIDLHSRISWLVILDGGLKLVRQVKLANSLAEFVRILEPYRGELAGLVVESTPNWYWLVDGLRDAGYRMHLANTYAAQQYSGLKYTDDRHDARWLAHLLALGILPEGYIYPAHERPLRDLLRRRGFLVQKRTSMVLSLQGAFGCHTGHRVNSDTVKKWTAAEIEEQLDDPMVVRSFTCLLEPIKAMSSQIQMLEKEILAQVKLRDEFALLKTVWGIGPILALTVMLEVGDIKRFEKVGNFASYCRLVKTDRLSAGKRKGAGNARNGNPYLSWAFSEAAHFAIRYHDTAKRFYQRKRAKTNGIVAVRALGHKLARASYYVMRDKVEFDPERLFA

SEQ ID NO: 210650 - protein, 345 aa, unidentified
MSVAVGVDSHKSSLAVAVLDELGRLVGSREFLNDDGGHGALLEWIRGHDDNRVIGIEGTGNFGAALARRLIEANEDAREVPSFLPHRERRKHPSRGKSDLQDAVAIARVVARGEGLSSPQRVDILRDLKLLTDHRDQLVRARTQLINRTHKDLVISHPGYERRIPKLTSKKRLREARTLLRADRSVRAELIRDRIAEITRLIDKIAAVKKQIATKIAESGTTLTQLHGIGFLVAAKILGEVGDPSRLRSKGSFAMLTGTAPIEASSGKTRRHRLNRGGNRQLNYALHVMALARRRGHADTGAYIERLRQEGKSDKEAMRCLKRQLSNVVFRRLHSDLGGGEKAAA

SEQ ID NO: 210651 - protein, 344 aa, unidentified
MNSTTIAVDVAKSVFEVAVSEYPGQVRERHRLSRSRFSRFLAEHPPATVVMEACGSAHHWAREAQSRGHRVILVPPHAARPYVLRNKTDRTDAKGLLEAFRNDALHPVPVKSETQQALAALHRLRSTWVATRTARLNTVRGILREFGVVIPTGAHHVVPHVRALLEDADAGVPGLLRVPLSEAIREIGELEERILAIERQLARTAEPALLIGRLRTIPGIGILTATALVAAVGDVQRFPSGRHFASYLGLTPREHSTGQRRHLGAISKQGDTYLRMLFIHGARSVLHHAKSKTAPATDRLRTWALQVERLRGHNKAAVALANKLARIAWAVWRSGNDFTAAAAV

SEQ ID NO: 210652 - protein, 341 aa, unidentified
MKLYTGIDLHSSNSYVGIIDETGKRVFKRKLSNDPEIILNSLAPFKNDIVGIVVESTYNWYWLVDLLMAEGYTLHLANPTAIQQYSGLKYSDDQHDAFWLAEMLRLGILPEGYIYPKEDRPIRDLLRKRSHLVKLRTSLVISLQNIINRNNGFKLRGNKIKALTTDHVAPFLETNEDLALAGKVSKDSIDFLTRQIKAIEATLEGKVELREPYTRLLTIFGIGKILGLTIMLETGPIRRFEKAGNYVSYCRKVSSKWLSNDKGKGKGNRKNGNKYLAWAFSEAAELARRYYPEARAYYNRKMQATNFMTAHAALAHKLARAAYYVMRDQVPFVPKKLLGTE

SEQ ID NO: 210653 - protein, 320 aa, unidentified
MNQELSFVGIDVAKAHLDIAIRPSDKQWQVDYTEEGIQKLVGQIAKLHPTLVVLEASGGLEVTVVAALAVADLPVVVVNPRQVRDFAKATGKLAKTDALDAHVLAHFAEAIRPDCRSLPDSETQSLNALVARRNQVMTMLVAEKNRLRTSRPPVIQRIQLHIDWLKQELDEIDRELKEMLHNSPVWREKENLLRTVPGVGPQLAVSMLAYLPELGTLDKKRIAALVGVAPFNRDSGTLRGKRTVWGGRSRIRASLYMAALVASRHNPVISAFYQRLLEAGKAKKVALTACMRKLLVILNAMLKNHSPWQPLNPQLPDSCS

SEQ ID NO: 210654 - protein, 343 aa, unidentified
MESIHYVGLDVHKKTIAYCIKTVSGKTVRQGVVGAERKALRQWLTELPGPWMGALEATIFTGWIYDFLKPHAVELKVAHPEMLKAITAAKKKNDRADAEKLADLLRVNLLPECTMMPTELRELRRILRYRTMVVRTAVTMKNKMAGLLMEVGATYDKRRLYGRKYFAQLMERVEDVPESVKELLQLSRGNLELFTVVQKKLIKALRENSLIRERVERLMSIAGVGEIMALTWVLEIGDSERFRSSRQAISYCGLCSAQRESAGKEQRGPLSKKRNKHLQTMLIEAAKLAPNWNPQLAALHEKELAKGNRNRATLAVARKLVEYLLAVDRRGMPFAAEVPSQVA

SEQ ID NO: 210655 - protein, 530 aa, unidentified
MVTRIKKRKFTGSKKRFIGKPTGQIQPRVQAVGPEHFGILSVDCAKRRSKWMLCNYYGKVVVEPTTVEHTTGGLRVMTQLVAEACRAEGLTDTIVAVEMTGIYHKPVQRAFRKAGFDTRIVHPFASNHYRRPLHPDEKTDDHDLEAIFHAAVKGYGLATLPVGEVYQSLQAVSRHRHNLVKQRSRLMVQMRRLLHQTMPGFADLFEDDKLFHKSIALPIALEFSSADAIRHAGVAGIERYLTKTKLRFQTRTIERIVAWAATAAEPSELARMHTRQWQQLNEVRQLFDEQVAAAEREMAGFLVKTPYVLLLSVTGINVVSAARLAGEAGPIEHYASARAINGRAGLYPSRYQSDEVDHADGALVRQCNRQLRGAAMLVAENLIKCHPYYRGLSALWAQQKVDPRDRRCRIANRAMRMVYQLVGGRQVWRGRGVDREYLLAKLQEFHRLHHTPIDQSIRDLNEAFVWLPKSAYAAEAKPLTELPRRKHRGPQRIGDLLVPLLMRLGLSREELGLPGEETVQSTTSEARSSS

SEQ ID NO: 210656 - protein, 400 aa, unidentified
MDKRKRYIHFCGIDVAKHRHVLCVIDRDGNKIVKSRSFTNDKAGYQRLLQSLKNVGLSHPILVGMEATAHYWYSLHDFLVRHGYPVAILNPIQTAQQAKKGIRKRKTDKIDAFHIAMLLKNGEYKAALIPGELGMICRQLTRLRCRLVQQTASLKQLIWSRLHPVWPEYEDLFKDPFCATGRKLLYTAPTPKDVLSMGLEELSELIRRASRGKYAKAQAEKIRHAAVNSAGMHRSLDGARIGIRTLLTQIDAVRPIREKLEEEITYLAKNLPAYIFSLPGINPVRAASLFGETDPITTFERPDQLVAFAGLDVTVFQTGQYEAYHRHISKRGSPFLRETLWNMAFQAIYQEGDIRNYWLRKMSDGLKHKAAVTATSIKLCHIAWRILIEKRDYLPEGRPN

SEQ ID NO: 210657 - protein, 372 aa, unidentified
MNYNTVYVGMDVHKESFTFCAYTIDAEKGSRFQRTEADYKNVLRYLEFLRTVYGNDANFICGYEAGCLGYTLYHQLTEHHVNCVILAPTTMLEQRSKKRIKTDKRDAEIIAKCLAQHNYSPVHIPTAADEETKEFLRMRDDHKLALKKVKQQILAFCLRHNYRYDGNSHWTAAHIKWLKSLKPEALYKEILDEYLLTYTTLSDKVERLDKRIEELASKDEYRESVKKLCCFIGIKTHTALSVLVEVGDFQRFASAQNFASYLGLVPGEDSSGDGQTRLGITKAGNRHVRMLLTEASQCYARGQIGFKSKKLKSRQAGNSPQVIAYADKANERLRRRYYKMVLGKSKKPNVAKTAIARELACFMWGMMTDHVA

SEQ ID NO: 210658 - protein, 422 aa, unidentified
MSYCPVAGIDVSKRFSDMCILSPDNKIFAQEKIYHDETSINRANALLQKAERLFFSKPVIVMESTSHYHLILFQFFSEHGYDVIVVNPLQSNSMKDFSIRKRKTDRVDAFKLAMMYRTKTLRPSQIPQTATRALRQLCRHRAELLNDVSSYKNRLTALLDQTFPGYDKVFSDVGGVTSCAVLVHFPTPTILLVEEESELVEVIAAASKSGYSFAKKKAGLLISAAQKAQTLGVHSCADETLIVCTIQMLRTLSESVLQIETAIDNLLAQIKEMRNNVSLLQSIPGVGSHSAALLLGEIGDISLFKKPKQLAAYFGLDPTERQSGSFRGTKNKLSKRGSPYARAALHMGVVNSICKRGKDSAANPVLLSYYEKKCKNKPAKVAQAASMHKLVFIVFAVLRDQKPFELKTPEQHAVEQGFVKAA

SEQ ID NO: 210659 - protein, 399 aa, unidentified
MEEQVPRVVIGMDPHKRSVTIEVMTADETVLDGGRFDTSVEGYQAMLEHVAAWPERVWAIEGCEGIGRHIAHRLIADGQVVVDVPAKLSARARVFATGQGRKTDATDAHSVALVGTRMAGLRPVVTDAQLEVLQLLVDRRRSIGDEHTRKISQLHRILLELLPGGAKKYLSAAQAKAILAGIRPRDAVGKTRKRVAAELVADLERIYARKKAADKELKELVAATGTSLLGLHGVGPSGAARLLVEVGDLSRFPDRNHFASWTGTAPIDASSGDHVRHRLSRGGNRQINRVLHIMATVQLRTPTEGRAYFDRKKASGKSSMEAMRCLKRRLSDLVFRTMLGDYVAGRITTATRQVTGPGGHRGNVSDSSATGSQPHTGSSDKPLPGPVTTQRRTHLPAAS

SEQ ID NO: 210660 - protein, 315 aa, unidentified
MDVTHSGSRFVGIDVGKAHIDVHVRPSGEAFRLTRDPAGLAELVARLQPLAPALIVLEATGGFERVVTAALSGAGLPVAVVNPRQIRDFARATGRLAKTDRVDPKVIAHFADAVRPDQRPQPDAAARELADLITRRRQVVAMISSETMRSHQARLPAVRRRLAAHLDWMNQELRQLDADLDTAVRANPAWQERATLLVSVPGVGDATTRTLLAELPELGTLGRRQIAALAGLAPVAHDSGQHRGTRHIRGGRGTVRAALYMAAWIGSRWNPTLKDIYQRLRAAGKPRKVALVACMRRLLTILNAMIRDKAPWRAA

SEQ ID NO: 210661 - protein, 363 aa, unidentified
MKNEAQLSPNNRTETGEVVNLTLMHEGNNVREFYSKLPRPVLVGIEATGSMPWFLNLMEELGIECRVGHPAQIRAAEPRKQKHDRRDADLILKLLAQNRFPAIWLPSKELLDLRALLLHRHQWVRMRVRMQNALQAIALANGLRRGPALWSYDGQAKIAFLPLLPHAAYRRSALQAMYKNMQSEIENLTRRVAEQAGNRCGARLLMTHPGVGPVTALATEVFLGDPQRFTDSKTLASYVGIIPREYSSGEHQRLGGVTKQGSPLLRFLWGEAGAHAARRDPELKRFYRRKLVQKGLGKARVAVARKLGIRLWIMLRDEIDYQEFCRRGQIQQKTVRPVVGMPETGNGAKSHRPSDEATRLPES

SEQ ID NO: 210662 - protein, 409 aa, unidentified
MEPQVERVAGLDVHRKTIAVSVRIPGERGERMQHIRTFGTTAADLLVLRDWLEAHHVIQVAMESTGVYWKPVFYVLEESMECVLVNPQHVQKVPGRKSDVQDCVWLAQLLEHGLLRGSFVPPPPQRELRDLTRYRKVLIQERTREANRLHKVLEDAGIKLATVATDILGVSGRAMLQALIEGTTDPDVLADLARGTLRKKLPALRQALVGRFRPHHAFMVSQHLGHLDYLDEAIDALSHQIEEALRPFEVQLTRLDSIPGVGRRTAEVLLAEVGVDMRRFPTAANLASWAGLCPGQHESAGKHRSARTRPGNRWLRTALVEAASMAARTHNTAVAARYHRIKRHRGHKKAVVAVARALLVTAYHLLDRRADYRELGPDYFDRHHAERATRRAIRALERQGYRVTLDPAA

SEQ ID NO: 210663 - protein, 446 aa, unidentified
MICAAVERCAGIDVGKTFLAVCVMTGPLQEEARVERRRFGTMTSDLEALRDWLKAEGVTDVVMESTGSYWKPVYNVLEGSVQVCLANPQEVKNRKGHKTDDQDGWWLAHLLRHAMIHPSFIPPRPIRELRDLTRRRKRLLGNATAEKNRIQKVLEDANVKLGNVLTDVFGVSGQLMLDALLKGEAPAEEIAQFAKRSAKHKIPQIVQALEGHRMSEHHRQMIGYSLKHLGFLEEQLGDIDRAIIRKIQEAGLEKEWELLQTLPGVQDCSAAAILAETGADMKQFPTARDLSSWAGVCPGNNRSAGKNKSSHTTGGNPWLRSALTECAWAAAAKKNCFIKEKFWRIVSKSGGKKAPAVIAVAHLLILLAYQVLQTHQPFHDRMAPPMDERQKERLIRHHIRRLGKLGIAIRCYAPSASETCRPRPLGQIKPPTSPHRRKCSPANVRT

SEQ ID NO: 210664 - protein, 324 aa, unidentified
MSDAIVGIDVSKETLDAYCARGQRKQGRTFANSPDGWKLVRAWLKAMGSKQAHVCMEATGRHSLGVALALHEAGHVVSVVNPAQIRDFARTKLGRNKTDKVDAALIREYAELFKPEPWTPPSPAMRRLCELQTMRAGIIRSRAEWKNRIGSGLGDSTATKLAAATIEHFTSQLEAIDGAIGETIDQDTELRGRRDLLLSVIGVGETLAASLMAEMPEPGVLRRSGEMVAYAGLNPSHHQSGSSIDRPTRISKIGNATLRSSLYMPALSAMRFNPAVAILVARLKSAGRLKPKQIVVAAMRKLLVLCFGVLKTGKRFDLAIAMPA

SEQ ID NO: 210665 - protein, 343 aa, unidentified
MQTITTIGLDIAKSVFQVHGVDAGGQVIVRRQLKRRYVLNFFQKLSPCLVGIEACGSAHYWSRELQALGHTVRLMPPAYVKPYVKRQKNDTTDAEAICEAVTRANMRFVPTKTAEQQSGLVLHRARHLFIRQQTAVINAIRAHLAEFGIVAPVGRHGVEELLNVVSDPNDKRVPDLARECLLALGAQLRRIKEQILEFDRLIRAWHRSNEMSMRLDEAPGVGPVLATALVAAVADPMSFRSGRNFSAWIGIVPKQHSSGGKNRLGNISKQGDRYLRGLFVAGALSVIRYAKIHGTKHRPWLTALLARRPTKVAAIALANKIARMVWAMMARGERYKEPVALAR

SEQ ID NO: 210666 - protein, 397 aa, unidentified
MYIVGIDIAKRKHEAAVIDGEGAVIIKPFSFTNNCSGYNRLLAMLTKAKLPLDEVSFAMEATGHYWLALFTRLQKEGFRVQVINPVQTNSIRSFYIRQAKTDPRDALLIAEVIRFGHFSESTLHPENIYELRELCRGRHAIVSMQADVKRKVVALLDQVFPEYETAFTNLFGDTSMAILQTCPTPKELSEMRLEELCHLIEVSSRKRFRMAKAQELQALARNSFGFAMAGDVFSTMIRLYAKHLVFLKQQVQEMDRKIAEIMDTLDTPITTITGIGPTLGAYILSEIGDINRFSSAAKLAAYAGIDPTMRQSGEYNGVRNRMSKRGSPYLRHAIWLAASSAVLHDPALKLYFQKKRDEGKPYMASVGHACRKMVSIIYAVMRDNKAYTPCIPNEISA

SEQ ID NO: 210667 - protein, 338 aa, unidentified
MAILTVGIDLAKNVLALHGVNEAGKPELLQPRVPRAKLHALVAALPPCTIGIEACSGAHHWARLFQAHGHSVRLIAPKLVTPYRMSGKRGKNDAADAAAICEAVSRPNMRFVPVKTVEQQSRLMVHRAREGYAQQRTATLNRIRGLLGEFGVVLPLKAEVVRREACNHLEDLPGYANTVIGDLLSEVHHLDERIKQYDRHIRTMARDCTAAQQLMQLTGVGETTATAIVAMVGNAHEFDSGRQFAAWIGLVPGQYSSGGKSRLGRITKAGDAYLRSLLVLGARAVLNAAANKADSLSRWAMALRQRRGYWKAVVAIAAKNARMAWAVLTKGESFELPT

SEQ ID NO: 210668 - protein, 354 aa, unidentified
MSQKLNTAITVIGIDIGKNSFHVVGLDKRGAIVLRQKWSRGQVETRLANIPACLIGMEACVGAHHLSRRLKGLGHDARLMPAKYVRPYSKGQKNDFRDAEAIAEAVQRPTMRFVATKTAEQLDLQALHRVRERLVSQRTGVINQIRAFLLERGVAVRQGLRFLRAELPDILATRTEVLSPRMVRVIEDLAGDWRRLDERIEGLSTEITAIAHQDVACNRLMTVPGVGPIISSAMVAAIGTGDVFSKGRDFGAWLGLVPKQISTGDRTILGKISRRGNRYLRVLFVQAAWVVLIKPKSWERYGLKPWIEAAKKRLHHNVLAIALANKLARIAWAVLNKERNFECISTDKMVSRPV

SEQ ID NO: 210669 - protein, 389 aa, unidentified
MSQAFDASRSLTALEQDNTLIAVIEMAHSKWLVAALVPGIARQPLKKLEPDAEVLLKLLRRWRNEANRVGRAINRIAVAYEAGRDGFWLARWLRAREVEAYVIHPSSVAVSREHRRAKTDRLDTELLMRAFLGWLRGEKRHCSMAAIPTVAEEDVRRPSRERETLVGERTRLVNRVKAILARFGIRAFKPNLRKAANKLEGIRTAEGMPLPENTRAELRRYLERLHLVREQIHVIEQERLRRLATAPAAEEDSHARVRLLAQVVGIGIETADLLVHEVLSRKLRDRRAVARYAGLTGAPNESGQRRREKGLARAGNARVRRGMIQLAWRFLLFQKDSALARWFRERTTDGRGATRKTMIVALARKLLIALWRFLTMGELPEGVVLRTAS

SEQ ID NO: 210670 - protein, 377 aa, unidentified
MREKLRFLGLDVHAETIAVAIAEPDGEVRSLGTIANREDSIRKLIRKLGPAENLRACYEAGPTGFVLYWQLSQLGVACAVIAPTLVPKKPGDRVKTDRRDALKLARSHRSGDLTAVWVPDEDSEALRDLVRQREAAKQDQLRARHRLTKFLLRTGQRPPLGLKAWTERWMRWLAQVRYTQPAQEVTRLDCMNEVEHMAARVKRLEEAILEVVKLAPEPMQELIRGLQALRGVAHISAVTIASELGNISSRFQSARKLMGYCGVFPSEDSSGKRIRRGGITKCGNAHLRRIVVESAWCYRHLPRVGEKLRKRHQGVPAEITEIAWKAQNRLHKRYMKLTMAGKDQRKVMTAVARELLGFIWAIGIKAEAVASRQQFAA

SEQ ID NO: 210671 - protein, 411 aa, unidentified
MHHRQNYLYVGVDLHKEQHTAVIINCWQEKLGEIQFENKPSAFSKFLLEVETYVSDGLSVVFGLEDVGGYGRALAKYLVDHEQVVKEVNPALSFLERKSQVMIHKNDSWDAECVARILINKFNQLPDAKPNDLLWSIQQLVSRRNALVKAQSALKNQLHIQLNHHYPSYKKFFSELDGKTALAFWQQYPSPSCLEGVSIKKLTAFLLDVSNNTCSVKKASDILKLVKEDGQTMKEYQETRDFLVRSIVRDIEFKKKEMKYIERELKRLVNLLDYQLETMPGIELVTASALIAEIGDVRRFPNANKLARFAGIAPVYFGSGGKGKTHKSKQGNRALHALFYNLAVQQVQVAKGSKMPRNPVFHAYYQKKLKEGKTKGQALVCIMRRLVTIIYGMMKYKIAYELPIVEEKEVV

SEQ ID NO: 210672 - protein, 359 aa, unidentified
MSSIALGRGDVVVGVDTHKDEHVAVALDGLGGLLDELAIAANPDGYAQLLAWADELGAVAVFGVEGTGSYGSGLARFLRRHGRKVLEVSRPPRKGERRLSGKSDSIDAEHAAREVLAGRAKATPKLADGIVEAIRLVKIARDSAVGAHSQAMITLKATLVTAPDELRGQLEPLTDFKLIGACAALDTTGDIADPAVAMRLALASLARRWLELHEEIKAHSRRLKKLTQTAAPDLIAAFGIGPDIAAEMLVTAGDNTDRIRSDAALAKLCGACPIPAGSGKTKGRHRLNRGGNRQANAALYRAIIVRMRWHPPTIAYVERRTAEGLSKKDIIRCLKRYLAREVYRLLPEPSTPANLASAA

SEQ ID NO: 210673 - protein, 480 aa, unidentified
MEATQQQKQKKGVKRPVQRGWHEMNRKQRREMTRRIQAEDLSLEVMHPEAAGIDIGNQSHYAAVPSSRDSQPVRCFGCTTGELRKMAAWLKQCGIRTVALQSTGVYWIPVYEVLEEAGLEVFLVNARDTKNLPGRKSDVQESQWLMKLHAYGLLRNSFRPPQEIRTMRTYWRQRNDLVQSAGRHIQRIQKALTQMNIQWANVLSDVSGMTGQAIIKAILAGERDPWKLAGFRDKRVKATEEEIARGLEGNWQDDLLFLLKQEQDSYEFCQKQIAECDARLEQYLQQRPDRSHGANLPEEKRKGRLQKKAKNPQFDLRTHLFRMTGADLTQIDGIDVRTAATVISEVGWDMSKWENEDHFVSWLRLCPDNRTSGDKIIGKGRLPTNNRLTVALRMAASTLRESDTYLGAQFRRLRSRLEGPVAVKAMAAKLARLVYRMLRYGMQFVDRGALFYEARHRQHQINFLRRKAVKLGFQLVACAN

SEQ ID NO: 210674 - protein, 343 aa, unidentified
MRKIVKQVAAIDVAKNELVVCLGRMYDDWTPELFAGKTFANNAKGMTSMLAWVRKLHNEEIPVRFVMEATGVYHESLVYYLNDELQEVSIVLPNKISNYMRTLETKTITDKTASEAIALFGLERRLDKWKRPKEIFRKLRQLTRERDQIVQERTIVKNQLHAEQTEAHPGKSTLARIKSRIKMLDKQETEIKQEIAALIATDAETKKAVALITTVSGVGVLTAAIILAETNGFEHIRNKRQLASYAGFDVKEKQSGISIKGKPRISKKGNKNLRKAMHLPALAAIRYDERFKAIFSRIVSKHGIKMKAAVAVQRKILEMTYTIFKTGKKYDKNYLNELITINT

SEQ ID NO: 210675 - protein, 437 aa, unidentified
MFSLRYFNFREGRYLKVVYPICCGVDVHKTFFVATIITTEGIQPKYQKRRFSTFNNQILVFKAWLLENNCRDVCMESTGKYYVPVYNLLEDSINVTVANPKWVRAVKGCKDDVKDSKWIGDLFRLGLVPGSFIPRKDIRILREYTRYRFKLISCKSSEKNRFQNVFTVCNVALDAVVSDMFGKSASSITDYIINSDTFDSEHCVSLLQKSLKKKADEVVDSITGFQMTLSQKHRAKLVREHYVYLENQIQKLDDAIDELALPIEPSINLLCTIPGIRRLSAIMLLSEIGDDMSQFGSSKRLCSWAGLTPGNNQSAGKKKSVRINRAGVYLKPTLVQIAHAAVKDLKNSYYRIKYERLSKRRGKKRAIIAIARMILTAVYYMLSTGEVWNPRDLDQIDMPFELREKEMQKSIRRAAKLLIAQGVIDPNNIVIPLSDTA

SEQ ID NO: 210676 - protein, 343 aa, unidentified
MQTITTIGLDIAKSVFQVHGVDADGNVVLRRQLKRRYVLAFFQKLPPCLVGIEACASSHHWSRELQALGHTVRLMPPAYVKPYVKRQKNDTADAEAICEAVTRPNMRFVPTKSPEQQSCLTLHRTRHLFIRQQTAIINSIRAHLAEFGIVAPVGRRGVDRLLEIVADPNDNRLPEVARACVAALGSQLLALKAQILAFDRRIMAWHRSNETSRRLDAIPGVGPALATALVASIADPKVFRSGRDFSAWIGLVPKQNSSGGKDRLGSISKQGDRYLRSLFTTGALAVIRYAKLHGTKHRPWLAALLARRPTKVAAVALANKIARMVWAMMTRGERYKEPVALAA

SEQ ID NO: 210677 - protein, 390 aa, unidentified
MGFRARVKIEGNRPLKTKFRIFQGRLDTHKDTIAVAVSDAAGGKPRYYGEIANTPEAITKLAKKLSPDGEVISFCYEAGPCGYGIYRQISKMGHDCSVVAPSLIPSRPGDRVKTDRRDSESLSRFHRAGELTPVWVPDQEQEAIRDLTRAREDMKAMERQSRQRLNAFLLRHGKVYESGKSKWTQAHFRWLERVKFEVPVQQIVFEEYVGAIKQNQQRVSGLEDEMLKVMEGWSLEPVVEALMALRGVKLITAMTVMAELGDITRFDSPSQLMAYLGLVPSEYSSGKSKRRGGITKTGNGHVRRVLTESAWCYRFQARRTAHLQRRIEKTSEEVQAIAWKAQKRLCGRYQHLLERGKLRVQVCTAIARELVGFIWAIACEVMGHQMVIAH

SEQ ID NO: 210678 - protein, 436 aa, unidentified
MRGCRCSMIMGFTKPIEHFNLQRKKVITMNTLYVGIDVSSKSNVVYLMLPNGDKHSNFSVANSHEGSTLLVKKIYSALTSHSLDTVLIGLEATSVYGDNLVYFLREDATLAPFNRKIHVLNPKQVKKFHDTYNDLPKNDYVDSFVIADCLRFGRINKEVYMGEYRYKALQNLTRARFFAVQNLVKEKQRFMNVLFKKYSTMTQEKVFSDAFSTTALAVYDEFESAEALANMDLHELTDFIIEKGKNRFPDPDAVAKAIQKAARSSYRLPKTVNDSVNQVLSISITSMKALESQIKEFDKAIKALMELLPNVLISIPGIGPVYSAGIMAEIGDINRFDNQASLAKYAGLAWKQHQSGGFEAEVTRLIPLGNRFLKYYLCEAAFSLVRCDKEYSDFYHLKYKEVNRCQHKRALALTARKFVRLVFRLLKDNRLYCPAK

SEQ ID NO: 210679 - protein, 349 aa, unidentified
MRFYTKQHQFYCGIDLHARLLAICIVDEAGVVVCRTQIPADKTILLETLAPFRRDVVVAVECLFAWYWVADLCTAEKIPFVLGHALYMKAIHGGKAKNDDIDAEKIGRLLKGGNIPVAYVYPKGLRETRDLLRRRMYLVRQRAALITHVQIVNAQYNLPEFSKKLIYAKNRAELKIAERFDNLQLRKSVAIDLALIDALDVQIADAELHLERTAKVEDPQTFHLLKTIGGVGKILGLTLLYEIHDIRRFPDVGEFLSYARLVRCRHESAGKKLGSGGHKIGNAHLKWAFSEAVCLLVRHYPAVKVWQARHEKKHGKKKTLGILAARLGRAVYHMLRKREAFDVKRFLGQ

SEQ ID NO: 210680 - protein, 346 aa, unidentified
MEHYVGLDVSLKLTAICIVDRTGKIVREGTVASNPEAIAAFVKSHARHVVRIGLETGATSTWLWTELNKMGLPIICIDARHAKAALKMQINKSDRNDAFGIARIMQCGWYKEVRVKDLDCHAIKALLVSRALLVKIKRDLENEVRGLLKNLGLVIGRAKMNTFSVRVSELIEDRLELAAVIEPLMKARVAVAQQIADLDRKVMQLARNDAQVRRFMTAPGVGIITALCFRATICDPTRFKRSRSVGAYVGLTTRRYASGEIDWTGRISKCGDAMLRSYLYEAANVLLTRVAKWSVLKAWGIRLAKRSGLRKAKVAVARKLAFILHRMWVDGTEFNWSSKEIAAQST

SEQ ID NO: 210681 - protein, 337 aa, unidentified
MKDIIYDHYIAIDWAAKNMAIARMTKKSNKITAIDVPSDIVELQFYLKNLKGTKILAIEETTTSQWLYTELKEYVDKVLICDPYRNSLLSEGPKTDKIDATKLVQLLKADLMKEVFHSTDKFIYLRRIVSGYEDLVKAGVRLKNQRYSMLRVCGKSGYEKKGIKLSSRDEQYVLECLDRQTQNYEEEKKGYEKEFARLARRHPEIRYQKSIPGIGLINAVKIVARVVTPYRFSGKGHYLSYSGLIKHEKMSGGRSYGKKNPRYCRMMKCVYKSGVIAAIGGNNPINDYYEYLLSEKGYPAYNARNKACRRLAILSFGVFKSGKKYEPYRRDHVKKGK

SEQ ID NO: 210682 - protein, 467 aa, unidentified
MKHNSTRERKEKPTRLSLSLLERIQPDAAGIDCGQNSHFVAVPPDRDPQPVREFRTFTADLHRLADWLVQCGVKTVAMESTGVYWIPLYEILEQRGFQVVLVNARDVHNVPGRKSDVKDCAWLRELHSVGLLRASFRPAAAIVPLRSFMRQRETLVEEAATRIHRMQKALTEMNLKLHTVLTDLTGLTGLKIVRSILNGERDPERLAAYRNYRCHASHAEIVAALTGNYRAEHLFALRQNFAAYEFLLKQIAECDGEIEALLATLAAQQPPPSAPLPAARRKRVSKHQPQFDIRGPLHRLTGGADLSQIDSIGPQAALQIIAETGTDMRRWPSEYHFASWTTLAPNNKISGGRLLSSRTPPSANRVAIILRRCAMSAGKTSTALGAFYRRLAVRIGKAKAITATARKLALLVYRVLSGQLVYNDPGAAAYHQLNRSRELKSLRKRAKLLGFDLVDHSTGEVLLNPVS

SEQ ID NO: 210683 - protein, 412 aa, unidentified
MEVMHRIIAGLDVHAKQVVACLRVQAGRRGRRTLKQFATTTPGLLELHAWLVEAHCPIVLIESTGVYWQPVFNILEGSVEVILANAQHVKTLPGRKTDLRDAEWLAELGAHGLVRASVIPPAPIRELRELTRHRTHLIQMRSQQMNRVHKLLESANIKLGTVVSDLFGASGRAMLRALLAGEQDPQRLSALAKGSLRTKCDQLVPALTGRFRASHGFLLRALLEHIEYLDRQLATVSEEIARRCHPFEEAVALVQTIPGVGRVTAEVLLAEIGDDMARFPSAHHLASWAGVCPGNNESAGKRRTGRTRKGNRWLRTALCEAGWAASRTRGTYLQSQFRRLAFAKAKGGKKAVMAIAHSILIAVWHMLTSRVPYRDLGPCHLVAPEPERAKRVLVRKLEQLGFHVTLATKAAA

SEQ ID NO: 210684 - protein, 420 aa, unidentified
MKAWNQITHYAGFDWAKDHHDVIVLDSSGKIVADFRFEHTAGGWEQFREKLAAFAGVAVAIETKFGTVIERLQEIDCCIFPVHPQSAKAYRQRKVPSGNKTDHVDAWSLADALRLDGANWKQLAPQEPLIKELRLLCRDEVALIRDRTALITQLRQTLYDYYPAALEAFDDWTMPAAWAFILAFPTPEALVKAGKRKWEKFLHVHKLGRPETYQRRLEIFARADRFAGSPPAIHAKSRLAVTRAKQLQLLQTQINEYRQEIRRLFAQHPDAALFESLPGAGDKIAPRLLSEIGDDRVLFPDAQGLQCLAGTAPVSFQSGQIHRVHLRRQCNKSLRNVVHLWANLSREFCPWAETYYKALRAKGKSHACALRALGQRWLKIVWKMWQTRTLYDADLHARNQIKHGSWVLQLVNKADASPKT

SEQ ID NO: 210685 - protein, 367 aa, unidentified
MKKVSTAVAKQSRNISQQKLTIGLDLGDRNSWYCVLDEAGQVQLEQRVRTHAKALGEVFGAMPGSRIALETGTHSPWISRLLGELGHEVIVANARKVRLIGESRKKDDRLDAQTLARLARIDPQLLCPVKHRNAQAQADLMMIRARAGLVRARTGLVNTARGLAKSYGERLRGCNVRNMNPEKVEGLSPELQRALEPLLSAIAELSEQIREYNERIEKLAQESYPQVALLKQIKGVGTLIAVTFLLTLEDPHRFRKSRDVGCYLGLQPGRRNSGRSELQMHISKEGDPYLRTLLVQGAQHILGPFGVDCDLRRWGLKLAERGGRNGKKRAIVATARKLAVLLHHLWVSGEVYELLHNSSRTTVAAAA

SEQ ID NO: 210686 - protein, 313 aa, unidentified
MDKQFVGIDVSRGTLSVALHPTGQSTEFPNTDGGRADLITHLRGQEVALVVVEASGGIERVLARSLAHASIPVAVVNPRQVRDYAKALGRLAKTDAIDAQVLARFAEAVRPEPRPLADDKTQELADLVTRREQLVNMLTAEKNRLRSARPDIQPSIVEHIAWLNGQRDQLDRKIRALSKADPKWREHERILRSVPGVGPVLSATVLGCLPELGQLDRREIAALVGVAPFNRDSGRMRGKRRVWGGRGQVRKVLYMATVAAVRSNPVIRAFYDRLVDAGKAKKVALVACMRKLLVILNAMLRQGTPWSPSIASP

SEQ ID NO: 210687 - protein, 337 aa, unidentified
MSEISILAIDLAKNSFQACAVRVDGSIIFNRAISRPRLYQLLAEQESCTIAMEACATSHHWGRVAQSNGHEVRLIPAQYVKPFVKRQKNDHADAAAIAEAASRPTMSFVAVKSAEKQGRAVAFRTHQCFVRQRTQLINSLRGHLAEFGLVAAKGPASLKVLENALADPITDIPAQVREMGAIYLAQIVRLTAVIERLANELETATKVDEELRRLCTVPGIGPVTAGAVAAFAPDMSTFESGRNFAAWLGLVPRQRSTGGKARLGAVSKMGQCDIRKLLIVGAMSVIRWVVRKGGSSNQWLANLVARKPRMVAAVALANKMARQIWAMATKGEDYRMA

SEQ ID NO: 210688 - protein, 352 aa, unidentified
MNTTTFAIDIAKSVFQLHWVEPQTGQICRRQLTRAKVLNFFAQRQPARVAMEACGSAHHWGRQLAALGHQVLLIPPQKVRAFVTGNKDDASDARGIWLASTHGDIRCVSVKSVEQQAQLSVHRVRAHWVKQRTASVNVLRGLLYEFGVVIPKGRAHLMPWIGEHSAALEQQLPPAMWQLVLMQMQALRVLDQQIEAAQLQLEQAMKASDAAIRLLKMPGIGPLGATALAATLGDGSAWKGAREFACSLGLTPSHTGTGGKIRMGGISKRGDAYLRTLLVNGARNLARVPNPRPWIAQMLERRPFNVVVVAVAHKLARMAWAMIAHQSHYEERWRSVDDTSTSEAAAVGAAAV

SEQ ID NO: 210689 - protein, 395 aa, unidentified
MYSSFVGIDIGKYHHQAAFIDSAGKKCYPDISFDNTCDGFEMLLMSLNRFDKEQTVVGLEATGHYWLALYSFLADAGWAVKVINPIQTDAFRNFYIRKTKTDRVDSFIIAEVLRFGRYTETVLPDEKLSQLKELSRCRAGFTESVGSLKRKIITILDRVFPEFAACFSDVFGASPIAVLNEYTTPEELANADIEKLLKLLARSSRGRHSIKKVNELQAHARRSIGVKKGIQALILELKLLLTQMDFINGQIKELDLFIAEIMKDFALILSIPGIGDVTGGAIMGEIGDITRFATPQKLQAFAGLDPRVTQSGQFSGTDNKISKRGSPHLRRALYIAANIARIHDPIFKVHYERLVARGKHPKQALTAVATKLLRVVHAVMTKGVPYTPEILANEK

SEQ ID NO: 210690 - protein, 366 aa, unidentified
MSSVTPAAGPIHLGMDTSKNTIVVGILMPGDEVPVIDRIWNEEGSVRHLVSRLGDPAALRACYEAGPCGFELHRLLASMGVACDVVAPSLIPRRAGDRVKTDRRDASRLARLHRAGELTPVRVPSAAEEAVRDLVRVRAALLADRKRAQQRLTAMLLRHGRVWRSGSSWTQAHEQWIAGQRFEEPALAAALAHYRAGLDTRRAELDAIEAELAPWAGREPLAGPVARLGCYRGIAELHSLALAAEVVDWHRFPSARAFMGFTGLVPGEYSSGDKTRRGSITKAGSEPVRTALVEAAWAYRFKPAIGVTLRRRQRGAEPGTLARSWKAQRHLHAKYKAMTARGKPPAVAVTAVARELAGFVWAEMTS

SEQ ID NO: 210691 - protein, 335 aa, unidentified
MTKVMGPVFVGIDVSARTLVVALERDHQPGRQRREFLNTAVGHEGLIQWLSKSATAVQVCIEATGLYSLDLALALHRAEGIEVMVANPRAIADFAKALLQRSKTDQLDAEVMLEFARRMPFVAWQPPSSPQLDLRALMRRITGLKLVSQQEKNRLHSVSQSAEITPLVRKDIQSHLVQLERHIEKLEHQAETIVQADRELARQFCHLVSVRGIARVSALHLLAELVVLAPDMTARLWVAHAGLDPRHHESGTSVHKPTRISRAGNRYLRSALFMPALVATQHDPNIRAFYQKLVDHGKTKLQAIVAVMRKLLHALHGMLRTDSDFVGEKFFVIPS

SEQ ID NO: 210692 - protein, 400 aa, unidentified
MDKRKRYIRFCGIDVAKNKHVFCVIDREGRTILRSRSFTNTQEGYRRLLHSLQDIGSVRSLLVGMEATAHYWYSLHDFLVRHGYPVAVLNPIQTAQQAKKGIRKCKTDKVDAFHIATLLKNGEYRAALIPGELGMICRQLTRLRCRLVQHTAALKQLIWSRLHPVWPEYEKLFKDPFCATSRTLLYTAPTPTDLLSMRQDELSELIRKASRGKYAQAQAKKILHAAAHSAGMHRSLDGARIGIRTLLTQIEAVRPVREKLEQEIARLAEDLPAYIFSLPGINPVRAVSLFGETDPITTFEKPAQLVAFAGLDVSVFQTGQYEGSYRHISKRGSPFLRETLWNMAFQAIYQEGDIRDYWLRKMAGGLKHKAAITATSIKLCHVAWRILTDKRDYLPEGRPN

SEQ ID NO: 210693 - protein, 340 aa, unidentified
MNALYAGCDLHGNNNLIGIIDGEGKRVFKKRLSNDLGLVRDTLKPFQEKLVGIAVESTYNWYWMVDGLMEKGYQVHLANPSAIQQYSGLKHSDDKHDAFWLAEMLRLGILPEGYIYPKEERPVRDLLRKRGHLVRLRTSLIISLQNILSRNLGRRVNVNDVKALKEDRISPLLERNEDLALAGRVSKEAIDHLTGQIRKIEGVVEKKIRLKEEYRYLLTVYGVGKILSLTIMLETGPISRFETVGDYVSYCRKVPSQWTSNGKRKGSGNSKNGNKYLAWAYSEASEFARQLYPEPRAYYNRKMQKTNAAVAHSALANKLSRAGYYVMRDQVPFEPQKLFG

SEQ ID NO: 210694 - protein, 417 aa, unidentified
MKNDNYAALVALDWGDKNHAFAWQFADAQSIERGTIEATPEALHAWLDQLHATCKGRPVALAVESGRNTLLHALLEHEGLTIYPVHSATSARFRKTFTPSGAKDDGPDALMLLTLLRTHRDQLNPLMVDTPIMRELAALVAIRRSAVDQRTRTLNQLTSLLKTYYPQALVLAGEDLATPLARAFLRRFPELLCVQKARAQTMRVFYQAHNVRSLQRIQERMTVIAQARALIADRALIEPAILEMTMLVDLLEVQTDHIAKLQTRIGEVFQTHPQASLFSALPGAGATLAPRLLVAFGDNLERYPSAASLQKYSGIAPVREKSGGRSWTHWRWAAPKFLRQSFVEWAGQTVRYSAWAQAYYCLQKQRGKAHHAILRALAFKWIRILWRCSHDQIPYNENHYLAALQAKASPLHNALQK

SEQ ID NO: 210695 - protein, 427 aa, unidentified
MKESNLPRLAEFRQLKKEIRGSEEYLIVGIDVAKEKHHAYFGTATGKSLLRKLIFENNRKGFETLLHRAGAIMRQEGLTKAVFGVEPTADYHKPLGEFLINSGQSLVLVANGAVKQNRELLDGRWDKNDTKDCANAADLISQGKALYYDLPDLKIRDLRNLASLKKKLKAQEHSLRMRIRNHLVAQFFPELDEYYGHREGENLAIVKWCLNPAQISAMEFEQFFQMVTASDKGAAQRCRLRLIQEAARDSIGCHVTESVMFEARLLVEHLSRVRVMLAETDARIAVLCRQLPGYESLMSIPGFGPVVTAEVITALGNPHRFTSSKQVLKLAGLDLSASRSGKNSANAETRISKKGKAPLRYVLYQSALIATTRNKDFIEYFSRLIAGRERERGIKTKMLVKTAAKMLVIAWTIWKKEEVFQGKYLLQ

SEQ ID NO: 210696 - protein, 403 aa, unidentified
MHSSSDWALVHVRTKSGGLNRSMQHHLIEVAEIPVNEMVRRLISTLKWVIVLAGSRRIIDMQIRSVGIDLGKTTFHLVALSATGKVLLRKKFTQKQLITFTANMQTSLIGMEACSGAHFLGRVLREQGHDVRLIAAQFVKPFVKSNKNDFLDAEAIAEAVDRENMRFVPIKTDDQLDLQAMHRVRDRLVARRTSVINQLRAFLLERGMVFAKTPFKLKQAMPEILENADANLTLRMRNLVDLLWSEWKDLEHQIVAMNLEVEQIASSDPACQRLRQIPGIGPLVATAIVAAIGNGAAFRKGREFSSWLGLVPRQHSTGGKARLFGISKRGNCYLRKLLVHGARSAVLRVKRERSPFGPWLDALERRSPVKVVITAAANKLARVAWAVLSSGEEYRPPTALMPS

SEQ ID NO: 210697 - protein, 342 aa, unidentified
MDQYAGIDVSLECSSVCVVDASGMILREARVASEPEALIAWFRWSGFELERIGLEAGPLSQWLFAAMRQAGLAVELLETRHVRKAFEAMPVKSDRNDARGIAQLMRLGWFRPVHCKSMSAQETRTLLTARKLVQSKLQDVENSLRGILRGFGLKVGKTTGLGFAGRIEELVAGHPHLQVVTRALLSVRAVLRSEFAAFEKQTRKMAQSDARTRLLMSTPAVGPIVALTYVSAIDDPARFTSSKQAGAHFGLTPKKYQSGETDYTGRISKIGDSSVRTALYEAAHIMLTKPLKGCTQLKSWAMRIARRAGMSKAKVALARRLAVIMHRMLADRTPFNPDAAVT

SEQ ID NO: 210698 - protein, 406 aa, unidentified
MAAQAPEDTAGTGQKVFGGVDSHTDTLHVAVISDNGGHLADAEFATTPAGYAAALAFIDAHGQVTAIGVEGTSSYGAGFTRAARSRGHQVIEVNRPDKAERRRIGKSDPIDAYAAARAALSGRASSAPKDDTVTGIRALHNAARSAVKARTAALNQIGSILVCAPEAIRAKYGPLKSTDRADALARQRPAGDTVHTAVLTALRTLARRVKELTAEHEALTKALDTAVTAGNPGLRAAHGVGPDTAAQLLITAGGNPERMRTEASFAALCGAAPVPASSGRTNRHRLSRGGDRAANAALYRIALVRMGSDSRTREYAARQMAAGRTKKEIIRLLKRAIAREVFRCLTTTVNVPEIADLRPLRQSKNITLTAAARHLGVWPNRISDVERGTRRLDDLAHAYRDWLQTA

SEQ ID NO: 210699 - protein, 385 aa, unidentified
MQDHKPEDQTAIRTDLGAIFVSLELSRSTWLVTSLSPGGGEKMSKHSVPGGDISGLLMLFSRLTERARKRAGEEFPIIAIQEAGLDGFWIHRALEQEGIESHIVDAASIMTSRRRRRAKTDRIDGEALLRALMAYKRGEPRVCAMVRVPTPEDEDRRRISRERNVLIAERVAHVNRIKGLLFSQGIRYEPLRRDRRARLEELRTGDGRVLPEHMKRQISRELDRLELLLAQIKAVEAERNTMLAKTNEANLAPAKMLMGFKGIGAEFAMALWSEGLFRHFDNRRQVGAYAGFAPTPWQSGMTDREQGIAKSGNPRLRTTMIQLAWLWLRHQPDSLLSHWFQQRVAGKGRRIRKIMITALARKLLVALWKYVTAGVVIERAVMKTA

SEQ ID NO: 210700 - protein, 365 aa, unidentified
MTRYVGLDAHSKRCSYMIQDEQGKVLAEGSVPTTPEGLLQLRAHHGLSAGTRVALESGTMAFYVARQLQKLELDPVVVDAHEVRAKALRPNQKSDRRDAWELCEGIRRDVYRSRVHVPPETIERLRETLGRRRHFVRVKTMQVNAAKRLLRASGLQGLNRSLQADSGWQKLLEHTSSDASLHTFLQTHHTLWRCAHEQVALLERSLREQQSHFQEDLTRLQTVPGVGPIVALTVIAAFSDVQRFPTAKHAASYAGLVTSTYDSGERIQHGRITRRGSSELRSMLCEAAHHAGRSNSPFYPYFIGLCVRRGYKMAVVAVAHRLCRILYAMLRHGTTFNPKKLAIEEGRFEHTVVRRFRRQVEPTPV

SEQ ID NO: 210701 - protein, 448 aa, unidentified
MKKETSKKKSVVNLPLVNPNAAGIDIGDIIHAVAVPVDRDDVNVKSFGAMTCDLEAIVTWLHYCEIDTVAMESTGVYWKPLFAMLIKAGFEVYLVNSKQVRNVSGRKNDEDDAVWIQKLHSCGLLKSSYLPDDEQEALRTLVRHRKTLTLHCNRFILRMQKAMEMMNIKVHTVIRDITGKTGLAIVEAIIKGERCAENFLIYVDKNIRADHETIAKSLQGSWRTEQLFILEDCYRSYQFYKERIACCDVAIELQLKQYQSEFLPAEVVDEEVKSTKRATKNKPKFNTCSYFKAILGVDVTAIYGISDISTMEILSETGTDMSKWETSKHFVSWLNLCPNNKISGGKLISSMLMKKKPNTASQAFRNAANAVQRSNNWLGDYFRRMKAKGGNKYAMVATANKIATIYYKMVRNKQEFNPVDLQSYQQKYKQAKITYLEKKLNDLKREVA

SEQ ID NO: 210702 - protein, 391 aa, unidentified
MIYVGIDVAKDKHDCFITNSDGEVLFKSFTIANNREGFETLFQRIQSVSDDLTKVKVGLEATGHYSYNLLGFLLDKGLPTYVINPLHTNLYRKSLSLRKTKTDKVDSHTIASMIMSDVNLKSYSDTSYHNEKLKSLTRYRFDKVKERAKLKSSVSRLVCILFPELEKLVPQLHIASVYALLSEFPSAHAVASAHLTRLTHLLSESSKGRYGKDMAIIFREAARNSIGSNMPAKSLELKHTIKLIRELTSEIDEIEIEIKSIMDDINSPILTIPGISYRMGAMIIAEIGDFNRFNSADKILAYAGMSPSTYQSGQLDNCYSHMEKRGSRYLRYALYNATKYVCHWDPTFAEYLAKKRAEGKHYNVAISHAVKKLVRVIYAMEKSGQVYNKAS

SEQ ID NO: 210703 - protein, 342 aa, unidentified
MNPVSTVGLDLAKHIFQLHGADSAGAVVFRKKLRRGQLLAFLATLPPCTVALEACGSAHYWGREIAKLGHTVRLISPAYVKPFVKRQKNDMADAEAICEAAQRPTMRFVALKSANQQAAAVVFRTRDLLVRQRTQAINALRGHLTEFGVIAAKGPVHTSKLMAALEDPASDLPQAARTILAVLVEELRSLDERVAVLDREIARHAKENAVARRLMTIPGIGAVTAAALTALAPPAETFRRGRDFAAWLGLTPVQRSSGGKERRGRTSKRGERSLRRLLIIGASAVARWAARKGVPASSWLGRMLARKPPMLVRVALANTMARIVWALLAKGGVYRAPVVAAA

SEQ ID NO: 210704 - protein, 346 aa, unidentified
MDIMILGIDLGKNSCSVVGMDAAGRVVLRRRLRRGTLESFVGELGSCIVAMEACCGAHHLGRIFAARGHEVRLMSPEYVRPYVKAQKNDDLDAEAIAEAATRPTMRFVPVKSQDQSDLQALHRARERLVSERTALINHLRALLLERGIVVPQGRRKLEAELETLAEDGGFAALSPRIRTLIEDLRAEWRSLDQRITGFDAEFVQLARDDVAVRRLTKIPGIGTINATALAAAVGEAQAFKRGRDMAAWLGLVPRQMTTGGKPRLLGISKRGNRYLRKNLIHGARAALPYLVERDTPLGRWARGLLDRAHKNVVVVALAAKLARIAWAVLAHGCNYDAQFEAAAAAA

SEQ ID NO: 210705 - protein, 435 aa, unidentified
MEEVEDEPLFCERTAGIDIGKATVMVTPRVPSDTRKGGRAQETREFGTTRRELLALADWLRCWQVERTGMESTSDYWKPVYFLLEREGFDCTLYQASQVKALPGRPKTDKLDSAWLARITERGSLAGSFVPPEDIRRLRTRTRYRRKLVQMRTAQKERCEKLLEDAHLKLSSVISDIHGVSGRDMLGAIAAGERNPKVLADKARGVMRGKIKKLEEALDCSFFTEEHAFILQMMLDSIDQLTAQITVLDEKIAEMCRPYERQIEQLDDVPGFAITTGQDLIAEIGTDMSVFPTAGHLSSWARQAPRVTESGGKRKGKNATGRGNPYIGGTLGEASISVGRTQTFLGAKYRRLCTHMPKGKAQVAIMRTQLVIAHALLSDPDARYEDLGPDYYERKADIRRRAHSHARALERLGYKVTIEAIDTATGELLPVTAGR

SEQ ID NO: 210706 - protein, 398 aa, unidentified
MKQMNQTQPLNPGTSPGRTIGLDVHPDSFAAAILEGSDPLKARVIKSVTKQPLTTLEAWAAKHTLPLDLLIIEASSNTFSVVERLAKIGRRAIILESHRAGQIGKAYLANDKLDAAKIARIYLSGLATTVWKPDPVTRERRELLSTYQRCVKDSTRDQQQLRSYLNEHSLRLPVGFRLCRPEALPRLLKLKDWSPRQQILLTEMHHSLLAVRERRTRLRRMMALEIEGDPKLLRLYKLSGLSLITTYALVAIIGDVKRFAHSKNLVSYLGLNPSVVESGKSKGGGALQSHGRGPMRSLLIQASKMLLKTENPLQKWGLSVALRRGANKAAVAVARKLTVAVWHILMDHWSQSLEVTGTLVTKLGKLATDLGLPVLKELGYKSKIEFRERKLYQLQTVS

SEQ ID NO: 210707 - protein, 379 aa, unidentified
MASVAHLAPTHLGLDVHRDTISVGILAPGREVPVVERIAHDEASIRRLVGRLGDPRRLRACYEAGPTGYELARLLDRMGIGCEVIAPSLIPTAPGDRIKTDTRDCRRLARLHRAGELVAIRIPTPAEEAVRDLCRTRADMVEDLTRARNRLGKFLLRHGRVWRGGSAWTHKHEAWLGGQRFDEPALGTTYVHYRAVVATRHAQLDAVEVDLATWLDRPPFADQVARLAAYRGVTRLGGLTLAAEVGDWRRFARAAQFMGFCGLVPSEYSSGHSVHRGRLTKAGNAHLRAQLAWVGLDLPASTVCGPRDCRPPARAGPRGGRPRMGRAAAPVRSVPRPGRPQEHQIHRGRRDRPRTGRVLVGRDGGLTPPPPPQGVHHPC

SEQ ID NO: 210708 - protein, 338 aa, unidentified
MKLYGAIDLHSNNNMTVVTDEQDRVVYEKRLANDLELIVQQLAGYRDGLQGIVVESTYNWYWLVDGLMEEGHKVHLANTSAIQQYEGLKYTDDEYDARWLAHLLRLGVLPQGHIYPRQHRPVRDLLRKRGQMVRQRTMNLLSIQNLFSRNTGSSMSANGVKRLNSQQVESLFPETDLALAIQANLAMLGCADEQIERLEKTVIERVKLKPEFKLLKTVPGIGDILALTIMLETGDITRFPSVGDYASYCRCVGSKKISNGKKKGSGNTKNGNKYLGWAYVEAANFAIRFNATIKSFHQRKKSKTKNVVALKAVAHKLCRACYYIIRDQVAFDISKAFA

SEQ ID NO: 210709 - protein, 484 aa, unidentified
MDVLHPRCCGLDVHKSSISACILVQEAGRVQKHRRRFGAMTQDLQELANWLRQFEVTQVAMESSGVYWKPVWNILEGQFTVVLANAQHIKNVPGRKTDQKDAEWIAQLLQHGLLRPSYVPCEVIRDLRDLTRMRASLSQEASRISSRVQKVLEDANVKLASVATNTLGKSGRAMLEEIIAGQDDPEYLASLALGHLRAKTPQLRLALDGKIRAHHRFLLRRLLDQLRFVEHEIVLLDERLEEIGRERQELSQAVARWDTIPGIDRVAGWTLLAEVGFSMAQFPTAEQLASWASLCPGNHESAGKRLGGTTRKGSPWLRRMACQCAWAAARTKNSYLSAQFRRLASRRGSKRAIIAVAHSLIITGYYLQKNQRNCFRGRRPVSDGMRYAPNDRRARSTKKRRPAMQKISTRPISEKSIFKGPLIIGVDLGDRFSAYCVLDAAGEILQEQSADRIPGYARQVQLGLGTAMLPGLSDRGPCPEGALE

SEQ ID NO: 210710 - protein, 366 aa, unidentified
MLQKLNSALTLIQRTTTEAPRDDMYYIGLDVHKRTISYCVKDAAGHVHREGKIGSTRCELDAWIGMLPQPRMIAMEATIFTGWIYDHLLPHAENVKVAHPLMLRAIAAAKKKNDKIDASKIADCLRCDFLPECHMTPTEIRDRHRTLRYRNLLVRQMVQMKNRVSGLLMETGVSYNKRRLHKVGYFADLMSANEEVNQSIRPLLKLSREHILRAQKLDYALISSLERDPLLAERLKRLRTVPGVGPITALTWALEIGDFTRFRSIKQAISYCGLCGDERSSADKVMRMPLSKQRNKHIQRVLIEAAKLAPRECHELAMVRERELQKGNPNRATLAVARKMLSYMLAVERRKQNFVPAEKFKCTAAA

SEQ ID NO: 210711 - protein, 344 aa, unidentified
MSITMIGLDTAKSVFQIHAVDETGRTEIRRKLSRNDLIPFFKKQELCTIVLEACGAAHHWARILTGLGHDVKLIAPEAVKPFVKKGKKNDAADAAALCAAASRPDVKFVPAKSLEQQGILALHSARSLLVKQQTMLANAMRGLATEFGLTVPKGISKLEELTVLVDADETFPAKARQAFTGLFDQCKALTESIVTFEAEIVAHARHDETARRLATIPGIGPITASLIAATVGDIGMFKSARHFAAWLGLVPRQHSTGGKTRLGRITKTGNREIRKLLVLGATSMVYRAPQWNSAAGLWIRGVLERRPVRLATVALANKMARIAWALMTRKEVYQAKGRVAAAAA

SEQ ID NO: 210712 - protein, 396 aa, unidentified
MLFVGIDWASEKHDLCFLAEDGRILSEFTITDNLAGFHDLQARLMSFAEVKINIERSDGLLVEWLISQGYPIFITPTVVVAHRRPRRSKDDRGDAYLLAHLLRMGDPECRPLPRQSQVVEHLKHLTSAYDTVLQEQRRLTNRFVYALQRYFPAVLAAFRVPHGLTCLAFVETYATPEAAQVLSQADLVAFLRQNRYSHLYKAEVMYQVFQAPAPRSPFCEGYVASVKLLIPLLRCLYQQRKALEKQIVAVFNQHPEAAWWRSLPGAGGNLTPARLLAWIGDDRSRFPSPEVLQAVAGTVPVTRRSGKQLHVEFRHACSHQLRAAADDLARQSVKHSGWAKAYLNEQLARGHAAPRAYRALANRWLRIIWTLWQTNAPYDENKHVANRSKRGSHPLR

SEQ ID NO: 210713 - protein, 340 aa, unidentified
MDILDLLGLDIGKSTFHLIGHDAKGKEVLRKKFNRNRLLEFAARLKPCTIAMESCGGSHWLARKLLSFGHQVKLIAPQHVKPYVTGNKNDYIDAEAICEAASRPKTRYVAIKTVEQQVLSTQHRLREALVGHRTQTINRIHGFLLEFGIELPATKAAMNQVHQILDDPAAELPQQLKSFIEHLLEEMKRLNDEIKAIDRSIKEQMDTDDAGTRLMSIPGIGPIIASALLADVGDASNFHSSRDFAASLGLVPRQYSTGDQTVLLNISKRGDKYLRKLMIQGSRAVLVHIDKRTDALGTWCRDLLIRKHPNKVACALANKLARIVWAVLAHGVSYNAQSMT

SEQ ID NO: 210714 - protein, 402 aa, unidentified
MAYDCVIGMDVGKYFHHACVLDPQDRQVLSKRINQHEGSLRKLFGTYLADNASVLVVVDQPNNIGRLTVAVAQAMGADVRYLPGLAMRQLSRIHVGNSKTDVRDAYVIAHAGLNLPDALRSVDRVEEVFLQLKVLNGIDEDLARAYTRLINQMRSALVGTYPAFEHVLHGQMIHRKWILHLLAKYGGPTKIRRIGKARLAAFARGHRARNPEPVIDAMLAAIHSQTVSIAGAEYAELGVAMSAKDALAKLEHRKEIEAQVLELIQDIPQTEILLSMPGIGPRSAAQILMTVGDMSDFPDAAHLASYAGLSPRTNQSGTSIMSNSPNRAGNKKLKNALWQSSFASIRFHERSRQFYERKRKEGKRHNAAVVALARRRLNVLFAMMRSGELYRDISTVQEAAAA

SEQ ID NO: 210715 - protein, 355 aa, unidentified
MNSVRYIGLDVHRDTISAAVLNESGRLIQQSVLATRAAAILDFIGGMRGALHVTFEEGTHLAWLYDLLSRRVARLVVCNPRKNALMKSGNKSDAIDARKLAELLRADMLSPVYHGEKSAMEVQHLARSYALLTEDTTRVMARIKAVFRGQAIACSGKKLYGHKHRDEYLAELGSGALRRRAEFLYQELEAVQLLRRQAKRDMIVECRKYPETKLLCSVPFLGPVRAAVLIGRVQTPHRFRTKRQFWAYCGLALEMRDSGEYRMVDGQVERRKRPAQIRGLNWNHNHELKNLFKAAATSASACEGVFREFYLGLLKKNMQPEMARLTLARKIAAIALKIWKKGEAFDAEHLKLQAA

SEQ ID NO: 210716 - protein, 319 aa, unidentified
MGSFLGVDISKATFHACVLTDRGEGAKAFPNSTNGFKQLSAWLKNRLAVDVHCCMEATGAYWEDLALYLHGLGHRVSVVNPARIKAFAQSELLRTKTDAVDAALIARFCKSQIPPPWTPPQPEIRVLQALVRHCEHLKTTRAQQIVYAQSTGSPTVITSSMRKLIATLDDQIAQVEREIEQHFNDHPDLKGRRDLLTSIPGIGNTTAALLLAEIPHIDLFTSAKAVAAYAGLSPRDRQSGTSIRGKSRLCKTGNARLRKGLYMPALSARRFNPVFKAFAERLAAAGKHNMLILGAIMRKLLVLAFAILRSGKPFEPNHA

SEQ ID NO: 210717 - protein, 406 aa, unidentified
MRVVHERCAGLDVHKSSVVACALLPEGKQLRTFGTMTWQLEQLAEWLRSLEVQVVAMESSGVYWKPIFNILEVAGFELLVVNARHIKAVPGRKTDVKDAEWLADLLRHGLLKPSFIPHREERELRELTRYRRTLIEERAHEVQRLQKVLEGANIKLEDVISNVVGLNGRRFLSALMAGDYDPEAVAATANYGLQRKQALLAQALHGTLGAHQRFLLDQLLSHIDFLEHRIAALDQEVKQRSRPFEAAIARLDQIPGVGIRAAEEILAEIGTDMSRFPSDRHLASWAKVCPGNNESAGKRRSGYAGKGNRWLRSILVECAWCATRKKDSYFKAQYHRLAARRGKKRALFAVGHSLLIVIYHLLRDGVVYQDLGTNYFDQRDRSHVARQAIRRLERLGYRVSLSEGAA

SEQ ID NO: 210718 - protein, 312 aa, unidentified
MFIGIDVSKLRLDVYVRPSGDAFSVDNDAKGYARLVERLSPLGLSLIVLEATGGYQTAVVAELAAAKLPVAVVNPRQVRDFARATGEQAKTDAIDAAVLARFAEAIRPEPRPFPDELTLELHALVTRRRQLIDMRTAEMNRLDTCRIETVRRNIQKMIAMLTKQIDKVDDDIDKTIRRSPAWREREDLLSSVPGVGPTTARTMLTQLPELGRLNRREIAALVGVAPFNNDSGKRRGARSIRGGRSEVRGVLYMATVSAVRCNAQIRSVYQRLLAAGKKPKVALIACLRKLLTILNAMMKTQQPWRLNAPKAA

SEQ ID NO: 210719 - protein, 395 aa, unidentified
MKHILSFDIAKGKSVYCFIDEFKNIIIEPTLIEHNKNKFDNLLNLVKDYSNLIVVMESTSIYHLPVENYFRSKGIETIVMNPKLVKQFKDTLNKSKTDKLDCFKIARCYLGTIDNFYQKQDEYFMYNPLARQYWSLVEGQTRLKNRYKQLIEIIFPEFSLIFNDLYDDLALNFIHDFPHPTFFINRRIDYLMNYLKEKNGTTQAYRFKNKVLKMKELASNSLCYVAFDSLQVQNLVQVIEMIQFHKTEINKIKNQLINEMKNKNLFKIINSIPGFGEFSTALFLAEVGDVTRFDDKYQFISFIGIDSVTSQSGVSAYHGPISKTGCKFGRTILFNIVTTIIQISAHADKTNPIYLFFRKKQYEGKHHYKCIIACETKLCKIIYKLCSSNCLYENK

SEQ ID NO: 210720 - protein, 430 aa, unidentified
MKSNTQNAKIEAITEKTLVLGIDVGSETHYARAFDYRGIEYSKKPFKFSNTEAGFVTFKEWILDLKERHEKDKVVPGMEPTGHYWFNLGKFLQDNEMKPVLVNPHHVKKSKELDDNNPTKNDRKDPKVIAGLVREGRYMIPYLPDGVYADLRTASNIRFQLQAELTRIQNRISRWFNIYFPEYKTVYGKPDAKSGMLILKAAPLPEDILTLGIDGVNQIWRDAKLRAVGKARAKTLIEAAEHSVGSKEGAVSARMEIRMLLEDYESRNTRLQEVMVLIEELVRKIPMTEKLLEIKGVGIKTVSGFLAEVGDISRFNNPKELQKLAGLALVENSLGKHKGETTISRRGRKRLRYLLFEVAMSLVAKNPEFRELHNYYTTRRLNPLKKMQSLMAIAAKLIRVFYAMLTKGVDYDPKKMVSDIKRPAVYLQAA

SEQ ID NO: 210721 - protein, 474 aa, unidentified
MVTRAPEVILDEAHEQIVERVCAIDVAKDSGKVCVRVPAESGSGRRVSKVWDVPARTKAVIELGDHLACQGIQKVTVESTSDYWRIWFYLLEARGLDVQLVNARDVKNVPGRPKTDKLDSIWLAKLTEKGLLRPSFVPPRQIRVLRDYTRLRVDLTAERTRHWQRLEKLLEDALIKITAVASRIDLVSVREMIEALIAGQRNPRILAGMARGRMRLKHADLVEALTGQFDDHHAELARMLLDQIDALTVQIDTLTERIDVVLADIPAPAPQPEPDPDDHGPGTSDDAEVTAVIRPSHGGAPRPRTAARAVTALDLVDILDEIPGVGRHNAHEIIAEIGLEMTRFPTAGHLVSWAKLCPRTIQSGAKSSAGKTGKGNRYLRAVLGDAAAGAAKTQTFLGDRYRRLIKRRGKLKALVAVARSILVIIWNLLANPGMRYHDLGVDFHTTRMDTEQRTRNHIRQLEALGYTVTLTAAA

SEQ ID NO: 210722 - protein, 338 aa, unidentified
MTTGLAAGTYELFVGIDIAATTAEVSTQRPGAKAGRSFKIDQTPEGFHRLVHTLQATDNEPSHVLVVMEATGSYWMSLATRLVHEGFRVSVIHPSQAHHFAKALLKRAKTDAIDAQTLAQLAMVLQPEPWMPPPQIYYALQQRLAQRDDLLNLRQQVRNQLHALDQHPEVIASVRTRMESLLLLFQSQIDEVEGEIAAALNQDSAWAAAAERLQSIKGVGWVTAAWTLVTTLNFTTCDTVDALTAYAGLAPMPRQSGSSVWHRPSIGHSGNGRLRTAFYMATLTAARFNPAIKAFYNRLLEAGKPEKVARCAAARKLLHMAWAVVKKDQPFDPNYAQG

SEQ ID NO: 210723 - protein, 344 aa, unidentified
MASMYYVGLDIHKKTISYCIKDAAGSVYREGTLAATRNALDDWMKLLPRPWTAAMEATLFSGWIYDHLRPHAASVKVAHPLMLRAIAAAKKKNDRMDARKIADCLRCDFLPECYMAPKEVRDRRRVLRYRNLLVRQAVQLKNKTAGLLMETGVTYNKQKLHQPGYFGELLASNDEVEERLRPLLRLNREMLVRVEKSERALLRALQHDRLLADRVQRLMSIPGIGPVTALSWVLEIGEVKRFSSLDKAVSYCGLCGSEKNSAGVAQRTPLSKQRNRHLQTVLVEAAKLAPRWNPRLAEIYAREKAKSDHNCATLEVARRLVAYLLAVDRRLRPFVVAQKEAGAA

SEQ ID NO: 210724 - protein, 425 aa, unidentified
MNQDNQSFAAFIGLDKSDKKINVTLQRCSTARSERSIIQGSAEALHAWVAALCARFPHQRVAICVEQPAAGLIHALMGYDFVVLFPINPVTLARYREAFTPSRAKDDPTDADLLCELVAQHREQLKVWQPDDICTRKLRHLTQARRSSVNMRTRLSNQLKALLKGYFPQALELCGDDLTTPLACAFLQKWSSLQQLKKARPETIRRFYYAQNARRGDVIEKRLTLIAQAVALTNDPALIESSIITVQALTLGLRAAHTAIARFDREIARTFTQHPDASLFAALPGSGTVYSARLLAAFGSRRERFESAEALLNFSGIAPVLKRSGQTTIVHRRYARPIFLHQSFIEYANESIRHSLWARAFYQMHKAAQQSHWVIIRALAYKWIRILFRCWQERTPYDELRYLKSLQKSRSPLLQYLAQPNTQTV

SEQ ID NO: 210725 - protein, 378 aa, unidentified
MRFYNQAHRFYCGVDLHARTMYLCILDHRGQVVLHKEVPCEPAAFLEAIGPFRDGLVVACECLFCWYWLADLCQAQNITFVLGHALYMKAIHGGKAADDKTDSAKIAHLLRGGNLPIAYVYPKGLRETRDLLRRRMYLVHKRAEVVAHVVNTNSQYNLPPFGKKLIYARNRQALKIAQRFSDASVKKSIEVNLRLLDCLDDLIADVELYLERTVKVDDADTFYRLRSIPGVGKILALVLFYEIHDIKRFAGEGEFLSYARLIRPVKTSAGKVKGNGGGKIGNAHLKWSFSEAACLLARESDQAKRFLARKEKKHGKPKALGILAARLGRAVYHMLWQKKPFDPKRFWNGEPGVTPEKLKKSVVKRPRRAKGSRCVLQA

SEQ ID NO: 210726 - protein, 343 aa, unidentified
MQAITTIGLDIAKSVFQVHGVDAQGNVVFRRQLKRRYVLLFFQKLPPCLVGIEACATSHYWSRELQALGHRVRLMPPAYVKPYVKRQKNDATDAEAICEAVGRPNMRFVETKTREQQGCLTLHRTRHLFIRQQTSVINAIRAHLAEFGIVAPVGRRGVDQLLAVVADASDKRLPEVTRGCVAALGAQLQMLKAQILEFDRMIRVWHRSSETSKRLDAIPGVGPVLATALVASVADPKVFRSGRDFSAWIGLVPKQSSSGGKDKLGSISKQGDRYLRSLFTAGALAVIRYAKIHGTRHRPWLTALLARRPTKVAAIALANKLARMAWAMMARGERYREPAALAA

SEQ ID NO: 210727 - protein, 339 aa, unidentified
MTTLATIGLDLAKNVFQVHGITAEGKVLVRRQLRRGEVLKFFQGVPPCLVGIEACGTAHHWAREIAALGHTVKLMPPAYVKPYVKRGKTDAADAEAICEAVTRPTMRFVAIKTTDQQAALMLHKTRDLLVRQRTMLVNGLRGHLAEFGIAAAKGPGGVKTVIEALHEAQDQLPELARLALHGIVEQLGHLGTEIERLEARILAWHRASDVSRRLATIPGIGPITASAIAAAVPDGTLFRSGRQFAAWLGLTPKAHSSGGKERQVGISKQGDGYLRRLLVVGATAVMRLARKDNASRSWATKLLERKPAKLAAVALANKTARIAWAVMTRGKTYEAPAAA

SEQ ID NO: 210728 - protein, 411 aa, unidentified
MRLIFVGDDWAEAHHDICVIDEAGKKLAKRRVPEGLDGVNQLHALVAAHASDPAEVVVGIETDRGLFVQALIAAGYQVYAINPLAASRYRERHSTSGAKSDPGDALVLAELVRTDRHNHRPVAGDSELAEAVKVLARAQQNLIWVRQRQLNTLRSTLREYYPAALEAFGDDLGSRDALAVLGRAPTPALGKALSAAKIAAAVRAAGRQRNVETRAGEIREHLRGAHHLEAPATLAKAYGATVKATVGILTEMNAQLAALEEELKSSFETHPDAEIIVSLPGLGTVLGARVLAEFGDDRTRYDDAKARKSYAGTAPITKASGKSKVVLARFARNSRLADACYLWAFSALSASPGARAFYDAHRAARGPNDKDAHSKALRALANRLVGILHGCLRHHSPYDEAKAWHREEAAA

SEQ ID NO: 210729 - protein, 391 aa, unidentified
MFYIGVDIAKNNHEASIIDSNGKLVSESFSFSNSIRGLEKFQKFISSFSIDSNNCIIGMEATGHYWLSLYSFLIDLGFSCIVINPIQSDAFRKMYIRQTKNDSVDSFVIAQILRFGEFSVSHFSDEDTFALRNLSRFRFALVDEASDWKRKLVCILDQVFPEYSSLFSNIYGVASKELLSKYPLPEDMISIPADELAKMLSKCSKGRFGIDKAKEIQEKASNSFGVKFALKSFSFQIKQIIAQISFLEDQIADIEDEISSMINSLCPVITSITGIGDVLGAAIFSEIGDISRFERANQLVAYAGLDVAVKQSGNFNATDTKISKRGSPYLRRAIWLAASVAAFKDPALSVYYQKLRQRGKAHGTAIGAVARKLTNIIFAVLRDNKAYIPNI

SEQ ID NO: 210730 - protein, 318 aa, unidentified
MPQESRIVGIDVSKRKIDACIRALGLRQTLASTPDGHEELVGWLRANGVGTAVMEASGGYERPWADALRTAGIKVRIVDPKRVKYFAKSAGRLAKNDRIDAETIAWFAETFPVGVVVAHDPERAALERLVKARASLKDLETRLTQQGEHQQPSLVSKAHGRILKSMRAERRKLEAAIAAKIKANPVLARRAEIIESVPGLADLASAGIITWLPELGEVPNKAASALLGAAPFDDDSGAHKGKRFIKGGRRKLRNLLYMPLVGAVTQHNPVLKAHYLSLIARGKEPKVALIACMRKLIVILNTMLARDQTWNPPAQATA

SEQ ID NO: 210731 - protein, 450 aa, unidentified
MQFMKKKAGFPVLYPNAAGIDIASREHYVAVNPDAAEQSIRSFGSFTDDLHEIAAWLLQCKVDTVAMEATGIYWVSLYLILEEAGFEVVLVNAKHVKNVSGKKSDVKDAEWIRQLHSCGLLSKGFQPDHFTRTLRAYMRHRKNLTEMAATHIRMMQKALEQMNIKLQNVIADITGKSGQAIIKAIIDGEHDPQNLVKLLDGRIKATKESICKSLHGIWKTENLFELKQSFDLYHTYQEMIKECDLHIKGHIEEKASYCESDQIQSLYQVKKKYKTNKNNLNFDATDMLQKIVGTDLTEIFGITDTNATEIISEIGLDMSKWPTAKHFTAWLNLAPNNKVSGGKLISSRVPRKRNKAGQIFKMAAFAVQRSKNWLAIFYNRIKMRSGTSRAVTATARKIAVIFYKLMKEKLRFCPLDRDQYLESFKVRQLKKLKQQATRLGLVLVPDNLVT

SEQ ID NO: 210732 - protein, 340 aa, unidentified
MKRYLGVDLHRNCFTVCTLGEDGKSDLRKWSIHSLGDFAQGVQATDAVAVEATGNARFFCQALKERGCRLVVVNPQQFQVISRSVKKTDARDAKTLAEFLAKDMLPEVRMKEALPAEIASVLQTRDKLVKLRTVLKNKINNLLAGRGILIRRESLSSDKGLEQVLQAPVSDLERVELEVLVGQIRHLNDSIRRLEAAIKDQGPKLPGYENLKSIKGIGDIGGSTLLSTIGDIHDFASEGKLAAYFGIVPRVQNSNETERSGRITKRGSKLGRTVLVQCALIAMRYSPYLANYYARLKAARGTGKAIIALARKFLGIIYKTLKNGWVFEDFPAFVLAPAAG

SEQ ID NO: 210733 - protein, 409 aa, unidentified
MDTVIARCAGIDVHQATMVVSVRLPGPAGGRVTHTQTFGTMTVDLVVLRDWLQAHGVTHVAMESTGVYWRPLYYLLEEDFTLTLVNMKHLTHVPGRKSDVRDSDWLAQLLECGLLRGSLVPPAPIRDLRDLTRYRKRQIEDRAQEVNRLYRVLEDAGIKLASVLTDVMGVSGRAMLDALLHGTTDPAVLADLARGRLRQKLPALQQALRGRFRPHHAFLVTQILTKVDFLEETIATLTTEIDRQVAPFEPTLTGLMTIPGIGRTNAVTVLAETGGDMARFPDAAHLCSWAAMCPGHEESAGKRRTGKTREGNRYLRGALVEAGLASTRARGTALQARYYRIKRRRGHKKAVVAVGHQILEIAYYVMRDGVTYQELGADYFDRRDRERTIRRHVKHLETLGYVVTLQPAA

SEQ ID NO: 210734 - protein, 372 aa, unidentified
MQQKSKVFVGLDTSKLKISVAVAEDGRQGEIRFLGEIDNTPEAMRRLVHKLASRHSELLFCYEAGPTGYGLQRQIAALGHECAVIAPSLIPKRPGERVKTNRRDALTLARLHRAGELTAIWVPDPGHEAVRELVRAREAAMEDLREKRQHLQSFLLRHGRIFPGRQPWTRAHARWLAELVFEHSAQYLVLREYRQAIEEAEARLDRLTQQVAEVVATWSMAPVVEAYQALRGVALLTAVTFVAEIGDVRRFDSPRQLMAYLGLVPCESSTGERVRRGRITKAGNARVRRVLIEGAWTYRFPARMSRLLQERQKGLPAIVRAIAWKAQVRLCARYRRLMAAGKRQTVVTTAIAREMAAFLWAIGREIEPRSAA

SEQ ID NO: 210735 - protein, 412 aa, unidentified
MTKNHILGLDIAQHSAVVQLDRADGSKCWRGTLTTDQAGWQQLEQLLAAQDARLADTLVVIEATGVYHLAWAERLTKAGAEVYVLNPLLAARLESAANALRGHKTDRIDVARLCEGSRLYYAEFARFRYQSRPAQQGLKQLDHARRQLRRTLTNLKKSFKSHLELVFPALLAARIGPYTVRAGRILAAAPTAGAWRALSEAKRRELAGDQRAALDQACTETLTDEALAQACVPAMRALLQAQQAMADQLHDCQEEITPRLPAERVALIASIPGFGQHTAAVMATYLPPSFEGWGRRKHIAARVQALFGFDPRLRSSGKPVGNLKMFKRGIEAGRTALFQAAFCSLLHDEENALYYKRLREVEKKEHKEALVDVMRKQLRRLVAVLCRARPFEQRSASAKTQRAGRKKSHRAA

SEQ ID NO: 210736 - protein, 461 aa, unidentified
MKHNPKREANKGRVSISLLERIQPDAAGIDCGQNSHFVAVPPDRDPQPVREFRTFTADLHRLADWLTQCGVKTVAMESTGVYWIPLYEILEQRGFQVVLVNARDVHNVPGRKSDVKDCEWLRELHSVGLLRASFRPSAAIVPLRAYLRQRETLVQETSTRIHRMQKALTEMNVMLHVVVSDITGQTGLKIVRSILAGERDPERLAQHRDHRCRASHAEIVAALTGNYRAEHLFALKQNFAAYEFLLKQTAECDSEIEALLSTLADRQPPPTAPLPDARRKQVSKHAPAFDVGGPLHRLTGGADLSQIDSIGPHAALQLIAEIGTDMRRWPSEKHFTSWLSLAPSNQISGGRLLSSRTRPSANRAAAILHRCAMSLSRTSTALGAFYRRLAARVGKAKALTATARKLAVIVYRVLSGNLVYNDPGATAYHQLHHARELKSLRKRARLLGFQLVDQTTGEVTA

SEQ ID NO: 210737 - protein, 367 aa, unidentified
MSKAETGRLCVGVDLHKTQFTICALNEDGEYLLEKQYPTKEEGYREFAREMHRFEEQGCSIELAVETTGNARFFKNRMESEYFAVKVVNTNRFKVITMSTKKTDANDAATLAYYLMKDLLPEAHLCSQTSEEIRRLLKTRSVLVQSMVKIKNQIHGMMLGYGIETKAAQLQSKRKRQELINDLEDHNFSAYTAPSLKVMLKILDDLSAEIKGIEKLLEEMVASNEDVALLMTVPGIGINTATVIAAYTAELERFDGNYKKFASYVGIIPSVHNSNETTHYGRITKHGPQELRTAFVQAALGMIRLTNVSSDWRIIKEYQRRKGDKGSGRAIIALARKITRIVFVMLSKREGFNPEMMRCEEAIQQTA

SEQ ID NO: 210738 - protein, 379 aa, unidentified
MARRREMVLREADTTKAPTIYMALDLGRRRWTVGLLLPGDRDARLFQIAGGDREGLSRLIRHRREMIGAGVRVVSCYEAGRDGFWLHRWLREQGIDNRVLDPASLEVPQRRRRVKTDRVDTLGLLRVLLRLDRDETEMTRVVWVPSPPIEDARQQTRERERLVKERTAHHNRILGLLAAQGVTSIKVGGRDWLDQLTAARTGDSRPLGAALLGDIRHEVERLVLIERQIEEVEAARRAALKSDTPLAARACKLKRLKGLGEVFATGLTHEAFWRDFANRRQVGGAFGLTPWPWDSGDTHGDQPISKVGNRRARTLAIECAWMWTFHQPGSALTRWWRQRFAGGGKRQRRIGIVALARKLMVALWRYLKEDLIPEGAVFA

SEQ ID NO: 210739 - protein, 382 aa, unidentified
MTGTEPHAWGTGLMDDIIFVGLDVHKATVCIAVAEGGRGGDVRQLGVFENRPEILNKVVSRLSKGGRRLSFCYEAGPCGYGLHRLLTGYGHECVVIAPSLIPMKAGDRVKTDRRDALMLAKLHRAGELTAIWIPDAAHEAMRDLVRARATAVRVLVKARQHLQGFLLRHDRIYRGARAWTLAYRRWLSTVRFEHPAQQIVLQDYIHAVQEAETRRDRLTQQIEELLPNWSMAPVVAALQSMRGVALVVAVTVVAEVGDFRRFANPRQLMAYLGLVPSEHSSGSSVRRGGITKAGNALARRVLIEGAWTYRMSARVSRKLHDRLEGLPAAVRDIAWKAQLRLCARYRRLTAMGKSKVVVTTAIAREMVGFIWAIARLAQPALV

SEQ ID NO: 210740 - protein, 462 aa, unidentified
MKLYLGGDVSKGYADWVILSEKKQAVLDNFQLDDTYAGHCKLYAMLEAYFGKHRDLEIYAAVESTGGYENNWFSTLKGYQKVFNLKVARVNPAGVNFNRRAGLKRNVTDAISALSIAEYLINHPDNIKYDQDDQWKSLCRHWNFVEMQKQQRVQTINQLETILYSANPTLMRFKKDNLPNWLLELIIQCPTAETLAKARPEKLAKIPYLSLARAKTLVTEAKQSIASATDKNAEILVSQIARQIKSFDQNIKSQMQLIERDLTCPEIEILKTFKGIDTVSAIGLLLEIETIERFPTVKGFSCYYGLHPKFKQSGDKIIGVRMSKQGSKNMRKILFNIAKGAITYNPLITAVYEKKLSQGMSKMAAIGVCMHKVLRIIYGMLKNKQAYNPLIDKQNCERSKDKQQEKQQQENANIDKSRRYQEFDVKAPISRKQTKKRREHDLSQCEITSQGAGSSCSSETKL

SEQ ID NO: 210741 - protein, 457 aa, unidentified
MGRKGKRTEGLEEAHPFTGMSQVNPNAAGADIGAVEIVVCVSGDENTQIVRVFGNYTVDLQAIGKWLKEYDVKTVAMESTGVYWIPLFEELERQGFECLLISSRSLRRVAGRKSDITDAQWIQTLHSYGLLENSFRPQAELIALRTLLRHRSQLVEHRSPHILHMQKALLQMNVQLSQAVSDITGVTGQTILRAILAGERDPQELASMREPGCKKSAEEIGKALTGTWREEHLFILKQSVEMFDFYTRQIQSCDEEIERVYGLTRPDWETGEVRPLEQRKRSSHSKNRPHNPEGIRKHLKRISGVDLSVVDGFGVSLAQTVIMEVGTDMSKFPSEKHFCSWLGLAPKHEISGGKVLKNKTLKTKNRAGQAFRMAAQSVKQADCVFGVTYRRLKARLGPAQATVATAHAIARVVYRMLKYKVEYETISVEEYEKKYQVQQLKYMSKKAAKLGYQLVPA

SEQ ID NO: 210742 - protein, 391 aa, unidentified
MILAGIDVAKDKHDCFIMNSDGEILVKAFTFSNNLEGFNFLYEKIRSVTKPKDKIKVGLEATGHYSYNLLGFLLNKGLPTFVINPLHTNLFRKSLTLRKTKTDKVDSRTIAMMLMSDVSLKPYTDTSYHNEELKSLSRYRFTKVQERSKLKTSVSRLVQILFPELEKIVCTIHMSSIYHLLEEYPGASYIASVHLTKLTNLLMEASHGRYNRNIAIKFREAARNSIGSILPAKSLELKHTIKLIRELTVEIDEIDAEIKKMMDSIASPITTIPGIGYSMGAMIISEIGDFSRFSSPDKILAYAGLSPSTYQSGQLNNCYSHMEKRGSRYLRYALFTVAQKVCIWDNTFAEYLSKKRAEGKHYYVAISHAVKKLVRVIFHLERTGQAYLKAA

SEQ ID NO: 210743 - protein, 341 aa, unidentified
MYYIGLDVHKKTISYCVKDAAGQVYREGRIDATRKALEAWINTLPQPRTMAMEATMFTGWIYDHLQPHAEAIKVAHPLMLRAIAAAKKKNDRIDASKIADCLRCDFLPECYMAPTPIRERRRSLRFRHLLKRQGVQMKNRVSSLLMETGVEYDKQRLHQAGYFQEMMRTNQEIDRSIRPLLQQGREHIQRVEKTDQALLRSLEQDPVLRERVRRLRTIPGVGLITALTWVLEIGDSSRFSSISKAVSYCGLCGAEDRSGDTVKRTPISRQRNKYLQHVLVEAAKLGPRYNDGLARVHGRELERGNRNRATLAVARKLVAYLLAVDGREKDFVPEEEELVAA

SEQ ID NO: 210744 - protein, 335 aa, unidentified
MNYTHFVGIDVSKNTLDFTVLQGTNICFQTREENGMQGIRKFMKQLKAQPDFSLEQTVFCMEHTGIYNQHLLEFLSHLKAPVCLESSLHIKQSSGLQRGKNDTVDALRIAQYAYKNREELRLWQPPREVIQKLKHLVVLRSRLINVKKQLTTPLKESSTFIDKSLTRQIVALCKNSIASVEKDLQKTEKEIQQLVASDDQLSKLFSIITSVDGVGKVTASAMIITTNEFKDIREPARFACYAGVAPFEHSSGTSIKGKTRVSPKANKAMKTLLHLSAISAIRNNADMKAYYVRKIAENKNKMSVINAVRNKLVWRVFACVRNNRLYQEKYVSALG

SEQ ID NO: 210745 - protein, 322 aa, unidentified
MSQPGSLCVDIDVSKAILDIAASSAIEQFSVGNDSDGFDAIIAELRMYAIALVLMKATGGLETAIVCALQAEGFELAVVNPRQARDFARAMGYLAKTDSIDARVLSQMAEVLNRHPERERFIRALPDTECQVLTAMVVRRRQLITMLVAERNRLHPAHPLNRKSINIIIKALEDELARLDADMNSHIHSHFKELAKRLSSIKGVGTMTAAALLAEVPEQGNLSRREISVLVGMVPVNRVSGTMRGRRTIFGGRAGVRTALYMAALVATRFNPVIKVFYMRLLAAGKPKKVALVTCIRKLLTILNAMLRKNEEWNESYHHVAP

SEQ ID NO: 210746 - protein, 408 aa, unidentified
MSYVMAFDVSMGKSAVVIYDDNQQCHYEGEVEHTTVGSRSLKEQINLVRKLDGQLPEIVFEATGVYSQGLERFLQNEQYPYSRINPLQAKLQMATGSMRRHKTDISDAHELAKSHFKTERNKTYVHEEYFEQMRALGRYYDDLEHESRQYANRLHAFLQLSFPLLEDVFSRSSLHFLQIVQHYPHPDLIKGLSLEEIQSRVKETSLKNISLQQAEKKAALLLAAAENSYPAIQATDVRCQHLKECAQRVKELKRQKKEIIKQMVQLSKERSDFQVLISFPGIGEATAVRIIGELGDIRRFQNNKQVNAYAGIDIQRYQSGKLHYQDRINKRGNRRLRKILYFMVISMISLRKRTQNTIVDYYDQLKKQPQSKPHKVAVIACVNKFLKVAFHLIQHSIPYNYAFAMASA

SEQ ID NO: 210747 - protein, 381 aa, unidentified
MTATRDHEYSVFDPVLYLAFELSNVHWKLGFATGPGRRPRERTINAGDLAALQEEVRRAKKRFELSGDIRVVSCYEAGRDGFWLHRFLLAQGIENLVVDSSSIQVNRRARQAKTDGMDVEKLLSQLIRYRSGERDVWSVVRVPSLEAEANRHLHRELGTLKKDRTRHINRIKSYLVGQGIRIKVKGDFLEEIERVRKWDGSALPDSLKTRLQREYERLQLVQEQIKGLERERVEAIRHSEEESVKTVRNLLRLKGIGQNASWLFVMEFFSWRKFSNRKEVGALAGLVPMPHQSGASYREQGISKAGNRHIRAMAIEIAWGWLRFQPESELTKWYERKFGQGSKRIRKIGIVALARKLMIALWRYLETGAIPEGAVLKTRLI

SEQ ID NO: 210748 - protein, 443 aa, unidentified
MKELPVLDSRAAFCDVGSEHMHVSIAGGLPKVFGTFTSQLHELRDWLLGEGVHSIAMEATGVYWLSLYGVLESAGLEVVMVNGRQTRNLPGRKTDMKDCQWGATLHAHGLLKAGFVPPSHIRKLQDYQRLRTDHIASAASHVQHMQKALERMNIKLHNVISSLMGVSGLAIVHAILDGERDPAKLLELCYSTIRHKKAKDVIEALRGTWEPEHLFALRQALQSWEHYHRQIAECDQQIQLLLQEITFNDTQGGGIGEKPKATAGKHPSANAPQISGLHRMLIDLCQGKDLSILPAHTDYSILQIISEVGTDLSKWPTEKHFTAWLGLAPGTSQSGKRKSNVKHSRSRVGRYFCIMARSLARSKDMALGGFYRRLAARRGGLIANIALARKLAALFWRVMVKGTGFVEEGLAAYEAKFLEGKKRSLRRLARELGQAVSPIPVTV

SEQ ID NO: 210749 - protein, 347 aa, unidentified
MRFYTQQHRHYCGIDLHARTMYVRIIDQDGTILVEKNIPARPRPFLALIAPYRDDLVVAVECMFTWYWLADLCHEEGISFVLGHALYMKAIHGGKAKNDRIDAGKIAALLRGGMIPRAYVYPREMRATRDLLRRRLHLVRHRGRLLAHIQNTNHQCNHDAFGAKLTYKANREGVAERFEDPSTRKSVEVDLALIGHYDGIIRDLELFIIRMAKQHDADMFHRLRSITGVGKILALTILYEVHDITRFETVQQFASYSRLVKCSRESAGKRMGTGGAKIGNVHLKWAFSEAAVLYLRANPKGQKYLARLTGKHGKGKALSILAHKLGRATYYVMTRSRNFDGKKFLAA

SEQ ID NO: 210750 - protein, 313 aa, unidentified
MIITLRCIGIDVSKRHLDIFDEGIGVSERVANAPHAITKLVARWRCDVLVVFEATGVYDLGLREALRAAGIRFARINPARARDFARASGQLAKTDPIDARMLAAFARAMRPAPEQVSTPARNALARLAKRRDQLVLMRAQEKNRRSEAGDRAMVERICRLIEVLDHEIAEIEADISALIKAEPEISHDAQLMRSLPGVGPVACMQLIAQMPELGHVGPKQAAALAGLAPFNVDSGAYRGKRKIRGGRKRVRNALYMAALNAVRRADRFKAFYAKLRQAGKPAKLALIAVARKLLIILNAIMRDRKAYVPAQQT

SEQ ID NO: 210751 - protein, 397 aa, unidentified
MTESSDYESVQVFIGVDVGKDTHHAVAINRSGKRLFDKALPNDENKLRSLISDLKQHGQILLVVDQPATIGALPVAIARSEGVLVGYLPGLAMRRIADLHAGEAKTDARDAAIIAEAARTLPHALRTLKLADEQIAELSMLCGFDDDLAAQTTQASNRIRGLLTQIHPALERVLGPRLEHPAVLDLLQRYPSPEKLASLGEKKLAAQLCKLAPRLGKRLAADIAQALAEQTVVVPGTNAAAVVLPRLALQLITLRKQRDEVALEVEQRVLAHPLYPVLTSMPGVGVRTAARLLTEVACRAFAFAAHLAAYAGLAPVTRRSGSSIRGEHPSRRGNKALKRALFLSAFAALRDPLSRAYYTRKMSQGKRHNQALIALARRRCDVLFAMMRDGTFYTPQG

SEQ ID NO: 210752 - protein, 353 aa, unidentified
MIIIGVDFHPEFQQIAWVDTDSGEFQEKRLAHREEPEKFYRALAGKKVRVGMEASGHAGWFERLLAELQFELWIGDAAEIHNRRVRKQKTDRQDARLILQLLLENRFPQIWVPNWENRDLLQLLWHRHRMVQARTRLMNQLQAVALNEGLRCKKRLWRERGRQQLESFRLAPWASRRRQDLLELLDRLNPTIAELTQAIEQEAEKCPAAQQLRTHPGVGALTALAFVLIIGEADRFHCGKQVASYLGLVPLEDSSGKRRRLGHITKQGSSILRFLLVEAAQVTVRRLPEWRSKYFHLALRRGRKIAKVAMARRLAIALYWMWRKRCDYEQVKKFGSQGRKLSSHAVATKGSIR

SEQ ID NO: 210753 - protein, 419 aa, unidentified
MSKSLFCGCDVASDNNTIWLMLDDGSQPVKLFSVDNNQPGAEILVERVYSIAKEHCVSDILIGTEATSMYDWHLLEYLAESKLALEFNFKLYRFNAKWIKNFKKSLTPRGKTDPIDSFAIAERLRMGRLPKEYVPDIKYQPLRKLTRFRFHLMQQIAREKDFFLANLFLKASAYSQIKPFGSTFSATSLSIINDFFSVDELAAMPIEELTEFILEKGKAHFSKPDEIVDNLKRVARESYRLKPELAPTVNLILASTFNNIRCYKEQVKLVDSAITENLKAFKHTLESISGIGPVYAAGILAEIGDVHRFQDDSALAQFTGLTWPKHQSGKFQAEETRMSHTGNQYLRYYLVEAANSVKRCDATYKAFYEKKYKEATKHHHKRALVLTARKLVRLVWTLLTKQVLYQPGYCSFEDLSKIG

SEQ ID NO: 210754 - protein, 354 aa, unidentified
MSQNPNVTIAVIGIDIGKNSFHVVGHDQRGSIILRQKWSRGQIEVRLANLPPCLIGMEACVGAHHLSRRLKALGHDARLMPAKYVRPYAKGQKNDFNDAEAIAEAVQRPTMKFVATKTADQLDLQALHRVRERLVSQRTGIINQIRAFMLERGIAVRQGIRFLRTELPIILASRTDVLSPRMLRVIEDLAGDWRRLDERIETLSREIETIARQDAGCDRLMSVPGIGPIISSAVVAAIGSGDVFSKGRDFAAWLGLVPKQISTGDRTILGKISKRGNRYLRVLFVQAAWVVLVKPMSWERHGLKSWIEAAKKRLHHNVLAIALANKLARIAWAVLAKGRGFEATRTIDGSTQPA

SEQ ID NO: 210755 - protein, 374 aa, unidentified
MEKSITYAAMDTHKKLHKVALQYHGNSEITEFTVKNTVAEIRKMVRKISKQTSNKIVFCYEAGVCGFTLKRIIESMGCKCSVIAPLLIPRKLGERVKTDRRDAKKLLMLFKSGLLAEVQAPNEHDEAARELTRLRDTARENLKRIRHQLLKFLMRHGYVYTEGRHWTQKHIAWLRNIELTEPILKKVFNSYFEQMVYCMCRLDNLDREVEQLAQSKGYQEMVGILRYFNGIDTLTAITFLTEIFEFGRFESARNLMSYLVLTPSEDSSGDKREKGAITKTGNKRIRRILTEVSWHYRHKYVPSTALKKRRQNQSQWAVEIADAAGRRLIRRYWHLINNGKMPTKANIAVARELVGFIWFMITQYHARKNIKDAA

SEQ ID NO: 210756 - protein, 325 aa, unidentified
MAHSHDVVGIDVSKGNLDVYVLVHQQLRTVTNTAAKHAELASWLKSLGVRVAVMEASGGYEQAVAGALRRAGFEVRVVDPKRVRHFAKAAGRLAKNDRIDARMIAEFGAVFAVVEQCEVPTDPAREHLASLVGARQALIEHEIGLRNQISAAPAGAARLALAAVLKPIAGAIKKLDRLIAATIAAHPPFAALAARLDTVPGLGPVAIAGLIAWLPELGRLDRRALAALVGVAPFDDDSGKRTGRRSIQGGRRKLRNIVYMAGMGAATRHNPVLNAYYTALINRGKLPKVAIVACLRKLLTMVNAMVAQQKDWEPRLATGPSACAV

SEQ ID NO: 210757 - protein, 340 aa, unidentified
MNFTTYGLDIAKRVFQLYWVDHESGEINSRKLGKQDLLEFFARREAGLIALEACGSAHWWRRKLMALGHEVKLIHARFVRPFVQGNKTDAADAKAIWTAIRQPGMRTVAGKTEEQQAMLALHRMRMSLIKFRTMQVNQLRGLLYEFGITLKGGRQAGLAEIQQRMAELEESVPGMLFEAVKEQLKRLNAIETDVLDIERRIKDWQKQQEACRKIAEIPGVGLLSATALVATMGEAGSFKSGREFAAFIGLVPRQSGTGGKVKLLGISKRGDTYLRTLLIHGARAAMFRASDKNAWSESLLQRRPTNVAVVAMANKMARTAWAILAHGRAYQKGYVSQAPA

SEQ ID NO: 210758 - protein, 408 aa, unidentified
MRLFVGVDWAEDHHDVCVMNSDGRVLSKGRVSNDLAGIAKLHDLIGRAVPTEVDDDPEIVVGIETDRGLVVRALVAVGYRVLAVNPLGVDRYRDRARVSGAKSDPGDAKVLADMVRTDAHQHRPVAADSDLAEAIKLVARSHQSAIWSRRRLANQVRSSLREYYPAALEAFDDLAHSDAIAVLSIGPTPELGRTLSRSKIAAALRRGGRQLNIDTRAEKIQATLRSEHLTQPAAVAAAYGAIVASLVKVIAAHNTQITELEAVLTDHFSQHPDAAILRSLPGLGIVTGARVLGEFGDDPTRYDTAKARRNYAGTSPLTVASGTRRTVRARHIRNKRLADALYWWSFNAISRSPGARALYDHRRAVGDTHSGALRVVSNRLVAILHGCLRHRTLYDEHTAWAHRHDIAA

SEQ ID NO: 210759 - protein, 354 aa, unidentified
MLIIGADYHPSFQQIAFCSQDTGECGERRLNHSDGEAERFYRELKQRGISVRVGMEATGYSRWFERLLRELGFELWIGNAAEIKTRRVRKQKTDRRDAQLLLQLMLEDRFPRIWAPSSENRDLRQLLWHRHRLVQMRTRIANQLQALAMNEGKRCKKLWSAQGRAELEKLQLAPWASRRRQELLELLDRLHPTIEELTTAVEQEAGKRPEVLRLMTHPGVGPLTALAYVLIIGTPERFRCGKQLGSYVGMIPSEDSSADKQRLGHISKQGNSLLRFLLVEAAQAAARINDEWRRRFVHLAMRRHRSIAKVAMGRRLAIRLYWMWRNQCEYSPSFEFGSYVGQLGTGHSVKAPGN

SEQ ID NO: 210760 - protein, 364 aa, unidentified
MNTQTTAIPKLFIGMDMHKKSWSLHFRTDLFDHRGFSMPPSSEQLYDHVQKTFPDHEVSLTYEAGCCGFSAARYFLNLGWQVKVVNAADVPIANKQIYQKTDKIDCRNLCRQLQDGRLRGIHIPTENQEQLRSLLRHRNNIVKQLRREKQLIKSMLLYVGIQLPGEYDNPNWSRNFKQWLQDLHWSHTTGAFSMQSKLRILETLHKEYLQTGNELRYYCRIHHNKDYYLLKSIPGIGGYLAAALLAEIGDIRRFSNEKEFSSYIGMVPGISKSGETEKHMGVTPRCNSLLRSYLIESAWVAIRRDPEMQAYYRKHIGKNIKCIIVKVAHKMVKRILSVIKNENPYVINYQLKNKNIQVETTIPS

SEQ ID NO: 210761 - protein, 343 aa, unidentified
MREVITIGVDLAKNVFQVHGVDADGGVIFRRQLRRGQMLPFFNKQPACLVGMEACATSHHWGREIEALGHRVRLMPPSYVKPYVKRNKNDMADAEAICEAVRRPTMRFVEIKTPEQQSVLMLHRTRHLFVRQRTTLINALRAHLAEFGIVAGVGRNGLARLLTVIENGEDDRVPPTARECLLALRDQLEMVKGQILDADRRILVWHRSSEVSQRLDDIPGIGPLIATALVASVPDPHAFKSGRDLAAWIGLVPRQNSTGGKDRLGHISKAGNRYLRMQLVVGALSVIRRAQQVDYTRRPWLTKLLQSRSKKVAAIALANKNARTAWAMMAHGTYYQEPVSQAA

SEQ ID NO: 210762 - protein, 431 aa, unidentified
MTRRKSTPPEAALVAIDVAKHRNEVLIDPGHGRRRRMTVLNTRADHDRFIATLHALARPVIVGIEPTGNYHRVLAHRLIVAGFEVQLISTMALARTREALHNGWDKNDPKDAQVILHMLRIGATMAYQDPLAAGINDLQELSKTHEVVSKAKTEIWHRLLTHYLPLYFPEIERFAGNSRSDWFLAFLERFPTPASITDLAKDAFVAAAWNVAGGKVSKARLLGDIYETACTSAALPVPLDAPAIAMFRLVLAEARSLVRQRNVIEAQARELLRTHPGYLRLCQVPGIGPIHALTILAEAGDLRRFRHHRQFLTFCGFDLATHQSGQFRGQTRLSKFGNARLRRTFWLAAQVAIQQRDNSFRDHFGRHIAKDRDNKDLRRKALTAVAAKMARVAHALVKTGTDYRPFSEVRYQVEEPRSVGAVRAWPEASTL

SEQ ID NO: 210763 - protein, 349 aa, unidentified
MPKSNTAVVTIGIDPGKNALHLVGLDARGAIVLRERVARARIVSRLANVPPCLIGIEVGMGTHYVTRELLALGHDVRQVPPVYAKPFRQTHKNDFRDAHAIAEAVQRPTTRCVPPKADEQLDLQALHRVRYRLVGQRTAIINQIRCFLLEHGIAVRQRLHWLRQALPDILAQRADVLSPRMVRILEDLAQDWRRLDDRIQAVSGEIEALSKTTEPCRHLMTIPGIGPIISSAVVAAIGDGTAFTRGRDFAAWLGLVPKQISTGDRTILGRITKRGNRYLRMLFMQAARVVLLRPRNWMKHSYGPWLAAAAQRLHHNVLATALANKLARIAWSVLAQHRVYEARLSLAAV

SEQ ID NO: 210764 - protein, 321 aa, unidentified
MSAPSAVTVGIDVAKAHVDVSVLGANLDIRRFNNDAEGHSALAVALQPLNVQLVVMEATGGYETELACALQGAGLPVAVVNPRQARDFARSMGRLAKTDAIDARMLAELASVLLRRDDLSRLLRPVPDERQQWLAALVTRRRQLLTMLLSERQRLQITPVGLHPSLLAIIAAIQAQLDDIDAQMVAHVRQHFGELDRLLQSTHGIGPVSSACLIAELPELGRLNRRQIAALVGVAPIACDSGLRNGRRRVQGGRFAIRRVLYMATLTATRYNPAIRAFYQRLKAAGKLSKVALVACMRKLLTMLNAMVKTNTPWDDSLHRA

SEQ ID NO: 210765 - protein, 344 aa, unidentified
MAEVTTIGLDIAKHVFHAHGADATGRAMFSRRITRGKLLDFFAAHPRCLVALEACGGAHHWARELQAMGHEVRLIPPAYVKPFVKRHKNDAVDAEAICEAAQRPSMRFVVVKSEEQQAAALVFRTRDLAVKQRTQLANAIRGHLTEYGWVAPKGAAHLAMLADLLEDGEIGESLPEAARPMFTMMIDMLAELDKRIAALDKEIARRAREDVVARRLMTIPGIGPITATAIAAIAPPAETFAKGRDFAAWLGLVPKQASTGGKQKLGAISRMGERTLRRLLIIGASAVVLQVSKRGAPAGSWLEGMLARKPRMLVTVALANKMARTVWALLVKQEDYRAPVAVAA

SEQ ID NO: 210766 - protein, 390 aa, unidentified
MNTISTTASANTIILAIDLGKYKSVACVHDQSTGEYRITTFETTRAELRKLIGQEQPAAVVIEACLLAGWVHDLCGELGVRCLVANTASEAWKFKHLKRKTDRDDALRLAQLYLLGQLPTVTLPPTKVRQWRSLIANRQALVGRRVAVQNRIRALFVAQGLPAPRGARAWTETGLAGMATQAKSLAECGPDELWRGLLELSLTEYRQVGELVGQLTARLDALGKHNAEVILLQTAPGLGPRTAETIAAYLNDAPRFKTGKQVSAYSGMVPRQHQSGEMDRRGRITKRGPALLRKMLVECAWCMVRYNAWARGFYLRLTGGGQRRKKQAIVALARKILVRSWAMLRDQRPWRDPQTAPKDPLPPSKRRRQEQSQRRRQEKQQAVLAPSGTP

SEQ ID NO: 210767 - protein, 365 aa, unidentified
MGVPTVGQVRSFAGLDVHAAKVVAAVVDAGSGELSFRRLSGSTSEVAGVCAALPAPASVAFEAGPTGFGLARELEARGVRCVVAAPGKIARAPQDRVKTDRRDAERLVRLLMAGELHPVRVPSPEEEALRDLVRAREDVRGDLMRARHRVAKLLLRHDVRFAGNNWTQRHREWLARVELDQPVAQMVLLDGIGAIDALLVRRDGLERRMAELVPCSPWAETVARLKCLRRLDILSALGLCAEIGDFERFQHPEQLMSFLGLVPSEHSTGEHRRRGSITKSGSDHARRLLVEAAWHYRRAPRVGRELARRQHGQSQPVVAISWKAQQRLHRTWQRLDHERGKRRTVVAVAVARELAGFCWAAATAD

SEQ ID NO: 210768 - protein, 343 aa, unidentified
MQTTTTIGLDIAKSVFQVHGVDAAGQVVIRRQLKRRYVVSFFQKLPQCLIGIEACASSHHWSRELQALGHTVRLMPPAYVKPYVKRQKNDATDAEAICEAVTRANMRFVPTKTPEQQSGLVLHRTRHLFIRQQTSVINAIRAHLAEFGIVAPVGRRGVEELLTVVADPNDKRVPEIARACLSAFGAQLRSIKEQVLEFDRLITAWHRSNEMSMRLDEAPGVGPVLATAVVATVADPKVFRSGRNFSAWIGLVPKQHSSGGKDRLGSISKQGDRYLRGLFVAGALAVIRYAKIHGTKHRPWLTALLARRPTKIAAVALANKIARMVWAMMAKGERYKEPVALAA

SEQ ID NO: 210769 - protein, 412 aa, unidentified
MVQVIYERCAALDVHKKTVVTTILISNADGGVQEQTQTFSTMTADLLALNDWLRIHQVEVVAMESTGVFWRPVFNLLEEGRTIILVNAQHMKAVPGRKTDVKDSQWLADLLRHGLLQASFIPPKPVRDLRDLMRYRKTLVQERADEVNRLQKVLETANIKLASVATDVLGKSGRSMLDALLGGQNDPEILAELARGRMRPKIADLRKALDGRVHPHHQVLLTRILAHIDFLEESLAQLQKEMEQYLTPFDEAVTLVASIVGIGEIAAGSIIAEIGTDMTRFVSDKHIASWAGLCPGNKQSGGKRLSGKTTKGNPYLRAILYEVAWAISHTRNNYLSAFYHRIVRRLGKKKAITALAHKVLVIIYHILRTKKPYADLGAGYFDQKDQGRIQRHHVSRLEQLGYTVTLIPKEVA

SEQ ID NO: 210770 - protein, 453 aa, unidentified
MARKAEKEKTKDGLKLKIVNPNAAGIDIAYGEMQVCVPEDRDGENNRCFGSFTCDYEEIASWLKACGITTVAMESTGSYWVGLYFFLEEKGFDVLLANAKDVKNVSGKKTDEADAEWIMLMHSYGLLKPSFHPDAAARSIRELARHRDNMLRSASKEVQHMQKSLVLMNIKVDTVISDILGKSGKAIIEAILNGNHDPKSLVQLVDPRCKASKETIEKSLEGTWDAVHLFELKQSYDLYKYIHIQIADCEAEMDRLLGEYTEGCGTDMQGYTATKKRVAKKNAISFDAEKHAFSMWGVNAMEIPGMSLGALAVLMGELGSGFTEKFTSAKSFCKWCNLVPNNKISGGKLLSSKVPKQKNRVGQVFRLCANSVKSVKTGLGIYFRRQKSKGGHLQAIVATANKIAKIFYTMVVTKNHYDESKVGLDEKQLLERKIIMAQKTLDRLNLKLSVAQR

SEQ ID NO: 210771 - protein, 343 aa, unidentified
MQMITTIGLDIAKSVFQVHGVDAAGQVVVRRQLKRRYVLAFFQKLPPCLIGIEACASSHYWSRELRALGHTVRLMPPAYVKPYVKRQKNDATDAEAICEAVTRVNMRFVPTKTPEQQSCLMLHRTRHLFIRQQTAVINAIRAHLAEFGIVAPVGRKGVTELLHVVADPSDGRVPEVARACLAALGTQLLGLKEQIVEFDRLIMAWSRSNETSKRLHYIPGVGPLLATALAASVADPQIFRSGRNFSAWIGLVPKQHSSGGKDRLGSISKQGDRYLRSLFVAGALSVIRYAKIHGTKHRPWLTALLARRPTKVAAIALANKLARMAWAMMARGERYRNPVALAV

SEQ ID NO: 210772 - protein, 345 aa, unidentified
MKITTMGIDLAKNVFQVHGIDERGKAVLRKQLRRSQVAVFFGNLPPCLIGMEACASAHYWARTLQCFGHTVRLMAPQFVKPYVKTNKNDVADAEAICEAVSRPNMRFVPIKSIEQQAILSVHRVRQGFVKARTAQANQIRGLLGEFGLVIPQGIYNVAKRVPEILEDASNELPVPFRHLVDRLTQHLKELDRQVKEFEQEIIAWHRGSELSRKLEKIPGIGPLAASALVASIADARSFKNGRQVSAWLGLVPRQNSSGGKPTLLGMSKRGDAYLRTLLIHGARSAILAAKNKVDNTQGWLTNLLKRRHPNIAAVALANKNVRTVWAILAHGREFKADYVPTRMTA

SEQ ID NO: 210773 - protein, 408 aa, unidentified
MQKRENLLYVGIDLHKETHTAVMVNCWNEKLEVVVIENKPSNFKKLAEKVNKKSNHLGLEPIYGLENAYGYGRSLAVWLIENGYIVKDINPALAYDQRKSAPMLRKNDEYDAYCVATVLINQLHTLPDAKPKDNEWTLAQLVNRRDLLVKDGIRFKNGLHEQISMAYPSYSKFFSEIDGKCAMYFWKIYPSPVHLQEKTAEDLTIEIKEIARIYKKDKAELILDCVHNDGNTFREYQESIDFITTSLVQDLEHQKEELAGLDKEIEKILLSFDYKLTSMPGIGTSVASKLIAEIGDIRRFSSADKLARFTGVAPVKFSSAGKGKEQSSRQGNRQLHGLFYFLAVTMVSKPKNGIPNHPVFYDYYMRKIGEGKTKSQALVCIMRRLVNIVYGMMKNKTEYREPIREEEQ

SEQ ID NO: 210774 - protein, 410 aa, unidentified
MRYYLGVDWADQTHAVWVVNESGTKTAARTVPHTAEGLSEWGRELDEWRAQGIELWAAIERREGRVVDVLLDHGVVVYPVNPKALDRARDRFRQSGAKSDPFDARVLADFLRTDHTHLQALQPSSEAAQELKLLTEDYQQQIRQQTRLINQLTATLKAYYPRALEIAELSTPLAREFLQAYPTPEAVAALTERQWQRWARAHRLSETRTQALWNLLQQPQLSVPAHVVRAKARLMRSLVGQLTLVVAAVAEYREAIEDFFARMPAAQWARTLPIGKHGITAPTLWARLGDAPGRWESFRHLQAHAGAVPVTKRSGKQPRTIQFRFACDKALRYVIDHVAFLSLHSSVWARAYYDQQRARGHAHRQALRALAAKWLKIIFVMWQHQAPYDEQYHLATMTRQQLRHGQKQIA

SEQ ID NO: 210775 - protein, 319 aa, unidentified
MAQNDLVVAGIDVAKDKVDVCIRSLSLKRTFASTAEGRRELASWLRRQKVGKAVMEASGGYERDWAKVLRNAEIEVRIVDPKRVRSFAQSAGRLAKNDTIDAEMIAWFAETFDEARGQAYDETREQLHQMVNARQALKGMQAKLESQGEHALPAAVQRMHARILKTITVELVKFEAAIAAMIQATPRFTELAEIIESVPGIGRTTSAALIAAMPELGQANNKIVAALLGVAPYDDDSGRRRGERHIKGGRRRTRNVFYMACLGAATQHNPVLKAFYDRLVAKGKEKKVALIACMRKLISILNIMIERRQKWDASRYAVS

SEQ ID NO: 210776 - protein, 323 aa, unidentified
MKEKSHYVGIDISKESFDVAFESEGKYRFFKFSNTPAGFGKLMKVLPKQAHCVMEHTGVYGLHLAGYLYDKDVVVSVVNALKIKRFIQMHMVKSKTDKSDAHMICEYGKSQTPDPWKPASPHIQEIKQINVVLKGYLKQKTANTNRLKLLEQAPVKNRLAIVSLKRQSRQLIKEIVLLEEETENIVKEYYSEMFEKLQSVPGLGKKTIVVLLAVTGGFEHFESPRQVISWLGLSPRVFESGTSVRGKSRICKMGGSYLRPLLFMCSFSAIKSNAGCRNLYERLVERGKPKKVALIAVCNKLIKQAFAIAKSGEEYDPEYYIAA

SEQ ID NO: 210777 - protein, 422 aa, unidentified
MKNVTDSGQKVKGQKRLMALEHASWILGIDVGKEKLSCALLLKDETFRCRFDVEASLHGFQMMLERVKTETKGEGAVMFALEPTGHYWMVLGQFFEDHNQSYVLVHPLVVARSREVKQLNRGKTDAFDARLIAELACRGAVTRTQIPEGDWATIRFYAREYMDREKEIAREKNRMMSYLETTLPGFLEIFPRPLGMNSRACLRVLTNFREVLQGDIVQFESQARKHITGKRLMTSRVRRLFEMLQRGDILGLRAGRKTLFWRIINSLDRLELYEKQQDMASKALISLYEQCEFKPYLDSVWGTSPLTNSLVLGFMGDPTSYDTPASLIKMAGCDPVPNESGKFKGKASISHRGRNLLRKAGDRISFLLEKRNTVFRNFMHHLTARPKNKLTKRQARIACINKYFRIIWVLCNHRVLFNPALA

SEQ ID NO: 210778 - protein, 350 aa, unidentified
MNVNHYIGFDVHKKSVSYCVKLADGQIVEESRLRATHDALRQWAGKRPEPWHGAMEATLFSGWIYDTLKPFAAQLQMGHPALMKAIGASKKKNDKLDARKIADLVRCNLLPACYVAPAEIRELRRMLRYRNLVVAQATRMKNKVSGLLMEVGAEYNKQQLHGKQYFTELLDTLEEVPESVKDLLRLSRGALETFETTQEQLVVRLQKEPLLAQRVLLLKSIRGVGPVTSLTWILEVGDPQRFSSVAHAVSYCGLTSALDSSADKQQRGPISKQRNAHLQTVLIEAAKLAPRWNPQLAAVHAREVERGNRNRATLAVARKLVAYLLAVDKSGQPFQPRTPLAAETEVEKVA

SEQ ID NO: 210779 - protein, 422 aa, unidentified
MKKRIYRRMPVNDFQPESIPPAALGGRLVFAVDIAKVDMVAAFAAADGRVLQTISWKAPAENITVLGILRGFRAAGVTVEVAMEPSGTYGDVLCHQLRQDDFPVFMVSGKRTHDAREMFDGVPSLHDAKAAAIIARLHADGLSKPLREEQPDRRQLRAALAIMDLHQERYLQLVHRLEGWLARHRPELPTHLELTSSSLMALLARIGGPADVAAAPVGARRLLLGISHRLMPEDTVAAVLASAATSVAVPLVGLERDALMAIAADAYRAHRAFATAKTKVDQLAARTPAATLAPAVGHTTAAGVYAEVGDARTFSCARAFLKAMGLNLKEKSSGTVQGQLKITKRGPSRVRQYLWLAVFRWIQKDPIANAWYQRKKQRDGGKGSRAAVALMRKLAKALYHVGRGATFDSRKLFDTRCLPQPT

SEQ ID NO: 210780 - protein, 429 aa, unidentified
MSYRIAGIDVHKKMLAVVVSDVEIESEYQFERRMFGSSPEQLRSLAAWLLEQEAEEVVMESTAQYWKPVWGALERYWKPLREKREGARRRSGTLHLAQAQSNRGPRGRKKDFPDAERLVKRLVARELTLSFVPDAEQRLWRTVTRRKYQLTRDRVRLQNQLESFLEEAHIKLSSLVSDLLGLSARRMLKALADGETNPAALAALADQRLRATPAQLCDALGACAELSPVYRRLLKMALEELRLIDEQIGQLDQEMANLLSQHQDAVKRLAEVPGLGVDSAQQIIAEVGPTSATFPSEKCLSSWVGACPGDDESAGVNYSHRSPKGNRHMRRLLNQAANAAARTKGSIFEIVYRRSVPRLGHNQAIGTIAHRQCRLIWLILHQGVRYEERGPAVTKRSKQLRTSKMLRQLRSLGYRIEPPNPQPSQAQVQ

SEQ ID NO: 210781 - protein, 326 aa, unidentified
MEELYAGMDLHSRNTYIGIMEKDSKKRIFEKRVPNDLSLILGVFEPFKDRLQGIAVESTYNWYWLVDGLMDAGYGCIHLANPSAIKQYEGLKHGDDRSDAFWLAHVLSLGILPEGYIYPKEDRPVRDLLRKRSFLVRHRTAHILSLQSMIERQTAKKINSNEIKSLTSEDIKLIFNEKHLVLSARASSASIEFLTHHIKKIEKVVRERIKIRKPFDCLLTIPGIGDILTLTIMLEVGNIKRFPKVGNFSSYARCVSSNRISNGKSKGKGNTKNGNRYLAWAYIEAAHFAKRFSPRIGRYFQRKAARTNEIVATKAISDKLARASCS

SEQ ID NO: 210782 - protein, 342 aa, unidentified
MDKIEACGIEVSAQELVVAMSGKKGEAVLRRFANTPVGHRQLLQALTRGGKRVRACMEATGVYGLDVALFLSAQAGIELMVANPRAVRHFAQARMQRSKNDRLDAVMLREFAMRMEFTAWTRPEQSTLALWAIARRLQALTRLCTAEKNRQHAAGVSQAMPACVRASVARTLRLLQREIQKLRETARQCIAGDARLQRRYQLLRTVPGIGEISAIQILAELALLPTDRDVRQWVAYAGLDPREYSSGSSVKKYTRISKVGNRHLRCALYMPALVASRCEPHLQGFYEHLVAAGKKKRQALTAVARKMLHAIFGMFRSDRPYDGNRVFPLPASGLALRAPKIA

SEQ ID NO: 210783 - protein, 338 aa, unidentified
MVSVGIDLHRRRSDLVGVDDLGSVVWKRRIPSSPADFLHVFGELEPGSFEVAFEATYGWGWLADLLQDVGIPAHMSHPLATRAIASARVKNDTIDATTLAQLLRTHLLPEAWIAPPEAREARRLVRSRAALVRIRSRLRCQIHAVLADHGITPEMSDLFGVAGRRLLAELELPPLSRHRIDGCLRLIDALTVEVESVDREMRVVFGQHSALPRLMRIPGIGFVGAATVIAEVWDVSRFRRADQLCSWAGLTPTERSSAEHTRRGHISKQGSRWLRWILVEAATNHTGRDPELGQFEARIARRRGLKIARLALARRLLCLCFYALRDPAGCAAYPLAAA

SEQ ID NO: 210784 - protein, 315 aa, unidentified
MTTSSRKFVGIDVAKDKLDIAVLGEKKASQVGNDEAGIASLIKKMQKLAPHLIVVEATGGYQRAVVLGLYEAGLPVSLVNPSRVRQYARASGLLAKTDKLDAFNLAEFGKQMKPRKFEAKSEAGRDVSALLVRRRQLEEMLKAEKSRLRTVSPKMRGSVERIIETLKEEIKRLEKELDDFMKENEEWQAQEKILTSAKGVGRITATTLLAELPELGKLDRKKIAALVGLAPMNADSGKKRGYRKTKGGRMEVRNVLYMSTLVATRYNPLIQAQYQQLLKRGKVKKVALTACMRKFLTILNAMMRDKTSFRQIASA

SEQ ID NO: 210785 - protein, 370 aa, unidentified
MPQPTTVFVGLDVHKDSISVAYAASGRSDQPEFLGPIGTRHADLEKMIRRMRSKAANLVFAYEAGPCGYGLYRFLAGKGFECRVVAPSLIPKRPGDRVKTDRRDALEIARLLRSGDLTSVYVPTVDDEAIRDLCRARDATRITLKAAKLRLKSFLLRLGLHYTGRANWSDAHRRYLASVACPTPSQQIVFQESVLAVDEQVDRLQRIEQELLDFASTWRLHPVVEALQALRGVRWVVAITVVAELGDLTRFDNPRQLAAFVGLTPSEHSSGPKRRLGGITKAGNSRARRVLIEGAWSYRFPAKVSKEMQSRIEGLPKSIQGIGWKAQVRLCKRFRRLTSRGKNGNVVVTAIAREMLAFMWAIAREVPIKV

SEQ ID NO: 210786 - protein, 443 aa, unidentified
MSQKKQTHLRGERGQAFADKIRGIPLEQVLCVSLDIHKYFHVVMIHNALGEIVTATFEIDIFQTGFDQLCQAIDDAVTRTKAQVVLVGLEPTGHYFENLARHLDQRPQPVTLINSFAVSRNREQQMMRREKDDEIDVAAIGDLLRRGEGTPFQPISGIYLEMQHLSRVRLSKVKMQAALKNQILGHLDRIFPGLVLQGQVVRERYVPLFVADFWSCQTLQHLIRVCPDPRRLAALTPQELRTAFHAHGFALGTQTAAKIITYAQKVLLPDPEVVAIRCELLAHDLALLEEVERLVAELEDRLRILLQQTPYWVWTKVKGLSVTQVASLAAAIGDPSHYTHAAQVFRRSGLVSGRNDSGTRRHKGKGKRVVKTGDVYLRRALMTAVISLIRHQPVLRDYFNELLRTKHASVARVATARRAMGILWAMQRDQHSRTLVLKRGAEM

SEQ ID NO: 210787 - protein, 380 aa, unidentified
MSMRNNAPAAGAEISAVVFVAIEMSRSRWDIVVRTPVSDKLSRYCLMAGDGAALVAFVEEIEGRVARRLGQAVRVVSCYEAGYDGFWLDRLLREHGIENQVVDPSSIEVNRRARRAKTDRLDAEGLLRVLMRWWHGDKQACHMVHVPSIAEEDAKRPSRERQRLVKERVQHVNRIKGLLATQGIYGFLPLRRDREARLAALALPEQLRAELRREFARLSLVCEQIAGLEAARDAVLEGEATAVDAAAAKIGKLARLKSIGPEFATVMVREVYYRDFANRRQVGSYLGLDGSPWRSGRLAAEQGISKAGNPRARRTMIEAAWMWLRFQPDSALAQWFRERVGGQKGRVRRIAIVALARKLAVALWHYLGHDLLPEGAIVKS

SEQ ID NO: 210788 - protein, 455 aa, unidentified
MSKPKRQTKVKVQVDALEQIHPHAAGIDVGAEEVWVAVPPERDEESVRAFPTFTADLRRLAEWLKACQIETVAMEATGVYWVPLHEILEAAGFEVCLVNARHLKNVSGRKTDVLDCQWIQQLHTYGLLSASFRPPEEIVAIRSLVRHREMLVQYRSAHIQHMQKALTLMNVRLTNVLSDITGVTGLKIIRAILAGERDPKHLARLRDEHCKKSEEEIAKSLQGHYKREHLFALKQALELYDFYDQQLQACDAELEAMYQEFEPPQDPGTPPPAPRTQKRRKNQAHFELAPALYRLAGVDLTQIDGLDELTVQKVLCETGTDMSKWPTVKHFTSWLRLCPNNKITGGKVIQSGVQPTKNRASAALRVAAASLKNSDSALGAFYRRMRARLGTPAAITATAHKLARIIYFMLKYRVPYHDFGADSYEQQYRERVLRNLNRRASRLGFRLEPAITPVS

SEQ ID NO: 210789 - protein, 333 aa, unidentified
MYYSGIDLHSDNCFITTLDDTGAVIKRHRIENNNERILDYFHSLPGPHQAVVESTTGWYWLNDLLGDNGIELVLAHAKYLKAISYAKVKTDKVDSQTLALLLRQGLIPRAHKISRELRGLRDTMRIRLRLVQQRTACLLRLYSVHAKFNGSVPDPYRFQLAVLEHTRDMFTSQILALEKSLHPVLIPNDDIQLLLYIPGIGKLSAFTVYLEIDGIERFDSDKRFVSYCRLVPAADNSNRSVHHRSSKDGNKYLKIAFSDAAVHAVQYYPEYKRLFQKLARRSNEPIAYAVIAKELAKIVYYVLKNKTPYKGLKGQPISRQKSQQWPRLASPLS

SEQ ID NO: 210790 - protein, 288 aa, unidentified
MNKYKETYGVDISKDVFDVYGSLSGHHQFNNDEYGFKKFLKVLSKNSLVAMEATGYYHYRLAQFLYKNAVVVSVINPLSIKRFIQMKLAKVKTDKSDAKAICEYAKTNKIPIYNALTEVQSECLQLFRLLDTYLKQRTAVKNKIHGEEALGVLSKFVYRSLKRQRKQLDKEVKAIKEKILSLVKKDQEQQLTLLTSVPGIGQKTALFLIVITDGFSKFETASQLCSYVGITPTTRESGSSVRGKARISKVGNRKLRNLLFLCAFNACKHNKGCREIYERIVTRERARS

SEQ ID NO: 210791 - protein, 429 aa, unidentified
MHVEEITRIKEFRQIRKEIRGSDKYLLVGIDVGKEKHYAFYGTANGKTLERRLVFWNTFSGIEMLMDHANAIKEGNNLEKVVYGMEPTSNYHKPLAEYLIRCGCNVVLVSGVSVARNRELLDGRWDKHDGKDAANVADLISQGKCQYYDYPSLEVRDLRGLLSLKRMLKKQEHRIKVRIRNNVIAQYFPEFDSQFAKGRSESLAVVKWCIRPKDINLLEYEQFEEMIAPRVRTRAQADRIKSIWLDANESIGCKAGDALQFVSRLMVEELQSIRASIKKLDEQVEKICSGFPECQYLLSIPGFGPDISAKVLGAIGNPLRFENCKQVIKLVGYDLSASRTGKTSDKAVSVISKRGNAHLRYALYQAAFIASTSNSYFKRYYANQLKGREREKGIKTKMKVKLAAKMLIIAWTLMKNKEPFDPAYLNIEH

SEQ ID NO: 210792 - protein, 411 aa, unidentified
MERIRDRVAGLDVHRDFVTACVRAFAAGKWTVVKERFATTMAGLTDLGEWLAGHGVSTVAMEATGVYWRPVYYRLEGFGFDELWLCNAHHVKNVPGRKTDMSDAEWLANVAAHGMVRPSFVPPPEFRALRELTRSRKGFAHMRAREIQRLEKLLQDAGVKLTSVASGVWSQSSRDMVEALIRGERDAKVLASMAKSRLRSKIGQLQEALASGFDTHHAVACRHIIDHIDYLDATLASSSAEIARRVAPYEGAIELLCAIPGISRIVAEIVIAEIGVDMSRFPSAAHLCAWAGVAPGNWETGGRSRPAGTRHGSTWLRRALVEAARSASRTTNSRLGARYRAIARRRGPNKAAVAVAHTMLTIIWHVLSTGETYEDLGPEYYERRNDPQRHARQLAARIEKLGYTVTIEPAA

SEQ ID NO: 210793 - protein, 335 aa, unidentified
MQVYGIDLSMEKFDVNYLTSDGNEKKLIVKNAIKPIEKFLINLPADAILCAEYTGVYGDLLVYLCNQLDIAISLVPGYNIRHSLGLVKGKTDSADARNIREYGERFFDKLVYKTYDHEDVVELKELHTLRAQLVKLKKSLLTNESGRKNLPMQCISVHSHLEQVLLKIEQEIEDIEEEIITIIATNTSMTENYKLITSIKGIGPVIGTDLIIKTGNFKTIDSARKAASYAGICPFPNSSGKMVGKAKTSPFGDKKLKSLLYMGAKAAVKHNKEYKLYYQKKELEGKPYFLIMNNIANKMLRTVYSVIKSRVPYNENHICNDPRERYLTSSKKNVA

SEQ ID NO: 210794 - protein, 345 aa, unidentified
MKITTVGVDLAKNVLQVHGVDERGKAVLRRQLKRKDVLSFFANLEPCLIGMEACGSAHYWARKLSKFGHTVRLMAPQFVKPYVKTNKNDRNDAEAICEAVGRPNMRFVAVKTAEMQTVRALHRARQGCVKSRTAQANQIRGLLAEFGIVIPKGIGNITKHLPEILEDGENELSGMMRQLLERLGEELQALGKQVGEIERQITLWHRDNEQSRKLEAIAGIGSISASAFVASVGDAKNFKNARQVPAWLGMVPRHEGTGGKATLGRISKRGDVYLRTLLIHGARAAITAFERKPDHANTWLKKLLARRNKNVAAVALAAKNARIAWALLAHDRSYQHDYVATRKAA

SEQ ID NO: 210795 - protein, 408 aa, unidentified
MEVVYRCCCGIDVHKKIIVACLNQGGEQSLREFGTTTSEIKSLATWLTESGCEMIAMESTGVFWKPLYNLFELMDLDAIVVNAAHMKALPGRKTDVKDAEWIADLLRHGLLKASYIPSREQRELREITRYRKSLTEERCRETNRLQKILEGANIKLDSVVKDINGKSARKLLERIIEDDVPTSEAEVSRIVHGSMRSKLGQLVTAIEGITTPLQRKLLAQVIDHIDDLNKRISNLDKLVQNYMDEYEAAIAALCEIPGIARRSAEVILAEIGLDMSRFPSAAHLCSWAGVCPGNCQSAGRRKHGKTTKGNKPLKTILTQCAKSARSVKGSYFSAQYQRIAARRGKNRATLAVAHSMLIAIYHMLRNNVPFRDLGSDYYDSFNRDRKIHGYLKRLKALGWEPDALPGSA

SEQ ID NO: 210796 - protein, 422 aa, unidentified
MHVVYERCAAIDVGKDEIAVAVRMPGDGPDGRVTVKRTFKTFYGVLGEAARWLVSLGVTHVAMEATGSYSLPVYYALLEHGDFAKVLICNAGHVKNVPGRKTDYADAEWLAHLLECGLLAGSFIPPAEIKAARDVIRYRAKIVRQRVAEIARLGSTLQDAGIKIDSVASSIATKSGRAMIEALIDGERRGPVLADLARGKMRAKIADLSMALEGRFGEHHALMCRLHLDHIDHLDAAIARLDARIEVMMEPFQCWRDLLITVPGIGRHAAAAVISEIGVAVKEFFPGDAHLASWTGLCPGNHESAGKRRGGKPRKGNTHLQTLLVECAWSAVRHDGYLKSLYHRHVMKNGGYRSTTAKKKAIVVVAHAMIVIIWHIMVTGKPYHDLGADYFASLKDPERETRRLIARLEALGHHVTLDTTAA

SEQ ID NO: 210797 - protein, 356 aa, unidentified
MSQKLDTSPAVIGIDIGKNSFHIIGQNQRGAIVLRQKWSRGQVEARLANLPPCLIGMEACVGAHHLSRTLKALGHDARLMPAKYVRPYSKGQKNDYRDAEAIAEAVQRPTMKFVATKTADQLDLQALHRVRERFVGQRTGIINQIRAFLLERGIAVRQGLRFLRAELPGILATRTEALSPRMLHILEDLTADWRRLDARIEDLSSEIEALARQDKGCERLMSVPGIGPIISSAMVAAIGAGDAFSKGRDFGAWLGLVPKQSSTGDRTILGSISKRGNRYLRTLFVQAAWVVLVKIGPKHWDRYGLKSWIEAAKKRLHHNVLAIALANKLARIAWAVLHKGRAFECVKTNEAASQTA

SEQ ID NO: 210798 - protein, 354 aa, unidentified
MEKVREILDRSYRLFIGIDVHLVSWTVTIRTRDVELKTITMAANCTALEAFLRPYMGHPLQVVYEAGYFGYSLCDFLQSKRIDCVVTPPNLVPDSAGNRVKTDKKDSRKLAQCLSNGELKRVYVPTAEERSARMVSRRRRQLIADRVRVQHRIKAELRFHGITIVEPRAQWSACYRDNLGRITFHDRWGTESFQQLLTEFDHLTGQIASQNRLLNELSQTDRYRDRVKLLRSIPGIGPIGAMEFLLELQDISRFHTAKALAAYLGLTPSQYSSGEHTHMGSITRTGKPSLRGQLVESAWILVAKDAGMRTRYERLRARTGGKRAIVAIARRLALIARRVLLSREPYQPGISPAV

SEQ ID NO: 210799 - protein, 411 aa, unidentified
MKVVHEVCCGIDVHAKMLVACLLLANGEKKVRTFSTMTAELLQLRDWLGTAQCTHVAIESTGVYWKPVFNILEDALTVILINPEHARALRGRKTDVKDAEWLADLLRHGLLKASFIPPVEIRELRELTRYRESLVREQGAVANRLQKLLESGNIKLGQVASDALGVSGRLILKALATGENDPRKLAALARGKLKEKSLSLQQALDGRLTVNQRYVLGELLHRWEELEAADARVTREIDKYVQARPKLARAREILDGIPGIGLRVAEVIVAELGITMAVFADAAHLASWAGICPGNKATGGKRLSGRTRKGNTYLRAALVQAAWGASMKKNCYLSSQFFRLVKRLGRKKALVAVAHSLLVIIFHVLQSDQTYTELGGDYFDRHHVEQQREYYLRRLQMLGLKVTVEELPVAA

SEQ ID NO: 210800 - protein, 346 aa, unidentified
MMIIGCDFHPSWQQISWLDTESGDCGERKLVHASGEARQFYERLVAPVLIGMEATGNSQWFIELVEDLGHTIWIGDAAQIRASYVRKQKTDRRDAEHMRKLVVEGRFPRLWTPDREQRDLRQLVLHRHKLVIIRSRVKNELQHLFLNKGVQRKHKLWSQAGQKMLRELPLKPWAACRREDLLGLLAMLNQQIGKLDGAVQQAAEENPQAKLLMTQPGIGPNTALAYVLTVGDVSRFRRGKQVASYLGLIPREESSGGRQKLGAITKQGNRMLRCLLVEAAQSAVQHDPGLRKQYLHRCHQKPKGVAKVATARKLAVRLYWMLRTQVAYPEIVRIESSPGLSLVGAS

SEQ ID NO: 210801 - protein, 286 aa, unidentified
MNNEKYIGLDVHQATVVVAVLDSTGKLVMESIVQTEAATLLQFFAGLRGTLAVTFEEGTWAAWLYDLLQPHVDRLVVCNPRKNALLKDGNKSDRIDARKLAELLRGNQLKPVYHGETGVRMLRELSRSYLTIVKDLSRVMNRLKAVYSSWAILCAGRDVYYTRNRAQWLAKLREPGVRRRAERLYEQLDMLRHLRQQARRELLAESRKHAITAKLRQIPYLGPIRSALAVALIQTPHRFRTKRQLWAYSGLASETHISAEYRLVEGQVRRSKKVYTNHDPGGPQGT

SEQ ID NO: 210802 - protein, 339 aa, unidentified
MSNIKVLGIDLAKDVFQLHGTDAKGKQVLSKRLNRQTLTECVAQLQPCLIGIEACMGAFYWARVFKKMGHGVKIMAPQFVKPYVMANKNDRNDARGIAEAVTRPDMKFVAVKSIEQQDVLLSHRVREQLMKQKLAQVNQIRGLLMEYGVIPKGIKHMTTLTAVLENNEEKLTQKAIRIFKQMYEQFKNYEKQIALYDKEIEQDVAQNSVCTEIMKIGGIGPITASAIVATVGDAKEFKNGRQMAAWLGLVPKQHSSGNTIRLSVISKRGDGYVRKLLVHGARSIVNTCQKKTDKKSKWVADKKNRIGYNKASVALANKNARTIWAIMATGECYRAPIAA

SEQ ID NO: 210803 - protein, 317 aa, unidentified
MKKHSMICAGIDTGKHKLDVALNGQAERLQVANADAGYRELIAWLRRHRVKRVGIEASGGYEQAVVNRLRRDGFLVIVFQPMQVRAYARFHLQRAKNDRIDAALIAGCAAEAKKIHAPPDPRLAALAAQQTLIDQIVDQMARFKNYREACRDAPLRQFWNDEIKRFRGLFKRELKQLVTAIRRHPDLAERLELIASVDGIALRTATAILVRLPEIGSVSREQAAALAGVAPYDDESSDRIGERHIAGGRERLRKNIYGAALAASFHWNAELIELYQRLTAAGKDHKVALIACSRKLLVFANAVVARGTPWQPRTAVH

SEQ ID NO: 210804 - protein, 351 aa, unidentified
MEYNIFNMKQSYVIGIDISKSKIDCVVMSSKFELIKEIEIGNTDLKIKQFIKKILLELKLSESDILVCCENTGIYNRPLERVCQELGVDIWVEHALKIKRASTDMRGKNDRQDARRIAEYAVRYNDKQILFKEPLEVIKELNINMKIRETLIEQKVAIQNQLRESKSHDKKEYDQLNQGYKQILKALVKSIENVEMKIYELSRKHVEISDNIDLMTSIPGIGAQNALNILIATNNFQTFNSAKHLACYAGVVPFQNQSGTLIKRDRVSKMANKKLKKLLHMAAMCAIRYDLDIKEYYQKKVGEGKNKMSVLNAIRNKLVHRIMAVINRKTPYIKKISEKISESEEKVCILT

SEQ ID NO: 210805 - protein, 507 aa, unidentified
MLFGGLEPVKKHGPGAVADLRVVTPILAIPFRKVIDIPSPLLSDFTQGGVPMSNSKRGRQSTRVLPTVHAQAAGLDVGSTFHVVAVPPELCDESVRTFRSFTGDLHRLADWLRAIGVTTIAMESTGVYWIPAFEILETRGFEVLLVNARDTKNVPGRKTDVNDAQWLQQLHQFGLLRGSFRPHERVVRLRALLRHRERLVDSAATHIQLMQKALMQMNVQLHHVVTDITGVTGMKIIRGIVDGEHDPLTLAKHRDVRCKESVETICEALTGNYRSEHVFALRHALELFDFLQTKIGESDAEIETVLHELNEDRVPPAVPIPHVRHSRGRNEPQFDVRAALYTMLGVDLSQIHGLGPYTVLRLIAECGDDMRKWPTVKHFTSWLTLAPGNKISGGRVLSSRTRRSSNRAAALLRIAAVNIGKTETALGAFYRRLGARIGKAKAVTATARKLAVLLYNALRYGTRYADPGANYYDERYKQRVLSNLHRRARQMGFLLIEAEASPSLGVS

SEQ ID NO: 210806 - protein, 322 aa, unidentified
MTHTTTTIGIDVSKQYLDVFCRHDQQTVRMPNHSQGITALLAWIGQRTARPLIVIEPTGGYEHTLQTMVLDQGFSLAKVNARQVREFARAKGQLAKTDAIDAAVLADYGQVMAPRTVVGTSHEQQALAQLVKRRRQLVELATIEKNRLEKVSDDLATQSIQRMLRVLKEEIQDMDTRMAKLMKSHRSLSNVHDVVKPIKGIGPLTLATLLAELPELGRIGNRQISSLVGVAPHNVDSGMRRGSRHIHGGRVRIRCALYMAVLSAIQHDPAMKRFYQHLVGQGKKPKKVALVAVMRKMLVRLNAKMREYYLQGDGASWQGQAV

SEQ ID NO: 210807 - protein, 312 aa, unidentified
MVFVGIDVSKHQLDVFVRPSGERWSVENSPKGHAQLVTKLCAVVPTLVVLEATGGYQAAVAGELAAGGLAVAVVNPRQVRDFAKATGRLAKTDEIDATVLAHFAEAVRPEPRPFPDELTLELQALVTRRRQLIDMRTAEINRLETCRVEQVRRNIQKMINLLTKQIDKVDDDLDTTIRRSPAWRDREDLLSSVKGVGSTTARTMLTQLPELGRLNRREIAALVGLAPFNNDSGRRSGQRSIRGGRAEVRSVLYMATVCAVRCNAQIRTVYERLVLAGKKPKVALIACARKLLTILNAMVRTNQPWRLNAEVA

SEQ ID NO: 210808 - protein, 346 aa, unidentified
MMIIGCDFHPSWQQVNWLDTETGETGEQKLVHASGDAKQFYQKLAAPGLIGMEATGNSQWFVELVEDLGHEIWIGDAAQIRASYVRKQKTDKRDARHIRKLVVEGRFPRLWTPDREQRDLRQLVLHRHKLVEIRSRVKNELQHLSLNKGMQRKGKLWSQVGQKLLRELPLKPWASCRREDLLGLLAMLNQQVGTLDDAVQHAAEENPQARLLMTQPGVGPNTALAYVLTMGDVSRFARGKQVASYLGLIPREHSSGGKQKLGVITKQGNRMLRSLLVEAAQIAVRFDPGMKKQYLHRCHQKPKGVAKVATARQLAVRLYWMLRTNVAYPEIVRIESSPRVALVGAS

SEQ ID NO: 210809 - protein, 366 aa, unidentified
MKKVMAGMDLHGNNVVVGIVDADGTRLQHRRLPCDLPEIIKFLDPYKAELESIAVESTFNWYWLVDGLRAAGFPVVLANPAKIQQYGGIKHADDKNDAYFLAELQRLKILPTGYIYDPALRPVRDLLRRRTSLMRQRTAMILSAKSQHQRTIGRSLDLRRLKAMEPQEAEALYTHSADQLIARIQKEHIDSLQQSIRQIEKAVLKVAIEQPYYERLKTLPGVGIILGLTIAMEVGNIDRFAGPGQFASYCRTVDSKRVSNGKKKGENNEKCGNKHLAWAFVEAAHGAHRFDLACRRWYDRKAAKKGTTIATKALACKLAKAAWYVMAKAVEYESGRMFPGLAEPKTEEISGEQASAIDGVGLNPED

SEQ ID NO: 210810 - protein, 370 aa, unidentified
MGKSTPLFVGLDVHKDSIAVAHAQGQSADPPVFVGAIGTRQADLDKLIRRLQAKTRTLVFAYEAGPCGYTLHRDLTGQGFTCHVVAPSLIPKKPGDKVKTDRRDAVELARLLRSGDLTRVYVPTVEDEAIRDLCRARDAARLTLKNAKLRLQAFLLRLGRHYVGRADWTDAHRRYLAKVVCPTAAQQIVFQESVRAVDEQVDRLHRLEAELRERGPAWRLSPVVQALQALRGVQWLVAITVVAELGDLTRFDTPRQLAAFVGLIPSEYSSGPARRQGGITKAGNGRARRALIEGAWAYRHPAKVSEHIQRRIDGLPKPIQDIGWKAQVRLCKRFRRLTARGKHPNVAVTAIARELIAFMWAIAKEVPVPA

SEQ ID NO: 210811 - protein, 360 aa, unidentified
MRTVSCAQSEAVARIATRMQLTLTYPIKISVSQRKDFSMIFVGIDISKLTFDVAVLIDGKYLSRQFENKQSGFLKLSQWIKSFKNPAYFCSEATGIYGLALAKHLYQTNQKVIVANPLQTHAFAKMEMARNKTDKADAMSIARYCQYLFNRGEIDKSLFIPRSAAFERVQFLVTRLDQLSKMKSQENNRSGVSLDKAAARSIQSVLTFIDKQIVVIKKEITMIIKQDEQLTVQLKLLVSINGIGDKTAWALLAYIGDISLFENSKQISSYAGLNPSVDQSGTSLNRSSLSKTGSARLRKSLYMPAMVAVRYNPLMLAFYNKLLTKGKPKKVALIAVMRKLLVLAYGVLKSRKPFDVNYQH

SEQ ID NO: 210812 - protein, 349 aa, unidentified
MSQRSTTSIARMGIDIGKSVFHVVGLDDNGEPVFKGRFNCERLLEFLARASPTIIGMEACPGSNWLARKAVGQGHQVRIVPAQFVKPFIKSNKTDIVDAEAIAEAISRPTMRFTQPKTEAQLDLQALHRVRQRLVSSKTAVINQSRAFLLEYGLTIGAGAAYFVRDIPNILSDETNGLTTAMRELLQELWQEYRSIEARLLQLRRQIEAIAGADDVATRLTSIPGIAHLTATAITAFSGSGTQFKSGRNFAAWLGLVPREFSTGGKQHLLGITKRGNPYLRKLLIHGARACVLHLDRTKDHLGVWISDMEAKGIHRNKVIVALANKLARIAWTILTRQGTFYLRQPRIL

SEQ ID NO: 210813 - protein, 361 aa, unidentified
MERQYVGIDFHRRRSVIVRLNAAGDRLAVTRVTNDPLAISAAVAEAGPVPEVVIEATYGWYWVVDLLRANGATVHLANPNALNWGERRVKNDVIDATDLADMLRLNRLPEAWIAPPGIRELRELVRYRAKLVGLRSGLKARVHAVMAKEGVLPTVADMFCDKGNAQLDAMTLGPNYELRVASLRELIAIYDREVAMLERDIHRHLRHHRGYAAVQAINGIGRTIAAVLVAEIGDVMRFPNPEALCSWAGLTPKHRESDVKARRGEITKQGSRLVRWSLVEGIARYHGGPKLSSDLSPHRQAARRQQGAGGDRPQGPHARLLRPARRRDPLPGAGRGGVRLGHGQAASSTSGMTLSDGGSTN

SEQ ID NO: 210814 - protein, 338 aa, unidentified
MNKTTTIGLDLAKNVFHLVGCDKRGKRQFKKKLKRQQLLAYFANLPVCLIGMEACGSAHYWARELQALGHEVKLIPAQHVKAYLRGNKNDYNDAQAIAEAVVRPQMRFVAVKSPEEQDIQALHRLRARRIEERTALCNQMRGLLSEYGIVIPRNISALKQHLPRLLEDAENGLSDLFRRLLTEASSQLDELEAHIGFYDEEIKRFSRQHEACQRLQTIPGFGVIVSSVFYAQVGNGEAFRRGRDVSASLGLVPRQYSSGGKEVLLGISKRGDAYLRGLLIHGARAVVRHAHGKKDRLSRWVQHLVERRGHNKAVVALANKMARMGWAILAHETTYEAV

SEQ ID NO: 210815 - protein, 393 aa, unidentified
MRISVGTDVAKETHWVVALTEPGEVLLDHAVDNDPAAIEALIAELGALPGECTIGLDVLGGIATLLSAMLLAAGQRVVHVPGLAVNRARQGTTGGETKSDPRDARVIAEQVRSRRDLRSIAVEEEPLAELQLLVGRRRDLVAEQTRRLARLHDLLSRIHPGLERALDLTNKSGLCLLTRYVTPAEIRHAGRARLVRHLRASGARHVEAIATAALEAAQRQQIALSGERVAAGLARELAREALAVRERLVEIDAELAQVLAVHPDSTLIRSLPGMGVILTAEFIAEVGIRDRFADADALAAAAGLAPVLRQSGKVRFLRRPLGGDKRLKRVFYQAAFCSLSCPASRAFYARKRREGKRHHQALLALARRRVNVLWAMLRDRRPYELQEPRCGAA

SEQ ID NO: 210816 - protein, 427 aa, unidentified
MAVVMIGIDPHKASHTAVAINAAEQSLGQLRVRASAVQAERLLGWAQPWPERAWAVEGAGGIGHLLAQQLLSAGERVLDVPPKLAARVRLLATGDINKNDPNDARSVAVAALRSAEVREVRQDDHAAVLKVWSKRHQDLAQARTQVACRLHQVLCELIPGGVPGQITAGQAGRILAAITPAGAVAAARWELAAELTEDLRGVDTRIRETRKKTAAAVRAAGTSLTGLFGVGPVIAAAVIGDVRHVSRFPNRDHFAAYNGTAPIEVSSGGRKIWRLSRRGNRRLNHAIHMAAVTQIRYRHSPGRAYYDKKLAEGKTGKEALRCLKRQISDAIFACLQADARRAATAPEKSPGGQPGNHSSSRAAGSNPEHRRFGQATPGPATHPTTPTAPFPAPLPTRASGRPGQEPGAARPRSGARRASLRRPPGSR

SEQ ID NO: 210817 - protein, 339 aa, unidentified
MTIVGCDFHPGWQQVAVFDAETGEIRELKLENGNGEAERFYRQLSAPALIGFEACGNTQWFEDLLDRLGHEVWMGDAAAIRASYVRKQKTDRRDAAHILKLLMESRFPRLWRPSAGERDLRQLLIHRHKLVGIRTRVKNGLQHLMLNRGVQMKRKLWSEAGQKALRALPLEGWAAQRRQDLLHLLSGLDPQIRQLDVAIERAAQENPRAQLLMTQPGVGPITALAYVLTMGDVSRFQRGKQVASYLGLIPSEHSSSKRRRLGSISKQGNSFMRMLLVESAQTVNRLDEGFRKQYQHRCHRMARGVAKVAAARRLAVRLFWMLRTNTAYPEIAHIESSPR

SEQ ID NO: 210818 - protein, 413 aa, unidentified
MDILYACCTGLDIHKKTVTACVRCVDVKGKVRQQTRTFGTMTSDLLALADWLTAEGVSHVAMESTGVYWKPIWNLLEGLFEMMLVNAQHIKQVPGRKTDVKDAAWIAQLLQHGLLRGSFVPETPQRELRELTRQRRQLIQTKASVANRIQKVLEDANIKLASVATNVLGASGRAMLEALIAGQTDAGALAELAQRKLRAKIPELRLALHGRVTEHHRFLLRLLLDEWKGLEELIERLSTRIAEVLPAPFVEAIQRLATIPGIDVVAAQNIIAEIGVRMEQFPSAGHLASWTGMSPGNRESAGKRQSGRTTKGNRWLRTTLVQVAWAATHTKGTYVSALYRRLAGRRGKKRALVAVAHSTLVSIYHVLAKQTVYSELGPSYLDQLQQKRLTQRLVRRLQQLGHEVTLKPKEAAA

SEQ ID NO: 210819 - protein, 344 aa, unidentified
MKNSNVIGIDLAKNVLQVCKVSKHGELITNKAMSPSKLKELLAASTPSIVAMEGSGSCHYWGRLAKEFGHEVRMLNPKKVKAFLQGQKTDANDALAIAMAATQFGVRFSLVKSEEQQMLQTLETSRKFLDRELTALSNHIRAYLYEYGITMSKGRKSLRETVALVLDHLDTRLPLCLKNTLKLLWERYQLTLAQLKEAKAAKAAMVKQIEPCKRLLALESVGEVCAAMLYANIGDGKAFKTGREASACIGVTPKQHSSGGKTNMMGINKKGGNKELRAALYQGALSVISRLPDEPQTVKQAWLIELVKRAGVKRACIALANKTVRTAWALLATGESYQPVLLNK

SEQ ID NO: 210820 - protein, 346 aa, unidentified
MKRYKYFIGIDVSKLTLDFAIMNVEKLIYHRKIANDETAIASMLVELKEINGFKLSNSVFGMEHTGIYSNKILSILERKKANIVYENPTHIKNSLGNLRGKNDKLDSIRIATYLKKLKDDLRLWQGKRKIIQELASLVALRDRLARTKRALKTPLKEDHLFVSTKFAIQNEKFSSRTIDALEADIHILDETINLLCLSDPKIKRMMDIITSIPCVGPFTALQMIITSNEFETISSPKQFAAYAGLAPYPKQSGTGLQSRSRVSNIANKKMKTLLHTCAMLSNRFVPEMQAYFKRKTEIEGKPKMLVFNAIRSKLVLRVFSCIKHNRLYTKDYDYNSEKLTQGIRQT

SEQ ID NO: 210821 - protein, 350 aa, unidentified
MNYVGIDVHKRYSVCAAQDEQGRELGVVRIEGNTRSGFAQFLERLGGSATVAIEACWNWGKIYEVLEELPQVSELVVGNPLKTRLIGEAQIKTDKIDARALATLLRGHFIAQVHVPAKVTRRRKDQLRQRLYWSRLRTRIRNRIHALLDRQHDLALPQCSDLFGVKGLAYLRRLELPEPDGTMLGEDLALFDLLSMQIKAQEKRIAQANAADAMTRRVQSIPGFGPILAALIATEIDKITRFADAEHLCAYAGLVPMTRASGGHTRHGPLLRAANRWLRWAFIEGAWVAIGCSAYFGALYRRNRERGKAANTAITIVARRMCRILFHLLNEQRDYVPDLKSLSPAAPLTD

SEQ ID NO: 210822 - protein, 307 aa, unidentified
MFIGIDVAKDRLDVHVRPGGEAFAVARDGEGVAALVERLKESGPQLIVLEATGGFEQVVAAGLAAAGLPVVVVNPRQIRDFARALGRLAKTDRIDAEVIALFAERVRPELRPLPDDQARELDELVTRRRQVIEMMVAEGNRARRLTSRRLQKRIARHQAVLQKELTEIERELDDTIRKSPIWRETEDLLKSVPGIGNATARTLIAELPELGSLDRRKIAALVGLAPFNRDSGTLRGRRMIAGGRAPVRAALYMAALVASRRNPVIRAFYQRLLAAGKPKKLALTACMRKLLTILNAIVRDRSPWQTA

SEQ ID NO: 210823 - protein, 371 aa, unidentified
MTKKHTQNSLDTSIQWKAIGVDLAKYDNTVVAISEDGEIQHIERISTDDLLKLSTELQPTTFAIEPCNGANLLSLALQKNHEVKTISGVAVKNWVKVHCAGQKTDRNDAMALAFLAMDTMLKPIRTKSLAQMKMLSIFAARKQLVSCRTSILVSLKGMAQAWGILFSAKKRNLNQMKERFNEQKELLTEPIVNAFEKMIEMVRKLDEQICDLEKVMVEQLKDDPRSERITKVLGLGLIGTHRLLSTCGNVDDFKGPKSFAAYYGLVPNNRSTGHNYRVGKCSCHGDVEMRCSLFQSAAVLYILNAKHRLTNCALKNWIDKKMAQKMVWGKLMVALAAKLARILWALLKYGEDFDINKAGVSRSLLAQQQTK

SEQ ID NO: 210824 - protein, 318 aa, unidentified
MAIQVVTRDYGVDVSKGSLQMAADQGPESIPNEPKSIRRWLKSVPAGSCFAVEATGTYHVLFVQQTHQLGHTVYLIDGFRLNRYRDSIGGRAKNDVLDAVLLRRYLQREKADLRPWEPAPKGYTELMRLLHRRERLVTARVALEQSLRDMPESRSTIQALLRQLRRLADRLERRIVATVRTRGWGEDMRRCQQIEGIGPLTSAALATVFQRGQFRNADAFIAFLGLDVRVRDSGKQRGKRKLTKKGDSELRRLLYNAAMSASSTPQWHPYYERHLARGLTKIQALVALGRKLARVAFALMQNQSDYQPKTPQEACIAA

SEQ ID NO: 210825 - protein, 425 aa, unidentified
MTYRIAGIDVHKRMLAVVIADVAVEGEYQFERRKVGTSPSDLCRLADWLVAEQVEEVVMESTAQYWRPVWATLEQRWRPKLRESAGARSGQLHLAQAQSNRGAAGRKKDFPDAERLVKRLVAQELKLSFVPDVEQRLWRTVMRRKHQLTRNRVQFQNRLECLLEEAHIKLSSLVSDLLGKSARYMLQAVAEGETNPETIAALADHRLRATAPQLRDALGACRDLHPVYRQLLKMALEELKLMEEQIDKLEQEMASLLSAQQDVVQRLAEVPGLGVDSAQQIIAEVGPEATAFPSAKHLASWVGVCPGEEESAGVNYSHRSPKGNRQMKGLLNQASNAAVKTKGSIFEFIYRRLVPRLGHAQAIGAIAHRLCRLIWMILHQAIRYEERGPAVSRSTTERRAAKMIRELRRLGYRIEPVACKAGGSV

SEQ ID NO: 210826 - protein, 299 aa, unidentified
MSEIITVGLDLAKNVFQAHGADVSGRAVLRKKLRRYQVLEFFGQLPACVVAMEASGGAHFWGREIGKLGHDVRLIPPAYVKPFVKRQKNDAADAEAICEAALRPTMRFVPVKSEQTQGAAMVFRVRELLIRQRTQAINSLRGHLAEFGEIVPQGAANASKLIALVKDPECTLPADALPTLKVLASTLTQLEEEITKLDAEIARRAKENDVARRLMTVPGIGPLIATAIATLAPPPETFRKARDFAAWLGLTPRQHSTGGKQRLGATTKMGERSLRRLLIIGANSVIIKRWTCRGLVPLL

SEQ ID NO: 210827 - protein, 418 aa, unidentified
MADVMIGIDPHKGSHTAVAIGLSEEPLGELQVQACPSQAEQLLAWAAAWPGRAWAVEGAAGLGHLLAQQLVAAGEPVLDVPPKLAARVRLLQAGDTNKNDPNDAFSVAVAALRSPARRPVLAEDHAVVLKVWAKRHRDLARLRNQACCRLHAVLCDLVPGGVRKEISAGQAARILEQVRPANAVVTARCELAAEFLTDIRCLDAKLRDTNKKLAAAVRASRTSLTGLFGIGPVIAGTVIGDVRQVFRFGSRDHFAAYNGTAPVEVSSGGRQVYRLSLRGNRRLNHAIHMAAITQIRHKHSQGRAYYDKKLAEGKTHKEALRCLKRRISDAIYAALVADARQTAAACAEGPGGQPGSRSVSRAAGSHPARRLFGQATPGPATTIRPGATAGRAPSQPNRTHQRPARHPAAASKKPRPTT

SEQ ID NO: 210828 - protein, 344 aa, unidentified
MNELIRIGVDLAKNVFQVHGVDRRERPAWCKRLPRERWLRAVAETAPPGCEIGMESCGGAHHWARQLQARGFRVKLIAPQFVKPYVKSNKNDANDAEAICEAMSRPCMRFVSVKSVEQQDIQSAHRIRAGLVEQRTAKANQIRGLVAEYGLVAPKELLSLRRAIPRWLEDADNGLSDRFRHLLDGLWRDIRALDDRVAELDADIGAIAQSDPDAVRLQQLRGVGPMIATALLAAVGDARQFANGRQLSASLGLTPRQHSSGGKERLLGISKRGDAYLRSLLVHGARAMLRTAKGKEDRLSRWICRLAERSHPNVACVALANKTARMAWAMLRNGTDYQPDLAAA

SEQ ID NO: 210829 - protein, 399 aa, unidentified
MTNQDHRVGGIDSHKDTIHVAVITAIGQPVTDREFPTTVAGYRRAVAWLIEHGPLSAVGVEGTSSYGIGITTELLAAGIRVVEVNRTRAAEKRKQGKTDPLDAYRAARSVLSGEASTEPKNPSIEPLRALTIARRSAVKSQQAAWRQIGSLLVTTRPALRDRFRDLPETKLIATLRDCRPDQIHDVDDADTLYALRTLARRYLALQDEITALEERMLRRATRANPALMAIKGVGPAVGAQLLITAGDNPDRLRTSASFAALCGTAPIPLSSGRTDKHRLSRGGDRQANAALHHIVKVRMSYDQRTRAYRDTRLANGRTTKEVFRALKRAVAREIFHALAGHTLAPDYSDLRPARHAKNLTLTAAAQHLGVWPARIGELELGRRPNDELATRYRAWLAAA

SEQ ID NO: 210830 - protein, 423 aa, unidentified
MGIDKVKVKLSYIKRRQNMKHVIAFDVSMGKSYMVVYNSLKKCELEKEIEHTRPEFTKLKLLIDDLIDGYGEQPHIVFEATGVYSRVLERFMRDNGYRYCRLNPLEAKLQCDTLRIHKTDRSDAHQLALTHFTNNRRFETNLDDVYAQLKGLSRHYGELDDELSVVRNRMHKVIQVTFPELEKIFTRKSELFLNVAQLFPHPDIVLTYSKTIIKNRILANTNKRMSAKKAEEKAIKLLEVAEKSYPAVSSTDVCCDQVIVYAKRYQELLGQKQQCIDKMATLAEGLEEYSLLLSIPGIATNTAVRLIAEIGDIRRFDNHKQLNAFAGIDIRRYQSGKFIAKDKINKRGNKHLRKLLYIIIQNMIRLRRFGQNHFVDYYDKLKKQPYNKCHKVASIACVNKLLKTIFFLVIHNMNYEYRLAANS

SEQ ID NO: 210831 - protein, 316 aa, unidentified
MHAIGIDMSKDSFHAAFSDTHVCEFKNTEDGIASFTEAMRSLGLQKEETVIGVESTGVYHLLLCVRLFEHGWHIHVINPTLTAQMISAGLRMVKNDRKDARIIRMATALGKGHPFRDTPDILALKALVSEREDIVRMRAELKQRQRAHEIRAHACGVALHDSYAPVFAALDAAVEDVNERLRGHATGTQQLLQSVTGVGATTAAFLVAYVGDISRFGSAEQLVAYVGIDPRVKQSGTSIRGRGYITKRGSQHLRTALYRAAFIAQRHDPELHTYYKKKRAEGMHHVAVLCAIERKLVHRIFAVWKRGTPYVKTPKA

SEQ ID NO: 210832 - protein, 519 aa, unidentified
MVQDDKPVGLEGLEVAFDDERVVSDAGVMLVATLAGRLGGCVNPPTGYERRLLSGGEHEVRRNGGRGKHQLRAGRLCIWAASPTRYLTAPATCPVALRARIRRCRAARAASRRRRSANRGGQVSRTVALDIHKRFAEVAVHEDGHVGRLGRVEVDELEAFAESLRPDDHVVIESTSQTWAVVELIGRYVGRVTVSNPMRTRAVASAKVKTDKIDARVLAELGAADFLPPVWTPDAETQELRRRVAHRAGLVRQRTRLRNQVHAVLARNLVTIDVSDVFGRKGRRALGEVALPGHEREQVDSALRLHDALDTEIKLAERTLAERALADSDVRLLMSIPGVGAMTSLAIVSVIGHVGRFPSSRELVSYFGLDPRVRQSGDRAARHGHISREGQAHARGLLIEAAHSAVRTPGPLRAFYQRIKARRGTKIAICATGRKLLTVCWQLLSKQEPYRYEAPSGTRRKTRLLQRAAGHTDLVSLAGERDARAIERRVLDNVQRHYEAHVAERTARDRKHVARLERT

SEQ ID NO: 210833 - protein, 411 aa, unidentified
MTKEDFIYVGIDLHKETHTAVMIDCYNNKLGEITFPNRPADFPKLVTKVKKCNTDAKEVVYGLENAYGYGRALAVWLIDKGYLVKDVNTAISHRQAKHRGAMYRKSDSDDAKAIALATLNMLDKLPDACPNDAYWSLGQLVHRRDNIMKQRTRLVNQLHEQLHISYPSYKSFFNDISRPTALYFWENYPSRKYLKGKSVEDLREELVPVSHNKCSTKTCQAILDAVAGDKVKNIDYQDARDMVTLSIVSDLRHYDSQLTEVDKMLEQMYKMLGCTLTTIPGVNVITAVKILAETGDIKRFSNANKLAQFAGIAPLHLSSSGKGKDVATKQGNRRLQATIYFLAIQMVQLSSKGTPRNPVVRAYYEKRKAEGKTSQQALICISRRLISIIYGMLKNGTEYRMPVVENAGENR

SEQ ID NO: 210834 - protein, 418 aa, unidentified
MKVVYSTCCGVDVHKTFLVATLITTEGITPHYSKKRFSTFNKSILQFKQWLIENNCFDICMESTGKYWVPVYNLLEDKIRITVANPKWVKAIKGNKDDVKDSKWIGDLFRLGIVPGSYIPEKRIRILREYTRYRCKLVSCKSSEKNRFQNAFTVCNVALDAVVSDMFGKSASSITDYLISTDSFDPNHCSSLLKGSLKDKADTVIESIEGYQMTKEQKDRVLMVRSHLEFVQKSIGKLDEKLDEMAASFESAITLLCTIPGVDRVSAITIISEIGTDMSQFASSKRLCCWAGLTPGNNESAGKKKSVRITRAGVYLKPALVQVAHASVKSNKSPYYKNKYNCICKRRGKKRAIIAVARMILTAVYNMFVTGEEWNPSDLYKIDMPQEMLEKQKQKALKQAAKLLISNGLIKATDISLA

SEQ ID NO: 210835 - protein, 410 aa, unidentified
MEQQVARVAGLDVHRDSVVGAVRVGEAGSIKYHKKTFATTTTGVSMLAGWMADHEVTRVVMESTGVYWKPVYYPLEGLFAELWLVNAAHVKNVPGRKTDMADAEWLADVAAHGMVRPSFVPPPPVRELRELTRYRKTQITVRAQEIQRLDKVLQDAGIKISSVASKVLGKSTRAMIEALIAGESDPAVLADMALTRMRQKIPALSEALVGRFGAHHGAVCRAILDHIDFLDGTIARLDAEVVARLGPFQSAIELLVTIPGVGQTMAEVIVAETGADMSRFPTAGHLAAWAGVAPANHESAGKRRPSGTRHGANWLRRGLMEAAKAASRSKGTYLAAQHRQIARRRGENKATMAVAHSIVVIAWHILTTGQPYQDLGPEWFESRRDPQREAARLVARLEALGHHVELSPAA

SEQ ID NO: 210836 - protein, 434 aa, unidentified
MSTPSRFVHRKLLRAAVNPVPEEERMEQLIERGCGLDVHRDTVAACVRVPGPNRGPQQDVRTFGTTAAELLALRDWLEGHGVTHVAMESTGVYWKPVFYVLEDSFTCLLVNATHIKQVPGRKTDVRDCVWIAQLLEHGLLRGSFVPPAPIRELRDLTRHRKVLIQERSRAANRLHKLLQDAGIKLASVATDVLGVSARAMLDALVEGTTDPDVLADLARGKLRKKLPALRQALTGRFRPHHAFLVSQLLAHVDYLNESITAVSEEVAVRITPFAAQVEQLDTIPWINMRTAEVIIAELGVDMHFFPSDRHLASWAALCPGNHESAGKHASGKTRQGNRWLRTALIEAAAAAIRTKDSALGARYRRIMRHRGHKKAVVAVAHAMLRSIYHLLAEGTTYHDPGADYFDRRHAQRVTRRAIQLLERQGFRVVLEPAA

SEQ ID NO: 210837 - protein, 345 aa, unidentified
MNKLSVVGLDLAKNVFQVHGINTDGEVVVRKQLRRSEMRKYFARLEPCLIGMEACGGAHFWSRELTRLGHTVRMMAPAFVKPYLKSNKNDRNDAEAICEAVQRPSMRFVQPKLPEQQAVLHLHHGRQLLVRQRVALSNHMRGVLSEYGIVVPQGVKVLSQYLPEILEDAENTLPMLARHLLAELKAEHDQLIERVDRFEKQLKAWHANSTVSQCLASIPGIGVLTATALAATVGEGQDFKNGRQLAAYLGLVPRQASSGGKDRLLGISKRGDGYLRGLLIHGARAVIHHIRRRLKAGRPGGNPWVEQLLQRCHVNEAAVALANKMARTAWVLLARNETYCLARPV

SEQ ID NO: 210838 - protein, 366 aa, unidentified
MRKSLIYVGLDVHKDSIVVAMAVGKDRAVVVRTIPNDWMMLAALLGKLGSHQRLRICYEAGPTGYGLARRLSDSGLYCIVVAPSRIPREPGQRVKTDRRDARKLADLLRAGLLTEVKIPAAETEAMRDVERARDDAKNAERTVRHQLDKFLLRHGRIWSRTKWTRLHWSWIKEQAFPAEASRRVMADNIRAVEEATARVQRLEKDIEELVETWSLAPLVRALQALRGIRLIAAVILAAEVGDFARFVAPRRFMAYLGQVPSEDSSGQRRHQGRITRTGNGHARRILTEAAWNYRFRPRPSRAIRKRRELLPAEIVAIAEKAEQRLSRRYQHLVNRGKSSPKVVTAVARELSGFVWAIAREVRSQAA

SEQ ID NO: 210839 - protein, 341 aa, unidentified
MEDVTLVGIDLGKHVFHLHGQNTAGKAVFRKKVSRKQLVEFFATLHACTVVMEACAGAHHMARKLTTFGHQVKLISPQFVRPFVKGIKNDFVDAEAICEAAARPSMRFITPKTESQQTLLALHRVRESLMRDRVRATNQIHGFLLEFGVSLPKGEAVIKRLASVLAEHPLPPRLIAVLERLHAHIKYLNEELDEINGELARQLADDDLGQRLLTIPGVGPVTASVLTAEMGDGKQYGCSRDFAASLGLVPRQYSTGGRSNLLGISKRGDKHLRWLLVQCARAAMRWLGRQCGPMADWVRSMLTRRHPNVVACALANKLARVAWALAAHNTTFNAGSAVLPA

SEQ ID NO: 210840 - protein, 463 aa, unidentified
MELRLGVDIACRAAHQASLADARGEFLWSGRSFRTAPRDLDQLWAMLPPGTDPAEVTVVMEPTRNAWVPLAAWFRRRGATVVLVPPERAADLRAYYAKHTKSDRLDSRLLARLPLLHPEGLHPERGLGPGDALRRATKLHSTLVLRRGKSLARLDALLEILGPGWHAALGGDLANKTPLRFLAAGYADPDTVRRLGRARLARFFARHSRGAWGEAKADELLHAASETLALWAGDLDYPDLAEDIALEARLALAVTDETKELDERIAVLLARADPAGIVRSAPGVGAITGAAILGRLGDPARFSSLAAARSFTGLVPSLDASGQSGRHGGPTKRGDAVLREALFLAADHARRIDPSLAARYHRLMTVAGKHHTSALCHIAPTLLTRVIACWRRGEPYVLRDIDGRAVSSGEARAIIAARYTVAADVRSRQTRLLRPSGTGRRRQGSRSAPSADPFARHAITVTP

SEQ ID NO: 210841 - protein, 385 aa, unidentified
MYQLSGSTQGALDYNSTIIGALELSEKKWVLAVQLPGVRRHSRHVLEACGDGLASFVERLKARCAAAGRKIARVILTHEAGRDGFWLARFLARRGIEIHVIQPSSLPVDRRARRAKTDIIDVEMLLRTLMAWLRGEPRVCSMVPIPSEADEEARRAYREREDLTGERRSIVNKIDGILATLGVKGYKALRRDRREQLTAVRQPDGDPIPQKARARIERLLDRLDLVLKLIEQVESARDAVLKKDAPADEAERMIRSLTDLRSIGPDFATLLVREAFVRQFRNRRALGGYVGLGGTPFSSGGSEREQGIGKDGNRRVRAAMVELAWTWLRWQSDSALSVWFRARVGAMGGRIKKIMIVALARKLLVALWRYVMDGVIPDGAKMKAA

SEQ ID NO: 210842 - protein, 387 aa, unidentified
MIYFIGIDISKYKHDFCIISNTGEVIVENSSFENNQKGFQTLIHLLEPYNKQSVRIAFEATGHYSLNLELFLTNQGYSFMKMNPLVVHNYLKARSLRRTKTDKADSKTIANYLMSVQYIPNSTLLYHTYTLKQLCRSREALIKERSKITVLLTNQLDLTFPELKVFFNNNFSTTLLYILEKYKNSSHIALMKDYESLRKVSHGRFSYAKFTKLKELAKNTVGYHDENTDLLISTYVSLYNELSNKIDPIDKQISTIIKELNPRILSIPGIGVISAATIFSEYGDINNFSSPAKMLAYAGLEPSINESGTLQSNGKMVKHGSGHLRYALMNIAMIILRHSPCFYDYYLKKRSESKCHRVALSHVCKKLIRVIYSLEKYNHIFDPSLLK

SEQ ID NO: 210843 - protein, 375 aa, unidentified
MTHEHGVAGIDPHKNSATIAVLDQRGGVVGSESFPITEEGIDRLLTFLLGIELTIDRIGVEGSGFLGRPLVLALTAAGYDVREVQANRTAERRRRRRRAKTDIEDAEAIARETLADPHLPPAGKHATPSPAWQTLTVLRDWRASLVLQRVRLLTEAEAVLVTLPVAIRDALPATSRVLPQLTALADGHVAPAALAPADRLKLDRLATSLLDITTLTKRIKELDQRIPPLLTELGSTLTDLHGGVVVTAMDPLVEIGDPHRFTSEAQFARWCGIAPVAVSSGEGHGPARRHRLDLGGNRAVNSILHIIHVTQARCHPPAKEYVARKMLENKSKREARRCHKRQLANVIIRHMWNDAERNTPPAVTDRPGGRLTRST

SEQ ID NO: 210844 - protein, 326 aa, unidentified
MQGKEASEQETKIKSSVGIDVSKCWLDVHVLPTNERLRAANDRTGIRQLKRWLSPHAIALVAIEATGKWHRLVHRSLIASAIPVAIVDPFRVRMFAKAQGILAKTDQLDARMLALFATVMNPATRNPAPQTIAELAELVVARASAVDAQTALKNQLSAAECKFLKQQFARRIETTGKDIAALDREILKRIKADDCLARRYAVLTSIPSFGFVVAATLIACLAEIGSTTAKQIAMLAGLAPIADQSGERDGIRVIWGGRPAVRRMLYLAALSAIRFNADIKTFYRRLVGSGKPRKVALIAAARKLVVLANTLVGQDRHWSPCSPNHA

SEQ ID NO: 210845 - protein, 405 aa, unidentified
MFYCGIDIAKRNHEASVIDAEGKPLLDSITITNTQEGCEKLFALFERLSIAKSDVTIGMEATGHYWLSVYEYLTEQGCDVRVINPIQSDAFRKMYIRQTKNDSKDSFIIAQVMRFGQYSETTLSDENIVAMRQLTRFRMALVDNCGDCKRRIIALLDQVFPEYASLFSDTFGVTSKELLLQFPTPDDLLAISTRKLTNLLNKASRGRFGEEKAKEVRAAASSSFGVGFAKNAFAFQIRQLIEQLMFTETQIEELDEQISHLLKQVNQAITTIPGIGDTLGAIIVSEIGDINRFDAPNKLVAFAGLDVKVTQSGDFTGTKQHISKRGSPYLRRAIWLAANRAAFCDPILSEYYQSLKARGKHHLTAIGAVSRKMCNIIFTILRENRPYEPTPPKKNQTNITEGENA

SEQ ID NO: 210846 - protein, 350 aa, unidentified
MNVIKQVVGIDVAKDNFEVRFGAISDQQEERFVGSATFPNEKRGFRKLLEWTKKQLIQVDAPVWFVMEATGSYYEHLAYFLSEHHEQVVVVLPNKIKHFAKTLEAKSKTDRLDARSICQFGLERPLSPWQAPTPQMKLLRELVREHNTLQQMATQVKNQLHAKDHTYQPSAETTKRLHTQLRLFQKQLKSVEQQLHSLVDDDDNLRRRITNITAAKGIGFMTVITAVAETNGFALITSEKQVTSYAGLDIVVRESGARQGKPSLSKKGNKHLRRAVFMPALAACRFNPTLREFYLRLVRTKANKKVALLAVARKILCLIFTLWKKNVQYDPNYRHQNIRSVPNNLPLVTT

SEQ ID NO: 210847 - protein, 412 aa, unidentified
MVTCGIDWAQDHHDIALVDSEGRLVAKRRIPESVAGFTELTAMLADAATTRRTRSRSRPRPHAACWSRCCGPAVDRSTRSNPMWVARYRERTSMSGKKSDHGDAVTLGNILRTDADQHRRLPTDTELAQSITVLARAHQDATWRRTRAGNELRSLLRQYFPGFLHTVAERPGGITAPEARAVLAIAPTPARAARLSQPQIVAALRRAGRQRGLTTLAATIQQQLRLPQLRHPALVEDAFGIQALAVLATLDAECASVDRLGEATAAAFTQHPDHRIITSFVGLADLTGARLLAEIGDDRTRFADARALKAFAGSAPVTKASGRSIRITHRHVKNNRLAAVGFVWAFIAAGCEGPTRDHYLARRDHGDRHPAALRHLYNRMLGQLYHCLQTNQTYDPIKAYGRPPTRPTRAAA

SEQ ID NO: 210848 - protein, 349 aa, unidentified
MIVIGVDAHKSTHTLVAVDDIGRQVGQRTVKATTEGHLSAIEWAAQWPQVQFALEDCRHVTRRLESDLLSRGHAVVRVKTQLMALHRRSARQPGKSDPIDAHAVAMAALREENLPIAQLDESTREVKLLSDHRRNLVCERTKLINRLRWHLHELDPELVIPVRGIRRYRVMDELAERLTAFTGVVAQIAGELLDRCRQLTEQVNDLERQIRDRVRRIAPSLLAIPGCGVLSAAVIIGETADARRFHSKDAYAKFNGTAPIPVWSAHERVRLNRGGNRAVNAALHAIATTQVARGGPGKDYVAKLQAAGKTKREAVRLLRRRVSDRVFQVLRVHESATGNASESSLSAAT

SEQ ID NO: 210849 - protein, 462 aa, unidentified
MTLPPPASPGLRTGNRETRRRAPVSDRPGASPGAAGSSLPLRGRGTLSLCVPEAVFFAGIDWAAETHAVCVLDADGEVVDRCTISHSAEGLAMLVRRLARLGDPGDIPVGIERPDGRLVDVLLDAGHPVVPVKPNAIKAWRDGEVLSGAKSDAGDAAVIAEYLRVRRRKLRVAAPYSGPTRALRAVVRTRDDLVDLRIAAVNQLAALLDAHWPGGKAIFARLDSPIALEFLTRYPTASSAAHLDEAGIAEFCTALGYSGKRPAAVLLDRLRSAPAGTTGEALTAAVHDAVLGLVAVLKAITAAARDLGRSAAAQLGEHPDGKIFTSLPRSGQINAAQMLAEWGDARPAYEHPDSVAALAGVTPVTNQSGKHRSVYFRWACNKRFRRAVTIFADNSRRASPWAAHIYNQARAAGKDHPHAVRILARPWIRVIWRCWTDDVPYDPALHGAAAALARQTVSQSVP

SEQ ID NO: 210850 - protein, 345 aa, unidentified
MELHTIGIDLGKTVFHLVGLNPHGEVVVRKKFSRTQLLRFTANVHVQLIGMEACGGAHFLGRALREQGHEVRLIPAQYVKPYVKTNKSDYIDAEAIAEAVARPTMRFVPIKTDDQLDLQSLHRVRERWVMRRTAVINQIRGLLLERGITLRKGRCHVGGALPGILEDADARLSGALRMLLAQLKLELDHLDLRIDEADALIKKTACENEACQRLVAIPGIGPVTATALIAAIGNGGAFRKGREFAAWMGVVPREHSTGGKQKLLGISKRGNSYLRRLFVQGARAVMQQRTKQSSGLSAWLAQLTSRSHRNVAGVALANKMARMAWAVLAKNEQYRPPVLADVAAA

SEQ ID NO: 210851 - protein, 331 aa, unidentified
MKILETIGIDISKLTFDVRIHSNQFYKQFENNDDGYDKLTKWAYKNSSFTKKNILFAFEHTGLYSHNLAVYLTTKEIAFSLIPGLEIKRSLGIARGKDDKVDATKIALYAFRLRDEIKPYTMPSSDIISLKNLLSLRDRIVKQKAGFVASLKEQSRILKNDGNETLFLTQEKMIVFLSEQIEEIDNELSKIIKNDDLLKEQYKLIVSIKGVGKQTALHMIAYTSAFTLFNTWRQFASYAGIAPFPNSSGTSIFGKTKVNNLANKKLKTLLDLCAKSAKQHNLEMKKYYDRRIEIGKNKMSTINIIRNKIVARIFAVIERKSPYVDFLKYAS

SEQ ID NO: 210852 - protein, 412 aa, unidentified
MEVIYAVCAGLDVHKDSVKACLRRSGSNRQRIGEVQSFGTTTRELLRMTEWLSTYGCTHVAMESTGVYWKPVYNLLEGSVEVILVNAAHIKQVPGRKTDVKDCEWIAQLLEHGLLRKSFIPPKPIRELRDLTRHRKTLIQERARIANRVQKILEDANVKLASVASDVLGVSGRAVLAALINGEGDSTVLAALTRGRLHATQDEIQEALSGRFTEHHSFLLQQLLAQVDFVAARITECDQRIEVLCRPFAQKIDRLKRMAGVGQRAAEQLVSELGVDMGQFPSHRHAASWTGICPGNHQSAGKRKSGKTRKGNRWLRCVLIECGWAASRSKQSYFGAQFRHLVRRRGAKKAAVAVGHSLLVAAYHILRDDVEYRDLGADHFDRLNHHRLTDYHVQRLEQLGYQVNLESQPVAA

SEQ ID NO: 210853 - protein, 428 aa, unidentified
MSQKNYIKQVQKRQRIKRTTLVIGIDIGRAFHAVAYMDKEGNILGKYPRVYNSREGFDFFTKVTEQIKRKHGMKEVLMALEPTGHYWRNIAYFAKEKGYDVQFIRTTSVKNQRELDDSSSAKTDIRDALTLANLTREGKYIDTVIEDGIWRQLRTVVKVREKIRKYNISAKNTLQAALDDYFPELRKIFWAVSTKGIWAILERCPFPEDVLKVDVSELREIIGKASRRRKLAAQKAIKLHEAAKESIGIKEIGPSDRYRVKMCLQEVKRTEGLVKEAEKKIKGLLKQIEYTEYLLSIPGVGPLSAAVVLGELGNPPHFKHARQIIKYAGYDPQENDSGQRIGRKVISKKGRWLLRKCLYFMSLRVVMKTIFFKEFYQRKLEKKNRFGQNLKKKEALCAVIIKLINVIHALLRDKRCFYDTESCLAKAA

SEQ ID NO: 210854 - protein, 327 aa, unidentified
MDQRILGIDVSKDTLDVVLWDERGWRYQVFANTPEGFVRLSHWLTKQEAGFVHACLEATGQYGEGVAEYLYAAGHAVSVVNPFRIKRYGESKLHRNKTDKADASLIAEFCLKENPPLWQPLPEHVKQLRQMVRRLDDLQRNYQQESNRLQSGVNNEWVVADLKDHLQELHMRIQALKAAIQQFVTETPELKHQVDLLVSIPGIGKLTAARLLAEIGDIHSFEDAPQLAAYAGLNPKGARSGSSVKKKTRISKEGRAFLRYILYMPALVARRCNPIIQAFCARLAQKKLPEMAIIAALMRKLLHLVFGVLKNQQAFDPFFLQRKVFAS

SEQ ID NO: 210855 - protein, 350 aa, unidentified
MVVVGADVHKRTHTFVAVDEVGRKLAEKVVKATTTGHAEAVMWARERFGADVVWAIEDCRHLSARLERDLMGFDQSVVRVPPKLMAQTRASARTRGKSDPIDALAVARGYLREPDLPVASHDEVSRELKLLVDRREVLVAQRTATINRLLWRVHELDPDHAPKARSLDLAKHRRILGDWLATVPGLVAELARDELADITRLTETINVLAKRIGCRVRDVAPALLALPGCGELTAAKLVGETAGVTRFKSEAAFASHAGVAPVPVWSGNTAGRVRMTRSGNRQLNAALHRIAVTQIRLDGLGRAYYRKRIDAGDSKTEALRCLKRRLARVVFHHLHTDHHNRIQPCQPAAA

SEQ ID NO: 210856 - protein, 403 aa, unidentified
MHYLGIDVSLKSHRCALLDSEGEKVGASFSVDSSPEGFSSLLETLKKRNIPFDQVTAGLEATGHLWENLFSFLERQKIKVLLLNPFQTNRYRELLSKKAKTDDIDAFCIAGLLRSGEGRACYVPDDMVQGLRDLVRARNSFISNLQDYQRQAQALLQVVFPEITGLLKDPFAKVACEILRQFPTAKDLAGVHPRTLEKIARAFQGNNFGREKAEEIVEAAKKSIYSGKAQKARGQVLSSLVKQIVDLKTAIANLDQIINDTLNTPSKGPSEIDLITSIPGVGPKTAAVLIAEIGDISRFASANHLVGYFGFFPQIRESGGKRLGTPKISPRGPKHFRKALYMAAVACLKHNPEMKAVYDRKKSQGKAAKQALIVVARKLLATVYSLLRYQTTYNPLRLSIAAA

SEQ ID NO: 210857 - protein, 333 aa, unidentified
MKSNVFGIDIAKQVFQIHWVDQETGEIHSDKVKRKDFVQYFANQQPSMIGMEACGGAHHWGRLFIKMGHTVKLLPAKKVKPFVYGNKNDVVDAQAIWTAMQQPGMKFIAVKTEEQQAILSIHRMRELLVKQRTAQINSMRGLLTEFGLVMPKGKKAFKEQLPSCLAQLEEKTPSAFMCALQIQVERLTQLDEDIKQLEKQIQSWFKHDEDCQRIAKVPGIGPLTATALIASMGSSSEFKSSREFAAWIGMVPRQTGTGGRVFLHGISKRGDVYLRTLLIHGARSVLNHSKEKNEWLLSLQARRPTNVVVVALANKIARTVWALVANQTEYKPC

SEQ ID NO: 210858 - protein, 385 aa, unidentified
MAPPRMPEAVIGLDVGKLSHWACVATRDGEILLSAPVANREGDLDSLFGRFPDALVVVDQSRNIGALALARAKAAGMSAAYLPGLAAHGAARLFAGDAKTDERDAMVIAKTALGIPDALLPVGDPGPTVAAARALAAQRNFLTCENTRSKNRLRSILLESCPAFEALVDLSDGPQLRLMASLGGAWSVADAGPRRAAALTRGAARGKIEALVRSTASSTRPDAAAIAAEDRAVRLLARRISENSAEIDVITAEISALLEGDDTYRCLLTVPGIGPKTASELAISIDIGDFPSHDRLASYCGLAPRNRQSGTSISSVTASRQGNKRLKNLLIFSCNCLTRTEGRWGDYYARCRERGMPHGKALKALARKRLKVIYAIMRDRVPYAA

SEQ ID NO: 210859 - protein, 324 aa, unidentified
MNKNTIYWGIDISKAVFDVFSSSGEFYQFDNNKDGFKKFFKILSQDSHCVMEATGYYHQQLAYFLYEKGIAVSVENPLSVKRFGQMQLSKVKTDKADAKLICAYAQNVELELWEGESKKLRECFQIIRLIDSYFKHSTALKNKIHGEKTLGNPSSYVVRSLKRSLKSLQKEIKQLEDKLTELVQKDHQELLTKIETIPGIGRRTASMLIVLTGGFTRFERASQLCSFAGITPIIRESGSSVRGKARISKMGNQKLRNLLFLCSFTACQHNKACREIYERITAKGKPKKLALMAVCNKLLKQAFAIAESGLVYDENFRSKKPELS

SEQ ID NO: 210860 - protein, 350 aa, unidentified
MEQQTATPKLFIGIDIHKRSWKIHCATDLFSGKTFSMRPDASLLRDYVERHFKGHEVSTAYEAGCCGYSAHRAFESYGWRSLVVNPADIFRKGKEKYTKTDRIDAQLIARELKDGRLESIEVPDPKREQLRSLFRRRNDLVKDMRQIKSYIKMQLLYYGIKVPEAYDNDHWSHGFRDWLDGLCFDHVTGNEALQSRMRSFRFIDKEFRDVSTALRKYTKHYYKKDYMLLRSIPGIGPIVASGILSELGDLRRFKSVKHLAGYVGLCPGIHQSGDNLRHTGVSVRAHRLMRSYFIEASWQAIRADPVMQAYYRKHRGKNVKSIIVKIARKLLSRTLAVIKTDTPYQIGVVE

SEQ ID NO: 210861 - protein, 336 aa, unidentified
MSHKLNSAIAVIGIDIGKNSFHIVGHDKRGAIMLRQKWSRGQVETRLANLPPCLIGMEACVGAHHLSRKLRMLGHDARLMPAKYVRPYSKGQKNDFRDAEAIAEAVQRPTMKFVATKTAEQLDLQALHRVRERLVSQRTGVINQIRAFLLERGVAVRQGLRFLRAELPRILATPCDVLSPRMVRVIEDLAGDWRRLDERIENLSSEIEVLARRDVGCERLMSVPGIGPIISSAMVAAIGTGDAFTKGRDFAAWLGLVPKQTSTGDRTILGKISKRGNRYLRVLFVQAAWVVLWLEAAKKRLHHNVLAIALANKLARIAWSVLAHGRTFEASKTQVA

SEQ ID NO: 210862 - protein, 358 aa, unidentified
MAQHVGVQVLAFVGNPNSYLNSFRMLQGRDMTNADVRELTSLAFVGVDMAKESFDWAVHGEASRHTLPNDDKGFEGLLVALKAYRVGLVVLEATGGWEKRLARFLLGYGLLVAVVNPRAAREFARSMGHLAKTDAIDAMALAHLAQTLAAKADQAGVAFAPPPAEVERLQLLVTRRAQLIDMRTAETNRLSGAGRALQRSITAVVKTLDKEIARVEGDIDAHLKSHFEEQARRFDAIKGIGPITCAVMLAFMPELGRVSNARAAKLAGLAPLNRDSGKERGQRHIFGGRSIVRSTLYMAMCSAVRFNPVMKIFHDRLIAAGKPKKVVLTACAHKMLRILNAMAGKGQPWNEDLHPVAP

SEQ ID NO: 210863 - protein, 344 aa, unidentified
MSEVITVGLDIAKHVFHAHGVDDRGRPIFSKRISRGKLLDFFAAQPSCMVALEACGGAHHWARQLIQLGHQVRLIPPAYVKPFVKRQKNDAIDAEAICEAALRPNMRFVAVKSEQQQAAGLVFRTRDLLVRQRTQLINAIRGHLTEYGWIAPKGPSHVAMLADLIEREAIASSLPEAARAMFRCMLDQIAGLNGKIADLDKEIARRAREDEVSRRLMTIPGIGPISATAIAALAPPAETFAKGRDFAAWLGLTPLQRSTGGKQKLGATSKMGERTLRRLLIIGSSAVVQQASRRGAPKGSWLEQMLARKPRMLVTVALANKMARIVWALLVKRENYKAPVAAKA

SEQ ID NO: 210864 - protein, 431 aa, unidentified
MEKFVKMSKPNVEIAAFIGLDWADQTHAVTLHEVGTDKRQRFTLDQTPEALQNWIQLLRSRFAGRPVAIAVEQKRGALIYALMHVDFLQLYPVNPQTLSQFRKAFYPSGAKDDPVDADLLLEILLTHRQHLRVWIPDDVLTRTIQLLTEDRRHLVDERTALTNQVTAALKMYFPQALEWFGDLHTSRACAFLQRWPSLRDLKRATASSIRKFYKAQGYRGDDKLKQLIANIPKAQPLTQDDAVVLAGSMKVQALVTQIALLSASIQRYDQQIASLFDQHDDSTLFGSFPGAGSSLAPRLLAAFGSDRSRFEFAAEMQQLSGIAPVTEKSGTGIWIHWRLACCKFLRQTFQEFAGCSILQSAWARAYYDEQRKRGKSHHAALRALAFKWIRIIFRCWKTRTPYDEAIYNNSLKIRRSSLADKLSAAEKMALT

SEQ ID NO: 210865 - protein, 332 aa, unidentified
MSIIGCDLHTRYQVIAMLEAETGEIVTRRLEHETGEAKKFYAGLEKPSLIGIEATGYTQWFERWVAELGHQLWVGDPAQIRARAVRRQKTDTRDAEHLLDLLLTSGFPRVWVPTPEERDFRQLLKHRDKLVKMQTSVRNQLHFLAMSQGVCRKQKLWSARGRQELEGLPLGPWARRRRQELLELLDRLGPRIEELDAAVKAEAARRPEAVQLMGQKGVGPVTALAFVLTVGPVERFPSSRKLVSYLGLNPGEASSGGHQHLGHISKQGNQMLRWLLVEAGHTAAQYDEELRRRYLRLKFRRGANVAKVAVARRLAVRLYWRLRRYATDSHAQ

SEQ ID NO: 210866 - protein, 416 aa, unidentified
MSFALPDALFFTGIDWAAETHAVCVTDAGGKIAAEFTIEHSADGIALLVRRLARYGEAGVMPVAIERPDGRLVDLLLEAGHPVVPVSPNAIKTWRDGEVLSGAKSDAGDAAVIAEYLRLRAHRLKTAAPYSDETLALRTAVRTRGDLVEMRVAATNQLSALLDAHWPGAKAIFADVESPISLEFLTRYPTPAAAAHLGEKRMAAFLAKHGYSGRRPAAELLARLRAAPAGTGREALSEALRDVVLAAVGVITALNAAVKSLDRSVAAHLGEHPDGKIFTSLPRSGQVNAAQVLAEWGDCRQAYDGPDSVAALAGCTPVTSQSGKHRSVHFRWACNKRFRVAMTTFADNSRHASPWAAKTYSDARASGKDHPHAIRILARAWIRVIWPCWLNGIPYDPARHGAAAALAEQPAKQVAA

SEQ ID NO: 210867 - protein, 377 aa, unidentified
MRLTEYGRDPHKRKEYVHQPDLLLVGVDVSKAKHNACLDTQTTISCRKLEFTHTREGFRRFEQTLRDHLVKNRCQRLLIAMEPSGLYWHALYDRLTSCGYDVCLVHCPAVRNNRKTMQDGTSTTDDKDAYSICDVLLQGKFFLPVARDAALKAAYRLMRRHMALKKRGSQLRNQLRAAIHLAFPELNPMINDLTQPTSLRFLQLQPTPESILRHGREPFLTAWAPRPRCGQWRPGKFQQLYDLATQSIGLQDPYQIDEFELKALAYDLADALGKQQLWLDQAIALLAPRPDFHLLMQLPRIGKPTAAALLTAIGDICQYTNGKQLVKLAGLAIRLFASGSSIRRLPKISRVGSAYLRHWLSHDALRLVAHAPHVKAY

SEQ ID NO: 210868 - protein, 338 aa, unidentified
MKITTVGVDLAKSVFTVYGVDEHGKPALRKTVRRGKLLELFAQLPACVVGMEACSGAQHWARELRELGHTPRIMAAEFVEPYRRGGKNDTNDAAAICEAVARPQMRFVPIKSVEQQAVLAVHRLRQGLVEERTALANRIRGRLTEYGLVIGVGLDRLRKALPSILEDAENGVPGIAREVFADATRQLIELDARIGEYDRRIAALARASEPAQRLMKMEGVGPVTATAIVASVGDAKMFRNGRQFAAWLGLTPRQHSTGGKQRLGAMTKHGDVYLRTLLIHGARAVLRVTPTHSDAKSRWAESLRHRRPDNVAAVALAAKHARIIWALLARGQHYHPAV

SEQ ID NO: 210869 - protein, 339 aa, unidentified
MKVSTLGIDLAKNVFQLHGVGCNGQTVLKKKLTRDKFLPFLMQLEPCLIGMEACASSHHFARVLRQYGHEVKLIPPQYVKPYVKTNKTDAADAEAICEAVARPNMRFVQIKTAEQQAILVLHTERNILIRERTACANSMRAILAEFGIIMPRTLSQLYKKIPEILEEYDNELSPFVRCSVARQLEHLQGVEDQITLIEQELSRWAKTQPACQRVMKVPGVGLMTATYLVASVGNGQQFHSAKQFAAWLGLVPREFSSGGKQRLGRISKRGDRYFRYLLVHGARAVAAVIERRKDNMPWLYRLLNKKAYNVAVVAQANKTARILWSMLVHHTEYRTLSAV

SEQ ID NO: 210870 - protein, 416 aa, unidentified
MSGAPNSSSFQRYLAIDAHKHYVVVGGMNAQLEIVLPAHRMDIERYPPWAKENLTGQDCVVIEASTNTWELYDITAAVAGKVVVAHPLEVKLIAHARVKTDKQDVFRLARLLVGDLIPEVWVPPVPVRELRNLISHRRRLIQLRTMTRNRLHSLAHRHNLILPEGGPFVDKNQGWWKALQLSPAEKLRLQHDLSLLEFLEPQIEDIDAELARLSGTGPWEEAIPYLVQLPGFGLINVMTLLSAIGDIQRFPTSKHLVGYSGLGASLHQSGETNYTGHITKQGRKELRHALVEAAWTAINSHPYWREQYQKLSHRMPANKAIVAIARRLLVAVWHVLTERVADRRANPDMVAYKLMVWSWKLDDVQRGGLTSRQFVRYGLIRLKIGQEISRIKRMGNRPIASVEEVLGRLPELNLNI

SEQ ID NO: 210871 - protein, 346 aa, unidentified
MTIVEAPRAVTGGVDTHLDLNVAAALDDIGGLLGVEEFPTDAGGDRRLLAWLQSFGIVMRVGVEGTGSYGVGVARALRAADIAVVEVDRPNRMVRRRQGKSDPLDAIEAARAALSGRASGKAKTRDGNVEAIRALTVAQRSGRTTRTTTLNQLRHPGFCAPEPLRQRFQGLSAAAMALEAAALRPRAEGDAVIFATKTAMRTLGRRVAVLDQEKADLDELLGELMAKTAPELLALHGVGVITGAALLVAAGDNPERLRSEAAWAHLCGVAPLEASSGKIVRRRLNRGGDRQANAALWRIAMVRMRSDPRTRTYVARRVEEGRSKPEIIRVLKRYIAREVYRHLPRG

SEQ ID NO: 210872 - protein, 320 aa, unidentified
MSATSVVVGIDVAKAHVDVAVLGAKFDAQRFDNNAEGHSALATALQPLGVALVAMEATGGYEAALACALQAAGLAVAVVNPRQARDFAKSMGRLAKTDTIDARMLAEFAAVLVRREDLASFIRPLADAQQQALAAMVTRRRQLLTMLLSERQRLQLAIPVVRPSIEAMIEAIRKQLDEVEAQMVTHVHEHYAALDKLLRSASGIGPVASATLIAELPELGRLNRRQIAALVGVAPIANDSGTSRGRRRIQGGRFEIRRVLYMAALTASRRNPAIKPFYERLIAIGKQPKVALVACMRKLLTTLNAMVRTNTPWDNSLHLA

SEQ ID NO: 210873 - protein, 389 aa, unidentified
MTTAIDTRDVCCVALELSKTSWVCAFAVPGESKVAIHKIKAGDTDRLMAVLTGSKARAEQQLGRPLQIVLCYEVGYDGFWLARYLIARAIHTIVFDPASFLMPRRSRVAKTDRLDAEGMTRILRRWLSGDREMARPVQIPSVEQEDAKRIERERKYLVEERISIIGRIKGLLALHGIWLVKKNIGKGLLQRLDAMKTGDGRPLAPFLRSEIERMLTRYDLISRQIADVEADRKAALNNEKGVFPHADKVRRLTTLGAVGETTATVLVAEIYHRTFLTRRQVASFVGLAPSPYKSGEVDRDRGINKAGSKLARHMLVELAWFWLRYQSNSQLSQWCHSRFGNQGMRGRKVGIVALARKLAIALALCRRRYRAGRSHTQSPTRELIAIGNQ

SEQ ID NO: 210874 - protein, 345 aa, unidentified
MENMYYIGLDVHKKTISYCVKDGSGRIYAEAEIPATRLDLDMWMKTLPQPWTAAMEATIFTAWIYDHIKPHAVAVKVAHPLMLRAIAAAKKKNDRIDAHKIADCLRCDFLPECYMASTEIRERRRTLRYRNLLVRQAVQMKNKIAVLLMEAGVSYNKQKLHKVGYFRELLATNPDIDEGLKPLLRLCRETVVRLGKTESALVRSLQRDSLLMERVERLMTIPAVGPITALTWALEVGDVQRFSSIKKAISYCGLCGAENSSANIIKRTPLSKQRNKHLQTTLIEAAKMAPRNSPELAMIYDREKQKGNANRATLAVARKLVAYLVAVDRRQKDFLIVERENRTAA

SEQ ID NO: 210875 - protein, 278 aa, unidentified
MRTIGLDVHKRFAEGAILEPGRPLRRRRIPTTPTELRAFVDELGPEDQVVLEATFNTWQLTELLRTRAGRVVVSNPMKTKAIASAKVKTDKVDAEILARLLASDFLAEVWIPDAPLQVLRRQLSHRLSLVRHRSQLRNRIHAVVARNLLDCPHTDLFGKAGQRWLADQRLPADERALIDSTQRMLAALETELALLDRPLAERALEDPQVRHLISIPGVGLVTALALVAVIGDIRRFPRPNQLVGYVGLDPRVRQSGEGPARTGHISRQGQSHARGLLG

SEQ ID NO: 210876 - protein, 431 aa, unidentified
MSESLTSPSSESNVISLLSANFLRLLGNSQGRGIVTVNVLRRGVEGKEDLDEVRSFGTMSKDLCSLAAWLGEVGCTHMAMESTGVYWKPIYNIMSGEGFEVLLVNAQHIKSVPGRKTDVQDCQWIAQLLQHGLLQGSFIAPEPIRELRDLTRQRKKLVSQRASCVQRIQKVLEDANIKLSSVASDVVGVSGWVMLEKLVSGQTDAQKLAELARGRLRSKKEQLADALEGRLTEHHRFLLRHHMREIRFFDEMISDYDERIEQQVQPFFDYIPLLDSIPGVNGTAAAGILGEIGADMNQFPDYAHLNSWAGMCPGNNESAGKHKSGTTRHGNAWLRTLLVEVAWAASRKKGSYFRTQYRRLAARRGKKRALVAVGHSILTIVYHVMKYKIPYKELGEDFFDKLNTDRLRKHYTKRLESLGYRVELFKGETAA

SEQ ID NO: 210877 - protein, 402 aa, unidentified
MNAVGIDVSKGKSMVAIMRPFGEIVSTPFEIKHTSSDINSLVKLIKSIEGESRIVMEHTGRYYEVLAHQLSEANLFVSAINPKLIKDFDNDSLRKVKTDKADSVKIARYALDKWQNLKQYSVMDELRNQLKTMNRQFGFYMKHKTAMKNNLIGILDQTYPGVNTYFDSPARSDGSQKWVDFASTYWHVDCVRKMSINAFIDHYENWCKRKKYNFSKSKAEEIYGKAKELVPVLPKDDITKLIIKQAVDQLNSASITVESLRTLMNETASKLPEYPVVMAMKGVGTSLGPQLMAEIGDVSRFTHKGAITAFAGVDPGVNESGSYEQKSVPTSKRGSSDLRKTLFQVMDALIKTHPQDDPVYQFLDKKRAQKKPYYVYMTAGANKFLRIYYGRVKEYLASLPES

SEQ ID NO: 210878 - protein, 367 aa, unidentified
MSSVASQAGLIHLGMDTSKNAIVVATLLPGEQSPVTDRIANEEAAVRRLVGRFADRSVLRAWYEAGPGGYELCRLLASMGVACQVVAPSLIPKGSSDKVKTDKRDSRRLARLGRAGELTPVRVPSPAEEAVRDLVRARDAMLADRKRAQQRLTAVLMRHGRVWRGATYWTAAHRSWIAAQRYGEPALAAAVGYYRATLAVREAELAAVEAELLPWAGREPLAGPVARLGCYRGIAELGALTLAAEVVDWRRFPAARAFMGWTGLVPAEYSSGERTRRGHITKAGSEPVRTALTEAAWAYRFQPAIGAGLRRRQHGAGPDTLARSWKAQRRLHDRYVHLTRDGGKAAPEAAVAVARELAGFIWAEMTA

SEQ ID NO: 210879 - protein, 407 aa, unidentified
MTAVMIGVDPHKGSHTAVVIGPAEEPLGELRVRASAGQVEKLVAWAADWPERTWAVEGAAGLGRLLAQQLVAAGERVLDVQPKLACRVRLLQAGDTNKNDPNDALSVAVAARRSKTARPVMAEDYPAVLKVWSKRHRDLARLRNQVACRLHAVLCDLVPGGHPKEISAAQAARILEQSSPSGAVDRARAELAAQFPGDMRRLDAQLRGTRKKLAAAVRASGTTLTEVFGVGPVIAGTIIGDIADVSRFPGRDHFAAYNGTAPVEVSSGNRKIHRLPLRGNRRINHAIHMAAITQIRHRHSDGRAYYDKKVTEGKTHKEALRSLKRRISDAIFACLLADARRAGQRPARTAREGNQGTTLTPARPAHTPNAGSSDKPLPDLGTTIRPGTRAATPSPSKPASKKTRPAT

SEQ ID NO: 210880 - protein, 399 aa, unidentified
MNNVAGIDVSKGKSVVSVLRPFGEVVAKPFSVGHIGSELKALADYLKSLDGETRVVMEHTGRYYEPVARFLHEEGIFVSAVNPKLIKDYGNNTLRKVKTDKADARKIARYGLDNWVELRQYTPMDTIRMQLKTLNRQQGLYSKTKTMMKNNLIALLDQTYPGANSLFDSPVREDGSQKWVDFAMTFWHVDCVRGMSLAAFTERYRKWCKRHGYNFSQSRAIEIHMDAQNLIAMLPRNPLTKTMIRQAVDALNAVSKSLEQLKAEMRTLAAQLPEYPVVMAMRGVGDSLGPQIMAELGDVTRFTHRNAITAFAGVDPGADQSGAHEAKSTRASKSGPPELRKALFLVMDCLLNDPVYRFMDKKRAEGKPYLVYMTAGANKFLRIYYGRVKEYLASLENSD

SEQ ID NO: 210881 - protein, 334 aa, unidentified
MKELKSCVGIDISKDSFEVCVKQLKDERSVIKATHSFQNDFMGFEKLLKWTLAKVLNPIFVMETTGVYHEDLTHFLYSNEQKVAVVLANKMKHFAKSLNMKTKTDKADAQMIAQYGLERPLDWWKPMMPQMKNLRDLCRERASLKKDLVRCKCQIHGLKHAHSILDVVLQVKEQQIEFLDKNIQVIENEIIRLTQEDKEFSQRVKNIETIKGLRLLTIVTVLCETNGFEQFNNIRQVVSYAGLDISERQSGLFKGKTHISKKGNARIRECLYMPALSATSYNEQIKALYQRVIERNPTIKRKGVIAGMRKLLILIFVLWKKNETYNAAYQWDAH

SEQ ID NO: 210882 - protein, 427 aa, unidentified
MSVTQNEKIRQVTDTTMVIGVDIASELHWARAFDWRGLELGKTVKFENSAEVFNFFLRWGSELTVEQKKDSVMVGLEPTGHYWFTLAAHLQGGDFKLVLVNPYHVKRSKELDDGHPSKSDKKDPKTIAKLVLEGRYVYPYIPQGLYAELRIAMNCRWRIRKELASLQNQIQRWLKIYFPEHSKVFGRFTGTGNMELLHSAPFPSDLISLGVEGISGIWKQMKLRGIGRKRAQRIYEAAQTSVGCTTGMEAARMKLQILLEDYDAKLQQYERVMQVVENLCSQIPAVAELLKIQGLGLVTVAGLFAEIGDIRRFESPRQIQKLAGLAITENSSGKHKGPTEISRRGRSRLRAILFRAAIPLLAKNREFQLLHRYYTTRQNNPLQKVQSIIAVCCKLLRVFYALAIKDCAYSPEKMLAGIQRNQSLKAA

SEQ ID NO: 210883 - protein, 319 aa, unidentified
MEDASGYIGIDVAKAELVVARDGVVECTTYPNTAAGHAVLQRDVETTPPALIVVEATGGYERGLVAVLGSAGLPVVVVNPRQVRDFAKATGQLAKTDRIDADVLALFAERVRPEVRTLPAADAQELDALLARRRQLLEMLQAERNRLGQVFGRGKQPVKKSLKAHIAFLERELRIADTDLGAMIRRSPAWRERDDLLQSVPGVGPVLSLTLLAELPELGRLSRREIAKLVGVAPLSRDSGALRGRRFVQGGRAGVRAVLYMAALVATKRNAVIGAFYQRLLRAGKPKKLAPVACMRTLLTILNAMARTNTRWQEHPATA

SEQ ID NO: 210884 - protein, 340 aa, unidentified
MGQLAVIGIDLAKNVFQLHGVDKQGRCVLKKMLRRSQMLKFFARTEPCLIGMEACGSSHYWARELTALGHDVRLMPPQYVKPYVKTNKNDEADAEAISEAVTRPNMRFVSVKSVEQQTLLLIHRERDGLVKERTALISRIRATLSEFGIVIPAGRRRFKNWFLAEYGKFESKLPQLLQQHIVFMMNRLHQKESEIQRLETEIDQQSGRNAECKRLLEVPGIGRLTSSALVATVGDAKTFKSGRQLSAWLGIVPKQYSSGGKQTLQGISKRGDVYLRRLLIHGARAVIRHSKPGSPWYSWIKSLESRMHKNKVIVALANKLARIAWALLAKGVRYQRVEEA

SEQ ID NO: 210885 - protein, 426 aa, unidentified
MAVVMIGVDPHKASHTAVAVNAAEVPLGQLRVRASAVQAERLLEWAQAWPERAWAVEGAGGLGHLLAQQLLSAGERVLDVPPKLAARVRLLATGNINKNDPDDARSVAVAALRSADVREARRDDHAAVLKVWSKRYRDLGRMRTQVACRLHQVLCELIPGGVPGEITAGQAARFLESVTPAGAVQAARWELAAELTEDLRGVDARIRETRTKAAAAVRAAGTSLTGLFGVGPVIAAAVIGDVRHVSRFGNRDRFAAYNGTAPIEVSSGGRKVYRLSRRGNRRLNHAIHMAAITQIRYRHTKGRAYYDKKLAEGKTPKEALRALKRQISDAIFACLQEDARRAAAAAKSPGGQPGNHSVSRAADSHPDHRLFGPATPGPATHPMTPAAPVPAQLPSRASERLSPGPGAARPRSGARRASSTRSRTSR

SEQ ID NO: 210886 - protein, 415 aa, unidentified
MKVVFPTCCGVDVHKTFLVATIITTPADSLQPHYQKKRFSTFNSDLNRFADWLLERDCLDVCMESTGKYWIPVFNILEKRGIRVVIANPKWVKAVKGNKDDTKDSKWIGDLFRIGLVKSSFIPNWDIRILREFTRYRYKLVSMKSSEKNRFQNAFTVCNVALDSVVSDMFGKSATAITDYLASDESFDADHCVSLLQRSLKKKAEQVLESIVGFSIADEQKTRIKIIREHYDFIEKLIAKVDACVNEMVAKYEGEINLLCTIPGINRNSAITIISEIGIDMHQFGSSKRLCCWAGLTPGNNESAGKKKSVRISRAGVYLKPALVQVAHAAVKDKKNPYYALKYERIAKRRGKKRAIIAIARMILTAIYSMFCTGEVWNPVDIFKIDMPEHLKEQQLAKAIKQAKRFLEKQGLTVA

SEQ ID NO: 210887 - protein, 398 aa, unidentified
MLSIGIDVSKGKSTVCGMKPRGEIVYTPFEVQHTREGMSELVSLLRGSGEEVRVVLESTGSYHCPVVAALLENGIFVSVVNSLRMKRFCSQSIRRVKTDQIDAMQIALYGLAYWPELQPTRLPENTYRELQLLARQYYQMTSILIKAKVDFNALCNQVLPGMQELMNDHAGRHKLSDFVLRYRHTAHILKMGETRFRKDYCKWAEKKGYRNRERMAALIFATAQNGIPVLPNAPSTQIVITEAIRVLHTVEASRDAILTQMQALAKTLPEYSLVREMPCIGDTLAPRLIAEIGDVRRFHSKRALIAYAGIDAPPYQSGKFSANNRHISKRGNRYLRKTGYEVMQSYVMHKPANDPIFTFIEKKRSEGKSGKLAMVAGLNKFLRVYYGKVTELYRSLPQ

SEQ ID NO: 210888 - protein, 350 aa, unidentified
MQYIAFDSHKRYTQASVASMTGTICREARIAHEPEAIAAFLGEFDQGSPVAVESVGNWYWIVDEIEKAGMVPHLVHPRKAKLMMGMINKTDKLDARGINRLQQNGTLPVVWIPPGDLRDKRDLPRTRMVLVRQRTRLKNRIHATLAKYALSPTGVSDAFGKRGREILRERIRKLPPETRFVTERLIKEISSLEASVEALEIRMKTLFAKTPEVKLLMTLPGVGFILATVIAMEIGEVTRFPAANRLASYAGTTPRVYSSGGKTRFGTLRTDVNQYLKWAFVEAANSICVHAHRCPDRHVVRLYRRIQTRKGHQKAVGALARHLAEASFWVLRKGEPYREPTRPAVSSTEG

SEQ ID NO: 210889 - protein, 442 aa, unidentified
MARKPSKQRFTVVHPDCAAIDVGGREHFVAVDPRHDNAVQSFTSFTDDLYKLADWLQSLAIKVVAMESTGVYWIPIYEILSERGFEVYLVNARATRQITGRKSDVLDCQWIWQLMTHGLLRGAFRPDDLTCCVRSLVRQRASKVKDQAQTLNRMQKAMSQMNIQLANVISDISGVTGMRILRAVCAGERDPVQLAELTDRRIKAGKEAVARSLHGNWRREHLHALTQELAAYDFLEQQIADCDDAIKTALEQLPVLQNEPEPAKKALRSPHRSGAQQTELHQTLWKVLGVDLTAIPTIGVDTALVLAGEIGTDLSRFPSSQHFCSWLGLAPPTRISGGHRLAGGGPKIVNRAAQALKQAASNARNDKGFIGASHRARLTRMDTSCAIKATAHQLARLVYNLLTKKRAYVEQGLEEFETRSQDRQVRALLRKARKLGYQLVAA

SEQ ID NO: 210890 - protein, 408 aa, unidentified
MEVMHPRCAGLDVHKEQVTACIRIARDGKASREVRSFSTTTSGLLALAEWLGNDGCTHVAMEATGVYWKPVWHILEGSFELVLANAQHVRNVPGRKSDVNDATWLADLLAHGLVRASFVPPTPVQEMRDLTRTRKQLVREIAQHTQRIHKTLEDANIKLDSVISNILGVSGRAFLAALIAGETDPEKLVELAHPRLRAGRNTLVEALRGRVTQHHRFLLELHLSQIDSLDKAVRGLEARMGDALAPFRGQVEHLKTIPGVSDTVAQVIAAEVGLDMARFPTAGHLISWAGLCPKMDESAGKRRSTRVRKGAPWLKTTLVTAAWAAARKKTGYLRAQFLRIKSRRGAKKAIMAVAASMLTAVYYMLRNGMPYHDRGADHLDDRDNRQVANRLLKRLAALGFTVTVTAAA

SEQ ID NO: 210891 - protein, 343 aa, unidentified
MQTITTIGFDIAKSIFQVHCVDAEGKVILRRQLKRRYVLAFFQKLPPCLVGIEACASAHHWSRELTALGHTVRLMPPAYVKPYVKRHKNDATDAEAICEAVARPNMRFVATKTPEQQSCLTLHRTRHLFIRQQTSVINAIRAHLAEFGIVAPVGRNGVEQLLSVAADSNDKRLPEFARACVVALGAQLRMLKAQILQFDRMITAWHRSSEASRRLDDIPGVGPALATALIASIADPKAFRSGRNFSAWIGLVPKQNSSAGKDRLGNISKRGDRYLRSLFTTGALAVIRYAKIHGTRHRPWLTALLARRPTKVAAIALANKIARMAWAMMAKGERYKEPAALAA

SEQ ID NO: 210892 - protein, 275 aa, unidentified
MLLIGCDYHPSVQQITWADTGTGECGEQRLTHCAEAEQFYRDLKQRGASVRVGMEATGHSRWFERLLAELNFEVWIGDPAQIRAKQVRKQKNDRRDAGHLLKLMLENHFPQLWVPTPEDRDVRQLVWHRHRLVQMRTRVMNQLQAIAMNEGIRRKRGLWTRRGRAQLEALQLPPWTSRRRQELLEVLDRFNRSVDELTKAIEQEAQRRPEVERLQTHPGVGPITALAYVLVVGTPERFACGKQVASYLGLIPCEDSSADRWPLGHITNQGNALLR

SEQ ID NO: 210893 - protein, 351 aa, unidentified
MTLDFTPNEWFVQSVGIDIAKSTFTACICMSNVCESQLSEVVTFNNSKQGFNQLLKWARKEAIKGFPLRFLMEATGVYYESLAYHLYKLKQTVYVVLANKVHDYAKYEGIKTKTDDVDARVIARMGCANRNLYAWEPPAPIYRELKQLTRTCASLKKIRVALCNQLEAVTHAEEMLPSIIKYYERAIANIDKQIEQIQIEIRKKVEEDAILHAKIKRIAAIKGLTEDTITAIVAETNGFAFITSRKQLASYAGLDVQAHASGQQDPKRHISKRGNVHVRNILYMPALVAARFEQPMRIMYERINERNPTAKKIGVTAIMRKLLLLVYTLWKNGEEYDANKIKQQYKKEVAC

SEQ ID NO: 210894 - protein, 340 aa, unidentified
MNINVIGLDLAKIIFHLIGLDQHGKQVLKKKLRRAQMLAYFANLTPCTIAMEACGTSHYWARELQKLGHHVKLLPAQHVKPFVRGNKNDYNDALGIAEASRIPQMREVSVKTVEQQSIQALQRFRRSAVGDRTALCNQVRGLLAEFGISLNQGVATLRKAIPEILEDAENGLHAIFRDALSLKYQQLCQLDDLIDDLTRAIQKEAKLHHEIKLLQSIPGYGPILSSAFYCVFGDGKGFRKGRDASAAIGVVPRQHSTGGKNVLLGISKKGDKYLRSLMVHGARSLIKHAHKKEDALSCWVTALIERRGKNKATVALANKLTRIGWAVITTGKPYEENYAV

SEQ ID NO: 210895 - protein, 397 aa, unidentified
MIAVGIDVSKSKSTVAILNGDGSVRAKPFDVHHVADELQALVDYIKKTSEPPTILMEPTSHYHYPLLKAFQEADLPVCLINPYQMKKYGDTSLRKAKTDKRDALRIAQYALEKSYSLVPYTPQDQKYEDLRFLSRQYGQRISTLTVAKVQLLSLLDETMPGITTILPLKSRDPDNCMLLCFIKRFKSFDIIRKMGKTRFLDSYQVLVKKTKDRFAGAKGLAIYELVLNSITTRGENPLSAMTQDQCVDLVSTSQKAADEINLQMRIIAETIPEYKVLRSMAGVGDRLGPIILGEIGDIRRFHSGKSLNAYAGNDAPPYQSGQFESRNRHISKRGNPALRKACFEVMQALKLTKPQDDPVYLFLLKKEQEGKPYNVAKMAAVNKFLRIYYARAMELYK

SEQ ID NO: 210896 - protein, 395 aa, unidentified
MQVMHPVCCGIDVHQKSIVCCILDGPLTSNEPKKYQTSFGTTTKELKAALDWLLEHQVTHVFFESTGQYWIPLFNIFSDSDLELVLANPQHIKNVPGRKTDVKDAEWIAQLGRCGLINQSYIPSQEVLQLRYLTRYRISVKQRLTQIKNHIHVILQRGNIKITSYLADIFCKTGQALLTLFINGEVINEDNVESCIHGRIKASTRQLIEAMEGKLSTVDRFLIKECMEEYKLQKKISDELNKEINEYILEHFPEEYQLLLTIPGISDNCCATILAEIGPNVEAFKTDKKLASWAGMCPGSNESAGVKRSSHTTQGNKYLKQALVMSVLSVQRAKEVTFSLFYQRISSRGSKMKAIIACGHKMLRIIYKILQSHQPYNSQKALGLRQQTNALSLTI

SEQ ID NO: 210897 - protein, 342 aa, unidentified
MEHYAGIDVSLERSSVCVVDGTGRIVREAKVASEPEALVAFLGQLGLPLTRVGLEAGPLSQWLHAGLSEAGYEAVLLETRHVKAALSAMVVKTDRKDARGIAQLLRMGWYRPVHRKSPPAQEIRALLAGRKLLQAKLRDVELSIRGLLRGFGLKVGEVSKGRFAARVDELVAGHEMLEEVIGAMLRAREGLRAEFARLHRRMLTIVRGDTVCRRLMTAPGVGALVAITFKTAVDDPGRFRAAKAVGAHFGLTPKRYQSGETDVSGGISKVGDAMVRTALYEAANAMLSRTSRVSALKRWALEVARRRGMKRGKVALARKLAGVLHRMWANATDFRWGGEAAA

SEQ ID NO: 210898 - protein, 367 aa, unidentified
MKKGSTVAAKQGRNFKHQKLTIGLDLGDRASWYCVLEQTGAVLWEQRVSTTPKAMREAFSTVTRSRIALETGTHSPWVSRLLAEFGHEVIVAHARNVRLIGESRKKDDRWDAQTLARLARIDPQLLCPVKHRSAKAQADLTVIRARAGLVRARTALVNTARGLAKSYGERLRSCNVRNMNPEKAEGLSPELQTALEPLLLAMESLSEQIREYNERIENMAQHSYPQVALLKQVKGVGTLIALTFLLTLEDPLRFRKSRDVGCYLGLQPGRRNSGQSEPQMHISKEGDPYLRTLLVQGAQHILGPFGVDCDLRRWGLKLAERGGKSGKKRAIIATARKLAVLLHHLWASGEVYEPLHNSKQNAMATAA

SEQ ID NO: 210899 - protein, 401 aa, unidentified
MVSDFRKGRYNLMKIYVGIDIAKLNHFAAAISSDGEIIIEPFKFTNDADGFQLLVSKLESFDKNSIIIGLESTAHYGDNLVRYLVAEFYQVCVLNPIKTCQMRKNNVRKTKTDKVDTFVIAKTLMMQDDLRFITFFDLDMMDLKALGRFRQKTIKQRTRLKIQLTTYVDQVFPEIQYFFKSGLHQNAVYALLKEAPSPKEIASMHMTHLANLLKVNSHGHFTKEQAKELRVLAQKSVGANDSAISIQITQTIQQIELLDSQLEKIEAEMTDIMKFNDSVIMTIPGIGYINGGMILGEIGDIHRFSNPNKLLAFAGLDPSVYQSGNFQAKTTRMSKRGSRVLRYALVNAAWNVVRNNATFKAYYDAKRAEGRSHYNALGHCAGKLVRVIWKMLTDEVEFNLE

SEQ ID NO: 210900 - protein, 339 aa, unidentified
MQVTTIGLDLAKNVFQVHGITKDDEVAFNRPLRRAQLLPFFSKVDPCLIGMEACSSAHHWARELTKLGHDVRLIPPMYVKPYVKRGKSDAIDAEAICEAVTRPTMRFVAIKTVEQQSLLSVHRARSLLVRQRTQLINGLRGMVAEFGVFIPKGLARIIDFAENILAGEVLDLPDIANEVIHNLCEHLIALHARVRWYEDRLKQVAKEDARVRLLRTIPGVGAVTASAIIASIGDGHQFRSGREFAAWLGLTPANKSSGGKEKLGRITKMGDQYLRSLLVVGMTSLVRQTRSHPERASKWLTSLLERKPARVATVAMANKTARIVWAVLTRNQPYTPHTA

SEQ ID NO: 210901 - protein, 353 aa, unidentified
MTDFGGSVVAGVDAHTDEHHVAVVDAQGRLLGAAAFPTTAEGYAGLISWVRGYGEVDRVGVESTGAYAAGLVRALQTGGIRVVEVNQPHPHARQRRGKSDPLDAELAARAALSGTATAVPKQTSGIVEAIRQLRVVRVGALKARTAALQQLDDLVITAPEQLRRELRHGRTLKAKAALCLKLRPDIERIDEPAQAAKLALRSLARRIRELDTEILELDRQLEQLVNAAAPRTLQLFGVGTQGASQLLVTAGQNIQRLRNQAAFAKICGAAPIQASSGRTKRHRLDFGGDRQANRALHMIAVCRLRHCKRTRAYATKRTADGLNRREILRCLKRYIARETYHTLRADLEALNST

SEQ ID NO: 210902 - protein, 324 aa, unidentified
MRFYTKQHPFYCGIDLHARTMYVCILSPDGEIVLHRNMPASPDALLKAIAPYRDNIVIAVECICTWYWLADLCVQEGLPFVLGHALYRKAIHGGKATNDKIDAQKIAVLLRGGMLPQAYVYPAEMRATRDLLRRRLPLTRQRAELLAHIQNTHSQYNRPEIGKKLASKGNRDGVAERFPAPAVQKRVEVDLALIDYDDRLLSDVELTLVQTAKQHHAQTLYRLQSVPGIGKILSLVVLYEIHDIARFPRVQDFVSSCRLVKCAKESAGKRSGTSGAKIGNAYLQWAFSAAAVLFLRNHPAGQNYLARLEHKHGTGKAFTIFAHK

SEQ ID NO: 210903 - protein, 455 aa, unidentified
MSRSKSAKAGDLPMVVPGAAAIDIGSTMHMAAVNPDADDRPVRAFGTFTGDLHVMACWFKTCGVTSVAMESTGVYWIPAFEVLEEHGFQVILVNARYAKNVPGRKTDVNDAAWLQRLHSYGLLRGSFRPKAEVATLRAYMRQRERLIEYSASHIQHMQKALMEMNVQLHHVVSDITGATGMRIIRAIADGERNPVTLAEMRDVRCHATVETICSALTGNWREEHIFALCQSLALFDFYQSKIVECDRKLEIALRDLEDGNGHDTARLPKARTKTGQVNAPDFEVRSALYRVLGVDLTQIHGIGPSLALKLVGECGTDLSAWPSSKHFTSWLCLAPGNKISGGKLLSSKTRRSSSRAAALLRLAATTIGRTDTALGAFYRRLSARAGKAKAVTATARKLAVLFYNAVRHGMAYHDPGATQYEERYRSRVIGNLQRRAKAFGFVLQELPEEPEMAVS

SEQ ID NO: 210904 - protein, 423 aa, unidentified
MNRLHYELHVGIDLGQWLHQACVVDANGEFLEERGFEHSVDGLGATRDWLLNLAGKNAERIAVAIEKPHGAVVETLLESGIAVFAINPKQVDRFRDRHSMSGAKDDRRDAFVLADALRTDGHRFQRLQLPPPESVALRELLRTRDQLVKNHVALSSQIRDLLARCWPHLVALAPKDKALDVFFCELLQLFFDHHPTADLSLQNIQELVHQHHIRRLPPEQILEVLRKTPLRVAPGTTEATSAHLKLLLHQVLLVRQHRRDSDQHLERWFKQLQPTSHQPYTDAAILASLPGVGAVVLACVLSYAHDPVRLRNLDAFRSLGGIAPVTKKSGNRGQQRPQILMRRARSLPLNNALHHWARIAVLRDPHFKDHYDRLRAKGHSYARALRGVMDRILPIAVAMLRDQTLYDSSRRVRSDDVRKKISS

SEQ ID NO: 210905 - protein, 354 aa, unidentified
MIIIGVDFHPEFQQIALLNTTTGEVEERRLAHPEEAEKYYRALATAAESVRIGMEASGHGRWFERLVAELQFDLWIGDAAEMRAKRGRKQKTDRQDAQHILKLMLKDDFPKIWVPSWTNRDLRQLLWHRHRMVQARTRVMNQLQAVALNEGLHCKKKLWRERGRQQLESFALAPWASRRRHDLLELLDRLNPAIAELTQAIEREVENYPAAQRLKTHPGVGMLTALAFVLILGDAERFPCGKQVASYLGLVPLEDSSGNRRRLGHITKQGSSILRFLLVEAAQVTVRSLPEWRSKYFHLVLRRGRKIAKVAMARRLAVQLFWMMRKEWDYEQLKMFGSHAGQPGNRHGVPSNTE

SEQ ID NO: 210906 - protein, 391 aa, unidentified
MTYYVGIDLAKYHHECLVITQEGEVVSNSFTFDNNKQGFNSLLSVLSSLDASKQIKIGFEATGHYGTNLKNFLTNLGYDFMEIHPVLISRFSKVSSLRKTKTDKIDVFLISSYLTTVEYKPYLTESYHITSLKSLTRSRDALVKERSLQLQRITNLLDYIFPEFKPFFNHSLTSATCQYLLINYATPSKMSRMNQTSYDKMKSKLRRTISYAKFSKLRDLAKNTVGVENPLLEFQLNNYLTLYSTVDQLISETDSLIVHEFSQINSYLQSIPGIGIISAASIYCEIESFDRFNHPDKLVAFCGLDPAFYQSGESEFTGKMVKRGSAYLRQYIMNCAQYVLLHNSTFYDFYLKKRHEGKKHRVALSHVAKKLLRIIFKLEHNHINFDATKMI

SEQ ID NO: 210907 - protein, 353 aa, unidentified
MQCIAFDSHKHYTWALVQDQTGKVLCEQRINHTKGALREFLLGFDQGSPVAVETIGNWYWITDEIEQAGMVPLLVNARRAKAMNGSTNKTDRLDAQGLNRLQRSGTLPTVWIPPRHLRDARELPRTRMVLVQQRTKLKNRIHANLAKYGLETSGATDLFGVRGRRILSARLQEMPEQTGYATQALVEELDHLQDRIGELEARMEDLFGKTNALELIKTLPGVGFILGVVILTEVGDVARFPSASHLASYAGMTPRVHASGGHVRYGRTRADVNHYLKWAYAEAANVVMVHRRRHPERHVSRLYERIRRRRGHAKAIGAVGRHLAEATYWMLKKMEPYRDPTVDREQPESMRVA

SEQ ID NO: 210908 - protein, 523 aa, unidentified
MAATATSKRRRAPRPRGVHKPRGVLHGRVQKAGPEHFGMVCVDCAKARSKWMICDFYGRMLLPPEDLLHGRAYFELAVCRLREAIDKHRLRDVVVAIERTGTCHLPVKRAFSAAGFECRIVHPFATKQFRQPADPGNKTDETDLSAIFRAATCGFGLIEPPLDPLSEHLRLLVRHRRDLVQKRSAVCCQLREHWEATLPGFASCFDEFWDSAVGLYVARHFHHPEAVREAGVEGLARRLKEAGHRCSKPTLQRCVSWAANAASPAGAAAVDHRIARALDDDRRAKTEQIQALERDIAGLFVRTPYVLLLSIPGINVVTAAEFAGEMGPISHYVHAKAITGRAGIFPSRYQSDQVDCQSGPLIRCANRRLRASVMMIADNLVKCNYYFNGLAGAWKAAGKDPRANRVRVACRYSRIAFHMVAGGEVFHHPLCRDRSYILDKLLMFYREHDTPPARIVTDLQAAVAQLPKTEYAAEAAPLAKRMTQRTARRRRGPQPLGDILPIVLARLGVSEVQSNLSGDQGPG

SEQ ID NO: 210909 - protein, 373 aa, unidentified
MPKYSTAFGMDVHLRSTTVCALDADTGEAVTRRFPGNPWGEIAGWMGGFPGPSLAAYESGYPGFAPQRELAGLGVECVVAAVSKIPRSAADSASKNDRNGAARMAKAILAHDISPVWVPSPEVEGIRDLAGAYDGATARLATAKQRLLAFLAKRGFAYGGTTPAGNPRKYWTYDFLRWLDKVRPEDDGGVRTLAALRSEVEAAAEARADLLSEYRAAVDASPIAAEVAALQSIKGCAFALAAAFSAEVGDFTRFRSGRQVTAYFGLAPSQRSSGDSVRLGGISGAGNALVRKLAVEGSWCYAAARHQPKLMPRDTGVPLEIRMHGRKGSERLLRRREEMLARGMPAAKANAATAAELVRWLWALGMMCREGAE

SEQ ID NO: 210910 - protein, 329 aa, unidentified
MKAYVGIDVSKKWLDMALWVDGEIVEQLQLDYNRAEVEVAVQELNDIVGKRELIFGCEATGQYHKALVYQLHELGYRQKVINPRMTHHEKMARNISSGNDAIEAVIIAQHLAMRDDPFWKPEHEGNSALRDLVLRRDQLKKELNREKNRLDRFTVFGPAEKSLKRGIKFIEKELEIIEEEIKKVIDEDGQMQEDMELLRTIPGVGYYTSLTFLARIGDVSRFNKADEVVKYLGLAPIVKKSGSSINKARLSKTGDTIFRSTVFNAALVNTNKDNYYGKYYRSLVERGKNGRTALTGVMRKITRAMFAILRDRRPFSINIYGNSKIALTA

SEQ ID NO: 210911 - protein, 346 aa, unidentified
MITIGIDPHKDTHTAAAVEDTTGQLLGELTIPATEDGHRHLLAWAHELGDEQRPRFALEDCRHVNGRLERFLLGAGETVLRVGTRISAHARQGARTYGKSDSIDALAVARAALREPGLPHATHDPKLRELKLLVDHREDLVGERTAHSMRLRWLLHDLDSGLEPIARTLGEEKVRRGLSQRLGRYGSGVQVRICRELLLRIGELTRAIDALRKEIAALVRPMAPALLAISGVGELVAARILVEAGGPGRFTSDAALARHAGCAPIEVSSGRTRRHRLSRMGNRKLNATLHVVVLTQARVHPPARAYLAKKRAEGKSNKEAFRCLKRHLVRVVFRALQEPQVVAVSP

SEQ ID NO: 210912 - protein, 327 aa, unidentified
MKMSIGIDVSKDKLDVSIYDGINYKYYQFDNSRKGIEQLLNETNQFNYEAVFTMEATGVYSLLASNMLYERKYSVSVVNPLIIKRYSEYKMCRAKTDKIDSRIIADYGFNNPPSCFIPKPIEMQYLKQYLKLVYDFKQEITRYTNRLKALKINPKVNNSLLQLYNEHVLYLKNKIKQAENEIDKIISENFKKENELLRSIPGVGKRISAIIISNFHTFEDFENSKQLSSMLGINPSPYKSGSSVNRRAVISRKGNSYIRKILYMGALVASKNNKECREFYNRLLLKGKDKKLALIAVENKLLRQIFTVLKNKREYIENYYFNNQKIA

SEQ ID NO: 210913 - protein, 401 aa, unidentified
MESPIVSIDVSNGNSHYMCFIKNNKRFGKVKKIDHDIEGFKRLLEDIQKLEAETNEKVCAVFEATGVYTKPLERFLSKNSIKTYRINPLESARKRKEEIHNKKTDKLDPISISKVYYDKEEMMELKKKDETYNWLRKKNRLYEDQLNHLRKYKVTFQNQLSICFPGYLDLFKDGYSDIPMTILKKYPHPDLLKNKKAETVARYLEKNTCHTHKVSLEYALKIIEFAKKTYPGCEKDDVEVEIFKILLDKVIETQRECEKTLNEMITVASTLEEYRYISSIDGIGPNLAARIIAEIGDIEEFKSREALVAYAGLDPHIYQSGDQDGKHLKISKKGNKYLRCLLFLAVGCSIRGAKDNPVNRFYQKKKQQSNPLNSKAAKTACTAKLLKIIYGICKNKTTYER

SEQ ID NO: 210914 - protein, 344 aa, unidentified
MEPMYYIGLDVHKRTISYCVKDGSGKIHSEGSIPATRFDLDRWMKTLPQPWTAAMEATVFTGWIYDHLQPHAAALKVAHPLMLRAIAAAKKKNDRIDASKICDCLRCDFLPECYMASTAIRERRRTLRYRNLLVRQMVQMKNKIGMLLMEAGVSYNKQRLHKAGYFRELLTTNPAIDEGLRSLLRLCRETVVRLQKTESALVRSLEHDSLLMDRVERLMTIPAVGPITALTWALEVGDVQRFSSIKKAISYCGLCGAEKSSGNTVQRTPLSKQRNKHLQCTLIEAAKMAPRYNPDLAMLYDREKQKGNANRATLAVARKLVAYLMAVDRGQRNFKVVETNCIAA

SEQ ID NO: 210915 - protein, 346 aa, unidentified
MTIVGCDFHPSWQQVAVLDVETGEINERKLVNGNGEAERFYRALPVPSLVGMEACGNSQWLSELLQQIGHEVWIGDAAQIRASYVRKQKTDRRDAAHILKLLIENRFPRLWAPSAEQRDLRQLLVHRHKLVSIRTRVKGGLQHLALNRGLQKKSKLWTAAGQKTLRELPLDTWAACRRQDLLGLLMNLNQLIDKLDVAVERAAKEDPQARLLMTQPGVGPITSLAFVLTLGDVSRFKRGKQVASYLGLIPREHSSGGKQRLGAITKQGNSFMRTLLVESAQTVTRLDKGFRKQYLHHCHRMPKGVAKVAAARKLAVRLFWMLRTNTRYPEIVRIESSSALAVVGES

SEQ ID NO: 210916 - protein, 390 aa, unidentified
MPYYKLNSDKFMEKACGLDVHKDSIFACILDEQGEKIFEKRFGTLTPDLHALHDALVAHYCGRVAMESTSIYWMPIWHILEGSFELTLANPYFIRQLPGRKSDAKDACWIAECLQKNSIKGSFVANDVCQQMRQYTRRHRRLTKSRVREEQQLDNQMQRCNIKFSNYVSNQGNNVSMRKIIRELIFGERDSDKLRDLVHGRTTNKHGKQIISDSLMGVIQQVDIEMLKQCMEKIELIEKQQATCLNHLEELAKEHFAEEISLLCTIPGIQKFSALCILAEIGSDMSAFQKATHLIGWAGLKPRNDETACKIKNRKILHGNKYLRQTLVEISWAATRSNKSFLGKKFKQLSKRMKSQKALIAITRKILVIIYNVLKTKQPFDPKKNLQAFA

SEQ ID NO: 210917 - protein, 343 aa, unidentified
MQMITTIGLDIAKSVFQAHGIDAAGQVVIRRQLKRRFVLSFFEKLPPCLVGIEACASSHYWSRELQALGHTVRLMPPAYVKPYVKRQKNDSTDAEAICEAVTRPNMRFVPTKTVEQQSCLMLHRARHLFIRQQTAVINSIRAYLAEFGIIAPVGRRGVEQLLEVVADTADDRLPEVARACLAALGSQLRALKAQILEFDRRIIAWHRSSATSKRLDAIPGVGPALATALVASIADPKAFRSGRDFSAWVGLVPKQNSSGGKDRLGSISKQGDRYLRSLFTAGALAVIRYAKIHGTGHRPWLTGLLARRPTKVAAIALANKLARMAWAIMARNERYREPAALAA

SEQ ID NO: 210918 - protein, 410 aa, unidentified
MGLYCGIDWASDHHDVAVVDGDGRVLARGRVGNDAAGFGQLLTLLAEVADSARDPIPVGIETDHGLWVAALRETGRVIYPINPLAASRYRARYAVSGAKSDATDAVLLANIIRTDPDAHRPLPADTELAQAIRVLARAQQDAVWARQQIGNQIRDLLKDFYPAALAAFAKLPSGGLARADARTILAAAPTPAQAATLTPARLRRLLVKAGRRRDLDRDVSRLRAVFTDTYLHQPPVVENAMGIQLTALLRQFEAACAAVDDLAEAATAHFEQHPDAKIITSFPGLGNLAGARVLAEIGDDRTRFADARGLKAFAGSAPITRASGKKTVVTHRHIKNRRLAAVGSIWALTALRASPGARRHFDARRAAGDWNRQAQRHLFNKFLGQLHHCLQTGQLYNEHRAFPPPLPLAA

SEQ ID NO: 210919 - protein, 343 aa, unidentified
MTHHVGLDVSVRETSICIVDEAGTIVKEARVPTEPSIIIEVLTTPGIACQRIGLEAGPLSQWLFNELARAGLPAICVETRHMKAALAAQVNKTDRNDARGIAQMMRVGLYRPVHVKTRISQEKRTLLMSRKLLQGQIRALENDLRGSLRTFGLKVGATSAGAFDERVRELVVEHPALAAIVGPLLAARGALRTQFVVLHRMLLKLVRSDPICARFMTVPGVGPVVALTFQATVDQPQRFAKSKAVGAHFGLAPRQHSSGETDYSGRVSKCGDAMMRSALYEAAHTLLTHTRRWSSLKAWGVRIAMRRGLRKATVAVARKIAVILHRMWIDSTEFRWGAEPVAA

SEQ ID NO: 210920 - protein, 389 aa, unidentified
MSPQNDQSKKCFTAFEQASTMVAVVELSKKLWLVAGIVPGIDRHPLKKFEADENRLLALLHHWQQQAVKAGREIKRIVVAFEAGRDGFWLARWLRVRGIEAYAIHPTSAAVSREHRRAKTDRLDTEHLKRVVLGWLRGEPDHCRMVAIPTVEEEDAKRPNRERETLVGECTGIVNRVKACLARFGIRGFNPTLRKAADRLETLVTPEGVRLPPLTLAEMLRDIARLRFLREQIKSIEKARVQRLRDGPATRTNVMVNLIARVFGIGIETADLLVHEILSRNLRDRRAVARYAGLTGSPDESGDRRREKGLARAGNARVRRGMVQLAWRFLGFHPDSALTQWYNKRAADGRGSTRKTMIVALARKLLIVLWRMVTTGEVPADLKLRRTTA

SEQ ID NO: 210921 - protein, 418 aa, unidentified
MSAAMVVPTRFVGLDVHKYYLIAVAVDRELNELLSPHRVNLAQLDAWARKTLTAQDAVVLEMTTNAFQLYDDLQPYVASVTLVHPPHVNLITRARVMTDKIAARILARLHAAGLLPPVWVPPQEVRDLRALLAQRTKMVRLATQAKNRLHAVLHRHHLAAPAGEPFAPARRTWWLDLPVTALERVRIASDLATLTFAHDQVAALETTLADLAAHDDRGPLLIQLPGIGLVAAMTILAALGDVARFPDARHLVGYAGFGVCVHDSGQTHRVGRITKAGRRDLRFVLVEAAQVAANTHPHWQAELARLEPRLGRNKAIVAIARKLLVAVWHVLTEGCADRYAEPEHVARKLLNYTYTLGKENRPQGQSAATFVRAQLDRLDLGVDLAAVPHGRRPVPLPPSKKLFLKVPAKVTIPELVEV

SEQ ID NO: 210922 - protein, 374 aa, unidentified
MGDYSEVFVGIDTSKLRNAVAIAEGGRNGEVRYLGEIDNTEAATSKLVKKLAAQHRRLTFCYEAGPTGYGLHRLIETLGHECVVVAPSLIPKKPGDRVKTNRRDALNLAKLLRAGELTAVWVPDARHEAMRDLVRAREAAVDDLKSKRQQVLSLLLRLGRHFTGKRTWTRAHMNWLVSQKLAHREQRIAFEEMLLAVRQADERVIRLERAIAAAVPDWSLAAVVTALMAVRGLDLISATIFLAEIGDLSRFASPRQLMAYLGLVPGEASTGDRVWRGGITKAGNHRARRILVECSWSYRHPPRVGKKKLAKVEAAPPAVQEIAWKAQARLTARYRALARRGKRPTLVVTAIARELSGFIWAVSRAVGAPATPAR

SEQ ID NO: 210923 - protein, 402 aa, unidentified
MNCVGIDVSKGKSMIAVMRPFGEVVVSPFEVRHTANELSELAGLLKSLDGETRVVMESTGNYHAPVAWLLHDAGLYVSVVNAMLVHDYGNNSLRRAKTDKKDAVKLANYGLDHWLTLPRYIPEEDTRLMLKICYRQYQQYSKVQTMLKNNLISLLDTTFPDANRLFTSPPRADGSEKWVDFVAAFWHCECVCGLSKKAFTTKYQKWCRKHGYNFSEDKALDIYASACRHFGVIPKTDTAKLLVEQAISQLQTTSSALAALKQEMQSLAASLPEYPVVMGMFGVGPSLGPQLMAEIGDVRRFHSKKALVAFAGIDAPPYQSGQIDVRSRSISKRGSASLRRTLFLVMSVILQCAPIDEPVYQFMDKKRSEGKPYRVYMMASANKFLRIYYASVKAYLESLEHD

SEQ ID NO: 210924 - protein, 382 aa, unidentified
MNQVIIVGCDLHDRSLLLKAACGMDAPQQKSFLNDCDGRQAMLDYLLGLAQQHQADRIVFVYEASGQGYGLYDFLTDQGIECYVLSPSHLPKSAKQKRNKTDAKDAQMLLERARAYVLAGNDLPIVWAPPKALRNDRELVRARLETAEAGAAMKLRILALLKRHSRAIPEVYRNNPNWTKRFLRYLATEAQQLPSVVGPVLLSLLARLEVIRQQVTELDRQLRKLALTERYRVPCETLRKLKGVGLLTALTFLTEMGDLNRFPNRRTVGAYLGLTPAALESGEADDRKGHITRQGGARLRKMLCQAAWAAIRNDAAVRTAWQRIRGDRPGRGKKAIVAIMRRLGIRMWHVAVAAGVSSDLAARPIPPPCWLRASSTNVSQAT

SEQ ID NO: 210925 - protein, 337 aa, unidentified
MNIVFLGIDLAKNVFQICGLNQAGKPVYTKRTGRKELLQTLANIPACLIGIEASTGAFYWQREFEKLGHKVKVISPQYVKPFVRGQKNDGNDAQAIAVALMQPTMQFVPPKSPEQQDIQALHRARQRIVNHRTATVCQIRGLLLDRGIPIGSAVSRARRAIPLIPEDAENGLSSRMRRTIAELYDLFNDLGRRIHFFDKEIETVFRQSEACQRIAKVKGIGPKTATAVVAIGKGTEFKNGRHFAAWLGLVPRQHSSGDRQVLMNMTKKGDKYLRTLFIHGARAVVRVATNNNDGHMNQWVNRLKERRGFNKTTVAVANKNARIIWSMLRNDTGYQVV

SEQ ID NO: 210926 - protein, 384 aa, unidentified
MQSDSITYVGLDVHKRTIAVSLLMPGRAESVEWQETNDATVARRLARKLLREAPGKVICCYEAGPTGYVLQRRLRSEGVMCVVVAPSLIPVRPGSRIKTDRRDARKLGELMRAGLLTEVHPPSEEQEALRDLCRCRVDVVEDLLRARHRMSKFLLRRHCLFTGTLRSWGTRHMAWLRQLRFEDPASQATFDNYLLAIEQLGERLLQLELKLGEFARQEPYREPVGWLRCFRGIDTVTAISLVAELHGFQRFRSARELMSYLGLVPTECSSGERERRGSITKAGNRHARKLLVETAWHQRHRPAISQPLRQRRDGQPAWVLAIADRAQERLWRRWTRMTFQGKPTQKVVVAMARELVGYLWAVLQGPEVMGMEAQDQEKPIHRTT

SEQ ID NO: 210927 - protein, 341 aa, unidentified
MKLTTIGIDLAKNVFQVHGADDKGRAVLRKQLKRAQMLPFFAKLSPCRVGLEACGSAHYWARKLQALGHTVELIAPQYVKPFVKRNKNDAADAAAICEAMTRPDMPTVPIKNADQQAILSVHRARQGFVKARTAQSNQIRGLLAEFGFALPKGIGLLLRRVPEIIEDGENDLPGSFRLLIERLLNHLKELDRQVGELAAEIQLWHRQNTASQKLAAIPGLGPLTASALVASIGDARNFKNGRQLAAWLGIVPKQHSTGGKPTLLGISKRGDAYLRTLLIHGARAVIRTAERKPDADPWLKQLLARRHKNVAAVALANRNARTIWALLAHDREYQPDYRKAA

SEQ ID NO: 210928 - protein, 407 aa, unidentified
MNAVGIDVSKGKSMVAALRPMGEVALLPKEYPHSEVGLEQMAYAIIALGEDTRVVMEATGRYHEPVAATLHEYGIYVTVLNPLFIQRSGGGSIRKVKTDKADAMKIAKYGLDNWVDLQEYTPMEAIRQQLKLCSRQYNLYMKTIMALQNNLISLTDKTFPGVNELFTSPERADGHQKWVDFALSFWHCECICRVSDKAFIERYRKWCKRKGYNFSEDKAIDLYADSCGHITTLPKNDNSKLLITTAAQQLITAKTTLVAMRTEMLRLAKLLPEYDTVLAIYGVGEITAAQLIAEIGDVRRYPRRSSLVAFAGVDPAVNQSGKHEAQSNPTTKRGSPHLRKTLYQVVCTYLKKSPTDEPVYQFIDKKRSEGKPYFVYMTAGANKFLRIYYARVKECLAALDNATSSLN

SEQ ID NO: 210929 - protein, 350 aa, unidentified
MIIIGCDYHPGFQQIAWLDSDDGELQERRLAHREEAEQFYGKLKQPGKPVRVGMEASGHARWFERLLAELQFELWIGDAAAVRAKRVRKQKTDRQDAQLLLQLLLENRFPRIWVADAENRDLRQLLWHRHRLVQMRTRVINQLHVVALNQGLRRKKALWRPAGRAELAGLSLAPWASRRREDLLDLLDRLTPKIQELTGKLEQIVQRRPVTRQLSTHPGVGPLTALAYELVIGMPERFQCAKQVASYVGLVPAEESSGDRRRLGHISKQGNVLLRFLLVEAAQVTVRSDARWRSQFFHLALRRGRKIAKVAMARKLAVELYWMWRRGWNYAEMQKLGSHAGEPGNRHGVQ

SEQ ID NO: 210930 - protein, 443 aa, unidentified
MARKKSQQPFKVVHPHCAGIDVGSREHWVGIDPSHPQPVSRFSTFTDDLFKIADWLEAHDVTVVAMEATGVYWIPLFEVLDGRGFEVFLVNSRSTRQVSGRKSDALDCQWIWQLMHHGMLKAAFRPADLICSLRSLVRQRATRVRDQSQTLNRIQKALSQMNIQLANVISDIAGVTGMKIIRAIIAGERNPQRLAELRHGRVKADKDTIARSLYGNWRLEHLHALKQEVDCYDFLNRMIEECDQAINDALVLLPVLEAAPQPAKKVLRSPHRSVSAQSSLHQALWRILGVDLTAIPTLGVDTVLVLASEIGPDLSRFPSCEHFCSWLGLAPPTRISGGRQLPGRGPKVINRAGQALRQAASNARNEKGFIGASHRARLVRMDTSCAIKATAHQLARLIYAMLTKGQEYTEKGIEAFEARSQERQHRALLRKARKMGYELQKVA

SEQ ID NO: 210931 - protein, 415 aa, unidentified
MHTFEQLTHFAGFDWAKEHHDAVIVDRQGATVASMTFAHTAEGWAQWREMIKACPALGVAIETNQGAAVEQLLQSQVTVYPMQPKAAERYRDRHVPSGSKTDQTDAWCFADALRVDGQHWRALAAEDPLSEELRLLCRDEVELITQRTALVNQLQQALYEYYPAALEAFGDWTAPYAWEFVLAYPTAGQLVKAGRRKWEKFLHTHKLWRPDTAPKRLEIFGRADRFCGSEAVTRAKSRLAVSTAQVLRALQKQLEEYRRVIEQLFAQHPDHDLFGSLPGAGDKLAPRLLSEIGSDREQYPEAQGLQCVAGTAPVSFQSGKIRRAKIRWHCNRHLRHAVHLWADCSRKFCAWAGTYYQAQREKGKSHACALRCLGQRWLKILWKLWQSRQPYDETRHALNQQRHGSWVLQLQPKTA

SEQ ID NO: 210932 - protein, 340 aa, unidentified
MAMTVKLGLDLHARDVVVCRQNDGQQPKPVCRMTHKELLDLVAGLIAAGHRVESCYEAGPCGYGLHRKLIQMGARNRVIVPRKWDAEGRRVKTDRRDAREICDALDRYLRGSTTAFSVVYVPTEEQEETRALGRQRGMLVKERQRCVVRGHGLMLTAGVQADPDWWHPKAWSELAKTLPPELRARIETWQRQALHFESEIEAWTKRVESMGEKQILVKGLGLLTNTLLGMEVCDWARFGGRRKVGGYSGLCPSEYSTGTRRRQGSISKHGNPRMRHLLVEAAWRLLRWQPDYPPLKKLRQALGARGRKRAVVAVARRLAIDLWRIHTGRCTPEQLGLKVG

SEQ ID NO: 210933 - protein, 348 aa, unidentified
MTTIDYIGFDIHKKTISFCAKAQDGTILEEGAIPALRNKLLAWAKARPRPWIGAMEATLFTGWIYDLLKPLAQELKVAHPPMLKAIAAAKKKNDKVDARMIADLLRCNLLPQCYMAPVAIRDLRRMLRYRNLVVRQTTRMKNRIAGLLMETGTPYTKERLHGKAYFNELLGSLQEVPRSVVELLKLSRGQVEFFVAIQQRLLKGLREHADLHERVMRLQTIPGVGEILALSWALEVGEVERFPSIAQAASYCGLTSAQHNSAGKEQRGPISKQRNQHLQTILIEAAKLAPRYNPPLAAVHERELKRGNRNQATLAVARKLVAYLISVDKSGKPFAMRACMEVAACVGG

SEQ ID NO: 210934 - protein, 383 aa, unidentified
MRAVCGLDVHKDSVYLCILCDTGEIFENVYGVLTHQLKDMCRTMKAHGVTEVTMESTAVYWIPIWRVLEPHFHLKLVNPYFIKQLPGRKSDVKDAQWIAECTLKDLIRGSFVPPERIQQLRQYDRRIFDIDAEIVRKLSKLDAVLQRCNIRLSNYVSNTDTKSYKDVVDELCKGVTAPEELIKKVHGRIVNKHGRETILASLTGVVSEAEKDAMRQLRAEISLAEEHKQECQDKMLNICKTYYPKELKRLMTIPGIKERAATSLIAEIGVDMTKFQTAAHLASWSGLKPRNDVSNGKYKSRRITHGNVFLRKTIIECAWAASRTKDCFFSRFSYRLTQVCKKNKLKVLVAVARKLLIAVWHVLHDEKDYVDFNPDCKAPATNG

SEQ ID NO: 210935 - protein, 315 aa, unidentified
MENQPFVGIDVSSQRLDVDTVPVSQPFSEPNHEDGIASLMKRLKPLNPKIVLLEATGGYEIAVAYALYEAGLPVVITNPKNVRHFAKALGRLAKTDKLDAQILALYAQRVHPPVQPLRDQEQLELANLMTRRRQLQGMIGMEENRRRTCTPKVRSNIDLSLAHLRQLLKDLDRDIQDSIRRTPLWHEKAEILQSVTGIGPKVSAALIADLPELGRLPGNKASALAGLAPMNQDSGKHRGKRMIKGGRPAVRRALYMAALVASRYNPVIKESYQRLRLAGKPPKVALTACMRKLLVILNAMLKNRTYWNPQLPLAA

SEQ ID NO: 210936 - protein, 412 aa, unidentified
MEIIHPRCAGLDISKKDAKVCVRINGAGRRKTSETVTTFGATTRQIVAMRDHLAIQQVTCVVMEATGDYWKPFYYLLEDLPGVEVMLVNARHVKNLPGRKTDVADATWLAQLGAHGLVRGSFVPPEPIRQLRDLTRTRTAVTRERTREIQRLEKLLEDAGIKLSSVAADLNGASSRAMLEALLAGETDPAAIAELAQKRMRVKIPQLTEALHGRFTPHHAFLTRMHLDLIDQHTAAIEQLTDRIEVVIEPFRSFRDLICSIPGIGGHTADVVVAETGADMTRFPTAQHLASWAGTTPGNNESAGKVKSRRTRPGNPYLQGALGTAAMSISHTRDTYLAAKYRRIATRRGPLRANVAVQRALLVAIWNIATTNTPYHDPGGDYFTRLNPQKARNNAVRQLEAMGYHVTLDQAS

SEQ ID NO: 210937 - protein, 510 aa, unidentified
MSLPPNDDNPPSPKVRKPRSAAKQESIQKPQVAPQHKLRKSSRKSKASRSLPVAAPSMPAELKQVNLNAAGIDVGATVHFVCVPQGRDAQPVRSFGAFTADLEAIADWLAQCGVTTVAMEATGVYWIPLFELLERRGFAVKLVEPSRLKYVPGRKSDVLDCQWIQQLHTFGLLSGSFRPNDAICVLRSFVRQRQMLVRSLSRCVQHMQKALTQMNLKLQHVLSDITGVTGMAILDAILAGERDPQQLAKLRDGRCSHDEATIALALQGNWREDHLFALKQAMDTYHFYQQKLAEVDEKIEAHLKTFEDKSQGKPLERSTGTNKHRASDPACEMRTHLYTMTGMDLTEVDGLEAKTVLTVISEIGLDMSRWPTEKHFTSWLSLCPGVNKTGGRAESRSGRTRASSNRAAAALRMAASTLLRADCALGAYGRRMRARLGAPKAITATARKLAIIIYNMLKYGKTYVDRGEEYYQEQYRTTMLKNLKRRAKQLGFALVEVTAQPVAAETTPCA

SEQ ID NO: 210938 - protein, 346 aa, unidentified
MRIIGCDLHARQQTLSMLDTESGEVIEQVLAHEGEAVREFYAALPKPVLVGLEATGSMYWFLRLLEELGIEYRVGHPAAIRKAETRKQKHDRRDAELIRRLLVEKRFPQIWLPTVEQRDLRTLLQHRHQLVRMRVMTQNGLQGLALSQGLRRGAKLWSQAGQQALDALPLADYSRTRREQLQELRHQLQQRLQQLDQAVREQAEQRAGARRLLSHPGVGPITALATEVFLGDARRFPNAKAVASYAGMIPSEHSSGGKQRNGSLSKQGNPLLRLLWVEAARAAARKDARLKQFYRKKLVQKGLGKAVVATARKLGIRLWIMMRDQIDYTEFCRRAEQRCPHAGMPE

SEQ ID NO: 210939 - protein, 452 aa, unidentified
MPAGKDITMHYQKVLKMPESIPYLSVGFDVGADFTWMSIMLPNGILIGKPFKIIHSDPQSRELAISKIKEAQEMYSLESRCFLESTGIYHIPLLCFLRDKGFDCSVINPIITKNSTNINIRKLHNDKFDSKKAALVGLNVSLKTSILPDDSVVDLRNLVRDYYYFKDLQSAVALKLTAELKVSFPAYAKVFSKVTTQSSLKLLSSYPLPEDMLAASKEDIVDIIRSTARFGEAYALRKYDAIISAAQDAAVFGRALPSNAVRIPLYIDTYQEYQKHLDALLKALHETVEKLQDTLIYDQICLLQSLYGIGFLSAVVLVAEMGDFKLFSSPKKLYAYFGLDPAVKQSGKLNGDKVHMSKRGSSLARRVLHMAALNNVKVAKGSGTPVNPVVYDYYTRKCSCKKKPVAMGAVMHKICNIIFAMLRDNKPFEIITPEEHCRRFAAEHPDKIRKAA

SEQ ID NO: 210940 - protein, 376 aa, unidentified
MGKSIVEARRFVGLDVHADTIAVAVAEKEGEVRSLGTIPNRLSSVRKLLGKLGDPGSWRACYEAGPTGYTLYWQLTKLGVECMVVAPTLVPMKAGDRVKTDRRDAERLARSFRAGELTAVWVPDAAHEALRDLVRAREAAKGDQLRARHRLGKFLLRHGRRPSEKMTAWTQRHLDWIRREVKFEQFAQQATLEDYLAEVDHLGQRILRLEKAIDEAIEGAPATMKAVVSALQALRGVAKMTAVTIVAEVGRLSRFARARQLMGYSGAVSSEDSSGERTRRGGITKTGNAHLRRVLVEAAWCQRYAPSLTRTLRARQEGLPAAVVEIAAKARHRLSARYRRLLARGKSKQQVVTAIARELLGFVWAIGVEVERTPAA

SEQ ID NO: 210941 - protein, 348 aa, unidentified
MEAVLERCAGLDVHQETVVACAMTGPVDRKPQSETKTFKTTTTGLLELFDWLQKNDCTHVAMESTGVYWKPVWHVLEGGFELILANARHIKNVPGRKTDVKDAEWIAQLLRCGLVTRSHVPPENIRDLRDLTRYRKKLLGNAQAEKNRIHKILQDANIKLSSYMSDVFGVTGRTLIEAIINGEVIDKEFVNRVAKTQLKKKVPELVEALNGKLRKHHRNMIELSWKHLLYIEQSIHEVEMRIERLLEPYYEEVELLKTIPGVKTEAAATIIAEMGVDMSVFPTAQHAASWAGLCPGNHESAGKKKWAYQKNKFRVEINSYAKCVGSKPNARNQVSCPILGYCKTQGTT

SEQ ID NO: 210942 - protein, 359 aa, unidentified
MLKVTKPTGESSMRFYNNSHPYYCGIDLHARLLYVCIIDSKGEVVVHKKIGASKDDLLLILEPYIGNVIVGVECMHCWYWVSDWCAELGIDFVLGHALYMKAIHGGKTKNDKVDSFKIASLLRGGNFPIAYDYPSEMRAARDLLRRRMKIVRHGAMLKGHVVNTNSQYNLPATELNLKNISARQKLREQYQDPIVQRNIDLDMALLDCYAKELAQVEWFIEKQAKNHNPVYLELLKTVPGIGKILSLTILYEIGDICRFESVQKFASYSRLVKCKAESAGKTYGTNGNKIGNAHLKWAFSEAAVLYLRGNDKARNYLNRLQKRMSKAKALSALAHKLGRCVYFMLKNKTVFDELRFLKG

SEQ ID NO: 210943 - protein, 359 aa, unidentified
MSQTVAALTPAAVDYERTLVLAIEVSNQSWVLAAQVPGLPHTKAKRTVNPEAEALLAAIAGYRARAAATGCSIERVIAVYEAGWSGFWLARRLMRHGVEVHVIQPSSVPVDRRMRRAKSDGIDAELLLRTLLAWLRGEPRVCSMVPVPDEADEDARRCVRERSELIAERVGLTNRIGAVLATLGVNDYNPLLRNRKRRLAELRTGLGEPLPRNAHAKIDRLLARLELVLAQIAELERERDAVVETEASDKASKMIQQLASLRGIGVQSATVLVREAFVRRFANSKALGSYAGLASSPFNSGGIEREQGIGKGGNRRVRTVMVELAWLWTRYQPMLFKFAGSANGLEQPDGAFAKSWWWP

SEQ ID NO: 210944 - protein, 454 aa, unidentified
MQHPHAAGVDIGSRSHWVCVGFSNDADSGSTREFPAHTAGLNAIAAFLREHRVDTVALESTGIYWIPLYELLQAEGFEVLLVDPSYTHQLRGRPKTDRRDCQWIYRLHSVGLLAAAFRPDEQTCQLRAYLRQRANLVRAASRHVQHMQKALEQMNLKRTEVLSDITGLTGRAIIRAILRGTRSPEKLARHRDKGCKASEAEIAQALTGSYRDEHLFELKLAYEAWQFTLGQVTQVDGQIALQLGRMKCDRALPPLKPKARPKRRASSPGFDVRAALYYVVGLDLTEIEGVSELTALTVIGEIGPGVSRFPTVKKFCSWLGLCPNWRKTGGRVKSSRTRRGVNRAAQALRVAAQGLHHSKGALGGFLRRMKGRLGAQAALTATAHKLARIVYLALKHGRTYVRRGQEEYEAQMKEKQLKALRRKARQLGLEVVEKTSDSVPTATAAPEQGQTADR

SEQ ID NO: 210945 - protein, 380 aa, unidentified
MTIIHENLQVLYHKDTKTCRFIKLICDIFYYITIICSLIKERLFIGIDFSKEKLDVTIIFAEGLTETSMRLFNEFKNSVSGYKQLVKWIETNSNEIDPALWLFCGENTGDYSKPLCNFLYGKGFDMWLENAKSIKDASGIRRLKSDRADACMIAEYAMRNYDKAVMYEPLSESLAQLRELFLYRQMIIRHRCSFQVRRSEKKLTMEKSPVKTMISQIGRHIVSDLNKEIEKIDKRIAELIDSDDELSHVFNIVTSIPGIGTQNAICLMVYTDNFQRFNYDSRKIACYYGIAPFGKNSGTSVYTDPHVHYMANRQIKAMLTQAALAAVKFNPAISSYYSRLITRGKKKQIALNNVKNKLVHIATAMVRDKQVFDKDYKMSA

SEQ ID NO: 210946 - protein, 395 aa, unidentified
MSAEGEAIRSNDYRKDTTVKAPSTRPAAVLGLDVGKSSHWACLIDRDGEVLDSAPVRNREAELDALFASAPAGTLVVVDQFRNIGSLAVRRARAAGLGVAYLPGLAASRAAGLFAGEAKTDERDAAVIARTALGVPDSLSGVPGRGEALEAARALSSQRDHVVACATRDKNRLRAVLLESCPALEAAVDLSDRRWLELLAGFGGAWGIARSGAEGPRAEAAGEAAAASTAPPPALVEAENRQVRFLAARISEALDEAGALEAETAALLEGDETHACLLTVPGIGPRTAAQLAVSVDIGRFPDHDHLASYCGIAPRVRSSGTSVRSVRASRRGDARLKSLLIFSCNSLVRSSGRYGEYYRACRARGMGHGRALKAVARKRLRAIYAVMRDRVPYRE

SEQ ID NO: 210947 - protein, 322 aa, unidentified
MESQVSFSQVVSRGCGIDVHKKIVAVTIDGEGLKKETREYGTFTRSLTELRDWLLENGITHVAMESTGVYWKPVYHVLEPSGIKVWIVNARHIKYVPGHKTDKQDSAWICKLLLAGLLKPSYIPAREQRELRDLTRYRTKMIQHVASEKNRMIRVLEDCNVKLSSVLSNTQGAVGTRLIEKLCEGKTITMADIDEVYHRKLEASKEDLYEACQGILTGHHIYLLQTIKEDILNSEGIIEKLNTRIRDMLMGYENVLENLKAIPGLSTKTVEDLVAEIGLDMSAFPSEKHLSSWAGMCPGNNESAGKKKADAPITGTNRLKRY

SEQ ID NO: 210948 - protein, 473 aa, unidentified
MRPRSAIGIDPDVKGLRCSLVGIEGDKPKMKGFLVTQKGLEGFIRWVKEKGDVIIAIEGSNGQSKPIEQALRAERLVFYSFKPSDVAKFRKAVLGQNKNNDIDAESVARYAMALETQGKLNGNKRVWFPDTELQGLTRSHEQKTKQRTAEVNRLWKLLRMASPDLYLALGGSNPDIEINEKMLQNQGILALLAEKPDIVEWKTFSVMDFLEAMGGRLYTGRQKLIKELQKVAKTFRPIPSSLSLMIEDSVTQILLLKKQLKRIHDMLEQITQDNKAISILRGYNGIATLTASTLIAEIVNIRRFVSNDGLACYAGLGMTDKSTGERSNMVHSSLFNHRLKDALMTAAKNFVRFNPGSHLAGYYRNLVKNGMSVTESRKRVARALVRVFFRVLYSIDKETNTGNPECADAEREIKRENDMANGQVRSDKNHESNISLSPLKNHGTICDDKVNNRFARRERKELEKKLKKSVKSA

SEQ ID NO: 210949 - protein, 394 aa, unidentified
MFFIGIDVAKRSHQAAVTDISGNVIVKPFNFKNSSDGFTKFLSAVESNAIEKNDCIIGLESTGHYWYPLYFFLIENGFGVKVFNPIQTAAFREITIRKVKNDNLDSLLIADFTRFGRYSETYIPDENMLALKNLTRFRLSISDICGSLKKKVIAILDQVFPEYTGVFSDVFGKTSKQLLEQFSTPDEFMDISTTKLTNLLLKVSRGRNGREKAELIKTAAQSSIGISYALDAFSFELKQLLAQIEFMENQLSDVDAEMEKLLSQSEYGVITTISGIGPMLGSVIVSEIGDINRFENSSKLVAYAGLDASVKQSGEFNSSKNKISKRGSPYLRRALWMAAFMSLQCDPALYDYYSKLRARGKTHRCATTAVARKLCIIVWAIMKSKKPYSPVLKN

SEQ ID NO: 210950 - protein, 342 aa, unidentified
MKEITIIGVDLAKNVFQLHGAAADGSVVFRKKLTRVQFHKFMLGHPACIVAMEACGSSHYWAREMAQMGHDPRLIAPRYVKPFVKRHKNDAADAEAIVEAALRPTMRFVEPKTQVQQGGAVLFRTRSLFIRQRTEAVNALRAHLYEFGYIAPVGIQNVKQLVLVVEADSSELPEIVRFACKEAIEQITQLTERLAALDKEIARLSGQGKVAKRLRTMPGAGPITALAVETFAPVMENFRCGRDFAAWLGLVPLQRSTGGKQILGKTSKMGQRDIPRLLIIGAMAVVGSSAKRGAPKGSWLEKMLARKPRMLVAIALANKMARGLWAMLTKNEEYRGPVMTGL

SEQ ID NO: 210951 - protein, 403 aa, unidentified
MFTLGIDVAKQSHRYLLLNPEGKKIRSSSFENSSQGFQSLWQQLQDLKIPPQDLLIGMEATGCFWENLYSFLKEKGFPTVLLNPFHVKKFREALGKKAKTDEIDALVIAQFLRTQGYVQSQVAEENIQSLRELTRLRFELLNENKNYHRQVCSLLTLIFPEYEQTFLKNPFTATSRAILEKFPTAKKLAQAKPKQIEKIVRSIHGNPFDLQEITALLTAAKNSIYSGRAEEARSTSLRILLTQVASLLAAIQKLEEEIHKILSSQESEKNGPGENLLTIPGVGEKTQAATLSYLGEKGKNFSSSTDAVGYIGFFPKIHQSGQTRRENKICKRGPKVLRWALYMAAVASVKHNPEMKILYQQKCAQGKTKKQALICVGKKLLQIMLAMLKSGKPYNPQLVFKQA

SEQ ID NO: 210952 - protein, 338 aa, unidentified
MALYCGIDLHSRDCWLAILDERLKVVQEAKVGNDLDALLQVLEPYCEDLEGVAVESTFNWYWLVDGLQEAGYRMHLTNTWAVQQYEGLKYTDDRHDARWLAHLLSLGILPEGYIYPKEERTTRDLMRRRSFLVRKRTAFMLAMRGAFENRTGTRINSNDLKQWKAEDVEAHVDDPAAAFGITCLLEPMHVLSSQIKKIEKGVLARGRLRPEFAPLETVWGIGKILGLTIMYEVGDIGRFRKVGNFTSYCRLVNTARLSAGKRKGSGNRKNGNPYLSWAYSEAAHHAVRHHPEAQKYYQRKRSKTNGIIAIRALAHKLARASYHVMRDHVNFDPGRVFG

SEQ ID NO: 210953 - protein, 351 aa, unidentified
MKECSTVSFKGQVIYCGIDVHKKSWHVTIRHCCHQIENFSMNPDPVELANHLKRNYPEAEYRSVYEAGFSGYEAHRTLCCLGVKNIVINPADVPTSGKEREYKNDSADSRKLARELENGSLEGIYIPEPENLELRNLTRRETKLTGNIVRIKNRIHSHLFFLGLKFRSWSGRSLKIMELDAVKRHDYALLSDLRELRFLREEKIRVIRDERECLKRLNRDKIQENLQSIPGIGFRTAVVLQAELWDLLRFPNKDSLNSYVGLAPHTVGSGEHEKIKFGGNRKKKQLHYLLIEASWRAVRFNLEYRARYGAILSKGACPQRAISIIAKKLLLSIRAVWIQNRLFVELLPRTK

SEQ ID NO: 210954 - protein, 481 aa, unidentified
MVKRQGKSSSQSKRSARPRKPKKVLSDDLQITQVRAAGIDVHSREHWVAVPTSCASIPPKNHPATLPAHVRVFGTCTADLELLADWLKECGITSVAMESTGVYWVPLFELLERRGFEVFLVDPRQTRQVSGRPKSDKHDCQWIQRLHSYGLLAPSFRPADEVCVLRGYLRQRHMLIGNAARSVHHIQKALEQMNIKLTEVVSDVTGVTGMLILKAILRGERDPRRLAKYRHENCKHTEEQIARALKGNWRAEHLFALKQALKAYEFEWRQLKECDEVIEKYLMTLEDKSGGELLEPKPNRGRKAKTAPDFDARRLLFRACGKDLTVIEGIDQSTALSVLSETGYDMSKWLTEKHFTSWLGLCPQHRGSAGKIKNRRLRGGANRAALAFRMAAQGCHHAKNAMGAFYRRIQARAGGAKALVATARKIAERVYRLLKYGAHYVRQGMNDYENAYRAKVTKSIAKKAAALGYKLVPHTVADATT

SEQ ID NO: 210955 - protein, 364 aa, unidentified
MSTITLGVDLAKSVFSVCEVNGSGHVLHRLDFKRDAFAVWLAQVPAGTVVAMEACSGAHHWARRCQEVSLQPRLMAAQLVKPYRLSQRSKNDRNDAEAIATAARQGNMRFVPVKDVDQQARLAWHRVREGYKAESLAIGNRLRGLLAEFGIVVATSDVALRRVLGDLDQAALPGEFKELLRRLEGHWTEVRKALDACDARIDAHAREDERCVRLRAIIGIGPITADAMVASLGSAKDFRNGRQLAAWLGLVPTQHSSGGHTRLGTISCRGDAYLRTLLIQGARSSLQRAKAVSVEKSTPEQIWIRQMACRMPFGKVLVAIANKHARQLWAMLAHEQIYDADAWLKHPMVQRSAGKHAITVAAMA

SEQ ID NO: 210956 - protein, 345 aa, unidentified
MTTMNYIGLDVHKKTISYCVKDVSGRIQQEGKVGSSRRELDSWMKTLPQPWMVAMEATIFSGWIYDHLLPHAAQIKVAHPLMLRAIATAKKKNDQIDASKIADCLRCDFLPECHMMPAAIRDRRRTLRYRHLLVRQMVQMKNRVSGLLMETGVEYNKQRLHKVSYFRELLSAKEEVPPSIQPLLKLSRETIERCQKTEYALVSSLQRDPMLADRIKRLRTIPGVGPITALTWALEIGDVSRFRTIKQAISYCGLCGDERSSADKAMRMPLSKQRNKHIQRTLVEAAKLAPRQSHELAVIYDKEKQKGNGNRATLAVARKMVAYLLAVDRQQRDFTPAEERRTAAA

SEQ ID NO: 210957 - protein, 347 aa, unidentified
MNIIGCDFHSRSQMIAMLDTQTGEVVERRLDHESGEARRFYEGLKTPALVGIEATGYTRWFADLLAELGHELVVGESGKIRAMNPRKQKHDRRDAEHLLNLLIRGDFPKIWLPAAEERDVRVLIEHRHQLVELRTRAQNGLQAIALSYGLRRRRRLWSEAGQEKLQKLPLREGQARRRKDLMQLIGQLNGWIKELDERIREEVERRPEAQRLMTHPGVGPQTALATVLVLGPAERFPDDRHLTSYLGLIPQEDSSAGRQRFGHLTKQGNRLMRFLLVEAAQTASRTDPRLQRAYRRLRFRKGAPIAKVAVARKLAIRLYIMLRDGIDDEEFCRRGSHAGMLGEVALV

SEQ ID NO: 210958 - protein, 470 aa, unidentified
MLLGLYRPSARHITADGRDYAEIALGDEVVGLASANRGRVAADGVQPETRKPLSQRDMHLAIVPLEVLRERCAGADVHKRFVTVAAMVGAGKPVVREFGTETGSLLELADWLQHLGIEDIAMEATGSYWKPVYNILEASGLRPIVGNAAHMKGVPGWKTDVKDAEWICDLHRHGLVKASFIPARPQRELREAVRYRMALIAERAAEANRISKMLEGANIKLGSLATDILGKSGRDMLAALAGGATDPEALAGLAHGKMKRKHDALVRAFQGQVGPHLQAMLRVQLDHVAQLDRGIAQLDGEIAERLSPFEEALARLDTIPGVNRRVAEVILAEVGPDMSHFPDAGHLTSWAGLCPGSNESGGKRRNARTRKGNRTLRDTTVQAGQAAGRSRDTYLGATYRRIAARRGGKRAAMAVGRSILEIAYFVLRDGVCYEEIGVNYYDERKKVAVVRSAVRRLERLGYEVIVSRPA

SEQ ID NO: 210959 - protein, 271 aa, unidentified
MSVNVGIDVGKDYLDICLLHDQTKSGRKHRKFKNTKGTHSEISRWLIKASKCKPEDTLITMESTGVYHESIALYLHAVGFRVFISNSGKAHKFSQSLGLVHKTDKSDSYMLALYGDAQRERDQIWTPDSLNTRNIRSLVRRISALEKDRLRESNRLEASEISDANERVKSSIMRIVSVIDEEIASIEQEIELAINSDADMERNHKLLQSVVGIGKVMSRELVYLFSAKKFATAKQAAAFIGLIPQLNESGKLKGRTTMSKNGPSRVRAKLF

SEQ ID NO: 210960 - protein, 403 aa, unidentified
MKKGFKKTQAGRPSWREKAAAGIDPARYGFQMALLSPSKTYYNRSFPLSARTAQELATIVPKGTPLIIEGFGTSGRLLFMELARLSYSCKELNPKLGRHLRFLEQEGHTDSGDAAAIAKAEFLFPNRLSPIILSESGEALAALSKSRRRLVKGKTADKNRLHVLLSESYGTCYKTLKTKISINTQKGRRFFHRFPSINALLSSPEKERELAFFFPEKGEALLAEERPWSSIVYLEALEAEAHLLIDHIENTEKMTEELKKKITAVLPSQKEAPLLLSIPGVGPISAATIIAEMKTIDRFPSEAKFAGYCGLGQLVFQSGEQSPCFKKRTMYNRVLRGAFFDVAFSAISKSGLARTYYRKKRQEGKTHRQALLRLARYYARIVYSILKKQKTYQEIVSERDRVL

SEQ ID NO: 210961 - protein, 317 aa, unidentified
MTTESFYIGIDVAKATLAVSTTQKRLGEFANSPAGHQAVITCFKQLAVTCVVLEATGIYGQAVVEALLLAGYAVAVVQPGCVRHFAKSKKILAKTDDIDARVIAQFGEANKPRLIQKKPEGCAHLRVLVDRRDQIIEMRVSEQNHLEACRDRAIQKDMKANIARFEKQEDTYNKKIAEAIAADEVLTAKRKILENESGIGKQTAAVLLAHLPELGTVNRQHIAALVGLAPYNQDSGTINGKRAIYGGRKRLRKALYMAALSAVRWSDSLKETYTNLLKRGKCKKVALIACARKLIVRLNSILATANKKTPESAMKTA

SEQ ID NO: 210962 - protein, 323 aa, unidentified
MSELWVGIDVSKKYLDVCLRPTQQASRYPNKPEGIDTLVAYLQPLSPQLIVMEATGGLEVPLAAALAVAGLAVVVVNPTNVRNFARATGTLAKTDTIDAAILAHFADAIRPPIRPLPDQQAKHFNDLVTRRRQIVEMLVAENNRLPHLSGLAHSDLEEHITWLKSRLKNLEQHLQQAIEQSPIWQARYDLLISVPGIGQVVSTTLIAELPELGELTHKQLSALVGVAPFNRDSGRMQGQRRIFGGRASLRAVLHMAVVVGLRHNPVIQKFYKRLRAAGKPAKVALTACVHKLLIILNAMVKSGQRWNPKTVEDSTAEQSTAVA

SEQ ID NO: 210963 - protein, 365 aa, unidentified
MPSMKYVGLDVHKDSIAVAIAEGSAEVRFYGEIPATGEALRNLVRRLGSPKTLRFAYEAGPCGYGVYRMLGNLGAHCVVAAPSLIPRRPGDRVKTDRRDACGLARLHRAGELTAVWVPDEGHEAMRDLTRAREDAKLAETRARQRLGSFLLRHGCRFTGRTRWSAAYFAWLTTLRLPHPMQHVALEEYRQAVDEATARVLRLTGQLEAALSTWGLAPQVQALQSLRGVSLVAASTVLAEIGSLTRFDHPKELMAFIGVVPSEDTTGDRVRRGPITKTGNGHVRRVLIEASWAYRHPPRRSYALRRREQTQSAQVKAIAWRAQLRLCGRYQRLVARGKVKQQVVTAVARELIAFMWEIDRAVAPAA

SEQ ID NO: 210964 - protein, 370 aa, unidentified
MRHSSTLYVGLDVHKESIAVAYAREERDAEVIFLGTIGTRQCDIDKLVRTLTAKAKHLVFVYEAGPCGYWLYRYLTKKQLLCWVVAPSLVPKKAGDRVKTDRRDATQLARLMRSGDLTPVYVPAVEDEAIRDLSRAREDAIRDLKAAKSRLKAFLLRQDIRYEGRATWGPAHLRWLAEVVCPTPAQQIVFQEYVRAVSEHQERLQRLEAELREQAQAWRLHPVVQALQAMRGVQFTVAVTLIAELGDLTRFDNPRQLMSYLGLTPSEYSSGARRRQGTITKAGNTFARRALIEGAWSYRYPAKVSRHLQLRLEELPTAIQDISWKAQVRLCTRFRQLTARGKHANQVVVAIAREMAAFVWAIAREVQITR

SEQ ID NO: 210965 - protein, 408 aa, unidentified
MRIIGLDIHRAFAEAVAWKDGKLSRLGRVIMRRERLEEFAKQLSNSDVVIVEATGNAASVAAVIGPHVSRVVIANPKQVRLIAYAKIKTDKIDAGVLAQLYASGFLPEVWIADETTQALRRQVTRRNQIVRQRSRLKNIIQSILHAHLIPSCPHQDLCGPMGRAWLCEQSLPGDERLAVERHLREFDRLTDDLKVIERDLAQSALADERVKRLMTIPGIDMVVALALIAAIGNIERFAKPEQLVGYLGLNPSVRQSGPGPAYHGRITKQGRGHARGMLVEAGWAAARSPGPLRSFFLRVQSRRGQHVAAVATARKLAILIWHLLTKNENYLWARPALHARKLRDLELKAGHRPARGQKGTAHAYNLQSQRDQERRWVEQAEVAYARFVAGWNARGPKVRTGAAKEERH

SEQ ID NO: 210966 - protein, 425 aa, unidentified
MKSNLIKSQNQRVERISTSTLVIGIDIAKEKHAAQAINFRGIVLTKRPILFSNDLAGFEHLEQSIRKLQKMHGMNDVVVGMESTGHYWFNIANWLVGQGIDVALVNPMTTKRNKENRDNSPSKSDPKDALVIADAVSRGFYTPFAPKDEAFRRIRVMVTNREHWVVKSGRIKNRIHRWLDIRFPEYRQAFDDIFSDRSLATLRRFPAPSDILQLTSEQMVQIWSEYMTRPGGERGKNKALELQSLARHSVGDTSALEEDKWELRHLIEEYERIRRIIDEADQMIEKALPEIPCSDLIRSVGASVPATAAILAFGGDLRKLSHGKQLLRKAGLNLAERSSGKYKGQIKLTKRGNSLLRKHLYFTVFHLLSFNGAFQAMHVHNTEVKRMTKMQSMMKLIGKLARILVALAREGQAFSPDKAQPPLAA

SEQ ID NO: 210967 - protein, 346 aa, unidentified
MPETEVGTFAGIDVSARELSVALRRGKGEDKPAMATFSNHPSGHKALIAHLLRGGRRVRVCLEASGNYSLDLALTLQAHRQVEISVINPRRARRFAESLGQRSKTDPVDARVLCEYAARMPWVAWQPPSSVALHLRAVARAIADLGVIHTQQNNRAHASAASQALPVLVVKEMQRHQKYLEQRMTRLRREALRIIAGDSELDRRFRLMLTTTGIAETSALQILGELAVLPDMLDARQWVAFSGLDPRLFKSGKSVEKRPRISRGGSRHLRRALYMPALVALRRDPYLRCFYQNLLARGKARLQAVVAVMRKLLHALFAMFRTNQPYDGSKLCCAVEMAGHAIAACA

SEQ ID NO: 210968 - protein, 323 aa, unidentified
MAAVVGVDIAKRTFDLAILQPNGKHRTKSKLSNDKAGFAVFADWLQRHAEPGAWIVMEATGIYHEALAEHFHELGYRIAVLNPSQIARYAQSQLQRSKTDKLDAKLIATYGQLHVEHLRGWYPEPVSVRQLRALTRRLEDLQSLRQMELNRLDVSSSTVQSSIQAVLQRLDEQIAWTLEQIKRHIDDDPDLRGKRDLLVSINGIAEKTAALIMAELGDIERFTDARAVTAFAGLDPRLQESGVARGHSGISRTGSARLRTALYLPAVVALTYNPAIKAQAERLRARGKRGKQTVCAAMRKLLCIAYGVLKSRKPFDLALAIAR

SEQ ID NO: 210969 - protein, 369 aa, unidentified
MKKKVLHVGLDVDDKSFHIGAFCKETGETFELSTRPHAGNLMKKFENFSDKNFELKICYEATYIGYSLCRELNKNGYSTQIIAPSLIPELASNRVKTDRLDARKLAQYYANDLLTPVHVPSEEDEHERDLLRSRSFLVDQRKVLKRHILSACRRNNLNYMSETGGKNHWTPTHERWLIDKINKLNGAIKINLEILYRQYEKLSEGIDEFVKEIEKLADKEKYKNKKDALNCFRGIDTLTAMTLITEIGDINRFKHPKQLTSYCGLDIAEYSSGGKERKFGITKMGNYRIRTSLVESCQRLDRANTLSKRLKNHRKGKDIKIIDIADRCTKRLKIKSNRMLDIGKPRNKVKVACAREFLGFIWEALNVAA

SEQ ID NO: 210970 - protein, 406 aa, unidentified
MKQIVSVGIDVSKGKSTVCAMIHPNTIIKESFEVLHTVEEMSMLADYIGSLDGEIRIVMESTGHYHLPVAQFLYQKGFFVCVENAYIIRQFSRIMLHGAKTDPLDAKKLAKYGLAYWSELKPYKFHPSCYTELSLLSKQYQTYIKLLIAAKQNVIHLMDEMLPGFKEALDTASSVQFSKVKYVDFAKEFYHVDMIKSMGKEIFRENYKQWCKEKGYRFQSEKADELFHLAEDGIPTLPTEFPSTRLCMEVATEQVSQLGYALEQILSQMQNLAKTLPEYQTIRQMGGMGEKLCVRFIADIGDVRRFHNGKALVAYAGIDAPPYQSGQYTGTKRRISKRGNSVLRKTGYEVMKSLKSHPPKTDTRVYDFIIKKENEGKSKKQAKIAGLNKFLQIYYARVMEIYKNIV

SEQ ID NO: 210971 - protein, 336 aa, unidentified
MKKNYEFVVGLDVSKDKLDYCIINQSTLHQDFGQLANTAKGIAAFLSSLVKKLKGKREGILFCLENTGVYSMPLCYWLQASQFDYWVVSALEIKRSKGIVRGKTDKADSRDIALYAMSHLHQLKLSSLPEKDFVELRLLLTEREKVIKAINLFNMTNESKNFLPNSVLKTTLQHNKRMMTFLKKQLKQIEQSIENLVQSNPVFKQQDDLLQSIPGVGKQTSVLLIAYTQAFTLFQNHRQFACYAGVAPFEYSSGSSIKGRTKVSNLANKKLKTALNMAALSAKKYDTQLKVYYEKKVSEGKNKMLVLNAVRCKIISRAFAVISRNSKYVDTMKAVA

SEQ ID NO: 210972 - protein, 340 aa, unidentified
MTVIIGIDPHKATHTAVAIGCDEAELATVTIRATRHQVDKLLGWASPFEQRTWAIESAGGLGYLLAQQLVDAGEHVLDVPATLASRVRVLGTGKSDKNDPNDARSVAIAALRSPGLRSVQTADHAELLRLLAKRNLDIGSLRTKLVCRLHAQIADLSAGGIAKELNASDADGLLGSFEPSSPVEVARHQLALELLEDIRHLDHQLKESHKRIKLAVRASGTSLTDVFGIGPVLACSLIGYTGDVTRFASREQFAAYNGTAPIEVSSGGRVVHRLSRRGNRQLNHAIHMVAICQIRQTHSEGRAYFEKKVAEGKSKKDAIRSLKRQISNTVYRHLVLDTQR

SEQ ID NO: 210973 - protein, 453 aa, unidentified
MAKVARKIKTDKGLRLKIVNPDAAGIDVADGEMQVCVPEDRDSENNRRFESFTCDLHKICAWLKACGIKTVAMEATGVYWLNIFLLLQDEGFDVVLANPLQVKNLTDKKTDEADAEWLMLMHSYGMVRPSFQPDSVARRIRNMTRHRSSLITTAGREIQHMQKAMEQMNIKLSTVISDILGKSGQAIIRSIIAGNHDPVSLARLADVRCKASRETIAKSLEGTWDEDLLFILKQSVELYDTYMEKVASCEQEIERLMKQYAAQVDQGKAGQIIRTQKKSKYKNAPSIDTEKYAHALWGVNIMAVPGLGSGALLQLIGELGHDFADKFDTCSKFCRWCNLSPNNKITGGKLISSHIPKRKNPVGQILRQCANTVKDEKSEMGIYFRRMKSRNGHMQAIVATAHKMARIIYTMVKQHKEYNPNMVGCSEKEILERRIAKTTMQLQKLNEKLGKVG

SEQ ID NO: 210974 - protein, 411 aa, unidentified
MSKFRFYVGIDLGNSQQAICVLDQNKKELSRQSVGTNDVVNHLLRAIGQVPFNEVAVAVEDRNNVVVDALLELGFAVFSINPKQADRFRDRMSASGAKDDRRDALVLARALYTDMEFFLRRPALTELEAKMRIYRRREATMAEEGRRLSSQLYALVQRLDPTLLTLCAGADEAWFWSLFLAASKDVRLTTSKVEALLKREGKRKLDELVPTVMAVVGNDRRTRATKSMISIVVVEAKTLITVLRAIETERLKALKDLTAFVEDEAKRHHVTDDGRTVAGTVGILLSMPGIGIKTAADLVADATPLLHRDKLHLLRAVAGVAPVTKQSGKSRSVSMRRACNPRLRNAMFHAAQAAVRHDVIFKSYLEKLLAAGHGRPRALRSVADRMLRVLVAMLTSGTLYDPERATQAAAA

SEQ ID NO: 210975 - protein, 297 aa, unidentified
MTTQLVTPNVFIGMDIHKKSWSISIRTDISDHKTFTTPAKPEVLFDYVNTHFPGHEVSLVYEAGCCGFSASRYFLSMGWTVKVVNPADIPTMDKQYYQKTDAFDSRNLAKQLQGGQLNGIHIPEESQDFLKSLVRQKADVSKQLRKIKNTIKAFLLYHGIIIPDQYDNPNRRKEFLQWLSNLEFKHHSGKITLESKLRILACLHSEHLELANQLRAYCRKNHKEDYYLLKSIPGIGGYLASAIIGELGDIRRFNNETQFASYVRIVPMMRSSGGSENIFGVTPRCRSLLRSYIIEAA

SEQ ID NO: 210976 - protein, 450 aa, unidentified
MSNGNGVSRGDRNRNARLARLRELVSLENAIVGIDLADQKQMVVVCDHDSKVLARRTFRCKAWALDAALDWAAQQARAKGFAGVAVSCEPTGHRWRVLGQLAADRSMPFVCVQPMQTSWARRSEDLTFDKTDDKDAVLIARLTAQLRCYAPEPVDETWGRLRHLGARRERLLTDAVAQVQQMRDLLECVWPAALETARQPFRSKTWTAAMSVVVDRDSGDLDRTRRLGWARFERAVRREITKRGGQKPCLRIARKLYSALADPTGVLAHRRGALERMQLLLEDWADTHRKLTDTETRMTAVLDELGLTALATSIHGLSPVGAAAILAETGDPHRFATARALVKHAGLAPRQQQSGTYTGQTRLTGKGRPRLRAVAWRAVWGTLQTNTVYATRYRHLTTRETNKFKPTQAQAVIAAALLRHLHAVITTGRACDPVIAQYGTGPTQTATLAA

SEQ ID NO: 210977 - protein, 343 aa, unidentified
MEEFNIVGIDLAKNVFQVHASDEIGRRLFSKKVLRGQLLKLMSTIKPCVVALEACASAHYWGRQIAELGHEVKLIPPIYVKPFVKRQKNDAADAEAIVEAASRPTMRFVAVKSADQQAAGMAFKTRDLFVRQRTQLTNALRGHLAEHGVVAPQGIVHLKRLKAALSDEKSQLPATVVIHAELILDQIATLQSHIEALEKEILAVSRKEELATRLMTIPGVGPITAAALLAFAPDPATFKRGRYFSAWMGLTPKQHSSGGKDKMGRTSKMGQRDLRRLLITGGMAVVRWAARKGAQEGSWLARMIDRKPKMLIAVALANKMGRIIWALMAHGDTYNSHRGKAQA

SEQ ID NO: 210978 - protein, 372 aa, unidentified
MNYNTVYVGMDVHKESFTFCAYTIDAEKGSHFQRTEADYKNVLKYLEFLRTVYGNDANFICGYEAGCLGYTLYHQLTEYHVNCVILAPTTMPEQCSKRRIKTDRHDAEIIAKCLAQHNYSPVHIPTATDEETKEFLRMRDDHKLALKKLKQQILAFCLRHNYRYDGNSHWTAAHIKWLKSLKPEALYKEILDEYLLTYTTLSDKLERLDKRIEELASKDEYRESVKKLCCFIGIKTHTALSVLVEVGDFQRFASAQKFASYLGLVPGEDSSGDEQTRLGITKAGNRHVRMLLTEASQCYARGQIGFKSKELKSRQAGNSPQVIAYADKANERLRRRYYKMVLGKSKKPNVAKTAIARELACFMWGMMTDHVA

SEQ ID NO: 210979 - protein, 340 aa, unidentified
MDITTLGIDVSKNLFHVAGTNRAGKPLFKDKFTRQKLAEFVAQHPPCLIGMEACPGAQHLARKFEEYGHQVKLMPAQFVKPYVKSNKNDYNDAAAIAEAVRRPTMRFVTTKTSEQHDLQALHRVRERLVRTRTSIICQLRSFMLENGVAVRTGRAALAKALPGILEDADQPLSDRMRALIQGLREHWLFLDEKIKSVSADLERIAKSRDDCRRLLTVPGVGPLVATALVASVGNGKQFKRGRELSAWLGLVPRQHSTGGKQRLLGISKRGSSYLRKLVIHGARSCYLNMNRSQHRMGAWIDEMANRGTHRNVIVVAIANKLARICWAVMRDGDVYHCAKP

SEQ ID NO: 210980 - protein, 376 aa, unidentified
MGKVIMVGCDLHEDSMLLKIAVGRGTAETRSVKNTVRGRESMIADLKRRAQEGEGARVVFAYEASGQGFGLYDQLSEAGIECYVLAPTKIARSPRQRKQKTDEKDALQLLELVRGYVLAGNALPAVWIPDPQTRDDRELVRMRVEVGEKVTGVKAQVQSLLKRNALHRPAGLGRGWTRRFWSWLRCELAEPLDPAGSRLGGGGRAALGSLLRELAWLEEEEKRLDEALVGLAWSARYAGAVREMTQLCGVGVLTALVFLTEMGDLSRFGNRRQVGAYLGLVPSSNETGESQDRKGHITHQGSRRVRKVLCQATWARVRHSPEEKAVYERIKSKHPKKKKIAVVASMRRLAIRLWHRGCEAQRGGGGKVPEGAAQAG

SEQ ID NO: 210981 - protein, 417 aa, unidentified
MEHFAALVGIDWSDKKHDVCLVDLATGKREQLIINHTPEALDAWVTKLRARFPGQKLAVGLEQSRGPLIFALFKYDFLVLYPINPTTLAKYREAFSPSRAKDDPQDAEYLVELLIHHRDRLKPWLPDDEKTRTLQYLVEHRRRLVNDRTRISNRMTALLKAYFPQVLEWFDDIRTLMVCDFLTSWPTLEAVKKARPTTLEKFFREHNSVRKETIEKRIVAIKEAVPLTTDKAAINSSVLMVKALASQMKTTSDAIAEFDREIETLCQTHADYFIFDSLPGSGTVYSSRLLAALGTDRNRWTSVDDLLCFSGVAPVIERSGKQERIRWRYFCPKFLRQSFIEYAGESIKHSFWAKAYYSSQRARGKSHQAAVRALAFKWIRIIYRCWQTQTAYSEVTYLESLRKKGSPLLTFAANNPS

SEQ ID NO: 210982 - protein, 331 aa, unidentified
MNTLMMPAAAARFNHVIAFDVAKASLSLHILPSGETLSLQNDGAAIRRLLKREEKRNRKQGLGRMLVICEATGGYEDAVLKAACELGLDCHRAHGSGVRAYAKFRGRHAKSDPIDAALIAEYGRDKLDLELYQPPRPEEAALRALMGRRAELKDMIQAETCRIEHASLKAVRGSLESHLAALKEQLALIEKEIRTLTRRDEAFSHNSRLMQTLAGIGAVASQTILAFLPELGHVPTPTAVALAGLAPYDRDSGKERGKRRICGGRGQIRPCLYMAAVAAIRSHAHFRDFAQRLTRKGKPFKVAVTAVMRKLIVILSAMIRNDQPWKHAQTA

SEQ ID NO: 210983 - protein, 420 aa, unidentified
MAIVELPAPVFCGIDWAEDHHDIALVDAGGNQLAKMRISDDAAGFTQLTALLTEHGDSDVAPIPVAIETSRGLLVACLRATGRPVFAINPMAVARYRDRHSVARKKSDAVDAAALANILRTDMAAHRPLPADSELVQAIAVLARAQQDVVWARGQAHNKLRSQLREFYPAILEAFAQHKHGLCSREARAILAAAPTPTMAAKLTRRRLQSLLKQAGRVRGIQADAERLHEVFKREYLHQLPQVEAALGQQTSALLRQLNTACDKADQLEGVVTQAFEEHPDAPIICSFPGLAALTGARILAEIGDDRARFADAGSLKAYAGSAPVTRASGKSCKVMSRKVKNQRLAAVGYVWAFVSLTRSPGARAHYDRRRAAGDRHVAAQRNLFNRFMGMLFHCLQNGHTYDEAVAFPQPSAGHTAAAA

SEQ ID NO: 210984 - protein, 340 aa, unidentified
MKLYGAIDLHSNNNVTVLIDEKEKVVYQKHLTNDLPLIIEQLSPYTSSIEGIVVQSTYNWYWLVDCLMEKEHRVQLANTAAIQQYEGLKYTDDHSDARWLAHLLRLGVLPEGYIYPKKERAVRDLLRKRSQLVRQRTANLLSIQNLVTCNTGSSISANQIKGLDTRKVDELLAEGDPALSVKANLSVMRSANEQTELLERAVTERVKLRPQFRYLKTVPGIGTILALTIMLETGDIRRFVSVGNFASYCRCVGSQRISNGKRKGSGNTKNGNKYLGWAFVEAANYAIRFNARIKSFYQRKKSKTNGIVAIKAVAHKLCRACYYIMRDRVAFDLTKAFGQK

SEQ ID NO: 210985 - protein, 316 aa, unidentified
MAETWFVGVDVAKATLDVGFVRGEEETTSQVSNTSAGWAELVAACKERSVERIVLEATGGYERRVVAELMAAGLPVVVINPRQARDFAKATGRLAKTDRLDALGLARFAEAIRPPVRPLPDDNAVELQEKLARHRQLVQMRTAESNRLAHAMSKAIRKSIHAVLKLLDQQIEALDKDIEQRIEESPAWRDKDRILQSVPGIGPNTSHALLCNLPELGQCTRQQIAFLVGVAPLNRDSGKMRGVRTISGGRGHVRHALYMATLVASRHNPLIRKHYQHLLQLGKKKKVALVACMRKLLCILNAMLRNRETWNPVFST

SEQ ID NO: 210986 - protein, 358 aa, unidentified
MSSTLERIESRYFIGMDLHQKTSTFSVKEREGRVIEAKTVLTTKETIQKFLSPYRGSLLTLEPVSQWYCYADFIESLGIDVKIANPMRVKMIAAARIKTDAIDADVLADLLRGDLLPESYHAPADVRAWKEEVRLRMSLVRLRVQVKNKIHALLWKQGIRSPYALFSKKGLVWLDVQTFSHEAAIAHTTYRETLALLDRQIKEAEVRMIENNKHREEVKLLITIPGISYLSALTIMAEIGEIGRFPSAKKLMGYAGVVPSTYASGGKVRHGRITKTGSSWLRYILIEAAHHQLHCTKRKGFADYYKGIKERKGSKAAAVATARKICAVIFRVLTDKEPFVSPKEWENRRAHQCGIAIN

SEQ ID NO: 210987 - protein, 340 aa, unidentified
MRALYAGSDLHGNNNLLGIIDGEGKRVFKKKVPNDPQLVRDVLEPYKGEIVGIAIESTYNWYWLVDTLMEEGYQVHLANPSAIQRYSGMKHADDKHDAFWLAEMLRLGILPEGYIYPKEERPVRDLLRKRGHLVRLRTSLVNSLQNILSRNLGLSVVANEVKRLREDRITPLLGESEDLAMAGRVSKETIDFFTHQIRRIEAMVERRMLLKEGYRYLLTLPGVGKILALTIMLETGPIVRFETVGDYVSYCRKVPSEWTSNGKKKGSGNKKNGNKYLAWAYSEASDFARRFYPEPRAYYNRKMQKTNPAVAHSALSHKLARAGYYIMKDQVPFRPEKLFK

SEQ ID NO: 210988 - protein, 341 aa, unidentified
MAKFIRAAIDLGKNYFQFHGLESEGDRSISRKVKRTKMHEVFSQTEPCQIGMEACGSAHYWARQLTAMGHEVVLIPPAYIKPYVKRGKNDAIDAAAICEAMSRPGMRFVPIKSDDQQAVLMLHKTRELLVKQRTMAVNALRGHLAEFGIVVAKGIGRVDELLALAKADAALPPVAATAVACLAQHLEGLDLSIATVEEEIARAHKKNRISRVLDEIPGVGTLIASVIAASVPDPGVFKSARDFAAWLGLTPRQNSSGGKEKLGAITRQGNRYIRKMLVTGATSVLRVAGKRKGTFADWINALRARKPERLVAVALANKLARICWAIMTTGEGFRTETYIKA

SEQ ID NO: 210989 - protein, 373 aa, unidentified
MVHSSEAFVGIDTSKLRHAVAIADGGRTGEVRFLGEIENTAAATAKLVRKLAAKYERVTFCYEAGPTGYGLHRQIKSLGHECVVVAPSLIPKRPGDKVKTNRRDAVGLARLLRANELTPVWVPDERHEAMRDLTRARETAMLELRSKRQQVSALLLRQGRSYPESKKTWSKAHTSWLASQKFDYPEQRLVFEEMMLALRQAQERLERLEQAIRAAVPDWSLAEVVTGLMAMRGLDLISAATFLAEIGDLSRFQTSQQLMAYLGLVPSEESSGDTIKRGSITKAGNRRARRMLVECSWSYQHPPRVWIVKQHKVDAAPPAVREIAWKAQCRLYRRYRALIRKGKLKTVAITAIARELAGFIWAVSRQIAPAAAR

SEQ ID NO: 210990 - protein, 406 aa, unidentified
MEAGITFVGLDTAKRSIQVAMLLPDRKQAVEWQEANEPRAVRRMIKRMKREASGEVRVCYEAGPCGYALQRQLRAAEVDCIVVAPSLVPVKPGERVKTDRRDARKLAECHRAGTLTEVHPPTPEEEAARDLCRCREDVREDLLRCRHRMGKLLLRRGLLCAGQAWTKSHRTWLRSLKFEHEADRSVFDDYLLAIEHLEERLRGLEEKLDALSHEEPYREPVGWLRCYRGIDTVTAMSIVTELHGFARFGSPRELMSYLGLVPSEHSTGGKHRRGAITKSGNGHLRRLLVEASWHYRHRPGVSVKLRQRREGQPGWAIALADRAQIRLNKRYWRLLSHCKPHNKVVTAVARELVGFIWATLSLQDRSAHAPRSTSVPRTTGKTARVYRVKKPSCEPSPGRSGRRAVA

SEQ ID NO: 210991 - protein, 345 aa, unidentified
MHIASIGIDLGKTTFHLVALGEHSKVLVRKKFSRTQLLAHMANLPSSLIGLEACSGAHFLGTALREQGHEVRLIPAQFVKPYRKSNKNDFIDAEAIAEAVSKQNMRFVPIKTEEQLDVQAMHRVRDRLVQRRTALINEIRGFLLERGITFPVQPNHLRKNLPTVVEDCEQNLTPRLRWLLNRLWQEWKQTEIDIETVADEIERISNEDERCRRLRQIPGFGPLVSTAMVAAIGNGAAFRRGRDFAAWVGVVPRQYSTGGKQRLFGISKRGNVYLRRMLIHGARAVLFRIKYDTAGLGQWVHRLSQRAPRNKVVVAIANKLARIAWAVLSSGKDYRHQPLQPRAAA

SEQ ID NO: 210992 - protein, 486 aa, unidentified
MPSPIPDGKGQPSLKLYRYGVGVDCHSRFFQVCVLIPDGTQIVKIEHQVPALWPELRAAKAWILETLRTHGLDVSPSDLRYTCESTGQYHMPLCLAWRGHPAIINPSDTSHVRRKTDRLDAVKLAQHSLHGLWRESWIAPDEIQELRVLANQRSKLVAERSRLTNRINGDLLRFGHTVGQLGKINGSVVRALIEDFCTTGSVSIHRDHFSDTRIPAGVIFVLDQRWKRIDALDQEIKAIEELCMKKTDALSWRIGASRTASGCQLRSNLQSIPGVGTQTVTTWLGEVGDITRFASVNNLLAYAGLDPSGQISAGEVTGTKTRKGNARLHGALRHAARAMLSRAPSCKFSMWARGYMGRHSRASKSKAIRALARRVGKALYYCHLKNEPFDDSGYHALLSESSYPLCPTEEMGLSARVVGILKGNGLHTSRQVVDAFYSDLGRRPGCGKVTVQAVATWITSHTNRSRDAIRRPKGTKPSNSLPAPEG

SEQ ID NO: 210993 - protein, 410 aa, unidentified
MRLFVGDDWAQDHHDVEVMDEQGKMLAKKRLPEGVAGMARLHELIGQHLGEAEDAEVAVGIETDRGPWVTALIAAGYTVYPVNPLQASRYRERHGVSGAKSDGGDAHMLADMVRTDAHQLRPAAGDSPEVQAIKVVARTHKTLIWERTRHLQRLRHQLREYFPAALEAFEDLAAPDALELLGKAPDPARAARLTRAQVAAALKRARRHRIADKTTAILAALRSEQLGQPPALTAAYAAAVRSLIAVITTLNEQTTALEGQVEDHFGRHPDAEIYLSQPGMGPILGARVLGEFGDDPHRYASAKARKNYAATSPITRASGKKKLVAARWIHNDRLLDALMAQAFSALKTSPGARAFYDELRGKGIEHNDALRRLANRLVGILHGCLKTRTLYDEAAAWGHRKNLPQSSVAA

SEQ ID NO: 210994 - protein, 364 aa, unidentified
MKRKVYVGMDVHKETNRIAGLTNNTKEIVKEQQIKHNEVQIKKFVNKLKSEWNEIHSCYEAGVTGYPLYRCLKSLGVNCILVAPGKIPRQSSDKIKTDKRDAIKLAKLLRSGELESIHVPSEEDEAVRDYLRSRDSLRLDLGRNRQRLMKFLLRKGITYSATKYWTVSHNKWLNNLQFNNEILQETFNDYYSRVRVQEENLKAMDKRIQEIAESEPYREKVGILRCFRGVDYLTAMFLLCEVCDFKRFKTAGSFMSFLGLVPGEYSSGSKRKQTGITKTGSPRLRRILTEAAWQHRFPGTGSKIVTARRSGQPALVVALAEKASLRLHKKFRNLQQRGKTPQVMITAVSRELSGFLWAAMNLVA

SEQ ID NO: 210995 - protein, 428 aa, unidentified
MQNQLIKNVEKRKWITSRTLVVGVDIGCQFNAVALMKGDGEVLGAPVRVYNSRKGFMYFMELVEGARRRHELGQVVVGMEPTGHYWRKLAYFAKDRGFEVRFVRTTALKHQRELDESSSAKSDARDALTIGNLVREGKYLDTLVEEGVFRELRTLGKTRERLLRYYSGTLQVLGAVLDDYFPELKDVFFSMESKGLWAVLERFPFPEDVLRTDPAVLEEVIGKATRHRCKAREKALAIIERARDSVGLTGVSGTERLRVRMYVEELRRMWSKLLEIEQEMKRLAAEVPCAKWLCSIPGTGMLSVAAFLGELGDPARFDHYKRIVKFAGLDPVEQDSGLRVGGKRISKKGRYVLRKFIFYMTMRAVHHSSYFKGEYERRLATTNRRGRTLAKREALCAISIKLIKVVFALLRDGRVFSEKPPALLGQVA

SEQ ID NO: 210996 - protein, 347 aa, unidentified
MSFIGVDLHQNSFTVCRRKTDGAESFETLTLSAADLERFCLSLDADDELAVEATGNSAWFRDCVLPCVGRVVVVNPSQFKVIRKSVKKTDRNDAAALALFLAKDMLPETRARTQGENELASLTQTRDLLVKQRTRLLNKIHALHVRKGLKLRKESLGSKRALASIDLALFSACEVIEIEVLREQALSLTASLARLDREIEGVASTFKGYAGLTSIKGVGPRSAAVLLSTIGNVHDFESADKLAAYFGIVPRVSQSNETDNRGRITKRGNKLARTTLVQCSLIAMRYSSYLKTYYDRIRQRRGTGKAIIATARKLLAIIYETLKNGWVFDDFTQFSRRDPLIPAGQTS

SEQ ID NO: 210997 - protein, 286 aa, unidentified
MLIVGCDYHPRWQQVAWFDTETGEIGEQKLVNGDGEAERWYGQLPVPSLIGLEATGNSQWFLDLLNQLGHEVWVGDAAEIRASYVRRQKNDRRDAGHVLKLLREGRFPRVWVPSAEQRDLRQLLIHRHKLVQIRSRVKNGLQHLAMNQGMQKKSRLWSAAEQKAFRQVPLSGWAGCRRQDLLQLLTYLDQQIAPLDRAAQQAAEQDPQARLLLTQPGVGPITALAFVLTIGDVTRFARGKQVASYLGLIPREQSSGGRQRLGAISKQGNSSLRMLLVEAAHSGSAR

SEQ ID NO: 210998 - protein, 403 aa, unidentified
MKLKIVNPNAAGIDIAYGEMQVCVPEYCDGESNRCFGSFTCDYEEIASWLKACGITTVAMESTGSYWVGLYFFLEEKCFDVLLANAKDVKNVSGKRTDEADAEWIMLMHSYGLLKPSFHPDAAARSIRELARHRDNMLRSASKEVQHMQKSLVLMNIKVDTVISDILGKSGKAIIEAILNGNHDPKSLVQLVDPRCKASKETIEKSLEGTWDAVHLFELKQSYDLYKYIHTQIADCEAEKHAFSMWGVNAMEIPGMSLGAQTILMRELGSGFTEKFTSAKSFCKWCNLVPNNKISGGKLLSSKVPKQKNRVGQVFRLCANSVKSVKTGLGIYFRRQKSKGGHLQAIVATANKIAKIFYTMVVNKNHYDESKVGLDEKQLLERKIIMAQRTPYRLNLKLSVAQG

SEQ ID NO: 210999 - protein, 438 aa, unidentified
MRAKCNDDLSTVNFSTIGLDVHKNRLVACAVHVQHDAKGREVHEKEYFESTGTYSGRQRLTEWCSSQNADLILMESTGIFWKAPFRDLEKADLHPVHINPRIFNRGSDKRKTDKSDATWLANLARLGLYRASFIPAEPYRSLRLVQSQIKSLVAERQRLKNRLVKVLDDSGFRFTVAFADIGGASSQSLIAGILEDAPREELALMIDPLCKKSIEEILDAVSGELSQINKDIVQSILRLIETHTKEIETLEQTVIRELKKCEKVKQNIRLMTTIPGVSEKSAQLLMSMIGPDFVENFSSPHAFARWLGVCPGNNESAGQIKSGRTPHGQRLIKKVLTECAQAACHTKGSHLAVLFGGWKHKGFCKAVMAVAHKLALLIHWVVVNQKPYIDKEFDYTGVFKQNGQRRPRWIRALRRYGLMTLADVEKEKAARGWIIAKA

SEQ ID NO: 211000 - protein, 430 aa, unidentified
MKSNTQNAKIEAITVKTLVLGIDVGSETHYARAFDYRGIEYSKKPFKFSNTEAGFVTFKEWILDLKEKHEKDKVVPGMEPTGHYWFNLGKFLQDNEMKPVLVNPHHVKKSKELDDNNPTKNDRKDPKVIAGLVREGRYMIPYLPDGVYADLRTASNIRFQLQAELTRIQNRISRWFNIYFPEYKTVYGKPDAKSGMLILKQAPLPEDILTLGIDGVNQIWRDAKMRAVGKARAKTLIEAAEHSVGSKEGAVSARMEIRMLLEDYESRNIRLQEVMTLIEELVNQIPMAEKLLGIKGVGIKTVPGFLAEVGDISRFNNPKELQKLAGLALVENSSGKHNGRTTISRRGRKRLRYLLFEVAMSLVAKNPEFRELHNYYTTRKLNPLKKMQSLMAVAAKLIRVFYAILTKGVDYDPKKMVGDIKRPAVYLPAA

SEQ ID NO: 211001 - protein, 341 aa, unidentified
MNSSKTVVGIDIAKRVFQLHSIDMETGEIVSLQLKRDKFLEHFANRKPCLIGMEACGGAQHWARKLTAMGHQVKLLPGKAVKGFVAGNKNDRQDARAIWTAVQQPHVKAVAIKTEEQQAILALHRMRSQLVKFRTAQINGLRGLLTEYGEVMPQGKAGVRKGITDALARLEDRLPAMVIDTLREQWARIGKMDEEIATIEQRIKLWLKQDDACKRIAEIPGVGPLTATAAVAIMGNAKAFKSGREFAAFAGLVPRQTGTGGRIKLLGISKRGDTYLRTLLIHGARAVLTTAKDPGPWAIELRQRRPLNVAVVALANKMARTIWAMLAHERTYQKEFVSQPA

SEQ ID NO: 211002 - protein, 366 aa, unidentified
MKKISTVQEFGNEILKEQKLTIGVDLGDRWSFYCVLEEAGKIIVEQKVPTTPEAVKQTFSRVPQSRIALETGTHSPWVSRLLTALGHEVIVAHAQKVQLITKSNRKDDRHDARTLARLARIDPELLGPIRHRSVQAQIHLTVIRARAELVSARTALVNAARGLVKSYGQRLPKCGTQQVGRELGAALSTELRDVLEPLLKEIESLNERIKEYDERMEKIAKEVYPEVSLLKQVKGVGTQIALTYVLTIEDPHRFLKSREVGCFLGLKPGRRNSGESEPQKSISKEGDRYLRTMMVQGAHYILGPFGADSDLRRWGLKLAERGGKNAKKRAVVAVARKLAVLLHRLWVSGEVYEPLRNSQKAMRAVA

SEQ ID NO: 211003 - protein, 307 aa, unidentified
MLQQIAGFDVASQEHVSYREEVGWCNVVNTASAIRRHLRSLPKGTIIALESTGGYGLLLARLAHELGFTVYVLQASKVKNFCKSSPSRGKSDKHDARDIAAYIASFGARLHPYTPLPAFEARLRMLCRKKEGMNDHLTALRLMLRALGDTPRKVQSTLRELAGRIKGLEAEIESMLAEADDAQVLYKIPGVKSNLIAAVLPALRTIPFKDKYALDSYAGIDLKMNESGKFVGRRRMSHQGDAHLRRAVYMAGMTATNCKVWKPYYLKLRNEKRLKPVQAINALGRKILHTVFGVYRSQTPFVAPSRA

SEQ ID NO: 211004 - protein, 427 aa, unidentified
MRVLYDRVAAIDVHKDMVKVAVRVPGSKRGTRKTDVLEYRTFYGVLQAMARELRRRGVTHVVMEASGVYTEPVYYALTELDFTEVLVINPAHAKALKGHKTDAKDAVRLLDLYECGALLRGSYIPAPDLKEVRDLARYRMKTVQARASEIQRLQKTLETAGIKLDSVVSDITGMSSTAMIEALIDGERRGGVLADLALGRMRTAGKLADLSMALTGRFTDHHALMCRLHRDRISMFDDAIGELDAKIAPLVARYAREADLLKTLPGFGEVVAAGWLGAIGPAPHRHFGTAERLASWVTLCPGNYISARKSRSGRTGDGGSHIKPLLVQAAWAAIRTPGRLQAKFHRLVRKFGGPKNKGARKRAIIAIAHALLKIAYAVLKTGKPYQEPGADFYTRRESAQAREEYLLRQLQKLNPGCVITITPAEAA

SEQ ID NO: 211005 - protein, 372 aa, unidentified
MGWLPPASDGIVMCQTGGCVGHEKERTATVTKDMMIGVDLAKHVFHLHGATMSGHVLFRKRLSRGQFLRFMERQPSCTVVMEACGGAHHWARELAKLGHEAKLISPGYVKPFVKRQKNDANDAEAIVEAAQRPGMRFVTVKSAEQQAIACLFRARKQLVEHRTALVNALRAHLFEFGFAFPAEAAGLARARRVLEDAGTELPDLVRELCRDQLARIDEASERLAELSRRISALGSSGEQARRLQTMPGLGPVTALAIEAFAPPMESFRSGRDFAAWLGLVPRQHSTGGRQRLGRISKAGQSDIRRLLISGAMSRLNWIGRRAIRPGSWLARMLERKPKMLVAIALANKMARAVWAMIVKGEDYRDPAPIASV

SEQ ID NO: 211006 - protein, 377 aa, unidentified
MSSAIIWIGMDVHKDTVMVAVYSDDAREPEIVQQLPNDPRKLKRFFQRWGRRGEIRSCYEASGAGYVLQREITEWGHDCEIVAPSLIPIRPGERRKHDRKDATQLARLYRAGELVTIRIPSAAEERVRDLVRCRQCFQREILRSRHYVTKFLARRGLVYREGTNWTRRHRSWLQSLFQQGGLEPEDRSVFSEYLALLDYKVSRREDLDGQIEKLAFSPAYKPKIDRLRCFRGVDTLAAMTLVTEIGDWRRFERPGQLMAYLGLVPSEYSSGDREHRGPITKAGNSRCRHVLVQAAWKYKHRPTVSVDLKKRQSGQLPQAIAHAWKAQHHLHKLFHRIAARKSSRIAVVAVARELVGFLWAVMQEFETEQAVTLSTAA

SEQ ID NO: 211007 - protein, 348 aa, unidentified
MNNNITIGMDLGDKFHIAVVFDSDGTELEIAKVINTKTGIRTFFKQYKSATVAIEAGTHSPWISRLLTEMEQTVYVGNPRKLRYIWDSIDKSDARDARMLGMVCRLEPRLLQPIHHRSSQAQVDLTTIKSRDMLVKSRTQLINHVRGIVKANGERLPKCSAASFANKCSSDIPKELWPAIAPLFEVITELNCQIKELESKIEQLSIEKYPETRFLRQVPGVGPITALSYILYIEDPARFSKSRQVGPFLGLTPRRDQSGEMDKQLPIAKAGNTYLRQLLVGCAHYIMGPFGPENSLRLHGLAIAARGGKNAKKRAVVAVARKLAVLLHRLWVSEDTYQPFYCRDKKVA

SEQ ID NO: 211008 - protein, 354 aa, unidentified
MSQKLESAIAVVGIDIGKNSFHVVGHDERGAIVLRQKWSRGQVEARFANMPPCLVGMEACVGAHHLSRKLNSLGHNARLMPAKYVRPYSKGQKNDFRDAEAIAEAVQRPTMKFVATKTANQLDLQALHRVRERLVSQRTGVINQIRAFLLERGIAVRQGQRFLRTELPRILATPPDVLSPRMVRIIEDLAGDWRRLDERVESLSKEIIAIARQDASCERLISVPGIGPIISSAMVAAIGAGDVFTKGRDFAAWLGLVPKQISTGDRTILGKISKRGNRYLRVLFVQAAWVVLIKPQSWERHGLKSWIEAAKKRLHRNVLAIALANKLARIAWSVLAHGRSFEASKLAAAVTQPA

SEQ ID NO: 211009 - protein, 382 aa, unidentified
MTGTEPHAWETGLMDDITYVGLDVHKATVCVALAESGRGGEVRQVGVFENRPEILVKLAARLSKGGRRLSFCYEAGPCGYGLHRLLTGCGHDCVVVAPSLIPVKAGDRVKTDRRDAVMLAKLHRAGELTSIWIPDAAHEAMRDLVLARATAGRVLSKARQHLQSFLLRHDQIYRGARAWTLAYRRWLTTVRFAHPAQQIVLQDYIHAVQDAEARVDRLTRQIEELLPNWSMAPVVTALQAMRGVALVVAVTVVAEVGDFRRFANARQLMAYLGLVPCEHSSGATVRRGGITKAGNTLARRVLIEGAWTYRMPARVSRKLHDRNEKLSPVIRDIAWKGQMRLCSRYRRLAAAGKPKVVVTTAIAREMVGFVWAIARIAQPTPG

SEQ ID NO: 211010 - protein, 344 aa, unidentified
MHFLGIDWATEKHDLCLLAHDGRVLSHLEITHDLAGFHRVRDLLHTLPDVQINIERSDGLLVDWLVQQGYEVYITPPHVLAHRRPTRVKDDKGDAYLLAYLLRMEDRDCRPYSRQSQIVTHLRQLARAYEQALSEQRRLGNQLIYNLRQYYPVALTLFTKVHSLIALEFIEAYPIPQDAEKLTYLDLERFLRAQHYTHINKRLDLIYRRLQVAMPHASVQIGYVEHVRVLIPILRMLHHQKETLIKAMTQVFATHPEADWWLSFPGTKGPLTPARLLAWIGDDRGRFPTAEVLQAVAGTVPVTRRSGKSKVVEFRTACSHPLRSADDDLARQSLRHSGWARAYF

SEQ ID NO: 211011 - protein, 365 aa, unidentified
MKRILKQAIGIDCAKDDFEASYGKYYENSEVEITARKNCSNNQQGFEKLDHFIEKLVVKDVPLVIVMEATGVYHEKLACHLYDKGYSVSVVLPQRAKAFMKTLKTKTVTDKESSKGLTVMGLEKNLDLWQKPDQVFNTLKQLTREREQVQKSLSQIKNQLHAEQAGAWPNTKSIKRMNQLKKTYEKQIKEIEDDIDEILRSNPGLQKKIDHITTTPGLGKLTVVTVVAETNGFNLMRNKKQVVSYAGYDVVEKTSGTSVRGKTHISHRGNRHIRRAMHMPALTAIRHTPQNKELFKRLVSKHGIKMKGVVAVQRKLLVLIYTLWKKEEDYDENKYLHKLLEQPEKTALTELDQVRSLEFLNSKQR

SEQ ID NO: 211012 - protein, 408 aa, unidentified
MKVLYERCCGLDVHKKEVVACIITPEGKEIRTFHTMTDDLLELADWLSGEQVTHVAMESTGPYWKPIYNILENEFTLVLGNAQHIKIVPGRKTDVKDAEWIADLLRHGLIRGSFVPDRAQRELRELLRYRRSLIQEHTREVNRIQKVLEGANIKLGNVASDVLGVSGRVMLRAIVEGVNDPMAIAGLAKGKLREKQAELEKALKGIIGPHQRMVMRCQMEHLEFLEEQIARLDKEVADRMGPMQGHIDAADSIPGIDVRTAQDILGEMGTDMSQFPDAGHLASWAGVSPGNNKSAGKRRSGRTTRGNRWLKASLVLAARAAVRSKENYLKSQYHRLAARRGDKKAIVSVAHSILVMLYTMLKKGQLYNELGPDYFDKRNLNATLRRSVQRIEQLGYKVILENVQPAFS

SEQ ID NO: 211013 - protein, 357 aa, unidentified
MEYGAIDLHKKESQIRIITTNGQVIDQRIATTRECLTQVFWGRPRLRILLEASTESEWVAQHLEQLGHEAIVADPNYAPMYGHRSRRIKTDRRDVAALSEACQHGTYRVAHRRSARQHEVQCRLNVRQELTQSRTRAISLARGITRAAGLRIRSGRAETFLDRLAALDLSPSMKATLSPLRSVIEILDDELVNADEQFEALGAADPVVKRLTTLPGIGPITASAFVAALDVASRFDRAGQVTSYLGLVPHEYSSGEKQRRGRVVRSAHPHLQSLLVQAAWRVSRAADPRTEHFRAWAQAIARRRGKKVAMVGLARRLARTLFAMWRDEADYQPGRTRTRGAQAVAAATATTGAGVTV

SEQ ID NO: 211014 - protein, 325 aa, unidentified
MEKLYGGIDIHKETLAGCIMDKDGNITREHTFPSSKKAIERFLCGIPSPGITIAIETCGMWRGTYKILTDMGYEVKLANPKKTHDIACKKKTDRVDAKILADLLRTKYLPEVWIPDEQTLRFRDLTRHKSQLTRLKTQIQCKIKSYLLRKGVKYGKLWNEKTLSTLAQQDQDIQNLINVYNSVKKEEKEVMNRIKTVARNRKETTLLMTIPGIAEFSSLMILAEIGDIQRFRSSKELVSYAGLCRGIYQSASTERSVHNTAANKWLKWIIYECSGRAIMLDHRFQQYYYPIQKRKGQNTARRATARKMLTIIWYMLTNKETYRAS

SEQ ID NO: 211015 - protein, 323 aa, unidentified
MNKYNETFGIDISKDVFDCYGSVQGHLQFSNSETGFKKFQEILSNASLVVMEATGYYHYRFAQFLYKQKVAVSVVNPLSVKRFIQMKLAKVKTDKSDAKAICAYGLTQEIPLYNALTDIQSECLQLFRLMDSFLKKRTATKNKIHGEEVLGVPSSWVYRSLKRDKKHLDKELKGIEQKLLSLVKQDQQQQLTLLQSIPGIGLKTALFLIVVTDGFKKFETASQLCSYVGITPTIRESGSSVRGRARISKVGNRKLRNLLFLCSFTACKHNKGCRDLYERIANKGKSKKLALIAVSNKLLKQAFAIAKSGHTYDPTFVSVFEVK

SEQ ID NO: 211016 - protein, 401 aa, unidentified
MYLLLVMARLGLAIHEFQCARLSCCRQTRDGVDGPRTASMCQNEVVVDLKRREPSVDKLIRIGIDTSKSVFQLHGVNAAEQPVVKKKLRRKELVAFLGRLEPTVIGMEACGGSHYWARVLGELGHTVKLMAPQLVKPYVKRGKNDAADAEAVCEAMSRPKMRFVAAKSAEQQAALMLAGVRDRLVRNRTQLSNAIRGYAAEFGLIAPKGLDKIEPLLARAVGDESLPDLARELFTSQGREYERLQAQIRDIDVKLMAWHRDNECSRRLAEVPSIGPIGGTLLAMKVPEAASFRSGRHFAAWIGLTPQDHSTAGKQRLGAITRAGDPALRSVLVVGAMAVVRQALRNPDRASPWLVDLLKRKPRKLAAVALANKTARIAWTMMMTGERYNANRAAVVKAMAA

SEQ ID NO: 211017 - protein, 324 aa, unidentified
MEHYVGLDVSLKLTAICIVDQTGKIVREGMVPSDPEVIAGFVQSHAPHVARVGLEIGATATWLWNELNALGLPVICIDARHAKAALKMQINKNDRNDAAGIARIMQCGWYKQVHVKDRGSHAIKALLASRALLVKLKRDLENQIRGLLKNLGQVIGRAKMNVFARRAAELLEDRPELAAAALPLLRAREAVEQEIADLDRKVLRLARRSAQVQRFMTVPGVGAITALCFLATIDDPARFTRSRSVGAYAGLTARGYASGETDWTGRISKCGDTMLRSYLYEAANVLLTRVAKWSALKAWGLRLTKRSGLRKAKVAVARKLAVTC

SEQ ID NO: 211018 - protein, 316 aa, unidentified
MPSPLVVGLDVAKAEVVVAVRPTAEHWTVANDARGIAALVARLAALQPQTIVVDATGGYERDLVVALAAEGQPVVVANPRQVRAFARGIGQLAKTDQIDAAVLALLAERVQPLPRPVPDAATRALQALLTRRRQLLDYLVTERGRLEHADREVRPGIDAHIRWLKRRLAAIDRDLDTTIQRSPVWRVKDDLLQSVPGVGPVVSRTLLGDLPELGTLDHKQLAALVGVAPLARDSGLARGRRLVYGGRAKVRAALYMAALVAVRYNPVLRAFYTRLLHAGKAKKVALTACMHKLLSILNAMIRSGKAWQPPTSTQQT

SEQ ID NO: 211019 - protein, 463 aa, unidentified
MKEKTRRTGGKLVGGSQLSVINPLVAGIDIGSREMFVCGPANGEGRREIRVFATTTQQIRDCGRWLKERKVQSVAMESTGVYWIPVLEILEGQGLEVLLVDPGPLSRVPGRSEKTDNSDCQWIQTLHSHGLLRGSFRPSEQVGELRTIVRQKAALVREQADWTRRMHKCLDQMNVRVHHAVTQTQGVTGMAILRAIVHGERDPRKLAALRDRGCQKSEAEMIELLTGNWRENHLFNLRQHMTMYDAVSQQLAVYEQEIQRRMQELTPPGREDTDIPAAAKREKQKSLKRRGQEGKRQTLYRMIGADLTSIDGIGVETAEVIITEYGTDMSKFQTEKEFVKHIGLAPSRPVSGGKVLKKSRKARKSTRTAEVLRNAAAALKNSHSALGAYFRRMARRKDASIAVFATARKLGEMIYRMLRHGEGYVDMGQAAYEKHYEETKLRAMKSTAKQMGYDLIKQEAITV

SEQ ID NO: 211020 - protein, 328 aa, unidentified
MENEIHFIGIDVAKAKLDVDMLRPDGRHRSKKFANTPGGHDELVSWLQGHQVIHAHICMEATGTYMEDVAAHLSDAGYQVSVINPMLSKAFVQSQGIRSKTDTVDARQLAYFCREKRPAIWEAPHPVERALRALVLRHQALTEMHVQEQNRRESARDVQLPSIDMHLLWLDTELKRLEKQIKDLTDDDPDMKHRRKLLDSIPGIGPKTSAVLLAYVGLKERFREARQFAAYAGLTPRQHESGSSIRRVSRMSKMGHVSLRRALYMPAMVTLYKTEWGREFRERLEKNGKNAKLIIGAMMRKLAQVAYGVLKSGRPFDATLHTKNACMA

SEQ ID NO: 211021 - protein, 344 aa, unidentified
MSNLDTCGIEVSAKELVVSLRRQEDLEPLRNFTNTPEGHLIILRYLRRAGRVVRVCMESTGLYGLDLALALSGQEGVEVMVANPRAVRHFAQAMMKRSKNDQIDAGVLEQFAVHMPFKPWQRPSVATLALHALARRLRELVEMQTAEKNRQHAAGLSKAIPAVVRRDLARSLRAQERAIERLTRQARKLIAQDPQLAERFELLDSVPGIGETSAVQLLGELSVLAPDLEARQWVAYAGLDPRQYTSGTSVHKKPRISKAGNKHLRHALFMPALVAVQHDPHLRAFYQHLLAQGKFKMQALVAVMRKLLHALHAMFKTHQLYDGSKLFRLKSAPAQEVTHVLVAC

SEQ ID NO: 211022 - protein, 421 aa, unidentified
MTQSAPHTFAAFVGIDWADAKHDVCLQAAGSAKRECCQLDHTPEAIDAWVITLRTRFNGQPVAVCLELNKGPLVFALCKYDFLILFPLNPLTLARYREALTPSRAKDDPTDAALQLALLLTHRDKLRPLNPQSPTMRALAQLVEHRRRVVGDQVRLTHRLTSTLKNSFPHALQWCQDKDTLLFCDVLSRWPTLKAAQLARRSTLETFFRDHHVRSSDVIDKRIHAIHAASPLTIDEGVIAPHALLVQALVSQLRVTLQAIETFDNAIAQRAQSHPDFPLFQALPGAGPVFASRLLVAFGEQRDRYASAAELQRYAGIAPVTERSGKKSWVHWRLQCPKFLRQTFVEWAAESTRHSFWAQVYYQQQRDKGKAHQAAVRALAFKWIRILFRCWQERTPYNESAYLQALNSRGSSLIHNLAKEA

SEQ ID NO: 211023 - protein, 470 aa, unidentified
MGFEPGSFRWPPLRLARLCREHVSVVVVSPLLLQWFTQSEEDEVRSAGRAIGLDVHRDFCEVAIAQDGEVRSSGRVDTTPEQLELFGSSLDPRDRVALEVSGSAWEVARILERHVARVIVVSPADTGIRQARAKTDRLDARTLARLLAAGELDGVWSPDERCRVMRRRLSRREQLVRSRSRAKNEIHAVLVRRLVGRPPVTDLFGVKGRRWLSELELPLEETETIGACLRHIEFLDSEIAAVERQIASEALRSAEIKRLMTVPGVNVICAASFMAAVGEIRRFQNPRALVGYLGLDPRVYQSGSAPATGGHISKQGSASTRWALVEAAWSAVRQPGPQHAFYQRVRARRGHGIAIVASARKLACLFWFLLTREEDYAHQQPSLTAKKLRLLEIRAGAPTVKGTPTGVWATRQAMRAGERRLAEQAEASYKRMVSDWQAATPKQKAGASVTLGRASQKPSKGNVARQTTSP

SEQ ID NO: 211024 - protein, 358 aa, unidentified
MKATNLKQKVDFTGKNIFVGIDVHKKNWSNTLYYDQQYLRSYTQPGSVEVLVNFLKKEYPNANYLCGYETGFSGFEIQRKLESQGIKCVVLNASDIPQTVKDKLQKTDRLDSRRIAHALATNSYNPVYIPDIESEADRSLVRYHFILVKDITRCKNHIKSLLFQFGVTLPEQYEKRWTKGLVKWLKECDDIKGNARVRLDLMIEQFEKVKTVYLDTNRRIAELQKSPKYKKSIEILTSVSGIGPLIAIVFMTEIIDINRFSNMRKLNSYVGFVPMEHSSGEHEIKGGITIRTNKLLRTLLIEASWIAIRQDPTLTYTYNELIKKMTGKRAIIKIARKLLSRIRYVLINETMYEKGILK

SEQ ID NO: 211025 - protein, 352 aa, unidentified
MAAKKRQVIGGVDTHGKTHHAAAIDRVGVLLGDQEFPATAAGYRALLAWLRRFGVVVKVGVEGSGSYGAGLARYLTGENVELVEVDRPDRRARRARGKSDPLDAIAAARAALSGQAAGTPKTRIGPVEAIRVLRVTRRGAVKARTAALNQLHAVITSAPESLRAQLLAVPAACLVAHCLTLPVNEADMSDPLTATAAALQALAERVRHLDAEIAQADKRVRPVVATTAPRLLALKGVGPEVAGQLLSTAGDNPHRLHSEAALAHLCGAAPIPASSGRTHRHRLNRGGDRAANTALHTIVLCRMRHDPRTQAYVQRRTKQGLGKKEIIRCLKRYIVREVYHALLADFTLLTTP

SEQ ID NO: 211026 - protein, 322 aa, unidentified
MNKYKETFGVDISKDVFDVHGSKAGHHQYKNDEPGFKKFLKRLPDDCLVAMEATGYYHYRLSQFLYKNAIVVSVINPLSIKRFIQMKLAKVKTDKSDSKAICEYALINEVPIYSALTDLQSECLQLFRLLDVYIKQRTAIKNKMHGEETLGIPSNFVYRSLKRHRKWLDKEIKSIEEKLLSLVKEDQQQQLSLLKSVPGIGPKTALFLIVITDGFSKFETASQLCSYAGITPTTRESGSSVRGRPRISKVGNKKLRNLLFLCSFNACKHNKACRELYERIVNKGKSKKLALIAVANKLLKQCFAIAKSGRPYDESYVSVLPK

SEQ ID NO: 211027 - protein, 343 aa, unidentified
MYYIGLDVHKKTISYCVKDAAGCVHQEGKIGSTRRELDAWIRTLPQPRMIAMEATIFTGWIYDHLLPYAEKVKVAHPLMLRAIAAAKRKNDRIDAAKIADCLRCDFLPECHMASTAIRDRRRTLRYRSLVIKQMVQMKNRVSGLLMETGVSYNKQRLHKLGYFEELMTTNEDVHDSIRPLLRLSREMISRSLKLDYALVSSLERDPLLKERLRRLRTVPGVGPITALTWALEIGDFTRFTSNKQAISYCGLCGDENSSADKVMRMPISKQRNKHIQRVLVEAAKLAPRESHELAVVRQRELERGNPNRATLAVARKMVCYLLAVERRKQDFVPAEKFKQVAAA

SEQ ID NO: 211028 - protein, 325 aa, unidentified
MILGIDVAKAKVDIALLDGKELIATGQFNNTPAGFKKLSKWLKHKTASPVQACMEATGRYGDELAEYLHKQDHQVSVVNPARIKKYAESQLRRNKTDKPDAQIIADFCRTQEPALWAPPSPQKRLLQEMVRRLSTLVQEQTRERNRLKSGLKSDVVKASIVEALDFIAAQIEHLETQIQEHIDHYPDLKRDHELLTSINGIGDKTAFRIPGELPDVDRFDNAGQAVAYAGLSPQQHTSGSSVHKRSRLTKIGNQNIKTAMYFPALVAIKHNPIIKAQAERLENYGKEKMVIVGAAMRKLLQLAYGVLKSGVPFDPNYSANIQDAA

SEQ ID NO: 211029 - protein, 413 aa, unidentified
MIELEVLRCAGIDIGKAEVVVAVHTPGHDGGRSKTLRSYATMTRQLLLLRDWLVELGVTRVAMEATGVYWKPVFYLLEDVIDECWLVNPQHVKQRRRGRKTDAVDAEWICQLAEHGLLAPSLVPPPPIRALRQLTRRRATLLAERTREKNRLQALLEDAGIKLGVVVSDVVGVSGRRILAALIDGHRDPHLLADLAVGTLIRKYSALVEALTGRFTDHHALLAGQILAHVDYLDTAIGQLDTHIELQIAPFRHLIDLLITLPGVAARTAQVIIAETGGDMTAFPTAAQLAAWAGLCPGISASAGTRHPTGAPKANKWLRRALGEAATATARTHTHLGARYRRLAARRGANRAKLAVGHSILTATWHMITTDSPHHDLGEDHYTHHINPDRRRRHLTTQLEQLGYTVTLTPTAA

SEQ ID NO: 211030 - protein, 362 aa, unidentified
MEVRHIFVGIDLGDKNSVARIAVDREKSERIGFVNNRHGRARLFGEVKRRAEQAGGAEIVMAYEASACGFVLRDEAEAMKIGCWVLAPTKMEKSVEQRKQKNDDRDADDVLEKLRGHVLAGNRLPTVWVPDQQTRDDRELIRTRLELAEKQTQVKSQIQMLLKRHGLEKPSGLGAGWTVRYRRWLDALTESAPLGWGASHGLASLLRQLCSIEGEIERIQESVEQLAGEPRHKPIIEELTKECGVGLLTAMIYRTEIGYAGRFRRGRQVGKFVGLTPTSHESGQQNDRKGHISRQGPPRLRKMLCQASWVHVCHDAGARRIYQQLVSRNPKKKKIAIVAVMRRLAVRLWHRMRKVELELAVA

SEQ ID NO: 211031 - protein, 430 aa, unidentified
MKSNTQNAKIEAITEKTLVLGIDVGSETHYARAFDYRGIEYSKKPFKFSNTEAGFVTFKEWILDLKERHEKDKVVPGMEPTGHYWFNLGKFLHDNEMKPVLVNPHHVKKSKELDDNNPTKNDRKDPKVIAGLVREGRYMIPYLPDGVYADLRTASNIRFQLQAELTRIQNRISRWFNIYFPEYKTVYGKPDAKSGILILKTAPLPKDILTLGIDGVNQIWRDAKLRAVGKARAKTLIEAAEHSVGSKEGAVSARMEIRMLLEDYESRNTRLQEVMVLIEELVRKIPMAEKLLEIKGVGIRTVSGFLAEVGDISRFNNPKELQKLAGLALVENSSGKHKGETTISRRGRKRLRYLLFEVAMSLVSKNQEFRELHNYYTTRRLNPLKKMQSLMAIAAKLIRVFYAMLTKGVDYDPKKMVSDIKRPAVYLQAA

SEQ ID NO: 211032 - protein, 354 aa, unidentified
MKRTTKHVALDVHQATTVASVREESGRVIARSVLPTDAAPILEFFHGMRGTIHVAFEEGTQAQWLHDLLAPRVDRVIVCDRRGEARHGNKGDQRDADGLSEQLWRGGLRAVYHGGGAGAELKELTRSYQNLVQDATRVMLRLKALFRARGIRTPGQRVYHPAGRAAWLARLAERGARLRAEALYAELDVLRALRPPAKAAMVAAARRDPAWAVLQSIPFMGPVRGAQLLATMQTPWRFRTKRNLWAYAGLAVVTRSTADYEIVAGQPVRRQRAPLTRGLNRNHNRMLKDVFKGAATAATARPGPLQEWYHGVLARGVPPELATVTLARKLAAITLRLWKKGERYDPAQLTTPAR

SEQ ID NO: 211033 - protein, 315 aa, unidentified
MKGSVEKPVVCYVGIDVAKAELVVATQQLRAVFTRNPAGLDRLVVWLHGLGANVHVVMEASGGYEREVVAHLQAAALAVSVANAGWVRNFALSQGRLSKTDRIDARVLVDFAVANAPRLRAPISAAQQKLTDLVRARHQLVAVRSLLQNQLEHTREPLARRSQEELVALTTTRIERLEKSLTALIAATPDLQAKAQKLTAVRGIGPTTAALLLAELPELGTLNKAEAAALAGLAPRNHDSGSFRGQRHIAGGRSAVRTGLWMPTLVATRYNPILREFYQRLRAKGKPTKVALTATARKLLLHLNSLLKSTPLSPC

SEQ ID NO: 211034 - protein, 367 aa, unidentified
MKHYIMVGCDVHDETLVLKIAVDRSEPQARTVENTPRGRAELVRDLRDASRRARGAKVVLVYEASCQGFGLHDELVEAGFDCHVLAPTKIARSSRDRRQKNDGRDAAGLLELLRGHLLGGNKLPKIWVPDVETRDDREITRGRQDASEKAASIKAQVRTLLKRYGQRLPAGLSKAWTRAFEAWLRGLIAPGGALPHGAAVALSSLLRQKAALDREIERLDEEVAALATTVRYAEPARALMTVQGVGLHTAMVYLTEMGDLSRFSNRKKVGAFLGLAPSSDESGPDCDRKGHITHQGPWRVRRALCQAVWARVRTDPPEKTVYERIVRRNPKHKKIAVVAGMRRLAVLLWHIGRNAQRRHRCFAAKAA

SEQ ID NO: 211035 - protein, 411 aa, unidentified
MDVLVERAAGLDVHQASIVACVLIGRPGQKPRKEIRHFGTMTADLEALRDWLRELGVTHVGMESTGVYWKPVHTILEGHFTLIVANAHHIKAVPGRKTDVKDAEWIADLVRHGLVRPSFVPPLEIRELRDLVRHRRTLAETLASERNRTLKLLETANIKLSSVATDVFGVSGTAMLRALAEGDMAPEAMAELAKGRLRTKLEPLVKALQGRVSEHHRFLLRLHLRRLDEIERDLAELETRIAERMRPYRRQVGLLKRIPGVDEIGAAEILAETGIDMTVFGNARRLAAWAGVCPGNHESAGRSRKTSTRKGNPHLKAALFRAATCAAKAKGTYYKEKYYRLKARLGAKRAAMAIAHKILLAVFHVLAGDTEFRELGAAHLDQQNKHRVTKGLVRRLDALGYEVILRPKLAA

SEQ ID NO: 211036 - protein, 315 aa, unidentified
MAMLVCASKPIVGVDVAKDELVIYHAERDLQEAIPNTKAAIKKWLKALPAKVAIAIEATNVYHLLFADMAHESGCVVYMVGGYELSHYRKGVNVRAKTDALDARLLARYLKNEAEELHPWTPPSPLYRQLLSLFRRRAALVQARTSLTQSWANEPLLKTSFSAQVKSMQRLEALVEKMIRSLLEKAGLLGALKRCMQVEGIGFLTAARLLTTFERGTFRGSDAFIAFLGMDLRVSKSGQKDGRRSLTKRGDSEARRLLYNAAMSASRTAAWKPFYEQQRARGFSTTQALVILGRKLARVVFALLKSQSEYQSKAV

SEQ ID NO: 211037 - protein, 360 aa, unidentified
MIHVGIDHGKKFSHVVAMMDSGEVCFDGRLASTAEAFREFYEGLPAGEPVQSVLEAGWNWGVLYDAIEDLGMEPKLANPAKTRVIGASFIKTDRIDATALAQLLKAGMVPLVHVPAKEVRDRKNLLRHRFWLVRLQTSIKNRVHSILDRNHVRAPEVSDVFGNRGRAWLNTLDLRDPDGKLLRSHLALFDMVRAQIRETQQWVEEALKENAYVPILQSMPGFGETLAALVALEIDTVERFAAPEKLCAYSGLACSTYSSGGRTYHGGLIPTSNSHLRFAFVEAAWVAVRVSPYFGAFYRRLKARRGANKAIGAVARKLCEIAFHCLKKRRFYEERVYQFKPVRHEFQSGRLERHLAGSRG

SEQ ID NO: 211038 - protein, 343 aa, unidentified
MQTITTIGLDIAKSVFQVHDVDADGRVVVRRQLKRRYVLAFFQKLPPCLVGIEACASAHHWSRELQALGHTAKLMPPAYVKPYVKRHKNDATDAEAICEAVTRANMRFVATKTPEQQSCLTLHRTRHLLMRQQTSVINAIRSHLAEFGIVAPVGRNGVEQLLGVVADSNEKRLPEIARACVAALGAQLRVLKVQILEFDRMIRAWHRSSEASKRLDQVPGVGPVLATALVASVADPRAFRSGRDFSAWIGLVPKQHSSGGKDRLGSISKQGDRYLRSLFVAGALSVIRYAKIHGTKHRPWLTALLARRPTKVAAIALANKLARMAWAMMARGERYRRPAALAA

SEQ ID NO: 211039 - protein, 393 aa, unidentified
MICVGVDVAKDKHDCFILSSEGEILADVFTIQNNAEGFDTLLQTIRRCTCPADKIKVGLEATGHYSYNILGFLIDKGLDTYVINPLHTNLYRKSLSLRKTKTDRVDARTIAAMLMSDVDLKSYTDTAYHNEELKSLTRYRFDKVRERAKLKQSVSRLVTILFPELEKLVSSLHSASVYALLSEFPGAKQISSTHMTHLKAILCNASKGRYGRDMAEAIRNAARCSVGSVMPAKSLELQHTIRLIRELDSEIQDIEAAIQTMMEEIASPITTIPGIGVRMGAMILAEIGDFSRFDSPDKILAYAGMSPSTYQSGQMSLTGAYSHMEKRGSRYLRYALYNATKYVCLWDPIFSAYLAKKRAEGKHYNVALSHAAKKLVRLIFAMERSRQPYSSAA

SEQ ID NO: 211040 - protein, 365 aa, unidentified
MGQGSGRIVAGLDVHKRSTRIAAVQGDRLVREVTVASDAEIVEAALLRLGVAACCYEAGPTGYGLYRHLNAHGVRCEVIAPGLVWRQPGDRIKTDPRDARRLAAQYQGGMLRAIHVLSPEQEALRDLVRAREDARHDRMRARGRLGKFLLRQAREMPTQSWSIQRRTWLGQQVFAEPAAQAAFDDYLTSVDLVDRRIDALERGLAEQALEGPYAELVARLRCLRGIDTLSAVGLAAEIGDFGRFASAEEFMSFVGLVPSEHSSGAKRTQGSITKAGNAHARRLLVEAAWNHRRRPGASYTIQRRRRDQHPLTVARALRAEQRLYKRWSRLRSRGKDERTIVVAIARELAGFVWATATDQPLQPTL

SEQ ID NO: 211041 - protein, 336 aa, unidentified
MQLLAIDLGKQSFHIHGITSEGKVISKKVTRSKLKSVVQEISPEAVAMEACASAHHWGRFFEESGFPVRLIHPRFVLPFVKGSKNDAVDAEAIHEAALRPTMRFVPVKTTDQQDLQMLHRTRDRLITQRTGLINHIRGLLAEYGVVIPVGACRFRKDIRNAVAEAGLSTLAKQNFTALISEFEALDRRVNEIDRKLVTICRKDARCKRLSTLPGVGPVIATAMVAAVDDGRHFSSGRALAAWIGLVPRQYTTGGKPRLGCIGKRGNQYLRRQLIHGARSVLIRIASRNDQRAKWAQNLLVRAGHNKTLVAIANKTARIAWAVLRSGEDYKAVYSQQ

SEQ ID NO: 211042 - protein, 314 aa, unidentified
MSFQHFIGIDVSKAKLDLAFDEQATTTVVPNDPKGIDELVDLLPEAKSCLIVIEATGNYERPLAVRLVEAGHVVSVVNPRQVRDFAKAIGQLAKTDKIDARIIALFGKLTRPRAVAKTKQLQGELDQLVTRRRQLIGTRTAEKNRQGQAVSGAVRKSIQRVLDAINKDIKMIDREIQKLVQSDDDWKHRAELLGTMPGIGDVTSATIIAELPELGDLNRREIASLVGLAPFNRDSGQMRGKRSIFGGRGSVRSALYMAALSARRYNPAIAAFSKRLTEQGKPPKVVIAACMRKILITLNTMVKTNTTWENPQNA

SEQ ID NO: 211043 - protein, 338 aa, unidentified
MYFIGIDISKFKHDCAIIDEAGDTVTASWSFANNCEGFSLLKQLLDALDGQKKIGFESTGHYGHNLKLFLETNNFSFMEFNPLLVSKFVRSKSLRNTKTDSLDAVSIAQYLMTVEYKPYPPSFYHMDQLKSLTRFRDSLVRQHSRQLVELTNILDKVFPEFKPFFDGRFSATALYILTHYQSPEKIANMNAKSYEALRKKSRGKFSMVKFAQLKTLAKNTVGRSDAFLLKQMEITIDIENQLDAKIDEIESQILECIRALNPPILTIPGIGELTAAIILSEYGNINKFENPAQLLSFAGLEPGYYQSGLAEHQGHMVKHGSSHLRYALMNACLPLIKW

SEQ ID NO: 211044 - protein, 360 aa, unidentified
MRKQSNTLNFEGQNIYVGIDVHLKSWTVSILSGHLHHKTFVQPPSPEALSSYLHSHFPNGNYLSAYEAGFSGFWAHYKLVAMGIQNIVVNPADVSTSQKERLQKTDAVDSRKIARSLRNNELTAIHVPCRETLEVRTLLRSRDALVRDLARMKQRVKAFLYYYGIDYPKEFQHSGTHWSRAFMNWLRNGIRMDTEEGGAGLSLLLDSVESQRRLLLEATRKLRALSRSDGYATDYELLRSVPGIGMITALSLLAELEDIRRFANSDRLAGYIGLVPTSHSTGEKDNKGEMTFRGQMQLRSKLIECAWFAARIDPALNMAFSKLTRRMEPNKAIVRIARKLLNRIFYVLKYKRRYKNETVE

SEQ ID NO: 211045 - protein, 309 aa, unidentified
MLTAEADKCKTKVVVNTAAGVQALLAWCAKHGAQPAQLHAILEPTGLYHEQAATALPQVRVSLVNPAQARDFAKALALRSKNDALDSYVLARYGQTLSPALWHPAPLHARQLRALLTRREALSKDLLRELNRKEKSQFSPSAPLVDGSIDKAIAFLREQIKQIERAIDQHIDNHPDLKQDCELLNSIPAIGPQAGNAILAVMHNRHIDSAQSLAAYLGVVPVQRQSGSSLNSRARLSKAGPSQVRATLYMAALVGTRHNPHIRALYQRLLKAGKSKKAALGAAMRKQVHLCFGVLKNRIPYQPNYAMNG

SEQ ID NO: 211046 - protein, 308 aa, unidentified
MTEHCYGGIDVSKDRLDVMVLPDRKSFSVDNNAAGYSELVKRLRGLSIAAIGIEPSGGYERAVIRALLAADLSVRRINPNKLRQFGRARGVLAKNDRLDARLIAEYVAIMPTRVVQRDPATEQLAEVVTMRRQLCDEHVAVENQTAHLEDAMLRRLNKRRLARLAADILLLDRRMAQIVVSNANLTRRYELLTSMQGVGPTLAFTLVALLPELGQMSRKQIAALVGLAPYDFDSGRLKGHRCIYGGRLPVRNVLYMAALSACRYNPALKVFHHRLAATNKKPKVIIVAVMRKMITTLNAMLRDNVTAT

SEQ ID NO: 211047 - protein, 391 aa, unidentified
MTERKTETVNDLSRCLDPLDMDATLIAVIEMSQSSWLVGGIVPGVERQPLKKLAIDEHALLKLLSRWRAEAEKKGHRITRIAVAFEAGHDGFWLARWLAAQGIEAHVIHPSSVAVTREHRRAKTDRLDTGLLKRGFLGWLRGERGHCKMVAVPTLAEEDAKRPSRDRETLVGEASRIITRVKAAFVRLGIRRFNPKLKTAAAGLEALRTPEGEPIPPNTLAALKRDLERHRIVKQQIREIEQTRLERLGKAPAEGSHAMVRLLARVIGIGVETADMLVQEVLSRNMRDRRAVARYAGLTGSPDESGSKRREKGLARSGNARVRRGMIQLAWRFLMFQKDSALAEWYRQRTANAPSARKTLVVALARKLLIALWRLARDGVVPEGVRLRPAA

SEQ ID NO: 211048 - protein, 343 aa, unidentified
MGSSIGVDSHKCSLAAAAVDELGRVIGVREFPNDPQGHLALLAWARDHETPRAIGVEGSGNYGAALCRALSSAGEQVYEVPATLTFRERRRKGSQGKSDPVDAVAIARVVARDEALPSPRRAQALADLKLLSDYRDQLLCARTQLANRVHRDLVVLRPGYQRMVPNLVGAKHLSRAASLVKGDSSVRAELVRRRIAELRRVSNEIAETKARLREALAGSGTTLTEVPGIGPLIAAKILGEVGDVDRIRSQAAFAMMAGTAPLVASSGMSSRHRLNRGGNRKLNFALHYMALVRYRSDEETRGYIERRRAEGKTFKEAMRCLKRHLCNVVYRQMISDWRAMQSV

SEQ ID NO: 211049 - protein, 358 aa, unidentified
MEQIIRPDFTGQPFFIGIDTHKKSWKVSIFTEHLEHKTFTQPPDVDKLANYLRRNFPGGEYHVVYEAGFCGFWIHDSLNKEEGVDCIVVNPADVPTTDKEKKTKADPIDSRKLGRSLRNGELKGIYVPPRESVEDRNLVRMRQTMVKKQTRVKNQIKSLLYFYGIVLPEEYTQRRWSRKFIDWLYEIQMTRASGDMALKTLLDELTYLRQTISGLTKGIRGLALTEEYAENFRLLKTVIGISILADMILLTELVDINRFKNLDMLASYVGLIPDTESSGEKENDKGITKRRNPLLRHVLIEAAWTAVRKDPALMEAFNKMLGRGISRKVAIVKIARKLLNRIRYVLKNKKEYVPSVVQ

SEQ ID NO: 211050 - protein, 337 aa, unidentified
MKYCGIDLHSNNSVVIVSDEEDRIVFSKRLPNELGQIGAALEPHRGDLAGVVIESTYNWYWLVDGLMATGYQVHLAHPSAIKKYEGLKHSGDFADAAYLAQLLRLGLLAEGYIYPREERGARDLARKRMQLVRYRTAQILAIEGIVMRQTGARMKGEAVKRLTAEQVDEFAFAPDVALAVEANRAVSQALGQQIEALERRLKERVSLRPEYRLLKTVPGIGDTLATTIMLETGSISRFAQVGNFSSYCRCVDSLRESNGKKKGEGNTRNGNKYLAWAFVEAANFAMRYCPQAKSFYDRKKSKTNRVLAIKALAHKLARACYHMLREQKPFNVHLCFG

SEQ ID NO: 211051 - protein, 365 aa, unidentified
MIVVNESHQGVIDMQVATIGLDIAKNVFQVHAIDSDEKVVVRKQLRRCQVLQFFQELPACLVGLEACATLHYWARELAKLGHEVRLMPAKDVKAYVKRNKNDAADAEAICEAVRRPTMRFVQVKSAEQQAQLMQHRARDLLMHQRTQLINALRSHLAELGIIAPQGREGIKELLAIIANDANTHLPNDARASLIVLAAQLQALQTTIGAIEKRITVQHRATKESKRLQTIPGIGVIGASAIAATVTNPKIFRSGRDFAAWIGLVPRQMSNVDRGESETRADIQTGRPLPAAHPRGRSGFCPAPGQAQSAEISLGDAAPGTATVQGCRGCACKQDGAHCLGAVDQRQDLSICLVCGSVSRSLPRGV

SEQ ID NO: 211052 - protein, 341 aa, unidentified
MQVTTIGLDIAKNVFQVHGIDVAEKVIVRKQLRRSQVLEFFKTLPGCLVGMEACATAHYWARELTKRGHQVRLMPAKDVKAYVKRNKNDAADAEAICEAVRRPTMRFVQIKSAEQQGGLMLHRTRDLLMRQRTQVINALRAHMAELGIVAAQGNAGLKELLKIIAGERDARLPVDAHASLVVLAAGLHAVQTMIGTIDKRIIIEHRSNEASKRLRSIPGIGLLGASAIVATVQDPKAFRSGRDFAAWIGLVPREDSTGGKQKLGPISKQGDRYLRRILVVGAHAVLKLARQKPERYPWLTQLLARRPFKVVAVALANKMARVAWALLAKGGTYYRARAAAV

SEQ ID NO: 211053 - protein, 427 aa, unidentified
MSIQPRCWYAAVDWASEKHDVVVTDYEGQRLGRLQVEHSGEGLARMADWLVATTNGTPDAILIAIEVPHGPVVDTLIERGFSVHSINPKQVDRFRNRFTVAGAKDDSRDCDVMASALRTDGHCFRRLVTRDPTLVELREWSRMHEEHGRDRRRYVSRLREQLIRYFPAFLQLDGELDADWKLELLERAPTPRSATALTKVRVSKILERHRARRWDAGKILAVLQQQAVTTSPGTIEAAAAHVAALLASIRLAKQLEKEAKGNIERITDKLRDPNSNEFGSPCGAGKPTSEQPPLRDAAILLSFPGIGPLNLATLLTEATDGVRDRDYQALRCQGGVAPVTKQSGKSRYVVQRWACNKRLAHALLHWARVAVQHDPASRAKYRALRARGKSWGRALRGVADRLLYVACAALRSSTLYNPELANKKSAC

SEQ ID NO: 211054 - protein, 362 aa, unidentified
MGKIPAVKSRRETVRPLVLKTVGEQGSPPVIPLTRTVARAGPGRARISKDGIMENIFVGIDVSKDRLDVCVRPQGESFVIARDDEAVAGLSVRLGALSPRLIVLEATGGLQVKVAGALAAAGLPVAVVNPRQVRDFARATGQLAKTDRLDAAVIARFAEAVKPDPRPLPDETSSALMALVSRRRELVQLRVAERNRRRQATSRWVQRDLEASIEALTLRIEAIDLEIEDQVKGSPIWRLKEDLLKSVPGVGGIVSRTLIAELPELGHLTRRKIAALVGVAPMARESGAWKGRRQIAGGRPSVRTVLYMAAVTASRCNPVIGALYERLIAAGKAPKVALIAAMRKLLVILNAIARDQKPWTTA

SEQ ID NO: 211055 - protein, 409 aa, unidentified
MLKIVYPNCCGIDVHKTFIVAVIAITDNHGITSYHRKRFSTFTNGLLQLQDWLEYYSCFDVCMESTGKYWIPVFNILENSCNICLAHPKYVKAIRGKKTDKKDAQWIADLFKHDLVASSFIPPLKIRQLRDLFRYRMKLTQLQVSEKNRYQNCLTWSNLQIASVVSDVFGKSAQAIIKSILDKPEDKPNIEQLVHKRMKHKVQELENATEGELTPEQAEKIRVIKAHYDALAICKEDLEQMIRELGREYQEQVKLIQTVPGFKEELSALRIISEIGADMTVFDSAGKLCSWAGLVPANNESAGKKYSTRISKGGRYLKPFLVQIANAVVKSEKYPEFRNKYLKLKKRRGHRKAIIAICRRLLVAIYQVLLKQENYNPVLQGLTEIRNPDKTMSVKDAIRFAQQHGFNVS

SEQ ID NO: 211056 - protein, 420 aa, unidentified
MKVVYQTCCGVDVHKSFLVATIIKTTSGIEPSYQKKRFSTFNNSILQFKDWLLKNHCRDVCMESTGKYWVPVSNLLEDEINVTIANPKWVKAVNGNKDDVKDSKWIGDLFRLGLVPGSYIPCKPIRILREFTRYRYKLTCCRSSEKNRYQNALTVCNVALDSVVSDIFGKSATSVIDYLIEQSGNSVNHEEIASRLLRSLKKKSDSIIESIEGYQMTDSQKYRMRLVRAHLDYITSTINDIDTMLDSLVAPYENAVQLLCTIPGVDRNSAITVISEIGMDMTTFSNSKRLCCWAGLTPGSNKSAGKKKSVRITRAGVYLKPALVQVAHAAVKSNKSPYYKQKYERIMKRRGKKRAIIAIARMIFTAIYQMLSTGEAWNPTDLYKIDMPEPLKEKQKEKAIKQAKKLLIREGILSESQFAS

SEQ ID NO: 211057 - protein, 401 aa, unidentified
MKYGVGIDVSKGKSTVAILSQAGEVIELPFEVEHTIEGMQVLENKLSKLPKEDLKIVMEETGTYHLPILGYLLDNDYFVVGENALKIKKYLDRDLRKAKTDNKDALKLADYACENWYKLTMSKEQDSIYDDLKFLSRQYLNKISIQTTMKVDFVNLCDLMFPSFNSLLNENNYILGLEIFKIYYHPDLVLNKNQSEFITEIDELAKKLGHKSAGKSLAIKIYNLAKNTLSPRPSNEYSQLAATSCVDALILIIKTSSSIITEMDRLARELPEYEIVSKMDGVGIKLTSRIIAEIGDIRKFKNAGSLIATAGIDAPPYQSGQYEAQIRHISKRGNRYLRKTGYEIMKAIKTSCKSGVELYDYIVKKEMEGKPKKVAKIAGLNKFLRQYYGTIKKKYKELKIW

SEQ ID NO: 211058 - protein, 415 aa, unidentified
MTTDYQIAAGLDVHKRFIVATILWTNGSKFQEKFDRTVQGLLALKNWILQNKCQVVACESTSDYWIQIYDSLIDHLPVIVGNAHDIKVLSHKKTDKIDSEIIALLALKGMIEPSRVFSRHHRDFRKLVRLRHFLVKKRTDIKNRIHGILDTELFHLSETLTDIFGVSGRLIMIGILQGDPADKIIKQIPWKVLNKKEPEIRNLLEQSLSQNALIQLGHCLRVMMKLDEEIGLLTKYVIHYAHTNYPRKVEILKSVPGVGDITAVTLIAEIDNFKDFSSSDKLASWLGIVPKVYQSADHQVKRSITKRGSKLGRWILTQAAHAAAKKKKSVLRDFYEAKKPVIGTGKAIIALARKMITIIWHLIVNDETYVDVYAQPKKQVKYHNVRIPVAYTLEEALKLLSDTIKEMKKPDPDPI

SEQ ID NO: 211059 - protein, 313 aa, unidentified
MKTVRVYLGADIAKDQIVLACRDLATLPPTITNDPAGHRLLVKKLVATSVPVQIVCEATGPYHRAFLAALHAAGVAVSVINPRCARDFARAQNRLAKTDAIDAATLADYGRCCQPPLTARPEPSLTELQELVTRRSQLVEDRAREANRTEGVGLRRIQTSLRRHVRYLDGEIEALDQAIAALIEATPVLQARARVLRAVKGVGSVTIAVLLADLPELGSFNKNQVAAMAGLAPFNRDSGAWRGTRSIRGGRDAVRRILFMAALSAARTNPVLKPVYQRLRANGKAHKVALVAVMRKLLIHLNSLLKSSPPCPA

SEQ ID NO: 211060 - protein, 350 aa, unidentified
MLIIGCDYHPGFQQIAYVDTETGELQERRLRHPEEAEKFYRDLWERKLRVRVGMEASGHARWFERLLAELSFELWIGDAAEIKAKRVRKQKTDRQDAQHILKLLLKDDFPKIWVPSWENRDLRQLLWHRHRMVQTRTRIMNQLQAVAINEGVRCKKRLWREAGRKQLESLPLAQWASRRRQDLLEVLDRINPTIAELTQAIEDEAEKCSEARRLMTHPGVGALTAVAFVLIIGEAHRFSCGKQIASYLGLVPAEDSSGERRRLGHISKQGNSLLRFLLVEAAQATARSDCRWRNQFFHLAKRRGRKIAKVAMARRLAVRLYWMWRRGWNYEQLQSFGSHAGQPGNPHGVQ

SEQ ID NO: 211061 - protein, 411 aa, unidentified
MEVAVITAVGIDVSKSKSTVAVRRPGGEIVLRPFEVHHTNSDLKKLASTLKKLGGDIRIVMEHTSTYWRPIALTLKEAGFFVSVVNAMLIHDFSDNTIRKLKTDRADALKIANYALTFWDTLPPLNNEEETRLLLKMQSRANERITATATALRNGLIALADQTFSGVNIAFAPNTKNANGHEKWVDFFLRYWHKDCVCQYSMEAFTESYRGWCKRKNYKFRTDTAHKIYLLAQESVATLPKCESTKMLITQACKSLNAVCEAKQSTQLEMQRLAAMLPEYEVVMRMEGAGPVTGPALMAEIGDVRRFKNKKALVAFAGIDAPPFQSGAFESKSRHVSKRGSPHLRRTIFIISNIILTRSNPENAVYCFMDKKRSEGKHYYVYTVAGSAKFLRVYYARVTEFLRSQPSYDAY

SEQ ID NO: 211062 - protein, 344 aa, unidentified
MWIIGCDYHPSFQQIAFVNQATEEYGMLRLDHKSGEAEQFYRALAGEQVRIGVEATGTLRWLERLLQELGMELWVGDPVKIRAAGARKAKTDKRDAELLLRLLLEKRFPRIWVPSVEQRDARQLILHRHRLVQTRTRAKNQLHALAASEGLHPKRRVWSQAGQSELMRLELPPWTSVRRQDWQELLEELNRRIQPLDKALQQQAQMRPEVQLLVTHPGVGPVVASAFVLTLGTPDRFATSKQVAAYLGLVPLEESSGKGKQRLGHITKQGNSLLRGLLTEAAHIAARYDPQWRRKYLRLAMKKNRSIATVAIARCLAVRLWWMWKLGLDYGHMKESRSHAEPLA

SEQ ID NO: 211063 - protein, 398 aa, unidentified
MTESSDYESVQVFIGVDVGKDTHHAVAINRSGKRLFDKALPNDENKLRSLISDLKQHGQILLVVDQPATIGALPVAVARSEGVLVGYLPGLAMRRIADLHAGEAKTDARDAAIIAEAARTLPHALRTLKLADEQIAELSMLCGFDDDLAAQTTQASNRIRGLLTQIHPALERVLGPRLDHPAVLDLLQRYPSPEKLASLGEKKLAAQLCKLAPRLGKRLAADIAQALAEQTVVVPGTNAAAVVLPRLALQLITLRKQRDEVALAVEQRVLAHPLYPVLTSMPGVGVRTAARLLTEVACRAFASVAHLAAYAGLAPVTRRSGSSIRGEHPSRRGNKALKRALFLSAFAALRDPLSKAYYTRKMSQGKRHNQALIALARRRCDVLFAMMRDGTFYTPQAS

SEQ ID NO: 211064 - protein, 440 aa, unidentified
MRPRTRMGICTLEDYHLPLSGQAIVMETQRNKVCGADIHKKFLVATTLSRDGTKVTKRFGMTLDDLLKFKSWVIENQCEQVAVESTGSYWIPIHAVLEDSVDLMVANAYKIKHTPGRKSDLIDSEWIAELCLNGMIEPSRIFPKEDRELRRLTRAREGYVNDMTREKNRIHHALESCGIKISSVLSDIFGKSGRYLFKCLLDGVELEKMIKGIPVKSIRNKADQIREAVRGSLETTQIILIRGGLEQIASIQRRIDELDREIKNRIASREEDLKIAMSIPGIGFTSAATILAEIGDFKDFAKAEQLASWAGLVPAVYQSADKLVTGSITKHGSKHIRRILVEVAKAISQTNKSKLKRFFRRVQAKKGYNVATVALARKVLCILFHLLMSREMYREDDVIKTKSVVIDTSSLSSKLDFEEMIRVLAKAGYEIRKTNLGTGG

SEQ ID NO: 211065 - protein, 458 aa, unidentified
MGQNRSTDKISRAMPLVHPNAAAIDIGATMHMAAVSADRTPEPVRSFGTFTTDLHRMVDWFTECGVETVVMESTGVYWIPIFELLDAGGFAVFLVNARDAKHVPGRKTDVSDAQWLQRLHSYGLLSASFRPKGQIAELRAYVRQRERLLEYAASHIQHMQKALTEMNLQVHHVVSDITGLTGMRIIRAILAGERNPTVLAGMRDSRCRADAETIEKALGGNYRAEHLFALEQALALYDTYQEKASACEARIEAVLKELSIDRDRCTTPLPSPGRRIPNTANALDFDVRAALFELLGKDVTRINGLGPYLALKLIAECGDDLSAWPSAKYFTSWLCLAPRNKISGGKVLSSRTRRSGNRAASLLRLAAISVGRTDTALGAFYRRLSARIGKAKAVTATARKIAVLFYNAVRYGMEYVDPGASAYETRYRERVIDNLHRRAKAFGFALQPLEPTPDNAVS

SEQ ID NO: 211066 - protein, 326 aa, unidentified
MVIIGIDVSKTKLDCLWIRDLQAMKIKGKVQANTPTGHQALLAWAMKQTGEDVSGLHFVMEATGVYHETLAYALHDAGAQVSVVNPARVRDFARSLGAQTKTDKRDSVAIARYGMTQSPRLWVPEPVEVRQLKALIARCDAIKQDIQRELNRLEKATASDASEEVRASIETVRSQLEAEKARLESLIEDHIDNHPDLKNDQVLLESIPGVGPVISQHMVAIIRSRSFKQAPQCAAFLGLIPVERQSGTSVYSPPRLSKHGDGRVRAKLYMAAVVATRYNPDIRRQYQRLLKNGKSKMSAIGAAMRKLVHICFGVLKHQTPYRPQPA

SEQ ID NO: 211067 - protein, 400 aa, unidentified
MLSIGIDVSKGKSTVCGMKPGGEIVYTPFEIQHTREGMSELVSLLRGSGEEVRVVLESTGSYHCPVVAALLENGIFVSVVNSLRMKRFCSQSIRRVKTDQIDAMQIALYGLAYWQELQPTRLPENTYRELQLLARQYYQMTSMLIKAKVDFNALCDQVLPGMQELMNDHAGRHKLSDFVLRYRHTTHILEMGETRFRKDYCKWAEKKGYRNRERMAALIFATAQNGIPVLPDAPSTQIVITEAIRVLHTVEASRDAILTQMQALAKTLPEYSLVREMPCIGDTLAPRLIAEIGDVRRFHSKRALIAYAGIDAPPYQSGKFCANNRHISKRGNRYLRKTGYEVMQSYVMHKPANDPIFTFIEKKRSEGKSGKLAMVAGLNKFLRVYYGKVTELYRSLPAIE

SEQ ID NO: 211068 - protein, 452 aa, unidentified
MAKRSHRRCDQLPLLHPDAAGIDVGASELFVAVGADRDPQPVRRFPTFTRDLHVLADWLQQCGVRSVAMESTSVYWIPIYQILEARGLEVCLVNAQHVKNVPGRKTDVSDCQWLQYLHSVGLLRASFRPPGAICAVRALWRHRGSLVQMAAEHIMHIQKALDQMNLQVHRVLTEITGLSGLRILDAILAGERDPLTLARLCHKRVKSSESTVAKSLEGDYRPEHIFALRQSLAAYRYYQQLVLETDQEIQRQMVELEAADNALAKMPKRTKHLPYQRQGHEPRVFDLRSELYRIFGVDLTNVPGISAMTSQTILCEVGTDVSRFRNASAFASWLGLCPEKKISGGKVLFTKSRRVRSRVAIALRLAARSLHHAKDYMGEFFRRICRKLGKPQAITATAHKLARIVYHLLSTREAYNESVFHKCEEEALKRAEMRLRRHAAHLGFRIIPAEEG

SEQ ID NO: 211069 - protein, 387 aa, unidentified
MPASGPRPDQVAVQTSLAAIFVSLELSRSSWLITSLVPGGADKMSKHTVRSGDVAELMVHLAKLRDKAHARAGASFPIIAIQEAGLDGFWVHRVLERAGIESFVVDAASILTSRRRRRAKTDRIDGEALLRTLLAHKRGEPRVCAMVRAPSPEEEDRRRLCRERRTLVAERVAHVNRIKGLLFAQGICDYEPLRSDRRQRLEALRTCDGRPLPPYLKAQIGRELDRLELLLEQLKTVEAERNALLEPANDVAPVAVKALAALRGIGPELTAMLWSECLFRSFRNRRQIAAYAGLAPTPWQSGSVQHEQGVSKSGNPRLRSTMIQLAWLWLRHQPTSELSLWFRERVKRDGGRGKKTAIVALARKLLVALWKFSSSGVVIEGATMKAA

SEQ ID NO: 211070 - protein, 492 aa, unidentified
MSRHQRPPAQAKSPTSKAPPKSRPRPPRAQPPTMPLLNPNAAGIDVHSDMHMVCVPPDCMPPAAAATVGSPANVRRFGANSCDLVAIADWLAECGVTTVAMESTGVYWIPLFELLESRGFEVWLVEPGQLSHCGARPKTDVLDVQWIQRLHSYGLLRPSFRPPDSLLALRGYYRQRQMQVRYAASHTQHMQKALEQMNVKLTEVVSDITGLTGRRIIAAILKGQRDPAQLAALRDPQCKNDAATIAKALEGTWRPEHLFALRQAYDLYQFHHQQIAQCDQMIHAELARLPSRAGDKPFTPKPRRCGRKPNDLSFDACGPLFKALGVDLTQIEGIDVGTALVILAEIGVDVSRFPTEKHFASWLGVCPRQHESNKTKQKRGPRKGKNRVAIALRMAAQALGRTQSPLGLFYRRIKSRIGGKGAVTATAHKLACLVYRMLKYGTEYVKQSMEGYEQKLRGQLERALRRKAAALGYELVAKTPPMTEASAAPVPT

SEQ ID NO: 211071 - protein, 453 aa, unidentified
MSRKRKNNKNKVSAPTLYCLNPNAAGVDVGATEIYIAVPVDRDPQPVRHFSTFTGDLHAAATWLKSCQIETVAMESTGVYWIPFFQILETQGFTVLLVNARHVKNVPGRKSDVSDCQWLQYLHSVGLLRGSFRPEQAVCAVRSILRHRDSLVQMASSQVQHMQKALDQMNLQLHHVISDITGVTGMTIIKAILAGERNPHTLAALRDGRVKATADTIAKSLVGDYRREHLFTLDQSLTAFRHYQELIEACDSEIAQLLEAFESKADPPEGSLPESPDGQKPSGGEPRFDLQSHLYRIFGVDLTRIPGINVLTTQTLLAEIGPDLSRFANAPAFTSWLGLCPDNRVSGGKVLSVKTRKVKNRAATALRMAAQSLHRSQSYLGHFYRRMRAKLGAPKAITATAHKLARIIYHMVTTRQAYDETICVKNELKNRQRLEARVRKQARELGFQLVAAS

SEQ ID NO: 211072 - protein, 343 aa, unidentified
MKLSRVGVDLAKNVYQLHGVDRCGKTVWKRRLRRGQWLQVLTDKVEPGCEIGMEACTGAHHWARELQARGYTVRLIAPQFVKPFVKSNKNDANDAEAICEAMSRPHMRFVTVKTVEQQDIQATHRVREEIKAHRNAKANQIRGLVAEYGLVAPKTLLALRRAIPEWLEDAENGLTDSFRSLLHGLWIDLLAFEERLKGLDREIEKLARSNEVTKRLQQLRGVGPLVATALVAAVGDGRQYAKGRQMASAVGLTPRQSSSGDKYRLFGISKRGDAYLRTQMIHGARAVVSQARHRDDPLSRWVTGIARRRHPNVAAVALANKTARMAWAMMRNDTDYNPGLATS

SEQ ID NO: 211073 - protein, 388 aa, unidentified
MHIVTDRPHAPTAIRTDLGAIFISLELSRSTWLITSLSPGGGEKMSKHTVRSGDVAGLWARFSQLKDKVQVRTGQTVPIIVIQEAGLDGFWIHRLLQDKRVESYVVDPASIATSRRRRRAKTDKIDGEALVRALLAYKRGEPRVCAMVRAPTPQEEDRRRICRERKTLTAERVEHVNRIKGLLFAQGITDYEPLSRKRRERLEELRTGDGRPLPEHLKAQIGRELDRLELTLQQIKSVETERDAMLSPSDEGTRAPGAMLQNLKGIGAEFAGVLWSEGLFRSFSNRRQVAAYAGLAPTPWRSGSVAHEQGVSKAGNPRLRTTMIQLAWLWVRHQPRSILTLWFHQRVALNGGRARKVLIVALARKLLIAFWKYVTTGVVLEGAETTAS

SEQ ID NO: 211074 - protein, 343 aa, unidentified
MKDTIYNHYIAIDWSIENMAIARMTKKSNKITAIDVPSDIADLQAYLKNLKGRKMLAIEETTTSQWLYTELKDYVDRILICDPNRNKLLNEGPKTDKIDATKLVQLLKAGLMKEVYHSTDKFLYLRRFVSGYEDLVKAGVRLKNQRYSLLRACGKRGFERAGTKLDSKDDQFVLDCIDRQIGAHKQEKEGYEKEFERLTKDYPEIRHQKSLPGIGPIHAVKIVARVVTPYRFADKGHYLSYTGLIKLEKISGGRSYGRKNSRYCRQLKSVYKTSTWAAIGGNNPINDYYEYLIQEKRYPEHNARHKACRKLAILSLGVFKSGKKYQPYRRDHVKGYQELKSGL

SEQ ID NO: 211075 - protein, 461 aa, unidentified
MPQPTSSSPVEPLAGVHPNAAGLDIGAREIWACVPQDRAPEPVRMFGTFTPDLNALVTWLIACGVATVAMESTGVYWIPVFEMLEARGLQVFLVNARHIKNVPGRKSDYLDCQWIQKLHALGLLTASFRPDAEMCALRAYLRHRAQLLQHRAPHILQMQRALHQMNLQLTQVLTDVTGVTGLAILRAMVAGERDPLTLARLRNPACKSSEEKIVKALTGNWQPEHLFVLKQSLELYDFYTTQVAACDVELERYFTALKPRYEPAAEDLDGPALPRAKPGSKSKNRPAFDARAHLVRLLHIDLVAVEGVSASLAQTLLSEIGTDMAKWPTVKHFASWLGLAPHNDISGGRVLRSRTLKTDNRAGQAFRQAAASVTRSDSAFGAYYRRKKAQIGPQQALVATAHKIARTVYHMLKHRMSYHETGARVYEQQHRERELTHLQRKAAKLGFTLTAHEPVLAPAAT

SEQ ID NO: 211076 - protein, 338 aa, unidentified
MQTYAGIDLHSSNNFIGVINDKDKILYGKRHANRLDDVLRALDPFKDSLKGVVVESTFNWYWLVDGLQEHGYRLHLANPSAIQQYEGLKHTDDPWDSFWLAHMYRLGILPEGYIYPKEHRAVRDLLRRRLLFVRHSTAHILSLQSMISRNLGFKMSNNEIKKLKPADIESLFDCSNLVFMANNSLAAIEFLQKITKGIEKKVKSQVKMRKEFEMLLTIPGIGNILGLTINLEVGDIGRFPKVGDYSSYCRCVESKRLSNGKKKGENNKKNGNKYLAWAYVEAAQFARRYCVKAQSFYQSKEAKTKPVVAIKALSNKLSKASYYIMRDQVAFDEEKLFG

SEQ ID NO: 211077 - protein, 364 aa, unidentified
MSMLTEPPVKSRLAELVDVVIGVDTHTDTHTAAAVTAATGALLETVTVPTDANGYAELVEFADTHTGLRAWAIEGTGGYGAGLARHLADHDELVVELDRPGRLVRRGGRKSDPLDAARAAREALSRTRLAQPKTGANRAALQMLLTVRRGAVEASTDAQRQLRALVVTAPEQVRDRFRGQSIVVMVSTAAKLRPHTAADDVHVFTAMTALRSLARRVRDLEAEAGAHEKAIRVIVGSWRPDLLPLPGVGPITAATVLAAWSHPGRCRDDGAFAMLAGTAPIPASSGKTVRYRLNRSGDRQLNRAVHTIAVSRLRYDPDTRAYTQRRRAQGKTDPEIRRCLKRYITRQLYRQLEHPPTPQGLDEP

SEQ ID NO: 211078 - protein, 355 aa, unidentified
MSQEKYIGMDVHQATISVAVMDVHGKQLMECLLETKADTILEFIQGLRGTLALTFEEGTSATWLHDLLKPHVSRLVVCDPRKNALLKDGNKNDRVDARKLAELLRTNQVKPVYHEKHGTRALKEVGRSYLTVTKDVTRVMNRIKSVYRSWAIPCAGTSVYTRCHRAEWLAKLVEPGVRTRAERLYQQLDSLQPLRQAARRELLLESRKHAAVKLLRQIPSIGPIRSALLVALLQTPHRFRTKRQLWAYSGFAVEVHDSGEYRWVRGKLHRNRERITVRGLNDNHNKDVKNLFKGAAISASTRPGPLHDFYVARVESGMRPTMARLTLARKIAAITLTMWKKGVSFDPKQLQRQAA

SEQ ID NO: 211079 - protein, 417 aa, unidentified
MTHILFVGIDVSSKHNVVCCLPQGDTAKSLSRFTVTNDEPGVLTLRERIIALMQKHHLTHIRFGLEATGCYSSHLARYLENVLSFEPFAHSVYVFNPSLIKVFKKTHFLDAPKNDRVDAWFIAAKLRAGHLPHAFTWSETIAALQRLCRTRFHITQNLTRETNFLLTNLFLKFSSYAVGPFNKKTSSATSLAVMEHFSSVEQIVDMPVEDLVSFVAKCGKNRFENPQEVASALQKAARSSYRLPKAMADAVNLAMASNIRIIRSLQEQAKSLQKAIEEHLATIPQTLTSVPGIGPIFAAGLISEIGDIGRFPNQMALAKYAGLAWTESQSGDFKGVESRLIKSGNRYLKYYLTEAAKSVQVHDTVFAQYYSQKKAEPAKYAEKRALALTARKLVRLVDYLLRTHRLYEPREVIRQHG

SEQ ID NO: 211080 - protein, 305 aa, unidentified
MNETLYLGVDVAKSHLDFDAPVGRIANTPAAIAAVLRQLPAGTHLVCESTGGYEAGLLAGSLTAAQPISVVPPQRVRHHAHSMGRLAKTDRIDAALLSDYGRKHRPAAQRALEPERQHLRQLLRARTQLLELQQLETNWQEHASELPGLRRQAAQRTKLLARQLAQLEQQIRTLVATSAALAPVQRLQQVQGVGEITAWTAWAEMPELGRLEAGQPAALTGLAPHPYDSGQKRGHRQVQQGRPQLRRVLYMAAVSASRHNPVLMPLYQRLLARGKPPKLALVAVARRLIELLNTLIKNPNFVLVH

SEQ ID NO: 211081 - protein, 391 aa, unidentified
MFYIGIDIAKKNHEASIIDSSGKSLSKSISFPNSTKGIEKFNNFIAEFGVTTNNCIIGMEATGHYWISLFSYIVDLGFTCYVINPIQSDAFRKMYVRQTKNDSVDSFIIAQIMRFGEFSISNFSDENTFALRNLTRYRFALVDECSDWKRKLVAILDQVFPEYSSLFSNIYGVSSKELLSKYPLPEDMLSIPAEELGNLLYECSKGRLGINKAEEIQSRARETFGIKFAKRSFSFQIKQIISQISFLEEQLKEIEIEISCLLEDICPIITTITGIGSVLGASIVSEIGNISRFERANQLVAYAGLDTRIKQSGDFSATNTKLSKRGSPYLRRSIWLAATVAAFKDPALSIYYQGLRARGKAHGTAIGAVARKLTNIIFAVLRDQKPYTPNI

SEQ ID NO: 211082 - protein, 351 aa, unidentified
MSQNLNSAVAVIGIDIGKNSFHIVGLDYRGAIVLRQKWSRGQVEARLANTPPCLIGMEACVGAHHLSRKLKALGHDARLMPAKYVRPYSKGQKNDFRDAEAIAEAVQRPTMKFVATKTAEQLDLQALHRVRERLVSQRTGIINQIRAFLLERGVPVRQGLRFLRAELPRILAAPPDVLSARMVRVISDLAEDWRRLDERIDHLSTEISVLARQDAGCERLMSVPGVGPIISSAVVAAIGTGDAFAKGRDFAAWLGLVPKQISTGDRTILGKISKRGNRYLRVLFVQAAWVVLIKPQSWERHGLKRWIEAAKKRLHRNVLAVALANKLARIAWSVLARGRTFEARSAMAPAA

SEQ ID NO: 211083 - protein, 420 aa, unidentified
MAYKVAGIDVHKEVLRVVVCEVEVPETEPERRRFGTTTSELRRLSAWLRQQGVQQAVMESTAQYWRPIWYELEPYMHLSLAQAFSNRAPRGRKHDFRDAERLIRRLVAGELILSFVPEAEQRAWRTMTRMKVQLTRDKSRLQSQLECLLEEMRIKLSSVISDLLGASGCRILRALAQGEADPKNLAALGSDRLQCTEEQLMDALSGNPQPFHRQLLALYLERQQIIVEQMEKLDRMIAEAMKRYQEAVVRLAAVPGFGADSAQQVIAEVGPEASMFPSAANLTSWVGTCPGEEVSAEQNQSSRSAKGNKYMRRILNQAAHAAVKKRGSHFQAVFRRLLPRLGYKGAIWAIAHRLCRLLWKILHDGVVYIERGTEPNPRAQRQRVRTLVRALRKLGYEVDLKLITPRIPASPSPMEIPSTG

SEQ ID NO: 211084 - protein, 332 aa, unidentified
MASIPVHVGLDYHEAVIQVCVGSAQGQLLGNRRCDNSVQAVAAYAAQFGEVCSVTLEACSGAADFADALITHTGWKVQLSHPGYGARMKLNPDKSDYSDARMQYELGRTGLVPRVWLAPREVRELRLLVRHRQQLVKERRAGKLRIGAVLREQRCLDAPARRWTRPWLEWLRDEAALSEQGRWVVERHLAGLQRLGEEIGQVEARLAKVTAEDPQVRRLLEEPGIGPVTAWMLRAEIGRFDRFHNGKQLARFCGLSPRNASSGKRQADAGLIRAANGELRACLIEAGHRLARTHPRWNVLAVSLRARGKPGSVVAAAIANRWVRSLHHRLAD

SEQ ID NO: 211085 - protein, 463 aa, unidentified
MEGKARRNHRPRKGPSLLERVNPNAAGIDCGSAEHYVAVPQDRDGEPVRRFKTFTADLHRLADWLVGCRIETVAMESTSVYWIPIYEILVARGIKVVLVNARHLKNAPGRKSDVTDCEWLRDLHSVGLLRGSFRPEEGIVTLRSYLRHREALVQSAATMVTRMQKALVQMNLQLPVVIKDIIGLTGLRIIRDIVKGEIDPAHLAKHRDPHCRASEAEIRAALTGHYRPEHLFALNQNLELFDALQRQVEACDVQIEACLAEQAAKMTSASPPLPAPRHRRNRRSNEPQFDVRTILYRLVNTDLSQLDGIGPHAALRLISEIGTDMSHWRTERHFTSWLTLAPNNRVSGGRLLSSKTQPSGNRAAAIFRMAAMSLARTQTALGAFYRRLACRIGKAKAITATARKLAILVYRCLKGEIVYKDPGAAAYDLRHRDSVVRRLRQRAAALGFNLVSGETGEILDGVS

SEQ ID NO: 211086 - protein, 411 aa, unidentified
MQEVVERCAGLDVHRSSVVACVRVPGPDGRPETHLATFGATTPDLLALRDWLVSLGVSEVAMEATGVYWKPVYYVLEDAFARLLVVNARHVKQVPGRKTDQSDAEWLCQLLAHGLLRGGFVPPPPIRELRDLTRRRKILIQERQREANRLHKVLEDAGIKLGAVASDVLGASGKAMLGALVEGTRDPEALAHLAKGRLRAKLPELERALTGRFRDHHAFMVSDILAHLDYLEERIAAFSARVEERLAPFGPAVERWTSIPGVGPRTAEVLVAELGANLPATFPTAAHLASWAGLAPATYESAGKRRPAGSTHGNRWVRGALYEAAMAATRRPETDLGRRYRRIQARRGHKRAIVAVSHAILTTGWQLERDGAPYAEPSPEQMLERERARLRRRALRQLFALGYEVELRSAA

SEQ ID NO: 211087 - protein, 357 aa, unidentified
MSTIAPRSKSVTVGVDTHSEFHVAAVITEVGRMLGSAAFPTTPAGNAELIRWAATHGTIGDVGVEGTGSYGAQLTRDLQRAGYRVTEVDRPDRSARRRLGKDDHIDAEAAARAVLSGRASTTPKSRDGQIEAIRALRVARRNAITGRTATINQLKALLVTAPAGLREQLRPLTSAALVRTASRLRPTDELADPTNATKYAMRELALRHQFLTDQMKRLDAALTGLVAHAAPALVARFAVGTDTAGALLVAVGDNPGRLHNESSFAHLCGVAPLPASSGKTTGRYRLNRGGNRSANNALWRIVLIRMGSDQRTKDYVTRRTTEGLSKPEIMRCLKRYVAREVYAALAHTCPRPTVDGQ

SEQ ID NO: 211088 - protein, 359 aa, unidentified
MIKANQLDFSGTNIYCGIDVHLKNWQINIRDENMELRNFSHNPDPAALAHFLKKNYPGAIYKVGYEAGFCGFGIHRQLSALDITCVVLNAADIPKGNKDKRQKNDKRDARNISEEIKKKDVHGIYVPPLDWEYGRTLVRTRHQQINDSTRMKARIWHFLYFHSLAVPQKEDTGKYWSRRFIQKLENHSCNNNIQLRTTLQIMLSDYLQKRKLLLLTTRAIRALCRQDVYKKDMQLIISIAGIGEVNAAIILFELQNINRFQTFDHLCSYVGLIPDTGDSGDVKKDFGLTHRHNSRLRKALIESSWMVIRKDPALLMLFKKYCRTMHKNKAIIRVAKHLLARIRYVLKEQKPYVEGVVAG

SEQ ID NO: 211089 - protein, 339 aa, unidentified
MREFIRIGVDVSKGFFQVDAIEGEGSSAVRRKLSRAKFLSFFAGIAPSRIGIEACGSAHHWARELRALGHEVVLMAPAYVKPYLKRGKTDANDAAAICEAMSRPDMRFVPVKSADQQAVLMLHKTRALMIKQRTMAVNALRGHLSEFGLIAARGIHRIKDLLALAETDERLPEAAREATAMLAAEIQGLDGRIDGLEAKIAAASSPMIRHLDEIPAFGPLIASAMVAFNPDPRAFRSGSDFSASLGLTPSQHSSGGKEKLGHITKAGNRYLRTMLVVGCTSVLRVAHKYKGALAEWIVAMRARKPERVVAVALANKLARIAWAMMATGEAFRKELYFKA

SEQ ID NO: 211090 - protein, 413 aa, unidentified
MKRILERCAGLDVHKKQLTACRLVPGPQNTTVSEVRTFGTMTKELLALVDWLKQGGCTHVAMESTGVFWKPVFNLLEGEFEVLLVNPREVKQVPGRKTDAGDAEWLAELLQCGLLKGSFIPPAPQRQVRDLTRYRTTLVQERARILNRLQKVLEDANIKLASVVSDIDGVSARTMLQTILAGETDVKFLAGLAKGRLREKRAELEQALTGLMKEHHRFLIAEHLSHMDYLEEAIARVSAEIEERLRPFQLEAEQLDSSPGINLRIAEIILAEIGPNPFPAFEDADHLASWVGLCPGNQQSAGKRLSGKTRKGCAALRSAFVEAAHGAARTKDTYLSAQYHSLVRRIGKKKALIAVAHSILIAVYHILTRKEPYRELGPRYLDDLRRPQRIRRHVRCLEQFGFEVVLKPIPAAA

SEQ ID NO: 211091 - protein, 345 aa, unidentified
MKITTVGIDLAKNLFQVHAVDERGRAVLRKQLRRDQMARFFANLPPCLIGMEACASAHHWARTLQKFGHTVRLMAPQFVKPYVKTNKNDVADAEAICEAVSRPNMRFVPIKSVEQQAVLSLHRVRQGFVRARTAQGNQIRGLLGEAGLIIPKGIVNVAKRVPALLEDAGDEVPASFRRLIQRLTEHLKELDRQVDELEAQIKAWHRGSELSCKLEKIPGIGPLGASALVASIADATSFDNGRQLSAWLGLVPRQDSSGGKPKLLGISKRGDVYLRTLLIHGARSAILAAQRKAVNTNVWLASLLNRRHPNIAAVALANKNARTVWALLAHGREFRADYAPEVSAA

SEQ ID NO: 211092 - protein, 407 aa, unidentified
MEVLFPRCAGLDVHKDTVVAAVRCVSAPLAHEVRTFGTTTGELLTLAGWLESHGCTHVAMEATGIYWKPLWHVLEGRFELVLANATHIRNVPGRKTDVNDATWIADLLAHGLIRNSFVPPAPIQELRDLTRTRKQLVREISQHSLRIQKVLEDANIKMASVLSDVLSLSGRAMLAALIDGVTDPEHLADLAKGTARNKRPELIEALRGHVTPHHRTMLKLHLDVIEALRTALSEVDATVGKTLGPVSEAVGLLKTIPGVSDVVAHVVVAEIGVDMSRFPTAGHLLSWAGLCPRNDESAGKRRSTRVRKSGTWLKTTLVTSAWSAVRKKDSYLRAQFLRLKARRGPKKAILAVAASMLTSAYFMIRDHTAFRDLGPRHFDARDKTKAINRLVRRLQDLGCQLELKHVA

SEQ ID NO: 211093 - protein, 389 aa, unidentified
MDSSGNSISKFSVPNNQPGAKTLVSKIVSAMTSNRFDSLVIGLEATSVYGEPLVLFLKQDADISPFRPRIHVLNPKQVNAFKKAFLDLPKTDDVDAWIIAENLRFGRINQEVYMDDRILALRKLTRARYYTARNLTREKNYFLNTLFLKFSSLAQEKIFADRFGATSLAIVEEFLSVDEIAYMPIEELSAFVNEKGKGKFGTPEDIAKLIQKAARSSYRLPKTVNDSVSQILAISLVSIRTLKDQLKLFDKAIEEQMKVIPNTLTSVKGIGPVYAAGIIAEIGDIHRFKNQAALAKFAGICWSKYQSGKYTADNTHLISSGNRYLRYYLMEAANKVRMHDPEFKRFYELKYRETPKTPHKRALALTARKLVRLVYALLHDNRLYIPPKE

SEQ ID NO: 211094 - protein, 342 aa, unidentified
MEQIIRIGMDTSKHIFQLHGVDAAEQPVLRKRLRRREVRAFFAELGPTVVGMEACGASHYWARELKQLGHEVKLIAPQLVKPYVTRNKNDGRDAEAICEAMGRPRMRFVPVKTAEQQAALMLAGIRERLIARRTQLSNAIRGYAAEFGITTAKGLDKIEPLLKQIAQDESAPTLARELFAMQGREYAQLQVEVKAIEAKLMAWHRANADSRRLARIEGLGPIGATALVMKTPDPHAFPSGRHFAAWIGLTPKDHSTAGKTRPGKITRAGDEMLRSVLVAGATSMVKQAKYGRGSPWLIALLKRKPAKLAAVALANKIARIAWKLMVTGEVYDSARRPGALAV

SEQ ID NO: 211095 - protein, 360 aa, unidentified
MKTEQRKGLNFKKQNLYIGIDVHLKSWSVTVLSEQLVLKKFTQPPSALALYKFLTHHYPGASYHSVYEAGYSGFWIHEELLQLGINNIVVNPSDVPQMVKEKLHKTDAVDSAKLARALRSGELKGIYIPDRQALENRSLIRLRSSIVKDLTRNKNRIKAMLRFYGIVFPEQFERPNTHWSKRFMLWLKDIELQTESGRQALFFIIKEAENQRNLLMETTKAIRNLSRTAAFSKHMKLITSVPGIGATIGMSLLVEIDNITRFKNADQLVAYIGFMPMCHSSGERDYKGDITLRKHNTLRSQLVESAWKAVRSDPAMTVAYENYHKRMPACKAIIKIARKIVTRIFFVLKREQEYVSGVVK

SEQ ID NO: 211096 - protein, 316 aa, unidentified
MITVSVFVGIDVSKDRLDVALRPSGDRWAVANEEPGIATLVERVRGLSPTLIVLEATGGLEAPLTGALAAAGLPVVVVNPRQVRDFAKATGTLAKTDALDARILAQFAEVIRPALRPLPDAATQALSALLARRRQLIGMRTAEQNRLGPAPPPVRKGIRAHIAWLARQLARTDDDLAQAIRESPVWREKDDLLQSTPGVGPVLATTLMASLPELGTLSRQQVAALVGVAPLNRDSGTLRGRRRVWGGRAQVRTALYMAALTATRYNPVIRAFYARLCAAGKAKKVALTACMRKLLTILNSMLKHRTRWQEHVASTP

SEQ ID NO: 211097 - protein, 320 aa, unidentified
MAILGIDISKATFHAHLIAERGEAKKAFPNSTTGFGQLDSWLRNRGVGKLHACMEATGSYWEALALHLHEHGHGVSVVNPGRTKAYAQSEQLRSKTDAVDAALIARFCQSQKLQAWEPPAPEIRMLQALSRHLEYLKSTRAEYLTRAQTPMQSGLVERSMKVLIMGIDREIAEVEQAIRDHFDQHPGLKRRRDLLTSIPGIGETTATTILSEFVGIEGFKNAKQVGAWAGLSPAIRQSGTSLRGKGRICKAGNARLRKGLYFPALTAKRCNPLLMPFAERLSAAGKHPMVILCALMRKLLVLAYGVLKSGRPFDAAIAGA

SEQ ID NO: 211098 - protein, 370 aa, unidentified
MLDTTTFIGLDVHARSIKAVSLDVMTGEVRAATFGYDAGAVAEWVRSVDPRARCVYESGVTGFDLQKRLSGLGVDCAVGAVSKMIKPSADRRRKNDRNDAEFLARMLSVGNVVEVWVPDDECEAARDLTRALEDARDDLSRSKQRLSKFLLRHGLAFDERTPTGRRKGNWTRAHWSWIESIRFAERADNDVLAYYVDAVRRAAEEKARLEGLVEAEARKPRWRKRVDSLRCLKGVDTASAADLVFEAGEFSRFRNARSFAAWVGLTPSEHSSGESDRRGAITKAGNKHLRKTLVEAAWHYLTCSGRPKGLAKGQAPDRGARRHAAKGVRRLVERREALLARGVHGNKANVATARELACWVWAVGLMAEEA

SEQ ID NO: 211099 - protein, 320 aa, unidentified
MNQELSFIGIDVAKARLDVAIRPTGRQWQADHTEKGIEELVEQITELNPTLVLLEASGGLEVTVVAALAIANLPVVVVNPRQVRDFARATGKLAKTDALDAHVLAHFAEAIRPAYRSIPDSETQSLNALVARRNQVMSMMVAEKNRLRTARPTVRQRVQLHIDWLEQELDEIDRELKEMLHNSPVWREKENLLRTVPGVGPQLAVSILAYLPELGTLNKKRIAALVGVAPFNRDSGTLRGKRAVWGGRSRIRAALYMAALVASRHNPVISVFYQRLLAAGKAKKVALTACMRKLIIILNAMLKNHSSWQSLNPRLPDPCP

SEQ ID NO: 211100 - protein, 475 aa, unidentified
MIFVGVDWAEAHHDVHVQDQDGARLGGGRLPDGVEGIARFHELAAAHADDPDQVVIGIETDRGLFVAALVAAGYQVFAVNPLSTSRYRDRHGTSGAKSDPGDAKVLADMVRTDRHNHRPVAGDSDLAGAVKVLARAHQSMIWNRRRQANQLRSVLREFYPAALAAFGDLTSGDAVEVLRVAPAPAAGQGLSRPKIAAALRRGGQQRLIEHRAGEIQAALRSPQLRAAPATEAAMGASVAASAAVIAEMSTQISALAQALEADFEQHPDAVMVRSLPGLGIILGARVLGEFGAEPDRYLTAKSRKNYAGTSPVTRASGTRRVVLARHTRNDRLADALYLWAFAALTASPGARAYYDQHRAAGDTHHQALRALGNRLVGILHGCLAHHTTYDETTAWGHRNRVERLTARRSHRYDRPPGRRLGRLGLRPNGLISGRGAAPCIDLAARAAIRIAKLSRALPYATPGKLPGNPRLKPSS

SEQ ID NO: 211101 - protein, 420 aa, unidentified
MSNSISLQIGIDWADLKHDYCLCAFDAKRGQSMGEKESGIVSASPKELHKWVIQLRKRFPEGTIEVCVELTRGALINALREYDFIRIFPLNPISSNRFRECLYPSLTKDDVKDASLLLTILQKHREHLRVLNEQPESNRLLEGLVQARRKSVNQRTALVQQLTSNLKEYYPQALGMVGDLNECMSRRFLKKWPSWDELSRVRAQTLRKFYYANQSRSEARIEARLNLHRDSDSLSDDETTVELGRMQTLMIVQQLDTLDKIIREYDQKIDPLYREHEKHRIIDSLPGAGKKMGPRLICAMQDNLPACSNASELSSYSGVAPLRQKSGNSSRISKRFRRPKFLHQTFIEWAQCSIKYSKWAKVFYHHRKHTLGHDHWAIVRALAFKWIRILYKCWESNLPYDEEKYLQTLKKRGSKLAEMM

SEQ ID NO: 211102 - protein, 343 aa, unidentified
MGEVSTIGLDVAKSVFQVHGVDDTGAVVMRKRVSRPKVLEFFGGLSPCLVGIEACPSAHYWSRELQALGHTVKLMPPNYVKAYLKRGKNDANDAAAICEAVTRPSMRFVPIKTQEQQTGLMLHRTRQLLVRQRTMLSNAIRGHMAELGIISAKGRNGTAELLQIIGDVADDRIPPVARFCLDLLARHYLTLNTEISSIDKRVHAWHRSCEESRRLEEIPGVGPIVATALVAEIGDWGAFRSGRSLAAWIGLVPKQHSTGGKERLGSITKQGNRYLRWLLVVGAMAVIRYARQHGTKRLWLARLMERRPPKVAAVALANKIARMAWAMMVRDERFTEAKLLSAV

SEQ ID NO: 211103 - protein, 428 aa, unidentified
MDFEVKRLICAGLDVHKRSVAAAVCTTDPTTLEATYKAKVFSTSNSDIAALREWLLAQKCYDVCMESTGKYWIPIFNILESQMHVILTHPKYVRAIKGKKTDKRDAKWIANLFRFDIVKSSFIPPADIRALRELSRYRLKLSYMRTAEKNRYQNSMTISRIRIDCVLTDPFGKTATNIMDYLLSDKPFDESECAKLIDRRVKASTESVLDSIRGFEILSEQKFKMTHAKKHMDFINSTIHDLEVELFRLSRPYDELIKRISKIVGFTELSALFVLSEIGTDMSVFESDKHLCSWAGLIPANNESANKKKSTRCSKAGQYLKPLLVQCALAAAKSKKDPYFAIKYNRLAKKRGKKKAIIAIARMMLTSIYHMVQDNEEFHPDDYETIIHPSKPTKVILTIDNVMQFLGEQGADPETLKLLQQQCAVKTG

SEQ ID NO: 211104 - protein, 345 aa, unidentified
MEYFAAIDVSLELSSVCVVDETGKIICEKKVASEPEALVAWFNDTGLEFTRIGLEAGPLSQWLHAGLTAAGLSAILIETRHVKAALKAMTVKTDRNDARGMAQLMRMGWFRPVHVKTVPAQEIRALLTGRKLLLGKLRDVELGIRGLLRGFGLKVGRVSKGRYEARIHELTAGHPMLEPVAAAMLQARVSLRAEYGKLHRMLLGIVRADATCRRLMTVPGVGPLVAVSYKTAVDDPARFRKSKELGPYFGLTPSKYQSGEVDWTGRISKVGDAMVRTALFEAANVMLSRVTRFSTLKAWALRVAKLRGVKRAKVALARKLAVVLHRMWVDGTDFRWRKMPAAVAA

SEQ ID NO: 211105 - protein, 338 aa, unidentified
MIVIGVDVHKYSLTAVAVDEAGRTLDEQTVAAASGELLAWASGLSEERLWALEDCRQLTRWLERQLLEAGEQLVRVPPKLMAPERRAGRARGKSDPIDALAVARAALREPGLSRPRPDEQPFRDLKLLVDHRDDLVDERRRAQQRLRWHLHQLDPSFVVPARRLDRPMHLERVARWLARREQDVQVRVARELVVRCRSLTRTIVELERELEQRTAEIAPALLELPGCAALTAAKLLAEVGPINRFQTDAQLARHCGVAPLEASSGRVQRHRLDRGGNRQLNAAFYRIAITQARVHPAARTYLERKQTDGKSRREAIRCLKRQLARVVFNTLKESPALT

SEQ ID NO: 211106 - protein, 356 aa, unidentified
MPAQLKADEYTYFIGTDISKNKLDHAVYKGRTLLFHQVIKNDVAEITAFMEKVKKIRNFAMYRAVFVMENTGFYGNHYMEVLSEMKANIVVEDAGHIKNSLGLIRGKNDKIDAMRIAEFAYKCREDLRLWIPKRQIMLELANLATLRSRLLNVREAIAEPLKEQQQFIKSGIAGTANQLCQRSIDSIKADIADVDKVISRLIADDKRLSRIFAQMVSVPCIGPVTAVQILISTNEFRDIRCPKKFACYAGIAPFEKQSGTMTSRARVSHMANKKMKSLLHICAVSALRVKWEIADYYIRKTKDEGKHKMLVLNAVRNKLILRVFACVIQDRFYQENFVRGGVPEFFEIPSEVIRIE

SEQ ID NO: 211107 - protein, 407 aa, unidentified
MEVLYPRCAGLDVHAGSVTACARIATDAQITYDHHTVPTTTRGLLALAEWLTTHGCTHVAMEATGVYWKPVWHVLDAQFTLVLANAMHIRNVPGRKSDMNDATWIADLLAHGLIRSSFVPPAPIQELRDLTRTRRQLVHEVARHVLRIQKTLEDANLKLTQVMSDIVGVSGRAILNALIAGEMDPNRLADLTRGRLKATRADLVDALHGRVTDHHRFMIKLHLTHIDALETAVTTIEARIGDALGPCRAAVSLLTTMPGLSETTARVLIAEIGTDMSRFPSAGHLISWAGLCPRLDESAGKRRSTRTRQTTPWLKPTLINAAWGATRKKDCYLRAQFLRIKSRRGAKKAILAVASSMLTAAYFMLRDGVEYRDLGAQHFVERDKEQLAKRLIQRLRDLGVAVEVKAA

SEQ ID NO: 211108 - protein, 403 aa, unidentified
MNNVAGIDVSKGKSMVSVLRPFGEVVAKPFSIGHTGSELKELADYLKSLDGETRVVMEHTGRYYEPVARFLHDEGVFVSAVNPKLIKDYGNNTLRKVKTDKADSRKIARYGIDNWAELRQHTPMDTIRMQLKTLNRQQSLYTKTKTMMKNNLIALLDQTYPGVNALFDSPVREDGSQKWVDFATAFWHVDCVRNMSLTAFAERYRKWCKRHGYNFSQSKAVEVHTGAQDLIAMLPKDALTKTMVRQAIDALNAVSASLERLKAEMQALAAQLPEYPVVMAMHGVGDSLGPQLMAELGDVARFTHRNAITAFAGVDPGADQSGTHEAKSTRVSKSGPPELRRALFLVMDCLLKTQPQDDPVYRFMDKKRAEGKPYLVYMTAGANKFLRIYYGRVKEYLASLEEN

SEQ ID NO: 211109 - protein, 412 aa, unidentified
MAVVMNQDSGFDIWCGLDVGKTGHHACPLDAAGRKVFDKPLPQDQKRLEELFDKLQTHGRVLVIVDQPNTIGALPIAVARSMGIQVAYLPGLAMRRAADLYPGNAKTDARDAFVIADTARTMPHTLRRADAGEETLAELKVLVGFDEDLAAEATRLSNRIRGLLTQIHPALERVVGPRLTTKQGLAVIEQLGGPQAMAAASKSKLLRVISKAYPRGAQEFADAITTALAEQTVIVAGTAAAEQVLPQLAASLRQTLDQRHALAAQIEQVVDAHPLAEVLTSMPGVGVRTAARILLDVGDASQFPTAGHLAAYAGLAPVTRRSGTSIRGEFPARAGNKHLKRALFLSAFAALRSDPTSKAYYDRKRAQGKKHNAALICLSRRRCDALFAMLKNREPYRAPTPTREPSPLPLAA

SEQ ID NO: 211110 - protein, 368 aa, unidentified
MKNITTYVGVDAHKKDLFIAMLVGDQTTPVTWQLANEPNAVRRLVRKLERDAPGPVHVCYEAGPCGYALQRQMTTPRVSCQVIAPALIPRKPGERIKTNRRDARKLGELLRAGLLTEVRPPTPEEEAVRDLCRARDDAREDFQRCRHRLGKFLLRRGLHYSGRNWTQAHRRWIDSLEWTQPAERAVVDDYLLAIDHTEARLIELDARLTEIAQADPYREPVGWLRCFRGVDTLTAILILAELHDFRRFHAPRALMAYVGLVPGEDSSGEKHRRGRITRTGNALVRRLLVEAAWHYQHRPGVGVALTRRRKGQPGRVIAIADKAQQRLCRRFRRLAEHHKPAPKIAVAIARELAGFLWAALQPAPARTH

SEQ ID NO: 211111 - protein, 416 aa, unidentified
MNEVKCWFVGVDWASESHRVRIADCCGKRLGERDFAHGGAGLAEMAAWLTSVAGAEPSAIYVAIEIPHGPIVETLLERGFNVYAINPKQLDRFRDRFSPAGAKDDSRDAEVLCDALRTDMRAFRRLALAEPLVIELREWSRMTDDLNGERNRLCNRLREQLWRYFPAMLELEQDLGAEWFLDLWELVPTPDKAMRIRETSIARILKSRRIRRVSAPEVLTVLRKPPVTVAPGTIEAASAHIRVLSERLRVVNRQLKDAHRQLDRLCGLLAEPTESEPGPANEQRDAAILASLPGNGRIVLATLLAEGWEALQRRDYHALRTLCGAAPVTKRSGKSCIVTRRLACNPRLQNALYHWARVAVQHDPRSRAKYAALRLRGHGHARALRSVGDRLLNVACAMLRNGTQFNPSLESQKSAC

SEQ ID NO: 211112 - protein, 391 aa, unidentified
MVCVGIDVAKDKHDCCILDSDGTIRADCITIPNNMDGFKQLLQTIRDCTKKSDKIKVGLEATGHYSYNILGFLLDNDLAVYVMNPLHTNLYRKSLSLRKTKTDRVDARTIATMLLSDVDLKSYTDTAYHNEELKSLTRYRFDKVRERAKLKQSVSRLVTILFPELEKLVPSLHIASVYALLSEYPGAKQISEIHLTKLTNLLATASKGRYGKDKAIQIRDAARTSIGSVMPAKFLELKHTIKLIRELTSEIDEIEVSIQKIMDELNPPILSIPGVGIQSAAMILAEIGDFSNFESPDKILAYAGCSPSTYQSGKLTNCYAHMEKRGSRYLRHALYNATKYVCYWNPVFAEYLAKKRAEGKHYNVALSHAMKKLVRLIYALQKSGKTYLTAA

SEQ ID NO: 211113 - protein, 416 aa, unidentified
MSQTTSGSSQEDAPIKYVCGIDVGSQSCAGCVCRPDKSVVVKPVTFANAKEGWDVLFEKLTRLDAVPKQILIGMEATSRYGENLYQEAQERGYQLCLLHPGQTHQFHRQQGLRAKTDRLDAMTIAKVLLSGEARAGYVPSEQITTYRELVRLHTRLSDEAASYQNEIQILVVVLFPEFTRVFADPCLPSALAVLKAYPSAQDVAAAGVEPITHLLRTQTSGHFGRPTARKLVELAQSSVSSNRALSGRSTSLRILCDQLEHAQANLARLRAELEQLMAHDPGVKGLEQIPEFGPKTVAVLRAELGDMNRFSRTDQVIAYGGMDIEIKESGQWKGKAKLSKRGSGLVRQVLYLAALRSIHLEGSAFGAYYRRLVQRGHRKGSALMAVMRKMLAVSAHLLKHEEESYYPSKVCVGDAT

SEQ ID NO: 211114 - protein, 483 aa, unidentified
MSQKNNPKKPVAKTTPADQGKRDRRGKGMCMQDRPILEANAAGIDIGAREIFVAAPPDRDEHPVRVFSTFTEDLEKMADWLVSCGVTTAAMESTGVYWIPLYDVLERRGLKPCLVDARGMKNVPGRRTDWHECQWLQFLHSVGLLRAAFRPSEDVCAVRALMRHRGELVAMANQHIQHMHKALTQMNVQIQHVISDITGLTGLAIVDAILGGERDAAVLAKLRNVRIKASEEVIRKSLMGNWRAEHLFTLQQSRRSYQHYQEQIIACDEEIEKRIVAFSPRVDPAERPLPPDRKRKERGRKKKIANPQADQAGFDLRTESYKLFGVDLTQIPGLMAMVLTLFSEIGRDMSRWATAGQFVSWLALCPDNDISGGRILWRGTRKVQNRAGQLFRMAAYTLHHEQSPLGDYLRRMKSRIGPAGATTATAHKIAVIFYTMVKNQVEYDATIWAERDAERDKRFEAKLKRQAQQRGYRLVPIEEKPAA

SEQ ID NO: 211115 - protein, 312 aa, unidentified
MDVAKDEFVWAVHGSSQTTSCPNDSAGAQALFSALAEHNIGLVVLEATGGHERALAGFLLERGVAVAVVNPRAAREFARSMGHLAKTDQIDACALAHYAQTLAAKADQAGIRFAPPPPHIEALQALVTRRAQLLNMRTAEKNRLAGAVRVLRSSIEDVIRTLDRQIKRLDKEIDDHLDSHFSQQRKRLESIKGIGVTTCATMLAFMPELGHVSAARVAKLAGVAPLNQDSGKMRGRRQIWGGRSLVRCTLHMAMLSAVRYNPVLQAFYQRLVAAGKPKKVALVACAHKLLRILNAMERSGQHWNEAMHTNPA

SEQ ID NO: 211116 - protein, 349 aa, unidentified
MRRLSRVAEPVLVGTIGTRQCDIDALVRRLQSKSAQLVFLYEAGPCGYWLYRYLTRKGLTCFVVAPSLIPRRPGDRVKTDRRDALALARLGRSGDLPPIYVPDVADEAIRDLARAREDALTDLNAARFRLKALLLRNDIRYAGRANWSAEHVHFLARLVLPTPAQQIVFQEYVRTVSERTELLHRLEQELLEHARTWRFYPVIEALQALRGVQFTVAVTTVGELGDLTRFDHPRQLMSYLGLTPSEHSSGERRRLGGITKAGNGHARRVLVEAAKAYRHRPKVSEAIQVRQQTLPQAICDIAWRAQVRLCGRCRKLLARGKHPNTITAAIARELAGFMWAIAKAQPLTA

SEQ ID NO: 211117 - protein, 327 aa, unidentified
MRYIGIDVSKATFMVAYPLNEKEYKTREFKNTAKGIHEFIRTLEAGDHCVMEATGNYSYLLLYLLNQADITTSMENALKVKNFARTMLSVTKTDKADAQLLSLYGERMRPTPFKLPSNSILLLKQKRTAMRQFQKQLHATNNLKKSLEVLPQKDPTTFKSINKIIETLEKQIRKIEEDLIALTHKEFERQMQKLTSIKGVGASLAAAIIISTGGFTYFDNAKQVSRYLGICPTYQQSGTSINVKGHINRNGDSYLRSQLYVASWSMSQHNKECHNLYLRMKEKGKPGKLIMIAVANKVIRQCFAVVKHDTDYVDGFVSQKPQSLNLD

SEQ ID NO: 211118 - protein, 408 aa, unidentified
MDAYYIGIDWADAAHAACVVDAAGEVVWTGAIVHTAAGLAAWRERLEGWRVPGREIAVAIERPDGLLVEQMLAQGVPVYPVNPKALDRARDRFRVSGAKSDPFDAEVLAQWLRTDHAQWVPLQPQSAPAQELRLLTEDHQRLVRERTRLVNQVTATLKAYYPRALELWPDLTTASARGFLRAYPTPDALTAGTRAQWERFTRRQRMASRTRSELWARLRVPQIPVPPHLVRAKASLLGALLDQLDAVIRHLADYQRRIEDFFGSLPAAAWARTLPASQSGTTVATLWAQMGDAPGRWASWHHLQAHAGTVPITRTSGQQHSVRFRRACDHLFRAAMDRYAFLSIRQSEWARAYYRQQRARGHRHHRALRALAAKWLKILFVLWQRQEGYDETRHLAMIARQHLRAAAA

SEQ ID NO: 211119 - protein, 354 aa, unidentified
MSKERTDAALVFIKPERLQAPIASAHAQAGDAKTMSESLVVVGIDVAKAHVDCAVLGADFGARQFANDIDGHSVLAAALQPLAVALVVMEATGGYESALACALQAAGLAVAVVNPKRARDFAKGIGRLAKTDRIDAEALAELAATLARRRDLARFIRPLPDAQQQELAALVTRRRQLLTMLGAERLRLQLATAKIRPSITALIEAIRAQLEDIDAQMQAHVQEYFASLDELLRSARGIGPVASATLIATVPELGRLSRREISALVGVAPMANDSGTSHGRRRITGGRFQVRRVLYMATLTATMHNPTIMAHYQRLLAAGKLPKVALVACMRKLLTMLNAMVRTQRRWSDEFHRA

SEQ ID NO: 211120 - protein, 354 aa, unidentified
MSQHYGVTVGIDLGDRYTHVCLLDSENGEVIEESRIPTSPKAFERRFSSSEPMRIAIETGTHSPWVSRLLEECGHEVLVANARKVRLIYGEGRKNDKIDAEKLARLARLDPKLLSPIKHRDESSQAHLALLRSRDALVGARTKLVNHIRGAVKSFGARLPKCTAESFHNRVAEHLPQELAPALEPILKIIASLSERIRDYDRQLEGVAEESYPETKLLRQVHGVGVLTALTFVLTLEDPSRFAKSREVGAYLGLVPASDQSGGSDPEKHISKHGNKMMRKLLVGSAHYILGPFGEDCDLRRHGERIASRGGKNAKKRAVVAVARKLSVLLHRLWVTAEVYEPLYNASRRESQAA

SEQ ID NO: 211121 - protein, 436 aa, unidentified
MASHCQFYNYKFQEVILLSFKILKFKCCGLDVHKTWIYACIGITDSNNRTEYKQARFSSFTKGLNELCDWLAKYNCTDVCMESTGKYWIPVFNILEQHNLWVTLSHPKYTKPMKGNKTDRKDAKWICDLYMCGMVKPSFIPPADIRELRDLVRYRYKLTCMITGEKNRAQNCLTVSNLKLDDVFSDVFGKSSRSITEQILQHPGEKFDVAPFVHGRCKTPIEEIQAAVDGAISKEQAVKLRQCLDHIDELNKHISELEQEILRLSDKYEAALNLIRTVPGFDKNPMTAVQILSEIGGDMSVFPTAKHLVSWAGCCPRNDQSNQKIKSTRISRAGSYFKPVLVQVANALIKSKKHLEFTNRYKRIKARRGHKKAIIAICRMILTAIWHILSDLKPYTPEGFLESHPVKEGKVLSSSQALNFFKQRGYIIKDEPLSVS

SEQ ID NO: 211122 - protein, 342 aa, unidentified
MVLIAIDPHKTSHTACALGPSGDELGQLRVEARQREQLLRWAQQWPERRWAIEGAHGLGHGLAQWLVAHGEAVVDVPARLVARVRLLSGGGKSDPADARATGVAAQRAERLHPVVAEDDTVPLRLLTDRRDDLTAERTRTVNRLHRLLRDLLPGGGPRKLSADEASRLLRRLRPGSAADQVRLELAKELVTELRALDRKLLANEARIAAAVRAYGSTLTDLAGVGVIVAAKLIGRSGPMRRFPTAAQYAAYAGAAPLETSSGDVRRHRLNRRGDLQLNRALYTAALTQARMPQTDGYAYVVRKRQEGKSTKEALRCLKRRLANVVYRRLLADERARGLRAAA

SEQ ID NO: 211123 - protein, 409 aa, unidentified
MQVVHERCAGLDVHKKSIYACALWWDEKGERHQQIRSFGAMTAGLLRLGDWLQQHQVSHVAMEATGVYWRPVWAVLEGRFELMLVNPHHVKAMPGRKTDVKDCEWLADLLQHGLVRGSFVPPTDIQDLRDLTRYRAELTQAQNRVTNRIQKVLEQANIKLSSVASDTLGVSGQRMIEAIIAGEDNPESLADMAQKRLRQRIPELQMALTGRVRDHHRFLLREHLDEWKALANRIRRVEQEIDRRIVPFEHAVTLWKTIPGINHVTACSLVAEIGVNIGQFPSAQHLASWAGLCPGQNESAGKRMSTRTRAGDRWLRRALCQASWAASHKKNCYFSGQFKRIAARRGIQRALIAVAHALLIVVYTMLKTGSSYQELGGDYLERIRKDQLQKYYIRRLQRLGLSVSVQPAA

SEQ ID NO: 211124 - protein, 411 aa, unidentified
MVVFVGDDWAEAHHDIEVEDSQGRVLARRRLPEGLAGMASLHALLAEHADLDGEPDQVIVGIESDRGPWVQALLAAGYRVFPINPIQAARYRERHTSSGAKPDPGDAHVLAEIVRVDRSAHRRLVGDSAVAEQVKITARAHQSMIWTRQRSVNTVRSMLRDYYPGFLATFNELATGEALLVLQAAPTPAQGLKLTLGQIRTLLRRAARQRRLDERALAIQTGLRAPQLVARPAVVAASAVAVASLAAVILVMLEQTEVLPRQVEQDFGQHPDAEVYLSQPGLGKVLAARVLAEFGDDPDRYADARARKNYAGTSPITRASGTKRVVLARYARNKRLADALDQQAFCALTQSVGARRSYDAHRARGATHHQALRALGNRLVGILHGCLKTHTPYNENAAWPTATPERAPAAA

SEQ ID NO: 211125 - protein, 293 aa, unidentified
MTIATIGIDLAKNVFAVHGVDHNGKTVLVKSRVTRAALPELIAGLPPSVIGMEACSGAHYWARLFRQYGHEPRLMAAKFVSPYRMAGKSGKNDAADAQVICEAVRRPHMRFVPVKDESQQAMQCLHRTRQSFIEEKTAIYNRLRGLISEFGVIAPQSTDALRRIVSEQKSYLPLQVQQCVDDLLEHIDRIEDKVSEYDRTLSCMAKTDHRSQRLMELKGIGPTTACALVASIGNTHDFKNGRQLAAWLGLTPSQYSSGGKSKLGRITKAGDSYLRTLLVQGGSFGSDRCGEKE

SEQ ID NO: 211126 - protein, 461 aa, unidentified
MAKKAKKVKTAKGAELRIVNPDAAGIDIADGIMQVCVPADRSKDNNRAFGAYTSDLHAISAWLRECGIKTVAMESTGVYWIPLFCRLQEDGMDVVLTNARDVKNITERKTDESDAEWLMLLHQYGLLKASFQPHNDAKRMRTLTRHRDTLSREASSIVLRMQKAMQQMNIKLTLVLSDITGKSGIRIIEAILAGERDPKKLADLADIQCKTPKEEIAKALEGNWEEDLLFVLRQNYDTFKHFCAQLDRCDTELEKLMENYRTEVAGTGRPSYSPTKKRRDYHKRKRNVGFDVERKAYDMWGVNVFEIPGISHLTALGLMSELGHDFTRKFPSSKQFCCWCNIAPNTKISGGKRISSHVPHRRNNVGLIFRSIASSLANAKNQLGNFYRRIRSRAGGKAAVIATAHKVAEIFFAMVANQTTYNPEKVGIDEKVLLEKRIARYKRELERITGMHIEIGNACVP

SEQ ID NO: 211127 - protein, 321 aa, unidentified
MQTENTVVYAGVDVAKATLQLHLQGQQSEYRNTPKGLLELCTQLQAVPSVHVVCEATGGYERALVKVLHQEQIPVSVTNPARVRAAAQAQGQRAKTDRIDARMLTDYGQRYQPKATPPVSATQDQLVDLAQWLKQLIHGQALAKTQAEHHQDPFVRRQHAKLMTHLEAQVEAVEKQIEALLEQDAALQERVTCLDKIQGVGPRTAWMVLAHMPELGQLNRHEVAALAGLAPWTRESGTMKGMRCIGGGRPEVRLALYMAALSAARCNPVLCPLYKRLRAKGKLPKVALTAVMRRLLTYMNHCIKALPSETAGARTEELKAA

SEQ ID NO: 211128 - protein, 354 aa, unidentified
MVCYVGLDVSLKSTSICVLDARGSVMKEGAAPSAPEDIAGFLRGDGRRYGQVILEAGALSRWLYEGLVHAGLPVVIAETRHAHAMLRGSRTKTDRNDARGLAEMARVGLFKPVAIKSAESQRLQGLMTARDLLVAKSVDIEAALRGLLRGFGLKLGVVSKRGFADKVAALIGSKVWLWKIIRPLLRARNLMREQAGHLEVEFAEVARADPVCRRLMTAPGVGPIVALTYKLAVGDPARFGRSRSVAAYLGLTPRLSQSGDMLRRGRISRLGDVGARRVLFLAGRSILNPRTQPSVLKAWGLQVVARRGKLKAFVAMARRLAVILHRMWIDGADFQFGRQQPAGSVVKAITFVAA

SEQ ID NO: 211129 - protein, 410 aa, unidentified
MLFIGDDWAEAHHDIEIEDEAGRLLVRKRLPEGLAGVTLLHELIAEHLDPSGEPDQVLVGIETDRGPWVQALLATGYLVYAINPLQVARYRERHSTSGAKSDPGDAHLLAEIVRLDRAHHRRIAGDSEIAEHVKVATRAHQTMIWSRVRQVNTLRSLLREYYPAALAVFGTDLASPDALAVLAAAPTPELGRRLSQARIETLLRKAGRQRNIAATAARIKTALGSDQLTARPGVVPAYAASASALVAVLTTMVTQTEVLAGQVEQGFGRHPDVEIYRSQPGLGVILGARVLAEFGDDSDRYADAKARKNYSGMSPITRASGTKRVVLARYARNRRLGDALFRQAYSALRASPGARACYDRQRARGASHYQALRTLANRLVGILHGCLSHHTLYDENQAWHTPDDKLTIAA

SEQ ID NO: 211130 - protein, 340 aa, unidentified
MNVEYDGRRIVGIDLHRRRSVIVQQTEAGERLGTTRIDNDPFALAEQVAGWGEAPQVVLEATYGWYWAADVLAEAGAQVHLAHPLGVKGFAYRRVKNDERDAGDLADLLRMGRLPEAWIAPPATRELRELVRHRAKLVALRSGLKASVHAVLAKCGLSVPVSDLFGVGGSRLLDQLQIPDVYAGRIASLRRLIDAFGFEIDTYTKLATTRLAAHPGYRAIQAIDGVGPVLGSVFVAEVGDPHRFPGPAQLCSWAGLTPRHYESDTKVRRGRITKQGSTLVRWAAVEAVQRVRSGHLGGVRARIGERRGANVAKVATARKLLTLVYYGLRDGHIRCLARPA

SEQ ID NO: 211131 - protein, 340 aa, unidentified
MTAHVCGIDIGKTVFHLIGLSKEGHVVIKKRFTRKQLITHTVNMPACLIGMEACPGAHFLARILKAQGHEIKLMPAEYVRPFVKSNKNDYVDAEAIAEAVQRPTMRFVPIKSEAQLDLQALHRVRDRWMGRRTAVINQIRGFLLEHGITVAVGPAHLKRQLPSILEDADNLLSSRMRALLIELRDEWDKLEEQIERVNREFAQAAKKDESCRRLLTIPGIGPLISTALTAAIGNGSAFHKSRDLAAWLGLVPRQHSTGGRSRLLGISKRGNPYLRRLFIHGGRAVFARVKRKDHKFGSWLDRLEARSPRNVAVVAMANKLARIAWAVLTTGQLYSATAGT

SEQ ID NO: 211132 - protein, 370 aa, unidentified
MKKNNTCQQSPKRGTRVRPGSLTIGMDLGDKTSRYCVLDDQGEIVQEGSVGTTKKALAQKFGSLRRSRIAVEVGTHSPWVSRLLGKLGHEVIVANARQVKLISNSSRKDDRLDAQRLARLARVDPQLLRPIQHRSEEAQAHLMVIRVRAALVETRSSLVNTARGLAKSVGERLPKCDADQMGVERMEGLPAQLQQALRPLLEQIESVTEKIKESDGRIEQIARTIYPESALLKQVRGVGTLIALTFVLTIDDRDRFQKSRDVGCYVGLRPKRSESGESQPQLRITKEGDAYLRKMLVQGAHYILGYRGPDTDLKRWGLGLASSHGGKNAKKRAIVAVARKLGILLHRLWVTGEVYEPLRNSQAQARTVAA

SEQ ID NO: 211133 - protein, 409 aa, unidentified
MVKYFCNNPLAPRTPYAVPCYRPTQAQMTINVRNEQGDVIQKGQISTNHADIDDFFVALVKKARKHRGYMAIVEVCSFNDWLLEKLKKTRCSEIVVIQPGKTAVHKTDKRDANALGELLWNNRNRLRGEQRPNGIRRIFPADPADAQVRQLANFRQHLIKQRTRGINKIKGIIDKHNLAQNAPTQDCNTKKYRQWLVTVQLPVIDRMEINMNIQSWELYDKQILEVESELVKRSEVKAADVFRLKAIPGISAMGAITLLSRIGDIKRFKNPDSLANYFGLTPGCHNSAGKHRVGGITKRGNAVARQVLNFAVNHVIRKDTDMKSWHKKIKSKRGTKTARVAVMRRLATIIWHILRWEKPYQFRYDPPVITPKKGDLRSPKEVFQGIGNDNPVRRRQRQTPLKCRGKTKA

SEQ ID NO: 211134 - protein, 372 aa, unidentified
MKQNIIHIGLDVDDKQYHGSALNHSTGEILDFKCRPNLKGLLDQLDKLHKYFSGSTFKLGYEASYIGYTLQRDLVGKGYHCDVVAPTSIPSPRGKQVKTDRIDAAQLVQFYANDLLTLVAIPEPEQEQDRDLIRSRQKLLQQQTELRKHIQALLRRNGRHYKVETENKTHWTLHHYCWLERTIEASSGSLKVNLELLVRQLKGLNRILTEYGQQIEALAKTPRYEPMVQALTCYKGIKNLFALTMITEIGDVKRFPHPRQLVSWIGMDIREYSSGGKHNRFGITKHGNRYLRTAFIEANQRGYRTARISKDLKARRKNTDPELISIADRCLRRLNKKGNRLLVAGKHPNKVKVACAREMVGFVWESLNKMAA

SEQ ID NO: 211135 - protein, 336 aa, unidentified
MHQSSTLYIGLDVHKESIAVAYVVQEHHAEVVSLGNIGTRQCDIDQLIRKMQSKSKHLIFVYEAGPCGYWLYRYLTQKGHVCWVVAPSLIPKKPGDRVKTNRRDAIKLARLMRSGDLTPVYVPQVEDEAMRDLCRAREDTIRALKAAKFQLKAFLLRHDIRYTGRATWSPAHLRWLSEVVCPTPAQQIVFQEYVRAITDHTARLARLEQALTDQVQTWRLAPVVDALQALRGVQCTVAVTTVAELGDLTRFDNPRQLMNYLGLPPSEYSTGERRQQGGITKTGNSHARRALVEGAWAYRYPAKISRHLQLRLEKVPKPIQDISWKAQIRLCKRYRQ

SEQ ID NO: 211136 - protein, 360 aa, unidentified
MITQGTSVGLDVHARSVVAHARDVSSGEVRKARLTPDYRSIIDWLLALVGPVEVGYEAGPTGFGLYRAIVAAGMACTVAAPSKLQRPVGDRVKTDAKDAAHIEKLLRMGELVAVTVPDENTEAARDLVRARDDARGDLMRARHRLSKLLLRQGIVYYDGKAWTGKHEQWLRRQHFDNPALQAAFDNDFDAVLTVSARRDSLDERIIEMAADSTWTPVATRLQCLRGISVLTAFGLAVEIGDWSRFTGASIGAYTGLVPSEYSSGQSRSQGPITKAGNTHVRRLLVEAAWHHRRAYRCPSAVLRARWEAAGPAAKDRGHAGNKRLHKRWTAFDDRSKNACVANIAVARELAGWCWSLAVLD

SEQ ID NO: 211137 - protein, 426 aa, unidentified
MNANNDETQHDHAAFIAIDWADQQHVFSLQVAGQTKKETGILEQKPEVIGPWVAQLRERFGGRSVAIAVEQSRGALIHALMSYDFIVIYPLHPTTVAKFREAFKSSGAKSDPLDTDQILEIVTKHLHQLKPLNPDTEETRLLGRLVEDRRNAVDLRTGHIQALLAALKEYFPQAIELANGNLTSRLAGDLLKKWPNFEAFQQAKPSTIKGFYYGHNIRSPQVLEKVLNLAQRAQPLTTDPAIVESGGRLSQLHAQLIQTLNPLIEGYDRRIEKVFQAHPEAHLFSRLPGAGPALAPRLLSFFGTDRSHYETAQNVHSFSGIAPVTKSSGRTKVVYFRRACPKFDRQTFHEFARLSLAKCQWARNYVDYYKAKGKKYHTIIRALAFKWIRILFRCWQNRTPYSEDTYLAALKKRGSIFATLHLEQKS

SEQ ID NO: 211138 - protein, 407 aa, unidentified
MIFVGVDWAEAHHDVHVEDAEGRRLGGGRLPEGVEGIARFHELVGAHVEDPSEVIVGIETDRGLFVAALVAAGYLVFAVNPMSTSRYRDRHSSSGAKSDPGDAKVLADMVRTDRHNHRPVAGDSEVVTAVKVLARAHQSMIWSRGRQANALRSTLREFYPATLSAFDDLASADATEVLKVAPTPSLGAALSLAKIASALRRGGRQRRIDERAREIQAALRAPQLRGSALVASAIGASVQASVAVISMMNVEITKLAQQLEAGFEQHPAAKVVRSLPGLGTVLGARVLGEFGDDPDRYASAKSRKNYAGTSPITRASGTKRVVLARYARNMRLADAIYLWAFASLTASPGARAFYDAHRKAGDTHHAALRALGNRLVGILHGCLVNGSFYDEHTAWGHRSESQLTEAA

SEQ ID NO: 211139 - protein, 401 aa, unidentified
MALQAAGHTQIERTTLEQKPEALTQWIAGLRQRFAGAKIALILEQKRGALLWALQPHEHLVLYPINPQMSAKFRQAFHPSGAKDDPLDADLQLDILLHHRARLTAWQPDEATTRQLSLLVEGRRRFVADQVRATNRLRDALKSYFPQAVALVGEDLSSRMACAFLKKWPRLASVQAVKPAVLRQFYYAHHSRSAELLAERLQIQAQAQPLTTDEAILAAQSLLVQSLAQELATLHPVLARYDQQIAQLFATQADFAIWESFPGAGPALGPRLAVAWGTQRDRFADRQAMSAYSGIAPVKEASGKALWIHMRWACPKFLRQTFHEMAKCSLQRCAWALCYYRMQIERGKGHHAAIRALAFKWQRIMWRCWQDRTRYDDAKYVASLKRSASDLYARLSAAPAK

SEQ ID NO: 211140 - protein, 325 aa, unidentified
MANIALKVGIDVSKSKFDVCYRSGNGTVSKTYSSGARSVKEFVSSLPEGSHCVMEATGVYHTRLAYALHEAGIIVSVVNPLVIKNFSRMRMARTKTDRADAELIMEYAEREDPPAWEPAEAECIKAHNCLVTIDLYQRQITAMRNEVEALEQSAVCDGKVMNSLKKSAQSLEKEIAKLEEEMLGLVKAFAPKQAEELQSIPGIGKKTAATLITATKGMRGFSNYRQLSSYFGLCPRIYASGTSVRGKARICKMGQARMRQMLYVCAWSAMRHNKPCAQMAERLSEQGKPKKLIIVAVANKLLKLSFAIIKNDTFFDENHISSLAN

SEQ ID NO: 211141 - protein, 394 aa, unidentified
MGIDLHRETHTAVMLDCWNTKLGEITFGNKPSEFPRQVRKVSRFVTEDKTAVYGLENAYGYGRALAVWLIEKGFHVKDVNTALSYAQRKSVPMYQKSDSYDAEAVALVLINMLDKLPDAIPDDKYWTLGQLVNRRDNICTHLHRLKNQLHEQLWMAYPSYKQFFSDISRATALYFFKEYPSPDHLLGKTAEELAKELRPVSHNNCSVKRAEKILNLVKADGETKREHQESRDVITRSLVSDLEHYRIQLEEVNEAIETLLPEFNCTLTTMPGIDRITAANILSEIGEITRFPSADKLAKFAGIAPVNFSSAGKGKDMCPKQGNRRLQAIFYFMAIQMIQISTNGTPRNKVFREYYLKRVAEGKNKQQALICVSRRLVNIVYGMLKNHTEYREPE

SEQ ID NO: 211142 - protein, 375 aa, unidentified
MRDHSEAFVAFDTSKLRNSVAIAEAGRAGEVRFLGEIENSAAATAKLVRKLAGKYQRLTFCYEAGPTGYGLYRQIKSLGYECLVVAPSLIPRKPGDRVKTNRRDALSAVKLLRASELTAVWVPDPRHEAMRDLTRARGAAVEDLRRKRQQVSAFLLRQGRHYSDGKKTWTKAHMNWLASQKLDHPEQRIAFEEMLLAVRQAQERIERLEQAIRAAVPDWSLAAMVTALMAMRGIDLVSATALLGEIGDLSRFQTAPELMAYLGLVPSEASTGDTVKHGPITKAGNRRARRMLVECAWSYQHPPRVGKEKQEKVAAAPRAVREIAWKAQCRLSARYRALIRRGKLKTVAVTAVARELAGFIWAISREVTTAGAAAR

SEQ ID NO: 211143 - protein, 352 aa, unidentified
MPATTAQTAIAVIGIDIGKNSFHIVGLDDRGSIVLRQKWSRGQVEARLANMPPCLIGMEACVGAHHLSRKLKAFGHDARLMPARYVRPYSKGQKNDFRDAEAIAEAVQRPTMKFVATKTAEQLDLQALHRVRERLVSQRTGIINQIRAFLLERGVAVRQGLRFLRAELPHILTAPPDALSPRMVGVIEGLTEDWRRLDERIEHLSGEITALARQDAGCERLVSVPGIGPIISSAMVAAIGTGDAFSKGRDFAAWLGLVPKQISTGDRTILGKISKRGNRYLRVLFVQAAWVVLIKPQSWQRHGLKAWIDAAKKRLHRNVLAVALANKLARIAWSVLARGQTFEVKPAMLSPA

SEQ ID NO: 211144 - protein, 312 aa, unidentified
MNEHFIGIDISKDYLDIASSATQKTWRTSNDEAGIDGLIKRLSTPTLIVLEATGGLETPLVLALVANQLPVTVVNPRQVRDFAKATGQLAKTDTLDAKVLARFAAAVRPEMRQIKDQETRELAALVTRRRQLVEMLSTEKTRLKQVSKPIRKNVETHIAWLKNQIREMDQDLSKTLKRSSVWRENDQIIQSVPGAGQVLSINLLANVPELGTLNRRQIAALIGLAPLNRDSGTFRGRRCIWGGRAGVRSTLYMAAVTAMQYNPVIRSFYQRLTEKGKPFKVAITACMRKLLTIINTMIKTKTRWNEKLITNT

SEQ ID NO: 211145 - protein, 369 aa, unidentified
MAEYSEVFVAFDVAKRKHAVAIAEGGRTGEVRFLGEIENSAATIERVIKRLAGRYDRLHVCFEAGPTGYELYRHIRDLGHDCMVVAPALIPKRPGEHVKTNRRDAITLARLHRAGELTAVWVPDAVHEAVRDLVRAREAAADDLRRKRQQLLSFLLRRGRIYSGGGHWTLAHRRWLAKQAFEHTAQQIVFQEGIDAIEDAVQRLHRLEQQLAAIVPSWSMAPAVAAYQAMRGASFLVAVTFAAEIGDVRRFDTPRQLMSFLGLVPAESSTGDTVRRKGLTLAGNRRARRALVEAAWTYRYPARVSETLRARIEGLPKTVRDIAWKAQLRLCARYRRLSAAGKKLPVVVAAIAREMAAFLWAIGREVAAM

SEQ ID NO: 211146 - protein, 483 aa, unidentified
MKPKRVESNKKASCRPTQNNWHQMNRKQRREMTRKIQSEDLSLEVVHPDAAGIDIGNESHYVAVPLSRDSQPVRRFGCTTSELKGMAVWLKQCAIRTIALQSTGVYWIAVYDILEEAGFEVYLVNAKETKNLPGRKSDVQESQWLMKLHTYGLLRNSFRPSQEIRTMRTYWRQRNDLVRAAGRHIQRMQKALTQMNIQLANVLSDVSGMTGQAIVKAILAGERDPYQLAALRNWRVKASEEEIARSLEGHWQEELLFVLQQEQDGYEFCQRQVAACDQRLQQYLQQLEDRSHGAGLPEEKRKERLRKKKKGNAPQFDLRTELFHMTGTDLTQIDGIDVTTTMTILSEAGWDMSKWKTEHHFVSWLRLCPDNRISGDKIIGKGRLPTNNRVTNALRMAASTLRLSNTYLGAQFRRLRTKLGAPVAIKAMAAKLARLVYRMLRYGMTFVDRGAEFYDAQHRKLQINYLKRKAANLGFQIIEAPAA

SEQ ID NO: 211147 - protein, 430 aa, unidentified
METLNRVVVGIDVHKKMLAVVVRREQDGQTQYEKHRFGTTRSEIVSLAAWLQHQQVSEVVMESTAQYWRPVWYGLEGHFKLHLTHPLKTRAPRGRKRDFRDAQRLADRWRSGDLEESFIPNAEQRSWRWLTRTRVQLKRKVGVIRCHVEGLLEQGGIKLTSVASDLFGVSGWAMLEQIAKGEADVEVMVKQARGALRKKETQLREALAGQLEPVYRLLLKQHMDQVRLLWRQIEELNQTLALAMKEHLPALHRLSKIPGVDLYAAQELLSEIGPGAAAFASAEQFVSWVGVCPGSQESAGVCYSRRSAKGNRYLRRLLCQVAWAAIHTKGTFFSGLFARLKPRVEGKGAAWAVAHRIAKVIWLVLHKEVEYQEKGTVPPNERTLVRKFNRLLRDFGRLGLDVRAVLDRQLPAPATPAASTGPSIPSAPPA

SEQ ID NO: 211148 - protein, 457 aa, unidentified
MNRKRTKSKVDRTMPMVHPNAAAIDVGATIHMAAVSADRTPEPVRSFGTFTTDLHRLVNWFKECGVETVVMESTSVYWIPIFELLDARGFTVFLVNARDAKHVPGRKTDVSDAQWLQRLHSYGLLRASFRPKGQIAELRAYVRQRERLLEYAASHIQHMQKALTEMNLQLHHVVADITGTTGLRIIRAILAGERDPKALAHLRDYRCHASAETIEKALTGSYRAEHLFALDQALALFDAYHEKVSACDVRIEAVLKELSISRSRGSGSLPSSRRRTDQTNAMAFDVRAALFALLGKDVTQINGLGPYLSLKLIAECGDDLSAWPSAKHFTSWLCLAPSNKISGGKVLSSRTRRSGSRASALLRLAAVTVGRTDTALGAFYRRLSARIGKAKAVTATARKIAVLFYNAVRHGMEYVDPGASFYETRYRKRVVENLHRRAKAFGFVLHPAEPTPSVAVS

SEQ ID NO: 211149 - protein, 324 aa, unidentified
MHSSERRAQMSGEVFVGIDVAKENVEVAVRPSGERWAERNDGMGWRNLVRRLRELSPRLVVMEATGGYEAEVALHLTEASIPVRILNPRQVRDFAKGKGLLAKTDGLDAAVLAEYAETYRPEPRALPGEEAREMAALLSRRRQLVEMRVAEKNRLEQARGEVRKRILAHIAWLESEIERTGSDLDRRIRKSPLFLDKHERLTSVPGVGNQTALSLILNLPELGMLDRKEIAALVGVAPFNRDSGKYRGKRIVWGGRAQVRAVLYMAAVVAARHNEVIRSFYEKLVAAGKPKKLALMACMRKLLTILNAIARDRAVWTPALAISR

SEQ ID NO: 211150 - protein, 418 aa, unidentified
MQTELSNYTAIIGIDWADKKHDVCIHVTATGKQDLLQIPHRSEKIDEWARSLYRRYGGPMAVVLELSKGPIVAALQKYDFFVLYPVNPSSLVSYRRTFTPSGAKDDPTDAAYILNLLLRHPDEFHPLKPQSVEMRALMTLTEQRRRLMNDRVRLTNRLRNALKQYYPQALEWFDRIDTQLFCDFIRRWPTAVQARRARRATLETFFRTHNMNRKPLLEKRITAIKSAVPLTTDDGVVIPYRLLALTLVEQLETMFTCLDRFDEEIAALAPQHPDHELFAGLPGAGPVYTPRLMVAFGEQRERFNNAAEVQKYGGIAPVTERSGQQLWIHWRWQAPTFLRQTFVEWAAQTINKSYWAGLYYYQQRAKGCSYQAAVRALAFKWIRILYRCWKTRTPYDEARYLKALQERGSSLLKTAEAA

SEQ ID NO: 211151 - protein, 327 aa, unidentified
MNQSASNLSILGIDVSKGKFDVALLREGKYKHKRFLNNLEGFKKLREWLAEYKVERLHACMESTSTYGEALAEYLHDRGFMVSIVNPARIKGFAQSELIRSKTDKVDASLIARFCAAMKPSLWTPESKEIRELRSLVRRVDALVEMRQQEINRLDVSDAVIKKTIENHIDYLTKQIDSIKEQINKHIDRHPQLRDKQKLLQSIPGVGEATIHLVLANFANTEKFSNAKRLSAFLGIAPREYQSGHSVRGRRRMSKVGRSSLRKAFFMPALVALRYNPIIVEMKRRLTEAGKPKMLIVGAAMRKLIHIIYGVLKHGKPFDSNFALKNT

SEQ ID NO: 211152 - protein, 374 aa, unidentified
MKDTTKVYAVFVGLDVHKESISVAVAEATGEVRSLGVIPNRPEAVRKLIDRLGPKAHLRVCYEAGPCGYDLYRQLRKMGVACDVVAPSLVPTKPGERVKTDRRDAVKLARLLRSGDLTPVWVPDEDHEALRDLIRAREDAVTDLLRQRHRLSKFLLRLGHRPPEGMRAWSSRHRQWLQGVKLPRRAQQVVFEEYRHTVEEAEARIARLDQEIVAAAKDSAHVALIAALQALRGVALTAAVTLVAELGDLRRFRSPAELMAYAGLVPSESSSGSSRHRGSITKTGNAHVRRVMVEAAWCYRYRPSVQGALKKRSKDLPAEVRRIAWKAQHRLHRRYRHHVGRGKVKGVAIVGIARELLGFVWAIAQVVPPAAASA

SEQ ID NO: 211153 - protein, 528 aa, unidentified
MGLIAADISFGVIHDRAKRPRAARRSEVVNNSAVGENSAGGRPASARSRSYRSNPQRIKGRLPGEPEALAKTSNRTKPQEGHYISSMDGRAKGRQHQKKRITAMSNPLDQESGGWLESRGFGALDWASEKHSVVVVDPQGKVLEDFEIEHSALGWKKFRERMRPYGSIPFAIETSQGAAVEQLLEAGMHVYPLNPKSAQAYRERKAPSGVKDDQLDAWSFADALRVDGQNWKPLRPEGSVIKELRLLCRDEIVLIEQRTAFINQLRHALAEYYPTALEAFEDWSAMSAWMFLQRFPTPHILEKAGKRQWEKFLHSRHLWRNESGPRRMELFANATEFCGSEPTANAKSMLALSLVKMLFALENQLSEYRRRIEELFESHPDHDLFGSLPGAGPKLAPRLLGEIGDDRERFDGDAQNLQCLAGTAPVTKRSGKHRECHQRWACNKYLRYAVHLFSEHTITRCAWAEIYYKAHRTKDHSHARALRCLGQRWLKIIHKMWMDRTPYNAELHHLNQVKHGSWVFQLKTVNCK

SEQ ID NO: 211154 - protein, 414 aa, unidentified
MEIVHTHCAGLDVHKKTVVAAIIIPDPKGGLHKETRTFGTMTPDLLALSDWLMAQGVSHAAMESTGEYWKPVFNILENNFEVLLVNAQHIKAVPGRKTDIKDAEWIAELLRHGLLKASFVPPLGQRELRELTRYRSTFVKERASLVNRLQKVLESANIKLASVATDVTGVSGRAILQALLEGKSSPEEMAELAKGRMREKCELLAKALQGQVKAHHRFVLTELLCQIDGLDETIARFDEQIEAYCRPFEEVVELLDTIPGVARQTAEMIVAEIGTDMSRFPSADHLASWAGVAPGNNESAGKRRSGKTTPGNHALGVALNHAANAASHTKNTYLSAQYHRLASRRGKKKAIVALEHSILIIAYHIIQRKEPYHELGGDYFDQRRPEATAKRLVKRLERLGFQVSLQQSLAPVAA

SEQ ID NO: 211155 - protein, 411 aa, unidentified
MQLLRQAVPATALVVAVDPGKVSNRVWLTSAERGLIGEPVSLPVLREGVDRLAGLIAASGVAGAPTIAVEATGRLHHAWVAELERRWPGSVRLFAPSETQAARTQLGWRRSKTDDRDCAALVWLARQGAGRPTATDTVDALLGAVRHRRGLVTDRKALQQRLHDQLQALCPGLSAPAGHGRALALEDPIGQAVLACAAAFAGRPPTMRSLQARAPGRLTQTTARFWVDRWRRLLPPPDDAELRAERLGRDLARHQGLQADIAAVEAQLTRLLAATAGQVLTTLPGVATVRAASFAAHSLPIDRFPTPDHLYAATGLAPAAWQSASLSRRGRISRQGLPEHRDALMGIAWGLSQYSGSFQERNRELRGRGMRPIQARVVLARHACRLCHALLTTQQPFDEARYRSARHSRGR

SEQ ID NO: 211156 - protein, 370 aa, unidentified
MNDLIRIGIDTSKSVFVLHGVNAAEQPVLRRKLRRRQMLEFFAKLAPVQIGIEACGAAHYWARELTALGHEVRLLPPQYVKPYVQRGKNDAADASAICEAMSRPRMRFVPVKTAEQQAALMLVGVRDQLVARRTQLSNMIRGYAAEFGVTAAKGLDKIEPLLARLAREPGVPEEAKALFAVLGEEFAALKPRLRKLEADLLAWHRHNELSRRLVEVPTIGPIGSALLTMKVTDPHAFRCGRDFAAWVGLTPKDHSTAGKQRLGVITRAGDETLRRVLVVGATALIQQVRKGRGNPSPWLTGLLRRKPPKLVAVALANKTARIAWKLMVSGERYNGERARSGFVPPTGSLAPGARRQGRVAPPAAVACGQP

SEQ ID NO: 211157 - protein, 343 aa, unidentified
MAIVAGFDVHRNQITFDALDTETGELTRGRIPSTREAVAAWVRRFPQRRVEVAVEACTGWLFVCEALAAAGATARLADPAEVAGRRGTKRRAKTDRADARHLRQLLAERRLPEAWIPPAHVREWRTRTRLRKTLVDERSQWLQRVQATLFHHGIPAGAVPRRLLTPAGRAALAQLPLPDAARERIRAALALIDAIDAQLAPLERELRALARRQTGCRALMRQFGIGELTAPTILVELGDVARLSASRKVVRAVGLDIGVHRSDRRSRVGKLTRQGPPEARWALYEAAQSACRRTSPDHQQYLALRERGLSHTQASLTIARKLARRSFHTLRKLGPAALEPVSG

SEQ ID NO: 211158 - protein, 306 aa, unidentified
MHSENIAAYIGLDVHKETLAVAIAAPERLGEVRYYGTINNEAQAVRRLFQKLQGLYGNILSCYEAGPCGFGLYHQLTAMNIKCQVIAPSRIPKSPTDRIKNDHRDAISLARLLRAGELTPVWIPDLTHEAMRDLIRASAAAKRDSRVARQRILSMLLRTDKRYAGKHWTGKHRTWLANQSFSQPSQQIAFQHYCQSLEQIEDRILQLDQEISRLLPEWSLCNLVCQLQALKGVGQLIAITLVAELGDFSRFSNPKQLMAFLGLVPGEYSSGNSIRPRGITKVGNSELRRLLYEAAWSLNRPGFPGE

SEQ ID NO: 211159 - protein, 425 aa, unidentified
MPYRIAGIDVHKKMLAVVVADVEIDGDFHFDRQKVGTTPADLRDLADWLVAQDVEEVIMESTAQYWRPVWEALEQHWRPRRRARDGAPRLAGTLHLAQAQSNRGPGGRKRDFPDAERLVKRLVAQELTLSFVPDTEQRLWRSVMRRKYQITRNRVQLHNRLEALLEEAHIKVSSIVSDLLGISARRMLQALADGQTDPTALAALAAPRLRATPSQLCDAFQACPTLHPVYRRLLKLTLEELRLIEDHLGQLDQQMADLLAAHHDAVQRLAEVPGLGVDSAQQIIAEVGATAATFPSPKHLASWMGACPGNEESAGVNYSHRCPKGNRHMRRVLNQAANAAVKAKGTIFAVVYRRLVPRLGHAQAIGAITHRLCRLIWKILHERVRYEERGPTVSVEAKKVRARKMIRELRGLGYRVELVAPCSTV

SEQ ID NO: 211160 - protein, 372 aa, unidentified
MRPCSLVAVLEMSQQSWLAAGVIPGIDRHPLKKLAPDPAAVLQLLERWRAQAEQAGRPVTRIVLAFEAGRDGFWLARWLRARGVESYVIHSTSVAVSREHRRAKTDRLDTEMLIRVFLGWLRGEPRHCKMVAIPALEEEDARRPGRERENLVGERTRIVNRMKAALVRLGIRGFKPELKKAPQRLVALHTPEGVPIPPNTLAEIRRDMVRLATVREQIDAIEEARLEALRQAPDTGPHAMIQLLANIFGMGLETAGMLVREILSRNLRDRRAVARYAGLTGSPNASGNKKRERGLAKAGNARVRRGLIQLAWCFIRYQKNSALVQWYLAKVEGGKRKVSMIVALARKLLIALWRMVTIGEIPEGIVLRTPLN

SEQ ID NO: 211161 - protein, 306 aa, unidentified
MKKISTVRVNGNMIFKGHKLTIGVDLGDRWSFYCVLDEAGKVLLEQKVATTPEAMKQTFGKIPRSLIALETGTHSPWVSRLLTELGHQVIVAHAQKVELITKSTRKDDRHDARTLARLARIDPELLGPVRHRSAQAQIHLTVIRARAELVRARTALVNAARGLVKSYGLRLPPCGTQQVSRELAAGLCTELREVLEPLLKEIESLNERIQEYDAGIEKIAKESYPHVALLKQVKGVGTQIALTYVLTLEDPHRFRKSRDVGCFLGLRPGRRNSGQSEPQKHISKEGDRYFIPARMRLPFYAAAWTE

SEQ ID NO: 211162 - protein, 335 aa, unidentified
MSAYVVGLDVHKTRSTFVIQTTTGAVTARGELATTRAGLEQWAHPQALPAATPVALESGTLAFFVADELARLALHPLVIDAHEVRAKAQRPRQKSDRRDAFELCDGLRRDQYRTRVHVPAPAVRRLRVLLARRRHFVRVQTAQINTVKGVLRAQGQGALGRSLRPARAWTRLQQAVAPHADLAHAVAAHAAVWDAARQQRDAVEAALAAHVPAFAPAAARLMTVPGVGPIVALTALATFGDVTRFPSAKHAASYAGLVPSTYQSGDCDRHGRITKRGSAELRAMLIEAAHHAARREHPFHRVFTALCVRRGYKAALVAVAHRLCRLPLRAAAGRE

SEQ ID NO: 211163 - protein, 339 aa, unidentified
MVQATTIGLDIAKQVFQVHGADRAGKAVLRRKLKRNEVARFFSGQPPCLVGIEASGSAHYWARVISGFGHTVRLMAPQFVKPYVKSQKNDANDAEAIAEAVTRPNMRYVPRKTVEQQDLQCIHRVRSRLVACRTQLINQIRGLLAEYGIVLPQHPGQVRRGLPTVLEDAENQLTGPGRELFQSLYEELTELDEKIAAADDRIQVAFRNTPNCQRIAAVEGVGPLIATAVVAAISNGHAFANGRQFSAWLGLVPRQNSSGSKSRLLGISKRGDPYLRTLLIHGARSVVYRAKAKTDKRSLWIADKQRRLGTTKTCVAVANKNARVIWSLIAREQEYRRAA

SEQ ID NO: 211164 - protein, 310 aa, unidentified
METIFVGIDVSKDRLDVHVRPSAEAFAVARDGKGLKELVERLSGLSPRLIAVEATGGFETIVAAAIAGAQLPLAVVNPAQIRHFAQAVGKRAKSDPIDAAVIARFAEAVKPEPRQMRDEAARLLAELVGRRAQIIEMLVAERQREGRVAASRVRKSIGRHIAALEKELVAVDSDIDGLVRGSPVWREKEDLLTSFPGVGDTLARVFLAELPELGQLTRREIASLVGVAPFTRQSGRWKGKSMIAGGRSSVRAASFMAALSASRCNPALRAFYQRLLAAGKPKMVALIAVARKILTILNAMLRDKKQWQTA

SEQ ID NO: 211165 - protein, 341 aa, unidentified
MQITTIGLDIAKNVFQVHGIDAAEKVVVRKQLRRSQVIAFFKDLAPCLVGMEACATAHHWARELANLGHEVRLMPAKDVKAYVKRNKNDAADAEAICEAARRPTMRFVQVKSAEQQAQLMQHRARDLLMQQRTQLINAMRSHLAELGIIAPQGREGVKELLAIIANDADTQLPNDARASLIVLAAQLQALQTTIGAIEKRIVVQHRGNKENKRIQTVPGIGVIGASAIAATVPNPKIFRSGRDFAAWIGLVPRQMSTGGKPKLGSISKQGDRYLRRILVVGAVSVLRRAKLNPEKFPWITRLLARRPFKVVAVALANKMARTAWALMMSGKTCRAARFATA

SEQ ID NO: 211166 - protein, 426 aa, unidentified
MIFVGDDWAEDHHDVWVMNEAGRRLASRRLSEGITGMRQLHELIGVHAEEPDQVVVGIETDRGLWVQALVAAGYQVFAINPLAVARYRDRHHVSGAKSDVSDAKLLADLVRTDRHNHRPLAGDSAEVEAIKVLARAHQSLIWARVRHTNALRSALREYYPAALAAFEDLDHGDALGVLGRAPTPDTGAKLSLSAIQSALKRGGRQRYIASRAKEIQAALRSQQLTAPPTVATAFAATTRAAVAIIAELNRQITELETSLAAHFEAHPDADIYRSLPGLGVVLGARVLGEFGDDPNRYTDAKSRKNYAGTSPLTVASGKKCRVVARYIRNSRLYDAIDQWAFCAFPPARAPAPSTISASGLKTATTKPYAPSATASSASCTAASATTPSTTKTEPGPTEPHRRLTTYKPGMSRPGQNAGSIGWPERR

SEQ ID NO: 211167 - protein, 319 aa, unidentified
MSKHSTKAAGIDTGKHKLDVALSSGGEALQVVNKEAGYSELCVWLRQHRIKRVGIEASGGYEQEVVAWLRRRGFVVIVFQPMQVRAYARFRLKRAKNDMIDAHLIAICAAESEQIREPCDSRLSGCKERLRLIEQIEEDAARMKTRLEAYRDKSLISQLKAEIKRLSAWRRSELKALLAELFTHADLRQKLELLWSIDGVGKRTALAMLIHMPELGTLTREEAVSLAGLAPFDNDSAERSGQRHIWGGRHRLRRSLYAAALPAAFHWNDALINLYKRLTAAGKLHKVALVACARKLIIYANTVLQRGTPWTALPKGAAT

SEQ ID NO: 211168 - protein, 361 aa, unidentified
MVDPYRLMPWQVVFSGPLHLEELTVKLYCGIDLHSNNHYLTLIDETDRRILEKRLPNDLSLTLKTLKPYRTQISDIAVESTFNWYWLVDGLMEAGYSLKLVNTAKARQYEGLKHTDDRHDAFWLAHQMRLGILPTGHIYPKEQRAMRDLLRVRRRLVRQRTTHVLTTQSTVWRHTAMKLPSTVILGEKKATWPKLPNTSDELGVKAHRAAIGVLNTQIDRIERAVLKTLKPRTDYQMLLTVNGIGPVIAWTIVLESGDLQRFKNVGHFASYARCVDSKRTSNEKKKGEGNVKNGNAYLAWAFFEAAHFAIRYLPSAKRFFERKSAQRNPILAMKALSHKIARACYYVMRDRVPFDPARLFG

SEQ ID NO: 211169 - protein, 309 aa, unidentified
MEEIFVGIDVSKDRLDVHVLPTGDAFAVARNGEGLAELNDRLRPLGVAVVAVEATGGFETVVAASLGGAGLPVVVVNPAQIRAFAQAMGQRAKTDPIDAEMIARFVAATRPEVRPLPDEQTQALAELVTRRRQIIQMMVAERQRATRLPARLRKSCERVVRVLEKELTALDQDIGDTVRGSPAWREKEDLMASVPGIGPTIARTLLAELPELGTLGRREIAALAGLAPWTRRSGQWSGKSFIGGGRASVRSALFLGAMVAARHNPVLKAFHQRLIAAGKPKMVAIIAVARKLITILNAILRDKKPWQIA

SEQ ID NO: 211170 - protein, 310 aa, unidentified
MTETKNKFFIGIDVAKAKLDIFNGKTGEITQVKNTKTEILKYIKTLGFSENYYVVIDLTGGYEAMCVKLFDKKGFKVICAEGRRVKHFAQANSLYAKTDKIDARLLAKFGERCFDTLRLYKSFDDTIMKLVLRMQDLKDACKQEKNRLQMPNILPETKKSVQRTIKFYEQEITEFERLIEQKIKADELLCKKFNLYVSQKGVGKQVAFALIGLMPELGYLNRRQIAALAGVAPFAKDSGTLSGHRFTRMGRTGVKKALFMAALVAIRFDKHFKEVYENLLARRKMKMVAITAIMRKILITLNAKAKSLCV

SEQ ID NO: 211171 - protein, 375 aa, unidentified
MNNNNTLYVGLDVHKESITVAYAINSEPVELMGKIGTSPTDIQNLCKRLRSKSSQVSIVYEAGPCGYGLDRRLVKSGFDCMVCAPSLIPKKPGERVKTDRRDAIRLVRSLRAGDLSDVYVPGIEDEAFRDLARAWASARDDLRHARQRLKSFLLVHGVHYVGRADWGPAHRRWLSKYSFESPWRQLAFDEHRRTIEDRQAQCERLESALKEAVTEWRLYPVVEALQAMRGIQFITAVGLISELGDLTRFEHPRQLMSWFGITPSEYSSGGSRHQGSITKAGNSYARKLLVEAAWSYRHPARISPAIQKRQENLPRPVIDRAWDAQLRLCKRYRKLQAKGKNVNITIVAVARELAGFIWDMGRIAMSVAQQPQCHK

SEQ ID NO: 211172 - protein, 408 aa, unidentified
MAIIGMDIHRAFAEVVALAGKSPRRLGRIDMRRDRLAAFAAGLTKDDIVVVEATGNAAAVAEVLAPHVGRVVIANPKQVRAIAHAKIKTDKIDAAVLAQLYASGFLPEVWIPDENTQALRRQVTRRNQIVRQRTRLKNIVQSILHAHLIPAFPAVNMFGRQGRAWLSAQKLPKDEQLAIERHIREIDRLGEDLKVIQRDLAQYGLADLRVKRLMTIPGLDMIVATALVAAIGDINRFGAPQKLVSYLGLNPTVRQSGPGPSYYGRISKQGPGRARGLLVEAAWAAARAPGPLRAFFLRIRSRRGQHIAAVATARKLAVLVWHILTKQQDYLWARPALHATKLRRLELTAGHAPARGQRGSAYNYNIKATRDQERRRVQQAEKVYERFVAGWNRSGPKVRTSAAKEERQ

SEQ ID NO: 211173 - protein, 343 aa, unidentified
MDQYIGLDVSLKETAISIRQDGKRIWRGKCASDPKLVAEMIRKHAPHARRVVFETGPLSTWFYHELTKEGLPAICIEARHAQKVLNETLNKTDANDADGLAHLAEAGFYKAVRVKAFDSMRTRTLVAARTQLLSISTQLSNQIRGVMKTFGLIVAQGKGRVFDNNVRQLLDGNDGLAKIILPLLEGWRDIRMRAADLGRQLVAAARESQATKRLMTIPGIGAVTAVSYVAAIEGPDNFKTSRSVGAWLGLTTRRYQSGEVDYDGHISRRGDPHLRGLLYEAATVILTRTSARNESRLKSWGLKLRERLGFKRAAVAVARKLAVIMHSMLKTGDVFNRLAGATA

SEQ ID NO: 211174 - protein, 339 aa, unidentified
MFIIGIDPHRGSHAAVVIDREERIQATLELPANRHQRRRLLDWAIGYTPRAWAIEGATGTGSLLAQQLVAVGERVIDVPPKLAARVRVLDNEQSDKNDRHDARSVAIAALRKRNLHDVTIEDHVAVLRLLAKRHHDLVAARTRTVCRLHTTLCYLAEGKFPRRLRAEQAAAILSRIHPTTAIAVERKALARELLGELRRCDRDLDELAAKIRDAVKASATTVTEVPGVGPIMAAYILGHTGHIGRFPTAGHYARYNATAPIAASTAATDRHRLNPYGNRQLNHALHVAAVTQTSHDTPGRVYYQRKLTEGNSRKEALRALKRQISDAVYRQLVADTAHT

SEQ ID NO: 211175 - protein, 351 aa, unidentified
MRTSQKTSETISTIGIDVGKNTFHLVGVDKRGAIVLQQKVTRHQLGRRLSNIPRCLIGMEACCGTHFIARQVTALGHDVRLIPAQYVKPFLKGHKNDYRDAEAIAEAVQRPTMRFVSIKTPEQMDLLALHRVRSRLVRQRTGTANQIRGFLLERGITVRKGLMPLRKALPEILSSKSDVLSPRMINLIGDLVQDWRRLDERIAHVSTEIEALAKRDENCQRLMSVPGVGPIVSSAVVAAIGNGTGFKQGRDFAAWLGLIPKQESTGDRTILGKISKRGNKYVRTLFVQAAHVVLERRPRTAKQGLWPWIEQASKRLHRNMLAIALANKLARIAWAVLARGRAYQPRITAHA

SEQ ID NO: 211176 - protein, 343 aa, unidentified
MNNVSTLSIDLAKNVFQLLSFDKQGNKCFSRRLDRAKLLQTLTQLPACNVVMESCSTSHYWGRYCLQAGHQVQLIPAQHVTPFVRGNKNDKNDCMAIYEASLRPNIRFVPVKTEHQQAILALHRYRERLIHNRTACINQTCGLLLEFGIVIKKSLKSFRATIADLLNRNLHGALNLLLRDVYEEMQKLDANIKNVEAQFKQFNEQSQAAQIIQSIPGIGIINASALSATIDKGQAFSNKKELAVWLGITPRQYASGETNKMGGITKRGDRYLRKQLIHGARTVVNHAHKKQDDLNKWINALVERRGKNKAVVATAHRLARLMWILLQRNEPYKAQYTQSEAQS

SEQ ID NO: 211177 - protein, 351 aa, unidentified
MIIIGVDYHPSDQYVAFVDTETGEYGERQLNHSAGEAEKFYRELARRGASVRVGMEATGYSRWFERLLAELGMELWIGDAAEIKSKRIRKQKTDWEDARLLLRLLRENNFPRIWVPRPENRDLRQLLWHRHRLVQMRTRIMNQLQALAMNEGQRRKKKLWSAQGRAQLEKLALGTWASRRRKDLLELLDRMNPTIEELTAAVEREGRKWPEVLRLMTHPGVGPLTALAFVLIIGTPQRFCRGKQIGSYVGLIPEEDSSAGHQRLGHITKQGSSLLRFLLVEAAQAAARCDADWRRRYVRLAVRRQRNIAKAGMARRLAVQLYWIWRNGWEYAQWVKFSSHAGQLGTGQGAK

SEQ ID NO: 211178 - protein, 366 aa, unidentified
MIVIGTDTHKRTHALAAVDEGTGRLRGSREIKADEEGHLVALKWARGLDDERVWAIEDCRSVSRRLEEALIAAGERVVRVAPHRMGASRRGERDPGKSDEIDSLAIARAVVKDGIECFPAAFLDAQAMEIRLLADHRRDLVAERTRTQNRLRWHLVTLAPELEATLRRGSLANTRQLDRIDRQLRRSAGGARVRVAHDQITQIRSLTRQIDALKDELATLIKAHRPALLAETGCGALTAAILIGRTAGAERFVTDASFARQTGTAPLKCSSGLRQQHRLNRGGDRQLNHALHIIAVTRARYDPATRTYLARKHAEGKTTKGALRCLKRHLARRFHQLLTQPPTPEPGTPDHNQQQQPKNPLLTNIP

SEQ ID NO: 211179 - protein, 460 aa, unidentified
MSRERSKKQKRAGQGGAVPSLNCIEPNAAGIDVGATEIFVAVPQDRDPSPVRSFETFTQDLHRLKEWLQQCRITTVAMESTGVYWIPLFQILEEVGLEVCLVNAQHVKHVPGRKSDVIDCQWLQYLHSVGLLRASFRPEDRVCVIRSLLRHRDSLVQMAAAHVQHMQKALTQMNVQIHHVLSDITGQSGRAILDAIVAGERNPVVLAQLRHSRVQASEEEVVKSLVGDYRREHLFTLRQSLEAYRYYQRLITGCDAEIEQQLQNFDGHLPPDAPALPPERYPHRQRKNEFRFDMRSELYRIFGVDLTAIPSINALTGYTLLAEVGTDWSKFRNIQAFASWACFCPQNKKSGGKVLSAKTRRSANRVNRALRLAAQTLERSTSYLGIFYRKMCARLGRPAGITATAHKLARIIFHMVTTGRAYGESIFAAEEQRQRKHLESSLRRKAAQLGYQLTPLPQTA

SEQ ID NO: 211180 - protein, 394 aa, unidentified
MKLVGIDVGKNSHHFCVMDKETGEFNVTPTSFSNNKEGFDFLINSLKPYSKKSILIGMEDTGHYHVALLKFLLSNGYTVALINPKTTDLTRKMEGGITKNDKLDTITICDVLDTPERKKQYRITKVDRFDLYEQRQLTRHHHNLKEELNVYCNRLQKSIDLVFPEFNTLFSSKYSIVYMNLLKTFGSAEAIASTDIRTIRKCFEIKGRGNRISLTPEKLKECAKNSIGISSEVETIQIKHLVSQITLIKEQIAEIDKKIEEFSITNNSPILSIPGISHFSGTSILAELGDIGNYSKPSQIIKFAGVAPYHYESSQYNAQHTGITKKGSKYLRKTLYQIILTVINNNPVFKKYYLLKISQGKGHRCAQVHCIRKLLRIIYHLLETGQSFDPALLR

SEQ ID NO: 211181 - protein, 370 aa, unidentified
MGNRSMFVGLDVHKETIDVSIAEGSRDGEVRHDGVIASDLEPLDTVVRALRAPDRCLHFVYEAGPCGFGIHRYLTARGEDCVVVSPSMIPKRSGDRVKTDRRDSQMLARLHRAGELRAIYIPDATDEAMRDLVRAREDAVVVGTQAKYRLKAFLLRQGRRYPGREGWTLPYRRWLTDLSFPTAAQHVTLQEYRDTIDETERRIERLTEQLRQLAPAWRWAPVVAALQALPGVSFITAVALVAELGDLRRFGHPRELMAYLGLVPSEYSSGPSVRRGAITKAGNPHVRRLLAEAAWAYQGIPRIGRQHAYRQEALPKIVCDIAWRAQLRLTARFRRLVARGKAKPKVATAIARELSGFIWAIAREVSPTAP

SEQ ID NO: 211182 - protein, 354 aa, unidentified
MSQTQNAAIAVVGIDIGKNSFHIVGHDERGAIVLRQKWSRGQVEARFANMSPCLVGMEACVGAHHLSRKLNSLGHNARLMPAKYVRPYSRGVEYDFRDAEAIAEAVQRPTMKFVATKTADQLDLQALHRVRERLVSQRTGIINQIRAFLLERGIAVRQGQRFLRAELPRILATPPDVLSPRMVRMIEDLAGDWRRLDERVESLSNEIETIARQDAGCERLMSVPGIGPIISSAMVAAIGAGDVFTKGRDFAAWLGLVPKQISTGDRTILGKISRRGNRYLRVLFVQAAWVVLIKPKIWERHGLKPWIEAARKRLHHNVLAIALANKLARIAWSVLAHGRAFEARKIDQAANQSA

SEQ ID NO: 211183 - protein, 350 aa, unidentified
MKYVGIDVHSKSSVWCALDEKGKKLATGEAPTTAPGLKRLARELGRDDEVAFGQEVGGQVYLVHDAITAAGFPIASFNAAELRIIAASRKKTDKRDAYWIAKSLQTGMMPHPVYIPTGEVRELRQLLTRRRIVQRDRNRWQYRARAMLRGAGVSTRAGGHYIRKHMAQLLESPDGVETILLDGLGLCQRQVEILGEELEHIEAMLATRTAGIDAIQRLMTIPGVGPWVATSIYAAVGDVSRFPNAKSLAAYAGLVPSVRQSGDAAQLGGITKTGSKPLRAALVQSAHVLTSRLESADAEPLQAIYARIRGTRGRRKIAIVALARHLLRIAYYILRDGTRYDPERLPRPST

SEQ ID NO: 211184 - protein, 317 aa, unidentified
MDAKTEADRFIGIDVSKARVDVHVRPEGSVFYCTTDTDGLAELVRRLTPLRPRLVVLEASGGYEGVVAAALAEAGLPVAIVNPRQVRKFAGAIGRLAKTDAIDAAVIAHFAQAVRPAARPLPDDLAVRLGELMARRRQLVVMINAEKQRLARAHDRIAQSSFRAVLKRLEAERVRIDKAIDKLIEASPLWCAKQDLLKSVPGVGDVVARTLIAELPELGQVDRHQIAALAGIAPMNRDSGRYRGKRKIQGGRVEVRAPLYMACLVAIRHNPALKSFYRRLREAGKPARLALVAAMRKLLTILNAILRDQRPWAPAQN

SEQ ID NO: 211185 - protein, 342 aa, unidentified
MYYIGLDVHKKTISYCVKDASGRVHQEGKLGATRCELDRWMRTLPQPWTVAMEATIFTGWIYDHLQPHATQIKVAHPLMLRAIAAAKKKNDRVDASKIADCLRCDFLPECHMASTEIRDRRRTLRYRYLLVRQMVQTKNRISGLLMETGVTHNKQRLHKVGYFRELLARNEEVSESIRPLLRLSRDTITRLQKTERALVSSLQRDPLLTERIKRLRTVPGVGPITALTWALEMGEISRFRSIRQAISYCGLCSDERSSAEKSIRTPISKQRNKNIQFVLIEAAKLAPRQDHDLALLYAREKEKGNANRATLAVARKMVAYLLAVDRGKRDFVPVEHWSNAAA

SEQ ID NO: 211186 - protein, 315 aa, unidentified
MEAAPVYRGIDVSKAQWDVAERPSGKRAVMPHTEESMTTLVERLRPHHPACLVLEGTGGLDVPLASALAVVGIPVAVVTPRQVRDCATATGPLAKTDAIDAQTVARFAEAVRPVPRPLPDDATQAFSARLTRRRQLIEMLVAEQNRLQRAPRPIQRQIQVHLTWWKKPRTALDEDLTHQIQSTPIWREQEDLLRSVPGIGPVVSRTLLAELPELGTLTHKQIAALVGVAPSNRDSGTLRGRRMIWGGRAVVRGVLYMSAVVAARHNPVIKAVSQRLRAAGKAPNVALVACMRTLLTMLNAMVKHRTPWRLSAQGI

SEQ ID NO: 211187 - protein, 435 aa, unidentified
MKDQEQIAAWIGVDWADEGHQVWEYNLGTGGKETYVVQHNAESLQEWLSQLRSRYRGSGVAVVLEQARGGLIYALMGTDFIVMYPVNPQSLSKYRKALYPSGAKSDPSDAELLGEMVRQNPQRFRAWIPGDAQTRSLQLLTEDRRKLVEDMTARTNQLTSVLKTYYPQALEWAGHLGSEQACAFLEKWPTLVELQRSRPFRVREFYQKYGRPTREVLNQRVDQILKAQPLTSDRAVVKASVMMVQALVAQIRPLRLAIENYDQEIERVFRQHPDRVVFESFPGAGKVLAPRLLAAFGADRDRFQTALEVQEFSGTAPVTERSGKAIWVHRRLACPKFMLQTFHEFANCAWRFCAWSKLYYQQQRARGKDHHAAVRSLAYKWIRIMFRCWKDRAPYDDSIYVKSLIKRGSHLAKGLNQTRPDSVVEISSNVCESRA

SEQ ID NO: 211188 - protein, 377 aa, unidentified
MSNIYQGPGEADGPNPNQFLYVGVDIHKDKHTAVATNCFGHKLLEMEFANTENDFRQLVVNIRNLAGRENRQFIFGLEDSFGYGLHLAKHLFNSNLPVKMVPPVLVDRGRKYETHPEKSDSLDALGVAKVLIQRIDTLPDYSISITDELAKEIKELAMDRDFLVKEQTRIKNQLHRLLHKTYGSEYQGKFKDVFSLKALRHWKKYPTGKAYILVDDSILKNQVRRKINRLMDIRQECKEIENELKILLDRTGQKLPTMNGCGTVLASAVMAEIRNIERFHSPAALAKYAGLAPRQKSSGKTIRHIKSKSGNRKLNMAIHRIALSQISNSGNQYAKAYFKKKITEGKSKNQALCCLKRKLVNIIYMMLKHRQAYNYQK

SEQ ID NO: 211189 - protein, 404 aa, unidentified
MSESMGGKDDSAASVVIGMDPHKRTVTIEVMSASEQVVGHGRFTTDEAGFAAMLDYASRWAQRTWAIEGCEGIGRHVARRLLPLHETVVDVPAKLSARMRVYATGQGRKTDDTDAHSIALVGVRMAGLRTVKHDERLEILRLLVDRRRRIGADHTRVVCQLHGLLLELIPGGAKRDLSAAQARRLLASVRPRDAVAKTRKRIALELVVDLEKTYQRKKAANKELVELVRDTGTALLGLHGIGPSGAARLLVEVGDITRFPDRGHFASWSGTAPVDASSGDNTRQRLSRGGNRNINQVLHIMATVQLRTRTTQGRAYYDRKVAAGKTPNEAMRCLKRRLSDIVYRTMLGDVIAAAATKPGTGPGGHRGASLTSSAAGSQPHTDTSDQSLPGPVTTKATTTLPRAS

SEQ ID NO: 211190 - protein, 341 aa, unidentified
MRKTLFCGIDLHSNNAMYVITDGRDKQLLAKRLPNQLPAILETMDPFRPRLKVVAVESTYNWYWLVDGLMDHGYPVVLAHPSEMEQYDGIKEADDLTDAAFLAKLARLEVLPTGHIYPRQDRPVRDLLRRRMLLVQQRTGIVLSVQNLAVRQSGRSLPWRDIRRLDDEGRVELLGDHDCLTFVADQQIDLIEQLNEKIRWFEKKVLEHVQFQPEYERLQTMPGVGVILALTILLETGDIGRFKTVGDYTSYCRCVRAVHRSNGKKKADNNSRNGNGYLAWAFVEAVHHAIRVCPKAKSFYDRKRAKRNGALATKALAEQWSKAAYYILKRQEPFDLTRVFG

SEQ ID NO: 211191 - protein, 424 aa, unidentified
MSKKKSSVAGLGALYARVCGMDVHKNSVVACVRILNAKDGTVQSTLRRFGTMTADLVELRQWLTEQQVTHAAMESTGVYWQPVFNLLEGHLEVWVVNAQHIKKVPGRKTDMKDAEWIAQLMQCGLLKPSFVPERQQRELRDLTRQQSKLVQQRNAVDNRIQKVLETANIKLGSVASDVLGVSGRRMIEALIGGEKDTSVLADLAQKKLREKIPQLQRALAGEVTDHHRFLLRQLLDQYDFLEKEIARVSERLGAVAPPSFRAAVDQLDAIAGVGERGARALLAETGTDMSRFPSHKHFASWAGRCPGNRESAGKRKSGKTPAANRHLDAVLTEMAHAAVRKKDSYFKSQYHRLAGRRGKKRAIGAVKHSLLVTVYFMLRDYKPYKDLGADYFDKLNPQHQIRYHVRKLKDLGQKVELSPMADAA

SEQ ID NO: 211192 - protein, 340 aa, unidentified
MDEISIVGVDLAKQVFQLHGAAADGRALFRKKLSRPQFAKFMAALPPCIVAMEACGTAHYWGRELALLGHDIRLIPPVYVKPFVKRQKNDAADAEAIAEAVQRPNMRTVAVKSSAQQARAMLFRTRDLLVGQRTQLVNALRGHLAEHGIVLAKGIANVERLALRLEDDDLPDLVRHLGRIYLDQIAQLGVEIEKLDKRIVAAAKQNGEARRLQTMPGIGPVCAMAITAFAPDMREFRRGRDFAAWLGLVPRQHSSGGKQKLGRTSKMGQRDIRRLLIVGAMSIVHWRGRDGGRPGSWLARMLARKPRMLVAIALANKMARMVWAMLVREEDYRDPTGAVC

SEQ ID NO: 211193 - protein, 375 aa, unidentified
MKNNTERLSDDKLVEARVRSQSKVRVKLGLDMHYRQVTVAMQEEDGAIKALGKMSHDGFSNWVEQKLQAGFELYSCYEAGASGYWLHRDLEGLGVKNLVVAPKAMGQDRRQKTDRRDSAELVDALDRYLRGNRKALNPIAIPSVEVEEKRALIRYHRQIMADRNRCEARGKGLLCAQGIEVRGKWWQSQSWQELKTHPRLKSWMQAQLEGWRKKRLALETEQQSLRRQIEALAPALLPKGVGAYSAVALEYELKGLARFQRARALSSYTGLCPGIHSSDGRGREGSINRCGNAAVRWNLVEMVWRLLKWQPQYEPVRQLARGLLKSKRARKRLAVKAARQLAIDLWRLHTGRATAQELGLIMQPTTQKPTSRTQY

SEQ ID NO: 211194 - protein, 373 aa, unidentified
MSNPSTIFIGLDVHKETTDVAFVSNQDEAVLFYGTIPTNSRSVDHLIKKFSSKASKLVVIYEAGPCGYWLYRMLERKGIECWVVAPSLIPKAPGDKVKTDRRDAMALARLAKAGLLSSIHIPNADDEAIRDLIRCREDCMLDLRQARQRLKSFLQRNGHSYSGRDNWSDAHKRHLADIHFIEPAKKITFQHYIGIVEHRYQSLQHIERELEHLGQQWCWYPLVQFLTVLRGIRFLSAITLVAELGDMRRFANPRSLMNFVGLTPSEHSSGQRQKIGGITKCGNTHARRILIEAAWAYRFSPKVSRELQIRQQEHSVNLQERSWQAQLRLCNKFRRMKAKGKEQNKVVVAVARELLGFIWDIAQRFEPSSKTVG

SEQ ID NO: 211195 - protein, 355 aa, unidentified
MSNEKYIGLDVHQATISVAVMDSQGKVVMESILETKASTLLEFFAGLRGSLFVTFEEGTWAAWLYDLLKPHVTEVLVCNPRKIPLLKQGNKSDKIDARKLAERLRLHDLKPVYHGETGIRMLRELARSYLTVVKDLSRVMNRLKALYRSWAIPCAGRDVYYRRHRSEWLEKIPEAGTRRRAEQLYQQLDLLQHLRQQARRELLAESRKHAITAKLRKIPSLGPIRSALAVALIQTPHRFRSKRQLWTYSGLGLETRDSGEYHYVQGQVRRRKKQATIRGLNKDYNHDLKGLFKGAATRASVKPGPFQEFYQRSLAKGIKPTMVRLTLARKIAAITLTLWKKGEDFDINKLNSQAA

SEQ ID NO: 211196 - protein, 373 aa, unidentified
MFHFTTLFIGMDVHKESFSLCYYDMMANQFKHSTKVGPNVSYIVNYVNELRRLYGQDAEVLCGYEAGCLGFTLYHQLQAHRIPCIVMAPTTVMKEGSKRVKTDKKDAAQLAKALAFRSYRPVHIPTVEDEQVKEYIRMRTDHKVALKKIKQQILAFCLRHDFRYTEGSSNWTQKHVRWLRSLNPDGLYAEILTEYLLTYEKLVDQIERYDARIEQLGQSDSYQEKVSRLSCFIGIKTLTALSIVTEIGDFNRFATAQHFASYLGLTPSENSSGDKERRGAITKAGNSHVRRLLIEAAQSLAKGTIGYKSKELKRRQSGNRVEVIAYADKANERLRRRYRTLVLGKNKKQNVAKTAIARELSGFIWGMMTGRIA

SEQ ID NO: 211197 - protein, 414 aa, unidentified
MFAVGVDVSNGRSTVAVLGARRTVVVRPYEVPHTADGFAELTARLNDLDGEVRIVMEHTGRYYESLAMSMYRAGFFVSAVNPLAIKDYQEGISVRKVKTDKADALKIAQFAIDKWEILPQYSPMDTIRYDLKTLHRQFQLSSKTKTALNNNLIALLEQSYPGANRYFDSPVRPDGSQKWVDFADTFWHVDCVAKVSRKAFTERYRKWCKRHGYNFSEAKAVEIHEDARQKFPLVPKSDTCKLLVKEAVSQLNAVSRTVETYRAEMDRLASQLPEYETVMAMTGVGKSMGPQLMAEIGDLRRFVHQKSLVGFAGTDPIKDDSGDKVSDSKPSSKRGSPYLRKTLFVIMTILLQLQPPDDPVYQFLDKKRSEGKQYYVYMTAGMTKFLRIYYGKVRDCLKEKGLWEQPIVDEVNPV

SEQ ID NO: 211198 - protein, 314 aa, unidentified
MGWALEEVVENQVFVGIDVSKERLDAALRPRDESFNVANNPRGIATLIKRLKKWRVSRIVLEASGGYEIAAAYDLAAAGLPVAVVNPRQVRDFARATGRLAKTDAIDAQVLAHFAEIIQPQIRLLPDVQTRELMALVARRRQVVDMLTAETNRHGRAVDAVNRAIAAHVRWLRKQLADLDAALERAIRNSPLWSEKARLLRSVAAVGSVTVITLLSHLPELGTLNRRQIAALVGVAPFNHDSGKLRGTCAIWGGRAPSPRSTLHVHAWPKPAVTGLLRSVDCRGQETQGRTHSLHPQVAHHAQCCAPTADTVEP

SEQ ID NO: 211199 - protein, 458 aa, unidentified
MEQFYLGADVSKGYSDFILVDQHKQTVEENFQLDDTAAGHIQLYDQLTHFFAEHPDAEILAALESTGGYENNWYNALLKFQGSLNIKTARLNPEGVYCNSKADLKRTITDKVSALSIAEYQIAHPEKIIYQQEDYWAPLRKQWSFVTLLTKQKTQLSNQLEALIYTTNPEVLQHCQDGTPQWVLKLLRQYPTANKLRRARVSTVARIPYITKDRAHELISEAKKSVASAQDDFTGQLVSSTIEHIMQIEKSIKAQMKILTDNCSIPEIEILKSFSGIGDYSAIGLMLELQTVDRFPNVKKLSSFFGIHPVFKASGDGRTVACMSKKGRQEPRKILFMVVMAAINCNPLIRDLYNKHVAQGKEKMSAIGICMHKTLRIIYGMLKNNTAFDPDIDKANQLRSRKKTSQAPKDKNRRYQEFDSNAPVSRRQRKKRQEQKMSHSATSDAKNGINTPTPESSL

SEQ ID NO: 211200 - protein, 314 aa, unidentified
MSTQESKFYVGVDVALRHLDLFDPKSGKSERIKNDAVAIDSLCQRWKGQSDVMFVMEAGGGNEELLVSKLQQASIPCALIIARRVRDFANSIGVDATSDQIDAKLISQFAAVLKPDQLPAQSDDERKHVALVTRRFQVLDMISQERKRLKVTWDQEPKSSIQKVIELLREELGSIDAKLVKMLASDTKNKRKVEILRSADGIGDVAASVLLAQLPELGKINREQMAKLVGVAPMNPDSGESSGRRSLYGRRSNVRTVLHMATLISIRGNGKMKPHYAHLKSEGKESRVALVACMRKFITTLNHLIKTDQLWETK

SEQ ID NO: 211201 - protein, 465 aa, unidentified
MPNHPKPRSKPRKTTRKMDPTEGLPPLNLNAAGIDVGSAEHHVAVPGDRDAEPVQSFGSFTADLHRMARWLKDCRIQTVVMQATGVYWTALYDVLESYGLEVNVAHAQHTKTLPGRKTDVQECQWLQKLHTFGLLNKAFRPAEEIRVLRSYLRQRENLVAAAATCVQHMQKALTEMNIQLANVISDISGTTGMAILRDIVQGERDSEKLARHKHALIRATHKEIARSLEGTWRPELLFVLEQSLDLYDTYQDKIHSCDQRIDEHLGSMEAKVDPLREPIPQPPRRGKGARPHQPRFDLRGHLYRITGVDLTQIDSIDVKIAQTVISEVGLDMSRWKTEKHFASWLGLCPDHRISGGKILKRGTRRVINRAATALRLAAWSLIRSQSALGAKFRRLRSKLGAPKAITAMAHTLARLIYRMLKFGHQYADRGIEYYEAKYRQQQLYWVAKKAATLNMQLVPIPDVPN

SEQ ID NO: 211202 - protein, 319 aa, unidentified
MSSYQFVGVDVAKDKFDVALKIADRWDQVCFPNSKTGYQQFIKWLTKHTNQPHIAMEATGHYSALIAQFLFDRQLPVYVINPLQIKNFARAKLTRNKTDSIDAKLIAEYAEKMQPYPYQPRSDAQKEVKDLTNLLDTLKQQHTRLSNNQLHSVQGKIAKELLKKLLKELEKEIIPVQSEIAKLIKRDSMLDEMMTLLISIPGIGKITAYKLISTIVDISHFKSPKQFAAYLGVSPRQHQSGKYEGKTTMSRLGNAHLRKTLYIAALVAKRFNLALQPLARRLKEKGKSPKSVTGAVMRKLAHIVFGVLKNKQPFKFVHA

SEQ ID NO: 211203 - protein, 404 aa, unidentified
MYNAVGIDVSKGKSTVAVLQPGGTVIRKPFDVSHTSHSLNELTSYLGTLDGDTRIVMECTGRYHEPVLKALSQAGLFVSVVNPHLIKNFGNNSLRKVKSDPADAKKIARYTLDNWTELRQYSGMDNTRTQLKTLNSQFSFFMKQKVAAKANLIALLDNTYPGVHKLFDSPAREDGSEKWVDYAYSFWHVDCVRKTGLKAFTERYRAFCKKHHYIFQPDKPEKLFNAAKELVAVFPKEKTYKLLIQQSIQQLNLASEHVERLRREMNELASTLPEYSTVMGIYGVGKTYGPQLIAEIGDVSRFTHREALTAFAGVDPGVDESGQHKSKSNRSSKVGSARLRKTLFQIMTTLLQNAPENDPVYRFLDKKRSQGKPYYVYMTAGANKFLRIYYGKVKECLRNLEQTS

SEQ ID NO: 211204 - protein, 318 aa, unidentified
MKTYFIGIDISKDTLDVCILNDSDEKELAFKVSNTVEGIEEMIALACCSGNDSSHRYCFENTGNYGLLLASLLEERQLLYYQVPALEIKLSQGIQRGKNDKVDAWRIARYAKMHEQELIPSALSEEVLFTIKNFLTYRNFLIKVRTQFKNEKKAFYQVSKIADVSYEMEEIIQQIKALDDKIASVEEKITKIKGVGFLTAAYMLVLTDNFNKFQNPRKFNCYAGLAPFEHTSGSSIKGKTQTSKLRNRRIKTVLFSGANSAIIHDQELKAYYKRKKDQGKAHNSIINAVCCKLIYRIFAVVKREEPFVNLTRYNLHMS

SEQ ID NO: 211205 - protein, 425 aa, unidentified
MPISTLFVGIDVSLKTNQVCSINFNQDVFFSKKFDNSPSGTEKLIRLVLDVLYAHREFTKVIFCLEATNVYHIHLASALAMDHRLSAYDSKVYAENAKSIENYKRTFLDREKTDPEDAFLCADYARVGKCKKSHPVIGYQKTALQRLTRQRKHVAEQLGKEKQFLSSNLFLRFSALKVNPDDVPFSNIYGKTSSVMLNDFLTNEEIVNAHLSDLVERISELSKNRFDDPESVARQFKKLANDSYRLDKVASDSVSMAMASSFRLIQTYQDELNRLDKEIVRLLGSLDNQYLTILTSIKGVGLVYAAGIIAEIGDISFFKDSDHLAGYCGLRWKRKDSGHKNSDHTKQPNSCNSYLRYYMVEATGSVIRYNDEYASYYYRKRSEVKINAHKRALVLTARKFVRLVFGMLRNHKLFDNHYLAAFSQI

SEQ ID NO: 211206 - protein, 343 aa, unidentified
MEYYVGLDVSLKQTSICVVDQAGLVVREGVVDSDPEAISVYVRSKAPEAVRIGLETGPTSTWLWTELKRLGLPVICIDARHAKAVLKMQINKNDRNDAIGIARIMQTGWFKEVHVKDIDSHSVRALLASRALLVKIKRDLENHVRGLLKNLGLVIGRATFNVFAARAEELIEGRPDLVAAVRPLLEARNAVEQQVSELDRKVMKLARRDAQVQRFMTVPGVGPITALAFKATIDDPARFARSRSVGAYVGLTSRRHASGEIDWSGRISKCGDAMLRSYLFEAAGVLLTRVPKWSTVKAWGMRLAKRNGLRKAKVAVARKLAVILHRMWIDGTEFNWSKKEIAA

SEQ ID NO: 211207 - protein, 489 aa, unidentified
MKSIYEKSNPAIEKVFEKAGSRKKVMCVAFDYAKRSHTALACNGAAMQLRGAFDVHNTPEGLQYLDKVVRGLCRKHHIKKECVIFGGEDCGAYAFNFIHALAAKGSLVIGVNAKDAKDERGNVLASTDKKDPLGVAAMILKGRGRTILPDTSDMEILRRLNRQRASLVKSRTASSNRTHHLVDQLLPGFLNKDKSGITPFSRASLWLMSERFSAKQIHSRKLSTLVDRFRAFSVHHAEETAVQLKSLTEMILPPPPAMIPCLQESLSHEVITYRTLTQSIHDLEKVIARQLASTQGAMLTTMPAMGIGLAAGLYAEMADPSRRKALYKMSSYAGLVNRLKQTGGPDKEARSQGRSRRCNTFLKTVLIDLVIHVGLYGSPDLKSDYYRREEAGQYHRLTMARKMLRVCAHLIEGDFYVPLELRENPSYEALRQYYQDAWNSILVKWRNAGAIKQAFAKDAPLEQWRCMINERYGLNLSNISPQAWQLRKK

SEQ ID NO: 211208 - protein, 356 aa, unidentified
MPETNPAEVIIGVDTHKHAHAAVALTALGARLGTITVPANRRGYQELETWARSFGPVRAYGVEGSGSYGAGLSRFLQAGGHTVLEVNRPNRQLRYQQGKSDPLDAEGAARAVLSGQADARAKPGTRAVEMIRHLKVARDTAVKSRTQAMITLKALIVSAPAALREQLEGLAGKMTLIRHLAALRPGALTSPTASAKAALRALAQRWLALDAEIKAHEAHLDALTAACTPILRTAYGMSTGTAAEMLILVGDHPDRIRSEAAFAKLCGACPIPASSGKIIRHRLNRGGNRQANAALYRVVIVRMRSHPPTLAYVRRRMGEGKTKLEIIRCLKRFVAREIFGYLCGAKTLPTAPMTAS

SEQ ID NO: 211209 - protein, 371 aa, unidentified
MKNVRFVGLDVHAETIAAAIAESGGEVRNLGVIPNRPESVKKLLKKLGTPEQLQVCYEAGPTGYVLYWQLTELGIKCQVIAPNLVPMKATDRVKTDRRDAERLARSLRAGDLTPVWVPDAAHEALRDLVRARLVAKRDQLRARNRLSKLLLRHGRRAPEGVRPWTQQYLRWLQHMHFEHGALAATLTDYLYEVEHMAARIGRLEQAIDTAVKDVPAPLGAVIHALQALRGVAALSAITLATELGTLSRFAHPRQLMAYSGAVPREHSSGERIRRGAITKCGNPHLRRIVIESAWAYRYRPVISRALAPRQRDQSEAVKAIAWKAQNRLHARYCKLLARGKCKPQVITAVARELLGFIWAIGVEVEKNGLPA

SEQ ID NO: 211210 - protein, 413 aa, unidentified
MKKHTYRAQKVNNMNWQQVNEQTAGEALVLAVDIAKVQQYALLTNQEHTQTWLMQWSHLEHTQYLIEQLKALEVPITVVMESTSTYGDSLRYQCRQAGFSIYQANAKKVHDAREIYDGVPSLHDAKAAWLIAKLHKDGATKLWCEPTEEARRMNALRLEYELHQDQHLRNKNRLEAYLSRHWPEVLTLMPLDSITLEQLIKAYGSPQEVGTQSEQAASDMRGWGKSGLSADKIAKVITCAKNTLGEPCIEAERQFLMALASELQHSRELKRAVKQALEAIVENDEALQEMGRTIGKITTAVLISLHLDPRCFATPKSYQKALGVNLTEKSSGQINGRLRLSKRGSAIARKFLYLAALRLLVNDPLVGKWYEAKKDDRAKLKTVIALMRKLPLALWHIARGERFDAGKLLKVAV

SEQ ID NO: 211211 - protein, 394 aa, unidentified
MNFSFFVGVDISKDSFSVCIRNAQGEIISQKSFPQSSEGFSSFFDTLSSLSDNLSSFLVGMESTSIYHINLFSFLTERNISSVIINPSVIDRFSKVKLRPSKSDKKDAKTISEFLFIYKPSPSSSNKISELKIVTRERENISKEISHIKDDIKRCLSVLFPELEYHVNPFTSGMLNFLLHFPSAKSIASSDRKIVDFVFSESFKGRGKKPSFSSDMIFDLASKSIGINSKAFENILKSKIKILLLLLEELDKFDKLLSESIKDVEINDINIITSIPGIGKTSAISFLCEIQDIRRFRRAKSLIAYAGIEPVIKESGRHEVRLGISKKGNRHLRRILFLMAMNVIKYDGKFKEFFLKLRAKGKSFKSALIAVANKLLKTIYSMLIHGTFYSPNYS

SEQ ID NO: 211212 - protein, 353 aa, unidentified
MIHLPEEREVILGVDTHLDVHVAVLIDVVGRIVATTSVPTTALGYEQLIEWARGFGRLTRAGIEGTGTYGAALARRVHAHGVQVLEINRPDRSRRRLRGKSDPTDAENAARAVLAGEANAIPKAQSGVVEAMRAVSMARRSAVKAKTQAINQLRALLVTAPESIRATLWKVKPEQCVARCARLQSLGDTPLLKALTSTLRLLARRWMSLAKELHQLDAALEELTKRAGRRLLTRFGVGPQTAATLLVTAGDNPNRLRSEAALAALCGASPLEASSGKTTRHRLNRGGDRAANNALWTISMVRMRSDPRTRAYVTRRTAEGLSTKEIQRCLKRYIVRELYPLILADLAESIRKT

SEQ ID NO: 211213 - protein, 362 aa, unidentified
MKKNRTEKTLETTIGLDLGDKNHYYHMIDQECVVIKKGKIGANVRAVRRFFSAQPPSLIAMEAGTHSPWISREAHQHGHRVLVGNPRKLRMIYRNEQKSDERDAEMLARIARMDPQLLYPIVHRGPRAQSHLAVLKSRDVLVGARTKLINHCRGIVKSSGERLPTCSAASFARHRDEIPEDLAPALQPVFEMIGELTKRIKNMDYTIKKLCEKEYPETGDLQAIKGVGPITALAFVLTLEQPERFAKSRAVPVYLGLTPKRDQSGDSDKQLRITKAGDMFLRRLLVQCAQYILGPLCEDSDLRRWGLKLCARGGKNAKKRATVAVARKLAVLLHRLWSGKQPYDPFYHSKQHDDENKAKQAA

SEQ ID NO: 211214 - protein, 430 aa, unidentified
MLSAGLANVQHTMTRKSRAVAILTKELPQVIVGVDTHADTHHVAVVTEYGKPIADQKFAATAAGYSEMLDFITSHGIVTAVGVEGTGSYGAELSRVLAKEELKVFEVNRPNRQHRRIRGKSDPLDAYQAAQSVLAERGISTPKTKDGPVECLRVLRTARASAIKARTIAINQIRSLLVSAPETIRSKYRGLHTSAMITTLVRSRPSGHPADTEYITALTLKTLAVRYQSLRSEIASTDALLQEILDSYAPLLTELAGVGVEVASQLLVTVGDNPERINNEAQFAALTGTAPVPASSGKTNRHRLSRGGDRQANSALHHVVLSRMQSDHRTKDYVAKRTADGKSKRETMRCLKRYVAREIFRQIFTPIAAPDIADLRPLRQQLGVTLQQAAEQLSQWPSNLSRIERGIARNDHVAQKYRQWLTQQKLSPSM

SEQ ID NO: 211215 - protein, 352 aa, unidentified
MMIIGCDFHPRFQQISFLWEETGECGQRRLMHTAEAVEYYRSLRGTKVRIGIEATGSYGWFRRLLSELGHELLVGDATQIRASNPRRQKTDKRDAEHILGLLVADRFPAIWQPPAENEQLRQLLLHRSRLVRLRTRVTNQLDGMAKNEGFVVPGGWSGKRRQAIEALPLPGWYGERRKDLLGLLDRVEERIAPLNKAVGQAAANNAEACLLMTHPGVGPVVSLAYVLTIGNWQRFPRGKQVGSYLGLIPCEESSGDKRRLGHISKQGNTLLRWLLVEAASTAQRYDPSWHRQYVRLSMTKHHGVAKVAIAHKLAVRLYWMLRSGEDYQHVRERGSHARQSECPGGRSRRPIE

SEQ ID NO: 211216 - protein, 368 aa, unidentified
MERKSSKLYVGMDVHKESIDLAVAEEGGEVRHHGQIGGDMSALWRAVRKLESLGRELVFVYEAGPCGYGIYRGLTARGHTCWVVAPSNTPRRVRDRIKTDRRDSLKLAGLARAGELTPIYVPDVRDEAMRDLVRSREDAVVMQHQARQRLAALLLRNDVRYAGKTAWTAAHRRWIADLKLPQSAQRLAFEEYVQAVEEASARVQRLTRCIEQGLAHWRWRPVVGALQGCRGIQLIHAVRLVAELGDLSRFSHPRQLMGYLGLIPGEDSSGGHRQQGAITKAGNRSARRALVEAAWAYQYSAKVSALIARRQVDVPKAALDIAWKAQVRLCARFRRLAARGVNRNKIVVAIARELAGFVWAIAQQVKPV

SEQ ID NO: 211217 - protein, 373 aa, unidentified
MPKYSTAFGMDVHLRSTTVCALDADTGEAATRRFPGNPWGEIAGWMDGFPGPSLAAYESGYLGFAPQRELAGLGVECVVAAVSKIPRSAADSASKSDRNDAARMAKAILAHDISPVWVPSPEVEGIRDLAGAYDGATARLATAKQRLLAFLAKRGFVYGGTTPAGNPRKYWTYDFLRWLDKVRPEDDGGVRTLAALRNEVEAAAEARADLLSEYRAAVDASPIAAEVAALQSIKGCAFALAAAFSAEVGDFTRFRSGRQVTAYFGLAPSQRSSGDSVRLGGISGAGNALVRKLAVEGSWCYAAARHQPKLTPRDTGVPLEIRMHGRKGSERLLRRREEMLARGMPAAKANAATAAELVRWLWALGMMCREGAE

SEQ ID NO: 211218 - protein, 355 aa, unidentified
MKKYSEAFIGFDTGEIRYLGEIDSSPATVEKVIGKLAERYAKLHVCYEAGPTGYGLYRQVKALGHECAVVAPSLIPRKSGERIKTNRRDAVTLARSLRAGDLTSVWVPDAIHEAVRDLSRAREAAGEDVRKKRQQLLSFLLRHGRIFSGRKHWSLAHRRWLAEQKFEHPAQQIVFQDAIDAIEDGAARLRRLEEQLLAIAPSWSMAPVVAAYQAMRGVSFIVAVTFVAEIGDVRRFDNPRQLMAFLGLIPSERSTGETVRRGGLTLAGNRRARRVLVEGAWTYRYPARVSETLRPRLEGLPKAVRDIAWKAQIRLCARYRRLTAAGKKTPVVIAAIAREMAAFLWAIAHQIEPLT

SEQ ID NO: 211219 - protein, 412 aa, unidentified
MDVLHPCCAGLDVHKDSVYACVRRIGPGGGVRETVRVFGTMTPDLLRLADWLAAEGATHVAMESTGVYWKPVYYVLGEQFELVLANAQQLKRVPGRKTDTQDCAWIAKRVQDGLIAASFVPPEPQRDLRELCRQRVQLTRQKAAVSNRIQKVLEDANLKLGSVASDVLGKSGRAMLRAIIAGGTDPVALAELALGRLRKQLPRLRPALTGRVTEHHRFVLKLFLDEVEVVEEWVRRLEERIEVVLSPFAEAVRRWTTIPGVDRRTAQAVAAEIGTDMSRFPTEGHLSAWAGMCPGNDESAGRRRSGTTPRGSPWLKRALVQAAWAASHTKDTYLSAFYRRLAARRGRKRALVGLGHAILVIMYHMQRTGTDYADLGGDYFERRDKDRLTRRLVRRLESLGLKVTLEPAPQAA

SEQ ID NO: 211220 - protein, 351 aa, unidentified
MSRFSPSAAIATLGIDLGKNSFHLVGQDERGAIVLRIKLSRAQLTRRLANIPPCLIGMEACAGAHHIGRQLQALGHDVRLIPAQYVKPFLKGHKNDYRDAQAIAEAVQRPTMSFVAIKAPEQMDLLALHRVRARLVSQRTGVTNQLRGFLLERGIIVRQGLAPLRQALPGILASSSDMLSPRMVRLIADLMEDWHRLDERIAGVSAEIEALAAQDEHCQRLMSVPGVGPIISSAVVAAIGTGAGFKQGRDFGAWLGLVPKQESTGDRTILGKISKRGNKYLRTLFVQAAHVVLVRRPHGARLGLWPWIETAGRRLHRNMLVIALAHKLARIAWAVLARGHAYQPRSALQAV

SEQ ID NO: 211221 - protein, 399 aa, unidentified
MFCGWDWGSTLHGVCLLDEDGATIKTWMVRHTEEDLSALFTEFAQLGEPGLMPVAIERGEGLVVGLIARAGHPVLMVEPTAFKAARPRWGAAGAKSDAADAFMLADYARTDGHRLRRVEPLAQATRELAALVRARTSLVEARTAASNQLWAALAEHWPGAALVFQKLTSQIALAFFADYPTPQAAALLGEGRMRQFCRRHSYRGGKSPAELMSRLRAAPASANPIAEKVLEAIVRSQVAQIGLLNVEIRGLERKTADALAAHPKTALLKTLPRVATVSLAALIAEIGPLLQRCENPEQVAAMCGAAPVTRASGKSRTVGFRYTANKPARVAITSFADNSRHSSAWAGDCYRRARARGARHPHAVRILARGWVRVIWACWTTDTPYDPARHRGEQRLAAA

SEQ ID NO: 211222 - protein, 343 aa, unidentified
MQSITTIGLDIAKSVFQVHGVDVAGQVVVRRQLKRRHVLTFFEKLAPCLVGIEACASSHHWSRQLQALGHSVRLMPPAYVKPYVKRQKNDVADAEAICEAVTRANMRFVPTKTPEQQSVLMLHRTRHLFIRQQTSVINAIRAHLAEFGIVAPVGRRGVEELLTVIADPNDKRVSDVARACLVALGSQLLSLKKQILHFDRMIMVWHRSNATSKRLNYIPGVGPLLATALVSSVADPGAFRSGRNFSAWIGLVPKQHSSGGKDRLGSISKQGDRDLRNLFVVGALSVIRYAKLHGTKHRPWLTALLARRPTKVAAIALANKLARMAWAMMAKGERYRQPAALAA

SEQ ID NO: 211223 - protein, 305 aa, unidentified
MEEIKFKQVINVGCGIDVHQDIIVATIQKSNDKLETREFKAYTSSLKSLRDWCKAEGVSHIAMESTGVYWKPVFNVLEEDFEILLVNARHVKNVPGHKTDKKDSRWLSKLLLSGLLKGSFIPPCDIRELRDLVRYRKKVIEDCSSEKNRIIKILEDANIKLSSVLSNVDGSVGTKIINHLIEGNTDIDELMKFYHGKIKTSREEFRLALEGKLKKHHQFMLKIHRDSIADREKLISRLDAEIEQATQAYQVEIGLLQTIPGVGKDSAISIISEMGVDMEKFPNEHHLSSWAGMSPGNNETGGKKK

SEQ ID NO: 211224 - protein, 347 aa, unidentified
MALTIVDTPITGGVDTHADVHVAAALDPVGGLLGVAEFPVTPAGYARLLSWLGGFGAVCLVGIEGTGSYGAGLARYLATAGIRVVEVDRSDRQDRRRQGKSDPLDAVSAARAAQSGRARGAPKGRDGSVEAIRALMVAKRSARAERTQTINQARSLIVTGPDDLRIRFARHTVAALVAETASLRPRPGSTVGYATRIALRELGRRAQFLDGQLERLDELIVPLVTARAPGLLALYGVGPDTAALLLIAAGDHPARLRSEAAWAHLCAAAPIPASSGKRTRHRLNPGGDRQANHALWRIVITRMSSHPPTRAYVERRTAEGLSKTEIIRCLKRYVAREIYPRLRAAAD

SEQ ID NO: 211225 - protein, 408 aa, unidentified
MQVLYPRCAGLDVHKDTVVACVRCVSEPEHHETRSFATTTRELLALGEWIASHGCSHVALEATGVYWRPVWHVLEGQVELVLANAHHIKNVPGRKTDVNDAMWIADLLAHGLIRSSFVPPQPIQELRDLTRTRKQVVREISQHSLRIQKVLEDANIKLGSVLSEVLGVSGRAMLGAIIEGERDPHKLADLAHGTARHKHDALVEALHGHIRPHHCTLLKLHLNLIIALEHTVAEVDAAVGKCLDPIRQRARLLTTMPGVRDTVAEVIVAEIGIDMTRFPTPGHLLSWATMCPRNDESAGKRRSTRLLKGNNWLKTALVTAAWAAVRTKTSYLRAQFLRLKARRGAKKAIIAVAASMLTAAYFILRDGVPYRDLGPNHFDRQQRGKTVRRLLRRLHDLGYNLPLQNQPV

SEQ ID NO: 211226 - protein, 341 aa, unidentified
MKDTIIGVDLAKRVFQLHGATTTGHVIFRKKLTREQFRRFMAGHPPCLIVFEACGSASYWAREMAKLDHDVKLIAPQYVRPFVKRQKNDAADAEAIVIAARQPEMRFVSPKTEDQQAKAMLFRGRERLVNQRTELVNALRAVLYEYGHVFPAGIGHLKRIEALVEDRTCDLPTLITAECRDLLAQIAEKTDRIDAKTKALKRLAAETDTTRRLQTMPGVGPITALAVEAFAPDMTQFKSGRDFAAWLGLVPRQHSTGGKARLGRISKAGQTDIRRLLIIGAMTRIMGRARHKVPAESWIGRKLASKPKILVGIALANRMARQIWAMLRKNEDYRDPTLAAA

SEQ ID NO: 211227 - protein, 325 aa, unidentified
MSDPLHSIGIDVCKRFLDIHVCPTGKCWRVPNSIVGLLSVQSQFPEPDGVKRVVLESTGGYEREAALWLSQAGYPVGVINARQGRNFARAMNQQAKTDQVDAQVLALFGDKITPAVRPLASEAQQQLDDLVTRRRQLVDILTAERNRMALLRGKAQANVEGHIEWLTEQIKELDGEIEAQIQACQAWRHTQELVLSVPGVGKVMASTLVSALPELGKLSHKQIAALVGVAPFNDDSGQMRGKRRVSGGRANVRQLLFMSAMVAVRYNPVLKEFYSRLLQRGKEKKVALVAYMHKLLTTLNAIVKQGKAWVSPIAEAETEKVALSA

SEQ ID NO: 211228 - protein, 368 aa, unidentified
MKQQTSATTETLNKGKTMIDFAGKTIYVGIDVHKKDWQVGQYYQGITLGNHRITGNSGQLIDFLKKRYGGATLKCVYESCAWGFNLQRQLTAAGIECIVVHAGDVPGSDKEKKNKTDKVDAIRLARHHASHSLKAIHVPDEELQKERNLMRFRKKLVGDLTRSKNRLKSLLKFQGIDIPEKMDNSHWSHNFIRWIEEQGAKDRLLQDTVELMLEEVKLQRQLLLKAERKIRALMSSEKYAAKSKLLRSVVGIGPKVCTLFLLEVGDIRRFKGFDPLNNLVGFYPGSNSTGDKDVDTGISKRKHKELRTMLVEAAWQAVRQDPAMLEAYEQLTKRMKGNEAIIRIARKLLRRMRAVLISGVEYQKGVVK

SEQ ID NO: 211229 - protein, 315 aa, unidentified
MDEPRRVTTCVGIDVSKDRLDVHLRPSGEAFAVARDGKGLETLVERLASLDISLIVLEATGGFETTVAATLASAGLPLAVVNPRQIRNFAKALGKLAKTDAIDAEVIALFAEKIGPQARPVASAQAQALGELVARRRQLVEMIGMEANRRRRVSDKRLVKKIDRHVAFLEKELADIDADIDAGVRASPAWREAEDILTSVPGVGPVTARTLIAELPELGALDRRKLAALVGVAPFNRDSGQWRGHRMIGGGRTSVRNVLYMAALVAIRHNPIVRATYLRLTQRGRPKKVAIIACLRQLLTILNAMLRTKSQWKIA

SEQ ID NO: 211230 - protein, 337 aa, unidentified
MKRYLGVDLHRTQFTVCTRLENGRTYLRQWPMRELKLFAAQLKKEDELAVESTGNTRLFHDAVVEQVARVAVVNPGQFRVISQSVKKTDKNDAELLALYLAKGLLPEVRMKERQQREMSHLAQTRDLLVKQRSALKAKINNLLSSEGINLKREALSSNKALDRVLSLPLSPLMLAEARVLVSQIRSLNQSIDELEEMIKAEGPKLAGHKNLMSIKGIGPVSAAVLLSVIGDIRDFADAGKLAAYVGLVPRVQNSNETEHSGRITKQGNKLARTCLVQCALVAKRFSPFLQNFYQRIQRRRGGGKANIALARKFLGVIYHTLKNDWVFEDFPHFVLAS

SEQ ID NO: 211231 - protein, 572 aa, unidentified
MGKSRKRAMAKESGTSLVSPTCKCAETRQMLGRLPAVVLRRLLKEKKVLGRSKLKAKDVMIRALEGLIDAADIDLVLLQARPRTETIVAETIAQSKHDGSMLYLEGNRWEEPVMGIDVHKVTLAFAIATPAGVIKEGLTENTLEGLAVLVQACRLNQVAIVAMESTAEFWLLPYWTLQDAGIKVIVANPLQVKATQGIKTDRLDARRITLALRDGRLKPSVACDREQYALRKAMRELVTQTELKTQAVNRLKQIFHKASAPDLVEKAIDSQRGLSILAALPGCCARDELYTVVQVAFSQHKGMIVDPAELDKITSSFWAFLQRVDINRDRQRFVLILDEIVMHKAKIAELERVGLEYARQHREFLDDLKLVLTIPCVGLHTALAILAEIVDIRYFSMAFKLAKWAGIVPSTHQSGYRKRVHGKIYKGGNKYLRRACWLAADNDYAKAGGPGHRIGQFITHLIIDKKKPVNVAITGGAHKLLTIIHAMLTRKQSFTIINDDEARTRQEKNSQRKIHELERKLESLSISEVVPRFVKYLKAHVIHYQEIESEVQAIESALLGDIAGLMIDSGGD

SEQ ID NO: 211232 - protein, 421 aa, unidentified
MRSKNDNRQVKKRQRMTDATLVIGMDIGCEFNAMCLMSKEGTILGRYPKIYNSRKGFDYFHGIVESMKEKYGFTDVLIGMEPTGHYWRKIAYFAMDKQYEVRFIRTTALKHQRELDESSSAKNDIRDAYTIANIAREGKYIDTVIEDNIFRQLRTLAHTREKIQRISTGAKHALKGMLEDYFPELKHIFWSMKAKGLWALLEHCPFPEDVLKTDIDTVTELIAQSTRRKIQAHEKALQIYKAAQHSIGLQRVGDADRFRVAAYLSEIRHSETQLKEIEAQMEALLKKIPLAEYILSMPGIGTLTCGVFLGELGNPCNFTNPKQIVKYAGYDPKEHDSGQRTGRRIISKKGRWLLRKYLYFMAMRVVHRSPFLKDYYENKQKTMTKKEALCAVVIKLIKVIFALLRDKRTFTEKQSCLKQAA

SEQ ID NO: 211233 - protein, 430 aa, unidentified
MDEVDRNRLEKFRQLRQEIRHSDQYLIVGIDVAKDRHHAFYGTAKGKTLLRRLVFSNDHEGFRKLMDQAEVLRVQHGLKKVVYGMEPTANYHKPLGEYLITLGRAVVLVSGVTVARNRESLDGRWDKHDGKDSANVADLISQGKCLYYEHPSVELRGLRGLLSLKKRFKRQEQSYRVRIRNHLIAQYFPEMDQYYERLGAEGLAIVRWCLPASQITQLDIDPFIERVTSRRITMEKRRRLEEIWEKAAESIGCEEVPGVDHEAKVMVEGLKQIREMIKETEDKIRELCEQFSEYPYLLTIPGFGPDVSAKVLGAVGDPYRFDNGKQVLKLGGLDLSADRSGKGSDKAIPEISKRGKADLRYALYQAAFVASTKNRDFMLYYTSKIQGRQKEKGIHTKMLIKLSAKMLLMAWTLMKKKEAFNPAYLRVELS

SEQ ID NO: 211234 - protein, 584 aa, unidentified
MENMKKLKSNCLVGVGIDTSRYGHVVKFMSSDLSVAAPGLIVTECRDGYDKLEKQLNKLSRSNPGTYFKIRIDAAGQYSANLENFLRGLPLPIDVSVGEPTRNKNYRQAHYPKTKTDDVEGWAMARFSVIEQPPATPKLPDEFFALCEITSRLQGAVKDSTRAINRLHNLLSRVFPELENIVSNVAAGWVLALLQKYPSSAKIARARLKTLKSIPYAKLDKVKAIHEEAKRSVGALHGPLIESMLQELVGQVQSSKKVEKRYENLLIEAYRQLPDSGHKQVETIIGIGEITAAILVSKIISIDRFEMPKNLVGYFGVFPNLKSSGINADGTPKPAPIGHMSCKGNDLVRRYLWTAAFSAIQHNPAIRALFNRLRKRGTRGDVAVGHCMRKLLHLVFAVWKTDKPFDKNHYPWETKSNAVETSIEQSTRKENAVGPKMDTNSKEVASQEVTTATVNLDRQLPSVKQQSAKTQVAKSTNSVDYAYLRSQVTIEQVLKHIDHFENLRGTKTQRRGPCPIHKSTSKTSKSFSVNLTKNVFQCFNQKCGAHGNTLDFWAAIHGQTIHQAAVDIAKTFDLSPAVTEKRNP

SEQ ID NO: 211235 - protein, 438 aa, unidentified
MPNKVIFNFDELFISVGIDVGADFSWMSIVLPNQQFVGKPYKILHNSMDSLASAVSKIKEAEEMYSLESRIFLESTGIYHYPLFCYLRDKGFNCSVINPIITKNSTNINIRKVHNDRFDSKKAALVGLKPDLKVSLMPSDLALNCRNLCREYYDLMDSRNAYVNKLIDELRMVFPQYLGIFSKVTIDTSLILLETYTSPSAFINADKQEIIDLIRSTARFGLTYACNKYNAIIQAANDADEFGYILDSNIKRIRLYIGFIRKYDEEINSILESMHELAAANEDTDFVKQIRLIETFKGAGFLSAMSLMGEIGDFSAFSKPKQLFAYFGLDPAVKQSGKFEGTKIQMSKRGSAIARRVIHTLTLQSISASRTGESKNPVLLDYYLKKCESKPKLVAMGAVSHKVCNMIFAILRDSKPFEIITPQEHIKKYNAAKCDVAA

SEQ ID NO: 211236 - protein, 435 aa, unidentified
MTDQREWYAGVDWASESHHVFLTDADGRRIAERSFQHGGEGLAEMAAWLMATSGAAAAFQIQVAIEVPHGPVVETLIERAFKVHAINPKQMDRFRDRFTLAGAKDDSRDAEVMASALRTDPRCFRLLASADPGVIELREWSRIAEDLGAERNRLTNRLREQLWRYFPAMLELENDLGAEWLLDLWEAVPTPEKSARIRQTTIAKLLKRHRIRRFDAAHVLDVLRRPPVQVAAGTTEAASAHIATLIARIRLVNRQIKDAHQRLDTLTTRLIPTEEAGPGQKKQHDVEILASLPGVGRIVLATLLAEAFDVLQRRDYAALRSLTGVAPVTKRSGKSCIVIRRQACHDRLANAMYHWARVAVQHDVTSRAKYTALRSRGHSHGRALRSVADRLLNVACAMLKTGTTFNPSLAAQKTLSPRRSCCPVGGLLPRCRRRD

SEQ ID NO: 211237 - protein, 342 aa, unidentified
MTTIKYSVGVDIASSTFTVSVSEIPWKVILKPETFENAEDGYQTLLEWLAEHHLSVSETVVCMEATGVYSEGLAYFLYAKGYRVAVQSPLEVKRTFKPYGPKSDAVDSLQIAEYACRHMDKLSFWRPRNEILEQVKALLAVREQFVSQSTAHKNALKAIQRKVVRTPFAEQAYLQLIEQVKKQINAIDLEIRRLIESDPTFKEMLLLLLSVPGVGLLLAAHFILLAQFSLEYKILASFLGISPNEHSSGTSVFKHATSRHFGPPAIRKLLYLAACSVCTHRPQFGRYLARKAKEGKPPRLVLNNVENKLVRIMCAVLQSKTAFIENYHSVQPFVFQKTLTVS

SEQ ID NO: 211238 - protein, 454 aa, unidentified
MCLEDRPVLEPNAAGIDIGAREIFVAVPPGRDEHPVRACATFTEDLEQLADWLVACGVTTVAMESTGVYWIPLYDILESRNLKVCLVNARHMKNVPGRRTDWHECQWLQYLHSVGLLRGAFRPEAEVTAVRTIMRHRTELVQMSSQHVLHMHKALTQMNLQIHHVIDDITGLTGLAIVDAILAGQRDPVELAKLRNWRIKADPETIRKSLVGNWRDEHLFTLRQSRELYRTYQQQMVKCDQEIEKLVGGLEPRVDPEEKPLPPDRKRYRGAKKRAKKNGQPDTGFNLRTEAYKLFGVDVTQIPGLETMALPLFGEVGRDMSKWPTADHFASWQGLCPDNDISGGRMLWKGTRKLHNRAGQMFRQAAYSLHHSLTPMGDYLRRMKTKLGPAAATTATAHKIAVIFYTMVKNQVEYDETIWATRDLKRQQRIESRLKRQANQLGYQLVPLEEKPAA

SEQ ID NO: 211239 - protein, 417 aa, unidentified
MNTMTMHPYAAFVGIDWADTKHDVCIQSADSLRREFAVIPHKVEGIDEWARSLHRRFSGPIAIALELSKGPIVYALQKYDYFVIFPINPSTLAKYREAFQPSRAKDDPTDAELALDLILRHPERFEPLQPQSVEIRKLAALVEQRRRLVSDRVRLTNRLRNTLKQYYPQTLEWFDRINTKLFCDFIERWPTLMQVKRARTTTLVNFFRAGHTRNPALLETRLASIRSSQHLTLDEAVIAPNKLHALMLVGMLRVILDAIKTYDQTIAELAPKHDDYDLFSSLPGAGPSLAPRLLVAFGEQRNRFKNAAELQKYSGIAPVTERSGTKHWVHWRWRCPNFVRQTFVEWAAQTINKSYWAGEYYRQQREKGSAHQSALRALAFKWIRILYCCWQTRTQYDEATYLKALQRRGSPLVAKAG

SEQ ID NO: 211240 - protein, 340 aa, unidentified
MERRYIGIDLHRNRFTCCIRLENERTYLTEWRLEDLGRFVKKLRPSDEVAVEITSNTRLFHDAVAPQVARVVVVDTNQFRVISQSVKKTDPNDARLLSLYLSKGLLPEVRMKDKEHGQLASLTHTRDTLVKLRTALKNKVNNILSSRGLNLAKEALSSEKKLAEVLELPFDEIVRIELRVIVEQIRSLNRSIAELEKTIGEEGSKLEGHKGLSSIKGIGKITGAILLSVIGDVNDFPDEGHLASYFGIVPRVSNSNETERSGRIHKRGTKLGRTALVQSALIAANYSPYLKRFYEQVKARRGAGKAIIALARKFLGIIYRTLKNQWVFEDFPNFVLAEES

SEQ ID NO: 211241 - protein, 444 aa, unidentified
MKNNTEKQNKSANTKVGTEELRDQNSKIAFITDDMMVIGVDVGSENHYARAFTNRKIELSSKPFKFTNTKDGFEAFKAWAEDLAKRNGMKFIIVALEPTGHYWMNLGTYIKDSGMILAQVNPAAVKKSKELDDNDPSKNDRKDPKVIAGLASDGRYCLPYIPEGVYAEIRELSNQRIRAVEELTRTKNRVARWFSIYFPEYLDVYGNVYNVTGTMILKKYPLPQDIVAAGIDGILKVWSDNKVRGTGRRRAEKLYEAAKNSIGRKEASKSARMELMDLLNDLETYESRVDRIMEEVTDLLWQIPNTRELLNISGVGTISVLTFVAEVGDISRIKDAKALQKLAGLAIVADSSGKHNGESGISYRGRKRLRWCVYQLAISLISRNRDFAAIHAYYTTRAENPLKKMQSLIAVGCKAMRVFYKILTTGTPYDGRKMTSDIIRPAAA

SEQ ID NO: 211242 - protein, 370 aa, unidentified
MYGLHLHNSLDLKLTISQHEETDMNKFNTIGVDLAKNVIQVSVVSKNNKELQNRELTRKRFAEFLAKQKPSLVAFEACATAHYWSRVAIRHGHDAKIIPAKAITPFRQGHKTDKNDALAVAEAAKRPNIKIAPRKEIEQQGMQAIQRSRELLVHERTALSNHMRGLLLEFGEVIPQGFAALTRRIPEILEDGENELAYIYRPTLSRLFERFVQLQDDIKFIEQQIKFYVKENNPCYRLTAMEGVGPISAILLFATLGTGEAFKNGREFSAYIGLTPKQYSSGGKANIIGISKHVANRRLRAVLIQGARAYVYKMKEPKSTKDKWLCSLIQRAGYKRAAVALANKNVRTAWALLTEGTEYIKYHDNMQQAI

SEQ ID NO: 211243 - protein, 343 aa, unidentified
MTVIIGVDPHKASHTAVAIGDDEDELATVKVRATRSQVARLLAWAEPFEKRKWAIESAGGLGYLLAQQLVGAGEDVVDVPATLASRVRLLGSGRSNKNDPNDALSVAVAALRAPALRSVEPADHAEVLRLLAKRNTDIGNHRTRVVCRLHALLVELAPGGIAKELNVSDGVALLARVQPANAVERARHELALELLDDVRRLDVQLKESHRRIRAAVRASSTTLTDLFGVGPILACALIGYTGDVRRFRNRDQFAAYNGTAPVEMSSGGRVVHRLSQRGNRKLNHAIHLVAICQIRQPHSDGRAYFDRKVAEGKTKKEALRSLKRHVSNAVYRQLVIDARNAGR

SEQ ID NO: 211244 - protein, 338 aa, unidentified
MEDNIYDHYIAIDWAAINMAIARMTKKSNKITVRDVPSDVAELQIYLKNLKGTKVLAIEETTTSQWLYTELKEYVDKLFICDPYRNSLLSEGPKTDKIDASKLVQLLKAGLMKEIYHSTKQFIYLRKLVSSYEDLVKAGVRLKNQRYSMLRVCGKTGYEKTNFKLTSKDEQYVLKSLDRQIKNYEQEKKEYTKEFARLAKKYPEIRHQKSIPGIGLINAVKIVARVVTPWRFANKGHYLSYAGLIKHEKISGGRSYGKKQPRYCRMMKSVYKSGVLAAIRGNNPVNNYYEYLITDKNYPAYNARNKACRQLAIISFGVFKSGKKYKPNWRNHVEAGCA

SEQ ID NO: 211245 - protein, 324 aa, unidentified
MKVVFPTCCEVDVHKSFLVATIIKTPKDSLQPSYQKKRFSTFNSDLNRFADWLHENDCLDVCMESTEKYWVPVFNILEKRSIRVVIANPKWVKAVKGNKDDTKDSKWIGDLFRIGLVKSSFIPAKDIRILRELTRYRYKLTSMKSSEKNRFQNAFTVCNVALDSVVSDMFGKSATAITDYLTSDEDFDPQHCVSLLQRSLKKKADDVLASIAGYEITPEQKCRVGIIRDHLHYIEKLIERVDICINAMVEKYDGAILLLCTIPGIDRSSAITVISEIGVDMAQFGSSKRLCCWAGLTPGNNESAGKKKSVRISRAGVYLKPALV

SEQ ID NO: 211246 - protein, 374 aa, unidentified
MSNITSLETERHRFLYVGMDIHKDNHTAVATNCFGQNLLELVISNSEQDFDDLVARVERLSKAKNLKLIFGLEDSYGYGLRLAKYLYEKGLSVKMIAPVLVDRERQYETHPEKSDSLDALGVAKVLIQRIDRLPNYSISKNDEISKNIKELTLDREFLVKEQGRLKNQLHRLLHKAHNSEYRAKFKDPFSLKALKYWRGYPVPQKRTEIMGNVSIIKNQIRRKIKRLLDIKKEVKEIEQELSCLIQQTNQKIETLNGCGTVLASQVLAEIRNIDRFQSPHSLAKYAGLCPREKSSGKTFRHIKTKSGNRRLNMAVHRIALSQISKSGNQYAKTYFQRKLSEGKTKVQALCCLKRRLIDIIFMMLKYKQAYNYIG

SEQ ID NO: 211247 - protein, 341 aa, unidentified
MNIITVGIDLAKNVFAVHGVDNNGKPVLVKPKVSRADLLPLIANLPPCLIGMEACSGAHHWARQFRQHGHTVKLMAPKFVAPYRMTGKRGKNDAADAAAICEAVTRPAMLFVPIKEEHQQIILCLHRTRQGFVEERTASYNRLRGLIAEFGIVLPQKVTCLRREIGAHLEDLPGYANRCVGDLLTHADRLDERIAEYDRLIAQAAREDARSKRLMKLPGIGPVTASAMLASMGNGHDFDNGRQVAAWIGLVPGQYSSGGKARLGRITKAGDSYLRSLLVMGARAILNSIGDKQDRFSRWARSLQERRGYWRAVIAIAAKNARLAWAVLKYGEDFKLEPGTV

SEQ ID NO: 211248 - protein, 344 aa, unidentified
MTKISTIGLDLAKNVFQVHGVDASGAVVLGRQLRRAAVEKFFARLPPCLVGMEACGGAHQWARVISRYGHEVRLMPPAYVKPYVKRNKNDGRDAEAICEAVSRPTMRFVPVKSVEQQATLAVHGTRALLVRQRTMIANALRAALSELGIVAAQGYEGLGELMARLQEASDEIPETMRGALLLLAQHWQALDTDERALERQIAKAARCDGEARRLMEVPGVGPIIASTVLAKVPDAKVFRSGRDFAAWIGLTGRDHGTGGKHRPGRISKQGDRVLRALLISGASAHLRQQKRRGISDPWLRELLARRPYKVAMVAFAAKTARIIWAMLVKGEHYRDRATAPAAAC

SEQ ID NO: 211249 - protein, 452 aa, unidentified
MAQGSGLTRGDRNRNRKIAALRQVVRRDRAVLAVDLGEDKQAAVLVDHEGRVLARKTVTAKAHRLGALLEWAAGQAARAGFAGLVVACEPTGHRWKALMGLADAAGAGFVCVQPLAVHREREKDDYTRDKTDHRDAYLIGRLAVRLDCYLPERAEEAWARLRHLGARRSALVADVVCCTQQVSDLLACAWPAALATAARPLESTTWLAAMGVVTDRCCGDPARLRTMGYEKFLAAVRRELPRWGAKRVYHKIVTGLWDALADRGGVAAQRRGALERVHLVMADWRSLLARQADTEGRMCAVLDELGLTGLVTSIDGLSAVGAAVILAETGELSRFATSRAVVKHAGLNPAENTSATLAGRTRISRRGRPGLRTAAWRAAWPGLRHNRVLAARYAHLTGRDSGTRLSDGQARAACAAALLRWLWAVVTRRQAWDARIAAGLIPARAVTAPAAA

SEQ ID NO: 211250 - protein, 343 aa, unidentified
MFYAGIDLHKQSITVCVVNEARKIEKRKRLMCANEAAIVAFFKEVIQELGPFRAVVEATASYEWLIKLIEPLADKVILAHPGKLRVIAESTRKSDRLDAQVLAEFLSRDMVPASYRPTPRQRDHRGLVRQRSSIQRRITSVKNRMRRIMSNYNADRPDLFRKAGQEYVSSYPLSAADRICMNQLTSEWLFFLQQLKSANQALVDFAGTAPIREQHQRELLQSIPGVGFVTTEVVLSEIADIDRFDSQKQVVAYAGLAPGQRESAGKMKELHIEKAGSRYLRWALVEAAWQLVYRVPRWKTIYERLKKRLKAKKAIVAIARRLLGMMVAIMKSGEPFTATHQPA

SEQ ID NO: 211251 - protein, 352 aa, unidentified
MASTKQQKAIVVATAEDRVYVGLDVHADTIHVAVWKNGDCEADWVTSGDCAKLVEQLEPLRPGLKRVVYEAGATGFTLARLLASRGLPVIVCAPSKMPRMPAGDAKTDRLDARKLAGYAAKGLLKGVTIPTEKEERERALIRYRSDVVKRAATVKVRIKSVLLFHGFGKLKSWSAAERKRLLDMALPDEIRFVLEDLLRELDFHEAAKKRVEGKLRDALADGRHAAVARRLQTHPGVGPVVSACFMLELFRPERFGSGAAVARYVGLAPGRRQSGASCRGGPIMKAGQGKLRSLLIEAAWVWRKCDKKARAVYGRLVGNTGNAKKAIVGLARRLLIRLWTMSVYGKEYEPLA

SEQ ID NO: 211252 - protein, 340 aa, unidentified
MHTTIIGLDIAKSVFQLHAEDASGKVLWKKRLRREELERFLRKLPPALIGMEACGSAHHWGRVISGLGHEVRLMHAKYVKAYVKRGKSDVRDAEAICEAVQRSNMRFVPIKSIEQQIDRSLERARDLLVKQRTQLMNATRGLLAEFGVIARVGLRGFKTLSEKVDAGDAAIPKPLLSAVKPLLEQWRGLHASIDELEERLVKRARSDERMRRLMKIPGVGPLTAHALVTAIGDPRRFSTGRDFAAWAGLTPLPDSSAEKTRIGHISRQGDHSLRRLLVLGAATMARHAKAKPSEARAWLVGVIGRRPVKVAMVAQAAKTARIAWALLRSGENYRGSMLAA

SEQ ID NO: 211253 - protein, 340 aa, unidentified
MTIATLGLDLGKNWMHIVGLDADGRIVLRRCVRRDRLLAETVDMPPCLIGMEACCGAHHLGRALEAQGHTARLMPPQYVKPFVKANKNDYRDAEAAAEAVQRPTMRFVPLKNEAQLDLQTIHRIRQRLVGRRTALINQLRAILLERGITVPQRRRILELRLRAILADEPSPLSARIRHLIEDMRAEWRELDARIDAFDAELTAKARQDDACRRLCEIPGIGALNATALVAAVGDGAVFDRGRDMAAWLGLVPREYSTGGKQRLLGISKRGNKYLRTLLIHGARAALPYLAARDDRLGSWLRALLARVHRNIAIVGLANKLARIVWAVLANGRRYAAPAAA

SEQ ID NO: 211254 - protein, 341 aa, unidentified
MENVALIGIALGKHSFHLHCQDKSGKALQRKKFTRTNLMQFLATCPSTVVVMEACAGAHFMARRISDIGHEAKLISSQFVRPFVKSNKNDFVDAEAICEAASRPSMWFVQPRTEVQQAMRALHRARESLIRDKVKTTNQNNGFLLEFGISLPVGDTVIKRLPLVLVEHEIPEYLSRLLMKLHAHYLYLVEQITELESELNQSIKTDDATQRIMTIPGVGPITASLLSSQLGDGKQFSCSRDFAASTGLFAASTGLVPRQYSTGGKSTLLGISKRGDKNLRRLLVQCARSFMMRLEHQQGRLAEWVREQLSKKHSNVVACALANKLARIAWAITTNHNAYQA

SEQ ID NO: 211255 - protein, 434 aa, unidentified
MTLINFVAANQKYYAFNLLSVFIMVFWSVQYLLQHLLVQTQLSDQLLQPLILILQLPQTPQFRHARPGKFFLPVNGMDYLLPLRLTVRNVLTRRITMNIVFLGIALAKNVFQLCGLNQAGKPVYTKRTGRKELLQTLANIPACLIGIEASTGAFYWQREFEKLGHKVKVISPQYVKPFVRGQKNDGNDAQAIAVALMQPTMQFVPPKSPEQQDIQALHRARQRIVNHRTATVCQIRGLLLDRGIPIGSAVSRSRRAIPLILEDAENGLSSRMRRIIAELYDLFNDLGRRIHFFDKEIETVFRQSEACQRIAKVKGIGPKTATAVVAAIGKGTEFKNGRHFAAWLGLVPRQHSSGDRQVLMNMTKKGDKHLRTLFIHGARAVVRVATNINDGHMNQWVNQLKERRGFNKTTVAVANKNARIIWSMLRNDTGYQVV

SEQ ID NO: 211256 - protein, 347 aa, unidentified
MRFYPNQHRHTCGVDLHGRNLYLCILDQQGKICLHKNLRCDPDLFLQAIAPYRDDLVVGAECIFCWYWLADLCIDQGIPFVLGHALYMKAIHGGKAKNDKIDSRKIAVLLRSGAFPFAHVYPHQMRSTRDLLRRRLHFARKRAELLTHVQNTLTQYNLPRPEGRLTRSENRRELPECFDDPAARASISADLSLIDHYDSLIPELENTVLEQARVHDPDNLHRLQSVRGVGKILGLTLLYEIHDIGRFESVQNFSSYARLIKCAKESGGKTLGSSGAKIGNVHLKWAFSEAAVCFLQHNPPGQRYLQCLQRKHSKGKALSILAAKLGRATYFVLKQQTTFNMDRFLPN

SEQ ID NO: 211257 - protein, 320 aa, unidentified
MQDRNFDPAKAIGADVSASQLVIVSAQCDRPVISVPNTTAGISRWLTSLTPGCCIGMEATGAYHRRLADLAVAAGHTVWVFNPAHIANYLRSQNVRGKTDPQDARGIARYVLNEAHRFHPYTTPSALHERLHLLIQRRHQITKQRASLRMSLADLPDCQARKRQLFAALNALQAHIDALINLSFDDQPQLQARRSRLRSISGFGPLVSAAVAARLSRAPYATSDAVVAAFGMDPRPRDSGTYKGTRKLSKQGNAEERRLIYCAAMTACRSPVFKAIRDKLLARGMSKIQAYCVVARKLLRIAFSVWRSNQPFNPQLVGKA

SEQ ID NO: 211258 - protein, 310 aa, unidentified
MDAIYVGIDVSQARLDVHVLPGGEAFAVARDGKGLEELIERLRAFSPQLIAVEATGGFETIVAAAVAGAGLPLVVVNPAQIRHFAQALGKRAKTDPIDAAVIAHFVEAVKPELRALPDEAQRLLAELVGRRRQIIEMMVAERQREKRAANIRVRKSILRHIRVLEKELPEIDEDIGTLVRGSTVWREKEDLLVSFPGIGNTLARTLLAELPELGALTRRQIASLVGVAPFTRQSGHWKGKSMIGGGRAAARTALYLAALVASRHNPILKTFYARLLAAGKPKMVALIAVARKILTTLNAMLRDKRKWQPA

SEQ ID NO: 211259 - protein, 386 aa, unidentified
MVYVGVDISSEKFDAAFYYPDKDKYVVQTFRQSKNGFKKFSSKLSNIHDDVSIAMESTGIYDHSLLEYLRDSGFNVVLLHPYAVKNFLRARSHSKTDAIDARNLAFALFKLGDDAVVSTTASDELLSLRKLVRFRASLVKEYSNLQKQLKGTLKLNMPEILKFFSRVDSVVLVELLCRFPSRKSILEHKDEAIQFLSSFKTWSEDKAKAVVSELESSIGLTDSFDVDSTIISTLVNNLKALKDSIKDVDKQIEKIFSTFPHNPISTIPGMGSITQATIISEIGDIERFPTKEKFVSFLGLDPVIRQSGKSFHSGGISKKGNALLRRLFYNFAVRALRIIPKYRLKYDEMRKRGKHPKVILTAIARKLAELVYAIWKKGVDFDPSMP

SEQ ID NO: 211260 - protein, 356 aa, unidentified
MPVAPTYPNGSDGVVIAIDPHKASWTAVVVGSGLTPVAALRVEVNRAGYRQLLRFAAKWPQARWAIEGAAGLGAPLTERLRAEGIAVIDVPAKLARRVRLLSTGHGRKNDQADALSVGIAAWSAPALRTVEVDEAIAALRALTEHRDDLVRTRTQLVNRLHAMLVKLVPSGLPRGLTAESAAETLRRIRPRDPLGRTLRRLAVELVGELRRIDRRIAEATQALSDAVAASGTTLTRLLGVGDVVAAKLLARTGPISRFPSAAAFASFCGVAPIEVSSGDVVRHRLSRAGDRQLNYALHVMAMTQIRYDSPGQAYYQRKRAAGKSHKEALRCLKRRLADVVYRIMIRDTVSSLTLAA

SEQ ID NO: 211261 - protein, 466 aa, unidentified
MLVQEPDGTKVLAATFAHDERGLRQLCRTLVRLRVELVAIERPDGLLIERLLDAGIRVMAIHPNQVAATRPRFRTSGGKSDRFDAFVLCELARTDSQRFRALTPDSDQTKALRALTRAREDLVETRVALANQLRAELERYWPGAAVIFKDIDSPIALAFIKRYPSPNDAHGLGAQRLGWFLARHAYSGRKTPGQLIKKLRAAPEGRAGGHEIEARRQTALAFITALEPLVTKITELTSEIGHCLRQHPDGPIFLSLFKGPKSVITAAELLAEIGDCRERYPTPDALAADAGMSAVAIESGKRKVASFRWGCDKRLRAAFCVLADTTRRWHPWAGDHYARAITRGHDHPRAIRTLGRAWCRVIWRCWQDRTPYDPARHRGLQQHVLVTIPGASGSLPDTTATQRMLGAAVTGTAARRAEREALIGHHRCCLDQPPGEGLTRLPPVEGLVKTSLSRRVVRCRLSGNRT

SEQ ID NO: 211262 - protein, 347 aa, unidentified
MLHAGLDLSRKKLDVCLLSDEGEHLDQLAVPPDVDSLRRLARRVVEVHRQPVCAVIESMTGARIVHDTLEQQGWSVEIADAQKVKGLAPLACKTDKIDSMVLAVLSHRDLVPAIWLPDPRVREERELARFRLHLVKHKSALKCRIHSTLINFGRACPVTDLFGVEGRRLLERLEVPEPWCSNVTASVELIDDLEEQIAGINRRLKDGHADHRYIPLLMSVPGIRWVLAFTIAGEIGEIERFSSPERLAGYTGLCPRVNQSGEKDRRGPLTKHGPTYLRWALLEATMHALRHPAYAECYQRNKRRLGKQRGAKVAQIDIARRLAHAIWHMLTRNQPFAPRGAAFRLAA

SEQ ID NO: 211263 - protein, 343 aa, unidentified
MQTITTIGLDIAKSVFQVHGVDNDGKVVIRRQLKRRYVLAFFEKLQPCLVGIEACASSHHWSRELQALGHTVRLMPPAYVKPYVKRQKNDAADAEAICEAVTRTNMRFVPVKTPEQQSGLMLHRTRHLFIRQQTSVINAIRAHLAEFGVTAAVGRKGIEELLRVIADPSDKRVPDVVRTCLAALGSQLLSLKKQILDFDRMIMAWHRSNQTSKRLNCIPGVGPLLATALVASVADPKTFRSGRNFSAWIGLVPKQHSSGGRDRLGSISKQGDRYLRSLFVAGALAVIRYAKIHGTKYRPWVAALLARRPTKVAAIALANKLARMAWAMMARGERYNYPASLRV

SEQ ID NO: 211264 - protein, 366 aa, unidentified
MRTKKSYYIGLDVHKDSIWMAVMVDEKETPIESKQLPNKYLKVVKAMAPYQEKGKVQVAYEAGCLGYGLQRHLTEFGFDCRVIPPTKVVRPGMDKRVKTDKRDAALIANMLKRREGESINIPTRADEAGRDLLRCRSDFKDDQKRAKQRLLNFLLRHDKKYESNRYWTMKHRKWMGGLKFDLAMDKMTYEYYMNYIENMEERIARVDEEIRKEAENECNAEKTRILRAFRGIDYVTALSFICEIGDFRRFATAQSFMSYLGLVPSEYSSGKKIKRGSITKTGSSHLRKLLVESAWHYTRAVKESKRLASRRVGTSEQVITYADKAMFRLHKKYYKMLARGKQQNVAVTSVARELAGFIWGVMKMAA

SEQ ID NO: 211265 - protein, 310 aa, unidentified
MDEQGRILAQERLGPSPSEALGFVRGFKDPVIAMEACYCWQPIWDILEFEGYELKLAHPTRTRLIAEARVKTDALDSERLAHLLRANLLPTAYVPPREIRELRELVRLRVALVRERAAHKARLRAELAKRGIRFTSPFTKNARAFLLSLGVRRIEESLWMIEVLGRRIRSLDAELRRRTKGREEVRLLQTIPGIGEFSAVAILAEVGEIGRFPTPEHLCSYAGLVPSVHQSGNSRYYGHITKQGSSLLRWVMQECLWAHLREETYITRFYRRLEWRKGPKKAATAAARKLLAAVWEVLSRREPFNAKGGR

SEQ ID NO: 211266 - protein, 387 aa, unidentified
MPQPNDLSRSPIALNQDGTVIAVVEMSRSSWLVAGIVPGIARHPLKKLAPDEAALLGLLERWRGEATQAGRQITRIAVAFEAGRDGFWLARWLRARGIETYVIHPTSVAVSREHRRAKTDRRDTALLKRVFLGWLRGEPDHCTMAAVPTLEEEDARRPNRERESLVGERTRVVNRMKATLARLGIRGFKPTLRDAAERLDTLRTPDGAPLPPNTRAELRRDMARLGFIVGQIKEIEDARQEGLATQPDQGPHAMVRLLARVIGIGLETADMLVHEILSRNLRDRRAVARYAGLTGSPDESGAKRREKGLAKAGNARVRRGMVQLAWRFLLFQKDSALAQWYRARTADARGGTRKTMIVALARKLLIALWRFVSTGEAPEGVVLRPAS

SEQ ID NO: 211267 - protein, 329 aa, unidentified
MNEHSQGREAVKAARLNAGIDVSKATLDVAVGTRSERFGNDAQGMESLAALLHAQDVDIVVLEATGGYEAAAAAALQAAGLTVAVVNPRQARDFAKAMGVLAKTDKVDAKVLAAFADVIAKHEKRQTFLREVPDEQRLHLAALVTRRRQLLDMRGAEANRLAMAHKVTRKSMAAVIKTIDKLISELDRDIDTHIREHFRDLAKVLNSAKGVGPVTTSTLAAQLPELGQLDRRAIATLVGIAPLACDSGKKKGQRHVWGGRCQVRAVLYMAALAAARSNPVIRTFYQRMLAAGKPKKVALVACMRKLLTILNAMARDGTPWNPALHAINP

SEQ ID NO: 211268 - protein, 417 aa, unidentified
MNSPPETIPIERFMAIDLHKQYVMVGGMNVRREWLLRPRKVRMSGFRDWAARNLKPGDAVVIEATANTWDIYDIVAPLVTKVVVAHPGKVRQIAEARVKTDKEDVKRLIILLIADIVPEVWVPPAHVRELRSLTSFRWRLGKQITMSKNRLQSVIQSFNLNPPEGNVLANKNQSWWQQQEFSDLTGFQVQMDMQIVEQLEAQKALIDQKLAELSNSDPWDEDIVYLMQIPGFGVIFSMIILAAIGDISRFSHHKKLVGYAGLGAGIHDSGQKHQERSITKSGRKELRWAMCEVAWGAVRSDPYWKAQYQRLTKTKHPNKAIVALARRLLVSVWHILTKREPYRHFDPETIAYKMITWSQRMDEKALKGMTRQQFAKYGLLRLGIGHDITRIVRNGVPRRVSPSDEVLAIKPELRPPK

SEQ ID NO: 211269 - protein, 369 aa, unidentified
MTDLTLFVGLDVHKKTISVAVVEAAAGAVVRFYGTIANTPDSVRTLCRKLSKEGQQLHFCYEAGPCGYGVHRQLTRLGHRCDVVAPALIPRKVGDRVKTDRRDAMMLAQTLRAGQLTAVWVPDEAHEAMRDLVRLRTQAMRDLRKARQQLLSFLLRHGRNSPYGHWTKRHRRWLGELVFAHPAQHLALEEMLQRIERAEALCDRLKAAILELVPQWSLAPVVQAIQALRGVSLIVAAAIVAEVGCFSRFESPRALMAYLGLNPSEHSSGATIRRGAITKTGNTLARTCLVEAAWTYRFPPRVSQIIRDRLKELPEPIRAVAWKAQVRLSARYRKLTAAGKPEPKVVVAIARELVGFIWAIARMVEPKFA

SEQ ID NO: 211270 - protein, 348 aa, unidentified
MRFYTETHQHYCGIDLHAKTMYLCILDREGQILLHKNIRSRPEAFLAAVAPYRDDLVVAVECMFTWYWLADLCRREGMEFVLGHALYMKAIHGGKAKNDKVDAFKIATLLRGGNLPKAYVYPPEMRATRDLLRRRLHLVRRRGNLLAHIQNTHHQYNLPVPSAKIAYKANREGVAEVFTEPDVRKSMEINFMLIEHYDGVIRELQLHLERRAKQHDPQAYHRLRSVPGIGRILALTILYEIHDIRRFPRVQDFLSYSRLVKCEHSSAGKKLGTGGAKIGNVHLKWAFSEAAALFLRNNPEGQKHLRRLAGRHGKAKALSILAAKLGRAVYLMLRKERVFEMERFLART

SEQ ID NO: 211271 - protein, 338 aa, unidentified
MEQVITIGLDLAKNVFQVHGIDAAGKVLVRRQLRRGDVLRFFGGLPRCLVGMEACATAHYWARELTKLGHTVRLMPPAYVKPYVKRGKTDVADAEAIAEAVTRPTMRFVAVKTADQQAALMLHKVRDLLVRQRTMLINALRGHLAEFGIIAARGPGGVTAAIISLHEAQDSLPELARVALHGLIDQLRIVRGEIARVVKRIVAWHRASNASRRLATIPGIGPITASAIAAAVPDATLFQSGRQFAAWLGLTPRAHSSGGKERRVGISKQGDGYIRRLLVTGATAVIRLARQGNASKTWAAKLLERKSARLVSVALANKTARIAWAVLARNQSYVAPAM

SEQ ID NO: 211272 - protein, 389 aa, unidentified
MKIFVGIDIAKLNHFAAAISSDGEILIEPFKFTNDADGFQLLVSKLESFDKNSIIIGLESTAHYGDNLVRYLVAEFYQVCVLNPIKTCQMRKNNVRKTKTDKVDTFVIAKTLMMQDDLRFITFFDLDMMDLKALGRFRQKTIKQRTRLKIQLTTYVDQVFPEIQYFFKSGLHQNAVYALLKEAPSPKEIASMHMTHLANLLKVNSHGHFTKEQAKELRVLAQKSVGANDSAISIQITQTIQQIELLDSQLEKIEVEMTDIMKFNDSVIITIPGIGYINGGMILGEIGDIHRFSNPNKLLAFAGLDPSVYQSGNFQAKTTRMSKRGSRVLRYALVNAAWNVVRNNATFKAYYDAKRAEGRSHYNALGHCAGKLVRVIWKMLTDEVEFNLE

SEQ ID NO: 211273 - protein, 339 aa, unidentified
MTIVMGLDQHRAQITTEWIDTVTGEIGRARVAPAHREGVRRFLSRFAGQELEVALEATTGWRFVVEELRKVEAAVHLAEPAQTSALRGNKKRPKSDRADAKHLRELLMIGRLPESWIPPDYLLDLRSKVRLRHTLVDQRGEWQQRIRAVLYHHGLPHRRELDLLTSEGRGWLDEVEVPDAAREQITVALTMIEALETQIAPLDKQLRSYARRQPGCRALMAHYGIGELTSVVILAELGDCRRFSSSRQARYAGMDITVYQSDGRRSPGHLSRQGPPALRWALYEAAQVARRPASPDRGYYDQAAERLGANRACLAIARKLLLRSYHTLRELGEEALQPA

SEQ ID NO: 211274 - protein, 340 aa, unidentified
MEYGAIDLHTRKSLIRIVAEDGAVVLDRTITTTREGFAQVFGGRPAMRVLLETGTESEWVAQAIAAAGHEVIVADPNYALMYGVTVRAVKTDRRDVAALAEACRLGIYRAAHRVSAAQRQIRRQLRVREQLIRMRTQAINLLRAQLRQEGYRLPSGSSATTAARCRDLALSAGLRDALAPILGLLDDLAPRVKACEATAERQASADPVVRRLMTAPGVGPIVGLTYRAVIDDVGRFPDASTSTAFLGLVPREESSGTRRRKGGITKRGPTALRVLLIQAAWGIWRQRQGRGALHAWVERLAARRGRRIAVVALARRLARILYAMWRDGCDYRPVPVPVTI

SEQ ID NO: 211275 - protein, 363 aa, unidentified
MQYLINNELSSHEETRFEFNRSTGAIKLGIDVHQDFYTVVEQVGGSNPKPPQRFRKEAFVHWAARLKSQGAQVHAVYEACGFGFGLQRQLAALGIECQVVCPQKLDERNKRMKTDGLDAKALCLRLDRFVEGNKDALARVRVPSEEEEQVRAIHRQREQLVKARKRLEAQGRSLMVNHGIEPVKNWWKARTFGALPVPGWMKELLGHSQPILVALQEKIQALTQQLQAAAEPGQARGLGALTSVVIDREIGNWNRFNNRRQVASYTGLCPGEYSSGNTRLQSCVTKHGNPRLRAALVELAWRLVRFQPNYKPVLKWRETLRKGALATGAARKKAIVAVARQLAVDLWRIRTGRLTPEQLGLSI

SEQ ID NO: 211276 - protein, 343 aa, unidentified
MQVVRIGLDLAKYVFEVHGVDSHGKVVVRKTLRRDAVARFFANLPRCLVGMEASNGAHYWARVLSDLGHEVRLISPQFVTPYVKSNKNDRNDAEAICEAVDRPSMRFVPPKSTDQLAIQAVHRIRRRLVADRVRLVNQIRGLLSEHGIVIARDISQLRRSLAVIVGNDDDGLSDMVRSLMRELRAEMAELDDRIATYDRRIREIFRTSEQCQRLGKIEGIGPVTATALIAAVGNRTCFKNGRQFAAWLGLVPKQRSSGGRARLFGISKRGDRYLRTLMIHGARAALGKAGGKQDPRSLWLGKLRQRRHPNVAAVALANKNARIVWAMLSDNTFYEPAPSVKAA

SEQ ID NO: 211277 - protein, 354 aa, unidentified
MKRAKSELQPGDKVFVGIDMHKLKWHVTARTADFELFSGSIPGKWEALQRILERYKGHQINTVYEAGYFGFWLHDDLVEYGAECIVTPPSLIPQEYGNKVKTDRRDSRKLAHFLAKGMLKRVWVPTEKERYHRQVIRRRRQLIGDRIRAQSRIKAELQLHGLNLSAPHGKWTKIYLTNLGRIRFNNRFMQESFKRLLEQYHFLDEQIAKQTGLLQELSATKLYKQRVEILMTIPGIGMIAAMELLLELQDVNRFQRADQLAAYVGLTPSQYSSADKIRMGRITCVGKNSLRAMLVQASWALIRKDGVMREKYDRLKSRSGGKRAIVAVARTLLIRMRRMLLENNPYVVGLVATN

SEQ ID NO: 211278 - protein, 368 aa, unidentified
MTTVVSTGVQITVGVDTHADAHVAAALDQLGRLLETHSVPTTPTGYGALLAWARSLGELERFGIEGTGSYGAGLARWLHGQGVEVVEVERPKRQNRRRRGKSDAIDAEAAARAVQAGTATAQPKAGDGPIEMLRSLQVARRSALKARTQAANQLHALVVTAPDSLRTRLRRLSRPRLVATAAAFRPCLPLATPTAAAQLALKSLAVRHQQLSAEVEALEAQLALLVAQAAPDLVAVKGIGTDIATTLLVTAGDNPDRLRSESAFAHLCGAAPIPASSGKTNRHRLNRGGDRDANRVLHLLAVGRMGWDPVTRAYVERRTTEGRSKKEILRCLKRYLARQLYPLLARNPALLLLRQESSVGPAVALARA

SEQ ID NO: 211279 - protein, 419 aa, unidentified
MSFKILKFNCCGLDVHKTWIYACIGITDSNNRTEYKQARFSSFTKGLNELCDWLAKYNCTDVCMESTGKYWIPVFNILEQHNLWVTLSHPKYTKPMKGNKTDRKDAKWICDLYMCGMVKPSFIPPADIRELRDLVRYRYKLTCMITGEKNRAQNCLTVSNLKLDDVFSDVFGKSSRSITEQILQHPGEKFDVAPFVHRLCKTPIEEIQAAVDGAISKEQAIKLRQCLDHIDELNKHISEVEQEILCLSDKYEAALNLIRTVPGFNKNPMTAIQVLSEIGCDMSVFPTDKHLVSWAGCCPRNDKSDRKIKSTRISRAGSYFKPVLVQVANALIKSKKHPEFITRYKRIKVRRGHKKAIIAICRMILTAIWHILSDLKPYTPEGFLESRPVKKEKILTTSQALNLLKLRGYVIKDDPLPTS

SEQ ID NO: 211280 - protein, 430 aa, unidentified
MLCSLRAPPWPFSIQEGAAVEVIHTRCCGLDVHKKSVVACVLITHTDGQVERQVRTFKTMTADLLALSDWLNGLEVTHVALESTGVYWRPVFNVLEDDARTLLLVNPQHMRAVPGKKTDVRDSEWIADLLRHGLLRASFIPPAPIRAIRELTRYRKTLVQERVDEANRLQKTLEGANLKLAAVASDVLGVSGRAMLGAVIDGERDPDVLADLARGVLRAKLPQLRQALLGRVQPQHVVLISRILAHIDFLEQAIAQVQVEIERCLPALEESLQLLQTIPGIGAVAAAAIVAEIGTDMSRFPTAGHLSSWAGLCPSNKESAGKRMKGPVNRGNVWLRAIMGEVAWASVKRRATYFHAQFHRIARRRGRNKAVVAVAHSLLVVIYHVLQTRQPYAELGIDYFDQLDTARIQRHHVRRLEQLGYSVTLTPLAA

SEQ ID NO: 211281 - protein, 454 aa, unidentified
MKIPQSTIRLLTGRLVKILLNREVSEMKYNTQNAKIESITEKTLIVGIDVGSETHYARAFDWRNYEYSKKPLEFSNNEAGFVTFKVWMEELAEKYGKDVVIPGMEPTGHYWFNLGAYLQDNGMKPVHVNPHHVKKSKELDDNNPNKNDRKDPKTIAALVNEGRFSYPYIPTGVYAEIRSLSNLRLQAQEEITRIKNRIARWFSIYFPEIKDVYKNPGAVSGLMILKVAPLPKDIVKLGVDGVNQIWRDAKLRAAGLKRAKTLVTAAEHSIGSQEACDSARIELKILLNDYEIYHQREEELMELIEEKLSEVPYIDKLLEIKGIGMKTVSGFVAEVGDIKRFDNPKQLQKLAGYAIVECSSGKHKGESHISYRGRKRLRYVLYEAAISLIARNTEFKEIHRYYQTRGKNSLKKMQSVIAVACKALRIFYAILTKGVTYDGAKMLQDIKRPQLKVA

SEQ ID NO: 211282 - protein, 440 aa, unidentified
MVNDVKEIEADGDEEVLERVCAIDVAKASGKVCVRIPGRQRRITRVWDVNATTNAIIALGDELAEMGIERVVVESTSDYWRAFFYLLEARGLTVWLVNARDVKQVPGRPKTDKLDAVWLAKLNERGMLRPSFVPPKEIRELRDYTRLRAQLVEERSRHAQRLEKLLEDSLIKLSTVATDILGKSGRAMLEALIGGERDPEVLADLALGKMRPKRAALREALTGHFDEHHAELARMLLDQIDALSEKVDRLTTRVDQLVGRLPEAQPPTSPGGEPGASGLSALDRLDEIPGVGIRAAQVIIAEIGLDMAQFPSAAHLVSWAKLSPRTIQSGPRSRSGKVGKGNPYLKGVLGEVASAAARTDTFFGQRYRRLMRRRGRQRALVAVARSILVVVWHLLDNPNARFADLGSDYYDRRINKDRRTRDLIRQLHALGHQVTLSPAA

SEQ ID NO: 211283 - protein, 350 aa, unidentified
MMIIGCDFHTRYQQIAMLDQATGELMERRLEHENGEAHAFYRGLQGAVRVGIEATGPLQWFERLLGELGHELWIGDSAKIRASEVRKQKTDERDAALILDLLLANRFPRIWVPSPAERDLRQLLWHRHKLVRLRTMLGNQLHFLAMGQGLCRKQKLFTRKGRGELEQLSLGPWSSRRRAELLRLLDQLGPSIAELDRAVLEEAQRREDAVRLMTHPGIGPVNALAFVLTIGPVARFGRSKQVASYLGLNPSEHSSGGKRRLGAISKQGNTMVRWLLIEAAHHTVRFDPQLRQDYQRLKFRRGSAVAKVAIARKLAVRMYWMLRSGADYAQLVRMQGSPGATLVKATTPLG

SEQ ID NO: 211284 - protein, 340 aa, unidentified
MQAARHIGIDLHRNQFTCCVRLENGRNYLTEWKLEDLPRFVKKLRPADEIAVEVTGNTRLFYEAVAPSVARVVAVDPNQFKVISHSVKKTDPNDARNLALYLEKDLLPEVRMKDKTQAQLASLTQTRDTLVKLRTALKNKVNNILSAHGINLEKEALSSEKKLNEVLAMRFDPMVKIELEVIVEEIRSLNQRVAKLEKTITDEGSKLEGHKNLTSIKGIGPLTGSILLSVIGDIHDFADEGKLAAYFGIVPRVSNSNETERSGRITKRGSKLGRTALVQCALIAQRYSPYLKRYYEKIKGRRGTGKAIIALARKLLGIIYRTLKNKWVFEDFPNFVLAEA

SEQ ID NO: 211285 - protein, 427 aa, unidentified
MDHVQQRKAKIRKHERQIAFPDAMKERGLPLPVVVPGVHARGVYVIYDDGRPLVEAYDGPQIVGMDLHRRRSVLVRVAEDGRKLATARIANSPARLATEIRRAGEHPKVVVEACYGWYWAADALAAAGAEVHLAHPLGVKAFSHRRVKNDELDARDLAGLLRMGRLPEAWIAPAQIRELREITRYRGKLVHSRTSCKDQVHGVLAKLGIEVTCPDIFGAWGTAWLDELVLPQPYCWKVASLRQLIGWLSAEISVLEQVSADLLAGHDAYRAVQQLPGIGPVLGAVIVAEIGDITRFAHPARLCSWAGLTPRHYESDTTVIRGRITKQGSPALRWALVEAVQRTRPAPRSAGPGRPSSPAAAPRHAPSPRSPRPASCSPTSSTRCATGTSGHWTPPARSTRPDEQARPRAARDRFRVWPPPRRRGRGI

SEQ ID NO: 211286 - protein, 340 aa, unidentified
MAYFAGLDVSVKETRVCIVDDAGKIVREARVASEPDALLQMLTIYRFKRIGLEAGPLSQWLYSVLAEAGLPVICVETRHMRAMLKAQINKTDRNDARGIAQMMRAGLYRPVHVKTLRSQKLRMLLTHRKLLQSKAIAIENDLRATLRNFGLKVGMIGMIKFETRIRELVENLPDLAVLVEPLLIVRRVVREQLGILHRRLLAIVRDDEVCRRLMTTPGVGPVVALTYRATVDVPARFRKSKAVGAVFGLTCAKYQSGEVDRNGRISRCGDEMMRVMLYEAAQSMLRSKKWSWLKAWAMQIARRRGMKKAIVALARRLAVIMHRIWVDGTEFRWTREVAAA

SEQ ID NO: 211287 - protein, 338 aa, unidentified
MSELATVGIDLAKSVFQIHGVDENGRVLVRRQLRRSQLLAFFQKRPRCLIGMEACAGSHDWGRRLQDMGHEVRLMPPSYVKPYVKRGKTDAADAAAICEAVTRPSMRFVAIKSEACSSVLVVHRTRNFLVRQRTQIGNAIRAHMTEFGIIAAKGAQNVERLKGQLDRLPEAARTPVSLLFDQLAETDKRIEQLTDEIAETHAHDETSQRLATIPGVGMLTATIIAATTPVVDNFDCARDYAAWLGLTPKPHSTGGKQKVGRISKMGNRYIRRLLYLGAMAQIMLRCRLKREPGSDWLSSMLIRKKTKVVAIALAHRMARTIFAVLRDGTRYQPQAAAA

SEQ ID NO: 211288 - protein, 354 aa, unidentified
MNIKYIGMDVHKETISIAVMNSDGKVVMESIIETKASTILQSIQGIRGDLHVTFEEGTWAAWLHDLLKPHVTELVVCDPRKNALLKDGNKSDKIDARKLADLLRGGYLRSVYHGENGLRTLKELARSYLTITRDLTRVMSRLKALYRSWAIPCAGQQVYAPRDRAEWLGKIAEPGVRRRAEFYYQQFDALAALRQQARRELLHESQKHFAVKLLRQIPSIGRIRAALLVALIQTPHRFRTKRQFWSYIGLALKTYGSGEYRFVGGQLKRSKKALAIRGLNLNHNHDLTNIFKGAATWAAASSGPFQNFYEARLAQGMKPSMARLTLARKIAAITLLVRKKGVRFDAEHLKQQAA

SEQ ID NO: 211289 - protein, 410 aa, unidentified
MTKQSIGYYPIKQRTRLLRSACMVLFDPFWETKKGRGGGTSLRICGVLLTDIARPLPPTLTVDEESSSVDCRFKCKLTAVCIHPDIFNFTVEIKFMPAPLIIGADVAKNEIVFACSADTFTPCSVTNDTRALTTWLRTLPKESRIGMEATSSYHECLARLAHRFGHIVFVLNPKDTRYYAKGIGQRGKTDRVDAKLLARFVAHEQSHLRPWQPPTPLQKQIDGLIKRRAKLTALKTTLTLSMKGVRSLTNDVKTLTDQLNALLLKIDRQLVQLISTHSSTHQTCQRLQTIVGVGQLVGAGLTNTLERVPFKNADAFVAFIGYDPRPCDSGQKRGRRRLSKRGPSELRRLLFNAAMSAAKTKLWRPIYDHYRSKGWATTAVLVIIARKIARIAWSLHHYQTTFDPLRLQKT

SEQ ID NO: 211290 - protein, 319 aa, unidentified
MKTTSSARIANTERNVGIDVGKSTLDVLILEPDIYLQEPNSPDGIKRLVSKLSRYKLSRIVVEATGGYERHLVEACAEKALPIIIVQPMQVRQFARAQGLQAKTDKLDARLIAQFGAIMKPEPRPIASKKVRYIKDLLSRKRQLNETRTQELNRHQKAPTTLMPSHNRLLKLVDKEIAWINDKLAKEVAEVTEWQRTYEILSSVPGIGDGVAFTLLGELPELGALSSREVGALCGLAPYNRDSGSMKGRRRIKGGRAPIRTVLYMAMLSAIQHNKIMKTFYQKLVAQGKHKKVALTACMRKMMTILNAMVRDNQEWQTH

SEQ ID NO: 211291 - protein, 364 aa, unidentified
MKRKIYVGMDVHKETIRIACLTSNTKEIVKEQQIKHNEVQIKKFVNKLKSEWNEIHSCYEAGVTGYPLYRNLKSLGVNCILVAPGKIPRQSSDKIKTDKRDAIKLAKLLRSGELESIHVPSEEDEAVRDYLRSRDSLRLDLGRNRQRLMKFLLRKGITYSATKYWTVSHNKWLNNLQFNNEILQETFNDYYSRVRVQEENLKAMDKRIQEIAESEPYREKVGILRCFRGVDYLTAMFLLCEVCDFKRFKTAGSFMSFHGLVPGEYSSGSKRKQTGITKTGSPRLRRILTEAAWQHRFPGTGSKIVTARRSGQPALVVALAEKASLRLHKKFRNLQQRGKTPQVMITAVSRELSGFLWAAMNLVA

SEQ ID NO: 211292 - protein, 393 aa, unidentified
MICIGIDVAKDKHDCFILNSEGEVLADVFTIQNNRDGFESLLQRIHSCSQKSEKIIVGLEATGHYSYNILGFLLDHGLPTFVINPLHTNLYRKSLSLRKTKTDRIDARTIATMLMSDVDLKSYTDTAYHNEELKSLTRYRFNKVQERAKLKQSVARLVNILFPELETLVPSLHMASVYALLAEFPGAKQIASAHLSHLKSVLHEASKGRYHRDKAVDIREAARSSVGSNMPAKSLELRHTIRLIGELDKEIAEIEFAIEEIMNTIQSPITTIPGIGLRMGAMILAEIGDFSNFDSPDKILAYAGLSPSTYESGKLSLAGSYSHMEKRGSRYLRYAIFNATRFVCKWDSTFAAYLARKRTEGKHYYVAISHAAKKLVRVIYALQKTGKPYKALT

SEQ ID NO: 211293 - protein, 324 aa, unidentified
MKKRRDRVCGADVHKDLIVATITGDDVLPIQENFGTTKSELKRFRNWLVANKCEQVAFEATGVYWIPIYDALSQTIDTIVANPLQIKTIPNDKSDSKDSKRIATLCLNGQIKRSRVFSNEDRDLRTLTRARSGYVKTQTQFRNRIHKYLSSSGIKLSSCMDDIFCKSGRYILNGLADEKPIEEILKGIPSGKIRKKRDLIRAALENGLNDTNRMLVTDALEFLDNLESKMEKLSLEILKKVQQKSKDLAIVMSIPGIGFISSSVVLSEIGNYRDFQTPDQLAKWCGLNPGENESAGKRKNVESQSAVPSTSELCLSRLPRPYQE

SEQ ID NO: 211294 - protein, 400 aa, unidentified
MNAVGIDVSKGKSTVAVLRPFGEVVASPFDVIHNDNDLKRLVKLIRSLPGESKVVMEYTGTYFEPIAQFLHNNGIFVSVVNALLVHDYGGNSLRKVKTDKKDALKLASYALDRWTELDEYVPADEQRKILKLLNRQYNQSIKIQTMMKNNLISLTDSVFPGINRLFTSPERQSDGHEKWVDFLHAFPHKDCVAKLYLSAFKAKYKSWCSRNKYRYSESKAEKIHSYAKSVIAVLPLNESVKLIVTQVVSQLNTILETAFSIRTEMNRIASSLPEYDTVMSMFGVGKVYGPQLIAEIGDTRRFRNRRAITAFAGLDAPPYQSGQLDVSSRHISKRGSAALRKVLFQITEIFILSKPENEPVYQFIIKKRSEGKHYYSYRIAAANKFLRIYYAKVNQILNAT

SEQ ID NO: 211295 - protein, 470 aa, unidentified
MQISGEKARQPDNEVEVEVEGEGLPVVRPKVAGIDLGSTQHWVCAPKKEGTGRDVAHFGATTPELEKMAEWLKERKVESVAMESTGVYWIPPHEILERHGMEVVLVNTRELARVPGRKKTDRVDCKWIQRLHSCGLLTGSFRPNEAVCMLRTLVRDKGNLVAEAGDWLRRMQKSLDQMNVRVHRAVSDIDGVTGLAIMRAIISGERDARKLAQLRDPRCRKSEEEIAQQLSGHWRADHLFSLQQALKMYDAIQERIADYEQEILRKLAEMELEECRGQQAPKPKSRQKAAAIKKRGQEPMRQALFRISGVDLTGIDGIGVETVQTVISEYGPDLSRFPTEHQFVQHITLAPHRPTSAGKPVKTKKRGSASTRVAGVLRMAALSLRHSETALGAYYRQIARRTGGDVAVFASARKLATLIYRLLRWGQPYVDEGAAAYEKRYQEARIKSLTAAAKSLGFQLTPKASDLDPA

SEQ ID NO: 211296 - protein, 343 aa, unidentified
MAQQTIIGIDLAKHVFQVCMVTPTGTLKTNTTVARGKLLALIARQPPALIFMEACGGAHDWARRFGALGHEVRLLAPQYVTPFRRGQKNDPNDALALTEAGQRPNIPTVPIKTIEQQDLQALHRVRERLVKHRTAVVNQVRGLLLEYGIVIPQGIARLRKRLPRVIEEADNGLSFLMRDLLQSLQSELSALDTRITERTGQLTRLSHELEACQRLQEMEGIGPLSATALVAALGNGHNFHDGRQVAAWLGLVPRQHSSGGTTRLGGITKGGNSYVRRLLIHGARAVISHVRDKPDAKSAWIRQLVTRIGVNKACVAVANKMARVAWALLHTGAQYRKPVALSI

SEQ ID NO: 211297 - protein, 361 aa, unidentified
MKKVSRELATMEAVSTKPEMTVGLDLGDRYSHYCLLNGDGLVIEEGRIQSTEAALRRHFEGEACLRIALEVGTHSPWVSRLLSGLGHQVIVANARKIPAITGSESKNDRNDAEKLARFAAYDPKLLSPLEHRSEQRQLDLNLIHARATLVRARTMIVNALRGLVKSAGGRLPTSSTEALPSRALATIPPALTAVATPLVEQIALLNAQIDGMDKQIEKLGAKYPEIPLLRTVPGVGPIVAAAYVLTLDRPDAASNRAAGAFIGLRPAQSQSGDADPQRRIAKTGDSCLRSLLVQSAQYILGRFGPDSELRRWGLKLAATGGKRGKKRAIVAVARKLAVLLHSMWRNGQRFQPFPQQAAKAA

SEQ ID NO: 211298 - protein, 355 aa, unidentified
MNSTKYIGLDVHKESISIAVLNSAGKVVMECVIETKASTILQFIHGLGGDVHLTFEEGTWAGWLYDLVKPHVTELVVCNPRKNALLKEGSKSDRIDARKLAELLYMSKLSSVYHGEHGLRMLKELSRSYLTITKDLGRVMNRLKALYRGWAIPCAGTQVYASHYRSEWLAKIHEAGVRRRAELYYLQLDALRLVRQQARKELLAEARKHRAAKLLRQIPGIGPLRAAHLVAVMQTPHRFRTKRQLWAYSGLGLETHDSAQYRVVEGQLQRSTKPVTLRGLNDNHNHDLKDIFKGAAMRASTAAGPLRDFYEALLAKGRKPTMARLTLARKIAAITLIVWKKEVRFDANYLKQQAA

SEQ ID NO: 211299 - protein, 403 aa, unidentified
MNSVGIDISKGRSTVAVMRPFGEVVISPFEVRHTDSELSELARQLKSLNGETRVVMEATGNYHAPVAKLLHDAGLYVSVVNAKLVHVYGNNDLRRVKTDRKDAVKLANYGLDRWLTLPRYVSEDDTRLLLKNCYRQYRQYSKVQTVLKNNLISLLDTVFPNVNRLFSSPIRGDGSEKWVDFVAEFWHCRCVSEKSQKAFTSKYQRWCRKHGYNFSEEKAHTIHAEASGYIGVMPKSETTKLLVEQAVAQLRATSAALTALKHEMLALAAQLPEYPVVMGMFGVGPTLGPQLIAEIGDVRRFYSKKALVAYAGLDAPPNDSGDVTGKHKSMSKIGASSLRRTLFLVMSVYLQNAPLDEPIFRFMDKKRAEGKPYRVYMMASANKFLRIYYATVKAYLESLEHTA

SEQ ID NO: 211300 - protein, 428 aa, unidentified
MHGKDYNKQIAKRQRVKRTTLVIGMDIGNEFNAMCLMNKDGEVLGKYSRIYNSRKGFNFFSKIIEAMKKKKGFKDVLIGMEPTGHYWRKIAYFGKDKGYEVRFVRTTALRHQRELDESSSAKSDIRDAVTIANITREGKYIDTVIEDGVFRQLRTLAHVRERIQRYNTGSKHALRAVLDDYFPELNGIFWSMKSKGLWAVLENCPFPEDVKRLGQKELTELIAKSTRRKGSAAKKAAELYHAAKETVGLKQIGIADRYRLKMYLEEVKRSEAQLKDIEEEMKKLLGEVPCAKNILSIPGVGVLSCAVFLGELGNPSNFKSPKQIIKYAGYDPRENDSGQSIGRKRISKKGRWMLRKYLYFMSMRAIHRSKFFSEYYYSKLKSSNRFGQPLKKKEAICAVAIKLIKVIFALLRDNRMFTAKAPALALAA

SEQ ID NO: 211301 - protein, 391 aa, unidentified
MVCVGIDVAKDKHDCCILDSDGTVRADCFTIPNNMDGFKQLLQTIRDCTKKSDKIKVGLEATGHYSYNILGFLLDNGLPTYVINPLHTNLYRKSLSLRKTKTDRVDARTIATMLLSDVDLKSYTDIAYHNEELKSLTRYRFDKVQECAKLKQSVSRLATILFPELEGLVSSIHGTSIYALLSEYPGAKQISEVHLTKLTNLLTTASKGRYGKEKAIQIREAARASIGSVIPAKSLELKHTIKLIQELASEIDEIEDSIQKIIDELNPPILSIPGMGVNSAAVILAEIGDFSNFSSPDKILAYAGCSPSTYQSGKLTNCYAHMEKRGSRYLRHALYNATKYVCYWNPVFAEYLAKKRAEGKHYNVALSHAMKKLVRLIYALQKSGKTYLTAA

SEQ ID NO: 211302 - protein, 359 aa, unidentified
MPTLSNKIDFNGQHVYVGFDVHLKSWKVTIMTEELLHKTFCQPPKAEILHQYLVKNFPGGTYHSAYEAGFCGYWIHNKLKELGIDSMVVNPADIPTTGKEKIQKDDNRDSNKIARSLRNGDLIPIHVPASSTLEDRALLRTRTNLVQDLIRCKNRIKSFLYLRGIEFPESFRSPGTHWSNRFMLWLEKIELTEPSSKATLNVHLSQSRYLRTAILETTCTIRELSEHERYKSRQELLRTIPGIGYITAMTLLTELETINRFSNFDRLCGFVGLVPSTNSSGESESIGDLTPRGHSVLRSVLIESAWVAARIDPALTKSYHEYCRRMEPNKAIIRIARKLLSRIMYVLKNNKPYVCSIIK

SEQ ID NO: 211303 - protein, 480 aa, unidentified
MNIKAKKAKVQPLSKKSVINVLSQDEIKKKVQVIEQELKASTWRELETKGKFEKNDKLSFISEEMLIVGCDIGSETHYIRAIDTRGRELSKGAFEFSNSSEGFASAKAWVLKLAAKNDKKQIVLGLEPTGHYWFAIAAWMVSNGISVVQVNPYAVKQSKEIEDNSQLKDDRKDPKIIANLVKDGNYGMPYLPEDIYADMRRLSMFRDQLTEDRIRNINRLHREMKIYFPEYMDAFGKIDGAFTLEILKVAPIPSDIVELDEEGLKSLWHEAKLRGRGYSRARVIVDYAKKSVGLTGGTDAGRESIKWFVEQIIQLDEQLAEIENVLHQKCMEIPHAENILEINGVGENILAGILAEMGDISRFDDVKEIQKLSGRGLVACSSGKHKGQTKISHRGRKRLRYWLFQAAKSAVAHAVEFKQLHAYYTTRSMNPLKKMQSLVVIACKILRVIYTILNTGMKYDPERMLRDIRYPQGNTVQAAA

SEQ ID NO: 211304 - protein, 371 aa, unidentified
MEIVYECCCGLDVHAKTVVACLLKQDQKECRTFSTMTDDLLRLSDWLTHEGCTHVAIESTGVYWKPVFNSLEGLMDVILVNARHMKAVPGHKTDARNSAWLADLLRHGLLKASFIPPRHSHALRELTRYRQSVLRDHSAVANRLQKVIESGNIKLGQVASDALGVSGRAMLRALAAGETDATTMADLTRKSLKRKKPELVRALDGRLTDTQRWVLGELLARYDELEAALARVETHIRQAIEESPDPFVADAVSLLDTIPGVEEQVAQTIVAEIGGEMVRFPSAGHLASWAGLCPGNNESAGKRRPGKTTKGSPYLRAVVVQAAWAASHSHGTYLAGQYHRLVKRMGKKKALVAVAHSMLVIVYHMLSWRTR

SEQ ID NO: 211305 - protein, 356 aa, unidentified
MENYIGIDIAKSTLQIYIPLNKIDIELENSPDGLKQLYSKLKKLYGKAKKDINEIVFVYESTGSYSTILESYCQKQKIKCFKVGAYQSSSFSKTIKNRNKTDKVDARMLSRMYILAEPNDIKVPYRDTKAHQIRSLMKYYQSLVKEETRLSNYLEAATYNLEDDYVLHKVQLKIKNLKKEQTTLISKILTIIKDNKEYSQAYDNITSIKGVGEKSGIILLYLFIRYPNASRQHITALSGLDPIKKESGTSVNKRARISKQGMSIVRSILFMPVMTTVIYNAEMKHFYDKLLKRGKCKSLAQIAVMRKIILLAHSLYKNNEEYNPEKYLEYIEKEEVEIRECSSICVSHLVIPKIIS

SEQ ID NO: 211306 - protein, 370 aa, unidentified
MLNTTTFVGLDVHARSIKAVALDAMTGEVRSATFGYDAAEVAGWVSSVDPSAKCVYESGVTGFDLQKRLSSMGIDCVVGAVSKMIKPSADRRRKNDRNDAEFLARMLSVGNVVEVWVPDDECEAARDLVRALDDARDDLKRCKQRLSKFLLRHGHAFSETTPSGRRKGNWTAAHWAWIKSISFAEKADDDVLAYYIDATRRAMEDKARLERLVEAEASKPRWKRRVDSVRCLKGIDVMSAADLVFEAGEFSRFKNARSFAAWIGLTPSEHSSGESVRQGGITKAGNKHLRRVLVESAWHYPGCSPHSKDLAKGQAPDPGARRHAAKGVRRLVGRRAAMLERGVHKNKANVATARELACWCWAIGCMVENG

SEQ ID NO: 211307 - protein, 348 aa, unidentified
MLHVGMDLSRTRLDICVMDDSGTILEEAPWPPDADGLRHVARHLAERFGEGEVLGVIESMNGARFVHDTLELAGWSVELADAQKVKGLAPLACKTDRIGARVLAELSRRDLVPSIWLPSPETRGARERARWRLHLVRHRTALKNRVHATLLAFGKLCPVSDLFGTAGRELLARLEVPEPWASDVLAAVSLIDTLEREIDGIEKELRNLAADHPYVPLLMTAPGIGWVLGYTIAAEIGDIARFAVPNKLVAYTGLCPRVYQSGGKDNRGSLSKNGPKYLRWALIEAATHAARHPAYAGHYERTAKRLGRQRGKKVARVEVARKLAEAIFYMLKKGEPFAPYVATPRVAA

SEQ ID NO: 211308 - protein, 373 aa, unidentified
MFHFTTLFIGMDVHKESFSLCYYDMMTNQFKHSTKVGPNVSYIVNYVNELRRLYGQDAEVLYGYEAGCLGFTLYHQLQAHGLPCIVMAPTTVMKEGSKRVKTDKKDAAQLAKALAFRSYRPVHIPTAEDEQVKEYIRMRTDHKVALKKIKQQILAFCLRHDFRYTEGSSNWTQKHVRWLHSLNLDGLYAEILTEYLLTYEKLVDQIERYDARIEQLGQSDSYQEKVSQLSCFIGVKTLTALSIVTEIGDFNRFATAQHFASYLGLTPSENSSGDKERRGAITKAGNSHVRRLLIEAAQSLAKGTVGYKSKELKRRQSGNRVEVIAYADKANERLRRRYRTLVLGKNKKQNVAKTAIARELSGFILGMMTGRIA

SEQ ID NO: 211309 - protein, 343 aa, unidentified
MKITITWRFIVGIDISKNQLDCFLLDRQTDLGYTDQVPNTDKGFEQLASWLADHGADRSQTKLISEHTGRYGEHLLRWSTSNQWPHAVVKTTALKKVGNEHHRKTDAFDAEDLADYGVRFSDKLSLTKAPKPAIGQIKRLQAERRAMVDRRAALRSKLTEADIHDADMERLMDMWTQQIGLLTEHITEIEARTKELINQDTAIKNRYRIMRSAPGIGKVLGPLWLSLFAGRQTLDARIISSRFGFAPHPHQSGSSVKRAEKSSGFGNSEVRRVMHQAALSVKTHYPHYREYYQEKRAEGKEHLLVINNIINKLIRLYCAMWNNRTVYDPGYIQKNEHKWKKSA

SEQ ID NO: 211310 - protein, 347 aa, unidentified
MMHAGLDLSRKRLEVVLLSPHGEQLEQLAVRPTVDGLQDLASRVERYHQPVRAAIESMTGARFVHDQLELAGWEVRIADAVKARGIAPLACKTDRIDCWVLAELARLELVPEIWLPDPSVRAERERARFRLHLVKHRSSLKNRIHAILFQHGIPNASSDLFGAGGRRLLERLALPEPWASTVRASLALIDSLDEQIDACALELRELGADHRYIPLLLSCPGIGWALAYTIASEIGDIDRFQSPRKLVGYTGLCPRVEQSGERDRRGPLRKNGPNYLRWAYVEAAHTAARCHPPYTAIRERMQARHGKKRGTKIAAIEIARRLAEANWHMLTTNKPFTPAGAAASLAA

SEQ ID NO: 211311 - protein, 405 aa, unidentified
MVRYIGMDVHREFAQLAVAEDGLVRDEGRIGVTPEALREWAAGLRGDDQVALEATGNSDAIANLLTPLVGRVVVSNPVKTRAIAEAKVKTDKVDARILAQLLAADFLPPVWLPDERTRTLRRQVTRRAHLVRQRTRIKNQVHAILARNLAPTPPVSDLFGTTGRHWLARQDLPADEHSCVQALLRQLDFHGAELAAVDRELAVEALGDPVVARLMTIPGIDAIAAISVVAAVGDFSRFDSPDKLVAYVGLNPKVRQSGNSAPVHGRISKAGRAQVRGVLVEAAWSASRAPGPLRAFYQRVNARRGFQTAVVATARKMTVLAWHLATRDEDYAFARPALVTHKRRKLELAAGAPSRRGNHRQPGAAYNSRQQRNQETAAAERAEHAYQVLVAHWHTRKPAQTPLRA

SEQ ID NO: 211312 - protein, 342 aa, unidentified
METVSIIGLDLAKNVFQAHGARADGSTAFRKKISRAQLLSFFASIPKCRVAMEACASAHHWARQIGSLGHKVQLIPPIYVKPFVKRNKNDAADAEAIAEAAARPTMRFVAVKSVDKQASGMAFKTRDLLVRQRTQTINALRGHMAEYGVVAPNGPVHIARLSEALVDVDSGLPAAVIALCQILFAHIGVLTEQIRLLEKELRERSRGDEIAKRLMSIPGVGVICAVAIEALAPPPESFSKGRDFAAWLGLTPRQNSSGGKTRLGGTSKMGQRDLRRLLVSGAMTVVRWASRKGAPEESWLGRMIKKKPRLVVAVALANRTARIAWALMTKGGVYQASDAIRA

SEQ ID NO: 211313 - protein, 378 aa, unidentified
MKTKSSSTPSASAPSSPVSSAAPKPAPAPQPGCFLGLDLGDRKHHVCVLDASGKLVHEGSLANARPALAELLAQFPNATVAMEAGTHSPWISRFLSDLGARVLVANPRKLHAISRHERKCDRRDAQMLARLARVDPALLSPIEHGSAQAQQDLLGLKLRDALVRSRTSLINAVRFTLKSLGHAVRNPSSESFHKQAEIPAECLPVVQPLLDVLEKISGEIKSLERALIQRSRTEYPVTQRLQQIPGVGPLTALCFALKIGDPKRFSRARDVGAYLGLCPGRDQSGGTDKQLRISKCGDGLLRRLLVSAAHYVLGPFGPECALRAYGRHLMGQGSMREKKRAVVAVARKLAVLLVSLWKQAADYDPQRGLAAPAAGAVA

SEQ ID NO: 211314 - protein, 453 aa, unidentified
MSRRKPSIPAKADAATLLVVHPHAAAVDVHSDNHVACIGPEQVRTFGAYSADLATLADWFTQSGITTVVLESTGVYWIPLFELLEARGFEVFLIEPSQASHCGARPKTDRLDCQWLQRLHTFGLLRPSFRPPEAVLALRGYWRQRQMLVRYASHHVQHMQKALEQMNVKLTEVVSSITGVTGSAILTAILAGERDAAKLAELRHEKCARSEAEIALALEGTWRAEHLFALKQAWELYHHLHRQIDECDLKIAEELERLPDRRGDAPIASKPRRRGRKSNDVRFDATAKLTRAIGVDLTAIERIDVTTALVILAEIGVDVGRFPDEKHFASWLGLCPRTSRSNKTERRRTPRKGKNRVAQALRMAAQAVGRTQTALGQFYRRIKSRIGGRGAITATAHKLSRLVYRMLRHGTEYVVRSLAEYEAQMREKLERSLRRKAEALGFDLTPKAPVISP

SEQ ID NO: 211315 - protein, 315 aa, unidentified
MSDVPCFVGIDVAKAQLDIALRPSGERWAVANDASGVATLVDRVQTLHPTLIVLEATGGLERAVTSALAAAGLPVVVVNPRQARDFARATGQLAKTDALDARALAHFADVIRPTPRPLPDAQTQELRALLGRRQQLIGMRTAEQNRLAGTSERLTKDIVAHITWLNADIATLDNDLETTLRASPLWRENDDLLQSAKGIGPVCARTLLLELPELGTLTRQHIAAFVGVAPLNGDRGTLRGRRTIWGGRAHVRTVLSMGTLVATRYNPQIKAFYERLLTAGKVKKVALTACMHKLLTILNAMLKHRTPWQPQEVQN

SEQ ID NO: 211316 - protein, 345 aa, unidentified
MNVMIGIDPHKASHTAVAIGRDEDQIASVKVRATNRQVEQLLTWAEPFEKRTWAIESVGGLGYLLAQQLVAQGEEVLDVPATLASRIRVLATGRSNKNDPNDAHSIAIAALRAPALRSVEPADHGEVLRLLSKRNSDLGRQRSRVVCRLHSLFAELSPGGIAKEMYVSDAEALLAKVRPDSPAQQMRFDLVLELLDDVRRLDDQIKASHRRIRLAVRASGTSVTDVYGVGPIHAAMVIGYSGDVGRFANRDAYASYNGTAPVERSSGGRIVHRLSQRGNRKVNHALHMVGVTQIRNPGTEGRIYFERKVSEGKTKKEALRSLKRQISNAVYRQLLLDVERGPGGH

SEQ ID NO: 211317 - protein, 355 aa, unidentified
MNRYIGLDAHSESCTIAVMGETGRRLRKQVLDTRADVLIDFLKGIAGHKCLCLEDGQLAEWLVEVLEPHVDKLVVIQPEKHAGQKSDEEDAWSLAEHIRVRAKGVHVFKPTHELRELREAARMYMVSVKEIVRAKGRLRARFRSRGMRELTNAIYDDPETRRECISMLPKEFRPRVKWLGEQVDAMSRLHDVAQSTLEKSAKKNADVLRLATIPSIGIVRAAMIVAIVVVPHRFRTTRQFWTYCGLGIVRRSSSDFEKSPNGNWRRRTKGIQIRGLNPNRNAVLKYVFKGAATCVIRQTNHPLRRHYDQMVAQGTAPHLARLTIARRIAATALAMFKKKEAYQPEKYLAPAPAPA

SEQ ID NO: 211318 - protein, 454 aa, unidentified
MQKQDSYDYYVGIDCAQNKHDFAMKNNQDKFLIKKGHFSNTLQGYEKFLNTVLSKCLDKDKILFGMEVTGIYGTNLYERLKSDGYHVVMIFPDSVKNYRDYKRLNKTDKIDSACIAELLLNGDAQIVHAEKNGYTDLKAYIRRRNALKVTCTQETNRFLAKVCLYFPDLLKVFPSGRATLKAIFSIYPTPYSIIEADFNELVSVLQKASKNKFGVDKANELIHAARNSIVVRKSISDGELYNIHSLIDSIDSLESEIRNLEKIIDSKAEEFPAYHVLLALTGCGKITAATIVAEIGDISRFHKASQIVSLAGLYGDNSKSGSSVNKRGKISKKGSRYLRHAIYMVAEFARRNNPIFKAYFTKKKNGDRTKHILAVNAVANKLCKVIYSLMKNQSTYIIQYRDLAKLSESTQNEFFQNAETDFSAKTRRKKYLYEDEYGELHEFVFKSIKTALIE

SEQ ID NO: 211319 - protein, 306 aa, unidentified
MNKDIKYFGIDISHLDFDVTDSEGNYYQFKNNPSGFKKFVKLIEIDSHCVMEATGYYHYQLAYYLLESGVKVSVENPLAVKRFIQMKLSKIKTDKSDSKLICEYAKQVELKLWKGNSKHQTECLQMVRLLAVYTKQSTMLKNKLHGESVLGNPSKAVVSSLKRSLKQVQKEIKTLKEKLMILVKKVHQDVLTRLKSIPGIGNKTALMLVVLTDGFERFKSGSELCSYAGLTPVIRKSGSSVNGRSRISKIGNQKLRNLLFMCSFNACKYNKACRAIYERLVAKGKSKKLAWYTYKKCYNFRQLVYF

SEQ ID NO: 211320 - protein, 378 aa, unidentified
MPSETTIHVAIELSVSSWLVATRPPGAEKSRLHHIEGGDTTALLALIAELRTRASTKLGKPAEVVCCFEAGRDGFWLHRALTMHGVAAYVLEPTSILVNRRARRAKTDRLDAEGMLRVLAAWLAGDRQVCSMVRVPTPEEEDAKRPHREREHLVQERLRIENRIEALLFTQGIRKRPSLRSWERDLAELRTGDGRALPSLLRVELDRLRRRLVLALELIREVEAERAEALAVTAEDEMTQKIAALQRIRGIGTNFAAVLVREVLYRSFANRRQLASYVGIAPMPYQSGGMDRDRSISRAGNPRARTTLIQLAWLWLRYQPGSALAAWFRERVGTLQGRTRRIAIVAMARKLLIALWRYVETGVTPDGVEIRAQADVTA

SEQ ID NO: 211321 - protein, 355 aa, unidentified
MSQEKYIGMAVHQATISAAVMDAHGKLLMECLLETEASTIVDFIQGLHGTLSLTLEEGTSAAWLHDLLKPHVSRLVVCDPRKAALLKEGNKSDRIDARKLAELLRTNQLKAVYHEEHGIRALKELGRSYLTITKDVTRVMNRIKALYRSWGIPCSGTSVYAPRHRAEWLAKIVEPGVRVRAEHSYQQLDSLQPLRLQARRELLQESYQHPAVKLLRQIPSIGPIRAALLVALLQTPHRFRTKRQLWAYSGFAVETHDSGEYRYVRGKRQRNRERISVRGLNDNHNKDVKNLFKSAAISASTRPGPLHDCYVARVEKGMRPTMARLTLARKIATITLTIWKKGVSFDPKHLHRQAA

SEQ ID NO: 211322 - protein, 307 aa, unidentified
MARARPVREAKLPSDPDAIELFLAEWGVHLKRVGLEAFSFSAWLHTALDDKGLPVVCIETRHTKAALNAMLNKTDRNDARGIAQLMRTGWFRPVHVESEAAQALRVLLASRKALLGKMIDMENMIRGLIRPFGPKVGQVSTGRFDARVRELVAGMAELEQIVEPLLAARAEMCLQFARMHRMALAAARNDKAVRRLMTVPGVGAIVALTFRATVDDPGRFKKSVTVGAHFGLTPRRCQSGETDWSGRISKCGNEMITSNASGISWLADVVVANDIEFACLVGVKNLDSRHAKLCLNDFTKIQVRRSS

SEQ ID NO: 211323 - protein, 357 aa, unidentified
MAEGSWVGLDVHARSTVAGVLDGLSGELRVRRVPPGSGQTVEWLRALPRPVRVAYEAGPTGYGLARACAEMGIACTVAAPSKILRAPGDRVKTDRRDAERLARLLRLGELVAVRVPEPYEEAARDLVRAREDARADLMRTRHRLSKLLLRHGRVYEASAWTLAHDAWLRRQQFPSRPLSLAFDECYGAVLQVKARRDALDAAIVEIAAEPPFAEVVGRLVCLRGVSTLTALALTVELGDLQRFRPHSLGPFLGLTPSEDSTGERRRQGGITKTGNSHARRLLVEAAWHQRRPLRASAALERRRQGQPAAVPSQADQSARRLHQRWHALESRGKRRAIVAVAVARELAGHCWAPATMK

SEQ ID NO: 211324 - protein, 338 aa, unidentified
MQVTTIGLDIAKSVFQVHGVDDRGRVALARRLARGKVLAFFANLPRCRIGLEACGGAHHWARELRALGHDARLMPPQYVRAYVKTNKHDAADAEACCEAVQRPGMRFVPVKSEEQEATLMLHRVRDQLIGQRTATINALRGHLAELGIVAARRQVGLRELLAALGEVEDHRIPPLAREVLQTLVAHLRELADRVAELDRRLVAMTRSDPICRALCEAPGIGPVIATAVIATVPDATTFRSGRHLAAWLGLVPRQHSTGGKPRQLGLSKRGDGYLRRQLIHGARALVKVSPGRTGQLWSWINGLRQRRPFNVVVAAVANKLARIIWAMLSRGEAYRPAA

SEQ ID NO: 211325 - protein, 377 aa, unidentified
MSNVRFIGLDVHAETIAVAVAEPNGEVRSLGTIPNRPESIRKLMKKLGPAAQLRVCYEAGPTGYVVYWQLTALGVKCEVVAPTLVPVKAGDRVKTDRRDALKLARSYRAGDLTAVWVPDAAHEALRDLVRAREAAKKDQLRARHRLGKFLLRHGRRPPTAMNAWTQAHLAWVKSAVHFDHAAQEATLLDYIHEVDHVAGRIERLEAAITVAVETAPTHMRAVIEALQALRGIAMVSAVTIASEVGELSRFTKPRQLMGYSGAVASEDSSGQRTRRGGITKAGNAHLRRVVIEAAWAYRHRPAVGPTLRKRQAPVSREVKEIAWKAQHRLHARYRALTARGKCKQQVVTAIGRELLGFIWAIGVLVESKMDRTKRVAA

SEQ ID NO: 211326 - protein, 361 aa, unidentified
MGDATTSKETKVTVGLDLGDRHIQVCVVDEAGEVIEEARLATRPQALRRRFCGADPLRIVLEAGTHSPWVSRLLAELGHEVIVANPRKLRLIYANDSKSDRVDAQYLARVGRLDPALLAPLRHRGAETQVDLALLRSRNALVRARTRLISHARGTTKSLGARLPACSSESFAARAGACLPDELRPALDPVLAVIAGLDAQIGALDARIEEMARQRYPETALLTQVPGVGTLTAMVYVLTLEDPQRFPKSRSVGSYLGLRPRQRDSGSAQPQLRITKAGDEHLRWLLVGAAHYILGPFGPDTDLRRWGLALAAQGGRAAKKRAAVAVARKLSVLLLRLWTTGEVYEPLRNARLHGELLAAPS

SEQ ID NO: 211327 - protein, 455 aa, unidentified
MAKTGKTHQTSQGLSLIHDRAAGIDIGSTFHVVAIPPELDAEPVRTFGTFTQELHRLAEWLVRHGITTVAMESTGVYWVAVFEILEDHGIDAQLVNARETKAVPGRKTDVNDAQWLQKLHACGLLRASFRPGRHIAALRTYLRQRERLLDYAAAHIQHMQKSLVYMNLQLHQVVTDITGATGMKILRAIIAGERDAEVLAALRDVRCKASVETIREALSGNYQPEHLFSLTQAVALYDFYQQQVAACDVEIERTLVQLRATVSAPEAPLPKARHRTRQPNALAFNVRQALYDLLGTDLTQIHGCGPYLSLKLISECGTDLSRWPSAKHFTSWLGLSPGCKISGGKVLSSHSRKNANRLSVQLRLSATTIGRTNTALGAFYRRLGVRIGKAKAVTATARKLAVLLYNALRYGLHYRDPGADYYEQRYQDRLLKNLRRRAAELGYELTETVPVAGVS

SEQ ID NO: 211328 - protein, 387 aa, unidentified
MPQPNDLSRSLVALDQNSTIIAVVELSQSSWLVGGVVPGIERQPRKKLEPNPERLLGLLHRWRDEAVRAGRTITRIAVAFEAGRDGFWLARWLAARGIEAHVIHASSVAVSREPRRAKTDRLDTELLKRGFLGWLRGERGHCTMARVPTIAEEDAKRPNRERDCLVGERTRIVNRIKSTLARLGIRNFKPTLRKAAERLAAVHTPEGVPLPPNTLAELQRDMARLGFVVSQIQEIEKARQKRLEQHPETGPDAMVRRLVCIVGIGVETADMLVHEVLSRPMRDRRAVARYAGLTGSPDESGARRREQGLARAGNARVRRGMIQLAWRFLMFQNESALALWYRARTADSRSGTRKTMIVALARKLVIALWRFVTTGEPLEGVVLRPAS

SEQ ID NO: 211329 - protein, 388 aa, unidentified
MCVVDERGRIVEGRRYRHNEPGIRALCSRLVRLRVALVALERPDGLLIERLLDAGLVVVAVHPNQVKAMRPRYSVAGGKSDGFDSFVLAELARTDSHRFRVLVPDSDRTKALRAMTRAREGLVRTRVGLANQLRDQLATFWPGASKVFWSVDSQIALAFLRRYPTPLDARGLGEQRLATFLKRHGYTGRKPARELLARLRAGAEGRADELEMACRRQLVLARVSALEPVVARISELTIEIRHALDAHPDGRTFRSLFIAQDSWLCAATMIAEIGDCRERYPTYRALAADAGQCPVAVESGKAKHAQFRWACDHRLRAAFCTLADASRRHNPWAADIYDRARARGASHTHATRIPGRAWSQIIWRPWRDRDTYDPEQHTALQRLIAAAA

SEQ ID NO: 211330 - protein, 349 aa, unidentified
MSKSFSNSVAVIGIDIGKNSFHVVGQDERGAIVLRQKWSRGQIEARLANVPRCLVGMEACVGAHYLSRKLGELGHDTRLMPAKYVRPYSKGQKNDFRDAEAIAEAVQRPTMKFVATKTTDQLDLQALHRVRERLVAQRTGIINQIRAFLLERGIAVRQGQRFLRVELPRILGTPPDVLSLRMVRIIENLSGDWHRLDERIAGLSSEIEAIARQDSGCERLMSVPGIGPIISSAMVAAIGGGNAFSKGRDFAAWLGLVPRQMSTGDRTILGRISKRGNRYLRVLFVQAAWVVLIKPKIWERHGLKSWIDAAKKRLHPNVLAVALANKLARIAWSVLARGRGFEASKLQIA

SEQ ID NO: 211331 - protein, 352 aa, unidentified
MSQTPNTAIAVIGIDIGKNSFHVVGHDARGAIVLRQKWSRGQVEARLANILPCLIGMEACVGAHHLSRKLASLGHDARLMPAKYVRPYSKGQKNDFNDAEAIAEAVQRPTMKFVATKTAEQLDLQALHRVRERLVSQRTGIINQIRAFMLERGIAVRQGIGFLRTELPTILATRTDALSPRMLRVIEELAGDWRRLDQRVDGLSGEIEALARQDQACSRLMTVPGIGPIISSAMVAAIGTGDVFSKGRDFGAWLGLVPKQISTGDRTILGKISRRGNRYLRVLFVQAAWVVLVRIKNWERYGLKSWIEAAKRRLHHNVLAIALANKLARIAWSVLAHGRDFEARSIVTAQPV

SEQ ID NO: 211332 - protein, 343 aa, unidentified
MTRMAGGLVVGVDTHKDVHVAVVLDRLGRRLAVREFPATDAGNCQLADWLAGLGPVTDAGVEGTGSYGYRLAGRGVQVQEVNCPGRSRRRRKGKSDPVDAENAARAVLAGEATAIPKDRRGFAGELRLLLLSRRSAVKARTQASNQIKAFLLDADDQLRASLHGLRKARFGRACATLEPGDGLRRALAVLGRRWLALDAEVRELEKQIAALITAHAPRLLARHGAGAVTAAQILVTARANPERLHGDAALAALRGASPVQASSGKTSRHRLNRGGDRAASNALGVIAHVRTISDPRTRAFVAKRTATGNSRREIMRMLQRYIARELYPLIIDALRTAPIVGLT

SEQ ID NO: 211333 - protein, 398 aa, unidentified
MTESSDYESVQVFIGVDVGKDTHHAVAINRSGKRLFDKALPNDENKLRSLISDLKQHGQILLVVDQPATIGALPVAVARSEGVLVGYLPGLAMRRIADLHAGEAKTDARDAAIIAEAARTLPHALRTLKLANEQIAELSMLCGFDDDLAAQTTQASNRIRGLLTQIHPALERVLGPRLDHPAVLDLLQRYPSPEKLASLGEKKLAAQLCKLAPRLGKRLAADIAQALAEQTVVVPGTNAAAVVLPRLALQLITLRKQRDEVALEVEQRVLAHPLYPVLTSMPGVGVRTAARLLTEVACRAFASAAHLAAYAGLAPVTRRSGSTIRGEHPSRRGNKALKRALFLSAFAALRDPLSRAYYTRKMSQGKRHNQALIALARRRCDVLFAMMRDGTFYTPQAS

SEQ ID NO: 211334 - protein, 350 aa, unidentified
MIIIGVDFHPEFQQIALVDKDTGEFQEKRLGHRDEAEKFYRGLAAAGQKVRVGMEASGHARWFERLLAELQIELWIGDAAEIRTKRVRKQKTDRQDARLILQLLLEDRFPQIWVPSWENRDLRQLLWHRHRMVQARTRIMNQLQAVALNEGLRCKKRLWREHGREQLESFRLAPWASRRRRDLLELLDRLNPTIAELSQAIEQEVEKCPEARRLMTYPGVGPLTALAFVLIIGDAERFQCGKQVASYLGLVPLEDSSGNRRRLGHITKQGSSILRFLLVEAAQVTARSLPPWRSKYVHLMMRRGRKTAKVALARRLAVHLYWMMRQGWDYPQWVKFGSHAGQPGHRDGVR

SEQ ID NO: 211335 - protein, 338 aa, unidentified
MGEVSTIGLDIAKSVFQVHGVDVAGSVVIRKRVSRAKVLEYFGGLPRCLVGIEACPSAHHWGRELQALGHQVRLIPPSYVKAYLKSSKNDANDAAAICEAVTRPSMRFVPIKTKEQQAVLMLHRTRQLLVRQRTMMSNALRGHLAELGIVSAKGRNGTAELLRIIADGRVSPAVCSILKVLARQYGAIGTEIASIDKNIMVLHRACEASRRLGEIPGIGPIGATALVAEISDWNAFGSGRSLAAWMPKQCSTGGKERLGRITKQGNRYLRWLLVVGAMAVIRYARKHGTGRRPWLGRLIERRPTKVAAVALANKIARMAWAIMVRNERYKEPKLLLAA

SEQ ID NO: 211336 - protein, 348 aa, unidentified
MEHFAGLDVSVKVTSLCIVDDAGGIIREAKIESDPDALLQVLKSGAYHFKRIGLEAGPLSQWLFSALAEAGLPVICVETRHMRAALKAQINKTDRNDARGMAQMMRAGLYRPVHVKTVRSQKLRMLLTHRKLLQSKAIAIENDLRATLRNFGLKVGMAGAVKFEARIKELVENIPDLAILVEPLLIVRRTLREQFGIVHRRLLAVVRQDEVCRRLMTVPGVGPVVALTYRSTVDVPARFRNSKAVGAVFGLTPSKYQSGEIDRTGAISRCGDEMMRVMLYEAAQSMLYSRKWSWLKAWAMQIARRRGIKKAIVALARRLAVVMHRIWVDGTEFRWTKARGRSRMTMQH

SEQ ID NO: 211337 - protein, 405 aa, unidentified
MEVIIERVCGMDVHKDNITACIMTPEGKEIQTFSTKTVFLIQLMDWIKSHGCTHVAMESTGVFWKPIVNLIEAEEMEFLVVNAQHMKAVPGRKTDVKDAEWIAQLLRHGLLKASFIPDRNQRELRELVRYRRSIIEERARQHNRIQKVLEGANIKLGSVVSDIMGVSSKDMLHAIANGEDDSEKLANFARRSMKKKKDDLILALNGYVNPHQRMMLKTILTHIDFLTEQIEKLDQEVAQRVSVYQESIERLDSIPGIATRMAEQILAEIGTDVEKQFESAARLCSWAALVPGHNESAGKRKSTRGKKGNKYLKSALTEAAHSVGASKNYLGALYRRTAARKGRKRAGIVVAHAMLRISYYLLTRKEMYVDLGEDYFDKQKQASIVRNSVRRLENLGYTVNISEAS

SEQ ID NO: 211338 - protein, 401 aa, unidentified
MPEQRLILRWIGLDIHKAYFVAVGVSAEKCTVFGPHKIPNVQLENWIAKHLLPTDAVVMEMSTNTYLFYDTLVPHVGSVIAVHPPNVRLVTGVKVKTDKKAALTLAQLHAAGMLIGVWIPPVEVRELRAVIAQRSKMVRLQTQAKNRLTSLLHRTHRERPAQPFKPEQKAWWEALPLTAIEKYIVASDLETLAFAGKQIDAIGEVLRQEAAKDERVPLLTQLPGVAMLTALTILAAIGPIERFEDAKHLVGYAGLGASVHDSGQMHATGHITKAGRRDLRGAMVDAANAAVRHHPFWKKEFERLEYRLGRSKAIVAIARRLLVAVWHILTNGVADRHADVISVAASMYKLAYEIKISNLPKGVSSRVFTRQQLDRLGIGQNLDVLPRSGKNVKLPPSQLKT

SEQ ID NO: 211339 - protein, 413 aa, unidentified
MVVGVDIGSQIHYARAFDNRGRELTKRIFSFHNDLEGFNSFNLWAETLKTENKKTAVLIGCEPTGHYWFAFAKYVNDHQKRLVMVNPFSVKKIKELDDNSPKKTDSKDPKTIAKLVVDGRYSIPYMPEGIYAEIRDLVYSRDRIMKQHNISANRIQRWLAIHFPEYLGLYTRFDAISGLAVLEKAPLPKDVIALGVNGIRKIWHDKKMRGRGVTKDRAKTLVEAAHNSVGLDGGIGTKSELYMLLEEHRLWTSQLEAVNKVLEEMILKVPHVEKLLAIKGVGSITIAGFIAEVGDIRRFDSPKQIQKYAGLELVENSSGKHKGRTRISKRGRRKLRKILYQVMVPLLARNKEFRGIYDYYVTRVKNPLKRRQAMVAVSCKLIRVFYAVLTKGVEYDRFKMMSDIHRKSDIIAA

SEQ ID NO: 211340 - protein, 403 aa, unidentified
MNSVGIDISKGRSTVAVMRPFGEVVISPFEVRHTDSELSELARQLKSLDGETRVVMEATGNYHTPVAKLLHDAGLYVSVVNAKLVHGYGNNDLRRVKTDKKDSVKLANYGLDRWLTLPRYIPEEDTRLLLKNCYRQYRQYSKVQTVLKNNLISLLDTVFPNANRLFSSPIRGDGSEKWVDFVAEFWHCRCVSEKSERAFTSKYLRWCRKHGYNFSEAKAHTIYAEASGHIGVMPKSETTKLLVEQAVAQLRATSTALAALKHEMQALTSMLPEYPVVMDMFGVGPTLGPQLIAEIGDVRRFYSKKALVAYAGLDAPPNDSGDVTGRHKSMSKVGASSLRRTLFLVMSAYLQNAPLDEPVYQFMDKKRAEGKPYRVYMMASANKFLRIYYATVKAYLESLEHTA

SEQ ID NO: 211341 - protein, 428 aa, unidentified
MNNQEIIRRKQFCQIVKEVRSSKEYLVVGIDVAKDKHHAFMGTATGKSLFRKLIFGNNMEGFSRLLRTTDEIKSQNDLSKIVYGLEPTGNYHKPLARHLIRCDCNVVLVTGQAVKNNRNLLDGRWNKNDTKDAANIADLVSRGRCLYYDCPSSGIIEIRSLLSLRRRLKREEHSLRMRIRNNLLAQYFPELDRFYNACESETLSIVRYFLYPDTISAMEFGEFFHLVTRTRRGIAQTLRLRKIHSLAIESVGCPLGPAGEYESDLLVEKLNQVREQIKKTADLIKDFCLEFSEYSYLLTIPGFGPYISARVLASIGDPFRFENRKQLIKMSGYDLCANRSGKTSNKAIPVISKKGNGELRYALYQAAMVASARVDLFRTYFTRLLRGRERERGIKTKMCVKLAAKMLVIAWTLMKKREPFDPAYLNIE

SEQ ID NO: 211342 - protein, 340 aa, unidentified
MDHIAIDLGGSKSQICVRAPDGTILEERRLPTPRLVEYLGQRATKAARVVFETCAESFAVADTARALGYDVRVVPATLAPALGVGARRTKTDERDARCLSEASCRIDLPSVHIPSRQSRDRKTLCGMREALVTSRTQLINTVRGWLRGQGIRLRSGATETLPARVRQAISAPPTYVQRQLAMIDELTRSIREADKELEQTARGDETCRRLMTVPGVGPVTAVRFVAAIDSVQRFDAAHAVQSYLGLAPGEWSSGDRQHRTGITKAGSVATRRALVQAAWVMKTRRPNDPAVLWSTQVEKRRGKLIAVVALARKLAGILFALWRDGTTYDSARGAAPLLAT

SEQ ID NO: 211343 - protein, 353 aa, unidentified
MNLIKYIGMDVHMAMTAIAVLDNMGRVVTEAIVRTQDAAILDFIKGQRGTLHVAFEEGNQAAWLYDLLRPHVAKVVVCDPRKLPAHQGNKADKPDAKRIAELLRTNSLNPVYHGERSTRDIKELAQSYSCLVKDTSRVKSRLKALFRARSINCSGSSIYNSDEKKCWLGQLENAAVRARASRLWEELDCLEDLQEKAEKDLAAEARKHAAVKIFRGIPGIGPVRAAVILAIGGTPHRFRTKRQFWTYSGLAVVTKTSSEYVMVDGRMVRSKKRPLVRGLNSNYNRALKAVFKGAALTAAKGQWKSHYDAMIQNGMDPSIALVNIARKIAAITLAIWKKGERYDKAKVKLMQAA

SEQ ID NO: 211344 - protein, 339 aa, unidentified
MNFNNYIGIDISKGKLDLAVLNQEGELILYQCLNDKKSIIKCLGKVFKESNLSKEDTLIIAESSGHYINPLIWSIISENYLLWIEDGYQIANSQGIRRGKNDEKDAEMIAIYGKRFSDRCQLVKASSECIENLAYLNSERELLTKEMVKFDQQLTDHKKYVKPSFYLSRKKRYTELIANLKTHISEIEQEMEKLIENEPKLSHYAKLLRSIPGIGKQVSIATIIATKGFTKFTDPRKFACHVGVVPFEYKSGSSIRSAHKISQRANKKMKSLFHLASLVVIQLEGEFKEYYLRKQKEGKNKMSIINAIRGKLIHRAFAVIKRNEPYTKEFKPSFQNCTN

SEQ ID NO: 211345 - protein, 421 aa, unidentified
MDSYRVAGIDVHKTMLAVVVTDAAGGGESRFERRKFGTVDSELRALSEWLAEREVREVVMESTAQYWKAVWRELEPKFKLHLAQAQSNRAPRGRKGDFVDGERLVRRHIAGELILSFVPDPEQRIWRTLTRTKLQLTKDRVRLHSQLESLLEDARIKLGTCVSDLLGVSSRRMLQALADGETDAAKLAEMADKALRATPEQLQDALCAAATLNTLHRQVLGLFLDRLKLIEKQIGTLDQSIADALKGHHAAVMRLAEVPGYGADSAQQVIAEVGPQAATFPSAEQFASWVGACPGREESAEVSKSDRSPKGSRQMRRILTEVAHAAIKTEGSIFQQLFRRLVPRIGFKKALWAVVHRLSRVTWKILHHGVQYEEKGAVPDPKLAKRRAAKLARRLRAMGYVVQLTPVARPLTNSATIPANA

SEQ ID NO: 211346 - protein, 338 aa, unidentified
METYAGIDLHSSNNFIGVINDKDKILYGKRHSNRLDDVLRALDPFQDSLQGVVVESTFNWYWLVDGLQEHGYAVHLANPSAIQQYEGLKHTDDQWDSFWLAHMYRLGILPEGYIYPKEHRAVRDLLRRRLLFVKHSTSHILSLQSMISRNLGLNMSGREIKKLKPEDVDDLFDCHNLGFMANNSLEAINFLKKIILDIEKKVESQVKMRKEFLMILTIPGIGNILGLTINLEVGDIGRFPAVGDYSSYCRCVESKRLSNGKKKGENNKKNGNRYLAWAYVEAAQFCRRYCVKAQSFYQSKAAKTKPVVAVKALSNKLSRASYYIIRDQVAFDEDKLFS

SEQ ID NO: 211347 - protein, 337 aa, unidentified
MMYSGIDLHSNNSVVAVIDEGDHVVAQKRLPNDLTKIIGFLARWKDQLAGVVVESTYNWYWLIDGLQEAGFEVHLANTVAIKKYDGLKHSGDETDAQHLAHLLRLGILPTGTILPKEHRAVRDLCRKRMQLTRSRTSHILAVENIIARQLGARMTSNQVKRLTADAVDRLALPAEVALAIKSNVAVIATLNAQIEVLAKRLQETVGSRPQYGWLTSVPGIGQTLATVILLESGPIDRFASVGNFASYARCVDSVHTSNRKKKGEGNAKNGNKYLAWAFVEAANFAVRFCPEAKRFYERKKARRNNVVAIKALAHKLARASYHILKEGKPFDVTRCFA

SEQ ID NO: 211348 - protein, 300 aa, unidentified
MDVIYSHCCGLDVHKNNVVACVITPEEKEIRTFSTMTEDILAMVDWIKSKRCTHVAMESTGSYWKPIYNILEIEGLNPMVVNANHIKNVPGRKTDVKDAEWIAGLLGLLQGSYIPSREQRELRELIRYRRSLIEERAREINRMQKVLEGANIKLASVTTDILGKSSRAMIEAIINGEEDPAILSELAQKRLKNKKEELKKALNGLIGPHQRLMLKTQLTHIDFLDEQIALLDEEIKRRMLPFEEDLERLDTIPGVGRRTAEHIIAEIGTNMDQFPSAAHLCSWAGVAPGNNESAGKKKIE

SEQ ID NO: 211349 - protein, 414 aa, unidentified
MALVRWVGRAIGLDVHREFCVVAICEDGQVRSGGRVPSTPEGLGLLAESLLATDRVALEVTASCWEVARILEPFVERVVVVSPEDTGISSARAKTDKLDARTLALLLWKGEIDPVWMPDERCRILRRRLARREQLVHARSRAKNEISAVLARRLIERPPFADLFGVTGRRWLAEVQLPVEERESVDAGLRQIAFLDTEIKAVEQLIAQQALAWPEIRRLMTVPGVNLICAATFLGATGRADRFLTSRKLVAYLGLDPKVRQSGETPARSGRISKRGSASARWALVEAAWSVVKQPGPLRAFYERIRARRGHGRAIVATARKLAVLFWCMLSRGEDYAHQRPALTKKKLRELELTAGAKPRTKAAVGIWSTNRAIRDAERALTLQAEVSYKRMVTDQQAGRPARKVGASATPERA

SEQ ID NO: 211350 - protein, 317 aa, unidentified
MIYLGIDIAKHKFDAALLTQGKFKTKVFANDQAGISACLKWLATRAPSPVHACLEATGAYGEALACALCDAGHTVSVINPARAKAYAQSLGLRQKTDAVDAKVLAQFVQAQQPAAWTPAAPELRALQALLRRLDALIEMHTQEHNRQGVAEPTVAASIAQHLDYLKLQIDALKTQIESHIDQHPGLKQQQALLESIPGIGAATSAWLIGELNLLRFDSARQAAAFAGLTPRMRDSGSSVRGKPRLSKQGNSLLRKLLYFPAISAMTHNPLVRALCVRLKAKGKHTMAIIAAAMRKLIHIAFGVLKSGKPFDPSLANS

SEQ ID NO: 211351 - protein, 430 aa, unidentified
MQVVYSRCCGLDVHKDSLTACVLVFDEQGRRQVRKKEFPTYWQQLQRLKLWLYANKVQHVAMESTGVYWKPVWNILQGHFPLLVTNPYHMKNIPGRKTDQNDAEWIADLLAHGLLRGSFIPPPGIQELRDWTRYRVKLMQEYNRIHNRIHKVLEDANLKLSSVASDILGATGRAIIQAIIRGQEHPDWLADKAMSSLRNKRDQLRLVLKGRITDHHRHLLRELMDDVERVEEKICRVQTEIAERMSPYQELMDRLTTIPGVDILTAWTLIAELGPDMSVFPDADHAASWAGLVPGSFESAGKRKSSRTRHGNRWLRRALCQSAWAVAHKKDCYLTAHFYRRASRHGAKKAIVATAHQILIIVFHILRDGTVYREHGRRFRSHESRQNDKAAFEVILKPRPETAPPVPRRGRGLRCKCAERGIDCKHRPPE

SEQ ID NO: 211352 - protein, 444 aa, unidentified
MLRFVGCDVHKRTAVFTILLEDGPLFATYTVPVTREALTAFAERQLGAEDRLAMEATTNTWAVAGVLRPFVQEIVIGNPLRVRAIAEAKIKTDKVDSRVLAELLRCDYLPMVWQPDQETQRLRRLTHRRAALVSDRTRLKNRLHSILHHTLVPLPDGDLFSKKGIAWLRQVPLAQEEALARDSDLRLLELTELEIAELDELLVREAWQDEKVRLVMSIPGIDYTVAQTCLAAIGDVSRFANAKKLAAYLGLNPSTRQSGGHCYHGKITKQGNAHARWLLVQAAQHLGQYRGPLGQTMRKIIRRKNRSVAVVACARKLAVLLWHVLSSGEPFRYAPPKSLQAKFSRLRVRATGQRRRGGVAKGTPRSAQYGHGRTRALPSLSQVLVENGLPETAPLAKGERVMLERKKLEGFYRELQVPSRIEANARRAQVEECEEDAKSELTQS

SEQ ID NO: 211353 - protein, 364 aa, unidentified
MNDSTTTVTVGLDVHARSIRLAAVRADELLEERTLAYDEEAVERVLRRWPGVRCCYEAGPTGFGLYRHLLERGIDCQVVAPGLVPQRPGDRVKTDSRDARKLARLLAGGLLEPIHVPSPELEAARDLVRAREDARLDRMRDRHRLSKFCLRHGRLLPTSSWTVVRRKWLSEQRFRFAGQQITFDTYVHAVDLVDARIEALERAIRETAEQEPWRVLVARLRCLRGIDTLTALALVTEIGDFGRFRTAEEFMAFVGLVPSEHSSGEKRRQGSITKVGNSHVRRLLVESAWHARRRPKVGYELARRQRGQNAAVVERSWRCQQRLYTRWLRMAGRGKPQQKIVVACARELAGFVWAIATEQPLRSN

SEQ ID NO: 211354 - protein, 369 aa, unidentified
MKKNIFYVGLDVHKNTIDVAIAEDCAECEVRAYGKINSSLEALNKLIRKIRTKGSKLRFVYEAGPCGYEIYRYLTSKGHACAVVAPSMIPRRSGDRIKTDRRDAVNLVRLFRAGEVNSIYIPTQEDEAMRDLLRCRDDIRRFEHKARQRLLAFLLRHGFDYSGKNWTKGHHNWLAGLKPDHPAQQIVLQEYIDAAQECTDRLKRITEQIQALVPQWSRAPYVKAYQALRGVSLIVATTVASEIGDMNRFKNPKELMAYLGLVPSEHSSGNTVRRGSITRTGNGHVRRVLVEAGWTYKMRARKTITILKRQVGLSKSIQDISWKAQTRLCARYQRLFAKGKSKQTIITAIARELSAFIWAIDREVQQTMA

SEQ ID NO: 211355 - protein, 419 aa, unidentified
MSFKILKNNCCGLDVHKTWIFACIGITDSLKRTEYKQARFSSFSKGLQELYDWLSKYNCTDVCMESTGKYWIPVFNVLEKNNIWVTLSHPKYTKPQKGNKTDRKDAKWICDLYMCGMVKPSFIPPADIRELRDLVRYRFKLTCMITGEKNRAHNCLTVSNLKLDDVFSDIFGKSSRSITEQILQHPGETFDVAPFVDGRCKTPVEEIQAAVDGAISKEQAVKLRQCLNHIDELEMHKAEIEREIFRLSDKYESVLSLIRTVPGFDKTPMTAIQVLSEIGGDMSVFPTAKNLVSWAGCCPRNDQSNHKIKSTRISRAGSYFKPVLVQIANALIKSKKHPEFTTRYRRIKARRGHKKAIIAICRMILTAIWHILTDLKPYTPEGFLESRPVNKEKVLTISQALNLIKQRGYIIKDDVGPVT

SEQ ID NO: 211356 - protein, 342 aa, unidentified
MYYIGLDVHKKTISYCVKDASGQVHREGTIGATRSELDCWVRTLPQTRFMAMEATIFTGWIYDHLLPHAEQVKVAHPLMLRAIAAAKKKNDRIDAGKIADCLRCDFLPECHMASTEIRDRRRTLRYRHLLVRQMVQMKNRISGLLMETGVSHNKQRLHKVKYFRELISNNQEVHESIRPLLRLSRETIVRCQKTEYALVSSLQRDPLLAERIKRLRTVPGVGPITALTWALEIGDVSRFRSIKQAISYCGLCGEEKSSADKVLRTPLSKQRNKHIQHVLVEAAKLAPRQNHELALVHEREKQKGNGNRATLAVARKMVAYLLAVDRREREFVPAEGHSTAAA

SEQ ID NO: 211357 - protein, 344 aa, unidentified
MHIASVGIDLGKNTFHLVALGERNKILVRKKFSRAQLLSYTANLPCSLIGLEACAGAHFMGTVLREQGHQVRLIPAQFIKPYRKSNQNDFIDAEAIAEAVRKQNMRFVQIKTEEQLDVQAMHRVRDRLVQRRTALINEIRGFLLERGMTFAAQPIHLRRNLPGVIEDAEQSLSSRLRWLLERLWQEWKQVEIDIKAITEEIERISNENALCQRLRQIPGFGPLVSTATVAAIGNGAAFRRGRDFAAWVGVVPRQYSTGGKQKLFGISKRGNVYLRRMLIHGARAVLLRVKYDTGGFGQWVHRLAQRAPHNKVVVAIANKLARIAWAVLSSGKDYRHQPLQPAAA

SEQ ID NO: 211358 - protein, 360 aa, unidentified
MSFNGTSVGLDVHALSVVAHAFDEETGRVERARLCPDHGEILDWLHRLRGPLRVAYEAGPTGFGLARALTDAQIDCVVAAPSKLIRPAGDRIKTDARDAAHLTRLLRLGEITAVTVPEAEVEAVRDLVRAREDARADLMRVRHRLSKLLLRQGRVYSGGNAWTGVHETWLRRQRFDDPHTRAAFDHHFDAVLSATAARDRLDEQIVAVAASSRWSDPVDRLGCLRGISALTGLALSVEIGDWTRFTGASIGAYVGLVPTEYSSGASRVQGSITKAGNAHVRRLLIESAWHHRAAYRNPGPAMRARWAKVDPALKDRGHAGNRRLHQQWCRFNERKKPHVVANVAVARQLAGWCWSLATLA

SEQ ID NO: 211359 - protein, 349 aa, unidentified
MAKEIAVLGIDLGKNSCSLAGLDRTGAVIKRRRMRPENVPSFTAGLPRCVIAMEACCGAHHLARVLAAQGHEVRLMSPEYVRPYVKAQKNDDLDAEAIAEAATRPTMRFVTMKTEEQLDMQTLHRVRDRLVGERTALINQLRAILLERGVTAPQGRSKLEQFLAAMFAGEENRELGMLTGRIRSLVVDMRAEWADIDRRIAAFETEFVARAREDEAARRLLTIPGIGVMNATALIAAIGNGETFRRGRDLAAWLGLVPRQVTTGGRPRLVGISKRGNKYLRKLLIHGARAALPSLLTRATPLGGWLRTLTAKVHKNAAIVALANKLARIAWAVLRHGTTFDANVSIAMA

SEQ ID NO: 211360 - protein, 373 aa, unidentified
MGARPEVGMSFARADGEGPTETEVRALMKVLIGVDPHKGSIAVAAVDEASGELLERASFPQDRTGLRSLEGWAKRFSERRWAIENAGGLGRHLAGRLAAAGEPVVDVPPKLSAQVRVLSTGNARKNDGLDALATALAASRNERLAPVDPESDSEVLRLLSERREDLVAERTRALNRLHGLLRDLVPGGVARTLSADRAARILRGIRPQSSSSRVRRRLASEVLRDVRRLDRKIADLNGRIEAEVEASGTTLTEIFGIGPILAAKIIGTVGSVARFPSRGHFASYSGTAPVEASSGEVVRHRLSLAGNRHLNYALHMVAVCQARSDARGGTYYRKKIAEGKSRKEALRCLKRRISDAVFASLVADSQLLSRSAA

SEQ ID NO: 211361 - protein, 374 aa, unidentified
MEKATTQVGMDVHKKDIQVAMLTGSGSEWVEWTVANEPRAVRRLTKKLKRQAGSVHCAYEAGPCGYALQRQLVGQGVACQVVAPSLIPVKPGERIKTDRRDARKLAELLRAGLLTEVHSPTPEEEAVRDLCRCREAAKQDLLRARHRLGKYLLRRGLVYRAGQNWTQRHRSWLRTLCFEHSADKIVFGDYLLAVELLEERVRGLDQRLEQTAQSEPWAERVGWLRCFRGIDTVTALTIVAELHDFRRFHSPRQLMAFLGLVPSEHSSGETQRRGRITKAGNAHVRRVLVEASWHYRHRPAIGAKLRRRRQGQPAAIISIADRAQQRLHRRFWRLVLAGGKPRPKAVTAVARELTGFLWAALYLYPQHQVAKELG

SEQ ID NO: 211362 - protein, 331 aa, unidentified
MFPVGIDVSKNTLDLCMLYDGIKGRIKTRNIQNNRHSVENILRWLRLQHCGPEDVHVVMEATGVYHERLATELHDAGFYVSLANPHRSREFARGMGIMTKTDKVDAYMLACYAFLKNPHRWEPPAPEIRYLGALLRRRDVLLGDALREENRLEKYLSTDTPADIISSCMHMAQLLRDEVSNIERQIKAHIKASPALRRDYTLLTSIKSVGPQLGMHMLVVLRSHDFSSAEQAAAFLGVVPIEKRSGTSVRSRPRMSKIGPPQLRAKLYMSALCGKIYNKRMRNIYDEMCLRGKPKMVAIGALMRKLVHWCYGVLKTGIVFNDEGLKQVLST

SEQ ID NO: 211363 - protein, 345 aa, unidentified
MANMYYIGLDVHKKKISYCVKDGSGRIYSEGFVAATRMELDQWMKTLPQPWTAAMEATIFTGWIYDHLLPHAAALKVAHPLMLRAIAAAKKKNDRIDASKIADCLRCDFLPECYMASTEIRERRRTLRYRNLLVRQSVQLKNKIAVLLMEAGVSYNKQKLHKVGYFRDLLKTNPDINESLRSLLQMCRETLVRLQKIESALIRSLERDRLLAERVHRLMTIPAVGPITALTWALEVGDVKRFSSIKKAISYCGLCSAEKSSADVVKRTPLSKQRNKHLQCILIEAAKMAPRNSPALALVYDQEKQRGNANRATLAVARKLVAYLMAIDRSRRDFLVMEDQNRVAA

SEQ ID NO: 211364 - protein, 356 aa, unidentified
MLYSGVDLHRRLVVICTVDANGSVVARKSMKTQPELITNYFHQWTEDHRAVVECTTGWYWFCDLLHSLGIDVVLAHAKYLKAISYAKVKTDAVDALTLAQLLRMGYIPEAHQLPPEYRAMRDLLRQRMVMEHKRTNIIQRIASILAQFNITRLPVSPYQRGFADFLNECPISEEYRMTLLMYHQQCVQTTEHRKQLENYFKARLRPTPTVQLLMSIPGIGDITGSIIAMETGDIHRFADAKHYCSYCRLVPGAKDSGGKHSHRSGSKDGNQYLKYAFTEAAIKAMMFYPEIKRFAARLERRATKAIARTVVAKELAKITYYVLTRQQEFKTFKGIEINKLRDWPRARKPVRLTGGA

SEQ ID NO: 211365 - protein, 360 aa, unidentified
MDTINIGVDLHKHQFTNYYLFKKDGVYRKYFTNEVGMTQFKSEIKMMLDKGFKVRVAVESTGNTRFFKNEIEKLGVEVIVVNTLKFKIVNESVNKTDKRDAKVISEFLEKDMLPKVNLSSEKSEKIRRLVSIRKELVRTRVKMKNTIHGMLLGFGITTKAGLLNSKKGLKKAVEMATDDENRLIVETIVDTIEKLSVQIKDIESKIEKMVEGDRSVEILQSFPGTGLLNAVTVRAYIDDIKRFSHFNKLSGYCGLVPWVSCSDESQHYGRITKRGPVELRTAIIQMVLGMIRCKDEKNNRVMKVYQYMKKNKGSGKALVATARKFTKIIWFMLTNDEFYKTEKINAVFESESHRIQEHAA

SEQ ID NO: 211366 - protein, 563 aa, unidentified
MAMRKREDSPEVFPNAAGIDIGGSSHWVAVPKGAAEEPVREFGTMTDDLHEMADWLLACGVDTVALESTGVFWIPVYEVLEQRGLTVWLVDARQMKYVPGRKSDVMDCQWLQKWYGRLPTRRIAEVVGMGNERWHGRRGIDDGIRRQYQGAGFAWSQAPECRACDQNTAWRTPPRVKGRCTPGLTPGPLTRQTLSSTWSRSRHQALKCPSWKIMEIFTGKPEGVMKLTPVGIDIAKNVFQVHHIDEETGEIVNKPIKRAKFLEYFVNRAPCLIGMEACGGAHHWARQLTRMGHQVKLMPGEYVKAFNIRNKKDPADARAIWLAVQQPSKPVAIKTEMQQAMLALHRTREQLVKFRTMQINALRGLLTEYGEVMAKGRAPLDRAMPDVLARVADRLPAALIDTLREQWNGLTGLDEQIATIERRMREWKKEDQEVKAISEIPGVGLLTATAAVATIGDAKAFRSGREFAACIGLVPKQTGSGGKVKLHGISKRGDTYLRTLLIHGARSVITNAKQPDPWIEQMKKRRPPNVVVVALANKMARTIWAVLAHDRPYQRGYVSTKPA

SEQ ID NO: 211367 - protein, 316 aa, unidentified
MSVPLLFVGIDVAKAECVVAVRPTGPTWTVPQTEAGWTALAARLQALAPTLVLCEATGGLELPLASVLAAGGLPLAIVNPRQVRDFAKAKGLLAKTDALDAAVLAHFAEAIRPLPRAVPDATTQALAALVTRRRQLVEMATAEENRLGSAPPRLRGRLQAHLRWLRRELVALDADLDTTIRTHPGWRVQDELLQSTPGVGPILARTLLGGLPELGTLSRGAIAALVGVAPWARDSGRHRGARRCWGGRADVRAVLYMATLAAVRCNPVLRAFYQRLLAAGKLKKVALVACMRKLLTILNAMVKTQTPWAPRLAGDC

SEQ ID NO: 211368 - protein, 410 aa, unidentified
MGLFCGIDWATEHHDVAVIDDDGHVVARGRVSNDAPGFAALLTLLAQAGDSAADPIPVGIETDRGLWVAALRETGRTIYPINPLAASRYRARYGVSGAKSDATDAVLLANIVRTDPGAHRPLPADTELAQAIRVLARAQQDAVWARQQIGNQIRDLLKDFYPAALTAFADLPEGRLARRDARTVLAAAPTPAQAAKLTPARLRRLLIKAGRKRYLDRDIARLCEVFTDTYLHQPPVVENAIGIHLAALLGQFEAACTAADALAEAAVAHFEQHPDAEIITSFPGLGMLVGARVLAEIGDDRSRFADARGLKAFAGSAPITRASGKKTVVLHRYIKNRRLAAVGPIWALGSLRASPGARRHYDARRAAGDWHQQAQRHLFNKFLGQLHHCLHTGLRYDEHLAFPPPLQLAA

SEQ ID NO: 211369 - protein, 370 aa, unidentified
MTFIGIDLHTNRFTCCYRDGNGAANGNSGKRTETFDLTAPGLADFYKTLTKETYVLLEATITTFSFARLIKPLVKEVIIANTYELKQISLGRNKTDKIDADKLCRILKMQVLSGESTISPVTIPPAEIQDLRGFFSTYRLLKKQTTQIKNRIHSVLKEKLHGFTREKIFGKGVRKMLRGMEGDKALSLQLNELFDTLEYLEAKSQVWEDRIKEQAEPFMREIDILTSMKGVSVFIAIAIIADIISVDRFKNSKAFTSYLRSAPRVESSNTTRGNKGTNKMGRKLSATFLTQILNHVLDASPKLEKWYNRLTRYKKAGSVRTGLRRRVFAEVYQMLKKGEYHYGRDPKKHEEKMGQFKRFLEKRKNLLKSA

SEQ ID NO: 211370 - protein, 458 aa, unidentified
MQDNKQKKISKKKFSLFNSDAAGIDIGGAFHFVAVPEDRDDNPIRKFNNFTEELYQLADWLLACGIKTVAMESTGVYWIPIYEILESRGFEVFLVNACHVKNVPGRKSDVLDCQWIQQLHTYGLLRASFRPDQSICQLRAYMRQRESLIQYAANHVQHMQKALAQMNVQLANVVEDITGVTGMKIIRAIIAGERSPEKLASYRDGRCKQSEEVIAKSLHGNYRDEHMFALQQAVELFDTYRAKIAECDNEVEKVLNQLAPNNPEKNNSNSEQKKKKKKRRNNELHFDAQNRLQQMTGVDLTKIDGIKTHSALRIISEIGVDMSKWPSAKHFGSWLGLAPGTKISGGKKLSSKTKPSANRAANMLRIAASTLHRSHSALGAFLRRQKARLGAPKAITATAYKIARLIYSMLRHGEDYVDAGQDYYNQQYQDRIIKNMQKKAKMLGFQLMPIQSLATEVP

SEQ ID NO: 211371 - protein, 350 aa, unidentified
MVADEVDYVIGVDTHRDEHVLSVVRAPAGTVVAGTSAPANARGYRKLLRVADRFASGTRAWAVEGTGSYGAGLARYLAEHGEVVLEVSRTPRPQRRLRGKDDALDAVLTARAALAAETAALPRAGERREALRLLLIARRSAVDVRREALTQLRAVIVTAPDRLRQDLRGLSTGKLLDRCSRLRRSGSAGADELATRLVLRSLARRVQTATTEAGELEHELLAHVRALAPTLLDEPGVGPVVAAQLIVSWSHPGRIRSEACFARLAGVAPVPASSGQTTRHRLSRGGDRQLNRALHTIVLHRRQHDPATRDYIARRVAEGKSRRDATRLLKRYLARHLYRLLEQQQQPLMT

SEQ ID NO: 211372 - protein, 394 aa, unidentified
MKLIGIDIGKNKHFFCVMDQQTGEIISQPVSFSNDKEGFDFLIQKIKSYSKDSILIGMEDTGHYHFALLKYLLDLQYTVALINPKTTDFNRKMQGGITKNDKLDTINICDVLDTPERKKQYRITKVNSFDLYEQKQLTRHHHNLKEEENVYKNRLQKCIDIVFPEFNKLFNSKYGIVYMNILKMFGSAENIANTDIRTIRKCFEIEGRGNRISLTPERLKECARSSIGISSSAEVIQIKHLTAQIELIEEQLTEIDKKIEEFSIQNNSPILSIPGISHFSGTSILAELGDISNYSKPSQIIKFAGVAPLHYESSQFNAQHTAITKKGSKYLRKTLYQIILPVIRHNHVFNKYYQLKISQGKGHRCAQGHCVRKLLRIIYHLLKTNQQFDPQLLR

SEQ ID NO: 211373 - protein, 456 aa, unidentified
MSRLSKPNLGMAEARPFAGMSQVHEHAAGVDVGAHEIMVCVAGAEGMQMVRSFGSYTVDLQAIGGWLAEHDIETVAMESTGVYWIPLFEELERRGFHCHLISSRSLRRVAGRKSDVVDCQWIQTLHSYGLLESSFRPEADLVALRTLLRHRAQLIQHRSPHVLHMQKALLQMNIQLSQALSDVSGETGQAMIRAIVAGERDPHKLAALRNYRCKKDEQEIAKALTGTWREEHLFILKQSLELYDFYTGQLEECDAEIEHAYSLLRPEWKVEEKQDMPESKRNSHSKNAPKKVQVRKHLKRICGVDLTAIHGVSASLAQTIVLEVGTDMSKFPNEKHFCAWLGLAPKNEISGGKVLKNKTLKTHNRAGQAFRMAAGSVMRADCVFGAFYRRQKAQLGPAQAAVATAHLIARVVYKMLKYQVEYEPLSVSQYQQHYRQQQLKYLHNKAAKFGFQLTPI

SEQ ID NO: 211374 - protein, 343 aa, unidentified
MGDVITIGVDLAKSVFQVHGVDAGGTVVVRRQLRRRQVQPFFEKLRPCLVGMEACATAHHWGREIERLGHRVRLMPPRYVKAYVKIQKNDAADAEAICEAVTRPTMRFVELKTCEQQSILMLHRTRQLFVRQRTTLINAIRAHLAEFGIVAPIGRSGVEKLLQTIGDAEDDRVPEVARTCLGALAMQLHLVNRQILDADRRVLAWHRSNEASRRLDRIPGVGPLIATALVASVPNPQAFKSGRDLAAWIGLVPKQNSSGGKERLGGISKHGNRYLRMLLTIGALSVIRYAETHGTAHRPWLARLLERRPAKVAAVALANKIARMAWAVMARGEAYREPRLQTA

SEQ ID NO: 211375 - protein, 390 aa, unidentified
MFYAGIDVAMDKHDCVVLDSDGDVVVEVFTFENSRDGFKTLKRVLQSCSKNPKKIKVGLEATGHYSDNLLAFLNKIGYDPILFNPLHTNLFRKGLSLRKKKTDHVDAHTIATMLRTEDLKSYSQPSYHLNELKSLTRYRSNLVSDCSRCKVSLARLCQILFPELKAIVPTLHMSSVYTLLSELPSADKIAKCNLTHLTALLSSASKGHYGRDKAVEIRELARTSIGIKSVVKELELQQTIDRIQVYLQQIEAVEEEINKIMEEMDSPITSIPGIANRMAAVILAETNNFQEFDRAEQVLAFAGLEPSVYQSGQHTSSHSKMVKRGSKYLRYAIFNATKYVCNWDPTFHAYLAKKRAEGKPYNVAVSHAAKKLTRVMFHLVKTNKEFVPQE

SEQ ID NO: 211376 - protein, 371 aa, unidentified
MVWTPPTSASSLRIMVTINEEKGNGMSNYTVGIDIAKRVFQVHVVDANGEVQAARKLRRSEFLGFLSKLPPSLIGMESCSSAHHWARELSAMGHEVKLMNPMYVKPYIKRGKNDAVDAEAICEAVTRPTMRFVPIKSVDQQSVLMVHRTRSLLIKQRTMLVNALRGHLAELGIVAPVGIERIAELVDRVTGREGDEVGIPPLVRSLVEVFAQQISTITEEVRALEKSLRSWHRTSEASQRLATIPGVGEITATALAATVPDPSYFQSGRAFAAWLGLTPRSNSSGGKERNGRITKAGDRHLRTLLVLGATSVIRRVRAGQPTPIYSWVNRLLDKKPARLASVALANKLARIAWAVMARGTDYQPQRAALAL

SEQ ID NO: 211377 - protein, 342 aa, unidentified
MKVFVGLDLSLAKTSVCVISEHGKIIKEEEIESEPKVLARWMGDLDGSIAAIGLEAGPLSQWLHRGLTEAGLNAVLMETRQVKGALKAMPIKTDRRDAEGIARLLHLGWFRPVHCKSVSAQEVRAVLGARKAIQQGMLALEMSLRGLLRNFGLKVGAISRGGFEARIRELADGNPMLETATAPMLRARASLRQELAGLEKRVRQFAGDDSVCRRLMTMPGIGAVVALTFRAAIDDPKRFRSSKRVGPWVGLTPSRNQSGERDVSGGITKAGDVNLRRALCQAATVMMNRNRSTWLRTWRGQLAERRGRKIAMVALARRIAVILHRIWVGGTTFQSDAAPNSV

SEQ ID NO: 211378 - protein, 397 aa, unidentified
MYIVGIDIAKRKHEAAVIDGEGTVIIKPFSFTNNCSGYNRLLAMLAKAKLPLDEVSFAMEATGHYWLALFTRLQKEGFRVQVINPVQTNSIRSFYIRQAKTDPRDALLIAEVIRFGHFSESTLHPENIYELRELCRGRHAIVSMQADVKRKVVALLDQVFPEYETAFTNLFGDTSMAILQTCPTPKELSEMPFEELCHLIEVSSRKRFRMAKAQELQALARNSFGFAMAGDVFSTMIRLYAKHLDFLKQQVREMDRKIAEIMDTLDTPITTITGIGPTLGAYILSEIGDISRFSSAAKLAAYAGIDPTMRQSGEYNGVRNRMSKRGSPYLRHAIWLATSSAVLHDPALKLYFQKKRDEGKPYMASVGHACRKMVSIIYAVMRDNKAYTPCIPNEISA

SEQ ID NO: 211379 - protein, 349 aa, unidentified
MIRNQPMDAAVYGVDLGKNVFHVVGLDARGAVIQRVRLRREALLPFFERAARTVVGMEACPGSQWLARKLLAMGHAARIVPAQFVRPYVKSQKNDTIDAAAIAEAVTRPTMRFTQVRTTEQVDLQALHRIRDQLISSRTRLINQARAFCLEYGVAIRQGAGFFRLDLPRVLADETNDLTPAMRRMLAELFDDLERIDQRIAQATREIEGLAARDDRARRLMTIPGIGPLAATALLAAIGDGKQFRRARDLAAWLGLVPREYSTGGKTTLLGISKRGNRYVRRLLIHGARSCVAHLNRSRDRLGAWLDALQARMHVNKVTVALAAKIARVTWAIIVKPGALYDRRDPAVA

SEQ ID NO: 211380 - protein, 346 aa, unidentified
MEISTIGLDLAKNVFQVHGISATGEVVIRKALRRSQMLPFFEKLPPCLVGAEACGTSHHWARELTKLGHEVRLMPAAYVKPYVKRGKNDAADAEAICEAVTRQTMRFVPIKSREQQAALSLHRVRQLLIKQRTQLVNMMRSVLAELGVAIPVGIVKALQMAREIVDGESELDLPTEAANVVTVLAGQLLQLHAQLRKLDLRLAALQRSDERARRLATIPGIGPIGATALAASVTDPSQFSSGRQFAAWLGLTPRQSSSGGKERLGRITKMGDRYLRQLLVVGATALVRYAKQKPSTVDPRFVALLARKPARVASVAIANKMARIAWAVMARGGVFERGHAPMLAAA

SEQ ID NO: 211381 - protein, 344 aa, unidentified
MNHSAGLDVSVKDTSICIVDDAGKIVREVKVASEPAALLPVLTNGAYHFKRIGLEAGPLSQWLYSALAEAGLPVICVETRHMRAVLKAQINKTDRNDARGIAQMMRVGLYRPVHVKTLRSQRLRMLLTHRKLLQSKAIAIENDLRGTLRNFGLKVGMVGKVKFEARIEELVGSLPDLGLLVEPLLMVRRVLREQLVVLHRRLLAIVRDDDVCRRLMTTPGVGPVVALTYRATVDVPARFRKSKAVGAVFGLTCSKYQSGEIDRSGRISRCGDEMMRVMLYEAAQSMLLHSKKWSWLKAWAMQIARRRGMKKAIVALARRLAVIMHRIWVDGTEFRWTREQAAAA

SEQ ID NO: 211382 - protein, 343 aa, unidentified
MDYFAGLDVSVKETSVCIVDDAGKIVREARVASEPEALLQVLTNTIYRFKRVGLEAGPLSQWLYSVLAEAGLPVICVETRHMRAMLKVQINKTDRNDARGVAQMMRVGLYRLVHVKTLRSQKLRMLLTHRKLLQSKAIAIENDLRATLRNFGLKVGMVGTVKFEARIKELVENLPDLAVLVEPLLIVRRVVREQIGILHRRLLAIVRDDDVCRRLMTIPGVGPVVALTYRVTVDVPARFRNSKAVGAVFGLTPSKYQSGQNDRTGGISRCGDEMMRMMLYEAAQSMLVRSAKWSWLKAWAMKIARHRGMKKAIVALARRLAVIMHRVWVDGTEFRWTREVAAA

SEQ ID NO: 211383 - protein, 256 aa, unidentified
MRFVGIDVSKDWLDVHVVPEDESFRSPNNSDGIDQLAARLRELSPKRVALEASGGLEMLAVAELSAAGLPVVVVNPAQVRSFANALGKRAKTDTIDAAVIAAFAAAMKPPVRQLPDEATRLLADLVSRRRQIIAMIVAEENRARRATARQTLKSIRRLLLALRRELEGIDEEMDDHIRKSPIWLVRQKLLTSMPGVGEVTARTLLAELPELGRLDRRQIASLVGLHRSPASRANGGARASSAAAGAAFAPASSWPR

SEQ ID NO: 211384 - protein, 440 aa, unidentified
MVMRKREDVVFPNAAAVDVGASSHWAAVPPYSTDAPVREFGAMTDDLNALADWLIGCGVDVVALESTGVYWIPVYEVLEQRGLQVWLVDARQVKYVPGRKSDVQDCQWLQRLMSYGLLRAAFRPGADVCVIRAVARQREVLLTEQASWVQRMQKALVQMNIQLTEVISDVMGQTGQAIIRDIVAGQRDAQTLARHRHRRVQASEQDIVRALTGNWREEHLFVLKQALAVYDDLGKRLQECDAKLGELLAERSAASIDLGKTPRPGSKARVEYDARQQLANWAGVDLTRINGLGLDSVLKILSEIGTDLSHFANVKHFCSWLGLCPATKISGGKVISARTKRSANRVRQALKMAAMSLSHSDSALGAFYRRLCTRMDKPRANTATAHKLARMVYFMLTRGEAYVDEGQQRYEEQQRQRTVAALKRRAAALGFQLNPVGAAA

SEQ ID NO: 211385 - protein, 343 aa, unidentified
MSIVGGLDIHRKQITFDYVDTETGEVRRGQICPADREHLAKWLARFAGQDAHFALEGCTGWRYVAGEIIAAGLTPHLADPAEAAHLRGPKRRAKTDRADARHQRVLLEQGRLPECWVPPSHVLECRALLETYLDLREQRTGWVQRIHAVLFHHGAPNIAGQQLGTAEGAAALRAAAAHCSPAGQLQLAIAAQMLLVYDERLHQVRRQLLDRARHTRGAAELTARLYGVGPVTGLALTCWLGGAGRFSSSRKAVRFAGLDITVYSSDGKRSPGHLSRQGPEVLRWCLYEAGKAHARASAPDHAYYAQVKERIDGKRAALSEARKLIRQAMHILTELGDDALTAC

SEQ ID NO: 211386 - protein, 310 aa, unidentified
MDIIIDKGCGLDVHKETVVACVMGSGIKKEIRTFSAMTGDLLRMKGWLTDLGITHVAMESTGPYWKPVFNILEDSFEVILANARHIKNVPGRKTDVKDSEWICKLLRSGLLTASFVPPQVIRDLRDLTRYRQKLIQAASAEKNRIQKVLEDANVKLSSVVSDTFGVSASRMIKAIMSGNFDTDSLAELAVGRLKGKKEKLKEALQGHFRDHHGFMIQASLDHIASLEKIIADLDRQINEKLKDYHRERELLASIPGVKEQGSSSILAEIGAAMNVFPSEGHLSAWAGMSPGNNESAGKKKVARQPMAIKT

SEQ ID NO: 211387 - protein, 325 aa, unidentified
MKVTIYGLDLAKRVMQLHWVDWDTGEIHRKQVKRGKLLEFFVNREPGIIAMEACGSAHYWARELGKLGHEVRLIAAQFVRPFVKTNKNDAADAAAIWEAVQRPDMRFVAVKSVEQQSVLTLHRVREQLIKIRTMQINAIRGLLYEFGADLPQGRERGMKEIPAALTELEGKVSAMALDTLRQQLKRLGDLDKDIVAIEMLLWKKDQEDVARLMAIPGVGLLTATAILATVGDMKSFRSGRECASFLGLVPRQSGTGGKVRLLGISKRGDTYLRSLLSHGARAVVNFQINNRVSVRSAAFFSDGCGCGTSLSAGGWRRSVLSTIEE

SEQ ID NO: 211388 - protein, 458 aa, unidentified
MPKPRKTKPKSKPDPFAGLPPLNLNAAGIDIGSSKHYVAVPADRDPEPVRSFESFTCDLYRLADWLQACRIETVAMESTGVYWIPLYQILETRGFKVHLVNARQVKNVPGRKTDVLDCQWIQKLHTFGLLNASFRPADEICVLRSYLRQRDNLISSASTCIQHMQKALTQMNIQLAKVISDISGQTGLAIIRAIVHGERDSLKLAQMKDYRIHASVETIAKSLHGNWRQELLFNLGQALALYDIYQSKIAECDHQIQTHLGTLPNTVDPMEKPLPPRKPSKRPRGNSPQFDLRDELYRISGADLTSIDGIDVVTAHVIISEIGLDMMRWRTEKNFASWLGLCPDNRITGGKVIKRATRHVVNRATHALRMAALTLRKSDSALGANFRRLNARLGAPKAITAMAHKLARLVYRMLKYGQQYVDKGMQHYEQKFREQRIKWIKKQANELNLQLIEQAQLT

SEQ ID NO: 211389 - protein, 398 aa, unidentified
MQNQSELRICLDIGSVRHYVAIGLSTGERIDGFYLNHTSEDIEQFFEKIEKLRISYNMPVVMAMEGFNGYARPIDRYALDHGYSLYSVNNMKLARFKEVFPGPAKTDPIDAWAIFSLFQVQETLPLAKNILQKVEPPPVCNEQLKHISRRRRELVKEKTRIINRLQGDLQAVCPGLLSITKNPANLWFLRFLASKEDMTMLLRMQKRSLLQIKGVGEVYAEEIQKWQKTAKFSSKVEWIGKLIVRDVRRLLEMLDEIAQLEVLIEGLIPQSKIASRIESIPGYGSICAAELAGEIGSIDRFKSEASLALYLGIGILNKSSGQYEGSRSPRNINWRGKGAMMTGAARHIQLCDEAAQYYKKKRAEGKKHNQAVRAFARHMIRVIWSILIHDRDYRQKED

SEQ ID NO: 211390 - protein, 332 aa, unidentified
MTQLFIGCDMSKHFFDVTYRDKAGHYIYLGQFINEATGFKELVKQLKSVSKLPKSQWFVCFENTGSYSKALFKFFCEKSIPRREDIAAQISKSLGIKRGKNDKVDSKDICKYLYQRRDTIRPNVLDDSQISQLKKLLSYRDQLVKYKVGLSVCLKDINPNLEKDFVTELQGLNNPLIKKLKKSIKDVESKIAKLIASDEELNQTNKLVTSVVGIGHITSAYMIAYSDNFKAFFDPRKFACYAGIAPFENSSGLFKGKNKVSNIANKKIKSILSQCAMSAVLNDPQISAYYNRKKGQNKHYGIVMNAIKNKLVQRVFAVVKRKSPYLKLQAYG

SEQ ID NO: 211391 - protein, 387 aa, unidentified
MRVVAHRAEAPSAICVDLGAIFVSLELSRSKWLITSLSPGGGEKMSKHMVAGGDVAGMLSCFAELKRKAQARTGRCLPIIVIQEAGLDGFWIHRVLQAEGIESHVVDPASIATSRRRRRAKTDKLDGEALLRALLAYKRGEPRVCAMLRAPTPEEEDRRRIVRERKALTNERIRHVNRVKGLLFGQGVSGYEPLRSDRRKRLEELKTGDGRSLSPNLKAQISRELDRIELLLTHIKDVEEARDTMLESAQAVAPAPKLLLNLKGIGPEFAAVLWSEGLSRHFDNRRQVAAYAGLAPTPWQSGIVDHEQGVSKSGNPRLRSMLIELSWLWVRHQPRSALTIWFKERVKQNGGRFKKSTIVALARKLLIAIWKYVNAGVVIEGAALKAA

SEQ ID NO: 211392 - protein, 428 aa, unidentified
MNYSKTDKLNQITEKILIVGIDVSKNFHVARAQDFRGIEYGKAITFNNNFIGFSNLGTWIGELMLEHQKETLIIGLEPTGPYWINLARYLKSNNIQVVTVNPMHVKKIKELDDNSQTKTDFKDSKIIAQLVKDARFSEPNLLCGDYESLRNAKNLRQIMVKDLIRIKNQSHNWLDRYFPEYQVAYKDWESKSFIRILKNYTFPAVLTNVGADEIYNSLPSKLRCGVGLRKIVKLVNAAKESIATTEGLEIAKEEIKYLLKQYEAITAEMDALESKIEDICSRLPEVHKLLEIKGIGLTTASGIISELGDIRNYDHANQLIKMAGLSLIENSSGKKKGRTTISKRGRSDLRKFLYQVIFSMLATNKAFKALYKYFTERRKNQLKGKQAIMALARKLLRIIYVIVTKNIAYDEEKMLSDIIRPVEFLQTA

SEQ ID NO: 211393 - protein, 406 aa, unidentified
MYYIGIDVAKEKHYVCILDDTRELACKPFWIYSDILGLRDLLKRLAELSLNNDDFIIGVESTGAFSENLYEYITDADYKVILLNSYQTAKYRDFSTMKKIKNDSIDALVIAELLASDKYKESYISNDDYQSLKVLGRLRKSLSDKIKTIQREISTVMATVNPEITKVFPNIFTKTALATIKAYPTAVDIQKTTPKKLTKLFRHIKGNNFNEEKAKVLIELSNSSIYAGRAHESRALMIRTNIRILELLCQERDEIELQINTLLYSKIETVDASIENIKTIPGVSEKTISALLGECGDIKRFTSAKAFIAYLGLYPTQYQSGNSMCVGRLAKRGIPIAKHALYMAAIASVRHNSELNKLFRDKVSLGKSKKEALIIISKKLATIIYSLFKYNQPYQAKRVFIPSKGI

SEQ ID NO: 211394 - protein, 352 aa, unidentified
MRSCGKGIEEGKAIYIGVDLHRRAWHVTIMTREVELFSGSLPGNWDSLKRLLERYNGYRIEAVYEAGYFGFGLYDRLCAWGARCVVTPPSLIPREYGNRVKTDRKDSGKLAVLLSRGMLKEVWVPSPEQRCQRQVARTRRQLIGDRVRTQLRIKAQLMSYGVEIPGPRGKWSQTYLENLRRLRFEDRWLEESFRRLLDEYDFLSEQIKKQTDLLKELSETDSYRESAGILQSVFGIGLISAMEILLEIGDFTRFRRSSQIAAYVGLTPSQYSSGDKVRMGRITGIGKNSLRAILVEASWKLIRCDRRLRQRYEGLKVRCGGKRAIVAIARRLLIGIRAMIITRQPYAQGLTA

SEQ ID NO: 211395 - protein, 451 aa, unidentified
MSKISPAPQQKKKSAAKRVRPITRLDAAGIDLGALLHFVAVPADRDAQPVQSFGTQTADLHKLADWLVACRIKTVAMEATGVYWVPLYQMLEDRGLEVCLVNARHAKNVPGRKTDVLDCEWLQYLHSVGLLRASFRPPAAICAVRALVRHCESLVQSGSEHLLRVQKALDQMNVQLHHAVSDISGQTGLTILDAILQGERDPQTLARLRDPRCKKTQAEIAAALHGDWRPEHLFTLRQSLAAWRYHRTLIVECEAELKKQLAQLAPQTTVAVPPKAKPNQRCDETLRGLLFQKFGVDLTTADGMNTQTALVLLSEAGNEVSKFPTAEHFASWLCLCPDNRRSGGRHLSSATRTGANRLATALRLAARSLHRSETALGDWYRRLKAKLGSGGAITATAHKLARILWAMVKHRQPFDPARFGNPALRRQRKESALRRAAKELGYVLQPIHAVS

SEQ ID NO: 211396 - protein, 344 aa, unidentified
MNHYAAIDVALELSSVCIVDATGKVVKEAKVETHPDALVKFFKGLGLRFTLIGLEAGPLSQWLHAGLIEAGFEAVLMETRHVKKALSASAVKTDRRDARGMAQLLRMGWFRPVHAKSAGCQEVRALLVARKLLQHKLIDIEMSIRGILRGFGLKVGKVTKKDFETRIRDLVTGHETLKEIAAAMLAARTTLLTQFNKLHKAVLDIVRHDEVCRRFMTTPSVGAIVAITYKSALDDPHRIKKSRNAGPLFGLTPSRYQSGETDVTGGITRVGDEMVRTALYEAANVLLSPRTRFSALKRWGLEVAKRRGNKRAKVAVARKLAVILHRMWIDGTTFRWTKAEAAQP

SEQ ID NO: 211397 - protein, 351 aa, unidentified
MPLVVLGVDPHKQSHTATALAVGSHQQLASLRVPASAAGYQQLLGWAEQFRQRRWAIENARGLGCHLAQWLIAHGETVQDVRTTATARVRELSRGRGRKTDALDAAAAAGIAALQGDAGQLQPEDVTVVLALLEERRSNLVGQRTRTVNQLHAVLRELIAGGAPRKLSADKAAVLLSGVRPLTLADHTRKQVARDLVAEIRGLDRRLAAIGKRLHDTVTALGSRLPQTVGVGPVIAGRLLGRTGRASRFPTAAHFATYTGAAPLEVASGQHARHRLSRAGDRQLNHALHLIALVQVRTPGCAGYHYFRRKLGEGKTTREALRCLKRRIADHVWRVMLADEQARDRRQLQAS

SEQ ID NO: 211398 - protein, 356 aa, unidentified
MATIEAARSGHVVIGVDTHKHIHVAAVMDSIGGILATLTIATDAAGYKQLLDWAGGFGKIMAFGIEGTGSYGAALTSFLRRHDHKVIEVARPDRRLRRLNGKSDTLDAENAARAVLAGFATAVPKSADGAVEMIRQLKVAHDTAVKDRTGAMVTLKAMLVHASEDLRRETAGKTQKMIARHCALLRPRGLNTPEDANRHVLRSIAKRWIALNDEITELEAMIKDLVAQRAPHLLDRFGIGVDTAAEILIVVGDNPERIKSEAAFAKLAGISPIPAGSGMTCGKHRINRGGHRQLNAAIYRTVIGRMRFHEPTIAYVARRTAEGKSKRDIIRCLKRYVIREVYHLVKTDPHTGEIRS

SEQ ID NO: 211399 - protein, 376 aa, unidentified
MLYLGIDQHSKQITVCVRNQEGEIVRRRQVSTRSKKVEAFFDELLAIEADFMAIVEVCGFNDWLIEMLRQRGCREIVLIQAEQTTKKKTDRRDANKLCEMLWLNRDRLTEGKRVQGLRRVYIPTRQEQEDRQLTSMRKRVAQLRTRTLNKVHRILHKHNIMWDYPTKTFQTKRGRSWLEKVSLPAIDRMELDMLLQQWKLWNVQIAELDEQIAERVSQEREGEIMNKTQLLMTAPGVSYYSALAITSRIGDIKRFPRPRSLANYFGLTPGCRNSGNANHRLGSITKEGSSMVRFILGQLVIHVLKKDPQIRAWYRSVKRRRGAKIARVAVMRRLTTIFWHMLTHHEAYCVGGPPRLRHRDDLDSGSTKGAKGSQAA

SEQ ID NO: 211400 - protein, 384 aa, unidentified
MMVCRALQHLPKIQDNRSGCGEHSERYCSVKKYIGCDSHARYSVFVSVDETGKASAPVRVDHQARDLRDYLAGLEKGTPVAVEASGGWYWFVDELEAAGLDARLVNPLEAKKRMGGRNKTDELDARGLALLLRSGTLPEVWIPPAGLRDLRGLMRTRLAMRSHTTVLKNRIHAALRRYGTMESTGPADLFTKKNRLLLSVAIGRLPEETRRPTLHEWELLDVIDRHIGELEARIRLRIGQLGWVRLLKSLPGVGEILGATIHLEIGEVKRFPTPAHLASYAGLTPRVISSGGKTWHGRTSAQANHYLRWAFVEAADAVVMHRQTYTGDHVMELYDRLKKHKCHGKAAVAVARHLAEASWWILNKREQYRPPRAHAAVVTSSRNG

SEQ ID NO: 211401 - protein, 479 aa, unidentified
MCLPSLRLVRLKSLQTCLFGLSAHRLLFNGHALNVDPIMSRCSYVARLRLSFKTRTSLISYNLESGDFMNDLLLYLFVGIDVSKENNQVYAMNFSQDKLASFSTPNHQSGAQTLEAKLLEILDRHHLSKIIIAMESTGIYSAHIATYLSASKSLFPFDVRVYVLDPKISRNYRHSFSDMDKTDPKDAFVLADLARVGRCDRLTPFKGPQKIALQRLTRHSHHIAELLSKEKVYALNNVFLKFSEFRGVFSNDFSKTAVDLLLNFKSVDEIIDIPLEELVEFVMTSSKNRFADSNQIALTLKAAARNSFRLDKMAYEPINLSLAASFNCIQTYQNQLKSIDTAILKQVKGLNPNHYLSLISIPGIGPVYASGILAEIGHINQFDSEDALAKYAGITWRKSQSGNFDAEDTKMTKTGNVYLRYFISEAANLARIHNPVFKDYYLKKFDEVKTHQHKRALALTARKLIRLIFGLLSTDRLYK

SEQ ID NO: 211402 - protein, 342 aa, unidentified
MKNITTIGIDLAKNSFSVYGVNAKGKPVLQRTLTRAGVIRFFANLPACLVGMEACASSEYWARTVESMGHTVRRIHPRYVKAYLLGAKNDTNDAAAICEAVQRPHMRFVPHKSPEQTDIQCVHRIRQGFVRSRTALVNQVRGLLGEYGIIMPQGISTVRNRLPELIADEANELSPIMRRNLSSLYESLCFLDNRIFDQEKLLRAIVRENEACQRLMQVPGIGLLTATILLSVAAVASNFKNGREFAAYLGLVPRQHSTGGKIKLLGISKRGDSYTRTLLIHGARAVLYSLITGRTPQERQNAWLSELVARRGKNRASVALANKTARIVWSMLAQGTQYKFAA

SEQ ID NO: 211403 - protein, 368 aa, unidentified
MSDSDGFVFFVGMDWGSQAHQVCVLNAQGQQLGQRQVLHTAAALEELFGWFEKLTGGARSSLAVALEVSRGPLVEMLLERGFTVFSVNPKQLDRFRDRYFPAGAKDDRRDAFVLGSALRTDRHCFRLVRREDPLIIRLRDLSRLDEELGRNFRRYACQLREQLQRYYPQLLALCPQADEPWLWSLLEAAPDAANARRWSEARIEKLLRAHRVRRLRAAEVAAQLRAPGFALVPGTVEAASEHALLLVPHLRLLLQQRAALAKRIEALLEELAGEKTTDGEKPQHRDVTILRSLPGAGRVVAATMLAEAAQALAERDYHALRAYAGVAPLDPAERQASQRADALLLQCAAAQRHLSLGAGECAARSRQP

SEQ ID NO: 211404 - protein, 373 aa, unidentified
MNNTTVYVGMDVHKNSFSLCCYTVRDDACSHYVKIDPDYRLVLEYIEGMRGIYGDDSKFICGYEAGCLGYTLYHQLNDHGVECIILAPSTMAKSPVQKKKKTDKRDSEMTARCLAHHSYHKVHVPTSEEEQVKEFIRMRDDHKLALKKIKQQILSFCLRHGFIYNAGASYWTAAHLSWLRSLEPEGLYKEILSEYLLTYNKLADTLERLDRRIEELADQDAYRESVRKLCCFPGIKTQTALAVIVEVGDFKRFQKAQQFALYIGLVPGEDSSGDGINRLPITKAGNTHVRRLLVEAAQSYGRGSIGFKSKALKARQEGTPSEVISYADKANERLRRRYYRMTLKCGKKVNAVKTSIARELACFLWGIMTGETA

SEQ ID NO: 211405 - protein, 338 aa, unidentified
MIVIGLDVHKQSVTAVAVDEAGRPLDEKLIPVGSDELLDWAAGLDGERLWAVEDCRQLTRWLERQLLSVGEEVVRVPPKLTVPERRAGRTRGKSDPIDALAIARAALREPDLSRPLPSEQASREIKLLVDHRGDLVDQRRGTQQRLRWHLFQLDPTYQVPLRMLGRASHLERVGRWLARQDQELQVRLARELLMTCRQLNKQIAELDQQLEHRVKQTAPGLLELPGCAAVTAAKLLAEIGPVDRFRSDAQLARHSGVAPLEASSGRTQRHRLDRGGNRQLNAALYRIAITQARYHAPARDYLERKRAEGKSRREAIRCLKRLLVRVVFNTLKTEPALT

SEQ ID NO: 211406 - protein, 325 aa, unidentified
MTEQLSCCGIDVSNLTLDVTYQNNLGDLFYLQVGNNNAGFKKLVEHTGFNCHFVMEATGVYYIRLAFFLNSKGCKLSVVNAMSIKRYIQMHLERNKSDKKDSRWICQYAIEQRPSFWQMPDSAYFECKQIYNTIREYTEQVKRFNNQLHSLKLLPIPSKETIKSIEKMKAYLVKEMSILEVKLEVLLKKWQPQQYKSINSIKGLGKRATALLIIYTQGFKHTSNHRQLISFAGLSPTEYSSGTSIKGSNRIYKKGGKPIRDVLYMCAMNAKQTNEACKKLFDRLKAKGKTGKQALIAVMNKLLKQVFAVVKNKTLYQPNYCSVLQ

SEQ ID NO: 211407 - protein, 367 aa, unidentified
MSVLSVADCLSQASRFDTYSGSASMAHAPHLVLGVDTHKDLHVAVLLDRLGRYLAAASFATTDAANTDLVAWTRRYGQVTTAGVEGTGSYGYRLAQHLRDHGIDVVEVNRPDRARRRRRGKNDPVDAEAAARAVLAGDARAVPKDRNGAVGELRALVVARRSAIKARTQATNQLRALLVDGDDELRGRLRPLRKAHLARACAQLAPAAGLQLALGSLGRRWLALNDEITSLDAAITSRVRRTAPRLLERHSVGVQTAAQLLITAGDNPGRLHSEAAFAAVCGASPVEASSGKTIRHRLNRGGDRAANSALWTIANNRLMHDPRSRAYAAKRTALGSSRKEILRCVKRALARELYPLILDTLALPRLP

SEQ ID NO: 211408 - protein, 343 aa, unidentified
MQVSTIGVDLAKNVFQVHGVDSAGKVVITRQLRRKQVIDFFSKLPPCLVGMEACGTAHHWAREVSKLGHTVRLMPPSYVKGYVKRSKNDAADAAAICEAVTRPSMRFVPIKSADQQALLMLHRTRDLLIRQRTQLINALRAHLAEFGLVAATGREGLAQLAAIITDESNREALPSAMKQALQAIVDQLAALELQIGTLDRAIHAHHRANDMSCRLETVPGIGVIGATAIASTVTNPSDFKSGRDFAAWIGLVPRQHSTGGKERLGGISKQGDRYLRRLLVIGATAVVRHARQHPQKHPWVIRLLAKKPAKLVAVAVANKMARIAWAIMAKGGYYRAPELAAAA

SEQ ID NO: 211409 - protein, 413 aa, unidentified
MEGLQPIYRRVAGIDVHRMLHVVTAVIENSDGTIEQTSRNFGGFKRDCRALAAWLVELGVELVVLESTGIYWKSVYTYLEQAGINAWVVNAHFVKHVPGRKTDMSDAQWLAVLARFGLVRGSFIPPQDLRELRLLSRYRRRLSTMCASEVNRLHKILDDGGIKLGGVVSDINGVSAREMVAGLIEGVGIDQLQDMARGALKLKRDDLEAALDGDLTARHLFVLKHLHAHIGTLERELAELDAYILGAMTPYQWAHRLLQTIPGIDQIASALILIEIGDDMTRFGCADRLAAWAALCPGNNESAGKRKSGRTRKGNAIIRYLLCECANAARMTRSSLAAKYKSLMVRKTHKKAIVALAHKMIRLIYLLLTRKKAYLDPQVDYAAMSARKNAPRWIKQLKLIGQWPDKKPAPTSA

SEQ ID NO: 211410 - protein, 314 aa, unidentified
MSEKTFVGIDVAKDTLDVAIRPEGIQRNFPNDEEGWHSLLLFVRPLGPSLIVLEVTGGYQMGIVRVLAAAALPVVVVNPRQVRDFARATGRLAKTDSLDAGAIAHFAEAVKPDIRPLKTGEAEKLDALMTRRRQLIDMITSEKNRLHSATEWTKQDIETHIAWLEHALEKTDSDLDNLIKKSPLWKEKRSILLSVPGIGPVTAATLIVDMPELGTLNRKKISALVGVAPFNRDSGTMKGKRTIWGGRASVRSSLYMATLTAVSFNPVIKPFYQRLVKAGKLPKVALVACMRKLLVILNTMVKTNTNWRINPCAP

SEQ ID NO: 211411 - protein, 384 aa, unidentified
MVNNSITFIGLDTHKEFFEVAYIEDNREAKPVSLGRINGTKQALQKLVRQFESKHPGSTLHFVYEAGPCGYWIYRFLTSLGHCCYVVAPSLIPKKAGERVKTDKRDAVKLALLLRSGDMAPIYVPEPEDEAMRDLSRARETAMKDLKDAKYQLKAMLLRNNIRCDIQDNWSAKHLRWLTELILPHPSQQIVLQEAIQTITERIRRLERLDNELSYHVKNWRYYPVVKAIQAMRGVRLLVAVGVIAELGDLSRFDHPRKLMSYLGLVPSEHSSGGKRKQGGITRTGNTRARRLLVEGAHTYRYAANVSTELQKRQESLSKEIVDIAWQAQLRLCRRYQRLMKRGKHYNLVVTAIAREMIAYIWAISREVVLTPVNPAKRLARVPA

SEQ ID NO: 211412 - protein, 322 aa, unidentified
MNTSLGIDIAQRTFAAALWLGAQPLLKAEFLNCPSGFRQLERWLKTHGVGALRVGLESTGIYAEALAAWLHARQHQVFLLNPERTAHYARTLGQRNKTDPADAVTIALFVARHDDLTPWQPLPAEHKHLRSLTRVRHQLVLTHTQLRQQLATADAAARPHLRAACRALQRELLTVAKAIAAHLKSHPALAAQVRRCRTLKGIGLLTAAIVVSELPPITAQSDPRALCAWAGLTPRRWQSGQTEGPARLSRKGNAHLRLALYMPALVAKRFNPLLRAFADRLAAAGKSTPAILGALSHKMLRILIGLLRSHTDFDPNWSPQKT

SEQ ID NO: 211413 - protein, 349 aa, unidentified
MQITTIGLDIAKNVFQVHGIDAAEKVVVRKQLRRSQVLEFFKALPPCLIGMEACATAHYWARELTKLGHQVRLMPAKDVKAYVKRNKNDAADAEAICEAVGRPTMRFVRVKSAEQQGRLMQHRTRDLLMRQRTQVINALRAHLAELGIVAAQGREGIKELLAIITDEGDERLPLDARTSLIVLAAQLQALQTMIGSIEKRISAQHRANEASKRLETIPGIGILGATGIAATLTDPQAFRSGRDFAAWIGLVPRQDSTGGKQKLGPISKQGDRYLRRILVVGAHSVLRRAKQSPQISLAHAATGAPAVQGRGSGSRQQDGAHRLGVAGQGRQLSGAGARGGVRRGLAMGG

SEQ ID NO: 211414 - protein, 348 aa, unidentified
MDKIIRIGIDTSKSVFVLHGVNAADEPVLRKKLRRRQVLDFFRIMEPTRIGLEACGAAHYWARELMGLGHAVVLLPPQYVKPYVQRGKNDAADASAICEAMSRPRMRFVPGKTAEQQAALMLMGVREQFIARRTQLANMIRGYAAEFGITAARGLDKIEPLLARIATAPDVPELAKELFATLAEQYGELKPKLRRIDAQLLAWHRQNELSRRLVQVPAIGPIGAALLAMKVPDPRAFRTGRDFAAWLGLTPKDHSTAGKQRLGVITRAGDEALRGTLVSGATAVIQQVSKARGNPSPWLIALIKRKPPKLAAVALANKTARIAWKLMVSGEPYDRNHGAAAHTVGIAA

SEQ ID NO: 211415 - protein, 347 aa, unidentified
MQILSLDLGKNKTVGCDYERESGKHRFKTAFSTRAGLAQLVKEVKPDRVVIEVCSIAGWVCDLLREMGIEVQVANTSDDAWRWRKVKKKNDRCDALKAAQLSAVNQIREVHIPTIDVRQWRALIAFRQQLVQRRTRVKNHIRDLLLREGQILPRGGKCWTQLGVAELEAMAQPLSQVRMNELWRGELAIELRQLRAVQEEIEVAEEKLDAIGAADPRVRLLRTIPGVGPRLAEAIVALLDRPERFRKASEVSAYIGMVPKELDSGETERRGKITRHGSRLVRSLLVEVAWAGLRHNPWVRETYQRISGGKKSRKKIAIVAVGRRLLVRCWAMLRDGTSWQWPAAKVA

SEQ ID NO: 211416 - protein, 428 aa, unidentified
MNCNTQNAKIASITEKTLIVGIDVGSETHYARAFDWRNYEYTKRPLEFSNTEAGFQTFKAWMEELAEKHGKTAVIPGMEPTGHYWFALGKFLQDNGMKPVHVNPHHVKKSKELDDNNPNKNDRKDPKTIAALVNEGRFSYPYMPVGIYAEIRSLSNLRFQTQEELTRIKNRLARWFSVYFPEYKDVYGDLKAVSGRMVLKAAPLPEDIIKLGAEGVNRLWRDAKLRGAGMKRAKTLVSAAEHSVGSKEAPEAARMELKNLLNDMDVYASRMDELLQRIEEKLKEIPYIDNLLAIKGIGMVTVSGFIAEVGDIGRFDSPKQLQKLAGYAIVANDSGKHNGESRISYRGRKRLRYVLYEAAISLVGKNAEFRQIHEYYRTRKENPLKKMQSVVAVACKVLRIFYVILTKGVQYDSGKLLGDIRRPQVQPA

SEQ ID NO: 211417 - protein, 347 aa, unidentified
MRFYTQQHQFYCGIDLHARTMYLCIVNREGEILVHRNMPAGPEPFLKAVAPYRADLVVCVECIFTWYWLADLCAREGIPFVLGHALYMKAIHGGKAKNDKIDSQKIAALLRGGMLPQADVYPAAMRATRDLLRRRMHLAHKRAELLAHVHNTNSQYNLPAIGKKIAYKANRDGVAERFADPAVQKSIDVDLALITYYDELLRDVELTLVNTAKHHDANTLYLLQTVPGIGKILSLVWLYEIHDIDRFPRVQDFVSYCRLVKCAKESAGKRLGTSGTKIGNAHLKWAFSEAAVLFLRDHPPAQKYLARLEKKHDKGKALTVLAHKLARAVYYMLKRHVVFDRAQFFQR

SEQ ID NO: 211418 - protein, 347 aa, unidentified
MEHYAGIDVSLEYSSVCVVDTSGKIVREAKVASEPEALITWFGAQGLAVARIGLEAGPLSQWLYATMREAGLAVELLETRHVRKAFEAMPVKSDRNDARGIAQLMRLGWFRPVHCKSMGAQETRTLLTARKLVQSKLRDVENSLRGILRGFGLKVGKTTDRSFAGRIHELAAGHPSLEAVAEALLAVRAVLLREFNGFEKQVRRMARSDAKAKLLMSTPCVGPIVALTYVSAIDDPTRFKSSKQVGAHFGMTPKKYQSGETDYTGRISKIGDASVRTALYEAAHIMLTKAVKGCSELKSWAMRIARRAGMSKAKVALARRLAVIMHRMLVDGTPFDPAAKQTAAAAP

SEQ ID NO: 211419 - protein, 456 aa, unidentified
MKSKCKSEKKTTDKRTGRRSCPRVSSDLPKLNLNAAGIDVGSHSHYVAVPPGRDDGGWVREFKCYTSDLYAMGSWLRACGVENVAMESTGVYWIPVFQVLESLGFEVTLVNPKYVKNVAGRKTDVSDCQWIQQLHTYGLLSASFRPDDEICVLRCYWRHRDMLVKYASSHIQHMQKALDLMNIHIHKAISDITGVTGMSIIRAILSGERNPVVLAEMRDPRIKCTEDELVEALQGDYHPEHLFTLGQALSLYDFYRQQLAECDRQIEACLMQMGTKWEAPQESSQADNANADDNSIARKPKKKRVGGNAPTFDLHTHLITLCGGLDVTQIDGMNVVTGLTAISETGLDMSKWPSEKHFCSWLALSPNNRISGGKVLSASTRKVTSRAAYTFRMAAQSLHRSPTALGGFYRRIKGRLGAKAAITATAHKIARLYYNMLKYGKDYVDQGQDYYNKLSR

SEQ ID NO: 211420 - protein, 403 aa, unidentified
MNAVGIDVSKGKSMVTILRPFGEIVSSPFEIKHTSSDIHSLIKLIHSIEGESRVVMEHTGRYYEALAHQLSAADLFVSAVNPKLVKDFNNDSLRKIKSDKADSVKIARYALDKWQSLEPYSITDELRAQLKVMNRQFHFYVKQKTAMKNNLIGLIDQTYPNANTYFNSPTRSDGSQKWVDFVSTYWHVDCIRKMSLNAFVEHYQNWCKRKKYAFNKSKAEEIYTKTKELVPVFPKNEITKHIIRQAVDQLNSTSVTVETIRTLINETASKLPEYSIVMQFKGIGPSLGPQLMAEIGDVTRFTHKGALTAFAGVDPGVNESGSYAQKSVPTSKRGSSNLRKTLFQVMDVLIKTMPQDDPVYQFMDRKRTQGKPYYVYMTAGANKFLRIYYGRVKEYLSVLPDPS

SEQ ID NO: 211421 - protein, 442 aa, unidentified
MARKPSKQRFTVVHPDCAAIDVGGREHFVAVDPRHDNAVQSFTSFTDDLYKLADWLKSLAIKVVAMESTGVYWIPIYEILSERGFEVYLVNARATRQITGRKSDVLDCQWIWQLMTHGLLRGAFRPDDLTCCVRSLVRQRASKVKDQAQTLNRMQKAMSQMNIQLANVISDISGVTGMRILRAICAGERDPVQLAELTDRRIKAGKEAVARSLHGNWRREHLHALTQELAAYDFLEQQIADCDDAIKTALEQLPVLQTKPEPSNKPLRSPHRSGAQQTELHQTLWKVLGMDLTAIPTIGVDTALVLAGEIGTDLSRFPSSQHFCSWLGLAPPTRISGGHRLAGGGPKIVNRAAQALKQAASNARNDKGFIGASHRARLTRMDTSCAIKATAHQLARLVYNLLTKKQAYVEQGLEEFESRSQDRQVRALLRKARKLGYQLVAA

SEQ ID NO: 211422 - protein, 311 aa, unidentified
MDDVFIGIDVSKEYCDVAVIPDGTRGRFTNDEEGQEAVAAFILPLKPGRIVIEATGGYEMGVVRVLADNQLPVVAVNPRQVRDFAKATGRLAKTDTIDAEVLSQFARAIQPDIRPLPEKEAQVFRALVARRRQLVQMLTMEKNRLEKSPPAGSKDIRNHIYYLTEALKKIDRDISRTIRKSPLWKEKETILTSTPGIGPVISCTLIAALPELGTLNRKEIAALVGVAPFNRDSGKHRGKRTIWGGRSHVRATLYMGTLSAIRFNPVIRAFYKRLVDAGKVKKLAITACMRKLLTILNTMMKNKTTWAEVRS

SEQ ID NO: 211423 - protein, 347 aa, unidentified
MTTIVEIERAHVGGVDTHADVHVAAVIDPQGGLLGVESFRANPDGYKELSRWMRNFGTIGMVGVEGTGSYGAGLSRHLRSVGLVVVEVDRQNRQARRRQGKSDPLDAVEAARAAQSGRAFGVAKTRDGSVEAIRALMVARRSARESRTKAMNQIRQLIYTAPDELRERFVGTPPWRLAEGVAVLRVHADADEVRMATKTALATLGRRAVALDEEGSRLDALIARLVDNVAPELVQLVGVGYDTAALLLIAAGDNPSRLRSEATWAKLCGVSPLEASSGKVTRHRLNRGGDRQANHALWRIVLSRMSCHPPTKTYVARRTVEGKSKKEIMRILKRYVAREVYHYLPRE

SEQ ID NO: 211424 - protein, 339 aa, unidentified
MNIATIGLDLAKSVFQAHGIDARGRFILVKKLHRKQMLPFFSKLPPCLIGVEACATAHYWARTLIGMGHEVRIMPPSYVKGYVKRGKSDAIDADAICEAVQRPTMRFVPVKTIEQQSILMAHRTRSLIVRQRTMAANALRAHLAEFGLVANPGIANLVKLADRAFADETLPSYAHRALEILIRRMAELTEEIGTLDQELRTWHAENEASRRLATIPGVGVITATAIAATVTDPGQFRSGRQFAAWLGLTPQQQSTGGKTRLGGISKQGDRYLRRLLVVGATAVMRHAKRNPTPMTGWVNGLLEKKLFRLVSVALANKLARIAWAVLTRGEIYRPYGPPA

SEQ ID NO: 211425 - protein, 406 aa, unidentified
MKRRQEDWFGPHELYLGVDVGKSFHWAVGLDQEGEIRISRRVENRLDDVDALLEEAGDAALVVVDQKNNIGSLVVRRCRAKGIDVGYLPGKSMKSAREMLPGTAKNDRIDAEVIAQAGMSLRCAVLPIADTDDLGASMSLLSSQLAYATRRATMARNRLHAVLLESDPAFEAAADLSAAWTLDVLAAFGGAAGIAAAGRRSYGAACARDGATREARDAFWNAACASAGSCSHPASEDLVVRELADEIATADAERAELSAGLEGMLSEDETYQCLLTIPGIGPKTAAALVASIDISLFKGDSKLAAYCGLAPKDRDSGTSLSSVTSTRAGNKALKNLLIFSCNSLVGTKNRFGRYYDRCVARGMRHNKALKAVARKRLRVIYAVMRDRVPYIEPSADGDVEKSSSAA

SEQ ID NO: 211426 - protein, 445 aa, unidentified
MMRKAKKQRLEIVHPRCAGIDIGSREHWVAVDPGRCDQPVRCFTTFTDELHRLADWLKSLDVEVVAMEATGVYWIPLYEVLDARGFDVHLVNARATRQVSGRKSDVLDCQWIWQLMSHGLLTGAFRPGDKVCALRSFVRQRAGKVQEQSRCIALMQKALTQMNIQLDNVVSDLMGRTGSAILRAIVAGEHDPQELAKRRDRRLRADEATVARSLHGNWREEHLFALTQALAHYDFLNEQIGACDQQISQALATLPKLSEAQAPKPVKPLRNPHRSTAQQKELHQALHAVMGVDLCAIPTLGIDTVLVLAAEIGPDLSRFPTEGHFCSWLALVPPTHISGGKPLPGRKPKIFNRAGQALRQAAANARRSESYIGACHRVRLVRMDTAKAIKATAHQLARLIYAMLTKGQSYVEKGIDAYEALSKDRQLRALQRKARKFGLTLAEAS

SEQ ID NO: 211427 - protein, 391 aa, unidentified
MFYIGIDIAKKNHEASIIDSSGKSLSKSISFPNSTKGIEKFNNFIAEFGVTTNNCIIGMEATGHYWISLFSYIIDLGFTCYVINPIQSDAFRKMYVRQTKNDSVDSFIIAQIMRFGEFSISNFSDENTFALRNLTRYRFALVDECSDWKRKLVAILDQVFPEYSSLFSNIYGVASKELLSKYPLPEDMLSIPAEELGDLLCKCSKGRLGINKAEEIQSCARETFGIKFAKRSFSFQIKQIISQISFLEEQLKEIEIEISYLLEDICPIITTITGIGSILGASIVSEIGNISRFERANQLVAYAGLDTRVKQSGDFSATNTKLSKRGSPYLRRSIWLAATVAAFKDPALSIYYQGLRARGKAHGTAIGAVARKLTNIIFAVLRDQKPYTPNI

SEQ ID NO: 211428 - protein, 349 aa, unidentified
MSQNLNSAVAVIGIDIGKNSFHVVGLDNRGAIVLRQKWSRGQIEARLANLPPCLIGMEACVGAHHLSRKLKALGHDARLMPAKYVRPYSKGQKNDFRDAEAIAEAVQRPTMKFVATKTAEQLDLQALHRVRERLVSQRTGIINQIRAFLLERGVAVRQGLRFLRAELPRTLATPPEVLSPRMVRVISDLAEDWRRLDERIDQLSSEIGVLARQDSGCERLMSVPGIGPIISSAMVAAIGTGDAFAKGRDFAAWLGLVPKQMSTGDRTILGKISKRGNRYLRVLFVQAAWVVLIKPMSWERYGLKHWIEAAKKRLHRNVLAIALANKLARIAWGVLAGSRTFEASKLQAA

SEQ ID NO: 211429 - protein, 345 aa, unidentified
MKHFAGLDVSLQETAICVVDEDGTIIIEGKAASDPADLIRWLAATGLMIARLGLEAGPLSPWLHAGLRAVGLPAICIETRRMKGATAAMAVKTDRNDARAIAHAMRVGWFTAVHVKTAESQELRLLLSNRRTLLEKRVAIDNEIRGTLKAFGLKLGEVTVGTFEARVLELLAKRSRLLVMVRPMLTARAALRQQGDVLHRMVLKAVRASAVCRRLLSVPGVGPIVALTYATGVDDPSRFTHSRDLGPHFGLTPRKYASGEIDRSGSITKAGDGAVREVLVQAALTLLTRVHRWSALKAWGVAIAKRRGLRRAIVAVARKLAIIMHRMWANAAPFNWAREEAVALA

SEQ ID NO: 211430 - protein, 387 aa, unidentified
MEKPHDDSKACRTTFVQDNTLVAVIEMSLSSWLVAGMIPGVGREPLKKIAPDAEGLLQLLYRWRDEAITAGKEITRIAVAYETGRDSFWLARWLRERGIDANVIHATSVAISREHRRAKTDRIDTAMLRRGFLGWLRGEPGHCSMAIVPTVSEEDAKRPCRDRESLVHERTSIVNRMKAILIQFGVRNFNPVLRKASEKLDAVRTPEGIALPPNTVCALRRNMERLNLIKEQIKAIEQAQLQRLQRDPAEKMNVIIFLLVRIIGLGVETAQQLAHEILFRNLRDRKAVARYAGVTGSPDESGSKRREKGISRSGNARVRKILIQLSWRIVKFQPESDLVLWFKTRTENARGSRKPMIVALARKLIIALWRYVNTGVVPEGFKLRPAA

SEQ ID NO: 211431 - protein, 366 aa, unidentified
MGKRSTGRKGIKEGRKGSGGEVVGLDLGDRTSHVCVLDAEGDVAAESTVATTRAGMARWFRGKGRLRVVMEVGTHSPWVSRLLNDLGHEVLVANPRRLRWIYENRGKGDRVDARSLARVGRLDPTLLSPVEHRPEGMAEDLAVLRTRDVLVRTRVKLINHVRGAVKATGERLGSCSTRTFADKATGRLPERLSDRLAPVLTAIGVISEQIRELDRQLEELGRRKYPETKRLQQVTGVGLKVALGYVLTLQDPGRFRTSRAVGAYLGLVPARRQSGECDPQLRITKEGDGLLRRLLVQSAQYILGPFGPECDLKHFGQELARRGGKNARRRAVVAVARKLAVLLHHLWRAGDDYEPNRCKAALPAVA

SEQ ID NO: 211432 - protein, 387 aa, unidentified
MPQPNDLSRSLVPLDQDSTIIAVVEMSQSSWLVAGVLPGIERQPRKKLEPSAERLLGLLHRWRDEAVRAGKKITRIALAFEAGRDGFWLARWLRVRGVEAHVIHPSSVAVSREHRRAKTDRLDTELLKRAFLGWLRGERGHCSMARVPTIAEEDDKRPNRERECLVGERTRIVNRLKGTLARLGIRNFKPTLRKAAERLATLQTPEGSPLPPNVSAELQRDMARLGFVVSQIREIEEARQKRLEQEPETGPHAMVRLLARVVGVGIETADMLVHEVLSRPMRDRKAVARYAGLTGSPDESGAKRREQGLARAGNARVRRGMIQLAWRFLLFQKESALAQWYRARTADSRVGTRKTMIVALARKLLIALWRFVTTGETLEGVILRPAG

SEQ ID NO: 211433 - protein, 419 aa, unidentified
MKITKTKKHQTVNEKTLIVAVDIGKTVHYGYFRGPHGHDIKPFPFRNTQKHFKDFWDKIVRYKTENKLEDIVIGFESTGSYAEPLAHYLAQKPARLVQINPMHTKRIKELTGNSPNKTDRKDPRVIADIIALGHALTVVIPEGSAAELRRLIQARERAIKIRTIMTNQLHHLIYLVFPEFTQVIKNIKTKSALYLLKNYPTPESIVSLGLESLSLLLKKVSHGKMQRERAVRLFEAAQHSVGIHEGRQGMLLEIEHLVSDIEDKNRFIDQLEEKLTYHLDCIPYGQSMLSVKGVGPVTIAGLIGEVGDFGRFKTVSEIMKLAGFNLYEVSSGKHSGQRHISKRGRSLMRKLLFFAAIGTVRSNGIMHKKYHDMLDRGMPRVKALVAIARKLLCILFALARDNTVYCDNHNEVHKVALAA

SEQ ID NO: 211434 - protein, 343 aa, unidentified
MNLSRVGVDLAKNVFQLHGVDRHGKVVWKRRLSRAKWLQVLLEQVEPGCEIGMEACAGAHHWARELESRGYIVKLIPPQFVKPYVKSNKNDANDAEAICEAMSRPGMRFVTVKSVAQQDIQATHRIRSELMSQRTAKANQIRGLVAEYGLVAPRTLYALRAAIPDWLEDADNDLTDHFRSLLHGLWLDLVALDDRLRELDRAIEQLANSNPMTRRLQQLRGVGPMVATALIATVGDAGQYHKGRQMAASLGLTPRQCSSGDKQRLLGISKRGDVYLRTLLVHGARAVVSQAKHRDDRLSRWVTGIAQRRHPNVAAVALANKTARMAWAMLRNETDYDPDFTVS

SEQ ID NO: 211435 - protein, 453 aa, unidentified
MAQRNRSVPLKCAKSRQALSLTHPNAAGIDIGSASHFVAVAPDRDDEPVREFKSFTVDLIALADWLAACGVDTVAMESTGVYWIPLFELLDARGFKVLLVNARHVKNVSGRKSDVLDCQWLQQLMSYGLLSGAFRPADAVCALRALSRQREMLLKSQARHVQHMQKALTQMNIQLANVISDVVGETGQKILRAIVAGERDGNVLAAMKNVRIRASHDEIAKSLQGNWRAEHLFALKQALALFDFYTSQLAECDQEIEAQLESLAVHQGSPAKGKKRGRARNAPKFDLRERLFQMCGVDLTRIDGIDVTTALVVVSEVGADMSRFATAKHFTSWLGLCPGTKIIGGKVMSGKTKRCANRAAQALRLAAAALRTSRSALGAYFRRMCSRMDKPKAVTAAAHKLARLIYTPLTKGEEYTDQGQEYFEERYRQRVLHSLSVRAEKLGMKLVANEQPA

SEQ ID NO: 211436 - protein, 390 aa, unidentified
MSQQHFDASRSLTALEQDSTIIAVIEMSQSKWLVAALVPGVERQPLKKLDAQEEGLLKLLHRWRTEAGQAGRAIKRIVVAYEAGRDGFWLARWLRAHDVEAYVIHPTSIAVSREHRRAKTDRLDTELLMRAFLGWLRGEKRHCSMVAIPTIEEEDARRPNRERQNLVTEQTRLVNQMKAIFTRFGIRTFQPMLRKAEDKLKGLRTAEGTPLPENTRAELCRHLARLRVVREQIRAVEQERLRKLAAAPAAEYGPHAMVRLIARVLGVGIETADMLVNEVLSRHWRDRKAIARYAGLTGSPDESGKRRRERGLARAGNARVRCGMIQFAWRFLRFQKDSALAQWFAARTADRRASTRKTMIVALARKLLIALWRLVTSGQVSDGIVLRPAS

SEQ ID NO: 211437 - protein, 347 aa, unidentified
MVTIGIDPHKASHTAVALDPSGEMLGELRVVADASMLRRLRKWASSWPQRVWAIEGAAGLGRLLAHQLVAAGERVVDVPSALAARARVLASGHGRKTDGIDARSVAVVAQHRGDLLAVAADDHTAVLRLLSDRRDELTGERRRTINRLHRVLRDLHPGGAPRQLSADRAARLLTSIRPASAVDLERKAIARQLIADVRRIDRALLENRRRCEQAIAASGSTLTEIFGISDVLAAKILGHTGDITRFASADHYASYTGTAPVEASSGEQTRHRLSRAGNRSLNHALHIAARVQTMHPGPGRTYYQRKRAEHKTSTEALRSLKRQLAKIVYRQLRHDHLGRPFIDSELT

SEQ ID NO: 211438 - protein, 348 aa, unidentified
MRFYNQQHQYYCGGDLHARTLFVHILDSEGRTRFERNLPACPKAFLDAVAPFRDGLVVGVECMFAWYWLADLCEAERIPFVLGHALAMKAIHGGKTKTDRIDAAKLAGLLRGGVFPQAYVYPKPKRATRDLLRRRSNFVRQRAQLIAHIQNTNSQYNHPPFAKKLTYKGNRNDDIVDRFADDSTKMMVASDLTMIAAYDAQLQKLETHLQQHAKIDDPVTYQFLRTVPGIGPVLGLTMLYEIDNIHRFPEVGNFLSYSRLVSCIHESAGKVKGVGGKKIGNAHLKWAFGEAASLMLRSFPAAKAWMQRQERNRSKVRAHAILEAKIGRTVYAMWQHQRPFDPKRFLAS

SEQ ID NO: 211439 - protein, 341 aa, unidentified
MQITTIGLDIAKNVFQVHGIDAAEKVVVRKRLRRSQVLKFFASLPPCLIGMEACATAHYWARELTKLGHEVRLMPAKDVKAYVKRNKNDAADAEASCEAVRRPTMRFVGAKSAEQQGRLMQHRTRDLLMRQRTQVINALRAHLAELGIVAAQGREGLKELLKVIADEKDARLPIDARASLIVLAAQLQALQTMIGSIERRLLLQHRANEASQRLESVPGIGTIGASAIAATVTDPKAFRSGRDFAAWIGLVPRQDSTGGKQKLGPISKQGDRYLRRILVVGAHSVLRRAKQNPEKYPWLTQLLARRPFKVVAIALANKMARVAWALLAKGGTYRVPALAAA

SEQ ID NO: 211440 - protein, 344 aa, unidentified
MYHYAGIDVSLESSSVCVVDGAGKILREAKVASEPEALIAWFRSLGLTLERIGLEAGPLSQWLYAALREAGFAVELLETRHVRDAFKAMPVKSDRNDARGIAQLMRLGWFRPVHCKSIEAQETRAVLTARKLLQSKLRDLENSLRGVLRGFGLKVGKTTECTFADRIRELVAGHPGLEVVAKALLEAHAVLRREFNGLDKQTQKLARSHPQAKLLMTTPSVGPIVALTYASAIDDPKRFASSKATGAHFGLTPKKYQSGQTDYTGRISKIGDASVREALYQAAHVMLTKPIKGCTALKSWAMRIAKRAGMRKAKVALARKLAVILHRMLADAKPFNPAVKTVTT

SEQ ID NO: 211441 - protein, 409 aa, unidentified
MAERFVGIDVALREHRIAVLDRDGEAVGPSFTIAASQDGVATLLRTLAARDAPAAQPLIGLEASGHLWENLEAALVGAGYRVLVLNPLQTRRYRDVVRRKAKTDDIDAHLIAGLLRSGVAQASYVPDEPIQSLRELARLRARLLADRQDYLRQLIAQLDVVLPEHAVLGDLLTARARGILAQFPTAQHLAHASPRAIRRAAEDAGARGFSLDDATDVRDRARRSLYSGKAATARAHVVRTLVSQLERLTSAMDEVDRAATTLLPPSEPGAGPSDAELLQTIPGIGPQTAATLLGELGALSRFTDARALVAYVGFYPVISESGDHAAPPRLSRIGPRIARHSLYLAAFNAVRHSGEWRTIYLRKKAQGKTSKQALVVVAVKLLHAVYAMLKHREPYNPSRLLVASATIGS

SEQ ID NO: 211442 - protein, 350 aa, unidentified
MIIGVDYHPSFQTIAFLMEETGECGEQELNHSDGQAEKFYRDLKQRGISVRVGMEATGYSRWFERLLTELGFEVWMGDPAEIKAKRVKKRKTDREDARLLLKLMLENNFPQVWVPGPENRDLRQLLWHRHRWVQMRTRIMNQLQALAMNEGYRWKKKLFSQQGRAQLEKLTLAPWASRRRQELLELLDRMNPTIEELTAAVEREARKRPEALRLMTHPGVGPLTALAYVAIIGTPTRFQRGKQIGTYVGMIPCEESSAGKQRLGHISKQGNSLLRFLLVEAAQAAARINPEWRRRYIHLAMRRHRSIAKVAMGRRLAVRLYWMWRNGCEYSPSLEFGSYAGQLGLVHGGK

SEQ ID NO: 211443 - protein, 323 aa, unidentified
MSQGLCVGIDVSKDRLDVATYPITEQRQFANDAQGISELLEFVAEKQPRLVLLEASGGYEREPSCALHTNQVPTCVVNPRQVRDYAKSKNILAKTDAIDAAVIAEFGSVTNVQPRPITHGDALKLKALVTRRAQLVDMITAEKNRLGTAHDAVSQGIKNHIEWMQTELKNLEKQIEQTIKDDPQLSQKHQLIQTMPGVGKVTSAVLLAELPELGTVGHKQIAALAGVAPFNCDSGKHKGERHIWGGRQAVRDAMYMGTMAAIRHNPDIRDFFERLSTPKKDKTNNSNDKAYRVKLIACMHKMLKHLNAMLRDNAAWRPKAKAA

SEQ ID NO: 211444 - protein, 348 aa, unidentified
MRFYTQQHRYTCGIDLHARSLYLCILDDTGQICVHKNSKATPEALLKLIAAYQDDLIIGVECMFSWYWIADFCEDHGIEFVLGHALYMKAIHGGKARNDKIDSEKIARLLKGGMFPYAYVYPRGMRAHRDLMRRRIKLARDRGDLMAHIKNTLSQYNLPAHPENLRYAKHRKAMYAAFPDPSVQRSIDLDLARIEFYDGQLGKLEWYLKKTAKSVDSNTMIRLQSVHGIGDILSLVILYEVHDIERFPRVQDFVSYCRLVKCSRESAGKKHGTGGARIGNPYLRWAFGEAAALFLRGNPAAQRWLEKITRKHNKAKAMTILAHKLGRAVYFMLKRKTLFDQDRFLAAS

SEQ ID NO: 211445 - protein, 392 aa, unidentified
MTYFIGIDLAKYKHDCFIMDENGEVIRDSFSFNNDKEGFNTLLNVLNSLDSNQEKRIGFESTGHYGSNLKIFLERNGYSFMEFNPLLVHRHFKSETLRRTKNDKVDARKISSYLYTREYKPNPNSSYHLNCLKSLTRTREALIKDRTRHIIHMINVLDKMFPEFKLQFGNQGLNAASAMYLLENYSSPSKMSNMTRASYDKMKSELRRTISYAKFLRIKELARNTIGKEDEILVFELNTYLELFKELDKKILKVEDKITKEFSIMKCHIASIKGIGIITAAGILAEIESIDRFDNPGQLCAFAGIEPSENQSGTNDGGGKMVKHGSPHLRNYLMQSAGYMLIHNPVLYEYYLKKRNEGKCHTVALSHVAKRLTRIIFYLEKNDTDFNIDKMR

SEQ ID NO: 211446 - protein, 310 aa, unidentified
MDNVIVGIDVSKDRLDVALRPSGEAFVVERNAAGLEMLVARLRELSPYLVALEATGGFETIAAATLAAAGLPAVVVNPAQIRAFAKAIGQRAKTDPIDAAVIARFAEATKPEPRPLPDEATRLLADLVARRRQIVEMIGAERQREKRVTVPHLRKSTTRLLKALEKELTGLNTDIDDAVRGSPAWRDKENLLASVPGVGPIIARTLIAELPELGQLGRRQIAALAGLAPFTRQSGQWRGRSFIGGGRTAVRTVLFMGAMVAKQHNPTLKAFFDRLVTAGKPKMVALVAVARKLLTILNAILRDNRPWQIA

SEQ ID NO: 211447 - protein, 453 aa, unidentified
MARRNVQVIPKPGKARAALTITHPNAAGIDIGSAAHFVAVPPDRDEQPVREFASFTVDLNAIADWLTACGVDTVAMESTGVYWIALFELLESRGFTVFLVNARHVKNVSGRKSDVLDCQWLQQLMTYGLLSGAFRPVEQVCVLRALYRQRGMLLRSQGRHVQHMQKALTQMNIQLTNVLSDIVGESGQKILRAIVAGERDGQVLGAMKNVRVRASVDEIAKSLQGNWRAEHLFALKQALGAFDFVGTQLAECDAEIELQLQRLQAHDGDPVKGKKRGRARNAPRFDLRTQLFRMCGVDLTRIDGIDVTTALAVVSEVGADMSRFPSVRHFTSWLGLCPGTKITGGKVMSGKTKRVVNRAAQALRLAAAALRSSKSALGAYFRRMCSRMDKPKAVTATAHKLARLIYTMLTKGQEYTDQGQEYFEERYRERVLRALSQRAAKLGMQMVPIAQPV

SEQ ID NO: 211448 - protein, 324 aa, unidentified
MMSAVKTPKIFVGVDVSKFTLDVFHPDTGELSKLDNTEIVVEDFCRSLKKKKRSVMVVMEATGGYETLLLNQLAKHKIEAAVLNPKRVRDFARGIGADAKTDPIDAQVISKYALVVNPQPIAMKSDYDQKHTALVARRNQLLELINQENNRLKQSWDDDAKKSIREVLEMLKKQLKSLDSQLASMLEKDTKNQRKIEILRSAKGIGSVTISTVLVGLPEIGLLNRAEIAKLVGIAPLNRDSGKKSGKRFISGGRGHVRRVLYMATIVAIRHNPTIKAFYLHLKSKGKESKVAIVACMRKFLTILNLLIKKNELWRNEESVSASN

SEQ ID NO: 211449 - protein, 297 aa, unidentified
MKIIGCDLHARQQTLAMLDTATGEVVKTTLKHEGNTVRGFYSSLPRPVRVGIEATGSMQWFVNLMEELGVECLVGHPAEIRAAEPRKQKHDRRDADLLLSLLVEKRFPAIWLPTKELLDLRALLRHRHQWVCLRVKIQNALQAIALANGLRRGSSLWTQAGQHAITSLPLSPHAAYRRNELQAMYVQFETEIEKLNQRVEQQARERSAARLLMTHPGVGPITALATEVFLGDPARFADSKELASYVGMIPREHSSGGRQRLGGLSKQGNPLLRFLWSEAAIHAVRRDPELNIFTVAN

SEQ ID NO: 211450 - protein, 351 aa, unidentified
MPSKKDAAAIRAIGIDTGKNTLHMVGLDEKGAIVLREKVSRNRIAARLGNVPPSLIGIEAGMATHYMSRELVALGHQVKQVPPAYSKPFRQGHKNDFRDAQAVAEAVQRPSTRCVPIKTDDQLDLQALHRVRSRLIGERTAVINQIRGFLLEHGIPVRQGPRFLRQQLPQILATRTDVLSPRMVRMTGDIVEDWNYLDERIERVTDEIEGLARSDVSCGQLMTVPGIGPIIASATVAAIGNGTAFAKGRDFAAWLGLVPKQMSTGDRTILGRITKRGNRYLRTLFVQGARAILLHPTSWAKHSFGPWLTAAARRLHRNILVIALANKLARIALTVLVQGRSYETRIEPVAA

SEQ ID NO: 211451 - protein, 421 aa, unidentified
MRAFGLDVHRDFCEVAIAEGGAIRSAGRVATRVDSLELFAQSLVGSDVVALEATTGADKIVSLLQARGIRVVVANTRKLKSITEAKAKTDRLDARTLARLLVSGLLDEVWTPDERTRTLRRLTNRRERLVRGRTRAKNEAHGVLARNLCDRPPVTDAFGRAGRRWLARLELPVDERLTLDGCLRQVDFLDTEIAALDSEIAKAALAWPEVLRLMTVPGVNVQTAATFMAAIGDIRRFPSPRKLVSYLGLDPRVRQSGSTPARHGRISKAGASEPRHMLGEVAWKVMLTPGPLHAFFERIRARRGPQIAATATARKLAVLFWHLLTRDEDYAFARPAMTRNKVRRLELLAGAPPQKGRKGIAGGKSKAVFEAERELSRQAEAAYRRLVSDWRSSNPATTGAGATPGRASRRPSKGKAARQTP

SEQ ID NO: 211452 - protein, 332 aa, unidentified
MIIARVGMDIAAAKYNVWAIVGTRDARREFNNSPQGISECWTWLKKTGATHFHIVLEPTGRYHELVAESFCRFPNCRVFDPNPKTLKDFAGSLDLRTKTDWKDAHAMAFYAKERAGEPAYNVKEYQPKTPAQLDLRDLSMRMRSLTKRASSLKGQLECGISSRFVRDSMNEEIVELEAQKDLVLDEAKKVIAADPQLANDYELLLSIPGIGEKSAVLLLCVVDFRRFKNGRSVACFLGLTPRRHTSGDTIAVKERISKVGSKEFRSGMYWPAVTAMKHPLFAQFAQRLTDAGKTWSCAKNAVLRKIVVIAWSLIKSGRKFDANYVSKAVTPI

SEQ ID NO: 211453 - protein, 415 aa, unidentified
MALKIVYQICCGIDVHKTFVVACIASTNQQGVTTYKRHRFSTFTQGLKELLQWLLDNHCKDVCMESTGKYWIPIYNVLEKDCTIVLAHPKYVKAIRGKKTDKKDAKWIADLFKHDLVAGSFMPPADIRQLRDLMRYRFKLTCFMSSEKNRLQNCLTVSNIQLASVVSDTFGKSSQRILDKILENPEDTSFDIESLIHGSMKKKLPELELAIDGFITPEQAGKLKIIKKHFEDLESRKAELEELILALASPYQQELDLILTAPSFKNKFTAIGIISEIGVNMEAFPSAKHLCSWAGLTPTNNESAGKKKSVRVSKAGCYIKPLLVQCANSVVKSEKHPEIRNRYLRLRKRRGHKKAIIAIARMLLTALYNMLKNKEPYNAKLYRKSDVLPVNREITVEQAILMAQFQGYKIKSAAE

SEQ ID NO: 211454 - protein, 423 aa, unidentified
MMKLKYSICCGLDVHKNVIVATIVTTNKDGISEYKQKSFSTINSDIQRFHNWLIENNCYHVCMESTGKYWIPIFNYLENDIDVCLTHPKYVKAIKGKKTDKKDSKWIADLYKFDLVRCSFIPPKAFRQLRELSRYRFKLVCMKSSEKNRIQNCMTVSNVGIASVLSDPFGKTATEIISYLLEHTADSMDEKAVRKFIKKGAKSKSDEIIEAIKGYTIETDQAKKLELARGHLEYLDDMITQTEVELYVRIKPYYEFVEFVSTMPGMTELSSTIVLAETGVDMDIFDDAKHLCSWCGLSPANNESAGKKKSVRIAKAGDYLKPMMVQCALAAIKSKKQPYFAIKYGRIKKRHGHKKAIIAIARMMMVCIYHMVSEKKPFTPTDYEELMNPQNHVERVVMNENNVFAYLESLGYDSSKLVKRNDN

SEQ ID NO: 211455 - protein, 390 aa, unidentified
MDVLYQSCAGIDVHQATVVVCILHGPLTSTRPKREMTQFDTTTKGLKACHDFLSQFHVEAVGMESTGVYWRPVWHELCDDFELILAQPAHMKAIPGQKTDKKDAHWIAQLTRIGLLPRSFVPDETIQELRELTRQRKHYVESRNRETNRIHKILQSGGIKLTTYIEDIMGASGRNLLQLLIDKTPLTPRMIHQSVYTSLKRKVPQLLEALDGYFSAHHRFMLGQSLEMYDFYQKQIDCLEERMNGYLNLYERPVEILDSIPGIDLITASVIIAEIGVDMSQFPTAGHLASWAGLCPGNNESAGKKRSTKIRHGNSYLKRCLCQAVFAAKKQKGSPLAERYYQIQSRRGPQKATIALAHQLLKIAYILLKENLTYQEFVLQKKATRDEPVA

SEQ ID NO: 211456 - protein, 338 aa, unidentified
MSQVSTIGLDIAKHVFHVHGADERGVGLFSRRLVRGKVLEFFARQPRCVVALEACGGAHHWARQLLALGHEVRLIAPAYVKPFVKRNKSDALDAEAICEAAQRPTMRFVAVKSEQQQAAGLVFRTRDLLVRQRTQTINAIRSHMAEYGRVAPKGPSHVAALAGQLEELPEAARAMIRVMLDMLGELDRQVADLDREIARRAREDEVSRRLMTIPGVGPLTATALAALGPPPEQFAKGRDFAAWLGLVPVQNSTGGKQRLGRVSKAGERTLRRLLILGSSAVVLHASRRGAPRGSWLEGMLARKPRMLVVVALANKMARIVWAVLMKQEDYRAPVAAAA

SEQ ID NO: 211457 - protein, 408 aa, unidentified
MEQVIERCSGLDVHKKTVAACVRVPGPGGTRAQHVRTFGTTVAELLTLRDWLEAHGVTHVAMESTGVYWKPIFYVLEEAFACVLANAAHIAQVPGRKTDVKDCAWIAQLLEHGLIRASFVPPPPLRELRDLTRYRKALIQDRSRAANRLHKVLEDAGIKLAGVATDVLGVSGRAMLTALVEGTTDPEVLADLARGTLRRKLPALRQALAGRFRRHHGFLVGQLLAHLDYLDEAIATLSAQTEEAIAPFAPMVTRLDSIPGVSQRTAEVLIAEIGVDMRVFPTAGHLASWAGLCPGNNESAGKHRPGRTRSGNRWLRMTLIEAALAASRTSTALGARYRRVMRHRGHHKAVIAVAHAMLVIAYHLLSHETTYQELGADYFDRRQADRAQRRAVQTLERQGYRVILEPAA

SEQ ID NO: 211458 - protein, 334 aa, unidentified
MENIALIGIDLGKNSFHIHCQDHRGKAVYRKKFTRPKLIEFLATCPATTIAMEACGGSHFMARKLEELGHFPKLISPQFVRPFVKSNKNDFVDAEAICEAASRPSMRFMQPRTESQQAMRALHRVRESLVQDKVKTTNQMHAFLLEFGISVPRGAAVISRLSTLLEDSSLPLYLSQLLLKLQQHYHYLVEQIKDLESQLKRKLDEDEVGQRLLSIPCVGTLTASTISTEIGDGKQYASSRDFAAATGLVPRQYSTGGRTTLLGISKRGNKKIRTLLVQCARVFIQKLEHQSGKLADWVRELLCRKSNFVVTCALANKLARIAWALTARQQTYEA

SEQ ID NO: 211459 - protein, 385 aa, unidentified
MAPIRMPEAVIGLDVGKSSHWACVATRDGEVLLSTPVANREDDLDSLFGRFPDALVVVDQSRNIGALALARARAAGMSAAYLPGLAAHGAARLFAGDAKTDERDAMVIAKTALGIPDALLPVGDPGPTIAAARALAAQRNFLTCENTRNKNRLRSILLESCPAFEALVDLSDGPQLRLMASLGGAWSVADAGPRRAAALTRGAARGKIEALVRSTTSSTRPDASVVAAEDRAVKLLARRISENSAEIEAITAEISALLEGDDTYRCLLTVPGIGPKTASELAISIDIEDFPSHDRLASYCGLAPRNRQSGTSISSVTASRQGNKRLKNLLIFSCNCLTRTEGRWGDYYTRCRERGMSHGKALKAVARKRLKVIYAVMRDRVPYTA

SEQ ID NO: 211460 - protein, 351 aa, unidentified
MTTMTPARPLVTGGVDTHRDEHVAAGLDHNGGLLATASFPTTAAGYAALLAWLLGLGELVAVGVEGTGSYGAALARHLTGHGVKVLEVSRPNRQVRRRYGKSDVVDAIAAGRAVLSAEATATPKTHDGPVEALRALKSLQRSARKARTQALNQLLAVLVTAPDELRARLRDLPRGELLATCAAFRIRADDDSVAAITRLTLRELAARIAFLDAQLTSTVARLRQITTELAPELVAKRGVGPDTASTLLLTAGDNPDRLHSERAFASLVGSSPVAANSGQKQNRHRLNRGGDRQANAALWRIAMVRLSCDQPTRDYLAKRQAEGKTKSEAIRCLKRYIAREVYNALPKSALS

SEQ ID NO: 211461 - protein, 356 aa, unidentified
MSREVKYIGMDVHKEAIVIAVENAHGHVVMESIIETKASSILQFIHGLQGELHITWEEGTWAAWLYDLLQPHVHQVLVCNPRRNALLKEGSKNDKVDAGKLADLLRTGMLRPVYHGEHGLRTLRELARTYQTLSQDLNRVMNRLKALYRGWGIACGGTQVYAPRYREEWLGKIKHVGVRRRAELLYQQLDGLQVLRRTLRPELLAESRKHKAAKLLRQIPCIGPIRAARLLALMQTPHRFRSKRQLWTYSGLGIETRDSAQYRFVRGQLQRAKKPQQIRGLNQNHNHEMKEIFKGAATRASCGMGPFREFYVSLLDKGMKPEMARLTLARKIAAITLILWKKEERFDAQQVKTQAA

SEQ ID NO: 211462 - protein, 425 aa, unidentified
MIQQQPLVPPDSPKEFAAFVGIDWADQKHAVCLLHGERQSDMELPHTPEAIAEWALSLRRQFGGVPVAVAVEQSRGALIHALMQHDHLVLFPINPKQAAHYREALSVAGRKDDPFDAQLLARFLREHHDRLRPWKPDDGCTRELGRMCELRRNVVEARKHVVQQLTATLKLYFPQALKFAGDLQRPMALELLRRWPCLKELQRANPTSLRKFFRQYGHRNDDRINALIAEIRASQALTTDPAILRPNALFVQTLVKQIEQLNPAIEQFEKQIAALFAQHEDAAIFRSLPGAGAALAPRLCVAMGTDRTRFADASNVQAYSGIAPVTKRSGKSCHVNRRFACPKFIRQTFHEFADHARKWSAWSKAYYQQLRSQGSKHHAAVRALAFKWIRIIFRLWKGHTCYDEAKYTSQLIRRNSPLAKKLTLA

SEQ ID NO: 211463 - protein, 362 aa, unidentified
MTKSTTIIAFDQHAATTVAAVLLPGQRTPALHTLTSDRATILRFVERLRRRGPIQCCYEAGPCGFDLQRALTARAIPCDVIAPALIPRRAGDRIKTDRRDASQLAALYRAGALTAIHVPTEQEEAARDLLRCREDVRADLLRARHRLSKFLLRHGRRFTGTKKAWSKRHDAWLRTQTWPLSALDQTHAAYLRTVDEAVARLRSVEADLRGLLTLEPLRPRVERLRCFRGIDDLTALTIAAELGDPRRFPSAPRAMAFVGLVPSEHSSGTKRARGAITKTGNAHLRRVLVEAAWHYRHRPFVGAALRRRQRGAPATSVAQAWTAQQRLYRRYHRLAGRGKVKPLVNTAVARELTGFVWAALIQ

SEQ ID NO: 211464 - protein, 343 aa, unidentified
MESIYYIGLDVHKKTIAYCIKTVRGEIVRQGVVGAQRKALQQWLKEIPGAWMGALEATIFTGWIYDFLKPHARELKVAHPEMLKAITAAKKKNDRADAEKLADLLRVNLLPECTMMSEELRELRRILRYRNMVVRTATQMKNKMSGLLMEVGAIYDKQRLHGRKYFGELLERVEDVPDSVKELLQLSRSNLELFTAIQKKLVKTLRENDLIRERVQCLMSIAGIGEITALTWVLEIGDPARFHSSREAISYCGLCSAQRESAGKEQRGPLSKKRNKYLQTALIEAAKLAPYWNPQLAALHEKELTKGNRNRATLAIARKLVEYMLAVDRRGTPFVVEAPSQVA

SEQ ID NO: 211465 - protein, 326 aa, unidentified
MNKSGKVISNERFSSDQESLDKFLDRFDKAKFVLESTGIWEFIYEGIEKRGFEVVLAHPLKVRAISEAKVKTDKVDAEMLAHLLRADLIPRSHVPPRDIRNLRQLVRHRAYLVRQCTSIKNRIHAELLRRGIRRPDDLKKTFTFKHVGWMRSLGILTITSSLDCLEGIQAQIREVESFLLVEYNSRKDAQLIATIPGIGFYGALLILAEIDDVRRFPGPEKLCAYAGLVPTVHQSASRSYNGSITKNGSPHLRWMLIEAVHVHTNYCPGSKLSKFHAKVAQRRGKQRATVATARKLLHTIYWMLLTKEKFHCQGFNLVEKAASMNA

SEQ ID NO: 211466 - protein, 345 aa, unidentified
MVIMKQYVGLDVSQKETSVCVVDESGKVVFQGRARSDPGALAELLSKRAPSAERIGFETGAMSSWLWHELNRIGLPVVCIDARHAKAVLSVRMNKSDENDAQGLAELVRVGWYREVKVKSAESQATRSLLVARSRLVAIRRDLENQIRSMLKEYGLQFSRSIGAQFRRKVLELVVEGHPLRSVIGALLSVHEQACEEQEKLDRQVRRLARDDCTTRRLMTVPGVGVVTALTYRHTIDDPSRFSSASDVGAYLGLTPRRKQSGETDVSGRVSHWGDRLLRTYLYEAASVLMHRTKKWSTLKAWGIRLSKRIGMKKAKVAVARKMAVLLHCIWVDGTSFEWGSEKTA

SEQ ID NO: 211467 - protein, 310 aa, unidentified
MQDTIGIDISKATLDAHRLIDNEARQFANTPAGLRALRRWIGTKMPDLVIYEATGAYHAAIECSFGGVLPLVKVNPVQARRFAQARGTRAKTDAVDARILAMMGTALDLVPDAPADKNQPALKEMQIARMALIKERTRLLNRSKTQTLAILKRQSKARLGQIKRQLAELEDALLKLARQCPKRARAFDILCSIPGLGRITAVAILVECPEIGTLTRKQIASLAGLAPMTRQSGQWRGTAFIQGGRKFLRDALYMPALVAARFNPDLRQKYKAMISDGKPAKVALTALMRKLIELANALVRQDREWTPKTA

SEQ ID NO: 211468 - protein, 312 aa, unidentified
MAELSFCGIDVSKDRLDVLLLPEGLRFSVCNNAPGWAELIERLRPFAPAAIGLEPSGGYERGIIRALLAAGLSVRCINPNKLRQFARAHGVLAKNDRLDAQLIAEYVAIMPTRVVRRDDAVERLAEIVTMRRQLCDEHVAAMNQAAHLEDAILRRLSKRRLVRIEADILLLDKRLAELVAANSRLAHRYRLLTSMPGVGPTLAYTLLATLPELGQLDRKQIAALVGLAPYDFDSGKLRGHRSIYGGRMPVRNVLYMAALSASRYNPALKTFSKRLAAAGKKSKVIIVAVMRKMIVTLNAMLRDDTAWRPTFV

SEQ ID NO: 211469 - protein, 374 aa, unidentified
MAILVNGEKVHGYTMSNDALGFARLLGDLRTVHKPEIIFEATGVYSRPYTRLNPLEAKKQLDSLRVRKTDQIDAEKLAQSQFVLSRKPTYVQEEVYQNLRALSRFYQNLTEDIVRAKNRLHKVLQVTFPELETILSTPSGEQYWNLVIAFPCKDFVLELSKDKLSESIRQSTSKRISDKRVAYLAEKLIGLANQSYCAVKKNSPMLEEVRYYTKELLRLSEQRQTVLDQMVELAQPLPEYDILLSIPGIAETTATSIIGELGDIRRFQSANQINAFIGIDLRHYESGNFLAKEHITKRGNPYARKILFKCIHNIASASHTKPCHIADFYEKRKRQSQTTSTKPHTIASIHRLIRTMYYLITHNKLYDYTSTQNR

SEQ ID NO: 211470 - protein, 387 aa, unidentified
MIFVGIDIAKKKHFAAAMDSDGQILLEPFPFDNNIQGFSLLNSKLNNFNKEETIIGMESTAHYAENLIFFLFNLGYKIAIINPIQTSNIRKTNIRKTKTDKVDTYLIIKTLMFNNTRYLTSYDVKTLELKTACRARRKLVQTCASAKIQLNTYIDQLFPELHSVFKSGIHTKSCYQLLKEFTTPKAISKAHLTRLTGLLSKASKGHYGKDEAKKLKEVAKTSVGIDNNALVLRVTHAIQQIELITLQITEIESSIEKTMEEINSVVKTVPGIGSLNGAMIISEIGDINRFESPCKLLAYAGLDPSVIQSGNFTARSTRMSKRGSPTLRYALINAAFNVSLNNETFKKYYDLKISQGKSHFNALGHTAHKLVRVLFKLLKENVAFKAS

SEQ ID NO: 211471 - protein, 344 aa, unidentified
MKIMVGIDLHSNNAMCGLMDLEGKRLLHKKVPCRLSKVVELLDPFKERIERVAVESTFNWYWLVDGLQDRGYPVVLANPAKIVQYEGLKQADDKSDAYHLAELLRLGILPEGHIYDRNSRPVRDALRRRLGLVQKRTALYLSFESLCARTLGVKLSLKVLKKLSAQEASRMFSHRFDQLVAREQIELIGRLSQSIELIEREVLGVASKLPYYRRLLTLPGIGVILALTITLETGPIERFASAGDYASYCRCVESQRLSNGKAKGRNNGKCGNKYLGWAFVEGSNFARRYDAPSRQFHDRKESQTNPIVATKALACKLSKAAWHVMSEDVNYDPKRVFPGLSKKK

SEQ ID NO: 211472 - protein, 412 aa, unidentified
MKTQKGFDQVIEKGCGLDVHQKEVVVTIMGTGVKTQTRTFSTYTRSLISMREWLLKNGITHGMIESTGVYWKPVYNILSDHLTLLLVNPRHLKSIPGRKTDIKDSVWLAKLLLYGLLKGSFIPNLEIRDLRDLVRYKKKLQQQVTAESNRMIKILEDANIKVSSVFSKTLGVSSRKIIDDIIAGDYEPERLLHHVHGNVKMSRAEIKEAITGYVTGHHRFMLQTISESIKKTEDTIMKLNEEIERQTSKYSLEIELLDSIPGVDKEGAIGIISEIGIDMSHFPDQKHLASWAGMSPGANESAGKKKSGRTTYGNAHIRALLIQLAWAASRTKGTYLKSKYHSLVGRRGKKKAIIAVGHKILIAAYFIIKDKVSFNELGENHLTNYRKDKLIAYHMKQLEALMPEMDLSKVVA

SEQ ID NO: 211473 - protein, 324 aa, unidentified
MQTAHVIGLDISKKTFDVCTIFDGKMKIHSFYNNKAGYEAFVLWIKKFDLINPHICMEATGSYSEGVAEFLYSFGYKVSIINPLQIKSFRLSKMIRQKTDKSDCEVIAMFCLQNCPSLWNPKSREKKELHEINARIDALKMELNRIINFLEKELLNKIVIRSIKEEMQFTKDMIEKLEHEALNIIKNSPVMKKQFDHLTEIKGVGIKTAVTILADMPDINHFKNAKQYAAFVGVTPSHLQSGTSVKGKSHISRLGSKKIRKTLYMAAVVIKNHNPHFQFLVKRLASKGKPPKVIIVAIMRKLLHIFFGILKYNESFNQYKAFQP

SEQ ID NO: 211474 - protein, 370 aa, unidentified
MKKDTLFVGLDTDKKHIDVAVAEPLPRGEVRYWGRTANTPASVDRVVKKLSQGGRELVVCYEAGPCGYGLYRQLTGKRGVRCLVVAPSMTPQRPGDRVKTNRRDALRLAKLLRAQELTEVWVPDAAHEAMRDLVRGRSTAVSALTRCRQHISSFLLRQGIAYAGKPWTNKHRAWLGTLKFEYAAHWLLLAELLLALDQAQARRDRLTDHIRELVPSWSLAWLVEALQALRGYDLINAAVMVAELGDPRRFAKPRQLMGFVGLNVSEASSGETVRRGHLTKTGNKRARKTLIEAAWTYSRPAATTSKPAAARLPAAVQQIADKARHRLSRRYRHLLRRGKLKQVAIAAVARESLGFIWAIAHAAAPLPAQS

SEQ ID NO: 211475 - protein, 428 aa, unidentified
MGLFCGIDWATEHHDVAVIDDDGRVVARGRVSNDAAGFAALLTLLAEAGDSAAHPIPVGIETDRGLWVAALRETGRVIYPINPLAASRYRARHAVSGAKSDATDAVLLANIVRTDAAAHRPLPADTELAQAIRVLARAQQDAVWARQQIGNQIRDLLKDFYPAAIAAFAGLPEGGLARADARTILAAAPTPTQAATLTPARLRRLLTKAGRRRHLDRDIERLRAVFTDTYLHQPPAVENAMGIQLAALLRQLEAACTAADELAEAAIAHFEQHPDAKIITSFPGLGMLAGARVLAEIGDDRTRFADARGLKAFAGSAPITRASGKKTVVLHRHIKNRRLAAVGPIWALGSLRASPGARRHYDARRAAGDWNHQAQRHLFNKFLGQLHHCLQTGRLYNEHLAFPLNRPGFDGGSCYWISTSGWSVRFVA

SEQ ID NO: 211476 - protein, 402 aa, unidentified
MHKKMLAVVVRRQHGAAVEYLKKQFGTTRREIEHLAAWLQHEGVSEVVMESTAQYWRPVWYGLEAHFALHLTHPLKTRAPRGRKRDFRDAQRLADRWHSGDLEDSFIPGAEQRSWRWLTRTRVHSKRKMGVIRCQVEGLLEQGGIKLSSVVSDLFGVSGWAILEKIAKGESDVEAMVQLACGGLRKKTTKLREALEGRLEPIYQLLLRQHMDQVRLLRKHVEEINEALAVAMKEHVAALCRLSKIPGVDLYAAQELLAEIGPRAAAFPSAEQFASWVGVCPGSQESAGVNYSRRSPKGNRYLRRLLMQTAWGAIHTKKTFYAGLFQRLKPKIKAKGAAWAVAHRMAKVIWLVLHEEVEYQEKGSALPNQRTLTRKLRTLVREFQRQGMDVKAIFNQTLEAHA

SEQ ID NO: 211477 - protein, 444 aa, unidentified
MALSGMILIREVADAPVIMGISKSAGLKFPCGEVRIVNPLFVGIDVSSKSNVAYLMNPDGSKHSIFSVQNNLGGAKLLSERIVSALSSMRLNDVVIGLEATSIYGNSLVYALREDGSLGRFQRKIHVLNPKQVKKFKESYPDLPKNDFVDAFVIADHLRFGRIAKEVYMDDYRYQALRTLTRARFDVIQNLTREKQRFANYLFLKCSGMAQDKNIPNTSATTIALMEHFETVDDLANADLDELTAFIAKTGRGRFADPDVVAKAIQTAAKGSYRLPKTVNDTVNQAMSVSIASMRALKEQVKVLDKAIEQQFEIIPNTLTSIPGIGMVYSAGIIAEIGDIHRFNSQASVAKFAGLVWHKNQSGGFEAEHSQMIKSGNRYLRYYLLEAANSVRRCDSEFRRYYDLKFKEVNKFQHKRALVLTARKLVRLVFRLLKDNRLYIPPEG

SEQ ID NO: 211478 - protein, 392 aa, unidentified
MYYIGIDIAKRAHEVCFTDETGNVLDGNSFNIPNTISGIDKLRKKLDKFELTPDNSIVGMEATGHYWLVLYSYLVEQGFEVKVINPLVTDAYRHMLIRKVKNDRIDAQVVAAVLRLGEYQETAIADKETLALRQLCRFRLWQVDSCSDLKRKVIALLDQIFPEYERLFSDVFGMSSRQLLKTYTTPEEIASIHTTKLSNLLNKASKGRFGKEKALEIKAVAKQSLGITLGVDAFSFQLRQIIEQIEFTEEQIAKLDREIEAYMESLQSPVTTLPGVGPVYGAIILSEIGDINRFPSGKQIVSYAGLDATVNESGEFQGQRSPISKRGSPYLRRALWGAAFVASWSDPELKEYYQGLRARGKHHGVAIGAVARKLCYLLFAVLSENRPYEVRI

SEQ ID NO: 211479 - protein, 339 aa, unidentified
MVYVGVDLHRRVSQVSAMDEKGEVLLTRRIRTEPLEFLRVFGELEPKPMSVAFEATFGWGWFAELLKDAGIDAHMAHPRDTKAIANARVKNDAVDAKTLAHLLRTELLPEAWMAPLEVREARRLVRMRGALVRIRSRLKNQVHAVLADQGVLFPMSDIFGALGREELARLQLPSLVQHRLEGHLRLIADITDEVSIADHEIRALFKNDSRRKRLQAIPGIGLLTAATVMAEVGDFARFPSAAHLCSWAGLTPKERSSADNVRRGRITKQGSRWLRWALVEAAVTAERDPDLRALSTRIAARGGRNGKSIARVAVARRLLTLCFYAVRDEQGCRAFPVAS

SEQ ID NO: 211480 - protein, 343 aa, unidentified
MRAITTIGLDIAKSVFQVHGVDADGQVVVRRQLKRRYVLAFFQKLPPCLVGIEACASAHHWARELQALGHTAKLMPPAYVKPYVKRDKNDAADAEAICEAAARANMQFVATKTPEQQSCLTLHRTRHLLMRQQTSVINAIRSHLAEFGIVAPVGRNGVEQLLGVVADSNDRRLPEIARACVAALGAQLRVLKVQILEFDRMIRAWHRSSEASMRLDQVPGVGPVLATALVASVADPKAFRSGRDFSAWIGLVPKQNSSGGKERLGNISKRGDRYLRSLFTTGALAVIRYAKIHGTRHRPWLTALLARRPTKVAAIALANKLARMAWAMMAKGERYKEPAALAA

SEQ ID NO: 211481 - protein, 454 aa, unidentified
MTVSTPTRLRIDHLPTVFPNAAGLDIGSAEIVAALPPDRDVTAVRTFTTFTADLHQLVTWLLDHHIDTVAMESTGVYWIPIYEMLEVAAIRVYLVNARHFKIVPGRKSDYNDAQWLQKLHALGLLTGSFRPDDEMCVLRSFLRHRAQLIEHRSPHILHMQKALKLMNIQLPEVLSDMTGVTGMAILRAIVAGERRADVLARLRRPGCRRTEHDIIQALTGTWREEHVFGLAQSLDLYDFYTTKITECDHRLDQQFSSMKPRFDIEGEPPAPPTSRTKKNSNSKNQPTYNVRAHLVRLLGIDLVDIIGVSESVAQTVIAEIGTDMSRFPTSKHFCSWLGLAPHNDISGGKVLRSRVMKVHNRAGQALRQAAQSCSRSRSLFGAFYRARSARSSSEEAVVATAHTLARVIYHMLTCHEAFKPESIQAFDQKRQERDLKHLQKRAKALGFILQPLTP

SEQ ID NO: 211482 - protein, 409 aa, unidentified
METMHERCAGLDVHKDTVVACVRIAAGRSAQREVKTFATTTSALLDLHDWLHGCAVTHVAMEATGVYWKPVWHLLEDSFELVLANASHIKAVPGRKTDMNDATWIADLLAHGLIRASFVPPTPIQELRDVTRARKQLVQERTRYVQRIQKVLEDANLKIDSFITDLLGKSGRAILNALVEGYTNPEVLVSLTSGRLKASRAELLEALRGRVTKHHRFMLKLHLRQIDQLDRSIQELEAQAREATAPFRHRVGQLTAIPGISETAASVLLAEIGTDMSVFPSAGHLLSWAGMCPRSDESAGKRRSTRLRHGAPWLKATLVRIAWPATRRKDSYFRALFHRLKSRRGPKKAIVAVAASILTTVYHLLRDGTVYQDLGMSHFDSMNRDRAAKSLVRRLQALGFEVDVRPAAA

SEQ ID NO: 211483 - protein, 341 aa, unidentified
MSESALIGIDLGKHSFHLHGQDKLGREVFRKKLSRQQMMTLFGNLPACTVVMEACAGAHFVARQLMAMGHEAKLISPQFVHPFVKGNKNDFVDAEAICEAASRPSMRFVTPKTEAQQTLSVLHRLRESLVRDRTKTANQMHGFLLEFGISLPKGLAVMKRLASVLAEHELPVRLTVLLQRLHEHFVYLDEQIKALDKELACQLADDDLGSRLLSMPCVGPITASLLAVEMGDGKQYRCSRDFAASVGLVPRQYSTGGRANLLGISKRGDKHLRQLLVQCSRVYMQRLDHQKGALADWVRSLLSRRHSNVVACALANKLARIAWAIAAHHTQYEAGPDALNA

SEQ ID NO: 211484 - protein, 359 aa, unidentified
MTYLKYSIGIDVAKDEFKTCISSIDHLQKVTVKSTGSFKNNNTGFEGFYAWVAKHLREKIPSHFLMEATGIYYEQLAWYLYNKDCPVSVILPNKAKKYIQGLGLKSKNDKIDAKGLARMCAEQSLDLWKPLSKNIYRLRALTRLHEDLTVQNTALQNRLDALKASMFDLSDSNKSLSKLINTTKKELKKLEAQIKETIEKDQLLKAKFDKIGRIKGVGLMTFAVVTAETNGFELFSSISQLTSYAGYDVVENQSGKRSGKTRMSKRGNSHIRRVLHMPAFNVVKHEPLFKKFYNRVLTNTSIKMKAYVAVQRRLLTLIYSLWKKDVEYNPSYSEAGTADPLWVDSEGIKKSQAQSALAL

SEQ ID NO: 211485 - protein, 346 aa, unidentified
MVVLGIDAHKRTHTVVAVDEAGRQLGVKVTQATSTAAHLELVVWADRFGAERRWAVEDCRHLSRRLEADLLGAGEVIVRVPPKMMAHARDSARTYGKSDPVDALAVARAALREPGLPAARLDGPERELRLLADHREDLVAERTRAIGRLRWHLHELDPSWDPAPRSLTARSNLAAVAARLAPMAGMVAVIAADITARIAALSADIKDLERQIIARVKVLAPALLAVTGVAGLTAAKIVAQTAGVTRFKSKDAYARHNGTAPLPAWSGNRVRHRLSRTGNRQLNCALHRIAVTQKRCHPPAQAYLANRAAAGSTGPEALRALKRRLSDIIYRALLADSATTPSAQAA

SEQ ID NO: 211486 - protein, 344 aa, unidentified
MDHFAGLDVSVKETSVCILDDAGKIVKEVKVASEPQALLKVLGNPIYSFKRIGLEAGPLSQWLFSALAEAELPVICVETRHMQAVLKAQINKTDRNDARGIAQMMRVGMYRPVHVKTLRSQKLRMLLTHRKLLQSKAIAIENDLRGTLRNFGLKVGMVGTVRFEARIQELVETSPDLAVLVEPLLVVRRALREQIVILHRRLLAIVRDDEVCRRLMTTPGVGPVVALSYRATVDVPARFRKSKAVGAVFGLTCAKYQSGEVDRNGRISRCGDEMMRVMLYEAAQSMLRSKKWSWLKAWAMQIARRRGMKKAIVALARRLAVIMHRIWVDGTEFRWTREQATAAA

SEQ ID NO: 211487 - protein, 457 aa, unidentified
MAQKKMELDIINPNCAGIDIGSKSHFVAVGQALEDVKEFGVYADDLTAICLHLKDYGITSVAMESTGNYWQNLYVELERHGMEVTLCNGKFTKHAKGKKTDVKDCRWIQKLHALGLLTGSFLPDETTEHLRTYCRQRTNWIDIAAEASHKMQKYLRLLNFRLDVVVKDICGLTGLAIIADICKGNLDPEKLSEHRHGNCRKSQEEIAKALKGNNRIDFLFGLKQEYDSYLFFQKKIDACDVQINSFLKTEINTHPDKKKLQTDNKTYKKVNKNSLKGIDLNQAAYQYFNGVDLMKIEGLSHSTVLTIMSEVGPEGFPKFPSSKQFTSWLRLAPNNKISGGKILSNKIPKGSNRLKIALRHAANAIGNLKDTHLSDFFKRVAYRKGRATAVSATARKLAVILWNMITKKIAYNPPIEYLFLDQKRKLRLVTKIKKSITKFDLKPDDLGFADASLSASL

SEQ ID NO: 211488 - protein, 465 aa, unidentified
MTRAKAARKKRKGMQAAIEVSRPMVAGIDVGAEEHFVCGPARGDGEREVRVFRATTAGLQEMAAWLLEQRVESVAMESTYLYWIPVYEVLEAAGLEVVLVNARMLHNVPGRKTDVQDCQWLQRLHSCGLLRGSFRPRDAVCRLRALQRQRANLIEQRSRFVQWMQKALDQMNVRVHRAVSDLTGQTGMAIVRAIVAGERDPLRLAALRDKGCKKSVEAIAEHLTGTWREEHLYNLSMALRLYDEIERTIADYDARLLGEIEALQPDDRRSESVPAHPNASKEKVIRKRGDHGLREGLWRFAGVDLTTIDGISAHSAQVILTEVGTDLNAFPSENHFVSWLRLCPRTPISGGKPLKKRRNGMGASRVAAALRMAAVCIQRSKTALGAAYRRVARHKGAAVAVFSTARKLAHYVYRLLRHGQAYTDIGEALYEARFRQRQLTALTDTAKSLGFTLVAAVEDTPSTAG

SEQ ID NO: 211489 - protein, 411 aa, unidentified
MSDSIFVGIDVSTKSNKVCILDQQGTRLSKLSVDNNSHGSARIVERVLETLEKSNCSNVSFGLEATSVYGDGLIFFLKQEPSLKPYNTKVFLLNPKQVHNFKKAYSDLPKTDDVDAWVIADCLRFGRINLREVYFDEQHKALQRLTRARYFVAQNIVREKNRYLTNLFLKFSGMCQEKLFSNNLGATATELAGSEFSLDEIVHMPLDELATFINTTGKGKFADPEALAAEIQKAARSSYRLPKTVEDSVNQVLAVSVISIQGYLQQLKTLDKSISTLMEAIPNTLTSIKGIGLVYSAGIISEIGSINRFKDQASLAKYAGLSWSRYQSGNFDADNTHLINSGNRYLRYYLIEATNLVRRHDPELKRFYELKYRETLKSPHKRALALTARKFVRLVYALLRDQRLYSPPRVR

SEQ ID NO: 211490 - protein, 343 aa, unidentified
MEAKRFIGIDLHRDCFTACVRLENGREYLRKWKLEDMPKFAAKLRPADQVAVEMTGNTRLFHDQVAPLVDRIVAVNPTQFQVITHSVKKTDPNDARLLALYLAKDLLPEVRMKDKTQAQIASLTQTRDTMVKLRTALKNKVNNICSANGVNLNRESLASEKGLRAVGQMPFDPLVNLEMKIIVDQIRSLNQSIAELEEIIGQEGQKLDGHKNLTSIKGIGKLSGGILLSIIGDIGDFADEGKLASYFGIVPRVSNSNETEHSGRITKRGTKLGRTTLIQCALIAQRYSPYLKTYYEKIKSRRGAGKAIVALARKFLGIIYRTLKNNWVFEDFPNFVLAEEPTT

SEQ ID NO: 211491 - protein, 345 aa, unidentified
MNITTVGLDLAKNVFQVHAIDEAGEVVVGKALRRRQMMPFFSKLDPCLVGMEACATSHHWARQLTALGHQVKLMPPIYVKPYVKRGKTDAGDAEAISEAVTRPTMRFVAVKSLDQQSMLALHRTRDLLIRQRTQLVNMIRGQLAEFGIVLAKGIQHVFKFTGQLLDGEAPDIPPLAASVIVTLAENLRDLHARIGGLDKDIRTWSKDNEVVQRLLTIPGIGIITASALAATVTDPHQFTSGRQFAAWLGLTPKANSSGGKERMGRISKMGDQYLRRLLVNGMTSLSQSVRRNPDAHPWAAGLMRRKPDKLVAVAMANKTARIAWAVMTRGEVYRAPQPSGVKEAA

SEQ ID NO: 211492 - protein, 360 aa, unidentified
MRIIGCDLHARQQTLAMLDTETGEVVNRTLMHEGNQVREFYSELPRPVLVGIEAIGPMQWFLDLLAQLGIECRVGDAAKIRAAEPRKQKHDRRDAELILKLLVEKRFPAIWMPSKELLDLRALLLHRHQWVRLRTQVQNALQAIALANGLRRGPGLWSYDGQAKIAFLPLPPHASLRRSALQAMYGHMEEEIEKLTVQVAEQVEHRSGAQLLMTHPGVGPVTALATDVFLGDAQRFDDGKSLASYTGLIPQDRFSGRRRRLGRISKQGNPLLRFLWNEAGAHAARRDPELRRFYRRKLAQKGLGKARVAVARKLGIRLWIMLRDQIDYQEFCRRGQKQSGAACAGMPEVGNGANRHRPVE

SEQ ID NO: 211493 - protein, 349 aa, unidentified
MRIIGCDLHSRQQTLAMLDTETGEVKECVLHHQGDDVRRFYAGLPGPVRVGIEATGSMQWFLELMEELSVECLVGHPAKIRAFEPRKQKNDRRDALLLLQLLEDERFPTIWMPTFEQRDVRALLRHRHLWVRMRVRIQNALQALALSHAIRRGAGLWSEDGQYSLLELKLPPFMGDRRNELMVLYRQLQADIEVLDARVAETAEKRPLSRMLMTHPGVGPNTALATEVYIGDATRFADGKALSSYVGMIPKENSSGKHQRLGELTKQGNAMLRYLWCEAARHAVRRDQELKRFYTRKLAQKGMGKAAVAAGRKLGVRLWIMLRDEIDYEEFCRRGKRQRGEAHAEMPER

SEQ ID NO: 211494 - protein, 411 aa, unidentified
MHNRQNYLYVGVDLHKEHHTAVIINCWQEKLGEIQFENKPSAFSKFLLEVETYVSAGVSVVFGLEDVGGYGRALAKYLVDHEQVVKEVNPALSFLERKSHVTTQKSDSWDAECVARILVNKFNQLPDAKPNDLFWSIQQLVSRRNALVKAQSTLKNQLHIQLNHHYPSYKKFFSEVDGKTALAFWQQYPSPSCLEGANIKQLTAFLLDVSNNTCSVKKASEILKLVKEDGHTMKEYQETRDFLVRSIVRDIEFKKKEMKYIERELKRLVILLDYQLETMPGIELVTASALIAEIGDIRRFSNAKKLARFAGIAPVYFGSGGKGKTHKSKQGNRALHALFYNLAVQQVQVAKGSKLPRNPVFHAYYQKKLREGKTKGQALVCIMRRLVNIVYGMMKYKIAYELPVVQEKEVV

SEQ ID NO: 211495 - protein, 479 aa, unidentified
MSKVTSPKGKTKKASLSPKKGPTPSVVQMQVVRPNAAGIDIGDTLHAVAVPADRDREPVRQFGAFTCDLQAIVKWLKQCGIASIAMESTGVYWKPLYGLLIMNGFEVCLVNARHTKNVTGRKTDMSDAAWIQQLHSCGLLQSSFLPDDQTETLRTLVRQRKAWIQDSNRCIQRIQKQFELMNIKIHTVIRDIMGKTGKAIIEAIINGERVAKNFLPLVDGRIQASEEEIEKSLEGNWRSECLFIVKQCYRQYQELQAHIGECEKEIELILVQMAGARNEGVIESEEAKVLLGNKNKADRKTAKKKSKNAPKYNVRKYLEQIYEVDVLEIFGVSETTALEILSETGTDLNRWPTANHFVSWLNLCPNNKITGGKLVSSKIMKKLPNNAAQAFRAAANGVRRSDNWLGDYFRRMRAKGGHKFAITATARKLALIFYNMVKNKEAFKAVDIEVYKEKQRQSKIQYLEKRLDQLQNASQTVAA

SEQ ID NO: 211496 - protein, 343 aa, unidentified
MQTISTIGLDIAKSVFQVHGVDASGQVVVRRQLKRRYVLAFFQKLPPCLVGIEACASSHYWSRELQALGHSIRLMPPAYVKPNVKRHKNDATDAEAICEAVSRPNMRFVATKTAEQQSCLTLHRTRHLFIRQQTAVINVVRALFAEFGIVAPVGRNGVEQLLEVAADSNDKRLPDVARACVTALGAQLRMLKVQILEFDRMIMAWHRSSEASQRLDDIPGVGPALATALVASIADPKAFRSGRDFSAWIGLVPKQNSSGGKDRLGSISKRGDRYLRSLFTTGALAVIRYAKIHSTKHRPWLTALLARRPTKVAAIALANKIARMAWAIMAKGEHYKEPAALAA

SEQ ID NO: 211497 - protein, 340 aa, unidentified
MNVTTVGIDLAKNVFSVHGVGRDGKVLLRRSVGRADLLPMFAQMPPCLIGMEACSGAHHFARELRRLGHDARIMAPRFVAPYRKSGKNDGNDAEAICEAVARPNMRFVAVKSVEQQAILALHRVRKEVSDQRTALINQLRGMLCEFGMVLPRGRYSFRHKLPPVLEDTGNGIPELARRLFREVNERIGALDAQILAYDREIEALARHSEAAQRLMEMPGVGSITATAIVASVADMKVFKSGREFAAWLGLVPRQYSTGGKVRLGRITKQGDVYLRTLLIHGTRAVLAALGTKNDRLSLWIRLLIERRGYRKATVALAAKHARMIWAIPAKGDAYRRPAAV

SEQ ID NO: 211498 - protein, 342 aa, unidentified
MTIVAGFDVHRRQITFDALDTDTGELMRGRIDATPSAVERWAGSFEDREVQVALEACTGWLFVSRALERAGAVPHLAEPVETSALRGRKRRAKTDREDARWLRTLLGEGRLPESWIPPEHVREWRSRARLRKTLIDERTQWLQRIQATLFHHGIAGAPAELRSSAGRTFLDQLELPADARERIVIALAMVDSLDSQLRPLESELRKLARRQAGCRALMAQFGMGELTSLVTLTELGDVQRLSASRKAVRMAGIDIGVHRSDRRSRVGKLNRQGSPHLRWALYEAALSATRPKSPDHQDYLALKARGLTHTRASLTIARKLARRSFHILRELGPAALEPIPTS

SEQ ID NO: 211499 - protein, 366 aa, unidentified
MPRIAEQAGPVTGGVDTHADVHVAAVVDQVGRVLGTQAFPATAAGYRAALAWMRAHGELVKVGVEGTGSYGAGLARYLAGCGIEVAEVIRPSRQARRRRGKSDAADAVAAALAALSGEACGMPKSRDGAAESIRALRVARAGAVKARTQAGNQLRDLILTAPEPLRQQLAGLPSGRQVDVAARFRPGGPACPAEGTKAAMASVARRCQQLTAEITRLDTMLDELVRHAAPEGFLAKRGVATQVTAALLVTTGDNPGRVRREASFAALCGASPVDASSGKQIRHRLNRGGDRQANSALWTIAMTRLAHDPRTKAYAARRTAEGKTKKEIIRCLKRYIAREIYKALCRPQRPAMPSAPQTNKIFQLRS

SEQ ID NO: 211500 - protein, 338 aa, unidentified
MGYFVGIDLHGDNNYIGILDEEDRRVFKRKNRNDIKEITRVLEPYQGEIEGIVVESTFNWYWIVDGLQEAGYRVHLANTAAMQQYEGLKYVDDTRDSFWLAHMLRLEILPEGYIYPKEIRPVRDLLRKRMMLVQQRTAHILSMQTMVNRNKGIPISSETIKKMSDEEVEGLFGDEHLVMSAQCDHEVIEVLSEQIDKIEKAVHKEVKLKKPYKKLLTVPGIGEILAVTIMLETGEISRFKEVGNYSSYCRCVSAKKVSNGKNKGKGNRKNGNKYLAWAYVEAAHFHVRYCEEARKWHQRKASKSNAILATKALSNKLARACYYIIKEQIPYDKKRMFG

SEQ ID NO: 211501 - protein, 378 aa, unidentified
MDVLYHRCAGLDVHAKTIVVYALVGEEEHIQKEIEPFPTFTKDLFRLLKWLEDRRITHIAMESTGVYWKPVFNILEGYFDITLANAQRIKNVPGRKTDVSDAEWMAKLLRHGLIEKSFVPPADIRELQDLTRLRKKWMGQLTAEKNRIHKVLECSNIKLSAVISDIFGASGRKLLNRLMKQGYIEEWEIDACIHERMKEKKAQIQESLFGTLTEHQLFMIRQSWKHIEYLESLIQEMDHRIDQLLQTYQQELELLMTILGVKKETAAVIIAEIGVDMGQFPTSQHLASWAGVAPGNHESAGKRKSTRTTKGNPHIKSALCEAAWALSRCKNQRLAAKFWSLKSRRGTKKALVAIAHRVLIIVYCMLSRKEPFREQPTH

SEQ ID NO: 211502 - protein, 384 aa, unidentified
MMFDPRDARQEFEKFLSGRNLNERNLNLANGCEAFFLVPGVERQPLKKLKTDEHALLALLERWRGEAMRSGNAITRIVVAYEAGRDGFWLARWLRAQGIEAHVIHAASIAVSREHRRAKTDRLDTELLKRAFLGWLRGERDHCKMVAIPTVAEEDARRPGRERESLVGDATRIINRIKSALARLGIRTFKPTLKKATALLNDLRTPDGDPIPPNTLDEIKRDMERRQLICEQIRRIEQERVKRLEQAPDTGPNVMVHLLARVMGIGIETADTLVREVLTRNLRDRRARYGGLTGAPSRSGNINREKGLARSGNPRVRRCMIGLAWRFVRLQKDSPLVKWFELRTANARGSRKTMIVAVARKLLIALWGLVHEGVVSEGMVMRPA

SEQ ID NO: 211503 - protein, 421 aa, unidentified
MKKIQAKTERIVNGRTLIVTVDLGKTTNVGYCRCPDGTDNKPFNFFNDGHGFNKFWSCVSEMMRIHNMEDVVVGFESTGPYGEPLVHYLQKRGVRLVQVNPMHTKRLKELHGNSPNKTDEKDPKVIADIIELGHALSLVIPEGVAAELRRLTQARERGIARRTALLNQLHDLVFILFPEFLQIMGSMKGKSAQYLLTYHTIPQEIIGLGLETLTLVLRRISRGTLGAERASALYEAAQGSVGIKEGEDSIVFEMRNILAIVEASDRFTEDVETKMSHYLGQIPYSRSILSLKGVGKITAAGLIGEVGDFRKFKTISEITKLAGLDLFEISSGKYKGKRRISKRGRPLMRKLLFFAAVNVVRKGGILHEQYQQCLQRGMVKMKALTAMARKLLRIIYALVRDHSDYVHGYTKTQKLSLPEAA

SEQ ID NO: 211504 - protein, 419 aa, unidentified
MDLTDLTSTDTEPASPAPPPGLVAGVDTHQDTHTLAVLTAQGAVIATRSFPADQQGYDDLTAHLDRIGPLTAVGVEGTSSYGAGLTRTLRQAGYDTVEVLRPSRRVRRHHGKSDPIDAIAAARTVLSGDGVSQAKDTTGPAEQLRLLLAARTRLISAATAITNSIHSLLTTAPEPLRERYRRLDTPALITRLARTRPTRTITTPRQAATSALHHMARTHQDLHHRAERLNQQMHHILTTHYPGLLAVYGAGTTVAAQLAVTAGGNPGRIHNEAAFAHLCATAPIPASSGKTTRHRLNPGGDRRANAALHRIALVRLRHDPTTKNYADRRTQEGKTTKEIIRCLKRAIAREVYRALTQPPPTDTTSTLAAHRKRHHLTQTDVAHALNTYPARISDIENHRRPLPQLTHRYHQYLTTLDTQ

SEQ ID NO: 211505 - protein, 316 aa, unidentified
MFVGIDVAKAELVVATRPAGEHWAVANDEAGGRELAVRLRATAPTLVVLEATGGYELLAVAALAAAGLPVVVVNPRQVRDFAKATGQLAKTDRIDADVLALFAERVRPPVRPLPNAAAQALEALLARRRQLLEMLHAERNRLGQVFGRGQRPVAKSLKAHIAYLERELRTTDTDLGTMIRESPVWREKDDLLRSVPGVGRVLALTLLAELPELGRLSRREIAKLVGVAPLSRDSGTLRGRRFVQGGRASVRAVLYMGALVATRRNPVIAAFYRRLVAAGKPKQLALVACMRKLLTMLNAMVRSGAPWHHDPVVVRS

SEQ ID NO: 211506 - protein, 401 aa, unidentified
MQETQQHDVVDVFIGVDVGKGQHHAVALDRNGKRLYNKALPNDEVKLRALITELKTHGRLLFVVDQPSTIGALPVAVARAEGVLVAYLPGLAMRRIADLHAGEAKTDARDAAIIAEAARSMPHTLRSLRLADEQLAELTMLCGFDDDLAAQVTQTSNRIRGLLTQIHPALERVLGPRLDHPAVLDLLERYPSPAALAATSEKTLANRLTKLAPRMGKGLAAEIVQALSEQAVTVPGTQAATIVMPRLAQQLAALRKQRDEIAAEVERLVLAHPLWPVLTSMPGVGVRTAARLLTEVAHKAFASAAHLAAYAGLAPVTRRSGSSIRGEHPSRRGNKVLKRALFLSAFAALRDPVSRAYYARKIQQGKRHNQALIALARRRCDVLFAMLRDGTIYQPKSAPNA

SEQ ID NO: 211507 - protein, 459 aa, unidentified
MRQFSMKQNKQKKSLEIPVSLFNQDAAGIDIGGSFHFVAVPGDRDEKPVRKFDNFTTDLYQLADWLSDCKIKTVAMESTGVYWIPIYEILEERGFEVFLVNARHIKNVPGRKSDVIDCQWIQQLHSYGLLRASFRPEQYICQLRAYMRQRESLIEYAAHHIQHMQKALSLMNLQLSNVVNDITGVTGLKIIRAIIAGERSPEKLASFRDGRCKQSEEIIAKSLNGNYREEHLFALQQSVELFDIYQAKIMECDQAVKKLLDQYAPDFHENPESQNKKKKRRNNELYFDAENYLQQMTGVDLTKIDGLSTHSALRIISEIGTDMSKWPTAKHFGSWLGLAPGTKISGGKKLGSKTKPSANRAAIMLRIAASTLHRSNSALGAFLRRLKAKVGAPKAITATAYKIARLIYSMMKHGEEYVDAGQDYYDQQYKERIVRNMQKRALMLGFELTPVTALASEVP

SEQ ID NO: 211508 - protein, 355 aa, unidentified
MTDQRPDVFGGVDTHADTHHAAVVDPIGRHLGDAQFPTTSDGYRALLARLHSFGTVLAVGVEGTGSYGTQLARVLAAAGLQVFDINRPDRRMRRQLGKSDPIDAYAAAEAVASGRVGIVPKTHAGAAEGLRVLHNARTSAMKARTQAINQIRSLLVTAPDTLRSQLRGLAPAELISLCARLRPTPNLADPTAAAKFALRRLARRYQDLAGEISDYDVELTALAGQAAPTLLAVNGVGPETAARLLAAVGDNPERLRSEAAFAHLCGAAPLPASSGRRDRHRLNRGGNRSANAALYRIAVVRMQHDRRTRGYVARRTAQGLQKKDIIRCLKRYIAREVFRALTCTNITKTDFTQGA

SEQ ID NO: 211509 - protein, 377 aa, unidentified
MKEQTFVAREFEIFGGLDVDKKSIAVTFMSHQGILQSFSMPYRAENLLSYVGKHFEGKKVAFAYEAGPTGWGLYDRLTAGGHLCVVVAPSMIPKVPGQRVKTNRLDSQKLSEHLRGGQLKSVHVPTESYRQLRQLVQLRDTFVQDIVAMKLRIKAMLLFEGLEFPPAPAGSQWSLIVRGKLKKVSCSSAVRFKLDQLMESVESTEKRVIQTIKEIRRFYQQDPELSQAMKYLKSIPGIGEIVASHLLARVGDPQQIGNVRQLAGFIGLVPTERSTGDRVARGSITRSGDGRLRSKLIQAAWSAIRQDPELREFYRSVYQRHPRDRAARKAIVAVARKLTTRIYAVLKQQRPYEVRKIVHSAPLTQEETSSQGTTRRR

SEQ ID NO: 211510 - protein, 416 aa, unidentified
MNAAGIDVSSRKSTVAVLRPFGEVVQIPFDVRHSAEDLTALAQQLKAIEGETRVVMEHTGRYYEGIAKVLHEAGLFVSAVNPLLIKEYGNNSLRKVKTDKADAMKIAKYALDNWAELRDYTPMDTIRYDLKTLNRQFQLASKQKTATANNLIALQEQSFPGIRKLFDSPVRSDGTQKWVEFTHDFWHADCVRGCSQNAFTERYRKWCKRHRYQFSMEKAAEVYALAKSAVVLVQKTSVTKTLVQEAANQLTAISRSVETYRTEMNKLASQLPEYPVVMQMYGVGESLGPQLMAEIGDVRRFQRKQSLVAFAGIDPAPNESGDYHSCRNKTTKRGSPYLRKTLFNIMTVYLQRAPLDEPVFQFLDKKRAEGKPYYVYMTAAGNKFLRRYYAKVMAYLATLENLPPVDMESTGLQRTE

SEQ ID NO: 211511 - protein, 345 aa, unidentified
MKITTVGIDLAKNVFQVHGIDERGKAVLRRQLRRAQVAVFFANMPPCVIGMEACASAHFWARTLQGFGHTVRLIAAQFVKPYVKTNKNDVADAEAICEAVTRANMRFVPIKSIEQQAILSVHRVRQGFVKARTAQANQIRGLLGEFGLVIPQGIYNVAKRVPELLEDASNELPVQFRHLIERLTAHLKEQDRQVKEFEQEIITWHRGSELSRKLEKIPGIGPLAASALVASIADAHSFDNGRQVSAWLGLVPRQSSSGGKPTLLGISKRGDTYMRTLLIHGARSAIVAATKKVDNTQGWLTDLLKRRHPNIAAVALANKNVRTVWAILAHGREFKADYVPTLMAT

SEQ ID NO: 211512 - protein, 347 aa, unidentified
MDFYKGPHKYYCGVDLHSRTMYICVVGQDGVVLLHRSLPCDPVRFLLAIAPFREDLVVAVECVYSWYWLADLCAREGITFVLGHALYMKAIHGAKAKSDRIDSEKTAVLVRGGLMPVAYAYPVDMRATRDIMRRRLLFVRQRGSLLAHIQITHHQYNVAAPGKRITYRSNREGLGEAFADPSVRHSIAADLALADHYEVVIGDLELAVLRQARIHDPNALALLMSVPGIGRVLALTILYEIHDISRFPSVRDFASYCRLVKCERSSAGKSLGTGGNKIGNAYLKWAFSEAAVLFIAKSEQGRTVLTRLERKYGKPKALSVLAHKLGRAVYFMLARKRAFDPQRFAAA

SEQ ID NO: 211513 - protein, 335 aa, unidentified
MKKFDYYIGIDISKLTLDVTILCECENSVKTNYYKIENKEKSIAQFVKSKLGNYDSKQILFCFEDTGIYSMPLAYYMSDNKLTYWQVPSMEIKRSKGICRGKDDKIDSKDIAFYACTHTHKLRPGKVSATSIQQLRLLFTEREKGLKALALFENTSENKGFISNEVFNAVASVNKSAINHLKKTLQIIEEKMLAIIVSEEKLNLQYKLITSIQGIGMQTAIYLLLATKGFETFNNWRQLACYAGVVPFPYQSGTSIRGHNKVHHLADKKLKSLLNMCAIAAVRHDRELKTYYQRKTTEGKPKMLVINNVRAKLLARVFAVINRGTPFVNINKFAA

SEQ ID NO: 211514 - protein, 422 aa, unidentified
MTQQQNTSILRVMHEVCCGLDVHKELINACLITTDENGHEDSELRVFQTFTDDLCRLRDWLLDHNCPIIAMESTGIYWRPVHNILEGFFEVILVNARHFKNLPGKKTDMSDCLWICGLLRVGLLKGSFIPQKHVRHWRDLTRYRRSKTEDLGDVKRQVHKLFESANIKIDSVASHLFSRSGRNLMELLLEKDRELTLEDVRKCLKGTLKSKSQELYRAVQGFFEEHHRWLLEKMLAHADHLEHLITDIQVRLRSLLEAHEDTIDRLIEIPGISFISAYAIISETGPTLSTFPNTASLCSWAGVCPGNNESAGKRHSGRSPVRRGNLKTILIEVACGAVRTKRSYFRAKFFSLRSRLGPKKAIMAIAHRILKAIYHVIKHGEKFKDLGEDYLNDLHKKSKIDYLIRQAGKFGFKLMPCAILEK

SEQ ID NO: 211515 - protein, 367 aa, unidentified
MTVTIVDAARPVTGGVDARRDLNVAPCLVTGGVDTHLDLNVAAALDRVGGLLGVAEFPATAAGHRELLGWLAGFGPAARAGVEGTGSYGAGLARFLRRAGVEIVEVDRPNRQARRRSGKPDPLDAIEAARAALSGRASGAAKSRDGTVEAIRALVAAKRSARSAKIQALNQIRHLSFTAPEQLRQRLAGVSRHHLAARAAGLRPATGAGADPVVAAAKTALRLLGRRVLALDEEKARIDALLTGLVTQTAPGLLAVFGAGVDTAAALLVTAGDNPGRLRSEAAWARLCGTAPIPASSGKVTRYRPGRGGDRQANRALWGIVITRLGNDPRTKAYMARRLAEGRSKPEVIRVLKRYVAREACHRLPRP

SEQ ID NO: 211516 - protein, 350 aa, unidentified
MNATTVAVDLAKNVFELALADGRWKIIERARLTRAQFERWFDNRSVGLVVMEACGSAHHWARLIRSRGIEVRLLPAQYVRAYVKRNKTDRADAQALLEATRKGDIRPVAVKSIEQQGLQALHRTRSGWMSTRTRRINTLRGFCREFGLVVPEGAATGLAQIARYLADEHSGLPALLRPSMRLVLEEIRLMEARIGELERQLSQLAKASPACQVLQSVPGIGLLTSTAMVAAVADPGSFASGRRYSSFLGLTPREYSSGNSRYLGRISKRGDRYIRMLLTHGARSILRAATVARRAGRQIDRLKSWALAVQARTNHNKAACALANKLARIAWAVWVKHEAYRSEPAPTTPL

SEQ ID NO: 211517 - protein, 432 aa, unidentified
MRSTKMAKQNEETIAAYIGLDWADSEHEVTMLVVETGEVESRKLKQESEALADWVQSLRERFSGRKVAIAIEQRKGALIYALMCYDFLILYPVNPKTLARFREAFNTSGAKSDPGDAGLLLDLIRLHQDKLRPWVPEDADTRLLQMLVEERRGLVDEVTRLTNRLKSTLKQYFPQALEWAGELDSRQALDFLTRWPMLESIRKAGAVAVEKFYRRHSIRNQDKIEQRVKAIKEARALTTDRAVLAASKMKALAIVRQLRALGKSIAEMEARIQELFEQHRDHEVFSSFPCAKKVLGPRLLAAFGGDRTRYESALDLQSFAGIAPVTRSSGKSKTIHKRMACPKFLRQTFHEYAAQSIKKAGWARVYYRGHRDKGVKHHAAVRALAYKWIRIMFRCWQDQEPYDEAKYIASLKRRSSPLVSGLPPAPGSLVEV

SEQ ID NO: 211518 - protein, 347 aa, unidentified
MKEKIMAGIDLHSNNLVCALIDGEGNRLGQRRLPCQISEVNEYLKPYQERLEVVAVESTFNWYWLVDGLKALNYPVVLANPAGIQQYQGIKRVDDKCEPFFLAELCRLNILPTGWICEPETRAVRDLLRRRSLLVRNRTSLILSFKSLHARNTGQSMPLTRIRAMSQEEVGALYEHWADDLAARLEFELIEHFDASVKAIEKEVLQTVALWPAYRYLQTISGIGEILGMTIALETGDIGRFASAGDYASYARCVDSKRETNGKKKGRNNSKCGNKYLGWAFVEAAQFARRFNLQCRQFYDRKCAQTNNIVAIKALACKLAKAAYCVMKEQTPFNLEKVFPHMKIKSE

SEQ ID NO: 211519 - protein, 346 aa, unidentified
MTQYKRIGIDTSKAVFTLHGIDQRDQPTLRINLRRAQMISFFKKLPPVEVAMEACGGAHHWARELAVLGHAVLLIPPQYVKPYVKRGKNDRNDAEAICEAAGRPGMHFVPAKSLSQQAQGMVLKVRDTLIGQRTLLVNTLRGHASEFGVVAGKGVGRVGSLLAAIEQDATIPADAREMIALLGQQIEDLDIKIKALEARLNAAHKANAVSQRLATIPGLGPVTALTLATEIDPAAFASGRHMAAWIGLTPKEHSTGGKQRLVGISRAGNERLRSLLVVCATSVIKAATMPASKQMTGWLRGLLQRKPRKVAAVALANKIARVAWAVMTYGTVYRRSPTNVEVSYAA

SEQ ID NO: 211520 - protein, 420 aa, unidentified
MSPPGASEPASELLLQYLLQHLLVQTQLSDQLLQPLIFILQLPQTPQFGHVQPGKFFLPVNGMDYLLPLRLTVRNVLTKRITMNIVFLGIDLAKNVFQLCGLNQAGKPVYTKRTGRKELLQTLANIPACLIGIEASTGAFYWQREFEKLGHKVKVISPQYVKPFVRGQKNDGNDAQAIAVALMQPTMQFVPPKSPEQQDIQALHRARQRIVNHRTATVCQIRGLLLDRGIPIGSAVSRARRAIPLILEDAENGLSSRMRRTIAELYDLFNDLGRRIHFFDKEIETVFRQSEACQRIAKVKGIGPETATAVVAAIGKGTEFKNGRHFAAWLGLVPRQHSSGDRQVLMNMTKKGDKHLRTLFIHGARAVVRVATNNNDGHMNQWVNQLKERCGFNKTTVAVANKNARIIWSMLRNETGYQVV

SEQ ID NO: 211521 - protein, 337 aa, unidentified
MKRYLGVDLHRTQFVVCTRWENGEQEIRQWRIGELPKFVEQLRSEDQIAVEAMGTTTRFYDAIVGRVARVVVVNPHQFKVISESVKKTDRKDAQALALYLEKDLLPEVRMKPKQNRELMHLAETRDLLVKQRSALKGKINNLLAMQGIELKREALSSKIALARVLALPVSGMVQLELRILVEQIRALSESIAELDERLEEEGQQLPGYENLTSIKGIGSLSATVLLTVIGKISDFADENKLASYLGLVPKIANSNESERSGRITKQGNKLARTALVQCGLVAKRYSPYLSRFYDRIKQRRGGGKAKIALARKLVKIVYDTLKNQWVFEDFPSFTLAA

SEQ ID NO: 211522 - protein, 370 aa, unidentified
MRKKVLYVGLDVHKKTIDVAITNNRINGKVRSYGKITSSLDALNKLIKKLQTEETRLQFVYEAGPCGYQIFRYLQSKGISCSVVAPSMIPRRSGDRIKTDRRDAINLVRLFRAGELTSIYVPSAEDEAIRDLIRCRDDVRRFEKKARQRLLAFLLRHGYHYAGKKHWTKGFYNWLGTIKFPHRAQQITLQEYIDATNECSERIKRVTQQLQAQVEEWDRWPMVKAYQALRGVSFIVATTVVAELGDMKRFATPKQLMAYLGLIPSEHSSGTTVRRGPITKTGNSHVRRVLIEAAWTYRMPARVSIVLLRRQQGLPQSVRDISWRAQTRLCARYRRLIARGKSRQTVITAIARELSAFMWAIDKQINVASA

SEQ ID NO: 211523 - protein, 346 aa, unidentified
MEHYVGLDVSLKLTAICIVDRTGKIEREGVVASDPETIAAFIKSHAPHVARVGLETGATSTWLWTELNKLGLPVICIDARHAKAALKLQINKSDRNDAVGIARIMQCGWYKEVRVKDLDSTAIKALLVSRALLVKIKRDIENQVRGLLKNLGLVIGQAKMNVFAVRAAELADARPELAGAVEPLLKAREAVGRQIADLDRKVMRLARNVAQVRQFMTVPGVGPITALCFLATIDDPTRFRRSRSVGAYVGLTTRRYASGETDWTGRISKCGDKMLRTYLYEAANVLLTRVAKWSALKAWGIRLAKRSGLRKAKVAVARKLAVILHRMWIEGSEFKWSSKEAANQPA

SEQ ID NO: 211524 - protein, 355 aa, unidentified
MSQTANTAIAVIGIDIGKNSFHVVGHDARGAIVLRQKWSRGQVEARLANIPPCLIGMEACVGAHHLSRKLASLGHDARLMPAKYVRPYSKGQKNDFNDAEAIAEAVQRPTMKFVATKTAEQLDLQALHRVRERLVSQRTGIINQIRAFMLERGIAVRQGIGFLRTELPTILATRTDALSPRMLRVIEELAGDWRRLDQRIDGLSGEIEALARQDQACSRLMTVPGIGPIISSAMVAAIGTGDVFSKGRDFGAWLGLVPKQISTGDRTILGKISRRGNRYLRVLFVQAAWVVLVRIKNWERYGLKSWIEAAKRRLHHNVLAIALANKLARIAWAVLAKGRAFELTRTDDAGVVRPA

SEQ ID NO: 211525 - protein, 437 aa, unidentified
MIQAEIERCAGIDVGKKWLAVGVLVGPLDREPRAETRRYGTNVADLEQLRDWLQQQGITHVVMESTGSYWKPVFNILEETLTVYLANPQQVKPRKGHQTDNRDGHWLAHLLRHAMIQPSFIPPRPIRELRDLTRRRKKLIAAGSSEKNRIQKVLEDANVKLGNVLSDVFGVSGQRMREALLEGHAGPEEIARLAQRRARQKIPALVAALQKHRLSEHHRRMIRFRVEHMELLERQILRLDEEIATQIRQIGLARQWELLQSIPGVREDSAATILAETGADMQAFGDAAHISSWAGVCSGNNRSAGKNKSSPTNKGNPWLRGTLTECAQGAAKTKNCFLKEKFWRITAKHGGKRAAAVMAVAHNLLRLVFQVLSTGQPYQERSAGPLEPRQRERMIRHHIRRLGRLGIAVRGPEPAPRRPRRCTTITTKGIARLPASS

SEQ ID NO: 211526 - protein, 447 aa, unidentified
MTHRIGPSRGDRRRNARKARLRGLIPREFAIVGVDLADRKQVFAVCDHDGGVHGRRSVNKRAWQLDETLRWAKAAAVEAGFAGVVVACEPTGHRWRVMLDQCDELGLTMVCAPPMLVHREREREDLTPDRSDAKDAVLIAGLAAQLRCYEPERPTAQWARMRHLGARRSELTTACGVVRQRMRSLLECVWPAALATAADPLASMTWRATMAVICARSVDGDPAAIRRMGWPRFQAAVRRELPRWGGHRVTWTIARELWDATTDPTGVIVHRHGALERVADALTDWQRLRVQRGAVEARMVHLLDELNLTSLVTTIPGLSAVGAAAILAETGDPHRFDSGRALVKHAGLAPRDNESGTFKGTSRVSGRGRPELRLAVWRAVWGALPHNAVLSARHHHLRTREHNRLTDHQARVAVAGSLLRQLHAVIVRGVPWDARTAAGRQEVIAAA

SEQ ID NO: 211527 - protein, 358 aa, unidentified
MASIASTSRVVIGGIDTHKDLHVVAVLDTAGVLLGTEAFSTTRAGYRALVGWLRGFGDVRLVGIEGTGSYGAGITRHLGEAGIQVLEVDRPDRSDRRRRGKNDTLDAENAARAALAGRRTSTPKSKDGTVEALRVLRLTRTTAVKSRRVALQLLGNHIVAAPEELRDQVRNLTRMQLIRTCATWRPDTSGFRDPVVATRIALKSLARRILELNDEIAELDQLITTLVGELAPQLLAAVGIGVETAGQLLVTAGDNPQRLRSEPAFAMLCAAAPLPASSRQDPSHRLNRGGDRQANSALHLIVVTRMRVDPRTKDYVARRIAQGHSKLEIIRCLKRYVAREIYYLLKPPTQANMKSRAA

SEQ ID NO: 211528 - protein, 402 aa, unidentified
MNAVGIDISKGKSMVCIMRPFGEVVASPFEVLHTASELDKLANSLKNLNGETKVIMECTGSYYYPVAYALHEEGLFVSAIHAKIIHDFGNNTIRRVKTDKADSIKIANYGLSHWLELPEYIPEEDIRRMLKAFSRQYSKYGKLKTMLKNNFISLTDETFPGVNELFSSPPRKSDGHEKWMDFAMKFWHCECVCGLTPKAFSERYSKWCKKEGYHFSQDKADDIYAAACGHLIGMPKNDTTKLLVMQAVNQINAISESITVMANEMKRLAEMLPEYPVATGFYGVGGILGPQIMAEIGDVIRFRSKGSLVCYAGLEAPPYQSGSFESKNRSISKKGSPYLRKALFLVMDCILKSKPVDDPIYQFLDRKRAEGKHYYSYMIAGCAKFLRMYYARVNEFIDKFED

SEQ ID NO: 211529 - protein, 349 aa, unidentified
MKYREIKSQFYCGVDVHSKRSYVCVLDSTGKKYVNKNIINNFETFKEILDPFLPNIVVGCESTYTYYWLADGCHQNRIPFYLGHALYMKAIAANKQKNDKLDARTIAELLRTNFFPEAYPYPREMRPTRDLLRRRHRLVRIRAEAYSHIQMVAHQNAIEGIGSTEVKDKSFRDEMFKMFNFHQVAPLINSDLEVIDAFTPVIKKMEKEVEENAVFHNPKDVLLLQTTPGIGDMLSLILVYETHDIKRFPKHQNYASYSRVVRPQQMSNGKITGKKNNKMGNPYLKWAFNSILISAKQSSERIERYYQKLESKYGKRNARSRIAHKFNVAVYYMLKNSQAFDEKRFVQGC

SEQ ID NO: 211530 - protein, 344 aa, unidentified
MFEAYGGQQFVGIDLHRRRSVIVRMSDAGESLGWERIVNGRDRLAEVMARAGENPEVVLEATYGWYWAADLLTEMGANVHLAHPLGVKAFSYRRVKNDVRDATDLADLLRMGRLPEAWIAPPQTRQLRELVRHRAKLIHARTSLRCQVHAVLAGQGVAVPVSDLFGLAGAKLLDELVLPEAYRYRIESLRRLIAAFDIEIDATARLTRERLEQDLGYAAVKTIPGVGPILGAIFVAEIGDVTRFPGPAQLTSWAGLTPKHHESDTTVHRGRITKQGSRLVRWAAVEAVQRIEQHSPLWQVRERIAARRGRNIATVAAARELVEMVFYALRDHTVRRLTRPVLAA

SEQ ID NO: 211531 - protein, 387 aa, unidentified
MKRNDLSRSLVAFDQNSTLVSVVELGLKSWLVGGLVPGVNRQPLKKQKPDPDSLLALLARCRDEAIKAGRTINRVVVAFEAGYDGFWLARWLRARGIEVYVIHPTSIPVSREQRRAKTDRLDTALLMRAVLGWLRGEPKHCNMVAILTLAEEDARRPSRERETLVRDQTRIVSRVKATLVRFGVRNFNVKLRQAAASLEKLQGPEGEPLPPNTLAELRRDLARLRMIREQIKVIETARRERLKGAPRKGTHPMLHMLARIMGIGIETADMLVHEVLSRKLRDQRALARYGGLTGTPDESGSKRREKGLARAGNARVRRGMVQLAWRWLMFQNRSELTQWYRARTAGAKPALRKTMIVALARKLLIALWRYVTTREVPAGATLRPVSA

SEQ ID NO: 211532 - protein, 337 aa, unidentified
MKVFYLGVDVSKKKLDLCLRSNGKDILYDVIPNDLSSIKSWLTRTFEKFFLSEDSLVVCAEHTGQYTYPLVCATKSIGVYLCLEDAAKIKYCHGIPRGKNDKIDACRIAMYAERYNDCLQPYTASELIIQKLKNLSTERSMLVADRAKYQSQLKDQVDYMEHSIYIAKCNRVEGIINTFTDYIAQIDLEIKELINQAPVIAHQMDLLMSVDGVGERVALKMIMETDAFTSFTDPRKFCCHAGVVPFVYVSGSSQRSKNRVSNRADKSIKHLLHMAALSVSQVKNSPLKKYYDRKVEEGKNKMSVLNAVRAKLVTIMFAVIRADAFFREIIKIRLRNP

SEQ ID NO: 211533 - protein, 437 aa, unidentified
MNASEDPSASSDIFSTLTHYGAVDWARGHHDLCVVDAAGGVVFELRIDDTPQGWAQVRDRLAALKAPDGSAAIVGFAIETSSGPAVERLVEAGLPVFPLNPKSAERYRDRKASSGAKSDRLDAFCFADALRTDGHLWRPLRLQDPLTHELRLLCRDEITLIAQRTALVNQLQAALNEYYSTALAAFDDWTAGGAWEFIIAFPTPHQLASAGKRKWEKFLHAHKLYRPETYARRMELFAAADRAASPSSAVTAAKSLLAVSVARQLRTLQTQLDEYRARINELFGQHPDRDLFGSLPGAGEKLAPRLLAEMGAQREVFDDPESLQCYAGAAPVTQQSGRTRRVFFRRACNTVLRSTIHLWADRSRVKAPWAEAYYRQKREQGMGHAAALRCLAMRWLKILWKMWIDRTPYDGDRHLRDQIKHGSWVIALLPQPAAQQN

SEQ ID NO: 211534 - protein, 376 aa, unidentified
MREKLRFLGLDVHAETIAAAIAEPDGEMRSLGTIANREDSLRKFIKKLGSPEQLRACYEAGPTGFVLYWQLTQLGVECTVVAPTLVPKKPGDRVKTDRRDALKLARSHRNGDLTAVWVPDEASEALRDLVRQREAAKQDQLRARHRLTKFLLRTGQRAPAGLKAWTERYMRWLAQVRYTQPAQEVTRLDCMNEVEHMSARVKRLEEAILEVVKQAPQAMQELIRGLQALRGIAHISAVTIATELGDVSSRFESARKLMGYSGVFPSENSSGKRIRKGAITKAGNAHLRRIVMESAWCYRHLPRVGEKLRKRHQGIPAEIIEIAWKAQNRLHKRYVKLAVAGKDQRKVITAVGRELLGFIWAIGVKAEQANRRPIAA

SEQ ID NO: 211535 - protein, 365 aa, unidentified
MKKISTAATQKNGKIEGRKLTIGLDLGDRSSWYCVLDEAGDVLLEQKLATTPKAMKEVFGKMPRSRIALETGMHSPWVSRLLGELGHGVIVAHARNVRLIGESRRKDDRFDARTLARLARIDPDLLGPVQHRSRKAQADLTVIRARAGLVRARTSLINTARGLTKSYGERLRGCSPRKMNRELAEGLSPELQNALQPLLDEIESLSERIREYNDRVKQIAQESYPEVARLEQVKGVGTLIALTYVLTLEDPCRFRKSRDVGCYLGLRPGRRNLGQSEPQLHISKEGDPYLRTMMVQSAHHILGPFGADSDLRRWGLKLAERGGKNAKKRAVVAVARKLSILLHRLWVSGETYEPLRNQRVLTAAA

SEQ ID NO: 211536 - protein, 438 aa, unidentified
MSNKVFFNLDDLFISVGIDVGADFSWMSIALPNQQFVGKPYKILHNSIDSLTTAVSKIKEAEESYSLESRIFLESTGIYHYPLFCYLRDKGFNCSVINPIITKNSTNINIRKVHNDRFDSKKAALVGLKPDLKVSLMPSDLALNCRNLCREYYDLMDNRSAYVNKLQGELRMAFPQYLGIFSKVTINTSLTLLETYTSPSAFLKADKQEIIDIIKSTARFGLTYAQNKYNAIIQAATDANQFGYIIDSNIKRIRLYISFIRKYDEEINNILESLHELVDANEDADFVKQIRLIETFRGAGFLSAVSIMGEIGDFSAFSKPKQLFAYFGLDPAVKQSGKFEGTKVQMSKRGSAIARRVIHTLTLQCISISRNGEAKNPVLREYYLKKCDSKPKRVAMGAISHKVCNMIFAILRDNKPFKIIAPQEHIKQYNAAKCDMTA

SEQ ID NO: 211537 - protein, 347 aa, unidentified
MNFYTQQHKHYCGIDLHARAMYVCILDQHGTKLVHKNLPTTPEAFLRLIALYREDMVVGVECMFTWYWLADLCAKEGIAFVLGHALYMKAIHGGKAKNDKIDAHKIAVLLRGGMFPRAYVYPAEMRATRDLLRRRCHLARKRAELLAHIHNTNSQYNLPEIGKRLANKANREDVAEHFPDPSVRKAIEVDVALIDHYDELLGEVELYLTRSAKAHDVQTFARLQSVPGIGQILALVLLYEIQDITRFPRVQDFVSYCRLVKCAKESSGKKVGTAGKKIGNVHLRWAFAEAAVLFIRQSQPGKAYFMKLEHKHGKAKALTVLAHKLGRAVYYMLTREQAFDLNRFVTA

SEQ ID NO: 211538 - protein, 446 aa, unidentified
MGPIIVGVDPHKRSVTIEVIDGEGKVLATGRFGTLNRDYHGMLSYVRQQWPHHRWAVEGAQGVGRPLAQRLLTDGETVIDVPAKLSARVRVFDTGNARKTDPVDAHAVAAAALRTPALKVLKFDEELVALRLLADRRDELSALRVQTVNRLHRLLAELIPGGAPRNLSATKAKKLLAGVRPRTVVGRTTRRMAVEELADLVRVDTKLKSIKLELRTAVLARGSHLMDLHGIGPAGAARILADVGDIARFPDRDHFASWTGTAPLDASSGDHVRQRLSRAGNRRLNHVLYVAAITQIRQDCEGRRYFRRKLQEAKTGKEALRCLKRRLSDVVYRQLVADARAAAAAPCAAELEKTSGAGPGGHSGASTESSAADLHTPVIGSSDQPQPEPATPTLPARRRPRPAPAASSPQPSRRRAGAVKVQRPAGRTTLTATSTGAHSREPKPRS

SEQ ID NO: 211539 - protein, 514 aa, unidentified
MSEGTAQPPFSRLCPRLLRKHSAWLIRHIPLTQKFHPQPLAPAKMADWVHAHYARVRSPYAAQDKPFASGFTNPYRNGGDIMLKINYMSTLFVGIDVSSKSNSVYAMDFEENKYLSTSFGNNQPGADELVNRIAACMQKHKNLDTLLIVLESTSVYSVHISNFLASSEILMPYKPYVFCVNPKATANYRKSYIGMEKTDPTDAYLIADFARVGRTKKLEPWRGGQFIALKRLTRHRMHLSECITREKTYMVSNLYLKFSELQLLEGDDKPFGNLYGATSSAILTEFLSPQEIIDMPEEDLLAFLAQRSRNRICDLSKTSELLRKAARDSYRLDKCMYEPLNISLASSFNCIQAYQKEIRLIEQAIEKCIKGMNPNALIILQSIPGIGPVWASGILSEIGDISAFHSSDALAKYAGLYWPKGDSGDFISEDNQMSKAGNPYLRYYFGEAANSIRKHIPEYADFYARKYAEVSKHQHKRALALTSRKFVRLVFGLLAKNQLYTGEKLDTEHNTESN

SEQ ID NO: 211540 - protein, 438 aa, unidentified
MTLHENVIPPEAEEDFAAWVAIDWADKKHVWALQETGSSRRQQGEIEASPEAVDAWVSELLLRFPGRRIAVALEQKRGALVCLLSKYAALVLYPVHPATVSRMRAALYPSNSKDDPKDADLQLDILLYHRKHLRRLEADTVETRKLQILVEDRRQLVDQATAYSNQLRAKLKQYYPQALRWLPDLHAVAAGEFLKRRPTLPLLQKARRETIEKFFHRHNCRSEELIRKRLDEIPQAVVATTDAAILDSSVTMVLALVDLMAVLHTHIAALDREIAATAAAHPELPIVASLPGAGPVMVPRLIAALGTQRQRFACASELSSDTGIAPVKQASGQSEWTHFRWACPKFQRQSFHSTSGPGIPSPNARGPRPTIGSKSARAKDTTPRCGPWPSSGSVSCSAAGRTVNPTTNGSISRLSGGGVPRTHRRPHERIFGRDALFP

SEQ ID NO: 211541 - protein, 339 aa, unidentified
MVAVGVDTHKERHYAAALDQLGQLLGERTFAASAAGYAELQRWAESTAAGHELVFGVEGVGSWGAGLRQHLQHGGHAVVEVERPRRRDRRAGKSDRIDALTAAKCALNNENVSIPRRRGALTAIRALLIARRSAVAERTRLLNQLQALNATAPIALRERIGEGTGKQLERRILSMRARPGADVETRTVFAVMRDTAARSRALEADARRYKNEIAQLVRSLDPTLLDEPGIGPISAAKLFACDPARFKHEAAFARCNGTAPIPASSGKTVRHRLSRGGDRQVNNAIHTIAIIRAKHQPETRAYLDRRIAEGKTKREALRALKRHISRDVFKRLNEIPLTS

SEQ ID NO: 211542 - protein, 412 aa, unidentified
MKDLLEISCGLDIHKEKIVACILTGPLGKPTHSEIREFTTLIPDMLALRDWIISENCRHIAMESTGIYWIPIYEILEDAFSGDITLLVVNARHMKNVPGKKTDMRDSEWISTLLRAGLLNASFIPEKRIREFRDLNRYRKSIIRDITSQKNRVEKFLQSSGFRLSSFISDIFGASGRNIILHLMEHGQIDKISLDSYLKTKTRKRIDEILMSVNGTLSEHQKSFLKILMCHYDSMKEHLIEIETHLQEDMLPFALQIEQLNTIYGISTTASCAIIAEIGTDMKPFKTAEHICSWAGLCPGNNESAGKRKSTSITKGNPYIKSMLCEIAWVIAGKRNTYLSAWYWRIKQKKGARKAIVALARKLLVIIYTMLKQGTNFDENCFEVRRKNCEQKQLSRYIRELEKHGYTVEAQV

SEQ ID NO: 211543 - protein, 341 aa, unidentified
MKRYIGVDLHKNRFTVCYMLESGKYQLKTFRLDAGDLKRFKRTLAKTDEVAVESTGNTGYFVREIKELVKVVRIVNPSQFKIISQSVKKTDEQDAVTLARYLAKGLIPEVRMRSKEESQIASLIGTRDKLVKLRTALKNKIHNILNANGIQTTREMFSGEKSLNKIAGLDIDESYLFELKIIVEQIRSLSQAIEEISREITQRGQKISGHKNLTSITGVGDLSATILLNSIGDINDFSDEKKLAAYLGIVPRVYVSNETSHYGRITKMGNKIARTALVQSALVAIRYNSYLRTFYNRLKAKKGSGKAIIATARKLLVIIYRTLKNNWVFEDFNEFKLAAQT

SEQ ID NO: 211544 - protein, 390 aa, unidentified
MTATRLTDSIQITSGSLYLSFELGWNEWKLAFTTGLGQAPRMRSVPARDLQAVLDEIARAKERFGLPPDAPVHSCYEAGRDGFWLHRWLLAQGIDNIICDSASIEVNRRQRRAKNDRLDAAKLVTMLCRYHGGETKVWSVVTAPTAAAEDLRQLHRELLSLKEERTAHVNRIKGLLASQGLAVAAIDADFAEVLPGLRLWDGSLLGPDLTARLVREFERWQFVDRQIRDLENDRRRRIRRDETPHVDKVRLLLGLRGVGLAGAWMLVMELFGPRANLKRKQLGALVGMTPTPYQSGTTAREQGISKAGNRRLRTLMVELAWCWVRHQPDSDLTRWFQSRFGVGKRSRKVGIVALARKLLVAFGRYLDRGEVPKGAKLCSWRTKVNGKTAA

SEQ ID NO: 211545 - protein, 348 aa, unidentified
MTEALFAGMDLHSNNVLIGLMDESGRRLKHQKLECDLPAIDRFLKPYKSQLKSLAVESTYNWYWLVDGLRALSYSVKLANPAQIQQYNGLKHADDKSDAYFLAELQRLNILPTGYIYDPVLRPVRDILRRRLSLVHQRTALVLSFKSLYTRTTGQALKLGRVKSMTADEAKGLYEHPANCLIAKVQKEQIENLDQSIGRIEKAVLESARELPCYEKLLTIPGIGRILGMTITMETGEISRFQSSGDFASYCRTVKSERTSNDKKKGDNNRKCGNRYLAWAFVEAANFSRRYDETCRRWYDRKVAKTHKVIATKALACKLAKAAWHVMSQNENYSPDRMFPELTNMPKK

SEQ ID NO: 211546 - protein, 373 aa, unidentified
MDSLSILNPDLYKNVTPFVKAFRLSSSSFLSFSQYKNMENFYFIGVDVSKKKLDICVMCGSKVLTEEQVSNHQQAIIKLLNELKRDFNMTNDNFLICAEHTGQYTYPLICACKSVDCKLWIENPTQIKYCSGLTRGKNDKVDAKRIALYASRFYDRATYYKRPSEELTRLNQLEVERTLYIVDLSKYKAQLTDQKEFMPKALYKSKSDRLKILMKSLEQVLKTIEEEMNSIIESTKVLSRQMDLLTSIDGVGPVVARNMIIATEAFTRFDNPRQFCCYAGVAPFAYTSGSSQHSKNKVSQKACKYLKTLLHMAAVAVVHRKSGELKVYYERKVDEGKNKMTIINALRAKLVARMFAVIKRNEFYSPILSNNIC

SEQ ID NO: 211547 - protein, 338 aa, unidentified
MRRTTPAPLCGIDVSAAQLVVALEGEGGRGLRRSFPNRASGHEALILWLQKNGTRVRVCLEATGLYSLDLALALHAVAGIEVAVLNPKKVNRFAATLCRGKTDPADAQVLAEYARRMPFQRWHPPQAAALELRAITRHIAALTQQHTQQSNRLHAVSASRAGARCVQQDLKRSLRDLEHRVEKMRRAALAVIEQDAELRLRFALLLSVPGIGEVSALSLLGELALLAPSLTVRQWVAHSGLDPAHHDSGTSVHKRSRISRAGNRYLRRALYMPALVAVRHDPHLRAFYQALVARHKAKLQALIAAARKMLHAIFGMFRGRTGYDGSRLFPAIELAAAA

SEQ ID NO: 211548 - protein, 407 aa, unidentified
MEVLYPRCAGLDVHASSLTACLRLAAGHEVTYQHRTVATTTAGLLELAEWLEATGCTHVAMEATGVYWKPVWHILEGHFTLVLANAMHIRNVPGRKSDVHDATWIADLLAHGLIRSSFVPPAPVQALRDLTRTRKQLVGEIARHTLRIQKTLEDANLKLTRVVSDILGTSGRAILRALIAGETDPERLADLTTGRLKATRAQLVEALHGRVTAHHRFLIELHLTQIETLETAVQKLERHLGEALAPFRAAVDLLTTMPGLSETAARVLVAEIGTDMARFPTAGHLVSWAGLCPRLDTSAGKRHSTRIRHATPWLKTTLIQGAWAATRKKDCYLHAQFGRLKSRRGPKKAIVAVAASMLTAAYFMLRDGVEYADLGGAYFAHRDVEQTKQRLLRRLRDLGVEVEVKVA

SEQ ID NO: 211549 - protein, 318 aa, unidentified
MSAEITFVGIDVSKGTLDVHLLPQDDAFTVPNTHEGLDVIVARLKTCTRCLIVLEATGGYEIPVAASLDDSGFDVAVVNPRQIRDFARCLGQLAKTDRIDAAVIARFAQATRPEPKPAPSAERLMLKELITRRRQLLEMRTADQNRRATVRSAQVRKDLDEHIQWLNRRIGRLDKELGEVIRKSPLWREKEDLLRSVPGVGRVLARTLLAGVPELGRANRREIAKLVGVAPLNRDSGKMRGRRTIWGGRGSIRAVLYMATLAATRCNPVIAPLYQRLMAAGKEFKVAITACMRKLLILLNSILKTHVPWEAKKTPQAT

SEQ ID NO: 211550 - protein, 438 aa, unidentified
MSNKVIFNLDDLFISVGIDVGADFSWMSIALPNQQFVGKPYKILHNSIDSLTTAVSKIKEAEELYSLESRIFLESTGIYHYPLFCYLRDKGFNCSVINPIITKNSTNINIRKVHNDRFDSKKAALVGLKPDLKVSLMPSDLALNCRNLCREYYDLMDNRSAYVNKLQGELRMAFPQYLGIFSKVTINTSLTLLETYTSPSAFLEADKQEIIDIIKSTARFGLTYAQNKYNVIIQAATDANQFGYIIDSNIKRIRLYISFIRKYDEEINNILESLHELVDANEDADFVKQIHLIETFKGAGFLSAVSIMGEIGDFSAFSKPKQLFAYFGLDPAVKQSGKFEGTKVQMSKRGSAIARRVIHTLTLQSISISRNGEAKNPVLREYYLKKCDSKPKLVAMGAVSHKVCNMIFAILRDNKPFKIIAPQEHIKQYNAAKCDMTA

SEQ ID NO: 211551 - protein, 344 aa, unidentified
MTYYAGLDVSLRSTHICVIDDDGELLAEGKTDSEVADIIAFLDELDVEIVEVGLEAGTLTQYLTYGLQFAGFEVVCLEARQVKAALSAMRNKTDKNDARGIAQLLRSGWYSRVHVKSIESHQVRALLSSRKAVLAKCIDLEQEIRGLFKVFGIKLPPKLGHGSFDPKVRPLIEADQALSQSLLPMLDARLVLYRTFLTLENRVRNLAKQDPVCQLFMTAPGVGPITALTYKAGVDDPTRFRRSRTVPAHFGLTPRRFQSGEIDFDGHISRAGDANVRSTLYVAANSMMTRSSKWSPLKAWGMKLAKTRGHKKAVIAVARKLAVILHRMWIDDTQFRWGAEAARS

SEQ ID NO: 211552 - protein, 321 aa, unidentified
MNKNATVPKYVGVDVAKATLQVHLQGHQIEFENTASGHIQLCNKLRALTEPHVVCEATGGYEAAMAQAFHDANITVSVVNPAHVRAAAKAQGKRAKTDPLDAASLTDYGQRFQPAPTPEVAALQRQIRHLVLWLKQLIDAMAVAKAQAEHQLDAFVKQQHAQLLTHYHQQIKLTEQKVKTLLAQDHALQQRVDCLMEIEGVGLRTALMVLAYMPELGTINRSQAAALAGLAPWTRDSGTMKGKRCIGAGRAEIRPVLYMSSLSSIRYNSILKAFYKGLRERNKPGKVALTAVMRKLLVYMNYKLKHLQSPLAEQKLQTPKL

SEQ ID NO: 211553 - protein, 429 aa, unidentified
MKFKVYKQKKDFVSGKTIVGIDPAKQHHQASVINQYGIQIAKSFSFPVNLDGFNNNLWKKLHSIVPQFTPDNLVFAVEASCNLWKTIAYYLHDKGYTVLLVNPLVTHYSRPLMNHDFSKTDPKDAFLVAKNAFDANYDFYKSFTPQINRLHQLSITYDKLLKDKNKNLLRIRSLMEEVFPEFLNCLNIDTKTALFLLESYFLPQHFLNLDIEKLAPVITTISRSNYNKQLLLNLKDAASNTIGVNKISEEQSLRLILNSWLLEFKQINNHMAILMDEMITLAKQTDHFKILTSIKGISDNLASQFIAECRDLNNFQHYKQIEKLAGLNLRLSQSGDYIGARHISHIGDRRLLRVIYQMTIQTATYIPEVRIKFLTRQIKKKAYRKNIIAASSVLLQLIMALIKENRTYEFKQEKLQQLALLEEQYKKSA

SEQ ID NO: 211554 - protein, 355 aa, unidentified
MSKIKADFSGQTIYVGMDVHKASWNLGIHLNDTFIRNVHQKPSPQIMHDYLTKHYPGAKYKAAYEAGKFGYWIQRQLTALGIECLVVNPADIPKSQKDTLQKTDQRDSRNLGFRLQSGVLKSIHIPDEQQEADRVFFRQRKKIWRDLARCKNRIKSLLAFSGIDVPEKYDNANWCHNFIVWLKELDCVQASRRRALDYQVAQMEFLRKELLSISNEVRKMMREKRYRTNYYLLRTIPGIGPLTAGSILVEIGDVKRFDTFYHLNSFIGFLPMEHSSGQSDLKTNLTVRKHKQLRSDLVESAWVAKRCDPAISLYYQEQIKKKDSRVVIIKIARKLLSRIRYVLINQQPYEMGVVK

SEQ ID NO: 211555 - protein, 342 aa, unidentified
MKIIGCDFHPSFQQIAMVDTETGEQTERKLTPEEAEQFYGQLEGEVVVGAEAFGNMLWFERLLAGMGHRLRLGDAAQIQARELRKQKTDRRAAELILQLLLEGRFPEIWVPSLAERDARQLLIHRDKLVGMRRQVKNQLQHLCMNQGLQLKRRLWTQIGRKHLEELPLEGWTAKRREDGLRWLDQLDSNVAELDAAVARQAQQNAVARLLQTHPGVGPITSMAFVLTLGRIERFRGSRQVVSYLGLNPSEHSSGMRRRLGAISKQGNPMLRSLLVEAGQSAARFDTELKRAYQRLKQKKHSAVAKVMVARKLAVRLYWMWRTQQPYTATRMQGSPSHPVAKR

SEQ ID NO: 211556 - protein, 407 aa, unidentified
MDLLKTVFGIDVSSRKSNVCIMVNGQKVNDYAISNDMVGFNQLLGDLKQVTKPQIIFEATGVYSRRLQAFLDMHELRYVMMNPLEAKRKTKDDLHQNKTDKLDALYLAKLQSEHPQRLAYVQNKEYQELMANNRIYEQASHDLITNRNRLHKAIQLTFPEIEHLMVNPRGKNYWSIVLRFPHPDILLETKEADIIDFLKGLSGIGKKRANDITQSLIRLAKVACPAVKKNSAHIRGLKMAINNILSAEEECQTALQEMAKLAPKRDLEILTSIPGIGENTALRIISELGDIRRFNNPSQLNAFVGVDPQVYESGNLTAHLSISKRGTAIGRKVLYLAINQIQSAKKAGNPCHIADYYEKRKRSSETASHKKAAIASIHKLLRTIFALIKNDQLYSYDVAKHNQRLLS

SEQ ID NO: 211557 - protein, 310 aa, unidentified
MDITVGIDVSKSRLDVYVHPKGECLAVDNDEVGVASLVERLHRLEGIDCIGLEASGRYERLAVAELAAAGLPVVVLNPAQVRHYGQAIGLRAKTDPIDARLIALFIAAVHPEPRPIPDDATRELEALMTRRRQIVIMLVPERMRRQQAAPGRVRTSIARSLTMLEDNLRELDAHIDKAVRGTPVWRDKEDLLSSVPGIGKTIARNLTAQLPELGTLSPRQIAALAGLAPYTRQSGSWRGRSMIGGGRPAVRAALFMGALVAARHNPTLKTFRDRLIANGKPKLVASIAVARKLLTILNAIIRDQRPWQHT

SEQ ID NO: 211558 - protein, 389 aa, unidentified
MKIFVGIDIAKLNHFAAAISSDGEILLEPFKFTNDADGFQLLVSKLESFDKNSIIIGLESTAHYGDNLVRYLVAEFYQVCVLNPIKTCQMRKNNVRKTKTDKVDTFVIAKTLMMQDDLRFITFFDLDMMDLKALGRFRQKTIKQRTRLKIQLTTYVDQVFPEIQYFFKSGLHQHAVYALLKEAPSPKEIASMHMTHLANLLKVNSHGHFTKEQAKELRVLAQKSVGANDSAISIQITQTIQQIELLDSQLEKIEAEMTDIMKFNDSVIMTIPGIGYINGGMILGEIGDIHRFSNPNKLLAFAGLDPSVYQSGNFQAKTTRMSKRGSRVLRYALVNAAWNVVRNNATFKAYYDAKRAEGRSHYNALGHCAGKLVRVIWKMLTDEVEFNLE

SEQ ID NO: 211559 - protein, 340 aa, unidentified
MTIVMGFDQHRAQITTEWLDSMTGEIGRARIVPAHREGVRRFLGRFAGQELAVALEATTGWRFVVEELRRVGAEVHLAEPAQTSALRGNKKRPKNDRADARHLRELLMIGRLPESWIPPDHLLDLRSMVRLRHTLVDQRGEWQQRIRAVLYHHGLPHRRELDLLRGEGRAWLKEVELPDTGREQITVAIAMTEALNVQIAPLDRQLRLYARRQAGCKALMGHYGIGELTSVAILAELGDCRRFSSSRQAVRYAGMDITVYQSDQRRSPGHLSRQGPPALRWALYEAAQVARRAGSPDRGYYDQAAERLGSNRACVAVARKLLMRAYHTLRELGEEALQPA

SEQ ID NO: 211560 - protein, 388 aa, unidentified
MTQAPGARPTPAVLDYERTLILAIELSNTSWVLAAQIPGLPGVKAKRSIEPTPEALMAAIASYRARAETAGRNVDRVVTVYEAGWSGFWLVRWLAKYGIETHVIQPSSVPVDRRARRAKSDGIDAELLLRTLLAWLRGEPRVCSMVPMPTEADEDARRRVRERAELVTERFGLVNRIRAILATLGAGEYNPLRRNRRQRLDELRTALGDSLPTHAHAKIARMLDRLELLLIQITELEQSRDAVLEDKAPDRAASMIQQLAKLRGVGVQTATVLVREGFVREFANGKALGSYAGLTATPYSSGGIEREQGIGKAGNARLRTVMVELAWLWQRYQPDSAQVSWFRERIRGTGRRMRKVMVVALARKLLIALWRFATQGVVPEGAVMKPAS

SEQ ID NO: 211561 - protein, 391 aa, unidentified
MIYVGIDVAKDKHDCFITNSDGEALFKSFTIPNNRKGFETLFQKVQSVSDDLTKVKVGLEATGHYSYNLLGFLLDKGLPTYVINPLHTNLYRKSLSLRKTKTDKVDAHTIASMIMSDVDLKSYSDTSYHNEELKSLTRYRFDKVQERAKLKTSVSRLICILFPELEKLVPTIHMASVYTLLSEFPSAHAVASAHLTRLTNLLSESSHGRYGKDTAVMFREAARNSIGSNMPAKSLELKHTIKLIQELTSEIDEIETEIKSIMDEVNSPILSIPGINYRMGAMIIAEIGDFSRFDSPDKILAYAGMSPSTYQSGQLDNCYSHMEKRGSRYLRYALYNATKYVCHWDESFGTYLAKKRAEGKHYNVALSHATKKLVRTIYAMEKTGQSYSSAS

SEQ ID NO: 211562 - protein, 343 aa, unidentified
MQAITTIGLDIAKSVFQVHGVDAKGDVVLRRQIKRRYVLAFFQNLPPCLVGIEACASAHHWSRQLQALGHTVRLMPPAYVTPYVKRHKNDAIDAEAICEAVTRPNMRFVATKTREQQSCLTLHRTRHLLIRQQTSVINAIRAHLAEFGIVAPVGRNGVDQLLGIVADASDKRLPELARACVAALGTQLGTLKAQILQFDRLIMAWHRSSEASRRLDAIPGVGPALATALVATVADPRAFRSGRNFSAWIGLVPKQHSSGGKDRLGSISKRGDRYLRFLFVAGALAVIRYAKIHGTKHRPWLTALLARRHTKVAAIALANKIARMAWAIMAKGEHYKEPVALAA

SEQ ID NO: 211563 - protein, 341 aa, unidentified
MAKFIRAAIDLGKNYFQVHGLESEGGRSISRKVKRSKMREVFSQIEPCRVGMEACGSAHYWARQLTEMGHEVVLIPPAYIKPYVKRGKNDAVDAAAICEAMSRPGMRFVPIKSADQQAVLMLHKTRELLVKQRTMTVNALRGHLAEFGIVVAKGIGRIDELLALAKADAALPSIAMAAVACVAQHLEGLDLSIATVEKEIVKAHRQNPVSRVLDEIPGVGTLIASVVAASVPDPGVFKSGRDFAAWLGLTPRQNSSGGKEKLGAITKQGNRYIRKMLVTGATSVLRVVSKRQGSFADWINALRARKPERLVAVALANKLARICWAIMTTGEGFRTDTYAKA

SEQ ID NO: 211564 - protein, 338 aa, unidentified
MKLYGAIDLHSTNNVTVLIDEQDEVVYQKRLPNDLPLILEQLSPYASSIQGIVVESTYNWYWLVDGLMGEGHVVHLANTAAIQQYEGLKYTDDHSDARWLAHMLRLGVLPVGYIYPKEQRAVRDLLRKRGQLVRQRTANLLSIQNLVTHNTGSSISASRIKRLSAEEVEGILTDADVALAVKANLSVMRSLQAEIVRLEKVVKERVKLKPAFRYLLTVDGIGEILALTIMLETGDIGRFATVGNFASYCRCVGSEKLSNGKRKGSGNTKNGNKYLSWAFVEAANFAVRFNPLIRRFYQRKRAKTNGIVAIKAVAHKLSRACYHVMQDKVPFDVARAFA

SEQ ID NO: 211565 - protein, 342 aa, unidentified
MTIVAGFDVHRRPITFDALDTETGELMRGRIDSTPAAVEQWATRFQGRGVQVALEACTGWLFVSRALERAGVVAHLAEPVETSALRGRKRRAKTDREDARWLRTLLGEGRLPEAWIPPEHVRQWRSRARLRKTLVDERTQWLQRIQATLFHHGVDGVPAELRSGAGREFLDELELPADARERIEIALGMIDALEGQLRPLEAALRKLALRQTGCRALMAQFGMGELTSLVTLTELGDVGRLSASRKAVRCAGLDIGVHRSDRRSRVGKLNRQGSPHLRWALYEAALSATRPTSPDHQDYLALKARGLSHTRASLTIARKLARRSFHILRELGPSALDPIPTS

SEQ ID NO: 211566 - protein, 418 aa, unidentified
MKIVFPTCCGVDIHKSFLVATIIKTPQDSLQPIYQKKRFSMFNSDLNRFADWLHENDCMDVCIESTGKYWIPAFNILEKRGVRVIIANPKWVKAVKGNKDDTKDSKWIGDLFRIGLVKSSFIPDKDIRILRELTRYRYKLISMRSSEKNRFQNAFTVCNVALDSVVSDMFGKSAAAITDYLTSDEDFDPQHCVSLLQRSLKKKADDVLESIEGYEITQEQKTRIGIVRDHLHYIGSLVERVDTCIDTMVNRYEGYIILLCTIPGVDRSSAITILSEIGIDMTQFGSSKRLCCWAGLTPGNNESAGKKKSVRISRAGVYLKPALVQVAHAAVKDKASPYYVLKYERIAKRRGKKRAIIAIARMILTAVYVMLSNLEEWNPVDLYKVDMPEHLKEKQLAKAVKQAVRFLEAQGLTVLDSA

SEQ ID NO: 211567 - protein, 368 aa, unidentified
MDKDTVVAVDIAKTIFEVAVSREPGRVAERRRLSRGTFLIFFAQMPAATVVMEACGSAHSWARKLQELGHKVILLPPHQVRPYVTRNKTDRTDAKGILEAYRNADIRPVPVKSVSQQVLVTLHRFRSAWMAERTAQINTVRGLLRELGFVIPLGMEKVLPQVRALVEDADSEVPDALRGVLFEACEEIRTLGERIKKTERQLEALAEQTPVVERLRSVPGIGLLTSTAQVTFVGQILRFPSGRHYASYFGLTPREFSSGAKRRLGRISKRGDAYIRMLLIHGARSVLCHAKKEQEHDRLRAWALALERRVGHNKAAVALANKLARIAWAVWKNDPPSSRCPWPLRRRPPQEERRNQGFAHPGTAQSIA

SEQ ID NO: 211568 - protein, 391 aa, unidentified
MFYMGIDIAKFKHDFCIIDGDTGEVIAPPRTITNDKEGFQEMLEILTNLHCSQIIKIGLEATGHYGTLIKAFLTSNGYKFIELNPLQVSRFHSQTTLRRTKTDKIDCQVIARYIMAVTTKTYQPQLYHLEALKSLTRLRETLVDQRSRCLVKLTNVLDITFPEFKKFFTAKLRSKTALFIIRKYKTPARIAKWTDEDIRLVHNVSRKFSASTLLEIKQSAIDSIGIAPKYLLDEIPSILNVYETVNNEVSSLEERIKSIIVELDPPTLSIPGMGHISCATILGEFGDLSRFPSAEQCIAYAGVDVGISQSGTKCHRGKMVKRGSSHLRYALMNVVRTVCIHTPTFKDYWVRKKIDGHKFLRVADSHAAKKLVRVIYYLETHNTKYNPSRCK

SEQ ID NO: 211569 - protein, 438 aa, unidentified
MSNKVFFNLDDLFISVGIDVGADFSWMSIALPNQQFVGKPHKILHNSIDSLTTAVSKIKEAEELYSLESRIFLESTGIYHYPLFCYLRDKGFNCSVINPIITKNSTNINIRKVHNDRFDSKKAALVGLKPDLKVSLMPSDLALNCRNLCREYFDLMDNRSAYVNKLQGELRMAFPQYLGIFSKVTINTSLTLLETYTSPSTFLEADKQEIIDIIRSTARFGLTYAQNKYNAIIQAATDANQFGYIIDSNIKRIHLYISFIRKYDEEINSILELLHELVDANEDADFVKQIHLIETFKGAGFLSAVSIMGEIGDFSAFSKPKQLFAYFGLDPAVKQSGKFEGTKVQMSKRGSAIARRVIHTLTLQSISISRNGEAKNSVLREYYLKKCDSKPKLVAMGAVSHKVCNMIFAILRDNKPFKIIAPQEHIKQYNAAKCDIAA

SEQ ID NO: 211570 - protein, 397 aa, unidentified
MYIVGIDIAKRKHEAAVIDGEGAVIIKPFSFTNNCSGYNRLLAMLTKAKLPLDEVSFAMEATGHYWLALFTRLQKEGFRVQVINPVQTNSIRSFYIRQAKTDPRDALLIAEVIRFGHFSESTLHPENIYELRELCRGRHAIVSMQADVKRKVVALLDQVFPEYETAFTNLFGDTSMAILQTCPTPKELSEMPLEELCHLIEVSSHKRFRMVKAQELQALARGSFGFAMAGDVFSTMIRLYAKHLDFLKQQVQEMDRKIAEIMDTLDTPITTITGIGPTLGAYILSEIGDISRFSSAAKLAAYAGIDPTMRQSGEYNGVRNRMSKRGSPYLRHAIWLAASSAVLHDPALKLYFQKKRDEGKPYMASVGHACRKMVSIIYAVMRDNKAYTPYIPNEISA

SEQ ID NO: 211571 - protein, 309 aa, unidentified
MATSSYVGIDVSKARLDIAVLGEKQAWQVENTCKGIDELVQWMQELHPELIVVEATGGYQRSVVDALFHAGLCVAVVNPARVRQFARACGLLAKTDKLDAQVLAVFGERVQPKRYEGKNEAEKQLSALLVRRKQLEEMLKAEQNRLRTVSPVLRGSVERSIAFLKDEKKRLEEQIEQFLKEQKDWQEQREILSSAPGVGKVTTATLLADLPELGKMDRKKIAALVGVAPMNYDSGKKRGYRKTKGGRTDVRSVLYMSTLVATRYNPVIQAQYQQLLKRGKVKKVALTACMRKFLTILNAMVRDQQPFRI

SEQ ID NO: 211572 - protein, 310 aa, unidentified
MDAIYVGIDVSKDRLDVHVRPGGETFAVERNGRGLENLVDRLRDLSPLLIAVEATGGFETIVAAAVAGAGLPLAVVNPAQIRHFAQAVGKRAKTDPIDAGVIAHFAEAVKPEPRPVPEETAVLLAELVGRRRQIIEMLVAERQREKHASNVRVRKSLARHIAVLERELPSIDQDIDGLVRGAPVWREKENLLISVPGIKNTLARIFLAEAPELGSLDRRRIASLAGVAPYTRQSGRWRGKAMIGGGRTALRSALFVAALTVSRHNPLLKIFYQRLLTAGKPKKVALVAVARKLLTILNAMLRDNRKWQSA

SEQ ID NO: 211573 - protein, 448 aa, unidentified
MKKHNTEHGLPIIHAFAAGIDIGSRFHVVAVPTALAEEPVQTFQAFTADLERMAAWLVELGITTVAMESTGVYWIPVYEILETHGLQVILANARDARAVPGRKTDVNDAQWIQRLHACGLLRASFHPEREIAALRSYLRLRERHLDYAAAHIQHMQKALTHMNLQLQHVVSDITGATGMRIIRAIVAGERNATMLAAMRDLRCQSSVETIQRALVGNYQPEHVFALSQALAMYDAYQAQISLCDEQIAQSLQQLSRGKPRPSEALPKPRHRTRQPNALNFDVRTLLYQLVGIDLTQIHGIGPYLALRLVAECGTDLSRWRTAQHFTSWLTLAPGCRISGGKVLSAHTRKTKNRVTAHLRLAAVTIGRTNTALGAFYRRLSARIGKAKAVTATARKIAVLFYNAMRFGMEYQDPGADHYEQQYRERVVKGLHRRAAEFGFTLQAIEDVS

SEQ ID NO: 211574 - protein, 347 aa, unidentified
MRFYTKQHKNYCGIDLHANKMYVCIINQDGQTVFHRNMKAEPNTFLRAIKPFRDDLVVSAECMFTWYWVADLCEQESIPFILGHALYMKAIHGGKSKNDRIDSLKIAALLKGGLIPMAYVYPRKMRATRDLMRRRNHFMRKRAELFAHIQNTASQYNLQDPLGRIAKPQNREGVIERFDLPCVQKSIEANLEMIVTYDRVISGLERDIIQSAKDHDPVSHALLKTIPGVGRIIALNLLYEIENIRRFPRVQDFVSYCRLVKCAKESNGKRYGSSGKKIGNAHLKWAFSEAAILFLKGNEPGKKYLQKITNKHGKGKALSILAHKLGRAVYYVLKNQKAFNMNKFLAI

SEQ ID NO: 211575 - protein, 415 aa, unidentified
MFKIFRKNCCGLDVHKTWIYACIGITDNNGRTEYKQARFSSFSKGLRELLNWLAKYDCFDVCMESTGKYWIPVFNILETDCKVVLAHPKYTKPQKGNKTDRKDAKWICDLFACDMIKPSFIPPVPIRHLRDLVRYRFKLTNMLSGEKNRAQNCLTISNLKLDDVFSDVFGKTSMAITNYILEHPGETFDVAPFVTKRCKTPVSEIQAAVDGAISQEQAVKLRTCLKHIDQLTESKEKITQEILRVAEPYSEALNLLQTVPGLGKNRITAISILSEIGADMSVFPTAKHLASWAGCCPRNDESARKIKSTRISRAGSYFKPILVQIANSLLKSKEHPEFGERYRRIKARRGHKKAIIAICRMLLTAIWHILKKHVPYSAEGFVEQRKVQPSKKLSLSQALHLLKERGYIIDMPLRE

SEQ ID NO: 211576 - protein, 375 aa, unidentified
MTTIARLGVDTSKSVFQLHGVNEREEVVLRKQVRRGQFLAYLARLAPMVVALEACGASHYWAREVQALGHEAMLLPPQHVKPYAGHNKNDKIDAEAVCEAMSRRRVAERRVAIKSAEQSAAQMLLGTREGLLQRRTQLGNIIRGHAAEFGQVTPKGLAHVKPLLERIAADQSVPALARELFATLGEEFAALAPRIAQLDKKLKAFQRSDELCRRLVEVPTIGPVIASSMIVKISNPAAFRSGRRCAAWVGLTPKDHSTAGKMRHGGITRAGDEGLRAALVSGATAYIQQVKRGRTKPSPWLAGLLKRKPEKLVAVALANKTVRIAWKLMTSGQRYDPAKAEAREGFGATQGAGSAPSPSLHPRTAAHGTTAVTAA

SEQ ID NO: 211577 - protein, 340 aa, unidentified
MKITTFGLDLAKNVFQLHWVEPETGEVKRRSLKRDQTIKFFAQRSASVVAMEACGSAHYWARKLIELGHEARLIAPQFVRPFVRSNKTDAADAQAIWEAAQRPERRFVAVKSVHQQAVLMLHRVREQRVKMRTMQINQLRGLLYEFGVILPAGRHKAMTQVAQALARLEDTLPAMALEALREQCASIEALSAQIEEIERKLAAWRKEDEAAKRLMQVPGVGLLTATAAVATVGDAKVFSSGREFAAFLGLVPRQSGTGGRVKLLGISKRGDGYLRRLLIHGARAVITHAKARDPWVEALLARRPLNAVVVALANKMARTIWALLAHGRHYEPRGQALGCA

SEQ ID NO: 211578 - protein, 351 aa, unidentified
MRKIAYLAMDVHVSNSVLGEMEYEGHFRGNQSFTTSEKNIINALKAVKAKEKYLTIEEGTLTYWAAQVAAPYVTEVIPCDPIENALIYKSPHKRDKVDTKKLCRLLRLGELNRVYHPENDHRALFKAAAKHYIDLRGQLKALKQKIKAIYRHWGIIDVNGISVYTPKGREDFLRLIKHRHIHNQLHRLYCLMDQTESIREKALRAMKQMGKKYPEIKEFMKIPGIGEIGAHIFDALIQTPHRFPDKHKLWRYCRMGVTDRSSDGKPLGFKRLDKSGISELKAIAYQAWMVSMKGNNEVQRFYSESFRRTFSHVHARLNTQRKIIAVMYGLWKRGEPYNPQLFLESSQSGVV

SEQ ID NO: 211579 - protein, 443 aa, unidentified
MAMRTKKNELSVCYPNAAGIDVGGGSHFVAVPPDRSDLSVREFGCFTEDLYAMASWLAECGVTDVALESTGVYWIPVFEVLESCGLRVLLVNARSVKNVSGRKSDVLDCQWLQQLMSFGLLSAAFRPPADVCALRAISRQRDTLLQEQGRCIQRMQKALTQMNVQLANVITDITGQTGLAIIRAIVAGERDPAVLAKHRNYRIRASEETIAKSLQGTWKEEHLFCLGQSLALFDTYRTMVAEVDAQLKTMIAPLRLHAAAPLQGKPKRRGKNAPDFDVREALQQWAGVDLTRIGGIDVGTALKVLVELGPDLSRFKTAKHFASWLGLCPGTRISGGKRLSGASKRIPNRVARALKLAAQGLSRSQCGLGAYYRRMAARMGAGKAITATAHKLARLVYAMLTQGTEYVEQSQAQYEERFVDRTFKYLQQKAKAMGYILVAEAAV

SEQ ID NO: 211580 - protein, 341 aa, unidentified
MEQYAGIDVSLECSSVCVVDGTGKIVHEAKVASEPQALIAWFGSLGSGLERIGLEAGPLSQWLFAAMKAAGLAVELLETRHVRKAFEAMPVKSDRNDARGIAQLMRLGWFRPVHCKSISAQETRSLLTARKLVQSKLRDVENSLRGILRGFGLKVGKTTGQKFAGRIEELVTGHPHLQMITKALLTVRAVLRSEFAAFEKQTRRMVQSDKQARLLTSIPAVGPIVALTYASAVDDPARFKSSKQAGAHFGLTPKKYQSGETDYTGRISKIGDASVRTALYEAAHVMLTKPVKGCSQLKSWAMRIKRRAGMSKAKVALARRLAVIMHRMLADGTPFNAAAAA

SEQ ID NO: 211581 - protein, 316 aa, unidentified
MNSTECSVIGIDASKQRLDCCWGRTNSSFHIANTAQVIKAKLVTLRQEQEDLFLVVESTGKYHAVLFRVATELEIPIAIVNPKRIRDFAKALGQLAKTDCIDARIIARYGLTVALEPTKAPSKELQNLRALVTRRTDLVRMVTQERNRLGDIEDSILIKSLKRHIKWLLGECTALEAQIKATLRSAEFASKLSMLRGFKGIGDLSAAALIAYLPELGTLTKSSIAALAGVAPFADDSGSSCKGNRRILGGRSSVRSALYMSALTAARWNPIIKSFYQSLRAAGKPFKVALVAVMRKIIIILNAMLRNNSNFRTVQA

SEQ ID NO: 211582 - protein, 353 aa, unidentified
MVVFVTTDQEASVSEVSTIGLDLAKHVFQVHGADASGKVVFRKRLRREKVLEFFAGKPACVVAMEACSSAHHWARELTRLGHIVRLIPPAYVKPFVKRQKNDAADAEAICEAAQRPTMRFVAVKSETAQANAVVFRARDLLVRQRTQAINALRGHLGEYGLVVAKGPGHVIKLVEHVEDPDSNVPDAARLVLRTLVEALRFLRERIDLLDREIARRARENNEVRRLMSIPGVGPITATALAALAPPADAFRKGRDFAAWVGLTPSQHSTGGKQKLGTTSKMGERTLRRLLIIGASSVVRKALRQGTAAGSWLGRMLARKPRMLVIVALANKMARIAWAVQAKGEVYRAPVVAA

SEQ ID NO: 211583 - protein, 310 aa, unidentified
MEIVVGIDVSKERLDVAILPQEEVFAVGNDHAGIDELVERLKGIGVDAIALEATGGFEMLAVAGLSAAAGLTVLVVNPAQVRAYAHAIGRRAKTDPIDAAVIAAFVLATKPEIRPLRDAETQALSELVARRRQIVQMVVAEENRLRMALAKQAQKSIKRLLKALRRELESLDADLDSHIRKSPVWRVREALLTSVPGVGATTARTLLAELPELGSLDRRQIASLAGLAPWTRQSGKWKGKSFIGGGRGKVRAVLFMAALVASRYNPDLKAFRDRLVAAGKPKIVATVATMRKLLTILNAIIRDGRPWQNA

SEQ ID NO: 211584 - protein, 412 aa, unidentified
MEVVYPCCCGLDVHKKSITACVLWAEAKGKSRKEKKRFGTFTHDLLQLADWLGLCGVTHVAMESTGVYWKPVWNILAEQFEVLLVNAQHIKAVPGRKTDQKDSEWIADLLQHGLLRGSFVPPRPTRELRDLTRYRVSLVQEINRIANRIQKVLEDANIKLASVATDALGASGRAILEAMLAGEQDAGRLAELSKGLLRNKIPELKLALEGRMTEHHRFLLRQLFDHLRFTESKRSDIEQEIDKRMLPFEDKVTRLCTIPGVDRVTAWGMLAEIGMNMNQFPSSGHLASWACLCPGSFESAGKRLSGKMRKGNVSLRRCLSQAAWAISMTKNNYLSALYRRIAARRGAKRAVMAVAHALLVIAYHMLKRKEDYRELGADHFDRIDTNRTRRSLVRRLERLGHKVTLEPLAQTA

SEQ ID NO: 211585 - protein, 432 aa, unidentified
MKAVVERCAGIDVSKKTLNVCVLTGPADEEPEAELGLFGTFNAELDRLKNWLLEKGCQQVVMESTGSYWKPVYAVLEGNGIEVKVANGEDVKARRGHKTDWEDCQFLANLLRHGMIRSSFIPPQGIRDLRDLTRRRRQLSGAAVSERNRVQKVLEESNVKLASVLSDIFGVSGQLMLEKLLEGEPDIEAIAEMAKRKARQKIPEIRQALEGHRLRDHHRRMLRLSLEHIAFLERQISAIDEEVRKLIEREGYQESFDLVRSVPGVQEITAAALLAETGADMSVFPSEGQLSSWIGVAPGNRISAGKNKSGATTRGNRWARTTLVECAWAAAARKDSSLQERFRRLTVKGRKVALIAVAHQLAMILHRTLSSKVPYQDCCRPLLDERKRNRLIRHHVRRLGKLGVTVHSLRPDSPTHHQSSGAKVYDPGTPLF

SEQ ID NO: 211586 - protein, 309 aa, unidentified
MDVIVGIDVSKDRLDVHVLPASDSFFVGNDHAGVDGLVTLLREAKADIVALEATGGYEMLAAAGLSSAGLAVVVVNPAQVRSYAHALGKRAKTDPIDAAVIAAFAAATNPEIRPLRDEESQAFSAMVSRRRQIVQMIAAEENRARMALAKETHKSIRRLLAALRRELESLDGDLDGRIRKSPLWRVREALLTSVPGVGPTTARTLIAEMPELGNLDRRQIASLAGVAPFTRQSGKWRGKSFIGGGRGRVRAVLFMAALVAARHNPVLKAFRDRLVAAGKPRIVAIVATMRKLLTILNAIVRDNKPWQSA

SEQ ID NO: 211587 - protein, 428 aa, unidentified
MNGKEIIRHEKYCQLRKEIRGSEDHMIVGIDVAKDKHYAFFGTATGKTLLKRLIFENNMDGYSRLLARTEAIRVQNCLSKIVFGLEPTGNYHKPLATHLIRCDHNVVLVSGVAVKRNRELLDGRWDKHDTKCAANIADLISQGKCLFYEYPLPDINELRNLLSLRKRLKKEDHSLRMRIRNNLLAKYFPELDRFYGQCETENLAIVRWCLEPGKIAGMEFNKFFQMVTTRERGIAQKQRLRKIHSLSSESVGCPMGQASEFEAQVLVDKLKQVRQVIKKTEDLIKDLSLGLPEYSWMLTIPGFGPYVSSIVLATIGDPFRFNNRKQVLKMSGYDLNANRSGKTSLSAVPVISKKGSSTLRYALYQAALVASTRNSYFINYYTNLLRGREREQGIKTKMRVKLAAKMLIIAWTLMKKKEPFNPNYLNKK

SEQ ID NO: 211588 - protein, 381 aa, unidentified
MGNASTLHVGLDVHKESIAVAYATEDGATAPVPLGAIGTRQCDIDALVRKLQSKSARLVFVYEAGPCGYWLYRYLTRKGLTCFVVAPSLIPRKPGDRVKTDTRDAVTLARLARSGDLTPVYVPAVPDEALRDLARAREDALHDLNAARFRLKALLLRNDVRYAGRANWGAEHLRWLARLVFPTPAQQIVFQEYVRTVTERTELLQRLEAELLEQAKTWRLSPVVEALQALRGVQFTVAITTIAELGDLTRFDTPRQLMSYLGLTPSEYSSGERRRLGGITKAGNRHARRVLIEAAKAYRHRAKVSEQIHARQEHLPTVIRDIAWRAQVRLCGRLPQTARARQAPEHGGRRHRPRAGGLHVGDRQGAAGARVAVVTRTNEPT

SEQ ID NO: 211589 - protein, 427 aa, unidentified
MSYRIAAIDVHKRMLAVVVTDVEGTGEYQFERRKFGATPGELHVLAQWLVELEVEEVVMESTAQYWRPVWGTLELFWRPARQQREGANKKSGTLHLCQAKSNHGPRGRKNDFLDAERMVKRLVAEELVLSFVPDEEQRLLRTVTRRKYQLTRAKIGFKNQLESLLEQGHIKLSSLVSDLLGVSARRMLKALAEGETDAGVLAAMADHQLRATPEQLRDALGASSHLSGAFRRLLKLSLEELQLIEAHIEQLGREAMELLKGHEDVIQRVAEVPGFGPDCAVQMIAEVGLEAAKFLTAKKLSSWVGVCPGNEESAGESQSTRSPKGNRHMRRLLNQAAQSAVKVKGSIFEVTFHRLLPRLGYKQAIWAIAHRLCQLLWLILHKGVRYEERGPAVSAKSKRTRAARMIRELKKLGYRVEGGPIPAAARA

SEQ ID NO: 211590 - protein, 482 aa, unidentified
MKKRTIYTNQSQELLRLFEQVGNSAKVMCVPIDYAKKDHVVMFCNGYGDIVRKPFSVKNSPEGLKYLIDQVTRSCRHRRIRKEHVFFGGEDANSYAENFANTLRSKGWLVAHVNAHDAKKQRQNLQASTDRLDLMGIATMLLNRRANCSPAQTGIYRNLRTLVRHRKKLVVMKTEVRNRVHTVVDRLFPGFLSEKKTSITPFSNSSLYLMENSFSAQQIRRRKHSTLVNILKRYGTAAPEGAAAKLRTYAAQVLTTQNQYAAALQLSLAHHIKLYRCLLDNTEQLEKEIALPLAQSQGAFLTSIKGIGIVLAAGVTAEIGSPFEQRPLNNLTSYSGIIPRVKQSGGPNAQAHTGRVSKRSNHLLKDSVVQSAFHIGHFGPKELSLDYKRRKAAGQHADFGMGRRFLRMAMSLMKTSQIYLPPPLRNEQLRAQERAGYYLAVWPQLRDKWNKVDALKVAFAKHNPLGQWRHIVQELYGIKLKL

SEQ ID NO: 211591 - protein, 400 aa, unidentified
MSLAVGIDVGAYKCAVAVCREGEREAERKVLNITTQRGGFSDLDAWMVQQAAPIDVVVMESSGHYWFNLASHLRRQGYPVAVVNPLQAKYFAKSRMQRSKSDPADARTLAALGTHDQPRISEPLVGAELKEAARFAMRLVREQAQVCQRIQRLVDIGFPELREVWDDPTCVSALAVLRHAPTAAAVTRMHQDRIARLKRPGVGGRVIGPMKAAQLKQLAQTSVAAPELEQQVRFEMRLLIAQHDLFDQQIASADARVASLLDGEVSQRLLSIPGVGPSTAATLMAEIGDIWRFSDVDQLLAYAGVHPKEQSSGQKGANPETSWTMAKTGNTYLRAAAYRMAVVGVQHNPILRAHYARKRAAGKSAMNALGHCMSKSLAIVWGVWRGGKDFDPAHASAGSA

SEQ ID NO: 211592 - protein, 398 aa, unidentified
MLYVGIDVAKSKHDISVIDSTGRIFVKHLQITNNREGFTKLQSTLTNLQKTTGEEVQIALEDTGHYCFNLLRFLRMNGYPTFSYNPLLIKEFAKHHSLRKTKTDKKDAMTIARKLREDIDKQLFEAKTDMIELKYATRNASKIKENCTKQKINYTRLLDILFPELATFLGSPTAKHDSSIYAVLKEFPSPKKLANAHLRKLTNLLSSHSRGRFGKEQALALKELASESVGSESPALEFELLQTIDTIEYFTNQRKLADKEVAKIMDEIDSPILSIPGIGITLGSIILAEIRDIDNFKSPNQLLAYAGCEPSVSTSGTNQVETGHMVKRGSSQLRWALHEAARLMSIWSPSMRLYLDKKRSEGKHYNVAISHVVKKIVRIIFQLLKNNEPYDEEKMIVN

SEQ ID NO: 211593 - protein, 417 aa, unidentified
MNYQTDASPIQRYVGMDVHKHYVMVGGMNRQKEWVLRPRKVRVSGFRSWAERNLKSTDAVVIESTSNAWTIYDIVVPLVSYTVVADPRQVSEIAKAKVKTDKRDIKRLLRLLIADMVPEVWVPPQHVRELRSLISYRWRLNKQITMTKNRLHSVLHQYNLTAPEGGLFRDKNQGWWDEQVFSPMVAIQVEHDLKLLKQLEEHRIAINQELARLSNTEPWDSQMVYLMQIPGFGVILGMIVVSAIGDISRFSHSKKLVGYAGLGAGVHDSGEKHSGKGITKQGRKEFRWAMVEVAWRAVGAYPYWKTQFKTLKKRMHPNQAIVVIARKLLVTVWHILTKQEAYRHASDEDTAYKMLIWSWNMDERALDGLTRQQFAKYGLLRLGVGEHLTRIVRSNLPRRLAPSEEVLALKPELRPPG

SEQ ID NO: 211594 - protein, 357 aa, unidentified
MKERRDYILRNENVFVGLEDSKRTWSLCVRSSGMVVHETSMPARYEVLRNYFNNKFPECHIQVMYEAGFRGFELLDQLVADGWEGVVTPPHTVTDEKCQRKKNDRTDCRRLAKNLENGDYRKCFVPDKTLREDRQVSRTCGQVQADIKRVLNRIRRMLEFHGLDNGLPAGRWSGAAYSRLRQHLAEIEISDSLRFSFEVMFRELEQVRQLKRELLLQMRKLARSDRYKESVRLLMSAPGIGMLTAIRLTLEWGDMSRFGRKEEFASFLGLVPSDYSSGNQEHRGHITKQGNRSVRGWLTESAWVAIRYDPVLLDKYRRVLRNCGSKKKAIVAVARKLALRLRMVLLSGEPYVLGVVE

SEQ ID NO: 211595 - protein, 311 aa, unidentified
MRRSTKYVALDVHQATTVASVREERGRVIARSVLPTEEAALLEFFRGMRGSIHVAMEEGTQAQWLHELLAPRVDRVVVCDRRGQARRGNKGDQVDADQLSEELWRGGLRAVYHGGGRRAALKELTRTYQNLVEDSTRVMLRLKALFRARGIRAPGQRVYQPAGRAEWLARLPEDGARFRAAVLYAELDVLRALRPKAKAAMMAAARRDGSWGLLQSIPFFGPVRVALLLATMQTPWRFRTKRNLWAYAGLAVVSRSSADYQLVAGRPVRRRRAPLTRGLNQNHNRVLKDVFKGAATAATCAPARSRISTRP

SEQ ID NO: 211596 - protein, 369 aa, unidentified
MGEYSEVYVAFDVAKRKHAVAVAESGRSGEVRFIGEIENSGAAIARTLKKLASRHGRLHVCFEAGPTGYGLYREVQALGHACTVVAPALIPRRAGERVKTNRRDAVTLARLHRAGELTGVWVPDAVHEAVRDLVRAREAAADDLRRKRQQLLSFLLRQGHIYSAGGHWTLAHRRWLAQQSFEHQAQQIVFQEGVDAIADAAQRLHRLESQLAIVVPSWSMAPVVAAYQAMRGASFLVAVTFAAEIGDVRRFDTPRQLMSFLGLVPAESSTGDTIRRKGLTLAGNRRARRALIEAAWTYRFPARVSETLRARLDGLPKAIRDIAWKAQIRLCARYRRLSAGGKKLPVIVAAIAREIAAFLWAIGREVAPM

SEQ ID NO: 211597 - protein, 348 aa, unidentified
MVHFVGLDVSVKATSVCVVDDAGKVILEQKVPTDPADIISILTSLGVTYGRIGIEAGPLSQWLVNALTAADLPVICVETRHMKALLTAQQISKTDRNDARGIAQMMRVGLFKPVHVKTLVAQEQRMLLTSRKLLQRKLLDVESDLRGTLRNFGLKVGVVGGSRYEARVRELVEGFPRLAAIVEPLLSVRRVMRQQFAVLHKMLLDMVRGDLVCRRLMTAPGVGAVVALTYRATVDQPQRFVHSRAVGAHVGLTPKRYQSGEIDYDGGVSKCGDALLRTMLYEAAHSLLTRSRKWSWLKAWGVRVAQRRGMRRAIVAVARRLAVVLHRMWVDGSEFHWRKDGAAVPAVA

SEQ ID NO: 211598 - protein, 330 aa, unidentified
MDGTSIQNEVILGVDTHLDTHVGVVINYQGKVIGTLTSIPTNRAGYLKLLTWARSLGNVRRAGVEGTGTYGAGLARLLREQGIEVWEINRPDRAKRRLQGKSDPTDAESAARTVLSGNATATPKLQSGVAEALRTLSVARRSAVKARTQAINQLRSLLISAPDDLRERLWKAKPEQCVTGCAQLRNAESNVLLKTLTATLRLLAKRWLMLSAELKELDATLDRLTSESAKRLRNQFGVGPQTAAILVAVAGDNPERLRNEAALAALCGASPLQASSGKTTRHRLNRGGDRSANNALWTIAMVRMRSEPRIQAYVMRVQHKECQIKKFNAA

SEQ ID NO: 211599 - protein, 359 aa, unidentified
MPSVSPKPTEIIVGVDTHKHQHVAFAIDGLGRVAAEPITIPATGAGYAQLLAWADALGTVHAFGVEGCGSYGIGLARFLRRNGRRLQEVARPVRRGERRKSGKSDAIDAEHAARTILTSTGTATPKLANGPVEALRLIKIARDTAVKAQSMTMITLKAMVVTAPSGLRERIEPLSNRQLVLACSALDSSGAVSDPEVAVRYALGALGRRWLQLHEEIKTHTAHLKELTRASAPELVNTFGVGFDSAAEFLIAAGDNADRIRSEAAFAKLCGACPIPAGSGMTNGRHRLNRGGNRQANASLYRIVIVRMRWHPATMAYVERRTAEGLSKKEIIRCLKRFVAREIYRLLPRPSSASLPKAA

SEQ ID NO: 211600 - protein, 414 aa, unidentified
MRALVERCCGLDVHQDTVVACLLVGEPGKPLRQEVRTWATTTRALEALRDWLQAEKVTHVGMESTGVYWRPIYAVLEGPFVLIVGNARHIKTVPGRKTDVKDAAWIADLVRHGLIAPSYVPPQPLRELRDLLRYRRKLVEGRASERNRLLKLLETANIKLASVMSDVFGVSGLAILKPLVAGETSPERLADLGKGPLRKKRADLVRALEGKVEEHHRFLMGVQLRRLDAADHDIAALNERISERLKPYTAEHALLMQIPGVDGLAAAAIIAEIGVDMAVFLSAHHLAAWAGVCPGNHESAGRSKSGRTRKGNVHLRTILVGAAISAGRCKGTYLRDKYHRLKARRGALRAALAIAHKILIAAYHMLARGVSYRELGEAYLDQLSQTRTAAHLKRRLERLGYHVTLEPKTVAMVT

SEQ ID NO: 211601 - protein, 356 aa, unidentified
MSRDIKYIGMDVHQEAVVIAVLNSSGKLVMESIVETKASSILQFIHGLRGELHVTWEEGTWAAWLYDLLQPQVERVLVCDPRRNALLKEGSKNDKVDARKLADLLRTGMLRPVYHGEHGLRTLRELGRSYQTLSQDLNRVMNRIKALYRGWSIPCAGTQVYAPRYREEWLRKIEHAGVRRRAELLYQQLDGLQQLRRTLRPELLTESRKHKAAKLLRQIPCIGPIRAARLIALMQTPHRFRSKRQLWTYSGLGIETRDSAQYRYVRGELQRTKKPQQIRGLNQNHNHEMKEIFKGAATRASCGVGPLRDFYVALLAKGMRPEMARLTLARKIAAIALTLWKKEERFDAEQLKPQAA

SEQ ID NO: 211602 - protein, 334 aa, unidentified
MQNVALIGIDLGKHSFHIHCQDKSGNALLRKKFTRTKLMQFLVTCPSSVVVMEACAGAHFMARRISDIGHDVKLISPQYVRPFVKSNKNDFIDAEAICEAASRPSMRFVQPRTETQQAMRALHRVRESLIRDKVKTTNQIQGFLLEFGISLPTGDAVIKRLSLVLAEHEIPEYLSRLLMKLHAHYLYLIEQITELESELNQSIKADATAQRIMTIPGVGPITASLLSSQLGDGKQFSCSRDFAASTGLVPRQYSTGGKSTLLGISKRGDKNLRRLLVQCARSFMMRLEHQQGRLAEWVRKQLDNKHSNIVACALANKLARIAWAITVLQKEYQA

SEQ ID NO: 211603 - protein, 355 aa, unidentified
MTSTKYIGMDVHKESISIAVRNAAGKVVMECVIETKASMILQFIDGLRGDLQVTFEEGTSAAWLYDLLKPHVRKLVVCDPRKNKSMREGNQNDKIDARRLAELLRLDHLTPVYHGEHGLRTLKELVRSYLTITKDLGRVMSRVKAIYRSWAIPCTGKQVYAPRHRAEWLGKINEPGVHRRAEFYYQQLDALRVVRQQVRRDLLAESKKHKAWKRLCQIPSIGPIRAAVLLGILQTPHRFRTKRPLWNYGGLAIEMHSSADHRSVDGHLQRSQKNVLVRGLNRNCNHDLKNLFKGAAVIASSKPGPFQEFYAALLAKGMRPEMARLTLARKIATIVLIVWKRGVCFDAQYLKPQTA

SEQ ID NO: 211604 - protein, 337 aa, unidentified
MIVIGVDVHKHSLSAVAVDEVGRQLDCIETSDGEELISWSKRVGRRRLWALEDCRHVTRGLERTLQRQRQHLVRVPPRLTAPERRRGRVRGKSDLIDALAIARAALREPLLDSPRPEEARLRELKLLVDHRDDLVDERRRAQQRLRWHLHELDPSLRVPLGALDRTVWLERLSRQLTRRQQTTQVRIARQLLARCRSLSRSIGELDRELQAQTTTLAPRLLELPGCAALTAAKLLCEIGPIDRFRSDAQLARHAGVAPLDASSGKHQRHRLDRGGNRQLNCALHRIAITQGRVHPPAKTYLERKQAEGKTRREALRCLKRQLARTVYTTLKSELLLT

SEQ ID NO: 211605 - protein, 326 aa, unidentified
MMVIGVDVSKGKLDCAWVRDPQRGKVKTRVFGNRPAEFQALLAWACKQTGEPVEALHFVLEATGVYHEALAYALFEAGARVSVVNPAQVHHFAQSEGARSKTDRRDSVVLARYGIAHQLRPWRPEPPEVRTLKALIGRLIALEKDIQRERNRLEKADVLGLEGPVHTSIETMLTQLTAEHKRLRKEIDKHIRRHPQLQEDRDLLTSIPGIGEVMSRMMVALLRSRDFASAKAVGAYAGLAPMHHQSGTKEKRSTISKAGNSLLRSRLYMATVSATRHNPIIRALYQRLLARRKPKRVALVACMRKLLHLCFGVFKHRTEFQAMPTS

SEQ ID NO: 211606 - protein, 387 aa, unidentified
MAEPPFEVILGVDTHAQVHVAAVLDHLGRLQATLTIPATPAGYRQLLTWAAQHGHLTRAGVEGTGTYGAGLTRCLTRAGVKVIEVDRPNRQRRRRRGKSDPTDAEAAARAVLAGEATATPKTRSGIVESIRVLRVARSSAVKARTQTANQLRDLLVTAPDTLRAQLYPLPTAKRVAQLAAQHPGHGADPAVATRRALWYLARRYQTLTAELDALNADLAALTRRAAPRLLARYGVGVETAGSLLVTAGDNPDRLGSDAALAALCGASPVEASSGKTVRHRLNRGGDRQANNALWVIALTRLRDDPRTLVYAERRTTQGKTTKEIMRCLKRSIARELFPLLKADLHDACQLSLTQELRSVALVPARPRDEAAVLSARVIGSTPAKLRG

SEQ ID NO: 211607 - protein, 340 aa, unidentified
MKVRTLGIDLAKNVFSVHGVDDRGKTAVHRELRRRQLLPFMRQLQPCLVGMEACGGAHYWAREMAKLGHEVRLMSPQFVRPYVKSNKNDARDAEAICEAVGRPTMRFVAIKSQSQQDMMALHRVRSLLIRERTALMNEMRGLLAECGVIAALGASALRRLIATILAEPDDRVSSLLREILSEMNERLRLFEERLKHYDLQIAEFARTDERAGRLMAVQGVGPLTATALIAAVGDARQFRSGRELSAWLGLVPRQHSSGERVMLLGISKRGDRYLRTLLIHGARTTLRHARRKHDPCSRWVVTLRERRGPNIATVALANKNARVLWALLTRGEEYRIPVAA

SEQ ID NO: 211608 - protein, 347 aa, unidentified
MIVFAGLDISLEETHICVVDSNGNTLKELRVPTEPEAIAPVLERLGADIKRVGFEASSLSPWLFKELTERGLPAVVVEARHMAGALSAMRNKTDRNDARGLAQMMRTGWFRQVYVKSDESHRYRVILANRRMLKRKFLDIENAIRGTLKVFGVKMTRTTRGRFEDDLRERLQEEDPILREVTECMLLARRTLLAEFQKCHKLLMDIARSDEVCRRFMTVPGVGPVTALSFKCCIDDPARFRRSKTVGAHLGLTPKRYQSGSVDFNSRVSKCGDANMRWLLVEAANSMLTHVRSWSVLKAWGKGLQKRLGHKRAAVALARKISVILHRMWVDGSEFIGSREGLQARIA

SEQ ID NO: 211609 - protein, 391 aa, unidentified
MVCVGIDVAKDKHDCCILDSDGMVRADCFTIPNNMDGFKQLLQTIRNCTKKSDKIKVGLEATGHYSYNILGFLLDNDLAVYVMNPLHTNLYRKSLSLRKTKTDRVDARTIATMLLSDVDLKSYTDTAYHNEELKSLTRYRFDKVRERAKLKQSVSRLVTILFPELEKLVPSLHGVSVYALLSEYPGAKQISEAHLTKLTNLLSIASKGHYGKEKAIQIREAAKSSIGSVMPAKSLELKHTIKLIKELTSEIDEIEDSILQIMDELHPPILSIPGVGIQSAAMILAEIGDFSNFESPDKILAYAGCSPSTYQSGKLTNCYAHMEKRGSRYLRYALYNATKYVCHWNPVFAKYLAKKRAEGKHYNVALSHATKKLVRLIYALQKSGKVYLTAA

SEQ ID NO: 211610 - protein, 344 aa, unidentified
MVTTIGIDPHKATHTAVAIDESESVLGELTVPADRYQTTRLLDWAGRLNGNGRIWAVEAAGGLGYLLSQQLVVSGEEVIDVPPVLASRVRVLSSGKSDKNDPNDARSVAIAALRQPGLARVLREDHVQVLRILAKRHLELTSLRTQAVCRLHSVLVQLRPGGIPARVSPNRASQLLRNMRTLDYVSEQRRAYARRHLADIRRLDRDIKANKTMIKRAVTVSGTSVTDVYGVGPIVAAFLIGYTGDIGRFATADHYAAYNGTAPIEYSSGGKTRHRLSLRGNRKLNHAIHMAAVTQIRFDTPGRRYFDKKLAEGKTKKEALRALKRRISDVVYRRLVADQQRVAS

SEQ ID NO: 211611 - protein, 381 aa, unidentified
MIKEKKKSVRIRQNMNSDSLIAGIDLGDSTSLATILTATGDIADRFCFQMNDQGYTLFTNKVPRDARLAFEATSTAYPFFRMLKGRGYNDVTVAHPTELAWIVRSKKKNDRADSLKIAKLHLAGLLPESHLLPQMEQIERDLLIQRVKLGSEIGRIKSRIISYLKREGVYGHLPKSKDNFSARRRAAIASLRFNDDRDLVLKTMIDRLEFMERQCEPLEQRIKENARDNRYVRILMSIPGIDYYLASLYASYIGDPHRFPSFDHVASFLGIIPESKDSANVRRRGRMSKDGPPIARWGLGIMTDTVMLYNPNIKAYYARVKARTGRGSYAHVLTMKKLARMIHHMMITEQNYKWENEALTEAKISRLGTDADAAGGESSSA

SEQ ID NO: 211612 - protein, 391 aa, unidentified
MPQSNDLSRSLTALDQDSTLIAVVEMSQSSWLVGAIIPGVERRPAKKLEASEGMLLALLHRWRDEAAKAGCTIDRITVAFEAGRDGFWLARWLRQRGIEAHVIHATSIAVSREHRRAKTDRLDAALLQRAFLGWLRGERGHCTMVAIASLAEEDAKRPSREREALVGERTRIGNRMKSTLARLGIRGIRPGLRKTAERLEQLRTPEGAPLPPNTLAELRRDLARLRLINDQIGEIEAARLERLRQQPDEARHPMILLLARVIGIGIETADMLVQEVLSRKLRDRRAVARYGGLTGSPEESGARRREKGLARAGNARVRRGMLQLAWRFLMFQKDSALAQWYRARTADARGATRKTMIVALARKLLVALWKLVTTGELPNGVVLRPAIQAAL

SEQ ID NO: 211613 - protein, 423 aa, unidentified
MMKLKYPICCGLDVHKNVIVATIVITNRDGVSEYRQKSFSTINPDIQKFHNWLIENNCYHVCMESTGKYWIPIFNYLEKDIEVCLTHPKYVKAIKGKKTDKKDSKWIADLYKFDLVRCSFIPPKDFRQLRELARYRFKLVCMKSSEKNRIQNCMTVSNVGIASVLSDPFGKTATEIMSYLLEHTADSIDEKAVRKLIKKGAKAKSDEIIEAIRGCNIETDQAKKLELALGHLEYLDGMITQTEVELYVRIKPYYEFVEFVSTMPGMTELSSTIVLAETGVDMNIFDDARHLCSWCGLSPSNNESAGKKKSVRIAKAGAYLKPMMVQCALAAIKNKKQPYFAIKYGRIKKRRGHKKAIIAIARMMMVCIYHMVSEKKPFTPADYEELMKPQNHVERVVLNENNVFAYLESLGYDSSKLVKRNDN

SEQ ID NO: 211614 - protein, 349 aa, unidentified
MSQNLNSAVAVIGIDIGKNSFHVVGLDDRGAIVLRQKWSRGQIEARLANMPPCLIGMEACVGAHHLSRKLKALGHDARLMPAKYVRPYSKGQKNDFRDAEAIAEAVQRPTMKFVATKTADQLDLQALHRVRERLVSQRTGIINQIRAFLLERGVAVRQGLRFLRAELPRILATPPDVLSARMVQVISDLAEDWRRLDHRIDDLSNQIAVLARQDAGCERLMSVPGIGPIISSAMVAAIGTGDAFSKGRDFAAWLGLVPKQISTGDRTILGKISKRGNRYLRVLFVQAAWVVLIKSMSWDRHGLKHWIEAAKKRLHRNVLAIALANKLARIAWGVLSGSRTFEVSKLQAA

SEQ ID NO: 211615 - protein, 423 aa, unidentified
MEVMHERVAGLDVHKAMIVACVRIMAGGKISRECRTFETSTAGLEALLGWLTQSGCTDVAMEATGVYWKPVWNILSDGEFKLIVANAAHIKNGPGRKTDVNDAMWIADLVACGLIKASFVPEQEIQELRSLLRARKQLTREQTSHIQRIQKTLEEANIKLDSVISDILGVSGRRMIEAMIAGVRSPLRLAELADRRLKVSPKALYDALHGRLTDHHRFMLELYLGQHDALSGAIARLDQAVEALIARMDEEVAAGQATFLSLIMLLCTIPGVSILSATVILSEIGRDMSRFPTAGHLLAWAGLCPGQNESAGKPKSSRLRKGAPWLKTMLVQCAWAASRRKDSYYKAQFNRLRSKRGPKKAICAVAASMLTAIYHMLKDGTLHQDLGADHFDRRSTEVKAKRLVAQLTKLGFQVELQPLPKAA

SEQ ID NO: 211616 - protein, 323 aa, unidentified
MVYLGIDVGKADFHCALLSDGRSKPNSFPNSQKGFERLRSWLRNRGVDRVHACLEATGGWSEELALFLQEQGHVVSLVNPMAIKSFGQSELSRTKTDKADAALIARYCSAMQPRLWEPPSPSQRRLQRLGRRRTALVEMRTQEHNRLEGPGIAEVRDSLEKSIAFLESQIADIDREIASVISNDPDLRNKRDLLESIPGIGERFASTLLGELPQLTEFRNGKALAAFVGLCPREFRSGSSVSTSWLSKMGNPHVRRVLYMPAISAMRCNPILKDFSARLRARGKRTKQIIAAVMRRMLVLAYGVLKSGRPFIAVPALDNGHGI

SEQ ID NO: 211617 - protein, 360 aa, unidentified
MRLQEYGRNPNKRKEYVHQPDLLLVGVDVSKAKHSACLGTQTTVSCRQLAFTHTREGFRRFEQTLRAHLVKNKCQRMLIAMEPSGIYWQALYERLKSCGYGGCLVHCQAVRNNRKTMPDGTSKTDEKDAYSIFDLLRQGKFFLPVDRDPELQAAYRLMRRHMALKKRVSQLRNHLRAAIHLTFPELNPLVKDLTQPTALRFLQVNPTPTSILRNGQRHFLETWQPRSRCGQWRPEKFQQLYDLAQHSIGLSDPYGIDEFEITALAHDLADALAKQQLWLAKAIALLAPRTDCQVLMQLPRIGQPTATAILTAIGDLSTYTNGKQLVKLAGLDIRLFESGSSIRKLPKISHVGSAYLRYWL

SEQ ID NO: 211618 - protein, 357 aa, unidentified
MRIIGCDLHTRQETMAMLDTETGEVVEKTLQHEGEKVREFYSALPRPVQVGIEATGSMLWFLNLMEELGIDSQVGHPAKIRAAEPRKQKHDRRDADLLLKLLMENRFPSIWMPSKELRDLRALLWHRHHWVRTRTRVQNALQAMALTNGLRRGKSLWSQEGQHAIASLPLGPHAAHRRTALQALYRELDADIKALDKRVLEQALERPEARRLMTHPGVGPVTALATDVFLGDPVRFEDAKALASYVGMIPSEYSSAGRQRLGGLSKQGNPLLRFLWCEAAIHAVRRDPLLQRFYRRKLVQKGMGKARVAVARKLGIRLYIMLRDQIDYEEFCRRGQMRQKNGAARAGIPEVGYGPSL

SEQ ID NO: 211619 - protein, 339 aa, unidentified
MAIVVGFDIHREQVTFDALDDVTGEVRRGRIAPADRLSVRRFLASLPAEQIDVALEATTGWRFIVEELLAAGASPHLAEPAETANLRGRKARAKTDRADARHLRELLQQGRLPEAWAPPQEILELRQRVRLRKTLIDERTAWQQRIHALLFHHGIPRPRTLLTREGRASLAKLELSPSARETLEVALAMIDACDVQLAPLDRALHRYARHQTGCVALMGMFGVGPLTSAAILAELGDARRFSSSRHAVRFAGLDITVYSSDARRSPGRLSRQGSTVLRWAVYEAAQTAARPGSPDHAYYLTLAARLGKSRAKLALSRKLLRRAHHILPELGDAALCPAT

SEQ ID NO: 211620 - protein, 352 aa, unidentified
MTRITTIGLDLAKKVFQVHGVDAEGKVVVARKLRRKEVLAFFAKLPPCLIGMEACGSAHYWAREIIKLGHTVKLMPPKYVKAYVKRGKTDAGDAAAICEAVTRPNMSFVPVKGLEQQGLSMLHSARSQLIGQRTQLINGVRGHLSELGVIAARGLLGFAELAAIVRDKSDRRLPMTARAALMVLVRQIEMISTEIAALDSTLRKENKASELGPRLETIPSVGPVIASAFRARVTDPALFKNGRHLSAWIGVVPENDSTGGKVKQKGLSKKGDRYLRSLLVNGAMAVVRQAQRRPDKHPLVAKLLGRMSAKQVAIAIANRTARIAWVLMVHGGVYEAGHRAPQYRAQACAAAG

SEQ ID NO: 211621 - protein, 418 aa, unidentified
MAMKIVRFNCCGMDVHKNLVVATIGITDRKTNITEYFQRSFSTLNSDLYRLKDWLRSHHCSDVCMESTGKYWIPIFNILEDEINVRLTHPKYVKAIKGKKTDKKDSKWICDLFKHDLIKFSFIPPKEIRELREIARYRYKLVCMRSSERNRYQNCMTVSNVGLASVVSDPFGKTASNIMKEVMKSNVIDDDKILKLVHKNCKNKDKILDSLHGYRIESDQRFKMEKSLDHMEYLDQLIDSCEVELIKRAYPFRRSFQHITQIKGISALSAILIISEIGIDMSQFGSDKQLVSWAGLSPANNESAGKKKSVRISKAGQYLKPLLVQCALSAIKDKTSYFGRKYSNIKKRRGHKKAIIAIARMMLVSIYHMILTGEEFQPCDYESFMDPKPNANPSLTVEKALNFLKQSGIDISSIPINL

SEQ ID NO: 211622 - protein, 453 aa, unidentified
MKKLPMGIVNPNAAGIDIGSRFHMVAVNQNVDDVKEFGVYTEEHEAMIIWLKENSITTIAMESTGSYWQTLFSALQRAGFEVILVNGQHTKNLKGRKTDVQDCMWIQKLHSLGLLNGSCLPGEYVERLRTYYNHRQHLIEHCSKYVNKMQKALRLMNIRLDVVLNDITGKSGRAILDAILSGEREPMVLASLANIWVKKSKEEIAKSLHGNWREDLTFELQECLSLYDIYCEKLSFCDKEFDKVLQSVKSIDMRLPIAVPSGRVVRDRSKHAPVFNVRELAYMHLGVDLFDIKGVSHNTVLCVMSNMSREEIKKFPTVKNFTSWLRLAPNNKKTGGKIISSRTPKGKNQIALALRQAANSIGNQKDHPLTHFFKRIAYKKGRVAAITATARKLAVIIYHMITKQQAYQPINSEEIITRIKKHQISNIKQRLNKLNLLQDELNDIVRSVSLSAN

SEQ ID NO: 211623 - protein, 349 aa, unidentified
MLYVGLDLSRKRLDFDARLAGGQLFERGAVPPDADGLAGLVRRLGDAEVVAVIESMNGARFVHDRLELAGWDVRIADALKAKGLAPLACKTDKIDAWVLAELGRLSLVPEIWLPDPAVRAERERARFRLHLVRHRTALKNRVHAILIAHGIPTPSSDLFGVGGRRLLERLALPEPWRSTTAASLALIDALDEQIDACERELRRLGADHRYVPRLITCPGVAWILAFTIASEIGDIARFPTPTKLIGYTGLTPKVEQSGDSDRRGPLRKNGPNHLRWALVEAAHTASRHPLYQPILERNRARHGRKRGSKLAALTIARKLTQAIWHMLTNDQPFAPAGARTSLAASTAQN

SEQ ID NO: 211624 - protein, 344 aa, unidentified
MGEVITIGLDIAKSVFQVHGVDEAGAVVVRKRISRAKMLEFFGGLQPCLVGIEACPAAHHWGRELQALGHTVRLMPPSYVKAYLKRSKNDANDAAAICEAVTRPSMRFVALKTKEQQAALMLHRARQLLVRQRTMLSNAIRGHLAELGIVSAKGRNGTGALLEIIADAGDSRVPAVARGILDVLARQYSALGAELGSIDRSILAWHRSCEASRRLEEIPGIGPIVATALVAEIGDWKAFGSGRSLAAWIGLVPRQQSTGGKDKLGSITKQGNRYLRWLLVAGAMAVIRYAQKHGTLKRPWLGRLMARRPTKVAAAALANKIARMAWAIIVRGDRYREPTPLPAA

SEQ ID NO: 211625 - protein, 318 aa, unidentified
MPQKKRVVGIDVAKTKVDACIRSASLRLMVPSTPEGEAELAAWLRANRVCCAVMEASGGYERRWAEALRAAGVAVRIVDPKRVRHFAKAAGRLAKNDPIDAETIARFAETFPEGEAEPHDPARDEIARLVQARAAVKDVEDRLVQQREHRPPPIVAQAIGAILKTRRVERRRLEASIAAKIKANPAFAERARIVASAPGLADLSAAGVISWMPELGRISNEAAAALLGAAPYDDDSGERKGARRIKGGRRKLRTLLYMPVMGAATRHNPVLKAYYQRLIARGKEPKVAIIACMRKLIVILNTMLARNETWRPPQGEAA

SEQ ID NO: 211626 - protein, 345 aa, unidentified
MEISTIGIDLGKTVFHFVGLNARGEVVVRKKGSRTQLLRFTSNIRGCLIGMEACGGAHFLGRALREQGHDARLMPAQYVKPYVKTNKNDYIDAEACAEAVTRPTMRFVPIKTDDQLDLQSLHRVRERWVVRRTAVINQIRGMLLERGITIRKGRLHIEEALPGILEDPDNKLSGALRVLLTQLRSEMQYLHGQIEETDKLIARICGELEQCRRLVAIPGIGPITATATVAAIGNGAAFKKGRGFSAWLGVVPGERSTGGKQKLTGTSRRGNKYLRKLFVQGAHTVLLQKTKQSSGLSTWLVNLTSRKRKQVATVALANKMARMAWAVLFKGQAYRPPTVPQVIAA

SEQ ID NO: 211627 - protein, 416 aa, unidentified
MYYVGIDIAKTFHVVTIIDDIEVKVFKKAFRVENEIDGYISFIEKLKTVSIDKTNFLIGIEATGIYGENLLEFLMSKGYNVKLLNPFQTSRYREQTTMKKVKNDNIDSLMIALFLKDGKYSEGYVTNDEYQSLRTLYRNRTTIQDDMKDVKKRILTNLAVTFPEFEYIVNPFTNIGLALLDKYPTAEHYKHSSVDRIVKVFRHIKGNNFNNDKAIQILEASKQSVYSGKAKDARAIAIRSSIRLLQMYLQEIEMLEQEIFTLLEKQNISTEKFEEDMKADDKTTTLIDNLKSIPGVAEKTIAAIISECGDLTRFPNTAKFIGYLGLFPTENSSGNSTKTGHLSKRGSSIAKHALYMSSVSCMLHNSQLKQLYDTKKSQGKSKKEALIAVSRKLATIIYAIFKYNIPYNPNRVFAKS

SEQ ID NO: 211628 - protein, 325 aa, unidentified
MHYIGIDISKAKLDCCWLRDVDKSKFKTKVFKNISTDYKVLMAWLIAQTKSEASEILIVMEATGIYHENLAYYLYEQGFQVCVVNPARTKEFALSLGNTHKTDTKDSQILAIYCQRMRPECWQPEPPEARELKALIARLEALEMDLNRETNRLEKADFSCSSERVIESLHLMIERLRVEKNRLEQDIDDHIDRHPQLKKDRELMESIPGVGPVISRLMLYVLHCRSFTNAGQVAAYLGLVPRIQQSGQWKGRSRLSKQGPAKIRAKLYMAAVSCLKHNPDIQHQCQRLVENGKSKMQALCAGMRKLVQICFGVVKHQSEYRPQSA

SEQ ID NO: 211629 - protein, 409 aa, unidentified
MRVFCGIDWAETHHDVAVVDAEGRLLARRRIRDDAAGYQQLLQLLAEAGDTATEPIPVAIETSRGLLVAFLRATSRRVYAINPWPCTGYRDRHGVAGAKSDHADAVVLAGILRTDAAAHRPLPADSELVQAIAVLARAQQDAVWSRQQLANQLRSLLREFFPAALAAFHRKHVGLTAPEARAVLAAAPTPTQAASLTTAQLRRLLRCAGRQRNLDAWTKRLRASFHADQPRQLPLVEQAMGQQVLALLAQLQAACQAADDLAEATVAQFRRHPDYQIITSFPGLGELTGARVLAELGDDRSRFADARGVKAYAGAAPVTRASGKRLQVLARKVKNQRLAAVGYVWAFAALTASPGARAHYDRRKHAGDRHAAAQRNLFNRLLGMLHHCLATRQTYSEAKAFPAPEALAA

SEQ ID NO: 211630 - protein, 441 aa, unidentified
MRVMYERCCGLDIHKASITVCALITEKGKTQEETRRFGTMTADLRELAGWLQQKGIRHVAMESTGVYWKPVWNILEPAGFELLLANAQEVKIVPGRKTDQKDSQWIADLHKHGLLRNSFVPPRAIRDLRDLTRARAILTQEHTSVCNRIQKVLEDANIKLRSVASDVFGASGRAILRALMKEENDPEALANLSKGKLRNKIPQLRRALEGQVTAHHRALITGHWNRMEFLEHQIADLETQIAERMKPTPAEMAPAMQNAWEDAPVPLSPREEAIQLWMEIPGLSWTSACSMVAELGVNMDQFPTAAHAASWAALCPGNNESAGKRLSGKTRKGNIWLRRTMCEVAWAASHTNDSYFAAQFHRIASRRGRKRALMAVAHSILVTAYSMLKHKRHYKELGAGFFDEINRDKVRDRLVQRLAKLGFDVTLESKGAVESAADVTE

SEQ ID NO: 211631 - protein, 476 aa, unidentified
MPRKPSSRPDLVALPQLSHETLYVGVDVGKRAHVAGFLSSTLLTRHQRFEHCPALAFDNSREGFRSLLDRIQTYVPPTQVQALLEVTGHYHRALLQYLQEVDIPVYVIHVQKRQEGLLKTDKRDALGLANLLYNQLEKGIQVGDPLQAVRRLVSPTEAAAQLRGMVQHHYELVAESTQRKNKLTAICDELFPEFTRLLRDPNLPTALALRSHFPTPATLAAASFWELRQARGRTCSVSDAKLVELQRLAGQSIGTKDPARVRGLVFEQKQLITELKLIAEHLQQLETEMIQVVEHCREGKILTSLPGIGPQAAAALIATIGTIANFERAAQLKSYFGWVPKVAQSGSSLDWTRLSPRGVRQMKQTMYLIVWRAIQWDAEWKQMYERLISSKCRYDERTRRLIGREKVIGRLAGQMTSVIYALLKQDLELLAHLAPGAEPPEPQLYDPEIHRQHRMGQYQPRGAAGKPPQVLQLPSA

SEQ ID NO: 211632 - protein, 415 aa, unidentified
MEGLQPLHRRVAGIDVHRMLHVATVVLEQPDGSIEQTSRQFGGFRRDCRALAAWLAELRVELVVMESTGIYWKSVHAHLENAGITAWVVNAHFIKHVPGRKTDMSDSQWLAVLARFGLVRASFIPPKDLRELRLVSRYRRKLTQMHSAEINRLHKVLDDGSIKLGGVVSDINGVSATAMVKGLIEGQPIASLLGLARGALKLKRDDLQAALDGDLSARHLFVLKHIHAHTQSLQRELAEIDAYLLAAMQPYALAHGLLQTIPGIDQIAAALILIEIGDDMGRFGCAERLASWAALCPGNNESAGKRKSGRTRHGNGVIRYILCECANAARWTKSTLAAKYRSLMVRKSHKKAIVAVAHKMIRLIYVLLTRKQAYLDQQIDYAAMSAKKNAPRWIKQLKLIGKWPAPKSGLATASA

SEQ ID NO: 211633 - protein, 331 aa, unidentified
MNMHVGLDVGSRTTAMGWRNGGRFAGQCNIDQTPAGRKAAVGKLLELKPMSVVMEATGIYYLDLAMELAAAGLPVSVINPKSFHNFAKLMLKNSKTDAIDAQLLAEYGERMSPRLWTPPTSIQLELRAIGRHINRLTGHRTRAKNELHALKATQTTLLMLIEDEEEAINAFDKRIERFRLAGRALIDNCPTLSAQFAHMIAAPGMGEISVFAALAELTTLPVTLKSAQVSRYAGLDVRLTQSGTSIDKPGRISKGGNAYLRSAMYMPALTAIRCDPNVKAFYEALVARGKRKMQAIVAVMRKYLTGLWACMRAGEDFSTAKLFSGKHTQKA

SEQ ID NO: 211634 - protein, 359 aa, unidentified
MARTNLTRLAEVLDNGNSLSHHVGIDVHKRSYHLAFRREDGFLHTFVSPADPQFLITKLMQTGINVARIVYEAGPTGFGLARALGVVGYKVAVVAPSRVPRPVTAGAKTDRLDCIRLAEYSARDMIQGIAVPTEVEEAERSVIRRRHDLTDSIRRVKQRIRSLLLFSGIPEPDQLKNWSKKSAPALLKLPMLAGAKMTLRSLVRELIFLEKEKKQIERQLEHISSQARHSKEISCLQSVQGVGAITAATFRLELFDPERFQNVGEVVSLLGLAPMVRQSGEGKARGKLRPVGQKRLRSLLIEAAWGWKSRDSAAAARYGKVLARCGTPQKAICALARHLAGILWRLLVEKRHYEIRQMA

SEQ ID NO: 211635 - protein, 347 aa, unidentified
MGKSITDLSSVTTVGLDLAKHVFQVHGVDASGRVIVAKALRRKDVLAFFAQLPECLVGMEACGSAHHWARELIKLGHDARMMPPAYVKPYVRRQKNDAADAAGICEAVTRPSMRFVGVRTLENQAALMHHKLREMLVAQRTQLINALRGHLAEIGVIAAQGLKNARELAWVILAEGDETIPACVRAALAPLVRQLHALDQELARSDQTIAAMARDDEMARRLMTIPGLGPVTAAAMATSVQDVSVFSGPREFAAFLGLTPRQNSSGGKERLGRVSKMGNRYLRKLLVVGAHAVLYHRKPHDDALRSWAKKLMQTKPFKLVAVALANKMARIAFAIMLGKTSYSAAPA

SEQ ID NO: 211636 - protein, 419 aa, unidentified
MAFKILRRNCCGLDVHKTWIFACIGITDANGRTEYKQARFSSFSNGLRELAGWLTKHSCADVCMESTGKYWIPVFNILEKTCWVTLAHPKYTKPQKGNKTDRKDAKWICDLYMCDMVKPSFIPPADIRQLRDLMRYRTKLTNMLTSEKNRALNCLTVSNLKLDDVFSNVFGKSSRSIVQHILEHPGEQFDVAPFLDRRCKHSVEDVQAAVDGAMSREQAAKRRECLLHIDQLNGHRETIETEILRLAQPYSHQLELLRTVPGFSAAPLTAVALISEIGVDMSVFPSAKHLASWAGCCPRNDQSNNKVKSTRISRAGCYLKPLLVQIANAVIKSDKYPECKERYRRIKARRGHKKAIIAICRMLLTAIWNVLSKLEPYSAKGYLEDKLTEHSVVISKSQGLELLRKRGYIFKDEVSADSG

SEQ ID NO: 211637 - protein, 408 aa, unidentified
MQAIHERCCGLDVHKETVVACILTPEGKEIQSFSAMTNGLLKLADWLSERGVTHVAMESTGVYWKPVYNLLEGDFEAMVVNAQHIKAVPGRKTDVKDAEWIAKLLQHGLIRGSFIPDRPQRELREVVRYRRSIIRQRAQVVNRIQKVLEGANIKLSNVATDVVGASGKAMLKAMINGTEDPKVLAEMAKGRLRKKRPELEEALKGLISAHQRMMLESLLRHLDFLDKEISQLDEEVEQRMRPFEETIRRISEMPGMGRRNAEEVLAEIGSDMSRFPSANHLASWARMCPGNNESAGKRLSGRIGHANSWLRSALVEAAWSASRTKETYFSAQYHRLASRRGRKKAIIAVGHTILVDIYHIIHDKTDYRDLGANYFDKRKSSFVIHNAMRRIEQLGFKVTLEPAQALFS

SEQ ID NO: 211638 - protein, 309 aa, unidentified
MKTTSIEVGVDLGKETFDACLSGSVRTWPNSPSGIRRFLDHLATLDRPVRVSCEATGGYTRRLVLACLHRTIPIALLNARNVRAFARATGCLAKTDRIDAGIIARYAETFDPPVLDPSWEREERLRQFHQRLDALIDARARCRTSLEFYDDPEIRAEINREIAALGKRIETYQARIDHHIAEDQEMSRKREILRRTTGVGPAVSTTLLVTFPELGTLNRKQAAALAGLAPMNRDSGAARGRRTIQAGRSKPRKALYMAALTAAHRNPMFAPQYKQFIDRGKPVKVALCAIARKLLVYLNTQLKMELQKT

SEQ ID NO: 211639 - protein, 409 aa, unidentified
MKHVIALDVSMGKSYVVLYNALKKCEKEMELIHNRPSFNQLAVLINDLTDGYGEQPHIVFEATGVYSRPVERFMRDHGFTYCLLNPLEAKLQGDSLRMHKTDRGDAHQLALTHFTNLRRQKTESHDIYHQLNQLSRHYDELEDELSVVRNRLHKTLQETFPEIESVFTSKSGQFLNVVQLFPHPDFLLMHSKTVIKNRLIANTEKRISSKKAEEKAIQLLEVANNSYPAAHATDVACDHARIYARRFQELLYQKDACIQQMVSMSEPLEEFHILKSIPSIGDNTAVRIIGEIGDIRRFTTHKQVNAYCGIDIRRYQSGKFLAKDKINKRGNAHLRRLLYIVISNMIKSQRLSPNHVVDYYYKLKKQPNNKCHKVAVVACMNRLLKTIYFLITQNKLYDYGLAPDIVVPK

SEQ ID NO: 211640 - protein, 353 aa, unidentified
MRRPKDKLIAGLDLHSNNVMIGVINQDGKRVAHRKLGCDLSEVVGFLKPLKPQLQSMAVESTFNWYWLVDGLRAQGYSIDLANPAKIAQYSGMKHVDDKDDAFHLADLQRLNILPKAHVYDPELRPVRDLLRRRTNLVHQHTALLLSFSSLYTRTTGQKLDVGEAKKMEPKQAPKLYEHPANQLIAQVQAEHIQALAKSIRRVEKAVLACAQEIPLYDKLLTIPGIGRILGMTITMEVGDVKRFQTDGDFASYCRMVDAKRLSNGKCKGANNQKCGNKYLAWAFVEAANFARRYDESCRRWYDRKAAKAGKIIATKALGCKLAKAAWHVMAQQCNYDEKRMFPELANKPMKTS

SEQ ID NO: 211641 - protein, 340 aa, unidentified
MGTVTTIGLDLAKNVFQVHGVDADGVAVLRQRLTRSRLLKFFAKLPPCLIGIEACASSHFWARQLIALGHDVKLMPAQYVKPYVKRGKNDAADAEAICEAVTRPTMRFVGIKSPEQQSAMMLHRVRLILNRQRTQLSNALRAHIAEFGIVAPIGRNGIDQLLDIVADTNDARLPAEVRTCLDMLAAQLRIVKEQILENDRRIMASARETEIGRRLMEIPGVGPLLASAIVATVPDPSIFRSGRDLAAWIGLVPRQNSSGGKERLGGITKAGHRYLRQMLIVGAIAVIRFAERHKSKRPWLVQLLARKKVKVAAVALANKNARMIWAMMTNGERYREPQIV

SEQ ID NO: 211642 - protein, 454 aa, unidentified
MEHQLAQRNRGFSRAGIEVTHPNAAGVDVGGATHYAADYAAVRPDIDEPVRSFNCYTADLHAMADWFELCGVTIVAMEATGVYWIPLYEVLERRGFKVLLVNARQTKNVSGRKSDVLDCQWLQQLLTFGLLRGAFRPADHMCALRALCRQRARLLRDQGRYVQHMHKAMTLMNLQLSNAISDVAGVTGQKIVRAIVAGERDPQVLAAYRDCRIKATEEEIAASLLGNWRDEHLFALKQALAAFDFCGSQLAECDAEVERAMTLLHAHEGSPPARGRRSRNRNAPKFNLHEHLFKLCGVDLTRIDGIDVTTAMTILSEIGTDMSRFQTVKHFTSWLGLCPGTKISGGKVLDAASKRCRNRATQAFKLAAVALRSSRSALGAYYRRMCARMDKAKAVTAAAHKLARMVYLLLTRGQEYVDQGQQYDEERYRERVVRGLAKKAADLGMQLVPAVAHA

SEQ ID NO: 211643 - protein, 338 aa, unidentified
MQGWATKEDGMTSAQVFVGIDVSKAQLDVALRPEGRLSAPNDDAGHAQILERLRAVAPTLVVLEATGGLEIPITGILAAAGVPVVVVNPRQVRDFAKATGRLAKTDALDAQILAHFAEVLRPTLRPLPDAQTQVLAAILARRRQLVEMLTAEKNRLGSASTPVRTSLRTHITWLERELQHTNTHLADAIHQSPVWREKDELLQSVPGIGPVATSTLLANLPELGTLTGKQIAALVGVAPLNRDSGTWRGTRTVWGGRAQVRAILYMSALVATRFNPVIRAFYQRLCAAGKAKKVALTACMRKLLTILNAMLKHRTRWAHPTGEAEAVRDGQLSPSGGY

SEQ ID NO: 211644 - protein, 419 aa, unidentified
MAFKIFRKNCCGLDVHKTWIYACIGITDTNGRTEYKQARFSSFSKGLKELADWLAKYSCTDVCMESTGKYWIPVFNILEKTCFVTLAHPKYTKPQKGNKTDRKDAKWICDLFMCDMIKPSFIPPADIRQLRDLVRYRSKLTNILTGEKNRALNCLTVSNLKLDDVFSDVFGKSSRSIISYILEHPGQSFDVSTFVDRRCKKPIEEIQAAVDGAVSHEQATKLKECLNHIDEIRTHRQNIEFEIQHLAEPYAYALELLRTVPGLNSNPITAISVISEIGVDMSVFPTSKHLVSWAGCCPRNDKSDSKIKSTRISRAGTYLKPLLVQIANAVIRSDKHPEFKERYRRLKARRGHKKAIIAICRMLLTAIWNILSKLEPYSPNGYLNDKLTEHSVVISKSEGLALLRKRGYIFKDEVVSSSP

SEQ ID NO: 211645 - protein, 478 aa, unidentified
MNGKGRKAKNQANINNSINVLSQEEIGRRIAAVEADMKASTWKDLEVGGKFDKNAKLTFISDDMLIVGCDIGSETHYMRAIDTRGRELSKDAFSFSNNAEGFSSAKAWAMQIAAEHGKKQIVLGLEPTGHYWFCLTAWMITNGVSVVQVNPYAVKQTKELEDNSQLKDDRKDPKLIANLVKDGNYGMPYLPEDVYAELRRLSMLRDQLTEDRIRYVNRLHREMKIYFPEYMDAFGKLDGVFTLMILKKAPFPADILELGADGLREIWSEAKLRGRGYSRAEHIVKFASESVGLKHGTGGSKEAVRCFVEQILYLTAKLDEIEENLHQKCREIPYAENLLEIEGIGENILAGILAEMGDVRRFDDVKETQKLSGLGLVACSSGKHKGETKISHRGRKRLRYWLFQAARSAVSHAEEFKTLHVYYTTRPDNPLKKMQSLIVIACKILRVIFAILRTGQKYDPAKMLRDIKHPSVAAVQAA

SEQ ID NO: 211646 - protein, 409 aa, unidentified
MEQKVCGIDVHRDLLVATILDQDNHKQTQTFQNNTTNMQQLKQWLKTNNCIDLAMESTGSYWTTLYITLEDASLKPILANAHQVKAIPGRKTDQRDSEWLAYLHRSNLIRPSYVPTKPIRELRELARTRVRYVESRTQYKNRCQKILSKNNMRLSSVLSDIFGKSDKELLKGLMKGKTVEGILKTTESKRLKKRKQEIIDVARGSLSEIDMFLLKEMEQTIDALTVQIHNIERCMDELVDKAALEIICSVPGVGRLSGATVLAELGDVTRFGNGRQVASWRGFAPFVSQSAGVTRIGGITKRGSRWLRRVMVEVAHVAVRMLGRFKDMFWRIAVKKCKKVAYVAVARKLLTVIWYLLVNGEVYVEEGFSKKSTVLARSKSYDGNSGGGLSLDDIVGVLGRVMKVVSDGG

SEQ ID NO: 211647 - protein, 356 aa, unidentified
MSRDTKYIGMDVHKEAVVIAVRNSTGQLMMESIVETKASSLLQFIHGLQGELHVTWEEGTWAAWLYDLLKPHVHEVLVCNPRRNALLKEGSKNDKVDARKLSDLLRTGMLRPVYHGEHGLRTLRELARCYQTISQDLSRVMNRVKALYRGWGIACAGTQVYAPRDRQEWLEKIEHAGVRRRAELLYQQLDSLQALRRTLRSELLAESRKHKASKLLRQIPCIGPIRAARLLALMQTPHRFRSKRQLWTYSGLGIETRDSAQYRFVRGQLQLAKKNQQIRGLNQNHNHEMKEIFKGAATRASCGVGPLRDFYVALLDKGMKPEMARLTLARKIAAIALTLWKKEEGFDAEQLKTQAA

SEQ ID NO: 211648 - protein, 368 aa, unidentified
MKIIKYIGLDVHKNSISISTADEGRDAEVRYYGKIGNDVDQLMKVFRKFISKGFELNCVYEAGCCGYHLYRFLTGNGVKCVVVAPSKIPRKSGDHLKNDTRDSITLARLHRAGELTEVYVPAEEDEALRDLVRAREDAQNAHKKAKQQLAAFLLRYHIVFSGKSRWSKAYFNWLTTISMKHPGQQITLQDYIDTIHGCNDRVKMLTEQIRQLSEQSRLYPLIQALQAMRGISLIVAATLASELGDISRFEHPEDLMGYLGLIPSENSSGDKQNRGSITKAGNGHVRKALIASAQAYRLPARKTREIQKRQEGVPKEIRDIAWKAQLRLCSRYRHLTGRGKNPNVAKTAVARELSGFVWAIAKELPLAA

SEQ ID NO: 211649 - protein, 428 aa, unidentified
MNQTELSRVKEFRQLKNEIQASDTYLIVGIDVAKERHHAFFGTGTGKTLLKKLIFDNTSAGFSELLARVEAVRAQNGLSDIVFGLEPTSNYHKPLGRYLISKGCHVVLVGGKAVKNNRELLDERWDKHDTKDAANVADLVSRGKCFYYDTPSREIEELRDLLSLRARLKKEEHSLSLRIRNNLLAKHFPELDSFYRACEKETLAIVRWCLNPQKIAAMPFDQFFKLVATNGRGIAQKLRLQKIHRLAHESIGCPVGCAVELQAALLVEKIKQVREQIAEVEQVIQRLCTQFPAYEYLLSIPGFGPYVASKVLATIADPWRFDGAKQVIRTAGYDLCADRSGKRSDQAVPVISKKGNSQLRYALYQAAMVASSRHRFFIAYFARMLQGRERERGIKTKMRVKLAAKMLVIAWTLMKKGEPFNPEYLNLQ

SEQ ID NO: 211650 - protein, 351 aa, unidentified
MQVSTIGVDLAKNVFQVHGVDSVGKVVITRQLRRKQVIDFFSKIPACLVGMEACGTAHHWAREISKLGHTVRLMPPSYVKGYVKRSKNDAADAAAICEAVTRPSMRFVPIKSADQQALLMLHRTRDLLIRQRTQLINALRAHLAEFGLVAETGREGLAQLAEIITDESNREALPSAMKQALQAIVDQLAALELPIGALDRAIHAHHRANDMSCRIETVPGIGVIAATAIASTVTDPRNFKSGRDFAAWIGLVPRQHSTGGKERLGGISKQGDRYLRRLLVIGATAVVQHARRHPQKHPWIIRLLARKPAKLVAVAVANKMARIAWAIMARGGYYRAPELAAVTSRGSAMGA

SEQ ID NO: 211651 - protein, 426 aa, unidentified
MRSIGLDVHRDFCEVAISEGGPARAAGRVVARREPLELFARSLAPTDRVVLEATGNALAIARILAPHVADVVLAHPKRLRAISHAKIKTDRFDARVLAELLAAGLIPTVWVPDEQTRALRRLIARRRGVVKRRTQLKNEIQAVLHRNLIERPAVSDLFGAKGRAWLRTVWLVDDEQLTLDGALRQLDFLDGELARLDREIAERVVGDGDVRRLMTIPGVDVTTAATLKAVIGDIGRFPTARQLVGYLGLHPTIRQSGTGPARHGRTSKEGSAAARHVLVEAAWSAARAPGPLRAFAQRVSSRRGKPVAAVAVARKLAMLAWHLLTRGEDYAFQRPATVARKLRLLELTAGAPRRKSGPKTHDQQAVWAPAPQHQAERRLAEQAEIAYRRLVADWQASGPKAGAGATPERASQRPSKGKAARQATSS

SEQ ID NO: 211652 - protein, 371 aa, unidentified
MIVIGADTHKHTHALAAVDGGTGRQRGARQIKAEEAGHLAALRWARELDDERVWALEDCRGVSRRLEQALIAAGEQVVRVAPHRMGASRRGERQPGKSDEIDALAIAHAVVKDGPEDFPIAYLDEQAMEIRLLSDHRRDLVAERTRVQNRLRWHLVELCGERERSLRRGALCDLRQLERLDRCLRRMPQAARVRVAREQVAQSRTLTRQIHALELELLTLIRAHRPQLLAELGCGALTAAILIGRTAGAQRFKTDASFARQAGTAPIPCSSGQRDRHRLDRGGDRQLNSALHIIAITRANHDPATKAYLARKQAEGKTKKGALRCLKRHLARRFHHLLTDPTPPPPTNHRHARTDAQTIPASAPAPMPCIT

SEQ ID NO: 211653 - protein, 372 aa, unidentified
MYYNTIYVGMDVHKSSFTLCSYTIEAEKASHFQRTEVDYKKVLKYLEFLRTVYGDDARFVCGYEAGCLGYTLYHQLTEHHVECVILAPTTMLEQRSRKRIKTDKRDAEVIARCLAQHNYSAVHIPTATDEETKEYLRMRNDHKLALKRIKQQILAFCLRHGHIYGGKSNWTISHLKWLKELELNSMHREILDEYLLTYTTLTDKLERLDSRIEEIASKPEYNESVKKLSCFIGIKTHTALSTLVEVGDFHRFAAASKFASYLGLVPGEDSSGDDQTRLGITKAGNRHLRLLLTEAAQCYARGQIGYKSKALKARQSGNPPEIIAYADKANERLRRKYYKMVLQKRKTHNVAKTAITRELVCFIWGMMTDRIA

SEQ ID NO: 211654 - protein, 353 aa, unidentified
MKNQSGSQQVILGVDTHLDVHVGAVISHSGSLLGTRNVSVNSHGYADLFSWATEFGQLNVAGIEGTGTYGAALCRFLQSKGITVIEVNRPDRSKRRMYGKSDPLDAENAARAVLAGTATAIPKDQNGACEAIRMVSVARRSAVKAKTQAMNQIRALLVSAPQDIRERLWRTKPHECAKACLSVRSLGTTELLMTLMTTLKLLARRWMILAEELNQLDKNLDCLTQEHCKNLRSRMGVGPYAAAALVTVAGDNPDRLKNESALAALCGVNPLPASSGKTVRHRLNRGGNRSANNALWTITLVRARSDPRTREYVARRSSEGLSTKEIYRCLKRYIVRELYPLIMRDLSAITAPT

SEQ ID NO: 211655 - protein, 363 aa, unidentified
MFESTTVTVGLDVHASSIRLAAIRADELLDERTLPYDEEAVERALRRWPSVRCCYEAGPTGFGLYRHLSARGLQCQVVAPGLVPQRPGDRVKTDQRDARKLARLLAGGLLEPIHVPSPEQEAARDLVRAREDGRLDRMRDRHRLSKFCLRHGRRLPGKSWSIVRRSWLSEQRFQFAAEQLTFDTYLHALDLVDARIVALERAINESAAQGPWRELVARLRCLRGVDTLTALGIAVEIGDFNRFRTAAEFMAFVGLVPSEHSSGDKRRQGSITKVGNGHVRRLLVEAAWHARRRPKVGYELARRQRGQEALVIERAWRCQQRLYQRWQRMAGRGKPSQKIAVACARELAGFVWAIASEQPLRTT

SEQ ID NO: 211656 - protein, 412 aa, unidentified
MKRIHQRCCGIDVHKATLTGCVRVHGRGGKLNQEIRSFGTTSDELLSLHDWLIAHHVTHVAMEATGVYWKPVYYMLEQAFTVLLVNPADVKRMPGRKTDVSDCAWLAQLLENGLLRPSFIPPRAIRELRDLVRYRSQLKHDHTRVANRLHKVLQDADLKLSSVMSDILGVSGRQILRQLAAGHSDPAALAELARGRLRAKLPALRQALTGRFSEHHAFLISQALAELDNLEESMSALAARIEQHLVPFAQELELLSTIPGVKRVAATAILSEIGTSMSCFPSTGHLDSWAGMAPGNHESAGKRRRAKARQGNRWLRTILVECGQAAGKARNTALAAIYRRMIIRGGRKHAAFVVGRHILNIAYHLLAARTTYRELGPSHFEQRRAEQLKRRCLDQLRTLGYQATLTQLQKAA

SEQ ID NO: 211657 - protein, 412 aa, unidentified
MEPIYTNCCGLDVHKKSIQACVRRIGKDGRIQQELRSFGTMTRNLRDLADWLFQEEVTHVAMESTGVYWKPIYNILEGRFKILLVNARHIKHVPGRKTDVKDSQWIADLLQSGLLTGSYIPDRAQRELRDLTRHRTKLVDQRASVVNRVHKVLEDANIKLGAVATDIMGKSGKDMIRAIINGEKDSAEMADLARRQLRGKIPQLQLALEGHVTDHHRFMLSELMEQLDHLDEKIDRFSQRIEDISRPFAEAIQEVARLPGFEKRAAEVVIAEIGCDMSPFPTSDHLNSWAGICPGNNRSADKRKSGKTTKGSKWLRATLAQAAWAASRKKNSYFRAQYGRLAGRRGKKRAVIAVAHSLLTVIYYVLRDHVEYKDLGQDYFDKLNSKRLVPYLVNRLKNLGYEVNLVPLQNAA

SEQ ID NO: 211658 - protein, 412 aa, unidentified
MRVVHPICAGMDVHKEDVKVCLIWRNESGERCEEVKTFSTMTRPLLSMREWLESYGCKVVVIESTGVYWKPIYNLLDGDFEVMLVNPSHLKYVEGFKTDPKDARWLAGLLEYGLLRGSFIPPREIRDLRDMTRYRRRLIEQHTDEVNRVQKILEDANIKLACVATDIFGVSGRAMLDELLKGEMSPEQMAELAKGRLRNKREQLAESLEGRFRSHHALLLSRMLEHIDFLDDAIDQCDTVIEDMLRPFVSKIENMDTVPGIDVRAAQDIIAEIGLDMSVFPSHKHLCSWAAICPGNRESGGKRKSGKTRKGNKWLRAMLVQCAHAAGHSRKTYLGAQFGRFAARKGKQRAAIAVGHSILEAIYFILRDDVPYQELGPEYFDKLNKDHIIRSYKKRLEALGLVVEVSEAPVAA

SEQ ID NO: 211659 - protein, 366 aa, unidentified
MKKISTVEIERIQIFKENQLTIGLDLGDRTSHYCILNEVGEVILEHELPTTPKGIEGVFSRIPRSRIALETGTHSPWVSRQLTQLGHEVIVAHARNVRLIGESSRKDDQLDARTLARLARIDPGLLGPVRHRSAKAQIHLTVIRARAALVSTRTALVNAARGLTKSYGERLRKCGTEQMNREIAKGLSQELRDVLDPLLREIESLTERIAEYDGRIEQIAKEVYPQVARLKQVKGVGPLIALTYVLTLDDPHRFRRSRDVGCFIGLRPGRRNSGMSEPQLHISKEGDRYLRTLLVQGAHYILGPFGQDSDLRRWGWKLSERGGKNAKKRAVVAVARKLAVLLHKLWVSGGVYEPLRNNRKGMAAVA

SEQ ID NO: 211660 - protein, 339 aa, unidentified
MKYTPVGVAIAKHLIQVHFINEHTGEVIDKQLRNQDFLTFFSNREPCLIGMEACGGSQHWARELKKLGHQVRLLQARFVKAFVMGNKNDVMDARAIWMVVQQPGKEIAVKTEEQQSVLVLHRSRRQLVKFRTAQINSLHGTLLEFGENIHKGRAAMDRELPEALERMKATLPPYLITVPEDQHNRLKELDSMMDDPEKQLNSMARQNETCKRLMEIPAVGPLIATAAVATMGEAAAFKSGREFAAYVGLVPKQTGSGGKVRLPGINKRGDTYLRTLFIHGARAAALLTKEPGPWITELKKRRPTGVAIVAMANKLARTVWAIAAHDRKYDKNHVSIRPY

SEQ ID NO: 211661 - protein, 355 aa, unidentified
MKRCQYIGLDVHCSFTELAVVTQAGRLTQRQRCATTIPALRAALDAIARPRAVALAEGPLADWLWRNLNGHVETLTVCDPRRNRLIAKDSDQDDPLDAEKLAQLLRGGYLKAVHHPESLERAVFKQLVLLYHDRVRQRVREANRVLASLRRHGVFVRAKAFVDQEDRSALLRGLPPARLLTANLNVLWDSYELAAAQVRTLRRRLVDAARQEEVSERCTQLPGIGWVRAATFFVYVDTPWRFPSKASRWKYLGIGLERRHSGTGPVRVQLVKYANRQLKGVLLGAALRALGQKDNPFAAQYQRWLQAGISVGSARRNVTRSLAATLGGMWKNGSVYRPEWVGVAAAAVSAAEVSS

SEQ ID NO: 211662 - protein, 400 aa, unidentified
MLSIGIDVSKGKSTVCGMKPGGEIVYTPFEVQHTREGMSELVSLLRSSGEEVRAVLESTGSYHCPVVTALLENGIFVSVVNSLRMKRFCSQSIRKVKTDRIDAMQIALYGLAYWQELQPTRLPENTYRELQLLARQYYQMTSLLIKAKVDFNALCDQVLPGMQELMSDHAGRHKLSDFVLRYRHTTHILEMGETRFRKDYCKWAEKKGYRNHERMAVLIFATAQNGIPVLPNAPSTQIVITEAIRVLHTVEASRDAILTQMQALAKTLPEYSLVREMPCIGDTLAPRLIAEIGDVRRFHSKRALIAYAGIDAPPYQSGKFSANNRHISKRGNRYLRKTGYEVMQSYVMHKPANDPIFTFIEKKRGEGKSGKLAMVAGLNKFLRVYYGKVTEPYRSLPAIE

SEQ ID NO: 211663 - protein, 407 aa, unidentified
MDLLKTVFGIDVSSWKSNVCIMVNGQKVNDYAISNDMVGFNQLLDDLKQVTNPQIIFEATGVYSRRIQAFLDMHELRYVMMNPLEAKRKTKDDLHQNKTNKLDALYLAKLQSEHPQRLAYVQSKEYQELMANNRIYEQASHDLITNKNRLHKAIQLTFPEIEHLMVNPRGKNYWSIVLRFPHPDIVLETKEADIIDFLKGLTGIGKKRANDITQSLIRLAKVACPAVKKNSAHIRGLKMAINNILSAEEECQTALQEMAKLAPKRDLEILTSIPGIVENTALRIISELGDIRRFNNPSQLNAFVGVDPQVYESDNLTAHLSISKRGTAIGRKVLCLAINQIQSAKKAGNPCHIADYYEKRKRSSETASHKKAAIASIHKLLRTIFALITNDQLYSYDIAKHNQRLLS

SEQ ID NO: 211664 - protein, 317 aa, unidentified
MNTNTLQNINIGVDTGKAQLDIFIRPLNLFFTVSNNNKGIKDAIKTIKKHSPERVVIEATGRLEMPFVLACAKAKLPIVRANPIHIKRFAGSIGRRAKNDRLDAELIAHYAEAIKPDISIIKAENIRLMSDLVIRRNQLLSMQTMEKNRIQVLPKSLHSTIKPILTAMKKQISNIEDKLVKLIESSPDYQTKNDILQSVPGIGNIAAASIISNVPELGYITNKQAASLIGVAPITRESGRYKGKRVIQGGRAQVRTVLYMAMMSAMQCNPVFKATYTRLVKSGKPKKVAIIACVQMVVILNSMLRDGVMWDENIAKN

SEQ ID NO: 211665 - protein, 465 aa, unidentified
MKKKTPKSKKEKRKISINDGWELINPDAAGIDIGSREHWACVPPGRAQKNVRKFGTFTCDLEALADWFKECGVKSIAMEATGVYWIAAFQTLEKRGFAVMLVNARQTKNVAGRKTDILDCQWIQRLHTYGLLRGSFRPKDLYCVLRTYLRYRDELVGARSTQCQHMQKALQQMNVQLPQVLSDVTGVSGLAIIQAILEGQRDPATLASMVDCRVRASQATIQKALAGDYRKEHLFELKTAFELYQTYEEKIQACDKQIVAETAGLPDQVEVSSKPLPARKEGRAARKDKMAGQDMREWAYKKLGVDLTLIEGIGIMTALVILTEVGPDLSRFPSEKHFASWLGLCPDNRISGGKVLSSRTRRVINRVSDALRISATSLERSQTAMGAFYRRMKAKLGAAEAVTATAHKLARIVYHLLKHGENYVRQGMDEQEKKYQERKLFALRKTATAMGFELVARQAVVLPVS

SEQ ID NO: 211666 - protein, 341 aa, unidentified
MKVSTLGIDLAKNVFQLHGVDHEGHTILRKKLTRAKFVQFVIQLEPCLIGMEACSSSHYFARLFTRYGHEVKLIPPQYVKPYVKTNKTDAADAEAICEAVTRPNMRFVQIKTEEQQAVLALHTERGILIRERIACANSLRATLAEFGITIAAGQSHLTRELPAILEDGENGLSPFVRTSIYRQSKHIRELEEQVKQVEEALASWYRTQEACQRMAKIPGVGMLTATYVVAAVGNARQFSTAKQFASWLGLTPKEHSSGGKEQLGGISKRGDGYFRYLLVHGARALTAWVNRNGAVEKNSWLQGLLERKHYNVAVVAMAAKTARIMWSMLSHNTEYQPRQLA

SEQ ID NO: 211667 - protein, 415 aa, unidentified
MDVVYPRCAGLDVHKKTVVACVITPGGSSGWQRAVRTFGTMTADLLALSDWLSGYGCSHVAMESTGEYWRPVFNILEGNFEVLLVNAQHIKAVPGRKTDVKDAEWIAQLLQHGLLRASFIPPVAQRDLRDLTRERSNFIRERATLVNRVQKVLEGANIKLGSVATNVMGVSGRAMLEALAAGETNPELLANLAQGRLREKREQLSQALAGRVKAHHRFVLSELLCQIDSLDETIARFDMEIEAYCAPFEMAVVLLDTIPGVGRETAEVMVAEMGADMTPFPSADHLASWAGLVPGNHESAGKRLSAKTRKGNRTLCTALVQAAHGAAHTKDTYLAAQYHRLAARRGNKKAIIAVAHSILVIAYHMIQRQEPYRELGADYFDKRRPEATAKRLVKRLERLGFDVQLNRPVSVAATT

SEQ ID NO: 211668 - protein, 455 aa, unidentified
MYKVKLKKTKAKSLIEMPIVNPYSSGIDISDKEHMVAVPEGVATDRVRRFGAMTCDLEEIVKWLQECEIQTVAIESTGVYWKPLFSALTRHGFEVYLVNANYVKNVTGRKTDETDAMWIQKLHSCGLLRSSYLPDDEQEALRTLVRYRRTLVQDSSRFVNRMQKSLELMNIKFHTVIADIIGKSGRRVIEAILQGERDGKNFLPFIDKRVKADSQTIVKSLEGNWRTEHLFTLRESYEMYQIYKDRIAVCDQEIEKQLQQYEAKRNDGVIETDQKPKKKPIQKKKDKNHPRFNVRGYLERIHGVDVLNIYGLSETCGLELLAETGTDLSKWENDNHFVSWLNLCPNNKISGGKLISSTLLKKKSNPASQAFRQAANAVQKSNHWLADYFRRMKAKGGHKYAIVATANKIARIYYKMVRYKEEFNPVDLEHYQQKYKQAKIAYLERKLSQLKKEVA

SEQ ID NO: 211669 - protein, 343 aa, unidentified
MEHFAGLDVSVKETSVCIVDDTGRIVREAKVASEPEALLQVLKNPSHHFKRIGLEAGPLSQWLLSALAEAGLPAICVETRHMRAVLKAQINKTDRNDARGMAQMMRAGLYRPVHVKTLRSQKLRMLLTHRKLLQSKAIAIENDLRGTLRNFGLKVAMVGTVKFEARIQELVENLPDLAVLVEPLLVVRRVLREQIGILHRRLLAIVRDDEVCRRLMTVPGVGPVVALTYRATVDVPARFRHSKAVGAVFGLTPSKYQSGEINRSGAISRCGDEMMRVMLYEAAQIMLTRTNKWSWLKAWAMQIARRRGKKKAIVALARRLAVIMHRIWVDGTEFRWTRDVATA

SEQ ID NO: 211670 - protein, 344 aa, unidentified
MSEVSMIGLDISKHVFHAHGVDGRGRAMFRKRISRGKLLDFFATQPSCTVALEACGGAHHWARQLAQLGHQVRLIPPAYVKPFVKRQKNDAIDAEAICEAAQRPSMRFVAVKSEEQQAAGMVFRTRDLLVRQRTQLINAIRGHLTEYGWVAPKGPSHVAMLADLIDEEEMASSLPGAARMMFRVMLDLLSGLSRKIADLDKEIARRAREDEVSRRLMTVPGIGPISATAIVALAPPAESFAKGRDFAAWLGLTPLQRSTGGKQKLGAISKMGERTLRRLLIIGSSAVVKQASKRGAPRGSWLEQMLARKPRMLVTVALANKMARIVWALLVKQETYRAPVATRA

SEQ ID NO: 211671 - protein, 377 aa, unidentified
MDKDSRFVGLDVHAETIAVGVAEPGGEVRSLGTIPNTPEAVRRLVKKLGPPETLRVCYEAGPTGYVLYRQLSALGVPCAVIAPTLVPVKAGDRVKTDRRDAEKLARSYRSGDLTPVWVPDPGHEALRDLVRAREAAKKDQLRARHRLGKFLLRQGRRAPTGSKAWGVKHRAWLQTIRFAHAAQDATLLDYRTEIDHAADRIARLERAIATAADLTPAPVRAVIAGLQALRGIAKLSAVSVVTEVGALSRFAKPRQLMGYSGAVASEHSSGPHRRRGGITKTGNAHLRRIVIEAAWAYRHRPAIGGTLRTRQEGLSEEVKALAWKAQHRLHGRYVRLIAKGKAPTQVVTAIGRELLGFIWAIGVHIEQHTAGGAPAAA

SEQ ID NO: 211672 - protein, 323 aa, unidentified
MNKDIKYFGIDISHLVFDVTDSEGNYYQFKNNGSGFQKFSKLLDLDSHCVMEATVYYHYQLAYYLLESGIKVSVENPLAVKRFIQMKLSKIKTDKSDSRLICEYAQQVELKLWKGNSKDELECLQITRALAIYTKQSTMLKNKLHGEDVLGNPSKAVVRSLKRNLKQLNKEIETLENRLLILVKHTHQDLLTRLQTIPRIGRKTAIMLVVLTGGFERFTSASELCSYAGLTPVIRQSGSSVKGRARISKIGNQKLRNLLFMYSFNACKYNKACRDLYERIVAKGKSKKLALIAVCNKLLKQAFAIAKSGLIYDDTYRSTLVKN

SEQ ID NO: 211673 - protein, 341 aa, unidentified
MKKFIRIGVDLAKNYFQVHALVSDVGPAVTRKLRRSKMHEFFSQIEPSLIGMEACGSAHYWARELKAMGHEVLLMPPAYTKPYVKRGKNDAVDADACCEAMSRPGMRFVPVKSAEQQATLMLHKTRELLVKQRTMSVNALRGHLSEFGIIAAKGIGRVDELLDLVESDTTLPNAARASAKVLAQALEGLDKAIDDLEDEITNAQAQNEMTRLLYKVPGIGKIIASVIAASVPDPSVFKSGRDFTAWLGLTPRQNSSGGKQALGAITKQGNRYIRKLLVLGATSLLNVVGKRKGALRDWIVGLLAKKPARLVTVALANKLARILWAMMKTGESFHTEMFAQA

SEQ ID NO: 211674 - protein, 387 aa, unidentified
MPKTSDRSEVPAAVHTRIAAIFVSLELSRKVWLLTSLSPGAGEKMSKHSVPAGDVAALLLRFAELRRKAQARTGERFSIVTIQEAGLDGFWLHRLLESEGVESHVVDPASIAAPRRRRNAKTDRLDGEALLRALLAFKRGEPRACAMDVPPTPEEEDRRRLSRERKTLIAERVEHVNRIKGLLFSQGVSDFEPIERDRRKRLEELRTGDGRPIPIHLKSAIARELDRLELLIDQIKTVEAERDKLLAEQRPDASPSPGAMLLAFKGIGSEVASVLWSEALYRHFDNRRQVASYAGLAPTPWQSGSVSHEQGVSKAGNPRLRSTLIELAWLWLQNQPQSGLSLWFKKRIGDGRGKKTTIVALARKLLVALWKYIAFGVVIDGAVMKNA

SEQ ID NO: 211675 - protein, 375 aa, unidentified
MSHNLNNAVAVIGIDIGKNSFHVVGLDSRGAIVLRQKWSRGQIEGRLANMPPCLIGMEACVGAHHLSRKLGTLGHDARLMPAKYVRPYSKGQKNDFRDAEAIAEAVQRPTMKFVATKTAEQLDLQALHRVRERLVSQRTGIINQIRAFLLERGIAVRQGLRFLRAELPRLLAAPPDVLSPRMVGVIEGLAEDWRRLDQRIEQLSGEITALAHQDAGCKRLVSVPGIGPIISSAMVAAIGTGDAFSKGRDFAAWLGLVPKQISTGDRTILGKISKRGNRYLRVLFVQAAWVVLIKPQSWERHGLKPWIEAAKKRLHRNVLAIALANKLARIAWSVLARTIHWGQSRHNHGRRPPKWQAVHVMVTRCSVSFPSLSGK

SEQ ID NO: 211676 - protein, 367 aa, unidentified
MSKIRNIGLDVHKNSIVMAVADSDGGEPAELGTIPNDHVQLLKRLRKLGRESELRVCYEAGPTGYGLYRELNAAGIKCVVIAPSLVPTQSGNRVKTDRRDAARLARFLRSGDLTYVHVPDETTEGIRDLTRAREDAKALERTVRHQLGKFLLRNGRIYANGNNWTQKHLAWIRTQKFVHPGQEQVLVDYLKAVEDAKSRVERLTECIREVAKEWKLAPRVTALQALRGVQFITAVTLCAELFDFKRFGKANELMAYLGLTPSEYSSGESRRQGGITKTGNGHVRKLLVESAWSYRYRPAMSDGIRKRNQGVAENVRKIAWRAQERLHGRYNLMMGKGKSKQKTVVAVARELAGFIWAIGQEDNLLAG

SEQ ID NO: 211677 - protein, 411 aa, unidentified
MQRRENYLYVGMDLHKETHTAVMVNCWNEKLDAIVIENKPSEFNKLAKRVNKMAVKLGLSPIYGLENAYGYGRSLAVWLIEKGYTVKDVNPSLAYDQRKSAPMMKKNDEHDAYCVATVLINQLHTLPDAKPEDNHWTMSQLVNRRDTLVKDGIRLKNALHEQVSAAYPSYKKFFCEIDRKTALYFWKNYPSPGHLKNKSAEDLMAELKAVSANYTKSKAELILECVQNDGNTIRDYQASRDFITQSLVRDLEHQAVELAQIEAEIEKMLACFEYKLTTLPGVGNAIASKLIAEIGDIRRFPNADKLACFAGIAPKSFSSAGKGKDESNKQGNRELHGLFYFLAVSMVSVSTKGKPYNPIFRIYFLRKVSEGKTKSQALVCIMRRLVNIVYGMMKNKTEYRPYEPETTKQQA

SEQ ID NO: 211678 - protein, 412 aa, unidentified
MEAVYERCAGLDVHKRTVVACTVVPDRDGRVVKEVRTFETTTGELEVLGAWLAAAGCTHVAMESTGVYWHPVWNVLEERFTLVLVNARHVKAVPGRKTDVRDCEWLADLLRHGLVKPSFVPDRAQRELRELVRYRTSLVRERADAVNRLQKTLEGANIKLGDVASNVVGASGRAMLEALVAGNTDAAALAELARGRLREKLPQLQRALAGRFGVHQQFMVAQQLAHIDGLDELLERLDQEVVERTRPHEAAIARLDTIPGVGRRTAEVLIAEIGPDMTRFPTAGHLASWAGMCPGNHESAGKRYSGKRRPGNEWLCTALVQSAHSAARMKHGYLAAQYRRLVKRRGKKKTAVAVGHSILVSIWHMLTKNQTYQDLGDDYFDERDRKKLEHRLVSRLKGLGFEVTLQPRTQAA

SEQ ID NO: 211679 - protein, 407 aa, unidentified
MAKRLWAGLDVGVETTSVCIIDENGEVVHKAVCSTAVKSLHRELVFLKRRKWATVAMESGGGTSLARGLQALGYTIILYETRQLSGFLKVRRIKTDAGDAFGIAEVGRVGARLVSRVHLKSLECQSLGARLRIRRHIIISRVKAVNLLCRQLEHFGGRVTKSTRSPLLRERVESEIRALFGRTSTPLVAEFRRLLDYCLDLMAREKVIERDLLQFARSSEVCRRLMQIPGVGPICALSFYAAVDEPERFARTSQVGSYLGLTPRLHQSGLTTRSGRISKMGNKEARSLLFTASVRFMMYCSPDVELYAWTRSIELRCGRLKSRVALARKLATVMLAMWKSGEPYRPRLAQPAAGGTLSEVRGGRTSLAALPDPPPQSSANAVKVLRPATASLQERPGEASSLSSEAS

SEQ ID NO: 211680 - protein, 367 aa, unidentified
MEKSSKVFVGMDVHKESIDITLAEQGGEVRRLGQIGGDRDSLLKMVRKQQSRGGELVFVYEAGACGFWIYREITALGQACMVVSPALVPKRAGDHVKTDRRDSERLASLARAGELEAIHVPDIRDEAIRDLVRGRDDAVIAQRRVRQQLKALLLRNDIRYVGKTSWTGAHRRWLSELKLPEPAQQIVFEEYVDAIAVATGRIERLTRAIETEVIAWRFAPVVGALQAMRGIQFVHAVTLIAELGDLTRIGSARQLMGYLGLVPRESSSGEHRRQGSITKAGNSYARRALIEAAWAYRHPARVTRIIATRQTGLPKTACDIAWRAQLRLSAKYRRLNARHLNHNKIVVALARELSGFVWAIGQSVRPQ

SEQ ID NO: 211681 - protein, 375 aa, unidentified
MKKIAQVCDRFVGLDVHAATIAVAVAERGGEVRFLGTVANQSVPVFKLIKKLNEGGPWSACYEAGPTGYALYWTLTKAGIPCQVIAPTLVPMKAGDRIKTDRRDALRLAQSFRSGDLTPVWVPDAAHEALRDLVRARESAKRDQLRARHRLSKFLLRHGHRPEIKMTSWTQKYMDWIKRVKFEQQAQQWTLEDYVNEVEHCGLRIERLDQLIDQAVELAPTSMKEVVEALQALRGIAKVSAVTIVAEVGQLSRFATARQFMGYSGTIPSEHSSGESVRRGGITKTGNAHLRRVVVEAAWSQRHGPILSRHRKLRMQGLSAEVQEIATKAMHRLHSRYLRLEAREKPKQKVVTAVARELLGFIWAIGISVEQRHAA

SEQ ID NO: 211682 - protein, 337 aa, unidentified
MTLYCGIDLHAYNSVISVIDDHDTIVYEKRHANDLREIEGVLEPFRDDLFACVVESTYNWYWLVDGLMDAGFDVRLAHTGAIPQYAGIKHSNDQTDARHLAHLLRLGILPEGHIQPREQRAIRDLLRRRLLLVRQKTLHHLSLQSLIVRQTGERLSANQIKALDNDAIADKLTDPIRLGGQITHLARCWHEQAIEMLEDEVLKHLKPRKEYQLLTSMPGVGKVLASTIVLETGAIERFPDPGHYASYARCVNTARVSNGKLKGRGNKRNGNKYLAWAFMEAAHYATIWSPEIKRFYQKRQAKRHILVAKKTVSNKLAKACYHMLKRQEPFDVKRAFG

SEQ ID NO: 211683 - protein, 338 aa, unidentified
MAIIAIGIDLAKNVFAVHGVDEAGKAVLVKPSVRRDALLELVAKLPACVIGMEACSGAHHWARQFQQFGHQVRIIAAKFVAPYRLSGRKGKNDAADAQAICEAVQRPHMRFVPIKTEDAQGRLSIHRVRQGFIETRTATINRIRGLLSEFGVVLPQKAEVVRREAGRHLEDLPGWANTAIGDSLSELHHLDERIAEYDRHIEAMAKADDRGRKLMDMPGIGAKTASALLASIGNGHDFKCGRQLAAWLGLVPGQYSSGGKQRLGRITKAGDSYLRTLLILGARAVVAAGKNKTDRLSRWAQSVAERRGYWKAVVAVAAKNARMAWAMLSKGEAFKPLT

SEQ ID NO: 211684 - protein, 368 aa, unidentified
MKEITTYVGVDAHKKDLFIAMLIGDAQRPVTWTVPNEPNAVRRLVRKLERDAPGPVRVCYEAGPCGYALQRQMTTPRVTCQVIAPALIPRKPGERIKTNPRDARKLAELFRAGLLTEVRPPTPEDEAVRDLCRARDDAREDLQRCRHRMGKLLIRRGMHYSGRNWTAGHRRWIDSLSWAQPAERVVVDDYLLAIEQLESRLSALDTGLAEIAGTEPYRERVGWLRCFRGIDTLTAILILAELHDFRRFQSPRALMAYLGLVPGEDSTGEKHRRGRITRTGNALVRRLLVETAWHYQHRARIGVALTRRRKGQPGRVIAIADKAQQRLCRRFRCLMEHHKPAPKVAVAIARELAGFLWAALQPAPTPAG

SEQ ID NO: 211685 - protein, 348 aa, unidentified
MEQQSHYVGLDVSLETTSICVIDDAGAIIWRGKCCSDPDTITAIVHQHAPGAVRVGLETGQLSNWLTLSLRRRGLPVVCMDARHAKAALSLQINKTDANDAFGLAQVVRTGWYREVAVKSMDAHTLRMLLVARSRLVSQRQATANTIRGLLKTFGLVVARGSKGLFPVRVREQIAGNPALIAIIEPLLAVWYAIREQVTMLDRQILARARNDQVARRLMTIPGVGVVTALAYTAVIDDPARFRRSVSVGAYLGLTPRRYQSGEVDTTGHISKCGDSLLRGYLYEAAAVLLYRDGRASILKSWGLGLAKRIGMRRAKVAVARKLAVIMHRIWSDHSEYRWTAAIPPAAA

SEQ ID NO: 211686 - protein, 392 aa, unidentified
MRYVGIDVGSDSHVVAAVIADGTVAVKPTGIAEDAAGYAKLFALLGQAPVALVTMEATGHYWRNLFAALAAHGYAVALLNPLRTRRFAGEDLARTKTDSIDALGIARFGAQKCPAVTRLPDAATDELRELVRHRDRLVADFGDRVRQLHRLVDLGFPEFTRHVKSLDSMLACTLLAEYPNAQAFAGAMPRRLAKLVYDGVHKVGPELAAALIAAAKVSVGRHHGPAWRIQVRHTCQDLDLLRRRIRELDGDIARQLEEHEVGALLTSVDGIGTNTAARLIAELGDFSRFRNAAALAAYVGVVPGLRQSGKRRGQRAGLCPIGHARLRAALWMPLLTAVRRNPWLEAFYDRLISRGKLPKVALVAALRKLLGAVFAVVRDRKPFVPRLGPATA

SEQ ID NO: 211687 - protein, 415 aa, unidentified
MKVFCGIDWAEDHHDVALVDADGALVAKRRIGDSAAGFAELTTLLADAGDNANDPIPVAIETPRGLLVAALRQTSRLVYAINPMAVARYRERHTAARKKSDHVDAMTLANILRTDAHAHRPLPADSDLARAVAALSRATQDATWRRTRATQELRAALREYYPGFLAAFAKGTVTNLASPQARAILALAPTPAAAAKVTKTQLAAALRRAGRQRGIEDLALRLHQALRAEQLRQPPAVEDAFGSQALALLGSLNAECAAVDQLSQTTAEVFQQHPDYAVITSFPGLADLSGARVLGEIGDDRNRFADARALKAYAGSAPVTRASGRSISITRRTVKNDRLNAVGFLWAFAAMAKAGAPQDHYRRRRERGDRHAAALRHLFNRFLGQLHHCLHTGEHYDPIKAFGSPDDTPVQFAAA

SEQ ID NO: 211688 - protein, 340 aa, unidentified
MKEVTIIGIDLAKRSFQVHGATADGSVAFRKKLTRTQLLAFLAVQPRCTVAMEACATAHDWGREIEKLGHTVRLIAPIYVKPFVKRQKNDAADAEGIAEAVSRPTMRFVALKTEEQQARAMIFRTRDLLVRQRTQLINALRGHLAEHGVVAPQGPAHVKRLADAIEDGERFLPAMVRDIGRVYLDQIAIYSKKVADLDKKLRMAATSDETTARLQTMPGVGPITAMAIEAFAPPMHSFRRGRDFAAWLGLVPRQKSTGGKQILGKTSKMGQRDIRRLLIIGAMAVVRSRSGASEGSWLARMLARKPRMVVAIALANKMARSVWAMLVKQENYRDPMAALA

SEQ ID NO: 211689 - protein, 318 aa, unidentified
MNTNTLQNINVGVDTGKSQLDIYIRPLDIYFTVPNTEKGISDAIKTIKKHKPQRVVIEATGRLEMPFILACDKAKLPYVIANPLRIKRFAGAIGQRAKNDRLDAALIAHYAERVQPELTKLKSENIRLMSDLVTRRNQLLTMQTMERNRLQILPKNISSTITPILTALKNQIEKVEAKIAKLIESCPEYQAKNTILQSMPGVGKVLAASLISNVPELGFITNKQASSLIGVAPITRESGRFKGKRLIQGGRSQVRTVMYMAMMSAIQCNPVFRATYERLLTAGKPKKVAIVACMRKMVVILNSMLRDGVMWDTDSLKN

SEQ ID NO: 211690 - protein, 349 aa, unidentified
MQHYAGIDVSLELLSVCIVDAKGKIVKEAKVGSDPDTLVAFLRGLDLAIERIGLEAGPLSQWLHAGLTRAGFEAVLLETRHVKAALSAMTVKTDRKDARGIAQLIRMGWFRAVHCKSPGSQEVRALLVARKLLLSKLLDVEFSIRGILRGFGLKMGMVTRKRFEARVRELYADHAMLEQICSAMLTARLALQTEYAKLHKALLVIVREDEVCRRLMTTPGVGPLVAITFKTGVDDPSRIHKSKAVGALFGLTPKKYQSGETDVTGGITRAGDEMVRTALYEAASVLLSRVTRFSALKRWGMDVAKRRGTKRAKVALARKIGVILHRMWVDMTTFRWTKGAPTTMRLARV

SEQ ID NO: 211691 - protein, 313 aa, unidentified
MDRVVGIDISKARLDVFCEVSGRRLAVANDAASVAELAGWLEPGSLVVMEASGGYERLVHRLLTGHGIKACVVNALRVRQFAKGAGLLAKTDRLDAAVIARYGAFAKPVPTPVRAGAREALAETLAYRRQLLAEIGARSQQLAHLRSPALIERAKVALRRLRKDKVALDRLLQDTIAGDPELQAKATLLAGTPGVGPVLLATLLAELPELGQLDRRQIASLVGLAPVARDSGLMRGRRVIHGGRKEVRGALYMAVLALSRRASRFAVAYRALVAKGKPKKLALVATMRKLLVILNAIARNNTPWREQPLKAAA

SEQ ID NO: 211692 - protein, 313 aa, unidentified
MKMAQGKVFVGVDVSKARLDVEIWPAGERFQVANDREGRADLVRRLRRRGVEAIGLEASGGYERDALRALLDAGLPARRVNPLRVRQFALACGVLAKNDRLDAAAIARFVATVPQRPVEPNPAAERLAELVTARRQLREELTRAENQAEHTVQPMLKRLSKRRADRLRADILLLDKAIDQAVADDPELARKNDLLRSVPGVGPVFAHTLLALMPELGRLSNRQAAALLGAAPYDCDSGQMKGQRRIFGGRRAVRDVAYMAAMVAGAHNPALKAFRQRLLDAGKRPKVVLVAIMRKLITILNAILRDNTPWAHA

SEQ ID NO: 211693 - protein, 346 aa, unidentified
MTIIGCDFHPSWQQVCWVDGETGELVQRKVAHAPGEVEKFYRGFAAPALIGMESTGNCQWFVELLEGIGHIVWIGDAAKIRASDVRQQKHDRRDAELLWRLLEEKRFPQIWTPSSEQRDARQLLIHRHKLVRVRAQVKNELQHLAMNRGMQKKRRLWSAEGQQALRELPLAPWAGRRREDLLKLLSMLDGQITSLDMAVKAAAEQNENARLLMTQPGVGPVTSLAFVLTMGDVSRFQRGKQVASYLGLIPREYSSGGHQRLGSISKQGNRFMRMLLVEAAQTAVRLDPQMRSEYLHRCHRKPKGVAKVAAARKLAIRLYWMLRTKREYPGIVRTESSPRVPLVSAS

SEQ ID NO: 211694 - protein, 338 aa, unidentified
MTVEILGVDIAKNVFQLHGINRNGRVILKRRVMRDQLLAVLAQIDPCTVVVEACTGAFFWARKFETLGHQVKIISPQYVKPFVRRQKNDGNDAEAICTAACQPHIPFVPKKTATQQDIQALHRARQRMVNHRTAVVSQIRGLLLDRGFAIAKSITRARRAIPEIISDLENELTTMAREAITELYDLFRDLDRRIASFDKKIDCVFRGNEDCQRIARIKGVGPKTATAIVAAVGDGSEFKNGRHLAAWVGLVPRQHSSGDRKVLMGISKRGNQHLRSLLVHGTRAVVRTAPNKSDPVNQWVNQLRERRGFNRATVAVAIKNARIIWAMLRTGKPYRAAC

SEQ ID NO: 211695 - protein, 355 aa, unidentified
MLTIGVDSHKHSLTAVAIDSTGREVGALHVPSTPKGRDDLFEWAQSLRAEARQWGIEGSGMYGRPLAQQLTRAGEAVHEVSGLATSRERRAGVGVHRQKTDTSDALAVARITLREHTRLPKIFPAGITHRCKLLTEHRDNLVLQRTRLMNQLHAHVSLLNPLQMPGIRCAQGRDVLSAWAEELVPSTDPLLRTQGQIVQQIARLILVYDEMIKQLTLELTDLAKKAVPSLLALQGLGALTAAKILGEVGDIRRFPSRSKFASYCGVAPVEASSGERVRHRLSRRGNRKLNSALHTIATTQRRWDPRARDYLERKISEGKTRKEALRCLKRHLANVIYNMLRDAAMTQSVDAAVAA

SEQ ID NO: 211696 - protein, 369 aa, unidentified
MSSVASRAGAIHLGMDTSKKTIMVATLMPGEQIPVTERIANEEAAVRRFIARLGDPSQLRACYEAGPGGYDLYWLLTSMGVACEVVAPSLIPKGGSDKVKTDRRDACRQARLHRAGELTPVRVPTRAEEAVRDLVRVRAGLLADRKRAQQRLTAVLMRHGCIWCHGSYWTGAHRAWIAAQRFTEPALTAAIAHYRAALDTREAELAAIEAELAPWAHREPLAGPVARLGCYRGIAELGALTLASEITDWRRFPAARAFMSYTGLVPAEYSSGERTRRGHITKAGSEPVRTTLIEAAWAYQHGPAIGATLRRRQAGAAPGTLARSWKAQRRLHARYRHLISCGKAPGEAVTAVARELAGFAWAEMTADPA

SEQ ID NO: 211697 - protein, 344 aa, unidentified
MDHFAGLDVSVKQTSICIVDDTGRIVKEVKVASEPAALLKVLGNPTYRFKRIGLEAGPLSQWLFSALAEAELPVICVETRHMQAVLKAQINKTDRNDARGIAQMIRVGLYRPVHVKTLRSQKLRMLLTHRKLLQSKAIAIENDLRGTLRNFGLKVGMVGKVRFEARIQELVENIPDLAVLVEPLLIVRRVLREQIVILHRRLLAIVREDEVCRRLMTTPGVGPVVALTYRATVDVPARFRKSKSVGAVFGLTCSRYQSGEIDWSGKISRCGDEMMRTMLYEAAQSMMHSKKWSWLKAWAMQIARRRGMKKAIVALARRLAVILHRIWVDGTEFRWTREQAAAAA

SEQ ID NO: 211698 - protein, 409 aa, unidentified
MRYYVGVDWADAAHAIWVVDEAGQRVTARTVAHSAEGLSEWGRELDEWRAQAIELWAAIERPEGRVVDFLLDHGVVVYPLNPKALDRARDRFRQSGAKSDPFDARVAADFLRTDQGHLTALQPSSAAAQELKYLTEDCQRLIRQQTRLLNQLTATLKAYYPRALEVAELPTALARAFLAAYPTPEALSQLTERQWQRWARAQHVSASRTAELWSVLHAPQLPVPAHVVRAKARLMRTLVAALEPVLAAVGSYREAIDDFFAGMPAAATARTLPVGDRGLLVPTLWARLGDAPGRWSSFRHLQAQAGSVPVTERSGRQHRIHFRYACDKTLRYILDHLAFRSLQTSDWARAYYDQQRARGHGHRQALRALGAKWLKIIFVMWRDDVAYSEEHHLATIARQQLRCSVPKMA

SEQ ID NO: 211699 - protein, 326 aa, unidentified
MQGKEASEQDTKGKSNAGIDVSKSWLDAHVLPAGATLRVANTREGIRKLKRWLIQFDLALVVIEATGKWHRDVRRSLHAAMVPVAVVDPFRVRMFAKACGVLAKTDRLDARVLAQFAAVMAPAVRAPASEVMEELAELVTARASAVAEQTALKNQLSTATGTFLKRQLGRRIQRLAKDIAALEREILKCIQADQGLARRYAILTSITGFGPVVATTLIACLAELGTCSRKQIGMLAGLAPVADESGQRQGIRVVWGGRPNIRRVLYLAAITAARFDADMKAFFNRLIAAGKPAKLAIIAVARKLVVLANILISEGRMWQPHSPKHA

SEQ ID NO: 211700 - protein, 346 aa, unidentified
MSVYCGVDFHARVQTISYLTTEDGEVQQVELHHGQDDVRAFYAQFQGEVIVGFETSGYAYWFEELLEELGHQVWVGDPAEIRRLARRRQKNDRRDADLILALMVSGDFPRLHRQSAESRQVLQQLRYRQRLVKLRTIVMNSLQFMALSRGVSLRSKLMTRRGQERLQALRLSIVMTQQREELLSLLQELTGRIKTVQAWLEQQAQSDVRVVRVMTHPGIGPLTGLCLVHTLWPVSRFRDGRKVTGYVGLDPTEHSSGERQRFGSISKQGSRMLRYLLIEAGQAAARHDQDLKQLYWRVQLRRNRPKAKVAVARRLLVRAFIMLRDEIDYAEFVRRGVAARSSRVAP

SEQ ID NO: 211701 - protein, 324 aa, unidentified
MRAFIGIDVSKDTLDVCLLKESGKPAFKQFRNDACGFAKLLRWSVNLTPLPKHFCMEATGPYSQELALFLSEAGELVSMENPRRIKHYGIGLGIQNKTDHADAYLIASFCQKHEPAPFRLASPEVRELIGLLRRLDAVETHRHQEHNRLKQPGLTKEVIRSLKSSISFLEKECRRLKDQIQQHVDNHPKLKADRDLLTGIPGIGDTTAYWLLAELGDVSLFPDAKSAAAFAGLNPCVCTSGTSVRKRTRISKTGNVYLRRALYMPAMVAARYNPLVRDLYERMTKAGKHKMVALAAAMRKLLMIAYGVLKNQKEFSAEPAAEAA

SEQ ID NO: 211702 - protein, 348 aa, unidentified
MALTAISVLGVDLGKNVCSVVGLDRSGAVVMRRKVRRETLIALAEKLPQCVIGMEACCGAHHLGRVFATHGHDVRLMSPEYVRPYVKAQKNDDRDAEGIAEAATRPTMRFVDLKSQDQLDIQTLHRSRDRLVGERTALINQLRAILLERGHVAPQGKRKLERFLSVLMDEQGGAELSPRIVLLIADARAQWAELDQRIAAFDAEFVHWARENEEARRLTTIPGVGPTIASALVAAVGRAESFDRGRDLAAWLGLVPQQFTTGGKPKLLGISKRGNKYLRKLLVHGARAALPHVAERDTPLGRWAKGLLGRAHHNVAVVALANKLARIAWAVLRRGETFAVKGVHSMAA

SEQ ID NO: 211703 - protein, 465 aa, unidentified
MGSEGCRIFRTQIPLLKLAIIISRMHECVFERVWEIVPFEDDNICPYQEQNKMEKQKNIVCGADIHKKFIMATILSRDGNKIRGRFGMTLDEILRFKEWVINNNCEAVAIESTGIYWISIYTVLEGSVEVILANAYKIKHTPGRKTDKRDSKWLAELCLNGMIEPSRIFPKDDRELRALTRAREKLVNNSTQMKNRIHKELESACIKISSVLSDIFGVSGMKIINGLLEGKNIDEIIKMITSKRILKKEQELRKAVTNSLDPARILMIRTYLGLIEKIESEIEILNKEIMNRMQKLKEDLEIAMSMTGMGFSSASTILAEIGNYKDFETAEQLASWCGLTPKVSQSADKLVTGSITKQGSKHVRRMLVQVAHAIAKTKNSKLKKFFLHILAKKGKKKAIVALARKVLCILHHLLVNREKYQDAEMLKTKKVKLNWASSPVQMTEQDMINVLVGAGYTVQKMRECV

SEQ ID NO: 211704 - protein, 391 aa, unidentified
MPKPQQRQPDDLSRSLISLNMDTTLIAVIEMSQSSWLVAGIVPGVERQPLKKIKPDEAQLLALLCRWRDEASRAGHHVSRIAVAFEAGRDGFWLARWLKVNAVDAHVMHASSIAVSREHRRAKTDRLDTELLKRAFIGWLRGERGHCKMVAIPTISVEDAKRPNRERENLVSEESRIINRMKAALTRLGIRGFNPKLKKATERLEGLRTPEGEAIPPNTIAELRRDMARRQFVRKQIREIETAREQHHANGCEDGPHAMVRLLARVIGVGIETADMLGQEVLSRNLRDRRAVARYAGLTGAPDESGAKRREKGLARSGNARVRRGMIQLAWRFLMFQKGSALAQWYRDRTENAAGNRKTMVVALARKLLIALWRLVRDRVVPDGVVLRPTQ

SEQ ID NO: 211705 - protein, 394 aa, unidentified
MKLIGIDIGKNKHFFCVMDQQTGEIISQPVSFSNDKEGFDFLVQKIKSYPKDSILIGMEDTGHYHFALLKYLLDLQYTVALINPKTTDFNRKMQGGITKNDKLDTINICDVLDTPERKKQYRITKVNSFDLYEQKQLTRHHHNLKEEENVYKNRLQKCIDIVFPEFNKLFNSKYGIVYMNILKMFGSAENIANTDIRTIRKCFEIEGRGNRISLTPERLKECARSSIAISSSAEVIQIKHLTAQIELIEEQLTEIDKKIEEFSIQNNSPILSIPGISHFSGTSILAELGDISNYSKPSQIIKFAGVAPLHYESSQFNAQHTAITKKGSKYLRKTLYQIILPVIRHNPVFNKYYQLKISQGKGHRCAQGHCVRKLLRIIYHLLKTNQQFDPQLLR

SEQ ID NO: 211706 - protein, 347 aa, unidentified
MRFYTQQHKYYCGIDLHAKAMYVCILDQSGTKLVHKNLPTTPEAFLRVIAPYRADVVVGVECMFTWYWLADLCQKEGIAFVLGHALYMKAIHGGKAKNDKIDAHKIAVLLRGGRFPVAYVYPAEMRATRDLLRRRCHLVHQRAELLAHIQNTNSQYNLPELDKKLAYKANRDGVADHFPDPSVHKTIEVDVSLIDHYDKLLGEVELYITRTAKTHDVQTFARLQSVPGIGQILALVLLYEIQDIHRFPRVQDFISYCRLVKCAKESNNKRLGTSGKKIGNVHLRWAFAEAAALFLRHNHRGKAYFTKLEHKHGKAKALTVLAQKLARAVYYMLTRHQAFDLQRFVAA

SEQ ID NO: 211707 - protein, 343 aa, unidentified
MEYYVGIDVSLKESHLCVVDSKGKIVRESKVASDPEALAHFITEIGFPITRVGLEAGPLSQWLREGLISAGIEVVLLETRHVKAALSAMTVKTDRKDARGIAQLLRMGWYRPVHGKSVDSQEVRALLVGRKLLQAKLLDVELSIRGILRGFGLKVGEVSRGRFDARVRELADGHAMLEAVIGAMLQARGALWNEFTRLHREMLKIARADNVCRRLMSAPGIGALVAITYRSAVDDPCRFGKSRTVGAYFGLTPKKYQSGETDIDGGVSRVGDAMVRTALFEAAHIMLTRATRFSTLKRWAIGVAKRRGMKRAKVALARKFAVVLHRMWTDATEFRWGRDAAAA

SEQ ID NO: 211708 - protein, 400 aa, unidentified
MDETQRFRWFLGIDVSKETFDACCINMKGESLFSLSASMNRKGFEELIKQLSCLSISQESVLVGMESTACYHVNLYSFLISLGYTVIVINPLLISNFVKLQLRKTKTDKKDASVIAQFLLLNRDSLCQSLISSDFSELRDLSRQRESLVDQMSSIKSDIKRLLSVTFPELEQVAGIFSKSMLRLLCHYPSAASIRQLKRSQIAKLLIPGSYGKQTAASVERIIKAAQGSIGTTSPAKEIILRQKASLLIQLEQHLQELTDILKQLCQAKIQQDTGILTSMKGIGEKSAMNFLIEMGGDIKQFERHQKLIAMAGLDPALYQSGKIDRKGKISKRGNRHLRRVIWLMTTKVIQFNERFKQYYLKRIKDGLPYKKAVLATAHKLIRIIFAMLRNKTLFDPRMN

SEQ ID NO: 211709 - protein, 345 aa, unidentified
MPTAEVSTFAGIDVSAHELSVALRRGQGDDKPAMAKFPNQPSGHKALIACLLRDGGRVRVCLEASGNYSLDLALTLQAHRQVEISVINPRRARRFAESLGERSKTDPVDARVLCEYAARMRWVPWQPPSSVALHLRALTRAIADLGVIHTQQNNRAHAAAASQALPVLVVKEMQRHQKYLEQRMTRLRREALRLIVRDPELDRRFRLMLTTTGIGETSGLQILGELAVLPDMLDARQWVAFSGLDPRLFKSGKSVEKRPRISRAGSRHLRRALYMPALVALRRDPYLRAFYQNLLARGKARLQAVVAVMRKLLHALFAMFRTNQPYDGSKLCAVALAVNAIAACA

SEQ ID NO: 211710 - protein, 331 aa, unidentified
MKNKEIVGIDVSKKVLDIYILSEKHHFKISNDPGGFADLIELCAMKLGERFENVFFCFEDTGRYSKLLSVFLQESQFQFAALNALDIKRSMGLTRGKTDKKDARMIALYAWRKRDELSVTNLSGPIIDQLKQLLTLREKLIKHRTAFKNAGKDLHDCYIDGEFSFIKERHTSMLLYLNSEINLVEKELLRIINLHEELADTFRLLLSIRGIGKVLAVYLITLTDNFTRFLSPRKFACYAGIAPFEYSSGSSVKGRTKVHSCANKQIKSLLNMAAMSSIQLNGEYKTYYLRRLSEGKNKMSTLNIIRNKLVFRAFAVVRRGTPYVDLYRFAA

SEQ ID NO: 211711 - protein, 399 aa, unidentified
MEYQRYAGIDIASQRHVVAIINPACEVLVKPTPFGEDALGYQKLFALLGDPTDILVAMEATGHYGQNLFSSLAEQRFPVALLNPLRTRRFAQADLTRAKNDSIDALGIARFAAQKRLEPTPPVDQERVELREMVRLLDRFTQDHGDRLRQLHRQVDLGFPEFTQLVRTMESHRATAILAAYPTAAAFTEPCFRKLASLRYDGSHRVGPQLARALIDAASISVGRHHGLPNRTAVQYLCEDIARLRVKIEELRAEIERRVGEHPVAALLTTIEGLGAVGAARIIAAVGDPARLRSGASLAAYVGVVPGDRQSGLVSLRRASLSPIGNPRLRRSLFMTTLGAVRRNPWLGAYYQRLRAKGKPPKLALIAALRKLLMAVYSVAKHRRPFVPRLSSANDVPSQ

SEQ ID NO: 211712 - protein, 349 aa, unidentified
MWAIGADVHKRSTTFYALDDDGEPVDGFNRLFRSVRSNEEGYLEVRRYLDGKEYSILMENSTKTHDVVWTMESLGMEVLVAHSPDLKKITKSDKKTDENDARDLAMYLLARLSGADQFNLSYMCSKEDMMARQLCRAAKQEMVDRGKIKRRMRSHALLYGIDIDRLDPTTASGRKRLLELDDPVLDNLVRSMEDNLSRQKALEERLASMFSGNRTFEKIDAIPFFGLITSAYLTSYIGDISRFKDSKAFVASLGLAPRERNSGEKTSHCGITKKGDPHARWLLIQATIGHVRGCESSPVTRFFNRKNGGSLSERGEAELTPVMNRQAIVAAAAKMATIIYTLVVKDRDW

SEQ ID NO: 211713 - protein, 429 aa, unidentified
MNYIQNEKIEQVTDSTIVVGVDIGSQIHYARAFDNRGRELTKRVFSFHNDLEGFNSFNLWVETLKTENNKTAVLIGCEPTGHYWFAFAKYVNDHQKRLVMVNPFSVKKIKELDDNSPKKTDSKDPKTIAKLVVEGRYSIPYMPEGIYAEIRDLVYSRDRIMKQHNISANRIQRWLAIHFPEYLGLYTRFDAISGLAVLEKAPLPKDVIALGVNGIRKIWHDKKMRGRGVTEDRAKTLVEAAHNSVGLDGGIGTKSELYMLLEEHRLWTSQLEAVNKVLEEMILKVPHVEKLLAIKGVGSITIAGFIAEVGDIRRFDSPKQIQKCAGLELVENSSGKHKGRTRISKRGRRKLRKILYQVMVPLLARNKEFRGIYDYYVTRVKNPLKRRQAMVAVSCKLIRVFYAVLTKGVEYDRFKMMSDIHRKSDIIAA

SEQ ID NO: 211714 - protein, 408 aa, unidentified
MKRYYIGLDWGDRLHQVYVGDDQGKKVREMKVPETVEGLAEIGRWLDEQRAEGFELWAAIEKPAGRIVDFLLDHGVEVYPVNPKAVDRVRDRYRMSGSKSDAFDAYVLAEFLRTDQAHLKALRPSSEKAQELKMLCRDQRRVVRHKTRLLNQLTTTLKEYYPRPLDAFENIETEVALDFLMRYPTAAHLGALKRKEFNRFATQQHSLSKPRCEELWEKLQKPQLAVPEHVVRAKAQLLEVLIDQLRASIKAVKTYHHKVESFFASSPAAQLATTLPGGKSGTLVAAIWAELGDAAGRWKSAGHLQAEAGAVPVTKASGKSHVVLFRFACNKHLRYSMYWFSFVSLNNSEWAKLYYRSQRDKGHNHPQALRALAAKWLKIIFVMWRDHKPYDEQFHLANIALQKMRQAA

SEQ ID NO: 211715 - protein, 343 aa, unidentified
MLTKNVIAIDLAKNVLQACHISVHGELLSNKPLSRQKMKEFLAKAKPSIVAMEGCCGCHYWGQLAERFGHEVRIINPKKVKGYLEGHKTDHNDALAIANAAIQIGIKCSRPKSLEQQSMQSLESSRRFLSRSVVSLGQHIRGTILGYGIANPKGEKGLKASVQTVLDGETEIPANVVSVLSMLWEQYKQLKSKLIAFEKEKNALTRQIEPCQRLMAIEGVGEVTAAMLYTTLGDGKQFKNGRQASAFIGLTPKQHSSGGKVFMIGIDKCGGVKELRSLLYLGAMSYVGRLPEIPITQKDAWLKKIIERIGFKKACIALANKVVRTAWAMLRNETKYSPILITA

SEQ ID NO: 211716 - protein, 355 aa, unidentified
MIDQQPEKEVFAGVDTHTDTHHAAVVDPLGRPVADREFPATTQGYRALLMWLIMFGHVQAVGVECTGSYGAGLTTVLSAADLAVVEVNVPDRGTRHARGKSDPIDAYAAARAAASGRATAIPKSHTGTVEALRQLRVARASAIKARTQAINQLIGLRVTAPEPLRASLTGLTRTTLVNCCLRLRPGANLTCPTDAARYALRQLARRIRMLTEEIDEVTERLAMLTTSAGPELVALFGVGTETAGQLLVTAGDNPERLRTEAAFAALCGAAPVPASSGRTDRHRLSRGGDRQANRALHMIAVARMRYCPRTRAYVARRTQQGLTKKDIIRCLKRFIAREVYRALTRTHASGTTSTT

SEQ ID NO: 211717 - protein, 465 aa, unidentified
MSKTLGVDVACRAAHQGSLAVDGRLIWTGRRFFTRPADLERLWADLDLADPAELTVVVEPTRNAWIVVAAWFRRRGAKVVMVPTTQSADLRAYYSKHAKNDRLDSALLARLPLLHPEGLREFTGDGPADPLRRLTKQRSSIVKRRTAVLQRLDALLELLGPAWYEVLGSNYGKAALMLLARYGDPHALIRLGQARLARFLARHSRGWWKDDHATRLIAAARESLELWGSGGIDFAELAADIAIEAEQAQMLTEQIEDLDERIANLYQDADPDGFVASAPGVGPVTSAIIAGRIGDPHRFKSLAAIRAYSGLVPKVSQSGVVETRGGITKAGDPLLREALFAAADAARKTDPQLAAKYARLMATDRHHESAICHIATTLLTRIAASWRAGEHYALRNTDGRIITPEQGRQIVRDNHKVDPKIRDTAAHRRMAQRQKNRTSREQKKSHSAPTSRPATKSIEPTPEVA

SEQ ID NO: 211718 - protein, 368 aa, unidentified
MDVLYQSCAGIDIHQANIVVCILHGPLTSTRPKHEMATFDTTTKGLRACHDFLSQFHVEAVGMESTGVYWRPVWHALCDDFELILAQPAHIKAIPGQKTDKKDAHWIAKLTRIGLLPRSFVPDETIQELRELTRQRKHYVESRNRETNRIHKILQSGGSKLTTYIEDIMGLSGRNLLQLLVDGTPITPRIVHQSVYTSLKKKVPQLLEALDGYFSDHHRFMLKQSLEIYDFYQKQIELLEERINVYLSQYEKHVEILDSIPGIDVITASVIISEVGVDMSQFPTAGHLASWAGLCPGNNESAGKKRSTKIRHGNSYLKKYLCQAAFAARNQKGSPLADRFYQIQSRRGSQKATIALAHQLLKIAYILL

SEQ ID NO: 211719 - protein, 342 aa, unidentified
MEYGAIDLHKVKSEIRVVREDGTVLLETRIATSREDFARVFGRPPMRILVESSTESEWVAQTLEAVGHEVVVADPNYLAMYGARSRKVKTDRRDVAALAEACRTGVYRPAHRVSAAARDLRRTLRVRTQLVRARSGAICVLRAMLRQEGLRLSSGTAERILMRLDRVALPVALDAIVAPLRALITHLNTQLLALEATLTATARQDARVQRLMTAPGVGPLVALHFVAVLDTPARFGGNAGRASAFVGLVPSEDSSAERRLKGHITKTGPSDLRALLVQASWTLWRSRTADAAALREWAHALAARRGRRIAVVALARRLSRILYALWRDETVFRAPARPVVAA

SEQ ID NO: 211720 - protein, 400 aa, unidentified
MLSIGIDVSKGKSTVCGMKPGGEIVYTPFEVQHTREGMSELVSLLRGSGEEVRVVLESTGSYHCPVVAALLENGIFVSVVNSLRMKRFCSQSIRRVKTDQIDAMQIALYGLAYWQELQPTRLPENTYRELQLLARQYYQMTSLLIKAKVDFNALCDQVLPGMQELMSDHAGRHKLSDFVLRYHHTAHILEMGETRFRKDYCKWAEKKGYRNHERMAALIFATAQNGIPVLPNAPSTQIVITEAIRVLHTVEASRDAILTQMQALAKTLPEYSLVREMPCIGDTLAPRLIAEIGDVRRFHSKRALIAYAGIDAPPYQSGKFCANNRHISKRGNRYLRKTGYEVMQSYVMHKPANDPIFTFIEKKRGEGKSGKLAMVAGLNKFLRVYYGKVTELYRSLPAIE

SEQ ID NO: 211721 - protein, 371 aa, unidentified
MNQNLIYVGVDVDDVRYHGCALDQRTGEALEFQCRSTLKGLMGQLEKVSEYFGGVDLKLCYEASYVGFSLQRDLKDQGYACEVVAPSSIPRRPGKAVKTDRIDAADLAQFYANGLLTVVTAPDAQLEQDRDLLRSRQYVMQQQGMVRKHIQSLLRRNGFHYKAETQHKTHWQKHHYGWLERTVEACSGSLKVNLSLLLRQLRSLDVILADYGQEVEALAVTPRYREPVKALTCYKGIKHLFALTMITEIGDVKRFPHRRQLVSWIGMDIREYASGGKSNRFGITRQGNRHLRTAFVEANQRGYRTASLSKDIKVRRANAKPEYIAIADRCLRRLNKKGNRLLLAGKHPNKVKVACAREMVGFVWESLRAAT

SEQ ID NO: 211722 - protein, 367 aa, unidentified
MKQSSKIFVGMDVHKDSIDITLAEQGGEVRRFGEVRGDRAALLKAVRKLTSRGGELVFVYEAGPCGFWIQREITALGHPCWVVSPSLIPQRPGNHVKTDRRDSENLARLARAGELTPVHVPDVRDEAIRDLVRARDDAVIAQRRARQQLKALLLRNDIRYVGKTSWTSAHLRWLSELKLPQPAQQIAFQEYVDAITVATARIERFEQAMRDEVLTWRFAPAVAALQAMRGIQFVHAMTLVAELGDLTRFASPRQLMAYLGLVPSEDSSGPRRRQGSITKAGNTYARRALVEAAWAYRHPARLTRIIALRQDALPKQACDIAWKAQLRLCAKYRRLRARRVLETKIIVALARELSGFVWAIGQHVKPQ

SEQ ID NO: 211723 - protein, 463 aa, unidentified
MARKARRASQSHQLPAPLQHVHLNAAGIDVGAESHYVAVPVDRDPQPVRSFSAFTHDLYRIADWLKACGVDTVAMESTGVYWIPLYEVLVRRGFKVYLVSPQHLKRVPGRKTDVLDCQWLQELHTYGLLAGAFRPEDHEVVLRSYMRQRAMLVSYAAQHIQHMQKALVQMNVLVHHAVDDITGATGMRIIRAIIAGERDPNTLAALRDPGCKKDAATIAQALEGNWREEHLFALRQAVELFDSYQEKIHACDQQMLAHLRSFQDRSQSGRGAPPTPGEGRPRKNELTFDAATEAYRITGVDLTKVTGIKGHTAFKLLSEIGTDVVHWPTAQHFVSWLTLAPRNRISGGKRLPHHWAPANAHRAAQALRVAAYSLHNSHSYLGAFYRRMAARLGKVKAIQATARKLAILIYYALKYGNDYVERGERYYDATYRNRVLKNLTRRAKDLGYRLVKEDPNTPAPQPA

SEQ ID NO: 211724 - protein, 344 aa, unidentified
MSEVITIGLDIAKHVFHVYGADERGRSMFSKRISRGKLLDFFAAQPSCKVALEACGGAHHWARQLTQLGHEVRLIPPAYVKPFVKRQKNDAIDAEAICEAAQRPSMRFVAVKSEEQQAAGLLFRTRDLLVRQRTQLINAIRGHLTEYGWIAPKGPSHVARLADLIEEEEMASSLPEATLAMFRLMLDLLAGLNGKIADLDKEIARRARQDEVSRRLMTVPGIGPICATALAALAPPVETFAKGRDFAAWLGLTPLQRSTGGKQKLGATSKMGERTLRRLLIIGSSAVVQQASKRGAPKGSWLEQMLARKPRMLVTVALANKMARIVWALLIKRENYRAPVAAKA

SEQ ID NO: 211725 - protein, 414 aa, unidentified
MPETAYALYVGIDWGTVTHQVAVLDAQRVLLGERAIAHEAVALHALTEWLTQLARGEPARVAVALEVPRGAVVDTLLERGFHVFALNPKQLDRFRDRYTVAGAKDDRRDAFVLATALATDQPAFRALTPEDPLIIELREWSRVEDELREEWGRLASRLREQLHRFYPQALALCPAADEAWFWALVGLAPTPAAALRLRHAAVVTLLRAHRIRRLTADQVLAALQSPPLRVAPGTVQAASAHVALLIPRLDLVDRQRRDCARRIERLLDALATTGEHQGHRDVTILRSLPGVGRVVAATMLAEASRLLAARDYHGLRTQAGVAPVTRQSGKRLLVGMRYACNPRLRNALYYWGFISVRYDEHSRQHYQLLRGRGHSHGRALRGVVDRLLTVLMAMLAAQTTYDPARRSAMLALVP

SEQ ID NO: 211726 - protein, 348 aa, unidentified
MLIVGCDFHPSWEHICWLETETGETGEQKLVHAAGEAERFYRSLPAPALVGLEATGNCHWLVDLLAELGHELWVGDAAQIRASYVRRQKTDKRDAAHILKLLVEGRFPRIWMPSAEVRDLRQLLLHRHKLVEMRARVKNGLQHLMLNRGVQKKARLWSKTGLEQLRELALPAWAGRRREDLLGLLGMLDQQITPLDEAVSQAAQQDKMARLLMTQPGVGPITALAFVLTLGDVSRFAHSKQVASYLGLIPREHSSGGHQRLGAITKQGNRMLLVEAAHTATRYDPQIRREYQHRCHSRPKNVAKVAAARKLAVKLYWMLKSANPHPGSVATESRPRVPLVGLTPDRCG

SEQ ID NO: 211727 - protein, 344 aa, unidentified
MKEVTTIGLDLAKNVFQMHGVDGSGDTVIRRQLRRRQLLPFFRKLAPCLVGIEACASAHHWAREIAALGHEVKLMPARYVKPYVKRNKNDAADAAAICEAVTRPTMRFVAVKTCEQQSVLMLHRTRELLVRQRTMLVNAIRSHMAEFGIVAPVGVPQVKELLAVIADQQDDRLSPIARACLEGLARQFLSLHEEISLTERRIHAWHRSNEASRRLETIPGIGPITASALAATITDPSVFKSGRELAAWIGLVPRQNSTGGKERLGRISKQGDQYLRWLLVAGAMTIIRHARRRSTGNLPWLAKLITSKPTKVAAVALANKMARIVWALLSQGGMYQKPIAAPAA

SEQ ID NO: 211728 - protein, 415 aa, unidentified
MEVIVERCAALDVHKDTIMAAVRVPGERSKRHSEVREFRTWTSSLRELRAWLVSHGVTQVAMEATGVYWKAPWHVLFPEPSFELLLCNAQHVKNLPGRKTDVSDAQWLASLLECGLLRGSFVPDPVMSRLRDLTRHRKKLAEERARETQRVQKVLEDAGIKLDSVVSDVLGKGPRRMIEALIAGERDPELLAEMALTRSRARIPELRLALEGGFSEHHAFMLRTHLDTVDHLSTQIAKLDQRLETEIAPFERQVERLCTMIGIGKVTAQAIIAEIGVDMGRFPTAAHLASWAGMCPGNHESAGKRRSGKARKGNAALRSALIEAAWAASHSKDSYYAALYRRFCRRFGKHSESKAIFVVAHSMLVTIWHMLANESDYADLGADWFDRRSNNEQHARRLARQIERLGYKVTVQPAA

SEQ ID NO: 211729 - protein, 311 aa, unidentified
MTDHNIGADISKSHLDAFLLEDGAAQRFDNSAMGFRALTKWLGKAPVARIVFESTGPYHKAFEAKLGETFPLVKVNPLQARQFAEAHGTRAKTDAVDARMLARMGVAFDLVPQVPCSKEILVLKDLNVARTGLIKDRTRLRNRAQTQDIAVLKRQTKARLAQVERHVVELDAEIAALIAAGQTPARNCDILCSMPGIGTVTAAAMLTLMPEIGTLERKQVASLAGLAPITRRSGQWQGKAFIGGGRKPLRDAIYVPAVVAMRCNPDLKAKYEQLRAAGKPAKVAIVAVMRKLIEMANALVKADRTWTPKTA

SEQ ID NO: 211730 - protein, 331 aa, unidentified
MKILDTVGIDMSKLTFDVRIHKSKSYEKFENTNKGFKKLLKWVFNHSSFPKENILFIFEHTGLYSHQLSVFLTEQDVPFSLVPGLEIKRSLGIARGKDDKVDATKIALYAYRLRDEIKTYKLPTEQILSLKRLLSLRDRLVKQRAGFNASVKEQKRILIKKDNKILFDVQEKMIKYLTKQIEAVETQMKIIIQSDEKLNKQFKLIISIKGVADQTALFMIAYTHGFTMFKTWRKFASYCGIAPFPNTSGTSVRGRTKVSNLANKKIKSLLDLCAKSAIQHNPEMKIYYNRRLEEGKNKMSTINIIRNKLLSRIFAVVQRQTPYVEITKYAA

SEQ ID NO: 211731 - protein, 409 aa, unidentified
MEVLYPRCAGMDVHKETVVVCVLTPGPGPDPHKEIRQFATTTGDLRKLAEWLKQEGVTHAAMESTGVYWKPVFNILESSCELILVNARHIRQVPGRKTDKADSAWLANLLRHGLLEASFVPPLEVRELRDLCRMRTTLVRECVQVGNRIRKVLEDANVKLDSVVSDTLGVSGRLMIQALMEGEQDPAVLAELARGRLRSKLAELTAALEGQVRPHHRFLLRQWTRLLSSLEQHIVKVEQEIERHMPPFEWAAALLVQMPGLDRTAACALIGEIGVDMSRFASARHLASWAGLCPGNNTSAGQSRSGKSHRGNPWIKGLMTEIAWAASRTKESYPAALYKRIAVHRGKKRALVAVANSSLQVVWHLLAHHQPYRDLGPDHFDRNNRQHLTQSLVRRLQKLGHTVTLTPAA

SEQ ID NO: 211732 - protein, 307 aa, unidentified
MGLSIGIDVAKHTLEWAAGSSEKIQHTRNEPRPIAGLVRRLITLEPERIVVESTGGYERRLVAKLAEAGLPVVVVNPRRVRSFGQGMGFLAKTDAIDARLLALFGEKAEPPIRPILQGTDRLLADLVARRRQLVSMIVAEKNRKETAPPAVLRTIHPVLRSLEKLVREIEQHIDAMLCQDAERAELLTLLQTVPGVGPAVARTLLIDLPELGHLGRREIASLVGVAPFARDSGTFRGVRRIRGGRASVRTALYLAAMTASRFNPTLAKVYQRLRKAGKPPKLAFVAIARKLLVALNAIARDRTAWQA

SEQ ID NO: 211733 - protein, 395 aa, unidentified
MFIVGIDIAKRSHEAIIIAEDGQVVRKAFSFRNNCTGYNLLLEQVRRLTLVKSQIVFAMESTAHYWLALYARLLKDGYAVMVLNPIQSHSLRELYIRKAKTDARDSLIIADLVRFGRCKASNVPQDKILALRELCRSRAYLVDMAADLKRKLIALLDRIFPEYESLFDSVFSKASIAVLSKYSTPQKVKNANLRKLTDILMESSNGHFGEWKAHQLKEAACSSFGIDDSGGVYSTLLGMFLEQILSLTAQADSLEKQISVFFQEFNNPLTSIPGVGTVLAATILSEIGDITRFSSAAKLLAYAGLDPSVKQSGEFKSNQNRMSKRGSPYLRRAIWLASTVAVHRDPMFQTYYEKKISEGLHYINVIGHVSRKMTAVIFAVLRDGQPYQPILQSAG

SEQ ID NO: 211734 - protein, 359 aa, unidentified
MATKVKKNKINFKRKTVNIGIDMHKKSWRITALVEGDKVLAITPAMPTYDSFEKILSRFKGNHVRIVSEAGPGGFDLYDRLTDDGIKCIVTPPSLIPTESGNKVKTDKKDSYKLAKLLGSGMLKAVWVLSPEERAHRQLVRTRRQILNHRSDVMRQIKSLLLFNNIEIPFKSTRHWTGVFMNWLLKFDLGYETFNRSLKAQIDLFNYLNAEKKILTKDVLQLAKDEKYAQRVALLKTIPVIGPLSAIEILVEIQDITRFKAADELAAYLGLTPSQYSTGEHIRMGHITHAGNTRVRTTIVESSWTLVGKDPEMGRKYEKIKNKRGGKRAIVAVARNLSGRIRRILLDQVPYKLDFQKAA

SEQ ID NO: 211735 - protein, 350 aa, unidentified
MMIGVDYHPSFQQIAFLLEETGEYSERRLNHSDGEAEKFYRDLRLRGVHVRVGMEATGYSRWFERLLAELGFEVWIGDPAEIQARRVKRQKTDRKDAQLLLKLMMEDRFPRIWVPGPENRDVRQLLWHRHRLVQMRTRIMNPLQALAMNEGRRWKSKLWSEPGRAELEKLALAPWGSRRRRELWELLERMNPTIEELTAAAEQEARKRPEALRLMTHPGVGPLTALAYVLIIGTPSRFHRGKQIGNYVGMIPSEDSRGGKQRLGHISKQGNSLLRFLLVEAAQAAARSNPDWRRRYMHLAMRGHKSIAKVAMGRRLGVRLYWMWRNGCAYSPSMECGWYAGQLGTGHGVK

SEQ ID NO: 211736 - protein, 393 aa, unidentified
MICVGIDVAKDKHDCFILSSEGEVLADVFTIQNNVEGFDTLLQTIRRCVCPGDKIKVGLEATGHYSYNILGFLLDKGLDTYVINPLHTNLYRKSLSLRKTKTDRVDARTIAAMLMSDVDLKSYTDTAYHNEELKSLTRYRFDKVRERAKLKQSVSRLVTILFPELEKLVPSLHMASVYALLSEFPGAKQVAGAHLTHLKAVLYDASKGRYGRDMATTLREAARCSVGSVMPTKSLELQHTIRLIRELDAEIEDIEAAIQSMMDEMQSPIMTIPGIGVRMGAMILAEIGDFSRFDSPDKILAYAGMSPSTYQSGQLSLSGAYSHMEKRGSRYLRYALYNATKYVCLWDPVFAAYLAKKRTEGKHYNVALSHAAKKLVRLIYAMEKSRQSYRNAA

SEQ ID NO: 211737 - protein, 351 aa, unidentified
MMIIGVDYHPSFQTIAFLMEETGEYGEQELNHSDGEAERFYRELKERGVSVRVGMEATGHARWFERLLAELGFELWIGDPAEIKTKRVRKQKTDREDARLMLKLLRENRFPKIWVPSPENRDLRQLLWHRHRLVQMRTRIMNQLQAVAMNEGYRWKKKLFSEKGRALLEKLSLAPWASRRRKELLELLDQLDPKIEELTAAVEQEAKKWPEVLLLRTHPGVGPITGLAYVLVIGTPDRFACGKQIGSYTGLIPCEDSSAGKQRLGHISKQGNSLLRFLLVEAAQAAARCNRDWRRRYVHLMMRREKRIAKVAMARKLAVRLYWMWRNHWQYSQLVEFGSNAGKLGIVHGVK

SEQ ID NO: 211738 - protein, 397 aa, unidentified
MLYAGIDIAKRRHMACITDALGNKIAGPFAFDNTRQGFALFTKRMEEACGEEEVVVGMEATGHYWMALFSHLQQAGICACLINPVKTDAWRRFLGSSKVKTDAIDCAIIADAMRIGAFDPSMLACEEIGELKALTRMRQDLSESTSALKCRIIAALDRVFPEYAKLFSDAFSASSKAILKRCPTPKECSKVKASSLERILAKASRGKCGYEKAQKIKAAARESCGAAFADRAISFEIKSLVAQLEFIERQIDEADLMIRELLDGIEPLVLTIPGISYAIGAQIVAEIGDINRFDNSDALVSFAGLNPSKNESGEFSSTENRITKQGSPYLRRALYLAAQAQLVQGNAFRAFYDRLRGRGKRHRVALVAVAAKIARVVFAVLSKQEPYREEAVGVATS

SEQ ID NO: 211739 - protein, 385 aa, unidentified
MTTQRKACKFIPRDYDVFAGLDVDKRSMSVVFADHDGGQRALRLANKATPLLNYVRKHYPGQRVAFAYEAGPTGFGLHDELVRQAYTCVVAAPSKVPRARGDRVKTNRLDSRKLAESLRGGQLPGIHVPPPIYRDLRHLVQLRDTHVRQLTASKLRIKSLLLYEGIPFPDPQEKWTVRAMRELQTLPCSQTVRFKLDDLLETLHFHFQAAARATKQIRQHCLHDPQLQQSIDLLLSLPGIGWIVASHLVARLGDPQQIKNGKQIAGFLGIVSSEHSTGEKENRGEITRSGDSRLRNKLIQSAWTAIRKDPELRAFYRRIYQRHPQKVAARKAIVAVARKLTQRIYVVLKEQRPYVVRPDSSIAPLTAEETVGPRDRLDGAQNDQP

SEQ ID NO: 211740 - protein, 354 aa, unidentified
MAKSIETAVAVIGIDIGKNSFHVVGLDRRGAIVLRQRWSRGQVEVRLANMPPCLIGMEACVGAHHLSRELKALGHDARLMPAKYVRPYSKGQKNDFRDAEAIAEAVQRPTMKFVATKTIEQLDLQALHRVRERLVSQRTGFINQIRAFLLERGIAVRQGRLSLRLALPQILAAPPDVVSPRMLHIIEDLARDWRRLDERIQALSDEIEAIARQDVGCERLMSVPGIGPIISSAVVAAIGTGDAFSKGRDFAAWLGLVPRQISTGDRTILGKISKRGNRYLRVLFVQAAWVVLVKRKSRERLGLDRWLEAAKNRLHHNVLAIALANKLARIAWSVLAHGRTFAAENAAEATGRAN

SEQ ID NO: 211741 - protein, 343 aa, unidentified
MKRMYCGIDLHATSMQICVIDGDLNRLLERNIRNDLLTVLALLKPFRKGLSILVESTFNWYWLVDGVQEAGYDVHLAHTLGLFRITKAKVKTDRRDAYQLAKVLHDGEAPLAYIYPKETRPIRDLVRQRTRLVADRGHAYSSLRLRLYQHGLAHHSRNAAKSWTIEDLDVLLKEPSARFLARQELDRIALISDQVAAIEVLILQSVSGQDGYTHLMQIPGFGKALSAVVFYETGDVTRFPSARHYSSYCRLVPGTADSGGHSKPGRGSKQGNPHLKAAFTQAAQCAVRHYPNLRAFYDRQASRHPGRGSKLIATDILGHKLAQAAYHILKEGTDYDDSKLFMS

SEQ ID NO: 211742 - protein, 373 aa, unidentified
MPKYSTAFGMDVHLRSTTVCALDADTGEAVTRRFPGNPWGEIAGWMDGFPGPSLAAYESGYLGFAPQRELAGLGVECVVAAVSKIPRSAADSASKNDRNDAARMAKAILAHDISPVWVPSPEVEGIRDLAGAYDGAAARLATAKQRLLAFLARRGFVYGGTTPAGNPRKYWTYDFLRWLDKARPEDDGGVRALAALRNEVEAAAEARADLLSEYRAAVDASPIAAEVAALQSIKGCAFALAAAFSAEVGDFTRFRSGRQVTAYFGLAPSQRSSGDSVRLGGVSGAGNALVRKLAVEGSWCYAAARHQPKLMPRDTGVPLEIRVHGRKGSERLLRRREEMLARGMPAAKANAATAAELVRWLWALGMMCRKGAE

SEQ ID NO: 211743 - protein, 347 aa, unidentified
MRFYTTQHPFYCGIDLHARTMYVCILDQAGETLLHRNMTATPEALLKAIAPYREQIVLAAECMFTWYWLADFCAEHGIPFVLGHALYMKAIHGGKAKNDKIDAHKIAVLLRGGMLPQAYVYPAEMRATRDLLRRRMHLARKRGELLAHVQNTNSQYNLPAIGKKIAYKANRDGVAERFADPAVQKSIEVDLALITYYDALLRDVELTIVKTAKHHDANTLYLLQTVPGIGKILSLVLLYEIHDIERFPRVQDFASYCRLVKCARESAGKRSGTSGAKIGNAHLKWAFSEAAVLFLRDNPAGQKLLTRLEKKHSKGKALTILAHKLARAVYYMLKRQTAFDLETFLHA

SEQ ID NO: 211744 - protein, 329 aa, unidentified
MTPQLPLPVVGIDVSKATLAVCYQVNDQVKHLEISNNKLGFQQLVKTCGAQCQFVMEATGTYNLALAYHLHEQGGQVAILNPLVIKRFIQMHLSKGKSDRKDAQWLLRYGQQQPLKAWQPDETVLVECRQLEQVNEQLLKQKTMVSNALEALQRQPIISKLALKRLQQTLKTLTQQVEAVEAELLALLEERFAAQMTLLCSIPGIGRKTAGMLLLFAGGFTHLDNYRQLIAMAGLSPREHTSGTSIRGKVRITKMGGGLIRGKLFMCSFSAKKTNAACAALFDRLVAKGKNKKLALIAVCNKLLKQAFAIVKSGVPYQTTFCSKLAPTS

SEQ ID NO: 211745 - protein, 315 aa, unidentified
MTTGAVEIFVGIDVSKAWLDIAVHGQEQTYRAGNGEEGIANLVKMMKELGPALIVLEPTGGFEMLAVAELTHAGLPVVVVNAKRVRDFARATGQLAKTDKLDAKVLAHFAAAIRPAVRELRSAEEEQLTALLTRRRQVLDMLTVEKNRLVTVRAKMRTDIEAHIQWLSGNLQELNKEIAGFVESSAVWKEKDALLQSVPGVGPVTSATMLGMLPELGKLNRQEIAALVGVAPVNKDSGRKQGKRRVYGGRADVRSVLYMAALAAKKFNPVIRKFYERLTKQGKEKKVALTACMRKLLVILNVMMRTNETWRAQTT

SEQ ID NO: 211746 - protein, 321 aa, unidentified
MAMLSFCGVDVSKERLDVMVLPEQQRFSVRNDAAGWAELIARLRSFAIAAIGLEASGGYERGAMRALLAAGVPACRINPFKLRQFARASGVLAKNDPLDTRMIASFVAIMPTRPARPRPPAIERLTEMLAIRRQLNAEKVAAENASRLLEDTMLQRLSRRRIARLAADIDMLDRRLVEITASDAALAHRYRLLTSMPGVGLVLACTLIALLPELGTINRKQVAALVGVAPYAFESGKFKGRRCIWGGRAPVREVLYMAAMSASNWNPVFKAFHTRLKAAGKLPKVAIVAVMRKIITTLNAMVRDDVVWADHLHGRHIVPAA

SEQ ID NO: 211747 - protein, 341 aa, unidentified
MIMFAGLDIGGKRTAICVIDESGKAIWRGTVDTHPEMIDGALQRFKGSLDKVGLESGPFTPHLFRSLEAMGYPMICMDARRAADAIKSRRIKSDKGDAWALAEMLRTGWFSSVYVKSVDTHRLKALLGARDQLVKLKRSLGNQVRGLLRPFGIRLPSRAGRKKFDEAAYLATQKDPILHAAVRALLESLASIEGQQARLDDELDELAKRNEIAWRLMSVPGVGRITALAYMAAIENVDRFHRTRDIGAYLGLTERRYQSAETDVGMGISKQGDAMARHYLYEAANVLLTTVKKRFALRNWGLRLIKTIGPKRARVAVARKLAVLLGRMWKDGVHFEAAVAA

SEQ ID NO: 211748 - protein, 458 aa, unidentified
MQTCPPGTVAGFASVSGSSAHEVVERRDEVPTRPAMRQGPGCQGAPLVPHNTSTSASEVFAGIDWGGSFHQVCLINAHGDVIVQQRVQHDLAGLAELDRLLLVHRTPRARLRVAIERADGLLVEHLHTIEVEVFCVSPKISARARERYRLAAAKSDAFDAFVLADTLRHEHRHWRALSPASPALAELRAISRDRDRVVIAQQATENRLRAVLEAYHPAPLHLFSSLDRDITLDFVTDYPTPEQAARVGEARMQQFCRRHGYSGRTDPTVLVERLRPHLLSAAEGTEAGKAFSANMFTEELRLLNAHLRAYDKRLVELLDQHPDTPIFTSFPGIGPVVAAALISEMGEDRGRFPAPEALLAEAGLSPVTRASGRTRQVRFRYAANRRMRHMIDWWAFVAAREDAWSRRIYDDARARRQGKYRALRGLGSRWTRILWRCWTDHTTYDPAIHHKQQEPAQA

SEQ ID NO: 211749 - protein, 350 aa, unidentified
MNRYIGLDAHSSSCTVAVVGPAGKRLQSQVIETNAQAVINFLLTIPGDRHLCIEEGTHANWLYEVLSPHVQEMVVARVRESRGPKSDKIDAFGLAEKLRIGAIKTRIYKKRAAFGQLAELSRAHTVLVSDTVRVKNRIKCMYRSRGVNVGGPGVYAVATREDWLGELPAKARYRAELLYEQCDALSELRRRAEREMLGEARKHAVYRVLKTCPGMGRIRTAQMLPIVVTPFRFANKRSFWAYSGLAVVMRSSSDWVRTQSGDWVRAPVQQTRGLNRTCNRTLKAIFKGAATTVIQCAKDEPLYGHYVQLLDGGTKPNLARLTIARQIASIILSMWRSEEVYNPGKLKRKT

SEQ ID NO: 211750 - protein, 337 aa, unidentified
MEQQTQYVGIDLHRRRSVIVRRNQGGETLDTVRIDNDPVALAAELAKAGEHPEVILEATYGWYWAADVIQECGGNVHLAHPLGNNWGNRRVKNDERDATDLVDLLRLGRLAEAWVAPPPQRELRELIRYRAKLVHLRTGLKAQVHSVLAKEGVAVPMSDLFGVAGGHLLDDVHLGDAYRLRVNSLRELIGHVDHEIEVVENQVAPIFAGDLGYHAVQAIPGVGPVLAAVFVAEIGDISRFTSARHLCSWAGLTPTHKESDLTLHRGHITKQGSRLVRWAAVEAAARQRSDNPIRRHHHNVGERRGKQIGRVAAARKLLILVYYGLRDGEIRCLAKTG

SEQ ID NO: 211751 - protein, 457 aa, unidentified
MARKRTRKKKQDSLSEIPKLDSLKQLNLNAAGLDIGAEEIYACVPEDRDSQSVRVFSAFTIDLYALADWLQTCGVDTVAMESTGIYWIPIYEILEERGFEVFLVNARQIKNVSGRKTDILDCQWIQQLHTYGLLRASFRPSEDICALRSLVRHRDNLIRYRSAHTQHMQKALNTMNLKLTNVVSDVTGVTGLKIIRDIVAGVHNPNELARHRDYRCKKSEKEIAKSLHGNYRAEHIFELRQALELFDFYNLKIKACDDEIQDLYAAFEPQVDVADNPLPPGRNPRGNEPEFDLRSYLYRMTGVDLTRIDGIDVLTAQTVVSEIGLDMSKWKSVKHFASWLGLSPNNQITGGKIIRRSTKRITNRAAQALRMSALALTYSDSALGVFYRRMRAKHGAPKAITATAHKLARIIYFMLKRREEYVDPGASYYQEKYRERVVKNLEQKADKLGYKLVPNEA

SEQ ID NO: 211752 - protein, 415 aa, unidentified
MEPVLDSCAGMDVHEKKVDVCIAHGPLEKSPKFEIRTFSTMTSGLEELKSWLKKFKVTTIGMESTGVYWKPIFNIMEGEFTIVLANAQRLKAIPRKKTDIMDCKRIAKLLRYGLLPNSFIPPREIRELRDLNRTRRKQVGMMTSEKNRLTKVLESSNIKLSSVVSKISGVSSMAMIRALLEKDKLSKEEISQLAKGSLKRKVDLLEKALDGKITDHHRFLLKMHMENLDHLARQIEKIDKQIEMKMIPFQKEANLIQSIPGISKVSAAAILAEIGTDMSQFPDEAHLSSWAGVCPGNNESAGKKKSGKTQKGNSFLKGTLDEAAWAGSKVKGSIYNAFYHNIVRRRGKKRALVALAHRMLMDIYYIIKTGTPYKDKGATEANERATQKKERSMIRLLEKAGYSVVRTCTSEMAAA

SEQ ID NO: 211753 - protein, 405 aa, unidentified
MPVEAGTYHRVLLGGVNADQQVVLQPRRFSFEAWAIWSKAHLLKSDVLVVEATSNTWTFYDGYVELVARVELANANKVTWIAGTDVKTDRLDVMKLAKLCAAHLIPQVWVPPQPVRELRALFSHRRRLVKVSTLVKNRLQSLLHRHQIKAPGGDLYGEANREWWIALGISDTERLHIRHDFANLHLVQQQLEEVEAELQRLSTTEPWAKDLPFLMQIPGIGLLSALAIQAAIGDVSRFGAARKLVGYAGLGSRVHDSGKIHRTGRITKSGRRDLRYALIEAARAAVQHHPYWATVAAKLGARIGEKKALVAIARRLLVTIWQVLTKREADLHAEPERVATKFMRWSWELKPQHRQGLQSREFIRWKLEPLGIGAELTHLTYGKMPRRVASAEELWKKRPDLRPPD

SEQ ID NO: 211754 - protein, 421 aa, unidentified
MKNNAARKLRQVPVGYLRVGVDPHKKKHAAVTMTEDFLVQGKFKFTNSRDGFEEALERARADMEKARCLGIIFAVEAASHLWRNFAYFLDEKGIPFRLINPFSLKRRREGKDLNRRKNDFRDAEVAAQLLCTGEFTETTLPQGVYAELRATYSAYRRVVKEKTRSVNLLKGLLDGLFPEFTQVFKDICGQTALRVLSVCPIPGLIRGMTEEEFVKFVREGYQGRLMRGKLVALHYVARHSVGVKAGAWSVSSEISLLVEKLCLINRHIRQIEQTLVRLVDEAEEGKYLLSIIGLGYISVAGLLAELGSFRSYHNARQMIKMAGSNPTESESAGKRKSKTPMSKKGRPGLRHCGWTAVLSLLRHNPDFRSWAKRLRDRPAHANPLTGKEILGAGINKLLRIGFILVKKQNFYQLPRVPQLVS

SEQ ID NO: 211755 - protein, 314 aa, unidentified
MIISPRCVGIDVSKRMLDIFDDAIGTAERIANAPQAITEQVARWRCGNVLVVFEATGVYDRELAKALHQAGVRFARINPARARDFARAHGRLAKTDEIDARMLACFARTMAPAADQPPEPERNTLAQLAKRRDQLVQMRAQEKNRRSEAYDRTMKESIARVIDCFDEEVEAIEAAIKALIKSKPEISEQARLMQSAPGVGPVACMQLIAQMPELGQVGPKQVAALAGLAPLNVDSGTYRGKRAIGGGRKRVRDALYMAALNAVRRDGPFRSFYQKLRTAGKPAKLALIAVARKLLTTLNAMLRDRKTYLLPQPI

SEQ ID NO: 211756 - protein, 358 aa, unidentified
MRIIGCDLHARQQTVAMLDTDSGELVEKTLQHDGEELRKFYSGLSRPVLVGIEATGSMQWFLELMEELGIECRVGDPAKIRAAEPRKQKNDRRDAQLLLKLLVENRFPTIWMPSTEQRDLRALLRHRHQWVRLRSRVQHTLQSMALNHGLRRGHALWNQAGQHALWTLPLAPHASERRKALMKLYPCLQESIDELDRQVSRQVDQHPPARRLMTHPGVGPVTALASEVFLGDPLRFTDGKAVASYMGMIPREHSSGGRQRLGAMSKQGNTLLRYLWCEAAMHAVERDPELKRFYRRKLVQKGMGKARVAAARKLGIRLWIMMRDQIDYQEFCRRGKARQESGSVRAGMPAINSGPAEA

SEQ ID NO: 211757 - protein, 343 aa, unidentified
MKYVGVDLHKQVISLCVVVQKGAQRAVVQRQRLGCQNTAAIDEFFRSLGKFQVVVEATASYDWFVELVEPLADRILLAHPRKLRVIAESTRKTDKLDAQVLAEFLALDMIPQAHRPTPRVRQHRALVRQRQFVQRRITSAKAKVRHILARYNADVKNLFAAEGQVHLAAQKLLPSDRFVVDQLLVDLAHYQAQRQGADRRLAEFAKAALIAEQEARAILASIPCVGTVTIDVVLAELGDLRRFRNHKQVTAYAGLAPKVRESADRRKEGGITKEGSGLLRWVLIQTAWRMVTKTRRWGLAYEKLKSRKGAKRAIVAIARRLLGLMFGLLRRGERYSLGTEILV

SEQ ID NO: 211758 - protein, 347 aa, unidentified
MIAIGADVHKQQCTLAVQRPDGKLSMLPSMDNTRENWLDLLTQLPPEAQIALEVSTSGHFVMSVLEEAGWRDRAHWVHTAGIDSLRKQKTDRLDAKRLARKLSVAERDPLPEAWFPPRPIRELRLRARQRCWVAVLRTRVKNRVRSLLQMSGLRGTNPFTASGRTWLKQQKLSEATRESVEQLLRFHDFLTTEREKSETSLRGMEKDFPEIARLQTLPGVGHILSAVIWSEIGELKRFDSPRALVNYTGLAPSLYESGERSVRGGITRQGPVWLRWALITAVNAATHGHNAFARRYRRLRRHKLPNVAKTAVARSITRCAYGVLKHGVDYQEQRWGRKAGIEMEQEA

SEQ ID NO: 211759 - protein, 351 aa, unidentified
MVVSPSSKVLLKKLLRQFESKYPEATLHVVYEAGPCGYWIYRLITSLGHCCYVVAPSLIPKKSGERVKTDRRDSLKLVKLLTSEDLTPIYVPEPEDEAVRDLSRARGVAIKDLKQAKQQLKSLLLRNNIRYEGTADWSKKHLRWLTELVLPHPAQHIVLQEQLQTIEERIHRLERLDNELTHQVHQWRYYPVVKAIQAMRGVRLLVAVGVVAELGDLNRFDHPRKLMAYLGLVASEHSSGGKRRQGGITKCGNGRARRLLIEDAHSYRYPANVSAELQRRLEGLPKDIVDIAWKAQLRLCRRYQRMSQRGKHHNLIVTAIAREMAAYMWAISREVQLTPVNPKLRLSRVPA

SEQ ID NO: 211760 - protein, 326 aa, unidentified
MIYIGIDVAKNKLDCLWLKEIQPEKIKTKMFKNNIEDFENIALWLIKVTSAKPEQLHIILEATGSYHEGVAMHLFKMGFQVSVVNPARPKEFAKALGVTHKTDKADSLVLAKFGYQMKPKLWEPQSPETRKLTSLIKRIESIEKDIQRELNRKEPAVVSYDSSIIIDSIDKVVALLREEKERLTQELDKYINDDPTLKKNRQLLESIPGVGTVVSRVMLSVLSSHSFRNAGSVAAYLGLIPKIRESGTLRGRSVLSKVGPANVRAKIYMAAVVAKQHNPDVKALYDRLKSRGKTHMQALGAAMRKLTQICFGVLKHQSEYQPQIVL

SEQ ID NO: 211761 - protein, 340 aa, unidentified
MKLYGAIDLHSNNNVTVISDEQDRVFHNRRLPNDLPTILRAIEPYRAALQGIAVESTFNWYWLVDGLMEAGYKVHLVNTNAVKTYDGLKFTDDEDDARHLAHLLRLGILPTGYIYPKALRAVRDLSRKRLQLVRQRTIQLLSVKNLAQRNAGRHLSRTQVEELDEPAIEGLCGGDEHRALAMRSSLTVVRCLDEEILRLEQAILKQVRLRPEFQKLRTVDGIGPVLGLTIMLETGDIGRFKSAGHYASYCRCVSSRKMSNSKKKGEGNRKNGNKYLAWAYIEAAEFARRYNERIRRFFERKKAKATLGVIARKAIAHKLARACFYVMRDQVDFDVTRAFA

SEQ ID NO: 211762 - protein, 345 aa, unidentified
MNATTVAVDLAKNVFELAAADEHWKVVERARLTRGQLERWFQNRCVRLVVMEACATAHFWARSLRARAIEVRLLPAKYVRAYVKRNKTDAADAMALLEAARASDITPVAVKSVEQQALQALHRLRSGWMSTRTRRLNTLRGFCREFGMEVSVGAARGLAQIARLLADEHSALPELLRTPMRLALEEIRLMEARIDGLERELAALAHQSEACQALATVPGIGLLTSTAMVAAVCDPSSFRSGRHYASFFGLTPREHSSGESRYLGRISKRGNRYVRTLLTHGARSVLRAATVARRAGRKVDRLRSWALELQARTNHNKATCALANKLARIAWAVWVKHERFQSQAT

SEQ ID NO: 211763 - protein, 396 aa, unidentified
MTTMPQAVPARVTVGVDTHADVHVAVAKDTFGRRLDATSVATTPAGYAELLDWAQRLGQLEGWGIEGTGSFGAGLTRFLRRHGQVVVEVNRPDRAAPRRRGKSDPLDAEAAARAVQAQQGSVPKAGDGQVEMIRSLRVARATAMKARTQAIDALKALVVTAPEELREQLRGLPAVRLVQTAAALEPGPVTTPLAAARLGLRTLARRYQALSAELTTLDAELERLTATAAPKLLALFGVGADSAGALLVAAGDNPERLCSDAAVAMLCGASPIEASSGKTRRHRLNRGGDRQANAALHRIVVARLRHAQQTQGYVARRISEGKSKKEAIRCLKRYVAREVFAVLPRRADRAVAKSSAPSGVLFRDPRAGLGLHRQAHPGPRSDGPSGCRARLGKPDN

SEQ ID NO: 211764 - protein, 316 aa, unidentified
MNTQDHNEINVGIDTGQAILDIYIRPLGEFQSFENNAEGIRAAIRFIRKFKPIRILIEATGRLEMAFFCAAYKAKLPVCVCNPIQVRQFAQSCGRLAKTDKLDAQDIAYYGEIMKPDLSRLKPEKLRLLSDLLTVRGQCLDMSTMQKNRLQRMPKTVHKPIRNVLNVISKEIDRIEQQLDQLVAEIPHYQERVDQLTSAKGVGKVLAYTLLSDLPELGNLNRKEIAALVGVAPMNRDSGKHKGKRKIRAGRHKVRTVLFVSMLSAIQCHPKLKPMYQRLVAAGKPKKVAIVACMRKQLIILNTMVKNGTYWDENMI

SEQ ID NO: 211765 - protein, 445 aa, unidentified
MNKQNAATKKSPFDLNSYAAVIGIDWADQKHALATLELPLQSQRQQPELSVLEHKTDLLMEWISSLQKRFCGGRIAIAIEQRKGALIHFLSAFDFIDLYPIEPLSLKSYRKALYPSGAQSDPVDAALLAEFLLKHHARLRSYRPQSVPVRQCGQYCEDRRRFVDQRAQALQCLKASLKLYFPLALELFEDLSTSLANVFIRRWPTLEQLQRVRPATLRAFFHRHGSRSKKLIEQRINLIAAATALTKDPGVIEPQSLRVKCLLEQIATLSCIIGSYEQRIQELVKVLDSDGNFASLPGAGPCFIPRLAVLFGSDRSRFQSADELQMLTGTAPVTRQSGKKKLVTMRWACSTFQRQTLVEYALSSIRFSSWARAFYDLHMPKDPNADKPTYSVLRKLAFKWLRIIYRCWQTRTPYDESKYIQSLRRSGSPLWHRLQKTNAPAPSIL

SEQ ID NO: 211766 - protein, 357 aa, unidentified
MNTMPCLPVEVILGVDTHRDTHAVVLVDLVGRLIATATFPTTRPGLRALIKWAQQRGNVRRAGVEGTGSFGAGLTRALHHEGIEVVEVTRATRVGGRHRGKNDTRDAEAAARSVLSGQATAAPKARDGIVESIRVLRNTRASAIKARTQAILHIKNLIVTAPDELRETLSPLTNRQLVKHCARMHRSSRRDSLAATRHAMRSLARRHQDLDCEIAELDELLGDLIAQAAPRLLKQPGIGPEIAARMLLVAGDNPTRLRSDAALAALCGASPIEASSGKTIRHRLNRGGDRQGNSALWLIATNRMIHHPETREYVKRRTTEGKSTKEIRRCLMRHIARGIYPLILADLHDAYQQSALT

SEQ ID NO: 211767 - protein, 323 aa, unidentified
MIKDIKYFGIDISYLVFDVTDSNGNYYQFKNNASGFKKFTKLLDNNSHCVMEATGYYHYQLAYHLLEFGIKVSVENALSVKRFIRMKLSKIKTDKSDSKLICEYAQKVDLKLWKGNTKDEMECLQITRALSVYTKQSTMLQNKLHGEAVLGAPSKAVVRSLKRSLTQLTKEMKALEDKLLVLVKRAHQDLLNRLKTIPGIGPKTSIMLVVLTGGFDRFTSAAELCSYAGLTPVIRQSGSSVKGRPRISKIGNQKLRNLLFMCSFNACKYNKACRDLYERIVAKGKSKKLALIAVCNKLLKQAFAIAKSGLIYDKEYKSILVRN

SEQ ID NO: 211768 - protein, 420 aa, unidentified
MQVIYRRCVGLDVHEKSVSVCVRSLRGKQVETSEATYPTFTEDLEQLRAWLVRLRVRCVAMESTGVYWQPVWNILEQAPSLHLILLNPQHVKALPGHKTDRVDAARIAELLQYGLLRASFVPPPEIRQLRDLVRRRTHMVADRNRVSNRIHRLLETANVKISSVLGKVTGTTFRSILEGLASAHQIRPEALALLATHKRVRPKRALLEKALRGCRLTDHFRFLLRELIEELDRFSGKLRDWEVRIDQHMQPYAELIDRLCAIPGVNRLTAWTLIAEIGTDMSRFPTAGHLASWCGLCPGNAESAGKRHAGRTSKGNRYVRRALVEAAWSAARITRRRTFFTTLFFRISRRAGMKKAAIAVAHRILQVAYCMIRDGSSYREQGADYFDRLHPDRTEKRLLARLESLGFDVQLRPKIAASSG

SEQ ID NO: 211769 - protein, 383 aa, unidentified
MKEATRIGIDLAKNIFHLVGMDAGGAVVWRKALARRKLLEFLAQQKAAEVGMEACATAHYWGREIQNLGHRVKLIHPRFVTPYRKSDKNDFNDAEAVTEAMSRPTMRFVELKSLAQQDMQSLHQARRLLIKQRTQSANQLRGLLAEYGVVAPRGLSALRRAVAELSGEPQRATPLMAALAAASVELLAALESQRQEFDRRIQQACRSDERCRRLTAIPGVGPLTATAAVAKVGNARQFPNARALGAFLGLVPRQHSSGGKTVLGGISKRGDRYLRTLLVHGARAALRTAAQHDDRLSRWATALKQKRGANTTAAALANKNARIIWKLLSTGAAFDPQHPATAAERAPAAQAGASEKSAGPRLALRLEHGQRSRGFFSPSSKRQ

SEQ ID NO: 211770 - protein, 476 aa, unidentified
MARRKLSTFERLQRGERLQRRERRELQRKLEAGDAELKIVHPDAAGIDVGSASHFVSVPAGRDPEPVREFGSWTADLHKLAEWLKACGIRTVAMQSTGVYWIALQEALEKAGLEVFLVNAQGTKNLPGRKSDVQECQWLMKLHTYGLLRNSFRPPDEIRGVRTIWRLRSRFVEEAGSKIQQIQKALTTMNVQLTNVISDISGVTGMAIVRAIVEGERDPRVLAKLRDGRIQASEEEIAHSLEGNWREEVLFELKHVVEGYDFQQKQIGECDAEIEKRMGMLSSHPTREQKEGEAGARKKPAQKPRKNQPGFDLKGELHRIFGVDLTRIDGIHVMTAQVILTELGPDLSAFPSEGDFTSWLELAPRNDITGGRTIRKKARKSKNRVANAFRMAAESLCRSDSYLGARYRKLRGRMEGQPAVKAMARFLACLVYRLLTKGQEYVDKGAAYFEQKRKQRDLVSLQRKAAELGLKLVTAR

SEQ ID NO: 211771 - protein, 356 aa, unidentified
MTSVTKYIGMDVHKESISIAVRNAGGKIAMESVIEAKANTILEFIDGLRGEVHVTFEEGTWSEWLYDLLKPHVRKLVVCDPRRNALLKEGNQNDRVDARKLAELLQNNQLRPVYHANHGLRAMKELVRSYLTITKDLSRVMTRVKAIYRSWGIPCSGTQVYSSSHRSEWLDKIGEPGVRRRAEHYYQQLDALRLLRLEVRKDLLAESKQHAIWKRLRQIPSIGPIRAAVLLGIVQAAQRFRTKRQLWTYSGLGIEGHSSADHQVINGQLQRRKKPIEIRGLNKNCNHHLKNLFKGAAIVASTKPGPFQEFYTALVAKGMRPEMARLTLARKIATIVLIVWKRGVCFDANHLKPQTA

SEQ ID NO: 211772 - protein, 475 aa, unidentified
MNNKGKKKKNQVVTSNLLEQQELLAKVDVIKENLKASTWRELETKGKFNKNEKLTFISDDMLILGCDIGSETHYMRAIDARGRELSKSAFAFSNSSEGFHSAKEWAIEIAAANDKTQIVLGLEPTGHYWFCLATWMIASGISVVQVNPYAVKQTKEIEDNSQLKDDRKDPKLIANLVKDGNYGMPYLPEKLYGDLRRLSMFRDQLVEDRIRALNRMHREMKIYFPEYKDAFGKINGSFCLEVLKQAPFPEDLKTLGVEGIRDIWHAVKLRGRGYSRAGKIFNYANESVGLKDGADVSKEAVKWFVKKILELDEQILEVESQMEEKCLEIPHAEKILEISGIGENTLAGILAEMGDISRFDDVKEIQKLSGLGLVACSSGKHKGKTKISYRGRKRLRYWLFQAAKSLVAHSEAFKKLHVYYTTRAENPLKKMQSLIVIACKVLRVIYTILTKGVTYDPKKMLMDIKRPGKAELAVA

SEQ ID NO: 211773 - protein, 371 aa, unidentified
MKNTIKYVGLDVSKEKIAVAIADEGRDPARYHGAIAHTPDAVGRLIRKLKSPEVTLEVCYEAGPTGYDLYRWLTKMGISCTVIAPSRIPQRSGDAIKTDRRDAERLAQLHRAGELTAIHVPTPELEALRDLIRARENAREELHRARQHLVHFLLRHQIHTPEGMKKRWTKRYRLWLSTLTFEHTAQERVFTEMQQQLREVEERIKRLEEAMRKEAEICPYASVIQALQGLRGIALLTAMTLVVEIGDFERFRSPAQLMSYLGLVPRESSTGPKTRRGRLTKTGNASVRRALVESAWSYRYRPAVKGDLEKRLEGQSAHVQETSWKAQERLHKKYVQMVKRGKHRNLVIAAVGRELVGFIWCIAVKAEAQIA

SEQ ID NO: 211774 - protein, 348 aa, unidentified
MVHFAGLDVSVKATSVCVVDDAGKVILEQKVPTEPAEIIAVLTSLGVPLGRIGIEAGPLSQWLVNALVAADLPVICVETRHMKALLTAQQISKTDRNDARGIAQMMWVGLFKPVHVKTLVAQEQRMLLTSRKLLQRKLLDVESDLRGTLRNFGLKVGVVSGGRYDARVRELVEGFPRLAVIVEPLLSVRRVMRQQFAVLHKMLLDTVRDDPLCQRLMTAPGVGAVVALTYRATVDQPQRFVHSRAVGAHVGLTPKRYQSGETDYEGGVSKCGDALLRTMLYEAAHALLTRSGKWSWLKAWGVRVAQRRGMRRAIVAVARRLAVVLHRMWVDGSEFRWSKDSTAVPAVA

SEQ ID NO: 211775 - protein, 351 aa, unidentified
MHIGVDTHKVQHVLAALDDQGRRRGTHRSPNTPEGWADALAWARSLGDTRQWGIENSGSLGKGFAQALLGQGETAVCEVSPQRTAQYRRHGRSQDKTDDTDARAIARLLVAEGEQLPAVRRDDLSTELRLLSDHRDNLLVERTRLINQVHAQMLQVDPSYKEKSGPLTEARGVAYCRDLVVPDADRLVQTRLLVVHQLAAQILSLDGEVADLTSELDRRVRESRTPLLALRGVGTVVAARLIGELGTTPRIPSAGALAALSGISPVAVSSGGHGGYRLNRGGNRRLNRAIHIIALSQRRCAPRARAYDAKKRAEGKTGRAAMRCLKRRLVDVLYRTLSRADDSADAGACAA

SEQ ID NO: 211776 - protein, 352 aa, unidentified
MMIIGCDFHPRFQQISFLWEETGECGQRRLMHTAEAEQYYRLLSGARVRVGIEATGSYGWFRRLLSELGHELLVGDATQIRASNPRRQKTDKRDAEHILGLLVADRFPAIWQPPAENEQLRQLLLHRSRLVRLRTRVTNQLDGMAKNEGLLIPGGWSGKRRMAIEALALPGWYGERRTDLLVLLDRLEERIAPLNKAVSQAAANNAEACLLMTHPGVGPVVSLAYVLTIGNWQRFARGKQVGSYLGLIPSEDSSSDKRRLGHISKQGNTLLRWLLVEAASTAQRYDPSWHRQYLRLSMTKHHGVAKVAIAHKLAVRLYWMLRSGQDYQQVRERGSHARQSECPGGRSKRPIE

SEQ ID NO: 211777 - protein, 408 aa, unidentified
MKHVIALDVSKGKSTVVIYDRYRQCEFEGELNHTRVDFERLHERIKEITRLDGQAPEIIFEATGVYSKPVEKFFIDFGYTYCRMNPLEANLQMASMRRNKTDISDAHELAKTHFKMEREPTYVQDDYYEQMRALTRYYDEIDEEVTLLKSRMHALLHVSFPELEKLITPRSALFLNIVQLYPHPALLLAHSKTMIKNRLKVNTRKNLSLARAEAKAEVLLEAAQNSYPAIQENDIRCDQIRDYAARIMHLVEKKEFIVRQMVEMSEGRNEYEVLRSIPGIGDTTACRLIGELGDIRRFQNAKQLNAYVGIDIMRYQSGNTQYRDRINKRGNKKLRKILYFMICTMITLRKKTNNHLVDYYDKLKTQPQRKPHKVAIVACINKFLKMTFQLLIHGTLYDYESALPAQKS

SEQ ID NO: 211778 - protein, 394 aa, unidentified
MKLIGIDIGKNKHFFCVMDQQTGEIISQPVSFSNDKEGFDFLVQKIKSYPKDSILIGMEDTGHYHFALLKYLLDLQYTVALINPKTTDFNRKMQGGITKNDKLDTINICDVLDTPERKKQYRITKVNSFDLYEQKQLTRHHHNLKEEENVYKNRLQKCIDIVFPEFNKLFNSKYGIVYMNILKMFGSAENIANTDIRTIRKCFEIEGRGNRISLTPERLKECAISSIGISSSAEVIQIKHLTAQIELIEEQLTEIDKKIEEFSIQNNSPILSIPGISHFSGTSILAELGDISNYSKPSQIIKFAGVAPLHYESSQFNAQHTSITKKGSKYLRKTLYQIILPVIRHNPVFTKYYQLKISQGKGHRCAQGHCVRKLLRIIYHLLKTNQQFDPQLLR

SEQ ID NO: 211779 - protein, 335 aa, unidentified
MKVFYLGVDVSKKKLDLCLRSNGKDILYDVIPNDLSSIKSWLTRTFEKFFLSEDSLVVCAEHTGQYTYPLVCATKSIGVYLCLEDAAKIKYCHGIPRGKNDKIDACRIAMYAERYNDCLQPYTASELIIQKLKNLSTERNMLVADRAKYQSQLKDQVDYMEHSIYIAKCNRVEGIINTFTDYIAQIDLEIKELINQAPVIAHQMDLLMSVDGVGERVALKMIMETDAFTSFTDPRKFCCHAGVVPFVYVSGSSQRSKNRVSNRADKSIKHLLHMAALSVSQVKNSPLKKYYDRKVEEGKNKMSVLNAVRAKLVTIMFAVIRTDAFFSRNYQNSLA

SEQ ID NO: 211780 - protein, 421 aa, unidentified
MTYSIAGIDVHKKLLVVVVAEVTEQGEWSYERGKFGATAYEFERLADWFQQRGVQEVVMESTAQYWRPVWGALEQYWTPVMRQREGAGPMAGKLHLAQAQSNRGPRGRKNDYRDAERLVHRLVAHELVLSFVPDPEQRLWRTLTHRKQQFAEDRTRCQNRLEALLEQMHLKLSSFVSDLLGVSGRRMLEAVAEGATDPVAVAALAHAKLRATPEQLRDALAACAHLSPVYRRLLKMELKQLQFLEQQSQELEQEIIQALRPHAGAVERLAEVPGLGVESAHQIIAEIGPTAEVFPSQKALSSWVGVCPGEEVSAGETRSSHSPKGNRALRRLLNQAAHAAVKMKGSIFEVVFKRLQPRLKYKEAIWATAHRLCRLIWKILHQGVRYEERGPAVSAKSQRARLAKMVRELKKAGYQVMTPTI

SEQ ID NO: 211781 - protein, 406 aa, unidentified
MKRFFAGLDWAAQTHALCLIDEHGTVRERFEVAHSAAGLHELLGKLRGVARDAAQLAVAIERPSGLLVDTLVEAGYPVVPIHPNVVKATRPRYRSHGAKSDASDAYLLADLLRTDGARFEPLQPQSDAIRALRALVRTRDDLVATRVQLANQLRSLLESFWPGAAAIFADIDSPIALAFVQRYPTAQAASHLGEKRLAAFLAQHRYSGRRSPAELLERLRTAPAGHSAELELEAKGELVRALARTLEPLVDQIGQLSARIEHTIDELPDGRIVMSLPRAGRICAAQILAELGDVRERFPSDNQLAAQAGVCPVTYQSGKSRSVTFRWACNHRLRRAITCLADNSRRACPWAASRYAAARARGCDHPHAVRILARAWIRVLWRLWTDRCSYDPAQHRAALAFNAPGG

SEQ ID NO: 211782 - protein, 414 aa, unidentified
MKNLESDYSVLIGLDWANRKHDVCMQLPDQSERRFQVIGSSAEAVEEWVQSLHRKYQGQIAVALELDKGPIVYALQKYDFVTLFPVHPLMLAKYREVFSPSGAKDDPSDAELALDMMINYPEKIKPLSACSPEIRKLRHLVEQRRVLVNDRRRLTNRLINALKQYYPQLLEWFSHRDTALFCEFLCRWPTLQKLQRAHQKSVRAFFISRGGRAIPKIEERLGAIRNAIPLTHDAGVIDSHQLLSVALARQIQQLILAIREFDEEIETLFDSMEDASIFKNLPGAGPCLGPRLLVAFGEDRNRFEHAGQVQSYVGISPVTERSGQKVWIHWRWQCAKFLRQTFIEWSAKTIRSSYWAGLYYDQQRAKGNSHQSAVRALAFKWIRILFRCWKSSTPYDETKYLKALKGRNSPLLST

SEQ ID NO: 211783 - protein, 344 aa, unidentified
MDATTVGVDLAKNVFEIALADQRGHIVERQRLSRARFDRFFVNRAACRIVMEACGSAHHHARRLSSQGHDVILLPAQHARPYVRRNKTDAADAAALIEAARCPDIRPVPIKSVDQQALQQLHRLRSQWMGARTSRINFLRSCLREFGISIPIGAQRAIQTVRDALSNLDNPVPALLHSSLLELLTEIAALTERCKHIDRELARLTDQDPVVERLLQIPGVGPLIATALRASVVDIQRFPSGRHFASWLGLTSREYSTGERRRLGRISKQGDPYLRTLLIHGARAVLLAARSAQRGGISLDRLRTWALDLQERRGHNKAAVGLANKLARIVWATWRHERDFATTI

SEQ ID NO: 211784 - protein, 341 aa, unidentified
MFYVGIDHHKKTTTFCIVGQDRAVITTRTFSCNNVDGIVAFLRRFRPFQAVVEATGGYQWLVELIEPLAERIILAHAKKLRIIAESTCKTDKVDARILAQFLAVDMIPQAYRPTPRQREHRTLVRFRQFVQRHKSAVQVKIRRIVSDYNADRRDLFSQKGLEHLAALKLSKADRYVVKHLLEQWNNLANKLVAITKELQKFAKKGPAQELKCRKVLQSITGVGAVTTEVVISEIGDIKRFRSAKQVVAYAGLAPGRRESAGKAKDLGITKCGSGLLRCVLVEASWQLVRRSRYWGLVYEALKVRRGARRAIVAVARRLLGVMVALMRSGQAYHEPRVRKAA

SEQ ID NO: 211785 - protein, 345 aa, unidentified
MGEFAGIDLGKEVLNFHVVDAKGATVRRGRAPATPQAARQALNGLDLERVGVEAGPYGAWLVEGLRGAGVPGVLIETRRMKQFRDYSKVKTDARDAEQIAQAMRCELYTPVHVKSTASRQARTLLRARTTLSRARLELQNSARGLLKEYGVKLKRQSSRLLEDAIGEALVELDKAVSIAVLPLVAGIAELRRQEAVLSREVRRLARTDAACRLLMTVPGVGPIVGLAFRATLDNPQRFADSQLVGAYLGLTPAKYASGETDYDGEITRQGDKLMRAYLYEAATVILGRLRRPCALRDWGLELVERRGRRRATVALARKLAVVMHRVWLSRQPFDWERRAPTKPSA

SEQ ID NO: 211786 - protein, 344 aa, unidentified
MTAATVIGIDLAKNVFQLHGVNEHGRVVLRKQIKREQMASFFANIPRALIGMEACSSAHFWARKLQSMGHVVRLMAPQFVKPYVKTNKNDAADAEAISEAVTRPNMRFVPVKNVEQQAVLALHRARQGFVRARTAQANQIRGLLGEYGYSIPQGIAHMTQVFDVIEDASNDLPGVFRQLVLRLMDHLKALHQQVTEIDSQIKAWHRNSDLAKKLEKIPGIGPVTATALVATIGDAKHFENGRQLAAWLGLVPRQHSSGGKQNLLGISKRGDSYLRTLLIHCARSVIFASRRKGNCEGWVHELIRRRNHNVAAVALANKIARTVWAVWVRGTEFRADYPSASAAA

SEQ ID NO: 211787 - protein, 365 aa, unidentified
MEAKKKIGTRYVGIDLGKRTYEAAIVGENGKVTKSNGKTFVAGRQALYKKLRPQDKVALEAGNMAFIMAKEIEACVGCKVYVLNPSQLALIYGSMKKTDKEDSLKLAHILEDHNEQRLPVVPVPSEKEMNRRKLLAGYRRVQQDRNRSINQLHGLFMSQGITTKVKSDLATAAGREEAVKELTGIERKEAEYLLKCLVLCEQRISELEQDMKKDSAGDEQIERLQSIPGVGPKTSFAFVAHVAADRFENASQVSNYLGLVPRVYMSGETVRYGRITKRGNGYIRALLVQASWSLVISKNGGKLKERYEYMTKEKSISKKKAIVAIARRLAEEMYTLLRDGTRHEFRPFMPEKGEAKELAKLALSA

SEQ ID NO: 211788 - protein, 355 aa, unidentified
MSQEKYIGMDVHAATIFAAVMNAAGKLLMECVLETKAATILEFVQGVRGTLALTFEEGTSATWLHDLLQPHVNRWVVCDPRKNALLREGNQNDRVDARNLAELLRTNQVKPVYHENHGTRALKELGRSYLTLTRDSTRVMNRIKSVYRSWAIPCAGTSVYSPRHRAEWLAQLVEPGVRIRAEHLYEQLDRLQPVRQAARRERLRESRKHAAVKLLRQIPAIGPIRSALLVALLQTPHRFRTKRQLWAYSGFAVQTYDSGEFRMVRGKLQRNRERITVRGLNRNHNHDLKNLLKGAASSAIQRPGPLQDFYAALVEKGMRPSMARLTLARKMAAITLIMWKKGVSFDPKQLPPQAA

SEQ ID NO: 211789 - protein, 393 aa, unidentified
MICVGIDVAKDKHDCFILSSEGEVLADVFTIPNNAEGFDTLLQTIRRCARPEDKIKVGLEATGHYSYNILGFLLNEGLDTYVINPLHTNLYRKSLSLRKTKTDRVDARTIAAMLMSDVDLKSYTDTAYHNEELKSLTRYRFDKVRERAKLKQSVSRLVTILFPELEKLVSTLHMASVYALLSEFPGAKQVSEAHLTHLKAVLYDASKGRYGSDMATTLRDAARCSVGSVMSAKSLELRHTIRLIHELDAEIEDIEAAIQSMMDEIQSPITTIPGMGVRMGAMILAEIGDFSRFDSPAKILAYAGMSPSTYQSGQLSLSGAYSHMEKRGSRYLRYALYNATKYVCLWEPTFAAYLTKKRAEGKHYNVALSHATKKLVRLIYALEKSKRPYSTAA

SEQ ID NO: 211790 - protein, 343 aa, unidentified
MVHYIGLDVSLKQTSICVVNQVGSVVREGVVDSEPEAIATFVRSKAPGAVRIGLETGPTATWLWTELKQLGLPVICIDARHAKAVLKMQINKSDRNDAAGIARIMQTGWFKEVRVKDLDSHSVRALLASRALLVKIKRDLENQIRGLLKNVGLVIGRAKFNVFAVRAEELIEDRPELIAVVGPLLKARKAIEQQTDDLDRKVLKLARYDAQVRRFMTVPGVGPITALCFKATIDDPTRFKRSRSVGAYVGLTTRRHASGEIDWTGRISKCGDAMLRSYLFEAAGVLLTRVPKWSALKAWGMRLAKRNGLRKAKVAVARKLAVILHRMWIDGTEFNWSKKEVAA

SEQ ID NO: 211791 - protein, 355 aa, unidentified
MPIQRCENFQEQQNVYIGLDVHLKQWNVCIIQGGRQRKPFQQNPSAETLKQHLQKNYPGLRYYSAYEAGVCGCSIHYDLISVGIDNIIFNAADVSQTGKERVRKTDAVDAAKIARSLANGDLSCIHIPPRWRLADRNMLRLRSAQVSDLKRLKIRLRHYLHVNGIRIPAEFSSRWTLGFIGWLKGMVPELDSSTGYALSMMVARVEDAIAQVKAQDRRLLELMKHDNYARDYALLRSVPGVGAITAVTLLLECGDLSDFPSAESFCAFVGLVPDTDISDGHKGKCGITRRRHKTLRYMLTECAWRATATDEELSGLYAAYSRRMPPAKAIVKIANKLAKRIKFVLRNKTAYAKNR

SEQ ID NO: 211792 - protein, 391 aa, unidentified
MVCVGIDVAKDKHDCCILDSEGTTLVDCFTIPNNMDGFKSLLQTIQDCSQKSDKIKVGLEATGHYSYNIRGFLLDNDLPVYVMNPLHTNLYRKSLSLRKTKTDRVDAKTIATMLLSDVDLKSYTDTAYHNEELKSLTRYRFDKVQERAKLKQSVSRLVTILFPELEQLVSSIHGTSIYALLSEYPGAKQISEAHLTRLANILVKTSRGHYRKDKATHIRDAARTSIGSVMPAKSLELKHTIKLIQELTSEINEIEDAIRKIMDELKPPILSIPGMGFYSAAMILAEVGDFSNFNSPDKVLAYAGCSPSTYQSGKLTNCYAHMEKRGSRYLRYALYTATKYVCYWNPVFTEYLTKKQAEGKHYNVALSHATKKLVRLIYALQKSGKAYLAVT

SEQ ID NO: 211793 - protein, 391 aa, unidentified
MTSSHLIDTPAAGGQDGTLYVAFELSKSTWLIGLVVSGESKFSRHKVSGGDTAAVWQLISKKRAQAEKKQGRAVRVVSCYEAGYDGFWLDRWLAQQGVDNRVIDPSSIEMPRRARQAKTDRLDLERLMRVLIRYEGGEADVCSVVHPPSPEQEDARRVTRERERLIGERTAHTNRIKGLLHGQGIRDVQPRRKGFLEQLAQLRTGDGRAVAANLAAEITREHARLVMVCEQIAEIEHQMQAERATAAPDSRASQVNHLISLKSLGPVGGENLVNEVFWRDFQNRRQVGAYFGLTGTPFDSGQSSREQGISKSGNARARTLAVELSWLWLRHQPDSALSLWFKERVGTQKGRVKRIAIVALARKLMVALWRFLTTGLVPEGATLRAAAPAGR

SEQ ID NO: 211794 - protein, 478 aa, unidentified
MQDRRLVGIDLGITSAHTVRVLAGDGGLVCRRKAVPTVESLGEVEQAALAGAAAGTRLEVVVEPTGPAWLPIAVFFAARGHTVYRVSSAKAHDLRRFLRRHAKSNGIDADTLARLPLVDPAGLHPLQLPDAARAALDRRVRACDRLTRQAADHKRRIKGLVRQLLPASPLVGELGQADLAVLERWADPQALVAVGRARLQQVLASASAGQQGAQRAEQWLAAAHAALELYGDHPAIAWQDLAAEVTSEVRLLRATQAELAAHAREREACYRRVDPAALARSLPGLATIGGPALVATMGKASRFATAGKFRCFTGLAPKASETGQTDRKGQPISKAGNRLLRTTLVRAADHARRQDPQLARIYWTQMVQRGKDHLGAVCVVAAHLAERAWTVMDRATPYVICDTDATPVTPAQAKQIIAERWTVPEEVRRRRRHKKGKAPQQVLQGHVHGAQGATRRPSPSSATLGQPPSRVKPTQPQP

SEQ ID NO: 211795 - protein, 381 aa, unidentified
MAEPILTHGGRAMEEYSEAFVAFDVAKKKHALAIAEGGRAGEVRFVGEVENSPATIERTIKKLGKRYDRLHVCFEAGPTGYGLYRQVRDLGHDCMVVAPALIPKRPGERVKTNRRDAVTLARLHRAGELTAVWVPDVVHEAVRDLVRARETAADDLRRKRQQLLSFLLRHGRIYEGGGHWTLAHRRWLARQSFEHAAQQIVFQEKIDAIEDAAQRLHRLDEQLRAVVPTWSMAPLVEAYQAMRGASFLVAVIFAAEIGDVRRFDTPPQLMAFLGLVPGERSTGDTVRRSGLTLAGNRRARRALVEAAWTYRYPARVSEVLRLRLEGLPKSVRDIAWKAQVRLCARYRRLSAAGKKPPVVVAAIAREMAAFLWAIGREVAPL

SEQ ID NO: 211796 - protein, 375 aa, unidentified
MKEKVRFLGLDVHAETIVVAVAERDGEVRSLGTIANRAESIRKLVKKLGPVDQLKACYEAGPTGYVLYWQLAELGVACEVIASTLVPMKAGDRVKTDRRDAERLARSHRSGDLTAVWVPDEGSEALRDLVRAREAAKADQLRARHRLSKFLLRTGRRPETKIKLWTGVHMTWVRQLRFEHPAQESTRLDYLHEVEHMAERVLRLEQAITDAIKLATPEMQEVIRGLQALRGIAEISAVTIVSELGTLSRFENARQLMGYSGAVPSENSSGKRVQRGSITKAGNAHLRRIAVEAAWSYRLRPGIGPRLRKRQENVPEEIKEIAWKAQIRLTKRYARLAAAGKDQRKIVTAVGRELLGFIWAIGIKAESAAMQKVAA

SEQ ID NO: 211797 - protein, 344 aa, unidentified
MAQGTTARVTTVGIDIAKNGVCIHGVDAHGHVVVKKRLARQKVLPFLTQLPPCLIGMEASGGAHYWAREFTQLGHTVKLMSPQFVKPYVQSQKNDPNDAAGICEAVERPRMRGVPVKSITQQDVQALHRIRERQIKARTALINQIRGLLMEYGIVIPQRASQVRHKLPIVLEDAENGLTATAREWLHALAEELQALDQRIAATDQQIERVCEADEACQRLAQLPGIGPLTATALVAAVGDATEFKNGRQFAAWLGLVPRQHSTGGKTTLLGMTKRGNCSLRTLLIHGARAVLRVVDRKTDARSRWLQGVKARRGMNCASVAQANKTARVAWALLAKGDRYRHAA

SEQ ID NO: 211798 - protein, 341 aa, unidentified
MSEYIGLDVSLKETTISIRRDGKRIWRGKCPSDPKLLAEVIRHRAPAAERVVFETGPLSVWFYHALSAEGLPAICIDARHAKAALDMAPNKTDANDADGLAQLAEVGFYREVRVKGYDSMLIRTLVTARTKLIRIMTELSNQIRGLMKTFGLVVPKGSGLVFETNVRNLSGSNAGLEQIILPLLEAWCSIRGRAAQLDRQLVAMARQSDACQVLTSIPGVGAVTSASFVAAIEDPKNFRTSRSVGAWLGLTTRRYQSGEVDYDGHISRRGDSHLRGLLYEAATVILTRAHADSSLRAWGMKLREKVGFKRAAVAVARKLSVTMHRMLTTGEFFDRSAGVTA

SEQ ID NO: 211799 - protein, 315 aa, unidentified
MSDVPCLGGIDVAKAQLDIALRPSGERWAVANDASGVATLVDRVQTLHPTLIVREATGGLERAVTSAVAAAGLPMVVVNPRPARDVARATGQLAKTEAVDARALAHVADVIRPTPRPLPDAPTQALRALLGRRQPLIVMRTAEQNRLVGTSERLTQDIGAHMTWLNAAIATLDHDLETTLRASPRWRENDDRLQSAKGMGPVWARTLRLGRPELGTLTRQHIAAFVGVAPLNGDSGTRRGRRTIWGGRAPVRTVLYMGTLVATRSNPQSKAFDERLLTAGKVKKVALTACMHKLLTMLKAMLKHRTPWQPQEVQN

SEQ ID NO: 211800 - protein, 330 aa, unidentified
MGFRYFLGIDVAKAKLDVVLLDSAEDRRRSKVVINTPEGFQVLVKWLAKQGVGCADVHAILEPTGVYHEKALFALAQAGIAVSLVNPAQLRRFAQGLGIHTKTDACDSAVLARFGQLVKPVHWQPAPLKARELRALLARRDAVAQDLQRERNRAEQLVVDDTPDRVRRSLTEAISFLERELQALQQAIDQHIDDDPDLKRIWELLQSIPGVGQRVADHFTALLSGRDFKSAEQLAAYLGLVPTEWQSGSSIKGRSRMSKAGSASLRQLLYMPAIVAVRRNPHIRALYERLLASGKAKMCAIGAAMHKLAHLCFGVVHTGQPYRADWLVKA

SEQ ID NO: 211801 - protein, 323 aa, unidentified
MNKDIKYFGIDISHLVFDVTDSDGNYYQFKNTISGFKKFTKLLDLDSHCVMEATGYYHYQLAYYLLELGIKVSVENPLAVKRFIQMKLSKIKTDKSDSKLICEYAKQVDLKPWEGQSKHQTECLQMTRLLSVYTKQSTMLKNKIHGEAVLGNPSKAVVSSIKRSLKHVLKEIKTLEDKLMVLVKEVHQDVLTRLKSIPGIGNKTALMLVVLTDGFERFTSGSELCSYAGLTPVVRKSGSSVNGRSRISKIGNQKLRNLLFMCSFNACKYNKACRDIYERIVAKGKSKKLALIAVCNKLLKQAFAIAKSGLIYDDSYRSTLVKS

SEQ ID NO: 211802 - protein, 360 aa, unidentified
MKKVSKHMPKMEVSDKPEMTLGLDMGDRYSHYCLLNQQGDVVEEGRMQSTEGAIRRHLEGEPSMRIALECGTHSPWVSRLLKALGHQVIVANARKIPAITGSESKNDRNDAEKLARFAAYDPKLLSPLQHRSPGRQLDLNLIHARATLVRARTMIVNALRGLVKSAGGRLPSCSTESLPARAADAIPPALAAVATPLLEQIALLNRQIDGMDKQVERLAVKYPEIGLLRSAPGVGPIVAAAYVLTLDRPDAASNRSAGAFLGLRPGQSQSGDSDPQRRISKTGDSCLRSLLVQSAQYVLGRFGPDSELRRWGLKLATSGGKRGKKRAIVAVARKLAVILHSMWRSGQRFQPFPQSAAVAA

SEQ ID NO: 211803 - protein, 414 aa, unidentified
MFAVGVDVSNGRSMVAVLGARRSVVVQPHEVPHTADGFAELAARLHALDGEVRIVMEHTGRYYESFAMSMYRAGFFVSAVNPLAIKGYQEGISVRKVKTDKADALKIAQFAIDKWEILPHYTPMDTIRYDLKTLHRQFQLSSKTKTALNNNLIALLEQSYPGANRYFDSPVRPDGSQKWVDFVDTFWHVDCVARVSRKAFVERYQKWCKRHGYNFSEAKAVEIHEDARQRFPLVPKSDTCKLMVREAVAQLNAVSRTVETYRAEMDRLASQLPEYETVMAMTGVGKSMGPQLIAEIGDLRRFAHQKSLVGFAGTDPIKDDSGDRVSDSKPSSKRGSPYLRKTLFVVMTILLQLQPQDDPVYQFLDKKRSEGKKYYVYMTAGMTKFLRIYYGRVRDCLKAKGRWDQPMLEPDSSD

SEQ ID NO: 211804 - protein, 347 aa, unidentified
MNFYTNTHPYYCGIDLHARLLYVCIIDEHGEVLVHKKIKDSPEQLLSLLQPYLGNIVVGVECMHCWYWISDFCQLHNIDFVLGHALYMKAIHGGKTKNDKIDSFKIAKLLRGGNFPLAYNYPNELRATRDLLRRRTKLVRFGADLKAHVTNTVSQYNYRPHTLNLRYQPAREQMRGVFSEPSVQRNVDIDLTMVGHIETELRKVEWFIEKQAKQHNARDYYLLKSIAGVGQILALTILYEIGDIQRFESVQKFASYSRLVKCKAESAGKTYGTQGNKIGNAHLKWAFSEMAVLYFRGNDKAKAYLNKLQKRMSKAKALSALAHKLGRCVYFMLKRQKAFDESRFLAG

SEQ ID NO: 211805 - protein, 338 aa, unidentified
MDHYVGIDLHSTNSYIVIIDNDNKRVFKKKTKNDLRLVVEALKPYQEQIKGVVVESTYNWYWLVDGLIEEGYTIHLANPSAIKQYEGLKHSDDVTDAFHLADLLRLGILRTGYIYPKEERPVRDLLRKRLQLVQQRTLQILSFQNLVARNLGKSMNGNAVKKLSEDDVEHLFHDKHLVVSGKASISTILFLTEKIKQLEKTIHKVAKLKDEYTLLMTVPGIQKILALTIMYETGPIERFRKVGNYASYCRCVGSKRISNAKVKGKGNRRNGNKHLSRAYVEAAHHAMWHYEYVQRYYQKKMVKTNTLVARKTIAHKLARACYYIIRDQTVFDPKRVFV

SEQ ID NO: 211806 - protein, 354 aa, unidentified
MQYIAFDSHKRYTYAVVEEKEKGRVMEKRIEHRRGEIGAFLSQCEVGSPVALETIGSWYWIVDEIEAAGMLPKLVNARKAKMMIASSKKTDRLDAKGLNTLQRTGTLPTVWIPSSELRDIRELYRTRMVLTQMVIRLKNRILSCFSKYGISFDETSDAFNIKGRASLEAALEILPTQTCFALKELLRQLDLLQEAVKEFEARMLQVQSNDPEIKLLQTIPGVGAILSYVIAYETGDIHRFPSASCFASYAGTTPSVHASGGKVRYGHTPSDVNHYLHWAFIEAANVISMRHEVLRFRHTARLYERLRQAKGHGIAVGAVARHLAEATYWILTTKTAYREPNQNKQVVVVSSKEG

SEQ ID NO: 211807 - protein, 336 aa, unidentified
MKKISFFIGVDISKSTLDVAIIDQNSSNAALHSVFSNTKTGITSLLCWVKKHTSKDKSDFIFCMEHTGVYGLPLCSTLSEKNILYSLVPALEIQRSIGMQRGKNDKADSKAIAKYAYIRRDDIRITTMPDKAILKLRYILSQRDRVIKAKVMFENSKEVERFCDLNASNVLQKENKVIISFLKKRIEHFDKLVEKIIMEEPLMVNQYKLITSIPGIGLQIAANIIAYTQAFHLFDCPRKFACYSGVAPFPYQSGSSIKGRTRVSHLANKKMKSILSLGALLAIRNDMEMRLYYQRKVDQGKNKMLVLNAVRNKLLHRIFAVVKRETPYVKLAQHIA

SEQ ID NO: 211808 - protein, 360 aa, unidentified
MAKARTLVGLDVHATKIVAAVLDADTGELKSFAMKGDALAAAGFCAGLPRPVRVAYEAGPTGYGLARELAKRRVDCVVAAPSKIPRASGDKVKTDARDAELIARLLLAGKLHQVRVPGPEEEALRDLVRARETLRLDLMRARHRLSKLLLRHGVQFDDGRAWTERHRAWLKTVELEWPAAQATLLDAQGSIEALVHRREHLEREIVAILPSSPWRREVGRLRCLRGVDTLTAVGLCAEIGDFERFARAEQLMSYVGLVPSESTTANNRRLGSITKTGSAHARRLLVEAALHYRKTPALRKTLAERQKDQPPEAVAIAWTAQQRLHRTWARLEARKKRRTLIAVAAARELLGFCWAITQIE

SEQ ID NO: 211809 - protein, 490 aa, unidentified
MRRTKRRSSKIRPALPMVHPNAAAIDVGARMHVAAVGADRSAEPVRSFGTFTTDLHRLADWFAECGVETVVMESTSVYWIPIFELLEARGFTVFLVNARDAKHVPGRKTDVSDAQWLQRLHSHGLLRASFRPKGEIIELRAYLRQRERLLEYAASHIQHMQKALSEMNLQLHHVVADITGTTGLRIIRAILAGERDPAVLALLRDTRCHASVETITQALTGHYRAEHLFALEQALALYDAYQEKASACDARIEAVLKQLSFRRGRGVGPLPAPRRGMRRQPNGPAFDVRAALFALLGKDLTQINGLGPYLALKLIAECGADLSAWPSAKHFTSWLCLAPSNKISGGKVLSSRTRRSGSRAAALLRLAAVTIGRTDTALGAFYRRLSARIGKIKAITATARKIAVLFYNALRHGWTTSTPARPPTRPVIVPGSSRTCIGVPRPLASSSIPRRRRPFLRKAINLLRSAGRRAVGFRPILPASRRRGFLLLSE

SEQ ID NO: 211810 - protein, 412 aa, unidentified
MEILYQSCCGLDVHKKMIVACLRQTDEAGKVGKQVRTFGTTTSELLSLSDWLTGAGCTHVAMEATGVYWKPVYNILEGQMELLVVNAQHIKAVPGRKTDVKDAEWIAELLQHGLLKASFIPPQSQRDLRDLTRYRTTLVRERARIVNRLQKVLEDANLKLAGVATDVMGVSGRAMLEALLAGQTDATQLAELAKGRLRKKMPQLKEALTGRVREHHRFMLSEQLSHIDYLDEALERLNIEIGERLRPFEHEIQLLDTIPGINRQTAEELIAEIGADMSRFPDGHHLASWAGMCPGHNESGGKRKSGKTRKGNSWLRSTLVEAAHGAAHTKDTYLASQYHRLVGRRGKKRALVAVGHSLLIISHYVLKRSQAYYDLGSTYFEELHRQRLERNLVKRLETLGYKVTLEALYPAA

SEQ ID NO: 211811 - protein, 342 aa, unidentified
MDHYAGIDVSLECSSVCVVDASGKIARESKVASEPEALIDYFGSLRLPVVRIGLEAGPLSQWLYAAMKQAGLAVELLETRHVRDAFKAMPVKSDRNDARGIAQLMRLGWFRPVHCKSLAAQELRAMLTARKLVQSKLRDVENHLRGILRGFGLKVGHTTARSFAVRIRELVAGQANLETIAQALLAVHAVLLREFNGFERRVRTMAREHVKARLLMTTPAVGPIVALTYAGAIDDPARFKSSKQTGAHFGLTPRKYQSGQTDVTGRISKIGDATVRTALYEAAHIMLTKPIKGCTPLKSWAMRIARRSGMRKAKVALARKLAVILHRMLVSATPFNAAAAAA

SEQ ID NO: 211812 - protein, 346 aa, unidentified
MALFVGLDVSLRTISACIVEAKGKVVWEGKVLCEGPALIAALAPYRKKIKSVGIEAGPLSEWLFGILTECHFKAVCIEARHAHRFLSSRPNKTDRNDAHGIADMMRLGHFKAVHVKSRASQLLRTMLAARKTFVDHMLEIEQAIRGFLKVYGLKLGQVHRYNFSAKVKALVADTPELAAAIAPLLEARDMMRKKKKEIDRELEKRARQDAVCKRLMTIPGVGPIISLAYKATIDDPARFRSSRAVPAHLGLTPRVYQSGEMDRSGHISKCGDGLLRHCLYEAANAHLRVTRKWSALRAWGVKLAKRVGSKKACVAVARKLAIIMHRMWREDIDFQYGTAPQRLAKA

SEQ ID NO: 211813 - protein, 417 aa, unidentified
MKDNQRKLYVGIDVHSREHKAAVLPIALLEQSGAAWKKAKLLGIKNNIADFERLDTTIRSHISSTEEVAIAVDHTGGHYSEPIVYFLQAKGYTVYHLETKAIKAARERFLDEESKSDAIDSTSAAYMLYLRDAHGISFRISATTPELGSKAAALKSLVLQRWQFNKLATQATNRLHQFLLAVFPEGEAQHFNQLLKVTPYYATPKDILDSNGLEKIEKLSQKDKENMLELAANSVGIPGDIYQWLIKDLSIQRVESLAKRDALTAILRTQVAAHPYGDILLSFPFLGEIAAATIIGIIKDIERWPDKKKFKKAIGVYNSLTQSGTSLGRTKQGKEGSRHGRRVLFQVCFGCIRTNVHDNDFKDYYLRQVARGKLRMKALVSTMGKLAEIIYHCLKAGEPYQYQGKYKAGIAFYDKKP

SEQ ID NO: 211814 - protein, 459 aa, unidentified
MPRKKVKSKNDGAMPMVHPNAAAIDVGATLLMAAVGADRTSEPVRSFGTFTTDLHRLAAWFAECGVETVAMESTSVYWIPIYELLDARGFTVFLVNARDAKHAPGRKTDVSDAQWLQRLHSHGLLRASFRPKGHFIELRGYVRQRERLLEYAASHIQHMQKALTEMNLQLHHVVADITGATGLRIIRAILSGEHDPKLLARLRDYRCHSSTKTIEKALTGNYRAEHLFALEQALALYDAYHEKVLACDIRIEAVLKELSIGRGHKCDALPSSRRRTDQVNGLAFDARSALFALLGKDIARIDGFGPYLALKLIAECGDDLLAWPSAKHFTSWLGLAPNNKISGGRVLSSRTRRTGSRAAALLRLAAVTVGRTDTALGAFYRRLSARIGKAKAVTATARKIAALFYNAVRHGMEYVDPGASFYDIRYRQRVVENLHRRAKTFGFVLQPIEAASGGGAAVS

SEQ ID NO: 211815 - protein, 422 aa, unidentified
MRAYDTTAEAGTVQLHWKGAMFDTSNVGVFLGMDVGKSAHHGHGLTPAGKTVFDKAMPNSEPKLRAVFDRLIAKFATVLVIVDQPASIGALPLTVARDAGCQVAYLPGLAMRRIADLYLGEAKTDAKDAAVIADAARTMPHTLRSLELTDEITAELTVLVGFDQDLAAEATRTSNRISHPVPPVAGTRPRPPPGPPGRHLAPGALRLPGRPAKSRPPQTRRAHPTQGPTHGPAADRRRLRRTGRADRRGPGDRHLDIVVPRLAASLAAVHTQRRALEAQINTLLEAHPLSPVLTSMPGVGVRTAAVLLVTVGDGTSFPTAAHLASYAGLAPTTKSSGTAIHGEHAPRGGNRQLKRAMFLSAFACMNADPASRTYYDRQRGRGKTHTQALLRLARQRISVLFAMLRDGTFYEPRTPKDVELAA

SEQ ID NO: 211816 - protein, 364 aa, unidentified
MPTLHDHIPLAGLDVHANQSHAAVLDRASGELTTKRVVGPPSNALEFLESLGPGVRAVYEAGPTGFGLARDARERGIDLSVCSPSSIPRRNNRIKTDRRDAERLVRLLAAGELTLCRVPTVDEERFRDLVRAREDIRADLMRARHRMSKFLLRRDLRFGDRAGAWSTKHMNWLRRLRLEDPCSRAVHADYLTSIEALLQRRSALDQALEELWPESPFAETVARLRCFRGINTLTACGIAAEVGDFDRFRHPRKLSSYLGLVPSEWTSDERRRLGRITKAGPRHARWLLVEAAHHYRHPPTVRDGLKARQVGQDPRVCAVAWRAQKRLYARYLKLSERRRRKAGVVMVALARELSSFIWEAATLS

SEQ ID NO: 211817 - protein, 316 aa, unidentified
MSVPAIQTSRFLGCDVGKAEIAVFDSVSGLTYSIANEPEALSGFASGLDPTCFVVCEATGGYENNLLAALLAANVPAHRADARKVKAFIRSFGILGKTDAIDAKALARYAKDRQADLPSWRARDRERLRLHALVMARRDLIKDRLAYANRRDAPTAETTRPYFEALIESFEAQLVAIETDIQTLIDTCQPIAASVKTLTQIPGVGRKTAAALLALMPELGTTDRRKIAALAGLAPHPLQSGNEERYRRTRGGRPEVKRVLFMAALSARKHNPSLKAFFERLVQNGKKPLAAITAIMRKLVTIANAKLKAETRAHLS

SEQ ID NO: 211818 - protein, 331 aa, unidentified
MKTNEIIGIDVSKLLIDVCIYSKQIVQQFENSKSGFKLMLKWCFKNSSFPKEETMFVFEHTGMYSHLLSVFLAEEKSSFFIASGLEIKRSIGIVRGKDDQIDAKRIAQYGYRLKEELKPSNLPNSSVLQLKSLLSLRTKLNKQRAGFKATLKEQKRIYKATEYKTIFDVQQKMIAELTKQINKINAQMQSIIEQDITLKETYKLVTSVKGIGMQTAVMMIVFTDNFSKFENWRKFASYCGVAPFPYQSGTSINGRTKVSHLANKKLKAIINMCAISAIQHNPEMKLYYQKRVLEGKSKMSTVNIIRNKLIARVFAVVKRQTPYVDTFKFAS

SEQ ID NO: 211819 - protein, 371 aa, unidentified
MIILEKTSLTVEDVMKQDTQLNFSGQKIYVGIDVHKLSWNVTIILNGMKVKRFSMNPKPKELYNYLISHYPQGEYYSVYEAGFSGFWADRALHVLGINNIIVNPADVPTKSKERRRKTDRIDSLKLARELSVGHLEGIYIPEEKAEALRVLVRLRRQLVTDQTRQKNRIKSLLLFLGERVPEDVDEKHWSKRYIRALRNLPINQEESKRALVELLDNLESIRNQIASVVKQLRAYVAKDEEVSKIINLLITIPGIGFILSIILYSEIIDIKRFGRLDELAAYVGFSPAVYSSGEKEITLGLSKQKNKYIRNYLIEASWIAIRRDSALQMAYGKLCGRMPGNKAIIRISKKLLNRIRYVWNNQQPYLFSVVK

SEQ ID NO: 211820 - protein, 357 aa, unidentified
MGHFAGLDVSVKETSICIVDDTGKIVREVKVASEPEALLAVLKNPAYHFKRIGLEAGPLSQWLYSALAEAELPVVCVETRHMQAVLKAQINKTDRNDARGIAQMMRVGLYRPVHVKTLRSQKLRMLLTHRKLLQSKAIAIENDLRGTLRNFGLKVGMVGTVKFEARIKELVENLPDLAVLVEPLLVVRRVLREQFVMLHRRLLAIVRDDEVCRRLITTPGVGPVVALTYRATVDVPARFRKSKAVGAVFGLTCSRYQSGEIDWSGRISRCGDEMMRVMLYEAAQSMLHSKKWSWLKAWAMQIARRRGMKKAIVALARRLAVIMHRIWVDGTEFRWTPLIRLSRRRSEWRGMRKARPI

SEQ ID NO: 211821 - protein, 348 aa, unidentified
MGVFIGLDVSLSKTAVCVVDRDGVVLWQGKVASEPGPLVARLAEWSGVIDLAGIEACPLSEWLHRGLREAGIPVVCIEVRHARRFLSSRPVKTDRNDARGIAEMMRLGHYRPVHVKSPAAQSMRTTLAVRMQLVASQLQIEGMIRGLLKVYGLKIGAIHRNRFAARVVDLLEMAALPELSAAIQPLLRVREGMRTERRAIDRTLAGLSRRDNITRRLMTIPGVGPVTSLAFKATIDEVGRFGTSRALGAHLGLTPRVYQSGEIDRSGHISKCGDRMLRHLLYEAASALMTRTRKWSRLRAWGVAVAKRRGIKRATVAVARKLAVIMHRIWVTGGEFEFGNPAAAAIAA

SEQ ID NO: 211822 - protein, 342 aa, unidentified
MNEVSIIGLDLAKHVFQAHGAGADGSVIFRRKLSRVQLLKFLTQQPSCVVAMEACASAHHWGRVIGDLGHEVRLIPPAYVKPFVKRQKNDMADAEAIAEAASRPTMRFVAVKSEEQQGAAMVYRTRDLLVRQRTQTINALRAHLAEQGIVAPTGPAHVGRLAAVIDGDDGALPAAVRDLARLLLDQIAGLSEKVADLDAELRRRASADDTARRLATIPGVGPITAAAITTFAPPMETFSKGRDFAAWVGLTPRQHSSGGKERLGRTSKMGQRDIRRLLIIGAVAVVRWAARKGAPEGSWLARMLERKPKMLVAVALTNRMARTAWALMRKGEDYRDPAMATA

SEQ ID NO: 211823 - protein, 340 aa, unidentified
MKHIGLDVHSTTTSATVRNHVGKILCRAQFASTRGELARFMTSIKGPKRVALEESQMADWVTRALAPLADEVIRCEPRRNRLISKSEDKCDRNDADALSDLLYLNRLKQVHHPAEAYRALRESVRGYLIASRELTRAKNRLKAFFLFNGSHETGDAVYLVRRREENLKRVLQLGANVELARLLYRHMDHCRTIKAEHIRLVRQLAKPFKPLVDLLMTIPAIGLISAYTLVAYLEDGWRITNKRQLWKYAGLSLRRHESNNFGIQGASYSGNRMIKRVLMSAAITMVSHEEKNSLTDHWERWIRQGADAKRARRNLARKIAVIVHCVLRTRKEYQNEPVTA

SEQ ID NO: 211824 - protein, 346 aa, unidentified
MEQIIRIGMDTSKHVFQLHGVDASEQVVLRRRLRRRQVLAFFAVQAPLEVGIEACAGSHHWARELEALGHRVKLMAPQHVKPYVKRGKNDAADAEALCEAMSRPTMRFVAAKTMENQAALMLAGTRERLVRTRTQLSNAIRGYAAEFGLVAAKGLDKIEPLLARIGADETLPALARELFAAQGEEYRALQARLAAVDARLKAWHRTNACSLRLARIPGIGEIGAAMLVMKTPDPGIFKSGRDFAAWIGVTPKDHSTAGKLRLGVITRAGDETLRSLLVVGATSVVKQAQHGRAGVSPWLIQLVRRKPPKLAAVALANKNARIAWKLMMSGESYDAGRARLAPARAA

SEQ ID NO: 211825 - protein, 354 aa, unidentified
MHTTTDFANHHIYVGIDLSKTSWKVCILTELVEHKTFTQPPSVQVLVHYLKRNFPNAHYHCVYEAGRWGFWIYTQLAQLGIDCLVVNPADVPTTDKEANHKTDRIDARKLARSLRSCDLKSIYIPSRTALEDRSLVRTRQFLVNKQTRCKNQIKALLSFYGILIPESLNDYNWTRRFITWLESISFEHDSGNQSLRTLLDELLHLRQGILQLTNSIRTLAHEERYWRHVRNLITIPGISILTAMTFLTELVTLDRFKTLDQLASYVGLIPGEHSSGDRVITTGITRRQNTILRSSLIESGWIAARKDPALLLAFTKLAKRMPKNQAIIRIARKLLNRIRYVLIHQQPYVVAVVQ

SEQ ID NO: 211826 - protein, 345 aa, unidentified
MKIIGCDFHPSFQQIAICDLETGELQERKLSHADGQAERFYQELGESALIGIEATGNCQWFLDLVQRLGHEVRVGDAAKIRASYVRKQKTDKRDAGHILKLLLEKRFPQLWTPSAAMRDQRQLLRHRDKLVEIRTKVKNSLQHLAMNRGMQKKSRLWTHLGMEQFQQLAMPGWAGTRREDLLQLLKELNGQIEPLDQAVKQAAEQHPQAQLLMTQPGVGPVTALAFVLTVGDVTRFAGSKQLTSYLGLVPSEHSSGSKRWLGAITKQGNRFLRKLLVEAAQTTVRKDEGFRKEYQHRCRRRPKGVAKVAAARKLAVRLYWMLRSNVGYPEIVHIESNPRVPLGEV

SEQ ID NO: 211827 - protein, 345 aa, unidentified
MSEATTIGLDIAKHVFHAHGADERGAQVFSRRLSRGKLLDFFIAHPRCVVALEACGGAHHWARELRAMGHEVRLIPPAYVKPFVKRHKNDAVDAEAICEAAQRPNMRFVAVKTEEQQAAALVFRTRDLAVKQRTQIGNALRSHLAEYGWVAPKGAAHLAMLADLLDDGGEIGETLPEAARPMFAMMVDMLAGLDERIAALDKEITRRAREDEVARRLMTIPGVGPITATAIAAIAPPAETFAKGRDFAAWLGLVPKQASTGGKQKLGAISRMGERTLRRLLIIGASAVVLQASKRGAPAGSWLEGMLARKPRMLVTVALANKMARTVWALLVRQEDYRAPVAVVT

SEQ ID NO: 211828 - protein, 462 aa, unidentified
MNENEQKTIDLEKEGEGLPVVRPHVAGIDLGSQEHWVCAPRVDRTGREVARFGATTPDLEEMAAWLLERKVESVAMEGTGVYWIAPQEVLEAHGLEVLLVNTRELARVPGRKKTDRVDSKWIQRLHSCGLLAGSFRPQEQICMLRTLVRDRGTLVTDAGNWLRRMQKSLDQMNVRVHRAVSDLDGQTGMAIVEAIVKGERDAVKLAELRHPNCKKSPEEFVKQCSGHWREDHLFSLKQSLEMYQAVQQRMKAYDQEILRKVEELEREDCHGQKAPKLKNQNKADAIARRGEEILRQALYRMTGVDLTAIDAIGVRAVEVVISEYGSDLSCFPTEDQFVSHITLAPRKPISGGKPVKKKRKPNSASTRVAEVLRMAAQSMQHSQTALGAYFRRMSQRKDRGVATFATARKLAQYIYRLLRWRQPYVDVGAEAYEKLYQQARIKRLTETARSLGFQVIPKPAEA

SEQ ID NO: 211829 - protein, 319 aa, unidentified
MTASAYFVGIDVCKKYLDVAVRPDGRQWRVERTPEGIAALVKELTLRLPTLALMEATAGLEKEVAAALAAAGVPVAIVNAKRIRDFAKASGRLAKTDRLDAEVLAHFAETFRPASWKAPTPEEEELEALVTRRQNLVQFLKQEGQRLQASGVSALAKESLESHIKWLETEKARIEKLIEKMLRTEYFLEKATLLRSAKGVGPVATAALLAFLPELGALDRKQVAALVGLAPMNDDSGDKGKPRHIRGGRAELRQLLYMAALVATRHNPSIKAAFTALMARGKPFKVAMVACMRKLLCSLNAMVRDGEAWRAPETEEATE

SEQ ID NO: 211830 - protein, 450 aa, unidentified
MAAKRKKTKRTFKPVNPNAAGIDIGSRFHVVAVSRDRDEEPVRSFDSFTGDLNRLADWLEHCEIETVAMESTSIYWMPLYTILESRGIQVILTNARDVKHVPGRKSDVSDAQWLQQLHEYGLVRGSFHPSEGFDELRAYLRQRERLVQYAASHVQHIQKALMLMNLQLHHVVSDVTGKTGFRIIRAILDGERDTMALAAMRDVRCKSSVKTIAAALEGNYRDEHLLSLSQSFSLYDTYQGLIQECDHSIERTLTRLRRAGAPEKAPKSAKKRSRQPHEPGFDVRSAVYAVTGVDLTQIDGVGPLLALRIVGECGTDMSKWPTAKHFTSWLGLSPSNKISGGKVLSSRTRRTDNRVSSLLRLGAVTLGRNDSALGAFYRRLSARVGKSKAITATARKLAVLVYNLLKNGTAYVDPGATYYEERHRARVVRNLTRRAEALGFKVSPAECGVS

SEQ ID NO: 211831 - protein, 353 aa, unidentified
MNFFAGVDTHRDSHSIVVINQLGEVIEMLTISADDVGYGEAISRLAKLDNLTWGLEGTGSYGRPFAELLFRTGYTVYEVPGTITKRHRRKLRRQGKSDEQDAQAIAEAILRERDSLPQYIEADAEEATRLLYERRDRQVRERTGKINRIRALALRLKIQPAEDLTSTKSLKTLEDAVNAQSTVRYADFEVADEMRDLVADLRRIAERIAVLEERMRPFVERLVPELLNLRGCSIISAAGLIGHAGATANYRSADAFASHAGTAPVPCSSGKFESMRINTGGNRQLNRCLHNIANTQMRSDGHAGAVYYERKRSEGKTHREALRCLKRRLAAVVFRTLKAAQDRRGALSGALAA

SEQ ID NO: 211832 - protein, 368 aa, unidentified
MGMKARCSGWYNTSLVFVVLGFEKGATGMASIPIYVGLDYHTKAVQVCVEDGSGQVLLNSRCPNWGPTIIGSVEGLGPAYEVAGCAIEVCCGAADLGDELIREAGWSVDLAHPGYVSRMKQSPDKHDWGDARLLADLERVGYVPRVWLAPQEIRELRRLIRYRQYQVQQRRDTKLKIGALLRDHRISGRIESRPWTRPWLAWLKSVPLPAQSRWVMDHLMADLDRLNRDIRETEAHLEHVTANDSLVIHLRALSGVGPVTSWILRAEVGWFHRFRSGKQLSCFCGLSPRNVSSGERQADAGLVKAGNAQLRSVLIESAHRLIRYDKRWSELALKMLRAGKPKSMVAAAVANRWVRWMFHQVKDTQQVA

SEQ ID NO: 211833 - protein, 447 aa, unidentified
MKTEPEEIPDADHELIIERVAAIDVAKASGKVCLRLPRPGRPGHRVSRVWDVEATTAAVCELADHLVAGQIERVTVESTSDYWRIWYYLLEAAGLSVQLVNARDVKNVPGRPKSDKLDSVWLAKLTEKGLLRPSFVPPAPIRQLRDYTRLRVDLTRERSRYWQRLEKLLEDALIKVSAVASTLDTLSVRDMLEALIAGERDPRRLADLARGRMKTKRAALIEALTGRFDDHHGELARMLLDQIDALSGQINTLTIRIDQLLATIANEVPGHDDGDSGAGGQPSADLTVVQRLTEIPGIGPTGAQVILAEIGLDMSRFPTAAHLVSWAKLCPRTIQSGAIQRCGKSGKGNPYLKGALGEAAAAAAKTNTFLGERYRRIVKRRGKLKALVAVARSILVIIWNLLSDNHTRFRDLGPDYHATRINTEQKLRNHIAQLAALGYHVAVEPAA

SEQ ID NO: 211834 - protein, 338 aa, unidentified
MNHNAVGLDIAKNVFHFYSLGPDHKVIKKKLKRAELLSFFANYPPSIIGVEACGGAHHWARELIKLGHRVVLLNARYVKNFVVGNKNDFNDAQAIYDAVTRPNKREVAIKTVEQQDMQLIHRIRQDLVDKRTALVNQIRGLLSERGIVIKQGINQVRKELPCILEDAKNGLTALSRELFAEQYEKLKALDNEIEAQDRRINRLCIQNERSRCFLEVPGIGPLTATIVAADIGNGKGYTRSRDYAASLGIVPKQHSSGDKAVYLGISKRGNRYIRTLLIHGARAVVKNCASKTDQLSLWLQALVARRGFNKAAVALANKNARILWALASQGQAYQAKAA

SEQ ID NO: 211835 - protein, 318 aa, unidentified
MEQVVGIDVSKARLDGFCLASGRRLAVANDAQGIGELALWLEPDSLVVMEASGGYERLAHRLLVERGCVERGCKVAVVNAQRVRQFAKASGLLAKTDRLDAAVIARYGAFAKPAPTPVRDGAREQLAELLAYRRQILAEIAARAQQLAHLRHPALIERARAALARLRQDKAELDRLLRETIAADAELRTKAALLASTPGAGPVLLATLLALLPELGQLDRRQIASLVGLAPIAKDSGLLRGRRVIQGGRKEVRGTLYMAVLALSRRASRFALAYRALIARGKPKKLALAAIMRKLLVTLNAIARSNIPWRERPLNAAA

SEQ ID NO: 211836 - protein, 344 aa, unidentified
MEYYCGIDVSLEQSSLCVVDAKGRIVREAKVPSERDALIAWFQGLDLPLSRIGLEAGPLSQWLYAGLAEAGFAAELIETRHVRDAFKAMPVKTDRNDARGIAQLMRLGWFRPVHCKSLPAQEVRAVLTARKLVQTKLHDVEMSLRGILRGFGLKVGRTTPRAFEGRIRELVSGHSTLTDIAEALLSARAVLHQQFQVFERRVRTMVRGDERAKLLMSAPGAGVLVPLTYSSAIDEPERFKRSKQVGAHFGLTPTRYQSGEKDVTGRISKIGDRGVRTALYEAAHIILTMPVKGGALKSWAMRLAVRAGKKKAKVALARKLAVILHQMLISDTPFDADRAAMVKG

SEQ ID NO: 211837 - protein, 322 aa, unidentified
MAASVLGIDISKQKFDVALLVDEKTKHKTCKNSAEGFDTLMLWLEKQGIQRVHACLEATGNYGEDLAIYLHEAGHVVSIVNPARIKGFAQSELLRTKTDKIDAALIARFCLAMKPGAWIPPPPEIRFLRALVRRVDSLIDMRSQEKNRISTAHESVISLIKEHIAYLDQEIEKIRRQIADLIGQNPHLKRRKELLDSIPGIGKVTIPHILAELDDLEKFNHVRQMVAFIGLAPKETLSGSSIKGKPRLCKIGHARLRKALYMPALVSIQCNPVMIAFYNRLKEKGKNGKVIVCAIMRKLVHVIFGVLKSGKKYDPNFLITSA

SEQ ID NO: 211838 - protein, 369 aa, unidentified
MDKDTTYVALDDSKRKIVAGILRPSDTQPELREIANDARQIRRLFERLKREGPVAACYEAGVSGYDLHRQITGLGVACAVIAPALTPRRPGQRIKTDRRDAAKLVRLFRAGELTAIHVLDESEEAVRDLVRCRDDIRRDVLRWRHRVLKLLARHGRAYLTGKNWSHAHWRWIREQRFELPPLQRAFEATVFALEQALARQAELDKELEALAATAPYREPVGWLRCFRGIDTLSAIILLAEVVDFQRFRRPRELMAYLGLVPSEDSSGETQRRGALTKAGNSHARRVLVEAALHYRHRPTIGRALANRSQGQPDEIVSHAWRAQQRLHRRYRHLLGHGKRTPVAVAAVARELVGFIWAAMTRHESRRQAA

SEQ ID NO: 211839 - protein, 452 aa, unidentified
MADKIKRAEGLPVINRLAAGIDVGSRFHVVAVAADLDPEPVQTFSAFTTDLHRLADWLIRCGITTVAMESTGVYWIALYEILESRGLTVLLANAREVRAVPGRKTDIKDAQWLQKLHACGLLRASFRPGRDICALRAYLRQRERLLDYTASHIQHLQKALTHMNLQLHHIVSDVTGVTGLRIVRAIIEGERDAEVLSEMRDVRCKATAEEIRGSLHGNYQPEHLFALRQALDLHDYYQLKVAECDAEIERVMAIFRSKSSTPSAPIPAARHRTRAANALAFDVRTSLYEWIDTDLTQIHGLGPNLALRLVGECGTDLSRWPTSKHFASWLTLCPGSKISGGKVLSSRSRKSANRVVAHLRLAAVTVGKTQTALGAFYRRLSARIGKAKAVTATARKIAVLFYNAMRYGMEYRDPGANTYEEKYRERLVKGLGRRVAELGFSLQPIAAQAGVS

SEQ ID NO: 211840 - protein, 427 aa, unidentified
MLKAYCFTPYLAQGRDAFQMSGIQSKISKEGEAVFYLGIDIGKRTHVASVMDDAGKVVLKGFSFPNTLEGGHSLLTRLNTISDDPSHFLTGMEATGHYWLAIFSFLEEADYFVHVINPIQTDGWRKGTEIRKRKTDIIDSVLIADLIRYGSFEDTTLANEDMFSLRQLTRYRSYLVGTAGDFKRKIIAVLDQVFPEYDTIFSKIGVFGKASKAALLEYSTPDAFNEITADTLAETLRLASRNRVGLIKAEALKKVASNSFGIRFAQDAFTFQLRSMIEQLNFLETQIKQTEEEINQLMTSIDSVIETIPGIGPVTGATILGEIGDIHKFSNPKKLVAYAGIDASVSQSGQFDATHNVMSKRGSPYLRKALFQAALVASRSDPVLKAFYEKKRSEGKHHLTAVGAVSRKLCYIIHAILIKNEPYEIRQ

SEQ ID NO: 211841 - protein, 342 aa, unidentified
MEKRHIGIDLHRNNFTCCVRLQNGRNYLSEWKLEALPQFVKKLRPSDEVAVEVTGNTRLFYEAVAPQVARVVAVDPNQFRVISHSVKKTDPNDARNLALYLAKGLLPEVRMKEKTQAQIASLTQTRDTLVKLRTALKNKVNNILSAHGINLAKEALSSEKKLNEVLAMRFDPMVRTELRVIVEQIRSLNQSIAELEKTITEEGQKLPGHKNLTSIKGIGPLSGSILLSVIGDIHDFPEEGKLAAYFGIVPRVWNSNQTERSGRITKRGSKLGRTALVQCALIAQRYSPYLKRFYEKTKARRGTGKAIIALARKLLGIVYRTLKNNWVFEDFPNFVLAEKAAA

SEQ ID NO: 211842 - protein, 336 aa, unidentified
MLYVGLDVHSRQSSLCILNSAGGVVNEIQLRGPRAAVVDRLRQLDQPFDVCYEASCGYGHLYEALRPLARHVAVAHPAKLRLIFRSKQKNDRVDAQKLAKMLLLDMVPRVHVPRVDVRAWRSLIVLRQRVMSQVVRAKNQIRAVLRENDLAGAKWLWSKRQIAWLESLELHPVAKLRLELAVDEFKSLTQKIKRLEAELQRYADGHPAVRQLMTIPGVGIRTAETFVAWVDDVARFRRTRQLGAYFGLVPCQDASADRNRLGHITRDGPPVMRKLITEAAWTAVKKCPAFKAFFERVMGNKPERKKIAIVATSHRMIRVMGAMMRTGTAYDANYER

SEQ ID NO: 211843 - protein, 319 aa, unidentified
MDKEQKYVGVDVSKDYLDVTIVDSAKKWRFTNNQVGIKQVIKVFKGLTSVMVVFESTGGQELSLWLALTQAGIEAAPINPRQIRNFAQAKGQLAKTDNIDAQIIAQYGQAMKPHPQLIPDTQELKELMARRSQIVEMISAEKSRLKAAHQKLIKQDIQIHITWLQKRLLDADKELIQAIDDNPGLREKAKLLRSTPGVGPIMTAALLTQLPELGTLNRHEVAALAGVAPFNRDSGRMRGKRTVWGGRASIRGVLYMAALVATRYNPTIKAFYQRLCAEGKAKKVAIIACMRKLLIILNSMIKYKTLWQHSPSLLVVTCH

SEQ ID NO: 211844 - protein, 339 aa, unidentified
MRQLYCGFDLHSNNVYCGIQDGADQRVFRRRMPNDINVILQELKPFKKELVGVVVESTYNWYWLVDGLMEAGHTVHLANPNAIKQYNGLKNVDDQTDAFHLAHLLRLGILPQGYIYPKAERPVRDLLRRRMLLVQQRTAHVLSLESLMMRHLGCRLKSREIENLDEHGLDSHLLEPTLRLAADTAISMIQHLSGRIKLIEKEVTALCKLKPEYAKLTTIIGVGPILATTIMLETGPIQRFASDSNYSSYCRCARAVKTSNDKKKGENNGKNGNKYLSWAFVEAANHCRRVCEPARKFCQRKTDKRNGVVAVKSLACKLSKAAYFIMRDQEVFKLDKCFG

SEQ ID NO: 211845 - protein, 329 aa, unidentified
MVFLGIDVSKGRLDCAVLAAEGGRPPGRRSFRNDAEGAERAATWTTQVSGAAAADTHVILEATAAYHEPVAHRLAALGMRVSIVNPAQVRSFAKGIGVLGKTDRIDAQLLARYGQLARPRAWFPPARALLDLQGLIARLDDIEADLRREGNRLEQARTRGCPDVVEQSLLASLAALESSRETLRRAIAAHVAAHGELQADLERLLTIPAVGPKTAVRMLAMLRARGFDSARQAAAYLGLVPVERQSGKSVRGRPQLSRAGNPRLRAALYMAAVVGIRRNPDLKAQYERLLGRGKCKMAALSAVMRKLVHLCFGVLKGEGGYRAGAATPA

SEQ ID NO: 211846 - protein, 415 aa, unidentified
MSLKIVYKICCGIDVHKTFVVACIASTNDIGVTSYESHRFSTYTSGLKTLLQWLLNRNCKDVFMESTGKYWIPVYNILENDCSIVLAHPKYVKAIRGKKTDKKDAKWIADLFKHDLVAGSFMPPADIRQLRDLMRYRFKLTCFQSSEKNRLQNCLTVSNIQLGNVVSDTFGKSAQAILDKLLENPADTSFDLEPLVYKSLKKKLPQLRDAIDGYITPEQAGKLKVIKSHYENLESRKAELEELILALAAPYQQELAILQTAPGIRSDFTAIGIISEIGTNMEAFPSAKHLCSWAGLTPTNNESAGKKKSVRVSKAGCYIKPLLVQCANAVVTSKKHPEIRNRYLRLKKRRGHKKAIIAIARMLLTALYHMLKNGENYNAELYRKSYLPPVDREITVEQAIIIARNQGYKIKSATA

SEQ ID NO: 211847 - protein, 357 aa, unidentified
MTTYYIGADVHSNSTEMAIEKGKKIVASYIVPTTIQALSNILDSLQGKKQLAIEEGPMAGWLYRNLNKKVDKLIVCDPRRNKLIDCDGDKDDKIDASKLANLLRGGYLREVYHSEDDDRAELKNWVSLYNDRVRDAVRHINKIRARCRMHGVRIRRFVLRNPSHRSKWLSEIKHPALAKQLKMLWVGYDAIAEQTRMAKQQLIQLSKRYDIIRFWRKLPGIGLIRAVTLFAYLDTPWRFKKKNKLWKYCGVGLQRTTSGTDKKGRPKPAKLQLPWAVNRTLKNVALGAATSVINQEGNVFRVYYERMLSGGIMPSNARHAVSRKILTVMWGMWKTNSRFDEDLCRKPGPKIATALSR

SEQ ID NO: 211848 - protein, 293 aa, unidentified
MLHAGLDLSRKKLDVCLLSDEGEHLDQLAVPPDVDSLRRLARRVVEVHRQPVCAVIESMTGARIVHDTLEQQGWSVEIADAQKVKGLAPLACKTDKIDSMVLAVLSHRDLVPAIWLPDPRVREERELARFRLHLVKHKSALKCRIHSTLINFGRACPVTDLFGVEGRRLLERLEVPEPWCSNVTASVELIDDLEEQIAGINRRLKDGHADHRYIPLLMSVPGIRWVLAFTIAGEIGEIERFSSPERLAGYTGLCPRVNQSGEKDRRGPLTKHGPTYLRWALLEATMHALRHPA

SEQ ID NO: 211849 - protein, 428 aa, unidentified
MSNQEIIRRKQYCQIVEEITGSDQYLVVGIDVGKDKHHAFMGSATGKSLFRKLIFENNLDGFSRLLKTAEAIKVQNGLSKIVYGLEPTGNYHKPLARHLIHCESNVVLVSGEAVKKNRSLLNGRWDKHDTKCAANIADLVSRGRCLYYDCPSLGIIELRSLLSLRRKLKREEYGLKMRIRNNLLAQYFPEMDRFYSACESESLAIVQCFLNPDTISAMEFGDFFHLVTRTRRGIAQTLRLRKIHGLATESVGCPMCPAVEYEADLLVEKLNQVRQQIQKTADLIEDICLEFAEYSYLLTIPGFGPYISAKVLAAIADPFRFENHKQVLKMAGYDLCANRSGKTSAKAVPVISKKGNGELRYALYQAANVAATRVDHFRAYFTKLLRGRERERGIKTKMRVKLAAKMLVIAWTLMKKKEVFDPAHLNIE

SEQ ID NO: 211850 - protein, 374 aa, unidentified
MSYRIAGIDVHKKMLAVVVSDVEVDAEFQFERRMFGSNPEQLRALAGWFVEQEVEEVVMESTAQYWKPVWEALERYWKSLCEKREGAKRRSGRLHLAQAESNRGRRGRKRDFVDAERLVKRLVARELTLSFVPDAEQRLWRTVTRKKFQLRRARIRLQNQLESLLEAAHIKLSSFVSDLLGFSARRMLKALAEGETNPAALAALADERLRATPEQLSDALGACTELHDVYRRLLQMALEECRLIDEQIGKLDQEMASLLSQHQDAVERLAEVPGLGVDSAQQIIAEVGPTAATFPSEKCLSSWVGACPGEEESAGVNYSHRSPKGNRHMRRYLIKLLTPQPEPKEAFSKLCIAARSRDSDTIKPSGSLPIDSVG

SEQ ID NO: 211851 - protein, 347 aa, unidentified
MFQRENKKACVSLDVSKGSSHVQAFYSVGQKATDVCVIKHTKSGFEKLNEIIVALENSTGEKCVVVFECTGVYSKPVENYLQKIGKKYFLIPPLLSAKVRKSDIRPTKTDSKDCETIANVYFLKKLRPAKPFEKLHDKLKSFCSYYLFLINRTSCMKTKYRHYLDNVFPRIDEYFNVYSPFFMDLIIKNPNPQKLKKKTDEFLYKFITSYDYFGNGKATVFINSFHRYFEDAAIDINEDDAAIDVLSSSAKKLKEDMKSLDDLLEEIILLGMKTEEYKYLITIPGMTKNTASRIAAEVSGIDRFPTASKFIAYAGIDPTVKESGKMTGEHLPITHKGNQRLRCLFYL

SEQ ID NO: 211852 - protein, 343 aa, unidentified
MNVTRIGLDLAKKVFQIHGVARDDRVVVKRQLKRAQVRAYFEKLPACRIGMEACAGAHYWAREFGRMGHEVKLIAPQFVKPYVKSQKNDANDAEAICEAAGRPNMRFVTVKTISQQDLQAVHRIRSELVRQRTAKVNQIRGLLAEYGIVVATRIDALRRALPDLLEDTDNGLSGLFRRLLEGLRQDLVELDRRVAELDGEIQMAAKEDETARRLQTIPGIGPITATALAASVGDARQFKRGRDLSAWLGLTPGQHSSGGKDRLLGMSKRGDSYLRTLLIHGARSVIQAAGNKTDPRSRWIVGVAARRHKNVAAVALANKNARIAWALLVRGGAYDSQFGRVAA

SEQ ID NO: 211853 - protein, 320 aa, unidentified
MLSFCGIDVSKDRLDVMVLPDEYSSSVPNDPAGWAILVEQLRGFSITAIGIEASGGYERGAVRSLQAAGMPVRQVNPFKLRQFAKASGVLAKNDPLDARMIASFVGIMPTRPALRTTPAAEQLVEMLAVRRQLSAEKTAAENASRLLEDLMLQRLSRRRIARLAADIELLDKRLVESVATDATLAHRYRLLTSMPGVGPVLACTLIALLPELGGMSRKQVAALVGVAPYAFESGTLKGRRSIWGGRANVRQVLYMAAMSASNWNPMLKLFHDRLKGAGKLPKVVIVAVMRKMITTLNAMVRDDIAWADRLSGRHSVTTAR

SEQ ID NO: 211854 - protein, 429 aa, unidentified
MIMGFTKPIEHFNLQRKKVIIMNTLYVGIDVSSKSNVVYLMLPNGDKHSNFSVANSHEGSTQLVKRILSALTSHSLDTVLIGLEATSIYGYNLVYFLREDATLAPFNRKIHVLNPKQVKKFHDAYNDLPKNDYVDSFVIADCLRFGRINKEVYMGDYRYKALQNLTRARFFAVQNLVKEKQRFMNVLFKKYSTMTQEKVFSDTFSTTALAVYDEFESAEALANMDLHELTDFIIEKGKNRFPDPDAVAKAIQKAARSSYRLPKTVNDSVNQVLSISITSMKALESQIKEFDKAIKAQMELLPNVLISIPGIGPVYSAGIMAEIGDINRFNSQAALAKYAGLAWKQHQSGGFESEVTRLIPSGNRFLKYYLCEAAFSLVRCDKEYSDFYHLKYKEVNRCQHKRALALTARKFVRLVFRLLKDNRLYCPAK

SEQ ID NO: 211855 - protein, 425 aa, unidentified
MPYKIAGIDVHKKMLAVVVADVEKDEYEFERVRFGSTPEELRRMCSWLLEQGVEEVVMESTAQYWKPVWGYLERLWKPGCQPGEEGNGRAGVLHLAQAHSNRGRRGRKRDFPDAERLVKRLVAQELVLSFVPEPTQRLWRTVMRRKQQLIRNRVQLQNRLEALLEEAHVKLSSLVSDLLGASARRMLKAMAEGEKDPAVLAAMADKRLRATAAQLCDALEATSELNPVYRLLLKMVLEELALLEQQVGQLEQEMASLLRPHEDEVKRLAEVPGFGVDSAQQIIAEVGAKAASFPRKEQLSSWVGWCPGEEESAEQNKSGRSPKGNRNMKRILNQCANAAVKVKGSIFELLYHRWIVRLGHKRTIGAIAHKLSNIIWLILHRGVRYEERGPAVSQKARQARTTKMIKELRKLGYRIELSNMQPAVS

SEQ ID NO: 211856 - protein, 389 aa, unidentified
MFYVGLDVASEKHDCCILNEKKKVLQSFSISNSSIGFDSLLAALAELPSDEIKIGLEATGIYSENLSVFLRRKGFDVTTINPLLLKKHQCATTLRKTKTDKADAKGIALFIAEEGFQPDLPISYHIQELKSLTRARFSVVQDRSALKNKVKRLVVLLFPELLGEFTDIFGSSATALLKQYPSAAKLAACHCDTLAALLRKASRGRFGRAKAEHLRQLAQNSVGNHSTARAMELRMLLKRIDLLSEQIAEYDTEIKVIMDKIDLPILSIPGISYTLSAIIVAEIGDISRFSSPAKLLAFAGLEPSIYQSGKFVPTSGKMVKRGSPFLRWALLQAAGYVPTYSSTFALYRAKKVTEGKPAAVVRSHVAKKLVRIIYSLLTHSTAFSDQLSA

SEQ ID NO: 211857 - protein, 489 aa, unidentified
MEAEYRRCCGIDVHQKVLSVCVLPPVGSAGKEVKEERFRTFTRDLKRLRAWLKQCGVTDIVMESTGQYWRPVWNILEGGFANLVLVNPLQVKALAGRKTDRLDANWLATRMERDDLKGSFIPPLEIRELRELTRLRVHLLQDSNRVKNRIGQLCETGNIKVSSVASDLFGTSGRRMLAALERGDRDAGWMADYAQGSLRNKKGELEMALQGTFSAHQRQLLGRMLKQLNGLDQEVADLTEQIEQRVGCWRDVMARLTTIPGLDRITAWTVLAEIGTDMEVFGDAQHLASWAGLCPGNRESGGKRMSGKTRKGNRYVRRTLCQSAWAASRTKDSHLASLFRRIRSRRGAQKANMAVAHHLLTIIFHVIKDGAVYQELGGDHYDRQNEPKVTRKLVERLERLGYAVKLEPVAEHTTVAVAEAVPAYADGAAAASAAEPAAVAAPPQPQRKRGRPCHCVQRGIACTHRSRQAAADSTDNKSTHESGSKTISP

SEQ ID NO: 211858 - protein, 318 aa, unidentified
MQISGCVIGVDVGKFELQVAGYEGAILSGIVPNNRSGIVGWLKRLPAGSVIAMEATGGYQELLARLAHERGFVVYVLNPTHVHHYAISLGNRSKTDRLDAQVIAQYIAQRHAKLHRYEPISPELQQVRALQALRSTVVRVGTSLRLSAQRHGCASKHQKQALASLGAWAEQLERELIAKIQAQSEWAKTYGLLTSICGIGPINGAALTTLFNRIHFASSDAAVAFCGLDPRPNESGRKVGRRRLSKQGDKAARTLLYNAASSAARTAHFKDYYAMLRARGLASTAALVVIARKLLRIAYGVWRTGQAFDPGRLNLKTA

SEQ ID NO: 211859 - protein, 344 aa, unidentified
MQNMYYIGLDVHKRTISYCVKDGSGAIHAEGTIPATRFDLDRWMKALPQPWSAAMEATMFTGWIYDHLKPHAAALKVAHPLMLRAIAAAKKKNDRIDASKICDCLRCDFLPECYLASTAIRERRRTLRYRNLLVRQMVQMKIKISSLLMEAGVSYNKQRLHKAGYFRELLASNSEIDAGLGSLLRLCRETVVRLGKTESALVRSLERDSLLIDRVERLMTIPAVGPITALTWALEVGDAKRFSSIKKAISYCGLCGAEKSSGTTVQRTPLSKQRNKHLQTTLIEAAKMAPRNSPELAMLYDKEKQKGNANRATLAVARKLVAYLMAVDRGQRNFQVVETNCIAA

SEQ ID NO: 211860 - protein, 455 aa, unidentified
MPGKKTRGISAGRLSTINPDAAGIDIGSTFHVVAVPSDREDRPVRTFRTFSSDLYQLAEWLTAVGITTVAMESTGVYWIPVFEILEARGFEVLLVNARDVKHVPGRKSDVNDAQWLQQLHQHGLLRGSFRPRDSVVRLRAYLRHRERLVDYAAAHIQHMQKALMQMNVQLHHVVTDITGLTGMRIIRAIVSGNHAPEQLAEFRDRRCHATEDTMREALKGNYRPEHVFALRQALELYDFHQTKVAECDVEIEAVLGELNALRVTPEAPLPSVRHAKGRNEPRFDARPALYTLLGADLSQIHGFGPYTVLRLVAECGDDMTKWPTAKHFTSWLSLAPGNKISGGRLLSSKTRRSSNRATALLRIAAVNIGKTQTALGAFYRRLAARTGKAKAVTATARKLAILFYNALRFGTSYIDPGVSSYEERYRQRVIHNLQRRAKSLGFTLVTTPPATEGVS

SEQ ID NO: 211861 - protein, 336 aa, unidentified
MEYVGIDLHKKGFTACIMDQEGSIVHLHKYQNAREDVEELVSICQNPSFVIEATQNWMWITRMLQEKGLPVTLAHPLRTKAIASARIKTDNLDAETLAHLLRASLVPMAYIPTIKEQEDRELSRARCQLVKQQTWVKNQIHSLLTKENLTPPVTDLFGTRGVIWLKEQDLSQSKQLILKQMLALLEDIKEKITVLDRQIEIRIKGNKRVRILKSIPGFGTITAFVLAAEIGNPKRFPSGKKLAAYLGLVPSLYQSGNTKRLGSITKLGNPYSRWVLVQAAHRLVRSDTNTKLFYQTLSARRGKKKAIVAVARKLAELSYRLLVDNRNYEVRMPKRE

SEQ ID NO: 211862 - protein, 400 aa, unidentified
MRSIGMDVHRSFAQVAVLDRGKVTEEFRVELDYDAVVAFGQKLRKDDEVILEATGNTSAIVRLLTPFVAKVVIANPLQVKAIAHARVKTDKVDARILAQLHAAGFLPEVWAADDDTLNLRRLVSERAALVRSVRRVKSRVQAVLHANLVPKYSGHLFGKGGRDWLSTAPLPKAERDLLARHLDELDWLKGKLEKLDGAMARIALDDTRTRKLMTIAGINSVVATAVIAAIGDISRFPTPDRLASYFGLTPRVRQSGDRVAIHGRISKQGNAIARTMLIEAAWSAASVPGPLRAFFLRIKDRKGLNVAAVATARKIANLIWQLLTKEAPYRWARPAFVAMKMRKLELRAGAAKAHGPAGPARDYWIKEIRHREMELVAQAEAAYAAMVEAWRDRPPKPQKG

SEQ ID NO: 211863 - protein, 340 aa, unidentified
MAEQYVGIDLHRRRSVIVRLTPEGEVLEIVRVDNDPVALSLELAKAGPDPEVVLEATYGWYWAADLLQACGARVHLAHPLGVKMFGYQRVKTDARDSTNLAELLRMQRLPEAWLAPPAVRELRELVRYRAKLVALRSGLKAQVHAVLAKQGVQVPMSDLFGVAGTRLLDELQLGRAYALRIASLRRVLVAYDQEITMLGREISTALAGDVGYLAIQTIPGVGPVLAAVFVAEIGDIHRFAGAPQLCSWAGLTPRHRESDTTVRRGPITKQGPRLVRWAAVEATQRLPATSKQATDFHRIADRRGTGIGRVAAARKLLTLVYYGLRDGQVRCLAAAPRETG

SEQ ID NO: 211864 - protein, 364 aa, unidentified
MKRKVYVGMDVHKETIQIAYLTSNSKEILKEQQIKHNEVQIKKFIKKLKTEWNEIHCCYEAGVTGYPLYRYLKSLGVNCILVAPGKIPRQSTDKIKTDKRDAIKLARLMRSGELESIHVPSEEDEAVRDYLRSRDSLRLDLGRNRQRLMKFLLRKDIKYSTTKYWTVSHYKWLNNLHFNNEILQETFNDYYSRVRVQEENLKSMDKKIQEIAESEPYREKVGILRCFRGVDYLTAMFLLCEVNDFKRFKTAGSFMSFLGLVPGEYSSGSKRKQTGITKTGSPRLRRILTEAAWQHRFPGTGSKIITARRSGQPALVVALAEKASLRLHKKFRNLQLRGKTPQVMITAVSRELSGFLWAAMNLVA

SEQ ID NO: 211865 - protein, 442 aa, unidentified
MIAEIFEFCGCDVHKHQIEVAWLTLTGQKFLHGSFENTPEGNQQFWKECIRLGTTKVAMESTSIYWKAFYKSCPESISPTVFNSATIKLKTRPKTDTRDAMWIARCLRAGFISPSNIGLGKANEIRELCRLRNTIVEEITRKKNNIHKILDEYQRKLTTFSSSMNTHLALYTITILAQGGAFKDLVKSCPTTRIRKSIERNEGSLKAFLTPQLPPEAQIALDLALRGLLERAQACSKVDQELAKKLQDPTIHASLKILNSIPGISGVSALQLLFEIGRVDRFPSKRSIVSWAGLCPRIYSSGGKTSHGRITKRGNTHVRRILFQAARASLRVTNNPLKAWYQRLVARKPGRVALVALARKLLVIIYTLLNSGRTFESVPLGSEIKVYSTAKKIVRGLTTEPIAPLLNILVNWLDTPQEYRDSLSGIFYSMYEVVHDKRGTFS

SEQ ID NO: 211866 - protein, 334 aa, unidentified
MGQVTTVGIDLAKNVFSLHGVDGAGRVVLRRTLRRDRLLDTVAGLSPCLIGMEACSGAHEWGRRFQQHGHTVRLMAPKFVAPYRKSDKNDGNDAEAVCEAVSRPSMRFVPVKSTEQQALLAMHRVRQGFVVERTALINRLRGLMSEFGVVLALRSVTVRRQAAQAAEGLPELARRAIGDLLEQLRLLDGRIGAYDKEIEAQARLSEPARRLMKIRGIGATTALAIVATVGDAREFKNGRQFAAWIGLVPGQYSTGGKTRLGHISKRGDAYLRNLLVQGARSVLQTASAHQDRLSRWALELQARRGYYRTLVAIANKNARIAWAVLAKDAPLKMN

SEQ ID NO: 211867 - protein, 343 aa, unidentified
MNITTVGIDLAKNVFQVHGVDERGRVVLRKAVKRSELAKVFANLPACLIGLEACGSAHYWARRLQQFGHTVKLMAPQFVKPYVKSNKNDARDAEAICEAVSRPNMRFVPVKSVEQQAILAVHRARQGFVVERTAQANQIRGLLYELGIVIPKGIRHLEQRLPEILEDAENGLPGASRELFARLLEHFRELGEHVRELESQIKAWHRESEASQRLEAIPGIGALTASALVASIGDARAFKNGRQLAAWLGLVPRQASSGGKEQLLGISKRGDTYLRTLLIHGARAVMFHRIRGARDASSWLMKLLARRNRNVAAVALANKNARVVWALLAHRREYCANPVSAAA

SEQ ID NO: 211868 - protein, 351 aa, unidentified
MNTIDYVGVDYHTKFAVATRMNKDGDIISTDKIDNTKQDIRAYFSQLPQGSRVALESTGNWYAFVEWCHDLPLDLVLSHPQKTRVIAESRIKTDTIDSKILADLLRTNYLPQSYLAPAEVRGIRELIRFRTTLVRMKALFETKIYNAVYKNGEKIMATRPDGRKARAELAKMDLRPVYQDEINSCLAVCDYFKTQIKQYDEEVERKAVLDDDCKLLMTIPGISFFGALLITSELGDWKRFPSSRKLASYAGLVPSTYASGGRTRHGSITKQGSKNLRFILLQAITHLARRDSRFGRMYTRIKIKHGAKTARIAVSRKLLCVIFAMLKSRQSFQITKDRQHVKTAQSSDVTS

SEQ ID NO: 211869 - protein, 269 aa, unidentified
MSIVMGLDQHRAQITAEWIDLGSGEVSRARVRPADRSGVRRFLSRFAGEQLEVALEATTGWRFLVEELRAVGAGVHLAEPAETAALRGNKKRAKSDRADARHHRELLMAGRLPESWIPPDHILDLRAQVRLRHTLIEQHSQWQQRIRAVLYHHGCPRRPQGLMVGDGREWLDAQPLPETARQQVAVSIAVIDALEVQLAPLSRALRFYARAQIGCQALIEAYYGIGELTAVTILAELGDCRRFQNSRDAVRYGGLDVTVYQSEGVSSSV

SEQ ID NO: 211870 - protein, 354 aa, unidentified
MIIIGVDFHPEYQEIASVDTDTGEYQEKRLAHPKEAEEFYRCMSCVGQVVRVGMEASGHGRWFERLLEGLGVELWRGDAEVIRAKRGRKQKTDREDARHILKLLLKDDFPRIWVPNWENRDLRQLLWHRHRMVQARTRVMNQLQAVALNEGLRCKKRLFRADGRQQLESFQLAPWASRRRRELLELLDRLNPTIAELSQAVEREAEKCPEAQRLMTHPGVGALTALAFVLIIGETERFQCGKQIAAYLGLVPLEKSSGNRRRLGHITKQGSSIARFLLVEAAQVTVRSLPEWRSKYVHLTMRRGRKIAKVAMARKLAVRLYWMMRKEWDYEQLKKFGSHAGQPGHRDGVKSNTE

SEQ ID NO: 211871 - protein, 359 aa, unidentified
MVYLGVDLHRKVSHVVALDEAGNVTLSRRLVNDPAEFRRVFGELEPEPIEVAFEATYGWGWFADLLADAGVAAHMAHPLATKAIGAGRVKNDAIDARTLAHLLRTNLLPEAWIAPPEVREARRLVRMRASLVRVRSRLKCQVHAICADLGLQIEVSDLFGARGRELLTTLALPAVTAGRLDANLRLIDALGGEIRLADREIVRHFRADPRIRRLTPIPGIGFLTAAMIVAEVGDVGRFGTPNRLCSWAGLTPTERSSADHTQRGHISKQGSRWLRWAMVEAAVAAARGLSLQRFFGPIKERRGTKIARVALARRLLSLAFYALRDEAGCRAFPVLAHPSRSTRARSPYGMASPDGRDFD

SEQ ID NO: 211872 - protein, 408 aa, unidentified
MLEVKVERCAGIDVGKKFLEVCILIGPVHRKPAEEVRRFGTNVRDLEAMRAWLLENACTEVVMESTGSYWRPVFNILEGDLQVILANPEQVKALRGKKTDRKDCRWLAGLLRHGLVQASFIPPRDIRELRDLTRRRRKLLENGTEERNRVAKVLEDANVKIGNVLADVFGMSGQAMLEALLENKLSAEQMANLAHRRLRPKIPQIVEALEGHRMSDHHRLLIGQALKHMQFIEDMVEELNQEIQKKLQPYQRQIELACTVPGIARDAAASILAEIGIDMSDNGPFATCHHLASWAGVCPGNNSSGGKRKSGNIRKGNRWLKATLSQTAWAGAAKKNSTFQFRYHRLKSRRGGKRAAIAVAHAQIIALYWVLRNGVPYQQQIRESQQQQRESMIRHHLARLTQLGYSTP

SEQ ID NO: 211873 - protein, 332 aa, unidentified
MFLGIDIHKREAQVAVRNDDGDVIEQVRVKNTDLEEIGEKYAGGKALLEATTNYFYIYDMLSEHLDVVVGHPPKLKAIAQTDKKTDEVDAKELSRLVWLGSVPESYVPTGEIRECRALVRGRTSLLEERTSFVNKIHSLLQDNGITREVKPLNVSGREFLDELTLQEPWDELLSSYLSVIDTLTEEIEQLNELITERAKEIKEAQLLVTIPGVAHYTALVIHAELGEIDRFDTAKEVVRYVGLNPVVRESGDSRFEGGISKKGPGNVRWLLVQAVHSAVHTVEDEYLSRFYHRLEQKKNKQKAAVATARKLLVSIYHMLDRGEEYDPPGVKA

SEQ ID NO: 211874 - protein, 416 aa, unidentified
MSNELIVGVDVHRQQNVFSVLDGKGQELVASFACDNNRPGTQAAADRLAGIMAQGHYQQVRIGAEATGWYWFPFFLALSQNSVLNQWPVTLYPFNPRLTANYKKSFSDLDKTDAIDAFVVADRLRLDRDLPAPFAFDDDSLSLRMLTRYRYHVVHNLAREKAYCLSVLYLKASEYTRPEGKPFAHTFGATSRAVLQEFATMDEVAALPFHDLVEFIDVKGKRRFPDPTDNARRLQQVARDSYQLPRQLQESVQLVLGMSFQYIAHLERQLKRLDTAITQHMDAFHHSLQTIPGFGPVFCAGILAEIGDIARFDFDQAKVANYAGLKWRKTQSANFIADESPMTRKGNRFLRYYFCEAANIVRMCDADYRAFYDRKYKEVRKHQHKRALVLTARKLVRLVVRLLTTNQPYRPRSMPI

SEQ ID NO: 211875 - protein, 410 aa, unidentified
MNAVGIDVAKGKSMITVRQPLDVVTVKPYGILHTAIELEKLAEFLRSLNGETRVFMENTGVYHLPVADYLHESGIFVSVVNAKEIHGYDRNPLRKYKTDKADAVKIAEYGLAKWTKVRRYEPADDARRQLQAYNRQYCHYSKIKTMHKNNLDALLEQVFPQIKTAFSKRTRDDGHEKWVDFAGTFWHCECVSSLSEAKFHEKYRKWCHKHNYHYRKKQAAKIYEIARKNVAILPKDRFTENLIKSAAAQINSIAETQAALLLKMKELAMSMPEWEAVIEMSCVGETIAAQLIAEIGDVNRFDSKKSLTGFAGADSPRSQSGTVDRQGKPITKSGSPHLRRTLYLILFNMLRTKPDDDVYHFMLKKKSENKKFLVYMVAGFTKFLRVYYGKVKERLVQLDSAKSAPAFSCQ

SEQ ID NO: 211876 - protein, 416 aa, unidentified
MTEHQWYAGVDWASQSHHVRLTDGNGRDVGEKVFRHAGEGLADMAAWLMERSGAADPGRVHVAIEVPHGPVVETLLERGFNVYAVNPKQLDRFRDRFTLAGAKDDSRDAEVMASALRTDPRCFRLLAASDPAVIELREWSRIAEDLGTERIRLTNRMREQLWRYFPALLELEGDLAAPWLLDLWEAVPTPAKAARVREATVARILKRNRIRRLDAAQVIAALKAPPITVAAGTAEAASAHIATLLERIRLVNRQIKDAHARLDKLMVRLAQKEDAEPGQAREQRDVEILASLPGVGRIALATLLAEASDPLQRRDYAALRSLTGVAPVTKRSGKSWIVIRRQACHPRLANAVYHWARVAVQADPTSRAKYAALRSRGHSHGRALRSVADRLLAVACAMLRDRTIFNPSLALANAPC

SEQ ID NO: 211877 - protein, 416 aa, unidentified
MTFKIVRFICGGMDVHKNLIVATIGTTDKQTLTTEYIQQSFSTFYSDLIRLKEWFISHDCYDVCMESTGKYWIPIYNVLETELNICLTHPKYVKAIKGKKTDKRDSKWICDLYKCDLVKHSFIPEKEIREMREIARYRCKLVYMRSSERNRYQNCLTVSNIGLASAVSDPFGKTATNIMKELMQSEVIEDDKILKLIHKNCKDKDKILDSLQGYHIESDQRFKMDTVMNHIEYLDKQIQACEAELIKRAYPLRDYFQHITHIKGISALSAILIVSEIGTDMNQFESDKRLINWAGLSPANNESANKKKSVRISKAGLYLKPLLVQCALSSIKDKNSYFGIKYCRIKKRRGHKKAIIAIARMMLVCIYHMILTGEEFNPCDYESLTNPKPKKEPTMTVESALQFLKDSNFDFSSIQL

SEQ ID NO: 211878 - protein, 419 aa, unidentified
MSFKILKNNCCGLDVHKTWIYACIGITDSNNRTEYKQARFSSFTKGLNELCDWLAKYNCKDVCMESTGKYWIPVFNILEQHSFWVTLSHPKYTKPMKGNKTDRKDAKWICDLYMCGMVKPSFIPPADIRELRDLVRYRFKLTCMITGEKNRAQNCLTVSNLKLDDVFSDVFGKSSRSITEHILQHPGEKFDIAPFVDSRCKTPITEIQAAVDGAISKEQVVKLRQCLDHIDELNKHISEVEQEILRLSDKYEAALNLIRTVPGFNKNPLTAIQVLSEIGGDMSVFPTAKHLVSWAGCCPRNDQSNQKIKSTRISRAGSYFKPVLMQVANALIKSKKHPEFITRYKRIKARRGHKKAIIAICRMILTAIWHILSDLKPYTPEGFLESRPVKEGKVLSTSQALNLLKQRGYIIKGEPLAVS

SEQ ID NO: 211879 - protein, 352 aa, unidentified
MDATTVAVDLAKDIFEVALANRAGRIIDRKRLSAAQFERFIDTLAAGTGVVMEACATAHYWGRRCQNRGLAVQLLPPQYVRPYVRRNKTDRTDAEALLEARRCGEIRPVPVKTVEQQTLLALHRVRRHWQADRTARINTMRGLLREHGLPIAIGARTALKRIPALLEDATVALPDLVRHLIAVLLDEVAALERRLAAVDQQLARIAREHPIAQRLQQVPGVGVLTSTALVGTVTHIHAFRRGRQFASWLGLTPRESSTGHRRYLGRISKQGDVYVRCLLTHGARAVLLTAQRTSRTAPHRLTRFQQWAVTVAAKRGHNIAAIAVANKLARIIWAVWHFERDFQSVPISTVAA

SEQ ID NO: 211880 - protein, 411 aa, unidentified
MQVIYERCCGLDVHKRMITACLLKWLGGDWQKEIRQFGTMTKDLLALSDWLVREGCTHVAMESTGVYWKPVYNILEGQFELLVVNAQHLKAVPGRKTDVRDAEWIAELLAHGLLRGSFVPPPSVRELRELTRYRTSLVRDRARTINRLRKVLEAANIKLASVVSDIDGVSARLMLEALVAGERDTEQLANLAKGRLKEKRAQLVEALSGRLQPHQSFLIAEHLAQIDYLEGAIERLSREIEERLRPFEQEIGWLDTIPGVNRRTAEVLWAETGGDMNRFASARHLASWAGMCPGNNESAGKRRTGRTRKGSPWLRHCLVEAAHGAAHTKNKYLSSQYHRLAARRGKKKAQVAVGHSILVIAYHLLTRKQAYADLGANYFDERDRQAVTKRCLNRLQRLGYKVSLEKLSMAA

SEQ ID NO: 211881 - protein, 344 aa, unidentified
MKIRTIAVDLAKNVFEIGVSERAGHVKKTHRLSRSKFLKFFVNQEPSRVVMEDCGSSHYWAREIRQLGHEVRLISPQYVKPYVLRNKTDRADVKGLLEADRNSDIHSVPVKTLAQQQLTALHRIRSRWMATRISRMNTLRGLLREFGLVIPVGARHVIPGAMELIEDAEVNLPDALRGTLNQMCTEIRELEARLQSVNGQLEALAAQTPVVARLRSIPGIGLLTATAMVGFVGDVTRFRSSRHFASYLGLTPREHSSGNTRRLGRISKRGDVYLRTLLVHGARSALWSAHRKGITPSPLQKWVLNVHQQRGSNKATVALANKLARRIWAVWKRDSDYQDHYKAA

SEQ ID NO: 211882 - protein, 440 aa, unidentified
MAMRKRNDEVFPNAAGIDIGASSHCVAVPSHLADESTREFGAMTDDLNGMADWLLACGVDTVALESTGVYWIPVYEVLEQRGLKVWLVDARQLKYVPGRKSDVQDCQWLQKLMSFGLLRAAWRPDGEVCVVRAVARQREVLLIEQASWVQRMQKALVQMNIQLTEVLTDIMGMTGQAIIRAIVAGERDPKVLARYRHSRVKASAEEVTKALTGNWRDEHLFVLRQALAMYDDIARHSAECDAKLQALLAERSQIKVDLGKTPKAGSKLRLEFDARQALANWAGVDLTRINGLGVTVVMKLLSEIGTDLSRFASVKHFCSWLGLCPATKISGGKVLSSGTKRCANRARQALKIAAMALSHSDSALGAFYRRLSARMDKPRANTAVAHKLARMVYFMLTRGEAFVDQGQQHYEEQQRQRSIAALKRRAAALGFQLNPASVPA

SEQ ID NO: 211883 - protein, 408 aa, unidentified
MKTLHRRCAGLDVHSDSVVVCARLTVRTKVSHEVRRFSTTTRDLLELGDWLAAQGITHVAMEATGVYWKPIWHILEGRFELVLANAAHIRNVPGRKSDVNDAVWVSDLLAHGLIRASFVPPAQIQDVRDLTRTRTQLVREIAQHTQRIQKTLENANIKLTSVISDIVGTSGRRILKAMIAGETNPAKLAELGSTRLKCPRAELIAALDGRVTAHHRFLIAHHLGLVEDLERHIALFDARIDELLTPSRDAIARLITIPGVSTVSAQVILAEIGTDMTRFPTAGHLLSWAGLVPRLDESAGKRRSTRVRKGAPWLKPVLVQCAWGAARTKGTYYQAQFFRLKARRGPKKAAIAVAASLLTAVYHMLNDGTFHQDLGADYLVKRDKARIAARLAKRIKDLGYDVSFTATA

SEQ ID NO: 211884 - protein, 373 aa, unidentified
MTEISRVFVGIDSSKLKNAVAVASPGRDGEVRYLGEFDTTEAATRKWLGRLAGKHDQLTVCYEAGPTGYGLYRLIRSLGHACVVVAPSLIPKKAGDQVKTNRRDAESLARLLRAGELTAVWVPDERHEAMRDLSRARGQAMDDLKRKRQHIASFLLRQGLHYPGKKTWGKAHRIWLASVKLAQREQRFVFEEMLLAERQVAERVARLEQAIRDAMADWALGAVATALMAMRGIDLIAAVGLIAEIGDLTRFRSARELMAYLGLVPRERSTGDSVKRGGITKAGNGRARRLLVEAAWSYRHPPRVGAAKQARVAAAPEAVRAIAWNGQTRLCKRFRNLTKAGKRPTVVATAIAREMAGFVWDIGRTMAAAAGRD

SEQ ID NO: 211885 - protein, 332 aa, unidentified
MPRTTTVHAVTTIGIDMGKNTLHMIGLDSRGAIVLREKVSRGRITSRLANLPCCLIGIEAGMATHYVARELAALGHDVKQVPPTYAKPFRQGHKNDFRDAHAVAEAVQRPTTRFVPAKTDEQLDLQALHRVRSRLVSERTAVINQIRGFLLERGIIVRQGLRFLRQLLPDILAKRTDLLSPRMVRIVADLASDWRQLDERIETVTDEIETLAKSDDSCRRVMTVPGIGPIISSATVAAIGSGGAFARGRDFSAWIGLVPKQMSTGDRTILGRITKRGNGYLRMLFMQAARVILLRPANWPKHSFGVWLARAAQRLHPNVLAAALANKLARIA

SEQ ID NO: 211886 - protein, 320 aa, unidentified
MLSFCGIDVSKDRLDVMVLPEGQRSSVPNDVAGWAELVEQLRGCSIAAIGIEASGGYERGAIRALLAADLPVRQVNPFKLRQFARASGILAKNDPLDARMIASFVAIMPTRPVPQQAPPAERLAEMLAVRRQLTAEKVAAENASRLLEDAMLRRLSRRRIARLAADIDLLDRQLVEVAGTDAALAHRYRLLTSMPGVGAVLACTLIALLPELGRLSRKQAAALVGVAPYAFESGALKGRRRIWGGRANIRQVLYMAAMSASNWNPVLKAFRDRLAAAGKLPKVVIVAVMRKMITMLNAMVRDDVVWADRHSGRHIVPTAR

SEQ ID NO: 211887 - protein, 355 aa, unidentified
MNGLRYIGLDVHQETISAAVLDRAGTLIMQSVFATRAAAILDFLDGIKGTLHVTFEEGIHSAWLYDLLQRRVARVVVCDPRKNKLLKSGNKGDLIDARKLAELLRINSLSPVYHGEMSSLEVQHRTRSYTMLTEDTTRVMNRLKAVFRSQAIACPGRKLFRPDKRDSFVAQLATPGLRQRAESLYRELDALHPLRLRAKREMLAECRKHPAMKWLRSVPFLGKVRTAVLIGRVQTPHRFRTKRQFWSYCGLALQTHDSAEYRVVHGQLQRKSRPAQVRGLNWNHNHELKSLFKSAATMAAFRKGIFREFYSGLLAKGMRPEMARLTLARKIAAITLKIWKEGETFNAEHVKTQAA

SEQ ID NO: 211888 - protein, 432 aa, unidentified
MIRYVGLDVHKRFIEVCILDSRGKVVFRGKTSCEREELQRFAVSTLKPKDRVALESTTNTWPVVEILRPFVAQVVVGNPLKTKAIAEAKVKTDKVDAEVLAQLLRCEYLPAVWQPDEQTRQWRSWITHRTALMTNRARIKNRVQGLLGRLLIHSPYKLLWTKNGIAWLRSVELPPHERLVLDSELRQLAACQQELTLLDVELAAVAQREPRVQLLMTMPGINYVVALAILGALGDIHRFQDGDHAAAYLGLAPSTRQSGRRCYHGHITKAGNSQARWLLTQSAQHASRHAGPIGAFFRRLVKRKKRNVAITAVARKLVTIAYLMLKNNEPYRYAHPELMRKKFIKVKILNRGSGGRQLSAKGLAEMYQAAGLPEVKQPEQLPPGEQRMLSAQSLGQFAKELYRPTRSPNGKKPSSPRTQSSPKAGRPVGRPR

SEQ ID NO: 211889 - protein, 396 aa, unidentified
MEGETVIAGVDTHKDVHVLCLLDGLGRKIRSGSFRADPEGYDRLAEAIGDPGSCVVVGVEGTASYGAGLTRRLVELGYNVVEVLRPKRDKARPGEGKSDPLDAERAARKAASGRGCSVPKSQDGWVEAVRQLYVARRLAVATSTSCVACAKSMLTTAPGALRERFRGRERPKDLMPLLARRRKAGDALEESVLASLRSVAAVWKEARSQVESCDARIRALLEANAPALLGVEGCGTTTAAALVVAAGDNPGRLKGEAAFSMLCGVSPIPASSGKTERHRLNRGGNRQANWALYEIAIKRMAYDERTKRYVAKRTSEGKSRREAIRCLKRYIAREVYRVLMDPNPDGAAPEGPELAKMRKAMRVTQKQAAAGLGMSAAALGHLERGTRRSTRLERMY

SEQ ID NO: 211890 - protein, 391 aa, unidentified
MVCVGIDVAKDKHDCCILDSDGMVRADCFTIPNNMDGFKQLLQTIRNCTKKSDKIKVGLEATGHYSYNILGFLLDNGLPTYVINPLHTNLYRKSLSLRKTKTDRVDARTIATMLLSDVDLKSYTDIAYHNEELKSLTRYRFDKVQERAKLKQSVSRLATILFPELEGLVSSIHGTSIYALLSEYPGAKQISEVHLTKLTNLLTTASKGRYGKEKAIQIREAARASIGSVMPAKSLELKHTVKLIQELASEINEIEDSIQKIIDELNPPILSIPGMGVNSAAVILAEIGDFSNFSSPDKILAYAGCSPSTYQSGKLTNCYAHMEKRGSRYLRHALYNATKYVCYWNPVFAEYLAKKRAEGKHYNVALSHAMKKLVRLIYALQKSGKAYLAAA

SEQ ID NO: 211891 - protein, 421 aa, unidentified
MKNTAARKRKQVPEGYLIIGVDPHKKKHAAVAITQDFTIHDRFKFDNTREGLEFLLRRIRIEMVKSDCRGVMFAIETGGHYWRNVAYYLDEKGIPFRFINQYTLKRRREGKDLNRRKNDYRDSEVAAQLLCTGEFVESIIPQGVYAELRTAHNAYRRLVKERTRIINLVKGLLDGLFPEFTQVFKDPCGLTALSVLSTCSIPGVIARMTGEEFVATIEAKHRGRLMRKKLMALHYAARSSIGIAAGAKSLSSEISFLVEKHELIRGHICIIERTLVKLVDETEEGKYLLSIRGLNYIAVAGLLAELGCFKSYRSAKQMIKMAGSNPTESESAGKKKSRTPMSKQGRPVLRYCAWTAVIPMLRFNSDFRAWAKQRRERPAHANPLGGREIVGAALNRLLRLSFALVKNQTYYRSPQLVQVTG

SEQ ID NO: 211892 - protein, 342 aa, unidentified
MQTVTTIGFDIAKSVFQVHGVDAAGEVVIRRQLKRRSVLAFFQKPPCLVGIEACASSHHWSRELQALGHTVRLMPPAYVKPYVKRQKNDMADAEAICEAVTRANMRFVPTKTPEQQSCLMLHRTRHLFIRQQTAVINSIRAHLAEFGIVAPVGRKGVMELLHVVADPGDKRVPEVARACLAALGTQLLRLKQQILEFDRMIMAWHRSNQTSKRLHYIPGVGPILATALVASVADPRTFRSGRNFSAWVGLVPKQHSSGGKDRLGSISKQGDRYLRSLFVAGALAVIRYAKIHGTKHRPWLTALLARRPTKVAAIALANKIARMAWAMMAKGEHYKQPVALAA

SEQ ID NO: 211893 - protein, 441 aa, unidentified
MFCNGYGHILRKPFSIKNSPEGIAYLTEQVTRSCSHRCIDPKHVFFGGEDVGSYAENFANTLRSGGWIVAGVNAHDAKEQRANIQASTDRLDLMGIATMLLNRRANCSPAQSGIYRNLRTLVRHRRKLVSMSTEERNRIHTVVDRLFPGFLDEKNSGIPPFSESSLYLMENRFSPLQIRRRKRHKLIEVLHRYGTSKPEDTSARLQEYAACVLNTPDEYIFTLQLSLVQHVKHFRCLQDSINQLENEIAVWLAQTQGAFLTTVRGIGIVLAAGVSAETGDPYKQKPLNNLVSYSGIIPRVKQTGGSEGKTRTGKVAKRCNRILKDYVVQSALHMGLHGPEDLMADYKRREAAGQHADFGIGRRYLRMAMCLMRTSQIYMPQQLRNTKVKPEERAGYYLMTWPYLRNKWNKAGALEAAFKNDRPLGQWRNMVQELYEIKLKL

SEQ ID NO: 211894 - protein, 326 aa, unidentified
MLYADMDVHKKFCQVIICTKEGEVIKEGKIRTNEEEIKKFFYGIKDLKVAIEASTNYSYIVDALAKEGYEVLMAHPLKTRAIAEAKIKTDKIDAKMLANLARGNLLPTSWIPPKEIRDLRDLVRQRIFLVRQRTKIKNKIKAELIKRGIDYKRNIFSKAGKEWLHSLKIPAIETYLSIMDKLEDEIKKMDKKLKKEEEKFNEIELLKSIPGISTFSALVIIAEIGDVNRFPDEKKIFSYAGLVPSVHKSGEKIYYGRITRQGSKYLRWILVECARIHVRKCDSKITEFYRKLKKKGKHENVAIIGAARKLLQTIYYMLKKGESFNG

SEQ ID NO: 211895 - protein, 413 aa, unidentified
MTVFCGIDWAEDHHDVALVDADGKLIAKRRISDDAAGFTLLLELFAEAGDSTEQQIPVAIETSRGLLVACLRATGRRVFAINPMAVSRYRDRHSVARKKSDAGDALVLANILRTDMAAHRSLPADSELAQAIAVLARAQQDAVWERTCAHNKLRSLLREYYPAILAAFADKRDGLLRPEARALLAAAPTPNAGAALTKPQLRAVLKRAGRQRGLQVEADRVQTVLRGPQLRQLPMVETAFGRQALALLRLLDTACTNADELAAEATKQFEQHPDAEIITSLPGLGSLTGARILAEIGDDRSRFANTRALKAYAGAAPVTRASGKSLTVLHRRVKNQRLASVGYIWAFAALTASPGARAHYDRRKTAGDRHTAAQRNLFNRMLGILHHCLATTTKYDEHAAFPTANSGPSTAAA

SEQ ID NO: 211896 - protein, 396 aa, unidentified
MPDYVALDLHRDYVHRCQLEPHPEGAKMRHSRFPNTREGWARFIETETGPQTWVAFEVTGNAFEVWDLLSPHVGRVLVAKASAAKEKGSGRKTDRADTERLVLGLAQGTLPAVWVPPKEVRDLRHLLQARRRTDSRRKAVGNQLRAILRRNWIQVPTGTDVQAWIAAHPEALDELGPADRILALSALRQYEVLAQEVAALTAEVAARTEKEPRVQLLLSIPGVSLITAAHIYAYLGDPSRFPGPKQLTRYAGLDPSVHSSGERNRRGRTSKNGCKPLRTALIEAAHTVARYDTGPLGQFFARMRKKAGYHKSIVALARKLLIVAWRILLTGTSYHGARLETTQRKVRHLERQAARSRDWTVLRVQLLGGDTGDGVAAPGQTSQRRRAPRKRTPVPA

SEQ ID NO: 211897 - protein, 343 aa, unidentified
MTTIDYVGFDVHKKTISFCAKAQDGRILDEGIIPARRAELSAWAQARPRPWVGALEATLFSGWIYDHLRPFAEELKVAHPAMLKAIAASKKKNDRVDGRKISDLLRCDLLPECYMAPSPIRDLRRVLRYRNLIVRQATRMKNRIAGLLMETGTPYNKKRLHGKAYFSELLENLQETPASVVELLKLSRGQLEMFETVQQRLLKELRENRALAERVERLQSIPSVGQILALTWVLEIGEVERFGSIGKAASYCGLTSAERSSAGKEQHGPISKQRNKHLQTVLIEAGKLAPRWNEQLAALHERELRRGNRNRATLAVARKLVAYLMAVDKSGKPFQVRTVGEEH

SEQ ID NO: 211898 - protein, 482 aa, unidentified
MVVPNQEPKKPAKPRKPTNPKKPARPGKSRERSFPVPVPTSPAALQIINPDAAGIDVHSDMHMVCVPADRDANPVRRFGANTVDLHEIVTWLKKCRIKTVALESTGVYWIPLFELLESEGFGVNLVEPGQLSRCGARPKTDVLDAQWIQRLHSYGLLRASFRPPDSVLALRAYWRQRQMLVRYAASDVQHMQKALEQMNVKLTEVVSNITGVTGMLIIAAILQGERDAIKLARLRDPRCGHGQDEIALALQGTWRHEHLFALRQAYDLYQFRHAQIAACDEKVKAELANFPSRAGEKTHKVKPRKRGRKSNDVRFEATGPLFKALGVDLTLIEGIDVGTALVILAEIGADVSRFPTEKHFASWLRLCPPQNESNNTNRRHRNRKGTNRVTIALRMAAQSVGRTMTPLGLFYRRIRSRIGGLGAVKATAHKLACLVYRMLKYGQEYVTQSMEEYEAKVKANMLKALTRKAAAMGFQLSPLPTP

SEQ ID NO: 211899 - protein, 365 aa, unidentified
MITEYYTTIGMDVSDRKIQVCVMTKSGVNPKIVTETTIPTTKEGVQKFLSTQDKNTPVVFETGMHCRWMHEIGEGMGFKVYVANPCRLKMITESKTKNDVNDARMLARIALSDPGLLHPVKLRDAEHQKMLNLHEMRNLLIKQRTGMIVQMRFIAKSMGFRIPKTSTRCFHKLDTTLWPKEFRDIAWPMLKNLEQLDITIKTYEKKIRELAETPTFKAQVDRLMEIHYVGLYAATGFIAVTGGDMDRFERPRDIGPWLGLSPKQDQSGDIDKQCHITKAGSPLMRRLLVECAQMIVRDGAIETDLKIKGMRICVRGAKIAKRKAITAVARSLAVLMVAMLKKMDKPYKPLSEVNEKAFSESQFSA

SEQ ID NO: 211900 - protein, 341 aa, unidentified
MDIVTLGIDLAKNIFALHGVDQTGRAVLVKPRVRRDQLLELVASLPPCLIGMEACTGAHHWARLFEQHGHTVRLIAPKFVTPYRMSGKRGKNDAQDAAAIAEAVSRPHMRFVPVKSEHQQAILTVHRTRQGFVEERTALYNRLRGLIAEFGIVLPQKIERLRGEIGQHLEQLPGWANRCVGDMLAHADRLDERIREYDRAIAEMARDDARCQRLMRLPGIGPTTATAIVASIGMGHDFKHGRQVSAWFGLTPGQYSSGGKTRLGRITKAGDAYIRSLLVLGARAVLNSLGDKQDRFSRWARSLVERRGYWRAAVAIAAKNARLAWAVLKYGEDFRLELDEA

SEQ ID NO: 211901 - protein, 365 aa, unidentified
MKKISTTTAKALGKMQKLTIGLDLGDRSSWYCVLDESGVVVLEQRVGTTPKAIEEVFGGMPRSRIALETGTHSPWVSRLLSELGHEVIVAHARNVRLIGESRRKDDRLDAKTLARLARIDPQLLSPVKHRSAKAQGHLTVIRARAGLVRARTALINVARGLAKSYGERLKGCSARNLNPQQGEDLSPELRAALEPLLKQIESLSESIRECKQRIECIAQEHYPETALLKQVKGVGTLVALTYMLTLEDPHRFSKSRDAGCYAGLQPGRRNSGQSEPQMRISKEGDAYLRGLLVQSAHHILGRLGADSDLRRWGLKLAERGGKNGKKRAIVATARKLAVLLHRLWVSGEVYQPFHNSQRSTLVAAA

SEQ ID NO: 211902 - protein, 351 aa, unidentified
MADKISRHTLKPGDGKELLDLCERIRTRVTRETKRRVEIVSCYEAGYDGFWLHRLLEAHGIRNYVIDPASLQVDRRARRAKTDHVDVERLLRSLMAYLRGEPKVWSVVCVPSVAEEDDRRLNRERGRLINERIQHVNRIKGLLAIHGIYDYQPLRRDRMLRLERLRTAADGQTLPPRLKAEILRELQRLELILGMIKTIEAERDAIASPKTEVEHTNAKKIQDLAKIKSIGPEFATTLIGEVLYRSFDNRKQLASYVGLTPAHFQSGAMCRDQGISKAGNGKARTVMIELAWLWLRHQPDSPLSVWFRERVGKLKGRIRRITIVAVARKLLIALWRYLETGLVPKGAILKA

SEQ ID NO: 211903 - protein, 398 aa, unidentified
MTESSDYESVQVFIGVDVGKDTHHAVAINRSGKRLFDKALPNDENKLRSLISDLKQHGQILLVVDQPATIGALPVAVARSEGVLVGYLPGLAMRRIADLHAGEAKTDARDAAIIAEAARTLPHALRTLKLADEQIAELSMLCGFDDDLAAQTTQASNRIRGLLPQIHPALERVLGPRLEHPAVLALLQRYPSPEKLASLGEKKLAAQLCKLAPRLGKRLAADIAQALAEQTVVVPGTNAAAVVLPRLALQLITLRKQRDEVALEVEQRVIAHPLYPVLTSMPGVGVRTAARLLTEVACRAFASAAHLAAYAGLAPVTRRSGSSIRGEHPSRRGNKALKRALFLSAFAALRDPLSRAYYTRKMSQGKRHNQALIALARRRCDVLFAMMRDGTFYTPQGS

SEQ ID NO: 211904 - protein, 443 aa, unidentified
MNTSHPYDLVIGLDRSDQKADLHLITTATGQRHSVVIGTAPEALWEWLRQLRQLHPQARVGLCLEQPAVHLIAFLEAYEWITLYPINPITLQKYREAFVTSRAKDDAKDADYLADLLLTHHAKLKPWAPEDSPTRTVQQLVFHRRAVVDERTGLTNRLMALLKSYFPQALVLCGEDLWRPLATAFLLKWPSLQTVQKAKPATLKQFYYLHGSRSARLLEQRLALVQKAVPVTDEMARIKSFTLRVQLVCRQLQLVQQGVTEFDRQMAAAYAAHPDRMIFASLPGAGPVLGPRLLASMGSQRERFTAATKLQHYTGIAPVTKRSGGSCYIHRRYLCPKFHKQTFHEYAKESILWSRWAAAYYLQQRTKGSPHHTAVRALAFKWQRIIWRCWQDHKPYDEPTYEAALRRNGSDLVKLFDRVELGKSPFKKPVSNLKNSVDGLPQR

SEQ ID NO: 211905 - protein, 379 aa, unidentified
MDHANTDTPAETILHGALELSKNSWLLALQFPDRVQPSLYPISGGDTVGLIAKLMAARDRWAKVSGKAPSIVLCYEAGYDSFWLARFLKARGIECLVVDAASMQVNRRARRAKTDRIDVGMLLRALIAWGQGDRHVWSVVRVPSVDEEDLRRSHRERDRLVLERTAHINRIKGLLFGQGIRDIKVKSKYKTLQIDKLVTGDGRPLPPRLASEITREIARLALIQEQLATLDRERDQAPTPCKATEKKRVQLMSLTGIGPAIAAVMTREVFYRQFDNRRQVASFLGLATSPHDSGDVERSQGISRAGRGQVRGTIVQAAWLWLKHQPKSAITRWFVQRTAGQSGRIRRIMIVAVARKLAIALWRFLEQGLVPQGATLASR

SEQ ID NO: 211906 - protein, 367 aa, unidentified
MGWMAPLRHLGANVLVGQNQSADKEPSMNEITTVGLDLAKNVFQVHGVDAEGTTVLRKQLRRAQVLAFFSRLPRCLVGMEACATAHYWARELRALGHEVRLMPAQYVKAYVKRNKNDAADAEAICEAVVRPTMRFVPAKTAEQQAAVLLHRGRERLVRQRTMLVNALRGHLAEFGVIAPQGLRNVGRLIAIIRDEEDARLPGLARQVLQVLAVQIEQLEAAIAALEKQLMGWHKSNPVSQRLATIPGIGPIIATAIAAMVAEPSGFRSGREFAAWLGLVPRQNSTGGKNRLGGISKRGNQYLRRLLINGASANLLRSKATNADPWVIGLRRRRPSLVVAVALANKTARIAWAVMHRQENYQRMATAA

SEQ ID NO: 211907 - protein, 449 aa, unidentified
MSNHKGKAAGLPVIHDRAAGIDVGSRFHVVAVGPDLCTEPVQTFQAFTSDLQRMADWLEATGIKTVAMESTGVYWVPVYEVLEGRGIEVILANAREARAVPGRKSDVNDAQWLQRLHACGLLRASFRPGRDIAALRVYLRLRERHLDYAAAHIQHMQKALTFMNLQLHHVVADVTGVTGMRIIRAIVDGQRDPQVLSQMRDVRCKASLETVRAALVGNYQPEHVFALTQALALYDFYQARVDECDAQIQAVLAALTAEKATPSAPLPKARHRTVQPNAVSFDVRPVLYQLTGVDLTQIHGIGPYLALRMIAECGTDLSRWRSAKHFTSWLTLSPGCKISGGKVLSAHTRKTTNRVAAHLRLAAVTVGRTNTALGAFYRRLSARIGKAKAVTATARKIAVLFYNAMRFGIDYQDPGASHYEQKYRERVVKQLHRRAAEFGFTLQEAVSVS

SEQ ID NO: 211908 - protein, 355 aa, unidentified
MDNKKHIGMDVHQTSISIAVRDATGKLVVESIIETKATTILEFIRGVQGTLWATFEEGTSAAWLYDLLKPYVAKVIVCDPRKNALLNAGNKNDRVDARKLSQLLHAGLLTPVYHGENGVRTLRELSRSYLTVTKDLTRVMNRLKALYRSWAIPCAGQKVYSPRRRNAWLDKLSEAGVRRRAEQLYQQLDALAQIRRETRRELLVESQKHPATQLLRQIPRLGPIRVALLIALIQTPHRFRTKRQLWAYCGLALQTRASGEYRFSGGELQHSKRLPALRGLNVNHNHDLKYVFKSAALDVSTSTDPLGDFYRNLLAKGMKPTMARLTLARKMAAIVLTVWKKGARFDTGELKRQAA

SEQ ID NO: 211909 - protein, 448 aa, unidentified
MKQEPEEIPDTEHELVLERVCAIDVAKDSGKVCVRVSGRAGKRVSKVWDVPARTGAVAELAEHLLAEGIEKVTVESTSDYWRIWFYVLEAAGLSVQLVNARDVKNVPGRPKTDKLDAVWLAKLTEKGLLRPSFVPPAPIRELRDYTRLRIDLTRERSRYWQRLEKLLEDALIKVSAVASTLDTLSVRDMLEALIAGERDPRRLAGLARGRMKPKQAALVEALTGRFDGHHAELTRMLLDQIDALATQIGTLTTRIDELLTAMEPQARADEPDTRGGAGAGADGARESTTIERLDEIPGISPGLAQIILAEIGLDMSRFPTAAHLVSWAKLCPRTIQSGAIQRSGKTGRGNPYLKGALGEAAAAAAKTNTFLGERYRRIVKRRGKLKALVAVARSILVIIWNMLNDPTARYADLGADYHATPINTERRTRTYVTQLMAMGYRVTLEPAA

SEQ ID NO: 211910 - protein, 347 aa, unidentified
MGKSITDLSSVTTVGLDLAKHVFQVHAIGAFGRVIVAKALRRKDVLFFFAQLPKCLVGMEACGSAHHWARELIKLGHDARMMPPAYVKPYVRRQKNDAADAAGICEAVTRPSMRFVGVRTLENQAALMHHKAREMLVAQRTQLINALRGHLAEIGVIAAQGPKNARELAGVVMAEGDETIPACVRAALAPLVRQLHALDQEIARSDRTIAAMARGDERARRLMTIPGLGPVTASAMAASVQDVSAFSGPRAFAAFLGLTPKQNSSGGKERLGRISKMGNRYLRTLLVVGAHAVLYHRKPHDDALRSFAKKLMQSKPFKLVAVALANKMARIAFAIMRGRTSYCAVSA

SEQ ID NO: 211911 - protein, 337 aa, unidentified
MSSIHILGIDLGKHCFHAIAHNRCGVEVLRRKFNRNQLLIFLRKIEPTTIAFEACGGAHWLARKCSEFGHQPRLIPPQYVKPYVKGNKNDFIDASAIAEAAGRPTMRFVAVKSEEAQVIAAIHRVRDSYIKERTATMSRIGAILLEFGLSFPKGHAKMKSLFQWLAEQTVSLPKSLLCELISIHEHYKYLNEQIKTQDNKLQTIVNNNESAQLLKTIPGIGDLTSTLCLADVSSPSNFTNGREMAAWLGLVPRQFSTGGKTKLLGMSKRGNKHLRTLFVHGARAVLSRLETTGKVFGEWLVNLRATKPFNVVVVALANKLVRIAWAVLYHRQAFKAV

SEQ ID NO: 211912 - protein, 338 aa, unidentified
MKLYGGIDLHSNITVVALLDDEDHMVYHKRLANEVAGVLEALAPYREAIVGLVVESTYNWYWLVDALMEAGYRVHLANTAATVQYSGLKYSDDDSDARWLAKLLRLGLLPEGYIYPKAERAVRDLLRRRLRLVQQHTANLVAVQNLLARNRGRALSANAVRRLTPEAVERLLPDANLALAVQSTLLAMRGQEAAIELLERQASAQVHLRPAYRHLLTVSGIGQILGLTILLETGPVERFAAVGHYASYCRCVGSERLSNGKRKGRGNAKNGNKYLAWAFVEAANFAVRWNPAIKRYYQRKRAKTNGIVAIKTVAHKLARACYFILRDGSDFEVSRAFA

SEQ ID NO: 211913 - protein, 461 aa, unidentified
MGEYMMKGKKNRTKTNKKILQQHLEHVNLYAAGIDIGSREHYVAVPPSLDEESVKKFGCFTPDLDAMADWLVKIGITTVAMESTGVYWIPAFEILESRGLKVLLVNARHVKNVTGRKTDVKDCQWLLQLHTYGLLNGAFRPEDDYVTLRAYMRQRETIVSHLSSKIQHMQKALRLMNVLLDNVVSDITSQTGMAIIRDILSGIREPKKLAKNRDRRCKNSAEIIAKSLVGNYRDEHLFALKQSVELYDFYNEKLGECDQVIYQHLNTLHMQADPSERPVQKKRKKSSSNALRFDASSNLYALCGVDLTAIDGMDEHGLLKIVSETGIDMSKWATENRFTSWLGLSPNNKISGGKILSSSSIKTKNRAKQAFKMAAFSLSNSKSGLGAFYRRLRGRIGAPKAINATARKLAVIFYKMLKNKTEYKKQSQEEYDLIHRDRMLKQLKRKAKLLGIELVQNKELT

SEQ ID NO: 211914 - protein, 465 aa, unidentified
MVKSKTKSSSETKKQKSLKSLTPINPNAAGIDIGADSHWVSIPGDRDEQNIREFSCYTPDLYALADWLEQCKVTTVVMESTGVYWIPVFQILETRGFEVLLVNSHHVKTVPGRKSDVLDCQWLQQLHSYGLLAGSFRPQDEICVLRSYIRHRDNLIRTAGTHVQRMQKALTQMNLQLHRVISDITGKTGLKIIRAMIAGEQNPQTLAALRDGRIRRTEEEIAAAMTGDYRKEHLFVLQQELQLYEFYQQQISRCDRQIEEYLISLDSQIEIKEIEEVTKQPQTRNYSSNVPTFDLGSHLYRISGVDFTRIDGLGVLTVQTILSEVGLDPSRFPTVKHFTSWLGLCPGSRVSGGKVKSSRTRPVINRAANAFRLAAHALRRSQTALGAFFRRLRARLGAPKAVTATAHKLARIFYCLWTKGGEYHDPGVDSYEQQYQQRILKNLRKKAEDLGFNLVPQSSEVEFVS

SEQ ID NO: 211915 - protein, 311 aa, unidentified
MKAMDVFIGMDVSKDTLDVAVRPPGEEMSFANTEDGIGVMRDFIQSFSARLVVLEATGGWEADAVSALAAKGLPVVVVNARQVRNFAKATGLLAKTDKIDARTIARFAEAVKPEVRPLKDEEAQRLDAFLARRRQLLQMSTAEKNRLVLAPRWTKKDIQAHIEWLEKELGKVNRELQKLIKESPLWRERDEILQSAKGVGPTLSMTLISDLPELGALSRKKIAALVGVAPLNRDSGKYRGRRIIWGGRSQIRVVLYMAARAAIRFNPVIRDFAERLKKAGKPYKVVVTACMRKLLTILNTMVKNGTRWQAA

SEQ ID NO: 211916 - protein, 391 aa, unidentified
MTRISAGVDVSKNRSTVCIMDQDGKFIMRPFLVWHSTEELDFLADTLKRLNGEVRVIMESTSIYQYPIALHLEEKGIFISIVNAYEMKQFANIDFRGGKTDKKDSRTIASYGISYWDKLVEWQIPKDTYFNLDLLNRTYMNAKKHRQIILQELQHYIDCAMPGMDKELHSLNLSTKKDFMLDFVEKFWHRDEIVNMTEAEFTEVFTAWAKKKGYRPVEGKAAKIYAIAKSCIPYYPANPTVKTILQCIVDKLSGVNRTLVTIVTQMIEEAKKLPEYQIVREMPGVGDPLAARFFGSAGDIRRFKNSKALVAYAGIDSPPDESGDFSSTHRHITKKGSKVFRDTGYEIMMALRAQKRTWEKVRKNPEVYDYMLKKEAEGKPPPKLNELARFN

SEQ ID NO: 211917 - protein, 411 aa, unidentified
MIKENYIYVGIDLHKETHTAVMIDCYNQKLGEITFPNRPADFPKLVAKVKKCNTDGKTIVFGLENAYGYGRALAGWLIDKGYLVKDVNTAISHRQAKHRGAMYRKSDSDDAKAIALATLNMLDKLPDACPNDAYWSLGQLVHRRDNIMKQRTRLVNQLHEQLCIAYPSYKQFFNDISRPTALYFWEHYPSRKYLKGKSVEDLRAELVPVSHNKCSTKTCEKILDAVASDKVKNNAYQDARDMVTLSIVSDLQHYDKQLAEVDKMLEQMYKMLGCTLTTIPGVNVITAVKILSEIGDIERFANANKLAQFAGIAPLHLSFSGKGKDVATKQGNRRLQATIYFLAIQMVQVSSKGTPRNPVVRAYYEKRKAEGKTSQQALICISRRLISIIYGMLKHGTEYRMPVVESAGENR

SEQ ID NO: 211918 - protein, 411 aa, unidentified
MHHRQNYLYVGVDLHKEQHTAVIINCWQEKLGEIQFDNKPSAFSKFLLEVETYVSDGLSVVFGLEDVGGYGRALAKYLVDHEQVVKEVNPALSFLERKSQVMIHKNDSWDAECVARILINKFNQLPDAKPNDLLWSIQQLVSRRNALVKAQSALKNQLHIQLNHHYPSYKKFFSELDGKTALAFWEQYPSPSCLEGTNIKRLTAFLLDVSNNTCSVKKASEILRLVKEDGQTMKEYQEMRNFLVRSIVREIEFKKKEMKYIERELKQLVNLLDYQLETMPGIELVTASALIAEIGDVRRFPNANKLARFAGIAPVYFGSGGKGKTHKSKQGNRALHALFYNLAVQQVQVAKGSKLPRNPVFHAYYQKKLKEGKTKGQALVCIMRRLVNIVYGMMKYKTAYELPVVEEKEVV

SEQ ID NO: 211919 - protein, 342 aa, unidentified
MEKRYIGIDLHRDRFTCCVRLENGRNYLSEWRLEDLPRFVKKLRSTDELAVEITGNTRLLYDAVAPYVAQVLVVDSNQFRVISRSVKKTDSNDARLLALYLSKGLLPEVRMKSKQHAHLASLTQTRDTLVKQRSALKNKINNILSARGLNLPKEALSSEKRLTEILSLPFDAMVLLELRVIADQIRGLNKSIAELEQAIADASSELEGHTNLISIKGIGATTSAILLSVIGDVNDFPDEGRLASYFGIVPRVANSNQTEHSGRIHKRGTKLGRTALVQSALIAARYSPYLRSFYERVKARRGAGKAIIALARKFLGIIYRTLKNKWVFEDFPNFVLAEEAQS

SEQ ID NO: 211920 - protein, 343 aa, unidentified
MQRVTTIGLDIAKSVFQVHGVDAIGNVVIRRQLKRRYVLAFFQKLAPCVVGIEACATSHHWSRELKAYGHTVRLMPPVYVKPYVKRQKNDAADAEAICEAVTRANMRFVATKTPEQQSCLMLHRTRHLFIRQQTAVINAIRAHLAEFGVVASVGRRGVDELLDVVADSSDERVPEVARACVAALGAQLRMLKAQILEFDRQIMAWHRSNETTKRLDEIPGVGPALATALVASVADPKAFRSGRNFSAWIGLVPKQHSSGGKDRLGSISKQGDRYLRSLFTAGALAVIRYAKIHGTRHRPWLTALLARRPTKVAAIALANKIARMAWAMMVKGERYKEPAALAA

SEQ ID NO: 211921 - protein, 479 aa, unidentified
MNGKTKKTKNQGTVSISIANVFSQEEIAEKVAEINSNLRSYTWRQLETKGKFDKNDKLSFISDDMLIVGCDIGSETHYLRAIDSRGRELGRDAFPFSNNDEGFKSAKDWMLELAARHNKKQIVLGLEPTGHYWFAITEWLIANGISVVQVNPYAVKQTKEVEDNSQRKDDRKDPKLIANLVKDGNYGMPYLPEGLYAEIRHLSTLRDQLTEDRIRNINRLHRELKIFFPEYMDAFGKLDGAFTVEILKVAPFPQDIISLGIEGLKKIWHDARLRGRGYNRADQILTYAENSVGLKNGTDGGRESVKWYVRQMVEIGRELDEIESVFHRKCMEIPNATNLLEIKGVGENILSGILAEMGDITRFDDVKEIQKLSGLGLVSCDSGKHKGETKISHRGRRRLRYWLFQAAKSAVVHAEEFSMLHEYYTTRPSNPLKKMQSLIVIACKILRIIFTILRTGQRYDPEKMLADIKRTEPLASKAA

SEQ ID NO: 211922 - protein, 355 aa, unidentified
MNEIKYIGMDVHQTSTSIVVLSASGRALTSAVVETQGHALVAFLQGQRGTLHLTFEEGTYAAWLYDLLSPHVSRVVVCDPRHNALLKAGSKNDPIDARKLAELLRVNALRPVYHGQNSLRTLKELSRSYTTLVQDSTRVMNRIKALYRSRGIRCAGRKVYLPRHRTSWIDQLKEAGLHKRAELLYQHLDLLSLLRREAKCALLAESRKHSVSGILRPVPGLGPVRIAVLLATLQTPFRFRNKRLFWAYVGLGLVTRISAEFTLVNGQLQRSGKAPTIRGLNPNHQRELKEIFKSAASAAVQRPGPWQQFYERRVAAGGKPEMVRLTVARKLAAVTLHLWKKGERYDVKHLKSTAV

SEQ ID NO: 211923 - protein, 388 aa, unidentified
MTQASCLLSPPIALDYENTLVLAIELSKAKWVLAAQVPGLPRVKAKQTIEPRTEALLAAINGYRDRSKAAGRTVERVVAIYEASWSGFWLARWLGRHGVETHIVQPSSVPVDRRARRAKSDGIDAELLLRTLLAWLRDEPRVCSMVPIPDEADEDERRRVREREDLVSDRISLVNRIGAVLATLGVDDYNPLRRDRRARLESLRTALGDPLPPHARARILRMLDRLDLVCAQIAELEQERDAVLDKEAPDKAEKMIRQLVGLRGIGVQSATVLVREAFVREFANGKTLGSYAGLTPTPFSSGATEREQGIGKAGNRRLRTVMVELAWLWQRYQPGSAQVSWFRERVSGTGRRMRKVMVVAMARRLLIALWRFATQGVVPEGAIVNPAG

SEQ ID NO: 211924 - protein, 317 aa, unidentified
MTDDDKIQSALGLDVSCDSVTLFDSMTGQTVTIENNREALRSALAAYGGRPGMLAVCEATGGYEDRVLAVLVALAIPAHRADAAKVKAYIRSFGKRAKTDAIDARWLAQYGLDRSQALVRWQPPEVNQSQVRLLTARRTDLVAMRVQEKNRLKAPRSGMIAADIKDHIAELDRRIAAIEVQIEALIRSDRSLRRRERALRSIPGIGSTIAALLIAAMPELGSINRRQAASLAGCAPHPRDSGKMNGYRAVSGGRRHIRPALFIAALTAIRGDNPLATAYKAFLAIGKPKRLALGAIMRKIITIANARLREVEMMANN

SEQ ID NO: 211925 - protein, 347 aa, unidentified
MLIIGCDFHPGFQQVAIFDNITGEIEEKRLQHRAEAEDFYGSLAGQQVRVGMEACGHYPWFERLLEELGFELWFGDAARVRASVVRKQKTDRRDAEHLLDLLRRDHFPRIWVPSLEVRDVRQLLVHRHKQVQARTRTKNQLQSMALSCGVQKKYKLWTKAGRTELEQLPLLPYAAQRRKRLLEALDGLEAEIVELDRRVLEEARQRPEAVLLMTHPGVGSVTALAMVLTLGPAERFGSAKQVGSYFGLIPSEDSSGGKQRLGKISKQGSSFLRFLLVEAGQTAARLDPQLKRFYRRLAVRKSRGVAKVAVARKLATRLYLMLREDWTYAQLCQAVMQVSPSHSVAGE

SEQ ID NO: 211926 - protein, 412 aa, unidentified
MIVGIDVGSETHYARAFSWRNYEYSKKPFAFSNDEAGFAAFKEWMDDIAEKHEMEVIIPGMEPTGHYWLNLGAYLQEQGMKPVHVNPHHVKKSKELDDNNQSKNDRKDPKTIAGLVNEGRFSYPYIPTGIYAEIRNLSNLRIQTQEEITRIKNRIARWFSIYFPEIKDVYRNPDAVSGLMVIKQAPLPCDIKELGVDGVNKIWRDARLKGAGIKRARTLVTAAEHSIGNTEAPRSARKEIRNLLEDYEGYKKRMDELMEEIEKTLSEIPYIDKLMEINGIGIKAVSCFIAEVGDIGRFDNPKQVQKLAGYAIVADSSGKHNGESRISHRGRKRLRYALYEAAISVIGKNKEFKEIHSYYRTREKNPLKKMQSVIAVACKLIRIFYTILTKGVDYDGQKMLNDIVRPEIQPAA

SEQ ID NO: 211927 - protein, 484 aa, unidentified
MRYRRRVSEGIPCMTSYERVNQSPPHAPAHLTKSMMKVIAMTGKRKKQRLEVVNSSCAGIDIGSREHWVAVDPVHGEHSVRKFTAFTDDLQAMSSWLKSVDVQVVAMEATGVYWIPLFERLDADGFDVRLVNSRATRQVSGRKSDVLDCQWIWQLISYGLLRSAFRPADQVCALRSVVRQRATKVQEQSRTIAHIQKALTQMNIQLDNVISDVMGKTGQLILRSIVKGERDPQKLANLRDKRIKADEATVARSLHGNWREEHLFALTQALNHYDFLTSQIKECDEQIRQAMDALPCLSEQPPAPVKRLSNPHRSTQEQRALHGALYEIMGVDLCAIPSISVDTVLVLASEIGPDLTRFASEKHFCSWLSLAPPTRISGGRALPGRPQKINNRAGQALRQAASTARNSHSYIGASHRARLTRMDKAKAIKATAHQLARLIYAMLTKGQAYVEKGMQAYEEQSQERQLRSLQRKARKHGLVLAEAV

SEQ ID NO: 211928 - protein, 371 aa, unidentified
MKNTIKYVGLDVSKEKIAVAIADEGREPARYHGAIAHTPDAVGRLIRKLQSSEVTLEVCYEAGPTGYDLYHWLTKMGITCTVIAPSRIPQRPGDAIKTDRRDAERLAQLHRAGELTSIHVPTPEIEALRDLIRARDDAREELHRARQRLIHFLLRHQIHAPEGMKRRWTKRYRQWLSTLTFEHTAQARVFTEQLQQLREVEERIQRLEATMREEAEICSYAPVIQALQGLRGVALLTAMTLVVEIGNFERFRSPAQLMSYLGLVPREYSSGASTKRGRLTKTGNAAVRRTLVESAWSYRHRPAVKGDLEKRLEGQCAHVQETSWKAQERLHHKYLKMVRRGKHRNLAMAAVGRELVGFIWSIAVNAEQRIA

SEQ ID NO: 211929 - protein, 372 aa, unidentified
MGHHSEAFIGVDTSKLRNAVAVAEAGRGGELRYLGEIDATDAATRKLVAKLAGKYSKLTFCYEAGPTGYGLRRLITSLGHECVVIAPSLIPTRPGDRIKTNRRDAENLAKQLRAGELIAVWVPDERHEAMRDLSRAREAAVDDLKRKRQQISSLLLRLGLHFPGKKTWGRAHRNWLAAQKIAHREQRIVFEEALGAERQAQERADRLEAAIRQAAPDWSLAEAVTALQALRGIDLVAAVTVLAEIGDLERFANPRELMGYLGLVPSERSTGDSVKRGGITKAGNRRARRILVECCWSYRHPPRVGRDKQLKVDAAPEAVRDIAWKAQTRLSSRFRALARRGKRPTVVVTAIAREMCGFIWAIDRAMRRPARP

SEQ ID NO: 211930 - protein, 371 aa, unidentified
MKEFSKYVGLDVHKATIAVAVAEGKGGEVRYHGEIENTQEALGKLVRQLRKGSATLSFCYEAGCCGYQIQRYLTEHGWDCLVVAPSLIPKKAGDRIKTDRRDSISLARLHRAGELTAAWVPDEAQEALRDLTRGREDVKQLERKAKQQLLALLLRHGRRYEGKSHWTQAHWRWLETLKFERSAQQILFQEYVDLVKAMTNRVQALNQIIKGEAAASVFWPVIEGLMALRGVDLLTAVRIMAEIGDLHRFSGAPQLMAYLGLVPSERSSGGSKKRGGITKTGNSHVRRVLVESAWTYRHPARKSTLLQRRAEHAPQAIQDIAWNAQKRLCGRYRLLEGKGKLRVQVCTAIARELVGFIWAIGHAVPAPAVSH

SEQ ID NO: 211931 - protein, 452 aa, unidentified
MDEVTDEPLYRDRVCGIDIGKAGMAATIRVPSDRDPSRRMSETREFGTTRREVLALADWLRCWQVPAVVMEATGDYWKPVFYRLEAEGLECVLADAKQVRNLPGRPKRDPSDSRWLAACFERGAVTSCFVATPEFRVIREHTRCRRDLTGERTREKQRAEKLLEAAALKLSAVLTDMHGVTGRDIMDRLIAGERDPKVLAALARGRARVKMRQLEQALEGAEFFTPELAALLQVMLARIDAIDAGIAALTAVTGRLLAPYEEQLQQAESMPGWARLAAQDAIAETGPDMTRFPTPAHLASWAGRTPVDRQSGNRKGKATAKKGNRYLGAVTGQTAVAAGKTQTREGVRHRRLVRRRGKAKACVATGNTQMRVYHVLLSNPGMRYEEPRLGLLRTGTQHRPAGRPPHRQARQPRLRSHPLQTTRPRRGHPGRLTRPNPQPTAQTAAGYCRAPG

SEQ ID NO: 211932 - protein, 346 aa, unidentified
MRIIGCDLHARQQTISMLDTESGEVIEKTLAHEGETVREFYAALPKPVLVGLEATGSMFWFLRLLEELGIEYRVGHPAAIRKAETRKQKHDRRDAELIRRLLVEKRFPQIWLPTPEQRDLRTLLQHRHQLVRMRVMTQNGLQGLALSQGLRRGAKLWSQVGQQALDSLPLAGYSRTRREQLQQLRHELNQRLQQLDQAVREQAEQRAGARRLLSHPGVGPITALATEVFLGDAQRFPNAKAVASYAGMIPSEHSSGGKQRNGSISKQGNPLLRQLWVEAARAAARKDARLKQFYRKKLVQKGLGKAVVATARKLGIRLWIMLRDQIDYTEFCRRAEPRCPHAGMPE

SEQ ID NO: 211933 - protein, 431 aa, unidentified
MEVIHPRVAGIDVHKKIVWVAVRLPGQRPGERTVTVKRFKTFWRSLRQMAAWLAELGVTDAAMESTGVYWWPVYHALAGAGIEVCVCNAAHMRNVPGRKRDVIDCQWIAELHEHGLLRPSFIPAGAVAELRARTRYRKKLIEQRTSEGQRLAKVLEDAGIKIDSVASRLLLKSGRAMIEALIAGERNPGRLADLALGRLRRKIEELQLACDGRFTAAHGQMCRLHLDAYDHLTAKIAELDELVAEAAAPFAALIARLQTIPGIGRRTAEVIVAETGGDMARFATAARLAAWAGLAPGDNESAGKRKHAAARKGNRHLRTAMVESAWATARTRTRPGARFRRLARRFGKGNEKKAAVAVAHTLICIAWAVLSRGEDYAEAGEDYYQQRDRRDREHLIRHHQQALARLGCQVTLIPPGDGSPPPSATSQQPAA

SEQ ID NO: 211934 - protein, 353 aa, unidentified
MSKRNVSAVKPTASVNQSAHGHPARVFCGVDVSAETLAVAVLTREGALQQREFSNTASGHRALIGWLAKGQGRARVSLEATGIYSMDLALALDEAEGIEVAVLNPKRIHDFARTIRRSKTDKADAQVLAEFSLRMDFVAWQRPSRSALELRAICRHIEALGVDRTRAHNRLQAARGSGSTPRCVLDDLKRSLERLAERILKLRRAAQALIEADEQMREQFRLLTGMPGIAQVSAVQILGELVLFASDLKARQWVARSGLDPVQQDSGTSVHKPARISRQGSRHLRRALYMPALTAVRWDPHLKAFYQSLLARHKRKLQALMAVARKMLHAIYGIFKTKTAYDGGKLFPQLKIA

SEQ ID NO: 211935 - protein, 370 aa, unidentified
MLYMGIDLHKRHLTICARDEQGRIVIRRQVSTRWSELDAFLEGVQNSTTGEGGFMVMVEVCGFERWLIERLERYGCKRVCVVAPKERVRQKTDRRDAAKLSELLWINRERVTAGERLIEVKEVYQASETERYDRQLTALRYRLGKQLTRAKNAIRGVLRRHNLEQACPTKGMFTRKAMRWLREVSLPEIDRMELDMLLVRYDVYQSQIQETEREIHQRAQQQVKRIRLLRTVGKMGEYSALAISAHVGPVDRFKRARSLPNFFGITPGCRSTGENERVGGMTKAGHPLVRFLLGQLVLHGLRSDPGLRRWYRGIKRRRGAKIARVAVMRRLCEAIWHVLSKEEGYRPVDSLRADAGEGRRGEGDGLRQAG

SEQ ID NO: 211936 - protein, 381 aa, unidentified
MSRQPAAPAAVLSALMKQKLTGKSIEQGSGEGKCNRVLKLGLDMHYRQVTVAMQEEAGAIKAVGRMGHDGFEHWVERKREAGWEIYSCYEAGASGYWLHRDLEQMGVKNLVVAPKAMGQDKAQKTDRRDSAELVDQLDRYLGGNRKALSPVAIPSIEQEQKRALIRYHRQIMADRSRYEARGKGLLCAQGIEVQGKWWQPQAWKELKTHGRFQTWMQTQLQGWRSKLLSAEQEQQKLRKQIEALAPALLPKGVGAYSAVALEYELKGLARFKTARALSSYTGLCPGIHSSDGRGKEGSINRCGNAAVRWNLVEMVWRLLKWQPHYQVVGQLGAALVRSKRARKRLVVKAARQLAIDLWRLETGRITAQELGLVMQPTSKAK

SEQ ID NO: 211937 - protein, 316 aa, unidentified
MKNYIGIDISKSSIDVYDGKKSYKFENNEKGFKKIISLSENIKETIFIFEPTGIYSYALTSFCSKKNIFVVIVGPKESRDFARSLKVRSKTDKIDARILYKYQLHVEPSMVKVPKINHHAIKIQEMLNVYEGIQASKQRFKNQLESTNKTHKDLVRTLNRIVSDLDMEATKLFNKIELLLLKDAETKERYDAISAIPSIGQKSALYLTAFFLKYPTANAKQMTALIGLDPVMKDSGLFRGKQRISKHGGQQLRNLLYLPTLCAIQHNSWIKAFYERLTAQAKTKKLAVIASMRKLILMAFSIFKSKDVYQPLKAII

SEQ ID NO: 211938 - protein, 425 aa, unidentified
MSYKIAGIDIHKRMVAVVIADVAGEGEYQFERRKFGSGGEQLRLLAEWLVTNEIEEVVMESTAQYWKPVWEVLERDWQPVSRARAAGAKSGSLLLAQAKSNRAPRGRKNDFADAERLLKRLVANELVLSFVPDTEQRLWRTVSRQKLQLTRARVRLQNQLEALLEQAHLKLSSLVSDLLGVSARRMLQALADGESDPGRLAALAHCRLRATPEQLCDALGAATQLNAVYRRLLQMLLDELNLQERHREQLDQELSVLLTAHQSAIQRLAEVPGLGVDSAQQILAEVGANAAAFPSAKNLASWVGVCPGEEQSAEVSKSARSPKGNRNLRRLLNQAAHAAVKTKGSVFEWVFGRLRTRLAYQEAIWAIAHRLCRLIWKILHQGVQYEERGPAVSVKSKRNRATRMIRELRKLGYRVEPVGAIASNV

SEQ ID NO: 211939 - protein, 351 aa, unidentified
MMIIGTDYHPSFQQIAFLIEETGEYDEQRLNHEGGEAERFYRDLKRKGIRVRVGMEATGYSRWFERLLAELDFELWIGDPAEIEAKRVKKRKTDREDARLLLRLMREDRFPQIWVPSPENRDLRQLLWHRHRLVQMRTRVMNQLQALAMNEGKRWKSKLFSQKGRAEFEKLALGPWASRRRSDLLELLDRLNPSIVELTTAVEQEVNKRPEALRLMTHPGVGPITALAFVLIIGTPERFARGKQIGTYVGMIPIEESSGGKQRLGRISKQGSSLLRYLLVEAAQAAARYNPHWRRRYARLAIRRHRSIAKVAMGRRMAIRLYWMWRNGCEYSPSFEFGSHAGQLEKRYGGE

SEQ ID NO: 211940 - protein, 423 aa, unidentified
MAYRIAGIDVHKKVLAVVVADVECDGEYEFERRRFGSNPEQLQLLSEWLIEQQVEEVVMESTAQYWQPVWGALERYWRPICQKREGAGAMSGKLHLAQALSNRGRRGRKRDFPDAERLVKRLVAQELVLSFVPDPEQRLWRTVTRRKLQMTRLHVRMQNQLESLLEEAHIKLSGFVTDLLGVSARRMLQALAEGETDPAALAALADKRLRATPAQLCDALGACTELNPVYRRLIKMALQELQFLEQQMGQLDQEIANLLRPHEDAVKRLAEVPGLGVDSAQQIIAEVGPTVATFPSDKQLCSWVAVCPGDNESGGVNYSHRSPKGNRQMRRLLNQAANAAARTKGSIFEIVYRRQVTRMGHNQAIGVIAHRLCQLIWILLHRKVRYEERGPAVTETSKRKRTARMIRTLRALGYRVEPLGNPA

SEQ ID NO: 211941 - protein, 326 aa, unidentified
MDVLGIDLAKRSFDATLLMDSGAQHYASFANTAEGFAELAAWLTPLCAAPLHACMEATNVYWIDLANFLYAAGHTVSVVNPARIKGFALATLQRNKTDKLDSALIAAFCLTHQPKAWQPPSEQERHLRALVRHRDDLVQTKLQQQNRLRDATDELVKRSLQKLLELLESELETLEQEIERELQAQSTTKSNLALLDSVVGIGVLTAAKLLSEMPNLAEYESAKAAAADVGVSPSEYQSGTSVRRRSRMSKIGKATVRAALYWPAIAAKRHCPAMRAFAERLAARGKPKMVIIGAVMRKLIHICYGVLKHQTPYDPAKAFPRSAPLT

SEQ ID NO: 211942 - protein, 328 aa, unidentified
MGIDVAKATLDFCLLSKNATLLWQGQLQNDSHAIEQFLAQLQARGYKLAQIHFCCESTGVYGQRLAASLHQAALALSVLNPAQVKFFAISVLRRTKNDKVDAEIIARFCRERQPLATRPLRPIESQLKLLVHERESRVNEQIRERNRAKKDPYQIALPKLISQQRQSRLKQLAKEVAQFDAAIESLIASDEGLKEKSRLLCSIPGIAKVTAAKLLCELAGKEFQSARQLAAYAGLTPQECRSGYSSYGKTVLCKIGNAFLRKALYLPAAVARRWCKPLRPWIALLESRKLHDLAIRGAIMRKLLHIAFGVLANHQPFNPMLVFIPKTP

SEQ ID NO: 211943 - protein, 354 aa, unidentified
MNTIKYIGIDVHQATSVFAIRNHKGKIIGESILETQPAAILDFLKGQRGTLWVTFEEGTYSHWLHEIIEAHVDKVVVCDPRKNRLDANKSDKIDARKLSELLRLNALKSVYHGKSNTRVLKELARSYMGLQQDSTRVMNRVKAIFRSRGISCSGTSIYRPKNRKEWLEKLNGTGARGRAERLLKQLESIQELLAEAQRDLIRESRKHQDYKILRQIPGLGPIRVALVMAFVMTPHRFQNKRQFWTYTGFAVIRRGSAEYEITQGELKRTKRKPLPRGLNHNYNRVLKNVFKGAALTAAYRGPFKKIYDQRVANGTAPNLALLTLARKIASITLALWKKGERFDIERHLLSEQTT

SEQ ID NO: 211944 - protein, 419 aa, unidentified
MDVAIGALGEAGRKHDRRMHVIETGDIDVFLGLDVGKGEHHATAVTPAGKKAFDKRLPNTEPKLRELFAKLQAKHGTVLVVVDRPASIGALPLAVARDMGCPVTYLPGLTMLRIADLYPGEAKTDARDAFIIADTARAMPHTLRSVDLEDETIAELEMIVGFDDDLTGEATRVANRLHGLLTQIHPSLERVLGPRLQHPAVLTMLERFGSPAQMRKAGRRRLVTLLRPKAPRMAERLVEDIFTTLDEQTVVVPGTEAAALIVPSLAASLTAVLDQRKLLAGRIEELLEAPPLSQVLISMPGVGIRTGARILIEVGDGSTFPIAHLAAYAGLAPATRNSGSSIRGEQPSRRGNKQLKRAFFLSAFAALGDPASRAYYDKKIGQGKHHTQALLCLARRRADVLFAMLRDGTFYEPQPATAR

SEQ ID NO: 211945 - protein, 378 aa, unidentified
MLPEGLFQTLVSSPVATGMLGSEPALEQTLGGKHRGGALRAGRSRLPSRTVAGAEEPDENKEGKCGQSRGEKVFVGVDVSKKILDVYFRPLGERLRVENSPAGHAQLAERCKALNVEVIVFESTGGYERDATHTLLDAGFKVAVSNAAQVRYFGKALGVLAKTDKIDAEVIAHFAETMKPRLLVKKDAEEQVAADLLVRRRQLVEMRTMEKTRLHQARPDVRPGLLEHIGWLNKEIKRVENDIDDFLRGHFQEEEELLSSVPGFGAVSKRTLLLALPELGQLNRREVAALVGLAPFNVDSGEQRGQRHIRGGRGEVRSVLFMAALAAVRKKETYFGDLYRRMKSNGKPAKVALVAVTRKLLVMANAVLRTKTPWVQPA

SEQ ID NO: 211946 - protein, 406 aa, unidentified
MRLFAGDDWAEDHHVVEVRDAAGTVLARRRLPEGVAGMAQFHALVGGVLDEDDDDPQVLVGIETDHGPWVTALVAAGYRVFPVNPQQSARFRARYAVSGAKSDAGDAHVLADMVRTDSHQLREASGDSPEAAGIKVLARAHKTMIWNRTRETQRLRHQLLQYFPAALAAFDDLDAPDVLELLARAPDPASARKLTRAQISAAMKRARRRDIHGKATAVLAALRSEQLSQPAALAAAYAATVRSLIAVITTLNEQVRLLEEQVKEHFGRHPDAEIITSQPGMGMILGARVLAEFGDDPHRYRDGKARRNYAATSPITRASGKRKIVAARFVHNDRLVDALNAQAFSALSASPGARAYYDQQRAAGHGHNDALRRLANRLVGILHGCLKTRTPYNEHTAWSHRHQQAA

SEQ ID NO: 211947 - protein, 377 aa, unidentified
MKRVKFVGLDVHAETIAVAVAEQNGEVRSLGVIPNREDSVRKLVRKLGPVEEPRFCYEAGPTGYVLYWQLTRMGAKCEVVAPTLVPVKSGDRVKTDRRDALKLARNYRAGELTPVWVPDAAHEALRDLVRAREAAKKDELRARHRLNKFLLRQGRRPPMGVKLWTIKYLEWVKREVHFEQMAQEATLLDYLHEVEHAAARIMRLDGAVAEAVKLAPPKMRAVIEALQALRGIAHVAAVTVVAELGELSRFARAKQLMGYGGIVASEHSSGERTRRGGITKTGNAHLRRVVVEAAWNYRHRPAVGTSLRKRQEHVSEEVKEIAWKAQQRLHQRYKKLLANGKNKGVVVTAIGRELLGFIWAIGIKVEAAQKESLQRAA

SEQ ID NO: 211948 - protein, 387 aa, unidentified
MAQVNDLSRSLTAFDPISTLVVVVEMSKASWLVSGVVPGVERQPLKKLAPDATALLRLIERWRSEAIRAGRPINRIALAYEAGRDGFWLARWLIARGIEAHVIQSASVAVSRERKRAKTDRLDAAMLMRVFLGWLRGERGHCGMVVIPTMEEEAARRPSRERENLVNERSRITNRMKSALARLGIRGFKPHLRKAPERLAGLRTAEGTGLPANVIEEFRRDMARLALVRDQISSIEKTRAERLERAPDTGPHAMVRLLARVIGIGIETADMLVREILSRKLRDRRAVARYAGLTGSPDESGLKRREKGLAKAGNARVRRGLIQLAWRFLMFQKDSALAQWYRSRTEGPSGARKTTMIVALARKLLIALWRLVTTGEIPDGVELRPAA

SEQ ID NO: 211949 - protein, 347 aa, unidentified
MRFYTKQHKFYCGIDLHAKKMYLCILDAEGEVRLHRNIKTDREVFLKVIESFREDIVVAVECMFTWYWIADLCTEHGIPFILGHALYMKAIHGGKAKNDKIDSRKIAVLLRGGMIPIAYTYPAKMRATRDLLRRRNHLMRKRAELYAHIQNTKSQYNLPESLGCIAKPRNRQGIVERFEDPSVQEMIDTDLAVIQAYDPIIAKMERDIIRMANHHDPIAYALLKSIHGIGRILGLVILYEIENINRFPSVQDFASYSRLVKCAKESNGKKYGSSGKKIGNAHLKWAFSEAAVLFLKGNEPGKRYLDRLANKHGKGKALSILAHKMGRAVYFMLKNKKPFDQNKFLGL

SEQ ID NO: 211950 - protein, 420 aa, unidentified
MNWKTLAQNRAAIKKNVLVVGVDIAKKWHVANVVYPDGSFGQPLRFYNDVQGFEQFLAYIRKHQQLAGCSDAIIGFESTSHYWMNLAHWLDERQLRLVQVNPLHTKRSRDMLDNSPSGSDPKSALTIAMLVSEGKYLQVILPRGVYAVLRELVVLRDQLMGDRTSWLNRLHAALDRLFPEFTDVFKSLKGRTALYLLRHYPSPEELLRKTADELTIELRQTCHKSVSPKKVEALQAKARVTVGIKEGRFQISMQLMTALSAVTAMTEQIRVLEDELERSVLAADESKQLLSIRGIGLITTAVILGETGGLRNYDHARTILKLAGLNVYVVRSGQREGEHRISKRGRTLLRKTLYFAALRLVRKGMALHEFYQGLVVREKRKKKAIVAAACRLVRILYALVRDQRSYSEHWSPVGRVAAVA

SEQ ID NO: 211951 - protein, 356 aa, unidentified
MSSIALKRDEVIIGVDTHKEEHVGVALDGLGGRIGELKIPATGAGYARLCEWARGLGRVHAFGVEGTGSYGSGLARFLRRQGELVVEVGRPPRKGERRADGKSDPIDAEHAAREVLSGQATAQPKLANGVVEAIRLLKIARDTAVKAHSQALIALKATLVTADDELRSRLEPLSAFQLVKKCSGFRPDALPPSDPRTAMLYVLGSLARRWLQLHEEIKAHTRALEQLTARAAPRLVEAFGIGFDSAAEMLVTAGDDSGRIRSEAALAKLCGACPIPASSGKTNGRHRLNRGGNRQANAALHRVVIVRMRWHEPTRAYVARRTAEGLSKKDIIRCLKRYVAREVYRLLPDPLPETAG

SEQ ID NO: 211952 - protein, 349 aa, unidentified
MLADQLDYVVGVDTHRDEHVLAVVVAPSGAVVAQRSVRASARGYAQALRFVEQYSSGRRVWAVEGVGHYGAGLGRYLSGRGETVLEIGRGPRGERRLRGKDDQLDAIRAARTALASRTLTLPRAGERREALRLLLLARRSAVNVRREALVQLRSVIVTCPDRLREQLRRLPAGRLVVRCSRFRRSSACTPDELASRLVLRSLARRVEAATAEAAELEGEIHAHVRALAPQLLDEPGIGPIVAAQLIVTWSHHGRVRSEAAFARLAGVAPIPASSGQTTRHRLSRGGDRQLNCALHTVILYRRHHDPTTKDYIARRVAEGKTTRDAVRSLKRYLARHLYRLLQTQEPLIA

SEQ ID NO: 211953 - protein, 346 aa, unidentified
MKGKEVFVGLEDSKKTWKIAVRCERMVIHRTSMEAKYSVLIRYLRKKFPECTIHLIYEAGFKGFNLYDRLTEDGIDCVVIPPHMVTEPKVNRVKTDKRDANRLAYILENHDFKDACHVPDRERREDRQISRTLIAMQKDIIRTRNRIRKLLDFHGIEVSFPDRWGRDEFRALKTLSLSEPLRISLDVLLAQLEQLWAHQTSLRTALRTLCKKERYRKAFEIARTLPGIGWFTAIRLILELGEDLSYFTTGKKIASFVGLTCSEYSSGETERKGGITGMGSGFIRGTLIENSWGAIRKDPVLLGKFTRVWRASGNKKKAIVAVARILIVRLRACVLSGTPYAIGVVE

SEQ ID NO: 211954 - protein, 485 aa, unidentified
MKQTKSSPCGRAIPAHGGQLSRKERRELARQVQSEQVTLQIVHSNAAGIDVGKNTHYVAVPPDRDAESVRYFDSCTDGLQQMVAWLKKCGITSVALQSTGVYWIALYDLLQEADFEVYLVNARYTKSLPGRKSDVQESQWLMKLHTYGLLPNSFRPPQEIRWLRSYWRQRQNHVRSAASCIHRMDKVLTEMNVRLSSAVTDLSGATGLAIIQAIVDGERDPHELAAYRDPRVKATQEEIARQLHGNWQADLLFRLKQELQGYRFYQTLIAECDQELAQLLRAFPDRSAGVALPEETRKNRRKKKRGNSPQFDLRQLLYLMSGVDLARIDGIDVITAMTVVAEAGYDMSPWPTADHFVSWLRLAPDNRISGDKIIGKARTPTQNRLSQALKMAASSLKASKTYLGAQFRRLRARRGPAIAVKAMAAKLARLVYNMLRHGMEYVDRGTEFYEQQQRERRLHALTKNAAQLGFQLVPTELSLAGTGTI

SEQ ID NO: 211955 - protein, 418 aa, unidentified
MLVAGIDVGAEVHHVAVVDESEAVVTQPTAFAENAVGYDKLFALLGRAGARGGADLPLATASAAPPSTLVVMEATGHYWQNLLAALTAKGFAVALVNPLRTHRFAGEELARTKTDRLDCWQIARFGAQKRPAPSYLPEAAVEELRELMRLRERLVEELVARLNQLHRLVDLGFPEFTRYLKDLNTELATALLHQYPTAQAFRGISRKRLARLSYDGRHQLGAELAQQLIAAAAVSVGSQHSSSHQLGVRYACEDLETLRKRLKRLDGAVAGTLQQHQVGQLLTTIGGIGDTTAAMIIAELGDPARFQSAGALAAYVGVCPAHKHSGKHQPKRSSLTPIGNRRLRHALWMPTLSAATHSNPWLMLFYRRLIERGKPHKVALCAAMRKLLAAIYSVAKHRRPFTMDLNLQSRLRVSYENA

SEQ ID NO: 211956 - protein, 348 aa, unidentified
MQVSTIGVDLAKNVFQVHGVDSAGKVVISRQLRRKQVIDYFSKSPPCLVGMEACGTAHYWAREISKLGHTVRLMPPSYVKGYVKRSKNDAADAAAICEAVTRPSMRFVPIKSADQQALLMLHRTRDLLIRQRTQLINALRAHLAEFGLVAETGREGLAQLAEIITDESNREALPSAMKQALQAIVDQLAALELPIGALDRAIHAHHRANDMSCRIETVPGIGVIAATAIASTVTDPSNFKSGRDFAAWIGLVPRQHSTGGKERLGGISKQGDRYLRRLLVIGATAVVQHARRHPQKHPWITRLLARKPAKLVAVAVANKMARIARAIMAKGGYHRRPELASAGLAMGR

SEQ ID NO: 211957 - protein, 394 aa, unidentified
MNGTENQGKGRIIGMDIHPTVFSACALENTDARTVAELFMHDRVDMDDLERWHKKNHQPGDLYVMESCNNSFETAERLKKLGAHVVVLESLRIGQIQKAYLKDDKVDARKVARVYLSGLGVEVWQPDEKTRERREVLAVYDRVKRDSVRCRNRIWSWLTQHGIKKPEGMKLAEESSLNWLLQCRQWSLRQELLIRTMHSNLVYAQSKRKELKRLMAAEIAEDPELLKLQQLCGLRLVVIYALGAVIGDISRFKNPKRLVAYIGLQPSVKQSGISDRSGGLRHTGRKDLRCLLVQAAHAILRMGPSNNSLATWGRALTYRKNRNVAAIAVARKLTVYIWYLLRGFFTPLQNLSTSFRTKLQKLAVEIGTPMRREMGYKTIQDFIHKKEEILLAGG

SEQ ID NO: 211958 - protein, 374 aa, unidentified
MSDHSEAFVAFDTSKLRNAVAIADAGRADEVRFLGEIENTGTATAKLVRKLAAKYQRLTFCYEAGPTGYGLYRQIKSLGQECVVVAPSLIPKKPGDRVKTNRRDAVNLAKLLRAGELTAVWVPDRHHEAMRDLTRGREAAVMDLRSKRQQISAFLLRQSLHYPGKTTWSKAHMSWLASQKLEYGEQRLVFEEMQLAMRQGQERLERLEQAIRTAVPDWSLAKLVTALMAMRGIDLISAAGFLAEIGDLSRFRTASELMAYLGLVPSEDSTGDTIKRGPITKAGNRRARRILVESSWSYQHPPRVGKEKQEKVAAAPRAVREIAWKAQCRLSGRYRALIRRGKLKTVAITAVARELAGFIWAISREVTTARVADK

SEQ ID NO: 211959 - protein, 361 aa, unidentified
MKQNIRTQYTVGLDLGDKKSRYAILDAEAEIVEEGDVGTTREGLSQVFGSRAGMLIVVEAGTHSPWVSRHLRGLGQEVLVANPRKVALIYQNRRKRDRVDAITLARLGRSDRQLLHPLEHRSEQGQRDLALLRSRDALLRARTRLVAHTRGMVKAVGERLEDCDADNFHQRAKDQIPEALRDILGPLVETIGRLTRQIGKFDRMLEQMAARYPETARLEQVNRVGPITSLGYVLTLEDPARFPRSRSVGAYLGMVPGVAESGETRRDLGITKQGDRFLRGLLVQCAQQILGPFGKDCDLKRFGERLAAGGGRQAKKRATVAVARKLAVLLHRLWISGDTYDPLYNAKKREHKEAEISVSVG

SEQ ID NO: 211960 - protein, 355 aa, unidentified
MQSNKISFKGQNIYVGIDVHLKTWHVTTLTESGYKYSFAQHADAKELFDRLNKKFPDAHFKSAYEAGFCGFSVHYALTELGFENIVVHAADIPTTGKEKAMKTDAVDSEKIAWALKRDELTGIYIKDKHYMDDTNLMRLRQRFIIDLSRQKNRTKHLLYTQGVTYPERFRKNGTHWSRNFMKWLREEVDLLSEEKRTLMLLCDQVEHIRKDILAVTREIRRLSRTDKYKENFSLLTSVPGFGLITSMSMLTELDNNPMRFPNERKFVAILGLIPTCHDSGEKKVSGEKINRGNKQLGPLIVEASWVAIHRDYQLGCYYTNCCQSMKPQKAIIKVARRLACRAYAVMKTRKAYVLS

SEQ ID NO: 211961 - protein, 316 aa, unidentified
MANLHQSKSVVNVGIDVGKHYLDVCIHEKKIHFQEENTTKGIQSIIKRLSYYQVERLVMEATGRYEFAMAEAAFLKEIPVCIMKPLSIRRYAGAVEQLAKTDKIDAAIIAEFGAVIKPVATPQKSKKLILIKDLLSRRRQVMEMRTQELNRIQIMGKALEASCKRIIKTLDKEIERIEKSLDEQVQDEPEWTEKREVLMSTPGVGNTLTYTLLADLPEIGTLNNKEIGALVGVAPMNRDSGSLRGKRKVQGGRATVRTILYMATLSATQCNPVIKSFYKKLVAQGKHKKVAIVACMRKLITILNAMVRENKEWCHG

SEQ ID NO: 211962 - protein, 357 aa, unidentified
MEYVGVDYHTLYAIATRMNKDGDILSKDRIANVKDDIRSYFSALPTQSQVVLEATNNWAAFVEWTGDLPIEVKLANPSKTRAIASAKIKTDTLDSRILADLLRTDFIAESYLAPKEVRDIRKLVRYRMTLVRLRSQFKTRIRSVLFKVGERIPTANILGPLARKTILKFSLRDIYRSEIESCMVLAEAFTKQIMEFEERIEKQAVADEDTRLLMTVPGISFFSALLITAEVGDYRRFPSGRKLCCFAGLVPSIHASGGKIQHGRIIKQGSANLRFALLQAIPHLVRKHTGLARHYQRISRKKGTKTARIAISRKLLAIMLTMLKTRQPFRIDTGVKRESIARLPASARALNHPPAGG

SEQ ID NO: 211963 - protein, 344 aa, unidentified
MSEAFIIGLDIAKYVFHAHGVDERGRAIFSKRISRKKLLDFFAAQPSCTVALEACGGAHHWARQLSQLGHEVRLIPPAYVKPFVKRQKNDAIDAEAICEAAQRPNMRFVAVKSEQQQAAGLVFRTRDLLVRQRTQLINAIRGHLTEFGWIAPKGPSHVAMLAGLIEEEEMASSLPEAARAMLRLMLDLLADLDGKIADLDKEIARRAREDEVSRRLMTVPGIGPISATAIAALAPPAETFAKGRDFAAWLGLTPLQRSTGGKHKLGSTSKMGERTLRRLLIIGSSAVVLQASKRGAPKGSWLEQMLARKPRMLVTVALANKTARIIWALLVKKESYRAPVVAKA

SEQ ID NO: 211964 - protein, 404 aa, unidentified
MYYGLDVHKDFIQVCHLSPDGRQRQDFPIRATAEAIETFARRLTRKDQVALEVTFHTWTIHSLLVPHAGRVVAVNATQVKAIASAKIKTDKVDAHTLAQLLRADFLPAVQMPSSQTWALRQLVSHRRLLLKQQTATKNTIHAIFNRRLIHLPQGWTPFAQKTRCWMRERSLPPAEHFMLHNSLDLLEQIETRVDKVDEQLLQQARISESAKLLMTIPGIDVTVAIGFLAAIDDVQRFPTPQKLASYFGLVPRIRQSANRCYHGGITKTGNCAARSLAIEAAQVLARSSSPLATIYYRVRYKRGHNVAVTALARKLIHVVWHLLSKREPYRYAPIPRTRTKLLKLKTRRVRSRSVPQTLDAVYHEAGLPPFSLASPGERRAAANSRRTRTRLANAAGKLSKTRKM

SEQ ID NO: 211965 - protein, 407 aa, unidentified
MDVVHPKCAGLDVHQQTVVACARVGSGKTVTHAVRTFGSTTPELLALSDWLATHGCTHVAMESTGVYWKPVWHVLDGHFELVLANAMHIRNIPGRKSDVNDATWIADLLAHGLIRSSFVPPEPIQELRDLTRTRKQLVREIAQHTLRIQKTLETANIKLTAVLADITGVSGRAILQALVAGERDPERLATLANERVKASRADLVAALHGRVTDHHRFMLHLHLTQIAALEAAVREVEARLGDALAPFRAALDRLITMPGVSETVARVIVAEIGFNMTRFPTAGHLVSWAGLCPRLHESAGKRLSNRTRSSNPWLKTTLVQAAWAATRKKDGYFRAQFLRLKSRRGPKKAIIAVTASMLTAAYHMLKHGVDYRDLGADHFDRRDKAKLAKRLIARLQDLGITVEVRAA

SEQ ID NO: 211966 - protein, 424 aa, unidentified
MSKKKTSGAGLAALYGRVCGMDVHKNIVVACVRILNAKDGTVQSTLRRFGTMTADLVELRQWLADEQVTHAAMESTGVYWQPVFNVLEGHLEVWVVNAQHIKKVPGRKTDMKDAEWIAQLLQCGLLRPSFVPDRQQRQLRDLTRQQTKLVQQRNAVDNRIQKVLETANIKLGSVASDVLGVSGRKMIEALIDGEKDPRVLAELAQKRLRDKIPQLQRALEGEINDHHRFLLRQLLDQYDFLEKEIARISERLGAVAPPSFRSAVEQLDAVAGVGERGARALLAETGTDMNRFPSHKHFASWAGSCPGNHESAGKRRSGKTPAANRHLDAVLTEMAHAAVRKKDSYFKSQYHRLAGRRGKKRALGAVKHSLLVTVYFMLRDNKPYKDLGANYFDKLNPQQQIHYHVRKLKELGHKVELTPMADAA

SEQ ID NO: 211967 - protein, 343 aa, unidentified
MDATTYGLDVAKRVFQMYWVEAQTGEIVNRRFGREELIGFLAQRPAGRVALEACGSAHWWARKIKALGHEVVLLHAKFIRPFVQTNKTDAADARAIWTAVQQPGMRTVAAKTEDQQAMLSVHRIRALLVKFRTMQVNQLRGLLYEFGVTFRAGRQAGLSEIRVRMAKLEDALPGAMMCTLQEQLKRIDGLEQEIDRLEQRISSWQKQEAACRAIADVPGIGKLTATALVATIGEAKAFKSGRELASFLGLVPRQSGTGGKIRLGSISKRGDPYLRTLLIHGARSVMYHTKQPTPWQKSIQARRPANVAAVALANKMVRTAWAILAHGQAYQKDHVRVKPRLAN

SEQ ID NO: 211968 - protein, 374 aa, unidentified
MPTNNASSIVYLAIELSSSSWIVACRQPWNEKVKLHRMDAGDCETLLALILDLRRKAAAQFGVDAIIASCFEAGRDGFWLHRLLSAHGVINHVVEPTSILVTRGARRAKTDRLDALGLLRVLAATFTGDHDACRVVNVPSVSEEDAKRPHREREHLVQERVRIENRIAALLATQGISKRPSLRSWEADLNAIQTGDGRAIPPLLKAELNRLRRRLVITLEMIREVEAERQEALERQDDEAGRTIGALCKIRGIGDNFAAVLTREIFYRTFENRRQIASYLGLAPTPFQSGGMDRDRRINRAGNSRARKTLIQLAWLWLRYQPESSLAQWFRQRVGELKGRTRRIAIVAMARKLLIAIWRFAKLGIVPEGAILAA

SEQ ID NO: 211969 - protein, 389 aa, unidentified
MPTMTHSTTASEQTDIEVIGGVDTHKDTHTAAALDASGRLLGHREFAATAAGYAALLAWLGTLGQLVRVGVEGSGVYGAGLARFLQAAGVELVEVDRPDRKTRRWQGKSDPVDAEAAARAAQAGRASGIPKTRGGKVDALRALRVARRSAVAARADAQRQIKALIVTAPDALRITLRGLGDRELIAHCATRRPDRAGAGDPTVATVLALRALARRHQQLSVEIDELDALIGPLVTAINPTLIGLFGVGTDVAGQLLVTAGDNPQRLRSEAAFAMLCGVAPLPASSGRTHRHRLNRGGDRQANAALYRIVLSRLRWDPRTRAYAARRTTEGMSKPEIIRCLKRYTAREIYPTLLNSQPSSVPAITSTAPEESTWSARSAARTNDVDTDKR

SEQ ID NO: 211970 - protein, 398 aa, unidentified
MTESSDYESVQVFIGVDVGKDTHHAVAINRSGKRLFDKALPNDENKLRSLISDLKQHGQILLVVDQPATIGALPVAVARSEGVLVGYLPGLAMRRIADLHAGEAKTDARDAAIIAEAARTLPHALRTLKLADEQIAELSMLCGFDDDLAAQTTQASNRIRGLLTQIHPALERVLGPRLEHPAVLALLQRYPSPEKLASLGEKKLAAQLCKLAPRLGKRLAADIAQALAEQTVVVPGTNAAAVVLPRLALQLITLRKQRDEVALEVEQRVIAHPLYPVLTSMPGVGVRTAARLLTEVACRAFASAAHLAAYAGLAPVTRRSGSSIRGEHPSRRGNKALKRALFLSAFAALRDPLSRAYYTRKMSQGKRHNQALIALARRRCDVLFAMMRDGTFYTPQGS

SEQ ID NO: 211971 - protein, 422 aa, unidentified
MAKGKIDPEPEFAAFVGIDWADRKHVWCLQAAGSAKRETGELEHKVEAVEAWVAELCQRFGHRPIAVAVEQVKGALVFLLNKYECLHIFPVPSTMTAKMREALYPSGAKDDPRDADLLLDILWQHRDKLRRLSPDNEATRRVQNLVEERRKLTAEKTAQGNRLTSYLKIYFPQMVEWFEKLDMPLVCDLLERWPTLEELQKVSTEELRTFFRQHHCHRGLRERRILAISGAIPAKGDRAVIEAKSAVVKVIVQLIRSLLQGIAELDGKIEEVAAEHPDFIIFESLPGAGAVMAPRLLAAFGSQRDRYSCADELQTYSGIAPVTERSGKRKWVHFRWACPKFLRQSFHEWAGHSIVQSAGARAYYQQQRDRGSDHHAAVRALAFKWIRIVFRCWKDRVAYDESKYLAALAKRGSPLDKLVVVG

SEQ ID NO: 211972 - protein, 477 aa, unidentified
MRKLIPVSDRVLSNTNKERVMRKKSQRTKGIEEVRPFDGLSKVNLNAAGVDIGAREMVACVSGGEEVQLVKGFGNYTVDLKAIAQWFHEHQIKTVAMESTGVYWIPLFEELENQGFECLLISSRSLRKVAGQKTDVEDAQWIQTLHSYGLLKGSFRPQGDLVALRTLLRHRTQLLEHRAPHIQHIQKALLQMNIQLTQAVTDVMGMTGQKIIRAIVSGERNPEVLAAFREPGCKHSVEEIEKALTGTWRAEHLYVLKQSVEIYDFYSEQITACNDEIEQQYGVTRPEWEAGELAAWKAKKNNSHSKNAPQNQEEIRKHLKRISGVDLSVVDGFGVSLAQTVIMEVGTDMSKFPSEKHFCAWLGLAPKHEITGGKVLSNRTIKTRNRAGQAFRMAAQSVKKANNPFGMLYRRLRMRLGPAQATVACAHAIARVVYKMLKYKVEFDPLSVNEYQAKYDEQQVKYMKKKAAKLGYQLVAA

SEQ ID NO: 211973 - protein, 420 aa, unidentified
MRNAGIHANSLLEVRRMYNAVGIDVSKGKSTVAVLQPGGTVIRKPFDVSHTSQNLNELADYLSSLDGTTKIVMECTGRYHEPMVKALSEAGLFVSIVNPHLIKNFGNNSLRKVKSDPADARKIARYTLDNWTELRQYSGMDNTRTQLKTLNSQFSFFMKQKIAAKANLISLLDNTYPGVNKRFDSPTREDGSEKWVDYAYSFWHADCVRKIGLKAFTERYKSFCKKHHYIFQQDKPEKLFNASKELVAVFPKEKTYKLLIQQSIQQLNLASEHVERLRREMNELASTLPEYSTVMGIYGVGKTYGPQLIAEIGDVSRFTHREALTAFAGVDPGVDESGQHKSKSNRASKVGSARLRKTLFQIMTTLLQNAPEADPVYRFLDKKRSQGKPYYVYMTAGANKFLRIYYGKVKECLRNLEQTE

SEQ ID NO: 211974 - protein, 363 aa, unidentified
MNATAALPVVGVDLAKSVFQLAVADGSWRMVESHRLTRTQFERWFINRAVGLVVMEACGSAHHWARWLNGLGIEVRLLPAAYVRAYVKRNKTDAADACALLEAARCAEIVPVRVKSVEQQALQAMHRTRSLWMGTRTSRINALRGFCREFGIAIAQGSRLGVEQIGRVLADPHAAVPLLLRRSMSLLVEEIRLLEVRIAQLERELTALARQSPACTTLLSIPGVGLLTATAMVAATSGEVSHFHDARHFASWFGLTPKEHSSGGTRHLGRISKRGDRYLRMLLTHGARSVLRAASTAVRAGKSVDGLRQWALAVQDRSNHNKATCALANKLARICYATLRDGEPYGAARLNKKLARMAFALPA

SEQ ID NO: 211975 - protein, 570 aa, unidentified
MSRPSWQLRDAALGYASRGIPVLPLHYPLPHHRDLQPVGGDQQPAVGSGCSCRDPGCGQPAKHPLGTLVPHGVKDATGNRARVLAWWTSHPLANFGLATGHAFDVLDVDGPTGAQAIRALAATHGLESSGPLVRTGGGGWHFCEGEQGRCAKRRSRPGLTRGITGVLPSDRSVDQLPGTPPGAPSVDGVTSEEPGLGPRRSTVRRLAVGALPANRRAGKDDMASLPAVVRQVTVGVDSHKDVHVAAAVDQVGRVLGTTWVPTTTQGSAQLLRWATRLGQVQRFGIEGTGSFGAGLSRWLQQQGYQVVEVNRPNRQTRRRRGKSDPVDAEAAARAVLAGEATTTPKAANGTVEMLRVLRVARRSAIKARGQAANQLHSLLVTAPDQLRHQLRGLPLARLVQVAAAVRPGPLTDPQAATKFALRELARRYQFLTAELDRLDAELAALAPKAAPRLLARRGVGAQVAGALLVVAGDNPGRLRSEAAFSMLCGSSPLEASSGKTVRHRLNRGGDREANNALWTIAMTRLSCDERTQRYLARRTAEGKSKREIIRCLKRYIAREIYRDITAAVGS

SEQ ID NO: 211976 - protein, 349 aa, unidentified
MTVYVAVDFHARQQTISYCDLADGEIQRRQLRHQHDDVRGFYEQFTGEVIVALEASGYSAWFEQMLAEVGHTIWLGNAAEIRRKAPRRQKNDRRDADLMLDLLLKGDFPRVHGFSEESRTVLRQLRYRHKLVKVRTIAKNSLHAIGINAGLPLKRRLLTEPGIAQLQALSLSPVLTQQRDEWLQLIGSMNERIATVEAQLQQRAKDDAAIALLQTHPGIGLLTSLALRYTLLPTSRFSSTRQVTAYVGLDCMEDQSAERRRMGSISKAGSKLLRFLLNEAGHTAARHDPELKKFYRRLLHRRDKPKAKVAVARKLLVRSFIMLRDQIDYAEFVRRGVAARVAREAHSLP

SEQ ID NO: 211977 - protein, 347 aa, unidentified
MKNINVIGVDLAKNVIQISVVSRSNRELKNRSLTRKKFAEFLARQAVSLVAFEACATAHYWARAAKRHGHEVKIIPAKAVAPFRQGHKTDPNDALAVAEAAGRPNVKLSPLKSIDQQSLQSIQRSRELLVQNRTALSNHVRGILMEFGIVILQGFSSLHRRLPEILEDGESDLPDMYRATLHLLWRRLLELRDDIKVLTDQIESLVKQDSSCRRLLAIEGIGPIGAVLLFATLGTGEAFVNGRQFSSYLGLTPKQFSSGGKVNLIGISRQVANKRLRAVLIQGARAYVHKLKEPKSSKDRWLKALIERAGTGRASVALANKNVRTAWALLTRGESYDRQYQHALQAA

SEQ ID NO: 211978 - protein, 354 aa, unidentified
MKRTTKHVALDVHQATTVASVREDGGRVIARSILPTEAAAIVEFFRGMRGAIHVAFEEGTQAQWLHDLLVPVVDRVVVCDRRGEPRLGNKGDQVDADDLSERLWRGSLRAVYHGSAPRATLKELTRSYANLVEDTTRVMLRLKALFRARGIPAPGRRVYHPAGRAAWLGALADRGARLRAEVLYVELDVLQTLRPPAKAAMVAEARRDPAWGVLHRIPFFGPVRVALLLATMQTPWRFRTKRNLWAYAGLAVVTRSSADYVLVGGRPVRRRRAPLTRGLNQNHNRVLKNVFKGAATAATARPGPLQAWYQGLLARGMREELARVTLTRKLAALTLRLWKTGDRYDPTQLTTQAR

SEQ ID NO: 211979 - protein, 346 aa, unidentified
MEHYAGIDVSLECSSVCVVDGSGKIVRESKVASEPAALIAWFSSLGLEVTRIGLEAGPLSQWLYAAMKQAGLAVELLETRHVHDAFKAMPVKSDRNDARGIAQLMRLGWFRPVHCKSINAQEVRAVLTARKLVQSKLLDVENSLRGILRGFGLKVGKTTGTDFAGRINELVKGHPNLEVIAEALLKVRTVLLSEFKAFEKRAGKMSRMDAKARLLMSTPAVGPIISLTYAAAIDDPARFTSSKKAGPHFGLTPKKHQSGETDRSGRISKIGDASVREALYQAAHIMLTKPVKGCSQLKSWAMRIAKRAGMSKAKVALARKLAVIMHRMLKDGVPFNPLAKANAATA

SEQ ID NO: 211980 - protein, 460 aa, unidentified
MTLLGKLGQELPRRYYLGVDVGYKEHVAVVVSLQTFVRGDARWKRARSVHFASTQAGLRKLRRYLDRFSTEPSAFLGLCEPTGGHYGATVFQFLLDQGYDMRLVENATVKHMRERIYPGLPKTDEMDSRVMARIGYLHEAVGEEFTLRPLELAAPDDAHLLALCRDHWKLSTMITRARNQFTQLMAVNFPELKTFFVSSVSTFAPVSLVSAYPTPALLAVAPAEEVYDVLWKAGAYQHARRVTELQDLARDSSGLLPDPGRAWRIEWLTNFLLTNLGYQTSLDRRITTLVKHRREYPLVAHVPYSGPETLGMILAVTGDVTRFSNYRKYVAYSGYFAGLQKSQTIDRTKMSRRGNRNLKRALFQIAAPLVWFDRGDNPYKQLYQRKKTEGRPWYKVMPFVCAALARHIYHCLKFNDPYDVEKAFQGSTLVPASEEEWLDLSAELDERFETMDASLCQIEA

SEQ ID NO: 211981 - protein, 379 aa, unidentified
MNAITLYLGLDVHKDSITIAIAQAGPKGEVRLFGTITNDMQALEKALGRIRKAHPGAHLEVAYEAGPCGFVIARRLKQLKVPCLVVAPSLIPKQPGSPFKTDQRDARTIARLLRVGELTGVYVPEPTDEAIRDLCRARTDAVDDLRRCRLRLKAFLLRHGYRYQGKANWSAAHMRYLRELVLPHPAMKAILEEYLQGIDAADQRILRLQNSMFDLLPTWRLQPAVKALMALRGFQLVAAMITVSELGDIHRFEHPRQLMTYLGLVPTEDSSGPRQRLGHISRCGNGHQRWLLTECAEHYLLPPKVSKELARRQEGQPPEVRELSWKAQHRLHLRFNRLLARRLQRNKAKVAIARELCGFIWALLRTQKCYLLSTGGAAS

SEQ ID NO: 211982 - protein, 343 aa, unidentified
MDYFAGLDVSVKDTSVCIVDGTGKIVREVKVASEPEALLTVLRDAAYRFKRIGLEAGPLSQWLFSALAEADLPVICVETRHMRAVLKARINKTDRNDARGIAQMMRVGLYRPVHVKTLRSQKLRMLLTHRKLLQAKAIAVENDLRATLRNFGLKVGAVGAVKFEARIKELIDNFPDLVALVEPLLVVRRVLREQISILHRRVLAAVRNDEVCRRLMTVPGVGPVVALTYRATVDVPARFRKSKSVGAVFGLTPARDQSGERDRPGAISRCGDQMMRTTLYEAAQVMLLRSAKWSWLKAWAMKIARHRGMKKAIVALARRLAVIMHRIWTDGTEFRWTRETAAA

SEQ ID NO: 211983 - protein, 354 aa, unidentified
MPKTASAQIAVIGIDIGKNSFHVVGHDSRGAIILRQKWSRGQIETRLANLPPCLIGMEACVGAHHLSRRLKAFGHDTRLMPAKYVRPYAKGQKNDFNDAEAIAEAVQRPTMKFVATKTADQLDLQALHRVRERLVSQRTGIINQIRAFMLERGIAVRQGIRFLRTELPIIFASRTDVLSPRMLRVIEDLAGDWRRLDERIETLSREIEEIARQDAGCDRLMSVPGIGPITSSAVVAAIGSGDVFSKGRDFAAWLGLVPKQISTGDRTILGKISKRGNRYLRVLFVQAAWVVLVKPMSWERHGLKSWIEAAKKRLHHNVLAIALANKLARIAWAVLAKGRDFEATRTVNGSTQPA

SEQ ID NO: 211984 - protein, 424 aa, unidentified
MQKPAYTKCVSTLTEDTTVKKRRQLKTNGTVIGIDAHSEKIVASFIEMHDGVEGKPRNFVTTVDALEPTFKKRMQGGEIAVLEASTNSFSIASRLNAIGIDVRVVTSDCLAGRQRSDKINDRIDAENLARAFISGDTQLVWQPSPKFRGMRDLFFAYRNAVKNATQASNRIWGFMNGHGFKAPSRGKQKKLSTLEKLLKERKWNADEKFLLEQMIGDYEHAINQRDACEAKIKAHVAASEDMRRIMQVLGIRFIVAFALMAFIEDIHRFETAKSLVRYIGFNPSECSSGTKEGRHDMSRFGRHDLKGLMIQGAQAAMRTGKGNMHKWARHLCASGKNRNLATCALARKMTVYVWHILMGHPTPNATPDPTFVRKLSKLASELGEDALEKLGFKSAKEYVKTVSKTIYANQKKPQELQTDPLASA

SEQ ID NO: 211985 - protein, 340 aa, unidentified
MQITTIGLDLAKSVFQVHGVDAAGQVTVRKKLRRAEMLRFFEGLAPCLVGMEACATAHHWARQLSALGHEVRLMPPSYVKAYVRRQKNDAADAEAICEAVTRPSMRFVPIKSTERQGVLVLHRTRELLVRQRTMLVNAIRGHCAEFGIIAPQGVRRAPELIDEVRQADASLLPDLARSALLRLADQLDHLAAEIHALDRRILAWHRQDQASQRLATIPGVGIITATALSATVVDPSAFRSGREFAAFLGLVPRQNSSGGKDRLGRISKKGDGYLRKLLVVGATSVIRRSRTGTSAAAPWIRSLLERRPARVVTVAMANKTARIAWAVLTRGEVYRAQTMA

SEQ ID NO: 211986 - protein, 367 aa, unidentified
MKVYIGVDFHARQQTVSYLTTEDGELHQCTLDHQKDDLSDFYRQFSGDVVVGMEASGYIEWFEEMLMEMGHEVWVGDSAEIRRRARRRQKNDKRDSLLILDLMVKGEFPKVHRQTTESRQVLKQLRYRHRLVKIRTIAKNNVQALALSAGLLAKRQYTSKWRQELRRLEREPMLGEQAKQLVKIIEEVTIEIKRVEQWLQKQAEADHRVMLLQTHPGIGLLTSLVLVHTLWPVERFRNGRKVTAYLGMDPVEDSSADRIRIGSISKQGSRLARYLVIEAASTAAKSDKGLKCFYRRLMSRQGKPKAKVAVGRKLLVRCFIMLRDQIDYEEFLRRGVEVRSSRLASGPEMPEPVIGRPTSLEIRERAN

SEQ ID NO: 211987 - protein, 377 aa, unidentified
MSKLRFGGLDVHADTIAVAVAEAGGEVRSLGIIPNRLESIRKVIGKLAPIETLKCCYEAGPTGYVLYWQLAQMGVGCEGIAPSLIPTKAGDRVKTDRRDAEKLARCYRAGELTPVWVPDANHEALRDLVRAREAAKKDQLRHRHRLGKFLLRHGKRPTDAGKAWTQKYLNWIRIHVRFEQPALEATLKHYQEEVDHIAERIVKLEQAIDEAVKQAPAEIRVAIEALQALRGVAQTTAATVVAELGSLSRFASPSQLMGYSGLVSSEYTTGNRVQRGAITKSGNAHLRRVLLEAAWTYRHRPNVQGRVLRRQKSLALSEEARQIAWKAQQRLHKRFAALTARGKESKVAATAIARELLGFMWAIAVHTEAQQKQAKAA

SEQ ID NO: 211988 - protein, 357 aa, unidentified
MEGLDEERRDAPVFLGVDTHSEAHVAVALDGAGGRLGELVVPNDRAGYARLWDWAMSLGILVAAGVEGTGSYGAGLSRFLRARGASVQEVNRTSRQHRRRHGKHDAGDAEAAARQVLSGTAAGEPKGADGAAESLRALRVARRSAVKAKTQAANQLHALLSTAPDELREGLGGLPTKHLAAKASRFRCGAGPVDPARATKLAMRSVARRHQALSGEIAELDAHIEALVEEAAPELVALEGVGPDTAAALLIAAGDNPERLKSEASFAHLCGTAPVPASSGKVVRHRLNPGGNRDANRALHVVALNRLRRDPRTQEYLARRTAEGKSKEEALRCLKRYIARETYRAVLLDAGARRPPG

SEQ ID NO: 211989 - protein, 372 aa, unidentified
MGHHSEAFIGIDTSKSRNAVAIADGGRGGEVRFLGEFPATEATIRKLVSKLAAIYAKLTFCYEAGPSGYGLYRLIKSLGHECIVVAPSLIPKKPGERVKTNRRDALSLAKLLRAGELTAVWVPDERHEAMRDLSRASQAAKKDLQGKRQQISSMMLRLGRIYPGKTTWGPTHMNWLMAQKLEHVEQRIAFEELMEGMRQESERIERLQQTIREAVPEWSLAELVTAVQAMRGIDLIAAVGVVAETGDLSRFQNPRELMGYLGLVPSESSTGDKVKRGGITKAGNARARCILVEAAWAYRHPARVGREKQAKVAAAPRRVREIAWKAQTRLCRRFRALERKGKRKTVVATAIARELAAFVWPINREVMAARKA

SEQ ID NO: 211990 - protein, 339 aa, unidentified
MKFTPVGIDIAKSIFQVHYVDEQTGEVINRPLRRSVFLQHFVNRAPCLIGMEACSGAQHWARELIKLGHQVRLLPARFVKAFNIGNKNDAADARAIWLAVQQPGKAVAVKTEAQQAVLALHRMRQQLVKFRTMQSNGLRGLLTEYGEVMGRSRAALDKAFPDVLARLSERLPVMLIESLREQYARLSELDAQIAQIERRLRQWLREDAAVQVVAQIPGVGLLTATAAVASMGDPKAFRSGREFAAWAGLVPRQTGSGGKVQLHGISKRGDTYLRTLLIHGARSVLQHAKDPGPWVEQLGQRRPPNVVVVALANKMARTIWAVLAHGRAYQPGHISVRPA

SEQ ID NO: 211991 - protein, 343 aa, unidentified
MNTTASVIGLDIAKNVFVAMGRDERGKPVWKKTLARDGVLAFFANLPPTPVGIEACSGSHYWARQLLAMGHDVKLIAAQHTRAYVTGNKNDANDAAAIAEARSRAATKYVAVNTEAQQDLQMLHRARQALVEEKRAMVCRIRAFAHEYGKVFPLGVAKFRAGLSPWLADERNGLSAMALETFRDLVAQLDDKETRLQTYERRLAGAARANEASKRLLAVPGIGIITATAILATVAGPKDFKQGRDLSANLGLVPREHSSGGKQRLLGITKRGDRYLRTLLIHGARSALRCADGKEDRILRWARSLAERRGFNVAATALANKLARIAWAMLAHGREYQPNHGAA

SEQ ID NO: 211992 - protein, 387 aa, unidentified
MYYIGIDISKFKHDCAVIDDVGDVVTPSWSFANDHEGFLRFKALLDSLGPETRIGLESTGHYGTNLKLFLESSGSTFMEFNPLLINRFVKSKTLRKTKTDAIDCEMIARYLMTVEYRPYPPSFYHTEKLKSLTRFRDSLIRQRSRQLVELTNILDKVFPEFKPFFKGRFSATALHILATYSSPERIANMNARSYEALRKLSRGSFTLTDFTTLKHLARNTIGHPDDFLLNEMTMVIDIFSQLDSKVDETETLISECVLEINPPMLTVPGIGVDSVAVILAEFGDFSKYETPAQLLSFAGMEPGYFQSGTSESTGRMVKHGSSYLRYALMNCARSVVNYEPTFAEYYAKKRAEGKSYRVALCHTAKKLIRVLFTLQTKNLIYDPDSMR

SEQ ID NO: 211993 - protein, 386 aa, unidentified
MRGAKKRGPGGSHLLMTRDHAGNVVGIDPHKRTLTATVADARGGILGSEHFRVSGEGHRELEAWARQFGPIARWGVENAAGWGRHTAVFLAARGHDVRDVCANRTPRHDRARQRGKSDALDSERIAREVLAHSLLPKAFKRAGQDQGPDEQQQLLALWHNRRRSILTSRQHLVNEAEHLLCELPLGLREQLPDTKAVRPRLAALERRNRRRRYDTPTRLRLQLLDGYRAQIAALDREETQVVAELQTLVRQTGSTLSELCGLSTRSVAELLVETGDPRRFTEGGFGRFNGTAPLPASTGEGPGEPVPHRYNPGGNRRINAILHRMAVTQLRCEPRAQAIYANARAAGHTKKEARRVLKRHLSDVVYRRMIRDLAAASHPAQPLLAA

SEQ ID NO: 211994 - protein, 347 aa, unidentified
MRFYTQQHKHYCGIDLHARMMYLCVLDGNGAVLLSRNIECSPRAFLAAVRSFRDDLVVAVECMFTWYWLADLCQREGIAFVLGHALYMRAIHGGKAKNDRIDAHKIAALLRGGMIPQAYVYPPEMRATRDLLRRRNHLMRKRSELIAHIQNTVSQYNLAPLEHRIQKRCDRQGLLAHFPDPQVQNSVALDLAMIEQYDALLPKLERHIRTCAKQHDRKSFVLLRSIHGADLIIPLVILYEIQDIGRFPRVQEFLSYCRLVKPARESAGKIQGHAGGKIGNAHLKWAFGELATTFLRANPPAQQLHERLKNKHGKGKALSVLAAKLARAVYFMLKRGQIFDPDKFFQN

SEQ ID NO: 211995 - protein, 309 aa, unidentified
MLTAEADKRKTKVVVNTAAGVQALLAWCAKHGAQPAQLHAILEPTGLYHEQAATALTQVRVSLVNPAQARDFAKALALRSKNDALDSYVLARYGQTLSPALWHPAPLHARQLRALLTRREALSKDLLRELNRKEKSQFSPSAPLVDGSIDKAIAFLREQIKQIERAIDQHIDNHPDLKQDCELLNSIPAIGPQAGNAILAVMHNRHIDSAQSLAAYLGVVPVQRQSGSSLNSCARLSKAGPSQVRATLYMAALVGTRHNPHIRALYQRLLKAGKSKKAALGAAMRKLVHLCFGVLKNRIPYQPNYAMNG

SEQ ID NO: 211996 - protein, 343 aa, unidentified
MKHYAGLDVSVEETSVCILDETGRICREVKVTSHPEDLRRILQDPIWHFERIGLEAGQLSQWLFDALADAGLPVVCIETRHAKAFLKAQVNKSDRNDARGIAQMMRVNLFRPVHLKPLTSQKRRVLLTARKLLQEKAIAIENDIRGLLLNFGLKVGVVGAAKFEERIHELIRDMPDLAEIVERLLDARRRLREHFAALHRKLLDLARGDAVCRRLMTIPGVGPVVSLAFVATIDTPARFRKSKAVGPVLGLTPVRSQSGNTDRVGRISLCGDGMMRTLLFEAAQTMLRQTTRWSWLKAWAMRVAQRRGSRKAVVALARRLAVIMHRMWCDGTEFRWTREAPVA

SEQ ID NO: 211997 - protein, 351 aa, unidentified
MENPTTIAVDLSKNVFEIAVEREGRIWQRKRLNRRQMVEFFSQCEGATVVMEACGSSHYWGRKLKSLGHDVRLLPPQHVKPYVLGNKTDRRDAEAILSARHRESIVPVPVKSIEQQTVVFLHRLRAAWMKTRTSRLNLLRGILRELGVTIPEGASRVLPAVSAALSDPSAPVPEVLHPELMSAMAEVRELDERIEGVKRQLEAVAGTVPMVERLETIPGVGLLNATALAAMVGDFSRFGTGRRFASSLGLTPKEHSSGGRRRLGAISKRGDTYLRTLLIGGARSVLLSAHRTKRPHRLHEWALDVERRRGRNRAAVAVANKLARIIWAVSTRGVPFKPQFDIQNAPKTVPA

SEQ ID NO: 211998 - protein, 348 aa, unidentified
MRNQPKGAEVYGVDIGKTRFDVVGLDAAGTVIERLKFRRETLLAFFAGAPAATVGMEACPGSQWLARQLQALGHRVRIIPAQFVKPYVKSNKNDVRDAEAIAEATTRPTMRFVEVKTPDQADAQALHRIRERMVKSRTAVINQMRGLCLEHGVALRQGAGVFKIDLPRAIADEGNDLTPRMRRLLAELFDDLLALERRIAVVTREIEAMAQTDERARPLQTIPGLGPMGATALLAAVGDGRQFRRARDLAVWLGLVPRQHSTGGKTVLLGISKRGNGYLRRLIIHGARSCVLHLDRSRDRLGSWIERLQARMHVNKVTVALANKIARIAWVILTRLGALYQRTDPTIA

SEQ ID NO: 211999 - protein, 339 aa, unidentified
MNLLKQNVGVDISKDSFVATFAIMLQGQIIENKRTRNFRNTTKGIAEFIEWVNKLKNPALDLHVTMEATGVYYEELAYTLCELDNIIVHVLLPNIAKKYFESLNVKIKTDKVDSKILGQMGLERFLKPWVLSSKIYRNLRTLSREKGQLVKESTMVKNQLHAETHTAEPLKRTITRFKNRIKYLAKQIKSIEQDIDKVLASDNFVSDKVKKIETVPGISTATIVGIIAETGGFVNIKSIKQLTSYSGYDVSIQESGKWKGKSSISKKGNSHIRRLMHMPTLSSIRSSKNHKSTYNRIIENKEYKMIGVVAMQRKLLGLIYTLWKNDSEYIEDYQKNKTA

SEQ ID NO: 212000 - protein, 489 aa, unidentified
MSKDKGPVAKTRSPTKKSVRKRRPPSQPTSMTVINPNAAGIDVHSDMHMVCVPTDRVASQEESKAGGLPANVRRFGANSCDLHTIADWLEECGVTTVAMESTGVYWIPLFELLESRGFEVWLVEPGQLSRCGARPKTDVLDVQWIQRLHSYGLLRRSFRPPDSIMAVRGYHRQRQMQIRYAASHTQHMQKALEQMNVKLTEVVSDITGLTGRRIIAAILAGQRDPAKLAALRDRNCKNDAAVIAKALEGTWRPEHLFALRQAYELYQFHHQQIAQCDAMIEAELAKLPRRSGNKSFVPQPPRCGRKPNDLTFDACGPLFEALGVDLTQIEGINVGTALVILAEIGVDVSDFPTEKHFASWLGVCPRQHESNQTKRKRSPRKGKNRVAIALRMAAQALGRTMSPLGIFYRRIKSRIGGKGAVTAAAHKLACLVYRMLKYGTEYVKQSMEEYEQKIRKQMERALKRKAAALGYQLIPNPPRTRPASVTASS

SEQ ID NO: 212001 - protein, 358 aa, unidentified
MQRNEISFKGQKIFIGIDVHAKSWKVAIAPEVGSVKCHSQKPSAKELFDFLKKNYPDGEYRAVYESGFSGFSTYYALTEVGIDCIVIHAADVPTTQYEEVMKTDRIDAAKLARSLKAGQLRGNYVPEKQCIDDRSVVRVRRTIQKQLSGYKSRVKHLLHCHGVEMPERFSKVQTHWSMAFITWLKNDVELMSDTRMSLDLLIRQVEVIRGTLLEATQQLRKMSQTERYKRRCDLLRTIPGIGPIVSMCILTEVCDVKRFNNENEFAAYLGLVPTSHSSGEKTVHGEKTFRGNKQLGPMVVEAAWVAIGWDAGLGSKYFQYKKRMQPQEAIVRIARKLSNIIFSVLKNEKEYVPYNTGN

SEQ ID NO: 212002 - protein, 409 aa, unidentified
MGIIGLDIHRAFAEAVAWDDGKLKRLGRVDMRRPLLEAFAKKLSKEDVVIVEATGNAASVAAVIAPHVKKVVIANPKQVRIIAHAKIKTDTIDASVLAQLYASGFLPEVWIPDEPTQALRRQVTRRNQIVRQRSRLKNIIQSILHSHLIPSCPHADLCGASGRTWLFHQVLPEDERLAVERHLREFDRLGEDLKVIERDLARSALRDEGVKRLMTIPGVDMVVALAIVAAIGDVGRFEQSQKLVSYLGLNPSVRQSGPGPAYHGRITKQGRGHARGMLVEAAWAAARAPGPLRAFFLRVRARRGQHVAAVATARKLAVLIWHLLSKGESYVWARPALHARKLRDLELKAGYKAERGQRGAAHAYNIKSHRDQERRWVEQAETAYARFVAGWNPRGPKQARTGAATEGRR

SEQ ID NO: 212003 - protein, 357 aa, unidentified
MTSTEKYIGMDVHKESISIAVMNSTGKFVMECVIETKASMLLQFIDGLRGDVRVTFEEGTWAAWLYDLLKPHVSEVVVCNPRKNALLKDGSKSDRIDARKLAELLRGNQLKPVYHGEQGLRTLKELARSYLTISKDVTRVMNRLKALYRSWGIACAGTQVYAPRHRSEWLGRIREAGVRRRAEHCYQQLDVLRLLRQQIRRDLLLEGKKHQAWRLLGLIPGIGPIRAALLIALIQTPHRFRTKRQLWTYSGLGLETHDSAQYRVVEGQLQRSKKPVTLRGLNQDHNHDLKDIFKGAATRVSSSSNGPLHDFYEHLLSQGRKPTMARLTLARKIAAITLIVWKKEVRFDASYLKSQAA

SEQ ID NO: 212004 - protein, 343 aa, unidentified
MLYIGLDVHKEFCQACVIDESGRALSNERFSSTNEELDRFLDRFQDAKFVLESTGIWEFIYEGIEKRGFEAVLAHPLKVRAIAEARVKTDKVDAETLAQLLRADLIPRSWVPSKDMRDLRQLVRQRAYLARQSTSFKNRISAELLRRGVRRPPELKSSFTKKDIERMRSLDIPTVTSNLDCLERIQAQIEAMNMQLQDEFKRRPDAQLIATIPGIGFYGALLIHAEIDDINRFPDPERLAAYAGLVPTVSQSASTVHYGGISKEGSAYLRWVLTEAVHSHKYLHAGSNLAKFHSRIEKRRGKNRATIATARKLIHIIYWMLRTRQPYHSHGFNPVNKPARTSA

SEQ ID NO: 212005 - protein, 331 aa, unidentified
MKIKQTIGIDISKLTFDVRIYSNQCYRVFDNTPKGFKELLKWTVKNNPISKENTLFILEYTGIYSEEISLFFTKNNISFSLISGLEIKKSLGIARGKDDKVDATKIALYGYRLRDEITPSKLPSIAISKMKRLLTLRERLVKQRAGHKSILKEQKRIYLRKENKLLFGIQEKAIKFLTKQIKNIELEMKQIIKENQKLNQQYKLVVSVKGIGDQTALFMIVTTNGFTKFKTWRKYASYCGIAPFPNTSGTSIRGRTKVSHLANKKLKSLFDLCAKSAIQNNPEMKIYYHKRVKKGKNKMSTINIIRCKLMARAFAAVNRQTPYVNTLKFVA

SEQ ID NO: 212006 - protein, 328 aa, unidentified
MNYAGIDTSNKTLDVVVRKKGKSLDCRTFDNDYAGHMAIITYLRKHKVTRVGIEATGYYHLDLALELDDAKDIEVMIINPRASKNFARAMMQRNKTDASDANVLAFVERMDFVKWTSPVGEVLDIRACGRRLVSLGKEKTKAKNQLHAFSRTRRTPRFVIDDIHLSIQQIEAQVEKLISHALRLIKQCEFLKERYRRLTSMKGVADKTAIKLLGELGVLAMDMSAKQWVAHAGLYPRAFESGTSVKKRTYIGKVGNRYIREALYMAALSASSHDPHVRGFYLHLIEDNGLTKLQAVCAVMHTPLLAMHGMLKDNKPFDGARFYNLSGS

SEQ ID NO: 212007 - protein, 329 aa, unidentified
MGSKSRMQGKEPSQQSAKARVYIGIDVCKARLDVYIYPLDKRLVVANDAAGLKQLKKAVAKFDVALVVMEATGKFHRLAHRNLHDSGFKVAIVNPLRSRKFAEAIGTLAKTDRVDARMLAIMGESLTPDAVAPPPEVIEDLQELARGREGFVDDRTAVVNKIGASKSAVLIAELKRQLRALDNAIANLEAEIERQIDADPVLARRFEILTSIPGIGHVAATALIAGMNEIGQLSSKEVTMIVGLAPIACDSGQHAGKREIKGGRKHVRTALYMPANCAAQHNPDIKTFYDRLISRGKLPKVAITAAMRKLVILANTLVRENRLWEPRHA

SEQ ID NO: 212008 - protein, 339 aa, unidentified
MSLVLRSFLPFPDSCKGTSPHQQGRGTKMVERFGGIDVSMDRLDVMVMPDRSGFSVKTNAAGWAELIERLRCSSLTAIGIEPSGGYERGIVRALLAAGLSVRRINPNKLRQFARARGVLAKNDRLDARLIAEYVAIMPTRIVQSDPAAQRLAEVVIMRRQLCDEHVMVENQATHVEDAMLRRLNKRRLARLEADIRLLDKRLAEIVAADPALAHRYQLLISMPGVGPVLAFTLIALLPELGQMSRKQIAALVGLAPYDFDSGKLRGHRSIYGGRMPVRNVLYMAALSACRYNPALKTFHRRLAAADKRSKVVIVAVMRKMLTTLNAMVRDQATWQARAA

SEQ ID NO: 212009 - protein, 385 aa, unidentified
MQKCNDLSRSLTPLDPDGTLIAVIELSLSSWLIAGIVPGLGRQPLKKLAVDESALLKLLHRWRDEAAKAGHRIKRVAVAFEAGRDGFWLARWLSARDIEAHVIHASSVAVSREHRRAKTDRLDTELLKRSFLGWLRGERDHCKMVAIPTTKDEDAKRPNREHESLVGEQSRIVNRMKATLIRLGIRGFNPKLKKAAERLDGLRTPEGEPIPPNTLAELRRDMVRRRLISDQIRQIEDARLARLKQAPDNGPHAMVRLLARVIGVGVETADMLVQEVLSRSMRDRRAVARYAGLTGSPDESGRKRREKGLARSGNARVRRGMIQLAWRFLMFQKDSSLAQWFRARTESARGTRKTMIVALARKLLIALWRLVREGVVPDGVVLRPA

SEQ ID NO: 212010 - protein, 379 aa, unidentified
MKEHIDYLSTLFVGIDIASRIHVISALDFNQDFFIKMKPFENTKEGAGIVEKMIADVLADNHQFKYVVIGMESTGFYGVHLANYLSTSELLAPFSVRVYCLNPKEVKNYKKSFNDIGKNDGIDSFVIADFARVGRIAIKPWRGSQYLALQRLTRHRMHITECITREKTYMLNNIYLKFSEYALLRNGEHPFSNKYGATAEAILTEFTTNEDIVNSSIEELVEFINSKSKGRIADPEETAKIVQAAARNSYRLDKCLYEPLTISIASSFNCISSFEKELKAIDKAILQTVQGLNPEEYTVLNSIPGIGKVYSAGILAEIGSIKAFQNANQLAKYCGIVWNDNDSGDFESEDSRMSKAGNRYLRYYIICLLYTSPSPRDCS

SEQ ID NO: 212011 - protein, 343 aa, unidentified
MKPATHILGIDIAKDKFDVNLRGLTCSEPRLAASFANNAKGFQALQQWLAKKACCANEQLHTCMESTSTYGDALADFLHGRGHLVSMVNPRRTRNYADSRLTRTVNDTIDARLIADFGASERDSLHIWEPLAPEHRQLRDLTRARQALVDDRDRFGNMLETASGLARKTFLKQVRQLDRQIKQLEKAIKQFVALFPELQKQIELADSVPGVGFVTAAVVVAELPPIEKIPQAHQAVALFGLDPINKTSGKSVDTPARMSRMGSRRGRKALYMPALTALRCNPIIRALGQRLQAKGRTGKYVIVAAMRKLLRLIYGVIKQGKPFDPQWPIQPVASQPAQNFVSA

SEQ ID NO: 212012 - protein, 460 aa, unidentified
MTLLARLGEQLPERNYLGIDVGYKEHVAVVITLQNFAQDGSRWKRTPCCHFPSTRVGLDKLQEYLDGFSIDRETFFGICEPTGGFYGATMFQYLLDQGYRMWLIENAITRHMREKIMGHIPKTDEIEARVMARIGYLHEAVGEEFTLRPLILAKSEDADLLALCRDSWRLKTMISRARNQLSQLMAVVFPELKTFFTGSVTSIAPVRLIAAYPTPAELAAASAEDVRSVLWEAGAYRHAKRVDELQALAQNSSGLLPDPQRAWRLGWVTDFLLANFKANAALDKQIEMLVTQRKEYPWIVDVPYTGPATLGLILAATGDVNRFRNYRQYVAYTGYFAGLETSQTIDRTRMSKRGNRDLKRALFQIAAPLVWFDRGENPYKALFERKEAEGRPWYRAMPNVCAALARHIYHCLKFQEPYDVEKAFGEPASSHVFEEAIDDLRADLEDSFEVMEAHLIQEVE

SEQ ID NO: 212013 - protein, 341 aa, unidentified
MNVTTIGIDLAKTVFSIHGTDQHGKVVVRKRLNRPKLLSFFAQLPPCLIGMEACSGAHYWARELTKLGHDARIIAPRFVAPYRKSSKNDDNDAEAICEAVGRPNMRFVPIKTEDQQATLCLHRIRRGLTKERTAQINQIRGLLAEFGLIIPQGRYAARRRVPEILEDAENGLPMLARRLLNNINQRILQLDEEILAYDREIEAMARRDELAKRLMAIPGIGPQTATALLASAPDPRQFKSGRHFAAWLGLVPRQYSTGGKVRLGRITKRGDKYLRTLLIHGTRAVIAKLPDKQDRLSGWAKELVERRGYKRAAVALAAKNARIIWALLMNQTEFKTQPLEG

SEQ ID NO: 212014 - protein, 353 aa, unidentified
MPKELKYAVGLDIAKDQFDACLAVIDENQKITVKSTKSGIANSSKGFDGLLEWTKKHLRDEVPLVFCMEATGIYYEQLAWFLHQQGQIISVLVPNKTRNYLKSLGIRTKNDKTDARGLATMACQQDLKPWHPLSNEIYELRQLTRYYEQLQNTRTMLRNQLQTMLCGRLENKDVAAGLKELLSSVETQIESTAGLIEKTVRKDPVLCRKIEDINSIKGLGLISIATVIAETDGFALFENIAQLVSYCGYDVTQNQSGKREGKTKISKMGNSRIRRILFLPAFSVVRYDIAPFNSLFNRVYDRTKIKMKAYVAVQRKLLILIYTLWRKNERFNYPLYPERGLGCSLSGKTPMHA

SEQ ID NO: 212015 - protein, 412 aa, unidentified
MNAVGIDVSKGKSMVAVLRPLGVVVAKPFKVDHTAAGLGKLADFLKSLDGETKVIMEHTGRYYEPVAQVIHDRGVFVSAVNPLLIREYGGNSLRRVKTDKADAKKIARYGLDNWTELREHTPMDTTRYELKTLNRQFHLADKNKTACSNNLIALLDQSFPGVRGWFSSPVRKDGSRKWIDFAMSFWHVDCVRSVSRAAFTERYRKWCKRNHYNFSTTKVEQIYSEAKEMIALIPKSATSKLLIQEAASQLLNVSHTVEVLRAEMNRLATQLPEYLAVMGMYGVGESLGPQLMAEIGDIRRFAGKQSLVAFAGVDPMPNQSGMKDSRSNRSSKRGSPYLRKSLFNLMSILLRLAPADVPVYQFLDRKRAEGKPFYVYMTAGANKFLRIYYGKVRDHLAAIETATQDTASANPQ

SEQ ID NO: 212016 - protein, 422 aa, unidentified
MKGLGTKRVRTVKESALIATVDVGATTNTGYCTCLDGRDVKVFKFGNTREGFEKFWHMVVAAQNRFECTEVTVGYESTGPYAEPLVHYLIDKPVNIVQVNPLHTKRLKEVNDNSPGKTDDKDPRVIADIIKLGRALSVVVPEGDAAYLRRLNNARERHVGERIALLNQMQQLVFLIFPEFKAVIARMAGKTVRLILKKYTTPEKIGSMDTLVLGEEMRKRSWGKLGMKDAELLISAAQHTVGIKEGVAGIVLDIQHIIAQLEVVERFIAEIESEMALILERIPCSARLLSIKGLGVISVAGLIGEVGDFSKFRTQSEIMKLAGLDLYEVSSGKRKGEKRITKRGRSLMRKILYFAAIQMIGKHGIMHEYYERLTGRGTVKMRALVAVMRKLLGIIHAILRDDRDYVGEYCAPPKRRLIKRAA

SEQ ID NO: 212017 - protein, 339 aa, unidentified
MKHTVVGVDSAKRVFQLYWVERETGEIVNIPLKREKFLEHFANRAPCLIGMEASGGSQHWARQLQALGHKVKLLPGRRVKPFVGGNKNDAADARAVWTAVQQPGMKSVAVKSEAQQAVLALHRMRQQLVKFRTAQINGLRGLLAEYGEVMPQGRTGVTKVISKALQRLADRLPAVLIDTLREQFERIGQLDEQVAKIERRLRQWHKEDKASQRIGAIPGVGLLTATAAVATMGDAKAFKSGREFAAWLGLVPRQSGTGGRVKLLGISKRGDTYLRTLLIHGARSVLAHSKEPPQWVTNLAKRRPQNVVVVALANKMARTIWALLAHDRAYQKGFVSQPA

SEQ ID NO: 212018 - protein, 341 aa, unidentified
MSDYSYFCGIDLAKNHFSLHAVDQNGKVILHKSVTRSKLLTTIANMPLMRIGVEACGGAHYWARTLNKLGHDARIMAVKYVVPHRTKGKNDLNDAVAICEAVQRPSTRFVPIKSPEQQAILSVHRIREHWVRERTALMNRMRALLSEFGLIIPVGRSSLLKQVPLMLEDAENALPHLARTVIADAYHHLGELNQRIADTEQVFDSFAKVSANVQRVMKVRGIGPQTATAILASIGNGSQFDKSRDFSAWLGLVPKQYSTGGKPRLGRITKRGDKYLRTLLVHGARAVIANLGDKQDKLSQWCRGVLERRGMNRAIVALAAKNARIIWSLLHNQTEYENYAA

SEQ ID NO: 212019 - protein, 326 aa, unidentified
MNLSVVLGIDIAKLKFDVCLIKENGKAKHKIFANTKHGFEQLVIWLNSHTVSNLHACLEATGSYGEALALYLFDAGYRVSVVNPAQVKAFAASRLTRTKTDKVDAELIARFCLLQQPSAWQPPAPAVRGLQALVRRLESLIEMRVAEDNRLSSGISTDSVRLSLEAHIAYLAAEIKHTERLIRGHIDNHPDLKEQSDLLDSIPGIARTTAERLLAEITDFKQYQSARQVAAYAGLVPRERRSGSSVRGRTCLSKIGNARLRKALYFPAMTALRCSSFFQAWASGMRERGKSKMAVIGAAMRKLIHLAYGVLKTGKPFDPNWTTKTA

SEQ ID NO: 212020 - protein, 371 aa, unidentified
MHDTIFVGMDVHKATISVAVAGGARGGEVRHLGNFLNRADHVGKLVERLSKTGLQPLRFCYEAGPCGYGLHRQIIDLGHECVVVAPSLIPMKAGDRIKTDRRDAVMLAKLHRAGELTAVWVPDAAHEAMRDLVRARATAVRVLGKARQHLQGFLLRHGRVYAGKKGWTLPYRRWLTTVRFDHPAQQVVLQDYIHSVHDAEERTARLTKQIEDLVPTWSMAPIVEAFQAMRGVAFVAAVTVVAEVGDFTRFDNPRQVMAYLGLTPSEHSSGTAIRRGGITKAGNALARRVLIEGAWTYRMQARVSRKLHDRLEGLPQIVRDLAWKAQVRLCARYRRLAATGKPKVVVTTAIAREMVGFLWAIARQTQIGSVA

SEQ ID NO: 212021 - protein, 323 aa, unidentified
MGAVVNQIQSSCVSPLFVGIDVGGEFLDVAFHDSNEYFRVANSPDGIASLLDKLRPIKPQLIVLEATGKLERAVLEACCQAGLPAVAVNSKRVRDFARSTGKQAKTDRIDARVIAHYAAVIKPEVRPLSDEQTQELQALILRRTQLIDMLTGEQHRRKRAHKSSWPSIDELIQFLKQRIKDTDRDIDVFLHANELWCKSETLLRSMPGVGRTTAAALIAFLPELGKLDRREIASLVGLAPFNVDSGKQKGQRHIMGGRCTVRRALYMACVAAQRANPDIKAFCDRLRANGKKTKVAFIAGMRKLLTQLNAMMRDETPWSPPKI

SEQ ID NO: 212022 - protein, 391 aa, unidentified
MIYIGIDVAKDKHDCFITNSDSEVLFKAFTIFNNLDGFNDLYQKIESVMDDVTKVKVGLEATGHYSYNLLGYLIDKGLPTYVINPLHTNLYRKSLSLRQTKTDKVDARTIASMLMSDVNLKSYSDTSYHNEELKSLTRYRFDKVKERAKLKTSVSRLVCILFPELEKLVPTLHMASVYALLSEFPSAKHVATAHLTRLTNLLSKSSKGRYGKDTAITFRDSARASIGSNMPAKSLELKHTIKLIQELDSEIDEIEKEIKIIMDEINSPILSIPGINYRMGAMIIAEIGDFNRFDSPDKILAYAGFSPSTYQSGQLDGAYAHMEKRGSRYLRYALYNATKYVCHWNPTFAAYLAKKRAEGKHYNVAISHAVKKLVRVIYHLEKTKQQYIKAA

SEQ ID NO: 212023 - protein, 280 aa, unidentified
MTTPVYILGIDLSTTRLDCATLPDERSFHVPNSPAGFRTLVEHLSERRAQGLEVLAAVEATGGYERALFEALLAAGLPVAVVNPKRVRAYARGIGILAKTDRLDARVIARYAREVRPRPAAPVSPERRDLDDLLSYRTQLVGEIAARTQQKRLYTSAAAIGRADAALVRLRQEKRELDREIARMLEEAEALKQTAAVLLSVSGVGPVVGATLLAYLPELGRLGEKEIACLAGLAPVADDSGKRRGKRHIAEGRAKVRHALYMAVVAALKNNAPCAACTSA

SEQ ID NO: 212024 - protein, 406 aa, unidentified
MQGPVITVDVSKGSCHYQPYVSNGHPMRKPKVLHDTVEGFQSLSDLIDTMKDRYECETIPVIFEATGVYHHCLQKYLDDHQIPYYIISPLMSASYRKTTPNSNKTDDLDCSHIAKAYYGECNLFPYDKPSKSFHNLRELNRYYECELNHLRMRKNTFRKYLDIVYSRLDKCFKGHSSLYDEIPMEVIKQYPHPSLLLKHKEETIVKKIEKKTSHNALFIQNIVHEMYECSMHCYSGADVTDVESMILPELVDDLQSQKERCDEILKQLVSEAQKTPYFTSIVSIVGIGDNLAARIIAELGDMSRFSCRRAITAYAGLNPKIRQSGDMDGIHLAISKKGNKHLRCLMYLAVSCNYRLKKGDVLYEFNQKKRQQSFSLLKPKAATIAIAHKLLLIICALCTNGTVYRS

SEQ ID NO: 212025 - protein, 431 aa, unidentified
MKKSSQAQPVLPRGRAVVGIDIGKGKHAATALSPQGEIIAQLASFPNTRQGVDRLEEEILRKAGGPRKVLVGMEATGHYWMCPCHELMRRGYTCVVFNPLQTNARSRARVRKTRNDKIDSKTIARLVLAGEAKPTRLPDRKITELRLLVRHRHRLLQAAGDMERYAHTLVDRIFPEYAGVFCRPFLPSAQKLIRQIGIAPEKLVKNAEQVRELLRVAGRKMITDEKIERLLQAAQESIGIREAEDVIEAQLRAIFDYLDTVRQQIVAIDKQLDERARELDSPLYSLGITSPMVAAIHAESDPISDFATPDQYVAYTGLDPSRHDSGDTIQWRGKISKRGSPLLRCTLYLTAFVVCRRHDYFARIYRKHRAKGKKHTNALVIVARRLARVIWRLLTDDRGFSKRAPKPVSPLDKPRTSAKSTQPRRAIKAGV

SEQ ID NO: 212026 - protein, 341 aa, unidentified
MMIATTKFFIGIDVSKPHFDVAVMAVLDHVKQEIRTARFDNTAPGIKLFEKWLKSQKTTFNADSLVVMENTGIYHGLIWSFCSRRNLPIHIGNAAHIKWSFGIARGKNDKIDSIRLCNYAFKEADELKATAALDPELMLLKDLVSARTKLLRQRAGISVSMKELGNVNGKAYQKVVEKALKSAINGIARSIRDVEDQIKKIIMGNRDFKRNYKLLISIPGMGHVTAVYLIGCTGNFSGRPSGKELACYAGVAPFEQTSGISIKGKPKVHRMANKELKRLLHMCALSLIQHNQEFKVYYNRKKDEGKHSMSIINAVRNKIALRVAAVIKNQTSYKNNYNIAA

SEQ ID NO: 212027 - protein, 376 aa, unidentified
MSKVLFVGLDVHAETIAVAVAETGGEVRSLGVIPNRLESVRKMVHKLGAVQHLRACYEAGPTGYVLYWQLTQLGVACEVIAPSLVPTKAGDRVKTDRRDAEKLARCYRAGELTAVWVPDASHEALRDLVRAREAAKKDQLKARHRLGKFLLRHGRRPEGLKAWTKQYVEWIKSHVHFEQPALEATLADYLEEVDHVAARIAKLEKAIDEAVRQAPPEIRAVIEALQALRGVAQTTAATIVSELGSLSRFQSPRQLMGYSGLVASEHSSGNRVQRGGITKTGNGHLRRVLVEAAWAYQHRPNVTGFLLRRQKNLDISEEAKKIAWKAQQRLHKRYQALAARGKNKNQIVTALGRELLGFIWAIAIETEKQYKLAKAA

SEQ ID NO: 212028 - protein, 401 aa, unidentified
MAFHGGLDWGGTSHAVCVVDQAGQVVLRVEVRHDAAGLSDMLARLKRVAAPAELPIAIERPSGLIVESLVAAGHPVIPIHPNVVKACRPRYRAAGGKSDPGDAYMLADILRTDGHRFRPLMPASDDIKALRALVRGRDDLVAQRVALANQLRSLLESFWPGAAAIFAAIDSPIALAFIGRYPTPESASRLGEKRLASFMAQHAYCGRRSPAELLGRLRAAPTGLASEAEAEAKGELVRALVAVLERLVQEIAKLSSRIEHAVAELPDGKIVMSFPRAGRINAAQILAELGDVRDRFPTEDQLAAEAGVCPVTHASGKSRGVVFRWACNKNLRLAITCFADNSRHASAWAAAIYNKAKARGCKHPHAVRILARAWVRVLWRAWTDRKPYDLQNHAAAAKIAA

SEQ ID NO: 212029 - protein, 310 aa, unidentified
MEPIFVGIDVSKDRLDVHVRPGGEAFVVTRDGKGLEELVGRLQELGPTLVAVEATGGFETIVAAAVAGAALPLAVVDPAQIRHFAQAVGKRAKTDPIDAGVIAHFVEAVRPVPRALPDEASRLLAELVGRRRQIIEMMVAERQREKRAANVRVRKSLARHIAMLERELGAIDQDINTLVRGSPVWRVKEDLLASVPSIGKTLARTLLAELPELGSLDRRNIASLAGLAPYARQSGRWRGRSMIGGGRAAVRSATFMAALVASRCNPPLKDFYQRLVSVGKPKMVALIAVARKLLTILNAILRDNRPWQSA

SEQ ID NO: 212030 - protein, 344 aa, unidentified
MDKLTVVGLDLAKSVFQVHVANAQGKKVLTKRLKRSEVLAWFAALPPSLVGMESCGGAHEWARQLQELGHQIKLMAPQHVKPYVQGNKTDARDAAAICEAASRECVPAVALRSRDSQQMQVMHRARENWIKQRTAIANQLRGHLAEFGHVMPAGIHHIRVGCREWQAREGQKFGILNQIIDALLEQFAELEERVKKVEQQLLQIHRNDPACKLIESIPGIGMLTATGVISHFGRCDMFGSARKFACALGLTPREHSSGGKQVLMGISKRGNGYLRKLLVHGARAVLSARMNKPQYAQDWVVKLAQRRGMNIAVCALAAKNARRIWAMLQSGEVFRADYAERTTA

SEQ ID NO: 212031 - protein, 361 aa, unidentified
MSSIVYGGLDVHQEEIVVYLLCTETGEVLEDCVPNDRLPLERAVRRWQKRGELRLCYEASSAGYVIQRWLDKLKVHCEVIAPSRIPRPQGPRIKTNRRDARQLATLYGAGLLTAVRVPSEAEEQVRSLLRLHAAVTQDMTRVKNRIHKFLELQGLYYRQGHPWTKKHYAWLAALSLEPLPALILGTHLQTLESLQERRQEVDRQIIEVAHSPTYALPVARLMCLRGLALYSALMLVCEVGDVRRFATAPQLMSYWGLVCSEHSSGEHRRQGHITKTGSSWARWVLSEAAWQQRCRPAQGAAVHQRRQGQPAEVVAIAEKAEERLHRKFWRIAARKDSKTAAMAVARELAGFVWALLSLEAH

SEQ ID NO: 212032 - protein, 293 aa, unidentified
MEYIALDAHKHYTTVSVEGPTGEALRETRLAHHRGAIRTFLEEWTRGSPVAVETVGNWYWLVDEIEAAGMVPHLVHARKAKLMSGMINKTDKLDARGLNRLQRTGTLPTVWIPPAEIRDQRDLPRTRMVLVSTRTRLRNRVHATLAKYGLTVTGVSDLFGIEGHKLLADKVCELPPHTRYATHQLLEHLDLLDEQVADLEERIRDVFTTTPAFEGLRTMPGVGFTLGVVILTEVGDVRRFPDAEHLATYAGTTPRIHSSGGKTRFGYSNQGGVLSGTDTQDRRVHAGVSAGSA

SEQ ID NO: 212033 - protein, 350 aa, unidentified
MPKAPLQHVATLGIDIGKNSFHLIGLDARGAVALRQKLSRGQVEARLANMPACLIGMEACVGAHHLSRQLLALGHDVKLIPAQFVIPFRKSHKNDFRDAEAIAEAVLRPTMRFVPTKSVEQLDLQALHRVRSRLVGQRTAVINQIRAFLLERGIAVRQRLRSLRQALPDILAQRSDVLTPRMTHMIEGLMQDWQHLDERIDAVTSEIEALVAADEACQRLMSVPGVGPIIASAMVATIGNGAAFQRGRDFGAWLGLVPRQISTGDRTVLGRLTKRGNSYLRSLLIQAARVLLLWPAKWRQHSFGNWLTAASTRLHHNVLAAALANKLARIAWSVLSQNRVYEPRTAAVVG

SEQ ID NO: 212034 - protein, 389 aa, unidentified
MKIFVGIDIAKLNHFAAAISSDGEIILEPFKFTNDADGFQLLISKLESFDKNSIIIGLESTAHYGDNLVRYLVTELYQVCVLNPIKTCQMRKNNIRKTKTDKVDTYVIAKTLMMQDNLRFISFFDLDMMDLKALGRFRQKTIKQRTRLKIQLTTYVDQVFPEIQYFFKSGLHQKAVYALLKEAPSPKEVASMHMTHLANLLKVNSHGHFTKEQAKELRVLAQKSVGANDSAISIQITQTIQQIELLDSQLEKIEAEMTEIMKFNDSVIKTIPGIGYINGGMILGEIGDIHRFSNPNKLLAFAGLDPSVYQSGNFHAKTTRMSKRGSRVLRYALVNAAWNVVRNNATFKAYYDAKRAEGRTHYNALGHCAGKLVRVIWKMLTDNVEFNLE

SEQ ID NO: 212035 - protein, 355 aa, unidentified
MKKIVKQVLGIDVAKKELVVCLGRMYDDWSPELYAHKTFANTAKGFVALLLWLKKMTDETIPVRFVMEATGVYHESLAYFLEEKGYELSIILPNKISNYFRTLDVKTITDKTASEAIALFGLERKLDRWQKPKAIFKNLKQLTRERDQIVEERTMVKNQLHAEQTEAEPNKKSIQRIKERIKMLNQQEKEIKMEVAALIKQDEQLAEYIKIICSLTGVGLLTAAIVLGETNGFELIRNKRQLASYAGFDIKEKQSGTSVKGKPRISKKGNRHLRKAMHMPALCAIRYDERFKAIFARLVSRHGIKMKAAVAVQRKMLELIYTLYKTGNKYDKNYLKKNDSMIELHEMRYKKEKQS

SEQ ID NO: 212036 - protein, 345 aa, unidentified
MKITTVGIDLAKSVFQVHGVSERGRAVLRKQLKRSEMLKFFTNLPPCLIGMEACGSAHHWARRLLEQGHEVRLMAPQFVKAYVKTHKNDRNDAEAICEAVARPNMRFVPVKTPEQQAALALHRARAGMMKARNAQANQIRGLLGEFGIVLPQGIGQLRRRLPEIVEDSENGLPGLMRTLLRRLLAQLQALDQQVSELEREIVLWHRQNEDSRRLERIGGIGPLTASAYVTSLGNAKGFHNGRQVAAWLGIVPRQDSSGGKPKLLGISKHGDVYLRTLLIHGARSLLRHLEHRPQQADSWLKRLMLRRGKNIAAVALANKNARIAWALLAHQREFKPDYVSTVPSR

SEQ ID NO: 212037 - protein, 426 aa, unidentified
MVLEVVVVVYAGIDVSKGWLDLALLAPGGQEGEAGKGGAKEQHSLKKESKKNGAIEHYRFSNDATGRESLVKLLLMKRPRQVVLEASGVYHLPLLTLLLEANVAAFLANPYQVAAFRRAWGARNKTDSQDAVLLARFAKAYGGRLERRLPPPAKPAYLKRLLVYREQLIKRETMIKGSIEATSWMAEAAGWTAGEAGNRERDTERDWKTKRNGEAEQDGAAKQIRSWLKEDLLRVRERLTEVAQEIDRLLSLFPEAAVLQKQKGVGPQVAAAVLAFLPPALWDSPRRAASFSGLIPEQQHSGSSLHRSRLSKKGPALLRKKLYLAALVAVKHDPEMKAFYLRLLSRGKKRKQALLAVAHKLLRRLTGRLRAYYRGQQQCREADQGQNQKTGRKQSLKQRHNQSDERSHEDRQNHRLAAKQSSGYWR

SEQ ID NO: 212038 - protein, 355 aa, unidentified
MSQELKQETGQQQQEEQSKKRIWQWFGVDVSKDSFTVAFYDGLSDDTSEVLKFDSTPKGVKSFLSWREKHASEIVPSGIVMESTGYYSARLATLMRKLDSSLRVSICNARSVSYYIKSHSANKTDPSDAKLIARYGYDFQPPKLKVRSPVEKLLKEVVSERGKLVKIVTMLTNKAKSLEFSEIREINESAISHLKGKIKVLDKRIIEVSKQSEEMNAEIELMDTVPGVARLSAAVIYGTLGSLKQYTRLQLSALSGLYPKISQSGSSPVKSKLSKNGPSYLRQILYMDATKAMAKIPSLRNLRERLLARENSRKMTARCACMRKLLLIIKGVVDSGVPYDPNFQQKKQEISVKTA

SEQ ID NO: 212039 - protein, 357 aa, unidentified
MFIRSEELSKILIIMVMIMLYLGIDIGKNTHVASLVDEKGKILFKAFSFSNTSTSAEGLIRRLNDFISATSEVEIGMEATGHYWLSIYSFLALKGFVIHVVNPIQTDGWRKGVEIRKRKTDVIDSVLIAELIRYGDFIETSLADEDTMSLRNLSRFRNYLVSSIGDLKRKTICVLDQVFPEYQSVFSNIFGQTSKEILLHLSNPEDFENISSDQLQQVLSKITFKKFATNKINEISTLAKESFGIKFALDSFGLQLKLLIEQINFIEHQVQDVEEQISTLLDKINSPITTIPGIGNVTAATILGEIGDISRFSSPSKLVAYAGIDASVSQSGEYCSSNNKMSKRDLLTLEKPYLVLL

SEQ ID NO: 212040 - protein, 341 aa, unidentified
MKYRLISIDLAKNVFQIAVFDRQNRPISNCQVRRNRLLDTLRQYAPTTVVMEACYSSNYWGRAIEKLGHTVKLVPARMVKAMLVGNKNDANDAIAIAEASQRPKIHFVAVKTIEQQDIQSLQRIRSQFVKQRTATVNQLRGLLAEYGVVTEPSSACLIGAIPTILEDPNNELSHVTRSFVLKLWEHYKQLSEEIDALTQQLISCARKHNDYELLSSIPGVGPLVASGIIGSINSVGEFKNGRQLSAWLGLTPSQYSSGDKNYLGKITKRGNRDLRKLLIQGARAVINWCERKSDPLSLWLQTLKPKMHVCKLVVALANKLARIIWAVLVKRAPYNPHLACA

SEQ ID NO: 212041 - protein, 469 aa, unidentified
MRTKKGSTTKNKCQGSSHKYHRALDMINPSAGFIDIGSGEHWVCIPEDCCTKNVRRYAAFTSQLYEIRQWLLEHEITTVAMESTGVYWIPLYQVLEEANIEVCLVNARDLKSVKGRPKTDKLDCQWGQRLHSFGLLKASFRPPGQICEMRSIWRIRKQLVQEMSRTIQRMQKSLHEMNILLPKVISDITGKTGMSIIEAIIKGERDPVRLAKLRDPRVHASSDEIAEALCGDYRSEHIFLLTKAVEHNRFIQGQLSEYDEAIKERLEKIGKVKKVSNCDKIKNEKEHKKYKRRYPNAPLFDSRTLAHEILGIDLGCVPGLSSVTLLGLILEIGPDLTKWPDAAHFASWLGLCPNPRKSAGKDLGTHTKKCCNRAAGYFRMGGASLKQSQCYLGDFYRRMQARHGRGHAITATAHKLAVLFYKLVKDGEQYKEVNRSEYQKAMAKMRIESLTKRAHLLGFELTPIKEKAS

SEQ ID NO: 212042 - protein, 417 aa, unidentified
MQYAPVRLADLPVSGVMCGIDWARDDHAVAIIDRDAQVRYRGVAEHSARGLKDLIAILARHGVAEVAIERADGPLVEALLAAGLTVVVIHPHRIKSLRCRYGSAGNKDDRFDAFVLADTLRTDRARLRPLAPESPQTTALRTLCRARRDLVAHRVAVANQLRAHLDRVYPGPVGLFDALDSPISLTFLTRFDCQDRADWLSPTRLGAWLASVGYKGHTDPAVLYRRLTARPRGLSAAQGAAYTPITAALVATLKTLVPQIAELSSQISRALAAHPDAPIFTSLPRSGTVRAARLLAEIGDCRGRFPTADALACLAGVAPSTRQSGKMRSVGFRWACNRELRDALCDFANDSRHANPWAADLYNRARARGHDHPHATRTPSRAWIHVIWQCWQTNTPYNPSQHRALQTLLTPSEQAAS

SEQ ID NO: 212043 - protein, 367 aa, unidentified
MKKISTVGTRQIGKFQGQKLTIGLDLGDRSSWYCLLDEVWEVRLEQKVATTPKAMREVFGAMPRCRIALETGMHSPWVSRLLSELGHEVIVAHARNVRLIGESRKKDDRMDARTLARLARIDPQLLSPVKHRSAKAQADLTLIRARAGLVRARTALVNTARGLAKSYGERLRGCNVRNMNPEKAEGLSPELQRALQPLLAAIESLSECIREYNEGIEKLAQESYPQVAVLKQVKGVGTLIALTFLLTLEDAHRFRKSRDVGCYLGLQPGRRNSGQSEPQMHISKEGDPYLRTLLVQGAQHILGPFGADSDLRRWGLKLAERGGKSGKKRAIIATARKLAVLLHRLWVSGEVYEPLRNSQPAAMPAAA

SEQ ID NO: 212044 - protein, 367 aa, unidentified
MRDDITYVGMDVHKRQTKVAMVRADGKDVVEWSCATETKRLVRRLKKEAEGELLCCYEAGPCGYWVQRELAKSGIRCIVVAPSLIPRKPGERIKTDRRDALKLARLLRVGELTEVHPPSRQDEAARDLCRAREDAKGDLKRSRHRLQKYLDRRGVLWGKGSWTLAHRAWLRTVKFPEAVEQAVFDDYLATVEWNEERVKGLQERLEALSEQAPYAEPVSLLRCFRGIDTVSAMTLVTELHGFMRFESPRALMNYLGMVPSEDSTGERRRQGSITKTGNGHVRRILVEAAWHYRHRPYVSRALRARRAGQPGHVVALADRAQQRLHRRYWRLVSRGKATNKAVVAVGRELIGFLWAVLYPQSLETQQA

SEQ ID NO: 212045 - protein, 376 aa, unidentified
MKHSSTLYVGLDVHKESIAVAYISEEKDAEVLYLGAIGTRQSDIDKLIRQLHSKSPQLVFVYEAGPCGYWLYRYLTKKGLVCWVIAPSLIPKKPGDKVKTNRRDAVQLARLMRSGDLTPVYVPEVEDEAIRDLSRAREDAIGDRKAAKYRLKAFLLRQDIRYEGKASWGPAHLRWLAEVVCPTPAQQIVFQEYVRAVNEHHERVERIETELQEKAKGWRFYPVVEALQALRGVQFTVALSIVAELGDLSRFDSPRQLMSYLGLTPSEYSTGNTRRLGGITKAGNAHARRTIIEGAWAYRYNAKVSRPMQHRQETLPQAIRDIAWKAQVRLCKRYRRLVAKGKHPNVVVVAIARELAAFMWAIARQVPLAAHPATTR

SEQ ID NO: 212046 - protein, 377 aa, unidentified
MKHDSTLLYVGLDVHKDSITAAYALGTGEAELLGKIGTTKADIDRLCKRLQSKARHIRVVYEAGPCGYGLYRQLVQKGFDCMVCAPSLIPKKPGERVKTDRRDALKLVRSLRAGDLSAVYVPTVEDEAFRDLSRAWVTTKDDLKRARQRLKAFLLSHGVHYTGRADWGPAHRRWISQYSFDSQWQQLAFEELRRTIEDRVAQCDRLEAALRESVVNWRFYPVVLALQTMRGVQFTTAVGMLAELGDLSRFAHPRQLMAWLGVTPSEHSSGEKRRLGSITKNGNSYARKLLVEAAWSYQHPARVSPEIQRRHEGIPKPIVDRAWDAQVRLCRRYRRLVARGKEKNIAVVAVARELSGFIWDISRLAMSLAVRNEARPT

SEQ ID NO: 212047 - protein, 371 aa, unidentified
MELFVGLDVSVRTTSVCVMDASGKLIRESKVESEPETIAALLHAIGGPYKRVGLEAGPLSQWLYSGLASAGFPVICVETRHMKAALSAQINKTDRNDARGIAQMMRVGLYKPVHVKTIRSQEIRMLLTARKFVQTKIIDAENNLRGLLRNFGLKVGAVTRLQFERRIVELLEQSPHLRLIVEPLLTVRRVLREQFQHLHKAMERLAESDETCTLLMTAPGVGPMVALSFRAGVDEPARFGRSRSVPAHFGLTPSRYQSGEIDRDRGISKCGDAGIRWVLVEAAGILLRISKKSSPLKTWGLAVARRRGMAKATVAVARRLAPGGHPAPDVGRQHTISLGGRGRLKPAKSSASLRGERSRPGTSGQAIPRRA

SEQ ID NO: 212048 - protein, 404 aa, unidentified
MAVHLAPVTWSTIVVAVDVGKTSAMLSAADSARQRVVGLVEFAMTRTGLVRVVHRVEAVIPPGVQVKVGIEAAGHYHRPLLDYRWPSGWEVLEFNPAHVAEQRRVAGRRRVKTDAIDLEAITELVLAGRGRLITEREEFIGELAAWASHRSRRVTTRTATKNQLLGQLDRAFPGLTRALPDVLGTKVGRLIAAEFADPARLSALGVNRLIRFAALRDIQLRRPVAERLVTAAQDALPTRDAAVARRVLATDVGLLADLDTQISAAEAELVRLVPLSRFATLTSVPGWGVVRVSNYAAALGDPGRWPGPRQIYRASGLSPMQYESAGKRRDGKISREGSVALRRALIDLGIGLWLSEPAAKAYAGQLKSRGKHGGVIGCALAHRATRIAYALVRDHASYDSSRWA

SEQ ID NO: 212049 - protein, 333 aa, unidentified
MNPMNLVGIDISDARFEAKRRCGEVMAQRQFDNTARGHGQALRWIMAGAEAARVCLEATGIYQLQLALALAKAGGIEVMVLNPRASRRFAEAQLIRAKTDKVDADGLLEYLQRMPFRPWTPPADEILELQSLAHRLAQLGKEKRREQARLHAARRAGAHTRIAQRDLRAHLRYLECRAKAIEGEAIALMKRHETLAEDLRLVDTAPGFAALSAMKVLAELKVLPQHLQAPQWVAQAGLDPQPKESGNKKGPRQISKQGNSRIAAALFYPAMSARQHDPNVKAFYESLIARGKEPMQAIVAVMRKLLHAIWGMLHHRQTWDGNKFYRLNPVKST

SEQ ID NO: 212050 - protein, 451 aa, unidentified
MTGQQVSKVKLSTQPFGDGPTMTKRSSTPADAVLVAIDMSKHRQEVLIERPEGGRRRRMTIMATKADYDRLADELSSIGRPIVVGFEATGNYHRTLAHRLLSAGFELRLISSVALARTREALHNGWDKNDSKDAQVILHMLRISATQRYVDPLAAGINDLQEMSKTHEVISKAKTQTWHRILTHYLPLYFPEIERFAGNSRSDWFLALLERFPTPTSMTALGQEDFTREAWALVGRKVSKARLINDIYETACASVALPVDEDSVAIAMFRMVIAQARSLIRQRDEIERTAHALLSENRDYQLLRMIPGIGPINALTILAEAGDLRRFAHHRQFLKFCGLDLATCQSGTFRGRTKLSKYGNARLRRTFWMATQVAIRQRDNSFRDKLGRYVAGHGNDPDRRRKAMTALTAKMARVAHAVIKTGTEYRPFVERADTRWKDPSLSCREGATATL

SEQ ID NO: 212051 - protein, 404 aa, unidentified
MLEAMVRSCAGLDVHRRQVVCTVIREGNYETREYSTFYRELKDLTSWLQREQVELAVMESTGIFWKAVYASLEEAGIQGSVVNARHVKQVPGRKTDVQDSEWLAELARCGLLRPSFIPPRDLRELRLLTRYRRKLSGILAGEKNRLHKVLDDAGIRLGCVVSDIDGVSARAMVEALIKGGSTPEQIAEQALGRLQKKKDALQLALEGEISDRHRLVLQKILGHIKWLQRQMALIDGQIVAAMKPYQEEWKLVQTIPGLDVLSAAMLLAEIGVDMSRFGSKDRLCSWAGMCPGNQESAGKRKSGRSRKANAYVRSLLCEAANSARKTQSQFQGLYKGLVIRRGHKRAIVAVGHKILQVVYILIARKEPYKDPEIDYEALVVHRNAPRWLDALAKYGYLQRLRTSV

SEQ ID NO: 212052 - protein, 405 aa, unidentified
MPYILALDVSMGHSYSVLYKDDTCLFEDEIEHTQRGFHALLEEIQHLPERPLIVFEATGIYSRPVEKFFQDHHFSYCLLNPLEAKKQMEENTLRSWKTDKSDAHRLAQTHLKNQRQPKEVQSNFYLEMRDLARFYQEIEKKVTRLRMDLHNCLQLTFPELEQFFSNRLTPYALTLIRLFPHPDFVLASTRTKIKNKLINETRKKISANRAEQKADQIIHYAQCAYPAVEKDSIHCQKTIYYAELLQDLLEQKEALATQMIKKAEGSPCFLLYQTFPGIGALTAALLLGELGDITRFKTHKQLNAFVGIDIRRYQSGKYTGQDRINKRGNPKARKIIFFTIRNMIRQQRAAPNHIVDYYYKLKKQPIPKKDKVATVACMNKLLKCMHAMVRAHTEYDYAYAVSVDH

SEQ ID NO: 212053 - protein, 345 aa, unidentified
MGVIIGVDPHKASCTAAVLDERGELVDQQRFASTRTGSRALGRWAKRWPERRWAVEGASGLGRRLAQQLVGDGEPVVDVPAKLAARVRLLSAGHGRKSDAHDAVSVAMAALGTTRLGQVRLKDHTAVLRLLSDRRDDLVRQRTRTLNRLHVLLCDLLPGGAKRSLDADTAAALLRRLRPATAPARTRRQLAVDLVADLRALDRRITAVEERLRHAVTQSATTLIELFGVGPILAAKLLGEVGDVRRFATKHRFAAHNGTAPIEASSGEVVRHRLSRAGNRKLNHALHLIAIVQIRHPTAGQAYYRRKLAEGKSRKEALRCLKRRLSDAVYRQHLADQHQPVQAQA

SEQ ID NO: 212054 - protein, 347 aa, unidentified
MSIRMIGLDTAKTVFQIHGVDEAGMAEIRRKLRRNDLIAFFEKQPACTVVMEACGAAHHWARMLTGLGHSVKLIAPEAVKPFVKKGKKNDAVDAAAICEAASRPDVKFVPAKSVEQQGILALHAARSLLVKQQTMLANAMRGLATEFGLTVPKGIHKLDELMAVVDADEIIPKRAKQAIAGLHDYCNNLREGVETFEAEIVAHARRDETARRLATIPGIGPITASLIAATVGDISLFKTARQFAAWLGLVPRQSSTGGKTRLGRITKTGNREIRKLLVLGATSMVYRADGWNSAVGAWLRSVLERRPVRLVTVALANRMARIAWAVMTREEVYRPKGGVKVVAQAAA

SEQ ID NO: 212055 - protein, 341 aa, unidentified
MNEISIIGLDLAKNVFQIHGSGSDGSVALRKKLNRGRLLEFFAQLPICVVAMEACASAHYWGREIGKFGHEIRLINPSYVKPFVKRQKNDAADAEAIAEAASRPTMRFVSVKSAEKQASSMAFKVRDLLVRQRTQTINALRGHLMEYGLIIPQGIKHIPLLHEQITTNSDLPEVARVLCKGLLEQVVFLSEQIAVLEKELRTRARQDELASRLMTIPGVGPICATAIEALAPAAETFSRGRDFAAWIGLTPKQNSSGGKDRLGKVSKMGQRDLRRLLVLGATAVVRWARRYGAPAGSWLARMLLKKPPKLVAVALANKLARTAWALMARGGVYQAPASGTV

SEQ ID NO: 212056 - protein, 457 aa, unidentified
MYRELHSLRQALREELKGTLPPLMGVESDKLLETYLNQLTLYVGLDVADKTVTLLAINANQEELGHLLDAPNTLKGYVQIGDWLESLRVQHYLRIIAVAGETTGVFYWGIWDFLAQRPNVARVLYNPRTTEHMGEVLSKRVRTELVDALLLAEQLRLGSTPEVVLTDNAELLSARLCSRAARDAAQMINRKKNQLRSLVRGYNPVIAQVFPGQKFHHPAVYVVLQQYVFPNEFVTAGVETLTTILTEHSRSAFGTQQAQKLVELCRGYLSRPIRHEIVRQRVQDLIEEITLTRKHQQAMLKAGYALIKDRPEAKVLKASTGAGISNTLALVSELCDIQRFPDGEHAASFLGLTTSKHISGTSIYHSKHITKQGSPNGRYAAVNMALHLAVRVPKYQAMYKAIKSRKPPRKGHFVALVAIARDFVTNVLYDMWRYDRPFFIKVEDYRQYRKDHPRPTS

SEQ ID NO: 212057 - protein, 355 aa, unidentified
MTMLAEVVDAVIGIDTHRDTHEAEIADAAGRPLTVLQIRNDSTGFGQLLATVAEVAPGPRIVACIEGGRSYGIGVARALTASGLLVIECEQPSRAQRRGKGKSDPIDAHLAVLAALRLDAARLPALRADGDREALRILLVARQEIKVTATAQASRLRALLLTGDDADRQAARRSLSKTALTTLTERELPADAAREHVIRQGEIGRLALALTHARQQLKHNKAQLLAIVNDLAPSLTSRYGVGPVSAAQAIVSFSHPGRCRSEAAFAALGGTSPIPASSGRTIRHRLNRGGDRALNRAIHAIAVSRIRSCPRTRAYVTRRTAEGKTPREIRRCLKRYIARELYRQLTRSMSPPVGP

SEQ ID NO: 212058 - protein, 438 aa, unidentified
MSDLDQAAVKREFAAHIGIDWADQKHFWTMRTADGKTQRGELDNTPEAVQVWAAELEQRFGGRPVAVALEQARGAVIAMLCKYAHLVLFPIHPNTLANYRKAFRPSGAKSDPRDADLALELLVSHADKLRRLEPDTVETRKLQFLTEERRRLVNQQTSETQRLIGWLKQVFPQILPWFEDPACAMVGELLLRWPTLPALQKATPKTLRTFFHRQNCRSAERIEERIAQIRQAVAATHDAALLETGILCIQNSVHVLEQMREGIARFDHQIAETYRQHPDRAIMESFPGAGPALEPRLIAAVGSRRERFESAQSVACFVGIAPVKEASGQQRWVHWRWACPKFFRQTFHEWAGCSIRTCQWAREHYDQQRDKGKGHHAAIRSVAFKWIRIFYRCWRDRVPYSEQTYLKAKAARAPKPHPAVSMQWESCGGFAKLSKLPS

SEQ ID NO: 212059 - protein, 372 aa, unidentified
MDERIKFFVGLDAHKDSTSVAACEAGREPARFVGTIGPDVQVLLKVLAKAGDPAQVNVVYEAGPTGYGLYRELCRRGYRCEIVAPSLIPRRAGDRIKNDRRDCARLAELSRSGELKPIWVPDEAHEAMRDLCRAREDAVGMRLKVRQQLKAFLLRHGRLYPGKTSWTKSHAHWVAEQRFEHLGERIALSEYQLAVQSAQERVQRLTDALEEAVNGWRFEPVVAALRALRGIDTVSATGLVAEIGDINRFATARQLMGYLGLVPSEHSSGNSVRRGSITKTGNAHARRLLTEAAWNYRFPPRLSTTLRARSTSLPEPVRNHAWKAQVRLCARFSRLSSRGVQPNKVCVAVARELAGFVWAIAHQAGSTTTPTH

SEQ ID NO: 212060 - protein, 371 aa, unidentified
MNQLSGEISKGIGAEATQDKALGRVLKLGLDVHYRQVTVAMQEDGGRIKAAGKMGLGGFLNWVRTKLEQGWRIESCYEAGASGYWLHRQLVELGVKNLVVAPKAMGGAEAKRQKTDKRDSAQLCDALERYLRGQDKALSVVAVPTVEQEQNRALIRYHRQRIKDRTRAEARGKGLLCAQGIEVGGRWWEGKGWRQLQSDPRLKDWMKEQLEDWRKKILSAQAEEKPLRKRIEALAPEMLPKGVGAYSAAVLKYEMKGWERFSNRRQVASYTGLCPGIHLSDGRGKEGSINRCGNPTVRWTLVEMVWRLKIWQPHYGPVRQLAAGLVKSKRAKKRLVVMAARRLAIDLWRLETGQTTAEKLGLIMRPRSSSK

SEQ ID NO: 212061 - protein, 415 aa, unidentified
MSQTGDVLLYVGDDWAEDHHDVELMDATGRRLAKARLSEGVEGIARLHAMIATQLGDDVDDDPSLVKIGIETDRGPWVQALIAAGYTVYPVNPLQASRYRERLALSGAKSDPGDAHMLADMVRTDSHQLRPVAGDSAEAEAVKVVTRMHKTLIWERTRAGQRLRHALREHFPAALAAFEDLDAADTLELLAKAPDPASAARLSIAQISAALKRARRRDITVKAAAIQAVLRAEHLGQPAVVTAAYAASVRALVAVLGTLNEQVKIMQGQVEAHFGRHPDAEIILSQPGLGAVLGARVLAEFGDDHDRYISAKARKNYAATSPITRASGKKRVVAARFVHNDRLIDALMTQAFTSLRNSPGARAYYDRQRARGASYNAALRQLANRLVGILHGCLKTGTPYNEATAWSHHLTAAAA

SEQ ID NO: 212062 - protein, 342 aa, unidentified
MYYIGLDVHKKTISYCVKDASGQVHQEGKVGATRRELDSWIKTLPQPRTMAMEATIFTGWIYDHLLPHAQQVKVAHPLMLRAIAAAKKKNDRIDAGKIADCLRCDFLPECHIASTQIRDRRRTLRYRHLLVRQMVQMKNRISGLLMETGVSYNKQRLHKVGYFRELLATNEDVHESIRPLLKLSRDTVVRLQKTEYALVSSLQRDPLLADRVKRLRTVPGVGPITALAWALEIGDVARFRSIRQAISYCGLCGEEKSSADKVMRTPLSKQRNKHIQRVLVEAAKLAPRQDHDLALVYETEKQKGNANRATLAVARKMVAYLLAVDREERDFVPAENYQRAAA

SEQ ID NO: 212063 - protein, 331 aa, unidentified
MKFKDTLGIDISKKWIDVCIHSTQMHEVFENSNKGIKKMIKWALKNSTYPKDQILFIFEHTGLYSELITELLFQENIHFTVVSGLEIKRSLGLVRGKDDKADAIKIALYGYRLRDEIKPSQADSSSIKSIKKLLSLRERFVKQRAGYKASLKEQKRVLKHKQDKILLDLQAKTIIFLTKQISLIEKNLQEIINQNQDLNEIFTLIISIKGVGKQTALFLIAYTAGFTKFKNARKFASYCGIAPFANQSGTSIRGRTKVSNLANKKIKSLLDMCAKTAIQSNIEMKLFYQRKVDQGKNKMTVINIVRNKLLARIFAVVKRQTPYINIKKYAA

SEQ ID NO: 212064 - protein, 334 aa, unidentified
MSNVTTCGIDLAKNVFSIHAVDGHGVVVLRKTVVRARLAALVAQLPACVIGLEACSGAHEWARRFALHGHTVKLMAPKFVAPYRKSGKNDSNDAEAICEAVGRPSMRFVPVKSVEQQAMLTLHRVRLGFVEERTATINRIRGLLAEFGVVLPQRVVQVRRGAAAALAQLPALAQRALTDLLAHVRVLDERIAEYERELEQHARRDERARRIQKLSGVGPISASAIVSSVAEAREFKNGRQFAAWLGLTPKQYSTGGKARLGRITAHGDAYLRTLLIMGARSMLQTALRRTDRLARWALAVRARRGYHRACVAIAAKHARIIWALLAKNEALQLA

SEQ ID NO: 212065 - protein, 422 aa, unidentified
MNEQQANGYSVYVGIDWADSKHDVCIQPKFSDEREFAVIRHRAEAIDAWAKDLHQRHGGCIAVAVELTKGPIVSALQKYDFIDIFPVNPITLAKYREAFQPSRAKDDPTDAELAVDMLVRHPEHFKVLKPQSAEMRALATLVEQRRCLVNERIRITNRLRSALKQYYPQVLEWFDHIDTPLFCAFVKRWPTLMQAKRARSNTLKRFFHEHHLYRDRVVESRRQAIHAASPLTSDEAVIVPYRMQVLVLVEQLELMLKAIDQFDDEITKLASQHPDYALFQPLPGAGPSLTPRLMVAFGEQRERFSSAGDVQKLSGIAPVTERSGQKHWVHWRIQCPTFMRQTFVEWAAQTINKSYWAGVYYRQQREKGATYQAAVRSLAFKWIRIVYRCWQTGVAYDESRYLKTLERRGSPLVGSQKTPDSA

SEQ ID NO: 212066 - protein, 385 aa, unidentified
MIHVGADVHLRNSVLNAKDQDGQVLARGRAGNTMLELGRFFAPLERRAKATGEAIRVVMESTGNSRAIQRLLTQYGREARIDLTAEVLHARKLRVIAESVNKCDRVDADILTELSRSNLKLPTCYMPDDEEFALREHLRARTDLVRIRTMIKNRVHAILHRRGILTPDGDLFGRAGGVFLDQLDLDQAGLTTLERFRELLGRLDESINESTAGLRALQREPRWAKPAALLETIPGVGLITALTILAELGVLSRFRSRAAVANYAGLVPRHRDSDQKRWSGRITCRGSAHLRGMLVEAAWMAAPRVPVYQALFRRVEQKKNKKTAIVAVARRMLEDAWTMLIKDEAFRYVPASLDETQEDRTRTSAGPEHRELRSRVPQAASSVAG

SEQ ID NO: 212067 - protein, 429 aa, unidentified
MNSNDTDSAPAFVACIGLDWGDQSHALALHDPATGQTEASTLTHSAENLHRWLDQLETRFGGRPVALAIEGTRGAIFPVLLARPWLHVFAVHPVTSARYRTAFTPSGAKDDLPDAQVLLELLQRHRDKLTPLTLADAATRELAGLCEARRDLVDRRTQLLNQLVATLKKFYPQALTLVGENLASPLALDFLTKWPDLITLKTARPATVKAFYYTHNVRRPETVQARLDGIQNARALTTDDALVSVAVRQLCVLVEQVRVVQKHVAAFDAAIAKAFAAHPEAALFRDLPGAGAVLAPRLLIAFGTERDRYPDPNSLQKYAGLAPVREKSGGALWTHWRWHAPTFLRQSFIEWAGQTVKYCPWAKAYYEQMKAKDKGHWAILRALAFKWVRILWKCWQDRTPYDQIRFLKQLAHRRSPLAQALSKTQPACP

SEQ ID NO: 212068 - protein, 347 aa, unidentified
MDVHKEAIVIAVLNTRGHVVMESIVETKANSILQFIHGLQGELHVTWEEGTWAAWLYDLLKPHLHQVLVCNPRRNALLKEGSKNDKVDARKLANLLRTAMLRPVYHGEHGLRTLRELARTYQTLSQDLNRVMNRLKALYRGWGIACGGRQVYAPRYREEWLGKIEHAGVRRRAELLYQQLDGLLGLRRTLRPELLAESRKHKAAKLLRQIPCIGPIRAARLIALMQTPHRFRSKRQLWTYSGLGIETHDSAQYRFVRGQLQRAKKPQQIRGLNRNHNHEMKDIFKGAANRASCGVGPLRDFYVALLDKGMKPEMARLTLARKIAAIALTLWKKEERFDAEQLKTQAA

SEQ ID NO: 212069 - protein, 312 aa, unidentified
MTTLHPFVVGIDISKHHLDLHDLRDGATRRIANTDPAIAKWIATLGEARCLVVMEATGRYDASLRQALAAAQIAHARVNPERARHFARATGRRAKTDAIDARMLAELGRRLPVRTEPDASPARLHLAALSRRRDQLVAMRKQERTRRAEETDAAIRDDLDVHLAMLDQRIAALDRAITAAMRSDPGLAARNALLRSAPGIGPVAATVLIAHLPELGEIDQRAIAALAGLAPYNNDSGTFRGRRSVRGGRTRIRQALYMAALAAARSHTSLGRFHQRLRDAGKPPKVALIALARKLLVTLNAMARQQQPFAMT

SEQ ID NO: 212070 - protein, 308 aa, unidentified
MPKCTSKRTRVVIGGVDTHGRTHHAAVIDQQGRLLGDREFPADSGGYRQLLGWLGRHGQLEAVGVEGSGSYGAGLTRLLLDRGVNVVEVDRPDRRTRRQRGKSDPIDAEAAARAVLAGVATAPAKRRDGIVEAIRALRAARSGAIKARTAAINQLKGLLVTAPASVREGLDALPRAALVVTCARLRPDEAALDDPVQGVKAALRAVACRIHQLDEELSQADQRLAALVGRAAPRLLKLHAIGVDHAGQLLTTAGQRPERLRGEAAFAHLCGAAPIPASSGKTHRHRLHRGGDRDANRALHLAVVVRMR

SEQ ID NO: 212071 - protein, 340 aa, unidentified
MRQLYVASDLHGNNNLMGIIDSEGKRVFKKKLPNDPLLINDTLKPFKEEIVGIVVESTYNWYWLVDALMDEGYKVHLANPAAIQQYSGLKHTDDKHDAFWLAEMLRLNILPEGYIYPKEERPVRDLLRKRGHLVKLRTSLILSLENIISRNFGRKLPVNDVKGLRKDSVTPLFEGKEDLALSGRVSKETIDFLTRQIRQIEGVVEKRIQLKEAYRYLLTIHGVGKILGLTIMLETGPIGRFETVGDYTSYCRKVPSDRISNGKRKGSGNRKNGNKYLSWAYAEASDFARRGHPESRAYYNRKMQQSNPAVAHSALSHKLARAAYYIMRDQVAFRPDKLFG

SEQ ID NO: 212072 - protein, 455 aa, unidentified
MSNGSRRRLSRGDRRRNEKLARLRAVVTRESAVLAFDLAADKQVCALTDQDSRVLARRTVRCKAWELSQAVEWGLARAAEAGYSQVVVACEPTGHRWRVLDQIAAEHGVTLVCVQPLLVARAREAEDFTRNKNDDTDAMIIARLVCELRCYLPERADPTWARLRHLGARRAGLVTTAGAARQQVRDLLECAWPAVLDAACQPLDSASWLAAVTVALDRIGATGELGVLERAGWDEFAAAVRAELGATRWYSAIVRAVFDAATDPALSQIGVTGQRAGVLERVAFALADLAGRRTEITQVEARMLSVLDQLDLTGLVTSIPGVSPIGAATILAETGDPTRFSSARALVKHAGLCPRDNSSGAYQGKTAISGRGRPELRLAAWRAVFTALRHNPVLAARHAHLVGRSDNPLTDTQARVAIAASLLRQLHAVIVTRTAWDPAIAAGLDRRAQEVDHAA

SEQ ID NO: 212073 - protein, 356 aa, unidentified
MNYSGVDLHRRSIVICTVDDRGSVVGRTKMKTDPDLITQYFQQLPGDHTAVVECTTGWYWFCDLLQSNGITVVLAHAKYLKAISYAKVKTDAVDALTLAQLLRMGYIPEAHQLPPEYRAMRDLLRQRMVLEHRRTTIHQRVASILAQFNITDLPLSPSQSGFADFLNECPLPEQYRMTLMMHHHQCLQVTEHRKELEHYFKAHLRPTATLQRLLSIPGVGDITGSIIAMETGPIHRFADAKHYCSYCRLVPGARDSGGKRSHRSGSKDGNQYLKYAYTEAAIKAMMFYPVIKAFATRLEKRSGKAIARTVVAKELAKIVYYILARQQEFRTFKGVKIDKRRDWPRARKPVRLTGEV

SEQ ID NO: 212074 - protein, 366 aa, unidentified
MKKISTVAKSGNKIFKESKLTIGLDLGDRTSHYCILDEAGNVILEHSFPTTPKGILQVFSRIPRSRIALETGTHSPWVSRQLTAMGHEVIVAHARNVQLITESSRKDDRLDARTLARLARIDPKLLSPVRHRSAQAQIHLTVIRARATLVSARTALVNAARGLTKSYGERLRKCGSGQMSREIAKELSPELRDTLEPLLKEIESLNDRIDEYDRRIEQIATEVHPEVALLKQVKGVGTLIALTYILTLDDAHRFRRSRDAGCFLGLRPGRRNSGMSEPQMHISKEGDAYLRTLMVQGAHYILGPFGQDSDLRRWGLKLAERGGKNAKKRAVVAVARKLAVLLHKLWVSGEVYEPLRNNHPVVSAVA

SEQ ID NO: 212075 - protein, 317 aa, unidentified
MSKDITVCAGIDTGKHKLDVAINDSAELLQVDNSAEGHKALLAWLRQRNVERVGIEASGGYEQDAVAFLRADDLVVIVFQPVQVCAYAKFVLQHAKNDKIDAALIARCTAAATDVREPPDARLAPMAQHLTMIEQITEDVAQLKTRREACRDQRIREFWKQEISRLKSLLHGELKRLVSTIRQHHDLSERLDLIASVDGIGLRTAVAILIRMPEIGRVTREQAAAIAGLAPYDNDSGLRRGLRHIEGGRQRLRKSLYAAALPAVFYWNAQLKAVYRRLIAAGKAHKLALVACARKLLIFVNAVVARGIPWTSAQATT

SEQ ID NO: 212076 - protein, 317 aa, unidentified
MSGACFVGMDISQDTVDVAVQPGTAFQIAHTEQGLAEAVKRLQTLKPALIVLEATGGLEVPLAGALAAVGLPVVVINPRQVRDFARATGQLAKTDQLDAQILARFAEAIRPPVRPAPDAQTQALAALVARRRQLIEMLTAEKNRLRLTARPLQKRVQAHITWLENELQGLTTDLMATMRESPVWREKEEIVRSVPGVGPVLTTTLCANLQELGTLTRKEVAALVGLAPFPRDSGTLKGRRAIWGGRAHVRAALYMAALVSTWKNPVIRTFYQRLCQAGKAKKLALTACMRKLLTILNAMVKSGTPWHPKMEPASAEA

SEQ ID NO: 212077 - protein, 403 aa, unidentified
MNAVGIDVSKGKSMVSVLRPFGEVVAKPFEVRHTAGELRALADYLKSLDGETKVILEYTGRYYEPVAQLLHDAGLFVSAVNPKLIKDYGNNSLRKVKTDKADSRKIARYGLDNWVELRQHTPMDTIRYQLKTMNRQYGLYSKTKVSMKNNLISLLDQTFPCVNTLFSSPAREDGSQKWVDFAASFWHLDCVRGLNLAAFTQRYQKWCKRHGYNFSSGKAAEIHEGAKNQIALLPKDAMTKMLIHQAIEQLNATSKTVELLRTEMNRLAQQLPEYPVIMAMGGVGKSLGPQLMAEIGDVTRFAHKGSLAAYAGVDPGANQSGTREAKSTPSSKSGSPELRRTLFLVMSALLQTSLADDPVFQFLDKKRAEGKPYYVYMTAGANKFLRVYYGRVKEYLLSLEPTD

SEQ ID NO: 212078 - protein, 346 aa, unidentified
MQQVSTIGLDIAKNFFQVHGVDAAGRVVLRRQLKRTEVLKFFAKLPPCLVGLEACAGSHYWGREIAALGHEVRLMPPVRVKSYGKWGRKSDPLDAAACCEAVGRPGMEFVPIKTIDQQAALMLHRVRQLLIEQRTRLSNAIRAHLSEAGLIAAKGDAGFQALLGLLANAEDPHVPALLRPILAPLVRQWEEACAQIKELDRQIGAWHKSNADSLRLASVPQFGPVIASAIVATAGDAARFKNARRFAAWIGLVPSQNGTGGKIKLGPITKAGDRYLRQLLVIAATGLIRRVRKDAAVSPWLFGLLNRMPVKQAAIAMANKLARIAWAILVKGGSFRENAAPGAAAA

SEQ ID NO: 212079 - protein, 340 aa, unidentified
MGEQYVGIDLHRRRSVIARMTPEGEVLETVRIDNDPVALSLELAKAGPDPEVVLEATYGWYWAADLLQACGATVHLAHPLGVKMFGYQRVKTDARDAANLGDLLRMGRLPEAWLAPPAVRELRELVRYRAKLVALRSGLKAQVHAVLAKQGVRVPMSDLFGVAGTRLLEELRLPRAYGLRVASLRELLGALDQQIAMLGREIGSALAGDVGYLAIQAIPGVGPVLAAIFVAEIGEVGRFAGAPQLCSWAGLTPRHRESDTTVHRGPITKQGSRLVRWAAVEAVQRLPGTTKQAADFHRIADRRGKGIGRVAVARRLLTLVYYGLRDGQVRCLAPAPAEAM

SEQ ID NO: 212080 - protein, 343 aa, unidentified
MDKYIGLDLHPRSFLLHARNNDGSDLLSQSGETSARRLVELVSSLKGRLHLAVEESSLADWAFRLLSPYAEVMVTNPRRNRWIAGDENMDDGKAAERLAEMLRSGLLCPVHHSESAERQAFKELVQAYHDTSKQLARFKNKLKGKFARLAIACRGTSVYKPEDREQWIAKFPEGKVPVQVLLLWDTVDHLQEHKDCLQREMAQAGKQFPQIARFQKVPGVGPIRAATFFAFIDTPHRFPTRGKLWTYCGIGIARSQSGQGRPVEHLTYFGNRILKDMAKGAALSATQAGKDNPFARKYRRLLQDGKDPQIALLDVARSIVTTLWAMWRKDQEYHPTTTPDGKA

SEQ ID NO: 212081 - protein, 341 aa, unidentified
MYRTKVGVDLAKNIIQVCTLHGKKVTSNVEMSTDEFSLWLAQSKPVTVAFEACSTSNYWYQQAIKAGHDARLISAKLVKAVRQNQKTDKNDALAIAQTLFLPEVSFINGKSIEQQQLQSIQRLRELAIKSQNASQKQIVSLLLELNIRLPNTQGGILRGLEGVLEDGEINLSDTFRATLSVAKVQLENMISAIGEYDKYLEQSIQSLPDCKKLLKLEGVGPVNAVNLYIALGANQSQPFKSGKNASACIGLTPIQHSSGGKEVMGTIGKYCKNGSLRSQLITGAMSVVIKVIKYGAKTKKELWLQGLMQRRGNRCAAVALANKTVRTAYSMLQNNTEYHAA

SEQ ID NO: 212082 - protein, 418 aa, unidentified
MSEEGNARPSRRYVALDIHKHYCVMAGVDREGRVVLLPVRVEHADLEEWLKKKLNSNDQVVIESTTNAWYVHDLLSPLVERVVVANPIKVKQIATARVKTDIRDTLILARLLAANLVPEVWVPPIHIRQMRQLLSQRRQLVETHTQILNRMHSVAHRHHLNHERGQRFNEKTIGWQKDERLSKMEQFQLSLEMENKDYIEKQIERMSGVVRKLCHQKPWADGMAYLMQLPGFGVLTAMTVLAAIGEIGRFETPKHLASYSGLTPGVEQSGTKNRGKGITKEGRRELRWALVEAAQMAVKSDPLLKMRFQALQKRMHRNQAIVAIARHLLEVVWYVLTRRQPYRGFTHERIAYKYLTWAWRMDETSRDGLTRQQFARYYLMRLGIGHDLTRIALDPKHPRKIASEAEVLALRPELLQIE

SEQ ID NO: 212083 - protein, 540 aa, unidentified
MAPTGTRSSSLLDRLERSATSCLLIVLAGGATAGSRDALLGTWRPDCLVGIPVSECLVRIGFPRRTGSRRFIHHDRSDAAVVLWMGIDIAVRAPHQASLTNEKGELLWSAHRFRTTAADLEKLWARLPSGHTPSDITIVMEPTRNAWVPLAAWFRRQGAQVVLVSAERSSDLRAYYAKHTKSDRLDSVLLARLPLLHPEGLHRERGIGPGDPLRRASKMHSTLVKRRTTSLARLDALLEILGPDWHAAFSADLSNKTPLQFLAAGYAEPHTVRRLGRARLTRFFYRHSRGAFGEAHADQILAAAHASLELWGDELAFSDLAEDIAIEARLALALTAEIKELDERIAILVADRDPQGIITSAPGVGAITGAVILGRLGDASRFQSLAAVRSFSGLVPSLDSSGVSGRHGGPTKRGDHLLREALFISANQARRLDPTLAAKYHRLMIESGKHHNSALCHIATTLLTRVAACWRAQIPYQIRDVDGQAITRDEARAIIQARYTIPDKVRRSRVTTGTGRRRKESLRAPSTGPSNQHAKQSGAA

SEQ ID NO: 212084 - protein, 407 aa, unidentified
MQFVFGIDVSCDSVTVAVASDEHTLLREYKINSDKAGFSRLLKDLRSVNHPQIIYESTGVYSRRVRTFLIHQGYDFVELNPLQAKLDLTENFRRKKTDRNDARDLACSQYIRNRLTTVQEKPVYLDLRDNERFYQQLTRDDVRKEDQLERVIQVVFPGVQNIYSDKYGQNLYETLQLFPNPDLVLKESLDSLTNKLQAGLSKRLGKKRCRDYAQRLINAAKAAYPAVDSSSCMLHQMQFYCQSLLEIEQERDQIINQMVAEAKAAKLSELEIYQSVPGIGLTTAICLTAELGDLHRFSSPSKINAYIGIDLVVYESGNYTGHRRITKHGNQYARKILFRTIDNILAATKTHPCHIADYYRRRKKESSKSPEKVTKKIHIAAMARLLRTIYHLVLHNQKYNYEIAISH

SEQ ID NO: 212085 - protein, 316 aa, unidentified
MPKQARIVGVDVSKAHLDLADTTSKSPWRIANSAEAIAGQIEHLQADPPALVVLEATGGYETALVIALQAAALPVALINPRQIRDFARATGQLAKTDALDARAIVRFGVAVRPPPLPPIDAGREAFAGLVARRRQIIDMLVAEKNRLEHADTTVRGWIDQHLVQLKTQLAQVDAAIALAIEASTELRARQTILTSIQGVGPLTAAVLLAELPELGAIGHKQLAALVGVAPLNHDSGTLRGQRHIAGGRASVRCALYMATLVAVRHNPTLKTFYRRLRDAGKRPKVALVAAMRKLLSILNALVRDNRPWQPLPQDGC

SEQ ID NO: 212086 - protein, 405 aa, unidentified
MPYILALDVSMGHSYSVLYKDDTCLFEDEIEHTQRGFHALLEEIQHLPERPLIVFEATGIYSRPVEKFFQDYHFSYCLLNPLEAKKQMEESTLRSWKTDKSDAHRLAQTHLRNQRQPKEVQSNFYLEMRDLARFYQEIEKKITRLRMDLHNCLQLTFPELEQFFSNRLTPYALTLIRLFPHPDFVLASTRTKIKNKLINETRKKISANRAEQKADQIIHYAQCAYPAVEKDSIHCQKTIYYAELLQDLLEQKKALATQMIKKAEASPCFLLYQTFPGIGALTAALLLGELGDITRFKTHKQLNAFVGIDIRRYHSGKYTGQDRINKRGNPKARKIIFFTIRNMIRQQRTAPNHIVDYYYKLKKQPIPKKDKVATVACMNKLLKCMHAMVRAHTEYDYAYAVSVDH

SEQ ID NO: 212087 - protein, 402 aa, unidentified
MYTVGIDVSKGKSMISVMRPGGEEVLRPFEVHHTSHDLTLLCDKLKSLGDETRVVMEATGSYHLPIAWLLDHEGFYVSVVNPVLIHGYGNNSIRRGKTDRKDALKIAGYGLQYWNELPRYMPQDPARQLLKTCYRQYQEYSKTSSVFKNSLISLMDLYFPGVNDLFTSPVRPDGSQKWIDFVAAFGHCDCVRSLSERAFITRYQRWCAKHSYQFSPDKAKKIHAFALNCVAVSPNSKTVRILVDTAVSQLRTNLISLAAVRAQMQALASSLPEYPVVMSMFGAGPSLGPQLMAEIGDVRRFHSKKALVAFAGIDAPPCQSGQVNILSRSISKRGSPALRRTLFLVMNVINMCSPAEDPVYQYMAKKRSEGKKYQVYMMASANKFLRRYYASVNAYLGTLGSN

SEQ ID NO: 212088 - protein, 319 aa, unidentified
MPQTIAYLAGIDIAKDTLEVAVRKCHVAFTVENSPAGWDQLGERLRELGVGRAAMEATGSYGHGVMRHLQALGLTVLLLQPKQVKAFATMTLRRAKTDRLDARLIADCAVALEDRAREPVEARFDALAEHLTHIEQIEADLVQQKTRLEHVRDARIRRAIERRIAQLARLAEAERQLLTVRLRQHADLARRLDLVTSIPSLGPRTAMTLIVRMPELGRLSREAVASLAGVAPFLHKSGRWKGETHIGGGRAQVRTALYMAALAGAYRWNPQLIALRTRLIANGKAPCSAIIACARKLLIYANTVLARQTPWQAACPAAA

SEQ ID NO: 212089 - protein, 406 aa, unidentified
MQGPVITVDVSKGSCHYQPYVSNGHPMRKPKVLHDTVEGFQSLSDLIDTMKDRYECETIPVIFEATGVYHRCLQKYLNDHQIPYYIISPLMSASYRKTTPNSNKTDDLDCSHIAKAYYGECNLFPYDKPSKSFHNLRELNRYYECELNHLRMRKNTFRKYLDIVYPRLDKCFKGHSSLYDEIPMEVIKQYPHPSLLLKHKEETIVKKIEKKTSHNASFIQNIVHEMYECSMHCYSGADVTDVESMILPELVDDLQSQEERCDEILKQLVSEAQKTPYFTSIVSIVGIGDNLAARIIAELGDMSRFSCRRAITAYAGLNPKIRQSGDMDGIHLAISKKGNKHLRCLMYLAVSCNYRLKKCDVLYEFNQKKRQQSFSPLKPKAATIATAHKLLLIIYALCTNGTVYHS

SEQ ID NO: 212090 - protein, 433 aa, unidentified
MTTDFSQVGRLFVMWMWRSVPKDGRVEHDRRTHVIETGDIDVFLGLDVGKGEHHATAVTPAGKKAFDKRLPNTEPKLRELFAKLQAKHGTVLVVVDQPASIGALPLAVARDMGCPVAYLPGLTMRRIADLYPGEAKTDARDAFIIADAARAMPHTLRSVDLEDETIAELEMIVGFDDDLTGEATRVANRLHGLLAQIHPSLERVLGPRLQHPAVLALLERFGSPAQIRKAGRRRLVTLLRPKAPRMAERLVEDIFTALDEQTVTVPGTEAAALIVPSLAASLQAVLDQRKLLAGRIEELLEARPLSQVLISMPGVGIRTGARILIEVGDGSSFPSAAHLAAYAGLAPATRNSGSSIRGEQPSRRGNKQLKRAFFLSAFAALGDPASRAYYDKKIAQGKHHTQALLCLARRRADVLFAMLRDGTFYEPQPAQPA

SEQ ID NO: 212091 - protein, 366 aa, unidentified
METIYIGVDFHARQQTICYLKTETGELVTCELKHQDKQVVRAFYAQFRGQVIVGLEASGYSPWFERMLEELGGEVWLGHATEIRRRARWRQKNDRRDAELILELMLHNEFPRLHRPAVQSREVLRMLRYRQKLIKMRTMSKNSLQAIALQAGLAKRSRLFTKDGQQQLSAAEMSPVMHWQREHWLQLMEPLNQQLLETMVWFKEQSKGDVSITRLRTHPGIGLLTSLCIVHTLQPVSRFRNTRKVAAYAGFDPVERSSAERKCFLGISKAGSRLLRYLLVEAAQTAVRKDEDLKRFYQRLAERRGRPKAKVAAARKLLIRAYIMLRDEIDYAEFRHRAVAARLARRGQGPSNVPEVLIGQPASPEQ

SEQ ID NO: 212092 - protein, 418 aa, unidentified
MNIPSQFPYRATVGLDWADQKHDVFVRFANGDSYRRKIDSRPEAIQEWLLELRSTCAEATIAIALEQRRGALFYHLCTHLSWIDLYPINPHSLASFRQTFFSSRAKDDPVDSQLLEELLRTHPERLRSYQPEPTAERKLDQYCRHRRSLRDLATKTELKLISTLKQYFPLAVNLFADVGLKSEIALDFLSRWPTLEELHRAKAQTVRSFFYAHNSRSQSLIEKRLQLIAQAHPVTDDLALIEPLVLTSKCLVTQLRQFNQAIGQFDQKIRELFKSHPDHFLFESLPGAGEQLAPRLFAVFGSNRSRWADATDIQKYSGIAPVVERSGKSLWVHRRLARPIFVCQTFHEFAQQSTHRCSWADQFYRRQRQRGKSHHSAIRALAFKWIRIIYACWKANKPYDESLYVHALEKRNFSVSTT

SEQ ID NO: 212093 - protein, 346 aa, unidentified
MNQYAGIDVSLESSAVCVVDAQGKIVREAKVLSEPEALIAWFAGLGAPMERIGLEAGPLSQWLYAAMAKAGLAVELLETRHVRAAFKTMPVKTDKKDARGIAQLMRMGWFRPVHCKSLPAQEVRAVLTARKLLQSKLHDVEMSIRGILRGFGLKVGPTTPKTYAARVRTLVDGHPTLEAIAEALLKARGVLADELRGFERRVRKMARDDERARRLMTTPGIGVLVSLTYVAAIDETDRFRSSRMVGAHFGLTPKKYQSGETDYTGRISKIGDVGVRTALYEAAHVILTRPVKGSDLKTWALGVAKRAGMRKATVALARKLSVVLHRMLRDQTDFVAHRVAPVTAAA

SEQ ID NO: 212094 - protein, 313 aa, unidentified
MAQMAPSVGVDVCKERLDIALYPQLTHFSVANDDAGWRQLCRRLRPIGARAIGIEASGGYERGVIAALLAAGLPVRSVNAYKLRQFGKAAGLLAKNDRLDAQAIAHFVATLPTRPAKHDPLREHLAELVAARRQIVDLRQELGNQLEHLRDAELRRMQERRIRQLDLDLARLDQRITEAIAATPAMAWRYQLLCSVPGVGPVLAATLLAQLPELGGINNRAIGALVGVVPYDFDSGKMKGLRCIFGGRAAVRRVLFMAAQAAAIHNPLLRAFRQRLRAAGKKPKVAIVAVMRKLLTMLNAMLRDGREWAAAAA

SEQ ID NO: 212095 - protein, 412 aa, unidentified
MKVVHEICCGIDVHAKMLVACLLLANGEKEMRTFSTMTDDLLRLRDWLQRANCTHVAIESTSVYWKPVFNILEDALTVILINPEHAHVLRGHKTDVKDAEWLANLLRHGLLRASFIPPVEIRELRELTRYRDSVVREQSRVANRIQKVIESGNVKLGQVASDALGASGRAMLWAMARGETDAGKLAALAKKQLKEKVPELQRALQGRLTVNQRFVLQELLQRWEELEQADRRVTKEIDQYVEQRPKLARAREIVDSIVGIGPRVAEVVIAEIGIEMGAVFPSDAHLASWAGLCPGNKQTGGKRLSGRTRKGNTYLRSALVQAGWGATMKKNSYLSSQYFRLVKRLGRKKALVAVAHSLLVIIYHVLQNDQTYTDLGGDYFDRKYVEQQRDYYIRRLKMLGLSVEVQVLPVAA

SEQ ID NO: 212096 - protein, 351 aa, unidentified
MIEIGMDQHKRFSAAAALNAQTGEVVERRLEHDDAESILSFLRSFEGPVRVTLETTGNWYWLADLAEDAGAAVRLCHTVEAKRRRRGKAKNDRLDALGLAQLSAEDRVPEAYLPAREDRDRRERHRFRIRLVRLQTVLKNSIHALLNKLNIEVPFEDAFGKGGRACLDALSLREPYAAHLRSALRVLDALAQEIVREQAAIRVEMESNPAAQLLMTAPGIGELTAYLLLYEIGPIERFPGDKQFASYCCLAPQTEQSSDWIGRPGVGRAGNLYLKEAFTNAVLGAIRKDPSIRTFYNRQLRRNGAKKAKVAAAHKLAVAVYHMLRRRQPYRPTPAMNKQTSGKPVSRLGRP

SEQ ID NO: 212097 - protein, 312 aa, unidentified
MAILSFCGIDVSKDRLDVVVLPEGRFCSVSNDAAGWAELVARLHPLAVSAIGLEPSGGYERGIIRALLAAGLSVRRINPNKLRQFARARGVLAKNDRLDARLIAEYVAIMPTRVVQRDDAVERLAEIVTMRRQLCDEHVAVENQAAHLEDAMLRRLSKRRLIRLEADIRLLDKRLAEMVATNAAFAQLYELLTSMPGVGPVLAFTLIALLPELGKMSRKQIAALVGLAPYDFDSGKLRGHRSIYGGRMPIRNVLYMAALSASRYNPALRAFSNRLADANKKSKVIIVAVMRKMITTLNAMLRDNAAWQLKPT

SEQ ID NO: 212098 - protein, 362 aa, unidentified
MNDIHYIGFDVHKKSVSYCVKTASGEMVQEGQLVARREVLRAWAAAQAQPWRGAMEATLFSAWIYDTLKPYAQQLDMGHPARMKAITAGKKKSDRLDARTIADLLRCNLLPTCYVLSPEMRDLRRLLRYRQLVVGQSVRMQNKMAGLLMETGAPFVKAKLHGKKYFTQLLETLQEVPESVKDLLRMSRGAMEMFEASQKRLVKRLLAEPALQARVERLASIPGVGPITALTWALEIADPQRFPSIGDAVSYCGLTTAFRASAGQEQRGPISKQRNAWLQTALIEAAKLAPRWNPQLAAVHQHELQHGHRNRATLQVARKLVAYLMAVDKSGQPFRLRRSPEVAAAPPTRKKEKARRPALQLT

SEQ ID NO: 212099 - protein, 351 aa, unidentified
MDTTPSVVSSVAPIVAVGLDVSKDTLDVCLLIESKRHEKQFANDAPGHRQLLRWAHSLAKESSCHFCLEATGPYSQGVALFLMEKEQRVSVINPARIRFFGLARNQGNKTDKADARLIAEYCRMQCPPPWRVAAVEVRMLQEMVRRLHALSDLAAQEKNRMQAPGQSKAVLASSKRVVTALEKELLRLKREVRAHVKAHEDLYRDSRLLQSVPGIGEITSWDILAEMPDVNEFDSAQSVAAYAGLAPREQRSGSSVRKQTQISKRGNSRLRKAFYFPAVSAMTWNPLVKAHYERLREKGKPKMVALAACMRKLLMICFGVLKHQKPFDPQWLSQPATPPSPKQNDLLILPD

SEQ ID NO: 212100 - protein, 391 aa, unidentified
MNERDSVPADTESRCQKIFVAIELSKAKWIVVIRAPHVDKSSLFEVVGGDVDRLLVLIERARKAAVAQGFKVTEVCTCYEAGYDGFWLHRFLESQGMRNSVLDSASIQVSRRRRRLKTDRTDAGSLIRVFMAWHRGEHQACSVVHVPTPEEEDMKRLHRSRANLLRDRVRHVNRIRGLLFLQGVAHIHPNRAGWMIALRDLRTRDGRAFPVQLMHEIEREAKLLDIVKKLLHEVDLEVAALVHTQGAKRRSSTSKATHPIASRLARMRGIGPTLAGVLATELFYRRFENRKQVACYTGLTPTPYSSGSMSREQGISKTGNNRVRHNAIELAWLWLRHQPESRLAIWYRERVTNTQGRFRRIAIVAVARKLIVALWRFVETGLIPEGAVLKA

SEQ ID NO: 212101 - protein, 392 aa, unidentified
MKSLIYIGMDVHSKTFSLCAYNPKTRIYSNRIEIENNMKLVKKYAYNLLSEAEDLDTELIFGYEAGCLGFTLADDIKKMGFECRVMAPSTIRIASTDRIRKTDRRDAKSLAEALANDAYSQVHIPDQEDREVQAYIRMREDVQDMVKQTKQRINAFLLKQGKQYDQGKSKWTICHRKWLKEVELTPLYKEVLDEYLITLEELEIKVDRYDTRIVEISNQERYQEFVDKLSCFKGFTRPIAMRIVSEIGDFSRFQTAGQFASYLGLTPSEHSSSESENKGTITKMGNSHVRKTLIEAAQSMVRGIPGRKSKILKKRQEGNSSKVIHYADKGNMRIQSKFKRMMNSGKNRNTAITACAREMACFIWGMATGHIEERVDTPIPVINPETGEILVG

SEQ ID NO: 212102 - protein, 401 aa, unidentified
MPAVWAGIDSGKRAHHCVVIDQTGEILLSQRIDNDETVLLELIATVTEIADGHEVVWATDLNSGGAALLISMLVDHGQQLLYIPGRIIHHAAATYRGDGKTDAKDARIIADQARMRTDLQPVRDGDQISVDLKLLTARRLDIIHDRVRAINRLRATMLEYFPALERAFDYSKSKAALTLLSTYQSPGALRRMGVTRLAAWLKARGCRNSATVAQKAIDAVREQETTLRTESVGATLVARLAAVITPIDEDLVDLDKTITARFNEHENAEILESMPGFGPILAATFLANTGGNLRSFESPDRLASVAGVAPAPRDSGRISGNHHRPRRFNRRLLRTCYLAALSSLKNSPASRAYYDRKRREGKSHKQALLALARRRINVLWAMLRDHTTYQEPAVTPMLKTA

SEQ ID NO: 212103 - protein, 366 aa, unidentified
MTGTSTASRPRLRRPAREVVLGVDTHRDAHVAAVLSLVGEVIGTEEFPASAAGYRDLLGWARASGTVRRAGVEGTGSFGAALSRYLLAQGVDVFDVNRFDRADRRRRGKSDPLDAENAARAVLSGRARAQAKAGDGPVEIARMYKLAKDSAVKARTQAINQLKAVLIRADPQLREELAGLGNAELFRTCAGLVDDSLNDEADEGAVLHATHVTLGLLARRIRKLSEEVQDLEGRLTRLVERHAPQLLEVVGIGPDTAVTLLITIGDNPERLGSEASFAALCGVSPVERSSGSRQYRRLNRGGDRQANAALHRVVQTRLRVDPRTQDYYERRSKEGKTRREIVRSLKRYAAREVFHLVRPMQSQPLS

SEQ ID NO: 212104 - protein, 351 aa, unidentified
MIYVGMDIHKNYSSVAVIDEEGDLVDRCRVSHRYREELTGYFNQFPLKTQVVMEATCGWSWLSELLQDLGLEVKLANPSKVRIIAESQIKTDKVDALALAQLLRTNFLPESYLAPKEQREARDLLRYRISLVHLRSGVKNRIHAVLIRLGIYHSYSDLFGKRGRRFLSSLELSPVHRRSLDGYLCLIDVINKLIGEAEVEIRKVVKESADGKRLLSLPGVGFILAYLILVEIGDINRFSSYKKLCSYAGLVPSVYQSGARSYHGHLSNRANRYLQWGLIEAAQKAKVIDPFLRRKAERIERKKGASIATAAVAHHLLIIVYHLLKEQREYYSGKLRANLSGRPALTLVTKS

SEQ ID NO: 212105 - protein, 415 aa, unidentified
MDILYPRCAGLDVHKDTVVAGVRLAGDGPVRTEVRTFSTTTPGLLALSAWLAEHGCTHVAMEATGVYWKPVWHILSDGEFMLFLANAAHVKNVPGRKTDVADALWLADLLAHGLIRPSFVPEAPTQELRALLRTRKQLVREQASHVQRLQKTLEDANLKLGSVLTQIMGKSGRAILEALIDGEADPDKLLTLVQRGVKAPPETLRAALQGRVTVRHRFLLRLHLRQFDALDAAIAEIDREVGRDLDPFRQAVRLLSTIPGVSDLTAQVIVSEIGIDMSRFPTAGHLISWAGLCPRNDESAGKRRSTRLRKGAPWLKTTLVQCAWAGARKKASYLQAQFQRLRHRRGPKKAICAVAASILTAAYHMLRDGTFYQDLGPDHFRRIAPEVQANRLARQIAKLGFTCTISPATEREVSV

SEQ ID NO: 212106 - protein, 350 aa, unidentified
MVVVGADVHKRTHTFVAVDEVGRKLGEKVVDATGAGHHQALRWARKQFGIELVWGIEDCRHLSARLERDLLTAGQQVVRVPPKLMALTRKSARTRGKSDPIDALAVARAVLREPDLPVASHDEVSRELKLLVDRREDLVAQRTSTINRLLWRVHELDPAHAPQPRSLDLAKHRNLLGSWLETVPGLVAELARDELADITRLTETINALAKRIGERVRAVAPVLLAMPGCGELTAAKLVGETAGVTRFKSEAAFARHSGVAPIPVWSGNTAGRVRMTRSGNRQLNAALHRIAITQVRLEGLGQAYYRKRLAAGDSSTEALRCLKRRLARVVFHHLQTDHENRQKPCQPAAA

SEQ ID NO: 212107 - protein, 393 aa, unidentified
MSLDHHFAEPTAIRSNLGAIFVSLELSRSTWLITSLSPGGGEKMSKHGLSAGNMAALLARLSELKQKAFARTGQSFQVVVIQEAGLDGFWIHRVLQSEGVESHVVDAASIATSRRRRRAKTDRIDGEALVRALLAYKRGEPRVCAMVRTPTPEEEDRRRLCRERKTLTNERVQHVNRIKGLLFCQGISDYEPLRRNRRQRLDELKTGGGRPLPPHLKAQITRELDRLELLLGQIEAVEIERDALLSAMKPDGMNADAVRSPPAMLINLNGIGPEIAAVLWSEGLYRSFANRKQVAAYAGLAPTPWQSGSVAREQGVSKAGNPRLRTTLLQLAWLWLRHQPQSALARWFHERVRRNGGRLRKSTIVALARKLLVALWKYVTAGVVIDGAVVRAA

SEQ ID NO: 212108 - protein, 430 aa, unidentified
MTKRSSTPADAVLVAIDMSKHRQEVLIERPEGGRRRRMTVMATKADYDRLAADLADIGRPVIVGFEATGNYHRTLAHRLLSGGFELRLISSVALARTREALHNGWDKNDSKDAQVILHMLQIGATQRYVDPLAAGINDLQEMSKTHEAISKAKTQTWHRILTHYLPLYFPEIERFAGNSRSDWFLALLERFPTPGSMTRLGQEDFTREAWTLVGRKVSKARLINDIYETACASVALPVDEDSVSITMFRMVIDQARSLIRQRDEIERTAHAVLAENRDYQLLRMIPGIGPINALTILAEAGDLRRFAHHRQFLKFCGLDLATSQSGTFRGRTKLSKYGNARLRRTFWMATQVAIRQRDNSFRDKLGRYVAGHANDPDRRRKAMTALTAKMARVAHAVIKTGTEYRPFLERADTRWKDPSLWSREGAAATL

SEQ ID NO: 212109 - protein, 387 aa, unidentified
MPQANDLSRCLVTLEQDNTLIAVIELSQASWLVAGIVPAIERQPVKKIEADEVALLRLLERWRDEATRAGRRIMRVCVAFEAGRDGFWLARWLRARGIEAYVIHPSSVAVSREHRRAKTDRLDTELLKRAFLGWLRGERGHCTMAAIPTVEEEDAKRPNREHASLVGERTRIVNRMKSTLARLGIRGFKSTLRRASERLGTLRTPEGMPLPPNTLAELGRDMARLRFVMDQIKEVEAARFEQLARRPEEGAHAMIRLLARIVGVGIETADMLVREVLSRNLRDRRAVARYAGLTGSPDESGRRRREKGLAKAGNARVRHGMVQLAWRFLLFQKESALARWYRERTADARGGTRKTMIVALARKLLIALWRLVTTGEPPEGVLLRPAA

SEQ ID NO: 212110 - protein, 349 aa, unidentified
MRINPAPEAAAYGIDIGKKVFHVVALNAEGSPIQRAKFSRETLLKFFEAADPGLVGMEACAGSQWLARKLIALGHAARIIPAKFVKPYVKSNKSDTIDAEAIAEAVTRPTMRFVQVRTEAQVDLQALHRIRDRLIRNRTGLMNQARAFCIEYGLAMRTGAGGFHADIRRHLGNRENDLSISMRELLTNLLDDLAQLEDQVGALTKQIEAIAHSDETVRRLLTIPGIGPLGATALIAAAGDGRQFRKARDMAAWLGLVPAEHSSGGKQTLLGISKRGNGYVRRLIIHGARSCFLHLHREHHALGRWLGALEQRTHRNKAVVALANKLTRIAWAILTRPGENYLRTKGAAA

SEQ ID NO: 212111 - protein, 345 aa, unidentified
MKDIKVLGIDLAKNVFQLHGTDTSGKVVLRKRLSRTKLIEFMSNLAPCLVGIEACGSAHYWARTFKSMGHSAKMMAPQFVKPYIKSNKNDMRDAEGINEAVTRPTMRFVPIKTIEQQDILLLHRARELAVKQRTAQANQIRGLLAEYGVIIAKGLSHLQELPALLEFSVKEQKISDKGKNIFLNLYDQLKAYEEQVNYYEKEIEQNAKEDSRCVEIQKIDGIGPISASAVVATIGDPNVFKNGREVAAWLGLVPKQHSSGNKVVLGSISKRGDRYVRKLLIHGGRAAVKTCENKTDKRNLWLADKKHRIGFNKAAVALANKNARTIWAILKTGECYRQPEQVQGI

SEQ ID NO: 212112 - protein, 372 aa, unidentified
MTKNLLFAGIDVDENSFNVALISKKTGEFFHFQCKPNSGALIKKLDSFKSKGFLLKICYESTYLGFSLCREIRKHDYDCEVIASSLIPEVPGKKVKTDKVDCRNLATYYMQGLLTVISMPDKDDEAERDLLRSRSFLVGQMKALKTHISSACKRMNIDWKNSTGKTDLWTKSHRIWLDKAISELGNDELLKVNLSCLVSSLNQLETTIDYYNHKIEELSRKEKYLEKVKSLTAFRGIQTLTAMTVVAEIGNINRFPSPRQLVSYLGLDIIEYSSGGREKKFGITKMGNRHARTALVEANQMSRRPSNVSRYLSERRSGVEPKQIAVADRCMKRLSKKAYQMNMKGKSANVIKTACAREMVGFIWESLKNVAA

SEQ ID NO: 212113 - protein, 331 aa, unidentified
MKIKDVIGIDASKLTLDCCLHKSGAQEVFENTPEAIVFLVDWSKKISGLAKNELLFVFEHTGLYTHQLVRYLSEQGYYFLLVPGLEIKRSLGIARGKDDRADAKRIALYGYRIREEARPYQMPKESLISLKRLMSMRRKLVSQRAGHIATLGEQIRVLNNELGPILLQVQRDIIGVLDVQITKIEKELDRLIEQDPELQIIYRLLVSIKGIGAVTARFMIVHTVGFTAFKSWRKFASYCGIAPFPNRSGTSIRGRTKVSQLANKEGKTLLNLCAGSAIQCNPEMKAYYTRRIDAGKNKMSTLNIIRNKLLARAFAVVVRGTPYVNTIGYIS

SEQ ID NO: 212114 - protein, 427 aa, unidentified
MKEQSGTIVGIDWSADSHTCYDLKADKSFKIPDSVKGYERLLNDYPEAVFVIEEANNRIGDYLLINNREVYVLPPCRSKEARKYHFSSGAKSASLDAKAIALTFKEHPSYCLKARYSGVGAKITKLVTMYNIVSKTHSQQCNRLYSVLLRYFPEYLHIMDKQYRSNTSLRILSICPTITELKKVSNEELRKILNKENYRMTSILRKKLDRIRSEGISWGDTSCEGNLIMFLANQILALRGTAESLRKEMGETLENSPYRIILSIPGVKAVIGSYIVKAYLTHDFRSYQEMQKYAGTVPFLFQSGRKSIMLMRKKCDNDLRSMIHIAAFASLKTCGWARNYYKRKRKEGKTYGHALRALGNIILKIAFSMLSKMKEYNETLFLNAKGIKITQPNNTIIPEAFTNPEYSQDAHPSLAATKDVVENLNVT

SEQ ID NO: 212115 - protein, 309 aa, unidentified
MEHFVGIDVAKDRLDVHLRPSGETFTVARDGEGLAALVERLRALAPRLVVMEATGGYETVVASAVGAAHLPLAVVNPRQIRDFARATGKLAKTDRIDAAAIAHFAEAVRPPARPIADAQAQALGELVARRRQVIEMIVAETNRRRMAAQRRVIKAIERHLALLQAELSELDGDIDGAIRSSPAWQADADLLVSVPGIGKATLRTLIAELPELGRLTRRKIAALVGVAPINRDSGTRRGRRTIAGGRRAVRAGLYMAALVASRANPVIAAYYAKLRAAGKTGKQALVACMRKLLVILNAILRDRKPWQPA

SEQ ID NO: 212116 - protein, 348 aa, unidentified
MIIIGVDFHPEFQQIASLDTDTGEIQEKRLAHREEAEKFYRALAGQKVRVGMEASGHARWFERLLAELNFELWIGDAAVIRTKRVRKQKTDRQDAQLILQLMLEDRFPQIWVPSWENRDLRQLLWHRHRMVQARTRIMNQLQAVALNEGLRCKKRLWREHGREQLESFRLAPWASRRRRDLLELMDRLNPTIAELSQAIEQEVEKCPEAQRLRTHPGVGALTALAFVLIIGQTERFQCGKQVASYLGLVPLEDSSGNRRRLGHITKQGSSILRFLLVEAAQVTVRSLPEWRSKYLHLMMRRGRKIAKVAMARKLAVRLYWMMRQGWDYQQWSKFGSHAGQPGHRHGVQ

SEQ ID NO: 212117 - protein, 387 aa, unidentified
MPQLNDLSRSLVALDQDSTIIAVVELSQSSWLVAGVLPGIERQPQKKLEPSAERLLGLLHRWRDEAVRAGKKITRIALAFEAGRDGFWLARWLNARGVEAHVIHPSSVAVSREHRRAKTDRLDTELLKRGFLGWLRGERGHCSMARVPTIAEEDAKRPNRERECLVGERTRIVNRMKATLARLGVRNFKPTLRKAAERLATVHTPEGTPLPRNVLAELQRDMARLGFVVSQIREIEQARQKRLEQEPETGPHAMVRQVARVIGIGLETADMLVHEVLSRPMRDRKAVARYAGLTGSPDESGARRREQGLAKAGNARVRRGMIQLAWRFLRFQKQSVLAQWYRARTADSRLGTRKTMIVALARKLLIALWRFVTTGETLEGVILRPAG

SEQ ID NO: 212118 - protein, 385 aa, unidentified
MREKSFIPADYDVFAGLDVDKRSIAVTFIDHQGFIKSLRMPYSTEHLVNHVHKHFSDKKVAFAYEAGPTGYGLYDGLVAQAYPCLIAAPSMIPRAPGQRVKTNRLDSRGLSENLRGGQLKSIHVPSPLYRELRHLTQLRDTMVSEVMAMKQRIKSLLLFEGIEFPPAPAGSEWSLKVKAKLRKLQCSNTVRFKLDQLLDSLEFSEKQAVKTTREIRRFCQSDPELSQCIEYLRSIPGIGWIVASQLVARIGDWREIKNVRQLAGFLGVVPTENSTGDRTDRGSITHTGDGRLRSKLIQGSWSAIRKDDELREFFRSVARRHPRKIASRVAIVAVARKLSTRISAVLMEQRPYVVREKVHSAPLTQEETSPQGTTRRQREPGENNS

SEQ ID NO: 212119 - protein, 363 aa, unidentified
MAQVETRSRRTRKRRPAIDHVAIDLGSRESQICVRTSDGEILEEKRVGTRSLAKYLAGRPRGRVVMEACAEAFSVADAALAAGHETVVVPASLAPALGVGDRGIKTDVRDARNLSEASCRMSRLPKVHVPTKESRDRKAMCGMREGLVQTRTKLVNSVRGWARAQGLGTLRSGSLNTFTHRVREHVARKEAAIPGYVQRVLIAIEAVTEQIHEADEEMETMAKSDVTCRLLMTAPGIGPTASVRLAAAVDDVKRFPNAHKLESYLGMTPGESSSSTRKRRTGVTKAGPAKMRWALVQSAWVARRYYKDHPLVAWSFEVEKRRGKKVAVIALARRLVGVLYAMWRDQKPYEKNYGVTRAQTPAT

SEQ ID NO: 212120 - protein, 381 aa, unidentified
MPDGIRWVGLDVHARESTLAVFDQATSEVVTRRVVGRPHELLPWLRGVERPARMVYEAGPTGYGLARRARAEGIELGVCAPGKTERPPADRVKTDKRDAIRLARLLAAGELTLVTIPSVEREQLRDLVRCREDIRADLMRARHRIGKFLLRREIYWEGAGETWSRKHRSWLTSVQFADQASRATMADYLHAHDVLIARRDQVEAELAKLALTAPCAHTVARLRCLRGIDTLTALGLCSEIGEWSRFDHPDQLSSYLGIVPCEHTSGAQRRLGSITKAGSTHARRLLVEASWHYRRGPAVGEALERRQRGQAPEIINISWKAQRRLNARWRQLRDSRRKPGGVVAVAIARELAAYCWEIATCPTALEPIPIPTTRKRLTNSR

SEQ ID NO: 212121 - protein, 401 aa, unidentified
MISIGIDVSKGKSMVCICSVQKMLVSPYEIQHTRTALQDLIQSIQSYSEECRVVLEATGIYHLPVLLSLHEAGIFVCVVNPMLMKKYIASSSIRKAKTDRADAIRIAQYGLDHWFHLQNYMLANDTYEQLRLLGRQYERYTNMKVASKQTLDILLNQTMPGIKTLVRSKKTSKPEQDKLCDFVEKYWHYDLILKQSEQQFISSYCSWAKKKGYRPSATKAQEIYAAAQNSIPTLSSKTASSKMLVLEAVRVLKEINRTLHRILTQMQELATALPEYSVIREMNGIGDVLAVRFIAEIGDIRRFHCGSALVAYAGIDSPPYQSGTFSATRRKISKRGSPILRKIGFDAMKILKSVKPTQDDAVYRYILKKEAEGKPLKVAKIAGLNKFLRIYYARVSAVCNC

SEQ ID NO: 212122 - protein, 364 aa, unidentified
MKRKVYVGMDVHKETNRIASLTNNTKEIVKEQQIKHNEVQIKKFVNKLKSEWNEIHSCYEAGVTGYPLYRNLKSLGVNCILVAPGKIPRQSSDKIKTDKRDAIKLAKLLRSGELESIHVPSEEDEAVRDYLRSRDSLRLDLGRNRQRLMKFLLRKGITYSATKYWTVSHNKWLNNLQFNNEILQETFNDYYSRVRVQEENLKAMDKRIQEIAESEPYREKVGILRCFRGVDYLTAMFLLCEVCDFKRFKTAGSFMSFLGLVPGEYSSGSKRKQTGITKTGSPRLRRILTEAAWQHRFPGTGSKIVTARRSGQPALVVALAEKASLRLHKKFRNLQQRGKTPQVMITAVSRELSGFLWAAMNLVA

SEQ ID NO: 212123 - protein, 330 aa, unidentified
MYLGIDTHKRYSQVAVVNGDGNVQEESRLPNDRLEELAEQYTGAEAAIEASGHYRPIYEMLDEHLDVTLVNPSKNRIIADAAVKTDRVDAKRLALMLRADMLAESYVPPDEIRELRDLVRTRKSLVEERTAEKNRVRAVLTRTNNTYDSELFGPTGREFLAELSLSDTDRTIIEAHLSVIDEYDQQIERLEEKIERRVLESPAAQRLLTIPGVGQYTAAVIVAEVGEIERFDEDKQLVSYAGLDPVVHQSGDKEVRGSISKEGSAPLRWALVQCASIAVRCDEYLGNFYTRLKERKNHQIAIVATARKMLVSIFHMLTRKEPYDPPGVSA

SEQ ID NO: 212124 - protein, 351 aa, unidentified
MKYYTSTTEFNCGIDLHARQMYACVMDRQGKKLVHTNITGNDFEYFLKRVEPYRHDLTVVSECTFNWYWLADACFEADIEFVLAHALYLKHIHGGKNKNDCIDSEKLAHLLRANLIPPSYIYPSERRPIRALLRQRMSYVWDRATLKTHLSMNQTAEGLVPARKGGHDRDIWEERILEQYTNPLHKFAASCDMNMIRAYDVEIEHLEAEIIRQAKTGLGRNYHLLLSVPGIGRVLAMAILFETDAIERFPTVKDYVSYCRLVKGSVASAGKVKGLTGGKMGHAYLRWAFGQAALIAKRNHPLLTPYAEKLVSKRGKFKGNAILANKIARAVYHMLQKGSAFDAERVIATSI

SEQ ID NO: 212125 - protein, 412 aa, unidentified
MIYVGIDWAKAHHDVCVEDGEGQMLAKGRVPDGIEGVERIHEIVGVHAEDPSEVVIGIELDRGLLVEALVVAGYEVHAVNPLAVSRYRDRLAPAGAKSDPGDARVLAEVMRTDRHLHREVAGDSDLAEAVKVLARAHQNFIWTRQRIGNQLRSVLQEFYPGALHTFADLASADAIAVLQIAPTPTAGRALTKSIVRKALAAGGRKLRLDSRATEIVEGLRVPQLGAPALVEEAFGHQVASLVAVLRTLRTEIEELRSELAASFEGHPDAEIITSLPGLSSVLGARVLAEFGDDRTRYADARARRSYAGTAPITKASGTRKVVLARVARNKRLADACYGWVFSSLQASQGARAFYDRQRASGKTHHQALRALANRWVGILHGCLEHRKTYREDVGWGAGLETVGWGAGLETAA

SEQ ID NO: 212126 - protein, 431 aa, unidentified
MNADGKSPSMELLSPLEYEMSQRSKVCGVDVHKQFFVAALLSQSGGSTLKRFQSDKPGLLEFKEWLLNEQCELVALESTGIYWYSLYSTLEDHIEVIVANPYLIKNIPGRKTDIADAQWIAQLALNDLIKPSRIFPKKQREIRNLTRSREHLVNNRTMLKNRVHRVLESASIKLSSVLADIFGKSGLHIVQGLVAGTDLDTILASISNEKVRAKEPELRNAIQHNLESSQILIIDQCLSLIDQITCRINELDVEIGAQMNDREKDLKIAMSVPGIGKISAMTILAEIGNFEEFITPEKLAAWSGLTPSVYQSADHLKTGPITKRGSPHLRRIMVEVAQAAVKTKNSRIRSFFLRLKMKKGYNKAIVAVARKILCILWTILKKREVYCEENVPKKKVLITLKSSRNPPSIQEAIEILARAGYMIQKLNSSGG

SEQ ID NO: 212127 - protein, 330 aa, unidentified
MEGAPMLDTTTFIGLDVHARSIKAVSLDVMTGEVRAATFGYDAGAVAEWVRSVDPRARCVYESGVTGFDLQKRLSGLGVDRVVGAVSKMIKPSADRRRKNDRNDAEFLARMLSVGNVAEVWVPDDECEAARDLTRALEDARDDLSRSKQRLSKFLLRHGLVFDERTPTGRRKGNWTRAHWSRIESIRFAERADNDVLAYYVDAVRRAAEEKARLEGLVGAEARKPRWRKRVDSLRCLKGVDTASAADLVFEAGEFSRFRNARSFAAWVGLTPSEHSSGESDRRGAITKAGNKHLREALLARGVHGNKANVATARELACWVWAVGLMAEEA

SEQ ID NO: 212128 - protein, 340 aa, unidentified
MNTNAPQLGIDVSKLKLDVALLLSTGAHAATFANTPKGFLALARWLARFPVQPRVCLEATGTYALPVAHFLHGQGLMVSIVNPMAIHFFARTRMSRNKTDAHDATLIAYFGQQHQPRAWQPPTPAQAQLQPLVRVREQVLESRVVAQQHLESAPASTAKYFRAQIRLLDRQLRAVAGQIEQVLQAHPTLKESAALLTTIPGVGTVTAATVLAIIPEIDQLDNARQLAAFAGVTPSQRQSGTLSGRTRMSKLGHRRLRKALYFPAITALRCNPRVQALAIRLAQKGKAKMVIVGAAMRLLAHLIFGVLKNRTAFDPAYQRRQANISNSRAAASLQLAPGCP

SEQ ID NO: 212129 - protein, 418 aa, unidentified
MFKILKNNCCGLDVHKTWIYACIGITDSNKRTEYKQARFSSFTKGLNELCDWLAKYNCNDVCMESTGKYWIPVFNILEKNNIWVTLSHPKYTKPQKGNKTDRKDAKWICDLYMCGMVKPSFIPPADIRELRDLVRYRFKLTCMITGEKNRAHNSLTVSNLKLDDVFSDVFGKSSRSITEQILQHPGETFDVAPFVDGRCKTPIEEIQAAVDGAISTEQAVKLKQCLTHIDELEMHKAEIEREIFRLSDKYESVLNLIRTVPGFDKNPLTAIQVLSEIGGDMSVFPTAKNLVSWAGCCPRNDQSNHKIKSTRISRAGSYFKPVLVQVANALIKSRKHPEFTTRYRRIKARRGHKKAIIAICRMILTAIWHILTDLKPYTPEGFLESRPVNKSKVLTTSQALNLMKQRGYIIKDDVVSVT

SEQ ID NO: 212130 - protein, 345 aa, unidentified
MRPQADEAGEHFTVMNTTENIRRMADKFVARKPATFVYEAGPCGYELQRQLAEMGFQCVVISPGHTPVRPGDRVKTDRRDAVKLARLYRAGELTEIRIPNREEEAARDLVRVREDVVEDRLRARHRMSKFLLRQGRVWRETKSWGVAHGAWLRAQKFEALFLQETHNAYVRTLDEVDAHLLELTKKVDDLAGEKPYRQLVVCLSGLKGIDTLGAVTLAVEAQEFGRFESARDFMGYAGLSICEDSTGKRIRRGGLTKKGNAHIRRILGEAAWSYRSGGAGKPLLERRRRCPETVQRMAQRAQDRLHRKFWRMVKRGKPSQVAVMAVARELAGFVWAIAHEALKTV

SEQ ID NO: 212131 - protein, 390 aa, unidentified
MIYAGIDVAKDKHDCLIVDSNGKSLSKVFTITNNKQGFDELFVNLRTHSKDLSEIKVGLEATGHYSDNLLEFLIANDLPTTVINPLHTNLYRKGLSLRKTKTDKVDAHSIVTMLRTESLEPYSHSSYHIRELKSLTRYRFTLVQDCARLKTSFARLCVILFPELEKLVPSLHMASVYALLCELPNARAISECHLTRLTNLLSKASKGRYGKDKAIEIRYAAKDSIGSYSQVKSLELQQTIQLIQTMENQIAQTEARINPIVDNLHSLIMTIPGIGYRMAAIIIAETGNFASFDNAEKVLAFAGLEPSVYQSGQLTSTHAKMVKRGSKYLRYALFNATKYVCHWDPGFGQYLARKRAEGKAYNVAVSHAAKKLTRVIFHLVKTNQPFVSQA

SEQ ID NO: 212132 - protein, 387 aa, unidentified
MPQPNDLSRSLVALDHNSTIIAVVELSQSSWLVGGMVPGIERQPRKKLEPSPERLLAVLHRWRDEAVRAGRTITRIVVAFEAGRDGFWLARWLEAGGVEAHVIHPSSVAVSREHRRAKTDRLDTEMLKRGFSGWLRGERGHCSMVRVPTIAEEDAKRPNRERESLVGERTRINNRIKATLARLGIRNFKPTLRQAAERLATIHTPEGMPLPPNALAELQRDMARLGLVIGQIREIENARQKRLEQQPKTTPHAMVRLLARVVGIGIETADLLVNEVLSRPMRDRRAVARYAGLTGAPDESGARRREQGLARAGNARVRRGMIQLAWRFLRFQKQSTLALWYRARTADSRIGTRKTMIVALARKLVIALWRFVTTGEPLEGVALRPAA

SEQ ID NO: 212133 - protein, 315 aa, unidentified
MDEPRRVTACVGIDVSKDRLDAYVLPSGEAFAVARDGKGLESLVERLAVLDVSLIVLEATGGFETTVAAALAGAGLPLAVVNPRQIRSFAKALGKLAKTDAIDAEVIALFADKVRPQVRPLPTADARALGERVTRRRQIVEMIGMEANRRSHATDKRLARTIDRHLAFLEKELAAVDADIDTDVRASPAWRETEDLLSSVPGVGPVTARTLIAELPELGGLDRRKLAALVGVAPFNRDSGAWRGHRMIGGGRTSVRNVLYMAALSAIRHNPVVRTTYRRLVNRGRPKKVASIACLRQLLTILNAIVRTKSPWKIA

SEQ ID NO: 212134 - protein, 444 aa, unidentified
MGKAKFVKTTIDVVRPNAAGIDIASEVHYVSVPDDRASPSVRKFGSFTEDLHKMAQWLEQCNIDTVAMESTGIYWIQPYLILEEYGFEVYLVNARHIKNVSGRKSDVQDCQWIRQLHSYGLLNRSFQPESLTRELRAYMRHRKHLVQSTANQILHMQKAFEQMNIKLHDVISDITGQSGMRMIRAILEGERDANTLAKLASGKIKASKEKIAKSLTGVWREEHLFELKQAFDLYQYLNLKINECDEQINKVMTRLASNDNSDNIKRHKRTNKNSFHFDGTMHLKQILGIDVTRIYGISEVTATEIISEVGTDMSKWPTDKHFVSWLNLAPNNRITGEKQLKPKKSNKRNKAGQAFMMAASTLKNSEHWLGAFYRRIKARSGVGIAVKATARKLALIFYKMLKDKIEFEPVSIERYNQYFKERRIKSIERQANTLGLKLVPIFVS

SEQ ID NO: 212135 - protein, 320 aa, unidentified
MRNTVGLDISKLTFNASAMVGNAEYSAKFDNDSKGLDQFSDRLKSLGCQNLHICMEATGNYYEEVADYFAQYYSVYVVNPLKISKYAESRFKRTKTDKQDAKLIAQYCRSAQESELVKRQKPTDEQYRLLRMTAAYAQIKSECAAMKNRHHAAKDEEAAKAYAQIIKAMNEQLEVLKEKIKEQTEKPNCKEGVKRLETIPAIGRMTAAVLFHHLTSSKFETSNKFAAFAGLSPQQKESGTSVRGKGKLTKFGNRKLRAVLFMPAMVAYRIRAFPDFIKRLEEKKKPKKVIIAALMRKLAVIAYHVHKKGGDYDPSRYKSA

SEQ ID NO: 212136 - protein, 312 aa, unidentified
MTDVCAAGIDVGRDHLDVALAPSGRAFRVPNSQGGISGLIVRLRRAGAGRVVLEAIGGYAARLVRALADAGFAVGVVDPKRISALRLAEGRRAKTDRLDAQLIARFALLMQDAARPVPSARTFEIRALSTRRRQLVEMIAMEKTRLKQALDPAIAESCQRTIAWLGTERAEIEAKLEAMLLAQPQGAERARLLQSIPGVGPKISITLLADLPEIGVIDRKAIASLAGLAPHPQHSGTRDGPGRIAGGRPCVRAALYLAAVSATRTERGFKAEYTALRAAGKPAKVALIAIARKIVVTANLMLKTGQPWNRSA

SEQ ID NO: 212137 - protein, 339 aa, unidentified
MYPFYLGIDLHLKRTFMVLMDAKGEVIDKQRITNDDISRYLQEKVPQETYAVLEATRNWPFMYDLLNEHVQQVDLVHAKGVRAIANAAVKTDQIDASTLAHLARMNYIPKAYAAPLEIRDLRQLLRHREWMVNQRSKAKNRIHTVLAAYNLVSPVTDLFGAAGREYLHEVMEKDMRPAACQVIEDHLALIDHLTERIQAIEKSISLNEKQEHIVNILRSMPGVGRLIALILLAEIGDINRFHSPKALCSWAGLTPKVHSSDAVVQHGHITKEGSRFLRSAMVQAATTACRVSPKWYRVHEHMALRCGRRAARVAVARRLLTVIYYMWKKDQPYQENYGQ

SEQ ID NO: 212138 - protein, 331 aa, unidentified
MHYVGVDLHKRFLVACAEDERGAHTASGRFDCQDQEEILRFFEKLVPFRAVIEASCSYRWFHDAVAPLGEVVLAHPLQLRAIVAGRAKTDKLDAALLARLLRAGLIPEAYIPPPEYRELRDIARARSRLSRQGTTAVNELHALLCRRNIRLPFSNLSSMSSRRWVAGLELGTVDGFLRDELIRRLAHYHEEVSKLDALLHEMAARFPQVEALTVLHGIGLYSALLIVGEIGEPSRFADGRQVGAYAGLTARVSQSGEHAYYGHISHQGSPWLRWILVEAAMKLVFKDRQLGNFYQRVRKRSGAKIARVAAARKLAVICWKRLMHWQRQQAA

SEQ ID NO: 212139 - protein, 419 aa, unidentified
MYFKILKFKCCGLDVHKTWIYACIGITDSNNRTEYKQARFSSFTKGLNELCDWLAKYNCTDVCMESTGKYWIPVFNILEQHNLWVTLSHPKYTKPMKGNKTDRKDAKWICDLYMCGMVKPSFIPPADIRELRDLVRYRYKLTCMITGEKNRAQNCLTVSNLKLDDVFSDVFGKSSRSITEQILQHPGEKFDVAPFVHGRCKTPIEEIQAAVDGAISKEQAVKLRQCLDHIDELNKHISELEQEILRLSDKYEAALNLIRTVPGFDKNPMTAVQMLSEIGGDMSVFPTAKHLVSWAGCCPRNDQSNQKIKSTRISRAGSYFKPVLVQVANALIKSKKHLEFTNRYKRIKARRGHKKAIIAICRMILTAIWHILSDLKPYTPEGFLESHPVKEGKVLSSSQALNFFKQRGYIIKDEPLSVS

SEQ ID NO: 212140 - protein, 349 aa, unidentified
MLHVGLDLSRKRVDVCLVSGEGELVEHFRAPADRDGLYGLTRRVAVYDEAVRGVVESMNGARFVHDELVKCGWEVLVADAQRVKGLAPLACKTDKVDARVLAELSFRDLVPAIWLPTPELRAERERARWRLHLVKHRAILKNRVHASLIAFGHQVPMADLFGVAGRRLLAELDFPEPWLGHVQASLELIDDLDHRIGEIERWLRRSGADHRYIPLLMSAPGIGWITGFTIAAEIGDISRFSSPVKLTGYTGLCPRVSQSGEVDRRGPLSKHGPRYLRWGLMEAAIAASSHPLYRERYQRTKRRLGRQRGAKVAQIELARKLTEAIWYMLTRNQPFKPFAPAGAIFRLTA

SEQ ID NO: 212141 - protein, 425 aa, unidentified
MASRKQKAAQVSPALPPQLATANLHAAGIDSGAEAHFVAVPPSDDPQPVRSCGAYTADLEALADWLATCGITTVALALTGVYWMPLLELLETRGFAVLLVDPQQVQKIRGRPKSDVYDCQWIQRLHTFGLLARAFRPADQVCGLRSYRRHRAMLLTYAGQHIQHMQKALTQMHIKLQHVVSDLTGVTGMAIIRAILAGERDPVTLARLRDYRCQHSEETLAKALYGQWREEPLFALAQAGALYEVYHQQMLEGDRQIEAHLSTCAEHSPDQAPPSPPTRKRNQPTFDVRGSLQRVTGVDLTTIEGIDDTTALIVISEVGLDMSRWPTVKHFTSWLGLCPHQQVSGGKVLSRRTKSSANRVATALRLGAACLHHRHSALGAFFHRMKARLGTPKAITATAHKLARLIYTMLKHGTTYVQRGMDDYE

SEQ ID NO: 212142 - protein, 384 aa, unidentified
MIMSAERVNDCYVALELSQRTWLIGFLLPGTDKVQIMTVAGGDAEALLSALGRIESLAGTRLAAECTMVSMRVCYEAGYDGFWLARYLIDRGIDTTILDPSSFLVSRRGRRVKTDRIDVEAMVFTLKAYLLGDRSVCRPVRLPSVAEEDAKRLSRERTQLKKERTRHVNRIRALLVLHGIRSVPGLWGGRWKEALSNIRTGDGRELGRFIFRELCRQFERLDLVHSQLKSLEKERIQACETEGAINDSGKIRVLKQLDGIGEVGATQLVAEVYHRTFKNRKHLASYLGLSPSPYSSGEVHRDQGISKAGNKQARVMLVELAWCWLKYQPQSELTRWYRARFSGHGSRSGKVGIVALARKLAIAFWRFIEDGVVPEGATLAVATK

SEQ ID NO: 212143 - protein, 416 aa, unidentified
MSRKFMRTNTCGKLSQLLNIFERWFSHMYSYFVGIDIAKNTHWASCLSSDGEIIFEPFSFSNDNSGFQKFISKLESLDKTKILIGLESTAHYGENIISYLFNLDFNIGLINPIQTANLRRSNIRKTKNDKVDTKIIIKALTLGNYSLITSRDINNLKLKGLCRSRRNLVTMRSKAKIQLVSYLDQIFPELAQFFKGNLHLNVSYQLLKEYSSPKQISSLHLTKLSNILHDNSHGRYNKQDAIRLRELAKNSVGIDNPSLSLQIKHAILQIELYNEQIAEVEALYKQILDEMNTPILSIPGMSYNQAAVIIGCIGDINRFEHSCQLLAYAGLDPSVIQSGNFQAKSTRMSKRGSGMLRYSLVYSAHNVVKNNKTFRDYYELKRSQGKSHYCALGHVAHKLVRIIFKMLKDNITFNLD

SEQ ID NO: 212144 - protein, 351 aa, unidentified
MQIQSNTLDFDGQNIYVGFDVHLKSWKVTIMTDELIHKTFSQPPEPLILHQYLKKNFPGGVYHSAYEAGFSGYWIHNSLVNLGIHSIVVNPADIPTTNKEKVQKDDKRDSRKIAKALRSGDLVPIYVHSAKTLEDRYLIRARGLLVKDLTRNKNRIKSFLYFHGIKYPPSFENSKTHWSKRFVDWLEGIEMKEDSSKLTLSILVSEGKKLRSTILNVTRSIKELSQTVAYQEQERLLRSVPGIGLLTAMIILTEIETITRFGNTDHFHSFVGMVPSTRSSGEEEKVGEITPRGHGTLRSAIIESSWIAARIDPALTKAYHEYCKRMEPNCIFQPGSSPPFNRKVYHLVKIK

SEQ ID NO: 212145 - protein, 417 aa, unidentified
MIDDVQWFVGIDWATQSHRICLLDVEGRHVNERDFAHGGAGLTELRDWLLEKTKAAPGQIAVAIETPHGPVVEMLLDHGFLVFAINPKQLDRFRDRFTVAGAKDDSRDARVLGGSLRTDRQAFRRLVVDDPLVIELREWSRIAEELQQERTRLANRVRQQLWRYYPQVIELTDDVADDWFLALWQQVPTPATAAKVSEKTITRILKDHRIRRLDAATVLQTLRQKPLFVAPGTTEAACAHIRTIAARLRLVNQQIKEAHRALDGLCAKLEARESPSGQNREQRDVTILRSWPGIGRIVLATLLTEAAEPLRARNYHALRALAGTAPVTRRSGKQCFVIRRHACNGRLQTAIYHWSRVAIQRDAVARRRYDALRRRGHGHARALRSVGDRLLYALCTTLKRQTTYDPNCQTAQITASL

SEQ ID NO: 212146 - protein, 418 aa, unidentified
MKTDCETIPCERFLALDIHKHYVLVGGMNSLKEWVLRPRKVQMSRFPEWVQKNLKPTDALVLESTSNAWEIYDLISPLVAKAVVANPLKVGQIAGAKVKTDKLDVERLLILLIADIVPEVWVPPHHVRDLRALISHRWRIHKQIAMTKNRLHSFIHRFNLIPPAGPLFSEKNLSWWQEQEFSSMVRLQIEQDLLILEHLTAHKEAVHQELACLSNRKPWSKDVVFLMQLPGLGVVLSMTVLSAIGEITRFENAKNLVGYAGLGAGIHSSGLKHQGKGITKAGRKELRWAMVEAAWGAVRSDSHWKDQYEQLKKRGKHSNAAIVAIARKLLVSIWHMLAKGESHRHSTEEDLAYKMLIWSQRMDEEALRGMTRQQFAKYGLLRLGKGIHLTRIVRNSLPRRIAPADEVLALLPELNLLE

SEQ ID NO: 212147 - protein, 323 aa, unidentified
MNKYKETFGADISKDVFDVHGSSSGHNQFKNDEKGFTSLLKILSEDSIVVMEATGYYLYRLAQFLYKNNVVVSVVNPLSVKRFIQMKLAKVKTDKSDAKAICEYALANEVPLYNALTDVQAECLQLFRLLDSYIKKRTATKNKRHGEEVLGIPSKFVYRSLKRDLKHLDKEIAGIEERLLTLVKKEQQQQLTLLTTVPGIGPKTALFLIVVTDGFSKFETAAQLCSYVGITPTIRESGSSVRGRSRISKVGNKKLRNLLFLCSFNACKQNKACRELYERIINKGKSKKLTLIAVANKLLKQCFAIAKSGLPYDAEFVSVLAVK

SEQ ID NO: 212148 - protein, 454 aa, unidentified
MIAAVVERCAGIDVGKKFLKVCVMVGPLNQEPRFEIRKVDCTSTALEGLRQWLKAEGVTQVVMESTGPYWVPVFNVLEADVKVVLANPVEVKNRKGHKTDAKDCWWLAHLLRHGMIRPSFIPEKATRDLRELTRRRKKLVGQAAQERNRVQKQLEYGNVKLGNELSDVFGLSGQLMLKALVDEKRTAEEIAELAQGRLKKKKPAIAEAVRGQRLSETQKEMIRSSMRHMTFLELEIEQLDGLVAGLIDESGQKKQHELLQTIPGIKQEAAGNLLAETGSDMKQFPAAGHLSSWGGVCPGNNESAGKHKSRHTTHGNPWFRATLTECAWSASRTKGSAFQAKYESLKPKIGHKRALVAVAHLLSHAIYYVLSRGEAYRDTRPKELNQIQRQRIIRHHTRRLRRLGFWLPAEKLTPLQQWYATHCIPNIDPPQPKRRGRKKRQSPGGASEGGVVNG

SEQ ID NO: 212149 - protein, 359 aa, unidentified
MLTQSNKINSDSQHIYVGFDVHLKSWSVTVMTEELTLKTFTQDPRPELLHQYLVRNFPGAIYHTAYEAGFCGYWIHNKLSALGIDSIVVNPADVPTTDKEKVNKDDKRDSKKIARALRSGQLKGIYVMPSKTIEDRGLLRTRETMVRDLSRIKNRIKSFLYFHGIDFPQKFKNKSTHWSKRFSIWLQSIDLVEYGANKSLSLLIEEAKHIRSSILEATKAIRELSQTEDYSSRIRLIRSIRGIGILSGMIFLTEIETISRFSNFDKLCSFVGLIPSAHSSGEKEIHGELTPRGNNYLKSTLVECAWIAVRWDRDLNKSYHDYCKRMEPNKAIIRITRKLLNRIRFVLKNNQPYVCSVVK

SEQ ID NO: 212150 - protein, 414 aa, unidentified
METLNRFVAGIDVHKKMLAVVVRREQDGQTQYEKHRFGATRSEIASLAAWLQHQQVSEVVMESTAQYWRPVWYGLEAHFQLHLTHPLKTRAPRGRKRDFRDAQRLADRWRSGDLEESFIPNAEQRSWRWLTRTRVQLKRKVGVIRCHVEGLLEQGGIKLTSVASDLFGVSGWAMLERIAKGEVDVEIMVKEARGALRKKETQLREALTGQLEPIYRLLLKQHMDQVRLLWRQIDELNQTLAGAMKEHLPALHRLSKIPGVDLYAAQELLAEIGPRATAFASAEQFVSWVGVCPGSQESAGVCYSHRSAKGNRYLRRLLCQVAWAAIHTKGTFFSGLFARLKPRIEGKGAAWAVAHRIAKIIWLVLHKEVEYQEKGPVPANERTLIRKFNRLVADFQRLGLNVRTLLDQRLPANA

SEQ ID NO: 212151 - protein, 400 aa, unidentified
MRYFGLDIGRDFAHVAVVDGSGPARQLPRLAMGEQFRAFAGALGPDDAVAIEASTNTWTLADLLGVHAGRVIVSNPLRTKAIASAKRKTDDIDAATLAELLAADYLPPVWQPDATTRRLRRLVSHRAGLVRDRTAARNRVAAVLARRLVRPPATDLFGVRGRTWLATLELPLEERLALDAALRLDTALSAEVEAAERAIAAVIVDDPRVRRLLTIPGIGLVSAASILAVIGDVERFERPAKLVSYLGLDPRVRQSGDRPAMRGHISRAGQAHARGLLCEAAHSAVRSPGPLAGFHARIKARRGAAVAIVATARKLAVLVWHVLTSGENCRYGPPARVALKHRQLDRLAGRERTRPSQRGATGFSHDRSRARLRGGDDPHHPALRQAIDRVHPDLTSASGA

SEQ ID NO: 212152 - protein, 342 aa, unidentified
MEHYAGIDVSLEYSAVCVVDGSGKIVREGRPLSEPEALIGWFGSLGLELTRIGLEAGPLSQWLHAAMKQEGLAVELLETRHVRDAFKAMPVKSDRNDARGIAQLMRLGWFRPVHCKSINAQEVRAVLTARKLVQTKLLDIESSLRGILRGFGLKVGKTTGRSFAGRIRELTDGHPNLAEIGEALLSVRAVLLREFDAFEKRVRAMARSDARTRLLMSTPAVGPIVALTYSSAIDDPARFKSSKQAGSHFGLTPKKYQSGETDRSGRVSKIGDASVRQALYQAAHVMLTKPAKGCSELKGWAMRIAKRAGMRKAKVALARKLAVILHRMLANETPFNPAAAAA

SEQ ID NO: 212153 - protein, 322 aa, unidentified
MNKYNEIFGVDISKDVFDVYGSKRGHNQFKNAASGFMFFLKNLPKKSLVVMEATGYYHYRLAQFLFKQGVLVSVVNPLSVKRFIQMKLAKVKTDKSDAKAICEYGQINQVPLYSALSDVQSECLQLFRLLDSYLKKRTMTKNKLHGEDVLGIPSKHVYRSLKRNRKHLDTEIASIETKLLSLVKQDQQAQLTLLKSIPGLGVKTALFLIVITDGFTKFETAAQLCSYVGITPTIRQSGSSVRGRSSISKVGNKKLRNLLFLCSFSACKHNKSCREIYERIVNKGKSKKLALIAVSNKLLKQAFAIAKSGNPYDETHVSLLSK

SEQ ID NO: 212154 - protein, 401 aa, unidentified
MSENSTTHPEPEFVAFVGIDWADQKHAWCSQRAGATQREHGEVEHTPEMVEVWVSQLAQRFGPGPIAVAVEQVKGALVYMLSKYECLHLFPVPSTMSASMRKSLYPSGSKDDPRDAELLLDLLLQHRNKLRRLTPDDEVTRRIQNLVEERRTLVDEKTTQLNRLTGYLKVYFPQMLEWFEKLDTKLVCDLLERWPSLEELQKVPPAELRKFFGQHRGRHQELTERRLEGIGHAMPAIRDRAVLEAKRAMVQVSAQLLRILLEGIANLDSKIEEAASAHPDFFIFESLPGAGAALAPRLLAAFGSQRDRYGSAEEVQTHSGIAPVMEKSGKKKWVHFRWACPKFLRQSFHEWAGHSISQSTWARAYYQQQRGRGKDHHAAVRLLGFQMDSHPISMLARSSSL

SEQ ID NO: 212155 - protein, 410 aa, unidentified
MQTLVERGCGMDVHQATVVACLLVVLKDGKVQKQIRTFGTTTRELLTLREWLLSEGCTHVAMESTGVYWKPIYAILEGAFQIVVANAQHVKKVPGRKTDVKDAEWIADLLCHGLLRSSFVPPQPIRELRELTRYRRKLVESRSAERNRLLKLLETANIKLASVATDVFGVSGRLMLQALVQATTTPQEMAELAKGLLRKKIPELKLALEGKFEEHHRFLLGVQLRRLQAVEEDLRLLEQRIQEKLKPYAMQLALLQEIPGVDWTLAAVIISELGVDMSVFGNVSQLASWAGICPGNNESAGKRKSSRIPKGNVYLKTALVEAANAAAKAKGTYLRDKFYRLKARRGYKRAAVAVAHKILVAIYHMFSHQVCYHELGDLYLDKLNQHHVTRNLVRRLQRLGYSVTLEKKAA

SEQ ID NO: 212156 - protein, 392 aa, unidentified
MIIVGIDVASEKHDYFMLRKETGESFSSSAITILNNEAGYKKLHKDIQTFCGATGDSKVRIGLESTGIYHTNIIAFLLEQNYETMMINPILTNMARKASKVHTPKNDNLDAQTICKYLVDNESSFAPYTPALYHIQSLKSLSRKRFYIVEELRKAKLAVNNLIQLIFPEFKLLFSNIYGESALSVLKAYSSTQKLARAHSAKVASLLHGRCKCTADQLIEAARHTVGLKSDCYAFELLDAIEELEHIQRRVDNYDAQIKHYVDDLCPNLLSIPGISYTTAGLIAGEIGDIFRFHSTDSLVSFSGIDCTVYESGKYKSQHCIPSKKGSKYLRYALFQVSRVIWQWDPIFREYYDKKAAEGKHYYVILGHIQKKVIRVIYSVMKSGQNYVARTA

SEQ ID NO: 212157 - protein, 469 aa, unidentified
MNNAKKKKRKNNGKQHNSLSQLEQINLDAAGIDIGAEEHYVAVPKGRDPEGEDVRHFNTFTVDLLSLANWLKKCKIDTVAMESTGVYWIPLFEILDSQGFDVKLVNPRSIKNAPGRKTDVLDCQWIQQLHTYGLLQGAFRPDDQICELRSYLRQRSMLISYASHHIQHMQKALEQINIKLNRVITDITGVTGMDIIRAIIAGERNPEKLAQMRNPRCKNSKSTIAKSLQGNWRSEHIFALQQAVELYGFYKNQITACESRIQEHLETFDDRSNGKPLPKPPFKSGGCRNKFHFDARAYLYRMTGVDVTRIEGIDTPTALTIISETGIDMNKWPTDKHFASWLALCPGSKISGKKVLSSKSRPCANRAAHAFRLAAYSLHKSNSALGAFLRRKKSHLGSPKAITATAHKIARIFYNMLKTGTEYVDLGQDYYERCYQDRVITNLKRKAKQFGYDLVNVKEHELLTTPLQI

SEQ ID NO: 212158 - protein, 360 aa, unidentified
MTLKAKTLVGLDVHARQTHAAVLDPESGEIAVRRLRVAPGGVAEFLAELGPDVLAVYEAGATGFGLARAGAEWGLDVRVAAPGSIPRAPGDRVKTDRRDAIRLARLLAAGELTFAFVPSVADEHFRDLVRVIEDVRSDLMRARHRLGVFVMRRGERYSGSGNNWQPKHMSWLRALRFEDACSRATFDEYLDAVELLTSRKAALVRALEQQVPRSSHAPMVARLRCFRGIDTLAAAGLCAEVGSFERFAKPDLLSGFLGIVPTERTSDVRRRQGAITKAGPAHARRLLVEAAHHYRFKPAIGISLGRRQEGQDPRVIAVAWRAQRRLYQRWAHLRQHKPVPVVAIAVARELAAFVWEAATL

SEQ ID NO: 212159 - protein, 369 aa, unidentified
MNEVITGYVGLDAHAESTAIAIADAGRTAPRFIGTVGPQLSQLTKALERLGEPQSLQVVYEAGPCGYGLARALLERGYHCEVIAPARIPRRPGERIQTDRRDALNLAGLARAAQLVKVVIPDPRDEAMRDLSRARVDAVRARLKARQQLNALLLRHGRRYEGKTRWTAAHERYLGLISFGHPAQDIAFAEYRQAVSESHARVERLGQSLAQELERWRMQPMVRALMSLRGLDLVAATTVVAELGDLRRFAHPRELMSYLGLVPSEHTSGPKRRLGAITKTGNGHVRRILVEAAWNYRFPPRLSRTLLVRQQEQPALIQQIAWRAQLRLSHRYRRLRARSLQHNKITVAIARELAAFIWEIGQQVTPVTS

SEQ ID NO: 212160 - protein, 394 aa, unidentified
MGKLYVGIDISKDRSSAKGIDEHGESRFEISFAMDGTGFAELLKAIRANSDGYGDVTAAMESTACYHINLYSFLSAKGIDTVVINPLLISNFAKLSLRKTKTDKKDAGTIAQFILAHKDSVKQLAVSQDLQDIRDMARERESLSHHISATKVEIQRILQTTFPELATLTNPLTKVMLHFIQRFPSARLVSVAKPKVIEEILKEKPCSCRLRFTPKDLIELARKSIATVSPAKEFILSGKIETLLHLEKRCDELSKALTKYCESTIVEDLRIVTSIAGINNKMATTLLAEIGQISNYHSHKNLIAFAGIDPSVYQSGKYEGASRISKRGNRHLRRVIWLMAISVIQHNPIFRKYFMKRRNEGYPFKKAVFATAHKLMRVIFAMLSHRTFFEEQCV

SEQ ID NO: 212161 - protein, 283 aa, unidentified
MDYFAGLDVSVKATSVCIVDDTGKTIREVKVASEPEALLAVLNTPAYHFKRIGLEAGPLSQWLFSALAEAGLPVICVETRHMRAVLKAQINKTDRNDARGIAQMMRVGPYRPVHVKTLRSQKLRMLLVHRKLLQSKSIAIENDLRGTLRNFGLKVGVAGTTKFEARIKELVENLPDLAALVEPLLVVRRVLREQIAVLHRRLLAIVRNDEVCRRLMTTPGVGPVVALTYRATIDVPARFRNSRAVGAVMGLTPCKYQSGQSDRTGAISKCGDEMLRVMLYEAG

SEQ ID NO: 212162 - protein, 315 aa, unidentified
MDSAAVFAGIDVGKDYLDVALRTPGRAWRMRNDREGVASLVRKLRAVQPERIVLEASGGYELRAADALSDAGLPVSIVNPRQVREFARGTGHLAKTDPIDAQVLAHFAEVVQPAPRPKPSKHARRLAALVLRREQLVAMVSAERHHLAQADLCVRDLITANIRQLKAAQAEVESQISALIREDTDWCERERVLRSARGVGPVLTQTLIAGVPELGTLGAKQIGLLVGTAPLNRDSGRFQGKRTVWGGRARVRAVLYMATLVASQCNPVIQAFYERLLARGKAKKVALVACMHKLLIILNAMVRDGRTWQETPQPA

SEQ ID NO: 212163 - protein, 332 aa, unidentified
MNKIYIGIDLHKRSQTWVALGEKDNTKLFTRNYLVTPEEIVQAVNQAKKFGDQLIAFIEPVCGWIWVVRQLKSLGVEVHISNPRKIRMIADSLQKTDEEDAYTLAKLLKTGNAYESYECDEETRKHRSLARERCFLVNTRASIKTRLESIVTRDGNHMFSPSLKNRTKISVPNEEVKIHTDAIQAMDIIIKNVEKQISKNTDYKKEEIKRLLTIPGVGEVTANVIVAEIGDFSRFKKPQQLSSFAGLVPKERSSGGKQKLGSITHTGSPYLRYVLVESAMRIRDTKDTFSLYSFYKKIKTKSGAMKARVALARKLLTIMWFMMKNKQDYVAY

SEQ ID NO: 212164 - protein, 387 aa, unidentified
MPQPNDLSRSLVALDQNSTIIAVLEMSQSSWLVAGMLPGIERQPRKKLEPSPERLLAVLHGWRDEVVRAGRTITRIALAFEAGRDGFWLARWLEARGVEAHVIHASSVAVSREHRRAKTDRLDTELLKRGFLGWLRGERGHCTMARVPTIAEEDAKRPNRERECLVGERTRIVNRIKSTLARLGIRNFKPTSRKASERLATVHTPEGMPLPPNTLAELQRDMARLGFVMSQIREIEVARQKRLEQHPETGPHGMVRLLARIVGVGVETADMLVHEVLSRPMRDRRAVARYAGLTGAPDESGAQRREQGLARAGNARVRRGMIQLAWRFLMFQKESALAVWYRARTADSRSGTRKTMIVALARKLIIALWRFVTTGETLEGVILRPAG

SEQ ID NO: 212165 - protein, 351 aa, unidentified
MTEILKGMIAAIGIDIGKNWFHVVGLDGRGAIALRQKWSRGQVEARLANMPACPIGMEACVGAHHLSRRLRLLGHDARLMPAKYVRPYSKGQKNDFRDAEAIAEAVQRPTMKFVATKTTDQLDLQALHRVRERLVSQRTGVINQIRAFLLERGVAVRQGRHFLRAELPGILATGCAVLSGRMVHLIADLAGDWRRLDERIEGLSGEIAALARQDAGCERLMSVPGIGPIISSAMVAAIGVGDTFTKGRDFAAWLGLVPKQFSTGDRTVLGKISKRGNRYLRALFVQAAWVVLIRSKNWERYGLKPWIEAAKRRLHRNVLAIALANKLARIAWGVLAHGRSFEAAKVATLPA

SEQ ID NO: 212166 - protein, 446 aa, unidentified
MDHANGLSRGDRNRNSRLTRLRGLVPVSNAIIAIDLAGEKQMLVVTDHDSRVLARRTFRLAAWHMGAALDWAVEHATVAGFAGATVACEPTGHRWRVIGQLAADRAMPFVCVQPLLVARSRENENYSRDKTDDRDAVLIARLTAELRCYAPEATDEVWARLRHLGARRARHLEETSSLVQQMRDLLECAWPAMLDTAAKQFKAKTWLAALAVVTDRCNGDPARLRRLGLTRFSAAVRREMPRWQAQRPCRRIVEAVFAALADTTGVTVQRRGILERVGLVLDDWRDLHRRIADTETRMVAVLDELELTELVTSIQGLSAVNAAAILAESGDLRRFATGRALVKHSGLAPAEQTSGKLVGRTRLTGRGRPGLRTAAWRAAWGAMKSNPVYQARLLHLTTREHGKLKPAQARCAIAAALLRQLHSVVTTGQAWNPAIAANGTRMALAA

SEQ ID NO: 212167 - protein, 351 aa, unidentified
MNINHYIGFDVHKKSISYCVKAPDGKIIEEGKLRATRHVLREWAGKRKEPWHGAMEATLFSGWIFDVLKPFAGKLEIGNPVMMKAIAAAKKKNDKLDARKIADLVRCNLLPGCYVAPVEMRDLRRLLRYRNTVVGHAVQTKNKMSGLLMEVGAEYSKQRLHGKKYFTELMGELEEVPDSVKDMLRLSRSALEMFEATQRQILDRLQKEALLKKRVKLLQSIPGVGEVTSLTWALEVCDPRRFPSIADAVSYCGLTSALDSSADKQKRGPLSKQRNPHLQTVLIEAAKLAPRWNRQLAELHERELQSGHRNRATLEVARKLVAYLLAVDKSGKPFEVRNQAVPKTGEETKVA

SEQ ID NO: 212168 - protein, 321 aa, unidentified
MRTDHLAGADAENVILAASLELAGAQWKIALHDGRRQSPAVHTVRGAQAALRVQALLEVIERYKQKWSLPQDVRVVVSYEAGQDGFWIYRALRSRGMDCYVIDAASIPVERHRRRAKTDRLDAIKLVTNLRVWLHGERDRMRVVRVPSLQDEASRQLIRDRGQLHKEVLQHRERMRKLLITMGCWDGFDHRTFAKRLASGKLVCHDGTPLPSELHERLLRETARLALAEEQLAALERALQERLPAPVRERITYLRHLKGVGQLGASRLMLELFWREFGNRRQLGACVGLVPQPYDSGQSRIDQGISKQGNRRVRTQLIEMA

SEQ ID NO: 212169 - protein, 370 aa, unidentified
MLNTTTFVGLDVHARSIKAVALDAMTGEVRSATFGYDAAEVAGWVSSVDPSAKCVYESGVTGFDLQKRLSSMGIDCVVGAVSKMIKPSADRRRKNDRNDAEFLARMLSVGNVVEVWVPDDECEAARDLTRALDDAREDLKRCKQRLSKFLLRHGLVFSETTPTGRRKGNWTAAHWAWIRSIEFPEKADDDVLAYYVDAVRQAMENKKRLEKLVEAEASKPRWKKRVDSLRCLKGVDAMTAADIVFEAGEFSRFKNARSFAAWLGLTPSEHSSGESARQGGITKAGNKHLRRVLVEAAWHYISASPHPKDLAKGQAPDPAARRHAAKGIRRLVKRREEMLGRGVHKNKANVATARELACWCWAVGRMVENG

SEQ ID NO: 212170 - protein, 418 aa, unidentified
MKTFSSFEFAAYIGIDWSDTKHDICIQPAGGVEREFECIAHQPEAIAQWAQSMRQRFGGPIAVALELAKGPLVSALQNYDFFVLFPVNPSMLAKYREAFKPSRAKDDPSDAELAVDLVLRHPERFRPLQPQSIEMRTLVHLVEKRRRLVEDRRRFSNRLISALKAYFPQAVEWFSHKETFVFCAFITRWPTLKQVKRARRSTLERFFREHNVRRPRIVEARIQAIKAAVPLTDDPAVIEPYTLEALALAEQLRTALELIKRFDDAIATLAPTLPDYAVFASLPGAGPVYTARLVAAFGEDRERFQSAAEIQRYSGIAPVTERSGKTSWVHWRWACPHFIRQTFVEWAEKTIHYSFWAGAYYRQQRLKGASHNTAVRALAFKWIRIVYRCWQSHTPYNESLYLKALQRRGSSLVPQESA

SEQ ID NO: 212171 - protein, 343 aa, unidentified
MQAVTTIGLDIAKSVFQVHGVDAQGTVIIRRQLKRRYVLSFFQKLPPCLVGIEACATSHYWSRELKALGHRVRLMPPAYVKPYVKRQKNDAADAEAICEAVGRPTMRFVETKTPEQQGCLALHRTRHLFIRQQTAIINAIRAHLAEFGIVAPVGRRGVDQLLAVVADVSDKRLPEVARACVAALGAHLQMLKAQVLEFDRMIRAWHRSNETSRRLDAIPGVGPALATALVASVADPRAFRSGRDFSAWIGLVPKQNSSGGKERLGNISKRGDRYLRGLFTAGALAVIRYAKIHGTTHRPWLTALLARRPTKVAAIALANKIARMAWAMMARGECYREPVALAA

SEQ ID NO: 212172 - protein, 420 aa, unidentified
MFMIIPSQFPYQATVGLDWADQKHDVFVRFANGDSYRRKIDSRPEAIQEWLLELRSTCGEGKIALALEQRRGALFFQLCTHLSWIDLYPINPHSLASFRQTFFSSRAKDDPVDSQLLEELLRTHPERLRPYQPEPTTQRKLEQYCRHRRRLLDLATKTELKLISTLKQYFPLAVHLFNDVGMKSDIALSFLSRWPTLDELQRAKAHTVRSFFYAHNSRSQSLIEKRLQQIAQAHPVTDDLALIEPLLLTTKCLVAQLRRFNQAINEFDRKIRELFKSNPDHFLFESLPGAGEQLAPRLLSLFGSDRSRWADATDIQKYSGIAPVVERSGKSLWVHRRLARPIFICQTFHEFAQQSIQHSSWAEQFYRRQRQRGKSHHSAIRALAFKWIRIIYACWKANKPYDESFYVQTLEKRNFSVSST

SEQ ID NO: 212173 - protein, 343 aa, unidentified
MEYYAGIDVSLKDSSVCVVDGGGKIVREAKVASEPEALIAWFGGLGLEVARIGLEAGPLSQWLHAGLSEAGFEAVLLETRHVKAALSAMTVKTDRKDARGIAQLLRMGWYRPVHRKSPGAQEVRALLVGRKLLQSKLRDVELSIRGILRGFGFKVGEVSKAKFAARIRELAAGHEMLETVTGAMLTAREGLLAEFMRLHRRMLAIVRADEVCRRLMTVPGVGALVSITFRTAVDDPRRFSSSKAVGAHFGLTPKRYQSGETDVTGGISKVGDAMVRTALYEAANAVLSRPTRFSALKRWAMEVARRRGLKRAKVALARKLGSVLHRMWADGTEFRWGKEAQAA

SEQ ID NO: 212174 - protein, 337 aa, unidentified
MHSNNVMIGVINQEGKRVVHRKLECDLKQVIGFLEPMKARLASMAVESTFNWYWLVDGLRAKGYPIDLANPAKIEQYSGLKHADDKDDAFHLADLQRLEILPKAHIYDPQLRPVRDLLRRRAHLVHQRTALLLSFKSLYTRTTGESLALSDVKKLEAKEAPKLYEHPANQLIAQVQAEHIQALGESIGRLEKAVLGYTRAIPLYEKLLTIPGIGRVLGMTITMEVGDIKRFKTDGDFASYARMVDARRLSNGKVKAENNQKCGNKYLSWAFVEAANFARRYDAHCRRWYDRKAGKTSKVIATKALGCKLAKAAWHIMTNQSNYEEKRMFPELAKAKN

SEQ ID NO: 212175 - protein, 387 aa, unidentified
MPQPNDLSRSLVALDQNSTIIAVIEMSQSSWLVGGVLPGIERQPRKKLEPSPERLLAVLHRWRDEAVRAGGNITRIAVAFEAGRDGFWLARWLEARGVEAHVIHPSSVAVSREHRRAKTDRLDTELLKRGFLGWLRGERGHCSMVRIPTIAEEDAKRPNRERECLVAERTRIVNRMKSTLARLGIRSFKPTLRKAADRLATLHTPEGMPLPPNLLAELRRNMARLGFVVSQIREIEEARQKRLGQEPETGPHAMVRQLARVVGVGIETADMLVHEVLSRPMRDRKAVARYAGLTGSPDESGAKRREQGLARAGNARVRRGMIQLAWRFLLFQKESALALWYRARTADSRLGTRKTMIVALARKLLIALWRLVTTGETLEGVILRPAG

SEQ ID NO: 212176 - protein, 315 aa, unidentified
MQKQASFVGIDISKNSLDVHILPEDTRHSYPYEPQKVKALIKKLKQLKPVLIVMEATGGYELVVASKLAEAKLPVAVVNPRQVRDYARAIGKLAKTDAIDAYVIARFAQDVRPEAREQLTLKEQQLKELIMRRQQLIDMRTAEKNRLSRAFSRQIVKGIKKIIQALDEQIQALDDQLKREIQDNPTWDRKIEVITSAPGIGITTANMLLFCLPELGRLNRRQIAALVGTAPMNRDSGMMRGKRTIVGGRAVVRKSLHMPTLAAATRWNKKLKVFYEQLLARGKKHKVALTACMRKIIIMLNAMLKNNRVYDPKFC

SEQ ID NO: 212177 - protein, 407 aa, unidentified
MFQRENKKACVSLDVSKGSSHVQAFYSVGQKATDVCVIKHTKSGFEKLNEIIVALENSTGEKCVVVFECTGVYSKPVENYLQKIGKKYFLIPPLLSAKVRKSDIRPTKTDSKDCETIANVYFLKKLRPAKPFEKLHDKLKSFCSYYLFLINRTSCMKTKYRHYLDNVFPRIDEYFNVYSPFFMDLIIKNPNPQKLKKKTDEFLYKFITSYDYFGNGKATVFINSFHRYFEDAAIDINEDDAAIDVLSSSAKKLKEDMKSLDDLLEEIILLGMKTEEYKYLITTIPGMTKNTASRIAAEVSGIDRFPTASKFIAYAGIDPTVKESGKMTGEHLPITHKGNQRLRCLFYLVASGTSKSKSEANPVRDFIIKKKSDGLSAKAAIIAGCNKLARIIYAVCSKREPFSLQNQ

SEQ ID NO: 212178 - protein, 393 aa, unidentified
MGPQGSSQAAGFGGIAGQGRSGLARSDRDAATTGRCGGAGTGRPHGLQRLDLATKPWAPVPDLMKLEPLTEPPSSYRKMESTDPQFQVTYVGLDVAKDRLDYTVDGIRCAHVPNTSAGHARLAQHLRRVPAARVVCEASGGYERAVVAHLLTSGVEVCVVPPGRVRAFAHAEGLLAKTDRIDAGLLRRYGEKMQPRLAVPTTPAAVVLRELLEHRRQLSDYLVATNNRLELAGPTLRPRLERQQTFLQEELAAVDQLIEEHIAGDDDLRGKAARLRELKGVGPVLAATLLAYVPELGQIDSAQLSALIGVAPFARDSGKTSRPRHVRGGRGVVRHVLYMAAVAAIHYNTILAAFYARLRATGKPATVCLVAVMRKMLHVLNRLIADPHFVLAH

SEQ ID NO: 212179 - protein, 391 aa, unidentified
MIYVGIDVAKDKHDCFISNSDGEVLFKAFTIPNNLDGFNNLYQKIESVMEDISKVKVGLEATGHYNYNLLGYLIDKGLPTYVINPLHTNLYRKSLSLRQTKTDKVDARTIASMLMSDVNLKSYSDTSYHNEELKSLTRYRFDKVKERAKLKTSVSRLVCILFPELEKLVPTLHMASVYALLSEFPSAKHVATAHLTRLTNLLSESSKGRYGKDTAITFRDSARASIGSNMPAKSLELKHTIKLIQELDSEIDEIENEIKIIMDEINSPILSIPGINYRMGAMIIAEIGDFNRFDSPDKILAYAGFSPSTYQSGQLDGAYAHMEKRGSRYLRYALYNATKYVCHWDPTFAAYLAKKRAEGKHYNVAISHAVKKLVRVIYHLEKTKQQYIKAA

SEQ ID NO: 212180 - protein, 337 aa, unidentified
MKRYLGVDLHRTQMTVCTRLESGEESVREWAIKDLPEFAEQLRAEDEIAVEATGTTGRFYDAVVGRVARLVVVNPHKFKIISESVSKTDGKDCRELALFLSKDLLPEVRMKPKKQRELAHMTETRDLLVKQRSAVKGKINNLLAMQGINLKREARSSKVALERGMGLEVSAMVKLELRVLVEQIRALSASIGELEELIAEEGEQLAGHRNLTSIKGIGSLSATVLLTTIGSVGDFADENKLAAYLGLVPRVQNSNATERNGAITKMGNKLARTALVQCGLVAKRYSPYLNRFYQRIKERRGGGKAKIALARKMVKIVYDTLKNNWVFDDFPSFTLAA

SEQ ID NO: 212181 - protein, 321 aa, unidentified
MFSGPTNIGIDVSLDKLDIAVYETNEYFVVSYEPAECIEMIDRIKRLNPERIIIEASGGVECFIVSLLAAADLPVMVVNPRQIRDFARATGKLAKTDRLDAFAQARFAAVVKPEVRPLKPKETQALEALLARRQQLVEINVAERQRFAQAQQQRRKEVAKDIKVHLDWLKKRLAKCDAQLATAIRNSPVWHEREQLLRSAPGVGRITALTLIAELPELGQLEHKQIAALCGLAPHANDSGRSQGRRATHGGRSRVRATLYMAVLTAIRNNEIIKGFYQRLLAAGKTKKVALTACMRKLLVILNAMVKSNSPWRAENTQEIS

SEQ ID NO: 212182 - protein, 342 aa, unidentified
MEIAVLGIDLGKNSCSVVGLDGTGQVVMRRRMQRDSVIKFASGMAPCLVAMEACCGAHHLGRIVRDYGHQVRLMSPEYVRPYVKAQKNDDRDAEAIAEAATRPTMRFVELKSAEQLDLQSLHRVRDRLVGERTALMNQLRAVLMERGITVPQGRRKLEQHLAMILDDEELRLSPRVRSLVEDMRAEWEALDRRIEAFDDEFAAHAKTDDAARRLASIPGIGVLNATALAAAVGNAASFARGRDLAAWLGLVPRQMTTGGKPRLMGISKRGNKYLRKLLVHGARAALPSLLAGTTPLGKWLNNLLQRAHKNTVIVALANKLARIVWAVLRRGGIYDAATLTAA

SEQ ID NO: 212183 - protein, 317 aa, unidentified
MTTDARPFVGIDVSQATLDVAVRPSGAGWQVTNDSAGISTLVEQLRDLAPSLVVLEATGGLELLVVSELAIAKMPLVVANPRQVRSFARATGKLAKTDALDAQVLAHFGEAMRPEPRPLPDAATRELESLATRRRQLVDMRTAEVNRLRLAPRRVRPQIEEHIGKLDGYIADLDGQLDELLRSSPVWQAKDTLLRSVKGVGPVLSTTLIAQLPELGTLNRKEIAALVGVAPLNQDSGTWRGKRRCWGGRGDVRAVLYMATMTAVRHNPAIRAFYQGLLKAGKLKKVALTACMHKMLLVLNAVLKTGSRWQPDFQPAA

SEQ ID NO: 212184 - protein, 322 aa, unidentified
MAMLSFGGIDVSKDRLDVVVLPEEECSSVPNDAAGWAELVERLRGFSITAIGIEPSGGYERGAMRALLAAGMPVRQVNPFKLRQFARASGVLAKNDPLDARMIASFVTIMPTRPAQRQTPAAERLAEMLATRRQLSAEKVAAENASRLLEDAMLQRLSRRRIVRLAADIDLLDKRMVEIVATDDALVHRYRLLTSMPGVGAVLACTLIALLPELGRMSRKQVAALVGVAPYAFESGTLKGRRCIWGGRAHIRQVLYMAAMSASNWNPVLKAFHDRLTAAGKLPKVVIVAVMRKMITMLNAMVRDDVVWADRLSGRHVLPTAR

SEQ ID NO: 212185 - protein, 467 aa, unidentified
MAKERKIVKTTKSQTLKIIYPDTAGIDVGKDLMQVSVPEDRCEQSNRSFGTFTQDLREIVRWLKENHIQRAVMESTGVYWIPLFLMLEESGIEAFLVNARDVKNMSGRKTDVSDADWLRTLGAMDLITPCFQTSSGARRLRSYARQRRSKVVDMAVAIQQMQKAMEQMNIKLSSVLSDITGKSGWAIIKAILKGERNPRSLAALADRRCQNPQETIAKSLEGTWDMEHLLSLKQAVETYEFLQKQVAECDSEIKVFLDSYEMSSPTISSDDPKKGLTRAKKSERPSSTKNGFDIDLEQYAFNIYGVNLMSIPGVGYGTLMVIMSELGPDFVSKFKTVRKFCRWCNLSPKDDITGGRVVSSKVPKRPNPVGQAFRQCAVTLRKKKGSLGDFYRRMAGRLGPAQAVVATAHKIAELVYLLVSRQQDFDPEIAKKDMASANERRIKYYEKRLAELKSVQKQKIENQMNTE

SEQ ID NO: 212186 - protein, 370 aa, unidentified
MEKRSMFVGMDVHKESIDISLAEEGRNGEVRHYGGITGDLEALAKVVKALRSPTRRLRFVYEAGPCGFGIHRYLTAQGEECVVVNPSSMPKRSGDRIKTDRRDGDALARLHRAGELTAIYIPTPDDEALRDLVRAREDAVGLSTQAKHRLKAFLLRQGRRYPGRAGWTVPYRRWLADLSFPLAPQHIALQEYRDTIDETERRVERLTDQLRTHTPDWRWAPVVDALQALRGVSFVTAVGLVAEIGDIRRFTHPRELMAYLGLVPSEYSSGPSVRRGAITKAGNPHARRLLAEAAWAYQGIPRIGRQMLYRQEGLPTSVCAIAWKAQLRLTSRFRKLVARGKAKPKVATAIARELTGFIWAIAREVPAPPA

SEQ ID NO: 212187 - protein, 345 aa, unidentified
MEIRTIGIDLGKTVFHLVGVDARGRVVARKKCSRLQLLRFTANVCECLIGMEACAGSHFLGRALRQQGHDVRLMPAQYVKPYVKTRKNDYIDAEAIAEAVTRPSMRFVPIKTDDQLDLQSLHRVRERWVGRRTAVINQIRGLLLERGITVAKGRRRIEESLPGILEDAENRLSGALRVLLDELRQEMQYLQRQIEQSDKLIVKIAGELEACKRLVAIPGVGPVIATATIAAIGNGAAFKKGRGFSAWLGVVPGEYSTGGKQNLTETTRRGNKYLRKLFVQGAHALLQNKTKLAPGLSTWLGQLTSRKRIQVAAVALANKLARMVWAVLYKGEVYRPPLLAQTVAR

SEQ ID NO: 212188 - protein, 339 aa, unidentified
MKKVTTIGLDLAKRVFQVHGVDAAGSVVVRRSLRRSQVMPYFSRVAPCVVGMEACATAHHWGRVLSELGHTVRLIPPAYAKAYVRRNKNDAADAEAICEAVSRPSMRFVPLKTAEDQAACGLHRVREQLMKQRTMLINGLRGLMAEFGIVVAEGPQHVGGLVAVLADASDRRVPAPLHGGLVTMAAGLADLERHLKAIDRQILVWGRRNQTCEHLITIPGFGPILSSAMAAMVVKPAIFASGRDFAASLGLAPRQESTGGKTRLGPISKRGNGYLRRLLVNGAMSVLSSKRAKCDPWLVRLLETKHRMVAAVALANKMARIAWAVMMRQEDFRLQPAAA

SEQ ID NO: 212189 - protein, 422 aa, unidentified
MSKRRYSATEFKAVSWAAMTEQIAGERTVFAIDVAKEDFFGALMSSERTTLVTVKWTHPQQTRELVDQLAGVARTAKLEAVMEPSGTYGDALRWQLSLAGIDVYRVSPKRVHDAAEVYDGVPSLHDAKAAHIIGRLHLEGATQPWREPSAQRRELTAQMRLLELYKGREQAGVSRLEAQLSRHWPEIVQVLEPSSVALASLIATFGDAARVATEPDAAAALLRRAGHAALAEEKIATVLASAERTVGLPCVPAERQLLRRLAEDICTVREALHRREREIHRQVVADPTLERMAAVVGKTTSAVLAAAQGLPQDYPSAASYVKSLVLNLKERSSGKHKGQLKITKRGPGIARHYLHFAAMRWVYRDPIVQAWYRAKVRRDGGLTGKAMIAVVRKLAKALWYVARGEPFDPRKLFNVKHLELAA

SEQ ID NO: 212190 - protein, 427 aa, unidentified
MSYRIAGIDVHKRMLHVVVSDVQVDGEYDFTRRIFGSLPEALRSLAAWLLEQQVQEVVMESTAQYWKPVWGTLERYWKQICQTREGALATSGTLHLAQAQSNRGRRGRKKDFRDAERLVKRLVAHELVLSFVPDVEQRLWRTVVRTKYQLTRNRVQLQNRLEALLEETHIKLSSLVSDLLGASARRMLHAIADGETNRETLAALADRGLRATQEQLQDALGVCQELNPVYRRLIRMVLDEVASIDKRIEQLNQEMANLLRPHEDQVKRLAEVPGLGVDSAQQVIAEVGATAATFPSEKHLSSWVGACPGDEESAEVNYSRRSPQGNRHMRRILNQAANAAVKNKGSIFEILYRRYVPRLGHNQTIGIIAHKLCRLVWKILHRGIRYEERGPEVSKASKQKRTRKMIQALRRLGYRIEPSPSQSAITA

SEQ ID NO: 212191 - protein, 368 aa, unidentified
MSRKERLLVNTIDVEQEYKIIGLDLAKDDTSCVCIAESGEIIAIDRLSYADLLEAAEQLSPTIFAMEPCNGMHWLVNQLQEYGHKCRVVSGSAVQQYVESHFGKQKTDLNDAHAIAYLALDEMLHFIRAKSPSEMSIQALQAIRSQLTKQKTASLVCFKSLCQGYGISIAKNESSVAAFVSLLQETDKIPEEVKEALGMLIIGYKLLRTRINKIDKVIDTIVSRNPTGRNLKSIPAFGVQCAARLLTIAPNINDFKGPKDLVAYCGLVPRNLTTGHHQKTAGITKRGDRLMRRNVVLAANCLYRMNKHGNLPNCKLKRWMDKKFPIMPYQKFIIQLAAKLLRIAYAVMKYGTGFDYARAGVARSAIKV

SEQ ID NO: 212192 - protein, 367 aa, unidentified
MKKVSTARAKQVEKSESQKLTIGLDLGDRWSWYCVLNEAGEVVLEQKVATTPKAMKEVFGGMPRSRMALETGMHSPWVSRLLSELGHEVIVAHARNVRLIGESRKKDDRLDARMLARLVRIDPQLLAPVKHRSAQAQADLMAIRARAGLVRARTSLINTARGLTKSYGERLRGCNPRNMNAEKAQELSPELQAALGPLLGEIESLSERIREYSERIEKIAKESYPEVGRLTQVKGVGTLIALTFVLTLEDAHRFGKSRDVGCYVGLQPGRRNSGQSEPQLHISKEGDPYLRTLLVQGAHHILGPFGVDSDLRRWGLKLAERGGKNGKKRAVIAVARKLAVLLHRLWVSGEAYEPLRNQREVALTATA

SEQ ID NO: 212193 - protein, 342 aa, unidentified
MKITTVGIDLAKNVIQVHGVDERGKAVLKKSLKRVQVLPFFANLPVCLIGMEACGSAHHWARKLQTLGHAVKLMAPQFVKPYVKTNKNDAADAEAICEAVTRPTMRFVPVKNGEQQAVLALHRARQGFVKARTAQANQIRGLLAEYGITIPQGINHIATHLPDILEDWENGLPGVFRQLIDRLGAHLKELDQQVRELEVQIQVWHRANDASRKLAEIPGIGPITASALVASIGDAKAFDDGRQLAAWLGIVPRQHSTGGKQTLLGISKRGDTYLRTLLIHGARAVIRIAERKANYAGSWLAGVMGRRNKNVAAVALANKNARIVWALLAHDRKYTADYAPLA

SEQ ID NO: 212194 - protein, 370 aa, unidentified
MLDTTTFVGLDVHARSIKAVSLDVMTGEVRCATFGYDAGAVAEWVRSADPKARCVYESGVTGFDLQKRLSGLGVDCVVGAVSKMIKPSADRRRKNDRNDAEFLARMLSVGNVVEVWVPDDECEAARDLTRALEDARDDLSRSKQRLSKFLLRHGLVFDERTPTGRRKGNWTRAHWSWIESIRFAERADEEVLAYYVDAVRRAAEEKARLERLVEGEARRPRWRRRVDALRCLKGVDTATAADLVFEAGEFSRFRNARSFAAWVGLTPSEHSSGESDRRGAITKAGNKHLRKTLVEAAWHYLTCSGRPKDLAKGQAPDPAARRHAAKGVRRLVERREVLLARGVHGNKANVATARELACWVWAVGLMAEES

SEQ ID NO: 212195 - protein, 337 aa, unidentified
MSSIHILGIDLGKHCFHAIAHNRSGAEVLRRKFNRNQLQHFLCKTEPTTIAFEACGGAHWLARKCGEYGHQVRLIPPQYVKPYVKGNKNDFIDASAIAEAAGRPTMRFVAVKSEEAQVIAAIHRVRDGYIKERTAAMSRIGAILLEFGLSFPKGHAKMKALFQWLAEQKASLPESLLGELVSIHEHYKYLNERVKAQDSKLQVVVKNNESAQLLKTIPGVGDLTSTLCVADVSSPSNFTNGREMAAWLGLVPRQFSTGGKTKLLGMSKRGNKHLRTLFIHGARAVLSRLETTGKVFGEWLIKLRATKPFNVVVVALANKLARIAWAVLYHRQAFKAV

SEQ ID NO: 212196 - protein, 408 aa, unidentified
MNTLYVGIDVSSKSNVVYLMLPNGDKHSNFSVANSHEGSTQLVKRILSALTSLSLDTVLIGLEATSVYGDNLVYFLREDASLAPFHRKIHVLNPKQVKKFHDTYNDLPKNDYVDSFVIADCLRFGRINKEVYLGDYRYKALQNLTRARFFAVQNLIKEKQRFMNVLFKKYSTMTQEKVFSDTFSTTALAVYDEFDSAEALANMDLHELTDFIIKKGKNRFPDPDAVAKAIQKAARSSYRLPKTVNDSVNQVLSISITSIKALESQIKEFDKAIKAQMELLPNVLISIPGIGPVYSAGIMAEIGDINRFDNQAALAKYAGLAWKQHQSGDFEAEVTRLIPSGNRFLKYYLCEAALSLVRCDKEYSDFYHLKYKEVNRCQHKRALALTARKFVRLVFRLLKDNRLYCPAK

SEQ ID NO: 212197 - protein, 343 aa, unidentified
MEEYIGLDVSMKETAVSIRRAGERIWRGKCASDPSVIAALIRKRAPAVKRVVFETGPLSVWFYHSLRTEGLPAICVDARHDKAALDMAANKTDANDADGLAQLAEVGFFREVRVKGFNSMLTRTLVAARTRLVRITTELSNQIRGVMKTFGLLVPAGKGSTFENVRNLLADQDGLASIVLPMLEAWRGIRIRAAELGRQLVRDARQSQACRILMSIPGIGAITATSFATAIEEPDNFRKSRSVGAWIGLTTRRYQSGEVDYDGHISRRGDRHLRGLLYEAAAVTLTRSSTDSALRTWGRHLRERIGFKRAAVAVARKLAVISIRCLRPASCSIRMPELPHKLG

SEQ ID NO: 212198 - protein, 404 aa, unidentified
MRVTAGVDWAKDDHAICIVGDQGEVLDRFAVAHDAAGLKRMTARLLGAGVEQVGIERGDGPVVDSLLAAGLVLFVIPPGQVKNLRSRYGSAGNKDDRFDAYVLADVVRTDARRLRPMLCDTPATLALRSATRARKDLVSHRVAAANQLRSHLQIVFPGATTLFAAIDSQVSLAFLTRFTTQDAADWLSPKRLATWLKSVSYTGKVDPTVLHTRLTAAPRGALGEHAGTQAHVTAALVSLLLVLNAQIAVLAASIGAQLNAHPDAVIFQSLPRSGSIRAARLLAEIGDARGRFPTRDSLTALAGVAPSTRQSGKVRTVTFRWGADKQLRDALTDFAGDSRHANPWAAHLYDQARARGCDHPHAVRVLARAWTHIIWRCWQDGVAYDPATHHALQTLLDQDQQQAA

SEQ ID NO: 212199 - protein, 310 aa, unidentified
MENKNYDYIAIDISKSDLEVRTELHRCSVTNNLTGFKALVKLAGKQEQPLVVCESSGGYERDMMNYLHQKQIAVTRVNPGRIRNYVRSEGIKAKTDPIDALMILGFAREKQLQPAPVPQPIRQELAALLDRRSHLTGQAAREKNRIQNSSKFIKASIERMIKEVEKELQRIEKQIRKLVANDQQLTEETNILQSVCGVGEVPAWTLLSYLSEIGKLKRNQLVALAGIAPFNKDTGIFKGKRRIEGGRAKVRKCLYMAAQTAAIHNPVIKAYVDGLRARGKPYKCAMVAAMRKLLIHMHILIKKHQLTLAS

SEQ ID NO: 212200 - protein, 315 aa, unidentified
MPHQDRIVGIDVCKRNAAACIRSLQRWLSTPGTPAGEQELIAWLRDNGVGLAVMEASGGYERGWAQALHKAGIAVRIVDPKRVRYFAKSAGRLAKNDPIDAEMIAGFGETFTAEAEPAHDPERAALARRRLIGLATQVAQLAEHRQPPVVAQAQQAIGKIVKTQLAKLEIAIDAKIAANAAFRARAAITRSVPGLGPHFTAGAIAWLPELGRISSKAAAALVGVAPYDDDSGERQGERRINGGRREIRDLLYMATLAAASRHNPVVKAYYQRLRAKGKKAKVALVACMRKLIVILNTMLARGQNWNPPAAAGVLA

SEQ ID NO: 212201 - protein, 345 aa, unidentified
MSRVYVGLDLGSSQFEILAMDREGVALERRSLKTSELNLRDAFSQLRQQLKCELHVHLEAGELAGWAREVIAPMVTRVVIGDPRRSAWIANDPTKNDRLDAFKLADLLRMNRVHEVYYDDAKPRRVFKQVVQHYEDLTRRQAALKVKIKARLRVQGLIRKDTRVFAASEREAILDSLANKQLRSIIKQLYDLLDATRAQQQEALLTMREMSRQFPEIAILKKTPGVKLINACRFVAYVQNPHRFSNLRGFWRYARLGVVQQSSDGKPIGPQHLDRSGCGALKDVSRKTLEAAMRRRDNNLFKRAYEQSFARTGDATHARLSVQRKILAVMRAVWISGKPYCGDLG

SEQ ID NO: 212202 - protein, 429 aa, unidentified
MRTESTPGARGPVFCGVDTHADSHWLCVLDWRGRKVLSRRFPADAAGYEALAGAIAAAGEPACVAMEGTSSYGAGLTRHLASLGMPVREALSPARTQRRRPGQGKCDEADAERAARAAMSGSKLGTPKSQDGWVDGVRCMLAARSGAVKARTSAINTARSLLTTAPEGLRSRFRGMAGPRLMEELPSVRAEGALGAALGALADLWAAARDAALDMERAIEASLEENCPALLAMYGCGPVSAAKLAVAAGDNPGRLRSEASFAAICGACPIPASSGKTVRHRLNRGGDRQANSALHEIARQRVMRDPETAEYAERARGRGKSDREVMRCLKRYVAREAYRALMRPHEIRRPEDASELVAARRAAKVSQVRAASILGTSEKYISMLERGQRELKPIRRAYEAWVEAGLPLDWDRQAFEAERKMDSKKHLAK

SEQ ID NO: 212203 - protein, 366 aa, unidentified
MRKPSTKAVRGKGKLQDQQLTIGLDLGDRSSFYCVLNGAGEVILEERVATNPEAMKKTFEKMPRSRIALETGTHSPWVSRVLSELGHEAIVAHARNVRLIGESRRKDDRLDAQALARLARIDPQLLSPIQHRSAQAQADLSVIRARYALVRTRTALICAARGLTKSFGERIRSRYIRGFKPAMGDTLSPQLRVALGPLLSALETITARIREYDAQIERLAEESYPDVALLKQVKGVGTLIALTYILTLEDPRRFRKSRDAGCYVGLQPGRRNSGQSEPQLHITREGDSYLRMVLVQGAQHILGPFGEDSDLRRWGLKLAERGGKSGKKRAIIAVARKLAVLLHHLWISCEEYEPLHNTRKRRLAAA

SEQ ID NO: 212204 - protein, 333 aa, unidentified
MKLGQETYIGLDTHRETIHGTALNKNGNIIYSAEFANTKEALHEFMKEFPSWNTVIAIEACNFWRGCYKILKEMGYTIKLANPVTCHKIAHEKKTDKVDSKILADLTRVNYLPEVYIPTDEINALRDVTRHKIYFTRFKVRTQNKIKSCLSRSGISYKEDLWNKEGIQWLKELKNYEINSYLELYKTIQKEEQTIKNKIDKIAKAKEETAFLETIPGIGYFGASLIYAEIGDIHRFPTVKHLHAYSGVAPGIYQSGTKTRMPSRKSVNYWLKWITIQCAGRLTLKNTKPSKLRNYYFKVRNKKGWKTARKATARKLLTVVWYVLHNKIPYRES

SEQ ID NO: 212205 - protein, 449 aa, unidentified
MGKARPQVIEDDEQQRVFDRVAAVDVAKATGMVCVRLPRRDGSRYSKVWEVTATMGAVTELGRQLMKDRIQMVTLEATSDYWRIFYYVLEMCGLAVQLVSPSQAKNLKGRPKTDKLDSMWLARLTEWGMLRPCFVPPAPIRALRDYTRARTDLVRERTRCWQRLEKLLEGALIKLSSVASKLTTQSAQDMITAMIAGERDPRVLADMAQTRMRAKHDALIEALTGMFDSHHGELAEMELDQIAFLNGRIGKLEASIGDTLAAIPAAQGVNADGTTGPDAGHGPDAAVLPAVTRLAEIPGVSEQLAAAIIAETGLDMTRFLTAAHLVSWAGLCRVASQSGPRSRGGKKGHGNAYLRSSLGQAAIGSARTATFLGERYGRIARRRGKAKAQVAVARSILVIIWHLLNDRAARYTDLGPDYVASRTDRDKKIRNHVRGLRAMGLEVTLTPAA

SEQ ID NO: 212206 - protein, 375 aa, unidentified
MKEKLRFLGLDVHAETIAVAVAEPEGEVRSLGTIPNRAESIRKLIKKLGPAAKLRACYEAGPTGYVVYWQLAELGVECEVVAPTLVPVKAGDRVKTDRRDAEKLARCYRSGDLTAVWVPDAGSEALRDLVRAREAAKQDQTRARHRLSKFLLRSGQRAPTGVRPWTRPYLIWVAQLRFTQIAQESTRQDYLHEVEHMRERVARLEQAITEAVKFASPALQQVINDLQALRGIADISAVTIAAELGQVSRFDSARQLMGYCGAVPSEDSSGKRTRRGGITKTGNAHLRRIVVEAAWSYRHPPGIWYGLRRRQETVSEEAKEIAWKAQHRLHKRYMRLGAAGKDQRKIVTAVARELLGFIWAIGTRAEAISGQQVAA

SEQ ID NO: 212207 - protein, 508 aa, unidentified
MIVIGIDPHKSTHTATAVDPATNTDLGSIRIDATLTGYKTLIAWAKSWPQRQWAVENAYGLGHHLAQWLLVLGEVTLDVPTTATARVRELSRGGRRKNDRIDAAAAACVAALQGDARPVDPEGPAEILGLLDERRTNLSNSRTRNMNQLHALLRQLLAGGAPTSLTASAAAALLRSFRAKSPVDRMRVGLCRDLIADIRRLDDQLAANEKQMAETLDEHGTRLREVDGIGAVTAARLIGRTGRPDRFPTAAAYANYNGSAPVQIASADTDRHRLSRYGDRQLNSALYTVAVVQIRMRASAGRNYFEKKIAEGKKPAAARRALKRHLSDHVWRIMLSDEKRRLQPENNHSAKGRLTNREAPHMRHALIRSLVPPCATAVWCTTVTVAPRSAPPRPDIRSRVPAASVTRSSRTPSRDSASKECARNPLDCRASTVSDSWFDGRGGTGRPDGGRSEGSRPPEASNVKPVVNEHASDRIQVATAAASSTRPTLPIGIFSFKSSTAEGSMPAA

SEQ ID NO: 212208 - protein, 304 aa, unidentified
MTIVEPAAGAVTGGVDTHLDVHVAAALDDIGGLLGVESFEATRAGNDKLLAWLRSFGAIAQVGVEGTGSYGASLARSLRAAHIRVVEVDRPNGQARRRTGKSDPADAVEAARAVLSGRAQGAGKTRDGSVESIRALVVAKRSARSTRIKSLNQIRHLGFTAPDDLRDRLRGVSRDHLAGVAAALRPRVGSDPVIGATKTAMRILGRRVLALDEELATIDGLLAPLVAATAPSLLEVHGVGVDTAATLLVAAGDSPQRLRSEAAWAHLCGVAPIPASSGKVTRWRLNRGGDRQAKAPSGSSSSPA

SEQ ID NO: 212209 - protein, 343 aa, unidentified
MEYYAGIDVSLEESSICVMDATGTIVREVKIASEPEALVRYFDDLALSVSRIGLEAGPLSQWLHAGLVGAGRDAVLLETRHVKAALSAMTVKTDRKDARGIAQLLRMGWYRPVHAKSMTCKDSRALLVGRKLLQGKLLDVELSIRGILRGYGLKVGEVSRGRFEARIRELTAGHVTLETVIGAMLAARAALWSAFTKLHREMLKIARVDKVCRILMSTPGVGALVALTYRSAVDDPTRFGKSSTVGAYFGLTPKKYQSGETDRDGGVSKVGDAMVRTALFEAAHIMLTRATRFSSLKHWALDVAKRRGMKRAKVALARKLGVVLHRMWVNATEFRWNNDAAAA

SEQ ID NO: 212210 - protein, 371 aa, unidentified
MQGTSLFVVLPAPRGADDASMGTSAFAEPKEMTMTIATVGIDLAKNVFAVHAVGKSGLVEVRRPEVRRAKLLELVASLPPCLIGMETCSGAHYWAREFEKLGHTVRLMAPKFVAPYRMAGKRGKNDANDAQAICEAVARPNMRFVPVKTIDQQAELFVHRARQGFIEERTALINRMRGLLSELGIVLPQKAAAMRQGVHQVLEDLPGWCNTVIADLLSHLSKLDERVAEYDRHVQQAAKGNERARLLMQLAGIGPTTASALVATVGNGSDFKSSRQFSAWLGLVPGQHSSGGKARLGGITKAGDSYLRTMFILGARSLLMKAAAHTDSVSRWAIKLKERRGFGRAVVAIAAKNARMCWAALRMGESFKVPS

SEQ ID NO: 212211 - protein, 422 aa, unidentified
MRSDNPIRYAVHVGIDWADKKHDVCIVPPGEGLHEFDQVPHQVRAIDDWIRSIHLRFGGPIAVAIELSSGPVISVLQKYDFVVIHPINPSTLAKYREAFTPSRAKDDPTDAALIVDLLLRHPGRFKPLRPQSADMRALGTLVEQRRQLVAERVRITNRLRAALKEYYPQVLEWFEDIDTALFCDFITRWPTLLQAKRARSSTMRRFFHTHNMRRENVLESRLVAIKEAMSFTDDEAVIVPFRLKAQIHTEQLQLILKSIKQYDELIDQVATRHKDYKLFRALPGAGPSLAPRLMVAFGEQRERFSSAADLQKYSGIAPVTERSGKKEWVHWRLQCPTFLRQTFVEWAGQTINKSYWAGAFYQQQRAKGCTYQAAVRALAFKWIRIVYRCWKTGVAYDEAIYLKALERRGSPLLARQNVQEST

SEQ ID NO: 212212 - protein, 368 aa, unidentified
MDQNITVVGLDVHKATVVAAILPPTATRPTQTVTIQNCPKAIERLVKRVPDDGRVVFVYEAGPCGYQVHRQIAQTGRKCVVIAPGLTPVRPGDRVKTNRRDAEKLARLYRAGELTEVRVPTCGEEAARDLVRIREDALEDRLRARHRLSKFLLRQGRVYRETKAWGVAHRAWLRGQRFEWPPLQQTFEGNLRAVEEAEARLESLNQQVLDFAQSGPYRMAVRYLRSLKGLETLGALTLAVETLDFGRFERAPAYMSLTGLVSSEHSSGGKERRGSITKAGNAHLRRILVEAAWSYRLKNTVSPQLAERRRSCPPEVIQIARKAQDRLHRKFWRLVSRGKPSQVAAVAVARELAGFVWAIARQVPAAAT

SEQ ID NO: 212213 - protein, 385 aa, unidentified
MENIQRTLRNQDSTTPDTLYMAIELSHTEWKLAFSTGETIRTVTVDARDLDQLQKAINGSKSRFKLGGEVRIRSCYEAGRDGFWLHRYLLSCGIENNVVDSASIEVNRRKRRAKTDRIDARKLLTMLMRYHGGERLLWSVVHVPNMEDEDGRHLHRELEALNKERTMHRSRIKALLIQQGIAVTNPSSRTFLLDLDSFRTWDGKELPVDLKSRIIREHGRLRLVEEQIYALKKERERRLVEDADNPSMRKVSQLMALRGIGINSSWKFVRELFGWRDFRDRRELGSLAGLTPTPYDSGGSQRDQGISKAGNKRIRTLAVEMAWVWIRFQPQSKLSEWFMQRFAGGGSRMRRIGIVAVARKLLIALWRYVEYGVIPEGAIVEPRAY

SEQ ID NO: 212214 - protein, 411 aa, unidentified
MRLFAGDDWAEDHHDIEVMDAAGKVLAKRRLPEGAAGMSQLHELIGRFLPEDADEVEVVIGIETDRGPWVAALVAAGYTVFPVNPLQASRYRERHGVSGAKSDQGDSHMLADMVRTDSHQLRPAAGDSPEAAGVKVVARTHKTLIWDRTRQVQRLRHQLREYFPAAIEAFEDLDAPDVLELLGKAPDPARAARLTRAQISAALKRARRRNIADKTDAILAALRGEHLTQPAALTVAYAATVRSLVAVITTLNEQAKLLEEQVKEHFGRHPDAEIYQSQPGIGAILGARVLGEFGDDPRRYVSAKSRKNYGGTSPITRASGKKKVVAARFIRNDRLIDALMSWAFASLNASPGARAFYDQQRAKGLEHNDALRRLANRLVGILHGCLKTRTRYDEATAWGHRENLPQSSVAA

SEQ ID NO: 212215 - protein, 377 aa, unidentified
MREKLRFLGMDVHAETIAVAIAEPDGEVRSLGTIANSEDSIRKFICKLGSPEQLRACYEAGPTGFVLYWQLTQLGVQCDVIAPSLVPKKPGDKVKTDRRDALKLARSHRSGDLTAVWIPDEASEALRDLVRAREAAKRDQLRAQHRLTKFLLRTGRRPPLGVKVWTERHAEWLQQVCYAHPAQEATLLDCLHEVQHMAERVKRLENSIVEVIQLAPASMQEVIRGLQALRGIAHISAVTIAVELGNITSRFEHARDLMGYSGAFPDENSSGKRIRRGGITKSGNAHLRRIVVESAWSYRHRPAIGARLRRRQEGLPAEITAIAWKAQNRLHKRYMTLMARGKEQRKTMTAIARELLGFIWAIGIQAEASVCKQQMAA

SEQ ID NO: 212216 - protein, 393 aa, unidentified
MVCVGIDVAKDKHDCFIISSEGEILADVFTIPNNAEGFDTLLQAIRRSTRPEDKIKVGLEATGHYSYNILGFLLNEGLDTYVINPLHTNLYRKSLSLRKTKTDRVDARTIAAMLMSDVDLKSYTDTVYHNEELKSLTRYRFDKVRERAKLKQSVSRLVTILFPELEKLVSSLHSASVYALLSEFPGAKQISSTHMTHLKAVLKNASQGRYGQEMAETIRNAARSSVGSVMPAKSLELQHTIRLIRELDAEIEDIETAIQAIVDEMQSPITTIPGMGVRMGAVILAEIGDFSRFDSPDKILAYAGMSPSTYQSGQLSLSGAYSHMEKRGSRYLRYALYNATKHVCHWDPTFAAYLAKKRAEGKHYNVALSHAAKKLVRLIFAMEKSQRPYCAAP

SEQ ID NO: 212217 - protein, 326 aa, unidentified
MDVLGIDLAKLTFDATLLTTTGTQHYASFPNTVEGFTQLQAWLLQHDVTALHACMEATNIYWEALATWLHAQGYTVSVVNPARIKGYAQATMQRNKTDKLDSAVIASFCAKHQPTAWEPVSEQQRRLRALVRHRDDLLQTQLQQQNRLRDTTDEVVRASLQSLLQAITTELAAVEDRIQEHLAAQESLRTNLALLTSIVGIGAVTAAKVLAEFADLEQYESAKAAAADAGLTPSHYESGTSVRRRPRMSKVGKAGIRAALYWPAITAMTRCPAMQAFAEGLAARGKPKKVVIGAVMRKLVHICYGVLKHQTPYDPAKAFGRITPAT

SEQ ID NO: 212218 - protein, 378 aa, unidentified
MPSSVNFWVGLDVHKDSITAAVFRNRDPEPMRVDRLPYDLNKIRRYFQRLQAEGAVRACYEASGAGYVLQRALGDWGIPCDLAAPSLIPQRAGERRKSDRRDAIKIGRDFRDDRLVLIQVPTEADERVRDLVRCRETFQREIVKSRHYILKFMRRRGFIYREGAHWTARHLDWIRRTLAPGTLADEDQVVLGEYLALLEYKLQRRDDLDRRIEDLALTPRYKPLVDRLSCFRGFKTQAAMVIATELGDMRRFENPRQLMAYVGLVPSEHSSGERRRLGSITKAGNTRVRHILIQAAWHSRKRPAVGAPLRRRQRGQDPTVIQHAWKCQHRLYTLFHRLAAKKPRPVAATAVARELVGFLWAVLRDVDVSRLQEVSRAA

SEQ ID NO: 212219 - protein, 319 aa, unidentified
MAQNGLVVAGIDIAKDKADVSIRALSQRQTFPSTAAGRRQLISWLRKHKVTKAVMEASGGYERQWAKALRDAGIEVRIVDPKRVRSFAQSAGRLAKNDGIDSDTIGWFAEIFGEAPSQAHDAARETLQQMVNARQGLLDIRTMLSNKGEQDVPEPVQKSHARLLKTVAVELAKLEAAITALVKATPHFAKRAEIIESVPGLAATTAAGLIAAMPELGEVSNEAIAALLGVAPYDDDSGKRQGQRQIKGGRRKVRNLFYMASLGAATRHNSMLKTFYHRLIAKGKKAKVALVACMRKLIVILNTMIARGEKWDASRYPVS

SEQ ID NO: 212220 - protein, 348 aa, unidentified
MIIIGVDFHPEFQQIASVDTETGEFQEKRLAHREDAETFYRALAGQKVRVGMEASGHGRWFERLVAELQFELWIGDAAEIRTKRVRKQKTDRQDAQLILRLLLEDRFPQIWVPSWENRDLRQLLWHRHRMVQARTRIMNQLQAVALNEGLRCKKRLWRERGRQQLESFQLAPWASRRRRDLLELLDRLNPTIAELSQAIEQEVEKCPEAQRLRTHPGVGALTALAFVLIIGKAERFHCGKQVASYLGLVPLEESSGNRRRLGHITKQGSSMLRFLLVEAAQVTVRSLPEWRSQYFHLAMRRGRKIAKVAMARRLAVRLYWMMRQGWDYEQLKKFGSHAGQPGNRHGVQ

SEQ ID NO: 212221 - protein, 391 aa, unidentified
MVCVGIDVAKDKHDCCILDSDGMVRADCFTIPNNMDGFKQLLQTIRNCTKKSDKIKVGLEATGHYSYNILGFLLDNDLAVYVMNPLHTNLYRKSLSLRKTKTDRVDARTIATMLLSDVDLKSYTDIAYHNEELKSLTRYRFDKVQERAKLKQSVSRLATILFPELEQLVSSIHGTSIYALLREYPGAKQISEAHLTRLANILVKTSRGHYRKDKATHIRDAARTSIGSVMPAKSLELKHTIKLIQELTSEINEIEDAIRKIMDELKPPILSIPGMGFHSAAMILAEVGDFSNFNSPDKVLAYAGCSLSTYQSGKLTNCYAHMEKRGSRYLRYALYTATKYVCYWNPVFTEYLTKKQAEGKHYNVALSHATKKLVRLIYALQKSGKAYLAVT

SEQ ID NO: 212222 - protein, 407 aa, unidentified
MFIGIDWASERHAVCVLDQAGTRVTAFQIPHTADGFTQLISRLRRLGQPAGLPVAIERPDGRLVDRLLEAGHPVVPVTPNAIKAWRDAEVLSGAKTDAGDAMVIAEYLRLRRHRLRALAPFSPQTRALRAVVRSRGDLVEARVAATNQLAATLDAFWPGAVAVFADVESEIALAFLARYPTPASAARLGEQRMAAFCAKHGYSGRRSAAELLGRLRAAPEGLAGTVEVAARRDAVLAFVRVLRALNASIKDLDRSVAAHLGEHPDAEVFTSLPRSGQTNAAQVLAEWGDCRPAYDHPDAVAALAGAAPVTKQSGKHAAVHFRWACNKRFRAAITIFADNSRHASPWAAKVYAGALARGHDHPHAIRILARAWIRVIWRCWQDGVPYDPAEHNAARKLTETATSAARG

SEQ ID NO: 212223 - protein, 345 aa, unidentified
MKTNGARGYVGVDLHHDSFVVCVRRGGEQRWRRWEMEEISDFARGLGKGDVVAVEATGNTRWFCRQLAGHVGRVVVVNPHQFRLISQSVKKTDRRDAALLAEYLEKDLLPEVRQKTDQESEVAQMAASRDQLVKMRTMLKNQVHGLLRSHGVLVSKQQLASGKGRMQLRQAPLPTMAGVQREVLLEQIAAVNKGIVQLEKSLREAARTLPGYDNLISIKGIGKLSSAILLSAIGPVHDFADAGKLAAYFGLVPRVEQSNQSQHHGRITRQGNKLARTTLVQCALVAKRYNPFLRGFYERIRQRRGTGKAIVAAARKLLTIVYYTLKNQWVFDDFGSFALAESPGR

SEQ ID NO: 212224 - protein, 323 aa, unidentified
MPVAVGVDCAKKTFDIALLQDNQKFRTKAKLPNTEAGFIQFEQWLEKHAEPQCWVVMEATGIYYEALADFLYARGFKVAVLNPAIIHAYGKQDLRRVKTDKADAKLIAQYGHERGHTLRSWVPEPPARRRLRAMVRRLEDLQEMRQMESNRLEVADSVVQASIHSVIHSIEQQIAQTRQAINQHIDDDPDLRGKRDLIVSIDGLSSASAASILAELGDPLDYTGARAVVAFAGLNPVPDESGQYTGPTPISKTGSARLRKALYMPGLTAIRYNPVIKEQSERLKARGKAPKQVICAAMRRLLHLVYGVIKSGKPFDPSYAMSV

SEQ ID NO: 212225 - protein, 357 aa, unidentified
MLSSNVKYIGLDVHKEAITVAVRNGAGKLVMESIVETKASTLLDFLHGQRGELHVTLEEGTWAAWLYDVLKPHVGEILVCNPRRNALLKEGSKNDRVDARKLSELLHAGMLRAVYHGENGLRTLRELARSYQVVSKDLKRVMNRIKALYRSWGIPCTGTQVYSRRNREQWLKKIGEAGVRRRAELFYQQLDGLQALRRTVRGELLVESRKHQAVKVLRQIPFIGPLRAAQLVALMQTPHRFRSKRQLWTYSGLGVETHESAQYRYVDGQLQRSKKPQQVRGLNQNHNHTLKEIFKSAALSATLRAGPFQDFYEGLLAKGMKPELARVTLARKIAAITLTLWKKGECFDAKFLKPQAA

SEQ ID NO: 212226 - protein, 320 aa, unidentified
MSESSKSSPPKPTPVRFIGCDVGKALIVVHEAGTGATRTITHRKADLEAFAAGLDADCLVVCEATGGHEALLLDVLLASGVAAHRADARKVKAFIRSYGTLGKSDDIDARHLALYARERHASLLRWQMPDPDRQKLQALVLARQDMIADRTAWSNRSKAPGAIHAQPHFKAIIKALDKQISAAELAITTLIDGTRTLRQATRALADIKGIGTTTAATLIALMPELGKLDRRKAAALAGLAPHPKQSGANDAYRRTRGGRPQVKKALFMAALSASRSNPLLRQTYERMINAGKRPLVALTAIMRKLVVIANAKLRDIPHPI

SEQ ID NO: 212227 - protein, 446 aa, unidentified
MPNARALTRGDRRRNERLARLRAIVRRDYAVLAVDLAAAKQAAALTDHDSVVLARRMFPGDAWVIDDILDWAAPLAAEAGFAGIVLGCEPTGHRWKPLLDRARARGIELVCVNPMLVARGREEEDFTRDRSDFKDATIIAKKVTELRCYVPYQLDGHWCRLRHLGARRDAQLVAAGAARQGLRDLLECAWPAVLRAAADPLDALTFRAAMAVSTHPGEITAMGYDAFAAAVTAALPHWGGQRRNLRILRAIYAGAQDPGGVDAERDAACERAADLLRDWHHALGELADVEARMLGVLDALELTELVTTITGLSAVGAATILAQTGDPTRYDCPRTWAKHAGLCPRANESGAFHGATTLSRRGRPALRTAAWRAVWAALRHNPVYTARFAHLTTRADNPLRRGQARAAIAAALLRQLHVVVTRRVAWDPAIAAGHTDPTTEVAPQAA

SEQ ID NO: 212228 - protein, 341 aa, unidentified
MDAIGIDTHKATLAACLVDELGTALDERTFVNDPVGHRDLLAWAVDSSPQAIIGVEGSSSYGAPAARFLIAAGRTVREVPPQLSRRERLRTRRPGKSDPGDALAIARVTVRERDLPPVRLVDASHELQLLVEAREDLVAEITRVRNRLHADLRILAPGYGATAANLTAVRHQRTVARLLRPLTSVQAELARSRLDRLRRLAIEERAMGRRIAERVAGHPLLEMPGVGVLVAAKLIAEVGDVDRFRSADALAALAGVAPIPASSGQTHHMRLNRGGNRQLNRAFYVIALIQAWHHPPAQAYIAKKRAEGKSWRDAIRALKRQLVRIVFRLLRAGVGPLAVAA

SEQ ID NO: 212229 - protein, 415 aa, unidentified
MGLKIVYPICCGIDVHKTFVVACIASTNNKGVTTYKSHRYSTFTKGLKELSQWLSENDCKDVCMESTGKYWIPVFNVLEDSCNITLAHPKYVKAIRGKKTDKKDAKWIADLFKHDLVAGSFMPPLPIRQLRDLMRYRFKLTNFMSSEKNRLQNSLTVSNIQLGNVVSDTFGKSSMNIINKLLENPLETSFDIEPLIHGSMKKKVPELELAIDGLITPEQAGKLKVIQRHYEDLNSCKADLETIILSLAESYSEEINLILTVPSFKNLFSAIAVVSEIGVKMDVFLTAKHLCSWAGLTPTNNESAGKKKSVRISKAGCYIKPLLVQCATAVVKSEKHPEIRNRYLKLKKRRGHKRAIIAIARMLLTAIYNILKNKEPYNAELYKKSDVLPVDREITVEQAILLAKAQGYRIMTVVT

SEQ ID NO: 212230 - protein, 348 aa, unidentified
MAHFVGLDVSVKETSVCVVDDTGKVILEQKVATEPDDIIALLSSLGVTYGRIGIEAGPLSQWLVNALTAADLPVICVETRHMKALLTAQQINKTDRNDARGIAQMMRVGLFKPVHVKTLVAQEQRMLLTSRKLLQRKLLDVECELRGTLRNFGLKVGTVGGSRYEARVRELVAGFPRLAAIAEPLLNVRRVMRQQFAVLHKMLLDTVRDDPVCRRLMTAPGVGAVVALTYRATIDQPQRFVHSRAVGAHVGLTPKRYQSGETDYDGGVSKCGDALLRTMLYEAAHSLLIHSGKWSWLKAWGLRVAQRRGIRRAIVAVARRLAVVLHRMWVDGSEFRCSKGSAAVPTVA

SEQ ID NO: 212231 - protein, 384 aa, unidentified
MNKHSTLFIALDTHKEFNEVAYIEEHRGANAVHLGRFSSSKLAVQKLVRQFESKYSGATLHFVYEAGPCGYWIYRLITSLGHFCYVVAPSLIPKKPGERIKTDKRDALKLVKLLKSEDLTPIYVPEPEDEAIRDLSRAREVAMKDLKDAKYQLKALLLRNNINYKGTANWSQKHLRWLTELVLPHPAQHIVLQEFLQTITERISRLERLDNELTHHVHQWRYYPVVKAIQAMRGVRLLVATGVVAELGDLSRFDHPRKLMSYLGLVPSEHSSGGKRHIGAITKCGNGRARRLLVEGAHTYRYAANISTDMQKRQEGLPKNIIDIAWKAQLRLCKRYKKMIAKGKHYNLVVTAIAREMIAYIWAIAKEVVLTPVNTKLRLARVPA

SEQ ID NO: 212232 - protein, 358 aa, unidentified
MAVTEGTHHIVGGVDTHKDLHVAAIVDEQDRVIGTRCFATTRQGYRQMLAWMRAFGDLQRIGVESTGSYGAGLLRFMQQAKVSVLEVTTPDKQDRRRRGKNDDLDAQNAAHAAFAGQRTVTPRSRDGMIESLRVLMACRKTAVSARRVALQVIHNTIVCAPDGLRDQLRSLTRMQLIRTLASWRPDLTAYRDLESAYRIGLKSLARRYLELHDEIADLDVMIAAIVDELAPNLVARNSIGHIGAAQLLLTAGDNPERLRSEASFASLCGVSPVPASSGKTVRHRLNRGGDRAANSALHIIAIGRLRTDQRTKDYVARRIAEGHSKLDAIRALKRYLAREVFTLITQRRREINATRIAA

SEQ ID NO: 212233 - protein, 341 aa, unidentified
MTIHTIGIDLGKTSFHLVGLGERGEVVVRKRFTRTQLLRFTANRSVQRIGMEACGGSHFLGRALQQQGHDVRLIPPQYVKPYVKTNKNDYIDAEAIAEAVGRPTMRFVPIKSDEQLDLQSLHRVRERWIMRRTAVVNQMRSLLLERGITVRKGRSHMEAALPGILEDAEANLSGALRFLLAQLRLELDETSQRIGEADAAIQRAVRENEACQRLATIPGIGPVTATAVIAAIGNGAAFRKGREFAAWVGVVPRQRSTGGKPTLLGISKRGNAYLRRLFVQGARAVLAQKASQSAGLKAWLDPLTARTHRHVACVALANKLARTAWAVLCSGEAYRSPQLAA

SEQ ID NO: 212234 - protein, 404 aa, unidentified
MTGTEAADTRDQVVVGGVDSHADTIHVAVVTDRGGHLTDAQFPTNAAGYAAAIAFLQAHGTVAAVGVEGTSSYGSGFTHAARQAGLAVVEVNRPDKAERRRIGKSDPIDAYAAARAVVSGRATSAPKDGAIVGIRALQTAARSAIKARTATLNQITHLLITAPDAIRAKYTALSGDKRVTTLARLRPASDPAHAPLLTALRTLAKRVQNLTEEHTTLTGELDQQVTILNPGLRAAYGVGPDTATQLLITAGANPARLRTEASFAALCGAAPVPASSGKTNRHRLSRGGDRAANAALYRIALVRMARCRRTREFVARQTGAGRTKKEIIRLLKRAIAREVFRLLTTQVQVPEIADLRPARQTKNITLTAAANHFGVWPAVISNIERGLRRDDAFADAYRQWLTAA

SEQ ID NO: 212235 - protein, 345 aa, unidentified
MDIAAIGIDLGKSTFHLVALDQAGQIVLRRKLTRRKLVDLTATLKSTLIGMEACGGAHFLARLLHEQGHDARIIPAQFVKPFVKSQKNDFLDAEAIAEAVQRPTMRFVPVKTEEQLDMQTLHRVRDRLVGCRTALINQVRAVLLERGLTFPKGRASMAHVVAELVAADTDEVTAATRELLALLWQEWQELQTRVEDLTARIEQAAAQDEVCRKLTAVPGIGPLTATALVSAVADGSMFRRARDLSAWLGLVPQQRSTGGKTKLLGISKRGNSYLRRLLVVGAQSARLHLNRERHPRLGGWLTRLEQRAHRNTVVVALANKLARTAWVILRQGRDYDPAFGLPVEA

SEQ ID NO: 212236 - protein, 332 aa, unidentified
MNMNLQGGATQRSQSPTAGIDVSKLHLDVCLHADLWRTSNDAQGWEELAARLCAEGADLVVIEATGGYERGVVTALQAAGLSVARVNPRQARDFAKSMGTLAKTDRLDARGLRDFADVLARHPQRSKFITPVKQAEREALEGLMTRRRQLVDMRVAESNRLEVAAERAAKSIRRVLKLLDSQIAELDKDVDDHIDRHFKDQRKLLDSVKGVGPVTTLTLLSALPELGKLGRKPIAKLVGIAPLANDSGHRRGDRHIWGGRSEVRSALYMATLSAQRYNPVIAAFYQRLLAAGKPKKVAMVACMRKLLTILNAMLRDQAIWNAEKHLKEPQNA

SEQ ID NO: 212237 - protein, 357 aa, unidentified
MSSNMKKYIGLDVHKEAIAIAVLNGAGKLVMESIVETKASTLLDFLHGLRGELHVTLEEGTWAAWLYDVLKPHVQKIVVCNPRRNALLKEGSKSDRVDARKLAELLRTGMLRAVYHGENGLRTLRELARSYLTISKDQARVMSRLKALYRSWGIPCSGTQVYAPRYREQWLSKIAQPGVRRRAELFYQQMDGLSVVRHTVRGELLAESRKHQAVKILRQIPLIGPLRAALLLALMQTPHRFRSKRQLWTYSGLGVETHDSAQHRYVDGQLQRSKKPQQIRGLNQNHNHEMKRIFKSTALSASRCAGPLQDFYAGLLARGMKPEMARLTLARKIAAITLTLWKKGGRFDAEHLKSQAA

SEQ ID NO: 212238 - protein, 467 aa, unidentified
MSFPERHRASDAAFNLVKSMTATNPLPVLDPLAAFVDVGSEHMHVSIAGGPPEVFGTFTTELHRLRDWLKERGVTSVAMEATGVYWLPLYGVLEAADFKVSMVNGKQTRNLPGRKTDMKDCQWGATLHAHGLLQAGFVPPAQIRRLQDYLRLRADHLTSAAANVQHQQKALERMNVKLHDVISSLVGASGTKVIEAILAGERDPDRLLALCDVQIQKKKAERVKESLRGTWAEEHLFALRQAVENWQHYQRQIAACDRQMEIVLRQISGPDDPGKPEVKAKAIKRTGVNAPQIDDLHQLLAKLCGGKDLTVLPAHTDYSLLQLIGEVGLDLNQWRTEKHFAAWLGLAPGTHQSGKRKGSVRRKRNRAGRLFCVMARSLARSQHIALGGFYRRMAGRRGGLVAMVALAHKLAVLFWRVMVKGLNYAEAGLKAYEEQVLETKRRALSRLAKQLGRVVLPSLAELQTAES

SEQ ID NO: 212239 - protein, 328 aa, unidentified
MNLYVGIDIAKHDFASALELADGSLKRSTKKLGNNTRGWNTLKSWVSREKSACQAERVHLGIEATGGYEMPMVEWLRSHSDFEITILNPIQVKRFIQSQLIRTKNDPVDARMIAHYMAVLQPDPTPAPLEGSRELKELTRHLNHLVRKRADEKTYLETVRDPGIKSLVKQMIKSYDQQIRTVKTQINDHLDQHPGLKKNKDLLMSIPGIGAITAGILLSEIDESLDAKQQVAHAGLAPQERQSGLFGGKSQLCKTGSRRLRTALFLPALAAIRFNPIIRRFYLKLISKGKPKMVAVAACMRKLLHIAIGVLKNQINFDPDHEQLSLVS

SEQ ID NO: 212240 - protein, 393 aa, unidentified
MQNCLAVDGAKSKSMVTLVSSSGEVLIDPYEVNHSINDFSNLLNRINNFKLDNVSVIMESTGVYHRPIERFFLENNYKVFVINPIYGKMKKRNLRKTKTDKEDCFNLVNLFMSNTFKEYIKPDQIYLDLNALSRQYFALDELCVNIKNRYKNLLYLCFPEYEEIFKNSLIYSSIALEFIESYPHVDIISNTRIDKLQNFFKKHKFRYWKSKANLIKEIALKSFPSVNMNDEIVSNLSQVARLINEYQKAIDIIKYKIVFLAKKTKYFETINSIYGIGEFTTSIIIAELGDINRFNNIKELTAYCGLDPSIKQSGKSINVHGPISKSGNKYMRKILYLACFNIIRLTAISKQENDIEIYYRKKRNEGKHHYAAIVTCTTKLLRKILALCKQLDN

SEQ ID NO: 212241 - protein, 502 aa, unidentified
MSRPESGHLLILMVTLSRTGIPNRKILYVNIHSLKSSLFTKSKKMKEKDQELSMKIVHPHAAGIDIGSKSHWVAVDQSPANVREFGVYTRDHQRLIEYLRLYQVTTVAMESTGSYWQTLFHALQKVGFEVILVQGTQTRNIRGKKTDVLDCMWIQKLHTLGLLTSSFLLSDHLQTLRTYYAHRDHLIEQTAMYINKMQKALRLMNIRLDVAIRDISGKSGRAILDAILAGQRDPEYLASLAHFRVKKTKQEIAAALHGNWRDDLLFELQSCLAFYDTYRREIVTCDQKIETILQQHISHPNLLVLTSEPSDKKIRKQVNRNSPSFNVRHLAFAHLRTDLFQIPGVSHTTILCLLCNMGNDIKRFPSAKQFASWLRLVPNNKVSGGRIISSRTPKGKNVLAIALRNAANSIGNQTEHPLAPFFKRIAYRKGRNAATTATARKLAIIIWNMITKNQPYLQHDSQILFEKRKTAQVKNIKNRLFKLNLTDSEMISLFKRTSLPDT

SEQ ID NO: 212242 - protein, 426 aa, unidentified
MIDQHHTSLEPATFQDWTDAPTAGIDWASTDHAVAIVDHRGNQVERFMITHTTSGLRELVRRLRRAGVVEVAIERPDGPVVDALLDAELGVVVIAPNQLKNLRSRYGSAGNKDDRFDAYVLADTLRTDRARLRLLTRDSDATITLRMTVRARQDLVHARVAMANQLRAHLQTTFPGAIGLFRDIDSAISLRFLTRFPGQDKAEWLSSVRLGNWLRSVGYNHLANLDRMWAHLNNAPRGTTGTQATPRAEITLALVATLTALRTQIKTLEGQIADQLAAHPDAAIFTSLPKSGTVPAARLLAEIGDARGRFPTPEALACLAGAAPSTKQSGKVKVVAFRWAVDKQLRGAVIDFAGDSHHANPWAADLYNRARARGHDHPHAVRILARAWLHIIWRCWQDHEPTTPTNTARDSDSKGRRLVTGLLMPR

SEQ ID NO: 212243 - protein, 382 aa, unidentified
MSDCITHVGLDAHKKDHKVAMYLPGSDVPLEAVVPNTLRDVERWVRQAQKKAPGEIVVAYEAGVCGFALQRQIERAGVRCIVIAPSLIPIKPGQRVQTDRRDAAALGRLLRSGMLTEVHPPNVQQEAARDLCRCREAAMRDLGRVRHQVLKFLLRRGMSFNEGVHWTHKHMAWLGSLALEDPMDRDVFAEYLGELEHRQERLARLDRSLERLAQSTDYKEKVGWLRCFQGIDTVTALSVLVELYAFARFASPRELMSYLGLTPSESSSGATVRKGGITKAGNSRVRRLLIESAWQAPRRATASKALQVRRRDQPAWVIEIAKRSQQRLYQRYWRLVQCGKMPVKAATAVAREMVGFLWSVLREPRPGAAEGSGAPRPRPPDA

SEQ ID NO: 212244 - protein, 348 aa, unidentified
MTVYVGVDLHSNNNYVGIISQTSEVLFKKKMPNDLSKVLEVLEPFRNDIAGIVVESTYNWYWYVDGLMEKGYRVHLANPAACEQYAGLKNVDDKRSALWLADLLRLGILKTGYIYPKEERPLRDLLRKRLHLVHHRSSHIISIKNILTRSLGIQVKSEEVRKLDEGQIRRLFPNEDLFLAVNASVTMMKHLNDQINRIEKAILAKARLRKEFKSLLTLPGIGEILGLTIMLEAGDIRRFEDVGDYVSYCRCVKSVRTSNGKNKGKGNRKNGNKYLSWAYVEAAHAARRYHPVIERYYQKKLAKTNKAIAAKAVSSKLDRANYYVLRDQVAYDEKKLFGGKAEPGAVLG

SEQ ID NO: 212245 - protein, 343 aa, unidentified
MQTVTTIGLDIAKSVFQVHGVDGAGQVVIRRQLKRRYVLAFFQKLPPCLVGIEACASSHHWSRELQALGHTVRLMPPAYVKPYVKRQKNDMADAEAICEAVTRANMRFVPTKTPEQQSGLMLHRTRHLLIRQQTSVINAIRAHLAEFGITAPVGRRGIEELLRVVADPSDKRVPELVRSCLAALGSQLLSLKKQILEFDRMILAWHRCNQTSKRLNCIPGVGPLLATALVASVGDAKSFRSGRNFSAWIGLVPKQQSSGGRERLGSISKQGDRYLRSLFVAGALAVIRYAKLHGSNHRPWLTALLARRPTKVAAIALANKLARMAWALIARGERYNYPVALRP

SEQ ID NO: 212246 - protein, 538 aa, unidentified
MICGAWIWASGGGQRSRPRAVDEPDEQMLDGWKAATQDDSAFKPDRRVATTEGGGACPLSGGAVAASSHKGRRIRVARESNSKAVFKRSPSVDMRLRKLVCSQFDRGRVQGTLCQRILDHCSKGLPSVFVSVHVHSASRSMPKSTKPTRIRRDFPQSLNGVDAPRLMLRSQSATGKGKSMSEVTRGFIARVGVDLAKRVIQVHAVDAAGRVVAAKALPRDGFMPWCAQLPPGTLIAMEACSGAHHWTRKLRALGLDARMMAPHFVTPYRMQGKGGKNDANDAAAVCEAASRPSMRFVPLKTPAQQAMLAIHRLREGYKEERNACINRIRGLLTEFGLVFAQRPEVLRRELSDVLEDATNELPALLRMALRQAHLHWLELECHMAWCDERIEAHVRTDEQAKAAAQLCGVGPVTASALVAMVGDFKQFRSGNQFGAWLGLVPRQNSSGGKNSLGQITKRGDGYLRTLLIQGAKAAMVHAKKRTDRISLWMVSLIDRIGWQKAVVAMANKNARILWAVLSKGTAYDPNHVSINPGLPATA

SEQ ID NO: 212247 - protein, 355 aa, unidentified
MLYSGVDLHRRLVAICTLDESGTIVARAKMKTSSELITDYFQRWPTEHQAVVECTTGWYWFCDLLRSLGITVVLAHAKYRKAISYAKVKTDAVDALTLAQLLRMGYIPEAHQLPPEYRAMRDVLRQRMVMEHKRTNMIQRIRSILAQFNIIDLPVRPYVPAFADFLTACPIPEQYRMTLQMYHQQCVQTTEHRKQLEKYFKARLRPTSAVQLLMSVPGIGDITGAIIAMETGEIHRFADAKHYCSYCRLVPGAQDSAGKHRHRSGSKDGNQYLKFAFTEAAIKAIMFYPEIKHFAARLKQRANTTIARTVVAKELAKISYYVLHRQEEFKTFKGVEVNKLRDWPRARKPVRLTEA

SEQ ID NO: 212248 - protein, 419 aa, unidentified
MARTKDSQIISVVHPICCGLDVHKDQVSACMLFSGEGGETESEIREFSTFTDDIERLRDWLVKEECPVVAVESTGVYWRPVHNVLEHHLEVILVNARHVKNVKGRKTDISDCKWLAGLLRHGLLRGSFIPPQEVRMWRELWTARQSYVRTIGDFRRRIHKILQCANIKIDSVVSDLFGVTGRNLMKCLIARGNEITLDEIEECARGTLRAKCEELHRSLKGFFLSHHAILLATLLKTVETLESQMEDVTSRLRSLMTDHDSLLDRLDAVPGINEIGAMGILSYTGVDLSAFPKAENFCSWQGLCPGNNESAGKRHSGRPAVNKHPLKGLFIELAWTAVKKKGSYYKDKFHRLKARRGAKRAIVAIAHKLARAVYHIIKDGADYRELGEDYLDTRNAALKTKRLRAQAKALGFDLIPTVA

SEQ ID NO: 212249 - protein, 346 aa, unidentified
MMIIGCDFHPSWQQIAWLDTETGETGEQRLVHAGGDAERFYRQLAVPALIGMEATGNSHWLVDLLSELGHELWVGDAGQIRASYVRQQKTDKRDAAHLLKLLVEGRFPRIWMPSSEVRDLRQLLLHRYKLVIIRARVKNELQHLCLNKGVQRKHKLWTKAGQQVLRELPLKPWARRRRDDLLGLMAMLDQQIEPLDQAVKEEAQRDKMALLLQTQPGVGPITALAYVLTMGDIRRFPRGKQVASYLGLIPREHSSGGRQHLGAISKQGNRMLRMLLVEAAQTAVRLDPQFRKEYLHRCHQKPKAVAKVAAARKLAVRLYWMLRTQQGYPEVVRIESSPRVGLVGEN

SEQ ID NO: 212250 - protein, 356 aa, unidentified
MAEGTWVGLDVHARKVVAGVLDAGSGELRSLRAPALPLETVEWLRQLSAPVRVAYEAGPTGYGLARACAAAGIACTVAAPSKIQRAPADRVKTDRRDAERLARLLRLGELVAVRVPEPQEEAARDLVRAREDARGELMRARHRISKLLLRHGLMYETSAWTLAHDGWLRRQRFDSRPLQLAFEESYAAAVQAKTRRDALDHAIAELAAEPPFAEIVGRLCCLRGVATLTALALTVELGDWSRFRPQSLGPFLGLTPSEDSSGERRRLGAITKTGNTHARRLLVEAAWQQRRPLRESATLARRRQGQPAAVRAQADRSARRLHQRWHALERRGKRRTVVAVAVARELAGHCWAIATM

SEQ ID NO: 212251 - protein, 430 aa, unidentified
MKSNTQNAKIEAITEKTLVLGIDVGSETHYARAFDYRGIEYSKKPFKFSNTEAGFVTFKEWILDLKERHEKDKVVPGMEPTGHYWFNLGKFLHDNEMKPVLVNPHHVKKSKELDDNNPTKNDRKDPKVIAGLVREGRYMIPYLPDGVYADLRTASNIRFQLQAELTRIQNRISRWFNIYFPEYKTVYGKPDAKSGILILKAAPLPEDILTLGIDGVNQIWRDAKLRAVGKARAKTLIEAAEHSVGSKEGAVSARMEIRMLLEDYESRNTRLQEVMVLIEELVRKIPMAEKLLEIKGVGIRTVSGFLAEVGDISRFNNPKELQKLAGLALVENSSGKHKGETTISRRGRKRLRYLLFEVAMSLVAKNPEFRELHNYYTTRRLNPLKKMQSLMAIAAKLIRVFYAMLTKGVDYDPKKMVSDIKRPAVYLQAA

SEQ ID NO: 212252 - protein, 342 aa, unidentified
MSIVILGIDLGKNSCSVAGLDASGRVVLRRRLRRQTIAGFARQWRGCIVAMEACCGAHHLGRQLVAQGHEVRLMSPEYVRPYVKAHKNDDRDAEAIAEAATRPTMRFVAIKSEAQLDLQSLHRARERLVSERTALINHLRALLLERGIVVPRGRRKLEQALPGILADESSGLSARLRRLAGDLREEWRALDERIAAFDAEFVSQARTDEAARRLATVPGIGSLTATALVAAVGNAKAFARGRDMAAWLGLVPRQMTTGGKPKLLGISKRGNRYPRKNLIHGARAVLPYLATRDTPLGKWVQGLLARAHKNTVVVALANKLARIAWAVLAHGRSFEAAHVTAV

SEQ ID NO: 212253 - protein, 350 aa, unidentified
MSNHKFVGADVHAVSTTYAVLNDSGKLVAEGVVETTAESLVTMIKSIPGAVHLTFEEGTHASWLYGLLRPHVVELVVCNPRKNVSKKENKSDRIDARKLARMLRSGDLSPVYHGHDETRALKELVRGYEHVVSDSVRAKNRLKAIYRSQGERTPGTTLYKLEGREEWLAKLQSRGLRVRAEWLYSQIDALDCVREEAERAVLCEARKHQACKLVRSVPGIGPIRSATIVAHVATPFRFRTKRQFWAYCGLAVATTSSSEWIEVDGELVRKRRSASTRGLNKNFNRSLKHVFKSAVHDAGKFRPHLGYLVESGMRESLARLTVARKIAATTLAIWKKGEKFELSKAEIKSV

SEQ ID NO: 212254 - protein, 389 aa, unidentified
MAEVLRKLTGRAALDAGVVSGNGKKDGRGNTFGPNRDRLTVGVDLGDRWSQYCILGLEGETLAEGQLRTTQEDVGEFFRGLTTARVVVEVGTHSAWVQDVITECGHEVLVANPRLMEGSKRRKRKSDRIDANKLARLGRVDPQSLYPIRHRSREVRQDLVVLRARDALVSVRTELINTTRGLVKSMGTRLPRCSSPSFAEKVKDAIPVEVGEALQPLVQLVETVNECIERYDERIEELGRKKYGHTTLLRQVKGVGPITSLAYVLTLEDPQRFASSREVGPYLGLVPKQEDSGDSQPQLGISKAGDRMLRRLLVGSSQYMLGAFGPDTDLRRYGLRLCERGGKNAKKRAVVAVARKLAVLLHHLWVTGDVYEPLHHSGAETRTAQATAA

SEQ ID NO: 212255 - protein, 395 aa, unidentified
MFIVGIDIAKRSHEAIIIAEDGQVVRKAFSFRNNCTGYNLLLEQVRRLTLVKSQIVFAMESTAHYWLALYARLLKDGYTVMVLNPIRSHSLRELYIRKAKTDARDSLIIADLVRFGRCKASNVPQDKILALRELCRSRAYLVDMAADLKRKLIALLGRIFPEYESLFDSVFSKASIAVLSKYSTPQKVKNANLRKLTDLLMESSNGHFGEWKAHQLKEAACSSFGIDDSGGVYSTLLGMFLEQILSLTAQADSLEKQISVFFQEFNNPLTSIPGVGTVLAATILSEIGDITRFSSADKLLAYAGLDPSVKQSGEFKSNQNRMSKRGSPYLRRAIWLASTVAVHRDPMFQTYYEKKISEGLHYMNVIGHVSRKMTAVIFAVLRDGQPYQPILQSAG

SEQ ID NO: 212256 - protein, 351 aa, unidentified
MRTSQKITGIVATIGIDIGKNTFHLVGFDQRGAIILQQKVSRGQLERRVANIPRCLIGMEACSGSHHIGRRLAEIGHDVRLIPAQYVKPFLKGHKNDYRDAEAIAEAVQRPTMHFVTIKTPEQMDLLALHRVRSRLVGRRTGVINQIRGFLIERGITVRQGPMPLRKALSEILGSDTGALSPRMVGLIADLAQDWRRLDERIAAVSAEIEALAEQDHSCQRLMTVPGVGPIISSAVVAAIGNGTGFKQGRDFGAWLGLVPKQESTGDRTILGKISKRGNKYLRTLFVQAAHVVLERRPSAAMRGLWPWAEQASKRLHRNMLAIALANKLARIAWAVLARGGTYQPRITHAA

SEQ ID NO: 212257 - protein, 415 aa, unidentified
MALKIVYKICCGIDVHKTFVVACVASTSDKGITSYESHRFSTYTSGLKTLLQWLIDRNCKDVCMESTGKYWIPVYNVLENDCSIVLAHPKYVKAIRGKKTDKKDAKWIADLFKHDLVAGSFMPPSDIRQLRDLMRYRFKLTCFKSSEKNRLQNCLTVSNIQLGNVVSDTFGKSAQAILDKLLENPADTSFDLEPLVYKSLKKKLPELRDAIDGFITPEQAGKLKIIKDHYDNLESRKAELEELILALAAPYQQELTILQTAPGISSNFTAIGIISEIGTNMEAFPSAKHLCSWAGLTPTNNESAGKKKSVRVSKAGCYIKPLLVQCANAVVKSTKHPEMRNRYLHLKKRRGHKKAIITIARMLLTALYHMLKNGENYNPELYQKTDLPPVDREITIEQALMLIRNQGYKIKSATT

SEQ ID NO: 212258 - protein, 355 aa, unidentified
MFIVGCDYHPSIQQIAFVDTESGELREERLAQREEAEKFYRSLAAAGQQVRVGMEASGHARWFERLRAELQFELWMGDAAEIRRKRGRKQKTDRQDALHILGLLRKDDFPRIWVPSWENRDLRQLLWHRHRRVQARTRIMNQLQAVALNEGLLCRKKLWREHGRQQREAFRLAPWASRRRHDLLELRDRLKPTIAELSQEIEQEATKYPAAQRLMTHPGVGALTALAFVLIIGDAKRFPCGKQIASYLGLVPLEDSSGNRRRLGHITKQGSSLLRFLLVEAAQVTVRSLPEWRRKYVPLMMRRGRKTAKVAMARRLAVRLYWRMRQGWDYQQWIKFGAHAGQPGTGDGVQSTSSN

SEQ ID NO: 212259 - protein, 410 aa, unidentified
MDTLIERCAGLDVHKDSVTACVRLPAAGGGREQVLATFATTTADLLALRDWLGALGVTVVGMEATGVYWKPVYYVLEERVQCWLLNARHLHNVPGKKTDTLDAVWICQLVEHGLVRPSFVPPPAIRELRNLTRYRKAQIEERTREAQRLDKVLQDAGVKLSSVASHLLGVSGRAMLQALVEGTRDPATLAELARGTLRKKLPALREALHGRFSRHHALLVGAILTKLDFLDEVISDLSAEIAQVIAPFAAEVALLDTIPGVDRRTAEAIVAEIGVDMSRFGSAARLASWSGFCPGNNESAGRRGPGTTRKGSKWLRTHVVEAAKAASRTKQTYLAAQYARLRPRRGTGRATVAVGHSILVAAFYILDRHQPYRDLGPDYFRRRHSREHHARRLARQLQALGYRVTLEEAA

SEQ ID NO: 212260 - protein, 348 aa, unidentified
MIVIGVDSHKRTHTVVATDQTGRKLAEKTVAAVSAGHLELVRWASRFGERTWALEDCRHLSRRLSTDLLVAGEAVVRVPPKLMAGARRSSREPGKSDPIDALAVARAALREDLPAATLDGPEREIRLLVDHREDLVAERTRACNRLRWHLHELDPGSEPVARGLDRGVVLAALERDLAASPGTVGRIARELVVRIRELTATINELEREIGRLVANLAPSLLALTGCGRLTAAKLVGETAGIGRFRSRAAFARHNGSAPLPVWSGNTERQRLSRTGNRQLNLALHRIAITQLQRPGPGRTYLEHRRAQGDTKTEAIRALRRRISDEVFRRMRHDEAARVAGPTGLADVA

SEQ ID NO: 212261 - protein, 343 aa, unidentified
MEYGAIDLHLRRSQIRIIDEAEQVVLDRRVDTTREALTEVFGGRARMRLLLESSTESEWVARHLEGLGHEVVVADPNYLPMYGSRSRTVKTDKRDVAALALACRRGIYRAAHRASAAARTLRQTLRVRRQLVQMRSGLISLLRAVLRQEGMRLPSGSAERVLQRLDRLTVPAGVTTVLAPIRELLEQLTTTLTAADETVEARATRDPAAQRLMTAPGVGPVLALTFQAVLDDPARFGGEAARASAFVGLVPSEDSSAERQHKGHITKCGPADLRALLVQSSWVIWRGRTAAGADLRTWAHTLAARRGRRIAIVALARRLTRVLYAMWRDQTAFAPRRRAVIAA

SEQ ID NO: 212262 - protein, 323 aa, unidentified
MKNFVGIDISKETFDIYFEQEGKGCHVKLQQTEEDYKVLLHLIGKDAICIMEATGNYHLKSAHYLHQAGIKVIAENPLKIKRFSQMSLQRTKTDKADAKLIYEYGRIILSSNKLHFWRPDKTEIGHLKQYDTVRHQLIKQRTALSNSEEALNALTHLNDEVTQVLSDMVTAVDKAIKQLDKGMLKLVKEHHSETFDLVTSVPGIGPKTATMMICLTDGFNKFSHDQVKQFISYIGMSPRTFESGTSVKGRAHISKVGNSRMRSMLYMCSWTAKRKNQQCIALYERLSGKGKPEKVIKVAIAHKLIRQVFGVIKSGEPFSKEYA

SEQ ID NO: 212263 - protein, 328 aa, unidentified
MAKGITICAGIDTGKYKLDIALEGASEQLQVDNTLADHNVLADWLRRHRVKRVGIEASGGYEQAVVAALRRKRFVVVVFQPAQVRAYAKFRLQRAKNDKIDAALIAACTAAVKTIHAPPDPRLAPFAEQLTMIDQIGEDIARLKNRLETCRDPRIWQTWSEEIARLTKRRNSELKALVAAIRQHRDLAERLALIESVDGIGLPTAVAIVVRLPEIGRITREHAAALAGLAPYDDDSGKYVGIRHIAGGRERLRRALYSAALPASMRWNPQLIALYRRLIAAGKEHKRALIACARKLLIFANTVVARGTPWGRTAPTLPTTSHAQLAVA

SEQ ID NO: 212264 - protein, 338 aa, unidentified
MNIVFLGIDLAKNVFQLCGLNLAGKPVYTKRTGRKELLQTLANIPACLIGVEASTGAFYWQREFEKLGHKVKVISPQYVKPFVRGQKNDGNDAQAIAVALMQPTMQFVPPKSPEQQDIQALHRARQRIVNHRTATVCQIRGLLLDRGIPIGSAVSRVRRAIPLILEDAENGLSSRMRRTIAELYELFNDLGRRIHFFDKEIETVFRQSEACQRIARVKGIGPKTATAVVAAIGKGTEFKNGRHFAAWLGLVPRQHSSGDRQVLMNMTKKGDKHLRTLFIHGARAVVRVATNNNDGHMNQWVNQLKERRGFNKTTVAVANKNARIIRSMLRNETEYQVV

SEQ ID NO: 212265 - protein, 341 aa, unidentified
MDKELYFGVDVSKKTLDLAYYDGETIDWKNAHIKVSNDDAGFKKIGSWVAKVGKDFDTFLFCMEYTGLYNQNFRLWLESKEYIYGMVEPRKMHRFEPDLDDDQRSLDRIKTDELDAFRIAIYCEQNHKKILRNPSKLPSPVYFKLKRLLAERKQNTKQSTLYKQQLHDICAYDTDLSVERKKLLLTNMQENQKAIDKEIDSYMNEDTSIRKNYNLLTSIPGIGRIIALETIVLTENFTAISNPRKYACYIGIAPFKKESGTSVRKKTGVSKKGFSEAKADLSIAVLSAIRNNPSIRDYWIRKRKEKCGGIVLNAVKFKLVLRMFAVIKRGTPYVETDAYKN

SEQ ID NO: 212266 - protein, 413 aa, unidentified
MTDETKWYTGVDWASESHLVFLADDGGRKVGKRTFKHGGEGLAEMAAWLMATSGACEPSQIHVAIEVPHGPVVETLMERGFKVYAINPKQMDRFRDRFTLAGAKDDSRDGEVMSSALRTDAHCFRLLALADPVVVELREWSRIAEDLGGERNRLTNRFREQLWRYFPAILELEADLASEWLLNLWETVPTPHKAARIRDTTIAKLLKSHRVRRFDAAQVLSVLRAPPVRVAAGTAEAASAHIATLIARIRLVNRQLKQAHQMLDALTARLAPTEAEPGQTKQHDVEILASLPGVGRIILATLLAEASDALQRRDYAALRSLTGVAPVTKRSGKSCIVVRRYACHARLANAMYHWARTAIQHDPTSRSKYAALRSRGHSHARALRSVADRLLNVACAMLKSGTTFDESITKKTA

SEQ ID NO: 212267 - protein, 417 aa, unidentified
MSEYAALVAIDWADQKHAVCLLDPSTGEREQTIVKHTPAALQEWAIGLRQRFAGQPIAVCLEQSRGPLIYALLQYDFFVLYPINPATLAKYRQAFSTAHGKDDPSDADYLLDLLEHHRNRLRPWHPDDEKTRTLRLLVEQRRRLINDRTRVSNRLTALLKGYFPQVLDWFDDIRTRLVCDFLERWPQLSLLQHARPTTIDKFLRSHHSTSKATNQRRLSEIKTAIPLITDAAVMTASIINLKVLVAQMKTVIEAIAEYDRHLEALCQTHDDYHLFAALPGAGPVHAARLTAALGSDRTRWQTADELVRFSGIAPIIERSGKQFRIRWRYFCPKFFRQTFHEFAAQSIQDSFWARAYYSRQRAKGKEHHAAVRALAFKWIRIIWKCWHTRTPYNEVVYLESLRKKGSSLLKFAADYRA

SEQ ID NO: 212268 - protein, 352 aa, unidentified
MKKLVKQVLGIDVAQDELVVCLGKMYDDWTPGLVAHKIFANTAKGFSTLLDWVQKLTDASIPVGYVMEATGVYHESFAYFLHDQGLGVHIILPNKISNYARTLNVKTVTDKTASEAIAMFGLERKLDNWEPPKGIYRQLQQLTRERGQLMDESTVIKNQLHAEKAGAKPNKKSIKRGTTRLELIGKQLKEIMVEVSELISTDSETQAIVLLICSITGIGLLTAAIILGETNGFELIRNKKQLASYAGLDVREKQSGTSVKGKPSISKKGNKHLRRAMHLPALVAIRHDERFKAIFSRLVAKHGIKMKAAVAVQRKLLEMVYTVFKTKKKYDKEHSKNEEAKKESGVMEAMEG

SEQ ID NO: 212269 - protein, 340 aa, unidentified
MEKVSTIGLDVAKHVFQVHGVDAQGAVVVRRKLRRDDVVAFFTSLPACLIGIEACATSHHWARVLTALGHEVRLMPASYVKPYVKRQKNDASDAEAICEAVTRPTMRFVPTKSEEQQSVLMLHRVRELLIRQRTMLVNALRGHLAELGIITRQGATGLSMLVALVEDEGNDLIPPLARSALFLLVQQLREVHEKVGELDRQIHIWHRSHELSRRLETIPGIGPITASAIVATVTDASLFKSGRQLAAWLGLVPRQNSSGGKDRLGRISKQGDPYIRRLLVVGAHAVLRFCRKGKAAPTRWAAELLAKKPYNVVAVALANKMARIVWALMTTGKRFADSPA

SEQ ID NO: 212270 - protein, 368 aa, unidentified
MKQVTTYVGIDAHKKDLFIAMLIGQQKTPVTWQLANEPQAVRRLVRKLEREAPGPVNVFYEAGPCGYALQRQVTTSRVSCDVIAPALIPRKPGERVKTNRRDARKLVELGRAGLLTAVQPPTPADEAVRDLARARDDAREDLQRCRHRLGKLLLRRGLHYSGRNWTRTHRQWIDSLEWAHAAERAVVDDYLLAIDHTETRLLELDARLAEIADRDPYREPVGWLRCFRGIDTLTAMLILAELHDFRRFASAPALMAYLGLVPGEDSSGEKHRRGRITRAGNALVRRLLVETAWHYQHRPSVGIALTRRRKGQPARVIAIADKAQQRLCRRFRKLAAEHKPAPKIAVAIARELAGFLWAALQRAPEPAT

SEQ ID NO: 212271 - protein, 359 aa, unidentified
MLSQSNKIDFNGQHFYVGLDVHLKSWKVSIMAEKLTLKTFSQDPKPELLYHYLVKNFPNGTYHSAYEAGFCGYWIHNKLKALGIDSIVVNPADIPTTDKEKVSKSDKRDSKKIAKCLRNGELKGIHVSSLKTLEDRCLVRTRGTLVKDLTRNKNRIKSFLYFHGIEMPERFKQSSTHWSNRFLNWLRSIELAEYSAKKSLALIIDESEHLRLIILEATNGIKELSQSETYVNHVRLLRSIPGIGILTAMIILTEIEAINRFDNFDKLCSFIGLVPTTHSSGEKDILGEITIRGNNFLRSAIVECAWIAARKDMALNKSYHDYCRRMEPNKAIIRIARKLLNRIRYVLKNNQPYEYSVVK

SEQ ID NO: 212272 - protein, 418 aa, unidentified
MKKHSKSLQRSEPTLKRTKARGPVQRDAKEVLAEVLGKLTGKLDAPAVSTSAKENRRGNTVGPNRDRLTVGVDLGDRWSQYCILGLEGETLAEGQLRTTQEDVREFFQALTVARVVIEVGTHSAWMQEVITEWGHEVLVANPRLMEGSKRRKRKSDRIDANKLARLGRVDPQSLYPIRHRSREVRQDLVVLRARDALVSVRTELINTTRGLVKSMGTRLPRCSSPSFADKVKDAIPVEVGEALLPLVQLTETVNDCIARYDQKIEELGQKKYGHTTLLRQVKGVGPITSLAYVLTLEDPQRFSSSREVGPYLGLVPKQEDSGDSQPQLGISKTGDRMLRRLLVGSSQYMLGAFGPDTDLRRYGLRLCERGGKNAKKRAVVAVARKLAVLLHHLWVTGDVYEPLHHTGAETRTAQATAA

SEQ ID NO: 212273 - protein, 378 aa, unidentified
MKKDSIARLQVTKSQIRRMAAKQRLTVGLDLGDRSSRYCILDEAGEKASEDQLLTTKAGLDMLFAKMAPCRIALEVGTHSPWVSRHLAALGHEVIVANPRKVRLITQSVKKNDRMDAEQLARLARVDPRLLAPIRHRGPEAQADLAVIRARAELVEGRTKLINAARGLTKPMGERLKSCDADTVKESMADGLSEATQKVIRPLLKSVEVITQQIKVYDEQIQEIEKRYPETKLLKQVHGVGPLVSLAFILTLEDGERFEHSRDVGPYLGLTRKQRESGESAPELGISKAGDELLRRLLVQAAHCILRQGAPDSDLKAWGLTKVGAGAGKKKSKSRKKKAAVAVARKLAVLLHHLWVTGEVYDPQYNRKAAAATKKAAA

SEQ ID NO: 212274 - protein, 341 aa, unidentified
MQITTIGLDIAKNVFQVHGIDAAEKVVVRKQLRRGQVMKFFEALSPCLIGMEACATAHYWARELRKLGHQVRLMPAKDVKAYVKRNKNDAADAEAICEAVRRPTMRFVEVKSAEQQGRLMQHRTRDLLLRQRTQAINALRAHLAELGIVAAQGREGLKNLLTIIADEKDERLPIDARASLIVLAAQLQALQMMIGSIEKRIIAQHRASEESRRVATVPGIGTLGASAITATVTDPSAFRSGRDFAAWIGLVPRQDSTGGKQRLGPISKQGDRYLRRLLVVGAHSVLRRAKQNPEKYPWLAQLLARRPFKVVAVALANKMARVAWALLAKGGTYRAPVLAAA

SEQ ID NO: 212275 - protein, 411 aa, unidentified
MDKVYDKCCGIDVHKKLIVACFRKGNKQEVREFGATTRELLELSDWLKSGECEIVAMESTASYWKPLFNILESSDLNAIVVNAHHMKAVPGRKTDVKDAEWIADLLQHGLLQPSYIPDKSHRELRELVSYRKSLVGERSRELNRLQKMLEGANIKLSGTVRDINGKSARNILEFLITGESIDDAKYDEMYEKKIIAHNLKASKEKIIDDLNGVMTALQRRMMKELLVHFDELNVHIKNLNDEIDNYMKPEEKQAVAFIEEIPGIGHTSAQAIISVIGTDMSRFATDAHISSWAGLCPGDNESAKKRKSGKTRKGNSLLRSTLVICAHSCIRNKRSYFYAQYMRISAHRGRNRAYVAVAHSMLVAIYHVLKDGVVFNDLGADYYNQFNKERKINAYLKKLKALGWEGPIVAA

SEQ ID NO: 212276 - protein, 427 aa, unidentified
MPYRIAGIDVHKRMLTVVVSDVEVRGEYEFERRQYGSTPSHLRSLAAWLVEKEVEEVVMESTAQYWKPVWATLEQYWKPLQQAREGARPMSGMLHLAQAQSNRGPRGRKNDFADPERLVKRLVAGELVLSFVPSAEQRLWRSVMRTKYPLRCNQVQLQNRLEALLEEAHLKLSSLVSDLLGLSGRRMLTAIAEGETDPGVVAARADYRLRATPEELRDALAACGELHPVYRRLLKTAMEEWQRTEAEITRLGQEMATLLAAHQEQIKRLAEVPGLGVDSGQQIIAEVGASAATFPSAKALASWVGECPGEEESAGVNHNRRSPKGNRLLRRILNQSANAAVKVKGSVFAILYRRYVVRFGHNKTIAVIAHRLCRLVWKILHEGVRYEERGPAVQQKSIQRRTARMIRQLRDLGYRIELAKHPAPVQA

SEQ ID NO: 212277 - protein, 431 aa, unidentified
MPHIATRMGLPRFNASDIAPGKEFDMITVGIDIGKEKHAAAAVTATGEVLMRPRFFAQTAEGFSALLAQLKKLGKTADIRIGMEATGRYWLPLRHTLAAKGYRVESVNPLITSAEISKDVRGRKTDKADALAIAFALLRNRHNPAPAEDAVADALKSLTRHRTFLVRQKSSVKRCVHAALDVTFPEAAATFTSFFSSTALAVLEAFPSARLLSVANLKTLTALVSKASRGRLTAGYARSVRDAARNSVSAGIVNEGDEAALVSLIQQIRFADAQIEKAEEKIRAMPAPKAAALLASIKGVGPLLSRVISSEIGDMERFRNPPSGKPPRDMDKRVLAFAGCEPRLRESGKWKGRTKISKRGSPALRTALWQAASMCRLHTPLFAEVYQRQKKRGKPHSVALFYVVRKLIEILCGMHKTGVPFSPQSAGGVAC

SEQ ID NO: 212278 - protein, 350 aa, unidentified
METKVLIGVDPHKATNAVAVLDEDGQLLERAEFSADRHGLRALERWARCFPERRWAVEGANGLGRTLAHKLASAGEEVVDVPPKLSARVRVLSVGNGRKNDRLDATFAALAAWRNGRLAQVRPDDRIDVLRLLSDRREDLVSERTRILNRLHGLLRDLIPGGVSGRLSAERASRILRSVRPRRNSRSASESVRRQLASELMRDVRALNRRIADLDTRIREEVEASGTTLIDIFGVGPILAAKIIALVGDTGRFPTRGHFASYAGVAPVEVSSGEVVRHRLSLGGNRRLNHALHMIAINQVRYEGKGGVYYRKKIAEGKTHREAMRCLKRRVSDAVFKRLTADLEEVRTAV

SEQ ID NO: 212279 - protein, 346 aa, unidentified
MKKIFIGIDFSKEKFDATLIKAEGVEERAERLHEVFDNKVSGFRRLLRWVKSVADEPDAGLWLFCGENTGGYSKALCNHLYGSGYDMWLENALSIRRSSALQRVKSDKADSGVIAEYAMRNYDQMRLYKPLGKNLERLREVFLYRHNLVKMKASMTVRKGEKKLTQEKSDISRFMAQSSKHLISEFNKKIAECDMKIEKIISEDEELRRNFEILISVPGVGTQNAVCLMVYTDNFSRFDYDSRKIACYYGVAPFGRQSGTSVNTPPHVSPFANKLIKALLTQAALASINFCPQMAVYYRRLVEAGKKKPVAVNNVKNKLLHVITAMVRNGEMYNPDHDYYAALKVA

SEQ ID NO: 212280 - protein, 369 aa, unidentified
MVKKSSKLFVGMDVHKDSIDVATGDEGGGEVRHYGAVGGDRAAVSRLVRKLEATGKALVFVYEAGPCGFGIYRLLRGRGHECWVVSPGLTPRSNADRVKTDRRDALKLCRLARAGELTAIYVPDEADEAMRDLVRAREDAVGMQRQARQRLGALLLRNDIRYSKKTVWSAAHRRWIAELKLPHHAQHIAFEEYVQAVDEAGKRVERIEAAIRAELPQWRWRPVVEALQAFRGIRAIHAVRLVAELGDLSRFSSARHLMGYLGLVPSENSTGARRRQGAITKTGNSSARRALVEAAWAYRYAARVSVGIARRQSDLPKAITDLAWKAQLRLCGRYRRLSARGLPRNKIIVAIARELSGFVWALGQQVKPN

SEQ ID NO: 212281 - protein, 356 aa, unidentified
MDKVIREGAVRVGVDLAKRVIQVHAVDGAGRVLSARALARDRFIDWCVRLPAGCVVAMEASSSAHHWARKLVALGLQARIISAQLVEPYRSQGASGKNDANDAAAICEAASRPTMRFIPVKSIEQQSMLCVHRLREGLKEDRTACINRIRGRLAEFGLVFPQSPRELQAVLSDVLEDASNELGPLARLTLQRAQSQWHELDEHLAWCDARIATHGQTNAAVKTAATLVGIGPVTASAVVATVGDFKQFKNGAQFGAWVGLTPRQRSSGGKNNLGGITKRGDTYLRTLLIQGAKSAVMTAHRRPDKISSWVVALRERSGWQKAVVALANKNARILWAVMTRGELFDPNHLSVKPAGA

SEQ ID NO: 212282 - protein, 355 aa, unidentified
MSRDIKYIGMDVHKEATVIAVLNANGNLVMESIVETKAGSLLQFIHGLRGELHVTWEEGTWAAWLYDLLKPQVQVLVCDPRRNALLKEGNKSDKVDARKLADLLRTGMLRPVYHGENGLRTLRELGRSYQTISQDLNRVMNRLKALYRGWGIACAGTQVYAPRYREEWLQKIEHAGVRRRAELLYQQLDGLQALRRTLRPELLAESRKHKATKLLRQIPCIGPIRAARLLALMQTPHRFRSKRQLWTYCGLGIETRDSAQYRFVRGQLQRAKKPQQIRGLNRNHNHEMKDIFKGAATRASCGVGPLREFYEGLLNKGMKPDMARLTLARKIAAIALTLWKKEERFDAEQLKPQAA

SEQ ID NO: 212283 - protein, 418 aa, unidentified
MDYKVASIDIHKKLLIVAVATAADQVPDAIAEALEFECRRFGSGTQERQHLMAWLLQRGVQEVVMESTAQYWKPVWLDLEPHFPKLHLAQAQSNRAPKGRKDDYRDAKRLARRLLAGELMLSFVPEAEQRTWREAARAKEQYVAERVRVQNRIESQLEEMRIKLSSVISDLLGVSGRRILTALASGQTDPVQLAELADERLQCGREKLIDALSGTPAPMQIRILKLHLELLRKIDEVIADLDVLLAQAMKQHQDAVLRLTAIPGIGVDAAQRLIAEIGADAAAFESADAFASWFGGCPGSNISAERNHGSGAPKGNRYVRKLLAQAAQAAVRTKNCYFQQLFRRFVPRLTYAGAIWAIAHRLGKLVWKILHDGVDYIEHGGGTTPAARKRHVQRLTQSLRNLGYTVTLTPNTALPSEG

SEQ ID NO: 212284 - protein, 341 aa, unidentified
MQITTIGFDLAKNVFQVHGIDATEKVVIRKPLRRGQVIKFFAELSPCLIGMEACASAHYWARELTRLGHEVRLMPAKDVKAYVKRNKNDAADAEAICEAVRRPTMRFVQVKSAVQQGRLMQHRTRDLLLRQRTQAINALRAHLAELGIVAAQGREGLKELLAIIADEGDARLPLDARASLIVLAAQLQALQTLIGSLEKRLVVQHRANEASKRLISIPGIGIIGASAIAATVTDPKAFRTGRDFAAWIGLVPRQDSTGGKQKLGPISKQGDRYLRRILVVGAHSVLRRAKLNPEKYPWLTQLLARRPFKVVAIALANKMARVAWALLARGGSYRMPALAAA

SEQ ID NO: 212285 - protein, 400 aa, unidentified
MRVVFGIDVSKASSEVAILVNGEKVHGYTISNDAIGFSRLLGDLRTVHKPEIIFEATGVYSRRLQTFLDDNGYAYTRLNPLEAKKQLDSLRVRKTDQIDAEKLAQSQFVLNRKPTYVQEEVYQNLRDLSRFYQNLTEDIVRAKNRLHRVLQVTFPELENILSTPSGEQYWNLVIAFPCKDCVLELSNDELSKSIRLSTSKRISDKRVAYLAEKLIALANQSYCAVKKTSPILEEVRYYTKELLRLSEQRQAVLDEMVELAQPLPEYDILLSIPGIAETTATSIIGELGDIRRFQSANQINAFIGIDLRHYESGNFLAKEHITKRGNPYARKILFKCIHNIASASHTNPCHIADFYEKRKRQSQTTSTKSHTIASIHRLIRTMYYLIMHNKLYDYASTQNR

SEQ ID NO: 212286 - protein, 414 aa, unidentified
MDPDQGQPVDDQRDDFRYFAGVDWGGSFHQLCVLNAAGGLVLQQRINHDVAGLALLTAKLAQLGTPVALAIERAEGLLVELLQTLPAVTVFCVSPKISARARERYRLSASKSDLFDAFVLADTVRHEHRRWRPLSRPSAVTAELQAVSRDRQRVLNVKVACENRLRAVLDTYHPAPLHLFSELDRDISLDFIRTYPTPDQARRVKTARMTAFCARQHYSGRTDPQVLVDRLQPHLLSASAGTTAGKAFAVKLFAEELRMHTDHLRAFDARIDQLLKVHPDAPIFLSFTGIGPVIAAALIAEMGDDRSRFVTADVLLAETGLAPVTKASGRTRQVRFRYAANRRMRHVIDWWMFIAAREDPWSKAVYDAGRARGQGKYRALRGLGARWVRILWRCWTDHTTYDPTHHHRPELTAA

SEQ ID NO: 212287 - protein, 385 aa, unidentified
MAKVVIGVDPHKRINAVVVVNSRAQVLARAQFVNDAQGFRELRRFSRQWRPRTWAIEGCNGVGKHVAQRLVAAGERVVDVSTRRAALVRVFAGGNGRKNDDTDAHSIALVGLHAPDLPAVRADDRRTALRLLSNRRRELIGQRTQCVNRLHRDLVGLVAGGAPRSLNAKKARALLASVKPRDEIGRLRRHLAAELLSELVTLDKKIGAIEAEVRALVRSTPTGLPKIYGVGPVITALTLGEVGDIARFADRNHFASYNGTAPDDKGSAGNPAHCVNIKGNRKLNHAIHMIAITQIRNRNSPGRAYYKRKLAQSKTKKEALRALKRKISDVIYRQLVADAQLAMGPGGQAGTTLTASVTDPTPTAGTSDKPQPGPTENSTPLASTG

SEQ ID NO: 212288 - protein, 339 aa, unidentified
MDQFTKKKYFIGIDISKDHLDVALLKAEELDVFKDKQVENNFKGFAIIQNWLSKQKVKLEDCLFCMEHTGTYGLLLFAWLGQLGVNYCVEPGIKIKRSSGITRGKNDKVDARRIADYAATNRAKLKPFQMPSNLLLQIKQFLTYRDQQTKIKVSLKNSLTSHDQYQRVSGVKSISDEIQNQIAECDQRIDRIDAQIIELIKTDETLKQNFDLATSVKGVGLVIATFMLVTTNNFTSFENGRKYASYTGIAPFENTSGKYRGKTRISHLANKRIKTLLTNGANSAIQWDPELRAYYIRKLGEGKEHKLVINSIRCKMVNRVFAVVKRETPYVNTYQQKIA

SEQ ID NO: 212289 - protein, 355 aa, unidentified
MSQHYGVTAGVDLGDRYTHVCLLNTENGEVIEESRIPTNTKAFERRFSGTTAPMRIAIETGTHSPWVSRLLEECGHEILVANARKVRLIYGEGHKNDKIDAEKLARLARLDPRLLSPIRHRGENSQAHLTLLRSRDALVGARTKFVNHIRGAVKSFGGRLPKCTAENFHNKVAEHLPQELRPALEPVLETIASLSERIREYDRRLEEVADELYPESKLLRQIHGVGALTALAFVLTLEDPSRFAKSREVGAYLGLVPATAQSGKSDPEKHISKHGNKMMRRLLVSSAHYILGPLSEDSDLRRHGEKIAQRGGKNAKKRAVIAVARKLSVLLHRLWVTAEVYEPLYNASRRGGQAA

SEQ ID NO: 212290 - protein, 351 aa, unidentified
MERYIGVDVHAQSCTVAVLSPTGKRVGCKVVQTSAAALIAALKEIPGRRHLCLEEGTQSAWLHEVLEPHVAELVVTVPKAKKGTKSDEADAWARAEELRVGRVETKVFKAPKTFAGLREAARSQWLLTQDTTRVKNRLKAIYRSRGIGGTGEEIYDAKKRDVWLEQLPPSKRRRAELLGEQLDGLEPLRKRAEKWLNEEAKEHRAIGWVRSVPGFGPIRSAQVVAIVVTPHRFRTRRQFWAYSGLAVVTKSSADWVPKPGGGWTRAKRAMTLGLNRNRQPILKSVFKGAATTVIMDEEHPLRKIYDKQVSGGMKPNLAKLTLARKLATLALMLWKREEEYDPAKNHAPQSA

SEQ ID NO: 212291 - protein, 370 aa, unidentified
MLDTTTFVGLDVHARSIKAVSLDVMTGEVRCATFGYDAGAVAEWVRSVDPGARCVYESGVTGFDLQKRLSGLGVDCVVGAVSKMIKPSADRGRKNDRNDAEFLARMLSVGNVVEVWVPDDECEAARDLTRALEDARDDLSRSKQRLSKFLLRHGLVFDERTPTGRGKGNWTRAHWSWIESIRFAEGADNDVLAYYVDAVRRAAEEKARLEGLVEAEARKPRWRKRVDSLRCLKGVDTASAADLVFEAGEFSRFRNARSFAAWVGLTPSEHSSGESDRRGAITKAGNKHLRKTLVEAAWHYLTCSGRPKDLAKGQAPDPAARRHAAKGVRRLVERRGALLARGVHSNKANVATARELACWVWAVGLMAEET

SEQ ID NO: 212292 - protein, 313 aa, unidentified
MTAPTVFVGIDVSKDALDVALRPSGERWQVAHDSRGIESLLQRLSSLLHALVVLEATGGYEQALAAALASAGVAVVVANPRQVRDFARATGQLAKTDAIDAAVLALFAERVRPEPRPLPDEARQSLEALVTRRRQLIEMLLAEQNRLLLARRAVRRSLTDHIRWLERQLGGVDRDLDQAVRSSPLWRAQDDLLQSVPGIGPITSRTLLAELPELGRLSRKEIAALVGVAPLARDSGTLRGRRTIWGGRASVRAVLFMAAAAATRWNPIIRMFYQRLRAAGKPAKVALTACMRKLLTIANAIMRSQSPWRVATA

SEQ ID NO: 212293 - protein, 422 aa, unidentified
MLGVGVDWAESFHDVALGRPGEGVMEQFRIEHGPAGVARLVARCLELEPDPAQVRVVLETRHGLLVEALVDAGFSVLPVNPDLVARRRGPAKKKDDAEDARICCLLALDAYLELRKLIPHGQIGAELRAIARDDERAARDERRIGNRLRADLLAVFPAAIDIAAGDLASAVFLQLLQRWPSAQALAAASRQEIEDFARSARHGWPGRFADRVTGAMATAQLTVRPELARAKAGSIQLAAAQLLLLRAQRRQWERRMGELLLGAPRTGRDHTAKDPDPGKAFPGGEIYLSMPGLGDRLAARVAGEIGEHPEQFTTPNALQCYAGRAPVTRRSGRSEFTIARRLAYNHYLGDAVHQWAFCSLRYSAWAREFYDTKITAGHSHHAALRALGNRWLEVLWHCLRLDTPYDEAIHTANRNRALNHAA

SEQ ID NO: 212294 - protein, 336 aa, unidentified
MSKSYLGIDVHKKWCVYTEIDSTGKVIRQSRFGNTFEEVSTFASSLNSKVHLVLEPVLNYLWLLDQFEPYVGSVHVATPFKVRVIAESKSKTDKYDSRMLAELLRTNFLPESWVPPAEIRLLRGLIRQRYHLVKSVVMNKNRIRHLLFQHGIDLRVFNIASPKARLEIRGFCLPDVTRQTIDQCLKIVAILDDHVLEITKSIWERVKDNPTVELLRTIPGIGKLRSAIIYAEVGDVTRFRSAKSLASYTGLTPTVRSSGDSVWTGGITRLGSRPLRHALVEASINTVRKSPELNRMFCRILYRSNVQKARVAIARKLAVIIYAMLNRNEPFRAEAA

SEQ ID NO: 212295 - protein, 350 aa, unidentified
MIVLGADTHKSSHTIAAVDTSTGQVLGDKTVAVGARGFAALVLWARGLDGERVWALEDCRHVSGALERFLICRGERVVRVSTRLMAGTRRSSRERGKSDQIDAVSVARAALAAGIETLPTAALAGPELDIRLLVDHRERLVRTRVALNNTLQWNLHDLWPELTLPGGALFSKKWTTKIARRLARAEQTMRVRIARDELRRMRELTQAIKALQAEITVLVTEIAPQLVAEPGCGPLTAAKLVGEIAGAERFTSDAKLARAAGIAPIPASSGRTDRHRLDRGGNRQINAAIHRMAVTRARCDPETQDYIARKKTEGKTQRDAIRCLKRHLARRIWHLLQPPTPSQTSLNLLT

SEQ ID NO: 212296 - protein, 312 aa, unidentified
MDALVVGIDVSKDRLDVAVRPTGESFVFKRTAAGIEDLVARLKARSPTLVAIEATGGFEAVVAAGLAGAGLPVVVVNPAQVRAFARALGKRAKTDPIDAVVIAHFAEATKPQLRQIPDEMTRLLAELVARRRQIVDMIAAEGQRAGRMSDHRLTRSIGRLRKALEKELDELDRLIDDHMRGSAVWVETEKLLVSVPGVGKTIARTLIAELPELGSLDRRQIAALVGLAPWTRQSGQWRGKSFIGGGRKSVRSSLFVGAMVAARYNPQLKRFRDRLVAAGKPKLLALVAVARKLITILNAILRDRRPWQPLAA

SEQ ID NO: 212297 - protein, 375 aa, unidentified
MSKIRFVGLDVHADTIAVAVAETGGEVRSFGIIANRPEAVRKLLHQLGPVEQLRACYEAGPTGYVLYWQLTALGVRCEVIAPALVPVKPGERVKTDRRDAMKLARSYRAGDLTPVWVPDAAHEALRDLVRAREAAKRDQLRARHRLGKFLLRTGWQRPAHLKTPWSKPHLEWIKTKVHFEQLAQEVALTDYVHEVEHVAMRLDRLDRAIQDAVRLAPPRMRAVIAALQALRGIAETASVTIVAELGEISRFRTPRQLMAYSGLVPSEYSSGPTRSQGSITKTGNAHLRRVIVEAAWAYQFRAWLGGYLLKRQVGLSPEVREIAWKAQNRLHLRYRKFLARGKNKPQIVTAVGRELLGFIWAIGVKVEAEQQRIAA

SEQ ID NO: 212298 - protein, 354 aa, unidentified
MKSFIGEPVMSNYNKKTVFIGIDVHKKTYSVSCVSNNEILKQSSMPACPEKLIKYINKHFPSYTRQTAYEAGFCGFALHRELTENGIYNQVINPASIEVAARDRVKTDKRDSLKIAVQLSREQISGIHVPSRERESFRELTRLRTTLIQDKNRLGNRIKSMLYRLGKIKHNEAPRISDKWVQSVLKDEYDEYSSFAIESLGNLWLNVAKEIDIIDVRIKKQAANDLPMECVYRSAPGIGPIHARILANELEDMSHFKNEKKLFSYTGLTPSEYSSGEHVRQGHISRQGRSILRKVLVQASWVAIKADSSLREIYERISLTSGKKKAIIGIARRLIGRIRACFVNGTFYQVAEKH

SEQ ID NO: 212299 - protein, 345 aa, unidentified
MPIVGGLDIHRKQITFDYLDTATGQVRRGQIAPADRVHLRAWLARFAGRDDVAFALEGCAGWRYVAEELAAAGITAHLAEPADTAFARGRKRHAKTDKTDSRHLRQLLAEGRLPECWIPPARILECRALLELYNDLRRERTAWAQRIHAVLFHQGAPALGEGALRTEQGAAGLRAAAAAHLSPAGQLQVATALEVIDALEARLHVVRHQLLDAARHLAGAKALAARLYGVGPVTALAITCWLGGAGRFSSSRQAVRFAGLDITVSSSDRKGPPGKLSRQGPPVLRWAVYEAGKAHARTSAPDHRYYAAVKDRKNSKRACLSEARKILRQAHHILAELGDDALAAA

SEQ ID NO: 212300 - protein, 334 aa, unidentified
MAKNVFQVHGVDRNEKAVWRRKLARESWLKVLLETAEPGCEIGMEACGGAHYWARRLQAHGFKVRLIAPQFVKPYVKSNKNDANDAEAICEAMSRPHMRFVSVKTVEQQDIQAVHRIRAELTKQRTAKANQIRGLVAEYGLVAPQKLVHLRRALPCWLEDAENGLSERFRRLLNGLWGDLRTLDERMAELDREITVIAQSDPVAKRLQQLRGVGPIIATALVAAVGKGEQFANGRQMSAAFGLTPRQHSSGGNERLLGISTRGDAYLRVLLIHGARSVIRTSKDKDDRLSQWVTRLAARSHANVAVVAMANKTTRMAWAMLRNGTVYQPALPTR

SEQ ID NO: 212301 - protein, 341 aa, unidentified
MSIITIGIDLAKNVFAVHGVDDNGKAALVKPKVSREHLLPLVAQLSPCVIGMEACSGAHHWARLFRQYGHTVKLMAPKFVTPYRMSGKRGKNDAADAAAICEAVTRPNMRFVPIKEEHQQIILCLHRTRNGFVEERTATYNRLRGLISEFGIVLPQKVACLRREIGAHLDDLPGYARQCIGDLLAHADALDARIDEYDRIIAKAARDDARSKRLMERPGIGPISASALLASIGGGHDFKNGRQVAAWIGLTPGQYSSGGKARLGRITKAGDPYLRSLLVMGARAVLAGLGDKQDGFSRWARSLQERRGYWKAVIAIAAKNARLAWAVLKYGEEFRLNPNAA

SEQ ID NO: 212302 - protein, 391 aa, unidentified
MDKAWVGVDVGKEFHWAHALDASGSELLSRRLENDETDVSKLIDEALSLADEIVWTVDQPGGSAALLLGLLWERDQRVLYIPGLSVNRASDSYRGESKTDARDARVIADQARMRPDLSELEPDEEEIAELRVLLGRRRDLVIDQNRTITRLGEALLSLSPALERALDLNRRGPLALLTYYQSPQRLRRAGHKRIAAYLRSRGVKGFDGVAGKALAAAKSQNISLPAESIAARIVAELAAEILALKDRIELVDEQIERRFFDRPEAKILASLPGMGPLLGAEFLVAVGNLSAFESADHLAAYAGLVPAANDSGKRVGNKRRMRGGNKNLKRVFYQAAFASLRGSPESRAFYDRKRAEGKRHTQALIALARRRVNVIWAMLRDGTTFETRSAA

SEQ ID NO: 212303 - protein, 403 aa, unidentified
MVLLQVGIDPAKKSCVASVVDDSGHLCRKRLDFVPNRSGVARLVERVQALGPGVPCHFFVEASGYLWYAPAALLRELGQPVSLINPSYTKAQRRLHSPHAKSDARDAQALARVAFNMGDKALHPADIPEGARLNLRLLVRQRARTQEQATAIKLRLLSWLGLTAPGLTELWGTELSASRREFLGHFPTLAKLRRLGPERVRRFLERRAPGESQQETVQALFALVQEAYCPRDLDDRLVAEQFAMEFEHLALLEKHLQQLDRRIGALLAQCDPQGLARSLPGFGPLVAGILVAEAGCDLSRFPSAKHFASWTGVVSRASGTAGQQVEGLPITKAGRGIVKWALYMAARSAVNHDPEMHALYDRLRAKEKHHNVALLAVAHQLARVYWAVMTEQRPYQKRPPRTP

SEQ ID NO: 212304 - protein, 321 aa, unidentified
MNNLTALGIDVSKAKLDCALASGAKFRTKVFANQPGGWTELSAWLSQHAPEGVHVCMEATGTYFEGVAQHLADCGYTVSVINPALAHAHGQSLGLRSKTDAIDAKLLADFCREKHPTAWQPPSPAERQLRALVLRHQALVEIQTQEKNRAHVVRDAVRDSIDTHLAWLDSELLRIERAIADHLDQDPDLRRRRDLLDSIPGLGERTIAVLLAFGLAQQRFSNARQFVAFAGLSPRVHQSGTSVHAKPRLSKIGHAFLRRALYMPAMVILYRTVWGRCFRDRLAAHGKPPKLIIGAMMRKLAQVAFGVIRSGIPFDQTLHHA

SEQ ID NO: 212305 - protein, 391 aa, unidentified
MAGVRNQTGEPDTMPSENTVHIAIELSFSSWLVAARLTGAKKSRLHRIEGGDTGALLALIAELRSRALTELGGAAEVACCFEAGRDGFWLHRLLTAHGILVYVLEPTSILVNRRSRRAKTDRLDAEGMLRVLAAWLGGDRQVCSMVRVPTPEEEDGKRPHRERERLVQEKLRIENRIEALLFTQGIRARPSLRSWERELTELRTGDGRTLPPLLRAELDRLRRRLVLILELIRELEAERAAALAAAPDEAMAQKITSLQRVRGIGANFSAVLVREVLYRSFANRRQLASYVGVAPMPFQSGGMDRDRSISRAGNPRARTTLIQLAWLWLRYQPGSALATWFRERVGTLQGRTRRIAIVALARKLLIALWRYVEAGVLPAGVEIRTGTVPAA

SEQ ID NO: 212306 - protein, 433 aa, unidentified
MPTAPYDLLIGLDRSDKKADLCLLDTRTAQRRNVTLNTAPEPLWEWLAQLRQQHPHARVGLCLEQPAGHLISFFEAYEWITLHPINPITLQKYREAFVTSRAKNDTKDAEYLADLLLSHHDKLPVWAPEDSQTRAVQQLVFHRRAVVDERTALTNRLQALLKQYYPQALHLCGEDLWRPLATAFLLKWPSLQRVQKAKLATLKQFYHVQGSRSQKCIAERLELIGKAVPVTGEAGVIESFGLRVQLICRQLQQLHRTLTQFDEQIAAAYAAHPDHALFASFPGAGPVLGTRLLASLGANRERFAQGAAQLQHYTGIAPVTKKSGGSERIHRRYCCPRFHRQSFHEYAKESVLWCRWAGAYYLQQRSKGCHHHTAVRALAFKWQRILWRCWQNHTPYDDARYEAVLRQRNSPIVALLDRVELGKSPWKNPAKKN

SEQ ID NO: 212307 - protein, 305 aa, unidentified
MITLGLDPHPASHTVMALDESGVSQGHLTVPNTEEGLMRLHEFSARFELRRWAVEGAGNHFISMFVGQLLSRGDRVFSISPSLTSQYRARRGRKKNDIIDAGNVARALLANPQLPELNVVEQQRTLQELTRTQRRLSEQLKATRGAQQELASESPVREVLQRLIETLASEVKKLEQRIREMVRKIMPSLLEIPGVGPVVAGVLLAETAGPKRFATADHFASYCGAAPVERGSGQNSRVQVNPGGNRRLNWALHIVAMVRLRTDGGRSRAFLDNVKSSGKTQRAALRVLKTYIARELFRAMRNAIA

SEQ ID NO: 212308 - protein, 351 aa, unidentified
MSRRTTTIIGGVDTHSATHHAAVIDSHGRLLDDSEFPASPTGYAAMLTWMRSKGNLSQVGVEGTGAYGAGLARYLHEQKVEVLEVPRPDRRLRRQRGKSDPIDAEAAARTVLAGKASGAPKLADGPIEAIRMLRVARLGAVKAKTAAINTLRATLITAPDALRTHLQGLSPAQLVAACARLRPDLAHLDDPVQATKAALRSVAIRAQHLELETRTLRKQLDQLTKEAAPTTTAVFGLGPDTVSALLITIGDNPDRLRSEAAFARLCGVAPIPASSGKTNRHRLHRGGDRTANSALHIAAIVRLRYDPRSRTYADRRTGQGLSMPEIIRCQKRYLAREVFDALRTDYAKLST

SEQ ID NO: 212309 - protein, 311 aa, unidentified
MTICAAGVDVGRDFLDIGLAPLGRVFRTPNSPQGVETAVRRLARAGVSRVVLESIGSYGARLVRALAEAGFEVGVVDPKRIAALRLAEGRRAKTDRLDAALIARFALLMSDAARPVPGPKAMEIRALSTRRRQLVEMIAMEKTRLKQALDAVIADSCRRAIAQLAEERARIESRLRDELLVMPDNRDRARLLQTIPGIGPVISMTLLADLPEIGSLDRKAVASLAGLAPHPNQSGTRTGSAHIHGGRPCVRAALYMAAVTAVRSDKGFKAEYLAMRHAGKPAKVALIAIARRIVVAANVIVKTGQSWTKNP

SEQ ID NO: 212310 - protein, 341 aa, unidentified
MIDITRLAVDTSKSVFTLHGVDSAGGAVLRRNLRRRELLSFCGRLPPVEVALEACGGSHHWARALLALGHRVRLIPPQYVKPFVKRGKNDRNDAEAISVAAAQPSIGSVPVKSAEQQAAAMLLSVRELLVRQRTQLVNAMRGHAAEMGIVAPLGEKGVRELQVEIAAADDAAVPAAAKQAIALLGREAERIEVRLRAIDTTLMQQHKANPVSRRLAAIPGIGPIGALNLALRVDAAQFKSARHFAAWLGLVPRECSTAGKQRLGGISRAGDERLRQLLVLGATAVIQHAKPGRPATSPWLLNLLGRKPRKLAAVALANKMARIVWAMMTSGEAYRPRPAAA

SEQ ID NO: 212311 - protein, 398 aa, unidentified
MEEKAYDYPSDLPCAGEHDSGYLICMPESTTAGTLFVAFELSEKTWKLGFTTGHGQKPRERTVTARHQERVLEEIAHAKRRLGLPDTAPVVSCYEAGREGFWLHRFLQGHGITNHVVDSSSIEVNRRRRRAKSDGLDVRKLLSMLLRYAQGERQVWQVVKVPSVEAEDQRHLHRDLETLKQERASTATRIQGLLSSQGLRVTSLTKLPEQLDALRLWDGSPIPPGLRRRVLRVYAQYTFLSEQIAAVEAERRAQLQTATDARIEKVRQLMQLKGIGINGAWLLVMEFFGWRAFKNRREVGGLAGFTPTPYQSGESAREQGMSKSGNRHVRWMTTELAWSWLRFQPDSALSVWFRERFGSGGKRLRRIGIVAVARKLLIALWRFLETGVLPAGAVLKEV

SEQ ID NO: 212312 - protein, 351 aa, unidentified
MNYVGMDIHKRYSVLVAVDERGRELKRGRINGNVASGFAQFFAGLEGKSKVVLEACWNWGRVHDLLSEIEQVEEVVLAHPLKTRLIADAQIKTDGLDAHALATLLRGNLIARAHVPAKPTRQRKDVLRQRLYWARLRTRIRNRIHALIDRQRELSMPQCSDLFGRKGLNALSKLVLSEPDATLLREDLELLGMIQQQIKAQEGRIVEFNNTDETTLRLQTIPGMGKILAAVAAAEIDCVERFSTSAKLCAYAGLVPRTHASGGRVYQGPLVKSRNKWLQWAFIEAAWVAVGCSAYFGGLYRQHRARGKNANLAITSIARRMCQISFTLLKERRDFIETFPGRSAVRLTAAA

SEQ ID NO: 212313 - protein, 361 aa, unidentified
MSGTMTWVGLDVHARSTYAAALDLATGELSRMRFGAGVEAPVAWLRDLPGPVRACYEAGPTGFGLYRAAVEAGIEMQVVAPGKTPRAASDRVKTDRKDAELLARCLLAGSLHPIVVPPVQVEAARELTRCHDACRRDLMNARHRVSKMLLRHGRVYPKTTTWSQEHRRWLAQQQFTEPASELTYANLIAAVDGLTARKRALAERLSHLATDERWWPTVARLRAFRGIDTLTALSIHLELGADWQRFEKAPRVGSWLGLTPSLNQSGESSRQGAITKTGSTLARRLLIESAWHYARQPRIGATLESRQHGQPEHVLAIANRAQHRLYHVHTRMRSRGKPHHVTIVAMARELVCFLWAATTAP

SEQ ID NO: 212314 - protein, 347 aa, unidentified
MTIVGNPDAVIGGVDTHADTHVAAVVNHLGGVLGVESFSTTSIGYRQLVSWLKSHGALVLVGVEGTGSYGVGVSRYLQHEGVTVVEVDRPNRQTRHRKGKSDPVDAVAAARAALSGSATGSPKARDGNVEAIRVLMIARRSAVDTRIETLNQLRHVVFTATPEIRAKFTGLTAISLANKASALRPREGDDPVRYATHMTIRALGHRVQYLREETKQLNRMLRPLIRQTAPTLLEVYGVGYDTAAKLLVAAGDNPARIRSEGAWAHLCGAAPIPASSGKTKRHRLNRGGNRQANSALYHIVITRMRHHQPTRDYVARRLSEGKTMGEIARILKRYAAREVFKHLPRPA

SEQ ID NO: 212315 - protein, 396 aa, unidentified
MTTIGIDIGGRTHVAARCRDGESRADREILRVSQDRAGFAALDAWIERQAEPVTLVAMESSGHYWMPLASHLCRRAIPVAVVNPLGAKYFARSRLARTKSDPADARSLAEMAMRDTPDARDPLAGVELRQAARFAMTLVTEQAKVCQRLIRLVELGFPELGELFDDPTCRTAREVLRVAPTATAARRRRTSTLTNANAGPGHRRLGQAKAEHLQAAAADSIAVRELDAEVAFEVGLLLDQYDLLERQITDADRRVAGLLDSELARRLQTIPGVGPSIAATLLSEIGDISRFDDFDQLLAYAGVHPAERSSGTKGANPETSWHMSKAGNAHLRAAAYRMAVVGVQHNPVIAAHDARKRAAGKSKMNALGHCMRKALAIVWGVWRNGTDFDPDWGAEA

SEQ ID NO: 212316 - protein, 549 aa, unidentified
MAVVESNGSEPFAPEALRERPPPLTPANSCAITTAGCRPCPSGWYPRFQVVPRSRRNTTAKPDVVYTADFLRRWTNNQDDRSRPALAKAFAACRVFNAKLVACDIPYANRLTVGIMALAAEEERLAGYAWFRAGLPCLNHVPTRTSGQPTLHDPSSEPPDHGLGGYHQTGDRRGVLQSDPHHLRRFSTSGNGRELFREGRYDRPGCGRGDRSMDYFAGLDISMDETHVCVLDREGVVVRESKAESTAEAIAGELAKAPSCRRIVFETGRMAPILFHGLSQLGLPVVCVESRQAYYALRSLATHKTDRNDTRGLAHLARTGFFKPVHVKSLSAHAVRSLIIARKKLVGQRVTLENQIRGLAVVFGVRLPRALTAAFIDNAVRASEGIAGLSAAMRGLIAARTAVMSAVAAIDADIRRMTRASAACRRLMTIPGVGQLTALAFVAAIDDPSRIRRSRDIGAYLGLVPRRYQSGEVDYTGGISKCGDRRVRTLLYEAANVMLTRYKGQLKLKDWAFAIAKRSTMRKARVALARRLAIIMHAMLRDGTEFASA

SEQ ID NO: 212317 - protein, 327 aa, unidentified
MKVSIGIDVSMDTLDVAIYDGKSFKVGRYENSEAGFVAIEKELIRYNSSDTLISMEATGIYHLKTAVYFNERDYAVSVINPLIIKRYAEMKMLRAKTDSVDARTIAEYGYNERPCYFIRKEGQKERIIQLLRQIDALHRMQSENRNRLHALEKVPDADETALSIYREIAIILKAKERRAEQKIDEILNESYGDDYKRLIEIPGVGKRLSSLIIGFFGRFENFDNAKQVSSFIGLNPSPRQSGVSLNGRGIISKKGNRYMRKIFYMASLSASKYNEACRELYERLIMKGKNKRIALVAVANKLARQIFAIMKYDRNYEQNYFKNDALC

SEQ ID NO: 212318 - protein, 402 aa, unidentified
MAYDFVIGMDVGKYFHHACVLDPQGRQVLSKRINQHEGSLRKLFGKFLANDAEVLVVVDQPNNIGRLTVAVAQAMGADVHYLPGLAMRQLSRIHVGNSKTDVRDAYVIAHAGLNLPDALRSVDRVEEIFLQLKVLNGIDEDLARAYTRLINQMRSALVGTYPAFEHVLRGQMIHRKWILHLLAKYGGPTKIRRVGKARLTAFARGHRARNPEPVIDAMLAALHGQTVSIAGAEYAELGVAMSAKDALAKLEHRKEIEAQVLELIQDIPQTEILLSMPGIGPRSAAQILMTVGDMSDFPNAAHLASYAGLTPQTNQSGTSIMSNSPNRAGNKKLKNALWQSSFASIRFHERSRQFYERKRKEGKRHNAAVVALARRRLNVLFAMMRSGELYRDIPTAQEAAAA

SEQ ID NO: 212319 - protein, 428 aa, unidentified
MKYNTQNAKIESITEKTLIVGIDVGSETHYARAFDWRNYEYSKKPLEFSNNEAGFVTFKVWMEELAEKYGKDVVIPGMEPTGHYWFNLGAYLQDNGMKPVHVNPHHVKKSKELDDNNPNKNDRKDPKTIAALVNEGRFSYPYIPTGVYAEIRSLSNLRLQAQEEITRIKNRIARWFSIYFPEIKDVYKNPGAVSGLMILKVAPLPKDIVKLGVDGVNQIWRDAKLRAAGLKRAKTLVTAAEHSIGSQEACDSARIELKILLNDYEIYHQREEELMELIEEKLSEVPYIDKLLEIKGIGMKTVSGFVAEVGDIKRFDNPKQLQKLAGYAIVANDSGKHKGESHISYRGRKRLRYVLYEAAISLIARNTEFKEIHRYYQTRGKNSLKKMQSVIAVACKALRIFYAILTKGVTYDGAKMLQDIKRPQLKVA

SEQ ID NO: 212320 - protein, 422 aa, unidentified
MAYKIAAIDVHKRVLMVVVASGAEEVKDPTGQALEFECRRFGTLESDRARLIAWLQERQIQEVVMESTALYWRPIWLDMEGKFGKLHLAQAQSNRAPKGRKADFKDAKRLARRLLAGELMLSFVPEAEQRSWRDAARAKDHYVAERVQLQNRVEALLEEMRIKLSSVISDLFGVSGRNILAALAEGKTTDPKELAKLGDERLACGKEKLADALQGTPRQLHRKILEIHLEVLNKYDEAIGKLDKLVAGELKAHEDAVARLAEVPGFGVDSAQRFIAEVGVDAEAFPSAEEFGSWFGGCPGSNISADENHSTKSPKGNAYVRKLLTQAAQAAVRTKGSRFQALFRKFVTKQKYPGAIWTVAHRLGKVAWKILHDGVRYIEYGETSTPAAVKRRIQKQIQAFRKLGYAVTITPLNPTPEAPCPA

SEQ ID NO: 212321 - protein, 392 aa, unidentified
MDVITEAACGIDVHQKQITVTTLIGATTARPKKHSQRFGTTTVALKACGQWLRDQQIELVLMESTGQYWRPVWQILAPFGFKMILCNPRIIKNIPGKKTDQKDSEWIAELGRLGLVSASFIPPQAIQELRESTRLKKSLTQDITKKKNAIHNILQRSNIKLTTYVTDIFNGAGRKLLDLLVNGEKTTLPRIKQCMHGRMKATPEQIQAALDGVLSANDRRLLDILLELLKQITAAITELEQQIEAQLDPFRKLYLRLQTIPGISEGVAKIIIAEVGADVSPFPTAHHLASWAGLCPGNYESAGIAKSSHITHGNVHLKTAMVQAAMGAKRQKNTGLTDFFYRLSSHMGRQKAVVALAHKLLRIVYAMIDTGQNYQELKRSERSQKALISTNN

SEQ ID NO: 212322 - protein, 370 aa, unidentified
MIVIGADTHKSTHTAGAVDARTAELRGDSTVPARQAGHEELLHWARALDSERVWAIEDCRHVSGALERFLLASGERVVRVAPKHMAGARRSVRERGKSDAIDALAIARAALREGVETLPTAWLDPEAMEIKLLSDHRDQLIGERTRTQNRLRWHLHALWPCLEIPSGGLDRLKWLDRIARRLARAEPSARVRVCREQVRRLRELARRDRELERELRALVGAKDPRLLELGGCGTLTAAKLIAETAGAERFASDAKFARLAGVAPIPASSGGSDRHRLDRGGNRQLNCALHRIAVTQGRDHTPARDYLARKQAEGKSRREALRCLKRQLARTVLRLLRAPSQERESLSLSNEAEKPQTAIVGGDLVAVGLT

SEQ ID NO: 212323 - protein, 443 aa, unidentified
MGRRHRALTLKHPNAAGIDVGAESHFVAVPPDRDDKPVREFRSFTEDLHRIAQWLSNCGVDIVAMESTGVYWIALYEFLESKGFTVYLVNARHVKNVSGRKSDVLDCQWIQQLMSYGLLSGAFRPADEICALRAVSRQREMLLKYQSQHVQHMQKALAQMNIQIVNVIADIVGETGQKIVRAIIAGQRDPYTLASLRNYRVKASEEEIAKSLQGNWRQEHLFSLKQAVALFDAYSEQLRQCDCQLQKMLQELKRYEGVPIYSKARSRKKNAPQFDLRSYLVGMCGVDLTRIDGIEVTTALKIMAEVGPDLSRFPSVKHFTSWLGLCPGTKISGGKKLSGKSRAGANRAAQALRLAAHALRASKSALGAYYRRLCSRLDKAKAITAAAHKLARLVYTMLTRGTEYVDKGQESYEERDRLRVVHNLNKKAAAMGFILMPAPEKAS

SEQ ID NO: 212324 - protein, 395 aa, unidentified
MAGPEDVAVWVGLDVGKEAHFADVLDNDGESLFARAVTNDEADLVALLATAAEHGTPGLVIDQPGSVGQLVIAVAARRKVPVAYVPGLVMRRAADLYPGEAKTDRRDAFIIADTGRTRRKQVHWLDAASDELLDQLRVLNGFDVDLGAGSIRLTNRLRDALTSISPALERAVGSRLAHAGIRDLLVKYPTPTALRRAGRARITTAIKKRSPRLAGKVTGAVMDALDAQTLTLPAETTVGRVIAEVAGELDRVHARRKALEAEIEEVFLAHPFGQILVTLPGIGPRTGARTLAEIGDGTRFADGSKLASYAGLAPVTRQSGKTLNGESKSRRGNHRLKNALFLAAFASLRDPESRAYYDRKRAEGKRHNAALMCLARRRCDETAWRRRDRARRRCK

SEQ ID NO: 212325 - protein, 414 aa, unidentified
MSWNWRPYVGLDWADRCHVISLQAFGSRETESCVLEQKPDALHEWIAQLRARFNGDKVGIAIEQTRGAVIHAMMMYDFLELYPINPKALARFREAFRVSGAKDDPSDAELLMDLLRLHRHRLRAWLPDTMETRRLQILAEYRRKLVNNRIRHSNRITSLLKMYFPQALDWAGELGTAQSCDFLQTWPTLTAIQRVRPSRLRKFYLKHHCRNLALIEQRLNEIRTARPLTDDPAIVESLSLAVQAEAAQMCPVIEWIPRFDQIIAHYFALHPEHELFDSFPGAGPVYAPRLLTALGTNRSRWDSSADLLSHSGIAPVTEKSGNSCWVHRRLACSNFIRQTFHEFAAQSIRWSIWARIYYDQMRARGLRHPAAVRALAFKWIRIIYRCWKDNQPYDEQQYLKALREKKSPLADKLD

SEQ ID NO: 212326 - protein, 339 aa, unidentified
MRVYVGMDLHSTNCYTAMLDEELTPLFSRKLANEPARILAALAPYRERVAGIAVESTYNWYWLVDTLMEAGYRVHLANPAAMKQYAGIKHLDDPHDAVWLAKLLKLGILPQGYIYPRETRGLRDLLRQRSRLVVQKTALKHTLQQLYCNNLGVTLSNTALTQLDEAGLRHTLGQEDLAYNGASMLTAIRALEAQVKALETYAVKKVQGTAAYAALTAVPGIGVVLGLTIALETGPVTRFASAGQYASYCRCVPSAYWSNGKRKGQGNPKNGNKYLSWAFAEAANFAIRYCPEAKTCYQRKCAKTNQPSAYRAVANKLAKACYYLMRDQVAFDAKRLFAP

SEQ ID NO: 212327 - protein, 360 aa, unidentified
MIVIGADTHKRTHMLVGVDADTGQVLSGRQIAATDDGHLGAVRWARELHSERVWAIEDCRHVSRRLEQALIAAGERVLRVPPKMMGASRRGEREAGKSDEIDALAVARAVVKDGVERFPAAYLDERAMDIRLLSDHRDQLVRERTSIQKRLRWHLLALCPELEAQLPKGGLTRHVVQERIARRLRSFGADQRARVAREQLSRIRTLTRQAGELERELRTLVAAHRPALLAEQGCGVLTAAILIGRTAGSERFPTDAHFARQAGVAPIPASSGQVVRHRLHRGGDRRLNSALYMIAITKARIDPQTKAYLERKRAEGKTKREALRCLKRHIARKIHRLLSMPALDHDPVSLNVAISGRCLT

SEQ ID NO: 212328 - protein, 341 aa, unidentified
MTEYIGLDVSMKETAVSIRREGERIWRGKCASDPNIIAELVRKRAPAAKRVVFETGPLSVWFYHALRAEGLPAICIDARHAKAALDMAANKTDANDADGLARLAEAGFFREVRVKGFDSMLTRTLVAARTRLVRITVELSNQIRGIMKTFGLVVPAGKGTTFEKNVRSLLIDQNELAPIVLPMLEAWRSIRIRAAELGRQLVAGARQSQACRILMSIPGIGAITATSFVTAVEDPNNFKKSRSVAAWIGLTTPRYQSGEVDFDGHISRRGDRHLRGLLYEAAAVILTRSSIDSSLRTWGLKLRERIGFKRAAVAVARKLAVIMHSMLKTGEFFDRNAGATA

SEQ ID NO: 212329 - protein, 352 aa, unidentified
MHAITVAIDLAKDVFELAFADERGQVVERKRLSRRTFARALEQRPPLRVLMEACGSAHYWARRFQGQGHAVRLLPARDVRPYVRGNKTDRNDVAGILEADRCGDIAGVPVKTPEQQGIQALHRLREHLKAERTATINLLRGVLREFGLTIPAGALKVPAAVRDALEDGDNELPMSLRYSLDEQLQRLAQMQGNMAAIEQRLDEFATRDAAVQRYRRVPGVGLLTATALRASAGDLSRFRNGRQFAAWLGLTPREHSSGQQRRLGGMTKRGDVHLRTLLVHGARAVLQAARLKQRRGQALDPLQAWALKVQDTRGHNKAACALANKLARRLWAMEHHGRAFDPQHVSQRPIAR

SEQ ID NO: 212330 - protein, 429 aa, unidentified
MKIIYPRVCGIDVHKKFIVAVICISESVEPVYLKKRFSTFHNDLIRFRDWLIQNDCQNVCMESTGKYYIPVYNVLESHISNIVVANPKWVRAVKGEKDDDKDAKWIADLFKLGIVRSSFIPQKDFRILRELTRYKYKLVNMRSSEKNRFQNALTSGNCKLDMVFTDVFGKSASNIIDLILSDNPYTDEDILSKVHKNCKASPDMILNSINGTDLTPVQKSRIELVNDHIKQLSSNIQKLDKLIDLMIESYEDYISFLCQIPGVSRNSAIIILSEIGVDMNQFTSTRRLTSWAGLTPSSNQSAGKKKSVRISRAGVYLKPCLVEVAHAAVKDKNHPYYANKFNKISKRRGKKRAYIAIARKILVAAYHMLLTGEIWNPADLAEVETPVEQRIKYVKNNLKSDIKQLLDIGLTVEELTLMIQQNTNIIATQ

SEQ ID NO: 212331 - protein, 346 aa, unidentified
MKINRVGVDLAKNVFQLHGVDRKGKALWKRRLTRGKWLAVLCDTVEPGTEIGMEACAGAHHWARQLMQRGYPVKVIPPQFVKPFIKSNKNDANDAAAICEAMGRPDMYPVKVKTVEQQDLQAMHRIRDEIKSHRIAKANQIRGLVTEYGLVAPQQLSALRSAIPDWLEDAENGLSFLFRQLLQGLWGDLYALDQRMTELDKQIAVIAQEDPTARRLQQLRGVGPLIATALVATIGDGKQYRKGRDMAAALGLTPRQHSSGGKDRLLGISKRGDAYLRCLLVHGARSAVRTAKDKDDRLSHWIINLQARRHANVVAVAMANKMARMAWVIMTRDVDYDPDLAAASVS

SEQ ID NO: 212332 - protein, 453 aa, unidentified
MAKKQRKNCKKVKMLHTIKPNAAGIDIGATEIYIAVPHERDPEPVRHFDTFTADLHKAAKWLKACGIDSIAMESTGVYWIPVFQILESYSFEVVLVNARHVKNVPGRKTDVQDCQWLQYLHSVGLLRGSYRPPQKICAIRSLLRHRDGLVRTSASHIQHIQKALTQMNLQIHNVISDITGVTGLAILDAILSGERNPKKLAALKNGRIKASKTTIEKSLEGDYLSEHVFTLKQSLQVYRHYQQMIAECDQEIENHLNNIDSRIDVDKKPPPPPTSSYRRGQGNEPCFDLRTHMYRILGTDLTQIEGISSVTAHVFFSEVGNNVSKFSNAENFASWLSLCPGNKISGGKVLSSRTLPGSNRLAKALRISAMSLWRSQSYLGNYYRRKRARNGAPSAITDTAHKLARIIYHLVKTGEQFDESVFNAQEEAHQKRVFWNLENKAKRMGFQLVPCQQ

SEQ ID NO: 212333 - protein, 439 aa, unidentified
MQVELPHHVRLIPQEIESAMRNAGIHANSLLEVHRMYNAVGIDISKGKSTITVLQPGGTVIRKPFDVSHTSHNLNELADYLGSLEGSTKIVMECTGRYHEPMLKALFEAGLFVSVVNPHLIKNFGNNSLRKVKSDPADARKIARYTLDNWAELRQYSGMDNTRTQLKTLNSQFSFFMKQKVAAKANLIALLDNTYPGVNKLFDSPPREDGSEKWVDYAYSFWHVDCVRRIGLKTFTERYKAFCKKHHYLFQPDKPEKLFHDSKELVAVFPKEKTYKLLIQQSIQQLNLASRHVEQLRQEMNELASTLPEYSTVMGIYGVGKTYGPQLIAEIGDVSRFTHREALTAFAGVDPGVDESGQHKSKSNRASKVGSARLRKTLFQIMTTLLQNAPEDDPVYRFLDKKRAQGKPYYVYMTAGANKFLRIYYGKVKECLRNLEQAE

SEQ ID NO: 212334 - protein, 391 aa, unidentified
MIYIGIDVAKDKHDCFITNSDSEVLFKAFTIFNNLDGFNDLYQKIESVMDDVTKVKVGLEATGHYSYNLLGYLIDKGLPTYVINPLHTNLYRKSLSLRQTKTDKVDARTIASMLMSDVNLKSYSDTSYHNEELKSLTRYRFDKVKERAKLKTSVSRLVCILFPELEKLVPTLHMASVYALLSEFPSAKHVATAHLTRLTNLLSESSKGRYGKDTAITFRDSARASIGSNMPAKSLELKHTIKLIQELDSEIDEIENEIKIIMDEINSPILSIPGINYRMGAMIIAEIGDFNRFDSPDKILAYAGFSPSTYQSGQLDGAYTHMEKRGSRYLRYALYNATKYVCHWNPTFAAYLAKKRAEGKHYNVAISHAVKKLVRVIYHLEKTKQQYIKAA

SEQ ID NO: 212335 - protein, 408 aa, unidentified
MNPLFVGIDVSSKNNVAYLMKPDGSKHSSFSVQNNLGGAKLLSERIVSALGSMQLERVVIGLEATSIYGDSLVYALREDGRLGRFQRKIHVLNPKQVRKFKEAYSDLPKNAWVDAFVIADHLRFGRINREVYMDDYRYKALQTLTRARFDVIQNLTREKQRFANYLFLKCSGMAQDKDIQNTSATTIALMEHFETVDDLANADLEELTAFITETGRGKFADPDATAKAVRAAAKGSYRLPKTVNDTVNQAMAVSIASMRALKGQVKVLDKAIEQQFEIIPNTLTSIPGIGKVYSAGIIAEIGDIHRFDSQASVAKYAGLVWNRSQSGDFEAEHSRMIKSGNRYLRYYLLEAANSVRRCDSEFRRYYDLKFKEVNKYQHKRALALTARKLVRLVFRLLKDNRLYIPPEG

SEQ ID NO: 212336 - protein, 410 aa, unidentified
MIIIGVDFHPEFQQIASVDTDTGEVQEKRLAHREEAEKFYRALAGQKVRVGMEASGHGRWFERLVAELQFELWIGDAADIRTRRVRKQKTDRQDAQLILRLLLEDRFPKIWVPSWENRDLRQLLWHRHRMVQARTRIMNQLQAVALNEGLRCKKRLWRIHGREQLESFRLAPWASRRRRDLLELMDRLNPTIAELSQAIEQEVEKCPEARRLMTHPGVGPLTALAFVLIIGEADRFQCGKQVASYLGLVPLEDSSGNRRRLGHITKQGSSMLRFLLVEAAQVTVRSLPEWRNKYLHLMMRRGRKIAKVAMARKLAVRLYWLMSAVSSAASLSPDSRPPLMPAHSSSTDISYRLRNRAPSPRGCGFCSVTTGSSTPNGLSAGQNTRCAISVPTPTALPFPTAGWLLSPRAT

SEQ ID NO: 212337 - protein, 397 aa, unidentified
MQFSGIDVASERHTIASVDEQGKVLCKATTFEESSEGYAKLRALLGPPEGVLVAMEATGHYWQNLFAWLSAEGYAAVLLNPLRTNRFAGEDLRRGKTDEIDALTIARFAQQKRPAPTTLPSEAVLELRELVRLRDRFVQDLGDRVRQLHRTVDLAFPEFTSLVRELSSELATALLSRWPTASAFREAKVRQIAAVRYDGRHLVGDDLAGQLVEAAGRSVGRHHGAAYRAQAKYACEDIDTLRDRIRVVERDISQNIDKHDLGRLYMSIGGIGEATAARLVAELGDDIVGRFRDGDALCAHVGVVPGLRQSGKSKPSHAPLCPIGHAKLRAKLWMPTLAAIRHNIWVRTFYERLIAGGKPRKLAVTACLRKLLLAVYAVAKSRQPFIPRLPAAQEVPA

SEQ ID NO: 212338 - protein, 345 aa, unidentified
MSIVGGLDIHRKQITFDYLDTVTGQVRRGQISPADREHLRAWLARFAGREDVAFAVEGCTGWRYVAEELAAAGVAVHLAEPADTAFARGRKRHAKTDKTDCRHLRMLLAEGRLPECWIPPGRILECRALLETYHDLRAEHTAWVQRIHAVLFHQGAPALGEGALRSEQGLAALRAAAAAHLSPAGQLQVATALEMTDALEARLHELRHQLLDAARHLTGAKVLAARLYGVGPVTALAMTCWLGGAGRFSSSRKAVRFAGLDVTVHSSDRKGPPGRLSRQGPPVLRWALYEAGKTHARSSAPDHRYYAQVKDRCNGKRAALSEARKILRQACHILAELGDDALAAA

SEQ ID NO: 212339 - protein, 419 aa, unidentified
MNERPDQPTLFIGIDWADQKHDCHIIDRDGKGFHQEILHSPESIDTWVNEMLKLANGKPIAIMLEQSRGPLVYALMFRKNVLLYPVNPKQLARYRESYPGGGKDDPTDAKYLARMLRERITTLTASQPDDENTRLLAHLSQQRRRLVEGQIKLRQQFTAQLKSYFPVVLELFGKEWQLPLLLSVLSRWTDPRQFRRADRRLIRRVLSEHSTRNEQQQEAIIDRIRAAKLLSDDEALIVPSAMVVKLLVSQIKLSRKMIKEFDTKIAETMKQHPDAHLFTSLRGAGAALAPRLLCAFGSQRDRWKDADSLAAFSGIAPVTKRSGKLCQVHRRFACPKYLRQTFHEFADSARMYCPWSKARYRMLRDRGMKHHAALRKLARSWIRILFRVWQTRIPFDCDRYIAQLQQRCPEITPYLELQK

SEQ ID NO: 212340 - protein, 445 aa, unidentified
MSESLISAASEPEWAAFAAIDWADQKHFWRLVPAGSQRYEQGELENTPEAVEVWAAGLQQRFGGRPIALCLEQSRGALVQMLTKYPHLVLFPVHPTTAARYRETFCPSGAKADPSDTASLLDLLMRHRERLTPLQPDTVETRLLHFLVEERRRTVDEKTRQSNRLTDCLKMYFPQILHWFDDVTTPLVGDLLARWPSLEQLQRAHPGTLRRFFHEHNCRSQKLVEERITAISQAIPATRDQAVLEAGMMMARGLVALLAALRGNITAFDERIAELVRAHPDGAVFASLPGAGPVLVPRLIAAFGTRRDRYQTADEMERYSGIAPVKKASGKTELVHFRYACPKFLRQTFHEFASHSIGQSEWAKAYYEHLRNDEKKDHHPAVRALAFKWIRIIFRCWKDGKPYDEQMYQKSLRRRGSLLGNALGSATGVGWKTVAGFQKLSENNA

SEQ ID NO: 212341 - protein, 423 aa, unidentified
MMKLKYSICCGLDVHKNVIVATIVTTNKDGISEYLQKSFSTINSDIQRFHNWLIENNCYHVCMESTGKYWIPIFNYLENDIDVCLTHPKYVKAIKGKKTEKKDSKWIADLYKFDLVRCSFIPPKDFRQLRELSRYRFKLVCMKSSEKNRIQNCMTISNVGIASVLSDPFGKTATEIISYLLEHTADSMDEKAVRKLIKKGAKSKSDEIIEAIKGYTIETDQAKKLELARGHLEYLDDMITQTEVELYVRIKPYYEFVEFVSTMPGMTELSSTIVLAETGVDMDIFDDAKHLCSWCGLSPANNESAGKKKSVRIAKAGDYLKPMMVQCALAAIKSKKQPYFAIKYGRIKKRRGHKKAIIAIARMMMVCIYHMVSEKKPFTPTDYEELMDPQNHVESVVLNENNVFAYLESLGYDSSKLVKRNDN

SEQ ID NO: 212342 - protein, 326 aa, unidentified
MNLPAVVLGIDIAKLKFDVCLIKENQKVKHKVFANTKHGFEQLVAWLASHQVGSLHVCLEATGSYGEALALHLFDAGYQVGVVNPAAVKAFAASRLTRTKTDKVDAELIARFCLAQQPEAWQPPLPQVRRLQALVRRLESLTEMRVAEENRLSSGVAVDAVRHSLEDHIAYLVEEIKQTEQMIREHIDNHPDLKVQSDLLDSIPGIGQTTAALLLAEIVNIKQYKSARQVAAYAGLVPRERRSGSSVRGRVQLSKIGNARLRKALYFPAMTALRCSSFFQQWASGMRERGKCKMSVIGAAMRKLIHLVYGVLKTGKPFDPNWAKTA

SEQ ID NO: 212343 - protein, 344 aa, unidentified
MQSYRQYVGLDVHKKFVYGAVKDKEGNILFKKKFKTEPDDMDLFLLNVMKDDSIVAIESCSCWQYTYDYLSDAGYNVVLAHPLGVKALKKIRKHTDEHDAELLADLLRANMLPRSYAAPEDIRVKRQITRHKHSLVCLQTQIINMSHAILLRHGINNLPYTDAFCKKGIQYLQSLDLPSCDRFELDQYLGLIQMLEDKKKDSVEAIEQIAYEDPSVRLVMTMPGMGHYAATTFVAEVGDIRRFEHKDKVASFAGLAPKIYQSGETLRLGHITKQGNSNLRHVMVQAANVAVQHDATLKKVYERLAFKKGHQKAVVAVARRMVTLLYVMLKHNLEYHALQIHKAT

SEQ ID NO: 212344 - protein, 425 aa, unidentified
MTESSDYESVQVFIGVDVGKDTHHAVAINRSGKRLFDKALPNDENKLRSLISDLKQHGQILLVVDQPATIGALPVAVARSEGVLVGYLPGLAMRRIADLHAGEAKTDARDAAIIAEAARTLPHALRTLKLADEQIAELSMLCGFDDDLAAQTTQASNRIRGLLTQIHPALERVLGPRLEHPAVLDLLQRYPSPEKLASLGEKKLAAQLCKLAPRLGKRLAADIAQALAEQTVVVPGTNAAAVVLPRLALQLITLRKQRDEVALEVEQRVLAHPLYPVLTSMPGVGVRTAARLLTEVACRAFASAAHLAAYAGLAPVTRRSGSSIRGEHPSRRGNKALKRALFLSAFAALRDPLSRAYYTRKMSQGKRHNQALIALARRRCDVLFAMMRDGTFYTPQGHNMLDNLIGAPPRAAMNQQLQMLCIQTC

SEQ ID NO: 212345 - protein, 402 aa, unidentified
MQEQKSYRRFCGLDVGKNVHTLCIIDAQQNTLAPARSFRNDRRGFEQLLVSLQQTGRKHTVLIGMEATGHYWYSLHHTLTQQGYTVKVLNPIQTARQAEREVRKRKTDKLDAHRIAVLLKNGNYRSALIPGELAMTCRQATRLHCRLIHQQTRLKQLIQAQLHPVWPEYETLFTDPFSVTSRKLLAQSPVPADLLTWDEDRLREFLHKTSRGKHGPQQAQDIRQAAQDSVGMQRGLPGTRLAIQILLEQMENAEPLLHKLKEQIEALAQQIPAYLQTLPGSTRPSTVSLYGEVDPIATFQTPSQLVAFAGLDPHVYQSGQYDAPQRRISKRGSPFLRRTIWQMAYRAIYQEGDLRQFWLRKRAQQKHHLAAVTAVAGKLCHIIWRIMTDERDYVPEGRPSQP

SEQ ID NO: 212346 - protein, 429 aa, unidentified
MQNESTPGARGPVFCGVDTHADSHWLCVLDWRGRKVLSRQFPADAAGYEALAGAIAAAGEPACVAMEGTSSYGAGLTRHLASLGMPVREALSPARMQRRRPGQGKCDEADAERAARAAMSGSKLGTPKSQDGWVDGVRCMLAARSGAVKARTSAINTARSLLTTAPEGLRSRFRGMAGPRLMEELPSVRAEGALGAALGALADLWAAARDAALDMERAIEASLEENCPALLAMYGCGPVSAAKLAVAAGDNPGRLRSEASFAAICGACPIPASSGKTVRHRLNRGGDRQANSALHEIARQRVMRDPETAEYAERARGRGKSDREVMRCLKRYVAREAYRALMHPHEIRRPEDASELVAARRAAKVSQVRAASILGTSEKYISMLERGQRELKPIRRAYEAWVEAGLPLDWDRQAFEAERKKDSKKHLAK

SEQ ID NO: 212347 - protein, 366 aa, unidentified
MYFSGLDAHLRYVTVAVLDRLGGVALETTVPTREPDRLLAVLAPFRPLEVVVETCPFWPWLYDLLVPAGIGFHLAHAKALRAIATAPQKSDAVDARLLARMLLSGLIPEAYPRSADQRELLRLLRHRTALVRFRTRLAGRIHSQLHQQRLSLPREKLLRRATRAWLEATAWPRLTVEQRAIVTTHVELIDHLTPLIRALERRIAAAAAGDATAPLLATIPGIGPYRSLLLAAELVPISRFPRAEHLVSYAGLAPVTRSSGGHTHHGSIPPAANRWVRGALVSAIPSHVRYAPTSPVTVAYEQLKARLGWRVARVAAARKLARVVYVMLTRRTPWHGVPAAGKLTCRSDDLILLIDPSRSYSQIMRP

SEQ ID NO: 212348 - protein, 361 aa, unidentified
MQSTTIIAFDQHAATTVAAVLLPSQRTPALHSMASDSRTIVRFVQRLRRQGAVRCCYEAGPCGFELQRALTVDEVPCDVIAPALIPRRAGDRVKTDRRDAGQLAILYRAGALTAIHIPTEQEEAARDLLRCREDIRADVLRARHRLSKFLLRHGRRFTGTKKAWSKAHDAWLRAQRWPPAALDQTHAAYLRTVDEAVARLRTVEDDLRDLLTLEPLRPRVERLRCFRGIDDLTALTIAAELGDPRRFPSAPRAMAFVGLVPSEHSSGTKRARGAITKTGNAHLRRVLVEAAWHYRHRPFVGKALRRRQRGAPAAIIAQAWTAQQRLHRRYHRLAGRGKVTPLVTTAIARELTGFVWAALIQ

SEQ ID NO: 212349 - protein, 350 aa, unidentified
MNVNHYIGFDVHKKSISCCVKAADGTILEEDTLPAKRAILRFWARKRTEPWHGAMEATLFSGWIYDTLKPFAAELQMGHPAMMKAIGASKKKNDQLDARKIADLVRCHLLPVCYVAPAELRELRRLLRYRNLVVAQAVQMKNKMSGLLMEVGAEYNKQQLHGAKYFTALLDRLEEVPESVKDLLRLSRGALETFETTQKQLLARLKKHPRLAERVKRLESIRGVGEVTALTWALEVAEPQRFRSIAKAVSYCGLTSALDSSAGKEHRGPISKQRNAHLQTALVEAAKLAPRWNPQLAAVHEREVQRGDRNRATLAVARKLVAYLLAVDKSGKPFQIRTPATAEQEVGTAA

SEQ ID NO: 212350 - protein, 369 aa, unidentified
MLYLAIDQHAKQITVCVRNEDGDTVLRRQVSTRPEKIEAFFQQLTEMDTQFMAILEVCGFNDWLIEVLRKWSCREIVLIHPERPSKKKTDRRDAHKLADLLWLNRERLATGQTVHGLRRVYLVTQKEREDRQLTALRKTLGQRRTRTLNKIHRIINRHNLIWDYPTKSFQTQAGRRWLEQLKLPEIDRLEMEMLLEEWKTWDEQIAKVDEKIAQRASQVEPGKIFSPTQILMTAPGVSHYSGLTLASRIGPIQRFPRPRSLANYFGLTPGCRNSGNAQDRLGSITKEGSKIARFILGQLVLHFLKHDPTMRGWYRRIKLRRGAKIARVAVMRRMTTIFWHMLTHEEAYSRGGPPPRLRREPPSESQEAA

SEQ ID NO: 212351 - protein, 347 aa, unidentified
MRFYNSQHQYYCGIDLHARSMYLHVLDQQGQTLFDKDLPAGPDVFRAAVAPFRQGLVVGCECMFAWYWLADLCEDEAIPFALGHALYMKAIHGGKTKNDKIDAAKIAGLLRGGMFPMAYVYPREMRATRDLLRRRTFFVRHKAQLIAHIQNTNSQYNLPPFDRKLSRHPDYSDLAGRFPNPSTQLSIAADATLINHYQETIAELETHLVKNAKVHDPATYHLLQSLPGIGKVLGLILLYEIQDIRRFPEDGNFLSYARLVRCEHESAGKKKGSGGRKIGNAHLKWAFSEAAVLMLRCLPAAKAWLQRQERKRGKRKALAILEAKIGRAVYQVWRKQQPFDAKKFLTH

SEQ ID NO: 212352 - protein, 354 aa, unidentified
MTGTAMTIVEDRPVITGGVDTHADLHVAAALDPLGGLLGVQEFPATATGYAQLLGWLGGFGPITLVGVEGTGSYGAGLARHLAAAGVRVVEAGRADRQDRHRQGKSDPLDAVSAARAAQSGRASGAPKGRDGAVEAIRALMVARRSARAERTQANGQARALIVTGPDELRARFAGHRPAQLVEAIAALRPRPGDGPGYATRVALREPGRRAQFLDAQLDRLDELIGPLVTARAPGLLRLHGVGPDTAALLLIAAGDHPERLRSESSWAHLCGVAPIPASSGKVSRHRLNRGGDRQANHALWRIVITRLGSRPGHPATRAYVTRRTKEGLSKKEIIRCLKRYVAREVYHQLRAGA

SEQ ID NO: 212353 - protein, 348 aa, unidentified
MVLIGCDFHPSWQQVSWLNRETGEAGDHKLVHEPGAVEKFYRQFPAGTRVGMEATGNCQWFMELMMRLGHAVLVGDAAKIRASDVRQQKHDKRDARLLVQLLAEDRFPEIWVPSREQKDLRQLLIHRHKLVRVRTQVKNGLQHLAMNQGVLKKRKLWSQAGEKVLRELPLAPWASRRREDLFKVREMLNGQIDLLDRAVAEAAEKNEKARLLMTQPGVGPITSMAFVLTMGDVSRFPRGKQVASYLGLIPREYSSGGLQRLGSISKQGNTFLRMLLVEAAQGAVRCDESFRNEYLHRCHSKPKGVAKVAAARKLAIRLYWMLRSNTKYPEIVRVESSSRVALVVPPAG

SEQ ID NO: 212354 - protein, 466 aa, unidentified
MGRAKRGNKTLATLPKHLQRLNLYAAGIDIGSRSHFVAVPEGADPEPVREFKTFTADLHCLADWLVSRGITTVAMESTGSYWIPVFEILESRNLQVMLVNARHVKNVPGRKTDVLDCQWLQQLHTYGLLEGAFRPPEEICELRGYIRHRMNQVRYASSHIQHMQKALTQMNVLLHNVVTDITGVTGIAIIKAILAGERDPHKLAALRDKRCKNTVETIARSLQGNYRPEHLFSLKQALASFEFYQSQIADCDREIQALLASFDSVTEETRPDYPGKSSKAAKKSSPFNLQDELYRMTGVDLTRIDGIESATALRIISEIGLDMSRWKSAGHFASWLGLCPGSKISGGKRLSSKTKPVVNRAAAAFRMAASSLYRAQCALGAYYRRMNARLGAPKAITATAHKLARLVYSMLKNGTAYTDVGQDYYEQKYKARVIQNLKKRAQQLGFELIATIPTQTAENSRIISNG

SEQ ID NO: 212355 - protein, 323 aa, unidentified
MQGKVSLERSAATRVYVGIDVCKAWLDVHVHPLGQSFRVPNTREGLKQLKRRLANLDVALIVMEATAKFHREAHRNLHASGLAVAVVNPLRSRLFAEATGQLAKTDTVDARMLALLAAMLEPKAKAPPPEALENLQEIVRGREAFVAQRTALLNQLGTAKATCLKQQIRRQLKTVESAIDRLETEIERIIEADPALVRRFAILTSIPGLGTIAAVTLLANFPELGSCTAKQAAMIAGLAPIACDSGEMKGERRIKGGRASLRTGLYMPALAAARFNADLKRFYARLVGNGKQPKVALTAVMRKLIALANTLIREDRLWQPIHA

SEQ ID NO: 212356 - protein, 329 aa, unidentified
MQTILHNCCGMDIHKDTVVACILKTCETVDAKTFEENTVKELRVFKTFPDDLAQLRSWLESENCCHVAMESTGVYWTPVYDALEDACSGEMKLIVTNARHMRNVPGKKTDIKDAEWIASLLRAGLLDGSFIPPLEVRELRQLTRYRKNVVQDINTQKNRIEKSLQQAGFKLSTFLSDVFGVSGRNLIRVLIKKGKLTPTDVEYATTRISQEKKAEIKLAINGKLTKHQRRFLELQISHLDQQIAHLDVIEQSITELSEPFADEVSRLDTIPGIAETSATAIIAEIGTDMSKFPTAEHFCSWAGVTPGDNSSAGKKKVQESLLVTPTSKA

SEQ ID NO: 212357 - protein, 320 aa, unidentified
MRNAVGLDISKLTFDATAIVGNAEYSAKFDNDSKGLDQFSDRLKSLGCQNLHICMEATGNYYEEVADYFAQYYSVYVVNPLKISKYAESRFKRTKTDKQDAKLIAQYCRSAKESELVKRQKPTDEQYRLSRMTAAYAQIKSECAAMKNRHHAAKDEEAAKAYAQIIKAMNEQLEVLKEKIKEQTEKPNCKEGVKRLETIPAIGRMTAAVLFHHLTSSKFETSNKFAAFAGLSPQQKESGTSVRGKGKLTKFGNRKLRAVLFMPAMVAYRIRAFPDFIKRLEEKKKPKKVIIAALMRKLAVIAYHVHKKGGDYDPSRYKSA

SEQ ID NO: 212358 - protein, 321 aa, unidentified
MAMPKTPIEAGVDTAKDELVIQSAPDTKPFSIPNTSKSIKAWLKTLPAGSALAIEATSTYHIEMAEQAHAAGFTVYVVDGFRLSKYRESIAVRAKTDAQDAALLARYLRNERSSLKVWTPPPAGHRQIQVLLRRRAKLVEVRGMLRESFKGDKMFATELKKIERTLKRTELAIAKALREEVKDAGLNDQLRRVQQLPGIGFLTAVGLVMSFMRGEFANSDAFVAYLGMDVTVVQSGKWSGRGRLSKRGDSEVRRLLYNASMSGSRTATWKAFHAYHLGRGKKTTQAFVILARRLARLAFGLMRHQQDWKPEIYTGGAKLTS

SEQ ID NO: 212359 - protein, 339 aa, unidentified
MSKHSVPAGDIAGLLRRFAQLKEKARARTGRDFPIIVIQETGLDGFWIHRMLQSEGIESHVVDAASILTSRRGRRAKTDRIDGETLVRTLMAFKRGEPRVCSMARAPTPQEEDRRRVCRERRTLVGERVRHVNRIKGLLFAQGVFGYQPLRKGRREQLEELRTGDGRPLPVHLMAQIVRELDRLEVVLEQLKTVEAERNALLKPATGAAASPPAMLLELKGIGPETAAVLWSEGLFRQFDNRRQVAAYAGLAPTPWQSGSIDHEQGVSKAGNPRLRTTMVELAWLWLQNQPASALSLWFHERVRRLGGRMRKTTVVALARKLLIALWRYTTAGVVIEGA

SEQ ID NO: 212360 - protein, 453 aa, unidentified
MSKAIPSNTQNLRRMSPRAAAIDIGATMHMAAVNPDADDMPIRAFGTFTHDLNNLAHWFKSCGVTSVAMESTGVYWIPAYEILEQHGFEVILVNARYAKNVPGRKTDVSDAAWLRQLHSYGLLRGSFRPNAQIATLRAYLRQRERLVEYAAAHIQHMQKALMEMNLQLHHVVSDITGVTGMRIIRAIVAGERDPDVLASLRDIRCHSSVETIRASLVGNDRDEHIFALSQSLDLYDFYQQKMLECDHKLEQAIATMTHNVEKPQSPLPKIRIRTKQPNTPSFDVRAALYGLVGTDLTQIHGFGASLALKLIGECGTDLRAWPTAKHFTSWLCLAPGNKISGGRLLSSRTRRSSSRAAALLRLAATTIGRSDTALGAFYRRLAGRIGKQKAVTATARKIAVLFFNALRFGMAYRDPGAEAYDERHRGRVLASLQRRARALGYQLDPIPDAESVS

SEQ ID NO: 212361 - protein, 356 aa, unidentified
MSTITIGVDLAKRVFTTCRVDHGGRVLERKEHTRESFAVWLAQVPRGTQVAMEACGGAHHWARRCIAYGLQPRIMAAQFVTPFRKANKTKNDRADAEAIATAARQGNMRFVPIKSVDQQLRLCWHRAREGYKVEHRALGNRIRGLLAEFGNVVPNTDAALRAALADLDHATLPASLNALLADMTAHWHAIGKRRDACEAQIQAHALADERCQRLRSIIGVGALSADALVASVGSAQEFKNGRQMAAWLGLVPSQHSTGGVTRLGPISCRGDAYVRTLLIQGARSSLQRAKAVSVEKSTPEQMWIRSLACRLPFGKVLVAIANKHARQLWALLAHDVDYDPTAFTRHPMQRRSNPAT

SEQ ID NO: 212362 - protein, 340 aa, unidentified
MKLYGGIDLHSTNNVTVVIDKQDRVVYQKRLPNDLALILKELSVYQSELEGIVVESTYNWYWLVDGLMAEDYQVHLANTAAIQQYEGLKYTDDHSDARWLAHLLRLELLPEGYIYPRADRPVRDLLRKRSQLVRQRTTNLLSIQNLMTRNTGSSLSAKRVKALDVQQVDELLPNGDLALAVKANLSVMSSADEQVELLERAVTQRVKLRPQFSFLKTVPGIGEILALTIMLETGDIGRFASVGNFASYCRCVGSQKISNGKKKGQGNTKNGNKYLAWAFVEAAHFAIRFNSKIKGFDQRKKAKTKVVVAIKAVAHKLCRACYYIMRDRVPFDVTKAFGQK

SEQ ID NO: 212363 - protein, 352 aa, unidentified
MVYVAVDIGKRRCVTCVMGEDGSILDTGAYPNTVFDASRYARLIVENYGECKAVVESTGSVWMKTYEAFESSGMEVKLANPVKTRAIAEARVKTDKLDSRILAHLLRADLIAECYVPSRDVRLSRALLSHRVNITREQTRVKNRIHSLLDKYDLECEYDDIFGAHGMRWLHTLQLNGHDHEILQSLLRQLEFQQDEEEKANSTIAKDALHSQYVPIIMSMTGFDYYSASVLAAYIADISRFPSPSHLVSWVGLCPSVYQTGESLYMGRMKGGNRKVRWIMTQAANAAIRSDPRMRTYYERKIRRHHHNVAVTHVANKMLRILWHMLRENRLYNERKGRLYESKLKRMAHIAQ

SEQ ID NO: 212364 - protein, 344 aa, unidentified
MDHFAGLDVSVKETSICIVDDTGRIVREVKVASEPEALLKVLGNPAYRFKRIGLEAGPLSQWLFSALAEAGLPVVCVETRHMQAVLKAQINKTDRNDARGIAQMMRAGLYRPVHVKTLRSQKLRMLLTHRKLLQSKAIAIENDLRGTLRNFGLKVGMVGKVRFEVRIQELVENIPDMAALVESLLIVRRALREQIVILHRRLLAIVGDDEVCRRLMTIPGVGPVVALTYRATVDVPARFRKSKAVGAVFGLTCARYQSGEIDWSGKISRCGDEMMRAMLYEAAQSMLRSKKWSWLKAWAMQIARRRGMKKAIVALARRLAVIMHRMWIDGTEFRWTREQAAAAA

SEQ ID NO: 212365 - protein, 377 aa, unidentified
MGDYSEAFVGLDTSKLRNAVAIADAGRGGEVRFFGEIENTPAATAKLVRKLAVKYKRLTFCYEAGPTGYGLHRQIKNLGFECVVVAPSLIPKRPGDKVKTNRRDALSLAKLLRADELTPVWVPDGRHEAMRDLTRARETAMLDLRTKRQHVSAFLLRLGRPYPEGRKTWTKAHASWIASQKLEHPQQRLVLEEMMLAIRQAQERLQRLEQAIAATVPEWSLAPVVTALMAMRGMDMTSATTLLAEIGDLSRFQTPTELMAYLGLVPSENSTGDTVKRGPITKAGNRRARRMLVECSWSYQHPPRVGQAKQPKVDAAPLAVREIAWKAQCRLYRRYRTLIRKGKLKTVAIVAIARELAGFIWAVARAATTAPVAAAPA

SEQ ID NO: 212366 - protein, 412 aa, unidentified
MRRVIGMDIHRTFGEVVYWEQGKLRHGGRVDMTRTALEGFGKRLLATDEVVIEATGNCMAVSRLLSPFVKRVVIANPLQVKAIAHAHVKTDKVDAGTLASLYAAGYLPEIWTPDAATERMRRLVARRYQVVRHRTRIKNEVHAILHAYLIPKCPHADLFNGRGRAWLMRQTVPDDERGAIERHVRELDRLAEDLAILDREIAESTLDDPAIRRLLTITGVNLTVAAGLMAAIGEIIRFKSQQKLVSYFGLNPRVRQSGLGAAHHGRISKVGRSHARAMLVEAASAAAKAPGPLHAFFVRVRARRGHQVAAVAVARKLTVLVWHMLTKEKDYLWARPSLVAHKVRGMELQAGKPQRKGNARGPTYAYHVKELRNQEMNIARKAQASYEHFVGTWRPRPPKERARGRLNPARLE

SEQ ID NO: 212367 - protein, 420 aa, unidentified
MSKQNVELAAFIGLDWADQTHVVTLQEAGGDRRRENFTLDQTPEALQTWIHQLRIRFGGRPVAIAVEQVRGALIYALMHVEFLHIYPVNPQTLAKMRQAFYPSGAKDDPRDADLLLEVLLTHRQHLRVWVPDDVLTRSIQLLTEGRRHLVDERTALTNQLTAALKTYFPQALDWFGDMHTARACAFLHRWPSLQQLKRASSSSIRKFYQSQGYRGHDKLEQLLGNIKQAQPLTEDGAVLLASTMMVQALVTQIPSLTESIERYDQQIASRFAQHDDSTLFGSFPGAGPALSPRLLAAFGSDRNRFEFAAEMQQLSGIAPVTEKSGKSCWIHWRLACSKFLRQTFHEFAGQSILGSLWARAYYDHQRQRGKSHHAAVRALAFKWIRIIFRCWKNRTLYDETLYCKSLQLRGSSLAVALTTK

SEQ ID NO: 212368 - protein, 399 aa, unidentified
MSQLWAGIDAGKTHHHCVVIDSDGTRLLSRRVANDETELIMLIDAAVSLSKGGVVTWAVDLNSGGAALLIALMAEREQRLLYIPGRAVHHAAGGYRGDSKTDAKDAAIIADQARMRRDLHPVRTGDEISVELGILTSRRTDLMRDRTRAINRLRALLSTYFPALERALDISNVKATLILLSGYQTPDAIRRIGQSRLETWLRKHKAYNATQIAVKAIGAAQSQYARVAGQDVAASAVAKFAVQVMNIDAEMTELDRDIEERFRRHRHAEVIESMPGFGPVLGAEVLAVTGGDFTAFETVDRLAGIAGLAPVPRDSGRVSGNLRRPRRYDRRLLRVFYLSAQLSLRSCEPSQIYYARKRAEGKRHTQAVLALARRRLNVLWAMLRDNAVYRSELTVASAA

SEQ ID NO: 212369 - protein, 309 aa, unidentified
MQEIYIGIDISKDNLDMALHGSDKQWQFTNDPAGISKLCKELLKLHPVLVVFEATGGYEMPLFLGLDESGLPAAPINPRQIRDFARSTGKLAKTDVLDAKVIAHFGYAIRPPTHTVPETQELKLAQARRVQILEMIIMENNRLKGVPNHLRKRIEAHIKWLKAELEDTDQELKQMIEQDPAWKEKDQLLQSTPGVGPTLAATLIAQLPELGTLTRYQIAALIGVAPFNRDSGILHGRRQVWGGRSQVRTVLYMATLVATRFNPVIRSFYSRLCAAGKRKKVALTACMRKLITILNSILKHNTPWNPEYC

SEQ ID NO: 212370 - protein, 398 aa, unidentified
MTESSDYESVQVFIGVDVGKDTHHAVAINRSGKRLFDKALPNDENKLRSLISDLKQHGQILLVVDQPATIGALPVAVARSEGVLVGYLPGLAMRRIADLHAGEAKTDARDAAIIAEAARTLPHALRTLKLADEQIAELSMLCGFDDDLAAQTMQASNRIRGLLPQIHPALERVLGPRLEHPAVLALLQRYPSPEKLASLGEKKLAAQLCKLAPRLGKRLAADIAQALAEQTVVVPGTNAAAVVLPRLALQLITLRKQRDEVALEVEQRVIAHPLYPVLTSMPGVGVRTAARLLTEVACRAFASAAHLAAYAGLAPVTRRSGSSIRGEHPSRRGNKALKRALFLSAFAALRDPLSRAYYTRKMSQGKRHNQALIALARRRCDVLFAMMRDGTFYTPQGS

SEQ ID NO: 212371 - protein, 400 aa, unidentified
MRVVFGIDVSKASSEVAILVNGEKVHGYTISNDAIGFARLLGDLRTVHKPEIIFEATGVYSRRLQTFLDDNGYAYTRLNPLETKKQLDSLRVRKTDQIDAEKLAQSQFVLNRKPTYVQEEVYQNLRDLSRFYQNLTEDIVRAKNRLHRVLQVTFPELENILSTPSGEQYWNLVIAFPCKDCVLELSNDELSKSIRLSTSKRISDKRVAYLAEKLIALANQSYCAVKKTSPILEEVRYYAKELLRLYEQRQAVLDEMVELAQPLPEYDILLSIPGIAETTATSIIGELGDIRRFQSANQINAFIGIDLRHYESGNFLAKEHITKRGNPYARKILFKCIHNIASASHTNPCHIADFYEKRKRQSQTTSTKPHTIASIHRLIRTMYYLIMHNKLYDYASTQNR

SEQ ID NO: 212372 - protein, 438 aa, unidentified
MNESIAAVAPEGVAAYIGIDWADQKHDVVLRSATEAHKVEHRVIAHKVEALREWIGQLQQRFGGRGKILVCLEQSRGALIYHLMGYEFFELYPVNPKQLARYRETFSPGGAKDDGPDAELLCELLYCHRDRLRAWKPDSVLTRKLAFFNEGRREAVDQRTRLSNAIKSQLKVYFPLALELLDSDTSTALAADLLLRWPSLEALQKQIPHQLRKFFYAHHCRGEATMLRRLQLIEQAQALTQDSAVIESAAFHIQMLARQLKSLLADIGHYDQKIAQLFAAHPDRFLFDNLPGAGRVLAPRLLSALGSDPERWASAQEIATLYGIAPVRRASGQKSGQKGKKAKKGQKKASVLFRQACPKFLRQSFHEFAACSIRYCGWAKTLYEAQRAQGHGHHAAVRVVAFKWIRILFACCKHRTPYDPERYLQALQQRGSPYANAC

SEQ ID NO: 212373 - protein, 402 aa, unidentified
MTATPPNVPAVFAGADTHADTIHVAALDCFGRELDDREFATTPMGYRDALAFLSSFGPVQVLGIEGTSSYGAGLTVAARAAGIAVREVIRPEASVRRMQGKSDPIDAYQAARAVMTGRAKTATKDEDVEGLRALLNARRSAVKARTAAMNQIHAMLVTAPVEVREKYRLLKERALVNALAACRPGTKTGVARSVLTALKLLAQRHRFLTQQATDLENQLRDLVAAINLTLLSARGIGPVTAAQLLVTAGGNPERLRTEPSFAALCGTAPVPASSGKTARYRLSRGGDRHANSALHTIAVVRMSSDPRTRMFVEAQRAKNRENPELLRILKRAIVREVYKHLCTPNTLANNDDLRRTRRERNIPISTASQALGVHPNRISQIERGIVHDREFSDRYRTWLQAA

SEQ ID NO: 212374 - protein, 411 aa, unidentified
MQRVIGMDIHRTFAEVVFWEAGRLRSGGRVDMTRSGLEGFGRSLSKEDEVVVEATGNAMAVVRVLSPYVARVIIANPLQVKAIAHAHVKTDKIDAGVLASLRAAGFLPEVWVPDADTECLRRLVSRRNQVVRHRTRIKNEVHAILQAHLIPPCPHADLFGRLGRSWLGRQELPVDERAAIERHLRELDRLGEDLELLDREIAERVIEDPSVKRLLTITGVNIIVAAGLVAAIGDIRRFSSPQKLVSYVGLNPRVRQSGLGLAQHGRISKRGRSHARAMLVEAAWASSKAPGPLRSFFLRIRARRGHQVAAVAVARKLAVLCWHLLTKDADYQWARPALVANKIRAMQLQAGQPAKKGNKRGAAYAYNIKELRDREIDVARHAERVYEQFVSRWQPRGPGKRRTGAANEERR

SEQ ID NO: 212375 - protein, 348 aa, unidentified
MITLGIDAHKRTHTVVAIDDVGRQLGQKSTTATTSEDHLGLLRWAESFGTERTWAVEDCRHLSRRLESDLLYAGERIVRVPPKLMAHARDAARTYGKSDPIDALAVARAALRQPDLPAAVLDGSSRELRLLVDHREDIVAERTRGINRLRWHLHELDPSWDPTPRCLVRYLHIDAVIARLANTDGLVAHIALEIARHVRDLTASENELEREIARRVAALAPHLLALPGVGALTAAKIVGEVADIRRFKSKDAFARHNGTAPLPVWSGNRERHRLSRTGNRQLNAAIHRIAITQARCHEDAAVYLKRREAMGNTPSEARRALKRRLSDVVYRTLLLDASTDVTCVEPAA

SEQ ID NO: 212376 - protein, 349 aa, unidentified
MKEYNEKNAIKVIGIDLAKNCFHVHGVNQAGHKVMSKKMSRQQLKTFMMNLPPCLVGMEACGGAHYWARLLRSWGHQVKLIAPQFVKPFVKSNKNDAIDAEAICEAIQRPNMRFVAIKNTEQQDVLAIHRMRSLVVSQRTALVNQIRGLLQEFGIVIPKGRWHVNQYLPRILEDAENGLSGLFREALQGLYSDLSHFDQRVIDYDDRIDQMAQADEQAQRLMTIPGVGPKVATALLGAIGDISAFKNGRELAAWLGLVPRQCSTGGKSTLLGISKRGDVYIRTLLIHGSRSVLNWVDRKDDRTSLWAKELKARRHKNIASVALANKIVRVAFALLKRSEDYKVTLATPV

SEQ ID NO: 212377 - protein, 341 aa, unidentified
MKNLFIGVDFSKEKVDVAIIFADGLTETAARVFNEFKTTVSGYKQLVKWVEQNSYGIDSSLWLFCGENTGDYSKGLCNFLYGKGYDMWLENAKSIKDASGLRRLKSDRADASMIAEYAMRNYDKAIMYEPLSESLAQLRELFLYRQIVVRHRCSFQVRRGEKRLTMEKSPVKTMISQSGRHIVSELNKEVAKIDKRIAELIKSDEELSEVYTIVTSVPGIGTQNAVCLMIYTDNFRKFNYNSRKIACYYGIAPFGKDSGTSVHSDPHVHYMANRQIKAMLTQAALSAVNFNPIMARYYMRLVECGKKKQVALNNVKNKLIHLVTAMVRNHQLFSPEYKISA

SEQ ID NO: 212378 - protein, 408 aa, unidentified
MNAVGIDVSKGKSMVAALRPMGEVALLPQEFLHTEVGLEQMAYAIIALGEDTRVIMEATGRYHEPVAAALHEYGIYVCVLNPLFIKQSGGGSIRKVKTDKADAMKIAKYGLDNWVDLREYTPMDTVRQQLKLCSRQYNLYMKTVVSLQNNLISLTDKTFPGVNELFSSPERADGHQKWVDFVMTFWHCDCICRVSEKVFTERYQKWCKRKGYHCSVEKALDIYASSCGHFTTLPKNDNTKLLIVTAAQQLLAGKTTLAALRAEMTRLASQLPEYETVRAMYGVGETTAAQLMAEIGDVRRFPHRSSIVGFAGIDPAVNQSGKHETQSTSTTKRGSPHLRKTLYQIVCTYLRKAPADEPVYQFLDKKRAEGKPYFVYMTAAQNKFLRIYYARVKECLETFDAHQKNTQG

SEQ ID NO: 212379 - protein, 404 aa, unidentified
MDVSKRDAKVCVRVAGAGRRRTVETVTTWGATTNRILALREHLSAEHVTLVVMEATGDYWKPFYYLLEDAGFELLLVNARQVKNLPGRKSDVSDAAWLAQLGAHGLVRGSFVPPAPIRELRDLTRARTMMTRERGREIQRLEKLLEDAGIKLSSVASDITGVSGRLMLQALIDGQTDPAVLADLAKRRLRVKIPELTEALTGRFSDHHAFLAGMYLDAIDQRSQHIADLTARIEVVIEPFRSFCDLIGTIPGIGERSAEVIVAETGADMSIFPTAAHLASWAGCCPGSNESAGRVKSTATRPGNPYLKAALGAAALSIANTHGTYLATKYRRIAARRGPKKALVAIEHTILVAIWTMAHTGALYDDPGADYYTRRDPERTRRNAVNQLQRLGYQVTLTPAAASA

SEQ ID NO: 212380 - protein, 371 aa, unidentified
MQECITWVGIDAHAKSLQFAMREGGAWQEWQIANESKAIRRIAKKLVRQAPGEVRCCYEAGPTGYALKRELETAAPELVCEVIAPSLIPLKSGDRIKTDRRDARKLAEYLEAGLLTEVHPPTEQQEAVRDLTRCRRAMKGDLMRARHRLSKFLLRRGVRYSAGKKAWTQAYQKWLGTLEFAGINKVVFEQYLLAVEQLMERIAHIDCEVKGVSESEPYREVVGWLRCFRGVDMVAALTLIAEVHDFRRFDSPAQLMSYLGLTPSEYSSGESRRQGGITKTGNTHARRVLVEVSWHYRHRAAVGKALRERRSGKPPWAIATADKAQLRLCRRYQRLVARGKPSQKAVVAVARELVGFIWAVMRQGQRAAIAT

SEQ ID NO: 212381 - protein, 395 aa, unidentified
MKVNELQVAVDVGARLHRVAVGDGAGRLLEEFDLSHTANGLAGFFTRIERLRGRHRAPVSVAMEGFNGWARPLDAQVLAHGWRLYNVNNLKLARYKEIFPAPAKTDAIDARRILELFRLRGDLPVARGVLQEIIATSKEAERLKRLSRRRRQLVNEKVRVVNRMHADLQAVCPGLLAITADVENLWFLSLLGAREDIRKLARLRSNSLRALAGVGRAYCAKIEAWQREALFSHEAEWAGPMIVADARRVLALRDEIAALEQAIEPLTDACESARRLRTMPGFGRVCSAELAGEIGAIERFGSEASLALYLGMAVLDNSSGTHTGTKRSRQVNTRAKAAMMIAVARHMEQVPRSRAYYDKKRAQGKTHNQAVRALGRQLVRVIWSMLKHQRDYELR

SEQ ID NO: 212382 - protein, 407 aa, unidentified
MEVVNPRCAGLDVHSRRISACARIVTDRGVSREVCSFGTSTRELRAMADWLESKGCTHVAMESTGVYWKPVWHVLEGRFELVLANASQVRNMPGRKSDVSDATWIGELLAHGLIRPSFVPPAPVQEMRDLTRTRKQLVREISRHTLRIQKTLEDANIKLAEVVSSVLGMSGRAILAGLVGGETDPERLADLAATGRLKASRDQIVEALRGTVTDHHRFMLKLHLDQIDQLERAVREVEERARAGPFRAAIELLSTIPGVSETTATVIVAEIGDDMRRFPTAGHLLSWAGLCPRMDESAGKRLSNRTRRGAPWLKTVLVQAAWSASKKRDSYFRARFLRLKSRRGPKKAVVAIAASILTAAYQMLKTGAEYQDLGPKHYDHIDRVRAADRLRRRLQALGYRVTMEPAA

SEQ ID NO: 212383 - protein, 431 aa, unidentified
MLKINPLSTLYVGIDVSSKSNYVCALDFFKNKYINSSFANNQPGAEELALKILECLKEHPDITTIVAALESTSVYSIHIANYLSSCEELMRFKPYVFVLNPKCTANYKKSYIGLGKSDPIDAFVIADYARAGNIESEPWRGSQFLALKRLTRHRLHLVECMTREKTYLISNLYLKFSELQMLEGDDQPFCDIYGATSSSVLMEYLSPEEILASSEEDLIAFLAEKSRNRIKDISKTADLLKKAARDSYRLDKALYEPLNVSIASSFNCIETFKREIKVIDNAIEKEIKGLNPNAFIILQSIDGIGPVFAGGIIAEIGDITAFHSSDALAKYAGLTWKSNQSGDFDGEDTPMIKAGNRYLRYYLGEAANSMRKHNVEYGTYYRKKYNEVPKHQHKRALALTSRKFVRLVYGLLARNQLYSGVSLDTSIKNSN

SEQ ID NO: 212384 - protein, 347 aa, unidentified
MLYAGLDLSRQRLDVHLLDEDGRTVEVTAVRPDADALRSLVTRFDRYGQPVSAAIESMNGARFVHDQLELAGWDVEIADALKVKGLAPLAAKTDRIDARVLAELGRRDLVPAIWLPDPTNRAERERARFRLHLVRHRTALKNRIHAILIAFGHPVPVSDLFGVAERDLLAGLAIPEPWATTLATSLRFVDELDTEIDACERELRTMGADHPYVELLRTAPGIAWVLGYTIAAEIGDIARFSSPKKLAGYTGLCPIVRQSGGRDDRGPLAKNGPKYLRWALIEAATHAARHPAYKERYERTKKRLGRQRGSKVARVDIARELATAIWHMLSKNEPFAPGRSPARPLVA

SEQ ID NO: 212385 - protein, 434 aa, unidentified
MFVLSKYLNHIIVGIDVASEFSFAAILCPDGNQFRKPFKFAHSVDGFNYLIEQIKKAEEEFAMKPVFFMESTGVYHLTLFHFLKDNDFETLVINPLVTNSIKNKNIRKVKNDRNDALSIAKLGKYEDIKVSSDSDLNIFTLKLLVRDYYKLIDTRTSFKKKLSSTLSITFCGYQKVFANTCGHVSFNILKRYPSPQAVISAPKQEIIDILRLSRKGLSWAESKYQKLLECARNASFIGLSSPRLSLSVNSSLTLYESIELQADKLLTEIKEFTDSADMPQVLRDNIKLLTSIPGVGYITAVTILAELGNLDRFLTPKQLVAFFGVDPAANESGNFKGDKIKMSKRGTRLGRRALYSVALASIRSKSNGEAMNPVLLKYYNENLKGKKSKVALVAVMHKLIKYIFAVLKKKQEYQIRDPKLHQQMFLRNNNRLAS

SEQ ID NO: 212386 - protein, 316 aa, unidentified
MAEGIFVGIDVSKHSLDVAVHPNDAFWSTTNSDEGITTLITRLSQLKPTLVVLESTGGYEKQAVKAMVAAHIPVAVANPKRVREFARSTGQLAKTDKLDAQVLAKFADRVRPNPVHLPTEAEERLQGLLRRRQQLLVMRVAERNRLESIHPDLAEQVQRHIEWLEKEIRRLEEQMEELIEQEMPLKQKAEIIRSVPGVGPVLTYTLLSEMPELGLLDRKQIAALAGVAPLNRDSGKRSRKRHIRGGRPVVRHVLYMATLSAIQYNPVIRSVYHHLREAGKERLVAVVACMRKLLVILNAMVRSMQPWQPQLSSLQA

SEQ ID NO: 212387 - protein, 315 aa, unidentified
MTTSSGKFVGVDVAKEKLDIAVLGEIKASQVTNDAKGIASLIKEMTALRPELIVVEATGGYQRAVVLGLYEAGLPVAVVNPARVRQYARACGLLAKTDKLDAFNLAEFGKQVRPRQFEAKSEVGRYLSALLVRRRQVEEMLKAEKSRLRTVHVDMRVSLERMIEILKEEIKRLEKDLDRFMKEHADWQEQEEILCSAKGVGRVTAATLLAELPELGKLDRKKIAALVGLAPMNLDSGKKRGYRKTKGGRLEVRSVLYMATLVATRYNPLIQVQYQELLRRGKVKKVALTACMRKFLTILNAMMRDRVPFRQTVAA

SEQ ID NO: 212388 - protein, 346 aa, unidentified
MMIIGCDFHPSWQQIAWLDTATGETGERKLVHASGEATKFYRQLAAPVLIGMEATGNSQWFVELAEDLGHEIWVGDAAQIRASYVRKQKTDKRDAAHILKLMVEGRFPRLWTPDREQRDLRQLVVHRHKLVEIRSRVKNELQHLSLNKGMQKQNKLWSAAGQKLLRELALKPWAACRREDLLGLLAMLNQQIGKLDAAVQHAADGHPQAQLLMTQPGVGPNTALAYVLTIGDVTRFPRGKQVASYLGLIPREHSSGGHQMLGSISKQGNRLLRSLLVEAAQIAVRFDPGMKKEYLHRCHQKPKGVAKVAAARKLAVRLYWMLRTQVAYPEIVRIESSPRVALVGAS

SEQ ID NO: 212389 - protein, 369 aa, unidentified
MLKNVRFIGLDVHAESIVIAVANSGDTPAEFLKIISYDCSRLLKELRKLAKLSDLRVCYEAGPTGFGLQRFLVGENVSCIVVAPSLVPVQTGLRVKTDRRDARRLAHFLRSGDLTPVWVPDEQTEALRDLERAREDARLAERSARQQLLKFLLRHERRFTAGKTNWTQIHWAWIRQQAFGQEAANCVLADYVHAAQQAGERVQRLTLQIAQCVNDWALAPLVQNFQAFHGIQLVTAVGLSAEIGNFERFEKAGQFMAFVGLVPSEHSSGGSRKQGGITKTGNRHVRRLLVEAAWHYYDARPGVSAALTKRREGVSPEVVAIAEKARLRLSRKAMRMRASRKVPNKIVTALARELAGFIWAAAQATKLNI

SEQ ID NO: 212390 - protein, 407 aa, unidentified
MELMHPQCAGLDVHQHTVVACARVVAGSSVTHDVRSFGTTTQELLALSDWLTAHGCTHVAMESTGVYWKPVWHVLEGHVELVLANAMHIRNIPGRKSDVNDATWIADLLAHGLIRGSFVPPAPIQELRDLTRTRKQLVREITQHTLRIQKTLETANLKLTGVLTDILGVSGRAILQALVAGETNPERLAELARGRLKASRADLVAALHGRVTAHHRFLLQLHLAQIDALEGAARAVEARLGDALTPFRAAVDRLITMPGVSETVARVLVAEIGVDMTRFPTAGHLVSWAGLCPRLDESAGKRRSTRTRPSNPWLKTTLVQGAWAAARKKDGYLRAQFLRLKSRRGPKKAIIAVAASMLTAAYYMLKDGADYRDLGADHFDRRDKAKLAQRLLARLHDLGFNVELRAA

SEQ ID NO: 212391 - protein, 344 aa, unidentified
MTTIDYIGFDIHKKTISFCAKAPDGAILEEGTIPSLRNRLLAWAKARPRPWIGAMEATLFTGWIYDFLKPLAQELKVAHPPMLKAIAVAKKKNDKVDARMIADLLRCNLLPECYMAPVAIRDLRRVLRYRNLVLRQATRIKNRIAGLLMETGTAYNKGRLHGKAYFSELLGSLQEMPPSVVELLKLSRGQLELFAVIQRRLLKGLNEHPDLSERVMRLQTIPGVGEILALSWALEVGEVGRFASIGQAASYCGLTSAQHNSAGTEQRGPISKQRNKHLQTILIEAAKLAPRRNPQLAVVHERELQRGDRNRATLAVARKLVAYLMAVDKGGKRFAMRARTEVAA

SEQ ID NO: 212392 - protein, 430 aa, unidentified
MNYNQNHKIAQITSQTLIIGVDIAKFKHVARAQDFRGLEFGRPYTFENTSTGFDGFLAWIQELTQKHGMEKSIIGVEPTGHYWLNLAHFLKEKAIKLVVVNPLHVKKSKELDDNSPTKNDVKDARVIAQLVKDGRYAEPHIPQGIYAELRVAKKIRDLLSVDLQAVQGQIHNWLDRYFPEFFTVFKDWEGKAALQLLKLHALPHEIVKLSDEEILAHLKQAVQRAVGVSKVRDLKHAASVSIGIREGADMAKLELRTLLDKYMLIKKRFDELDSKIDGLLEQIPGVKQMLAIKGIGKDTIAGFFAEVGDLTYYSHPKQIIKLAGLSLKENTSGKHKGQTKITKRGRKKLRALLFRVMMPLVAKNTAFKALHQYFTKRPNNPLKKMQSLIALCNKLIRILFTIGTKQCEFSEERMLSDIPHMEVSSMVVAA

SEQ ID NO: 212393 - protein, 357 aa, unidentified
MNQNTHNSFPRTIGMDLGVRKSSFCILDPSGKQIEEDSLRMSHESIELFLSEQPTSRLVIEACGPCRWVAEFATKNGHEVIVANPREFRLIASSHKKSDRNDARILAEFGQVRPKLLHPIQLRGLKCQIARSTLGNRDHLVKQRTQLINAVRAEVRGLGECLPTCAAYVFHKRMRGQIPAILKASVDPLLDVLTSLANSIKRLENEIASLSVKQFSKSGTEIMRQVAGVGPITALAFVATIEDPTRFKKSRDVGPYVGLASKSRSSGDKNPELRISKRGDALLRRLLVNAATYIMRPNAPDSDLRRFGERIQGRGGQAARGKARIAVARKLSVLLHRLWTTAEVYQPMRNTNKSAVA

SEQ ID NO: 212394 - protein, 360 aa, unidentified
MAQAKTFVALDVHAAATVAAIVDRESGELRRQRLSGRVSEVCDFVAALEGPVRATYEAGPTGFALARQLEAVGVDCLVCAPGLIPRGPTDRVKTDQRDAERLVRLLIAGELRRVAVPTVQAESLRDLVRAREDLRGDLMSARHRVAKLLLRHDVRFEGGERNWTQPHLRWLSTVRFGLAGTQAAFDDYRGAVEALIIRRGELEREIAEQLPVSPSAQSAKRLLCMRGIDTLTAAGLCAEIGDFARFHHPEQLMSYLGVVPSEHSSGTRRRQGSITKSGSQHARRLLVEAAWHYRQPPRISEPLRRRQAGANPAIVALSWKAQRRLHHVWTRMESRGKRRTIIAVAAARELAGFCWAISTE

SEQ ID NO: 212395 - protein, 337 aa, unidentified
MKFCGIDLHSNNSVVVVTDEADRVLISRRCPNELKPILSLLEPHRDELVGVVVESTYNWYWLVDGLMAVGLDVKLANPVAMKRYDGLKHSDDKDDAAFLAHLLRLGILPTGYIHPPHERALRDLARKRIQLVRTRTQHILAVENIAARQLEHSFSCNEVKGFSATSVDRLGLSTDVALAMKANVAVIQALEVQIAGLESRLLQQVKLRPEYSLLKTMPGVGEVLATVIMLETGDIGRFAQVGNFASYARCVESAHYSNGKKKGEGNAKNGNAYLIWSFIEAANFARRFSEDAKRFFEKKKAKTNGVVATKALAHKLARASYHILKEKQPFDAKRCFA

SEQ ID NO: 212396 - protein, 320 aa, unidentified
MHERQKHVYVGVDLHKQHHVAVIINCWQEKLDEIKFENKPSAFSTFLRDIYKHMDDGLTPIFGLEDVGGYGRALAKYLADHEQILKEVNPALSYAERKSHMTTQKSDSWDAECVARILVNKLEQLPDAKPHDLYWSIQQLVTRRNALVKAQGALKNQLHIQLSHHYPSYRKFFSEVDGKLLDFQLDTMPGIDLVTASALIAEIGDVRRFPNANKLARFAGIAPVYFGSGGKGREQKSKQGNRALHALFYNLAVQQVQVAKGSKLPRNPVFHAYYQRKLKEGKTKGQALVCIMRRLVNVIYGMMKHKTAYELPIIKEEEVV

SEQ ID NO: 212397 - protein, 384 aa, unidentified
MSVIIGMDPHKRSATIEVIDGRAVVLAAGRYGTDKAGYAQMLAAARKFADRIWAVEGCNGIGRHLAHRLVHDGEIVVDVPPKLSAQVRVFATGNGRKTDPVDAHSVALVALRTPNLVQVRVEEDLVVMGMLADRRDELGQARTQVAGRLHRLLLELLPGGAKKFLSARQARSLIAPVRPRDLAGKTRRRLAVELIAELEAIDKKTRALDKELTELVTARGSTLMDLHGIGPSGAARLLADVADVHRFARRDRFASWNGTAPLDASSGSQTRHRLSRAGNRRINRVLHIMAVVQLRNQTKGRACYDARRAGGMPSMMAMRALKRRLSNVVFARMLADQKRREAGPGGQPGTPADSSVAGPDPRTPALRTSHVPGPPLHSLNGVLT

SEQ ID NO: 212398 - protein, 341 aa, unidentified
MQHVAIDLGSKESQICIRRPDGSILDERKYPTRKLVELVATWEPSRVVMETCSEAFKIADAAKAAGHEVRVVPGTLVRLLGVGERGIKNDQRDAQQLSKASWQTDVPSIHIPSSAARELRSICGARDVLIDSARKLTNNIRGWVRTQLWRLRPCSARTLGERLRTHASTLDRTLPEHVERQLKTLSLVLEQLDEATAQLARLAHEDPVCRRLMTIPGVGPITAVRFVAVIDDPTRFSSAHRVQSYLGLTPGENSSSERERRTGITKAGPNAMRACLVQAAWAATRVRTTHPMIEWSRQIAERRGRFVAVTALARKISGIMFALWRDGASYEAKRSAKTAAA

SEQ ID NO: 212399 - protein, 328 aa, unidentified
MTSMGQEKMNNAIARTPDQVTIGIDISKDRFDIHLHPDKVVKQFDNDQKGIAQLIAWIIPRQPTRIIFEATGAYHRALEMALGKAALPGVKINPLQARRFAEATGKRVKTDPVDAAMLARFGATMQPDISPARDETIDSLGELLAARRALVKDRTAALNRAKALTLALLKRQSRQHLNQIQTQIEAIDRARATILAANAKLKARSDILVSIPGFGAASAFALLIDMPELGSMDGKQTASLIGLAPITRQSGNWKGKSFIQGGRANIRQAIYMPALVAIRFNPPLKAKYQALRAAGKPAKVAIVAIMRKLVIIANALLRDNRKWTLEMA

SEQ ID NO: 212400 - protein, 308 aa, unidentified
MNTKNHDLVAVDVAKDTLCVLSEGHLSKVANAPRGLDDFVQYLGKLHCPWVFCEATGGYERALVDRLHKIGILVTVINPALLRHFARSEGVKAKNDPIDTRMILRFAQQKNLAPTPPPQRPELTALMDRRTHLSDELTREKTRLQNSSIRIHDSIRRSIRFLERELTRIEQAIKKLVKLDECAHKAAVLMQQTSGVGPVTVWAILAYLPEITQLNRNRIVAMVGLAPFDRDSGRYKGTRHICGGRHKVRNILYMAAMTACVHNPIIKQYAQRCATRGKDNKWIYTAVMRKLIIHLQHVLKNNQICLVS

SEQ ID NO: 212401 - protein, 373 aa, unidentified
MFSLPVFVGLDYHQKIIQVCVMDQNRKILANQSVENDPAAVLRVVAPFGANVHAAIEASTGAAEFAEQLLHLSNWSVELAHPGYVARMKQTPDKSDWTDARLLADLTRAGYIPRVWLAPKPIRELRDFVRHRHGLVEQRKQVKLRIRALLRNHRIICPFSPWTIKGRKWLLDEANISSSRTLYLIRDHYDTIDFFNKKISSVTEKMQADVVNDPVVKQLLQQPGIGIITAITMRALIGRFDRFRTGKQLANFCAVCPRNNSSAGRTTTGGLIKAGDELLRIVLIETAHRLIRYNPYWRDMATRLRANGKKACVTVAAVANRWVRKLFHQMRNPEPFDEVAVGFLRHGQKSTGVLKNPSDAGKRTSHGTGKLGT

SEQ ID NO: 212402 - protein, 414 aa, unidentified
MKLFVGIDVSSKELEACFMNSEGDTLETLKVENNLHGASHLRDRIVAAADKLSASEIHIGLEATSVYSWHPAMYLHEDASLHERKTKVFTINPKLINKFKEAYADMDKTDRIDAWIIADRLRFGRLTTTIVMQEQYIALQRLTRMRYHLVHNLTREKQYFLQNLFYKCNAFRSEVDSSVFGHAIMEMLSEKYSLDDIANMDVVDLADYLKEKGKKRFPNPEHVARCIQKAARASYRLSKVVEDSIDLVLATSIQAIRSIQSQLKELDKAIERILAGIPGAQCLRSIPGIDRVYAAGILAEVGDINRFNDQAAVAKYAGLTWRKHQSGGFEAEDTKRIRSGNRFLRYYLVEAANSVKNREPEFGEYYRKKYNEVPKHQHKRALVLTARKLVRLVDVLLRNGQLYTPGRKVKPTEQ

SEQ ID NO: 212403 - protein, 332 aa, unidentified
MSAVVCGLDVHKETSYATVLDRDGQVLVQRKMMNEDIPAFLEMTHPDKLAMEASTYIIPLYRKLTESGYDVTVSHPRKTRLIAEARIKSDRVDSRALAELLRLDSLPTSYIPPRDIAAIREKVRRRAFMVRQVTKLKVKIRDVLAIEGVKPPTGYGLFTAKGAQWLSSLKLEPVDCYLRLIEPLKEEVKLVSRDLKRSAGKDAEVQLLMTIPGVGYYVALLVKSEIGDVRRFSSGDHLASYAGLVPSTRSSGGVERHGGITREGSRWLRWAMVEAAMVHIRFDTPVTRFYHGVAERRGKRAALVAAARKLTEICFSVLVHGRPYFNPLDAQA

SEQ ID NO: 212404 - protein, 389 aa, unidentified
MIYLGIDVSKFKHNCYLADEDNFDKGCHFEIKNSRDGFDFLLKKLSDFDKDKIRIGLESTGHYHLNLSRFLLDLNFNIHFFNPYQTSLYRKADSFRNTKTDKVDAFFIAKLLRATDSNPTHNELYHNYELKSLTRYKSSLKNDRIKIKQTIIGHLDLIFPELTSICNDVFCKYTLEVLKEYPSADKIAKANLTRLSNIIKKASKGSHSKDKAIEIREYARKSIGINSAAVSFRLVQDIKTLEFLKEQINEVNEQIKLLLDYLDSPIMTIPGVGIEIGPSIISEIGNIERFDNPSKLLAYAGLDPSISQSGTMYSNYSSMSKRGSSYLRDALFIAAFLICQNDETFRIYYEKKKNEGKHHYVTLTHVARKLTRVIFYLLKTNQKFVSQTP

SEQ ID NO: 212405 - protein, 347 aa, unidentified
MVADSFDVVIGVDTHRDSHALALVRCRDGALLQEQVLAANRSGYRSALDLGRSLGERRLWALEGTGSYGAGLARYLQGKGERVVEVERPAREGSQSRLKSDALDALRAARSALAAPVLASPRRAGRREALRVLLAVREGAVSTRRNGLNQLRALVVSAPQDLRERLHGLPAPALLRACLSLRLPRGAEPERYGTVLGLRLCARRVERASREAAELKRELGRLALELAPKLLELDGVGPISAAQVLVSWSHRGRFRHEAAFARLAGAPPIPASSGRTVRHRLDRGGDRRLNRALHTIVLSRRRRDPATIGYIARRVSEGKSERDAVRCLKRYLARRLFRLLEAMPIAA

SEQ ID NO: 212406 - protein, 343 aa, unidentified
MSIVTWPLVFVGLDYHMSFVQVCVMDPDGKMLLNRKCANDWQAVVAAVHDRFGQQVRVQAAIESCCGAADLADELISHGWTVQLAHPGYVARMKHNPDKTDYTDARMLADLQRLGFLPRVWLAPEEVRELRRLVHYRQSLAKEHRTLKLQIGATLREARQKAPAHANPWTKAWLAWLETSAELSPNARHITSHRLRRLRALREELRQLDKRLERQTREDSLVQKLLTIKGIGPVTATTLRAEIGRFDRFRSGKQLARFCGLSPRNASSGQRQADAGMIKAGNNELRALLIETAHRLIRCDERWTALAARLSSRGKPTNVVVAAVANRWVRWLFHQVQPACLPA

SEQ ID NO: 212407 - protein, 437 aa, unidentified
MKTLAVLDPRAAFVDVGSEHMHVSVAGEEPAVFGTVTSQLHALRDWLKSQDVRFVAMEATGVYWLPLYGVLETAGFEVRMVNGRQTRNAPGRKTDMKDCQWGATLHMHGLLNAGFVPPADIRRLQDYLRLRADHVASAASHVQHMQKALERMNIKLHDVIASLAGMSGLAVVRAIVAGERSPEALLALFDQQIRRAKAEQVKEALRGTWAAEHIFALRQALQSWDHYQLQIAECDHQIQAVLPPHDPDQPPLPRPKTPKRAGVNSPDIPKLREILAQMCGGRDLTQLPAHTHYGVLQIVGEVGTDLTKWRTEKHFTAWTGLAPGNHDSGKRKGHVKRGRNRTGRLFCMMAQSLVRSKHIALGGFYRRMAARRGGLIATMALARKLAAWYWRVMVKGDDYVEQGLAHYDAQVLQTKQRALKRLAKELGQQLVPIAQPA

SEQ ID NO: 212408 - protein, 420 aa, unidentified
MEELTEELAELVERVAALDIGKASLVCCVRVPHESKPGARRQEVRTYDTVTPALLELRDWLVCQGVTRVVMEATSAYWKPPFYLLEDDIECWVVNARDVKNVPGRPKTDKLDAVWLCKLAERGMLRPSFIPARPQRQLRDLTRYRRTLTQERTREKQRAEKLLEDAQVKLSSVISDIFGVSGRDMLAALIAGQRDPHALADLARKRMRAKTSVLRQALTGHFTEHHAFLLGMMLDRVDALTAQIDTLTTRIEKAIAPFAAQVAQLDEIPGIGITTAQEILAETGTDMSRLPTPGHLVSWAKFAPKARQSAGRSKAAATGKGNRWLGGTIGEAAAGAARTSTFLAARYKRVVKRRGKKRALVAVGNSILTICWHLLSDPGARFTDLGPDWHDRLAPQRRKRQLIAELERLSGKKVTLNDAA

SEQ ID NO: 212409 - protein, 366 aa, unidentified
MDTIYIGVDFHARQQTICYLKTETGELVFHELKHQDKQQVRAFYAQFVGQVIVGLEASGYSPWFERMLEELGCQVWLGHATEIRRRARWRQKNDRRDAELILDLMLHNEFPRLHRPAVQSREVLRMLRYRQKLIKMRTMSKNSLQAIALQAGLAKGSRLFTKAGQQELGTAEMSPVLHWQREHWLQLMEPLNQQLLETMVWFKSQSKDDDRITRLRTHPGIGLLTSLCIVHTLQPVSRFRNTRKVAAYAGFDPIERSSAERKCFLGISKAGSRLLRYLLVEAAQTAVRKDEDLKRFYQRLADRRGRPKAKVAAARKLLIRAYIMMRDEIDYAEFRHRAVAARLARRSQGPANVPEVLIGQPASPEQ

SEQ ID NO: 212410 - protein, 343 aa, unidentified
MQVSTIGLDLAKNVFQAHGVSAEGKVVLKKQLRRGQVLSTFAKLPPCLVGMEACAGAHYWARELRKLGHDVRLMPARDVKAYVKRDKTDAADAAAICEAVSRPSMRFVALKTPEQQGRLMQHRVRDLLLRQRTQTINALRAHMAELGLVAATGRQGLCLLLAIVADAKDERLPQDARASLKLLASQITALQAQIDTLDKRLHAQHRQCPASRRLETIPGIGVIGATALAATITDPKAFKSGRDLAAFIGLVPRNNSSGGKQRLGPISKQGDRYLRRILVVGAHSILKQARARPDKHPWLARLMARKPGKLAAVALANKTARIAWAVLARGESYRAPTAPAAAG

SEQ ID NO: 212411 - protein, 307 aa, unidentified
MAPRFGIDIDKARLTIAQAGVPGTKTVDNTAQAITDWLASLPESSAIAVESSGRCHDLLLALACTVACAVYLLNPLDVRRYAQGIGRRAKTDAVDAHVIARYLDREIADLRPYTALDPAFAALRRVVRHRATLVKHRQALRASLAGTPWLSQIDEALTTSLNAIDAHITALLNTHAAARDLRQRLLTVPGIGPVASASLVSLLHPIAFDTADALVAYVGLDPRPCDSGMHRGQRVLTKRGDPEIRRVLYLAAQAFARTIGKALYERYRARALSATATYVILARKLLRIAWAIQQRNTSFDPQRFAMG

SEQ ID NO: 212412 - protein, 342 aa, unidentified
MKDMMIGVDLAKNVFQVHGALRTGEVHFRKKLTRKQFLTFMAKQEPCLVIFEACGSAHYWAREMETLGHEVKLIAPQYARPFVKRQKNDAADAEAIVIAARQPEMRFVEPKTGEQQSRAAVFRGRERLVHQRTADMNALRALLYEHGHVFPAGIRYLDRMTALVEDEASDLPALIREECQDLLAQIAEKTARIIERTAKLKALAAQSDRARRLQTMPGVGPLTAVAVEAFGPDMAQFKTGRDFAAWLGLVPRQRSSGGKERLGRMTKAGQADIRRLLIIGAMSRLGWLGQRSIVEGSWLSRMLARKPKMLVAIALANKMARQIWAMLTRNEDYKDPALAGAA

SEQ ID NO: 212413 - protein, 420 aa, unidentified
MSDQDQRLHRATRPNERKKVAVSGEALAGVDWASEIHAVCVIDGDGEATDQFDVTHDAGSIRALVARLRRVGVSRVAIERGDGPLVEELLDADLEVFVVPSRQIKGLRTRYGSAGNKDDRLDAYVLADTLRTDGHRWKPLRADHDDTRALRALCRSRKDLVETRVQIVNQLRANLELAFPGAIGLFCKPDSSITLTFLRRFPSAEKAQWLSPKRLASWLSSVGYTGGIPSGVLYGRIDNAAPGLLGAEGAARGRITLGLVAMLETLNAEVQALEHDMEELFRSHPDQRIFASLPRSGMVRAANLLAEIGDCRERFPSDDALAALAGASPSTRQSGKREQTVFRWACNKKLRAAVMDFANGSRSADPWAADIYKRAIDRGCRHPHAIRVLARAWLRVIWRCWQDSVPFDPALHGARQQLAA

SEQ ID NO: 212414 - protein, 443 aa, unidentified
MANLIKKNNKKTSGIDIGSEKIFISVEDKEVRNFGTYTESYIEAVKYLKEEGIETVAMEATGVYWITFYDLMVKAGIDVYVVNAASVKNVPGRKTDVQDCQWIQQLHSFGLLKKSFIPEEKIGQLRTYVRIREDHIQIGATHIQHIQKAFILMNIKLHNVITQVQGASGRRIIEAILKGERDANKLVELCETSILKNKREDVIKSLQGNFKREYLFALKQAYEGWKFYQSKIKECDVEINKLLSEMTKGKAAPKNLSKAKKIVHNKPNIEKFHEKMMTITEGKDGTRIPGFTDYTLMKLIAEVGTDLSRWSTPKQFTSWLGLAPGKHTSGTIKKRSKKKINTKAGQLFKESAHGLLKSKRIALGAFARRLRAKRGPSVAIKATARKLAIMFYNIMTKGMDFVEEGIKKYEEKYKESIIKSLNRRAAQFNLELVSISDDYTRVH

SEQ ID NO: 212415 - protein, 344 aa, unidentified
MYFIGIDHHKQWSVMTILDEAGQELKHGRVDNRREAVRRFLEDYKPNTAVLEAGYSSYVMVDMLRELGSEVKIANPAEVKAIAHARIKTDQRDSRILARLLRSGDIPEVTQRSTANRRAQRVMRLRAFRVAKQTELKNKIRALLAQQKEEIRLVVEGREEGLFSGKGLEFLGQLVLPDPDQMILDDLLGSYREGQEHLRKTDGIVEKLYQELEAARRIDTVPGFATTLSVLVTVEIGDIDRFTSAAHLHSYAGMIPTTHSSGGRTYHGHITKAGNLWLRWAALEAVFPAVKSSLEIRGIYDRLARRKGPNVAKVAVARRLLTIIYRMLKEKRDYILSMKQSSAA

SEQ ID NO: 212416 - protein, 470 aa, unidentified
MCFASSNEHSDVAWELPTLSIRVSREQSRPGAMQREKEVNKSAMSEAGSIQPEPEFAAFIGIDWADQKHIWCLQAAGSARRETGELEHTPEAVESWVAHLYQRFAQRPMAVAVEQSRGALVFLLSKYEPLHLFPVPSQMASSMRQALYPSGAKDDPRDADLLLDIVLQHRNRLRRLSPDSEATRRVQNLVEERRKLVDEKTAQINRLTDHLKVYFPQMLEWFGRLDSDVVCALLERWPSLEELQKAPPASLRAFLRKHRCRDRERIEHRMEAIRQSIAAIHDRAVIEAKSAAVRVIVRVVRVLGEGIEDLDGQIEEAAAAHPDFFIFNSLPGAGPVMAPRLLAAFGSQRERYRSPDELQSFSGIAPLTETSGKRKWVHFRWACPKFLRQSFHEWAGHSIVQSEWARAYYQQQRRKGHTHHEAVRALAFKWIRIVFRCWQDRVAYDENTYLAALVKRGSPLGAIAATGKTL

SEQ ID NO: 212417 - protein, 460 aa, unidentified
MDRVPVIGIDLAVTAASELAVATGATIEASRKVASTPKGLTEGIRQAAKGRAVAIVVESTAMAWLVAAVAALRSGVDHTLYRVSGRKSAALRAFYRTHTKTDHIDARVLARMPAVDDSLLSFSLPMPAELALKRLVVARHKLTTESTKIQNRLRSMLHWAAPGILKAGGGTVSAGVVAVLSRWPDLASLAKARSATIAQQAEWGSERAEAVRAAAAEAVAFYEGFVDFSAVGLELEISLAQLGFLGSQVERLEERIAALHAQLYPKDRLVSVPGVGPVVAGVVRAVVGDLSRFANLASFRAYTGLVPREDSSGEVRRRGRISKAGPSVLRWALYLAADAARQCDPALADLYRRLMVERGRTHTQAVCAVASHLAGRIYAVARAGRDYLWRDLEGNEITKEQARAIAQGLRVDPETRARLRARREGGPRTPYARQPEVPQDVTQPSGDKLIDAALELASKR

SEQ ID NO: 212418 - protein, 338 aa, unidentified
MYDKILGIDIAKSTFDVALLPLQAPAAGHTERARTRHFSNTPDGFADLQRWLATEQVAGVFACFEATSTYGEALAAALHAAGHTVVRANPYQIKRYAQSELQRSSTDRLMAAVIARFARERQARLPAWTPPDPALAILQDLVRHADDLETLCGQVKNRLERPGHCAAVIDSLTETARKLEAELQRIRQQIRAWVAEHPTLAAQTALLDTITGFAETSAVAVLSEVGDVTRYASTRQAACYAGVIPCSVQSGTSVSSEAHFSPHGNRRLRKALFYPALVAIRHDPRIKAFYLRLRAAGKSKMSAVGAVMHKLLRIAVAILRSGRAYDLYIPSQEVLTTQ

SEQ ID NO: 212419 - protein, 377 aa, unidentified
MNYSTSYSTVYIGIDAHKESFSLCSYTNEKEQAEYPQRVDAHYSKVINYIEAMRFHYGEDALFVCGYEAGCLGYTLYHELEAHNVKCVILAPSTMPVPKGKKRIKTDKRDAALIARCLAHHDYSAVHVPTEKDEQTKEYIRMRDDHKLELKKVKQQILAFCLRHGCIYDGTKSHWTQTHINWLRNLNLDSMLQEIMDEYLLTYDYLTGRLGLIEKRIEELANDKDYAENVHKAECFIGIKSQTALAVIAETGDFNRFPDAQHYASFLGLVPGEDSSGDDKNRLGITKAGNRHIRTLLIEAAQSYGRGKVGYKSAALKARQAGNSSAVIAYADKANERMRRKYYHMVLKQGKKTNVAKTAIARELACFLWGMMTGHIV

SEQ ID NO: 212420 - protein, 346 aa, unidentified
MKHYVGLDVSLKETAICVVDENGVVIREGKALSEPEAIGAWLNESGLPIVKIGIEIGGLARWLYSELRAAGLHAVCIDPRRLRGVTKTMPIKTDRNDARAIAQVMRVGWYTVVHIKGDVSQELRMLLNNRKTLLIKQIDIENEIRGVLRVFGLKLSGRIPQATFEQQTNELTDGHPRLAAMLRPMLVARAALREQYGVLHKMVLEIVRREPTCQRLMTIPGVGALTAITFLTTIDDPDRFQRSRDVGAHLGLTPRKYASGETDRNGAISRCGDVMLRTILYQAACTSNPHQALVRIESLGCKGGQATRPSPSGRSSRTKISDRDASDLGRWKRVPMDPRGGDRMIN

SEQ ID NO: 212421 - protein, 310 aa, unidentified
MFSYPAGIDVSSDSLEILVDQLDVAMSCPNCESDFPRLIGWLALHRVGRVLLEATGGYERKVMKALQAAGLEVIRINPCRAKSFAKAMGQQAKTDPIDARLLAQFAAVIKSPDSRVTSAEQDDLRALVQQREHFVQQRDDDKRRLKTASSEVIKPALQSHIDYLQGVLKQLENLIRQSAERLNSKKVSLLCSVKGIGLVTAASLMSYLPELGEIGRHQIAALSGTAPYNDDSGKHKGKRHISGGRFAARRSLYMACWSVIRFQPEFAVRYKALREKGKCPKVALIACMRVLLVRLNAMIRDGTEWREQPA

SEQ ID NO: 212422 - protein, 385 aa, unidentified
MQALLHCCCGVDVHDEIIETCIIKGLEDEPEIIRKQFQTKPKNLKDFAMHLMEHDCFNISMESTGVYWRPVYEAIEDHCERVDKIVVTNAAHMRNVPGRKKDQDDAEWIAILLRHGLLKSSFVPERIFRDLREASRLYKKFVGEQCRYTNRIMKLLQAHGIKLSHVLSDILGANGRNILKTLADRGSLSVDDVASCLRGRPKRTPQEIHEAVSGSLNPDERQMLSILLNKIEAAERDMDTIIDLMLQMMHPYKRALDIVDSIPGFDVLGSLLLLAEISTTPQLSFDTASKLCAGLSPRNDESAGKIKSRKILHGNPYVKSILCQAAWAAVKSRNNPFRDWFWSHQGKLGQKKAIIAVSRKILKTIYTLLANDSFYDPAIAFAHRP

SEQ ID NO: 212423 - protein, 361 aa, unidentified
MAQVRTWAAFDVHVSGVVAATLDRDSGQLQVQRLPGSSEEVTAFATTLPGPVRATYEAGPTGFVLARRLDAAGIDCLVCAPGLIPRGPSDRVKTDRRDAERLVRLLAAGELHRVAVPSIDEEALRDLVRAREDLRGDLMRARHRLAKLLLRHEVRFEGPQANWTQAHLGWLAGVQLPQPASQRALEDYREAVSALTIRRGQLETEIARALPESPWAQTARRLMCLRGVDTLTAAGLCAEIGDFRRFRHPAQVMSYLGVVPSEHSSGDKRRRGPITKSGSRHARRLLVEAAWHYRRAPRVAGNLARRQRDGEPHVIALSWKAQRRLHHIWNRMEHRSKRRTVIAVAAARELSGFCWAIATAD

SEQ ID NO: 212424 - protein, 310 aa, unidentified
MDKTIVGIDVSKDRLDVAVRPSGEVFVIERSPVGLEQLTLRLGGLSPCLVALEASGGFETVVAAALGAARLPVVVVNPAQIRAFAKAVGQRAKTDPIDAGVIAHFAEATRPEPRPLPDEATRLLADLVARRRQILEMMVAERQREKRVTVPHLRESIERLLKALKRELTSVDTDINEAVRGSPVWREKEDLLASVPGVGPTIARAMIAEMPELGQLSRRQVAALAGLAPFTRQSGQWRGRSFIGGGRTTVRSALFMGAMFAKRHNPILKAFFDRLVAAGKPKMVALIAVARKLLTVLNAILRDRRPWQTA

SEQ ID NO: 212425 - protein, 357 aa, unidentified
MASMASSISAAQLDRVFGGIDTHKDTHTAALVDSAGRLLGSAVFPTTRAGYRQLLGWMGSAGILARVGVEGTGSYGAGICRQLCAAGFAVVEVNRPDRSQRRRRGKSDTLDAAAAAEAARSGNHIAVPKSRDGQVESLRVLRLTRASAVQARTKAWQQLDQLLVTAPARLRDQIRDLSKMKLIRSCAEWRPNPANAADPLTATRIAVRRLARRYLALSEEIAEFDELLTALVAELAPQLLAVTGIGTETAGQILVTVGDNPERVHSEAAFAMLCGVAPLPASSGKTQRHRLNHGGDRQANRALHMAAIARMRTDPRTKAYVAKKTAQGHSKLEIIRCLKRYIARELYRTLNKAPIAA

SEQ ID NO: 212426 - protein, 372 aa, unidentified
MTSMPEPTPIDRARDEREEVVLGVDTHKDLHVAAVLSGLGALLATRAFPTTAAGYRGLVAWARSFGALRRAGVECTGSYGAALTRHLQAEAIEVVEVNQPDKATRRKRGKTDAIDAEAAARAVLSGRATATAKTSNGPVEAMRVLRMARNSAVNASTKAINQLKAVLVGADPALRDSLAGLGPATLVRRCAELPDPTPGSGLSEVDRAVVFTLRTLAARIMALKAEAYQLHKQLRALIAAHAPELLERRGIGPDSAAALLIAAGDNPERLCSEGSYAALCGASPVEASSGKTQRLRLNRGGDRQANAALYRITVSRLRWDSRTQDYLRRRLTEGKTRREAIRCLKRYIAREIFTLITPKAATALANQSANAA

SEQ ID NO: 212427 - protein, 305 aa, unidentified
MNESIYLGVDVAKSHLDFDAPVGRIANTPAAIAAVLRQLPAGTHLVCESTGGYEAGLLAGALAAAVPVSVVPPQRVRHHARSMGRLAKTDRIDAALLTDYGRKHRPAPQRALEPERQRLRQLLRARTQLLELQQLETNWQEHASELPMLRRQAAQRAKLLAKQLAQLEEEIRTLVATSCARAPIERFQQVQGIGEVTAWTAWAEMPELGQLEAGQPAALAGLAPHPYDSGQKRGYRQVQQGRQQLRRVLYMAAVSASQHNPVLKPLYQRLIARGKPAKLALIAVARHLIELLNTLLKNPNFILVG

SEQ ID NO: 212428 - protein, 412 aa, unidentified
MNQEANPSVVLFEQVVLRGCGLDVHEKTVVATIDGEGIVRETRTFDTYTSSLNELREWLQLHGVIHVAMESTGVYWKPVFNILDEGFKVILMNARHLKNVPGRKTDKKDSQWICKLLLAGLLKASFIPEERIRDLRDLNRYSTKLTQEMASEKNRIQKILEDANIKLSSVVSDTSGTVATKLIDGLMEARTDLEALVDECYHGKMKASKAELLKAITGRMTHHHRFMLRQIKHHMASLESQIEVIQLEIDRLLQQDQQSVALLTTIPGVSKLTAVKLLAETGTKVEETFGNAKRLAKWAGICPGNNESGGKKLSGRTTHGNKYLKSLLVEAAWAATRTKGTYLRAKYDSMAARKGRKKALLIIGHKILNAVYIILTTQQSYQAFSVEEFEIRRSQTRIKHLKNELKELGITA

SEQ ID NO: 212429 - protein, 454 aa, unidentified
MAARKAKPKVKVRTSRASLTITHPNAAGIDIGSTSHYVAVPPDRDDEPVREFPSFTADLIAIADWLTACRVDIVAMESTGVYWIPLFEFLESRGIKVLLVNARHVKNVSGRKSDVLDCQWLQQLMTYGLLSGSFRPEEQICVLRALWRQRGMLLKTQARSVQHMQKALTQMNIQLANVISDVAGETGLKILRAILAGERDGYALAGLKNSRIQASDEEIAKSLQGSWRAEHLFALKQALDSFDFTGTQLAEVDLEIERQLVSLGTHEGTPGKGRKRGRARNAPQFDLRTQLFKMCGVDLTRIDGIDVTTALAVISETGTDMTRFPSMGHFTSWMGLCPGTKITGGKVMSGKTKRCANRAAQALRLAAAALRTSQSALGAYFRRMCSRMDKPKAITAAAHKLARLIYTMLTKGEEYTDQGQDYYEQRYREHVVHNLSQRAAKLGLKVVALEAASC

SEQ ID NO: 212430 - protein, 337 aa, unidentified
MKRYLGVDLHRTQFVVCTRWENGEQEIRQWRIGELARFLEQLQPEDQIAVEAMGTTAHFYDAVAGRVARVVVVNPHQFKVISESVKKTDRKDAAALALYLEKDLLPEVRMKPKQNRELMHLAETRDLLVKQRSALKGKINNLLAMQGIELKREALSSKIALERVLAQPVGGMVQLELRILVEQIRSLSESIAELDERLEEEGQQLPGYENLTSIKGIGSLSATVLLTVIGKISDFADENKLAAYLGLVPRIANSNESERSGRITKQGNKLARTALVQCGLVAKRYSPYLNRFYERIKQRRGGGKAKIALARKLVKIVHDTLKNQWVFEDFPSFTLAA

SEQ ID NO: 212431 - protein, 449 aa, unidentified
MMEPVEIQDEEHEQILERVAAVDVAKASGMVCTRVPHESRPGRRVTKVWEVPATTNAIMELGEYLAGLEVQKVTLESTSDYWRPFYYLLEAAGLEVQLVNAREAKGVPGRPKSDKLDCVWQAKLTERGMLRPSFVPPAEIRQLRDYTRLRVDLTRERSRHAQRLEKLLEDALIKLSTVATDLMGVSGRAMVEALIGGERDPQVLAGLARGRLKVKHAALVQALTGRFDAHHGELARMLLDQYDALSAQITRLTARIEELIAAIPEARGVDASGATGPGAGEAPDAAVRSAIARLDEVPGIGRHGAQLIIAEVGLDMTRFPTAGHLASWAKLCPRTIQSGARSRGGKTGKGNPYLKGLLGEAAAAAAKTDTFLGERYRRIVKRRGKLKALVAVARSILVIIWHLLADPAATFCDLGAGYYASRISTDRKLKNHIRQIEALGFTVSLTKAA

SEQ ID NO: 212432 - protein, 329 aa, unidentified
MTTNPPQIVFNHIVAFEVSKEKLVVHTLPDDEQWTIDNKPQAVRRLIKAEIKRNRKKQLGQMLVICEATGGYERHVLDGALEMGLSVHRAHGTRVRHFGHYRGLLAKTDPIDAHLIAQYGLKTENIRLYSPPPPDTAALRALHARRTEIQQMLIAETSRLDHAQHKSVLKSLKAHIASLKAALVAIEADIAQLVEGSEMLRKKVALMQTVIGIGPISAMVVLAYLPDIGQLTKGQAARLAGLAPINNDSGKKRGARHVEAGRTAIRRALYMAASVAMRANPILKAFSDRLRSKGYPFKYVVTAVMRKLIVILNAVLRDGQSWKGAQMAA

SEQ ID NO: 212433 - protein, 412 aa, unidentified
MKVVYPRCAGIDIHKQSMTVCLIVDRQDGSAPEYHKRKLATHSEGIRELCAWLEQHQVTEVGMESTGVYWKPVWNALEGKWGLHLCNPQHVRVIPGSKTDMRDGTRIGELLAYGKLPESFIPPLWQRELRDLTRLRARFKQEAARAGNRILKVLEDAQIKLDCVASDPLGLTGRLILNRLVKGETDPAQLAELAVGNLKKKKKELRQALDGRCTDHHQFQIRQLLEVVKEFEDKIFQLDRRIERYLEPYEDLVRRLDQVPGVNRVGVADILAEIGPDVSPWEDSGKLASWSCLCPGSRESGGKRLSGRTRKGNRWLRRIFCQMAWAATHKNGSYFKAQYRRLARRRGKPRALLAVAHTLLTVIYHLLRDPNLEYRELGEDYFEQRDAAQTAVNLVRRLGKLGYEVTLKPKAA

SEQ ID NO: 212434 - protein, 415 aa, unidentified
MLKIVYPICCGLDVHRDFVYACIATTENGITTYKSHRFSTFTKGLRELLSWLLQNNCCDVCMESTGKYWIPIYNILESDCKIVLAHPKYVKAIRGKKTDKKDAKWIADIFKHDLVSGSFIPPADIRQLRDLVRYNVKLTNYTTGEKNRAQNCLTVSNLKLDSVFSDVFGKASSNIIGRILANPSEKISDVSVFRTKGMKATDEEVLAAVDGEMCAEQAEKLRIIRSHMDGLELCKANLMSLILSTAEKYIPEVDLVSTVPGLTAYSAIAVIGELGVDMSVFPTSKHLCSWAGLAPHNDQSAGKKKTTRISRAGVYIKPLLVQCALAAIKSKNKHPEIVNRYNALRKRRGHKKAVIAIARILLTAIYNILKKREPYNPELYRNSDTTPEHRNVTIEEAVFILQRQGYIISSPTSVG

SEQ ID NO: 212435 - protein, 385 aa, unidentified
MEPMTTAQLYAGVDVSKDRLDVCLRWSEHERRDGDVFFVTHDDAGIDTLISGLLEEHPVLVILEATGGFERAVVGALAAEGLPVAVVNPRQVRDFARATGQLAKTDTLDARVLARFAEAVRPAPKPLPDEEIRALQEILARRRQLLGMLTAENNRLHSASKPVAKRIAAHVGWLEKELERTNRDLDGAIKGSPTLRENEALLRSVPGVGPVLARTLLAEVPELGTLTHKRLAALVGVAPLNRDSGTLRGRRSVWGGRAEVRAALYMGALVAARRNPAINWEFYERLLAAGKPKKVALVACACASCSLSSTRSSNTVLLGGLLTIFPLDFEDSCFFFLPLFHQPRRRGVLGSPYAVSRIDRTPVPRGSPLRASTPQWPETACSGVE

SEQ ID NO: 212436 - protein, 344 aa, unidentified
MECFAGLDVSLRSCALCVVDGKGKVLLERDLPCEVGDIAACLAGFPHPVARVGFEAGTMSQHLFHGLTGEGFDVVCMEARQVNAALSAMRNKTDRNDARGIAQVLRTGWFSPVHMKSREAHGQRALLSARKALLNKMIDLANEVRGLLKVFGLRLPKSVKHGSFDGIVRPMIEADDVLAHALVPLLDARLGLYQHFLELDRRVKRAASRDEVCMRMMTVPGVGPIAALTFKAAVDDPARFKRSRTVAAHFGLTPRRYQSGEHDNPGHISRAGDRDVRATLYAAANALLMRTMAGSQIKSWGMRLMRTKGRRRAVVAVARKLAVLLHRMWADGTEFRPENVEGMA

SEQ ID NO: 212437 - protein, 341 aa, unidentified
MEKRFIGIDLHRNRFTCCIRLENERTYVTDWELEDLGKFVKKLRPNDEIAVEITGNTRLFFDAVVPHVARVVVVVNNSQFKVIRQSVKKTDPHDARALALYLSKNMLPEVRMKDKEHGQLASLTQTRDTLVKLRTALKNKINNILSARGLNLAKEALGSEKKLNEVLELPFDEIVRIELRVIVEQIRSLNKSIAELEKTIGEAGSKLEGHKGLSSIKGIGKITGAILLSVIGDVNDFADEGRLASYFGIVPRVSNSNETEHSGRIHKRGTKLGRTALVQSALIAANYSPYLKRFYEQVKARRGAGKAIIALARKFLGIIYRTLKNKWVFEDFANFVLAEAS

SEQ ID NO: 212438 - protein, 447 aa, unidentified
MNMSTTKHDTDKSSSAVAAPGPASEPHFAAFIAIDWGDEKHALALRVAGQTQTEHTTLEQKPQALTEWIAGLRQRFAGGTVAVILEQKRGALLYALQPHEHLVIYPVNPQMSAKFRQAFYPSGAKDDPTDADLQLDILLHHRDRLTAWRPDDATTRQLSLLVEGRRRFVADQVRVTNRLRDALKSYFPQALELAGEDLTSLMACAFLQKWPSLAALQQVKPAALRKFYYAHHSRSEELIAQRLKLQAQAQPLTTDAAIIAAQSLLVQSLAQELATLNPVLARYEKQIAQLFATHTDFALWDSFPGAGPALGPRLAVAWGTQRDRFPDPQAMPCFSGIAPVKEASGKQLWIHVRWACPKFLRQTFHEMAKCSLKGCAWALCYYQMQIERGKGHHAAIRALAFKWQRIMWRCWQDHLPYDDAKYVASLKRSASGLYARLSAAPAKERCE

SEQ ID NO: 212439 - protein, 411 aa, unidentified
MHNRQNYLYVGVDLHKEHHTAVIINCWQEKLGEIQFENKPSAFSKFLLEVETYVSDGLSVVFGLEDVGGYGRALAKYLVDHEQVVKEVNPALSFLERKSQVMIQKNDSWDAECIARILINKLNQLPDAKPNDLFWSIQQLVSRRNALVKAQSALKNQLHIQLNHHYPSYKKFFSELDGKTALAFWQQYPSPSCLEGANIKQLTAFLLDVSNNTCSVKKASDILKLVKEDGHTMKEYQETRDFLVRSIVRDIEFKKTEMKYIERELKQLVNLLDYQLETMPGIELVTASALIAEIGDVRRFSNANKLARFAGIAPVYFGSGGKGKTHKSKQGNRALHALFYNLAVQQVQVAKGSKMPRNPVFHAYYQKKLKEGKTKGQALVCIMRRLVNIVYGMMKYKTAYELPVVEEKEVV

SEQ ID NO: 212440 - protein, 361 aa, unidentified
MKTLTASTTPIVALDLGKYKSVACLYDGDPATARFQALTTSRAELVRLLQQHAGAAVVIEACALAGWVYDLCAELGQTCVVANTAAEAWKFKHSKRKTDRDDALRLAQLYALGQLPTVVIPAQQTRQWRALISYRQVLVGRRVRLQNQIRSFLVGQGLPAPRGAKAWTALGLDGIGRHAKALADCAADELWRGLLLLALTELRQLRQLLDQAEQRLDQLAADDAGVQTLQTIPGVGPRTAETVVAYLGDPQRFDNGKQVSAYGGLVPRQYQSGATDRRGRITRRGPALLRKLLVECAWVMLRYNPWARAVYRRLSHGTARKKQAVVALARKLLVRCWAMLRDGTPWRDDTSQEAAAAPVPA

SEQ ID NO: 212441 - protein, 414 aa, unidentified
MDVLHERCVGLDISKKDAKACVRTPSTKRRGSFTTETTTWGSTTNAVLALRDHLLAARVTLVVIEATSDYWKPFYYVLACELNVILVNARQVKNLPGRKTDVSDAAWLAQLGAHGLVRPSFVPPEPVRELRDLTRARTTATRERGRAVQRLETLLEDTGIKLSAVASDIMGVSGRAMLEALIRGEGDPQVLADLAKRRLRNKIPELTEALTGRFREHHAFLARLHLDHYDQLTTMIDQLTGRIEEAMAPFRGALDLLDTIPGINRAVAEVIIAETGGDMNRFATAKHLASWAGVCPGHHESAGRTKSTKVRPGNPYLKGALGLAAFGAVRTKDTYLQARYKRLTARRGPLRALVAVEHSIITALWHMLTDNVPYQELGGTYFTQRDPERATRRAVNQLNQLGYTVTLNPRENPA

SEQ ID NO: 212442 - protein, 434 aa, unidentified
MSAFINDFVVGIDVSSEFSVVAMLEPSGTPIRKPFRIDHTPAGFNKLLDILKKEEERLNRKPIYFVESTGIFHLPLFFFLKSNDLKGFVLNPLSVHSTKNFDLRKVKNDSKDAESIARLAKYQQVKCSLVPEPQILALRMMVREYYALSDMLTVMKNRLSTDLYLLFPGYAGVFANPFGKASLELLRICPSPQHVIDAEPDSLAVSIAASSRKGLAWAYKKVNLLLEISQLALSMPMSFSILSNKIRLHLDGIQNLQNSLDGLLLQLREMIAAPEFPQKERLYIDLLDRMPGCGFLTAVTIIAEMGDFSRFKSPKAFTAFFGIDPSVNQSGKFNGDRNRISKRGTKFGRRVLFTLALASIRTSRKGDPINAILRDYYLKKCETKKKKVALVAVMHKLLHYIFAVLRDEKPFVFRSPQDHQSWRHSQNSAAPDAA

SEQ ID NO: 212443 - protein, 343 aa, unidentified
MDHFAGLDVSVKETSLCIVDDAGRIVREVRVVSEPEALLAVLTNPDCHFKRIGLEAGPLSQWLFNALAEAGLPVICVETRHMRAVLKAQINKTDRNDARGIAQMMRAGLYRPVHVKTLRSQKLRMLLTHRKLLQSKAIAIENDLRATLRNFGLKVGVVGTVKFEARIKELVENLPDLALLVEPLLLVRRVLREQLGILHRRLLAIVRDDEVCKRLMTIPGVGPVVALTYRATVDVPSRFRNSKAVGAVFGLTPCKHQSGESDRTGGISRCGDEMMRAMLYEAAQILLVRSTKWSWLKAWAMTIARRRGLKKAIVALARRLAVIMHRIWIDGTEFRWTREVAAG

SEQ ID NO: 212444 - protein, 348 aa, unidentified
MALTIVETRAITGGVDTHADVHVAAALDPIGGLLGVAEFPATPAGYARLLGWLGGFGTVCLVGIEGTGSYGAGLSRHVTAAGVRVVEVDRSDRQDRRRAGKSDPLDAVSAARAAQSGRARGAPKGRDGTVEAVRALMVAKRSARSERTQTINQARALVLTGPADLRTRFARHTVVALVAETAALRPRPGDVVGYATRVALRELGRRAEFLDSQLDRLDELIIPLVTVHAPGLLALYGIGPDTAALLLITAGDHPERLRSEAAWAHLCAAAPIPASSGKVTRHRLNPGGDREANHALWRIVITRMSSHPPTRRYVERRSTEGLTKKEIIRCLKRYVAREVYPRLRAAAD

SEQ ID NO: 212445 - protein, 340 aa, unidentified
MDTIGLDLHKRESQLCVLTEAGEIVERRIVTSRERFTAVLGSQAPARILVEASTESEWVARHLESLGHEVIVADPNFAPMYATRRRGVKTDRRDARTLAEACRLGAYRPVHRASAPQRHVRAQLAVRDALIRTRTRYVSVVKALVRRDGLRLPPGNPVHTDAKLAALPLSAPLAGELAPLRALFEPLNNEITAADERLAAVAAADPVVERLRTAPGIGPVTAVAFVATLDDVTRFASAHHVAAYLGLTPREYSSGEQQHRGRISKTGNARMRYLLVEAAWRVLRTADPAAAALRVWADGIAQRRGRSVAAVALARRLAGILYAMWRDGKDYCAPPAAAVA

SEQ ID NO: 212446 - protein, 408 aa, unidentified
MDVLHARCAGLDVHKDTVVGCVRSSAEGKVAQEVRTFSTTTAGLTALSEWLTSHGCTHVAMEATGVYWKPVWHVLEGRFELVLANAMHIRNVPGRKTDVNDATWIADLLAHGLIRGSFVPPAEIQRMRDLTRTRKQLVREVAQHTLRIQKTLEDANLKLTGTISDVLGQTGRAILDALVSGETDPERLADLAHHRIKAPRTKLIEVLRGHVTDHHRFMLKLHLGQVDALRTSIAEVDAQLGKALAPMRALTDCLTTMPGVGEIVAQVIVSEIGTDMSRFPTAGHLVSWAGLCPRMDESAGKRRNTRVRKGAPWLKTALVQAAWAAVSKKNSYPRAQFLRIKARRGAKKAILAVAASMLTAAYYILHDGVEYRDLGADHFDRHDKTRTVNRLARRIEQLGYRVDIRPAA

SEQ ID NO: 212447 - protein, 398 aa, unidentified
MTNQDHRVGGIDSHKDTIHVAVITAIGQPVTDREFPTTVAGYRRAVAWLIEHGPLSAVGVEGTSSYGIGITTELLAAGIRVVEVNRTRAAEKRKQGKTDPLDAYRAARSVLSGEASTEPKNPSIEPLRALTIARRSAVKSQQAAWRQIGSLLVTTRPALRDRFRDLPETKLIATLRDCRPDQIHDVDDADTLYALRTLARRYLALQDEITALEERMLRRATRANPALMAIKGVGPAVGAQLLITAGDNPDRLRTSASFAALCGTAPIPLSSGRTDKHRLSRGGDRQANAALHHIVKVRMSYDQRTRAYRDTRLANGWTTKEVFRALKRAVAREIFHALAGHTLAPDYSDLRPARHAKNLTLTAAAQHLGVWPARIGELELGRRPNDELATRYRAWLAA

SEQ ID NO: 212448 - protein, 348 aa, unidentified
MTLTTIGLDVAKLVFQVHGVDENSRAALKRKLHRHEVVTFFEELPRCTVFLEACGASHYWARLLTALGHEVKLIAPEAVKPFAKKGKKNDAVDAAALCVAGSRPEIQFVPIKSVAQQAVLALHTARSLLVKQQTMLANAIRGLASEFGLVVPQGLHRLEELMVQVTAEASVPAEGRQALIVLHAQLQAAAERIVMLEEQIVVHARQNASARRLATIPGIGPITASLIAATVGDNITAFTSARHFAAWLGLVPRQHSTGGKPRLGRITKAGNTEIRRLLVLGATSMVRRAETWNSAAGIWLRGVLARRPVRLTTVALANKMARIAWALLTRNDVYRAQGRSKVAAGAAA

SEQ ID NO: 212449 - protein, 428 aa, unidentified
MERVFGMDVHKNVLVTTIITEEGEETRWSGVEAGDLKNLMEWLKEKNCLKGVMESTGIYWVPIYVTLVDNGFQVTVANAHQVKAIPGRKTDELDSQWLARIFSAGLVKPSYIPEKKIMELRNLTRLRVALLEEQTAFKNRAHKILQICNIRLASKLSNIFGKDGQMLLNALMKRESIDEVIEKYGSKRLKAKKEEVKESILGVLNETDIIQLKICLENINRLEEQIRQLNAKIATMVNKKDVERISKVPGLAEVSASAVIAEIADPRRFQNDKKINSWSGLAPSTYQTGGKKPKSGHITKKGNKWLRRTLVQCAKVAIKARNSQIRQFYLRIRGRRGHNIAIVATARKLLDIIWHLLITGEEYIDKHYEENHDKIKEEDAQTSIRRGNTTTQTSRIHNHSTRLAWQKRFWKIHPKKRSDNDRFHIVPC

SEQ ID NO: 212450 - protein, 362 aa, unidentified
MNKHIFVGIDLGDKNSVARIGVDLEKSERFGFVNTNAGRARLILEVKRRSEHAGGAVVVMAYEASSCGFVLRDQAQAAGIDCKVLAPTRMEKSVEQKRNKNDDRDADDVLEKLRGHVLAGNRLPTVWVPDLETRDDREVLRTRLALSEHQTKVKTQIQMLLKRHGLEKPSDLGSTRSKQYRQWLEGLSQWESLGWGTRQSLASLLRQLSGVEAEMENLEKLIRQLGNQPRHQPIVEALMKEKGVGLLAALVYRTEIGQARRFHRGRHVGKFVGLTPTSHESGQQNDRKGHISRQGPPRLRKVLCQASWVHVRHDPHSREAYLRLVAKNPKKKKIALVAVMRRLAVRLWHRMREAESLQQVSS

SEQ ID NO: 212451 - protein, 322 aa, unidentified
MKSQELFIGVDVCKDRLDIANDSNSEVWSSANDDLGVSLLVEKFTALKPTLIVMEATGGLETLLYSALVTAGLPAVVVNPRQVRDFAKALGKLAKTDAIDAWVLARFGALMRPEVRPVKDEQTRELAALVTRRRQLLGIRTAEKTRLRQAAKWTRKDIKSLIKVLDKRLAKLEKEIGNNVKNTPGWKEKDEIITSVPGAGPNLSSYLLANLPELGKLNRKEIAMLVGVAPLNRDSGKFRGGRIIWGGRSQVRSALFMATLSASIHNPHIKGFYQRLIEKGKKPKVALTACMRKMLTILNTMVKNNTTWNISYPLTLDINHGC

SEQ ID NO: 212452 - protein, 332 aa, unidentified
MFLGIDIHKREAQVAVRNDDGDVIEQVRVNNTDLEEIGQQYAGGEALLEATTNYFYIYDMLSEHLDVVVGHPPKLKAIAQTDKKTDRIDAKELSRLLWLDSVPESYVPTDEIRECRALVRGRISLLEERTRFANKIHSLLLDNGIAQRVKPLSVKGREFLAELSLPAPWDGLLSSYLSVIDTLTEEIDQLDERIEKRAKRFRETQLLMTIPGISHYSALVIYAEIGEIDRFDRAKEVVRYVGLNPVIRESGDSRFEGSISKKGSGKVRWILVQAVHSAVHTVGDEYLSRFYHRIERRKNKQKAAVATARKLLVSIYHMLDRGEVYDPPGVTA

SEQ ID NO: 212453 - protein, 447 aa, unidentified
MHSDSNEVVMVGIDAAVVANHRVVVRRPEAGGPGVVVDDFEASPTLAGLDRLSKRLADYPGAVAVAEPTSMTWLALSVATEKAGVSLMLVGNRHSARLRAALSGKDKSDVIDAQVLSRAPEVFTLEPARIPDAAELALRRAVQRRHKTLIEANRWYRRLLSLSRWAFPDVWIACGGSRATATAVLTRWPHLQQLARARVSSIADVVAANTKGVADTNRRAERIRHTAGEWASFWEGHLDLDALGWETAELLSDVDSAQARLARADAATVARWEAMWGDDTLLLSVPGMGPRTSPVVRGFWGAATQFPTPKEAQAYVGLNPSNWSSGQTSQPSRAITKEGPEELRLAFYQAANAARTVDPQLAWFYRKLMCERGHCHTQATCAVARKLVGRTWATLTSGSPYELRDLDGTPITRRHAKELARSLAVPNEVRRRSRARSAATRRGRLTR

SEQ ID NO: 212454 - protein, 364 aa, unidentified
MRFYTQQHRFYVGIDLHARTLHLCVLDSTGSVVADRKLPCHFDSVLQAIQPYRQDLVVGVECMFGWYWLADRCAEHSIPFVLGHALYMKLIHGAKAKNDRLDAHQIARLLKGGNFPMAYVYPRGMRETRDLLRRRMHLVHKRAELITHLEILNAQNNLPPFGKKLGYAANRAELHIPERFADPSVRMSAALDLALCDKLDELIGTVELYLTRSAKIDDVQTYHRLRTVPGVGPILALVLLYEMHNVARFEQVGQFLSYARLVRCEHESAGKKLGSGGKKIGNAHLRWAFAEAACLFLRASERARQWKQKQEKKHGPAKVLGILAARLARSVYHMLRKEEAFDEERFWHGQAAAVQPAGSRTKGS

SEQ ID NO: 212455 - protein, 443 aa, unidentified
MINANTAGIDLGGEYHWVSVPEDRDPECVRRFGCFTADLHAMATWLQECGIQSVAMEATGVYWIAVFQILETQGFEVKLVNARHVKTVPGRKSDVLDCQWLRQLHRYGLLAGSFRPDDQICVLRSYIRQRDTLVKSASTHIQRMQKALTQMNVQLHRVISDISGTTGLAIIRAIVAGERDLLKLAALKDCRIHASTDEIAAALTGDYRAELVFVLHQELQLYEVFQAQITACDGQVEHCLNQFADQVDLAAAPLPAAKRRGKKQPGNAPTFDLRTHLYRISGVDFTQIDGVGVLTVLTLLSELGLDSSRFPSAKHFASWLGLCPGSRITGGKRKSSKTRQVMNRVANALRMAAQTLVRSHSALGAFYRRMQARMGAPKAITAAAHKLARIFYHLWTSGGTYVDPGMNAHEHQHQERVVKNLKKKAQALGFDLVAKPTAPECVS

SEQ ID NO: 212456 - protein, 372 aa, unidentified
MNYNTVYVGMDVHKESFTLCSMTIEDEKASHYQKTEADYKKVLKYLEFLRTIYGGNAKFICGYEAGCLGFTLYHQLTSQHVECIILAPTTMLEQRSKKRIKTDKRDAEIIAKCLAQHNYSPVHIPTSTDEQIKEFLRMRDDHKLALKKIKQQILAFCLRHNCRYDGNSHWTAAHLCWLKSLQPEALYKETLDEYLLTYTTLNDKIERFDKRIEELASKDEYKESVQKLRCFIGVRTHTALSVLVEVGDFNRFASAKNFASYLGLVPGENTSSDDRNLLGITKAGNRHIRLLLTEAAQSYARSQIGYKSKDLKARQSVNSAQVIGYADKANERLRRRYYKMVLGHSKKHNVAKVAVARELACFMWGMMTEHIS

SEQ ID NO: 212457 - protein, 346 aa, unidentified
MKHLNTIGVDLAKNVIQVSVVSARGKELINRSLTRTKFAEFVGKQETSLVAFEACATSHYWARVAKRHGHEVKIIPARAVFPFRQGHKTDPNDALAVAEAAVRPKVMEAPLKTVEQQGLQAVQRSRELLVKERTALSNHVRGLLMEFGIVIPQGFAALHRQVPEVLEDGENELPDMYRPTLQRLYVRLCDLREDLGFLDKQIDELVKQHSSCQRLMAMEGVGPISSILLFATLGTGEAFRNGRQFSAYLGLTPKQYSSGGKTNIVGISKKVANKRLRSVLIQGARSYVHKLKEPRSPKDQWLWSLIQRAGHGKAAVALANKNVRTAWALLTEGTEYDRQRGRIQTA

SEQ ID NO: 212458 - protein, 352 aa, unidentified
MIIGCDFHPSFQQIAYVEQETGEYEERRLSHRGEAEAFYRSLAGRSVRIGMEATGNDRWFHKLMSELGHELLVGDASAIHASAPREQRTDKRDARHILRLLIENRFPAIWQPSVGNEEQRQLLLHRCRLVRMRTRIKNQLDSIAKSEGLTGSRVWKAKRRQQIEALPLTGWYAERRKDLLGLLDEMDKLIEPLDKAVQAAAEQNSEAQLLMTHPGVGPVVSLAYVLVLGDWRRFPRGKHVGSYLGLIPSEASSGKHQQRMGHITKQGNTLLRWLLVEAATKAQSKDPSWHRQYVRLSMNKHHGVAKVAIAHKLAVRLYWMLRSGQNYTKIVERGSHAGQSELAGGCGLRPIN

SEQ ID NO: 212459 - protein, 348 aa, unidentified
MQQYVGLDVSLEETSICVMDRDGRILQRGVTASEPELIAAYVHRHAPEVTRIVLETGQLSIWLTRALVAQGLPAVCIDARLAHKALSGRRNKSDRHDAEGLAHLARTGWFTKVEIKSKDSDERRTLLGARDRMIRIRKDLEGQIRGVLKIFGIKLGKITPGKDRGGFRRRVQEVIVDEPAIQPALKALLAVHVTTCKEESRLDDLVRRKAKNDKVVRLLATAPGVGAIVASAFVAIIDDPSRFRRSRQAGVYVGLTPRSFQSGEVSYSGKISKWGDAMLRAYLYEAAVTLLTRTKSFSPLKSWGLRLAQQKGFTKAAVAVARKLATILLAMWRDNTKFQWTKEASMAV

SEQ ID NO: 212460 - protein, 333 aa, unidentified
MKQEKVAGIDVACKTLALAMRTGEQTGKVRELANTASGHQAVIKALKSAGVQRVCLEATGAYHLDLALALDAAGIALMVINPTAAKRFAQALMTRSKSDAVDAGVLAQFAQTMPFQPWQSPALPALELRACARRLAALVKARTQAKNQLHAASQTTSTPAIVLADLRLTIAQCADQIEQLRAGACALIDADAALHEVFTLLNSVTGIAAASAIQIMGEILVMPADMQAKQWVAQAGLDPRHATSGTSVNKKPHLSKAGNRYLRLALYMPALSAARHEKHVSGYYQHLIVDRGLKPIQAVCAVMRKLLHAIHGMLKARQPFDGSRFYALVETPA

SEQ ID NO: 212461 - protein, 412 aa, unidentified
MDIVVERCAGLDVHKDTVVACVRTPGKGGKREQTTRTFKTMTIDLLALRDWLIAMGVTRVGMESTGVYWKPVFYVLEDAMECWLLNARHLRNVPGRKTDVQDAEWICQLVEHGLVRPSFVPPKPIRELRDLTRYRKAQIDERGREAQRLDKVLQDAGIKLSSVATDILGKSGRDMLAALVSGTHDPEVLAELARGKLRNKIPLLRQALEGRFVSRHRLIVEKILAKLDFLDETIEDLSAEIDRLIAPFAAEVDLLDTITGVDRRAAECIIAEIGVEMARFGSSGRLASWAGRCPGHHESAGKHKSGRSRPGSKWLAATLAQCAEAAGRSKDTYLGAQFQRLRGRRGHAKARKAVEHSILVAAFHVLDRHVPYQDLGADWFVRRRPEAHARRLAHQIEALGFRVTIEPTDQAA

SEQ ID NO: 212462 - protein, 340 aa, unidentified
MKKFLFIGIDFSKSKFDVTVLKSIDQQDFAQAIFLNEKKGFNDFLKWVTKQSNVSKQDWLFCGEHTGLYSRGLTDFLIKKNMFIWLENPLQIKCSWGIKRAKTDKIDSLEIARYALRFEDKAVAYKPANKDIESLRLLFAYRGRLVKNKVSLEVSAKETRRVITRDTTSRFIFENSQHDIDRIKKEIEVIETKMHDIIISGQLKENYLLVVTIKGVAMITAIALIIHTNNFEAFKTARQLACYCGVVPFEKSSGTSINKGNHISQLANKEIKTLLTQCARCAVQYDKELAAYYIRKIAQGKKDRIVINNVRNKLIHRIFAVVNNKIPYRENYLNPFLDCA

SEQ ID NO: 212463 - protein, 347 aa, unidentified
MQISMIGLDLAKNVFQVHGVDADGEVVLRRKLRRGEVLIFFSRLSPCLVGMEACASSHHWARELAALGHTVRLIPPSYVKPYVRRGKNNAADAAAICEAISRPTMRFVPVKSTDQQAVLVLHRGRDLLVKQRTMLINALRCHLAEFGIVAAQKRTGLAQLVALVKDDAEEGVPVLARRALEPLISQLQQAQVAIARLDKEIEAWHRSDPASRRLGTIPGIGPIIASAIAATMLDPLHFRSGREFAAWLGLVPKQNSSGGKERLGRISRQGNRYVRRLLVIGATAVLRYGRTKTPGNRWLQALLERKPARLVTVALANKMARTTWAVLAHKEDYRNRDDRVLDRTMAA

SEQ ID NO: 212464 - protein, 345 aa, unidentified
MDQYIGLDVSLKDTAISIRQDGKRIWRGKRPSDPKLLAQLIRKHAPHAKRVVFETGPLSTWFYHALTTEGVPAICIEARHAMAQKVLNETLNKTDANDADGLAQLAEAGFYKVVRVKAFHSMLTRTLVGARNQLLSVSTQLSNQIRGLMKTFGLLVPKGTGRAFDGNVRALLAGNDDLARIILPLLDAWRDIRKRAADLDRQLLAAARQSQATKLLMTIPGIGAVTAVSYVAAIEDPDNFRTSRSVGAWLGLTTRRYQSGEVDYDGHISRRGDNHLRGLLYEAATVILTRTSARSDSGLKNWGLKLRERLGFKRAAVAIARKLAVIMHSMLKTGEVFNALAGTTA

SEQ ID NO: 212465 - protein, 318 aa, unidentified
MDKDFVGVDVSKATLDVATYATNKSWRFPNSEAGISQLTQTLSDLTPALVVLEATGGYETPLAISLHKAAITCAVVNPREVRDFAKATKKLAKTDTIDARVLAHFAAVIRPKPRPLSDEQTRELEAIMTRRRQVIDMLTAEKNHLHVARKPVREAIEFHIKYLTKELVQIKSNLQGRIEENPVQRGKYSLLRSVPGVGPNLSATLLVDLPELGNLNRRQIAALVGVAPINHDSGARRGKRSIWGGRPQVRAMLYMSALVAARHNPVISQYYTRLCATGKAKKVALVACMRKLLTILNSILKHHVPWRIYQPLLISSNP

SEQ ID NO: 212466 - protein, 423 aa, unidentified
MRFIGLDVHRDFCEVAIAEAGMVRLAGRVRTEPAALELFAQSLGGDDQVALEATGNALEIARIIEPHVGRVVLANPKAVKGITRAGAKTDKIDARTLATLLAGGFLPTVWLPDEQTRVLRRRISVRAQLVRQRTRAKNQVHATLVRNLKGKPPVSDLFGARGRRWLAGQELPADERETVAACLRQIEFLDGEIALVERALAERVLASAEMRRLLTLPGVNFVTAAALLAAIGDIRRFPSARQLVSYLGLDPRVSQSGIEPARHGRISKQGPGETRHVLVEAAWHASRTPGPLRAFHQRIAARRGGNIATVAVARKLAVIVWHMLSRGEDYAFARPSLTREKIRKLELATGAERQKGKRIAVWGTKEQHQLDKQLSAQAEIAYRRLVQDWQPTIKGAGAAPGRASCGPSSGQAARQETAPPPAL

SEQ ID NO: 212467 - protein, 400 aa, unidentified
MKWPASRCQLRRQAQRGLLIVSLSPDTGGGPWKRLHSLSGWTYTKKTIAVAQVDGAAGADVRFYGTIENTPEAIRTLSRKLSKGGQHLHFCYEAGPCGYGVQRRLSGLGHTCDVVAPSLIPRKVGDRVKTDRRDAMMLAQTLRAGQLTSVWIPDEAHEAMRDLVRLRSQAMVDLRKARQHLLSFLLRHGITSPYGHWTKSHRRWLGELTFAHPAQHLAHEEMLHRIERAEALCARLKAAIIELVPKRLLASVVNAIQALRGVSLVVAAVLVAEVGSFDRFESPRQLMAFLGLNPSEHSSGATIRRGGVTKTGDSLARTCLVEAAWTYRFPARVTQIIRDRMKGLPEPIRNIAWTAQVRLSARYKRLIASGKAAPKVIVAIARELVGFIWAIARMVEPKFA

SEQ ID NO: 212468 - protein, 439 aa, unidentified
MSQELPTLDPLAAFVDVGSEHMHVSVAGNKPEVFGTVTSQLHALRDWLIGQGVHSVAMEATGVYWLPLYGVLESAGLDVRMVNGRQTRNLPGRKTDMADSQWGATLHMHGLLHAGFVPPADIRRLQDYLRLRADHVAAAAACVQLMQKAFDRMNIKLHDVISSLAGVSGMAIVRAIVAGERSPEALAALCARQIRRRKERAVIEALQGTWADEHIFALDQALQSWDHYQKLIADCDTRIASVLPPHDETQPPLPVSTKQTGVNAPEISRLREILAQMCGGRDLTRLPALSHYGLLQLIGEVGTDLSVWPTEKHFTSWAGLAPGSNASGKRKKRVSRGRNRTGQLFCMMAQSLVRSKDIALGGFYRRLAARRGGLVATKALARKLAGWFWRVMVKGDDYVEKGIARYEEQVRKTKERALKRLANELGRQLVPLPNSFPIP

SEQ ID NO: 212469 - protein, 341 aa, unidentified
MDYCGIDLHAEYSQVCILDDEGEVMEASRVRTSQKALERFFGREPMRVAMEAGGTSPWVSRLLSSLGHEVVVCSPRRVRLIAESTLKNDRVDAEVLARLVRLDPEFLKPIQHRSEQAQLLRGNLKVRSAMVEARTKWINTIRGLLRSFGYKVSGKAPQTFGDRVDRIGLPDDLRAVIEPLLEQLDLLSGEIERRNEHLEEMVKDLPEVELLREIPGVGPVVATYFVLTIDDPNRFKNSRDVASFFGLRPSMRESASVTRFGRITKEGDPEMRRLLVQAAHACLLTKADSELKRWALAVAERKGKGKAVVALARKLAVLMHRLWVTGEVYQAFPNNGAARAA

SEQ ID NO: 212470 - protein, 416 aa, unidentified
MRRTPSAPSEEEATIKYVCGIDIGSQSCVGCICRPDKSVVIKAITFANAREGWQIWEEKLSQLDAPPSQILIGMEATSRYGENLYHELEQHGYVLRLLHPGQTHHFHQQQGLRAKTDRLDAMTIARTLLSGEARMGYVPDEQVATYRELVRLHTQLADTAASYQNEIQALIVVLFPEFTQVFADPCLPTALSVLKAFPSAQALVEAGVDPLFQVLRAQPVAHYGRPTAKKLVALANQSVSSGRARAGRSTSLRILCDQLEHTQANLAHLNAEIEHLLSTDPGVKGLQQVPEFGPKTLAVLRAELGDVQRFSRTDEVIAYGGMDIEIKESGLWKGQAKLSKRGSGLLRRVLYMTALRSIHREDSAFGVYYRRLVERGLKKGSALMAVMRKMLAVAAHLLRHEGEEYDPSKVCGSRAG

SEQ ID NO: 212471 - protein, 475 aa, unidentified
MNLKGTKKKNQVSNVNIFEQQELLKKIEVVRENLTASTWHELETKGKFDKNAKLSFICDDMLILGCDVGSETHYLRAIDTRGRELSKSAFSFSNNADGFSKAKEWAVKIAAEYDKKQIVLGLEPTGHYWFCLATWMISNGISVVQVNPYAVKQTKELEDNSQLKDDTKDPKLIANLVKDGNFGMPYLPEQLYADLRRLSMFRDQLNEDRIRSINRLHRELKIYFPEYKEALGKTEGTFSLELLKQAPFPDELTALKEDGIRQIWHNAKLRGRGYSRAGEILEYAKASVGIREGKETGKLVVQWFVQKILELDAELALIETQINQKCLEIPHTDKVLEICGIGENTLSGIMAEMGDISRFDDVKEIQKLSGLGLVASSSGKHKGETKISHRGRKRLRYWLFQAAKSAVAHAEEFQELHVYYTTREQNPLKKMQSLIAIACKLLRIIFTILKKGIKYDPRKMLKDIRRESRQEGLAA

SEQ ID NO: 212472 - protein, 422 aa, unidentified
MENTLARKLKQVPEGYLVIGVDPHKKRHAVVAITQDFTIRDRFKLDNTREGLEFLLRRVRVGMLKSVCRGVMFAIETGGHYWRNVAYFLDEKGIPFRFINQYTLKRRREGKDLNRRKNDYRDAEVAAQLLCTGEFVESVIPQGIYAELRTAHNGYRRLVKERTRITNLIKGLLDGLFPEFVQVFKDPCGLTALSVLSTCTIPRVIAGMAEEEFIATVEAYHQGRRLMRKKLRTLHSVAKTSIGIAAGAQPLSMEISFLVEKLNLIERHIGIIERTLIRLVDATDEGKYLLSIMGLNYIAVAGLLAELGCFKAYRSAKQMIKMTGSNPTESESAGKKGSRTPMSKQGRPVLRYCAWTAVIPMLRFNPDFRAWAKRRRERPVHANPLGGKEIVGAALNRLLRLSFALVKNRTYYRSPQLLQVAC

SEQ ID NO: 212473 - protein, 330 aa, unidentified
MNVAGIDVAHKTLGVVLSAEEKAGKAQEFANTASGHQALVKALKAARVERVCLEATGSYHLDLALALEASGLALMVANPKAAKRFAEALLTRTKTDAVDAAVLAQFAQRMPFEPWQRPDNQALALRACARRLEALNRAKTEAKNQLHALTQTQTTPAVVLADVRLTITQCEAQIKDLRTWAEGQIQADAHLKEVFDLLTTVKGIATASAIQLMGEILVLPTDMRAKQWVALAGLDPRQSISGTSVHKKPRLSKAGNRYLRLALFMPALSAARHDRHVNGYYRHLIEDRGLKKIQAVCAVMRKLLHAIHGMLKSRQPFDGSRFYTLAETPT

SEQ ID NO: 212474 - protein, 350 aa, unidentified
MIIIGCDYHPGFQQIAFVDTDTGEFEERRVEHREEAEKFYRDLGAQGAKVRVGMEASGHARWFERLLSELQFELWIGDAAEIRTKRVRKQKTDRQDAQLILRLLLEDRFPRIWVPSWENRDLRQLLWHRHRMVQARTRIMNQLQAVALNEGLRCKKRLWRDAGREQLESFALAPWASRRRRDLLELLDRLTPTIAELTQAIEQEVEKCPEAQRLQTHPGVGALTALAFVLIIGRADRFQCGKQIASYLGLVPLEESSGQRRRLGHITKQGNSLLRFLLVEAAQVTVRSDQEWRSKYFHLAMRRGRKIAKVAMARRLAVLMYWMWRKGWDYEQLKKFGSHAGEPGHRDGVR

SEQ ID NO: 212475 - protein, 346 aa, unidentified
MMIIGCDYHPSWQQVAWVETETGECGERKLVHATGEAKVFYQQLGSPALIGMEATGNSQWFIELVEDLGHAIWIGDAAQIRASYVRKQKTDKRDAAHILRLVVENRFPRLWTPDREQRDLRQLVLHRHKLVEMRSRVKNELQHLAMNKGMQKKATLWSQAGQQRLRELPLKPWASCRREDLLGLLGMLNQQVGTLDQAVQKAAEEHAQARLLMTQPGVGPNTALAYVLTLGDVTRFQRGKQVASYLGLIPREESSGGRQKLGAISKQGNRLLRSLLVEAAQIAVRFDPGFRKQYLHRCHQKPKGVAKVAAARRLAVRLYWMLRTQVAYPEIVRIESSPRVPRVGAS

SEQ ID NO: 212476 - protein, 405 aa, unidentified
MAVVMIGIDPHKASHTAVALDRDETKLGQIRVRASTAQVTHLRSWAMLWTERVWAIEGATGLGRLLAQQLLAVGEHVLDVQPKLAARVRLLNTGTLNKNDPNDARSVAVAAMRSPDIRAAVVAPEDHASVMKVWVRRHRDLSRTRNRIVCRLHAVLCDLVAGGFPKQISAPQAALMLAAIVPVDAVGEARLELAHELLEDLRRVDEQRRAAKRRLSSIVAASGTTVSQVYGAGPVVTATVIGDVGAIARFPTRDHFAAYNGTAPIEASSGNRTIHRLSRRGNRHLNHATHMAAVSQISHHDTTGRDYYRRKIDEDMPPKSALRSLKRKISDALYARMIADALRTARRVDESGPGGQTGNDSDSSATGSHPEPALRKSHSRTATNSKSSRAYKPSSAPTKARQRTT

SEQ ID NO: 212477 - protein, 364 aa, unidentified
MSILAHAGIDAHEKSLTVCVYVGDSESPDVRFDVPNDEMEVKRAFGRLARKYDPRCCYEASSGGYVLHRWLKSIGVQCEVIAPSLIPKRPGDKVKTDARDARNPATLYRAEQLTPVRIPTPAEEAVRGAVRLREMFVREATQTKNQVGRLLSAHGRFWHEKSRWTTKHWAWVRKQDFDDADGFVFSELLATLDFKLARVKAADNYLAECANRPGYKKAVGILMCLRGIGLVTAMTLTSEIGGFRRFGSAPAFMCFNGLVPTERSSGDSRRQGGITKAGNAHVRRVIVEAAWKYASKPATGYQLRKRQEGQPAIAVAIAWEAQKRLYKKFHSVAARKEKFVAVVAVARELAGFVWALMTNDVASA

SEQ ID NO: 212478 - protein, 317 aa, unidentified
MNYIGIDISKESFDVALQETESYKHYKFSNDSNGFKQFGKLLNKQEHWCVMEASGPYYQKLALYLQVNEITLSVVNPLVIRRFCQMRLVKAKTDKKDAVMIAEYGKTEKPQAWKADAPYLLELKQMQAYLEQLNKSRTGFIRQMDAFKQSPKLNKEVKKGIAKMIKTTEMQMAQVEQKMEEIIRKYHNQMFEQVKSIPGVGKKTSLLLVVISGGFTKFENAKQLSSYVGLSPRIFESGTSVKGKVRICKMGMSRVRAMLYVCSWSAIKCNKACKELYQRLVEKGKAKQVALIAVANKILKQAFAVATKNEFYKAEII

SEQ ID NO: 212479 - protein, 316 aa, unidentified
MSMLPPAVYLGIDIAKDTLEVAGPGLRLPVPNTAEGHAQLLAAARSLHTPVHFICEATGGYERRLVASLLAQDCAVSLLNPARVRQFAKATGRLAKTDRIDATVLAEYGRALQPPAEPKPVPLLEEMTDVVRRRAQLAELLGLQRTQRQQLHDAKLIGDIDRLIGFLEEQIAALEQRLDELIDKDGGLGIRLQRLCQVEGVGKTTAMNLLAELPELGRLNRTRIAALAGLAPFNRDSGGATGQRHIRGGRVQVRRALYMAALTATRCNPVLAPFYRQLRARGKGHRVAITAVMRKLLVHLNQIVRTPEVILASQHS

SEQ ID NO: 212480 - protein, 331 aa, unidentified
MDEMRRFVGIDVAKAALDVFIGSAGTAFTVANDEVGIRDLVRQLVPADFVILEATGGLETAVASALAAAGIAVAIVNPRQVRDFARATGRLAKTDRLDAEVLARFGEAVRPEARPLADEHAQALEALVTRRRQLVEMLTAEKNRRTRAPKVLHRSIDEHIRWLEKRLSVFDDELGELIRSTPLWRERDELLRSVPGVGKVLSSTLLAQLPELGTLNRKQIAALAGLAPFNRDSGSMRGSRCIWGGRAQVRRVLYMATVAGVRSNPTIRTFYLRLRANGKHAKPALIACMRKFLVILNAMLHDKTHWQTPALTFPAPSLSPLLGAVSEHGCC

SEQ ID NO: 212481 - protein, 366 aa, unidentified
MKKDSIRIKNGKRDWEGKKLTIGMDLGDRTSRYCVLGEGGEVLLEASVATTQKGLSEAFGALPPCRIAIETGQHSPWVSRHLSGLGHEVIVAHAQSVRLIGESTRKDDRLDAKTLARLVRIDPALLSPVRHRSAEAQAHLTRIRARAVLVGARTALVNAIRGLTKAYGERLRKCHPEQIRKELAAELSPELRTALEPLFQEVQSLTERIQHYDHEIEKIAKQHYPEVAQLQQVNGVGTLIALTYVLTVDDPHRFGKSRDLGCYIGLRPGRRNSGNSQPQLHISKEGNRYLRTMMVQGAHYILGPFGKDSDLRRWGLKLAQRGGRNAKKRAVVAVARKLAVLLHKLWVSGEVYEPLRNHREEKRAAA

SEQ ID NO: 212482 - protein, 337 aa, unidentified
MTLYCGIDLHANNSVVAVLDEHDQTIYEKRLPNELETIIEVLSIYQTELEACVVESTYNWYWLVDGLMAADFPVRLAHTSALPEYSGLKYINDFSDARQLAHLLRLGLLPTGYIYPKEERALRDLLRRRLLLVRQRSLHHVSLQSLIARHSGQRLNTRQIKTLVPEQLADYLQGHALLSGEITHQARCWLDRAVMRIEQELQHQIKPREDYQLLQSVPGIGPILGTTIALETGTIERFASAGNYASYARCVKSEKISNGKRKGQGNKKNGNKYLAWAFMEAGHYGAIWNPRIKRYYQRKKDKGHILVAKKAVANKLARACYHMLKRREMFDVTRAFS

SEQ ID NO: 212483 - protein, 323 aa, unidentified
MTIMTYIGIDVSKDSFIAAYPTKSGYTTKSFPNTTSGVRRFIQSLPAESHCVMEATGNYSMLLLYLLQEANILVSMENPQKIKHFARAMLSTTKTDEIDAKLIAMYGEKMNPVPYKIPSESIILLRQKRTVLRQLKKQLTATLNLQQALAALPKQDPTSKATIEKTISFLRKQISKMEEEITNLSNKEFNSQMTLLTSIKGISNTIASALITATGGFTYFSSAKQISRFLGLCPTYQQSGTSINVKGHINRNGDTYLRSQLYIAACSSIRCNAACRETYERLRAKGKSGKGAIIAVANKLIRQAFAVITNNQPYIDGYISSFA

SEQ ID NO: 212484 - protein, 338 aa, unidentified
MAIVYVGIDLAKNVFAVHGVDEHGRPALVRPSVPRAKLHELIASLPPCTVAMEACSGAHHWARLFTVHGHTVRLIAPKFVAPYRMSGKRGKSDAADAAAICEAVQRPRMLFVPVKSLEQQSQLMVHRVRQGWIEARTACINRIRGLLSEFGHVLPLKAQSVRRQAAALLEDLPGWANTAIGDLLSELHRLDERIQQYDEHVRTIARCDARAKALMRLQGVGETTASTIVAMVGNGHDFACGRQFAAWLGLTPGQYSTGGKTRLGRITKAGDGYLRSLLILGARAVLAAAPKRTDGLSRWALALQERRGYWKAVVAIAAKNARMAWAVLDRGERFKLPA

SEQ ID NO: 212485 - protein, 333 aa, unidentified
MNYAGIDVSHKELVIVVSVKGKAHKAKTFENTASGHKAIIQLLSKLKGESKVCIEATGVYHFDLAVALSRAEGIEVMVINPKASHNFAKVLMKRSKTDAVDAEILAIYCERMPFEAWQRPADEHIALRAIARRIAALTKLKTQTKNQLHALKATEETPVLVIEYTEELIEVVDKQIQVHRESARQLIQQHDELAEAFALITGIKGIAVASAVQMLGELMILPKDMSAKQWVAYAGLDPRQFESGSSVTKKPRISKAGNKFVRRALYMPALVATCHEPHIKGYYTHMIQDNGLKKIQAVCAVMRKLLHAIHGMLKAKKEFDGTRFYTFPVEANS

SEQ ID NO: 212486 - protein, 355 aa, unidentified
MSQEKYIGMDVHQATISVAVMDSSGKLIMECILETKAATILEFIDGLRGTLSVTFEEGTSAAWLHDLLKPHVSHLVVCDPRRNALLKDGSKSDRIDARKLAELLHANKLHAVYHGEHGLRTLKELGRSYLTITKDLTRVMSRIKALYRSWAIPCSGTTVYAVRHRAEWLAKIPEPGVRLRAERLYQQLDLLQPVRQGARRDLMVESHQHHAVKLLRQIPSIGPIRAALLVALLQTPHRFRTKRQLWAYSGFAVETHDSGEYRFVRGKLRRNRERITVRGLNHNHNHDLKNLFKGAALSASTRPGPLCDFYLALVEKGMRPTMARLTLARKMAAITLTIWKKGVEFDAKQLNRQAA

SEQ ID NO: 212487 - protein, 416 aa, unidentified
MTDPEKSSTFERYLAIDAHKHYVVVGGLNAQLEIVLPAHRMDLERYPQWTKENLTSRDCLVIEASTNTWDLYDITAAVAGKVVVAHPLAVKLIANARVKTDKQDVFRLARLLAGGLIPEVWVPPVPVRELRSLIAHRRRLIQMRTMTRNRLHSLAHRHNLILPEGGAFTNKNQGWWKSLSLSLVEKLHLQQNLALLEFLEPEVKAVDAELARLSTCDPWKEAFPYLMQLPGFGLIVTMTVLSAIGDIQRFPTSQQLVGYSGLGASLHQSGETNYSGHITKQGRRDLRFALVEAAWTAITSSPYWREQYQKLSHRMATNKAIVAIARRLLVAVWHVLTERTIDRRADPDMLASKLMIWSWKLNDVQRGGLTSRQFVRYGLMRFKIGQEITRIRRLNNRPIASVEEVLERLPDLNLNI

SEQ ID NO: 212488 - protein, 297 aa, unidentified
MRTSQKAAGIIATIGIDIGKNTFHLLGLDKRGAIVLQQKVSRGQLERRLANIPRCLIGMEACSGAHHIGRQLAAVGHDVRLIPAQYVKPFLKGHKNDYRDAEAIAEAVQRPTMHFVAIKTPEQLDLLALHRVRSRLVGQRTGVINQIRGFLIERGITVRQGPVPLRKALAEILSSDTGVLSPRMVGLVTDLVQDWRRLDERIAAVSAEIEALAEQDDGCQRLMTVPGVGPIISSAVVAAIGNGAGFKQGRDFGAWLGLVPKQESTGDRTILGKISKRGNKYLRTLFVQAAHGDRTCQ

SEQ ID NO: 212489 - protein, 433 aa, unidentified
MAAQEKARNETMAEPEFAALIGVDWADEKLDICLMPCGEKGRREKGVIPHRPEALAEWVAGLRQRFGGRQVALALEQSKGPLIWALMHYEFVVLYPIHPKTLARFREAFAPSQAKDDPTDAEFALELLAKHRDRLRAWKPDDVHTRALALLSEARRHAVDLRTELSNQLTACLKGYFPQALDWAGETIYSPMACDFLCQWPTLQKLQRTPAQKIRQFYYGHGCRQGDVIETRLQAIPKAVALTQDKAILECSVLTVKMLARQLRALADAIRDYERRLAELFKNHPDSGLFANLPGAADALSPRLLAAFGSDRDRYESAEDLQAYSGIAPVTERSGKSRWVHWRWACPKFLRQTFQEFAQHSRKSCRWAQAYYEQMIAKGKGHHAAIRALAFKWIRILFRCWKDRQPYEESRYLAALQKRGSPLHALLANGVET

SEQ ID NO: 212490 - protein, 345 aa, unidentified
MNKISVIGLDLAKNVFQVHGIDTDGEVVVRKQLKRSQLRQFFARLEPCLIGMEACGGAHYWSRELTGLGHTVRMMAPVFVKPYLKTNKNDRNDAEAICEAVQRPNMRFVQPKTPEQQAVLHLHHGRRLLVRQRIALSNHMRGVLSEYGIVMPQGVKVISRRLPELLEDADNGLPMLARHLLAELKAEHDQLIERIECLEGLIKAWHATNSVSQRLASIPGIGILTATALAATVGEGQDFRTGRQLAAYLGLVPRQASSGGKARLLGISKRGDGYLRSLLIHGARAVISHIQRRLRSGQPGGNPWVEQLLLHRHPNKVAVALANKMARIAWVLLARNETWNPVRPV

SEQ ID NO: 212491 - protein, 355 aa, unidentified
MDSKKYIGMDVHKESISIAVMNGAGKIVMECVIETKASMILQFIDGLRGDLQVTFEEGTSAAWLYDLLKPHVTKLLVCDPRKNASMREGNQSDKIDARRLAELLRLNHLSPVYHGEHGLRSLKELVRSYLTITKDLVRVMTRVKAIYRSWAIPCTGKQVYAPRHRVERLGKIGEPGVRRRAEFYYQQLDALRSVRQEVRRELLAEAKKHKAWKLLCQIPSIGPIRAAVLLGILQTPHRFRTKRQLWTYSGFGIETQSSADHRSVDGQLERVKKQSSIRGLNRNCNHDLKNLFKGAAIVASSKPGPFQEFYTALLTKGLRPEMARLTLARKIATIVLIVWKRGACFDAQHLKPQTA

SEQ ID NO: 212492 - protein, 322 aa, unidentified
MNKYKETFGVDISKDVFDVHGSNKGHDQYKNDEIGFKKFLKELPKGSLVVMEATGYYHYRLAQFLYKNGVLVSVVNPLSVKRFIQMKLAKVKTDKSDAKAICEYALFNEVPIYNALTDIQSECLQLFRLLDTYLKQRTATKNKIHGEAVLGIPSKFVYRSLIRNKKQLNKEVAAIESKILSLVKEDQQEQLTLLTSIPGIGQKTALFLIVVTDGFNKFETAAQLCSYVGITPTIRESGSSVRGRARISRVGNRKLRNLLFLCSFNACKHNKACKEVYERIVNKGKSKKLALIAVANKLLKQSFAIAKSGRPYDETYVSVLPR

SEQ ID NO: 212493 - protein, 466 aa, unidentified
MTPHKDYFLDPRPPATPTLPQSPVLADALQVCHPHAAGIDIGEAEHWVAVPPGCDPQPVRRFGTFTVDLDALADWLIDCGVTTVAMESTGVYWIPLFELLEARGVQVLLIDPRQAKRAPGRPKTDRLDCKWLQRLHAYGLLAGAFRPEDQVCVLRSYLRHRQMLLTSAAHHIQHMHKALQQMNLKLTQVVSDLTGVTGMAILKAIIAGERDPVTLAKLRNPHCHHDEDDIAKALQGTWRAEHLFALQQAVALYEFYHQQLALCDQQIKSHLETFADKSAGKPLPPKARRHKKTNEPRFDARTPLYRLAGVDLTTIEGIEENTALIILSEIGTDMYRWPSVKHFCSWLGLCPQHQISGGKILSRRVRPGAHRVTVALRLAARSLHHSQSALGAFFRRMKARLGTPKAITATAHKLARLVYSLLQHGSAYVHQGLDAYEAQYRERKVTTMAKQAKALGYTLVPLPAQG

SEQ ID NO: 212494 - protein, 342 aa, unidentified
MSIVILGIDLGKNSCSVAGLDASGRVVLRRRLRRQTIAGFARQWRGCVVAMEACCGAHHLGRQLVAQGHEVRLMSPEYVRPYVKAHKNDDRDAEAIAEAATRPTMRFVEIKSEAQLDLQSLHRARERLVSERTALINHLRALLLERGIVVPRGRRKLERALPGILADESSGLSARLRRLASDLREEWRALDERIAAFDAEFVSQARTDEAARRLATVPGIGSLTATALVAAVGNAKAFARGRDMAAWLGLVPRQMTTGGKPKLLGISKRGNRYLRKNLIHGARAVLPYLATRDTPLGKWVQGLLARAHKNTVVVALANKLARIAWAVLAHGRSFEAAHVTAV

SEQ ID NO: 212495 - protein, 300 aa, unidentified
MKLKRIGVDLAKQVFQVHGVDSHEQVKCRKQLKRHQMLDFFRQLEPCVVAMEACGSAHYWARELGKLGHEVRLIAPQFVKPYVKGGKNDANDAQAICEAASRPTMRYVEVKTVEQQASQSVHRIRGRLIKARTALVNEVRGLLAEFGLIESRKGVAATRELLCRAIDDSDSSMPGTMRELLRGLSEELQGYDERLKKLEQLIQREAREDERVRRLMKIEGLGPISATAIVSAVGDARQFASGRQFAAWLGLVPSQYSTGGKERLGGISKRGDKYLRTLLIHGSRSVLKCGFRSTVTGRFG

SEQ ID NO: 212496 - protein, 417 aa, unidentified
MKCFVGLDISSTKLDVCIMLSDTSTPVTASLSNDLSGATEIKNHILDLNHTYHFERIVIGMEATSLYSFHPAMFFHEDRQLKELHVEIMVEQPNKIKKYRDAFEENKNDTIDAFYIADYFRIERFSPSFLKEEKYMALQHLTRTRLQIIEQLTRTKQHFIENIYYKCNTLAYQFKKEELSTNLWSSTMMTLMTDEMTLDELANMPLQELDDWLQKLGKGHFKDSEKLAQTIQAAIRGSYRLSKLQQDSVNVILGLLGREIRNLEKMIKEIDKAIEDMVETIPEYQCLTSIPGVGKVYAAGIIAEIGQIERFKDHPQVAKFAGLNWREKQSGNSNSQHTSLVNRGNRYLRYYLVEAANSVRRYDDEYKDFYKKKYHEVPKHQHKRAILLTARKFVRLVDVLLRNHQLYTPPRRIMEDN

SEQ ID NO: 212497 - protein, 385 aa, unidentified
MGWSSEEARGLQRPTTAMMTNHSDITNEVKLSTGPAKTGAVAPELFLGIDVAAARHVVTRFVPTEGAKPAEGMTSHTLIKRVAKLLKSGLAVHCVYEAGPTGFALCRELEALGAKCLVVRPRKLERYGRRRKTDPRDSRQLAEDLAHHVAGRRGLLIPVRVPSVAEELRRLPVRERETLADARQQILRSAKGRALALGHRLPKEWWRPRVLPKVLQGLPVELTRLLERTAHAAAAMKEQLEQVEADITADAPPAPTGVGALTAGTLEREVCDWRRFPSGKKIGSFSGLCPSEDSSGERRRQGSIDKHGSARLRFWCQEAVWRLYKFQPDYKGVVWARAHLIGANASRAKQIAVALARRFLVDWWRIRTGRVTAAQLGFTFKTPAS

SEQ ID NO: 212498 - protein, 333 aa, unidentified
MNYIGLDIHKKNTQACVKNDMGKVLMNVRFPSDSKDINEFLDKIEPLGAASIVMETTGFCMYIYDIIEARGHDVKVAHPFKVKALTAGRAKTDKNDAEMLAELLRLNAIPESYIPPKELRELRELTRFRQSLVRSSASIKNQVHAILAMRGIKTPPPLRSHFSKKHVKWLRSLEIVQLDDFLDIMALIDTKTAKADEDIGRICHDDEDVQRLKTIPGIGDVTATSFVAEIGDIHRFDSPEKLASYAGLTPIVRQSGEKTWAGPISKRGNATLRYLLIEAAYSHVNSSKESKLTRFFERKSQAKGRKKAIVATSRKMLEVIYYMLKRGEAYHAH

SEQ ID NO: 212499 - protein, 458 aa, unidentified
MKIKSIYPARNSSQLREVLGKYSPGELLYAPIDVAKYNHKACAVNFFGDILTPAFEFSNNAHGVKFFISKITEAARNAKAKKIFIGLEATGHYHQNLTLHLKSLGYEVAVINPFDSWKERLNKSSKTDKIDLGSIAKSLISRKFSSSTVPEGVYYNLQRATRTRRKFVNRRTSSKNIITGLLDNLFPGLWDKEDTIFSDRWGKASLSVLEHYPTPQMILRLGEKRLTRFLKKGTTKLGEKTARKIISAAKVALTRSPYEQTMDILALRSHLQAYRLYEEIIFHLEKEIAYLLVQTPGTYLLSVPGISVTYAAEVTAEIGDISRFAYANQIISLAGTCSKKDQTGEHDPQNLPISKKGNKFLRTVLNQAELSLNTWCPDFNAYYSRKVEEKKGRCGIARTATGNKFARLAFALMKHESLYHPHSFNTLVQDPGNYYLLSLWRNTEEVKGFLFREDPSSE

SEQ ID NO: 212500 - protein, 347 aa, unidentified
MSVYVGIDVHRKRSQVAVVDQDGKVLANRNVNNGVTPILHVIGGLPPGTPAAFEAAYGWGWLVELLENYGFEPHLVHPLQCKAIASARLKNDKVDAAILAQLLRADLLPEAWIAPPEVRRLRALLRHRAQLVRLRQLLRNRIHAVLADHGHDRPAGYWSGPGREWLASLDLPAVSAEVTGDALALIDAVDAIIGRLDAEIRGHARSDPRVKILTGLPGVGPYTALVLLAEIGDITRFASARKLASWAGLTPTVRGSDRVAHYGHIPGGRLGVAALGAVRGGADRQAASAVRRHLPRHRPPPRQEDRHHRDRPQAAHPRLSPAHRRQQRRCAPLAGRSPSPGQARETA

SEQ ID NO: 212501 - protein, 397 aa, unidentified
MIAVGIDVSKSKSTVAILNGDGSIRAKPFDVHHVADELQALVDYIKRTSEPPTILMEPTSHYHYPLLKAFTEAELPVCLINPYQMKKYGDTDLRKAKTDKRDSLRIAQYALEKSYSLIPYTPQDQKYEDLRFLSRQYSQRISTLTVAKVQLLSLLDETMPGITTILPLKSRDPDNCVLLRFIKRFKSFDVIRKMGKTRFLDSYQVLVKKTKDRFAGSKGLAIYELVLNSVTTRGENPLSAMTQDQCVDLVSTSQKAADEINLQMRIIAETMPEYKVLRSMAGVGDRLGPIILGEIGDIRRFHSGKALNAYAGNDAPPYQSGQFESRNRHISKRGNPALRKACFEVMQALKLTKPQDDPVYLFLLKKEQEGKPYNVAKMAAVNKFLRIYYARAMELYK

SEQ ID NO: 212502 - protein, 430 aa, unidentified
MKSNTQNAKIEAITEKTLVLGIDVGSETHYARAFDYRGIEYSKKPFKFSNTEAGFATFKEWVLDLKERHEKDKVVPGMEPTGHYWFNLGKFLQDNEMKPVLVNPHHVKKSKELDDNNPTKNDRKDPKVIAGLVREGRYMIPYLPEGVYADLRTASNIRFQLQAELTRIQNRISRWFNIYFPEYKTVYGKPDAKSGILILKEAPLPEDILTLGIDGVNQIWRDAKLRAVGKARAKTLIEAAEHSVGSKEGAVSARMEIRMLLEDYESRNIRLQEVMGLIEGLVNQIPMAEKLLEIKGVGIKTVSGFLAEVGDIRRFNDPKELQKLAGLALVENSSGKHKGKTTISRRGRKRLRYLLFEVAMSLVAKNPEFRELHNYYTTRRLNPLKKMQSLMAIAAKLLRVFYAILTKGVGYDPKKMVNDIRRPAAYAQAA

SEQ ID NO: 212503 - protein, 362 aa, unidentified
MMNHIFVGIDLGDKNSVARIAVDREKSERFGFQNNRQGRSRLFLEVKKKSEGAGGAQIVMAYEASSCGYVLRDEAEAMGMRCWVLAPTKMEKSVEQRQHKNDDRDADDVLEKIRGHVLAGNRLPKVWVPDVQTRDDRELIRARLEVTEKQTEIKAQIRMLTKRHGLEKPSGIGSGWTIGYRRWLEALGGSEQPLGWSTRQALQSLLRQLNFLEAEIERLQKPVEQLAQEARHKTIVEELTREAGVGVLTAMVYRTEIGQAGRFHRSRQVGKFVGLTPTSHESGQQTDRKGHISRQGPPRLRKVLCQASWVHIIHDRDAGRMYQRLVSRNPKKKKIALVAIMRRLAVRLWHRMRKIELQQAAA

SEQ ID NO: 212504 - protein, 353 aa, unidentified
MVVIGIDPHKRSHTAVTVDEAGRKLGQLTVNADDEGFLRLWAWAGRYGAARDCSVRWAVEDGRGVAGRLVRALIGQGAAVVWVPPKLMAQCRASARTRGKSDPIDALAIARAAIREPGLPAVQLDETAAELRLLSDRREHLVASRTELINQLRWRLHDLNPALDAGAPRLIGPQTLTRLASALAVLPASVSRDIAADLVADITRLGEQIRHLEHRLHVLVTPLAPTLLAIVGISTVTAAKIIGEVAGITRFRSSAAFAMHTGTAPIPVWSSGKPQYRLNRSGNRQLNTALHRIAITQLAHHQPARDYRDRWRTHHPHATGKAAIRALKRQLSNVVYRALTTDHQQQQQLSQTA

SEQ ID NO: 212505 - protein, 370 aa, unidentified
MKKRITFVGLDTHKNSIEVALADEGANSEVRLYGSIGGDLDSLDKMIRKLRIPGAELRFVYEAGPCGYEIYRHLRAQGLHCDVVAPSMVPRRSGDRIKNDRRDACNLARLYRAGELTAVYVPHEDDEAMRDLVRGRQDAINAQRKARQQLGGFLLRHGVRYPGKCLWSLAHGRWLAGVKMPHPAQQIMMQEYIHTVEECTQRVIRLNEQIQQLLPDWRMHPLVTALQALRGVAPVVAATVVVEIGPMGRFKNPRQLMAYLGLVPSERSSGGSVRRGAITKTGNGHARRALIEAAHSYRHPARISRTILKRQETLTEPVRQIAWKAQLRLCARFRRLIARGKSRNRAVAAVARELSGFMWAIAKQVPVPQG

SEQ ID NO: 212506 - protein, 402 aa, unidentified
MNCVGIDVSKGKSMIAVMRPFGEVVVSPFEVRHTANELSELAGLLKSLDGETRVVMESTGNYHAPVAWLLHDAGLYVSVVNAMLVHDYGNNSLRRAKTDKKDAVKLANYGLDHWLTLPRYVPEEDTRLMLKTCYRQYQQYSKVQTMLKNNLISLLDTAFPDANRLFTSPPRTDGSEKWVDFVATFWHCECVCGLSKKAFTAKYQKWCRKHGYNFSQDKALDIYSSACGCFGVMPKTNTAKLLVEQAISQLQTTSAALAALKQEMQSLAASLPEYPVVMGMFGVGPTLGPQLIAEIGDVRRFHSKKALVAFAGIDAPPYQSGQIDVRSRSISKRGSASLRRTLFLVMGVLLQCAPMDEPVYQFMNKKRSEGKPYRVYMMASANKFLRIYYASVKAYLDSLEHD

SEQ ID NO: 212507 - protein, 385 aa, unidentified
MEKQTAVAPTAVAGEVVRIFLALELSRSSWLVASHTPAADKISRHKLAAGDIDGLLALIERLRTRVEQKTGQPVQVISCYEAGYDGFWLDRKLKAEGVVNHVMDPASIQVDRRARRVKTDAVDADALLRALMAFCRGERKVCSMVRVPTRDEEDAKRLSREREQLIKERMSIGSRASQGIYDYQPLKANRLERLDELRTGDGNPLPERLRNEIGRQLERLKLLLELIGTVEAERDAVVKADKPASEADRRIRALAKLKGIGPEIATVLYNEVFYRQFANRRDVAAYVGLTPSLFASGDLRHDQGISKAGNPRARATMVELAWLWVRHQSGSDLTGWFLTRVSGIKGRIKRIAIVALARKVLVALWRYLETGLVPTGAMLKAEKQG

SEQ ID NO: 212508 - protein, 316 aa, unidentified
MSAVHIGIDVSKARLDVAYSDGREEQVANDEASVAEFVARVQAEAPALVAMEATGGYERLVLDALVEAGVRATMVNPRQVRDFAKATGQLAKTDRIDAKVICEFAQCVKTRLRTPRNPVSVALAELVSRRRQLVEMIAAETNRTKQTSRSSTTIRESLKDVVSYLRVQVKKLDRELETVARADEAASADIAIMTSVPGVGPVTSASLRAFLPELGTASRKQIAKLVGVAPLAQDSGLHKGRRSCWGGRANVRAVLYMAALVAVRCNPEFKAFYARLRAKGKPAKVALTACMHKLLTLLNAMMKTRDPWRQPAVAGP

SEQ ID NO: 212509 - protein, 362 aa, unidentified
MTINAGVDLHKTQFTVFVKQSGNQFEQYSTEEDGYKKFLARIQRWKKNGMTVRIGVESTGNTRYFKNRMEKAGAEVVVINTLKFKVGNESVKKTDRHDAATIAEFLEKDMLPESKLCSEESEQLRRLLKVRTTLVRTNVVVKNQIHALLTGLGMKDTRASLQSKRGRQKILDTLERTGNGLVVQPLFETINRLEENVKSIENELEKLTEGDRTVEILMTIPGCGKIGAWTIRAFTDDVSRFASAKKYSAYAGLVPWVQNSNETIHHGKITKRGPEELRTALVQLVMGMRRCRSTASWRLMERYTEMKRNKGSGKSIIATARKLSKIIWCMLSSSEEFNPALMIDKKLLKKAESMRAANRQSA

SEQ ID NO: 212510 - protein, 352 aa, unidentified
MKEYTNERVIKVVGIDLAKRSFHVYGVDENGQRVIRRTFNRVRLSEFMANLPACTVAMEACGSAHYWARQFREDGHEVRLIAPQFVKPFVKSNKNDAVDAEAICEAAQRPRMRLVAIKSVEQQDIQAIHRMRSLGVERRTAQVNQIRGFLLEYGIEIPQGRVAVNQRLPEILEDPENGLSERFRAELRELADELRHLDERVAHYDAQIETLAESHPQAQALMTIPGLGAKGATALVAAVGEDPRLFKNGRGLAAWLGLVPRQHSTGGRDRLLGISKRGDVYLRQLLIHGARAVLRWVERKDDPTSRWARGLKGRRHANVAAVALANKIARIAYAVMTTGQPYDAAKGALAPV

SEQ ID NO: 212511 - protein, 344 aa, unidentified
MSVYVGIDVHRKRSQVAVVTGDGQVRLNRNVVNGTEPILRLIGDLPAGTPVAFEAAFGTGWLVELLEDYGFTPHLVHPLRCKAIASARLKNDKVDAAILGQLLRADLLPEAWIAPPQVRQLRALLRHRAQLVRLRTLLRNRIHAVLADYGHDRPGGCWSGPGRAWLASLQLPAVSREVIDDDLAVIDALELTIDRLDWEIHQRARSDPRVKLLTQLPGVGPFTALVILAEIGDISRFGSARKLASWAGLTPTVRGSDRVAHYGHISKQGSAWLRWVLCEAAQTAKRSPQFAAGYQAIAQRRGKKIATTAVARKLLTRAWHLLTDAETTAASQPAAAAAARTGTR

SEQ ID NO: 212512 - protein, 352 aa, unidentified
MKIIGCDFHPSYQQIAMVDTETGELWEGRLEHEQGEARRFYQALQGQTVRVGIEAVGNSQWFEQMLVEMGHELWIGDAAQIRRLVVRLQKTDRRDAKHILDLLLDGRFPRLWVPSTQMRDVRQLLRHRQKLVEIRTQVKNQLQHLALNQGVRRKRRLWSVQGRAVLEQLPLQGWTARRRSDLLAMLDRLEEQVGELDRAVRTEAEQRPEVRLLMTHPGVGPVVGLAYVLTIGPTTRFPRGKQVASYLGLIPKERSSGGRQNFGPISRQGNTMMRTLLVEAAQTAARFDEELRRDYGRLKARKHSALAKVMVARKLAVRMYWMLRENKPYTQLYAQRPIARMQDSPGHSVVAG

SEQ ID NO: 212513 - protein, 327 aa, unidentified
MKSIYLGIEISKKTLDICLVDQKSEAFFKIENKIKAIKKLFKQITTLDAEIFIAMENTGLYNYNLYEVLKDYSFNVYVIDPKHIKRSIGLVRGKNDKVDAKRIATFIERNYQDFDCWKPISEAVQNIKILMSQRRHKVKTRQAIKQQNKELKTVKRTKIISSSMKINLKEIEQINKHIAAIEKLIKEEIANDSVLKKDIERIRTIPGIGSVTAWTLAVKTDGFVRLTNPRKLACFAGVVPFEQQSGTSLKTKPRVSKMADMQLKSVLQMAAMRAVRMDNDLQHFYLRKVEEGKNKMSVLNAVRNKLIHIAMALIKNKSFYENRLVLS

SEQ ID NO: 212514 - protein, 337 aa, unidentified
MEHVAIDLAGRESQICVRGADGSILEECRRLTRTLGEYLAKRPWSRVVVETCAEAFAVADQALELGHQVRVVPATLVRSLGVGSRRTKNDAKDARVMSEVSCRIDLPSVHVPSAISRRRKSICGMREALVTARTSLVNTVRGWLRGAAKGPLRSGAVETFVNRVRDRMGENERPRYVERQLETIEMLNRQIVEADDELAVLSHKDEECRRLMTVPGVGPVTAIRFVAAVDEIGRFANAHQLESYLGLVPGESSSGDKVHRTSITKAGSPRLRTTLIQAAWSARRSGGVHPMVLWALEVEKRRGRRIATVALARKMAGIMYALLRDGSRYNAPRGATI

SEQ ID NO: 212515 - protein, 429 aa, unidentified
MHHHAAGIDIGSRKVFVGLEDSSVRWFETFTSDLESLKDYLLEHKVTTVAMEATGVYWYVLYDILLDAGLDVWLVDGRQTRQLPGRKTDVKDCQWIQQLHSYGLLNRCYVSDGLVKELRSYQRLREDHLRSAAMHIQHMQKALIEMNIRLPEVLSQVHGVSGMALINAILSGERDEERLVALCHSKVRENKGEELRKALQGHYTPQGLFALNQAVKAYQFYQEQIFECDRQIDATLQKINRDKSLPPGTGSGKRKPIRHNKPDIDGLGDHLLKIFDGRDATRLPGFTDYNWLQLYAEVGSDLSKWPSEKHFTSWLGLAPGQNSSGKKNKSKSKGKPTVGHIFKQMAHGLLNSKYIGWGEFARRLRSRKGPAVAIKATARKLAAQYWRLIVKGADFVERGLEAYQNIHIQQKKRRLEKLAIELNVELVPA

SEQ ID NO: 212516 - protein, 355 aa, unidentified
MEEISVIGIDLAKSLFRLEALSPNGAVVWKKRLRRAAFMRFMEKQAPRCLVGFEACGGAHYWGRFLGDLGFRVKMMAPKAVKAYREGPHKNDGRDAHAVAEAALRAQVRAVRVKSEAAQAVQALVRVRLLQIKQMVQTGNQLRGILTEFGIVMPKGHHRLQLAIISLGEDPRYQRLPPELREAIAGLRAQLAEQVERVRLATAALAQATRADPACELLRSVPGLGPINAAGLSVALEAPQSYRNARAFAASLRLVPRQWQSADRQQLRGIPKQGASDIRRNLVLAGQSLLTMIARREEPPQDRLLIWAQHLLRRKQRNVAAVAVAAKLARIAWAVLAKGEAYRPRQRIADERTPA

SEQ ID NO: 212517 - protein, 342 aa, unidentified
MKITTIGIDLAKTTLSVHGVDDNGKVVLRKSMSRSKLLEFMANREPCLVGMEACGGAHDLARRLIAMGHRARLMAARFVQPYRKSQKNDGNDAEAICEAVARPNMRFVPVKSAEQQALLSVHRVRLQLIETRTALINQLRGLLAEFGILMPKGRYPLRAHIIPALEHPDLPELARTVLKELNTRIAALDLEILSQDRRIEAHARDNVLAQRLIAICGIGSISASAIVASVGDAKLFKTGRQFCAWLGLVPRQYSTGGKARLGRITKRGDVYLRTLLVHGARSALNVLAKRTDRLSTWIQSLSARRGYKKAIVALAAKNARIAWAVLATGKPYEPRGCAQAAQ

SEQ ID NO: 212518 - protein, 353 aa, unidentified
MKEHTSNERVVKVVGIDLAKRSFHVYGVDERGQRVISKTFTRTRLCEFMANLPACTVAMEACGSAHYWARTFRAYGHEVRLIAPQFVKPFVKSNKNDAVDAEAICEAAQRPTMRFVAVKSVEQQDIQAIHRMRSLVVERRTAQVNQIRGLLLEYGIEMPQGRAAVGRCLAEILEDAANGLSDRFRAELRGLAEELRHLDERVAYYDAQIETIAQSHPQAQALMTIPGLGAKGATALVAAVGEDPRLFKNGRGLAAWLGLVPRQHSTGGRDRLLGISKRGDVYLRQLLIHGARAVLRWVERKDDPTSRWAAGLKGRRHTNVAVVALANKIARIAYAVMTTGKPYDPTLGALANA

SEQ ID NO: 212519 - protein, 408 aa, unidentified
MNLFVGIDVSSKNLDVCFLDSEDTCLKEETLSNDLNGANQIKETILTYNGQFHYEKIIVGMESTSVYSFHPSTLLDNDKDLQRIGVEVVVQNPKAIHRFKGLFEEDKTDRIDAFRIADFLRFGRYNKTVIKEEKYIALQRLTRSRYQVIQQLTECKQHFLENLYYKCNTLSNDVDTSIFGAAMMELFTDSLSLDDIANMELEELAFFLQKKGKGRFSDPEKLAKSIKKAIRDSYRLGKVVQHSVDMVLATYAKLVQTLKKQIKELDKGIQALFEILPEAQCLISVPGIGPVYAAGIIAEIGQIERFETQAQLAKYAGLYWKRSQSGDFESERTPRVKTGNQYLRYYLVEAANSVRRNEPVYHEFYQKKYKEVPKYKHKRALVMTARKLVRLVDVLLRNHQLYTSERSV

SEQ ID NO: 212520 - protein, 346 aa, unidentified
MTKLMAGMDLHSNNVMVAIVDQDGKRLVHRKLGCDLAEVAQFLAPYKEQLEKVAVESTYNWYWLIDGLAEKGYPMVLANPAKIEQYSGLKHGDDTSDAYFLAELLRLKILPTAHIYDAQLRPVRDLLRRRLSLVQQRTALLLSFKSLYTRTTGQGLSLAVVKRLLPEEAKKLYEHPANQLIAQVQKQHIEQLTKSIEKIEKVILKVARCLPYYEKLKTLPGIGLVLGQTITMEVGDIKRFKEPGNSASYCRTVDARRLSNGKKKAQNNQKCGNRYLAWAFVEAANFAKRGDLKCRQWFDRKAAKTSKVIATKALACKLAKAAWFVMSQGVDYDENRVFPELAQKKN

SEQ ID NO: 212521 - protein, 369 aa, unidentified
MPTMTYPTPASEQTYIEVTGGVDTHKDTHTAAALDTSGRLLGHREFAATAAGYAALLAWLGTLGQLVRVGVEGSGVYGAGLARFLQAAGVELVEVDRPDGKTRRWQGKSDPVDAEAAARAAQAGRASGVPKTRGGKVDALRALRVARRSAVAARADAQRQIKALIVTAPDALRMTLRGLGDRELIAHCATRRPDRAAAGDPTVATMLALRALARRHQQLSAEIDELDALIGPLVTAINPTLIGLSGVGTDVAGQLLVTGGDNPQRLRSEAAFAMLCGAAPLPASSGRTHRHRLNRGGDRQANAALYRIVLCRLRWDPRTRAYAQRRTTEGMSKPEIIRCLKRYIAREIYTALLDPQPSSSLAITTTAPN

SEQ ID NO: 212522 - protein, 359 aa, unidentified
MKYIGLDCHKQYDHATMINTDTGEIKAKRLAHTGDEFRGFIGDKADAKMVIESCWNWSKTYEIAKDLVEDIILAHPLKVKAIASAKVKTDAIDSKTLAQLLMADLIPQAHLRKGENRVKQRVVRHRAFLVAMRTRTKNRIHDLVNNQLLPMEVLRTKPKNLFSKRGKGENGVEWLKSLDWPREEDRRIFESAMRLIEHLSHEISASNQMVEEIYKKDKDAQLLSTIPGIGKTLAVLISTEIDGIVRFSSLSRLCSYAGLVPSTHSSGGKTYHGKITLEGDRWLRWALVEAVVPASYADVEIRRRLNALRRIKNPNVAKTIMARWLLKVAYHVLKESRPYVAAHPADTNRGRLSKALASS

SEQ ID NO: 212523 - protein, 330 aa, unidentified
MMYLGIDVSKAKLDCCLLLNTEAGKRKTKCVANNDHGFSDLLHWIDKQGVARTEVRVLMEGTGVYHTPAAIALTQAQLGVSILNPARVRSYAQSMGMQSKNDRADSIAIAQYGARHPDKLILWEIPSPQTLSLKAMLARREALERDLQRERNRKEKADFIKVPEGIQKSLLESIDFIKAQIKKLSKDIDHHIDRYPDLKEDMALLVSIPSIAEKSGTQMLSITHQHHFQRAEQLSAYIGIDPVEYSSGSSVSRRPHLSKAGPKDVRATLYMATVSAIGHNPCIKAFYERLLAHGKPPMVAMCAAMRKLVHLCFAVLKNRKPFDPNYANSH

SEQ ID NO: 212524 - protein, 366 aa, unidentified
MLIHVPPGTAVLAMDVHKSTISAGILAGDASTPVVDKISSDDESVRRLIARFDDRSRVWACYEAGPTGYELARSLQGLGVRCEVIAPSLIPTRPGDRVKTDRRDAARLAVLFRAGQLSSVRVPTVAEEGVRDLCRARSDMVIDRTRARHRLGKFLLRHGRVWRDGDNWTLKHQVWIRAQHFDDAALTATFGHYQATLTAREAAVDAIDADLQEWYSRPPFTDAVSRLAAYRGITELGALTLASEVCDWRRFPTAAMFMGFCGLVPSEHSSGQRTQRGGITHAGNTHLRTQLVESAWAYKAHPAVGATLKKRHDGLDPAVTARAWAAQLRLCGKFRRLDQRKTNRKTVVTAIARELAGFVWAEMTAA

SEQ ID NO: 212525 - protein, 332 aa, unidentified
MNNIYFIGVDVSKKKLDFCVMFENKVVHEEIVANHQHAVIGLIHQLKKEFGIDNAQMLVCAEHTGQYTYPLVCACEIAECRLWLEHASSIKYSSGVQRGKNDRIDAKRIAVYASRFEDKLRLYKRPEQEIERLKQLEAERSLYVVDLAKYKAQLKDQKDYVPERIFKDKSKRLKKLMDNLQEVIDSITQEMQEIVKSSEVLSKQYRLLQSVDGVGPVIALNMIVVTEAFTKFENARQFNCFAGIAPFQYTSGSSQHSRARVSHRADKCIKTLLHLAAVSVIGKAGGEMKSYFLRKVEEGKHKMSVINALRAKIVARMFAVIKNNKYYKPILS

SEQ ID NO: 212526 - protein, 414 aa, unidentified
MDRVMIGVDPHKLSVTFEARDSREVLRAKGQFGTDARSYRQLLAYARQWPERIWAVEGANGIGRPLAQRLLASGERVLDVPAKLAARARVFDTGQGRKTDPADAHAIVMVALRDKRLRELGTDPGLTVLRLLCDRRDELSRSRAQALNRLHRLFLELIPGGAPVKKSTAQYQALLARVRPRDLAGKTRRRMAAEELADLGRLDAKLKAMKAELKAAVLASGSHLMDIHGIGPAAAARILADVGDIARFPNRAHFASWTGTAPIDASSGQHTHHRLSRAGNRRLNHVLYMAGIVQLRNDTPGRAYYRRRVAEGKTSMEAMRCLRRRLSDVVYRQLAADTQPQQAGPGGHSGATLLSSAADLPPGIGTSDQPLPGPAPATLPPSLTAPHSPAAQPGASPRRRTRGVNVERPTDERR

SEQ ID NO: 212527 - protein, 405 aa, unidentified
MMLDMEIIFGIDVSKHSSNVAILIDGRTFKEFKITNNRPGYKILDDALNSFRSPKVIFESSGIYSRSIRSFLQRENWNYTEINPLAAKKDMDGFRHNKNDRLDAVSLAMAMAQHHYQSTFKEKAVYGELHDLERTYQEFNEDIVRAKNRLHQKLQLTFPEVEQFISTTDGALYWHVVQQFPHASLVLAIELPALAQFILKATPKNMSEKRAFALARHLHDLASQSAPAVDYNAHAVHSVIYLANEVEHLSGLKADIIEEMTKISSLLAEIPILESIPGFGIKTAVCLLAELGDISRFHSSNAINAYVGIDLIQYQSGDFEMMQHIRKRGNPYARKILFKAVLNMMSVAKYHPSNISIFYQRKKQSSSESHTKKIAIAAMGRLIRTIYHLIKNNELYDSTQFSPEK

SEQ ID NO: 212528 - protein, 343 aa, unidentified
MDLHRRRSVLVRMTEDGRRLGAVRITNSPAELRREIARAGKGPRVVLEATYGWYWAADVLAAAGAEVHLAHPLGVKAFTYRRVKNDVRDSADLADLLRMGRLPEAWIAPHQVRELRELTRYRAKLVRLRTSCKDQVHGVLAKLGIPVTCSDIFGTAGSAWLDGLRLPQPYAGKVTSLRHLAGEFTAEIDMLGEVIADLLAGHRGYQVIQQLPGIGPVLAAVIAAEIGDITRFKNPGQLCSWAGLTPRHRESDTKVARGHVSKQGSRLLRWALIEAIQRIPKDSVIGAVKDGIITRRGKEARNIAKVAAARRLLTLVFYGMRDHQIRCLARPAGPAAAAPAKAA

SEQ ID NO: 212529 - protein, 410 aa, unidentified
MSEKIYAGMDLGQRFHQVAVVGADRKELVAPFRVGRGCQGIQEFFDGLHFLTRDPEQMVVTVEATGNYWNELIWDLSARGCEVYLAHPKKAHDLRRFFALHTKTDITDAEALARMPLVDEQLSPVWVPQRVQQVLLRMCRLRWKYRCRIADIKKRISRFADTVMPGIGEVMPIRYSKSARLFLRRYLASGKAKRVGRKRLSQIMSKAAWGKFSEERQRKLWECIQNAPDLGLLPDDILLEAGVQLDELDMLEHQVERLDSRIAELYAEVDPQHILLQIPGAGEFLAAALTAAIGDVRRFPSGKHLISYAGLAPRVKSSAGTTRAGQGITKHGSPFLRAWAYLAANTARRYDPDLKAYYTRLRKRRKHHNVALCATAARLLERCHELLGEGVAIVRESPGQIPCTGSDPKV

SEQ ID NO: 212530 - protein, 427 aa, unidentified
MPYKIAGIDVHKRMLHVVVSDVQVDGEYDFTRRIFGSLPEALRSLAAWLVEQQVEEVVMESTAQYWKPVWGALERYWKPICQTREGALAMSGTLHLAQAQSNRGRRGRKKDFRDAERLVKRLVAHELVLSFVPDVEQRLWRTVVRTKYQLTRNRVQLQNRLEALLEEAHIKLSSLVSDLLGASARRMLAAVADGETNPETLAALADRGLRATQEQLQDALGVCQELNPVYRRLIRMVLDEVASIDKRIEQLNQEMANLLRPHEDQVKRLAEVPGLGVDSAQQVIAEVGATAATFPSEKHLSSWVGACPGDEESAEVNRSRRSPQGNRQMRRILNQAANAAVKYKGSIFEILYRRHVPRLGHNQTIGIIAHKLCRLVWKILHRGIRYEERGQEVSKASKQKRTRKMIQALRRLGYRIEPSPSQLAITA

SEQ ID NO: 212531 - protein, 364 aa, unidentified
MHRLNSAATLIQRTTTEAPRGHMYYIGLDVHKKTISYCVKDVSGRIQQEGKVGSTRRELDCWMKTLPRPWTVAMEATIFSGWIYDHLLPHATQIKVAHPLMLRAIAAAKKKNDRIDAGKIADCLRCDFLPECHMMPAEIRDRRRTLRYRHLLVRQMVQMKNRVSGLLMETGVEYNKQRLHKVSYFRELLSANEEVHPSIRPLLKLSRETIERCQKTEYALISSLERDPLLADRIKRLRTVPGVGPITALTWALEIGDVSRFRTIKQAISYCGLCGDERSSADKAMRMPLSKQRNKHIQRALVEAAKLAPRQSHELAVIYDRERQKGNGNRATLAVARKMVAYLLAVDRQQRVFIPAEERRTAAA

SEQ ID NO: 212532 - protein, 403 aa, unidentified
MFTLGIDVSKKSSRYVLLNPEGRKVKSFSLDNSYEAFQDLLERFKELSIPKEDLLVGLEASGAFWENLYSHLKENGFSVVLLNPYHTNKFREALAKKAKTDDIDALIIAQLLRTGEYVQSQVAEELIQSLRELTKLRYELVKERKNYQRQVFSVLAVVFPEHEKTALKNPFSVASLAIFQAFPTAQDLAQAKAKQIEKIVRSIKGNNFDLKEIETLLQTAKRSIYAGRARKARGTSLRILLRHVENLSSSIEELEKEIKQILSPRQSEDSFPGENLLTIPGVGEKTVAAVLSYLGTNGANFSTSTKAVGYIGFFPKIHQSGQSQWDNVISKRGPTLLRWALYMAAVACLRHNPEMKSLYHKKLSQGKTEKQALICVAKKLLQIMLSMLKSGQAYNPSRVYVTC

SEQ ID NO: 212533 - protein, 340 aa, unidentified
MNATTYGLDVAKRVFQLYWVDAQTGEIANRRFGRDDLIAFLAQRPAGRAALEACGSAHWWARKIQALGHEVVLLHAQFIRPFVQTNKTDAADAKAIWTAVQQPGKRTVAAKTEDQQAMLSLHRMRSQLIKFRTMQVNQLRGFLYEFGVTFRTGRAAGLAEVRQRMAELEDALPASIMLNLQDQLRRIDAFQDDIDQLEKRIGAWQKQEMACRAISDVPGIGRLTATALVATIGDARTFRSGREFAAFLGLVPRQSGTGGKIRLGSISKRGDPYLRTLLIHGARSVLCHTKVPTAWQKGIQERRPANVAAVALANKIARTAWAILAHDSSYEAHHVSVRPA

SEQ ID NO: 212534 - protein, 351 aa, unidentified
MSQIPNTAIAVIGIDIGKNSFHAVGHDARGAIVLRQKWSRGQVEARLANIPPCLVGMEACVGAHHLSRKLASLGHDARLMPAKYVRPYSKRQKNDFNDAEAVAEAVQRPTMKFVATKTAEQLDLQALHRVRERLVSQRTGIINQIRAFMLERGIAVRQGIGFLRTELPTILATRTDALSPRMLRVIEELAGDWRRLDQRIDGLSGALARQDQACSRLMTVPGIGPIISSAMVAAIGTGDVFSKGRDFGAWLGLVPKQISTGDRTILGKISRRGNRYLRVLFVQAAWVVLVRIKDWERYGLKSWIEAAKRRLHHNVLAIALANKLARIAWAVLAKGRAFELTRTDDAGVRSA

SEQ ID NO: 212535 - protein, 348 aa, unidentified
MIYVGVDHHKRYSYLTAVDEQGKVRRSCRLPNEREALTQVLADLGEPCRSVVEAGRNWGVMYDLLEELGAQPVLANPCQVKAIAQARIKTDSIDSCTLAQLLRGDLIPCVHVPGRETRQMKNILRQRLFLVRLRTMVKNRIHMLLDRNHVVLPKFSDLFGRGGKRYLAALELPSREEGNLLASHMSLLETLEVHIKQTESWLDQALKQDRRVVLLRSIPGFGAILATLVALEIDDISRFQTSAKLCAYAGLVPSLHSSGGKTYYGHLIPHSNHHLRWAMIEASWMAVINSPYCRACYERLRRRKNPNVAITAVARRLLEIVHAVLTEDRPYQERPVSTSFVPAALKPA

SEQ ID NO: 212536 - protein, 386 aa, unidentified
MRVDDLSRCQIAFDQDSSLVVVVEMSESSWLAAGMLPGVGRQPLKKLEPDPAALLRLLERWRAEAIKTGRTIGRIALAYEAGRDGFWLARWLQARGIEVHVIHSTSVAVSREHRRAKTDRLDTAMRMRVFLGWLRGERGHCGMVAIPTLPDEDAKRPSRERESLVGERTRIVNRMKSALARLGIRGFKPGLRKAPKRLEALRTPEDSAIPPNMLDEIRRDMARLAVVRAQIDEIEQARLERLEQAPEVGPHAMVRLLARIVGVGVETADMLVQEVLSRNLRDRRAVARYAGLTGSPDESGSKRREKGLAKTGNARVRRGLIQLAWRFLMFQKNTALAQWYRARTEGAKGARKTTMIVALARKLLIALWRMVTTGILPEGIVLRPAA

SEQ ID NO: 212537 - protein, 332 aa, unidentified
MDKLFSVGVDVSQGNLDVAARTNSERRTGEFTNVNAGHRQLIKWLTKGGRSARVVLESTGVYSLDLALALHSAKRIEVMVVNPRAARKFADACLQRSSTDTTMAVALQEYAARMEFVAWTPPSDAVRQLRAITRRIAALTVEKARELNRQHAAGASADTPAVVVNDVEVNVRHLERRIAQLERHAIALVSSDPELQPVYQRVLTVRGIGQTSALQLLGELLVLPADMTARQWVAHSGLDVRHVTSGTSVHKVPRISKQGNAHMRRILYMPALVASQHEPHVHAFYEHLLAAGKTKMQALVAIMRKLLHAIWGMLKTNTDFDGARFRKFPEAA

SEQ ID NO: 212538 - protein, 355 aa, unidentified
MCAKKTGSLEDLAVVGVDIGKDTFHLVGFDRVGQLVMRRQIKRLALNATFEQLPRCIVGMEACLSAHFVSRTLRDMGFEPRIIPAIYVKPFNKGQKNDYNDAEAIAEAALRPNLRTVSEKDQDQLDLQALHRVRARLVSRRTATINQIRAFLIEQGITVRSGLRALKNSFEAILEQRQGEISPRMRGILIGLYGDWLWLDKRIDEVSGEIEEISRTEENCANVMTIPGIGPMISTAMVAAVGKGEAFDRGRDFAAWVGLVPTQYSTGGRTILGRITKRGSRYLRMLFVQAAKVIMMRQNRWSTFSFGPWLTEAVARMPRNKAAVALANKLARTAWSVLRHGTRFDTRRDMAMETI

SEQ ID NO: 212539 - protein, 415 aa, unidentified
MLILGCDIGSETHYMRAIDTRGRELSKSAFSFNNDPEGFRNALEWAVQLAAKHNKSQIVLGLEPTGHYWFCLAAWMISKGISVVQVNPYAVKQTKEIEDNSQLKDERKDPKLIANLVKDGNYGMPYLPEKVYAELRRLSMFRDQLMEDRIRFINRLHRELKIYFPEYKDALGKVDGVFSLELLKEAPFPADLLALEEDGIRQIWRNAKLKGRGYSRAKEIIQYAETSVGIKDGADAGSQAVKWFVERILELSKKLADIENQISRKCRELPHAENILEISGVGETILSGILAEMGDISRFDDAREIQTLSGLSLVACNSGKHKGETKISHRGRKRLRYWLFQAAKSAVAHGEEFKGLHVYYTTRAENPLKKMQSLIVIACKLLRIIYTILKKGVAYDPQKMLKDIKRMSPQETWTL

SEQ ID NO: 212540 - protein, 446 aa, unidentified
MNASSSSVSGPGPTPANPKSPVYSTLTHYGAVDWAKGHHDLCVVDRAGGIVFELSIDDTPQGWAGLRARLAAMIAADGAPAIVGFTIETSCGPAVERLLEADLPVFPLNPMAAERYRDRKAPSGHKNDRLDAFSFADALRTDGHLWRVLCPQDALTKELRMLCRDEITLIEQRTALVNQIQAALNEYYPTALSAFDDWTVAAAWEFILAFPTPHQLASAGKRKWEKFLHVHKLFRQTTYARRMELFAAAGRAGSPSRAVTSAKSLLAVSIARQLQTLQTQLDEYRARINELFNQHPDHDLFGSLPGAGEKLAPRLLAELGADRSVFADSEALQCFAGAAPVTYQSGSKRRVLFRRACNPTLRATVHLWADRSRMTSPWAEAYYRQKKEQGMGHAAALRCLAMRWLKILWKMWMERKPYDADRHLRDQTSHGSWVIALLPQAEPQPG

SEQ ID NO: 212541 - protein, 475 aa, unidentified
MLRLGPWINVKARDPPLPRGRWIVASSTSVKLLTYLVPPETRPARATARPGRSAAREGLTVVEVLHERCAGMDISKKDVKVCIRVPGGRGGRYRNEVTTFGSMTGQILELRAFLLEQQVTLVVMESTGDYWKPFYYVLEGAPFELLLVNPRHVRGLPGRKTDVSDAQWLADLGAHGLVRGSLVPPPPIRVLRDLTRTHADLTRDRTREYNRLQSVLEDAGIKLTSVASKINGVSCRLMLDALVAGERNPKVLAQLAKGSLREKQADLTQAMTGRFTDHHTFMVRLHLQVIDQLTTAIDQLTTKIEVVTEPFRPQLAVLETIPGVSTHIAVVIIAETGGDMTKFPTAGHLASWAGVCPGHNQSADVTKKAKTRPGNSYLKGALGSAAMSSMQVHETFLQDRHHRLKPRIGGLRTIVALEHSILRSVWHMLTTDQPYRELGAGYHQRRHPQNALRSITRQANRLGYTVRFDPIPQTA

SEQ ID NO: 212542 - protein, 343 aa, unidentified
MKVHVIGIDLGKTVFHLVGLDSNGRVVIRKKCSRTQLLAFTANLQVQLIGMESCSGSHFLGRALREQGHEVRLMPAQYVKPYVQTNKSDFLDAEAIAEAVQRPRMRFVPIKSEEQLDLQALHRVRERWVMRRTAVVNQIRSLLLERGLTLPKGRRYVDRQLPRILEDGELRLSGCFRVLLAQLQLELEQLTARIEEMDRVIQKTAKENEDCQRLREIPGVGPVTATALIAAVGNASAFKKGRNLAAWMGIVPREYTTGGKQKLLGISKRGNKYLRTLFIQGARSVLQQRHKQSPGLSHWLAQLLGRTHQNVVIVALANKLVRMAWAVLCKNERYRAPVLAVTN

SEQ ID NO: 212543 - protein, 329 aa, unidentified
MIVASSLPVVGLDVSKATLAVCYQVDDQLKHLEVSNTKAGFQQLVKACGAQCQFVMEATGTYNLALAYYLYEQGGQVAVLNPLVIRRFIQMHLGKGKSDRKDAQWLLRYGQQQPLKVWQPDEAVLVECRQLEQVTEQLLKQKVMISNSLEALQHQPIVSKLALKRLQQMLKTLTTQVAAVEAELLALLEQRFAAEMTLLCSIPGIGRKTAGMLLLFAGGFTHFDNYRQVIALAGLSPREHTSGTSIRGKVRITKMGGGLIRGKLFMCSFSAKKTNAACAALFDRLVAKGKNKKLALIAVCNKLLKQAFAIVKSGVPYQTDFCSKLAQAS

SEQ ID NO: 212544 - protein, 343 aa, unidentified
MDHFAGLDVSVKETSVCIVDDTGRIAREVKVASEPDSLLQVLTNPAYHFKRIGLEAGRLSQWLFSTLAEAGLPVICVETRHMRAALKAQVNKTDRNDARGIAQMMRAGLYRPVHVKTLRSQKLRMLLTHRKLLQSKAIAIENDLRATLRNFGLKVGMVGTVKFETRIKELVDNLPELAVLVEPLLIVRRVLREQIGILHRRLLAVVRDDDVCRRLMTVPGVGPVVALTYRATVDVPARFRNSKAVGAVFGLTPSRYQSGESDRTGGISRCGDEMMRAMLYEAAQILLVRSAKWSWLKASAMKIARHRGLKKAIVALARRLAVIMHRIGVDGTEFRWTREVAAT

SEQ ID NO: 212545 - protein, 303 aa, unidentified
MLHPATPVSRFIGCDVGNRHRRLRFMTGRSRSIANEPQALSDFASGLEATCFVVCEATGGYEGALLAALLAAGVPVHRADARKVKAFIRSFGTIGKTDAIDARALARYGKDRCAELARWQARDAERLRLQVFVLIRRDMVRGRLAYANRRAAPCAEPAYAHLDALLESFDAQIKAVDADIAALTAQPIARAAKALVAIEGGAKTATARIALAPPPGRCPRGLAPHPKQSGETDAYRRTRDGRAEVKRVLFMAALAARKHNPTLKAFYQRLVQVGKNPSSRSPQSRENSSSSPTTNLKRPMPFK

SEQ ID NO: 212546 - protein, 411 aa, unidentified
MQVINERCCGLDVHKRTITACRLEWLGSEWQKEIRQFGTMTKDLLALLDWLVKEGCTQVAMESTGVYWKPVYNILEGQVELLVVNAQHLKAVPGRKTDVRDAEWIAELLAHGLLRGSFVPPPGVRELRELTRYRSSVVRDRARTVNRLQKVLEAANIKLASVVSDIDGVSARLMLEGLVAGQRDTEQLASLAKGRLKEKHAQLVEALSCRLQPHQSFLIAEHLAQIDYLEGAIERLSHQIEEKLRPFEQQIGWLDTIPGINRRTAEVLWAETGGDMGRFASARHLASWAGMCPGNNESAGKRRSGRTRKGSPWLRHCLVEAAHGAAHTKNKYLRSQYHRIAARRGKKKALLAVGHSILVIAYHLLTRKQVYADLGANYFDERDRQAVTKRCVNRLQKLGYQITLEKLQMAA

SEQ ID NO: 212547 - protein, 387 aa, unidentified
MTTDHLATALQTVVRVNDTKLFASLELSKSRWLVTVSAPGSEKLSKHVVIGGDGGALLNLLSRLRATAERRAGMAVQVVVIQEAGLDGFWVHRLLEANGIESHVVDPASIAVDRRHRRAKTDVIDGEMLLRTLMAWARGERRVCSMVRPPSPEEEDRRRLTRERGTLLKERTQHTNRIKGLLSGQGITDYDPLRKDRLARLDALKTGDGRPLPERLKAEIRREIERVDLVASQMAMVERERDALVGMTSDPAPETAAAVLVRLKGIGPELGSLIWLEALYRGFSNRRQIAAYAGLAPSPWQSGGTDREQGISKSGNRRLRHALVELAWFWLRHQPDSALSVWFRARVGQGRGRIRRIAIVALARKLLVALWRYATQGVVPAGATFKA

SEQ ID NO: 212548 - protein, 314 aa, unidentified
METSAQPVFVGIDVSKNKLDVALWPSGEGFAVERNAKGLNSLCAKLAALNPVTIALEATGGFETVVAAALAAASLPVAVVNPAQVRAFAQALGKRAKTDPLDAAVIARFAEAARPAIRPLADAETQLLADLIARRRQIVDMIVAEKQRLGRAPAKRLKKSIERLLKALEKELSNLNGDIDTAVRASPLWRANEELLTSVPGVGPTTARTLIAELPELGTLTRKEIAALAGLCPFTRQSGQWRGKSFIQGGRASVRAALFMAAMVAARFNPILKTFYDRLAAAGKPKKAALIAVARKLLTILNAILRDQKPWQIA

SEQ ID NO: 212549 - protein, 343 aa, unidentified
MKRNLEKKHFVGIDISKETIDLALLKHEETGVFHDLQLPNTIQGFKSIAPWLRKLKVKTEECMFCMEHTGTYGLLLFTWLTTHGIDFCVEPGFQIKKSLGMVRGKNDIIDARRIADYAQCHQKKLKLYQVPSTLIIKIKQLLTYRDQMVRIKTMLQNSIKAHNQIEVLTGDHSITCQLEEMILEKQRVIQEAETQITSLIQSDTELSKSFRLAISVKGIGTIIAAMMIVTTNNFISFENGRKYACYAGIAPFEHTSGSSCRGRARVSFLANKKIKTLLSNGAQSAIRWDPELRAYYQRKIREGKEHKLIINAVSCKLVNRIFAVVKRQQPYVITYQQNFLQKT

SEQ ID NO: 212550 - protein, 358 aa, unidentified
MSNDNKEQPKVTAGLDLGDKYSHLCLLDTVSGEVIEEGRLRTTAETLEPRFAACEPMRIAIEVGTHSPWVCRLLERCGHEVLVANARKLRLIYSSKHKTDRLDAENLARLARLDPQLLYPLKHRGEQSQAHLALLRSREALVGARTQLINHVRGAAKSFGARLPKCSSPSFHEKAAEHVPAALLPALEPLLETIASLSARIQGYDRKLEAIAAEHHPETSLLRQVAGVGPLTALTFVLVLEDPSRFEDSRAVGAYLGLVPGTDQSGERDPQQRISKEGDEMLRRLLVGSAHYILGPFAKDSDLQRHGEKIASRGGKDAKRRAAVAVARKLSVLLHHLWVSGEDYEPLYNTHRSGERAA

SEQ ID NO: 212551 - protein, 419 aa, unidentified
MSFKILKNNCCGLDVHKTWIFACIGITDSRSRTEYKQARFSSFSKGLQELCDWLAKYNCTDVCMESTGKYWIPVFNILEKNNVWVTLSHPKYTKPQKGNKTDRKDARWICDLYMCGMVKPSFIPPADIRELRDLVRYRYKLTCMITGEKNRAQNCLTVSNLKLDEVFSDVFGKSSRSITEQILQHPGEIFDVTPFVDGRCKTPIEEIQAAVDGAVSTEQAVKLKQCLNHIDELEMHKAEIDREIFRLSDKYEEALILIRTVPGFDKNPMTAIQVLSEIGGDMSVFPTAKNLVSWAGCCPRNDQSNQKIKSTRISRAGSYFKPVLVQVANALIKSKKHSEFTSRYKRIKARRGHKKAIIAICRMILTAIWHILSDLKPYTPEGFLESRPVNESKVLTTSQALNLLKQRGYFIKDDPLSVS

SEQ ID NO: 212552 - protein, 449 aa, unidentified
MAAAPHAAGIDVGDTTHWACVESTPDGSGRVREFPAHTPGLRQLVAWLRACGVTTVALEASGVYGHVLFLTLLEAGFQVVMTPPQFTRQIKGRPKTDKRDCQWIQRLHKLGMLPPIFQPDEATQTLRDYVRQRANLVRLSGQHIQRMQKALGLMNLKLTKVLGDVTGVTGLKIIRAILAGERDPQVLARMRDRRCKRSAAEIAEALDGRYRPEHVTELRCALALWEKYQEVIAELDTVIAAQLRAMRKQTTLPPLPPKARVRGRKPHDPAFDVREALYYVLGVDLTAIDGIEAIHALTLVSELGTDFSKWPTTKQFTAWLGLCPNWQKTGGKVKSSQTRRGKNRAARALRLAAWGLMRNKGYLGAYLRRQRSRLGAPKAITACAHKLARIVYNLVRYGVAYVKQTEAAYAAQVRERLEKQLRRRAHELGYELVKVEPAAAPAVAEATGE

SEQ ID NO: 212553 - protein, 370 aa, unidentified
MKRGLPGVNTWVLVGTNTKEAPKDMLHLGLDLSRTRLDVCALDAAGSRVVVTASSPDADGLRHLAKEISAFGGPVRAAIESMNGARFVHDTLELCGWDVEIADAQKVKGLAPLACKTDKIDAFVLAELSRRDLVPAIWLPDPTIRAERERARFRLHLVRHRVMLKNRIHASLLAFGKPCPVTDLFGASGRELLCRLGLPDPWTKNIATALLMIDELEREIAACEAELRALGADHPYVSLLQSAPGIAWVLGFTIASEIGDIERFSSPKKLVGYTGLCPRVHQSGGKDFRGPLSKNGPKYLRWALIEGATHASRNAIYKEHYEKTKARLGPQRGTKVARVEVARKLAEAIWHMLTTGATFAPARSHMSLAA

SEQ ID NO: 212554 - protein, 363 aa, unidentified
MKKNSKKRPVAQETVTIGIDLGDKYSHYCMLNESGQAVESGSVLNTEGSARKHFAGMPPARIALEAGARTHWWAQLLRSFGHEVWVANPRALAGKGRRKNDTSDAERLARYARQDPRLLEPIVLRSPEQQADLAHIRVRDALVRTRTLLVNLARSLAKEAGQRLPASVTDTFGTRALERLPAELAELLAPVCSSIDDLTRKIEAQEAKVEKLCREKYPDTRYLRSVQGVGSLTALTFVLTLGSAERFLHSRDVGAYLGLQPSQYQSGQRDPQLGISKQGNTYLRRLLVQCAHHILGPFGKPSQLRDWGRALGARGGGNARKRAVVAVARKLAVLLHRLWRDRAWYQPFYSAPPSDTTALALMA

SEQ ID NO: 212555 - protein, 413 aa, unidentified
MTETVLMLSAMWFVGVDWASEEHAVHVMDVHGRRVKAFMIKHSRDGFATLVARLAKLGQAGAVPVAIERPDGRLVDVLLEAGHPVVPVSPNAIKAWRDGEVVSGAKSDAGDAEVIAEFLRMRQHKLRVLTPFSDATRGLRAVVRARDALVDQRVAANNQLEACLEAFWPGANVIFADICSDIALAFLERYPTPDSADRLTDKQLSAFLVRHHYSGRRSAGELLERLRSVPDGIRSGLESRARRAAVLSYVGVIRALNTAIKQLAAEIAAQLGEHPDHTTFTSLPRSGSINAAQMLAEWGDCRQAYDSPEAVCALAGLTPVTKHSGKHHAVYFRWACNTRFRDAVTTFADNSRHASPWAAGVYQRARDRGCDHPHAIRILARAWVRVIWRCWIDRVAYDPKLHHAAQQLTANAA

SEQ ID NO: 212556 - protein, 387 aa, unidentified
MPQPNDLSRSLVTLEQDSTLIAVIEMGQSSWLVAGIVPGIERQPLKKLTADQDGLLQLLHRWRKEAAQTGHTIKRIAVAYEAGRDGFWLARWLRAREIEAYVIHPSSVPVSREHRRAKTDRLDTELLKRAFLGWLRGEPKHCSMAAIPTVEDEDAKRPSRERESLVGECTRIVNRVKANLARLGIRGFRPRLAHAPKRLDTLRTPEGTTVPANTLAELQRDMAHLRFVKQQIKEIETTRTKRLQQASGGGRNAMVRLLARVVGIGIETADLLVQEAFSRKLRDRKAVARYAGLTGAPDESGQKRRERGLAKAGNARVRHAMIELAWGHLLHQPDSALAEWYRRRTVHARGGTRKTMIVALARKLLIALWRLVTTGEAPAGLLLRPAA

SEQ ID NO: 212557 - protein, 372 aa, unidentified
MNYNTVYVGMDVHKESFTLCSCKYEDEKASHYQRTPASYKNVLRYLAFLRTIYGEDTRFVCGYEAGCLGYSLYHQLENFNVECVILAPTTMLEQRSKRRIKTDKRDAEIIAKSLAQHNYRPVHIPTKMDNQTKEFIRMRDDHKAELKKIKQQILSFCLRQGYQYDGSGNWTAKHVKWLRSLKPAGLYKEILDEYLLTYTILTDKLNRLDQRIEELASKEEYKESVSKLTCFLGIKTHTALSVIVEVGDFQRFVSARKFAGYLGLVPGQHSSGDDRNGLGITKAGNTHVRRLLVESAQSYTRGKIGYKSRVLRSRQAGNSPQIINYADRANERLRRRYYQMVLKDGKKYNIAKTAIARELACFIWGMMTDNIY

SEQ ID NO: 212558 - protein, 452 aa, unidentified
MMSRKPVLLYHKLWLVYLEESESVGSCHSVYSWIGFVSSCHASLHDLISTVENRVFYERRSFLMTLYVGIDIAKYVHVASIYDPSTGELILDSLHFDNNLKGFKLLLSKLKSLHDSDVVIAFESTAHYHQNLFNFLTDQNYKCFLINPYLTSRFRSVSLRNAKNDNIDSRAIAYFISLKHKDLLEEEFQMNELKELCIHRDDLMKQSSALKTRLLTYLDRVFPELESIVDKHGIHSKAVRAILKDYPTAKAISSVRVDHLIKLASDASKNRFPSDKVRKIKEAARSSVGFDSLALALKIRQTIQSLESLEKQIDEVELSISSLPSVMDSPLHKLKGINSIEIAYILSAIISITRFSSEKKLVAYAGLDPVIRQSGTWQAAHTRMSKRGNKLLRYALIWTANNMRKHDSALKDYYEKKREEGKSHYNALGHCAAKLCRYIFFILNHPDLDFVM

SEQ ID NO: 212559 - protein, 347 aa, unidentified
MDHVGLDLGKRESQIAILAEDGELINMRIRTECRRLVEMFGRRPKARILMEASTESEWVARCLEDLGHEVIVADPNYAPMYAQRTRRVKTDRRDAHALAHACRAGSYRPAHRTSTERRDLRARLAVREAVVRTRAAWITRIQSLVRREGCRFRTGAPETFLTRVEELALPPALMTVIAPLVELLGPINKQIAVLDEELERIVAADEVARHLTTVPGVGPVTATAYVATVDDVTRFRGAHQVEAYLGLVPSEWSSSEVQRRGHITKAGNSRMRWLLVQAAWCILRRRKRPQTAALRDWAERIAGRRGRSIAVVALARRLAGILFAIWRDGTVYDATKVRGPLPARRAA

SEQ ID NO: 212560 - protein, 457 aa, unidentified
MSKRSKKAKSHSFKVPNLPKHLQHINLNAAGIDIGSERHMVAVPEGRDTVSVREFGTFTADLEALATWLKQCGVTTVAMESTGVYWIPLFELLERRGFEVKLVDARHVKNVSGRKSDVLDCQWLQQLHTYGLLAGAFRPPDEVCVLRSYLRQREMLIQTASMHIQHMQKALQQMNLLLHNVVSDITGVTGMKIIKAILAGERDPRVLARNRNERCQNTTATIAKSLVGNYREEHLFALRQAVDLYETYQAKIADCNQAIIKQVEQQPDISDEGPPTPEKPVQARDRLREGVDVRDLLFKKSGVDLFAIPGLAADTLLTLASEVGFDLTPWKTEKHFASWLNLCPGTRISGGKLLKNKTKRHPNRATQAFRMAAASLHHSQTALGAFYRRIKSRAGGQYAVTATAHKIARIYYAMLTRGTNYVELGQQAYEQRYKKRRLEHLKVQAKSLGFQLVPCAT

SEQ ID NO: 212561 - protein, 359 aa, unidentified
MSSIAQQPMRRKVAIGVDTYKHIHVAVVLDELGGRLGELTVPADSGGYVQLERWAVGFGRILAFGIEGTGSYGAGVASHLQRQGHRVIEVNRPDRRERRMNGKSDVLDAENAARAVLSGRATAMPKAADGEIEMLRQIKIAKDTAVKARTQAMVTLKTLVVTAPPELREELDGLPKMALIERCAGLRPGPMITKVAATKHALRGLARRWQQLQVEIKEHERHLAALTERVAPAMVAAFGIGPDTAAEMLIVAGDNPERVRSEPAWAKLCGVCPVPASSGKTSRYRLNRGGHRQANSALYRTVIVRLRFHQPTIDYVARRTAEGKTKAEIIRCLKRYVAREIWAYLHPDRHAAPAPELAA

SEQ ID NO: 212562 - protein, 354 aa, unidentified
MIIIGCDFHTRYQQIAMAREETSELLGERRLDHESGEAHSFYRSLQSLQEPVRVGIEATGPMHWFERLLAELGHELWIGDSAKIRASEVRKQKTDERDARLILELLLAKRFPKIWVPTPAERDLRQLLWHRHKLVCLRTMLGNQLHFLAMSQGLCRKKKLFTKKGRAELTGLAMGPWTRRRREELLKLLDQVDAPIAELDRAVLEEAQRRDDAVLLMTHPGIGPVTSLAFVLAIGPVTRFCCSRKLVSYLGLNPSEDSSGQRRRLGAISKQGNTMVRWLLIEAVYPAVRKDPALRQDYQRLKFRRGHAVAKVAIARKLAVRMYWMLRSGAAYAQLVRRQGSPGATLVDASPSLG

SEQ ID NO: 212563 - protein, 450 aa, unidentified
MAKRKAVFELKFPNAAGIDIGSSSHFVAVPADRDDTPVREFPSFTVNLCGIADWLTACGIDTVAVESTGVYWIPLYELLESRGFTVYLVNARHVKNVPGRKSDVLDCQWLQQLMSYGLLTRAYRPTDDICALRAISRQREMLLSYQSRHVQHMQKALVQMNIQLGNVITDVVGDTGQKILRAIIAGERDGQVLARFRNSRIRASEDDIAKSLVGNWREEHLFALKQAMALYDAYAERLAECDQELGSMLARLGWYDADPGKPKRRSHAKNAPRVDVRTYLFRMCAVDLTRIDGIDTTTALKVVAEVGPDLSRFPTSKQFTSWLGLCPGTKITGGKRLSGKTKRTANRAARALKTAAASLLKSQSALGAYYRRMCARLDKSKAITAAAHKLARLIYAMLTKGSEYVDRGQDYFEERYRQRVLHHLKRRAESMGFKLEPVTVAENNFVHSVT

SEQ ID NO: 212564 - protein, 391 aa, unidentified
MFYVFILFLLRNLSKGFGKVKKIDHDIEGFKRLLEDIQKLEAETNEKVCAVFEATGVYTKPLERFLSKNSIKTYIINPLESARKRKEEIHNKKTDKLDPISISKVYYDKEEMMELKKKDKTYNWLRKKNRLYEDQLNHLRKYKVTFQNQLSICFPGYLDLFRDGYSDIPMTILKKYPHPDLLKNKKAETVARYLEKNTCHTHKVSLEYALKIIEFAKKTYPGCEKDDVEVEIFKILLDKVIETQRECEKTLNEMITVASTLEEYRYISSIDGIGPNLAARIIAEIGDIEEFKSREALVAYAGLDPHIYQSGDQDGKHLKISKKGNKYLRCLLFLAVGCSIRGAKDNPVNRFYQKKKQQSNPLNSKAAKTACTAKLLKIIYGICKNKTTYKR

SEQ ID NO: 212565 - protein, 317 aa, unidentified
MSEHESFVGIDVSKAQLDIASRPSGERWQVRNDPAGCSSLVERLLRLRPSLIVLEATGGFEAAAATALATAGLPVAVVNPRRVHDFAKATGQLAKTDPISAAVLAHFGEAIRPPIRPLPDATTKELQHWLARRHQLVEMLTAEQNRLPGTLGAVQAQIRELITCLRRQLHSADRKLKDLIQQSPVWREQEQLLRSAPGVGPVLATTLLADLPELGQLNRKEIAALVGVAPFNRDSGTWRGQRTIWGGRAPVRAVLYMAALVATRANPVIRVFYQRLLAAGKPKKVALTACMRKLLTILNAMMKHRTAWKPSAAEFAA

SEQ ID NO: 212566 - protein, 339 aa, unidentified
MFMIGIDPHKGSHTAAAVDHSETVIDTLRVVADCHQRQRLLDWATPFSPRTWAVEGATGMGALLAQQLVAAGEHVVDVPPKLSSRVRLLERGRIDKTDPNDARSAAIVAWHNPLLNVVVGLDEHRVVLRLLADRDHRTTAQRTRTICRLHAMLCLLIEGGTGRSLTVAKAEELLASVHAGNAVMIERIAAAGELLDEVRDLDRTRAEIRKRTKLVIAATATTIIDVYGIGPMMAAIIIGRVGDIGRFPSSGHFARHNGTAPIEASSGPKKRHRLNPRGDRQLNHAIHMAAVTQISHDTPGRVYYLRKQVEGKSRKEAMRSLKRCISDAVYRQLLADSHR

SEQ ID NO: 212567 - protein, 406 aa, unidentified
MPPRNKPKRFIGLDIHKHFFVATGIDKDQDVVFGPQRVPNEKMESWIKKNLTKEDSLILEMTTNAYEVHDILVGKVHSVTVAHPPHVTLIARAQVKTDKKDSLILAQLHAAGLIPGVWIPPKEVRSLRALVAQRAKMVSLRSIARCRLHAVLHRHQILKPEGMNLFAEEAVDWWCSLSLEPIELINIQSDLDTLTFADRQVKRLEEQLGIIAVEEERLPYLVHIPGISLINGMSILGAIGDIKRFPSAKKLVGYAGLGARVNQSGTRYRTGRITKTGRKDLRYAMVEAANSAARTHPRWKEELKRLEPRLGRMKAIVAIARKLLVAVWNILYYEQVDRFASPKRVAAALHLLANRVKVRNLSEKSAAQYVRNQLDRLGIGQDLTHIPWGSKRVKMPISTLSISSTD

SEQ ID NO: 212568 - protein, 401 aa, unidentified
MSLDSHEEPAAIQTHIGAIFISLELSRSRWLITSLVPGGGQRMSRHSVEAGDLAGLLARFWAIRDKVSARTGISYPIIVIQEAGLDGFWIHRALEQEGIESHVVDAASIAVSRRRRRAKTDRIDGEALLRVLLAFKRGEPRVCSMARAPTPQDEDRRRICRERKTLLVERIRHVNRIKGLLFSQGVGDYEPLRRDRRRALEAVRTGDGRALGAHMKAQIGRELDRLELLLGQIAAVEAERDAMLAREADEAKAKAAQDAKRPPAAVEMLMDLRGLGPDTVAMLWTEAFYRSFDNRRQLAAFVGLAGTPWQSGSIDNEQGVSKGGNHRLRTAMIQLAWLWPRHQPGSALARWFIERTRGASKLQKKKMAVALARKLLVALWRWVDAGVVIEGAVLKSAAKAS

SEQ ID NO: 212569 - protein, 323 aa, unidentified
MAWVGIDVSQANLDVALMAESGQVQTLQVDNTSAGYARLDGWLRKRGAGRSAVTLEATGRYSAGVAQALYEAGYRVSVVNPARIKGYATAQLRRNKTDKLDACLIADFCRTQQPQAWQPAPEHVTHLQALVRHLAVLEAAKQAVDNRLRERAALPALVVEQLQHQRDLLKDQIQQLKRAIQGHIDQHPDLKQPRDLMASIPGIGRLTAAKLLAECRPLTDFDDVRQLVAFAGLNPAHHQSGSSIRKKTVISKTGNSAIRAALYMPAVVAKRCNPVLRPFAQRLLDRGLCQMAVIAAVMRKLLHLVYGVLKSGKPFDPNFALAS

SEQ ID NO: 212570 - protein, 426 aa, unidentified
MNVVEDIRLEEFRQLRKEIRGSREYLIVGIDVAKERHHAFFGTATGKTLLRRLIFENSGEGFRKLLDQAEAIREDQGLSRVVYGLEPTADYHKPLGEYLLSYGQRVVLVSGVAVKRNRELLDGRWDKNDTKDSANVADLITQGKCQFYEHPGMELRNLRSLLSLKRKLKKQEHSYRVRIRNHLLAQYFPELDRFSEYREVEAIVRWCLDPSRIAGFENDQFRELVSPNRKSRALRQRLQAIQELAMDSVGCPMGEGAAFEAKVLVEGLRQIREAIKATDYQIQDICRPFPEYEYLLTIPGFGPDVSAKVLGAIGNPYRFENRKQVLKMAGLDLGAERSGKTSDTFYPVISKKGKADLRYALYQAAHITSTRNKEFKRYYAQQLAGREKEKGINTKRKVKLAAKLLVIAWTIMKKREPFDFYYFTQD

SEQ ID NO: 212571 - protein, 324 aa, unidentified
MTIVADKYDYVIGIDTHARTHTYAIINTRTGSRKACQTFPVTAPGMNRAIAWIRGNTQVHCIAAVEGTRSYGATITHALTEHQVAVVEAKPPRRKDQADRGKSDQIDATDAALSLLPKDITKLLQPRDEGARAALSILSASRARIDAQRTVNRNSLSALMRTYDLGIDARKPLSAAQIKQISRWREHEADTIEQKFARDEAKFLAASVLAADQMLKENSRAMSELDEQLAPGLQQDFGLGPVTTAWILMAYSHRGRVHSEAAFAALAGVAPLQASSGNHERHRLNRHGDRQLNKALDVVARTRMGHDAATKRYVEKRTAEGLSP

SEQ ID NO: 212572 - protein, 475 aa, unidentified
MNLKGTKKKNQVSNANIFEQQELLKKIEVVRENLTASTWHELETKGKFDKNAKLSFICDDMLILGCDVGSETHYLRAIDTRGRELSKSAFSFSNNVDGFSKAKEWAVKIAAEYDKKQIVLGLEPTGHYWFCLATWMISNGISVVQVNPYAVKQTKELEDNSQLKDDAKDPKLIANLVKDGNFGMPYLPEQLYADLRRLSMFRDQLNEDRIRSINRLHRELKIYFPEYKEALGKTEGTFSLELLKQAPFPDDLAALKEDGIRQIWHNAKLRGRGYSRAGEILEYAKASVGIREGKETGKLVVQWFVQKILELDAELALIETQINQKCLEIPHTDKVLEICGIGENTLSGMVAEMGDISRFDDVKEIQKLSGLGLVASSSGKHKGETRISHRGRKRLRYWLFQAAKSAVAHAEEFKKLHVYYTTREQNPLKKMQSLIAIACKLLRIIFTILKKGIKYDPRKMLKDIRRESRQESLAA

SEQ ID NO: 212573 - protein, 355 aa, unidentified
MDSKKYIGMDVHKESISIAVRNDVGKIVMECVIETKASMILQVINGLRGDLQVTFEEGTSAAWLYDLLKPYVTKLVVCDPRKNASMREGNQSDKIDARRLAELLRLNHLSPVYHGEHGLRSLKELVRSYLTITKDLARVMTRVKAIYRSWAIPCTGKQVYAPRHRAEWLGKITEPGVHRRAEFYYQQLDALRALRQEVRRDLLAESKKHPAWKLLCQIPSIGPIRAAVLLGVLQTPHRFRTKRQLWAYIGLGIETQSSADHRRVDGQLERVKKPSSIRGLNRNCNHDLKNLFKGAAIVASSKPGPFQEFYNALLTKGIRPEMARLTLARKIATIVLIVWKRGASFDAQHLKPQTA

SEQ ID NO: 212574 - protein, 348 aa, unidentified
MLIIGCDYHPGFQQIAMVDTETGELGERRLTHREEAEQFYGALKERRVRVGMEASGHARWFERLLSDLRFELWIGDAAEIRTKRVRKQKTDRQDAQLLLRLMVEDRFPRIWVADAENRDLRQLLWHRHRLVQMRTRVMNQLHVVALNEGLRRKKALWRPAGRSELESLVLAPWASRRRQDLLDVFDQLTPKIQELSRALEEEVEKRPVTQRLMTHPGVGPLTALAFELVIGTPERFHCGKQIASYVGLVPSEESSGERRRLGHITKQGNSLLRYLLVEAAQVTVRSQPQWRSKFFHIAMRRGRKIAKVAMARKLAVHLYWMWRRGWDYGEFEKLGSHAGAPGNRHGVQ

SEQ ID NO: 212575 - protein, 444 aa, unidentified
MDLVYARCAGLDVHKATVVGCVRVPGLGRGERHTETRTFATTLRGLEELTTWLTGHGITHVAMESTGVYWRPVYAGLEGVVQVLLVNARHVQMVPGRKTDVRDCEWLAQLLECGLLRGSYVPPAAVRDLRDLTRLRKALIRERGHHVNRIEKTLELANIKLGIVVTDIMGKTGRAILEALSAGHDAPEQLTALAQGSIRTKKQAALREAVAGRLTPHYAFLLRQHLSLIEALDTHIGTLDARIETAMAPFAEAAALVQTMPGVATRAAQAILAETGVDMGPFPTAGHFASWARLCPGTHESAGKRRPTTTGQGAVWLRATLQEAAWAAIHTKKSYYRVLYHRLKARGSAKKAIVAVQHAMLIALWHMLKHRVPHHDLGADYFERRNTERTRRHHVHRLERLGRRGRQPHRTPGHVGQRRRQRLQLRVRLATEAATEMRHHHADA

SEQ ID NO: 212576 - protein, 358 aa, unidentified
MTNLAEKLDFSGHTISIGLDVHLKSWTVCLYLGNQYLKTFSQSPPSAAGLSSFLSSNYPGAHYECAYESGFCGFWIQRSLAEYSIGCIAVNAADVPKTDKSTKNKTDKLDSRRIAQALQAGQLRGIYVPDGELEADRQLVRLNDRYSNDLTRTKNRIKGLIYLIGIETPERFEKANWSGAYIKWLKELECGQPSIRTVLDRQIFLMETIKGQKLAALKQIRQLMGRPRYSALASRLCSIPGIGLVTSAVLVTELVDMGRFKSFDQLNSFIGLCPMQHSSGEYDRRGKMTTRQNRRLRYMLVEAAWVAKRTDPALTLCYAKLLSKMSSKRAIIKITSKLLSRIRYVWMNHTDYVTGLVK

SEQ ID NO: 212577 - protein, 319 aa, unidentified
MQRIDSSQAVVGIDVSKSSLDCFIDLPDKVLTVSNDETGRADLIAQLRQMNVGLVLIEATGRYHRRLAADLLDAAMPVAVVNPQRAREFARSTGKLEKTDRIDARVLAQFARAITHQTVAQGPQKQTELDDLVSRRRSLVQLRIAEKNRQGEEQPKLARSQSIKLLRLIEQQIEDLDRAIAALIEADDDWKNKHRIITSIPGVGDSTASQLIADLPELGKVNRQEIAKLAGVAPLNRDSGGHRGKRRIMGGRAAVRCALYMGAFNAMRRCDRFTQMARKLHQAGKPFKVIVTACMRKLLVILNEMVRTNTCYRATVAHG

SEQ ID NO: 212578 - protein, 426 aa, unidentified
MRVLYDRVAAIDVHKDMVKVAIRVPGAKRGTRKTDVLEFRTFYGVLQAMARELRGRGVTHVVMEASGVYTDPVYYALRELDFEEVMVINPAHAKALKGHKTDAKDAIRLLDLYECGLLSGSYLPSEDLREVRDLARYRMKTVQARTSEIQRLQKTLETAGIKLSSVVSDVTGGSATAMIEALISGERRGSVMAGLAQTRMRTAGKMADLSMALTGRFTEHHALMCRLHRDRITIFDDAVKDLDAKIAPLVARYAREAELLKTLPGFGDVIVAGWLGAIGPAPHQHFATASRLASWAAICPGNYMSARKSKGGRTGDGGAYIKPLLIQAAWAAVRVPGRLQARFGRLVRKFGGPRNKGAQKRAITAIAHTLLKIAYGVLKTGRPYADLGADFYTRRESPDARQDYLMRQLQKLNPGCVITITPTEAA

SEQ ID NO: 212579 - protein, 420 aa, unidentified
MGFIGGDLRESFIGRIKGADPAHLLAVPVDVGKHSAAALVCDFWGEIVAPPFVFELNERGFQDFAVIIARAEAEREAGWVRVGLEQAGHYHRPLQARLETHGLDVTLFNPAQVKANRDQDLLRSLKSDATDLAAMAELLIRGKGRLSDSGDEAIAIQGALAAHRRRKVRARTALKNQVHANLDLVFPGLSGCFHRIMHTRVGRLLIDEGLTPQRVRRLGPERLRRFCFKRGVVLQRAKAQQIVEAAATAFALNEALSGVHARMLAADVGLLSRLDQEISWAEGELAEVLPRTPARVLVTLPLVATVRASNYGGAVGDISRFRTAGQVYRLSGLVPKLYESAGKTRTGARISREGKVELREAIIDLGEALRQGHPDFARYAAEMRARGKHTGVVRCASGQRANRVAFAMMREQQPFDPTRW

SEQ ID NO: 212580 - protein, 312 aa, unidentified
MHELFVGIDVSKDKIDVHVRPSGEYITLGTAPAGLHDLVERVQAWGPALIVLEATGGYEVVVAAALASAALPVAVVNPRQIRDFARATGQLAKTDALDAAVIARFAEAVRPPVRPLAPPAAQALGELVTRRRQLLEMLGAERNRQAQARDRQVQRQLGTHVRWLTKALADLDRDINDTIRSSPVWRATDDLLKSVPAVGPVTAHTLIAQVPELGQLGRRQIAALIGVAPLNRDSGTLRGRRMIGGGRASVRQVLYMAALVGVRYNPRLAAFYSRLTGAGRPKKVPLVATMRKLLTILNAIVRDQRPWQPQNA

SEQ ID NO: 212581 - protein, 344 aa, unidentified
MERYLGIDPHRDSCTLSLVSAQGKKTKQFVVPTEGSALVRSVRDLRGELHVCVEEGEWSEWLSEILSPFVERLVVCQPKKRRGPKSDAADSRELAERLRTNRTGPPVYKPPRPWARLREAVRLESKLTQDVTRTKLRLNSLYRRRGLVSPRDELYSPRHRTEWVAKLPPSSRPSAEIWGEEIDALGELQRKAKSQMLEAARTFPIWRTLQTAPGIGEKRAAILVATVVTPHRFRTKRLFWSYCGLGVVTRTSSDWVQHSGHWVRAPVIQTRGLNRACNRPLKAVFKGASLTVRQMLPPNPLLEHYDRMLEAGTKPNLAQLTMARKIAAIVLAMWKTESEYKPMS

SEQ ID NO: 212582 - protein, 358 aa, unidentified
MTNLAEKLDFSGHTISCGIDVHLKSWTVSLYLGKQYLKSFVQSPPSVDGLWNFLSTNYPEARYECAYESGFCGFWIQRAFAARSISCIAVNAADVPRTDKDTKNKNDRNDSRRIAEALQAGQLEGVYVPDTELEADRQLVRLNERYSNDLTRSKNRIKGLLRLMGIEIPQRFAKANWSRAFVAWLKEASCGEPSIRIVLDRQLSIMETIRSQKLDTLREMRKLMGKARYRTISELLCSIPGIGPVTAAVLIVEIGDISRFEKFDKLNSFVGLCPMQHSTGENDRKGSITTRQHRRLRYILVEAAWVAVRTDPALTICYSRWTARVGSRRAIIKIARKLLSRVRHVWNDRAPYVSGLVK

SEQ ID NO: 212583 - protein, 350 aa, unidentified
MDLAKRVIQVHAVDADGRVLISRALARDKFVAWCGQLPAGCIVAMETSSSAHHWARKIASLGLSARIIAAQLVSPYRRQGASGKNDANDAAAVCEAASRPGMHFVPVKSIEQQSMLCVHRLREGFKAERTACINRIRGLLAEFGLVFAQSPAALEAVLADVLEDASNEMNALARRVLQRAHEQWRELDAHLAWCDERIAAHAKDNDAVKAAATLIGNGPVTASAAIATVVDFKQFKCGAQFGAWLGLVPSQHSSGGKTRLAGITKRGDVYLRTMLIQGAKSAVMTAHQRNDPISRWALALRERSGWQKAVVALANKNARILWAVMTKGERFDARHVSLKPGALAGAAARH

SEQ ID NO: 212584 - protein, 315 aa, unidentified
MAMPVSVTKPIVGVDVAKNELVIYHAELDVLEAIPNDKAAIKRWLKVLPGPVDVAIESTNTYHLDFADLAYEAGCTIYMMGGYELHHYRKGVKIRAKTDALDAKLLARYLKNEGHELHPWAPPSPLYRQLLSLFRRRAALVQARVALVQSWANEPLLKTAFAEQIAAMQRLEALIEKTIKDHLKNAGLLGQLNRCLKVEGIGFLTGARLLTAFQRGDFKNADAFIAFLGMDLRVSQSGQKDDRRSLSKRGDPEVRRLLHNAAMSASRTPAWKGFYERLRARGFATTQALVILARKLARIVFALLKGQSEYQPKAA

SEQ ID NO: 212585 - protein, 444 aa, unidentified
MQQFAGGVGQAGYMDRIRALTPEQCLVVPVDVGKKTAMMLVADHFGHVVCGPIEFTLTTSGLAKFVQIVIQAQQRTAAGSVRVGIEAAGHYHWALAAGLRAKGFDVVELNPYHVKMARAQMGQARVKTDLRDCLAMVELLVRGQGWPVHRRDGATAEQAAMVAHRRRKAAAAKVLGSQVHSLADVAFPGLTGCFTTGLEAKALRMLLATLPDPVRTATMDPEQLVAHAAQHGVRMLRPKAAQVIAAAAESMCVSDTQRVVAARLLVADITAFEALRLDLIACDQRLAELLPDTPAGVLTSIPGVGVVTASSYAAALGDAHRFTNAAAAYRFSGLTPSSYESAGRRATTVRISKIGSVELRQAMIALGVGITLHHPEFAAYRARLRASGKKPIVATIAVAHRAHRLAFAILRSQKPYDATTWAAATSRSERRDRPVTAAEATRTT

SEQ ID NO: 212586 - protein, 413 aa, unidentified
MDWTACVGIDWGDREHACQVRGRDGARHDDRIGSTPEALHEWVRRLRARFPTGTIVVAVEHGRWSLLYLLAAYEFFVLVPINPRASKAYRDSLRLSGASSDPADAALICEFVIKHLSELRAWQPGDVITRKLRLLVEHRRTLVDQRTALTHTLADTLKQYFPQALQWFGGEKSPLLRAILRRWPTLELLRAASVEELEQVMRSQQCRKVAVRAKATMEKVHAAIALTTDQAIVEGQAMYAQALVEVIEPLDEQVARHDQVIAAEWAAHPEHQLFDSLPGAGKVLAPRLAVAFGRDKTRYQSADEMQCYSGIAPVVEQSGPHWWTHARWGYPKFVHQTFHEFAQASIPHSAWAKAVYDQHRASGCGHHAAIRALAFRWIRILFRLWKHDEAYDEQRHLESLKKHQSPIAARLAA

SEQ ID NO: 212587 - protein, 342 aa, unidentified
MKQYVGLDVSQRETAVCVVNETGQVIFEGKAKSNPGALTDLLSKHAPHAERIGFETGAMASWLWHELRRVELPVVCIDARHAHAALSVRMNKSDQNDARGLAELVRVGWYREVKVKSEESQKIRAILVARSRLVSMRRDIENQVRSLIKECGLLFSRAIGQQFRNQVSELLGVDHLLLSVISPLLSIHENVCQQQGKFDNEVRRLAKLDETTRRLMTVPGVGVVTALTFRHTIDDPSRFRSASTVGAYLGLTPRRSQSGETDTNGKISRWGDRLLRTYLFEAATVLLYRTKKWSSLKAWGMKLAKRIGMKKAKVAIARKIAVILHCIWVDGTSFDWGQPKPI

SEQ ID NO: 212588 - protein, 342 aa, unidentified
MNHYAGIDVSLECSSVCVVEANGKIVREAKVVSEPEALIAWFRSSGLELERIGLEAGPLSQWLFAAMKAAGLAVELLETRHVRKAFETMPVKSDRNDARGIAQLMRLGWFRPVHCKSVGAQEARSLLTARKLVQSKLRDVENSLRGILRGFGLKVGKTTERGFAGRIKELVAGHPHLQMIADALLAVHAVLRKEFAAFEKQVRKMARSETRARLLMSTPGVGPIVALTYASAIDDPGRFKSSKQVGAHFGLTPKKHQSGETDYTGRISKIGDGSVRTALYEAAHIMLTKPVKGCSQLKSWAMRIKRRAGMSKAKVALARRLAVIMHRMLADRTPFNAAAAAA

SEQ ID NO: 212589 - protein, 429 aa, unidentified
MQEPSKAASAAGVAAYVGIDWADQKHDVTLRAAAEPAKVEHQRVAHELDALMEWVGQLHQRFAGKGKVLICLEQSRGALIYHLMGYDFVELYPINPGQLASYRETFSPGGAKDDRPDSELICELLYFHRERLKAWKPDDELTRKLAFLNEGRRKAVDQRTELANEIKSQLKVYFPLALKVLGNDTSTMLAADLLLKWPTLEALQKERPHKLRKFFYAHNCRNEPKLLERLELIKAAKPLTRDLAVIEPAALRVQLLAKQLKSLLPFIALYEKQIAELFGAHPDSFLYRDLPGAGAALGPRLVTAFGTDRGRFDNPTELLSLSGIAPIRRASGKKTGKRASVHFRHACPKFLRQSFHEFGACSIRYCPWAAACYQTQRDRGKGHHAAVRAVTFKWIRILFACWKQRQPYDPQRYQQALQRRGSQYAATAA

SEQ ID NO: 212590 - protein, 444 aa, unidentified
MRHQLAPSHRETAVREKVVEDEYRIYVGIDWATEAHQACVLNNAGRMLAERSFAHTGEAVAAFAQWLHELAGGEPAQVAIAIEVPRGAVVETLIEHGFHLYAINPKQLDRFRDRHSAAGAKDDRRDAFVLGDSLRTDRARFRRIRLDDPLVIQLRELSRVDEDLGREAVRLTNHLREQLHRFYVQALKLCPSADEPWLWALLELAPSPVRGCRLQRKTIERLLRQHRIRRLNAQAVLAALRAPALHVAPGVVEAATEHIALLLPRLRLVHTQRQRCGVRLDALLDKLAVVEGNDDSQQREHRDVEILRSLPGVGRVVAATVLAEASGPLAERDYQALRAHAGIAPVTKQSGKRRTVVMRYACNGRMRNALYHWARVAATCDPASKTYYAALRQRGHSYARALRSVADRLLRILIAMLKSDSLFDSTRLRHSVDAAINEEVPCAS

SEQ ID NO: 212591 - protein, 346 aa, unidentified
MNQIIRIGMDTSKHFFQLHGVDAAERPVLRRKLRRHQVLAFLAKLPPTVIGMEACGAAHYWARELRKLGHEVKLMAPQHVKAYVKRNKNDGRDAEGLCEAMSRPTMQFVPVKTEEQQAALMLAGVRQQLITRRTQLSNAIRGYAAEFGLTVAKGLDKIELLLAQVAQDETVPEIARELFAFHGKDYARLQIDLKAIEVKLMAWHRADATSRRLAQIPGIGPIGATALVMKVPDPRLFRSGRHFAAWIGLTPKDHSTAGKTRLGKITRAGDEMLRSVLVAGATAVIQQARRGRGRPSPWLVALLARKPPKLAAVALANKIARIAWKLMTTGESYDGARMPGALAVAA

SEQ ID NO: 212592 - protein, 347 aa, unidentified
MNFYTKEHLFYCGVDLHTRSMYICVLDQSGQILLHRNLAADPQRFLDAIGPFRQDMVVCAECMFSWYWLADLCAKENISFVLGHALYMRAIHGGKAKNDKIDSHKIAALLRGGMIPQAYVYPAAMRPTRDLLRRRNYLVRKRADLLSHIQNTNSQYNLPVFGKKIAYRSHRTGVAEQFPDANVQLSIKTNLELIDHYDKLINALELFVLQNARDHDPGSLHLLQTVPGIGKILSLVILYEIGDINRFPSVGQFVSYARLVACAKESAGKKQGTSGRKIGNMHLKWAFSEAAVLFLRKNPQGMKYKKRLQQKYGKSKALSILAHRLGRASYYVLKRHKAFDMKRFLSR

SEQ ID NO: 212593 - protein, 349 aa, unidentified
MDFYAGLDVSLEATNICVVDGDGNVVREAKLETDPDAIELLLAEWGIHLKRVGLEAFSYSAWLFTALAEKGLPVTCIETRHAKAALNAMLNKTDRNDAKGIAQMMRTGWFRAVHVKSEGAQTLRALLVGRKALLGKVLDMENMIRGLLRPFGLKVGEISVGRFDARVREIMAGKRDLEVIVAPLLDARSAMRLQLAKLQRLALAAARSDNAVRRMMTVPGVGALVALTFRATVDDPARFRKSTNVGAHFGLTPRRYQSGQTDRIGGVSKCGDELTRAMLYEAAIAILTRIPKNFKLRLWGLRLARKKGLKRAATALARALAVLLHKIWIHGTTFRFGAGGKRGRVAAAA

SEQ ID NO: 212594 - protein, 342 aa, unidentified
MSAIGIDTHKDSLAACAVDELGAVVAEAIFPNDPGGHAALGSWAGDVAPGGRLGFEGSSTFGAAAARTLDLAGFEVREVPPHLSRRERPRTRRPGKSDPGDALAIARVTAREADLPPIRRVDPTTELGLLLAARDDLLAEATRIRNRLHADLVVLVPGYGGRVANLVWERHLTAAGRALRRLTGVHPELARERLADLRRRQARIRALAERIEGLVAGHPLLGLPGAGPLTVAALVAEAGDLGRFRSADAFAMLAGVAPIPASSGQTQRTRLNRGGNRQLNRALHVIAVVQARVFPLARQYIARKVAAGRSWKDAIRSLKRHLARVVFRLLLEGSPQRIRAAA

SEQ ID NO: 212595 - protein, 337 aa, unidentified
MKYCGIDLHSNNSVVIVSDEEDRIVFNKRLPNDLGQIRAALEPHREELAGVVIESTYNWYWLVDGLMDAGYRVHLAHPAAIKKYEGLKHSGDFADAAYLAQLLRLGLLAEGYIYPREERGARDLARKRMQLVRYRTAQILSIEGILMRQTGARMKGEAVKRLTAEQVDEFAFAPDVALAVEANRAVSQALGQQIEALERRLKERVSLRPEYGLLKTVPGIGETLATTIMLETGSISRFAQVGNFSSYCRCVDSLRESNGKKKGEGNTRNGNKYLAWAFVEAANFAMRYCPQAKSFYDRKKNKTNRVLAIKALAHKLARACYHMLRDQKPFDVRRCFG

SEQ ID NO: 212596 - protein, 340 aa, unidentified
MSSLIFCGVDLAKHHFSLHAVDNRGKVILHKSVSRAKLLTTLANMPPMRIGLEACSGAHYWAREFIQLGHDARIMAAKYVGPYRTKGKNDLNDAIAICEAVQRPNTRFVPVKSPERQAILAIHRMREHWVRERTALINRIRALLAEFGIVFPTGRAAIHREVPLILEAAENGLPDIARAVLADCFEHLQTLNQRINEAEQSFDLVVKASPNAMRIMKVRGIGPQTATAIIATIGKGEQFDSGRDFAAWLGLVPKQYSTGGKPRLGRITKHGDKYLRTLLVHGARAAITNIGEKQDRLSTWGRHVLERRGMNRAIVALAAKNARIIWALLHNQTEYQDYAA

SEQ ID NO: 212597 - protein, 340 aa, unidentified
MRSKTVLSKKFKTVGQPNIDELFKVLETYCQDKPHMAVVESTYNWYWLADEFEKRNWNLRLADPSTVSKAGFKYSDDYTDASYLAECVRNGSIRSTAIMPKDDRAVRDLARYRMTLVEDRGRLKTILVNMTTNHLSIKLNADKLLKEIDEAVEKAASASDEGAADEVLSDYYDNRQVRTKMRSLLRRIRFLTNEVEALDEELTELIKPNVYATSLQSIKGCGYVTSMLIGVEIGDIGRFRTHKDFVSYCRLAPTSKLSNGKSKGLGNAKNGNAYLSWALTELATFVVRYNPEAKRVYDRYFNRSRLRVKAIRSVAAKIARGIFMMLKNGEVFDMKRCFGG

SEQ ID NO: 212598 - protein, 386 aa, unidentified
MATPIRTRIEQETPHLSTLFLAFELGKNTWKLGFTIGVAQQPRERTLPAGALETLQQEIARAKQRFGLPEDARVVSCYEAGRDGFWLHRYLVAQGVQNHVIDSASIEVNRRQRRAKTDRLDVRKLLTMLLRHSAGEKKVWSVVRVPSVDEEDRRQLHRELTTAKQDRTRVINRIQGLLAGHGVQLTLQGDVDAQLDQVQQWDGSPLPSALRTRLKRAWQQVGFLTAHIQTLEAERRALLRRREDPAVEQVRQLFTLRGIGVNSAWLYVMEFFAWRDFQTPKQVGALAGLTPTPYQSGQSRREQGIAKAGNRHIRAMAIEIAWAWRRFQPASALAQWYERRFGHGSARLRKLGIVALARKLLVALWRFVKTGVLPEGAVLKAAVPSR

SEQ ID NO: 212599 - protein, 350 aa, unidentified
MSTVTRFFVGVDLHKIVIQICVVADDGRAVCEKRFLVRTLADRGPLFSFLEPYRLSGRLAVEAIGLNRWFVNELLERGYDVVVCDPQKLNLKMLGRKTDRRDAQEIARRLQLGDIDRNCLTWYADDETYGRRKVLRARHAQMEIRQQVLNQIRALLNAYKISGFKGDLTSKRMIAQLSDLELATEELTTVLQSWVSLLVGLGESISLLDGQVKAMDRGGLVEELPRHLESVGPITAAVLVHELGDVKRFTGSKAVAAYAGLVPRVNQSADTAHHGRLTKRGNRELRHVLGEWAVRLLTWNEQVKAWARPRLQRSHKNKVRMALARRLLIGVYKMLLTGEAFSMKRCLGQA

SEQ ID NO: 212600 - protein, 347 aa, unidentified
MKVLIGVDPHKGSVAVAAVDEATGEPLERAGFPQSHSGLRALERWAKRFPERRWAMENSGGLGRYLAGRLAAAGESVVDVPPKLSARVRVLSSGNSRKNDGLDALATVLAASRNERLAQVDPEGSSEVLHLLSERREDLVAERTRALNRLHGLLRDLVPGGVAGKLSADRAARILRGIRSRGGASARLRRRLASEILRDVRTLERKIADLSGRIEAEIEASGTTLTEIFGIGPILAATILGTVGNVTRFPTKARFASYSGTAPVEASSGEVVRHRLSMAGNRHLNYALHMVATSQARSDAPGGTYYRKKLAEGKSRKEALRCLKRRVCDAVYKSLVADSQAPSSSAA

SEQ ID NO: 212601 - protein, 342 aa, unidentified
MTEVSIIGLDIAKLVFQVHGSDASGRVVMRRKVSRAKVLAFFASQPRCTVGMEACGSAHHWAREIAKLGHAVKLIAPAYVKPFVKRQKNDAADAEAICEAMQRPNMRFVAVKSEEQQASAMLFRARDLLVRQRTQLINAVRGHMAEFGWIAPKGSWHRAALADLIQDEGSCLPQAARRVLALMLASLTSLDGQIAELDQEIARRAREDEVARRLMTIPGIGPITATAIAALAPPAETFARGRDFSAWLGITPLQKSTGGKQRLGKISKMGERTMRRLLIIGSSAVVRQASRHGAPKGSWLEQMLARKPRMLVTVALANKMARIVWALLTKGEDYQAPVAASA

SEQ ID NO: 212602 - protein, 505 aa, unidentified
MPWAASPDFSIFLPPGLSRGTTWHFDAVLDKADDSWTKKHFTDKEIAMKHYYLGADVSKGYSDFMFLDAKKRRIEEDFQLDDTFDGHQKLYHILSGFCDQHPDAQIFAAVESTGGYENNWFDALVKFQSNLPLKIARLNPCGVHNNSKAGLERNITDPISAENVAKYMIEHPENVTYQQQDPLASLRKQWSFIKMLLKQKTQLLNQLESNLYGANPEILAYCKNGVPKWVLSVLVRFPTAAKLAKAKKSSLVLIPYVTEQKAKELIQIAQKTVASANDQITAQIIKATVKQIQQLTKTIEAQEKILTEACSIPEVQLLKTFPGISDISAIGLILEIGSVERFATAKKLSSFFGLHPIYKKSGDGTWGFHMSKKGRVVPRQILYMVAMVAVQCNPLIAEIYLKHTEKGMKKKAALGLCMHKICRIIYGMLKHNSAFDANIDRNNRKKSIKADTKKIRRDKRRRYQSFDPKAPVSGRHNKKRKERKQSQSDNIAHNGIIKASVPVSV

SEQ ID NO: 212603 - protein, 404 aa, unidentified
MVDITVSDFMKGRYNLMIYVGIDIAKLNHFAAAISSDGEILIEPFKFTNDADGFQLLTSKLESFDKDSIIIGLESTAHYGDNLVRYLVAKNYKVCVLNPIKTSTMRKNNIRKTKTDKVDTFIICKTLMMQESLRFVTFYDLDLMDLKALGRFRQKTIKQRTRLKIQLTSYVDEIFPELQYFFKSGLHQKSVYALLKEAPTPEAVASMHMTHLAHLLKVNSHGRFNKEMAQQLRVLAQKSVGANDSSLSIQVTHTIQQIELLDSQLERVEAEMTEIMKFNDSVIMTIPGIGYINGGMILGEIGDIHRFSCPNKLLAYAGLDPSVYQSGNFQAKKTRMSKRGSKVLRYALVNAAHNVVKNNATFKAYYEAKMVEGRTHYNALGHCAGKLVRIIWKMMTDNVEFNLD

SEQ ID NO: 212604 - protein, 364 aa, unidentified
MYDSTTTVTVGLDVHARSIRVAAVRADELLEERTLPYDEQAVELVLRRWPVVRCCYEAGPTGFGLQRFLVERGIDCQVVAPGLVPQRPGDRVKSDSRDARKLARLLAGGLLEPIHVPSRELEAARDLVRAREDARLDRMRDRHRLSKFCLRHGRRLPTSSWTVARRKWLSEQRFEFAAQQQTFDTYVHAVDLVDRRIEALERAIREAALQQPWRDLVARLRCLRGVDTLTALAVVAEIGDFNRFRTAEEFMAFVGLVPTEHSSGEQRRQGSITKVGNAHVRRLLVESAWHARRRPAVGYRLARRQRGQDAAVVERAWRCQQRLHQRWQRMAGRGKPQQKIVVACARELAGFVWAIATDQPLRSI

SEQ ID NO: 212605 - protein, 368 aa, unidentified
MHFIQNFHLGDKAKGDFHFHFKLIGMKKILKQVTGIDVSQDELVVCLGQLNEDLSVEFYGSRSFANSLTGFKSLIEWVEKKGSIGGFVMEATGVYHESLAYFLADNDYKVSIVLPNKISNYFRTLEVKTINDYTAAEAIARFGLERNLDNWQPPKGIYKQLRQLTRERDQIIEMRTMAKNHLHADKSEARPHKASLIRAKQRIEFLNKQEKQIIAELHQLIDQDAEMQKLIVLLCSIKGVGFLTSATVLAETNGFDLIRNKKQLVSYAGLDVREKQSGTSIKGKPRISKKGNKYLRKAMHFPALTAVRRDERYKAIYARLISKHGIKMKAAVAVQRKLLELIYAIFKTKAPYDKDYLQKTREQQIVTP

SEQ ID NO: 212606 - protein, 348 aa, unidentified
MNPMTKVTLLGIDIAKEIFQLHGINALANAVLKKKLKRTDLIKFIANLEPCTIVMETCGGSHYWAREFQKFGHEVKLISPQYVKPFVRGNKNDRNDAEAIVEAASRPRTRFVPINDEAEQDIRCVHRIRSRLVSERTALINEIRGLLYEYGIFHPQGVRNIKKFLAEVSGDTESKFHLTSMMRELCIEIYEELTEINKRIEKCDRKLEAIANTNPICQKLQTIPGIGVLSATILVTVLSNPKLFKNGRHFAAYLGLVPRQHSSGGKDKLLGISKRGDVYIRSLLIHGGRSVVKYAPKKNDKRSQWICKLQDRAGYNCTTVAVANRNARVAFSLIKNEMEYQTDYKNAA

SEQ ID NO: 212607 - protein, 405 aa, unidentified
MAIIGMDIHRSFAQAAFLQDGQIKREQRVDLVHDRLIRFGKSLSVEDEVVIEATGNSAAVERILRPFVKRVVVANPRMVRAIAYARVKTDKIDAVILARLHAGGFLPEVWVADDNTQRQRRQTVERMGVLEQVVRTKGRIHAILHANLIPKYSGHLFGKAGKKWLAGLPLPEEEKAIVGRLVDELERNSDQLAKLDMTIIGEALENPRVVRLMTIPGIGPVVASTVLASIGDISRFETPEKLSCYFGLTPKVRQSGDRPARHGRISKQGNTHARKMLVEAAWSAKTAPGPLKAFFQRVQRNRGAPAAAVATARKLAVMIWHVLTDGTEYVYARPAFTAMKLRKAALRAGAPRAYGKAGPGRDYWIKEIREREADYVRRAEQAYERMVAAWKEKPPTAPAITATPG

SEQ ID NO: 212608 - protein, 354 aa, unidentified
MDETVWVGIDVGRHEHHAAAVDEVGTVLWSRRLPNDQPAIEALVDRVADMKLVVWAIDMTAPESALLRGVLAARRQHIRYVPGRVVHSMTGAFAGEGKTDARDAVVIAQTVRLRGDLATITVPDDVAIELDLLTGHRNELVAERTRGINRLRGLLTRIFPALERCFDYSTLTGLAFLTRFATPAAIAVASDEEIYDHLRGHGVRRPTIPKMITKARVAVAAQTVTLPGEATTALLLQQAAASLMALTRQIAELDKQITEVFRRHRHARILESVPGIGTRSGAEVVAITGGDLTSFGSAAKLAAYAGLAPVPHDSGNRRGTLRRPQRYHRGLRKVFYMAALNLDPPIGNVWRSAR

SEQ ID NO: 212609 - protein, 373 aa, unidentified
MPKYSTAFGMDVHLRSTTVCALDADTGEAVTRRFPGNPWGEIAGWMDGFPGPSLAAYESGYLGFAPQRELAGLGVECVVAAVSKIPRSAADSASKNDRNDAARMAKAILAHDISPVWIPSPEVEGIRDLAGAYDGATARLATAKQRLLAFLAKRGFVYGGTTPAGNPRKYWTYDFLRWLDKVRPEDDGGVRTLAALRNEVEAAAEARADLLSEYRAAVDASPIAAEVAALQSIKGCAFALAAAFSAEVGDFTRFRSGRQVTAYFGLAPSQRSSGDSVRLGGISGAGNALVRKLAVEGSWCYAAARHQPKLMPRDTGVPLEIRMHGRKGSERLLRRRDEMLARGMPAAKANAATAAELVRWLWALGMMCREGAE

SEQ ID NO: 212610 - protein, 346 aa, unidentified
MTVYCGVDFHARVQTVSWLDTSDGEIHQKDLNHQEDDVKAFYQQFSGEVIVGLEATGYSRWFEEMIEALGHQVWIGDAGEIRRLAKRRQKNDRRDADLILDLMAKGEFPRVHRLSSHSREILRQMRHRHKLIKIRTMVRNSLHAIAIGAGLSLKAQIGLPSGRKKLESLPLSGVLGEQRKQLFELTDQLNEKIEEVEKWLKSQATSDERVTLLQTHPGIGMLTSLALVHTLEPISRFATSRKVVAYVGLDPMERSSADRIRWGGVSKAGPKLLRFLLGEAGQSAARHDQDLRAFYQRLRKRVPRQKAKVAVARRLAVRSYIMLRDRIDYAEFVRRGVKARSSRRGV

SEQ ID NO: 212611 - protein, 372 aa, unidentified
MNYNTVYVGMDVHKESFSLCAYTIEAEKASQYQRTEADYKKVLNYLEFLRTIYGDDANFICGYEAGCFGYTLYHQLTANNVKCIILAPTTMLEQRSKKRIKTDRRDAEIIAKCLAQHNYSPVHIPTAKDEETKEFLRMRDDHKLALKKVKQQILAFCLRHNYRYDGKSHWTAAHLKWLKALTPEALYKEILDEYLLTYQTLSDKIERLDKRIEELATQDEYKEAVKKLCCFIGVKTHTALSVLVEVGDFKRFASAQHFASYLGLVPGEDSSGDDQNRLGITKAGNRHVRLLLTEASQCYARGQVGFKSKELKSRQSWNTPAVIAYADKANERLRRRYYKMVLNKYKKHNVAKTAIARELACFMWGMMTDNIA

SEQ ID NO: 212612 - protein, 360 aa, unidentified
MQSIAIVAFDQHAATTVAAVLLPRQRTPVLNTLTSEPQAILRFLQRLQRQHRVRCCYEAGPCGFALQRVLTAHGIPCELIAPALIPRRPGDRVKTDRRDAGQLAVLYRADALTAIHIPTEVEEAVRDLLRCREDIRIDLLRARHRLSKFLLRHGRRFTGGRAWTLRHDAWLRAQTWDQLALQRTHESYLRAVDETVGRLRAVETDLRPLLQIAPLQARVQRLRCFRGMDDLTALTIAAELGDARRFASAPQTMAFVGLVPSEHSSGRKRAQGGITKTGNAHLRRVLIEAAWHYRHPARVGKALRARQAGAPAEAVTRAWAAQQRLHRTYRRLAARGKPPQQVVTAVARELTGFVWAALTQ

SEQ ID NO: 212613 - protein, 476 aa, unidentified
MKKQIKQTKKKIYIGCDVSKGYADFCILTQDKELAAKDFQLDDTYYGHHKLQSIIKDIFDQNPEIEIYAAVESTGGYENNWYNTFKKSAETCNLKISRLNPYGVNLNQKAGMKRNVTDAMSAFNIAEYLIDHSDTVQYNQEDILAPLRHYWNLIKMYKKQRKDLINQLEIVIYNANPTLMQYRKGKLYQWFIELIILYPTATDLANANVEDLTKIYSITTSKAEKLIAEAKQSIASATDEVTKKNIIEIASQIKSIDITIENDTNFVENELKKSKKFADQLEILESFIGIKTISAIGILLEIGSIERFKSVKAICCFFGVHPKFKQSGDKTSGVHMSKQGSKMMREILFNITKCAIVFNPVIKATYEKKLSEGMSKMAAIGVCMHKTLRIIYGMLKHNQKFDPNIDKLNADRSAKKLQDQNNQSLSNAIKARRYQTFDPTAPISRKQNKKRKELNSSQCESNPHTTGSSSSSPLSS

SEQ ID NO: 212614 - protein, 355 aa, unidentified
MNQEKYIGMDVHQATISIAVMDWQGKLIMECILETKAATILEFLHGLRGTVSVTFEEGTSAAWLHDLLKPHVAHLVVCDPRKNALLKDGSKSDRIDARKLAELLRGNQLHSVYHGEHGVRTLKELGRSYQTLTKDVTRVMSRIKALYRSWAIPCSGATVYAPRHRAEWLAKILEPGVRLRAERLYQQLDLLQPVRQEARRDLLVESHKHHAVKLLRQIPSIGPIRAALLVALLQTPHRFRTKRQLWAYSGFAIETHDSGEYRYVRGKVQRNRERITVRGLNDNHNHDLKNLFKGAALSASTQPGPLHDFYTALVEKGMRPTMARLTLARKIAAITLTIWKKGVSFDAKQLHRQAA

SEQ ID NO: 212615 - protein, 310 aa, unidentified
MDCYIGIDVSKATLDIASLPDGESWTVTNDDQGLAELTPRLVALAPALIVMEATGGFEMLAAITLAHVGLPIAVVNPRQVRDFAKAMGRLAKTDALDAGTLADFAQRIRPAPRPLPDEAAQLLESLLTRRRQIVDMLTAEKNRLGFARGPVKRDISQHIRWLAKRLTDVDGDLQDAVAASPLYQAKADLLRSVPGVGQVTTLTLLATLPELGHLSRHQIAALVGVAPMNRDSGTLRGKRMVWGGRAPVRAVLYMAALVGLKHNPVLRVFYERLRAAGKPFKVAATACMRKLLTILNAMLHQNRRWDPQHA

SEQ ID NO: 212616 - protein, 441 aa, unidentified
MPVNHRQMLKSLKKEVRTSTNALLIGVDIGKKRHCACFLNSQGTLLCKRFPITNDLSGFTDLEKEIFKRSNPFEKVYIALEPTGPYWKPLALFLTKLQYPVVLVSPLAVRRNRETIDTSMDKSDPKDAFNIADLLRQGKFHLTNLRTGLYGDLRRLNNLYCRLVEQRARVRIRLRTLLATSFPELEKAFKNITCKTMIALLEQYPLPRRIASLSLPQFTDFIKQASNHRLGRKKAEEIYSLAQSTIGIPGEETSILLELELLLEEWKRTLAGIHRVQSMTHLLLKDKPEYHLLQTIHGIGPITASAIIAEIGDISYFVSGKQLVKLAGLDLYSAQSGMSLHTQKHITKRGRKNLRTIMYQAAITLVRVNPVFRKRYKELLDRQPGKKKIKPKALIAIASKLLRVVFRMLCDRVAFDPQYDGKLRARLETAKSNSRLRSVAA

SEQ ID NO: 212617 - protein, 470 aa, unidentified
MSFHSASQLNSIFREVIMARGSQGFSIVHPHAAGIDVGATFHIVAVQPECDPTPVRRFQSFTTDLHKLSRWLREVGVTSVAMESTGVYWIPVFEILESDGFEVILVNAREVKQVPGRKTDYNDAQWLQKLHQFGLLKASFRPSEYIASLRAYLRHRERLIEYSAAHIQHMQKALMQMNLQLHHVVSDITGATGMKIIRDIINGERSPAALAKHRDIRCKESEQTIAAALTGNYREEHVFALKQAVELRDFYEDRIRECDAQIEKVMAKLNQKKTIPDTPLPKARHRGKQQHEPDFAVRSALYTLTGVDLTQINGFGPYTALRLVGECGDDMAKWPTEKHFVSWLSLSPGNKKSGGKVLSSKTSRTKNRATTLLRIAAVNVGKTETALGAFYRRLAARIGKAKAVIATARKMAILFYTLMKHGRAYVEPGAEYYETQYRSRVLSNLKKRAKRLGYELIANPIPEKLYAEVS

SEQ ID NO: 212618 - protein, 326 aa, unidentified
MVDQHETANIIGADVSSQEIVVAWARSNQPIQSIGNNRKCILAWLKTLPANTVIGMEATGRYHHCLADCAVTHGHTAYVINPKHLAHYARGVGQRGKTDPLDARVIARYVDRERDGLHPYVVPSELQRNLRNLLSQRAGVVKHSGAIRQNLQATHTGSRAALRRAAQQALNSMAAMIDTIDVEIKRAVQNHATLEAKRAQLQTITGIGFLNSVALTHRFDRTPFANSDAVVAAYGMDPRPKDSGQKVGKRHLTKQGNPEDRRLIYLAAQSASKTKLFKPLYLALLAKGFATTEAIVILARKLLRIAFAVWTSGKPFDPTKIGFKGC

SEQ ID NO: 212619 - protein, 406 aa, unidentified
MIVYIGIDWSEKKHDIVIHNEDGKRLMQMVIEHNLTGFLQMDAARQKLGVSAGECVVGMETVHNLLIDFLWQRGYEQIYVLPPNQVKSSQGRVRQSGAHNDPGDADLIAELSRTDRHRLSPWHPGSLLLQQMRARLGLVSFLTKTVVQTSNRLRACLLRYYPAALQVFSSLDCNITLTFIEEYPSPLQADELTWPTFEQFARRQGYPHPSRLPVCFARLQKPQPQPAPATLQAYQYEAVLLTRLLREQVQAKRQVLHELQQLFEQHPDHPIYDSLPQAGTLIAAGLLVKLGEDRQRFPNPEMLQALAGTCPITQQSGRTRRVSFRKACDHEFRYLVQEWARLSIKSSPWAVDYYQQIRPHCHSDSHAYRCLANQWLKIVWKLWQDNAIYDETYHLKRRAERSLPRT

SEQ ID NO: 212620 - protein, 348 aa, unidentified
MRIIGCDLHSRQQTLAMLDVDTGEVEECVLAHEGEQVREFYAGLPGPVQVGIEATGSMQWFLELMEEVGVECVVGHPAKIRACEPRKQKHDRRDALLLMQLLAEGRFPRIWMPSVEQRDVRALLQHRHQWVRMRVRIQNALQSIALSHGVRRGAGLWSQDGQRSLQELRLPPYAASRRNQLMAMYRQLQATIEALDRIVADTAERRPLSGLLMTHPGVGPITALATEVYLGDPTRFANGKAVASYVGMIPSEFSSGGKRQRLGELTKQGNAMLRFLWCECVGHAVRRDAELKRFYTRKLAQKGVGKAKVAAARKLGIRLWIMLRDQLTYDQFCRRGRQCGEAHAERPD

SEQ ID NO: 212621 - protein, 400 aa, unidentified
MRTICVGLDISKGDLKAAVKDDHNNQLMPIKTYSPNRPSLNALLSDIEEIRKLYPGRVMFGMEATGIYHIPVYRFLQAAKAEVKVFNSLELRRYKSRIRRTKTDKLDALAIAEALVFSVEPIYIPENDPKRAKLRELCRLRDRIVTKSSISKAQAKRVMDILCRGYTSIFDDVFSESSLEVIKATVRITKLFEVEVSALEEILLRYHTKPTAESKSRELHRIFRENIVPDMERDACILEMHMLIQQYQVYQEQISRLDTKIEDIVSTIDTKLLTIPGIGHLTAGIVLGELGNLKRFKSIGQLTAFAGLDTVVYDSGKTHRTGHISKRGSPMLRGALYKAALSAIQFNPVCKEFYQRLKSRGKHSKICLVAVARKLLHIAYSVEMKNRDFYVPAHLSIKAS

SEQ ID NO: 212622 - protein, 392 aa, unidentified
MRISVGIDIAKEKHWVTVLDADGAVQIDHELRNTPVEIASLADRLAAFGGTVRIGIDVIGGIAGLAEAMLAQAGFTLVHVPGLAVNRARQGTVGGENKSDPRDARAIADQVRTRSDLRPVEPATEIDLEIRLLAGRRRDLVEAQTQRLARLHDLLVGIFPGLEACLDLKTKGPLHLLTLYVTPAELRAAGRKRLVRHLQAAGGLPNPDALADRALAAAVEQAFAVPAERMTARLIRELAAEALASRARLLEVDRELEALLERHPDAALIRSLPGMGVVLTAELIAEAGNLSRFRSADALASAAGIAPVLRQSGRTRFLRRPNGGNKGLKRIFYQSAFCSLGHHDSRAFYDRKRREGKRRHQAVIALARRRVNVLWAVVHSRTPFQQGFKTAA

SEQ ID NO: 212623 - protein, 409 aa, unidentified
MGGMSCLISEGERRMYSLLVGIDVSKDLFSTAGINSGGKETFSRACAMDSSGFEELLKTIRSHCEDFSEVVIAMESTGCYHINLFSFLTSRGIRTMVVNPLLIATFAKLSLRKTKTDKKDAMTIARFLLDHQEEISQLSVSQDLQDLRDLSRERESLSHLISATKVEIKRVLRTIFPELETIGDIYTGVMLRLLQEYPSARLVRAAKLKAIAKLLRQPYVGNKLTFTAEDILRAAKTSIATVSPGKEIILRGKIATLVHLQDRLDEITKLLTDLCKATRVDDLKILRSIKGVGPKTAAPFLAEMGSVDNFLSHKKLIAFAGMDPSVCQSGQFVGMSRLSKRGNRHLRRAIYLMTASVVSKNAWFKAYFQKRKAEGLPPQKALFATVHKLIRVIFAMLSQRTYFNVKEAI

SEQ ID NO: 212624 - protein, 419 aa, unidentified
MELTPIHKSAIGLDVHQSQITACVIIERGDGTIHSEVREFGGFKRDRRALAKWAKQWEPEIVLMESTGIYWKSPYVALERVGIFALVVNARHVKKVPGRKTDVSDSQWLAILARCGLLRGSFIPLGDLRKLRLVARQRLNLVSMLASEENRLHKVLADGGVRLSSVVSDLHGQSARAMTECLLEGGMPEQALKFASSRLKASREELLDALEGELTEVHRFVLNEVLDPIRDLEARIVRFDTELLNGLKPYRWAVNLIQTVPGVDEVGAAMLIVEIGVEMEAFGSADRLASWAGVCPGNNESAGKRKPGRTRKGNRYVRRLLCEMANATRRSECAFKGKYAGLVIRRGHKRSIIALGHKILKDHFYPAQQEGALSGFDGKLRGACSQTQRAPMDRIPSTIRLFVRSSLNRDQSTGGLTAL

SEQ ID NO: 212625 - protein, 315 aa, unidentified
MGQSVSFPVHFVGCDVGKAEIVVFDQSTGKTTTLANQPDILAGFADSLDETSLVVCEATGGYEAALLSALVTAGRAVHRADARKVKAFIRSFGTLGKTDRLDAQALARYGCERHQDLARWTPPAVAQSRLQALVLLRRDLVADHTAWNNRSQAPNAEHAQHVHAAMIAALQTQIQTVDQQIKAVINASSTLKTLEKTLRLVAGIGPAVSAGLIALMPELGTLNRREVASLAGLAPHPQQSGQSHGYRSTRGGRPEVRRLLFMAAMAASRSKSELAAFYKRLVANGKKPIVALTALMRKIIVIANAKIRDQRTQLS

SEQ ID NO: 212626 - protein, 410 aa, unidentified
MRTVVERCCGLDVHQAVIVACLLVGKPGQKVKKDLRSFPTTTAGLLALRDWLDDAGCTHVAMESTGVYWRPVYELLEDAFEVVVGNAQRIKNVPGRKTDVKDCEWIADLARHGLIAPSFVPPRPLRILRDLMRFRRSLIEARTNCRNRILKVLESANIKLASVASDVFGVSGTAMLEALVEGSRTPAEIANLARGRLRTKLVRLELALHGSLNDDHRFMLDQLLRSLEQEDQRITATEDLIAQKLEPYQEEHGLLTTIPGVDWAVAATMIAEHGVDMTPFASPARFGAWSGTAPGNNESAGKHRHAPARKGNPYLKTALYTAAVSASRTSNTYLADKYHRIKARRGPGRAAGAVAHKIAIAAFHILTTHKPYHDLGGDYLDKRTQRRTKQRLIQRLERMGYNVVLQPKAA

SEQ ID NO: 212627 - protein, 340 aa, unidentified
MTPIRIGLDIAKNVFQVHGVDDKGTVVIRKRLRRPDMLRFFASLPPCLIGIEACSASHHWARELIRLGHEVRLMPARYVKPYVQRGKSDALDAEAICEAVGRPTMRFATIKTAEQQAVLTLHRARELLVKQQTMLANLIRGCLGEFGIVAPLGIRRVAELIAVINDDADTRILPEARIAMRAVAGQLCDLQTRIKQIEQAIRAWHRSNEASRRLATIPGVGSITASAIVATVANATEFKSARHFAAFLGLTPKQYSTGGRQRLGRISKQGDVYIRRLLILGGTSLVRYARGAGGSIWAKQLLARRPTRIVTVALANKAARIIWALLTRGEVYRAPQPQTA

SEQ ID NO: 212628 - protein, 418 aa, unidentified
MQEILERACGLDVHQKTVVACIMTGSGKNVNKEIKTFGTFTDDLRELGRWIKGHDIQDVAVESTGVYWIPIFNVLEGEFELNIILANAGHIKNVPGRKTDVKDCEWICKLLRNGLIEASFIPSVDIRHLRNIVRHRQSLVSDLIAAKNRIIKNLEIGNIKLSSVLSNVFGVCGWKIIRAIADGQCDSTELAKLIDRKIKASRDSITKALTGTLQQYHINTIKLMVKHVDELEKIIELVDDAIKNCTQNYEEHMRRLQTIPGVGEKVAASIIAEIGVNMDQFHSPQHLASWAGLAPGNNESAGKKKSSSIRDGNIHLKTKLVEGAWSAVKTKDTYWRSVYHRLKSRRGAKRALIAIAHKMLICAYWLIKNKEDYKELGANYIDQNTQEKKAKYYAKQLKKLGLIGVDEFINPQLQGQYA

SEQ ID NO: 212629 - protein, 349 aa, unidentified
MKGRERVVTITTLGVDLGKNSCSLAGLDATGAVVLRRRLSRGKLVEFLGRLPPCVVGMEACCGAHHLGRAFGAQGHEVRLMSPEYVQPYVKAQKNDDRDAEAIAEAATRPTMRFVALKSEVQLDQQTLHRARSRLVNGRTRLINQLRAILLERGITVAKGRHVLGRALGALLGDEGSGLSPRMKMLLDEMRREWAELDARIAALDREFVETARVSAPARRLATIPGIGALNATALTAAVGETEDFATGRDLAAWLGLVPRQMTTGGKARLGSITKRGNVYLRTLLIHGARAALPGLSRSETGLGAWLRGLLDRSHPNVVVVALAAKLARIAWAVLRSGADYKGHAGASA

SEQ ID NO: 212630 - protein, 350 aa, unidentified
MGIATIGVDLAKRVFAVHGVDRQGNTVLKRTLRRDQMVPFFTKLSSCTVAMEACGSAHYWARKLQSLHHQVKLIAPQFVKPYVKGNKHDAADAAAICEAASRPSMRFVSVKSEVSQAVLALHRVRSGFVKARTAQANQLRGLLAEFGFTAPLGVKALIDEVKCAMADEGNGLPPLMRTLTQRLLSHLLVLDRQVQEIDLQLRTIAKDSEVCRRLEEVPGIGPITSTALIASVGDCIHQFKNGRQLAAFLGLVPKQCSSGGKERLQGISKRGDVYLRQLLVHGARAVLGHTLRKPERAGSWLSRLAARRNTNIAAIAQANKMARVVWAMLTRKEGFRSDTATVLASNIGPA

SEQ ID NO: 212631 - protein, 378 aa, unidentified
MNRIIKIGMDVHTTNYTLCIFEPSFEHDGTVHCITQVKPEVKNIIHVIETFKKKHENEELNIVCGYEAGCLGYSLYHELKEKGIECVILAPTTMKTEKGGRKLKNDYRDAKMIAECLAYGGYSAVHVPTELDNSVKEFIRMRDDIKENLKSIKQQIIAFLTRNGKQFEGKSFWTRKHIDWINTVSFSEPLLQDTLKEYMIEYNHLCNRIETLDRQIEEISLKEEYVEKVQQLQCLIGIKTHTALSLIVETSDFNRFKKGNMYSAYLGLIPGDDSSAGHENKLGITKAGNSHLRKLLVEAAQGYTRGKVGFKSKDLKSRQEKCSSEVVAYADRANERLRRKYYRMTLRGKKFNVAKTAIARELACFVWGIMTDHIDLCN

SEQ ID NO: 212632 - protein, 354 aa, unidentified
MTAMLAGTVEFVIGVDTHRDSHTAAIVQAATGGVVDQLTVATDAFGYRKLQAFADQYAPGRRVWAIEGTGSYGAGLTTSLLEHGQWVVEIDRPARPARRDGAKSDDLDAVRAAREALARDYLAAPRARGDREALRVLTTARSGAIVARTKAIGQLKALIVNAPQSLRDQLRRGTTDPQLQRCARLRTLPGHTTEHRATIRAIRGTARRALALEAEASEYETELEQLVVAICPALLERPGIGTITAAQFLISWSHSGRIRNEAAFAALAGAAPIPASSGTISRHRLNRAGDRQLNRALHTVALSRLPIHEPTKAYADRRTAEGKSAREIMRCLKRAIAREVFRLMTHHAKGPMAA

SEQ ID NO: 212633 - protein, 450 aa, unidentified
MAKVSKAKTKKEWDEGLPALNRNAAGIDVGNAEHYVAVPAGRDPEPVQSFGSFTADLHRMAQWLKACGVETVVMQATGVYWIALFQILESYGFQVNVVNARHTKTLPGRKTDVLECQWLQKLHTFGLLNNSFRPTEEIQVLRTYLRQRENLVAAGSTCIQHMQKTLTQMNVQLANVISDISGVTGMAILRAIVAGERDPVRLSTLKHNRVRASRREIARSLEGNWREELLFVLEQSLELYDLYVLKIAVCDQRIERHLKTMASKQEPVQASDATPKQEPRFSLKDHLCRITGVDLTKVAGLQVQTVQTIISEVGVDMSRWNTEKQFASWLGLCPDNRISGGKILKSGTRQVVNRAATALRLAAWSLIRSQSALGANFRRLRSKLGAPKAITAMAHKLARLIYRMMKFGTEYVDKGMAAYESRYRQQQMKWLSKQAASLNLQLIPVPEVTG

SEQ ID NO: 212634 - protein, 415 aa, unidentified
MALKIVYKICCGIDVHKTFVVACIASTNDKGVTSYESHRFSTYTSGLKTLLQWLLDRNCKDVCMESTGKYWIPVYNILEKYCSIVLAHPKYVKAIRGKKTDKKDAKWIADLFKHDLVAGSFMPPADIRQLRDLMRYRFKLTCFKSSEKNRLQNCLTVSNIQLGNVVSDTFGKSAQAILDKLLENPADTSFDLEPLVYKSLKKKLPELRDAIDGYITSEQAGKLKVIKAHYENLESRKAELEELILALAAPYQQELTILQTAPGISSDFTAIGIISEIGTNMEAFPSAKHLCSWAGLTPTNNESAGKKKSVRVSKAGCYIKPLLVQCANAVVTSKKHPEIRNRYLRLKKRRGHKKAIIAIARMLLTALYHMLKNGENYNAELYRKSDLPPVNREITVEQALMIARNQGYKIKSATA

SEQ ID NO: 212635 - protein, 429 aa, unidentified
MNFRPIAGIDVGKFFSEMAILSPSNEVIARMKIRHDSSTDVERAVELLKKTEKDFDSRPFVVMESTGHYHKILFHSLYKAGFEVSVINPIQTDSIKNIGIRKVKNDKVDARKIALLYRFQELKTTNIPDEDIECLRSLCRQYYKLSDELTAYKNRLMGIVDQLMLNFKDVFPNIFSKAALAVLEKYPAPAHILKANRNKLIALIQKNSRRSLKWATAKYELLNSKAKEFAPLSISNSSNVAMLGVYISMIKTLEENLEKVFKAIRSLIIEDMAKDMPMLALTLELLQSIPGIGLISAVTILAEIGDFSAFSKPGKLVAYFGIDPSVMQSGEFTGTQNKMSKRGSRLLRRVLFTIALANIRTKRDKTACNPVLMEYYKNKCQSKPKKVALGAVMRKLVNYIFAVLRDRKPYELRSPQEHAQMLAAKHTAA

SEQ ID NO: 212636 - protein, 339 aa, unidentified
MSIIGCDLHTRYQVIAMLDTKTGEIVTHRLEHENGEARAFYAPLPKPALIGIEATGYTQWFERMVAEQGHELWVGDPAEIRARAVRRQKTDTRDAEHLLDLLLSQRFPRVWVPTPEERDLRQLLKHRNKLVRMQTSVKNQLHFLAMSQGVCRKKKLWSARGRAELEGLSLGPWASQRRQELLQLLDGLEPRLEELNEAVKAEAERRPEATKLMKHKGVGPVTALAFVLTIGPVERFTNSRALVSYLGLNPAEDSSGGRQRLGHISKQGHEMLRWLLVEAGHGAAQFDPELRRQYQRLKFRRGGNVAKVALARHLAVRLYWTLRQASSATPPVRTPGSPR

SEQ ID NO: 212637 - protein, 346 aa, unidentified
MEHYAGIDVSLELSSVCVVDAQGKIVKEAKVASDAEDLIAFFASLGFAMTRIGLEAGPLSQWLQSGLKCAGLEVVLLETRHVKAALSAMTVKTDRKDARGLAQLIRMGWFRPVHAKSMGSQEVRALLVARKQLLGRLIDVELSIRGILRGFGLKIGVVTRKGFEPRVRELVTGQATLQHITRAMLSARAVLRVEYEKLHKSVLAMVREDAVCRRLMTVPGVGPLVAMTYKSAIDDPSRITKSKAAGALFGLTPKKYQSGEKDITGGITRTGDEMVRTALYEAANVLLSRITRFSKLKRWGLDVAKRRGSKRAKVALARKIAVILHRMWIDGTTYRWSEAQLMATQA

SEQ ID NO: 212638 - protein, 474 aa, unidentified
MKAKCRPMQGKWHEMNRKQRRETMRKIQSDDLDLEVVHPDAAGVDIGNECHYVAVPPTRDTQPVRRFGCTTAELKAMAEWLKQCGIRTVAMQSTGVYWIAVYDILEAADLEVYLVNARETKNLPGRKSDVQESQWLMKLHTYGLLRNSFRPPQEIRTMRTYWRQRNDLVRAAGRHIQRIQKALMQMNIQLTNVLSDVSGMTGQAIIQAILAGERDPRKLAAFRDFRVKASQEQIARSLEGRWQEDLLFVLKQEQDGYEFCQQQMAECDRRLAQYLHQREDRSQGATLPEEKRKERLRKKKKGNAPRFDLRAELFRMTGTDLSQIDGIDVMTAMTILSEAGWDMSKWETEGHFVSWLRLCPDNRISGDKIIGKGRLPTNNRITLALKMAASTLRLSNTYLGAQFRRLRTKLGAPIAIKAMAAKLARLVYRMLRYGMQFVDRGAEFYEAQHRKQQISFLKWKAAKLGFKIIEASAA

SEQ ID NO: 212639 - protein, 360 aa, unidentified
MRTEIIKDSFNNQSFYIGIDYHKKSWQVTILGEQYEHKTMSQNPDPDLLATYLKRNFPGGNYHAVYEAGFSGFESCRKLNQLGVNCIVIHPADVPTSQKEKLQKTDKADSRKLARSLRSNEFEAIHIPDQELEADRALIRQRFRLVKDVSRTKNRVKSLLFQFGIPIPERFTSAQTRHWSKVYINWLKELEINKQSLRQVVDNYIYIGESQRKDLLLLNKQVRNLSLTEAYSKNYNLLLSVPGIGLMTAITFLAQIGDIGRFERLDDLCNYIGLVPKMYGSGDKMQVGKMIKRGRKELKIMLIEAAWEAIRKDPALMLKFNELSKRMHKNKAIVRIARKILSRIRFVLRNQHPYELSVVE

SEQ ID NO: 212640 - protein, 327 aa, unidentified
MNQFWLGIDIARDKFDVYLLNESEGWSGLFTNDAQGFKQLQKWLQKRKVTGLHACLEATGTYGEELAYFLHGQGYRVSVVNPKIINHYGHAKMQRNKTDKLDAKLIAQYCHKETPRAWEPPTAAERTLKALTRRLEALVTDRTREKNRLSSAVHPEAVRKSIEDAIAFYTEQIEKLEKQIQDHIDQNPEDLGHKQELLMSIPGIGQRSSAALLGELPDIQLFQSNKQITAFAGLTPKQLQSGKSSRTGGIYKLGSRRLRTTLYFPALTGMRHNPILRQMAERLAERGITGMSAVAALMRKLLQLVYGVLKSQRPFDANYVANIQDTA

SEQ ID NO: 212641 - protein, 393 aa, unidentified
MNAVGIDVSKGKSTVAILRPFGEVVASPFDVGHTAAELDKLVSFIRKIDGETRIVMEYTGTYYEPIAYALHDAGLYVSAIHAQLAHDFDNNSIRRVKTDKADAVKLANYALQHWLELPKYTPQEDIRRQLKICSRQYEKYSKLKTMLVNNLIALTDTVFPGVNELFTSPPREADGHEKWLDFLLNFWHAECVCGFTQKVFADKYHKWCNKAGYRFSESKAKDIYISACGHVGLLPKDDVTELLIKQAVEQANGICASIAAMLKQMTFLASRLPEYPVVMDFYGVGENLGSRIIAEIGDIGRFKSKNSLVCYAGLEAPPYEPGKFESHDRKISKKGSPHLRKALFQVMACIIQTAPADNPIFQFIDRKRSEGKHIITLTRTPAAPSSCVFTTPV

SEQ ID NO: 212642 - protein, 413 aa, unidentified
MVYVGIDIAKRVHVCAILDESNAVLVKPFKFHNDAKGFKKLLVHIERLGLDPSDILIGMEATGALFENLYRYLKSLDYPVVLLNPYQTSKFREMDTMKRVKNDNIDAVMIAALLKSGRFSKGYVSDEQLHSLRELYRHKESLSNQIKALKRNTKTILTVVFPELETVIKDPFSVTGLALLEKYPTAKHYEFASADRILKTFRGIQGNNFTQEKAQLLLDTARASVYSGVAKEARALHIHMNIKQIKMLQTMLDETLEAMQALFSEEAPIKEEDKEVVSDIIDNLRTIPGVSDKTILALLAECGNLDRFSSAKALVGYLGLYPTLDESGEKSRSGKLAKRGAKLAKKAIFLAAIAAIKHNEQMYTIYLKYRSRGKAKKEALIIVARKLIAIIYAIYTRNEPYDPVRVFTAKPNS

SEQ ID NO: 212643 - protein, 372 aa, unidentified
MNYNTVYVGMDVHKESFTFCAYTIDAEKGSHFQRTEADYKNVLKYLEFLRTVYGNDANFICGYEAGCLGYTLYHQLIEHHVNCVILAPTTMLEQCSRRRIKTDRRDAEIIAKCLAQHNYSPVHIPTATDEETKEFLRMRDDHKLALKKVKQQILAFCLRHNYRYDGNSHWTAAHIKWLKSLKPVALYKEILDEYLLTYTTLSDKLERLDKRIEELASKDEYRESVKKLCCFIGIKTHTALSVLIEVGDFQRFASAQKFASYLGLVPGEDSSGDEQTRLGITKAGNRHVRMLLTEASQCYARGQIGFKSKELKSRQAGNSPQVIAYADKANERLRRRYYKMVLGKSKKHNVAKTAIARELACFMWGMMTDHIT

SEQ ID NO: 212644 - protein, 351 aa, unidentified
MPSKTDAVVARTIGIDTGKNTLHLIGLDEKGAIVLREKVSRGRIVARLANTPRCLIGIEAGMATHYVARALIALGHEVRQVPPAYAKPFRQGHKNDFRDAYAVAEAVQRPSTRCVPVKTDDQLDLQALHRVRARLIGERTAVTNQIRSFLLERGIPVRQGLRFLRQQLPDILAKRIDVLSPRMIRIIEDLIDEWRRLDERIDHVTTEIEVLAQSNEGCRQLMTVPGIGPIIASAMVAAIGNGSAFATGRDFAAWLGLVPKQMSTGDRTILGRITKRGNRYLRTLFMQGARVILLRPANWAKHSFGPWLTAAARRLHHNVLATALANKLARIALTVLVQGRGYETRVTSEAA

SEQ ID NO: 212645 - protein, 386 aa, unidentified
MPRLNDLSRSLVTLEQDATLIAVIEMSLTSWLVAGIVPGVERQPLKKLGVDERALLKLLHRWREEAEKAGHRIKRIAVAFEAGRDGFWLARWLRAYGIEARVIHASSVAVSREHRRAKTDRLDTELLKRAFLGWLRGERDHCRMVAIPTIEEEDAKRPNRERESLVGEQSRIVNRMKAALIRLGIRGFNPKLKKAAERLDGLRTPEGDPIPPNTLAELRRDMVRRRLVSDQIRQIENARLERLEHASGDGPHAMVRLLARVIGVGTETADMLVQEVLSRNMRDRRAVARYAGLTGSPDESGKKRHEKGLARSGNARVRRGMIQLAWRFLMFQKDSALAQWFRARTENARGTRKTMIVALARKLLIALWWLVREGVVPDGVVLRPAQ

SEQ ID NO: 212646 - protein, 406 aa, unidentified
MINCGIDWAEAHHDVALVDDAGQTLTKVRVSADAAGFSRVIEVIAEHGGSPEATPVAIETDKNLFVVALAAAGFSVYPINPRAAARYRERHVQSGGKSDPGDAIVLANILRTDRHLHRRLPQISEHALAIKALARQHQEAIWAWHQALSRLRSVLLEFYPQAIKAFPNLKHHAATAVLTAAPSPTAAASLTRRRLVALLHRCGRRNDPDLVEQILTDLKTAALRQPARVEAALALTVAGLLRIIVTMRTTVEELGAALAAEFDSHDLAPVLRSAPGLGPVLAARVLAEVGDDPARFTSVEGLRAFAGTAPVTRASGRSHYVKARKVRNKRLGDACHWWAYATLTRSPGARAHYDRRRAAGDHHNAALRNLANKLLGRLWWCLINNQPWDENAAWPDLAKTPELTAA

SEQ ID NO: 212647 - protein, 409 aa, unidentified
MEVMYRRCAGLDVHQHTVMACARVVDKHKVQQEVETFQTTVKGLAALRSWLQGHGCTHAALESTGVYWKPVWQALEGSLELVLANAHEVRNLPGRKSDVNDAMWLADLLAHGLIRGSFVPPGTVQALRELSRTRTQLRREVTRHTQRIQKTLESAGLKLTGLISDVLGVTGRAILEALIAGESDPETLAQLKRQGIKASHEQLRDALQGRLLEHQRLLLRLHLEQIDALDLATRQIETRMAELLDPFRDCVELLKTVPGIQETTARIILAEIGFDPQRFPTAGHLVSWAGLCPGSDESAGKRRSTRLRKGNRWLRTAMIQAAWAASRKKDSYLQALYHRLRARRGSKKAIVAVAASMLTSIYFMLQRQQEYADLGPAHFDQRQRDRVARRLIRRLEELGLHVEAKSVAA

SEQ ID NO: 212648 - protein, 321 aa, unidentified
MTYVGIDVSKLTFVVAYSSAKTSKTKTFKNTAKGIREFIKTISVNEHHCVMEATGNYSTLLVYMLSEFGFTVSLENPLKIKNFSRVMLSVIKSDEIDARLIALYGEKMQPSPYRMRSDSILILKQKRTVLRQLKKQLVATSNLKGSMEVLPIYDSKCKKTIEKTIAFLGKQIKYMEEELASLANDEFKKQMDLLTSIKGIGVTLAAALIVATGGFTYFDNAKQLTRYLGLSPTYQQSGTSVNFKGHINRNGDPILRSQLYVAALSSLRCNTECKACFDRLRSKGKPGKVAVVAVANKLVRQAFAVVTQDKPYVDGFISVKP

SEQ ID NO: 212649 - protein, 380 aa, unidentified
MPDVSSTAPAQIRMWVAIDQHKLSLVAAMLPASGGQPEVVRVENTERAIRRFLQRLGGAEGLAVAYEAGPGGYELHRLLSSMGVACDVIAPSLIPVRAGDRVKTDRRDAKKLVRLFRAGELAFVQPPSPMQEGLRDLVRCRDDLRCARTAARHRVAKALMRHGHVYRQGKAWTLRHRAWVESQRLADPLAQAALEHMLTHLGGLDVQIAALDQQLEQIATREPWADPVAWLCSFRGVSTHTALGLLSEIGDFRRFAHPRELMSYLGLTPSEYSSGQQQHRGHITKTGNRHARRLLVEAAWHYRHRPRQSTRAARLQEHVPTEVTIRARQAQIRLHHRHRVLAEHGKRSTVANVAVARELTGFIWAAMTKAPLREQEAAAA

SEQ ID NO: 212650 - protein, 360 aa, unidentified
MNATTVAVDLAKSVFQLAVADKHWRVIDTQRLTRTQFERWFANHDVGLVVMESCGSAHHWARWLNGLGIDVKLLPAQYIRAYVKRNKTDAVDAAALLEAARSSDIRPVRIKSVEQQALQGLHRIRSLWMGTRTSRINALRGFCREFCIAIPVGARTGIEAISRVLADPRSAVPDMIRGTARLLIEEIRLLEARIAQLERELAEIARHSPACTTLLSIPGIGLLTATAMVAATSGDVSHFKDARHFASWFGLTPREYSSGSSRYLGRISKKGDRYLRMLLTHGARSVLRAAAVAVNAGRQVCGIRQWALAVQQRTHHNKAACALANKLARICYATLRDHAPFAESERISKKLNRESFAMPA

SEQ ID NO: 212651 - protein, 384 aa, unidentified
MTTMADPRSAVFGGVDTHLDVHVAAALDGVGAELGVKSFPTTAAGYGQLLEWLTSFGAVIKVGVEGTGSYGAGITRHMLGAGVAVVEVDRPNRQKRRRVGKSDPVDALSAARAALSGDAHGAAKTRSGSVEAIRVLRVVRSSARRDRTEALNQLRSLVSTAPDELRAKLRDLSGLQLIATTAALRPGSQLDVLSATKTALRELGRRAQYLVDQISRLDDQLGPLVAATAPKMIIQYGVGTDTAGALLVAAGDNPERLRHEAAFAHLCGSSPIEASSGKVTRHRLNRGGDRQANNALWRIVIVRMSNDPDTRAYVERRTKEGKSKREIIRCLKRYVARELFPFYPREYPLDITRSISIREPERLRMARLPTSLRVPALTPAVAVA

SEQ ID NO: 212652 - protein, 482 aa, unidentified
MVVPNEEPKKPAKPRKPAKPRKPTKPSKSRERSLPVPVPASPATLNVINPDAAGIDVHSNMHMVCVPADRDANPVRQFGANTVDLHEIVAWLKKCRIKTVALESTGVYWIPLFELLESEGFEVHLVEPGQLSRCGARPKTDVLDAQWIQRLHSYGLLRASFRPPDSVLALRAYWRQRQMQVRYAAYHVQHMQKAMEQMNVKLTEVVSDITGLTGMLIIGAILEGERDPNELAQLRHPQCHHSEEQIALALQGTWRPEHLFELRQAHELYQFHHRQIAACDQQIEAELAQFPNRAGEKTHTVKPRKTGHKSNDVRFEAAGPLFKAFGVDLTLIEGIDVATALVILGEIGVDVSRFPTEKHFASWLRLCPPQDESNKTNRRRGHRKATSRVTIALRMAARSVGQGMSPLGLFYRRIRSRIGGLGAVKATAHKLACLIYRMLKYGQEYVTQSIEEYEAKVRGNLLKGLKRKAAALGYHLSPLPAP

SEQ ID NO: 212653 - protein, 408 aa, unidentified
MQVLYTRCAGLDVHKDTIVACVRCVSPPMHQEVRSFGTTTAELLALADWLGEHDCTHVAMEATGVYWKPVWHVLEAEFELVLANAAHIRNVPGRKTDVNDAMWIADLLAHGLIRSSFVPPQAIQQLRDLTRTRKQLVREVSQHSLRIQKVLEDANLKLGSVLSDVLGKSGRAMLDAIVAGETDPARLAALAQGTARNKAAELREALRGRITEHHRTMLRLHLQVVGALQRTLAELDAAVGKALAPIRQRARLLTTIPGVSDLTASVVVAEIGVDMSRFPSAGHLISWAGLCPRSDESAGKRRCTRVRKSGTWIKTTLVTAAWAAVRVKTSYLRAQFLRIKARRGAKKAILAVAASMLTAAYHMLRDGTEYSDLGIDHFDRQDRSKAIRRLLKRLQDLGCEVPELAHAA

SEQ ID NO: 212654 - protein, 359 aa, unidentified
MLAMGDSALRKEADAMIFVGCDLHTRMQQVAVLDTETGERGEHQLRHDGMAVEEFYAALRRPVTIGIESTGYAVWFHSLMQRLGHTVLVGDAAKIRAMVVRKTKTDRRDARHLLELVSQDRLPTIWVPDPATRDLRALLTHRMRLVRIRTMVKNGLHAIALNCRLVRGARLLRQAGLAQLRALALPPHTARRRDQSLALLTELNAQIRELDDAITTAAHAHPDAPRLITHPGVGALTALATVVVLGPIERFHDSKHVVSYVGLAPAVHASADKYHLGHITKQGNPLLRFALGQAAAHAARMDSDLKRTYFTLMHRRGRPQAKVAVARKLLVRLFIMLRDHIDYDEFRRRGRQTLTLAPT

SEQ ID NO: 212655 - protein, 479 aa, unidentified
MPTSYRRCSGIDVHKKSVQVCILAPQGQSEIQPLEREFGTFSRDLRRLKGWLKGCQVTEVVMESTGQYWRAVWNVLEGEIPRLVLVNPQHVKALAGRKTDRIDSRRLARYLENHDLQGSFVAPRAIRELRDVTRSRVHLLEEVNRVKNRMGQICEAGNIKVSSVATDLFGVSGRRMLEAVAEGGRDPGWMADYARGTLRGKKKQLERALEGSFTDAQRGMLSRELAHLEFLEGQIAQLEQQIERRLQPYQEQIRRLRTIPGVDRITSWTILAELGPDMSVFPDAHHAASWAGLCPGNGESGGKRLPTRTRKANRYVRRALCQAAWGASHSQDTYLAALYRRQRGRLGHNQAIIALAHQLLLIAYTLLQRSEDYRELGADYFDRKNKPKVVSRLVQRLTRLGFYVTLQQAAALSAEPEPISPHIAAAVLTAESVCDAPSSDASVAPVKRSRGRPCKCAMKSIVCHHKTAFRTQPPINLSL

SEQ ID NO: 212656 - protein, 414 aa, unidentified
MKQQEVAAWIGLDWADKKHSIHLQVRNGKREHQMLEQKPDVIHEWVAELRQRFQGQTVAIAIEQRKGAVVHALMMYDFIMLYPINPKALARYREAFRTSGAKDDPSDSELLLDLVSKHGDKLRSWVPDTVEARKLQLLCEQRRKIVNHRVALSNRITSLLKQYFPQALDWVGDVASIQACDFLSNWPSLSAVQRARKETLRKFYRQHNCRKTSVIDERISQISNAVPLTTDSAIIEPLSLSVQIYAAQLRSLIRAVQQFDKQIAETFAQHRDHDIFDSLPGAGQVCAPRLAAAFGTDRSRWQSAVEMQSHSGIAPVTERSGDSKWIHHRLACPKFIKQTFHEFADQSIRFSNWARAYYDQMRSRGKEHHAALRALAYKWIRILFRCWKDRTPYNEEKYIKSLLQRGSALGKNFS

SEQ ID NO: 212657 - protein, 356 aa, unidentified
MVTGPKHQKEKRSMDHCAGLDVSVNETSVCIVDDTGRIVREVKVASEPAALLTVLTDPAYHFKRIGLEAGPLSQWLFSALAEAGLPVICVETRHMRAVLKAQINKTDRNDARGMAQMMRAGLYRPVHVKTLRSQKLRMLLTHRKLLQSKAIAIENDLRGTLRNFGLKVGIVGAMKFEARIRELVEKLPDIALLVEPLLVVRRVLRQQLGILHRRLLAIVKDDEVCRRLMTVPGVGPVVALTYRATVDVPARFHNSKSVGASFGLTPSKYQSGEINRSGAISKCGDEMMRVMLYEAAQSMLLRSAKWSWLKAWAMKIARHHGLKKAIVALARRLAVILHRIWVDGTEFRWTREVAAA

SEQ ID NO: 212658 - protein, 343 aa, unidentified
MDHFAGLDVSVKDTSVCIVDEVGKIVREVKVSSEPDALLTVLRNPTYRFKRIGLEAGPLSQWLFSAMAEADLPVICVETRHMRAVLKARINKTDRNDARGIAQMIRVGLYRPVHVKTIRSQKLRMLLTHRKLLQSKAIAVDNDLRGTLRNFGLKVGVVGAARFEARIRELVEDLPDLAVLIEPLLIVRRVLREQIDILHRRLLAIVRDDEVCRRLMTVPGVGPVVALTYRATVDVPARFRKSKSVGAVFGLTCARDQSGERDRSGAISRCGDEMMRTALYEAAQVMLMHSVKWSWLKAWAMKIARHRGRNKAIVALARRLAVIMHRIWVDGTEFRWTREAAAA

SEQ ID NO: 212659 - protein, 405 aa, unidentified
MPMNMQYERAFGLDLSKKTFHGCILDGPDLGSRHFFTGEMGQQGKAKLAGRLCKGDLVLMEAGTASFSLARFLLENTESEVVVLNPAKLYNIFNSTLKTDKSDSEKIAKIARTMPRDEWPTVSIPTREEQAERSAVSLEVFLAKEITMLVNRLYALFNAMGHPFVKKSDLKTEESRLILANRLLCEDGLAIEQAIMLSDQIGHVTNQLEQCKQRLRDICLSHPKEALSLLSIPGVGLMTAASQIAFLGDGSRFNSPDSYVNYVGLSERRFDSGNKISKGHISHMGNKCIRRNIIQAAWVAVTKLKGNPLSRKYEALRLRGKSKPVAAVAVAKKMTQLSYILVKGNGIYEFTKQQGLAAFQRKLRYHKLAALLNYLPEPIRIEMEEIDRNKRKEAAATTSRPKKLI

SEQ ID NO: 212660 - protein, 331 aa, unidentified
MMVIGIDVSKKKIDCAWLRDRERGKVKTRVFPNDPGGFKALLAWARQNTGASSEALHFVMEATGVYHEALAYALHQAGSRVSVVNPAQLRRYAESFGRRSKTDKKDSVKLAWYGTTQQPQLWQPEPEEIRVLKALVARLEAVEQDIQRETNRLEKAEINEVSAEVTRSIRTVLAHLEAEKQRLIKEIDQHLDQNPGLKNDHKLLETIPGVGPVLSRYMTVMLRSRDFDCASQAGAYVGLIPVHHQSGTSVRGRSSISKAGDNKVRAKLYMATVVATQHNPRIRAFYERLLQKGKCKMVALVAAMRKLVHICYGVLKHQQPFQAQAPTGHCA

SEQ ID NO: 212661 - protein, 337 aa, unidentified
MDKITILGIDLAKSVFQLHGVDAQGCTVLRRQLRRSQMLEFFQRLPSCLIGIEACASAHYWARELAKFGHEVRLIQPSYVKGYVKRGKTDAADAEAICEAVSRPSMRFVPVKSEDTQALLMTHKVREFLVRQQTKIVNAMRAHLGEFGIVVAKGIHNVERLIIACEQAGLPASTRKALSLLANQLIDTQKKIEDLTADIRADAKASDAAQRLQTIPGIGPITASALVSALPGIADFKSGRDLSAWLGLTPKPHSTGGKERLGRISKMGNTYLRRLLYLGAIAQVSARRRSEAGDDWLWKIIQRKKPKQAAIALANRMALTAYALMKNKTDFRAAQAT

SEQ ID NO: 212662 - protein, 319 aa, unidentified
MNTIGLDISQKTIDATLKKSDGSAYHIKISNDSEGFQKLKAWIKTNRVRKTVIGMEATGIYYEAAADTLSETHIVYVINPLKIKNYAESQFSRTKTDKADSNLIAEYTKRHIDKLTAYRKPDNRYLQKLLSLKNQLKEQQKQIKNRLHSSESETIKTIHEDLIQTYQEKIDQAQTAIEAEIDRQKDKNAHYRNLQTISGIGKETAAILYAQLTDKDFQTANKFISYIGLSPQIQQSGTSVNKKGKLSRYGHRRLKSALYMPALVAYRTGAFPQLVRNLTNAGKHKMIIIVAIMRKLAKLAYFIVKTGKPYDATRYKSAA

SEQ ID NO: 212663 - protein, 385 aa, unidentified
MGSQAFIARDYDVFAGLDVDKKSISVTFTDHQGLLKSMRMPYSVDHLVNHVRKHYGDKKVAFAYEAGPTGYGLYDGLVAQQYPCLIASPSMIPKAPGQRVKTNRLDSLGLAENLRGGQLKSIHVPTTLYRELRHLTQLRDALVSEVVAMKQRIKSLLLMEGLEFPPAPPGSQWSFLVKAKLRKLPCSSVVRFKLDQLLDNLEFGEKQILKTTREIRRFCHNDPELSQCIDYLKSLPGIGWIVASQMLARIGDWRQIKNIRELAAFLGLVPTESSTGERTTRGSITHSGDPRLRSKLIQASWSAIRQDGELLKFFRTVAKKHPRHLGPRVAIVAVAHKLCVRAAVVLMKQRPYEMREKVQSAPLTQEETVPQGTTRRRRVPGEKIS

SEQ ID NO: 212664 - protein, 423 aa, unidentified
MAGVMIGIDPHKGSHTAFVIDGREKPLGQLRVRASCEQAEALLGWAGRWRQRTWAIEGARGLGQLLAQQLLAAGERVLDVPPKLTARVRLLESGQINKTDENDARAVAIAALRARELPQLTVEDQTIVMRVWARRYHDLGRLRTQAVCRLHTVLCELVPGGVRKQLRTSQAIAVVDRITAESPVAQAKLELAHDLVADLQRLDAQRREVKRRVSRAVAAAPTSITEVYGVGPIVAACVLGYVRDIRRFPSRDRFASYNGTAPIEVSSGDRKIYRLSRRGNRQLNHAIHIAAVSQISHRGSEGHAYYQRKRAKGMTGKCALRALKRKISDTLYERMLHDIRQRKDPGGHSGNDAVSSAAGSHPDGPALRTSHSRATANSKTATTNQRPLTSPPAPDKRRTSRSGTGVKLQPRPRPRRGRGQERA

SEQ ID NO: 212665 - protein, 386 aa, unidentified
MRSARRALRDLWEVFATVGISHPASSAVKGPDTRTVVSAGRTFDDPGADPCLENQGRRTMTASVSSDNQIFIGIDVGGASFEAAWHRGGCAQYENRPDAIAAFVARLGIEKQIIRIAIEPTGGYEKPLVKALRGAGLPVDMVHTSRFAAYRSLVGAKAKSDTSDARLLAAYAAAPEEVRRRKADHVAIPQDAVREQLAELAARRDQLRRMIHAETCRLATVQSKDIREEIAAHLEALREAERKIHAVMKHLVHQRDDLSHSKRLLQTIKGIGDKTALTSIAGVPELGLISNKAAAALIGVAPFLRQSGTMNAPARIHGGRAPVRNVFYMAAVTASQHNPVLAPFYDRLIAAGKPPKVALVAVMRRLVVYANAVLKSGQPWKGAQIA

SEQ ID NO: 212666 - protein, 316 aa, unidentified
MQAQQVFIGVDVAKDSLVSCIHGLAKPQVVANEERAIKGWLKTLAPQAVIGMESTGRYHQSLARLAHQAGLRVYVLNAKDVYFYAKALGARGKTDPGDARVIARYVAEHHAALHAWAPGTAAQLRVQELLQRRARVAVHRASLRQVLAGLEELAPDVLQLEQHFEQLLQHIDDEVQALVASETQLSQGSALLQTICGIGPQGAALLAALFNRIEFANADALVAYSGLDPRPCDSGTRSGRRRLSKRGSPSLRRQLYLAALAATRSKALGPTYRAIRARGFKSTPAVVILARRLLRIAWAVWKSGQPFDAARLQSAP

SEQ ID NO: 212667 - protein, 413 aa, unidentified
MDRVALVGVDWGKSENAFVVRGKDGAVWRDRFPQTPQGVHLWAAALRSRYPEGKVAVALEQSRGALIYALSTYDFIELLTVHPSQTAAYRGVARPSGAKSDPIDADLIYDFVEKHSEKVRALQAVDALTRELTLLVEWRRKLVEQRTSLGQQLSETLGQYYPQALELMGERNSPMSLDFILQWSTLEKLQRSRPATIRNFYTSHNCRSKKVIEQRLALIASAVALHTDAARISALSAIACSLASLVQSVSEQISELDRRIKELWSSHPDYAVLDSFPGVGEVFGPRLAAALGTDRDRWDATTLSNFSGIAPLTEASGSTRWVHVRWACPKFIRQTFHEFAGSSIAQCGWVAAFYQCQRAVGKGHHSAVRAFAFRWIRILVRCWKDRVPYDDARYTARLIAAHSPNAPKPQVAA

SEQ ID NO: 212668 - protein, 369 aa, unidentified
MKKHITFVGLDVHKNSINVALADEDRNGDVRYYGAIGGTLDDLDRVVKKLSFSSRELRFVYEAGPCGYDIFRSLTDKGYACSVASPSHIGKKPSERIKTDRRDAMMLARLHRAGELTYVFVPRAEDEAMRDLTRAREDALKAQRVARQQLCGMLLRLGFRYQGRTAWTPAHFRWLTERKMPTPSQQVVFQEYIHAIEETTQRVERHTQQIENLIPSWRLAPVVKALHALRGVSRIVAATMVAELGDLTRFENPGKLMAFLGLVPSEHSSGQKRRLGAITKCGNSHARRVLVEAGQAYSFQARITPLLLKRQEGVSQEVKDISWKCQVRLCARFRRLTATGKNRNTVVTAIARELAAFMWSIAKQVPISA

SEQ ID NO: 212669 - protein, 420 aa, unidentified
MTRTVEIVYPVCCGMDIHKNFLVACIAVTDEHRNTEHHIRRFSTFTGDLRRLSEWLASYNCNDVCMESSGKYWIPVFNALEKTCNVCLTHPKYVKAIKGKKTDKKDAKWISELFKCDLVRSSFVPPPDIRQLRDLCRYYVKLTGLASGEKNRAQNCLTMCNFKLDDVFSDIFGKSATHVLDALLEHGNGDFELDGLISGKCKSSPEKIRAALDGELDPMQAEKLNLIRHHVNNINYLKTALENLICKLAAKYQPQIDLLMTVPGISTQLTAIRILAEIGADMSVFETAKQLVSWAGLTPQNQESAGKKKTTRIGRAGAYLKPLLVQIALAVSKSDKHPELKNKYLALKKRRGGKKAVIAIARKLLIAIWHILSKNEAYNAELYKKADNPPAAREFTTAQAIAFLRNKGFVIVDEETGEVA

SEQ ID NO: 212670 - protein, 425 aa, unidentified
MICAAVERCAGIDVGKKWLSVCIMIGPLDGEPRVERHRFGVNVADLQQLRDWLSEEGVTHAVMESTGSYWKPVFNVLEDSVKVYLANPHEVKNRKGHKTDDRDGWWLAHLLRHAMIHPSFIPPRPLRELRDLTRRRERLNGAGSAEKNRVQKVLEDANVKLGNVLTDVFGVSGQLMLDALLKGEAKPEEIAQFARKRAKKKIPEIIAALAGHQMSEHHRKMIRYSLSHMKFIEEQIEEIDRDIAAKIQEAGLDRQWQILQTVPGVQQRSAAKILAQTGADMTQFPSQRNLSSWAGICPGNNRSAGKNRSNRPTGGNRWLRGALTECAWASAAQKNCFLKEKFWRITTKSRGKKNSALLGVAHTILQLVYEVLRTGQPYRDRRAPALSGQQKDRLIGHHVRRLGKLGVRVYSLSAGAGSQKALSTN

SEQ ID NO: 212671 - protein, 399 aa, unidentified
MTARITPKELKVGIDVGGSNHAIAISDDDGNILKEFEVSHTSKGFEEFFKTIEEIAQSKHATLSIAMEGYNGLARPLDTLILERGYKLYNVNNMKLARFKEIFPGAAKTDQIDARKIIELFHLQKHLPIAKKVLQEIEPKDDTNAHLKKLIRRRKQLVEEKVAIVNRFNAELKGVSPDLKKLSPKVSNQWFLRFITLKKDIRDLVKLRASTVSKIERLGPKKLVRVMQWQQEATFGADIDYIAPMLYQDAKRILELKAMIAELKQAIDALIPQSHIAKTIMTIPGFSTISAGGLAGEIGSLSRFESEASLALYLGMTNLDNSSGAKKSSKRNISTNKQAKMLMVTATMKHAQHVEESKIYIEKKISQGKKYQQAIRALGRHMVRVIWNMIQQKREYEIR

SEQ ID NO: 212672 - protein, 413 aa, unidentified
MERLIERCCGLDVHKATVSACARVTRRPGGEVKQEVRTFATTTPELLALREWLSERGVTHVALEATGVYWKPVYYLLENDFQLLLVNPAHFKQVPGRKTDVADCTWLAQLLEHGLLRSSFVPPAPIRELRDLTRYRKSLTEERTRAANRLHKVLQDAGIKLSSVATDLLGVSGRAMLLALVAGTTDPALLANLARGKLRKKLPELRQALVGRFGPHHRFMVSRLLADIDYLEEASTELSRHIEELLAPFAAAVERLITIPGVQRRTAEVMVAEIGADMSRFPSAAHLASWAGMCPGNHESAGKRLSGKTRRGNRWLRTTLVEAGGAAGRTKHTALGARYRRLRGHVGHGRAVLAVGRNILEIAYHLLSEQTTYRDLGIDYFDHYRAERLKRRSLAQLQRLGYQVTLTPLATAA

SEQ ID NO: 212673 - protein, 385 aa, unidentified
MQKLNDLSRSLTALEPDGTLIAVIEMSLSSWLVAGMVPGVERQPLKKLAVDESALLKLLHRWREEAEKAGRRIDRIAVAFEAGRDGFWLARWLKARGIEAYVIHASSVAVSREHRRAKTDRLDTELLKRSFLGWLRGERDHCKMVEIPTMKDEDAKRPNREHDSLIGERSRIVNRMKAALVRLGIRGFNPKLKRATTRLDGLRTPEGEPIPPNALAELRRDMERRRLVNNQIRQIEEERLERIEQAPCDGPHVMVRLLARVMGIGIETADMLVHEVLSRNLRDRRAVARYAGLTGSPDESGRKRREKGLARSGNVRVRRGMIQLAWRFLLHQKNSALTKWFRSRTENARGTRKPMIVALARKLIALWRLVREGIVPDGVVLRAAQ

SEQ ID NO: 212674 - protein, 351 aa, unidentified
MKYYKTMTKYNCGIDLHTRQMYICVMDREGTILVHRNIRNNDFAFFLKLVEPYKDDLTVTCESCFVCFWLADACEDAGIKFVLAHAYYVKSIAANKHKNDKEDARELAECLRTNRIPPAYVCPRDLRPVRKLLRRRNKYVKNRAELSGHSTCEVMAVGNQPLTISANSKERWREGVRSSFENPVDSFTSEAELFIIESYDKVILKMEQRIEKHARDFKQQDYRLLRTASGIGKILALTILYETIDIKRFPTVKDYISYCRLVCGTNESGGKDFGGKGRKMGNPYLKWAFMQAAILGKRADPKLNAYYQKLERQKGKHTANAIVAAKIARAVYFMLDRKTGFSVDQLIKGRR

SEQ ID NO: 212675 - protein, 294 aa, unidentified
MTKVTTVGLDLAKSVFQVHCADQDGRPVVRKKLRRAQVVPFFAALGPCLIGMEACASAHHWARELQALGHEVRLIPPQYVKPFVKTNKNDAADAEAICEALIRPTMRFAAVKSAEQQSVLMLHRARELLVRQRTMLINALRGHCGEFGIVAAQGASKVTALIEMIEDPEDERFPVLAREALGSLIDQLRMAQTQILGLEKKLKVWHRANEASRRLETIPGVGVITATALVATIGDASQFQSGRQLAAWLGLVPRQYSSGGKERLGRISKRGDGYLRRLLVHLCGDNQGENSATI

SEQ ID NO: 212676 - protein, 484 aa, unidentified
MTRRKLSTFERLQRGERLNRKQCREVQQRLNLDDPGLDIIHRDAAGIDVGNESHFVSVPPDRDPQAIREFGSWTAALEEMARWLKDCRIRTVVMQSTGVYWIALFDVLRRYGLEVNLVDARGTKNVPGRKSDVQECQWLRKLHTYGLLRPCFLPPPEIQAVRTLWRLHLQHVRDAGRCIQRMQKAMIQMNVQLHNALSDISGASGQAIIRAVLKGERDAKVLAKLRDLRCQATEEEIVQSLQGNWKEDLLFELQQAVEAYDFCQRQMKTCDQQLRRYMAALPTRATVPAPGSVSSLPSAKKGKQGRARKPRRQGNQPAFDLASELERVLGVNVATIDGIDVLTIQTVLAEVGSDLSAWKTEQHWTSWLNLAPKRDVSGGRVIRHVRQHRTNRAGNAFRMAAQSLVRSQTYLGARYRYLRAKLGGLKAVKAMARYLACLYYRLLTQGQIWVDRGTEEFNRRSQQRELTALERKARKHGLQLVPAA

SEQ ID NO: 212677 - protein, 400 aa, unidentified
MISVGIDVSKGKSTVCILKPYGEIVSKPFNITHTQKDLSELSSMLFRLNDEVKIVMEATGIYHLPVLTYLQEKGFFVSVINPYLMKSYRNESLRKAKTDKIDSRIIANYGIDHWFKMKEFQTSGEIYEELKLLGQQYRHYMKLHLLSLAELTHLLDLTMPGIKNLLASWNETNRKDKRSDFVERFWHYDVITSMSEQEFTEEYILWAKEKKYVPSQEKAKVIYTLAQESIPTLPSETSSFKMLVTEAVRGLKEVDATLGLILSRMQEIAKTLPEYSVVIEMGGVGNTLAPKLIAEIGDVRRFRNGKALVAFAGIDPPPYESGQFVGCNRKISKRGSASLRKVGYETMRSLKMRSRPEDPVYRYVVKKEAEGKSKKSAKIAGLNKFLRIYYARVTELYKNI

SEQ ID NO: 212678 - protein, 316 aa, unidentified
MTTNSVVVGVDVAKDRLDVAVRPSGEVWSEANNETGITTLVARLRPLGPALIVCEATGGFERAAIAALAAAGLPVVVANPRQVRDFARATGQLAKTDQLDAGILALFAERVRPTPRPLPDAAAQLLDAVLTRRRQLLEMLVAEKNRLGFAPKPVHRGIQAHVRWLERQLDDVTKELAALIEASPVWRAKDDLLQSVPGVGPIVSYTLLGELPELGTLSHKQIAALVGVAPLARDSGTLRGKRLVWGGRASVRTALFMAALCGRRWNPTLKVFYERLKAAGKPTKVALIACARKLLTILNAMMRDQSRWTSNVQYSC

SEQ ID NO: 212679 - protein, 477 aa, unidentified
MNGTGREAKKQANINNSVNVLSQEELGRRIAEVKANLKSSTWKDLETGGKFDKNAKLTFISDDMLILGCDIGSETHYVRAIDTRGRELSKDAFPFTNNAEGFQRAKAWAVQIAAEHSKKQIVLGLEPTGHYWFCLAAWMITNGISVVQVNPYAVKQTKELEDNSQLKDDRKDPKLIANLVKDGNYGMPYLPEDVYADLRRLSMLREQLTEDRVRYVNRLHREMKICFPGYMDAFGRLDGPFALIALKKTPFPEDILSLGADGLREIWREARLKGRGYSRAEQIVRLAAESVGLRSGTAGSKEAVRCFVEQILYLTEKLEEIEDSLHRKCREIPCAGNVLDIEGIGETILSGILAEMGNISRFDDVKEIQKLSGLGLVACSSGKHKGETKISHRGRKRLRFWLFQAARSAVSHAEEFKKLHAYYTMRPDNPLKKMQSLIVIACKILRVIFMILRTGRKYDPEKMLKDIRHPVPAEQAA

SEQ ID NO: 212680 - protein, 311 aa, unidentified
MTILTSQTVVGIDIAKAEIVVYRADLETIEAVKNDRSALKRWLKTLPAQSAIAVEATNIYHLETVDLAHAMGHQVYVVDAYRVSHYRRGVGQRAKNDPCDARVLARYLTNEQSKLRLWNPPPKAYTVLKSLLHRRATLIQNHTGLMLSWADEPLLKKERTAQQKAFERSDRVIQNLLRKVSKEAGIDDNIGRCKAIEGVGELTATGLATTYMRGDFANSDAFIAFLGMDLTVDDSGKKNGPRFLSKKGDPEIRRLAYNAAMAACRSTKWKPFYESYLARGFSKTQALVALARKLCRVAFTLMKNQGEYRSV

SEQ ID NO: 212681 - protein, 319 aa, unidentified
MSKITIGVDIAKKKFDVASLISGKYKHKTFTNDESGFMAFVAWFLPLCGDVKPLICMEATGAYSLRLTDFLAKQSHSVSLVNPAKIHAFGKSELSRAKTDKADAKLIARYALKMQPPLWIPIPTNIRELQALVRRVEHLLEMIQMERNRQDTAATIIIDSINTILATLEAELKATRKAIHDHINNDPDLKQRGDLLNSIPGIGDATIAQLLIVLSPHHGFNHAKKIVAFAGLAPAPRESGQWRGNTHIAKNGDSALRKALYMPALVAWQHNPLIRTFCERLKANGKNGKAIACAAMRKLIHIAFGVIKPGKPFDPNYAS

SEQ ID NO: 212682 - protein, 428 aa, unidentified
MEVIYSKACGVDVHKSFIVAVICDSTSITPKYLRKRFSTYNNSLIEFRNWLIENDCDNVCMESTGKYYVPVYNALEGFISNVVVANPKWVKAIKGEKDDNKDAKWIADLFKMGLVRSSYIPSKDFRILREFTRYRYKLTNTKTSEKNRFTNALTVGNCKLDMVFSDIFGKSSQSIIDIILNNDNFSDDDIINCINKKCKSSHEDILSSVNGIQLTNEQKLRINIVKDHIDYLNNQITKLNDIIDTLVEPYESYIDLLCTIPGIDRNSAIGILSEISNDMSQFKSHYRLASWAGLAPGCNESAGKKKSVKISRAGVYLKPYLVEVAHCAVKDKSNSYYAKKFEKISKRRGKKRAYIAIARKILVAIYHMFQTGEVWNPTDLASIETPIQDRIKYTKNNFNQSFKQLLSLGLTSEELIELINQNANKLPV

SEQ ID NO: 212683 - protein, 309 aa, unidentified
MKVWVGIDVANDSLAVWIRPLGHSFSVPNTFAGYQEIVKRCRGHGVQRLLVESTGGYEQGVVEYCLSKALPVARIMPQRARAFANALGKRAKTDPIDASVLAHCAEVMELPVVRAVSPERQHLQSLVQRRLQVVTQRDDERRRLAQARHPDIIASLKRAIEGSKKELKVLQQSIEKVAAVVDGDRISRLRKVGGIGAVSASNMIAFMPELGELGRRQIAALVGVAPYNRDSGNHQGKRSTSGGRARVRRVLYMATWSAIRTNPLLRARYELLVEKGKPKKVALIACLRSFITQLNAMLRDGTEWQAATR

SEQ ID NO: 212684 - protein, 399 aa, unidentified
MIGCDLHDATMVLKLCCDSEKSVRKSWPTSKVDELIEYLQSFAAERGGQRIVFAYEASGQGFGLYDRLTDAGIECHVLAPTHLPHTAHRRKNKTDDNDAEMILDELRAHVLAGRKLPDVWVPSPQTRCDRELVRWRLELCEQRTRGKNQIRNLLKRYQRPFPAWFSKSGDWSQRSLQWLQDQAGDPPEGASTEVLDECVRTALGSVVALYKQMCEQLRQLDKAILKLAGTDRYRQAFRKLKLQKGVGTLTAMVFLTELGDLNRFANRRELGAYLGLAPSAFESGQRDDRKGHITRQGPSRVRHVLCQASWSAIRYSEHWRQKYDRVRRDSPKRSKVAIVAVMRLLAITMWHAAQSSELDEVLAEQDRLQALPKTNKRGSASARARQKGAAPPAVAITSP

SEQ ID NO: 212685 - protein, 445 aa, unidentified
MLTTTHDNEEIIERVAALDIGKAEVMCCVRVPDESHPGRRLQEVQAYPAMTRSVLRLAGHLAGLGVTRVVMEATAGYWKPVFYLLEAAGFETWLVNAKDVRHLPGRPKTDKLDAVWLCKVAERQMLRPSFVPPPQIRQLRDLTRCRADLVAARTAEKQRVEKLLEDACIKLSAVITDIFGVSGRDMLAALAAGQRDPGALAQLARRSMRGKIAVLEEAFTGHFTSHHAFLLRTMLRRVDAISADIATVDKRIAAQAAPLAGAVAQLDEIPGINLASASVILAEIGTDMTRFPTAGHLVSWARLAPGISESAGKKKGKGSTGHGNAYLASVLGNAAAAAAKTDTFLGEKYRRIARRRGSKRAIVALGRSILVIAWHLLSDPEARFYDLGSGHHAARIDPERRKRTHIRELEALGYTVTVEPAASTPDPKSGSAGRCRAPVTHQFSD

SEQ ID NO: 212686 - protein, 356 aa, unidentified
MQSKVISFKGQKVFIGIDVHKKTWSVTTLLEVGMPKTHSQKASAKELFDFLNRHYPEAEYHAVYEAGFSGFSTYYALKEYGIECTVVNAADVPTTQYESVMKSDPIDSDKMARALRAGMIKGIYIREKDNLDDRGLVRLRKSIQQDLTRYKNRVKHLLHANGVEIPELFDRSPNWSKAFINWLREEVVLLSSTRASLDMLIEQVETLRQNLLIVTKKVRNLRFKEEYAEKYDALTSIPGIGPICAITLLTEIYDVKRFRNERQFASYLGLVPTCHSSGEKASFGEMTFRGNKHLGPLLIEASWVAIHWDDALSVAFTNYRRKGLMPQESIIRVARKLSNIIFSMLKTGNNYAPANA

SEQ ID NO: 212687 - protein, 340 aa, unidentified
MHKSSAEVLLGCGIDVSAAQLVVALEGEGEEWLQRSFPNRPGGHQALIRWLQKTGVRVRVCLEATGRYSLDLALALHAASGIETAVLNPKRVHRFAATLCRSKTDPADAQVLAEYACRMPFQRWHPPCTAALQLRTLTRHIAALTRQHTQESNRLHALSASATSSAWVRQDLKRSLRDLEHRIEKMRDAAQTFIEQDAELRPRFALLLSMPGVGATSALHLLGELALLAPGLSVRQWVAHSGLDPAHHDSGSSVHKPSRISRAGNRYLRRALYMPALVAVRHDPHLRAFYQNLLARHKAKLQALMAVARKMLHAIFGMFRSQSEYDGSRLFPALELAPAA

SEQ ID NO: 212688 - protein, 380 aa, unidentified
MQPTHLFNVTSSLALSLELSSGSWKIAACDGCREKPALHGADAKAPWERLQQVLQCIEQLKAKWQLPADSEIYVVYEAGQDAFWIARALQAAGIKVFVVDPASIPVARHARRAKTDRLDALTLLECLFGWLRGERQRMHVVRIPSQQAEAQRQLIRDRGELQKEIGQHRDRTRKLLRTVGCWEEVQADLPARLAGGTLRCWDGQALPEPLRERLARECERLVLAQQQLAALEEQLRRQLPAPLQQRIEQLARLKGVGWIGAMRLVIELFWRQFQNRRQVGSCIGLVAQPYDSGASRVDQGISKQGNRKVRALLIEMAWMWLRYQSESAIARWFAMRTAGNAANKRGKRIAIVAVARRLAIALWRYIEQGVMPEGAKLKSA

SEQ ID NO: 212689 - protein, 451 aa, unidentified
MANRGKTACGTTILGRSQMFGKEIAKGIWWTVGVDCGEECHRFVLLDDRGERQNACWVRNRRDKIEEAVAQMVLALPEGVRLRLVTEGVRSLGWVVAQVSGSLDLEVWQVNPKALNHYRDLEGQPRKDDDIDAYLAARMVVFGMEGCRVAVDPRPEERALCRLTRLRRQLSDRRADVKNRLRSLLVELAPEVVSKDWEGPAHNGKGMRAVLKRWPTFEGLEKARTSTIEKMLMSTTRYGARCGAMSVPLKEMAGRVAMAPMEREIVKMDISMAIAELDVLDGSIAKLNKEIKHRVMDHSVGKKLLDMPGEGPVTVGTDIGEVLPVARNASEGMAATYAGLTPLSRRSGKGGKPSKLARGVNKHALRTNYLSAIAAIPASAIDAAYHQKQKERHQGHPKPHVKATLSLARQRFKIKYKLMTTDAVYDKEILISSHLERRRRVTSNQNQPHAA

SEQ ID NO: 212690 - protein, 398 aa, unidentified
MHAGIDTHKDTLAVAVIDPAGRPVIVTEVANTEAGFDALQHLLERHAVTRVGIEGSGSYGRGAAVRLVLAGGLQVVEVPTLLTSRERSSRPAQGKTDPVDALAIARITAREPGLPPVRLAVGAAADLRALCDYRTQLIGERTALANRTHAELHGLLPGYHTQVPRLTAPTFIAAAQALLAGDQRIRAEVTRRRLTRLAELTAEIKDVTTLIAAAVQQQDTGLTGLYGVGPVTAATILGEVVDIRRYRSRHAFAAANGTAPVPASSGRTARHRLNRSGNRTLNRVLYTMAITQIRADTEGRAYYQRKRAEGKTAREALRCLKRRLSDLIYKTLQQDLAATSAGAGGECGSGKRDASLRPQPAARQASSPEPALRSGQSTAPTASQNLRAPRPVLTGVDT

SEQ ID NO: 212691 - protein, 279 aa, unidentified
MSQPNPLCVGIDVSKATLDIAASSDVAQFTVSNDSDGFNAIITGLRRHSVALVLMEATGGLEVAVACSLQAEGFEVAVVNPRQARDFASAMGYLAKTDRIDARVLTQMAEVINRHPERKRFIRALPDAERQALAAMVVRRRQLIAMLVAERNRLYPSHPQNKKSINTIIKALEDELARLEKYMNSHIRNHFKEIAERLSSIKGVGTMTVSAMLAEIPELGTLSRREISALIGVAPVNRDSGSMRGRRTIFGGRAGVRSALYMAALVATRFNPVIKTFYV

SEQ ID NO: 212692 - protein, 342 aa, unidentified
MSEATLIGIDLAKRVFQLHGACDDGSVVFRKKLSRPQLIAFVSRHPRCVIAMEACATAHGWGREFEKLGHEVRLIPPIYVKPFVKRQKNDAADAEAIVEAATRPTMRFVALKSEAQQARAMLFRTRQMFVGQRTQLINALRGHLAEHGLVAARGPAHFKRLADAIEDDDPALLQDVRELGRMYLEQIEGLNARIADIDGKVKSAAKEDGLARRAQTMPGVGPVTALAIETFAPDLATFRRGRDFAAWLGLVPKQHSTGGKQRLGKTSKMGQRDIRTLLVSGAMAVLQAVERFDTPNNGWLKRLLTRKPRMVAAIALANKMARGLWAMMTKQEDYRNPAAMMA

SEQ ID NO: 212693 - protein, 358 aa, unidentified
MLYLAIDQHRKQLTVNLRNEQGDVILKRQVSTEWPRVRSFLEAVQKQSAPEGGFVTILEVCGFNDWLLKLLAAYGCRETVLIQPEKRTKNKTDRRDANALGELLWTNRQRLLAGKKVQNVRRIVPPSDRDAEDRQLTALRQRLGWLRTRTINKVQHLLLKHNLQQECPTKGLQTQRARKWLAKLPLGAIDRLELNQLLAQWALWDKQLAELEPKIRQRQAENPTAAIVATVPGAGAYSSLALACRIGSIERFPHARSLAHYWGLTPRSRNSGDATQRLGSITKQGSALARFLLAQMVMHVLRRNLVLKDWYRRIKRRRGAKIARVAVMRRLATILWHLVKYQQAYQPGGGKNGKTTAT

SEQ ID NO: 212694 - protein, 334 aa, unidentified
MVQGRAVVEEKGQKSSVRGEVKVMGGGFIGIDVSKGQLDVAFRPEGVHLQVSNDPRGIARLVRMLERWQPALVVLEASGGYEALLFERLSAKQIPVALLNPRHVRQFARASGRMAKTDAIDAVVLAHFAEVMKPEPRRLADEETRKLRILVGRRYQLIQMMTAELNRQSHSLAALREGFTATIRCFKKQIANIDKQVLALIQAAPELCAKAELLRSTPGIGAVASSTLLARLPELGTLDRKRIAALVGVAPFNRDSGKLKGKRAIWGGRSDVRAVLYMSTLVAIRRNPVLQDFYQRLRRAGKTSKKALTACMRKLIVTLNALIRHRTPWAPATC

SEQ ID NO: 212695 - protein, 370 aa, unidentified
MKMSIGVDLHKTQFTVCFLGESRKIQESGMYPVSEKGFEEFLAKTADFTEKGYEVSAAVESTGNARYFRNRLLTAGIDVTVVNTLKFKVVNESVKKTDKHDARTLAEFLEKEMLPESVLCSQESEDLRRILKTRTLLVRTMVSVKNQIHGLLLGYGIETKRGQLQSKKERQRILVGLADHRYIGGAAKAVEPLFETIDQLSAQVKNLEKVIVSLVEKDEDVELLMTIPGVGIITATTIRAYMDEISRYDSPKKFASYIGLAPWVQNSNETIHHGHITKRGPEELRTAMVQSVLGMVRNSKKTGEYRIMSKYRVMKKIKGSGQSIIATARKMSTIVYMMLKTREPFDPLRMAPDKKYLEMQTAAWNAVKAG

SEQ ID NO: 212696 - protein, 291 aa, unidentified
MNILALDLGKFNTVYCDYICETGEHKFGKVKTTPQAIHDLIVDKEPERVVMEVSEIAGWVVDIARALGKKTETANTSHEAWRWKNVKKKNDKEDARKLAKLSAMNQLPTVHIPAKPIREMRSLIKYRQRLVKHRRSIQLAIRAIFCAQGITGVPRGKSAWSQEGLGWLRKHARPLEEIKDLEQLWRGRLHVELETFDAINRALKTVEDKLNKLGSADARVRRLQTIPGVGPRLAEMVVAFLDDPQRFQSGKQVGNYVGLTPKQYQSGQMERQGRISGQGNKLLRNLLVEAC

SEQ ID NO: 212697 - protein, 356 aa, unidentified
MKYVGIDVHKKFCQAAVLDDEGELFDQIRFLNNKEEIKDFAMKLTTFRDDVKAVVESTGNLWIQIYDILEKFGFEVFLSNPGKTRLIAEAKNKTDKIDAKILARLLRADMLFTCYVPGEELRNRREFLRARQDFVKNRTQVRNRIHSILDKHGLRFPGEPFSKKSIVWLSELDLGDMDNAVVKGQLALLETLDEQIQVLEDKIAAMGMEDPQVKLLMTMPGIGYFAASLLLAEIGDINRFSNDKKISSWAGLAPRIHQSGGTTRIGRVGRGNKRVSGLLTQCAHNARQHDPRFKRFYDRYSKRSGKGKALVAVAHEMIRIVYFMLRDNEPYRGQNVEMTTRKLKSMKYRASISLQT

SEQ ID NO: 212698 - protein, 321 aa, unidentified
MTASPVYVGIDVAKDHIDLAVRPTGEPWSCPIADPDLSRLVTRLQGLGPTLIVLEATGGYEVPVVSALATAGLPVVVVNPRQVRDFAKALGILAKTDAIDAAVLALFGERVQPAVRPLPDEALHALTALVARRRQLVEMLVAERQRRAQMKDSVVRRDISQHIRWLERRLTQTTRDIGGVLEATPAWRVKDNLLQSVPGIGPHTAAVLIAELPELGQLTRRQIAALVGVAPFNRDSGTFAGSRHIWGGRVTVRGALYMAALVATRFNPVIRRFYLRLLAAGKRKKVALVAAMRKLLTILNAMVKHQQSWRTATDVANPLDA

SEQ ID NO: 212699 - protein, 377 aa, unidentified
MKKVRFLGLDVHAETITVAIAEPDGEVRSLGTIPNGEESVRKLVKKLGPAEQLQACYEAGPTGYVLYWQLTGLGVKCEVVAPTLVPVKVGDRVKTDRRDATKLARSYRAGDLTAVWVPDAAHEALRDLVRARESAKQDQLRARHRLSKFLLRQGRRAPLGVRPWTLRYMQWVREQVQFEQPAQDYTRLDYLHEVEHANDRVRRLEEAIGEAVKLVPVTMREVIQALQALRGIAQISAVTIVSELGPISRFAGARQLMAYSGAVPSEESTGQRIRRGAITKTGNAHLRRVVIEAAWAYRHRPAIGATLHQRQQGVCEEVKEIAWKAQHRLHKRYRSLAAAGKNQPKVVTALGRELLGFIWAIGVHVERDASPQHQWAA

SEQ ID NO: 212700 - protein, 322 aa, unidentified
MSPTHEFDLAAGRAGIDVCKERLDVHLLPKGAAFAVKNDPEGIDALVQRLLEARPELVVLEATGRYERPAATAIAAAGIAVAVVNPRQARDFAKATGRLAKTDKIDAEILARFAAAIEPSPSVLPDQEAQALQAILTRRRQLLLMLVSEKNRLQMAPEAVAKRIAAHIRWLEKELERIDRELDEAVQQSEVWRRNEQLLRSVPGVGPVLARTLLAELPELGTITHKRLSSLVGVAPFNRDSGKMRGKREVWGGRAPVRATLYMGALVATRYNPTLKEFYERLLAAGKPKKVALVACMRKLLSILNAMMRDRANWRCPHVLTP

SEQ ID NO: 212701 - protein, 408 aa, unidentified
MLFVGDDWAEDHHDVEVQDEAGRRLGRARLPEGVAGVARLHELIGEHLAEDAGPGEVAVGIETDRGPWVQALLAAGYAVYAVNPRQVARYRERHGASGAKSDAGDAHALADMVRTDAHQLRAVAGDSDQAQAVKVVARAHQTLIWERHRHMLRLRTALREFFPAALEAFGDLAAPDALELLGQAPDPASAARLTPAQVAAAVKRARRRKPQDRAAAIVAVLRAEQLGQPPAVAAAYAATVRSLVRMIAAFNAEIKVMEQQVTVFFGRARDAEVYLSQPGLGKILAARVLGEFGDDPARYASARARKNYAGTSPVTRASGKKKTVLARFVHNDRLIDALHQQAFCALTASPGARAYYDELRARGQGHHAALRQLSNRLVGILHGCLKTGTLYDEHTAWAHHNHDQQGAA

SEQ ID NO: 212702 - protein, 441 aa, unidentified
MVDTAVTTPEPVWAAFLALDWGSQKHAWILQPADGGKRNEGFVDNTPEAIAVWAAGLYQRFGGRPVAVALEQKRGSVVNLLLPYAHLVLFPVPASMSASYRKTFVPSGAKDDPTDAGWILDLLLRHRDRLRRLAPDDANTRLLLMLVEDRRQLVDDKTSLTLRLQDCLKQYFPQLVRWFDVDTALVADLLQQWPDLQHLQRCHDGTLRKFFRQHHGGEKLTGERIETIRAAVPATNDPSVLEAGSMKARHLTESIAALRGQITQLERRRDELVADHPDAPIFASFPGAGPATVPRLIAAFGTCRERYQCAFDVECDSGIAPVHIRSGKVDLVSMRRACQKFTRQTFHEFAGQSIPQCEWASAFYHAHCTKPEEHHAAVRALAFKWIRILFRCWKDRKPYEEQLYLTSQRRRGALLGPGLASVTSLEWKNVAGFSKLSEKNS

SEQ ID NO: 212703 - protein, 406 aa, unidentified
MQGPVITVDVSKGSCHYQPYVSNGHPMRKPKVLHDTVEGFQSLSDLIDTMKDRYECETIPVIFEATGVYHHCLQKYLDDHQIPYYIISPLMSASYRKTTPNSNKTDDLDCSHIAKAYYGECNLFPYDKPSKSFHNLRELNRYYECELNHLRMRKNTFRKYLDIVYPRLDKCFKGHSSLYDEIPMEVIKQYPHPSLLLKHKEETIVKKIEKKTSHNASFIQNIVHEMYECSMHCYSGADVTDVESMILPELVDDLQSQEERCDEILKQLVSEAQKTPYFTSIVSIVGIGDNLAARIIAELGDMSRFSCRRAITAYAGLNPKIRQSGDMDGIHLAISKKGNKHLRCLMYLAVSCNYRLKKGDVLYEFNQKKRQQSFSPLKPKAATIATAHKLLLIIYALCTNGTVYHS

SEQ ID NO: 212704 - protein, 433 aa, unidentified
MEKIHHHAAGLDIGSTKVFVGLEDQSVCSFETFTSDFKMLASYLLENQITTVAMEATGVYWVVLYDILVAAGLDVWLVDGRQTRQVPGRKTDVKDAQWIQQLHSYGLLNRCYVSEGLLKELRSYQRLREDHIRSAAMHINHMQKALIEMNIRLPEVLSQIQGQSGLSLIKAILNGERDREKLLSLCHKTVREKKGDKILKALEGHYTDAGLFALRQAYEAYLFYQTQVKACDERIESTLEKINADKVLPPNVEVTKRKAIRHHKPQVEDLGKHLLKIFGGRDATKLPGFTDYTWLQLYAELGAELNQWPTEKHFTSWLGLSPGQNHSGKRKKKSKSKGKPKVGQIFKQMAQSLLNSKKIAWGAFGRRLRGRKGPAIAIKAVARKLAIQYWRLMVKGSDFVEKGVENYEKILLQQKHKQLQRLAVELNMNLVPC

SEQ ID NO: 212705 - protein, 407 aa, unidentified
MEVVYRCCCGIDVHKKVIVACLVNGGEQELREFGTTTSEIKTLANWLTESGCEMIAMESTGVFWKPLYNLFELMDLDAMIVNAAHMKALPGRKTDVKDAEWIADLLRHGLLKASYIPNREQRELREITRYRKSLTEERCREVNRLQKILEGANIKLDSVVKDITGKSARKLLQRIIDDDIPDSDEVSKLVHGRMRPKLEQIVASIEGITTPLQRKLLAQIIDHIDDLNRRIGELDKLVQEYMAEYEAAIEAIDEIPGIARRSAEVILAEIGLDMGRFPSAAHLCSWAGVCPGNYQSAGRRKHGKTTKGNKALKTILTQCAKSAKTVKSSYFFAQYQRISARRGKNRATLAVAHSMLIAIYHILKNKTAFHDLGSDYYDSFNRDRKINSYLKRLKALGWEPDAISSSA

SEQ ID NO: 212706 - protein, 358 aa, unidentified
MAGKVTETAVVGGVDTHKDLHVAAVVDQNNKVLGPQFFSTIRQGYRQMLAWMTSFGALKRIGVECTGTYGSGLLRYLQNAGLDVLEVTAPDRMERRKRGKSDTIDAECAAHAAFSRIRTVTPKTRNGMIESLRVLKTCRKTAISARRVALQIIHSNIISAPDELREQLRNMTRMQLIRTLGSWRPDASEYRNVTNVYRISLKSLARRYLELHDEIADLDVMIAAIVDELAPELIKRNAIGYESASQLLITAGDNPQRLRSESGFAALCGVSPVPVSSGKTNRYRLNRGGDRAANSALHIIAIGRLRTDDKTKEYVARRVAEGHTKMEAIRCLKRYISREVYTLLRNQNRQLNSIPITA

SEQ ID NO: 212707 - protein, 428 aa, unidentified
MKVQYERVAGIDVHKDMVKVAIRSPGDKRWTRKTEIVEFRTFYGVLQHMARELRRRGVTHVVLEASGIYTEPVYYALAEQDFTEVAVINPAHAKALKGHKTDAKDCARLAELFECGLLRGSCIPAPELKEVRDLTRYRTKTVQARTSEIQRLGKALESAGIKLGSVASDITGKSATAMIEALIDGERRGQVLADLAIGRMRTAGKLADLSQALAGRFTEHHALLCRLHRDRIAVLDAAVADLDQRIAGKAARWQREADLLTTVPGFGDVVAWAWLGEIGPAPHQWFPDHEKLACWVTLCPGNNISARKRKHSRTGDAGTYIKPMLVQAAWAAIRVRGRLQARYSRLVRRFGGDKNPGAKKKAITAIAHTLLKIAYQVLRAGQPYQEPGADFYTRRESPQQRQAFLQRQLQKLHPGCTITITISPPEAA

SEQ ID NO: 212708 - protein, 394 aa, unidentified
MNFLKYAIGIDMGMEKLDACISLMTVQQQVIVKAQCNFNNDYKGFALFHAWVIKNIKMDLPIIFLMEATGVYYEQLAWFLYDKGCTVSVVLPNKAKKYKEALGLKSKNDHIDAKGLAQMACEQKATQWKPFSKDIYLLRLITRQIQNISKQYNIVFNQLHALQHAMFRDKVIEKMYNKQLTLLQKNKKDLQKRVELIVDSDKSLKQKFQNICKIKGLGLQNLAVIVAETNGFAAFENIAQLVSYAGYDVIENQSGKRTGKTKISKKGNAHIRKCLHFPAFNTVRLKVGPFKNLYERVYERSKIKMKAYTAVQKKLLVMVFVLWKNDQSFNPDYQDKVSRDAKPEPSLASASKKQLITKINPIVKKVALAKTKATQDKHPSKHRRMPSLAYLKIT

SEQ ID NO: 212709 - protein, 523 aa, unidentified
MVTKSRVRKKRGSRKRFIGKPTGQIQERVQAVSPEHFGIVAVDCAKRRSKWMLCNFYGKVIVEPTKVEHTAGGLRAMTQLVAKACQAEDLTDTIVAVEMTGIYHKPVYRAFHKAGFDTRIVHPFASNHYRQPLHSDEKTDDKDLEAIFHAAVKGYGLATLPAGEVYQSLQAASRHRHNLVKQRSRLMVQIRRLLHQSMPGFADLFEDKKLFHKSIALPVALKFASADAIRRAGVAGIAGHLNKTKVRFQRRTVERIVAWAGSAAEPSELAGMHTRQWQQLNEVRRLLDEQITAAEQEMAGFLVKTPYILLLSVTGINVVSAARLAGEAGPIEHYASAGAINGRAGLFPSRYQSDEVDHADGSLVRQCNRKLRGAAMLVAENLIKCHPHYRGLSELWKQQKVDPRDRRCRIGNRAMRMVYQLVGGRQLWRGKGVDREYLLAKLQEFHRVHKTPIERSIRDLNEAFAWLPKSAYAAEAKPLAELAAKKHRGPKRIGDLLVPLLIRLGVSIEEEVESNTSEARSSD

SEQ ID NO: 212710 - protein, 413 aa, unidentified
MTNDQQITKERVFVALDIAKGSHDAAIQLVSGKRLNIKIPNTQDGYQTLIQRCGVPEALIDVGFEPTADYHRNIAYWLAEAGCSCYLVSSLSCARAREMLHNTWDKNDRKDANVVLYLMKQGIAEPFHDPLVHGVMDIQELSNTYHQLQKARTRLLNSLFNHYVALYFLEMEQYFNSSRAEWFCRFMLKFPTPASVCRYRKPTFIKRAWDVVGRKVNKESFLSHLYDQASQSIGLPVAVDSVAVETFKLQITRFAELTDQRTKLERQADGFLSNRADYQRLRSIPGIGPILAMMIIAESGDLCRFKHYRQYLSFCGFNLAAQQSGLSKGQYRLSKRGNSRLRYAFWLAATQAINGKENSFREKFRRYISKDPDNKDLRRKARTAVAAKMARVAHALVKSDRDYQGYYEFSRGT

SEQ ID NO: 212711 - protein, 399 aa, unidentified
MDQSLTNTVGYLRRSWRLRQCQHREDWSRSDSSKTVFVGLDVHKDSIVIAAAEVGRAPARVVATVPHEWKALRRALERLGDPPAVSCCYEAGPTGYGLARSLLAAGWACDVIAPSKVPTKAGERTKTDRRDAVKLAQNHRNGELVAIAVPDEADEAIRDLERARDDAKKAERVARQQLGKFLLRQGRRYPGKTTWNERHLAWVRGQEFGEAAQRHVAADAVAAVEAATLRVAQLTATLREVTADWDRMPLVRALQALRGVEFVTAVTVAAEVGDLRRFPTAGDFMGYVGLLPTEQTSGDTRRRGPISKTGNGHVRRLLVESAWHYRRPPRMSKGLRRRSEGLAPSVCAVAWKAQGRLHSRMKKLLGRGKHPAEVVTAVARELAGFMWAIGRSEPLVSAS

SEQ ID NO: 212712 - protein, 353 aa, unidentified
MNVYTGVHAYYCGIDLHARTMYVCVLDKDGKKVCHKNIPCNPDRFLQAVEPFRKDIVVGVECIFCWYWLADLCEQEGIDFVLGHALYMKAIHGVKTKNDRIDSLKIARLIRGGNFPVAYVYPPEMRATRDLMRRRNHFVRKRAELISHIQNTTMQYNLEPLGAISRPHHRRDKDIIGHFPDPVVQLIVETDLQLIDHYDPIIKRLDKQILTLAKGHDPTSLQLLRSIHGVGEVLALTMLYEIHDMNRFPSRGEFCSYARLVKGQKSSAGKNYGTTGKRIGNAHLRWAFSEAAVLFLRNNKDAERYYNRLINRHGKSKALSIIAKRLGIAVYYMLKRRKSFNLNMFLSGAKEKV

SEQ ID NO: 212713 - protein, 367 aa, unidentified
MPTMTQPSTGEQTCTLVTGGVDTHQDTHTAVALDQTGRLLGHRQFPATAPGYASLLAWLRGFGLLVAAGIEGTGAYGAGLAAVLQAAGIELVEVDRPDRRTRRRQGKSDPVDAEAAARAAQARRATTGTPKTRGRRVDALRALRVARRSAVAARAQAQTQMKSLIVTAPEPLRATVRALGDRELIAHCTTRRPDRTRVEDPTVAAMLALRSLARRHQELCAEITELDTLITPLVAALHPALLALTGVGPDVAGQLLVTAGDNPERLRSEAAFAMLCGAAPLPASSGRTVRHRLNRGGDRQANAALYRIVLCRLRWDPRTRAYAARRTAEGMTRKEIIRCLKRYVAREVYTALLNPHPSSVPDSPCAA

SEQ ID NO: 212714 - protein, 421 aa, unidentified
MSVSPNEVPTPALRPASPPVTAGVDWAKDDHAVCVVGGQGEAIDRFTVTHDVAGLRALVRRLLKTGVEQVAIERPDGPVVEALLQAGLTVFVIPPGQVKNLRSRYGSAGNKDDRFDAYVLADTVRTDRRRLRPLVRDTPSTLALRSLTRARKDLVGHRVAAANQLRAHLQVVFPAAAGLFSELDSAISLTFLERFTTQAQADWLSAKRLATWLRSVGYSGRTDPAVMHARLTGAARGLTGDAASVHAATTLAFVAVLRTLNTQIQALADRIAEQLAVHPDGHVFTSLPRSGTVRAARLLAEIGDARGRFPTADSLACLAGVAPSTRQSGKTKAVSFRWGADKQLRDAICDFAADSRHANPWAADLYQRAISRGHDHPHAVRILARAWIDIIWRAWHDEVPYDPARHNALQRILNQDQPTAA

SEQ ID NO: 212715 - protein, 366 aa, unidentified
MKKTSTVRVNGNMIFKGHKLTIGLDLGDRWSFYCVLDEAGEVLLEQKVPTTPEAMKQTFSRISQSRIALETGTHSPWVSRLLTELGHEVIVAHAQKVQLITKSNRKDDRHDARTLARLARIDPELLGPVRHRSVQAQIHLTVIRARAELVSARTALVNAARGLVKSYGQRLPKCGTQQVSRELAAELSTELRDVLEPLLKEVESLNERIQEYDERMEKIAKEVYPEVSLLKQVKGVGTQIALTYVLTIEDPHRFRKSREVGCFLGLRPGRRNSGESEPEKRISKEGDRYLRTMMVQGAHYILGPFGHDSDLRRWGLKLAERGGKNAKKRAVVAVARKLAVWLHKLWVSGEVYEPLRNNHQVVSAVA

SEQ ID NO: 212716 - protein, 354 aa, unidentified
MSQTANTAIAVIGIDIGKNSFHVVGHDARGAIVLRQKWSRGQVEARLANIPPCLIGMEACVGAHHLSRKLASLGHDAKLMPAKYVRPYSRGQKNDFNDAEAIAEAVQRPTMKFVATKTTEQLDLQALHRVRERLVSQRTGIINQIRAFMLERGIAVRQGIGFLRTELPTILATRTDALSPRMLRVIEELAGDWRRLDQRIDGLSGEIEALARQDQACSRLMTVPGIGPIISSAMVAAIGTGDVFSKGRDFGAWLGLVPKQISTGDRTILGKISRRGNRYLRVLFVQAAWVVLVRIKDWERYGLKSWIEAAKRRLHHNVLAIALANKLARIAWAVLAKGRAFELTRTDDAGVRPA

SEQ ID NO: 212717 - protein, 362 aa, unidentified
MAKSTTIIAFDQHAATTVAAVLLPGHRTPALHTLASDSPTILRFVERLHRQGPIVCCYEAGPCGFELQRALSARDMTCEIIAPALIPRRAGDRIKTDRRDAGHLAVLYRAGALTAIHIPTEQEEAARDLLRCREDIRADLLRCRHRLSKFLLRHGRRFTATKKAWSKRHDAWLRAQTWPIAALEQTHRAYLRAVEETLARLRAIEEDLRTLLDLEPLRPRVQRLRCFRGIDDLTALTIAAELGDARRFPSAPSTMAFVGLVPSEHSSGTKQARGAITKTGNAHLRRVLVESAWHYRHHPFVSAALRQRQRGAPDAVIAQAWTAQHRLHRRYQRFAARGKPKQHIVTAVARELTGFVWAALTQ

SEQ ID NO: 212718 - protein, 418 aa, unidentified
MMSEEILAWFVGVDWGSEAHQACILDLQGNIAGERSFPHSGAGLAELSDWLLSIAGAASGVAVAIEVPHGPVVASLIDRGFVVHAINPKQLDRLRDRFSVAGAKDDRRDAFALADGVRTDRRLFRRLNVADPRIIELRAWSRLAQELTEERVRLSNRVHHELWRYFPQLPKLTDDLAAPWFLELWTLAPTPARARQLRKSMVEQLLKQHRIRRVDAETVIRTLREPAIKVADGVAEAASVHMRSLIARLRVINRELREAQRELDKICSAIGDSEAAASGDCLQRQDVVILKSMPGIGRINLAALLSEGSGPLSRRDYPALRTLCGAAPVTKRSGKSRIVIMRYAAHVRLRQTVYHWARVAAQHDPKSKARYVAFRRRGHSHGRALRGVADRLLGLACVLLQKQTPFDPQYGHPATIVR

SEQ ID NO: 212719 - protein, 410 aa, unidentified
MEVLYPHCAGLDVHKDTVVACVRHMANGSVRREVRSFKTTTKELLALSDWLVGEGCTHVAMEATGVYWKPVWHVLSDGDFTLVLANAAHVKNVPGRKTDVNDATWLADLLAHGLIRSSFVPDEQTQEMRTLLRTRKQLVRECSRHVQRLQKTLEDANIKLDSVISDIVGWSGRRMIEALIAGETEPGALAAMAHRRIKATPDQLEAALRGRVTRHHRFLLQLHLQQIDAVNAAIDQIDQEVDACVEPFRATVRLLTTIPGIDELSACVILAEIGRDMSRFPTAGHLISWAGLCPKNDESAGKRRSTRMRKGAPWLKTTLVQCAAAAARKKASYLQAQFHRLRARRGAKKALGALAASILTSVYHMLISGELYRDLGPHHFDHRAKAVNTRRLVMRLQNLGYAVQITPLAA

SEQ ID NO: 212720 - protein, 446 aa, unidentified
MEVIHERVAGIDVHRMKHVVTILIGRENGTVSSETREFGGFKRDMRALVGWLQTHRIQQVVMESTGIYWKSVFSHLETAGIPALVVNAFHVKNVPGRKTDVGDSEWLAQLARFGLLRGSFIPPKDLRELRLISRYRRKLMGTLGGEKNRLHKLLDDAGIKLGGVVADIDGVCARKMVEGLIAGGTPEGLSALGRGKLKSTSEVLEAAMDGDLSPRHRLVLSTVLSHLRYLQQQLAQLDRYLIEAMKPYAWAWRLLQTIPGIDQVTAAMILIEIGDNVHRFGSPSRLASWTALCPGNNESAGKRISGKTRHGNPIVRYLLCEAANAARRTKTVFRAKYNSLVIRRGHKKTIIALAHKLIRTIYFVLAPVSPIETQPSTTKPQAWRKMPRVGSGPSRNTAICQRSPPQPQSLPCKPIECVIRSTYRLRTVSQRFSPCTGGSFPRAPVT

SEQ ID NO: 212721 - protein, 340 aa, unidentified
MNANNKFFIGIDVSKPFFDASLMAVKGHQKQAIETARFDNTLPGLKAFAKWLKKLKVAMDQSTLVVIENTGIYHRLIWSFCNKNGLPLHIGNAAHIKWSFGITRGKNDKIDSIRLCKYACKEADTLKASPALNPVLMQLKDFMTSRTRLLSQINSNKQYIKELKNINDPMVQRAVEKAHRTAIEGIAASIRDIEALIHKIIADNPELKHNYDLLITVPGIGHLTAVYLICCTTNFSAKISGKQLACYAGVVPFEHSSGISIKGRNRVSHMANKELKKMLHLGALAAMRNYPEFSTYYNRKKQEGKHPMSILNAIRNKIALRAVAVINHQKTYINNQSIAA

SEQ ID NO: 212722 - protein, 391 aa, unidentified
MESNPMQKLNDLSRSLTPLKPDRTLIAVIEMSLSSWLVAGIVPGIDRQPLKKLEVEESTLLKLLIRWREEAKKSGHRIERIAVAFEAGRDGFWLARWLRARDIEAHIIHASSVAVSREHRRAKTDRLDTELLKRAFLGWLRGERDHCRMVAIPTIKDEDAKRPNRERESLVGEQSRIVNRMKAALVRLGIRGFNPKLKKAVERLDGLRTPEGEPIPPNTLAELRRDMARRRLVSDQIRQIEDTRLERLEQAPSDGPHAMVRLLARVIGVGIETADMLVQEVLSRNTRDRRAIARYAGLTGSPDESGRKGREKGLARSGNARVRRGMIQLAWRFLMFQKDSTLAQWFRARTENARSARKTMIVALARKLLIGLWRLVREGVVPDGVVLRPVS

SEQ ID NO: 212723 - protein, 404 aa, unidentified
MVAVMIGVDPHKGSHTAVAIGAAEEPLGELRVRSSAAQAERLVSWAAAWPERTWAVEGAGGLGYLLAQQLVAAGELVLDVQPKLGARVRLLATGATNKNDPNDARSVAIAALRSATPRRVTAENHAAVLKLWSKRHRDLGRARTQVACRLHAVLCELVPGGISKQITAAQATIFLQQIELSGAVAVARCELAAEFLEDLRRIDAQLRDTRKRLTAAVQASGTTITDVFGVGPVIAATMIGYVADAARFPTRDRFAAYNGTAPLEVSPGNRKIYRLSRRGNRRHGHAVHMAAVTQIRQPHSDGRAYYDRKIAEGKTRKEALRCLKRRVSDAIYARLQADARRAAAAVRTAGPGGQPGNDSVASAAGPLPSHGLLGPATPGPDPTLRPRQPPHAHEDQLKGRWKLH

SEQ ID NO: 212724 - protein, 347 aa, unidentified
MITELLSVGIDIGKDTLHIVGFNDDGSYAFRKKIRRLSLVATFEKLPRCIVGMEACMSAHFVSRTLRKLGFDPRIIAAKYTKPFVKGQKNDYNDAEAVAEAVLRPNLNYVQEKSQDQLDLQALHRVRSRLVSRRTATINQIRAFLLEQGIAVRTGSSSLRNSLFAILDNRANEISSRMHDILIGLYEDWLWLDERIDATSTEIEQISKYDVGCQLLMSIPGIGPIISTALVAAIGNGSAFERGRDLGAWLGLVPRQYSTGDKPILGKISKTGNRYLRMLLVQAAHVLMMRPKLWQNLSFGDWLERASKRLHKNKLAVALANKLARIAWSVLYNCTEFDNHTTDMEAI

SEQ ID NO: 212725 - protein, 459 aa, unidentified
MRIIGVDLAVKGPHKAIVADQGGGYLTPVIQLHTRASEVDELLARAREGAESCPLQVVMEPTGMAWFPLAAYLARQEEVTVYLVNSQQVADLRRFYRRHAKSDRIDARVLARLPVVNPEKLHPLILPSAAAFGCQQGCKELDRLQTQITAIKNRLRAVDRFAWPGLEESVFDDPFSPATRWFRQHWYDPRQVIQAGAQTIRHQWQNSGLAGGDREEWAEQLVELAEQVLALYGRDTACLDFALLQAEVGREQQQLAFLEEMHHSLRLQTVRPLYRLIHPSRNLETLKGVGQDGAAVYTSFIGDPYRFGSKRMFRGWHGLVPGSQQSADSEAKGLHVTKAGPNLLKRYAFLNADVARQWDPQIAAIYYDQIVNKGKHHKQAVCTCATHLLDRVLVVLHEDRPYVLQDVDGRPVTVEEARTIIAERYTVPEEIRRRNNKRHRRRRAERRAERKQKRESRPR

SEQ ID NO: 212726 - protein, 342 aa, unidentified
MKQFVWVDVGKLSLYIYDAMTSTDVKIKNDFTEIKKFFNKYSGKKEVTVVLEPTWIYFQKLVKVLNDLTIDYFLIPLDVIHNLNKILGEANKNDTIDARKIANYWALIKEHEEKWSYKIRTVKKIPNEVMIIKTTYSQIFSLEKVLTRIKQLKHNTENNAFQKELWYIRDGYDYQIEMMENMIKKLYEEVEHMIEKLWYKAQMETLETCPWVGKKVALIMTVFFIELEHKWLRRWDGKQVRKYSWLSPQQMQSGEVLHKTKISKRGNKFVRYAITFSAMNWKTHLDYEKRANTTIGKFWLRMKEKFENWNKKWGLSTNCAIASKLVTTLWVMFCDNRAYQRI

SEQ ID NO: 212727 - protein, 348 aa, unidentified
MIIIGVDYHPSFQQIAFVDQETGECGERQLNHSDGEAEKFYRELKQRGVSVRVGMEATGHSRWFERLLAELGFEVWIGDAAEIKTMRVRKQKTDREDARPMRKLLLENRFPRIWVPSPENRDLRQLLWHRHRLVQMRTRIMNQLQAVAMNEGYRWKKKLFSAQGRALLEKLSLAPWASRRRKELLELLDQLDPKIAELTAAVEQEAKKRPEVLLLMTHPGVGPITGLVYVLVIGTPERFPCGKQIGSYTGLIPCEDSSAGRQRLGHISKQGNTLLRFLLVEAAQAAARCNPDWRRKYLHLMMRREKRIAKVAMARKLGVRLYWMWRNHWQYSQLVEFGSNAGPPCQHL

SEQ ID NO: 212728 - protein, 455 aa, unidentified
MEHARQPTRVRRRLTIVNEDAAGLDVGATFHVVAIPGDRDAEPVRTFQSFTADLHALADWLQSVGIRTIAMESTGVYWIPVYEILEQRGFEVLLVNARDTRNVPGRKTDVNDAQWLQQLHQHGLLRGSFRPRPDVARLRAYLRHRERLLDYAASHIQHMQKALMQMNVQLHHVVTDITGVTGMNILRAIVAGNHDPAALAEFRDRRCKASQATIAAALTGNYREEHLFALRQSLELYDFHRRQIEECDAQIEATLTQLNIDREAPAQPLPTVRHQGGPNEPRFEVRSALYTLLGADLSQVHGFGPYTVLRLVGECGDDMTKWPTAKHFTSWLCLAPGNKISGGRVLSAKTRRSANRASALLRIAAVNVGRTHTALGAFYRRLASRIGKAKAVTATARKLAVLFYNSLRFGMRYVDPGQASYEERYQTRVLANLTRRAKQLGYALVKNPDIELGVS

SEQ ID NO: 212729 - protein, 282 aa, unidentified
MNYSHFVGLDVGKKTFDASLMSADEKELSQKSFDNIPEGIQSLLDWIAGYHLSLSKLLFCAENMGSYVTELSVSSVSMGFSLALVCSLTIKKSIGLQRGKNDRIDAKRIANYAVLHYRKLELYKLPNKDLVRLRGWIIIRDNLVKQKVSSIKLLETFSQMAKLADVTESISFLEEQLKSIKEKILEVEEDMEQLIAASTSLYTNYLLLRSIKGIGIINAIVLLYVTDNFQRFDNPRKFACYCGVAPFEHTSGISIRGKTQTSSLANKEVKVYLTWAAITAIS

SEQ ID NO: 212730 - protein, 323 aa, unidentified
MEAYDGPQIVGMDLHRRRSVLVRMTGDGRRLGTAKITNSPAELRREIARAGSCPKVLEATSGWYWAADVLQAAGAEVHLAHPLGVKAFSYRRVKNDEKDAADLADLLRMGWLAEAWIAPAEIRELRELTRYRIKVVRLRASCKDQVHAVLAKLGIQVTCSDVFGTWGNLWLDGLALPQPYAGKVASLRSLVAQLTGEIGLLDTVIASLLEHHDGYHALQSLPGIGPVLAAVISDIARFRHPARLCCWAGLTPRHRQSDVKVTRGHITKQGSPILRWALIEAIQRLPAGTPVRQARDRIIARRGSQARNIAKVAAARYLLTCVY

SEQ ID NO: 212731 - protein, 505 aa, unidentified
MAARKKKDMAADGAGDGVQPAHGGEAVEVSDEVTQVVEYAAGIDVAKGFGMACTRVPGSRPGRTRQKVWRVNATFTEVTALMDHLVCAGIQRLVLESTSDYWRIWYYLAEAAGLEVWLVNARDVKHLPGRAKSDRQDCIWLCKLNERGMLRRSFVPPQAVRDLRMLTRTRSRLAQDQARHQARVEKTLEDALLKVSAVISDLFGVSGRRFLDALIAGERSPAALAALGDYRLKASKATLEEALTGQFRDIHATEIAMHLRLIDAINAEITVLDAEIEQLIPQVPRTAPVCTACGLAGGGHAPDCQDLGIVLLGLADRLDEITGIGAVNARVLIAELGTDPSTFPAPGHAAAWAKLTSRTMQSGDRSWNGRAGKGNPYLRGALGQAVMSAAKTDTRLGAMYRRIARKRGKQKAIIAVARVICEIAWILICDPGARYIELGPDYYQPRGARQKTRASIRQIERDNPGKKVVLVDDPGDGWAGKAAGSGRPAEPAALPSAIPRSPVTY

SEQ ID NO: 212732 - protein, 412 aa, unidentified
MEVVSPIIAGLDVHERTVVACLRVQEGKRVQRTLRTFGTTTPALLELQRWLVENQCPRVIIESTGVYWKPVFNILEGSVEVILANAHQVKTLPGRKTDMRDAEWLAELGAHGLVKASFIPPEPIRELRELTRYRKSLIRQRTAEVNRIQKILETANIKLGSVASDVLGASGRAMLRALIAGERDAVVLAGLAKGMLRKKMDQLIPSLSGRFLQRHAFLLQQMLDHVEFIDSQIATIDGEVERLCVPFEIALQLLQSTPGVGSRTAQVILAEIGCDMNQFPTEHHLASWAAICPGNNESAGKRRTGKTRNGNPWLRAALLEAAWAASRARGTYLQSQFRHLAYARGKGTKKAIVAVAHSILIAAWHILKNNVPYNDLGPEHLRRTDPEKIKRLLVRKLEALGYRVSLEEKTAA

SEQ ID NO: 212733 - protein, 320 aa, unidentified
MQDRAKKGVEMEKIYVGIDISKDRLDVAIHTSDERWQFTNDDAGINRLCQLLTKLKPSLVAFESTGGYELPLYVALDAKGLPAAPTNPRQIRAFARSMGKLAKTDTIDARIIAQFASANPELKPRPIADTQELKETITRRTQLIEMVTAETNRLRGARKAHRIRIEAHIDWLRQEIDDIDREIRDGINQDPIWREKDHLLQSTPGVGPTTSAVLISQLPELGTLNRREIATLVGVAPLNHDSGKMRGRRNTWGGRARVRATLYMATLVATQYNTVIRNFYERLCAAGKSKKVALTACMRKLLTILNSMLKHHTPWIYATD

SEQ ID NO: 212734 - protein, 382 aa, unidentified
MARTASQTKDSVEPRRLYLAFELGWTTWKLGFCTRLDEKPWVVTIDARNIAAMTKSIAKAKTRFGLGATCSVASCYEAGRDGFWLDRLLSQMGVENVVVDAASIQVDRRARRAKTDRLDAEALLRMLVRHVSGEPKVWHVVHVPTPEQEDARHLQREIRTLKKEQTRVVNRVRGLLANQGVAVKMGRRGLLAPLDSVRIWDGSALPAGLSLRIENELSRHTVVHQQLLALEAERNQTLREGTTEAEQTARRLMRLKSIAETTAEILVREIFFRDFKNRREIGAYSGLTPSPYQSGETSHDSGISRAGNRHVRGIIVDVAWDWLRYQPASALARWYQKRFGSGGARMRKIGIVAFARKLLIALWRYAQTGLIPKGARLKPLAA

SEQ ID NO: 212735 - protein, 398 aa, unidentified
MNLYIGIDVSKQKHDVAIMTADKKLIGKTFVIRENAAGYGYLAARIGQLHEPYQVHSIYIGMEATADYWKNLFHFLKQQAHCIPVIINPVRTRAFAKTELRRAKTDPVNAKDIARFMVEKKPPASYYRPPILDSIKDIHTQISVLKKQQSMLGNRLRHELGKVIPEIEQHFRYIQGKQILAILSHFPTAEAIAQVELAEIQQLRYGQKQRRISEPFFRKVQALAQHSIGFKSGPGAGFVVQSLIRNIDHCQTEIELIKSQIKQLYQIEGSENAALLASIKGVTQEQAIILDAYFGDVTRFYNERAFVAFFGMNAVIDQSGKSKRRAHLEKKGSGVVRRILYQITLTLIREQVDPFYPYYQRLVDRGKPKLVAMCAVMRKLLVIMYKMLIDREKFNPNH

SEQ ID NO: 212736 - protein, 348 aa, unidentified
MIIIGCDFHTRFQQIAMLDTVTGEIVERRVEHERGEAQRFYAALPAPARVGMEATGYARWFERMLREQGHELWIGDASAIRAARVRQQKTDARDAQHLLDLLVEGRFPKIWVSSPAERDVWQLLRHRHKLVGLRTSVRNQLHALAMGEGVCRKQKLWSERGRQELEALVLGQWASRRRQELLALLDRLDSSIEELNQAVEQQAAQHPTAVRLRQHPGVGPITGLALALAVGPIERFRNSRKLVSYLGLNPREASSGGKQRLGAISKQGNSLVRFLLVEAAQTAARQDAELRRDYQRLVHRRGRAVAKVAIARKLAVRLYWVLRESAPPTRMQGGPPSPVVSAVPGSNA

SEQ ID NO: 212737 - protein, 425 aa, unidentified
MLAVGIDWAEEFHLVALGRPGDGVFDVRRVEHSPKAVDALVEQIAALEPDPAEVRVVLESRHGLLVERLLDAGYVVVPVNPDLVARRRGPAKKKDDAEDARIACLLALDRFERLRPLIPHGELAGELRAIARDDERAARDERRLLNRLRQDLLSTFPAALEIAGADLGAPVFLRLLERWPSVQALTGATREQLVEHARAGHHGWPERFADRVEAALAADHFQPRAYLVRAKADTIRLTAQQLLAIGSQRRAWERRMGELLLGAPRRGRAKQPREDERGQSFPGGEVYLSFPGLGDRLAARVAGEIGDHPEQFESPSSLQCYAGKAPVTRRSGKSEFVISCRLAYNRHLGNAVQQWAFCSLRSSGWAREFYDAKRATGKGHNAALRALANRWLELLWHCLRKGVLYDEAVHVANRNRALGRVPLAA

SEQ ID NO: 212738 - protein, 369 aa, unidentified
MADYREAFVAFDVAKIKHAVAVADSGRGGEVRFLGEIENRPVTIERTIRKLAKRYDRLHVCFEAGPTGYGLYRQVRDLGHDCMVVAPALIPKRSGERIKTNRRDAVTLARLHRAGELSAVWVPDIVHEAVRDLVRARQAGAEDLRRKRQQLLSFLLRHGRIYDAGGHWTLAHRRWLARQAFEHQAAQIVFQETSDAIADAAQRLHRLDKQLAAIVETWSMKPVVEAYQAMRGVSFLVAVIFAAEIGDVRRFETPPQLMAFLGLVPGERSTGDTVRRSGLTLAGNRRARRALVEAAWTYRYPARVSEPLRARLEGLPKAVRDIAWKAQVRLCARYRRLAAAGKKPPVIAAAIAREMAAFLWAIGREVAPS

SEQ ID NO: 212739 - protein, 402 aa, unidentified
MAQESTSVIGGVDTHKDVHVAAVVDDRGKLLDAAEFPTTASGYAKLLTWMQSFGTLDKVGVEGTGAYGAGLARHLATEGITVVEVNRPNRQMRRRRGKSDSVDAEAAARAALNDEATVVPKSKDSLVESIRVLRVAYTSARNARTRTTLQIRDLVLTGSTQLRAVLGPLTSEARATACARLRPGDVTDPAEANKYALRSLARRHQSLTTEMADLNAFLDELTALANPALRAAKGVGPDVAAILLVAAGDNPERLSTEAGFAALCGASPIEASSGKVNRHRLNRSGNRQANHALWRIAMTRLVTDPATKAYMERRTAEGKTRREVVRCLKRYIAREMFQLLTNPNQVPVGMLLRVTRTDAKVTLATAATALGTSGVTISRLERGIQHNSELARRYEEWLKTAS

SEQ ID NO: 212740 - protein, 427 aa, unidentified
MRVLYDRVAAIDVHKDMIKVAVRVPGTKRGTRVTDVLEYRTFYGVLQAMARELRRRGVTHVVMEASGVYTEPVYYALTELDFTEVKVVNPAHVKALKGHKTDARDAVRLLDLYECGALLRGSYIPSPDLKEVRDLVRYRHKTVQARTPEIQRLQKTLESAGIKLDSVVSDITGKSSTAMIEALIDGERRGQVLADLALGAMRTAGKLADLSMALTGRFTEHHALMCRLHRDRITMFDEAVADLDAKIAPLAARYPDAAALLGSLPGFGPVIIAGWLGAIGPAPHLHFATAERLASWTTLCPGNYISARKSKGGRTGDGGDYIKPLLVQAAWAAIRVPGRLQARFHRLCRRFGGIKNKAARKKAIIAIAHTLLKIAYSVLKTGRPYQDLGSDFYASRESPQARQDYLLRQLQKLNPGCTITITPAEAA

SEQ ID NO: 212741 - protein, 344 aa, unidentified
MKITTIGIDLAKNVFQAHGVNEHGKTEKKKQLKRGQVAEFFANLPPCLIGMEACGSAHYWARKLEGFGHTVKLIAPQFVKPYVKTNKNDAADAEAICEAVARPNMRFVPIKNVEQQAVLSLHRVRQGFVKARTAQANQIRGLLGEFGIIIPQGITNIAKRVPELIEDASNDLPGSFRLLVQRLMDHLNELDKQVDELEVQIKAWHRESAASCKLEKIPGIGPITASALVASIGNAKNFDHGRQLAAWLGLVPKQHSTGGKSKLLGISKRGDSYLRTLLIHGARSVILSASKKVDKSSWLRKLMERRNPNVAAVALANKNARIVWALLANEREFRSDYTPARAAA

SEQ ID NO: 212742 - protein, 358 aa, unidentified
MSNVKSSRLDFTGQPIYIGLDVHKKSWSVSIFSKYGEYKTFNQPTEVDKLLHYLRHHFPGGDYRSVYEAGYCGFWIHDQLRKKGIQCLVVNPADIPTKNKERRTKRDPIDCRKLARSLRNGEIEGIYVPCRPKLEDRSLIRTRQSMVRKQTRCKNQIKGMLLFYGVGIAEEREMGHWSRRFIQWIEGIRMERASGDIALKAHLEELSHLRQLIASLNRAILHLARTEEYRPFVRLLKTVPGISTLTAMILLTELGEITRFPSLDELSCYVGLIPDTQESGEKEYVGSLTQRRHSQLRWLLIEASWVAVRKDPALLMAFEEYCKRMRKTKAIVKIARKLLNRIRYVLKNQAEYVPCVIE

SEQ ID NO: 212743 - protein, 341 aa, unidentified
MHPIYYIGFDIHKRTIAYCVKRFDGVLIQQGAVSAERGALLQWLSGIPGCWIGAMEATMFTGWVYDFLKPHALELKVAHPEMLKAITTAKKKNDRADAEKIADLLRIDLLPECYMAPQEIRELRRILRYRNMIVRTAVRMKNKISGLLMEVGATYDKRRLHGKSYFNSLLERVEDVPESVKELLKLSRGSLEMFTAVQKKLLKALKENMLIRQRVQRLMSIQGVGEVLALTWVLEIGEVSRFSSSRQAISYCGLCSAQHESAGREHRGPISKKRNKHLQAMLIEAAKLAPRWNDELAFLHEKELARGNCNRATLAVARKLVKYLLAVDRRESDFETLQQAV

SEQ ID NO: 212744 - protein, 410 aa, unidentified
MIFVGDDWAEAHHDVYACDEAGTKLAARRVPEGIAGMTMLHELVATLAADPAEVVVGIETDRGLWVHAMVEAGYVVYAINPRAASRYRDRHSVSGAKSDPGDAKMLAELVRTDRHNHRHVAGDSALSEGVKVLARAHQTLIWERTRATNRLRSSLREYFPAALQTFDELAHRDALAVLAKAPTPSDAARLTPAKVRTMLRNAGRRRNIEPRADIIAAGLRIEALRAPAAVEAAHGATTRSTVAILSELNVQIEMLAAELADHFKQHPDSDIYLSLPGIGVILGARALGEFGDDPNRYADAKSRKNYAGTSPITRASGTRNVALARFVRNKRLADALDQWAFCSISSSPGARAFYDHRRAVGDSHHKALRALGNRWVGILHGCLHHRSLYDENTAWAHRNDNNLNKIREAA

SEQ ID NO: 212745 - protein, 419 aa, unidentified
MSFKIFKFNCCGLDVHKTWIYACIGITDSNNRTEYKQARFSSFTKGLNELCDWLAKYNCKDVCMESTGKYWIPVFNILEQHSFWVTLSHPKYTKPMKGNKTDRKDAKWICDLYMCGMVKPSFIPPADIRELRDLVRYRFKLTCMITGEKNRAQNCLTVSNLKLDDVFSDVFGKSSRSITEHILQHPGEKFDIAPFVDSRCKTPITEIQAAVDGAISKEQVVKLRQCLDHIDELNKHISEVEQEILRLSDKYEAALNLIRTVPGFNKNPLTAIQVLSEIGGDMSVFPTAKHLVSWAGCCPRNDQSNQKIKSTRISRAGSYFKPVLVQVANALIKSKKHSEFPSRYKRIKARRGPKKAIIAICRMILTAIWHILSDLKPYTPEGFLESRPVKEGKVLSTSQALNLLKQRGYIIKGEPLAVS

SEQ ID NO: 212746 - protein, 349 aa, unidentified
MDSMPPTGRDVIGGIDTHQDLHTAAVVDATGEVLATQAFATTRAGYRAMLAWFTSYGALLRVGVEATGTYGAGIARHLARAGVPVLEVTGPDPAVRRGAGKDDALDAIAAARAALTGQRVQVAKERSGAVEALRVLRTTRKTAVRCRRATLQQLHNTIVAAPDELRDQLRHLTRMRRLRTCASWRPDTVAYRDAAVATKIALRSLARRILDLGDEIADLDRLIAPLVGELAPGLLALPGVGVANAGELLVTAGQNPGRLRSEAGFAMLCGACPIPASSGKTNRHRLNRGGDRQANSALHMIVVYRMRRDARTKAYVERRSAEGLSKREIMRCLKRYVAREVYHVLLSGT

SEQ ID NO: 212747 - protein, 371 aa, unidentified
MNSIVYVGMDVHKEQYTICCYSYETDKVEYKQTIPSDYKLVLKYIDQVRSRYDGEVTFVCGYEAGCLGYSLYHQLKEHAVDCKILAPSTMAVTNTHHVKTDKRDAANIARCLAFHTYSEVYVPDNDDNDVKEYIRMRDDQKLYLKNVKQQILAFVLRQGKHFECGKTYWTIAHLKWLKTLELSALQRETLDEYLLTYEYLTEKIGRFDERIEELASAERYKEKVKHMSCLIGIKTHTAFSMIVEVGDFERFEKALKFASFLGLVPSEDSSDARVNRYSITKAGNCHLRRLLVEAAQSYTRGNVGHKSMALKQRQKRKSPEVIAHADKANERLRRRFYKMTLNKGVNRNVATTAIARELACFIWGMMTEHVS

SEQ ID NO: 212748 - protein, 348 aa, unidentified
MIVIGIDSHKRSHTAVAADGTGRKLGERTVAATPAGHLELVRWAGRFIDRRWAIEDCRHLSRRLSADLLRAGEAVVRVPPKLMAGARRSSREPGKSDPIDALAVARAALREDLPVATLDGVEREVRLLVDHREDLVAERTRAQNRLRWHLHELDPGNEPGLRSLDRGVVLAALERRLAEVPGTVARIARELVGRIRELTAAINDLEREIGRLVADLAPSLLALAGCGPLTAAKLVGETAGIGRFRSAAAFARHNGTAPVPVWSGNTERHRLSRTGNRQLNVAVHRISITQLRIDQRGRAYVERRRTMGNTKTEAIRALRRRISDEVFRRMRHDEAARAATPSGLWAAA

SEQ ID NO: 212749 - protein, 343 aa, unidentified
MKLTRVGVDLAKQVFQVHGVDRAERPAWCKRLKRSRWIADVERDVEPGCEIGMEACGGAHHWARVLQSKGYRVKLIAPQFVKPYVKTNKTDANDAEAICEAMSRPSMCFVAVKTVEQQDLQAVHRVRSSLIRERTAKANQLRGLVYEYGLVAPRELSSLRRAVPEWLEDAENGLTVRFRSLLAGLYRDLQQLDERVRELDREIAAIVREHEPVGRLEQLTGIGPLTASALYALVGDGRQYRSGRELAVALGLTPRQHSSGGKEKLFGISKRGDKYVRTLLIHGARSALRTAAGKPDRLSRWAVALAERSHPNVATVALANKLARIAWAMLRHGTNYEPEHVAA

SEQ ID NO: 212750 - protein, 351 aa, unidentified
MQAITIGLDIAKSVFQVHGEASGKVVLVKRLRRSQVVDFFAKLAPARIGIEACGTSHYWGRTLRALGHDVRLIPAGYVKPFVRRNKTDARDAAAICAALGRPDMRFVPIKSVEQQAARGLERSRDLLVKQQTQLMNNVRSQLAELGIVAAQGRRGFNDLVALIAPGDDDVPPVLLSALRLLVAQIDQLGKAIFILEKQIVARTRENELMRRLATIPGVGPLTAHAIVTAVDDGKQFACARDFAAWCGLTRRVDQSADKRRERGISHQGEMRLRKLLALGASTLMRHVRTCPGRATEWQRGILARRPVKVAVLAQAARNARIAWAMMQSGECYRRPAHAASTAQADNTLLAG

SEQ ID NO: 212751 - protein, 347 aa, unidentified
MKFYTTLHKYYCGIDLHARILYVCIIDDQNKKLVHQKIGANKKAFIELIKPYLDHIVIGVECMHCWYWVSDLCDEYNIKFVLGHALYMKAIHGGKAKNDKIDSYKIARLLKGGNFPLAYNYPKEMRATRDLLRRRTKLVQHGAQLKAHIVNTNSQYNYPPLDLNMKNKGVREAFKSRYDDEVVQRNVSFDLVILESYALELKKLEYFLENKAKQHRADYYAQLRTVPGIGLILAMTILYEIGDINRFKSVKNFASYSRLVKCKAESAGKTYGTSGNKIGNGHLKWAFSEAAVLYLRGNDKARRYLNKLQKRMSKAKALSALAHKLGRSVYFMLKNKTVFDDERFLKS

SEQ ID NO: 212752 - protein, 338 aa, unidentified
MAILTVGIDTAKSVFAVHGVDASGKVQLRQPKVARAKLLALVNALPPCTIGIEACSGAHHWARQFQAQGHTVRLMAPKLVTPYRMSGKKGKNDAADAAAICEAVSRPNMRFVPVKSEEQQSRLMVHRARQGFVAARTACINRIRGLLSEFGIVLPLKAEVVRCQAREHLEDLPGYANLVIGDLLSEVSHLDERIKQYDGYVRAMAKACTAAQQLMRLMGVGETTATAIVAMVGNGREFDSGRQFAAWIGLVPGQYSSGGKARLGRITKAGDAYLRSLLVLGARSVLNAANGKTDSLSRWALQLRERRGYWKAVVAIAAKNARMAWAVLTKGEKFKMPA

SEQ ID NO: 212753 - protein, 412 aa, unidentified
MMNPVIGLDVAKGESQVQAFLDKKQPYKKSFKVAHTLEGLTILLEFMREIEVASGERPPIVLESTGHYHTPVVQFFEDRGYLIIMVNPLVSYRAKSSSLRKVKTDIIDARHLCEMFYKEDLEPYKQRGIQLLNLRHLTRQHENITGMYVQTKLQFQSVLDQVFPEYCGVFGDLYSDVSLLTLQAFPTSEEVMATREETVAKKIKEFCKSRSQKWANSQSEKLKAAADRNPFQKTLYNSLILSINMYIKMLLEYKKHLSDLEREIDALAKSMEEYKILQSIPGIGEKIAATIISEIGEIDRFNHPKKLVAFAGIDPSVFESGTFKGTLNRITKRGSSRLRHALYMAVKSAIRDSRKKKTTDELIPRNKRLREFYDKKREEGKPFKVAVIACANKLIHWIYALLKNNSLFQDLT

SEQ ID NO: 212754 - protein, 404 aa, unidentified
MDPTASNNLLEVKPMIIVAVDVAKDKHDCFITNTDGEVLYDAFTIPNSLDGFDDLFGKIRSVADSLHNVKVGLEATGHYHLNLLGYLLDKGLHTCLINPLQTSLFRKSLSFRKTKTDPIDARAIARLLMSDLTLQPYSSSSYHNEDLKSLTRYRADKVQERAKLKASFSRLVVILFPELEKHVSKLHTTTVYDLLYEFPGASHIASAHLTRLTNLISKSSRGRYGKDDAIQIRDAARRSIGTISQAKSLELRHTIEHIRFLDDKLDEIESQIFTILDENPPKMLTIPGMGPRMAAVIKAEVGDFSRFSSPNKLLAYAGLSPTTYQSGQLTSTYAKMEKRGSRYLRFALFNATKYVCLWDPVFRAYLEKKRGEGKHYYVALSHAAKKLVRVIYHLETSGENYISK

SEQ ID NO: 212755 - protein, 402 aa, unidentified
MNAVGIDVSKGKSMVAIMRPFGEIVSAPFEIKHTASDIHSLVELINSVEGESRIVMEHTGRYYEVLAHQLLKANLFVSAINPKLIKDFDNDSLRKVKSDKADAVKIARYALDKWQNLKQYNVMDELRNQLKTMNRQFGFYMKHKTAMKNNLIGILDQTYPGVNTYFDSPARSDGSQKWVDFASTYWHVDCVRKMSLNAFIDHYQNWCKRKKYNFSQSKAEEIYGRAKELVPVLPKDAITKLIIKQAVDQLNSASTTVESLRTLMNETASKLPEYPVVMAMKGVGTSLGPQLMAEIGDVSRFTHKSAITAFAGVDPGVNESGTYEQKSVPTSKRGSADLRKTLFQVMDVLIKTHPQDDPVYQFLDKKRAQGKPYYVYMTAGANKFLRIYYGRVKEYLSSLPES

SEQ ID NO: 212756 - protein, 349 aa, unidentified
MGVDLGDRWSQYCILGLEGETLAEGQLRTTQEDVREFFQALTVARVVIEVGTHSAWVQDVITEWGHEVLVANPRLMEGSKRRKRKSDRIDANKLARLGRVDPQSLHPIRHRSREVRQDLVVLRARDALVSVRTELINTARGLVKSMGTRLPRCSSPSFAEKVKDAIPVEVREALLPLVQLVETVKDCIARYDQKIEELVREKYGHTTLLRQVKGVGPITSLAYVLTLEDPQRFSSSREVGPYLGLVPKQEDSGDSQPQLGISKAGDRMLRRLLVGSSQYMLGAFGPDTDLRRYGLRLCERGGKNAKKRAVVAVARKLAVLLHHLWVTGDVYEPLHHTGAETRTAQATAA

SEQ ID NO: 212757 - protein, 344 aa, unidentified
MTEYVGFDVSKEETAFCVKDAAGKIFARGKVATDPRALFGALREHCLCPGRIVVETGTLSGWLARELGRLGVAVEVIDARQANAVMRLQHNKTDANDAELLAEIARTGFCRPVAVKSEAAQESRALLKARCHLVRQRRDTQNTIRGLLGSLGLRFPRGSGKLAARVREALAARPELKVMIEPLLSAAAALGREIGRLDKVVVGRAKGSPACRLLMSTPGVGPVTALAYVATIGEAERFAKSRAVGAYVGLTSRRWQSGEMDYSGRISKHGDAMLRALLYEAANSLLTVVRRAHPLKDWARRIKRRTSHKKACVALARRLAVILHRMLITGEAFRWPEKEASAKA

SEQ ID NO: 212758 - protein, 317 aa, unidentified
MDHFAGLDVSVKETNVCIVDDTGSIVREVKVVSEPEALLQVLGNPIHRLKRIGLEAGPLSQWLFSALAGAGLPAICVETRHMRAVLQAQINKTDRNDARGMAQMMRAGLYRPVHVKTLRSQKLRMLLTHRKLLQSKAIAIDNDGTLRNFGLEARIKELVEDLPDLAELVEPLLIVRRTVREQIGILHRRLLTVVWNDEVCRRLMTVPGVGPVVALTYRATVDVPARFRNSKAVGAVFGLTPSRYQSGEINRPGATSKCGDEMMRVMLYEAAQIMPVRSTKWFWLKAWAMKIARHRGMKEGDRGAAAPVGGDHAPHLG

SEQ ID NO: 212759 - protein, 346 aa, unidentified
MKYYVGLDVSLKEISVCVIDGDGKIKARGTTPADPMAVKSWFKKRSLEPETIVHESGQLSIWLQRGFLELGLPAVCIDARRAHKSLSARLNKSDASDAEGLAQLARTGWFTPVFVRSVEADRLRALVGARERMIRLRKDLEGHIRGVLKTFGIRMAGVTQGKLRQKFRDQLAAAGETDPVLRIMADAFIDIHAMLCKAAADLGRALKTKVETHPVAKRLMTIPGVGPIVSLSFIALIEDPSRFTKSTDVGAYLGLTPKRYQSGEIDWSGRISKRGDKAMRSLLVESASTLIRNVKRFSALKSWAIRLAGRKGFRKAAIATARKIAVLMLTLWKTETDFQWTKEVKS

SEQ ID NO: 212760 - protein, 433 aa, unidentified
MQDVQDEPLFAERVAGLDIAKAEVEATIRVPSDTTAGRRQQETRTFATTRGDLESLADWLRCWGVTKAGMEATGDYWKPVFFLLESREFDCHLYNAAQVKALPGRPKTDRADSIWLARITERGMISSSFVPPEPIRRLRTHTRYRRHLTQARTAEKQRVEKLLEDGHLKLSSVISDIHGVSGRDMLEAIAAGQRDPKALAQLARGTMRGKIRRLEEALDCSFFTGEHAAVLAMMLAVIDHYTTQIEALTARIETLIEPYLHQVAQLDAVDGIGPVCAQDIIAETGTDMTVFPTASHLVSWARWSPQVKQSAGKRKGSNATGRGNPYLGAALGEATISASRTQSFLGAKYRRLTRRMPKKKALVATGNSMLTTIHALLADPAASYQDLGADYYEHRMHIRRQARNHVKSLERLGYQVTIKPLSPGAGQPLTATT

SEQ ID NO: 212761 - protein, 341 aa, unidentified
MTIVMGMDQHRAQISAEWIDTITGEISRSRIAPADRMTVRRFLTQFKGSDLEVALEATTGWRFLVEEIQRVGAEAHLAESAETSGLKGKKQRAKTDWADARHLRELLLIGRLPESWIAPAHLLDLRARVRCRHMLVHQRTEWQQRMHAVLYHHGVPHARKLLTLANRERVAALKLPAVATEQLTIALEMIDAIDVQIGSVDVALRAYARTQPGCRTLIKEIYGIGPLTSVTILAELGDTRRFQNSRDAVRYGGMDVTVYQSDQRRAAGHLSRQGPPALRWALYEAAQAARRPSSPDRPYYEQLAARIGGNRACVAIARKLLKRSYHLLRGLGDQALEPVTA

SEQ ID NO: 212762 - protein, 330 aa, unidentified
MKQYDHVFGVDVSKKTVDITHVINQQFTHRQYSNDEAGMEQLMDWLKELKLDFDTTLFCMEATGLYCFPLTRFLAAHSIDIWIEHAAQIKKATALTRGKNDKVDSQRIAVYATKNLDRLRLWKPMNTTLEKIRHMASLRNRLVETKKKLVTPIQEFEDIGNHSMAKLLTKTIKSSLTAIDKDLKNIESKIIDIVNEDDNLKLLYKLITSVVGIGFVTAINLLVHTNGFTMMKDARKLACYCGVAPFEYSSGSSVRGKTKVNYMANKKLKCNLHMASLTAVKLDADLKAYYERKVAEGKNKMSVLNAVKNKLLARVVAVVNKQQEYVKKSA

SEQ ID NO: 212763 - protein, 367 aa, unidentified
MKKVSTAAAKATKNFSQPKLTIGLDLGDRSSWYCLLDEVGEVLREHRLSTTRKAVKEVFGGMPRSRIALETGMHSPWVSRVLSELGHEVIVAHARNVRLIGESRKKDDRMDAQTLARLARIDPQLLSPVKHRSAQAQADLTVIRARAGLVRARTALVNTARGLAKSYGERLRGCNVRNMNPEKAEGLSPELQRALEPLLAALQSLSEQIAEYNERIEQLAQQSYPQVALLKQIKGVGTLIALTFLLTLEDPHRFRKSRDVGCYLGLQPGRRNSGQNQPQMHISKEGDPYLRTLLVQGAQHILGPFGVDCDLRRWGLKLAERGGKSGKKRAIVATARKLAVLLHHLWVSGDVYEPLHHSRQTPLAIAA

SEQ ID NO: 212764 - protein, 364 aa, unidentified
MKRKVYVGMDVHKETIQIAYLTSNSKEILKEQQIKHNEVQIKKFIKKLKTEWNEIHCCYEAGVTGYPLYRYLKSLGVNCILVAPGKIPRQSSDKIKTDKRDAIKLARLMRSGELESIHVPSKEDEAVRDYLRSRDSLRLDLGRNRQRLMKFLLRKDIKYSTTKYWTVSHYKWLNNLHFNNEILQETFNDYYSRVRVQEENLKSMDKKIQEIAESEPYREKVGILRCFRGVDYLTAMFLLCEVNDFKRFKTAGSFMSFLGLVPGEYSSGSKRKQTGITKTGSPRLRRILTEAAWQHRFPGTGSKIITARRSGQPALVVALAEKASLRLHKKFRNLQLRGKTPQVMITAVSRELSGFLWAAMNLVA

SEQ ID NO: 212765 - protein, 360 aa, unidentified
MFTERTSVGLDVHARSIVGCGLDAVSGEVSRRRVCPTFRGVTEWLAELPAPVAVAYEAGPTGYGLARALTAAGIRCVVVAPSKLQRPPGDRVKTDARDARHLANLLRMDQFVEVRVPSVEQEAARDLVRAREDVRGDLMRSRHRPTKLLLRQGILYSGGHPWTGVHEVWLRGQHFDLPGLQLAYDTAFETVLLTTDRRARLDKAIADMAGNSEYTPVVRRLCCLRGVSTLTGFGLAVEIGDWHRFTGSTIGAYLGLVPTESSTGSKRVQGSITKTGNTHARRLLVEAAWHHHKAYRPGLTMRARWDLAPAAARARGHEGNQRLYHRWQVLTDRKKRPVVADVAIARELAGWCWSLAVMED

SEQ ID NO: 212766 - protein, 371 aa, unidentified
MNHITTFVGLDVHKSSISIAFASAIVGQEPQFVKKITSDVRKLLKELRKLGAPGSIRVCYEAGPTGYGILRRLRQEGFAAEVIAPAMTPKSASDKVKTDRRDALKLAECLRNGQLTSIYVPTEQEEALRDLIRAREDLKRVDMNTKRQMSSMLLRYGRAWEGKSNWTKAHLVWISQQRFEHQATTEAHSHYLGELHSLKEKVAHLDQLIHEEALKLPNAPLYKAFMTVKGIKALTAATLVVEIGDFRRFKTAGRFMSFLGLTPSLYASGDRAVRGRITKAGNRRLRRLLVESAWSYRCAPHVSRDLQKQSQGIAAGPRAIAWQAQKRLHRKTKAMQARGMNHKKMLIAVARELAGFVWAIAQEDKLVESAA

SEQ ID NO: 212767 - protein, 370 aa, unidentified
MGEITTFVGLDVHKATIAVAVARGGLRDAADFLGTIENTPAALSKLLVKLGRKHDQLSFCYEAGPCGYGVHRQLIQAGHTCSVVAPSLIPRRAGDRVKTDRRDAVSLAQLHRAGELSAIWVPDAAHEAMRDLVRARLVAVHAVRRGRQQLSGFLLRHGRVYDGKKAWTRSYRIWLAGLRFEHAAQQIVLQDYIAVVADSERRRDALGEQIRVLLPEWSMAPVVTALQALRGVALVVAATLVAEIGDLTRFDNPRQLMAHLGLAPSEHSSGATTRRGGITKTGNAAARRAMTEAAWTYRLPARIGRVLLDRNDAVDKTVREIAWKAQVRLCARYRRLSAAGKPPQTVVTAIARELLGFAWAIARHVQKVHA

SEQ ID NO: 212768 - protein, 337 aa, unidentified
MIFINCLGIDIGKSESVVAHYKDEVLVKEMVIQNNQNGYRYLKNYIKHLDSLFILFESTGIYSRGMKRFCEIHKIDYLEMNPLEAKFKTSSLRSWKTDKSDAHKLALLAFRMKDSKVQRQSEEIYFELRERARFHLEMEINQNRLKVELVETLHQTFPGLEKLFTNRYSKIALSIAKAFPHPDFVSTLTHDELVEKVLHSTDKGISVNKAHKYVQKLIEIQINSFPNVDKSSFLLQKVQYLCDKLLIGIEEMKEFDQEMIDLAKNTTEFENIISIPGIGELTAAVLIGELGNIREFKTNKQLNAFVGIDIKRYQSGTSKVGIRSTKEEIKKQDVYCT

SEQ ID NO: 212769 - protein, 337 aa, unidentified
MNRNVVGLDIAKQVFHLFMMLDGKAVKRKLKRSELLTFIAQLPPSLIALEACGGAHHWARSFKQLGHEVELLNARYVKAFVVGNKNDFNDAEAIFTAARQPNKRTVVIKNMEQQDLTMVHGIRQGKVEERTALINQIRGHLAERGMVLPPSANQVRKHLPSILEDAENQLSALSRSLFAEQYQALVAMDEAIKAIDRQIDALCRQNALSKRLIAIPGVGPLTATLAAADVGDGKGYESSRDYAASLGVVPRQHSSGDRQVLLGISKRGNRRLRTLLIHGARAVWRYCGDKSDPLSRWLQALIERRGFNKAAVALANKNARIIWALATREDEYVAQVV

SEQ ID NO: 212770 - protein, 338 aa, unidentified
MEFKRLSIDTSKHIFTLHGVDEQDHVTLRRELRRGQIEAFFARIPPTEVALEACAGAHHWGRVLGAMGHRVKLIPPQYVKPFVKRSKNDRNDAEAISEAASRPSMRTVPVKTIDEQAATIVVKHREMLVGQRTQAINALRGHAAEFGVIAAKGTGNVDMLLSVLADDPAIPEIAKATFAQMGRHVAELDPKIDAIDRQLLEQHKVNAVSQRLAAVPGIGPITAITMALSVNPANFESGRHFAAWLGLTPREHSTGGKHRLGRISKAGNERLRQLLVVGAMAVIRFAKPGSKSASAWLLQLLERRPRKVAAIALANKIARVIWAMMARGEVYRRQPAAA

SEQ ID NO: 212771 - protein, 356 aa, unidentified
MSEGSWVGLDVHARLVVAGVIDQGSGDVRSLRVAAGNEGTVAWLKTLPAPVRVVYEAGPTGYGLARACAGAGINCVVAAPSRIRPAADRVKTDRRDAERLARLLRLGEITPVRVPEPEEEAARDLVRAREDARGDLMRARHRLSKLLLRHGAVYDATAWTRAHDAWLRRQRFQSGPLAVVFDECYGRMLDAKTRRDALDRAITELAGAPPYVDVVERLVCLRGVSTLTAFALTVELGDWNRFRPTSLGAFLGLTPSENSSGERRRQGAITKAGNSHARRLLVEAAWHQRRPPRLSVTLERRRTGKSLAVRAQADRSARRLHGRWHALEGRGKPRTIVVVAVARELAGHCWALATME

SEQ ID NO: 212772 - protein, 346 aa, unidentified
MTVRCMAGIDLHSNNLFCAIVDMEGKRVFEKRLPCDLETVLQALKPFKRRLEKIVVESTYNWYWLVDGLQDHGYTVVLANPAAMEQYNGLKHADDKSDGFFLAEMARLNILPTGHICDRTIRPVRDLLRRRMGLVQKRTSLMLSLKSLHTRMTGRDLSTGRIKALAPPDAEKLFEHPADQLITRLDLELMEQLDRGIETIETRILAEAKRMPRYQVLQTMPGVGKILGLTIMLETVDPKRFASPGDYASYCRCVDSRRLSNGKKKGENNGKCGNKYLAWAFVEAANFAQRHDAACRKFYDRKKAQINGIVATKALACKLAKAAWHMMSRNTHYDSGRIFPQVKMNK

SEQ ID NO: 212773 - protein, 344 aa, unidentified
MDHFGGLDVSVKETSICIVDDTGRIVREVKVGSEPEALLKVLGNPAYRFKRIGLEAGPLSQWLFSALTEAGLPVVCVETRHMRAALKAQINKTDRNDARGIAQMMRAGLYRPVHVKTLRSQKLRMLLTHRKLLQSKAIAIDNDLRGTLRNFGLKVGLVGTVKFEARIRELVEDLPDLVALIDPLLIVRRTLREQVVILHRRLLAIVRDDEVCRRLMTIPGVGPVVSLTYRATVDVPARFRKSKSVGAVFGLTSSRYQSGEVDWSGKISRCGDEMMRTMLYEAAQSMLHSKKWSWLKAWAMQIARRRGMKKAIVALARRLAVIMHRIWVDGTEFRWTREQAAAAA

SEQ ID NO: 212774 - protein, 355 aa, unidentified
MKEYISFDSHKHYTLAERENCKSGRIKQTRIDHSPGLIRQFLSTHCEAGSFVAVESIGSWYWIIEEIEQAGMIPLLVHPRKAKLMMGMINKTDKLDVHGLNRLQRNKSLPTVWIPPSPLRDLRELTRTRIVFVQQRTRMKNRITSTLAKFGLRILSAKDTFAKKARPELKNLIRGFPPETSVVTTMMLEQMESSNAQVILLEKRIRELVKQTEQMTLLKTIPGIGDILAAGIALEIGDVKRFASAERLASYAGTTPRVHSSGGKTHYGGLRSDANRYLRWSLIEAANSICVNRRNAPDRHTSKLYDRMKSRKGHGKAIGAVSRHLAEACFHILNKMEPYRDPAMNRRSSQAGVSA

SEQ ID NO: 212775 - protein, 392 aa, unidentified
MIFIGIDIAMDKHDIIIINDLGEIIYDHFIIQNNHFGFKKLHTVIQSCTKSVNDIRIGMEATGIYHNNLRDYLISKGYTVYCTNPMLVSLSRKSASPRMTKTDKIDAIAVCRHLMYNLNRLHPYTPPLYHLVELKQLSRDYNSNNQIITKAKGELKRLLQMFFPEFLKHFKPFSKWTLDLLYDFPLPSDYKGLHIESLAQRIRSRSNHVEQAKLIKYIAKNSIGNPNNLNAYLIKFCVSNIIHFNSQNEILKKLISQHMTLYPKILSVPGIGPINGATILGETGDISRFTDKHKYTSLFGIEPIVHESGKYKRKRTRISKRGSKYLRTAIYSAARIACVSPKTRDNKFKRKYIHMMTKGNKHHSTIIFAIAKNMVHSIYKILKTDTFYNDLL

SEQ ID NO: 212776 - protein, 313 aa, unidentified
MTEHSIGIDISKSHLDVFHLETETAKRFENSAHGFRALRKWLAQLAVTRVVFEATGPYHRAFEKAFSGNLPLVKVNPLQARRFAQACGTRVKTDAVDARLLARMGSALALVADEPMSEKLHDLRDLQIARTALTRERTRLRNRGHVQTSAVLKRQTKARLALVERQIAELNDEIGKRIADDRSTARKRDILCSIPGLGPVVAAAILAFLPEIGTLARKQAGSLAGLAPHSRESGQWKGKSFISGGRKPLRDALYMPALVAMRFNPDLKAKYTALREAGKPAKVALVALMRKLIETANALVKADRFWVENRSCA

SEQ ID NO: 212777 - protein, 388 aa, unidentified
MVDGDGRILEGRRYRHDERGISALCRRLVELAVELVALERPDGLLIERLLDAGLRVIAIHPNQVAAMRPRFSAAGGKSDSFDSFVLAELARTDSHRYRILVPDSDATKALRALTRAREDLVATRVALANELRAQLECFWPAATGVFADIDSPIALAFIKRYPSPADARGLGEQRMARFLARHGYSGRRTPAELLTRLKGAADGRAAALETEARRQIVLALVSALEPLVARISELTSEIRDALTDHTDGDTFRSLFKDPKSVITAATMLAEIGDCRDRYPTKQTLSADGGQSPVAVESGKSKRARFRWACDHRLRDAIGTLADASRHHNPWADDIYRRARARGATHPHAIRILGRAWCGVIWRLWQDRDVYDPARHTALQQLLAARAAY

SEQ ID NO: 212778 - protein, 430 aa, unidentified
MHNKNYISVGIDVGSAFSFMTILAPDETVILKPFKITHNNKDSLERAVSEIKKAEELYSLESRTFLESTGIYHFPLFCYLVDCGFNASIINPIITHSTKNGNIRKVKNDKIDSKGIAKLGLSKDIPVSQFPAKLVLELRSLTRKYYDLTDERSAHINKLKGDLHTVFPQYLDVFCDVTGKTSTMILRQYGTPDKILRGHKKTMIEKISKASRKGLAKASERYEKLCAAANAAKTFGCQIDSIYLNIFLTLDLVEKLDSALDSILNRIRQLITFNKNEKFIQQIKLLNTIPGVGFLTAVTIMCEIGDFSAFRNPKQLFAYFGLDPEVNESGKFVGTQLHMSKRGSRIARRAIFAVALASIRTKRNGEGINPYLRKYYELKSGQKPKMVAIGAVMHKVCNIVFAVLRDEKAFELRSPEEHCKQYQRPALAAA

SEQ ID NO: 212779 - protein, 405 aa, unidentified
MINTGIDWSDKHHDLCILSETGETLDSFRISHSQDGFEQAHRRIAKYANPEQVRVAIETKDSLLIDFLCELGYTLYFLNPRQTDRFRDRHRMSRSKSDSFDAYVLADAVRTDAHLFNALSPLDEQSLRLRVLTRTREGLVSRKVAVQNEITTYLKRYFPVALELFGGIDNLEAIDFLLQYPTYDQARSVSKIRIASILSNKAGISKAIAQRHAQQAHDKLKDTQSVPAASVSRSYPLAVKSLLRQLRSILEEMDALQDDIRDNYDKHPNKDLIASLPGVADTLGPVIAAELGTDISRYANIETLKAFGGSSPVTIQSGKFRSVHFRRACNGHLRRALHLAAQGAIRKAQWARKLYDRLRAEGKSYGRALRSVADQLLEMLYVILARRTPYDEAYHLRMKALHGSA

SEQ ID NO: 212780 - protein, 374 aa, unidentified
MTKFSKYIGLDVHKETIAVGIADGRGGLPRYWGEIKNRPGEVRRLVKQLDGPEQQLRFCYEAGPCGYGLYRQLVKVGYACVVVAPGLIPRKPGERVKTDRRDGLNLARLDRAGELTPVWVPDAAQEALRDLSRAREDMKIHDKQLRQRLSGFLLRHGRIYEGKQRWTQAFWRWLELERFDSPYQQIVMEEYAAAVRAAQARTATLEQQLYEAAEHWSLGEAARALTALRSIRRTAAITLLAELDDISRFGNPSELMGYVGLVPSEYSSGPRRRQGGLTKAGNAHVRWMLVECAWAYRFPARRTPEIQRRAEQASPAVQAIAWKAQKRLSGRFRRLSGRGVIVQKTVTAIARELCGFIWAVVCEVQQPGKLPASA

SEQ ID NO: 212781 - protein, 397 aa, unidentified
MYIVGIDIAKRKHEAAVIDGEGAVIIKPFSFTNNCSGYNRLLAMLTKAKLPLDEVSFAMEATGHYWLALFTRLQKEGFRVQVINPVQTNSIRSFYIRQAKTDPRDALLIAEVIRFGHFSESTLHPENIYELRELCRGRHAIVSMQADVKRKVVALLDQVFPEYETAFTNMFSDTSMAILQTCPTPKELSEMPLEELCHLIEVSSHKRFRMVKAQELQELARNSFGFAMAGDVFSTMIRLYAKHLVFLKQQVQEMDRKIAEIMDTLDTPITTITGIGPTLGAYILSEIGDISRFSSAAKLAAYAGIDPTMRQSGEYNGVRNRMSKRGSPYLRHAIWLAASSAVLHDPALKLYFQKKRDEGKPYMASVGHACRKMVSIIYAVMRDNKAYTPYIPNEISA

SEQ ID NO: 212782 - protein, 479 aa, unidentified
MTPRKQKNGRVIPSPEPLRVANPHAAGIDVHAAVHWVAVPPDHVPPPKSTDPNAAGAAHVPAHVRKFGACTADLELLADWLQACGITSVAMESTGVYWIPLFELLERRGFEVYLVDPRQTKHAPGRPKTDVLDCQWIQRLHSYGLLTASFRPEDQVVVLRGYLRQRHMLIRYAGQHVQHMQKALEQMNVKLPEVVSDITGVTGLAIIKAILAGEREPRKLAKLRDERCKRTEAEIARALHGNWREEHLFALKQALELYQDYEHLLRECDAKLEAHLATFADKSGGQKLAPKPRRCGRRHNEPVFGVRSALHRMSGHDLTVLEGIDDNTALVILSEIGTDMSKWPTEKHFTSWLGLCPQHQGSAGKIKSRRVRRGSNLAARAFRLAAQGCHHAKNALGAFYRRIQARCGGIKAVFATARKIAERVYRLLKYGVAYVRQGIDAYEAAYRERLLKGLAYRAQSLGYALVALPESPPSTPATP

SEQ ID NO: 212783 - protein, 323 aa, unidentified
MNKDIKYLGIDISKDFFDVCDNNLVYYQFKNNLSGFRKLVKLLDSNTICVMEATGYYHTRLAYFLLELGFGVSVVNPLKIKRYIQMDLSKIKTDKSDAKMIQLYGKDRRSKLWIGQSDTQQESLQLLRMLSIYSKQSTQLKNKIHGEEVLGHPSKVVINSLNRSLKKLKKEMEVLEKALNDNVKKEYQESLTLLKSIPGIGDKTALMLIVFTDGFHRFESSKELCSYAGLTPITRQSGSSIKGRPRISKMGNPKLRNLLFMCSFNACKYNQGCKALYDRIVAKGKSKKLALKAVCNKLLKQAFSIVKNGVPYNNQYKSTLVNN

SEQ ID NO: 212784 - protein, 326 aa, unidentified
MNSVRMHIGVDVGKSSLDVCFPDGKKEHLNNNKPGRARIIHAAKKLGAIVCFEATGIYEEDLANECLAAEVRAARLDAWKTRQYAKSRGRIEKTDRLDSEMIRDFASSLEEGKLPFVKPRSAAHSLIKEYAKIRENLMKARVVVSSQLEFVRDKSARRNIIAIVERIEREIARLEDECGKAVDEDERMSSLSRRFLEVKGVGPCLVRAIFAECPDIGSFSKKGIAKFCGKAPIASKSCTVEKQSRMRRGRQGLRQAFHMAALSASKHNHVLRETYMRLMANGKPKMVALGAVGRHLAILLNNIAKYPDFKIRHEPEDGKRKLHATC

SEQ ID NO: 212785 - protein, 346 aa, unidentified
MEHYIGLDVSLKLTSICIVDRRGKVEREGVVASDPEAIATFIKLHSPHVVRIGLETGATSTWLWTELNKLGLPVICIDARHAKAALKMQINKSDRNDAMGIARIMQCGWYKEVCVKDLDSHATKALLVSRALLVKIKRDIENQIRGLLKNLGLVIGRAKMNMFAVRAAQLAEDRSGLFAAVDPLLKAREAVEQQILDLDRKVLRLARNNAQVRRFMTTPGIGPVTALCFLATIDDPARFKRSRSVGAYAGLTTRRYASGEIDWTGRISKCGDKMLRSYLYEAANVLLTRVAKWSALKAWGVRLAKRSGLRKAKVAVARKLAVILHRMWIEGTEFKWSSKEVADQPA

SEQ ID NO: 212786 - protein, 385 aa, unidentified
MTTAKLWRNRKERKDWARRLRSEDPGLEVVHPHAAGIDVGNSAHYVAVRPDRDPEPVRRFECFTADLYRLAEWLESCGVKTVAMQSTGVYWIPLYEILEEHGFEVYLVNARHTKNLPGCKSDVQESQWLLKLHTYGLLNNSFQPSAEIRVLRTYWRQRAEHVSGAATCIQRMQKALTQMNLQLANVISDLSGVTGQAIVRAIVAGERNPQKLAELSDPRIEASREEVAKSLEGNWRPELVFVLRQEVEMYDAYQRRIAECDQQLQKHLASFADTELPQSPKAESKEKRAKSTKNAPRFDLSSELKRITGVDLTRIVGIDVMVAQTLLSEVGMDMSRWNTEAHFSSWLGLCPDNRISGDKLLGLRGHIKSGQRWSLQNRPTKVAWD

SEQ ID NO: 212787 - protein, 346 aa, unidentified
MEHYAGIDVSLELSSVCVVDAQGKIVREAKVASEPEALLAFFASLGFEVKRIGLEAGPLSQWLHAGLKRTGFDTVLLETRHVKAALSAMMVKTDRKDARGLAQLIRMGWFRPVHAKSMGSQEVRALLVARKQLLGRLIDVELSIRGILRGFGLKVGVVTRKGFEGRIRELVTGHITLERIAGAMLSARATLKVEYEKLHKIVLTIVREDAVCRRLMTVPSVGPLVAITYKTAMDDPNRIAKSKAAGALFGLTPKKYQSGEKDVTGGITRAGDEMARTALYEAANVLLARITRFSKLKRWGMDVAKRRGSKRAKVALARKIAVILHRMWVDGTTYRWTNAQPIAVQV

SEQ ID NO: 212788 - protein, 312 aa, unidentified
MTASQDVFIGIDISKDRLDVHVRPLGVGFSVSNEAAGHAALIARLRPLRSKRIVLEATGGYERALWLALSEAGLVAAVVNPRQVREFARAAGRLAKSDRLDAAVIAHFAETFAPRPGKPDPVADRLGEHVLYRRSLQEEIVALEHQRRRLETPALRERAERRHAALRAEVKEIEREMRAIVDGDPGKKALFACLTALKGVGLVLACTLIANMRELGSLTRHQAAALIGVAPLNHDSGVRRGYRAIAGGRRRVRNVLYVATLSAVRSNPVIREFYRRLSAGGKPAKVALVACMRKMLVMLNGRVRDHLATATA

SEQ ID NO: 212789 - protein, 336 aa, unidentified
MDYYSAIDLHSNNSFLVVIDECDKIIYERRLPNDLDKILFVLACYKDHIRGIAVESTFNWYWLVDGLKAAGYELHLVNTTAVQTYSGLKYTDDKHDERWLAHLLRLEILPTGYIYPRETRPNRDLFRKRMQLVQQRTRNILSLKSLYARWLGASFSTNDFYRNPDEFLPKDKAISLIARPNIELFKLMTEQIITIEKMLLSKKFKQRELFLLIKTLPGIGDILAMTVLLEVGDITRFKSVGNFSSYSRCVESKKVSNFKKKGSGNRKCGNKYLSWAFHEAAHHARVFYPEVDKFYERKKRKTNRIVAIRAVAHKLARACYHVLDKQEAFDMSKAFN

SEQ ID NO: 212790 - protein, 340 aa, unidentified
MSSLVCGLDVHKDNVYATVMNYSGEIVDKRKLTNDEVVSYLDRYPIDKVAMESSTSIVPIYRALRGRGYEILVSHPKKTRLIAESRIKTDRVDSWAITELARLDALPLSYMPPDDIAALREKVRRRAFLVRMRGKLKVKIKAQLLVNGLKPPSEYGLFTVKGLEWLRSLQLDAVDSYLPVIQTLTIQVGKVSRELRGMAPLDEDVRLLMTIPGIGYYAALLVKSEIGDISRFPDGEKLCSYAGLVPSVSISGNYRRHGSITKEGSCWLRWIMVECVHTHQKYDTSITRAYHAIAERKGTGIAKVAAARRLLMCCHSVLRNREPYHDPAGQYQPSRSGRGE

SEQ ID NO: 212791 - protein, 371 aa, unidentified
MVWTAPYGISCARMRLLRSQTREPSVEQIIRIGMDTSKHFFQLHGVDAAERPVLRKKLRRNEVLGFFAKQPSTAIGMEACAAGHYWARELGKLGHEVKLIAPQHVKAYIKRNKNDGRDAEGLCEAMSRPTMQFVPVKTEEQQAALMLMGVRQQLMTRRTQLSNAIRGCAAEFGLITAKGLDKIEPLLAQIAQDESLPALAREMFTLQGRDYARLQVELKAIEAKLMAWHRANADSRRLVKIPGIGPIGSTALVMKAPDPRLFPSGRHFAAWIGLTPKDHSTAGKTRIGKITRAGDEMLRSVLVAGATAVIQQAKCGRGRPSPWLLDLLKRKPPKLAAIALANKTARIAWKLLTTGENYDGARMPGASALAA

SEQ ID NO: 212792 - protein, 485 aa, unidentified
MTPRVYAGVDLGGAFHQVQITNAVGERLGKSFRIGRGKTGLAELQEGLRRIAGDDVDPVYTIEATQNYWLELVHPLQRAGASVYLVSPSKSSALRTFYRRHTKNDAIDAEALSRLPVVDPKLRPATASAPKWDMLRRLVRQSWLLKNQMANRKRRIMGRVLMVYPGYETVFRDRYCGTSLLFCRRYLDPAKARRVGRRRLSVLMRKRALGKFDESRAERLWQVIENAPELNLCYDDLQLLLNQDLDLLEAEEKSQQALRERIAELYGELDPSTRLSTVPGLGDYLAAAITAFIGEPGRYANADQVVALSGLCARLKSSAGTDTANQPLTQHGDPVLRGCAYLAAEICRHYDPELRAFHRRLTSRGKHYKQASCALAAKLLRRCFAVLREQRNYVIAHQDEMAQARKEEGKTVRGSVHEVAERLNDVSGMPSPGAENSSTQGPGQSATPSSAESGEKRPPRKPVQPRSQPTVTRTSSFIEAERSLS

SEQ ID NO: 212793 - protein, 340 aa, unidentified
MKLTAVGVDVAKRVFQLHWVEPETGEIISKQIKRAGFLEHFANRAPCLIGMEACGGAQHWARRLIEMGHQVRLMPGKAVKAFVSGNKNDVADARAIWTAVQQSGVKSVAVKSEAQQAILALHRMRQQLIKFRTMQSNGLRGLLTEYGEVMAVGRAALNKAMVDVLARLNERLPGMLVNTLREQWGRLGELDGQIAEIERRLSEWMKEDQSCKKIAEIPGVGLLTATAAVATMGDAKAFRSGREFAAWLGLVPGQVGTGGKVRLLGISKRGDTYLRTLLIHGARAVLAHAKEPGPWVEQISKRRPQNVVTVALANKMARTIWALLAHDRKYERSYVSARPV

SEQ ID NO: 212794 - protein, 319 aa, unidentified
MDGDGGIVEKSRIKTEKEAIEDFFSDKEGRVVMESTGIWEYVYELIEGKGLEVYLANPLKVRAIAEAKIKTDKIDSEILAHLLRANLLPTVWIGDKGMRDLKRLIMERAFLKRSSTMMKNRIHAELARRGTKTEGNIFTIKRRAYLRSLSIKSVDRLLTILDGIDEQIKEVNEELLDYYSNSEDAKILTTMCGIGFYSALSITAVIGNINRFSDSEHLCSYFGLVPSTHQSSLTTYHGSITKEGSRTIRWLLIQCAWVHVTKCKDTSLTTFYNRIARKKGKRKAIVATARKMVKIIYWMLKEKEPYHVEGYKPRSGHAR

SEQ ID NO: 212795 - protein, 344 aa, unidentified
MPSIVGGFDIHRKQLTFDYLDTVAGEVRRGQITPADRGHLRSWLAQLENPQDAAFAAEACTGWRYVTEELARAGVQAHLAEPADTAAARGRKKRAKTDRADARLLRDLLAEGRLPECWIPPEHIVECRALLECYHDLRAEHTAWVQRIHATLFHQGAPPFQGLRQADGPGQLTALAREHLSPAGQAQIAVCLRVLAALEAELTAMRHRLLAAAAHLRGVKALTGAIYGVGPITGLALTCWLGGAGRFSSARKAVRFAGLDITVYSSGGKRSPGHLSRQGPPVLRWCAYEAGKVSAHATAPDHPCYAAVKDRAGGKRAALAEARKIIRRACHILTELGDDAFTTG

SEQ ID NO: 212796 - protein, 354 aa, unidentified
MAENTIPNKTGHTAVAVDLAKNVFELAISEIPGRVSGRKRLKRAEMMPFFAQLPRATVLLEACGSAHHWARSISELGHRVVLLPPHRTSKYRDGSKTDRSDTKAMLEAFRNESVFPVPVKSIEQQSLALLHRLRSAWKQTRTARLNTLRGILRELGLTIPVGAAQVIPAVWSQVEDADSTLPDALRPFLVELCQEIRDCERRLLDAERQLDLLGRQIPAVEYLLSIPGIGPLTATALVAFVGDIRRFASGRRFSSYLGLVPKERSSGDTRRLGKITKRGDTYLRMLLIHSARAVLWAAKSKRSPDALSAWALHVEAQRGHNKAAVAVANKLARIAWSVWRDARRYEVRSIRAAA

SEQ ID NO: 212797 - protein, 406 aa, unidentified
MLFVGDDWSEEHHDIELMDASGRRLSKARLPEGVAGIARLHIMVGDHLGDNVDESEVAIGIETDHGPWVAALVAAGYTVFAVNPLQASRFRDRRRVSGAKSDAADAHVLADMVRTDSHQLRPVAGDSPEAEAIKVVARAHKTLIWERTRHTQRLRHALREYFPAALEAFDDLDAVDALELLGKAPDPTSAARLTRGQITAALRKARRRDIETKTDQIQAVLRGEHLGRAAVITTAYATTTRSAVAVLTTLNTEITTLQKQVDAHFGRHPDAEIILSQPGLGSLLGPRVLGEFGDDRSRYATAKARKNYAGTSPITRASGKKKTVTARFVHNDRLVDALSAQAFSALQASSGARAYYDKQRDRGLGHRPALRQLANRLVGILHGCLKTRTCYDETTAWSPHPEQAAA

SEQ ID NO: 212798 - protein, 416 aa, unidentified
MSLALPEALFFTGIDWAAETHAVCVMDAGGAIAAEFTIEHSADGIAALVRRLARHGEAGVMPVAIERPNGRLVDLLLEAGYPVVPVSPNAIKAWREGEVLSGAKSDAGDAAVIAEYLRLRQHRLKTAAPYSDETLALRTVVRTRGDLAGMRVAATNQLSALLDAHWPGAKAVFADVESPVSLEFLTRYPTPAAAAHLGEKRMAAFLVKHGYSGRRTAAELLARLRAAPAGTGREALAGALRDAVLAAVGVLTALNASVKSLDRSVAAHLGEHPDGKIFTSLPRSGQVNAAQVLAERGDCRQAYDGPDSVAALAGCTPVTSQSGKHRGVQFRWACNKRFRVAMTTFADNSRHASPWAAKTYSDARARGKDHPHAIRILARAWIRVIWPCWLQGIPYDPARHGAAAALAEQPAKQVAA

SEQ ID NO: 212799 - protein, 355 aa, unidentified
MNSKKGIKIEALMSVGIDIGKDVFHLVGFDPDGNVVVRKKIKRMALEKTFEELPSCIVGMEACLSAHFVSRALRKMGFEPRIIPAIYVKPFNKGQKNDYNDAEAIAEAALRPNLKSVPEKSQDQLDLQALHRVRSRLVSRRTATINQIRAFLIEQGITVRKGLRALKNSFLTILEERKDEISPRMRKILIGLYGDWMWMDDRIDAVSTEIEQISRAEENCVNVMTIPGIGPMISTAMVAAIGTGDAFDRGRDFAAWVGLVPRQYSTGGRTVLGRISKPGSRYLRMLFVQAAKVILMRPHRWPDFSFGEWLIRAEPRMHRNKLAVALANKLARTAWSVLHHGTTFDAPRDEVAVGV

SEQ ID NO: 212800 - protein, 382 aa, unidentified
MSSQSSECVAAAAHPIIYLGLDVHKDSITIAVLPEGAKVPTRLDKLPNDLPKLKKWIDRAARDGELRACYEASGAGYVLHRALQEWGYACDVIAPSLIPKRPGVQRKHDKRDAADLARLYRAGELTVVRIPSDAEERVRDVVRCRETFQREILKSRHYILKFLARRGFVFREGTNWCTPHLQWLLHLTTDGSPLAAHDRLVFREYHALLMYKLQRRDELDRQIEQLALLPALAPMVQRLQCFRGISLHSAMVLATEIVDWRRFERPSQLACYLGLVSREDSSGDRSRLGSITKAGNSHCRHVLVQAAWSYRHRPQTSVDLKRRQQGQPPAVITHAWKAQQRLHQRFNHLSYRKRPQIAVVAVARELVGFLWAVMQDLELTTA

SEQ ID NO: 212801 - protein, 339 aa, unidentified
MNEVTLIGIDLGKHSFHLHAQDAAGRMVFRKKLSRQQLLRTLAKVPSCRVVMEACAGSHWLARQLAGMGHEPRLISPQLVRPFVAGNKNDFGDAQAICEAACRPSMRFVSPRNEAQQTVSAMHRLRERLVRERTATVNQIHGFLLEFGISLPRGAALMSRLPTVLDHETLPPRLVGLVVRLRAQVHYLEEQLRQVEQDLKASLREDDKSRRLLEIPGIGPITASALAVELGDARQFANARQFAASIGLVPRQYSTGGKPTLLGISKRGDRNLRRLLVQCARAVMQHTASRTDALSLWVKTLSTRRHSNVVACALANKLARIAWAVLARGTHYQARALTT

SEQ ID NO: 212802 - protein, 361 aa, unidentified
MSESMALVGLDVHQAQTVAAVLDPSTGELRVNRLRGGPASVVPVFLEELDRPVAAVYEAGPTGFALARVAEERGLDIRVVAPGSIPRAPGDRVKTDRRDAKRLVRLFAAGELSFAFVPSEADERFRDLVRCLEDARKDLMRSRHRLSKFLLRRGERFPCKAWTQPHEQWLCKLRFEDAPSQATFVDYLCAVQALVARRRALIGVLEQAVPESSHAQTIARLRCFRGIDTLTAAGLCAEVGDFHRFSKPALLSGFLGVVPSEYSSDEKRTQGQITKAGPPHARRLLVEAAHHYRHRPAVGLHLRARQAEQDPRVVQIAWRCQRRLHERWTHLHSRRGKRTGTVAIACARELAAFCWEAATLD

SEQ ID NO: 212803 - protein, 320 aa, unidentified
MDAVLGIDIGKTKFHVTLLFDDGTRRRKACANSLAGCADLLTWMTRHGAGRVHACLEATGTYGELLATTLVEAGHQVSILNPAIIHHYAKSRLSRAKTDPVDADVIADYTAKEHPPTWTPLPRDIRELQALVRRLDALLGMQTDERNRAQAGALTPAVQHSIEAVLEHLAAQIATVRQQIRDHMDQHPGLRAQRDLLTSIPGIGEATAALLLAELFNKAFASARQAAAFAGVVPRPHDSGIQQGRRVMCKLGPGRVRKGLYFPAIAAIRFNPSLQPLARRLRAAGKPPMLIIGAAMRKIIHLAFGVLKSGRAFDARLAKA

SEQ ID NO: 212804 - protein, 413 aa, unidentified
MTQQPPQVWAGIDVGKGHHWITVVDADGDPLWNRKVINSESDILAALGEVLDAADQVTWALDLVDGPAALLLGTLANHGQNPRYVTGSKFAAFKVSFSGQGKSDLKDSYIIAEFARCLRRQTVPVPAPSRVTQELTLILAHRNGLSAERTRTINRLRALLTSIFPELEWSFEFARSDGPLVLLSGYQTSAAIRRMGESRLTAWLVKRGVRKAATIAEKAVAAAKNQDSAACGEVLAAELVAELAQKITQMNARLKELESKIKELLSQHPQAPIVLSMPGFGELLAAELLAAIGDISRFPSAGRLAVASGMAPVSRDSGSNTGNRRRPTQYSRPLQRAFFMSSQSACLTAGTWEKEMYLRKYQSYTHDKGRHKKAVIAVARQRVSVLWAMLRDGRLYEREYNPREKAADEVQTA

SEQ ID NO: 212805 - protein, 341 aa, unidentified
MRTLYVGMDIHKNFIQAAALDEEGNIITEQKFKSDCEAIKRFVKSLNAQKIHAAIEATCTWYHVYETLNALDVETTLVNMRRTKTIAESKIKTDKLDAKTIAQCLRTGFIATAYIPPKNIMEQRNILRHRMSLRKEIVRYKNKIHAILLRNGIQHHDYSDLFGAGGMKFLRRLTLSDSEQYSLTSYLNIVETLVQEKTQTAKKIEALCKNNHQAMLLTSIPGISYYSAMIILTEMGEVHRFSNPKKLCSYAGLVPRTIQSGTHVYHGRILKECNQNIKWILDQCTHIHIRYCSDSLITKLYYRVEAKKGANKATVAASRKLLTCIWHMLMKDETFKYNNDN

SEQ ID NO: 212806 - protein, 333 aa, unidentified
MNKKWFIGIDISKLSLDVAIHSDEGDQQENHIKVTNDIPGFKKLLEWLKEKKVDYKQSLFCMEHTGLYGLEIQFFLTKKEITYCMESPLQIKRSLGLVRGKNDKVDAQRIAWYAYTFRDRIKASHLPPEALRILQRLLTERKHYVKQIVSFRQQKSDVIKYETKQASKRKAKMLEYLDDMLSQVESQMMEIITADGTINNNYNLLLSIPGIGIINAITTIVNTQNFTAFANARQYACYIGIAPFEHTSGTSVNGRTSVSKLGNKQAKVELTQAARSAIIHDPGIKSYFQRKYNEKGATRDAYGIVLNAVKFKLLLRIFAVVKRGSKYVKLAYA

SEQ ID NO: 212807 - protein, 371 aa, unidentified
MEKGTKIHVGLDVHKDSITVAAAEPGRDKACLVGKVAHDVPKLLKVLAKLGTVDGLHIVYEAGPTGYGLQRALAARGYACEVIAPSKTPRQSGQRVKTDARDSLELAEYSRAGALTPVWIPDPADEAIRDLSRAREDAVNNRTQVRQQLKGFLLRHDRRYGGKTSWCGAHDQWLARQSFDSAATQTAFTEYWQAVKAADERVARLTKALQASIAGWRFEPVVEALQALRGVAAVTAIGLVAEIGDLSRFEHPRKLMGYLGLVPSEHSSGERTSRGSITKTGNGHARRLLVEAAWHDQFKARVGKEIHARQQGLSEAIRMIAWKAQLRLTARYAALHKRGVQANKVCVAVARELAGFVWALGMHAQRERGIT

SEQ ID NO: 212808 - protein, 411 aa, unidentified
MKFIGLDWKDKGYTTRIINKEGADLSGSFEVEKNREGFSEFIYKVRKYCDGDSNILFGIERERDPIVEYLLSLGHKVYLVCPNMMKSLRKRYSSTGKYNDDFDSYIIADTVRTDRNRLTQIEPRDENIRKIEFLLRNREKAVNDKTRLTNRLTCYLKEYFPAFLDLFNDITCPTALSFLKAYPTYYNIKELSREEIRTFLKEHHYHKESGILRIYKAIKKGQVKIDATVIQERSRSAILLIKRIELLNEEIKEYENDLKETTETDKDAEIFRSLPGSGDTLSPGLMVIFGKKRSRYENAEEINSLSGIVPFTKQSGNWETHLFRFGCNHFYRNIITRLAYCSLTKSEWAKGYYNEKKAEGKSHYHALRCLARIWIKVAFALWKKREKYNEDKHMAAVQRHKIRNRLARKSA

SEQ ID NO: 212809 - protein, 418 aa, unidentified
MEKHNNSGKKSEPTTKRVKSRGPVQRDTKEVLAELVGKLKEKLDPKKFAATSAGEKHKRGELRPNLDRLTVGVDLGDQWSHYCILGLEGETLAEGQLRTTQEDLAEFFQALNAARVVFEVGTHSPWVQEVIGGCGHEVLVANPRMMDGSKRRKRKNDRIDANKLARLGRVDPQSLHPIQHRSREVRQDLVVLRARDALVAARTELINATRGLVKSMGTRLPKCSSPSFAEKVEGTVPAELRDALLPLVRMAAALSDCIQEYDEKIEKLGRERYGHTALLRQVKGVGPITALAYVLTLENPDRFVKSRDVGPYLGLVPKQEDSGESQPQLGISKTGDTMVRKLLVGSAQYILGPFGPDTDLRRYGLRLCERGGKNAKKRAAVAVARKLAVLLHCLWVSGEVYEPLRQGTSATTAPAVAA

SEQ ID NO: 212810 - protein, 320 aa, unidentified
MNQELSFIGIDVAKARLDVAIRPTGRQWQTEYTEKGIEELVEQITELDPALVLLEASGGLEVTVVTALAIANLPVVVVNPRQVRDFARATGKLAKTDALDAHVLAHFAEAIRPAYRSIPDSETQTLNALVARRNQVMSMLVAEKNRLRTARPTVRQRIQLHIDWLGQELDEIDRDLKEMLHNSPVWREKENLLRTVPGVGPQLAVSILAYLPELGTLNKKRIAALVGVAPFNRDSGTLRGKRAVWGGRSRIRAALYMAALVASRHNPVISAFYQRLLAAGKAKKVALTACMRKLLVILNAMLKNHSSWQSLIPQLPDPCS

SEQ ID NO: 212811 - protein, 299 aa, unidentified
MSKTKTETNNPKGIAHTIEYLKKHKVALVVTESTGGLEIPAAKAIRRAGIAVIIANPRQTHQFAQSQPLTKTDAKDAKMPAFFAQMTAQKEDSQTMPYQPPTEAEEVLEALVNRRNQPADMRTAEKNRLHQVHETQVGSVKQLIAHFDRLIDELDKQIDDHTHTHFDGKAQVAEQIKGIGSITTATLMVMLPELGRLSHKRIASLAGIAPHPRESGETKFKSRCFGGRSAVRKALYMATVAATRFEPLIRDFYQRLLSEGKPYKVAVTACMRKLLTISNARMRDYFAENDTAENGIRTA

SEQ ID NO: 212812 - protein, 374 aa, unidentified
MKEFSKYVGLDVHKATIAISVADGTGGEPRFFGEIPNTAVAIANLMTKLTKGGATLSVCYEAGCCGYVIYRQLTKLGHFCQVVAPSLIPKKTGDRVKTDRRDSLSLARLLRAGEISGIWVPDGLQEALRDLTRAREDMKDLQRQSKQQLLGFLLRHGVDGFSGKTNWTQAHFRWFETVKFDQPAQQVVFQEYVDVIKAGTKRVQGLDQHIERTAQASKVWPIIEALMALRGISLLAAAIIMAELGDLSRFAGAPQLMAYLGLVPSESSSGANRRRGGITKTGNAHVRRVLVEAAWTYRHPARKTRTLQRRAEKTSDAVQEIAWKAQQRLCSRYWTLDARGKLKVQACTAVARELAGFIWAIGQAVPSPTSSASA

SEQ ID NO: 212813 - protein, 402 aa, unidentified
MKQQQPVPRGWAGVDVGKGHHWVCLIDEAGTTLWSSRVANDEGAILKAIGVVLARAQQVRWAVDVTGTMSALLLALLAAHGQRVTYVPGRTVNRMTVAYQGEAKTDARDAYVIAETVRHRGDLHEVDVPTALVSELRLLVAHRSDLVADRVRIINRLRDVLTGYFPALERAFDFAHSRGAVVLLTGYQTPAAIRARGQSRLQAWLARRKVRSAAQIAADALAAAQTQHTSVPAEAVAASIVADLATQLLAIDARISDLTERVTTTFRSHPQAEIIESLPGMGPILGAELIAAAGDLNGYPDAGRLASAAGLVPVPRDSGRRTGNLHRPMRYSRKLRRVFYLSAAASMMREGPNRDFYLKKRAQGLKHVQALIALARRRVDVLWALLRDNRVFQSAAPAAKAA

SEQ ID NO: 212814 - protein, 366 aa, unidentified
MQKISTMRAGGSEIFNGRQLTIGLDLGDRWSFYCVVDEAGGVILEQKLPTTSEAMRRAFEKMPRSRIALETGTHSPWVSRLLTALGHEVIVAHARNVRLIGESRRKDDRIDARTLARLARIDPQLLSPVQHRSAKAQIHLTAIRARAGLVSARTALVNTARGLAKSYGQRLRKCGAQQVRRDLAMGLSAELREALEPLLREVESLNERIKEYDRRIEQIAKKNYPEVELLQQVKGVGDLIALTYVLTIEDPHRFLKSRDVGCFLGLRPGRRNSGQSEPQMHISKEGDRYLRTLLVQGAHYILGPFGEDSDLRRWGRKLAERGGKNAKKRAIVAVARKLAVLLHRLWVSGEVYEPLRNSQKAVRAVA

SEQ ID NO: 212815 - protein, 450 aa, unidentified
MNLYIGVDIGKEFNYASFLNEKGLEIDKRFKFKNNYLGFLKLKDNIDKLTYDYNLKYDDILVGFESTGHYWINVDWFLTEKLNIKTVMVRNDAVRHTRALNSQGKGKNDSLDSRTIAECLKNGYYFDVQGRKEDYIVLRRLTRERSELEKEIARYKNRFRAWLDVNNPIFLENFSNVFSSVALALLKVYPSPLDIIKDSYLEVREKLREVGYSRTNKTLKIYYEEVETYKNIINGISYADRLEISEYIEALEMYIKKKENLDERIEALMNFLEGKVYTSLSEIKGMPKAQVASLIAEIGNINNFKSAIHLLSYAGLNLQGEGSGKNKGHSWISKTGNRKIRKELYVITFNLVRHNDYFRGLYCYYKSYKRPNEKSSKEMLIALMCKLLRGVYGMLRYNVEFNLNEMLKNYDFRNINKEKFIDEFLGNSEKKQKIIPQEIEDIFLNNRKSN

SEQ ID NO: 212816 - protein, 359 aa, unidentified
MLKYSVGLDISAKTIHACISVIDAAQKVTVKSSCKIDNTLSGFKQLDQWIDKHYRQKDVPLVVNMEATGVYYENCALYLFKQGYSVSVLLPNKAKKWLQSEGLKSKNDKIDAQGLSKMGAEKALELWEPAAEYYYELRAMTRQRQSLQEFKTAVNNQLHAEEHGMYKNKLVIKQLKQQIKFIEKQIADLEPVIEAHIAADEEVAAKVKNICRIQGLGIQTVAVILAETNGFILFKNAPQLVSYSGYDVIENQSGNHKGKTKISKKGNSRIRRALFMPAFNMIKFKQTPFVDLYNRTFEKHGLKMKSYVAVQKKLLVLIYALWKNNTAYDINYKNKYTRELEQALPLGLASIEATLENAV

SEQ ID NO: 212817 - protein, 410 aa, unidentified
MVIWLTHIQGRQNDRIQRLRIRQVFIGVDVGKDTHHAVAINRSGKRLFDKALPNDENKLRSLISDLKQHGQILLVVDQPATIGALPVAVARSEGVLVGYLPGLAMRRIADLHAGEAKTDARDAAIIAEAARTLPHALRTLKLADEQIAELSMLCGFDDDLAAQTTQASNRIRGLLTQIHPAPERVLGPRLEHPAVLDLLQRYPSPEKLASLGEKKLAAQLCKLAPRLGKRLAADIAQALAEQTVVVPGTNAAAVVLPRLALQLITLRKQRDEVALEVEQRVLAHPLYPALTSMPGVGVRTAARLLTEVACRAFASAAHLAAYAGLAPVTRRSGSSIRGEHPSRRGNKALKRALFLSAFAALRDPLSRAYYTRKMSQGKRHNQVLIALARRRCDILFAMMRDGTFYTPQGS

SEQ ID NO: 212818 - protein, 342 aa, unidentified
MEKASIIGLDLAKNVFQLHGALADGSVAFRRTISRAKLLSFFTRIPRCLVAMEACASAHHWARQIAALGHDVRLIAPIYVKPFVKRNKNDVVDAEAIAEAASRPTMRFVAVKSVEKQAAGVAFKARDLLVRQRTQAINAVRGHMAEYGIVAPNGPVHVERLAAATQDPESGLPVSILGVCRLLLQHIATLSEQIELLERELRERTRADETARRLMTIPGIGVICATAMEALAPPPESFAKGRDFAAWLGLTPKQNSSGGKTKLGGTSKMGQRDLRRLLVSGAITQVRWAARKGPPEGSWLARMMARKPRLVVAVALANRTARIAWALMINGGVYRASCLAGA

SEQ ID NO: 212819 - protein, 417 aa, unidentified
MTEYVGIDWAYRKAAWCAKSVGGAISAEGFTSADEDGLARLVLRLGTDVKACVEMMSGAVWVRDRLRSAGWQVEVADARRVKGIAPLACKTDRVDARVLAELCRRDLVPALWIPSLEERELRERLRRRAHLVRLRTSAASRIYGLGTQWGLRLSADRLRRPDRRELLARSEMPAVWQRSVDEALAVVDLLDQRIAPLEQELAPIARADRDVALLVTIPGVGDLLALTLAAEIGDVSRFPSARKLVGYAGMAPGVNQSGERTTSGLPLSKAGSRTLRWAAVEAAQHAWRESNPWHDLYTDLCTRKTKNDAKSAVARKVLTAAWHMLSLQSRASAGARAPQRAPPAPPAAHPAPPTSPTRPARHRRPPRVPARRSPPRPSAPHPLIRRPGAGPCRLTHTAPRKGSKTCSTRGRSGLGRD

SEQ ID NO: 212820 - protein, 344 aa, unidentified
MHIASIGIDLGKTTFHLVALGERNKVLVRKKFSRAQLLAYTANLPSSLIGLEAGAGAHFLGTALREQGHQVRLIPAQFVKPYRKSNKNDFLDAEAIAEAVTKQNMRFAQIKTQEQLDWQAMHRVRDRLVQRRTALINEIRGFLLERGLTFAARPIHLRKNLPTLIEDAEQNLSGRLRWLLNRLWQEWKQTEIDIKAITDEIERISNEDERCQRLRQIPGFGPLVSTATVAAIGNGAAFRRGRDFAAWVGVVPRQYSTGGKQKLLGISKRGNIYLRRMLIHGARAVLLRVRYDTGGFGQWVYRLAQRAPRNKVVVAIANKLARIAWAVLSSGREYRHQPLPLAAA

SEQ ID NO: 212821 - protein, 361 aa, unidentified
MKITRIGMDIAKSMFQLHGVDSHDRAALKKKLKRAEVLAFFRATPACEVGIEACGGAHYWAREIGKLGHSVKLIAPQFVKPYVKTNKNGAADAEAICEAMSRPNMRFVPIKTTAQQDLQAIHRIRSELIKQRTMKGNQIRGFLAEYGIVVDKRLERLRAALPVILEHADNGLTMPMRHLMNKLREDLVQFDARIGQMDEKIALEAKGNVAVKRLQQIPGIGPISATALVAAVGDAENFKCGRAMAAWFGLVPAQKSSGGKDRLLGISKRGDSYVRTLLIHGARASQRAAVNKTDPRSVWVNALGERRYKNVAAVALANENARIAWAILSRGEDYRAHGVTTSARSTTTSALPTAAHEARVM

SEQ ID NO: 212822 - protein, 354 aa, unidentified
MSQTPNTAIAVIGIDIGKNSFHVVGHDARGAIMLRQKWSRGQVEARLANIPPCLIGMEACVGAHHLSRKLASLGHDARLMPAKYVRPYSKGQKNDFNDAEAIAEAVQRPTMKFVAIKTAEQLDLQALHRVRERLVSQRTGIINQIRAFMLERGIAVRQGIGFLRTELPTILATRTDALSPRMLRVIEELAGDWRRLTQHIDGLSGEIEALARQDQACSRLMTVPGIGPIISSAMVAAIGTGDVFSKGRDFGAWLGLVPKQISTGDRTILGKISRRGNRYLRVLFVQAAWVVLVRIKNWERYGLKSWIEAAKKRLHHNVLAIALANKLARIAWAVLAKGRAFELTRTDDAGVRPA

SEQ ID NO: 212823 - protein, 294 aa, unidentified
MNFYTQQHKHYCGIDLHARAMYVCILDQSGTKLVHKNLPTTPEAFLRVIAPYREDLVVAVECIFTWYWLADLCQKEGIAFVLGHALYMKAIHGGKAKNDKIDAHKIAVLLRGGMIPQAYVYPAEMRATRDLLRRRCHLVQKRAELLAHIQNTNSQYNLPEIGKKLAYKANREGVEEHFPDPSVRKTIEVDLSLLDHYDQVLRDLALSITRRAKAHDGQTFTRLQSVPGIGQILALVILYEIQDITRFPRVQDFVSYCRLVKWAKESNGKRLGTSGKKIGNSHLRWAFAEAAILV

SEQ ID NO: 212824 - protein, 331 aa, unidentified
MNFIGMDIHKQFTVAVVKDEQGNELAKDKFENSKERFADFLKQFPTENTKIVMESTCVWEYIFEILEEMKYDVKLSNPSRTKAIAWARIKTDNVDASTLADLLRANLVAESYIPPKHIRQLREIVRERRTFVKQTTQIKNRIHALLIKRGIKLPTATLSKKALKLISNSVDENDILEHYINLLWYHKQELNFIEDKIRKISEENPEAKLLITIPGIAEIRGMDIIAEIGDINRFPTADKLCSYAGLVPSIKQSGNSLRFGRLIQQSSKVLKYNLIEASWNIVRTKEDNPLKRFYIKLSKKKGKQKAICATARKLCCVIHSMLRKNQKFMIL

SEQ ID NO: 212825 - protein, 355 aa, unidentified
MNDEKYIGLDVHQATIVVAVMDSTGKLVMESILETKAATILQFFAGLRGTLSVTFEEGTWSAWLYDLLHSRVDKLVVCNPRKNALLHDGNKSDRIDARKLAELLRGNQLKPVYHGETGVRMLRELSRSYLTIVKDLSRVMNRLKAVYRSWAIPCAGRDVYYRRHRAQWLAKIREAGVRRRAERLYEQLDMLQHLRQQARRELLAESRKHTITAKLRQIPYLGPIRVALAVALIQTPHRFRSRRQLWAYSGLALETRTSAEYRFVEGQVRRSKKLLCIRGLNKDHNHDLKGLFKGAATMASVRPGPFQDFYQAALAQGIKPTMARLTLARKIAAITLTLWKKGENFDAEKLKSQAA

SEQ ID NO: 212826 - protein, 326 aa, unidentified
MKEKQVIGIDVSSQKLNLHFLETGADFEIANTEKGICAFLRQEKLNVGNCLFGAESTGRYHLTCQETLVRKDFEFRLINPILTGKKIASSIRKKKTDKNDARLIAQIVSQGEGRVVTLEQLNVSRRTLLRTRSSVVNQRTGIKVILKELGMVGKNDKKISVAMKSLERLIANMDKCVENIEELALDKNEVSQDEKIIQSLPGFATRLSAIVSVEVGDFSRFPTATQFKAYVGIDPKVIQSGKSLKTGRITKRGNAHLRSAFYLAAQVARCHDPELKAFYQKKKSEGKPTRVAIIAVARKLCERVFAVVKKRVPYEIRQVQSQPALT

SEQ ID NO: 212827 - protein, 458 aa, unidentified
MYRELQPLRQALSTELRANLSPAEPGIEPEHLLQTYLDRLTLYVGCDVADQTFTLCAVDAAGEELGHLMDVPNHPVGFERAWDWLDNLRGHHQLRIILLAMETSGIYYWAWWDFLAGCANLARVLFNPRTTEHMIEVLSKRVRNELVDAYALAEQVRLGGTPEATLIEDADLLSARLCSRAARDLAGQINDKKNQLRSLLRAYNPALCHIFPGAKFHHPAVYALLQHYILPEKFVAAGPQVITAILRAHCRSAFGQQEADDLVTLCRQTLTHPIQPDVIRHRVQQLTADILTTQKHKKQFLKTGYRLIEDRPETQLLRTATGAGISNTLALVSETGGSQRFPDGEHLASFLGLTTSKHISGTTLFRSRHITKQGSPNARYAAVNIALHLSLRVPKYQAMYQRIKGRKPPRKGHRIALVAVARDFVTNVLYDMWRSQRPFFIEVDDYRAYRQTHPRAVH

SEQ ID NO: 212828 - protein, 362 aa, unidentified
MDAPSAQRRKMLEQRRGGAVKEDGRMSEVHVLAIDLAKRSFQLCGTDCGGAVLFNRTVSRSKLEKTLRGQPPCIVAMEACATSHYWGRMARACGHEVRLIPPIYVKPFVKRQKNDAADAAAIAEAALRPNMHCVAVKSAEHQARAVAFRAHQCFVGQRTQLINALRGHLAEFGLIVAKGPANLKSLASMMDDASLDVPEAVRDVAQLFLDQIETITRTIDDLALRLRNATRENEEMRRLCTVPGVGPVTAGAVLAFAPDLRVFSSARNFAAWLGLVPRQHSTGGKTRLGAVSKMGQNDIRRLLIIGAMSRIRWIVRKGVMPDNWLGRLLGRKPRMVAAVALANKMARIIWAMMTREQNYRMA

SEQ ID NO: 212829 - protein, 331 aa, unidentified
MEKLTLVGIDVSARELAVAIDRGRSPVWDGSFANDATGHRNLLKRLTRRGATVRVCVEATGVYHLDLCLSLDAAAPIELMVANPRATKDFARAQLRRSKTDRTDARSLLEFVRRMEFKPWNPPKRSILDLRALSRRIQALLVTRAQEKNRLHADDSVEATPPAIRSSIERHVGAINEEIAALTKAALEVVRSEATLRQRFDHLVSVKGIAQASAITVLAELSVLPADMSARQWVAHAGLDPRHYDSGSSVHAPARISKVGNRHLRAALFLPAMVASQHEPQIKAYYQKLLARGKKPMQALVAVMRKLLHAIHGMFRHDADFDGTKFFAEPS

SEQ ID NO: 212830 - protein, 456 aa, unidentified
MSKRRGKAKRVQKASNQEPENLPVLNRDAAAIDIGSEEHLVAVPPGRDTESVRSFAAFTIDLHAMAGWLKQCGIKSVVMESTGVYWIAPFQVLEQYGLEVLLIDARLAKNLPGRKSDVLDCQWHQQLHTFGLLRGCFLPVAEIVPLRSYLRLRDELVKASTQSIQHMQKALFEMNLQLANVISDITGETGLAIIEAILAGERDGKKLAELKHRRIVASKETIAKSLEGNWRPELLFALQRALDRYKFYQQQLAQCDGQISQALAQLPTRELQVQTEPEKKTEPSARGQKLTPLEAELQRIAGVDLTSIDGIGQQIAQIILSELGPDLQKSFQSEKHFSSYLGLCPGTKISGGKVLKRKSRKVKHRVATALRLAARSLHSSDSALGANFRRLKARLGAPKAITAMANKLAKLVYRLLVYGKDYFDRGAQMYEQKFRLQQIRRLQKQAKMLNLKLVPA

SEQ ID NO: 212831 - protein, 455 aa, unidentified
MKLLYRCCAGLDIHRDSVSVCVRRRVRGSSETTIEEAVFGTFTQELERLRTWLKQHRVRQVAMESTGVYWMPVWNVLEGGRSPFTLTLVNPATVRALQGQKTDRIDARRIAEYLQYGLLRGSFIPPKPIRQLRELTRMRVHIQQDRNRVISRIARLLETVNIKLASVATNIVGKSGLAMLRLLASGVRDAEQLADCALRKLRSKMPELILALDGRPDAHSRWMLSELLSKLDWLTEELARVDQRMDNVAAPHTDPLERLATIPGVDRTTALVLLAEFGTDMTQFPTPGHLASWAGLCPGNTESAGKRFSGRTRKGDRYVRRILVQSAWAAARTKDCFLAALFFRIAQRRGLKKAAVAVAHRVLMIAWHIIAEGTVYQERGGDHFDRRNPERTAHKLSRRLEHIGFEVTLVRRQCAAERPRPSVVDPLVCPKCARWRLPRCIHVIRRNAPPNPMSP

SEQ ID NO: 212832 - protein, 466 aa, unidentified
MAHKRKNIKSKKQKRSPRSLKAIQPNAAGIDLGSREHWVAGPPLEDEKPNVERFGTTTPELFRLADWLKQQGVETVAMESTSVYWIPLFEILDSRGFEVVLANARQIRNVPGRKTDMIDSQWIQILHACGLLRGSFRPSDDICQLRALIRERNTMVEQRSDWVRRMQKYLDQMNICVHQAVSDITGVTGMAIIRAIVDGERDPHTLARLRDRRCRKSEAQIAEHLTGNWRAEHLFNLRQALKMYDQLCAVIADYDSEILSYIATLQPADTSDESAPPPASKSKAKNLVKRGQEPMRQALYQLCGVDLTTIDGIGVDTSTVIVSELGLDFSVFPNENHFVSYLRLAPNLSISAGKKVPKKSKASTCTRVATALRMAALTLRRSKTAIGAFYRRVAWRKGASVAVFATARKLAQLIYRLVRYGQAYVDTGTEAYEARFKQRRIKFFTKALNDMGYNVEPLKTEEAILA

SEQ ID NO: 212833 - protein, 362 aa, unidentified
MEEVKQSKNFVAQKLTIGLDLGDGSSWYGVLEEAGWIVLERKLSTTPKAMREVFGGMPHSRIGLETGMHSPWVSRTLSELGHEVIVAHGRSVRWIGESRKKDDRIDAQTLARLARIDPQLLCRVKHRSAKAQADLTVIRARAGLVRARTALVNTARGLAKSSGERLRGCKVRNLNPEKAEGLSPELQGALQPWRVALESRSEQIGEYNEGIEQLAQRSYPQVAVLKQSKGVGTLSALTFLWTREDPHRFRKSRDVGCSLGLQPGRRNSGQSQPQMHLSKEGDPYRRTLLVQGAQPILGPFGVDCDLRRWGLKRAERGGKSGKKRATIAVARKLAVLLHHLWVSGEVYEPLHNSSPLAMPAAA

SEQ ID NO: 212834 - protein, 315 aa, unidentified
MSQDTFIGVDVSNKWLDVYVQPQGTSYRFANDEEGIQELVSMAKELEPDNVVMEATGGLERAVGASLSVAGVKASIVNPRQVRDFARATGKLAKTDAIDAQVIAHFAQVVNPQTRPVVDEQAEELSAILSRRSQLTGMLTAEKNRLKRAPRVVRMRLKAHIAFLEKELKRVDKDLDEAIKGSSLWKEKESILKSIPGIGPVVSTTLITSLPELGKVSDKEVAALVGVAPFNRDSGAYRGRRKVWGGRARVRSALYMATLAATRHNPVIKVHYHKLLAGGKARKVALVACMRRLLVIANAMLRKGTHWDQSLHRTA

SEQ ID NO: 212835 - protein, 353 aa, unidentified
MSDPMEQSEVILGVDTHLEVHVAVLIDVVGRVIATTTIPTTASGYEQLINWTSSFGRLTRAGVEGTGTYGAALARRMQEYGVQVIEINRPDRSRRRLRGKSDPTDAENAARAVLAGDANAIPKAQSGAVEAMRTLNMARRSAVKAKTQAINQLRALLVTAPATVRSSLWKAKPDQCIAGCVALKSLGETALLKALTRTLRLLAKRWMSLAKELRELDTALEELTRAAGRRVLAQFGVGPQTAATLLVTAGDNPQRLRSEAALAALCGASPLQASSGKTTRHRLNRGGDRAANNALWTISMVRMRSDARTRAYVARRTAEGLSSKEIQRCLKRYIVRELYPLILADLADSAHVT

SEQ ID NO: 212836 - protein, 342 aa, unidentified
MYYIGLDVHKKTISYCVKDASGQVHQEGKIGATRRELDSWIKTLPQPRTMAMEATIFTGWIYDHLLPHAQRVKVAHPLMLRAIAAAKKKNDQIDASKIADCLRCDFLPECHMASTQIRDRRRTLRYRHLLVRQMVQMKNRISGLLMETGVSYNKQRLHKVGYFRELLSTNEDVHESIRPLLKLSRDTVVRLQKTEYALVSSLQRDPLLADRIQRLRTVPGVGPITALTWALEIGDVSRFRSIRQAISYCGLCGEEKSSGDKVMRTPLSKQRNKHIQRVLVEAAKLAPRQDHDLAQVYETEKQKGNANRATLAVARKMVAYLLAVDRAQRDFVPAENYQRAAA

SEQ ID NO: 212837 - protein, 353 aa, unidentified
MTNTKYIGMDVHKESISIAVRNVAGKIVMECVIETKANVILDFIHGLRGELQVTFEEGTWATWLYDLLKPHVTKLVVCDPRKNSRQGNKNDQIDARELADRLYMNKLSSVYHGEAGVRTLKELARSYLTISKDLARVMSRVKAIYRSWGIPCAGKQVYAPRHRAEWLAKITEVGVLRRAEFYYQQLDALRALRHEVRRDLLAESKKHKATKLLCQIPAIGPIRAALLIALIQTPHRFRTKRPLWKYSGFAIETHSSADYRSVKGQLQKSKKQVSVRGLNRDCNHDLKNLFKSAATIASVKPGPFQEFYADLLAKGMRPEMARLTLARKIATIVLIVWKKGVRFDAQYLKPQTA

SEQ ID NO: 212838 - protein, 381 aa, unidentified
MNYNQNEKIAQITSQTLIIGVDIAKFKHVARAQDYRGMEFGSPCYFDNTKQGFQLFLQWIYHLKQEQNMGKVIVGMEPTGHYWLNLAHILKENEIKLVAVNPLHVKKSKELDDNSPTKNDVKDARVIAQLVKDGRYAEPKIPQGVYAELRVAKKIRDLLTDDLQTVQGQIHNWIDRYFPEFLKVFKKWEGKAALQFLRLGVLPHELIGFSDQDLLNHLRKAVKRSVGLNKIHELKQAANESIGLRQGATMAKLELTTLLDKYDLIQMKFEELDTQIDKLIEHIPGVQQMLAIKGVGRDTVAGFFAEVGDLGDYSHPRQIIKLAGLSLKENTSGKHKGQTKITKRGRKKLRALLFRVCMIMENSAFKALHAYYTQRPDNPLK

SEQ ID NO: 212839 - protein, 346 aa, unidentified
MNVTTVGIDLAKNVFSVHGVDSHGKVVLKKAVSRGKLLECFANLPPAIIGMEACSGAHHWARALRSLGHDARIIAPRFVIPYRKSGKNDGNDAEAICEAVSRPAMRFVPVKSVEQQAVLSLHRIRNTVVAERTAQINQIRGLMSEFGLIMPKGRYPAQHHIPDILEDAENGLPGLARRLLHDIYQRILQLNQQILDYDREIESLARQSEPARRLMSLPGVGAVTATAMVASIADPQQFHNGRQLAAWLGMVPRQYSTGGKTRLGRITKQGDKYLRMLLIHGARSVLAALKDDKQDRVSCWLRDLIERRGYKRAAVALAAKNARIIWAMLSRGEGYRTQASNPLAPA

SEQ ID NO: 212840 - protein, 346 aa, unidentified
MNQIIRIGMDTSKHFFQLHGVDAAERPVLRRKLRRNEMLAFFAKQPPSVVGMEACGASHYWARELRKLGHEVKLMAPQHVKAYIKRNKNDGRDAEGLCEAMSRPTMQFVPVKIEEQQAALMLMGVRQQLMTRRTQLSNAIRGCAAEFGLITAKGLDKVEPLLVRIAQDESLPALAREMFAGQGRDYARLQVDLKAIDARLMAWHRANPDSRRLAKIPGVGPIGASALVMKAPDPRLFPSGRHFAAWIGLTPKDHSTAGKTRIGKITRAGDEMLRSVLVAGATAVIQQAKKGRGRPSPWLVALLARKSPKLAAVALANKTARIAWKLLTTGESYDGARMPVTSALAA

SEQ ID NO: 212841 - protein, 410 aa, unidentified
MSLALPEALFFVGIDWAAEIHAVCVLDPAGQQVAAFPVAHTADGLARLIAVLARLGDPAGIPVAIERPNGRLVDVLLEAGHPVVPVKPNAIKSWRDSEVPSGAKSDAGDAAVIADYLRLRQHKLRTAAPYSDETRALRTVTRTRGDLVDTRVATANQLTALLEAHWPGASVIFADIDSPIALAFLARYPTPAAAAGLGEKRMAAFCAKHGYSGRRTAAELLARLRGAPAGTLDQALTEALRDAVLALVTVLQALGTALRAIGRSVTAHLGEHPDGAIFTSLPRSGQISAAQMLAEWGDCREAYDGPDSIAALAGCTPVTRESGKHRAVHFRWACNKRFRQAMTTFADNSRHASPWAAQIYAAARASGKAHPHAVRILARAWIRVIYRCWLDGVPYDPALHAAAGCLTRVA

SEQ ID NO: 212842 - protein, 435 aa, unidentified
MSQGKRSPSKSKASKSAPQAASRAPREQPVTLAVQHPHAAGIDVHSDMHMVCVPADRASEPVRRFGANTCDLQAIADWLKQCGVTTVALESTGVYWIPLFELLEARGFMVWLVEPGQLSHCGARPKTDVLDCQWIQRLHSYGLLRPSFRPAESILALRGYWRQRQMQIRYAASHVQHMQKALEQMNVKLTEVLADITGLTGRRIIEAILAGERNPHKLAALRDHNCKHNEASIAKALEGTWRPEHLFALQQAYELYRFHHRQIDECDAMIQQELAKLPDRSEGKPFTRKAAKCGRKGNDLRFDACGPLFKALGIDLTEIEGIDVGTALVILAEIGVDVSRFPTEQHFASWLGVCPRVYESNKSQKKKGPRKGKNRVAIALRMAAQALGRTQSPLALFYRRIKSRMSLRAPWERVKTYVITPIWTRVDQALLHWGL

SEQ ID NO: 212843 - protein, 343 aa, unidentified
MNEVITMGVDLAKNVFQVHGVDAEGSVIVRRQLRRGQMLPFFKKQPLCLVGMEACATSHHWGRELRALGHQVRLMPPRYVKPYVKRNKNDMADAEAICEAVTRPTMRFVEIKTVDQQSVLMLHRTRHLFVRQRTMLINALRAHLAEFGIVAGIGRNGLERLLKVIEDDDDARIPSVARDCLLALRAQLELVKHQVLDADRHILAWHRMSEVSQRLDDIPGVGPLIATALVASIPDPHAFKSGRDLAAWIGLVPRQNSTGGKERLGHISKAGNRYLRMLLVVGALSVIRRAKQVGTTRRPWLTKLLERRSTKIAAIALANKNARTAWAMMAQGTCYQEPVSQAA

SEQ ID NO: 212844 - protein, 382 aa, unidentified
MLPTHPRLTSIYETTLFASLELSRSTWLLTALLPGSEKMSKHSLPGGDSAALLSLLGRLQGKALQTCGAGSVSTVIVQEAGLDGFWVHRLLEANGVESHVVDPASVAVPRRQRRAKTDAIDGETLLRTLLAWKRGEPRVCSMVVPPSPDEEDRRRVARERTILLKERVRHVNRVKGLLASQGVTDFEPIRSDRRKQLEVLVTGDGRALPGRLKAELLREIEMIELVLRQIAEVEAERDTLEQQPQQQDGPIAQLTRLKAIGPQFAAVLYLEGLYRSFANRREVAAYAGLVPTPWRSGKIDREQGISKAGNRRLRTTMIELAWMWVRYQPGSALTQWFHDRIGTERGRVKRITIVALARKLLIALWRYVNHGEVPEGATLKTT

SEQ ID NO: 212845 - protein, 345 aa, unidentified
MKLMTVGIDLAKNVFQVHGVDERGKAVLKKQLRRQQVLAFFANVPPCLIGMEACGGAHFWGRRLQAQGHTVRLMAPQFVKPYVKGNKHDAADAEAICEAVSRPSMRFVPIKNIEQQAVLSLHRARQGFVRARTAQANQIRGLLAEYGQIVPQGIHHLARRVPEILEDVSNELPHTFRALLARLLEHLKDLDRQIKELESQITQWHRDNELSRKLAAVPGIGPITASALVATVGDAKNFSSGRQLAAWLGLVPKQESSGGKTVLLGISKRGDAYLRTLLIHGARSVLWAARRRKELVDRWVQGLLERRHANVAAVAMANKIARIVWALLAKGRQYEPEHMSMTVTA

SEQ ID NO: 212846 - protein, 399 aa, unidentified
MAEGVVAGIDWASEVHVACVMDGGGLVTARFSFTHDAAAIRSMVSRLCSAGVAGVAIERGDGPVVEELLDAGLAVFVVPSRQIKGLRTRYGSAGNKDDRFDAYVLADTLRTDGHRWKPLRPDTGPTRALRALCRSRKDLVETRVQVLGQLRANLELAFPGAVGLFTKPSSAISLAFLRRFPTAGKAAWLSPRRLACWLSSAGYTGGVSAGILHGRLTGAAPGLSGAEGEARGQITLAFVVMTAALNEQISVLDAEIGRLFAAHPDQHIFSSLPRSGMIRAATLLAEIGDCRQRFPTDDALAALAGACPSTRQSGKRSQAVFRWSCSKKLRAAVMDFANGSRMGDPWAASVYAAAIGRGCRHPHAIRILARAWLRIIWRCWQDGAAFDPALHRGRQPAAA

SEQ ID NO: 212847 - protein, 281 aa, unidentified
MNKRSKLDFSGQPIYIGLDVHKKSWSVSIFTQHGEYKTFSQPPEAEILSQYLQQHFPGAQYRSVYEAGYCGFWIHDQLKGKGIQNIVANPADIPTRDKERKNKRDRVDCRKLARALRGDEIEGIYTPPRWRLEDRSLIRTRLSMGRKQARCKNQIKSMLLFYGVEIPERREMGHWSRRFIRWIEEIRMERASGDMALQSHLEELCHLRQLIAKLNRAIVALARTEQYRSWISLLKTIPGISTLTAMIVLTELHEITRFGSIDPLCSYVGLIPDTQGSGEKE

SEQ ID NO: 212848 - protein, 386 aa, unidentified
MQTVADRPEAPTAIRTDLGAIFVSLELSRSTWLITSLSPGGGEKMSKHVVRGGDVAGLLERFAQLRKKTQTRTGKVFPFVVIQEAGLDGFWIDRVLQNEGIESHVVDPASIATSRRRRRAKTDRIDGEALVRALLAYKRGEPRVCAMVKAPTPEEEDRRRLCRERKVLIAERVRHVNRVKGLLFSQGISGYEPQRRDRRERLDTLQTGDGHLLPDHLKAQVCRELDRLELLLEQIKAVEAERDVLLAAQQVAAPAAMLLDIKGIGPEFAAILWSEGLFRHFDNRRQVASYAGLAPTPWQSGSVDREQGVSRAGNPRLRTTLIQLAWLWLRHQPKSALALWFEERVRRNGGRHKKTTIVALARKLLVALWKYVTAGVVIEGAVMKAP

SEQ ID NO: 212849 - protein, 312 aa, unidentified
MTEHCYCGIDVAKERLDVQVLPHRQRFSVDNNATGWAELIARLHALPIAAVGIEPSGGYERGIIRTLLAAGLSVRRINPSKLRQFARARGILAKNDRLDAQLIAEYVSIMPTRIVQRAATAERLAEVVTMRRQLCDEHVTIENQAAHVEDAILRRLNKRRLARLKADIHLLDKRMAEIVAADAILAQRYELLTSMRGVGPTLAFTLIALLPELGQMSRKQIAALVGLAPYDFDSGKLKGHRCIYGGRMPVRNVLYMAALSAARYNPILKIFHNRLAATNKKPKVIIVAVMRKMITNLNAMVRDNAAWRPRAA

SEQ ID NO: 212850 - protein, 409 aa, unidentified
MDIVRPRCAGIDIGKRTLTACVITTDARGAPAKQIRTFGTVTSDLLALADWLDAVGVTAVAMESTGSYWKPIWNLLEDRFELLLANAAHLKAVPGRKTDVRDAEWIADLFRHGLLRASFIPPRPERELRELVRYRTTLVRERASEINRLAKVLEGANVKLGSVSTNIGGVSGRAILAALAEGTTDPTVLAELARGRLRRKHDALVEALAGSIGPHQRFLLATQLHHLADLDALIESLDAEVAERLRGVDELIDRLVTIPGIGHRTAETVLVEIGTDMARFGSSRRLASWAGMCPGNYESAGTRHGGRTRRGSPWLRSALVGSARSASRTDTYLGAQYHRLAARRGAKRACVAVGHTILGIIYAVLVTGQPFHDLGPRYFDDRDRARVRRRLTRRLEQLGYAVTLRPDAA

SEQ ID NO: 212851 - protein, 360 aa, unidentified
MTTTMTFAGLDVHARSTHAAAIDVRSGELRRARFGAGSDEVVAWLGGLPQPLRACYEAGPTGFALYREAQAAGIDLCVVAPSKTPRASGDRIKSDRKDAELLARLLLAGQLKSIAVPSVSLEAARHLCRAREQVRQDLMRCRHRVSKLLLLHGRVYPEPTRWTQRHRQWLSRQRFSEPAAELAYLDTLAAVDGLAARKAALDERLSRLAPEGECWPTVARLRCFRGLDTLSALVLCLEVGDFARFDRPARLASWLGLVPALDQSGERRRQGAITKTGSGYARRLLVEAAWHYLRRPRIGATLANRQQGQPAQVLAIAWRAQLRLYRLYERLRARGKPGNVATVAVARELSCFLWAAAVAP

SEQ ID NO: 212852 - protein, 328 aa, unidentified
MNEATLPTLGIDISKDSFHLELSCNHKLRHRKFANRQEGFAELCVWLAKHKVQQVHACLEATGPYSEDLALYLYQHGHRVSVVNPAQIKAFGQSELRRNKDDQPDAGLIRRFCEKQQPAAWTPLPAPVRELQALTRHLENLHETRQQQLNRLEGNKSKGVVKSLRKLVAYLDTEIARTEKQIEDHIDNHPDLQGRCQLLESIPGIGKRTAAKLLAEIDDISQYKSARQVAAYAGLTPKNNRSGTIRGKTRLSKTGNARVRKALFLPAMTAKRYNPIVRSFCQRLANHGKSKMQIIGAAMRKLIHIVFGVLKSGKTFDPNHELLLNSAP

SEQ ID NO: 212853 - protein, 352 aa, unidentified
MRHPKHQSTGKEDLFVGIDLHKHRWHVTIRTMDLELFSASIPGTWEALERVLARYHGHPLQAVYEAGYFGFRLHDRLVDRDIPCIVTPPSLIPQEYGNRVKTDRRDSRKLAHLLAKGLLKRVWVPNEEELYHRQVVRRRRQLVRDRVRTQSRIKAELRFYGVLIEEPRGKWTQIYFENLRRVNFGNRWMQESFNRLLEQYEFLSAQIDKQTQLLRELSETELYQERVKILQSIPGVGVISAMELLLELQDVSRFRKAEQLAAYVGLTPSQYCSADKVRMGRITGIGKNTLRAILVEASWKLITKDQVMREKYDRIKIRSGGKRAIVAIARTLLLRMRRMLLDKQAYALQLAA

SEQ ID NO: 212854 - protein, 415 aa, unidentified
MFTSRKEACDVLRRIGRSRVEILDCNGKLFKRTEVKGRWPLLIEELKKVPKPFSICYEASCGYGHLYEQFSKLAQEVKVAHPGALAWIFKSKRKHNRIDAIKLAKLLFLDEVPAVHVPSAMVRTWRQTIEFRQKLLRSRVMAKNQLRAFLRERGIAAPKNLWTRKSQAWLKTLELEEGEAIRRDLLLDQLEESDQKVKRVDKYLNKIAANHPGVTLLKTIPGVGPRTAEALVAYIDDARRFAGLKRAGAYFGLVPCQDASADKNRLGHITRDGPGTVRKLLCEAAWTGVRCSPTIRSYYQRLTHDDPDRKKIAIVAVAHHLVRVAVSMLKTGQCWKESTKEDSPPNTHRGGGENPSRPQGFSPPPVTGDCSQQASPPPPLSASPSSPEAAEGQGSQRDRLSHEEQPVERPETVGA

SEQ ID NO: 212855 - protein, 362 aa, unidentified
MRIIGCDLHARQQTLAMLDTTTGEVVAMILTHEGDNVREFYSALPRPVRVGIEATGSMQWFVNLMEELGMECLVGHPAQIRAAEPRKQKHDRRDADLILKLLMENRFPAIWLPSKELQDLRSLLRHRHQWVRMRTRIQNALQSIALANGLRRGPALWSHDGQSRIASLSLAPHTAYRRSELQAMYKQFEAEIEKLNQRVEQQASQRPGARLLMTHPGVGPITALATEVFLGNPARFADSKALASYVGMIPREYSSGGRQRLGGLSKQGNPLLRFLWGEAGAHAARQDPELQRFYRRKLVQKGLGKASVAVARKLGIRLWIMLRDQIEYHEFCRRGQKQQKSSGACAGMPETPYGAKSHRPVD

SEQ ID NO: 212856 - protein, 443 aa, unidentified
MDQAWPLINPNAAGVDLGSREHWVAVPADRAQQNVRCFGTFTSDLEALADWLKACGVTSVAMEATGVYWIPLFQLLERRGLAVLLVNARQIKNVSGRKSDVLDCQWIQRLHTYGLLGGSFRPADPYCVVRSYLRYRDELVTARSTQTQHRQKALQQMNLQLNQVLYDVNGLSGLAIIEAILQGQRNPLQLAALADRRVKSTQSQMAKALIGDYRAEHLFQLQTAFDLYHTYEAKIATCDEELARVLVKLPDRVDVKLKPLPDKTSRKKMDEDLRLGLYLKLGIDLTAIEGIGPLVALTVLTEVGPDLSRFKTEKHFTSWLGLCPDNRISGGKVLSCRTRRVVNRLSDVLRLAATTLERSQTALGAYYRRMKAKLGAAEGITAMAHKLARILYRLLTHGEAYVRQGMADYEEKYQARKLKSLQKIAESIGFELIQKQTVAEVVS

SEQ ID NO: 212857 - protein, 451 aa, unidentified
MMKSKRLSPERDFVPTHPNAAAIDIGSRMHVAAVPPDRDPVPVRSFGTCTGDLKQLADWFERCGVRTVAMESTGVYWIPAYELLEQRGFEVVLVNARDAKHVPGRKTDVSDAQWLRRLHEYGLLRASFRPKGELAALRAYLRQRERLLDYSASHIQHMQKALMQMNVQLHHVVTDVTGETGMGIIRAVVAGERDPAVLATHRDRRCHASEQEIAAALAGNWREEHVFALGQALELYDAYHTKVVECDLRIEIVLRRLRDAAAKPAGRLPPARHRDKTANAPTFDARAALHAVLGVDLTQIHGLGPSLALKLIGECGTDLSAWPNAKHFTSWLCLAPANKISGGKVLSTRTRRSGSRAAALLRLAAVTVGRTQTALGAFYRRLSARVGKAKAVTATARKIATLFYNALRHGIDYADPGASYYEDRYRARVLANLRRRAKSLGYMLHEMPAPG

SEQ ID NO: 212858 - protein, 345 aa, unidentified
MSEVYAGQQFVGIDLHRRRSVLVRMSATGEHLETVRILNDRDSLAEVMSRAGESPEVVLEATYGWYWAADALAELGATVHLAHPLGVKAFSYRRVKNDQRDAADLADLLRMGRLPHAWISPPETRELRELVRHRAKLVAMRSQCKAHVHAVLAKGGIWVPMSDLFGVEGNLLLDKVRMPAPYKERIASLRRFIEGFDAEIDLFTALVQRRLTHDAGYSAVQQIPGIGPVLAAVFVAEIGDVHRFDGPAKLTCWAGLTPRHHESDTTVHRGHITKQGSRLVRWAAIESVKILPETSRIGAIRDKVAHRRGNRNIGAVAAARRQLELVFYGLRDHHVRALHRLPRAA

SEQ ID NO: 212859 - protein, 351 aa, unidentified
MLIIGCDYHPSVQQIAFVDLETGETGERQLLHKDGEAERFYRDLKLRGISVRVGIEATGHARWFERLLAELGFELWIGDPAQIKAARVRKQKTDRQDAQLLLKLLVEERFPRIWIPSPENRDVRQLLWHRHRLVQMRTRVMNQLQAVAMNEGVRRKKALWSKSGRAQLESFVLSPWASRRRQDLLEVLDRLNPTIDELSTAVEQEAKKRPEVLRLMTHPGVGALTGLAFVLIIGSAERFACGKQIGSYLGLIPCEDSSANRQRLGHISKQGNTLLRFLLVEAAQAAVRGDAEWRRKYVHLAMRRDPRIAKVAMARKLAVSLFWMWRKEWNYEQVIKFGSHAGLSDYVHGVK

SEQ ID NO: 212860 - protein, 374 aa, unidentified
MSSNVCHQIIHLAIELSSSSWVIAYRVPRNDKAKLHRLEAGDGAGLLAFIAGLRHRLDPPDDASTLVVSCFEAGRDGFWLHRLLTAHGVINHIVEPTSILVTRGARRAKTDRLDAVGLLRVLAARFAGDPGACRTVVVPSVEEEDAKRPHREREFLVQERVRIENRIAALLATQGVRERPSLRSWDADMRALRTGDSRPLPTHLVAELNRLRRRLLLTLEMIRELDAVREQALETQHDSASRTVKALCTIRGIGVNFASVLTREVFYRTFDNRRQIASYLGLAPTPFQSGGMDRDRRINRAGNSRARKTLVQLAWLWLRYQPESSHAAWFRDRVGSLQGRIRRITIVALARKLLIAIWRFVTLGLAPEGAIIAA

SEQ ID NO: 212861 - protein, 343 aa, unidentified
MQTITTIGLDIAKSVFQVHGVDAGGQVVMRRQLKRRYVLAFFEKLSPCLVGIEACASSHYWSRALHALGHTVRLMPPAYVKPYVKRQKNDSTDAEAICEAVTRPNMRFVPTKTVEQQSCLMLHRARHLFIRQQTAVINSIRAYLAEFGIVAPVGRRGVEQLLEVVADPADRRLPEVARACLAALGSQLRALKAQILEFDRRILAWHRSSTTSKRLDAIPGVGPALATALVASIADPRAFRSGRDFSAWVGLVPKQNSSGGKDKLGSISKQGDRYLRSLFTAGALAVIRYAKIHGTGHRPWLTGLLARRPTKVAAIALANKLARMAWAMMARGERYREPATLAA

SEQ ID NO: 212862 - protein, 345 aa, unidentified
MVMIGIDPHKGTHTAVAIDPMEQVLGERLVRATNRQVPELMEWAKHLDGGDRIWAIESAGGLGYLLAQQLLAAGETVVDIPATLASRVRLLGTGRSDKNDPNDARSVAIAALRAPELMPVRVEDHASVLRLLSRRSTQLAWTYNKAACRLHALVAELVPGGIGKEVVVCQARSLLEQHRPVGAVAVERHLLAVDLVDELDRLAGQRKALRQRISHAVAASGTTLVDIFGIGDVVAAIIVGQVGDIARFRTADRFAAYNGTAPIEWSSGNPKRPIHRLSRRGNRILNHAIHIAALTQLRHRHSPGREFYDRKRSQGHTGRAALRSLKRRLSDVIYRHLVADATRRC

SEQ ID NO: 212863 - protein, 347 aa, unidentified
MKGAVHMQITTIGLDIAKNVFQVHGIDAAEKVIVRKQLRRGQVIGFFEALAPCLVGMEACATSHHWARELTKLGHEVRLMPAKDVKAYVKRNKNDAADAEAICEAVRRPTMRFVRIKSAEQQGQLMLHRARDLLMRQRTQLINALRAHLAEFGITAAQGREGIKELLAIVAQDEGSRLPVDAHASLTVLAAQLHAVQTMIGSIEKRIVAQHRSNEASKRLETIPGIGVIGATTITAVVTDPKAFRSGRDFAAWIGIVPRQDSTGGKQKLGPISKQGDQYLRRILIVGAHSVLRRARQQPEKYPWLTQLLARRPFKVVAVALANKMARIAWALLARGGTYRAPQLVAA

SEQ ID NO: 212864 - protein, 369 aa, unidentified
MSNGMRWVAPEVRAAQTTGCTVLDGSSAEGPGAIVIGLDQHRAQITAEWIDTTSGEVGRARIAPAHREGVRRFLRRFAGLRVEAALEATTGWRFVVEELRAIGAAVHLAEPAETSARRGNKKRAKTDRADARHLRELLMAGRLPESWIAPDHLLDLRARVRLRHALVNQRGESQQRIHSVLYHHGHPQRRDLLTREHRAWVEQAALPATAREQITVALALIDALDLQLAPIDRELRAYARRQAGCRALMTHYGIGARIAGVILAELGDARRFSSSREAVRYAGLDITVHQSDQRRAPGHLSRRGPPALRWALFEAAQHARRTTSPDRAYYTQAAERLGGNRACLAVARKLLKRSYHTLRELGEEAMAPA

SEQ ID NO: 212865 - protein, 393 aa, unidentified
MKARSGAQRWHVRSAGKWLSSPALMQNTIVHHEGAASLETARTKIKLCASIIKIGLDVHARIYVAVAQYDQLLPKPARRLTPSEFVAWVEALLRAGHTVHVVYEACGFGFNLYRGLKALGAHCYVIAPRQLDEQCTRIKTDPRDATTLCQRLSRYVEGNTRELAVIRVPSEQEELDRHVSRQREQLVRHRQKLEAQGRSLLINHALPTPAHWWKQQTLEPIGKHLPAWIRLRLEVARPALLSLQEQINALTSELEAAAPASIPAGLGKLTSVVLTREICNWHRFHNRRTISSYTGLCPGERSSGSKRVPGSVTKRGNPRLRAALVECAWRMVRFQPNYPPVKKRLGVVAKGARATGAQRKKAIVAVARRLAVDLWRVHTGRCSAQQLGLNISN

SEQ ID NO: 212866 - protein, 411 aa, unidentified
METVVERPAALDVHKEQVTVCARTPGERGGRREQHVAEFKTTVRGLLALRDWLKAHGVTHVAMEASGVYWKPPWAILEDEFECLLVNARHVKQVPGRKTDVSDAAWLCQLLEAGLLKASFVPPKPIRTLRNLTRYRKAQIGERQREANRLHKILEDTGIKLDCVATNILGVSGRLMLDALVAGTTDPAVLAELAKGKLRQKLPALREALEGRFDAEHGIVVSAILAHIDFLDEQIDGLSDAIEEQIRPFAGAVELLCTIPGVQTRTAEVIVAEIGADMSVFPTAGHLASWAGLCPGNDESAGKRRSGRTRKGSRWLAIALTEAAQANTRSRDTYLAAQYRRLRIRRGHRRAIGAVRHSIIIACWHMLTTGEIYNDAGGDYFARIDPDKQTRRLVAQLERLGHIVTLQEAAA

SEQ ID NO: 212867 - protein, 425 aa, unidentified
MYCKQNQKINQVKKCTLVVGIDIGSTTHYARAFDWRGIELGNVFKFSNSLEGFQSLSGWMQRIMKKTEKSEVMVGIEPTGHYWFDLGAYLENGGILLVMVNPYAVKQTKELDDNSQSKNDRKDPKVIAKLVTEGRYSLPYTPQGVYADLRVMVTNRQRLIREITQIKNRFARWFAIYFPEYKEVFGDYESQSSMLVLRRACTPEKIIELGIAGINQIWRDAKLRAVGIKRATTLYETAQHSIGLKNGRNAAEYEMKLLLQDYDYKQAQYESVMEKLEHLCRQIPESEQMLAIKGIGLITVAGFLAEVGDLRRFESPRQIQKLAGLSLKENSSGKHKGQTTISKRGRSRLRAILFNAVIPLIATNAEFRELHRYYTTRTVNPLKKKQSVIAISCKLIRVFYAILTKGAIYDGEKMLSDIHRNPQIA

SEQ ID NO: 212868 - protein, 444 aa, unidentified
MIRKVMDAIYQCVAGLDVHQETVVACRRRLLGNGQAELEIRTFKTTSADLRELAKWLLEWNVTHVAMESTGIYWVPVWNVLEGQFKLTLANAQHLKKVPGRKDDQGDAEWIAQCMQCGLLCGSFVPPAEVRQWRHLTRQRVKLIDQRTGVINRIHSVLEQGNIKLSNVASNIMGVSGRAMIKAMSNGESDPAKLAALSQGRLKADFEQLVAALDGQLNENQRWLLKRLLGQVKTLENEIAIYSERIAEQMRPYQTQLERLDTIGGIGQRSAENLLAEIGPDMSPFPTDDQLVSWGGLCPGKNQSGGKNRSGKTPQGNKWLKRTLTEAAWAAKLKKGSYLAALYHRLAPRRGKKRAIMAVARTILQSAWHVLKEEVDYKELGGDYLDRLNEEKTTKYFVKRLEKFGYEVELRPKKDKPAKAELKPKPAKKVTVRRKPKPVKEATV

SEQ ID NO: 212869 - protein, 344 aa, unidentified
MKLFIGLDVSLAKTAVCALNEHGKIVKEAQVASDPAVIAHFAGGLDGEVATIGLEAGPLSQWLHRGLADAGADVVLMETRQVKGALKAMPIKTDRRDAEGIARLLHLGWFRPVHCKSVSAQEVRALLGARKAIQQSMIAIEMSLRGLLRNFGLQVGQIPRGRFEVRVRELVEGNAMLEAASAPMLRARDGLRRELAGLERVVRTLAKDDLVCRRLMTMPGIGAVVALTYRSAVDDPSRFTSSKKVGPWVGLTPSRHQSGERDVSGGITRAGDANLRRALCQAATVLMHRGPASWLRSWAVQVLRRRGTKRAMVALARRIGTILHRMWSDGTDFRLDATPERVAA

SEQ ID NO: 212870 - protein, 382 aa, unidentified
MQTIDTVNPTILLAIELSASTWLVAARVPGLEKPHLHRIDGGDTAALLALISSLRARAARGLDATIGVVCCFEAGRDGFWLHRLLTAHGVACHVLEPTSILVNRRARRAKTDRLDAEGMLRVLAAYLRGDHQACSMVRVPTPEEEDAKRTHREREKLVQERLRIENRIEALLFTQGIRKRPSLRSWERDLAVLRTGDGREIPRHLRAELGRLRRRLVMTLELIREVEAERDQAANTKPQDQTCHKIANLCRIRGIGENFAAVLTREVFYRSFDNRRQIASYVGITPMPYQSGGMDRDRRISRAGNPRARTTMIQLAWLWLRYQPGSELAEWFRERVGTLAGRTRRIAIVAMARKLLIALWRYAETGVIPAGAEIRAETTVAA

SEQ ID NO: 212871 - protein, 344 aa, unidentified
MSEVITIGLDIAKYVFHAHGVDGRGRALFSKRISRGKVLEFFAAQPSCTVALEACGGAHHWARQLTQLGHQVRLIPPAYVKPFVKRQKNDAIDAEAICEAAQRPSMRFVAVKSEEQQAAGLLFRTRDLLVRQRTQLINAIRGHLTEYGWIAPNGPSHMARLADLIEEEEMVSSLPEAAHAMFRLMLDLLASLNGKIADLDKEIARRAREDEVSRRLMTIPGIGPISATAIAALAPPAETFAKGRDFAAWLGLTPLQRSTGGKQKLGGTSKMGERTLRRLLIIGSSAVVQQASKRGAPEGSWLEQMLARKPRMLVTVALANKMARVVWALLVKQENYRAPVAAKA

SEQ ID NO: 212872 - protein, 414 aa, unidentified
MKTYILRDPHAVEPQTARFAQPPDRATDALVERSLPAGRGPVLYLGLDVHTASIAVSLAPSDSSEVRRYGMIGGTHDDVLRLARKLQAAHPDTELRFCYEAGPHGYPLGRALRTHGYDCILVAPSKVPRQPGDRVKTNRRDADQLARLFRAGELTAIYVPDPQDEAVRDLIRARYQVLKQQHRARQQLKMFLLRHNFRYAGTKAWTAAHLRYLATVKLPFAEQQFVFQEMVNVISEAGQRLERYEAQLPRVVPGWRWAPVVKALMSLRGVALLTAATLVAELGDLHRFATARQLMGYLGLVPSEDSTGDQRKQGGITKMGNGIARRALIEAAWNYRTPARLSRELLKRQEGLSKEVKAISWGAQTRLHHRYKHLTAVKHKKSQVAAAALGRELSGFVWALGQIVAPHAPKPVAA

SEQ ID NO: 212873 - protein, 346 aa, unidentified
MWIIGCDFHPRFQQVAFVNTETGECGNRRLEHGNGEAERFYGALRGQVVRVGMEAGGHSLWFERLLGKLGYELWTGDPAQIRAKRVRKQRNDVLDADHILGLLVEKQGEGFPRVWRPTLAERDIRQLVLHRHRLVQIRTRVKNQLQALAMNQQMCQKQKLWSKSGRAQFEALALPEWAARRRQDNLELLDELNRRTEPLDQAVKLQAAQRAEVARLMTHPGVGEVTALAYAMTIGDPRRFHCGKQLASYLGLIPSEDSSGGKQRLGHITKQGNALLRGLLVEAAHVAVRHEAELGRCYRRLAMKKNCSIAAVAVARKLAVRLWLMWIRGLDYGQMFFESGSHAGQA

SEQ ID NO: 212874 - protein, 355 aa, unidentified
MNQEKYIGMDVHQATISVAVMDSSGKLIMECILETKAATILEFIAGLRGTLSVTFEEGTSAAWLHDLLKPHVSHLVVCDPRRNALLKDGSKSDRIDARKLAELLHGNKLHAVYHGEHGVRTLKELGRSYLTITKDLTRVMSRIKALYRSWAIPCSGATVYAPRHRAEWLAKILEPGVRLRAERLYQQLDLLQPVRQEARRDLLVESHKHHAVKLLRQIPAIGPIRAALLVALLQTPHRFRTKRQLWAYSGFAVETHDSGEYRFVRGKLVRNRERITVRGLNHNHNHDLKNLFKGAAISASTRPGPLCDFYVALVEKGMRPTMARLTLARKMAAITLTIWKKGVEFDAKQLHRQAA

SEQ ID NO: 212875 - protein, 314 aa, unidentified
MAQFITAAGIDVSKAWLDVALWPDDAALLHIERSEAGCFDRLAAWLREHGVSRVGLEASGGYETEVMDALQARGFEVIRYNAYRIRMFAKANGRLAKNDRADAGILAHAAGVLPVKHARARQPQLDPLVELLNYRRRLQDWIGDCTNQLEHLRDKVLRRQTTARRAKLHREVTAIDKQLAATLAASGASRELVQRLRNVPGVGPVLSAALVALLPELGTLSRRKVASLVGVAPFDNDSGNRRGERHIQGGRARLRRILYMATLSATQHNPVIAAFAKRLAGKEPKVIITACMRKLLVILNAMVRDAKDWSPNAA

SEQ ID NO: 212876 - protein, 339 aa, unidentified
MTVQTVGLDLAKDVFQVHGISENGRVIFNRAIKRAKLLAFFERLPPCLVGMEACGSSHHWGRQLRKLGHDVKLMPAGYVKPYVKRGKSDAVDAEAICEAVWRPTMRFVEIKTEDQQAILAIHRTRDLAVWQRTQLANMIRSLLREFGHILPIGIEAVAAFAKRHLDGDHPDMPEIANGLLGVQCYQFLGLNERISGYSKMIEQHAMLSADARRLMRMPGIGPITASAIVATIGDAKQFRTGRDLAAWLGLTPLNKSSGGKERLGKITKQGDRYIRKLLVVGMTSRAVMAKRSPQKVDLWTAKILTDKPFRLATVAMANKAARAIWAMLTKKQEYRQPAF

SEQ ID NO: 212877 - protein, 315 aa, unidentified
MTISRKSRSVVNVGVDVGKEMLDICIHEKEVHWQEPNTPEGVRSLLNRLAHYQVERLVMEATGRYQFLLAEQAYVKEIPVCIMKPLSIRRYAGAIEQLAKTDKIDARVIAEFAAVIKPRPTPAKSKKLILIKDLLARRRQVMEMRTQELNRLQVMGKHLAASCKRLLNHLDKEVARIEAMLDEQVDAEDEWAEKRELLKSAPGIGNTMVYTLLADLPELGTMSNKQAAALVGVAPINRDSGKIRGKRRVYGGRAGVRTTLYMATLSATQCNPVIREFYQRLVAMGKHKKVAITACMRKFIVILNAMLRDNMAWQS

SEQ ID NO: 212878 - protein, 406 aa, unidentified
MIFAAIDWAEQSHTLLVMDAEGTTLAKASLEHGHNGLSELDVVLTGYAHHPEEVAVAIELNEGLLLDWLLDKGYRVYGINPKSAERARDRYTPAGLKDDARDAWSLAEFVRTSHQHLRPLRPESEHTTSLRAWVRLREDLMQDRTVQLQRLRSHLAMWNPHLLRAVQDLNAQWALDLLEQCPTADEFARLTCSDIKAFAHKRRMRSITQDRVLTQATFHSPSRRPARNAAHAAEVRHRVAAIRHLNGRIEEIDETLAGLIEHHPDANIFRSLPVSGTVTTATLLAGFGEDRDRWTGHEEVAARWGAAPVTQQSGRHRVVKRRRARDRTIHQAWLWFSFNTIRREDCWARAYYQEKRQSGTNHYTALRCTAQRWIKITYRLWRDRAAYDEQIHQARRAERQQPRTRK

SEQ ID NO: 212879 - protein, 355 aa, unidentified
MNSTKYIGMDVHRESISIAVLNSAGKIVLQCVIETKASIILQFIDGLRGDLHVTFEEGTWAAWLYDLLKPHVTKLVVCDPRKNASMKQGNKSDKIDARRLAELLRLNHLNPVYHGEHGLRSLKELVRSYLTITKDVGRVMSRVKAIYRSWGIACTGKQVYAPQHRAEWLAKITEPGVRRRAEFYYQQLDALRSLRREVRRELLEESKKHQAWKLLCQIPSIGPIRAAVLLGILQTPHRFRTKRQLWTFGGLGIETYSSADHRYVEGQLQRSKKPASIRGLNTNCNHDLKNLLKGAAIIASTKPGPFQEFYTALLAKGMRPEMARLTLARKIATIVLIVWKRGASFDAQHLKPQTA

SEQ ID NO: 212880 - protein, 413 aa, unidentified
MVAFFCGVDWSESGHDVAVVDAAGTVVARARIEESPAGVKELLRLLAGLRTSHRHGRKQVSIAIETSRGLLVAALRAAGQPVVAINPTVVARYRGRLNPTRKKADVTDAVLLANILRTDAHLHRRLWTPSPQGAAITVLARAHTDAGRRRHQLRFKLRSALREYYPAALEAWKGLPDDLLRGEARAVLALAPTPRRAARLSVGQLADALAQGGRTRLVHDHAGRLHELFRRPQLRQPDAVEEAMGAAMLARLALLNQACHTLDDLAVQVTEAFDAHPQAPIYRSFPGCGPIIGARLLAEIGDDPDRFITARGLLAYAGAAPLTWASGASSVVTHRRIANRALKATGHVWAFAALTRSLGARAHYDRRREAGDRYAAALRHLNGRLLRCLHHCLSTGELYREERAFPRGVSVDE

SEQ ID NO: 212881 - protein, 431 aa, unidentified
MKGGDFMKNNFMSTLFVGIDVSSKTNVLCALDFQGNKLLKLQALNNQPGAESILDSIIDCLNSNNLKYVVIALESTSFYSTHIANFLSSNEDLMFYKPLVYCLNPKSVANYRKSFVDMDKTDPLDAYVIADFARVGRIACQPWRGAQFLALQRLSRHRLHLVECITREKAYMVSNIYLKFSELAVLDKDNKPFSNTYGTTSAAVLTEFLSLDDITYSSIEDLVAFVSTKGKNRFSNPIETAKLLQKAARDSYRLDKVLYEPLNTSISSSFNVIKAFDDEIKTIDKAIKKTIKGLNTTEYQSLSSIPGIGPVLASGILAEIGTITSFNSHDALAKYAGLTWRVNQSGNYSADDTRMTKTGNKYLRYYLIEAANSVKNNIPEYRDFYSKKYGEVTTHCHKRALALTSRKLVRLIFGLLTKNQIYSSDKVGDIQ

SEQ ID NO: 212882 - protein, 468 aa, unidentified
MRTAKTLWQNRKEKKEWTRRLQSEDPGLEVVHPHAAGIDVGNSAHYVAVRPDRDPEPVRRFECFTADLYRLSDWLKSCGVNTIALQSTGVYWIPLYDILEERGFEVYLVNARHTKNLPGRKSDVQESQWLLKLHTYGLLNNSFCPPSAIRTLRTYWRQRAEHVEGAATCILRMQKALTQMNLQLANVISDLSGVTGQKIVRAIVAGERDPRKLAELRDARIQASQEEIAKSLEGNWRPELVFVLKQEVDIYDTYQQRIAECDQQLQKHLATFANNATPGQPPSPKGEPKKKKKKPTQNAPAFDLSHELERISGVDLTRIDGIEVMVAQTILSEVGLDMGRWKTEAHFSSWLGLCPDNRISGDRVLRRGTRRVINRAATALRMAATTLIRSRSYLGAQYRRLRSKLGAPKAITAMAHRLARLVYRMLKYGQQYVDKGMEYHDQRYRNQQIHLLQKKAAQLGLQLVPALA

SEQ ID NO: 212883 - protein, 440 aa, unidentified
MNEHRSSPILCIGIDIGKRRHVVGFVSQALLMRYGRFDACPTDRLEPTAQSLETLLARIEQHIPLERCAFLLEHTGHYHRTLEQALLGRGLDVYIIAVHARHTYADKNDRADSLRLANLLYSQLVLGVQEIDPTARIRKLHPPSPTAAELSYLVRRRHEIIQDCTRRKNKLTAIVDELFPEFTSVFRNPNLPQALAVREAFPCPAALAAASSDQLCQVSEKVRPAKLRKLQDLAATSLGTTDPHRQAGLILEQRQLIIELKMLEQHREVIDQTITRAVETSREGQILLSFRGCLGPPSAAIILAAIGSIQNFETAAQLKKFCGWAPQSTQTGISLDRMALTKAGARLLKQTVFLAALHAIRLDGEWKQLYERLVPLKCTYDARTGTYKGRMRVVGRICGDFIERIYILLKRDAELLAATPAGEQPKAPQLYDPDHRQGRG

SEQ ID NO: 212884 - protein, 427 aa, unidentified
MCYEDDSRLEEFRQFRKEVRGSKDYLIVGIDIAKEKHHAFFGTATGKTLLRRLIFDNTIEGFLKLLDQTEAIQSSYKLKKVVFGMEPTANYHKPLGEHLIRCGRMVVLVGGVAVKRNRELLDGRWDKHDDKDAANVADLISQGKCLFYECPAMEIRDLRHLLSLKRKLRKQEHGYRVRIRNQLIAQYFPELDQYSGYPETEAIVRWCLDPSRIAGFENDQFETMVSSGRKTLVKKKRLDDIQKLAIASIGCEMGEGAGFDAKIMVEGLRHIREAIQDTENKIEETCKQFPEYDYLLTIPGFGPDVSAKVLGALGNPHRFFNQQQVLKMAGLDLGADRSGKTSQNAVPVISKQGKADLRYALYQAAFVAASRNKEFMFYFAKQLQGREKEKGIKTKRFVKLSAKFLVIAWTLMKKQEVFDIKYLKQIE

SEQ ID NO: 212885 - protein, 329 aa, unidentified
MKIQHIIGADLSKKSIDLVCHLQNIHFQIGNSIEGFKDLIKWMRQQKINPSKTMIVMEHTGLYSYCFEQFLHQHQIAFCKVNALAIKRSMGLVRGKTDKLDAARIAAYGYEKKDRLAVDVQASDALKRLQMLHSTRERLVKQRASLTCAIKEYRYIGIPEKDVIMQTQVQLIKNFNRQIERLMAEIESTINEQEPLKQNFNLLQSIKGVGKILALTAIIKTRNFTRFANARKFACFCGTAPFEHSSGTSIRKKSRISHLADKQMKTLLDLSAKSAIQYDKELREYYLKRTEAGKPKMSTINVVRNKILYRMFAVIKRQTPFLENYLQAA

SEQ ID NO: 212886 - protein, 407 aa, unidentified
MRYYIGVDWADEEDAVWVVNDAGDKMLSRRFAHTVAARSEWARWLRERQAEGIELWAAIERPHGRIVDFLLDHGVVVYPINPKSLDRARDRFRVGGSKSDPFDAKVLALFLRSDHLQLRPLRPNSEAAQELQGLTRDYRRQVHLQTRLLNQLTATLKEYYPRALELGEDLTAGWAQAFLARYPTPAAAAALTEPDWRAFAHAHRLSPTRTAALWQTLQQPQLPLPAHVVRLKARLLQALLRELAPTLATIAEYRQAIDDFFATMPTAEIARSLPVGKSGTTVPTVWAELGDHADRWASFRHLQAYAGSVPETDCSGKHHVVKFRFACNTTLRDAMHQLAFLSLPHSLWARAYYDRYRERGHTHHQALRALGAKWLKIIFVLWKRQVPYSETHHLATMARQHLHQTAA

SEQ ID NO: 212887 - protein, 400 aa, unidentified
MNAVGIDVSKGKSMVAILRPYGELIEAPFEVKHTSSGVQSLIQTIQSIDGESRIVMEHTGRYYEPLFCQLTQAGLFVTAVNPKLIKDFGTNSLRKVKSDKVDAIKIAKYALDSWSDLKQYSVMDKIRKQLKTMNRQLDFYMKHKTSMKNNFIGLLDQTFPGVNNYFRSPAREDGSQKWVDFATTYWHVDCVRNMSRSAFINHYQNWCKRKEYNFRQSKAEEIYETAKELVPVLPKDNVTKFIVKQAARQLADASETVAQLKAKMNEAASKLPEYPVVMAMYGVGSSLGPQLMAEIGDVSRFTHKGALTAFAGVDPGVNESGSYEQKSVHVSKRGSAQLRKTLFQVMDCLIKNMPQDDPVYRFMDKKRTEGKPYYVYMTAGANKFLRIYYGRVKEYLLSLQ

SEQ ID NO: 212888 - protein, 402 aa, unidentified
MVSVGIDVSKGKSMVCMLRAYGEVVASPYEVVHTEQSIRELVDRIRSLEGEVRVVMEATGAYHLPLVEKLKKEGIFVSIINPLVMKKYASSSIRKGKTDKMDSLRIANYGIDNWFKLNDHVLSEDTRAELYILGRQYAHYIAVKVSCVLSLTNLLDRTMPGIKRFISGNYSVTSEKDKLCDFVAEYQHFDRITGMGEKRFVNSYVRWAKKKGYHPSEAKAEAIFALASEGIPTLPSSQQSTKIVTLESVRVLREVCKTLNTILSQMQTLSQTLPEYEIVRAMNGVGDKLAPRLIAEIGDVRRFRCGSCLVAYAGIDSPPFQSGAFTGTRRKISKRGSSLLRKTGYEVMNCLKTSKPVKDNAVYLFMLKKEAEGKAKKAAKIAALNKFLRIYYARVMEIYTEA

SEQ ID NO: 212889 - protein, 346 aa, unidentified
MDKFDACGIEVSAQELVVALCRDGRAERLRSFPNTAEGHAAICRYLTSGSPGVRVAMESTGLYGLDLAYALRQEAQIEVMVANPRVVRSFASALMQRSKNDRLDAVVLREFAARMPFQAWVAPSLPCFALCAVSRRLETLTEQCTAEKNRQHAASVTVAIPAAVRRDLQRSVRSIQRAIVRLTKEAQRILEQDPVLKSSYHLLLTAKGIGPTSALRLLAETALLSEDLDARQWVAYAGLDPRECQSGSSVHKRVRISKTGNRHLRRALYMPTLVAVRHEPHLRAFYRHLLARGKCKMQALVAAMRKLLHAVYGMLKNRQPYDGAKLYRLSETLPALPCAHHSAEAA

SEQ ID NO: 212890 - protein, 362 aa, unidentified
MRIIGCDLHARQQTLAMLDTTTGEVVEVTLKHEGDNVREFYSLLPRPVRVGIEATGSMQWFLNLMEELGIECQVGHPAQIRASAPRKQKNDRRDAELILKMLVEGRFPAIWLPSKELQDLRSLLRHRHQWVRMRTRIQNALQSIALANGLRRGTALWSHDGQSRIASLPLAPHTAYRRSELQAMYEKFEAEIEKLNQRVEEQACKSPGARRLMTHPGVGPITALATEVFLGDPARFADSKALSSYVGMIPREYSSGGRQRLGGLSKQGNPLLRFLWGEAGAHAARKDPELQRFYRRKLVQKGLGKASVAVARKLGIRLWIMLRDQIEYNEFCRRGQKQQKSSDACVGMPETRYGAKSHRPID

SEQ ID NO: 212891 - protein, 356 aa, unidentified
MSEKLNSAIAVIGIDIGKNSFHVVGHDRRGAIVLRQKWSRGQVETRLANLPPCLIGMEACVGAHHLSRKLQLLGHDARLMPAKYVRPYSKGQKNDFRDAEAITEAVQRPTMKFVATKTAEQLDLQALHCVRERLVSQRTGVINQIRAFLLERGIAVRQGLRFLRAELPGILAKRSDVLSPRMLRVIEDLAGDWRRLDERIEGLSGEIEALAQQDQACVRLMTVPGIGPIISSAMVAAIGTGDVFCKGRDFGAWLGLVPKQISTGDRTILGSISKRGNRYLRALFVQAAWVVLVKLGPKHWERFGLKSWIEAAKKRLHHNVLAIALANKLARIAWAVLNKGRAFACVKTDAMASRPA

SEQ ID NO: 212892 - protein, 329 aa, unidentified
MKITAIGLDLAKNVFQVHGVDERGHALVKKTLKRAQLAAFFASVPACLVGMEACSGAHFWARKLQGFGHTVRLISPQFVRPYVKSNKTDAADAAAICEAVTRPDMRFVPIKSIESQGLLVLHRARQGFIRSRVAQTNQVRGFLAEFGIIIPQDAENALPGTVRELLLQLVAHVRYAHEQEQLLEARIKRWHKDNEASSRLAQIPGIGPLTASALVASIGDVSAFRNGRQLAAWLGLVPRQHSTGGKAHLLGISRRGDSYLRTLLTHGARSVIICAKQKPGYEQSWLGRLLKRKHHNVVVCALANHNARVVWALLKHDRQYRADFSPQAA

SEQ ID NO: 212893 - protein, 337 aa, unidentified
MKRYLGVDLHRTQITVCTRLENGRTYMRQWPMRELKPFVAQLRQEDEIAVEATGNTRLFYDAVVKHVARVVVVNPSQFKVISQSVKKTDHHDAELLALYLSKGLLPEVRMKDQQHRSLSHLAQTRDLLVKQRSALKGKINNLLSAEGINLKREALSSKKALNRVLTLPLSPILVIELRVLVEQIQSLTGSIAELEELIEEEGPKLAGHKNLISIKGVGPVSATILLSSIGKIEDFADPGKLAAYFGLVPRVQNSNETERSGRITKQGNKLARTALVQCSLVAKKYSPYLQNFYQRIQRRRGGGKAIIALARKFLGVIFHTLKNNWVFEDFPNFVLAS

SEQ ID NO: 212894 - protein, 369 aa, unidentified
MTKSITYVGFDVHKNSIDVALADAGRESEIRYYGTINGDLASLDKVIRKLVSRGTRPSFVYEAGPCGYEIYRHLTQQGYDCKVVAPSLIPRKSGDRIKNDRRDAEMLARLHRAGELTPVYVPCLEDEAMRDLCRARIDSKSAERKARQQLGAFLLRSGFRYSGKTPWSKAHWNWISCIKMPHPAQQITLQEYIDAVRSCTERVERMTEQIRQLAEPWRMNPVVEAIQALRGVSLIVATTTVAELGDLTRFDHPRQLMAYLGLVPSEHSSGETVKRGGITKTGNGHARRMLVEAAWSYRLPARVSRRLLERQRHLPQAVWEIAWKAQLRLCSRYRLLTAKGKRSQVVIAAIARELSAFIWAIAQTVPRPA

SEQ ID NO: 212895 - protein, 341 aa, unidentified
MSDLTLVGIDLGKHTFHLHGQDKPGRELFRKKFSRQQMMRFFANLPACTVVMEACAGAHFVARELTALGHQAKLISPQFVKPFVKGNKNDFVDAQAICEAASRPSMRFVSPKSEAQQTLSVLHRLRESLIRDRTKAINQMHGFLLEFGISLPQGMAVMKRLSAVLAEHELPVRLTVLLQRLHDHFVYLDEQVKALDKELIGQLADDDLGCRLLSIPCVGPITASLLAAEMGDAQQYGCSRDFAASLGLVPRQYSTGGKANLLGISKRGDKNLRRLLVQCARVYIQHLARQKGALADWVRALMTRRHSNVVACALANKFARIAWAISAHHTQYETGPGALNA

SEQ ID NO: 212896 - protein, 352 aa, unidentified
MEIATVGIDLGKTVFHLVGLNAAGETVVRKRFSRAQLLRFTGNLKVGLIGMEACAGSHFLGRALRQQGHEVRLMPAQYVKPYVKTNKNDYIDAEAIAEAVGRPRMRFVAIKSDEQLDMQSLHRARERWVRTRTALLNQIRGLLLERGITIRKGRRHAEEALPAILQDAEANLTGMMRQLLARLIPELKQLDVQISEIDAMIAGKADDQEACQRLMAIPGIGPITATAIVSAVGNGAEFRKGRGFSAWLGLTPAEYSTGGKQKLLGISKRGNCYLRKLLVHGARSVMQCREKQTPGLRAWLGELVSRCHPNVATIALANKMARMAWALLAKGETYRPALLKSSLEAAAPQLVA

SEQ ID NO: 212897 - protein, 426 aa, unidentified
MTVKDCTSVKEFWQLKKEIRGSKDHLIVGIDVAKDDHKAFFGTANGKTLLKRLSFKNDIEGFGKLLERVKEMRVKHSLNELVLGLEPTANYHKPLGDFLIKCGHMVVLVSGVSVKRNRELLDGRWDKNDTKDSANVADLISQGKCLYYEYAPVLLKDLRGLLSLKRRLKKQEHGFRIRIRNSLLAQYFPELDKYYSKWEPEILSVVKWCLDPSVIAGLEYDQFVSLVSPGSKNIRQQGRLEWIWKKAVYSIGCDAGEAAEFEAKVMVEELRHIREIIKETDAKIKDVCIRFPEYDYLLTIPGFGPDVSSKVLAAIGNPFRFNSASQVLKMAGMDLNANCSGKSSTVPVISKKGSAHLRYALYQGAFIASCKNKYFIRYYNNTLRGREREKGIKTKMRVKLAAKMLVIAWTLMKKKEPFDPGYLKID

SEQ ID NO: 212898 - protein, 420 aa, unidentified
MKAPVITDFVAVVGIDWADKKHDVCEVAVGTQNYEFSVITNKPESLQEWAMALKKRYPNKSIAVICELKKGPLIYALSKYDHITLFPVNPSTVAKYRKAFTNSGAKNDPGDAHIQAEILLLHMDKLKPILPESVEIRTLMQLVEYRRKVVQNRVDLSNCITATLKNYYPQVLDWFKEKDTIIFCDFIAKWPSLAEAKKARKQTLINFFNQHNSRYPSVNEQRITDIKLATALTEDHGVIEPNKILIEVLIPQLKYFIEGIKRFDKEIKRLYQNQNDRFIFDSFPGAGEQLAPRILVAFGANRDRYLEASELQKYSGVAPVVEQSGQKKWTHWRYSCPTFLRQTFVEWAGLSIRYSFWAKAYYEQQISKGKPHNTIIRALAFKWIRIAFKCWKTNTPYDESKYLNALKKNGSPLLKFALDG

SEQ ID NO: 212899 - protein, 439 aa, unidentified
MAKETTFETVHQNVAGIDIGAEQIFVSPDGKEVVSFETFTSSYYACAVYLKERGVKKVAMEATGVYWIALYFLLEELGILVCLVNPKETKQVKGRKTDVRDCQWIQKLFSAGILRHSFIPQGKFMELRHLVRERLDIISMGSTYVNKMQKCLELMNIKLPEVLSQIHGTSGINMIKAILSGNRDSNYLLSLCDERIQKYKGEKVLKALEGRYNDTYLFMLEQNMQLWDIHQNQIKKIDGEISRLLDELSVDKEEVVTGKAKAVRHHAPKIPGLHATMARLYGVDLTSIPGINDYTALRLIGETGVDMSRFPTVKSFVNWLTLSPKSHRSGKMKKNVRGMPCNVAGQIFKQCAQSLLNSKNNAIGSFMRKLRGRKDSGIAIKAGARKLAIAYYNTLTKGTAYVEEGTKRYEDQLQRREMALLKKMAKKYNMQLSENQIAA

SEQ ID NO: 212900 - protein, 497 aa, unidentified
MPTKSTIYSRCNPQLLKLFETAGHPAKVLCVALDYAKAQHTALMCNGLGELLRPSFAIDNTPQGAAQLLSEVRACVKPRKIRPEHVFFGGEDYPSYAENFLRHLREEKFLVVRVNAWEAKQQRDNFQASSDSLDLLGIARCCLNRRGESVRDLPQAYPNLRIATRDRDKLVRMRTAVSNRIHSYVDRLFPGFLSGGNSGLEPFSKASLELMADRFSPAQLSRRPRQALAQWLGRRGVTQPRDTADQLKRFARNVLAPAPEQTLMLQQTLAQLVGLYRNLEQSIARIDREVAHWLARTPGAWLTSIAGFGITLSAGWTAELGPPSQWHSVRQLCSYSGVVPKSKQTGGPQKEPLVGAVQQRCNKRLKNVVLQAVQKVIQHGPEELRRTAQELQARGAHTEFALAKRLVRLGKYLALTGTVYRPKAMMDPDTPQATLAAHYQSLWEKLLPKWRDKADLREVFAPEQPLGQWRKMVQELYALDLRLPQQKAAPKSSALAP

SEQ ID NO: 212901 - protein, 348 aa, unidentified
MDDITTIGLDIAKHVFQLHGVDAQGQVVLRKALRRANMIAFFTKLPPCLIGMEACSTAHHWAGTLMELGHEVRLISPAYVKPFVKRHKNDAADAAAICEAVVRPSMRYVSVKSEEQQATLMLHSARELLISQRTALMNALRGHFAELGMVVAQGARNVGDLLLILERMGQGSNEKALPETMRLALQPLATALIGIEAEIAKLDKEILAIHRKDGVSLRLASIPGIGPITASFLSASIPDPGLFEGGREFAAFLGLVPRQYSSGGKPRLGRISKMGNRHLRKLLVVGAHAALYSIKNGKTKSPLADWARALLAKKSFKLVAVALANKMARIAWAIMTRAGHYQPNLATQ

SEQ ID NO: 212902 - protein, 314 aa, unidentified
MKKTVEIFVGIDVSKAWLEVAVHEQKETYRFSNDEAGIASLVKALKKLKPKLIVLEPTGGFEMLVVAELSQAGLPVGVVNGKRIRDFAKATGQIAKTDKLDARVLAHFAAAIRPEVRPLRTEEEEQLTALLTRRRQILDMLTVEKDRRVSVRAKMRADLEAHIHWLSDHLQELDQEIEEFVKGSPAWKEKDTLLQSVPGVGPVTSATLLGMLPELGLLNRQEIAALVGVAPMNKDTGNKKGKRSIYGGRADVRSVLYMAALSAKKHNPFIRKFYERLIRHGKEKKVALTACMRKLLVILNAMVRTNQPWRSQTA

SEQ ID NO: 212903 - protein, 358 aa, unidentified
MEYGAIDLHKKESQIRIVMESGEIVDRRIATTRERFTAVFWGRPRMRILLEASTESEWVAQHLETLGHEAIVADPNFTPMYSHRSRRIKTDRRDVAALAEACQRGFYRAAHRRSAPQRTVQSQLNVRRELTDSRTRAISLARAIIRGAGFRMRSGSTGSFLDRVAALDLPPSITETLLPVRTLIAVLSEELTSADDRFAKLVTEDPVVSRLTTLPSIGPITASAYVAALDDASRFGRAAQVASYLGLVPREHSSGEQQRRGRVLRSAHPAVQSLLVQAAWRMSRSKDPRTAGLRAWAQSVARRRGKKVAMVAMARRIARILFAMWRDKAPYDAARIRPTRAMLATPNVHDATRLVVNG

SEQ ID NO: 212904 - protein, 412 aa, unidentified
MSKIVYPICCGLDVHRDFVYACIASTDERGVTTYKSNRFSTYKRGLRKLLEWLLANNCRDICMESTGKYWIPVYNVLETDCKPVLAHPKYVKSIRGKKTDRKDAERIADIFKFDLINGSFIPPPEIRQLRDLMRYRFKLTDFSTGEKNRAQNCLTVSNLKLDDVFADVFGKSATAIIDHILEHPNEPFDVSEFVDKRCKTPIEDIQAAVDGEMCSEQAEKLKIIRAHMNDLDKAKSNIESVILNIAEKFLAQINLVCTVPGIKSFSAIAIIAEIGVDMSVFPTAKHICSWAGLSPQNDQSAGKKKTTRISRAGVYLKPLLVQCANASIKSGKHPEIKNRYLKLKKRRGHKKAIIAIARMLLVAIYNILKRNEPYNPELYKKSDEPSKNFTISVDYAIRILQNKGYSVSSPSG

SEQ ID NO: 212905 - protein, 388 aa, unidentified
MAQAPGSHLHPVAPDYDRTLVLAIELSDKSWVLAAQVPGLRQLKAKRSVEPTAAALLAAIEGYRDRARAAGRVVERVVATYEAGWSGFWLARWLAARGIETHVVQPSSVPVDRRARRAKSDGIDAELLLRTLLAWLRGEPRVCSMVPIPNEADEDARRCVRERAELVSERVSLVNRIGAVLATLGARDFNPLLRNRRQRLDELRTGLGTTLPLHARAKISRMLDRLELVQEQISELDRERDAVLEDETPDEARAMIQQLTGLRGIGVQSATVLVREAFVREFANPKALGSYAGLAATPYSSGGTQREQGIGKAGNRRLRTVMVELAWLWQRYQPGSAQATWFRERVGGAGRRVRKVMVVALARRLLIALWRFATQGVVPEGAVMKPAP

SEQ ID NO: 212906 - protein, 342 aa, unidentified
MFYAALDVSLRSVAICIIDQDGKVRLERSVSSDVPDLVRCLREFGEPIHQVGLEAGTLTQHLTYGLKEAGFDVVCMEARQVNAALSAMRNKTDKNDARGIAQLLRSGWYSRVHVKSVESHYIRALLTSRKVMQRKCIDLENEIRGLLKVFGVKLPMRLRGGAFDAAVRDTIESDPALSHALLPMLQARQMLLETFLELDRRVRRAAHQDSVTTRFMSVPGVGYVTALSFKAAVDDPTRFKSSRTVGAHFGLTPRRFQSGEKDNPGRISHAGDADVRATLYAAANAMLMRSIAWSSLKAWGVRLMKTKGRRRAIVAVARKIAVVLHRMWIDGTEFRFGSEASA

SEQ ID NO: 212907 - protein, 318 aa, unidentified
MERNTIEFEQIIERGCGIDVHKETAVVTVNGKGIKQETKTYDTFTSSLKEMKEWLMSNGITHIAMESTGVYWKPVFNILEDSFEILLVNARHLKNVPGRKTDKADSRWICKLLLSGLLRGSFVPPENIRELRDLSRYKTKLTREVASEKNRIQRILEDANIKLSSVVSDTSGTVATKLIDGLISGGKDLEALINECYHGKLTATKEELKQALTGRLTSHHVFMLKQMKAHIIYLESQIVLIDTEMDNKLEEYNQELELLQTIPGVAKDGARRILSEIGANMDVFTDEHHLASWAGMCPGNNESAGKKKVHGQDTETNT

SEQ ID NO: 212908 - protein, 328 aa, unidentified
MTMNPAHNAFNHIVAFDVGKESLAVHILPGDERYTIANKPKAIRKLLIKQMQRNAGLNLGRLLVICEATGGYERHVLEIGAELGLAAHKAHGTRVRHFASYQGLAAKTDPIDARVLAIFGLKTEDLRLYAPLSPEEAALADLRARRDQLQKMLLAETNRLDHARHASVTKSLNAHIAMLRKALAALEALIAAHIQASEVLSRKARLMRSLKSIGLKTVTAVLAYMPELGALCNARAAHLAGLAPIDNRSGKSKLPSHIEAGRATVRKALYMPALNAIRHNPVMKAFAERLKRNGKPKKAVIVAVMRKLIVTLNAILREGKPWRYAEIA

SEQ ID NO: 212909 - protein, 408 aa, unidentified
MNNFNLMNNYQNQLVVGIDPHEDILGIVFLNSNNTVIKGFSIPNCSKTHFDSLIADAYSIANSISANVVFVIESTNVFWRPLFSYLVNKNIPVYTVNSYQTNTSRKTKMRKTKTDLIDAKNIAELYIQGKAHETKFPPELLFDLRELTRFYFWLTDIKGRFLNRIYAYIFQVFPESLSVFPKKYFSKTLAFLLKKKLFHPSTISTMNPDKLLDMVRRISRDKYTNKVKQLVPIASNSTGITEGKFAFTNILKILVNLYQLFELTLNNIESEDILPILHSIPNKLNTIKGLSPVAQAGFLSELGHHSWFNNADEVLAFFGLDPAIGQSGRRKGQGKHISKAGTKFGRETMFLASTPVMFHNPVFKQKYHRLRNQGRKYIDAKIILAADLVKICYAMCRDNNEFIPNKVM

SEQ ID NO: 212910 - protein, 371 aa, unidentified
MKDMKKEAFIGFDVSKNLHAVAIAEGGRYGEVRGFGTISTTNEAVQKLLKKLATRFDHLHVCYEAGPTGYGLYRQVKALGFDCSVIAPSLTPVRPGDRVKTDRRDAERLARLLRAGELTPIWVPDETHEAIRDLVRARESAVRDKRQKRQMISSFLLRHGRIYQSPSPWTMRYRRWLQSQSFDHPAQQTALQEMVLAERHAGECVDRLTTSIEGIVPDWSLGPVVEALQALRGAALVGAVTFMAEIGDVRRFDHPRKLMAYLGLVPSEYSTGLTTRRGGITKAGNSRVRRALVEGAWTYRYPAKIGVQKLYILQKLSPEIQDIAWKAQSRLTARYRKLTQRGKKKTVITTAIARELSAFMCDIARKTMAAA

SEQ ID NO: 212911 - protein, 346 aa, unidentified
MNETTTIGLDIAKQVFQVHGVAVDGTVTVKRQLRRSEVIRFFDKLPRCRVGLEACGGAHFWARELTVLGHDVRLIPASYVKPYVKRGKTDAIDAEAICEAVSRPTMRFVPIKTVDCQAGVMLLKTRHLLVKQRTQSINSLRGHLSELGIIAARGTGKVETLIAIIRDKTDERIPAVARRALEMLAEQVEALVRRIATLENEIVSEVRRDDTMRRLATIPGVGPITAATIVALVPDPGAFNSGRHFAAWIGLTPKMHSTGGKERLGRISKMGNPVLRSLLVVGATAVSRHARRGATVSPWLTGLLARRPAKVAAIALANKMARVIWALLTKGGVFTRRPATAAQHAA

SEQ ID NO: 212912 - protein, 411 aa, unidentified
MDKIYDKCCGIDVHKKLIVACFRCGKKQEIREFGATTRELLELADWLKEGGCKMVAMESTASYWKPLYNILESSDLNAMVVNARHMKAVPGRKTDVKDAEWIADLLQHGLLQPSYIPDKDQRELRELVSYRKSLVGERTRELNRLQKMLEGANIKLSGTVTDINGKSARSILEYLLTGEFIDEAKYDEMYEKKIIAHNLKANKEQIIDDLNGLMSPLQRRMMKELLVHLDELNIHIKNLDDEIDNFMKPEEKQASQAIQDVTGIGNTSAQAIISVIGSDMSRFPTDRHISSWAGLCPGDNESAKKRKSGKTRKGNALLRTTLITCAHAAVKNKKSYFYAQYMRISAHRGSKRAYVAIAHSMLISIYHILKDGVVFKDLGADYYNQFNKERKINAYLKKLKALGWEAPIVDA

SEQ ID NO: 212913 - protein, 328 aa, unidentified
MNIIGFDISKNEIVGVRIDRNGGIKESFTILNNQEEITNLLERMRAKYPKFVAASEATAEYHRILTLECLRLGIPFRLLNPICTKQFTRATVRKKKTDLSDALIIAKLALQKEGALINKESFNPLKTISRTGYKLIRMSLMLHLMRERVLQILPEEKELIGCLEIPLISLKESIKKIQERVNKEVDSSLKELLCSLPGIGITIANTLICEIGDINRFPSAKSLVAFTGLDPKVRQSGQTLKRNTHLTKRGSPYLRRAVYLAATIAQRHDPELKYYYEKKRSEGKRYKEATISVARKLLNRIYAVWKRGAPYIKSSIRITLSVPQKVLT

SEQ ID NO: 212914 - protein, 305 aa, unidentified
MNIYIGIDVSKDRLDIQLPSKTLQISNAEKSITAWLKKLPDEAFLVCESSGGYESLLITLAHSLGRPIARVNARQVRDFAKATGVLAKTDTIDARVLAEFGKVLAPEALVIPDPLQQELCALVKFRSQLLTQITFNNNMRETLRDKQLLNLNSKTAAFLKKQADQVLLLIDEKINRSAELRSKRDRLTAIQGMGKTSASCLLALMPELGSLSSPTAAALAGLAPFNHDSGQFRGQRHIAGGRSHVRAVLYMPALVASRHNPVLKHLYQRLVSAGKPKKLALTVLMRKLVVLANHLLKNPSFSLAT

SEQ ID NO: 212915 - protein, 391 aa, unidentified
MSVDAPRPAQPAIRTDLGAIFVSMELSRKTWLITSLSPGGGEKMSKHLVPAGDVFGLLRRFAELRRKAAARTGRDFPVIVIQEAGLDGFWIHRVLQSEGIESHVVDAASILTSRRRRRAKTDRIDGETLVRTLMAFKRGEPRVCSMARAPTPQEEDRRRVCRERRTLVGERVTHVNRIKGLLFAQGVFGYEPLRKGRRERLENLQTGDGRPLPVHLKAQIIRELDRLEILLEQVKAVEAERDGLLKPASDEAASPAAMLARLKGIGPETAAVLWSEGLFRQFDNRRQVAAYAGLAPTPWQSGSIDHEQGVSKAGNPRLRTTMVELAWLWLKNQPTSALSLWFHERVRRLGGRMRKTTIVALARKLLIALWRYTTAGVVIEGAVMKAAPATT

SEQ ID NO: 212916 - protein, 379 aa, unidentified
MATSSTQDCYIALELSRSKWLIGALLPGPSKITTTHVPGGDTTALLDALNRLRARAALDTRSSVALKVCYEAGYDGFWLARFLISHGIETHVLDPASFLVSRRGRRAKTDRIDVEAMVLTLKAFLLGDRTVCRNVIIPSPEQEDAKRLSRERSQLAAERTRHINRIRGLLALHGIREVKGLWGGEWSKALAELRTGDGRELGGYLRAEISREFERLHLVLQHIRALDADRQVALTEEVSPFPQRQKAGALIKLVGIGPVTATALVAEVFHRRFQSRRHLASYLGLAPTPYSSGDSERDQGISKAGNQPARSILVELAWGWLRYQPGSRLTAWYQQTFAGRGPRGRKVGIVALARKLAIALWRYVEHGVVPEGAVLSPRL

SEQ ID NO: 212917 - protein, 401 aa, unidentified
MTSVRSRAWIGVDIGKTHHWVCAVEETGKRLLSCKVLNDEAQIIEVIAEVSELAAGRVWAIDILGTPSALLVALLAKAGEQMRYASGRVVAAMSTAYAGEGKTDAKDAYVIAETARIRADLSVVDTDTDLVRTLGVLTGHRADLVADRVRMINRLRDLLTSVFPALEREFDFASCKGALVLLSGYATPEAIRRMGEARLSRWLRQRRVRAYADVAARAVAAAQTQHTVLAGQDVAASIVAELANSILAQHERLKLLEQQIQDTFAQHPQAEVIESIPGFGPVLGASLLVAAGDLSAFPTAGHLAAAAGMVPVPNDSGRRAGNLHKPRRYSRPLRHALYLSAQSSMMRAGPNRDYYLKKRDQGRTHSQAVIALARRRIDVLWALLRDNRTWTATPPARAQAA

SEQ ID NO: 212918 - protein, 382 aa, unidentified
MAGTEPHAWGTGRMDDITYVGLDVHKATVCVAVAESGRGGEVRQVGVFQNRPEILCKMAAKLGRGGRRLSFSYEAGPCGYGLHRLLTACGHSCVVVAPSLIPMKSGDRVKTDRRDAMMLAKLHRAGELTAIWIPDATHEAIRDLVRARATAGRVLSKARQHLQGFLLRHDRIYRGARAWTQAYWRWLTTVRFEHPAQQIVLQDYIHAVEDAEARRDRLTRQIEEMLPGWSMAPVVAALQAMRGVALVVAVTVVAEVGDFRRFANARQLMAYLGLVPSEHSSGSTIRRSGITKAGNTLVRRVLIEGAWTYRMTARVSRKLHDRLEPLSPVIRGIAWKAQVRLCARYRRLAASGKPKVVVTTAIAREMVGFIWAIACIAQLALA

SEQ ID NO: 212919 - protein, 337 aa, unidentified
MKITTIGLDLAKSVFHVVCFDARHQEVGKRMLRRSQVREYFAQREPCLVAMEACAGAHYWGRELEKLGHTAKLIPPQYVKPYVKGNKNDYNDARAIAEAATRPGMRFVGIQTVEQQDIQALHRLRAQQVKQRTALCNQLRALVAEYGIVMNKGVAALRRGIPGLLEDAENGLSEAFRALLSRGYEQLLELEGHIDDYTRQVEAHSRQHEQTRRLQTLPGFGPIVASVFASVVGDGSAFKRGRDVSACLGLVPRQHSSGGKEVLLGISKRGDKYLRSLLIHGARSVVLHAKHKEDALSRWVNRVRERRGTNKAAVALANKLARMGWALLRHETVYRPT

SEQ ID NO: 212920 - protein, 349 aa, unidentified
MTLYIGVDFHPHQQTAAWCDTLTGETRTLDLEHDLEKVREFYTTLPEPAVIGIEASAKARWFEDILFETGHKLFVGDPVLIRKRATSRHKNDRRDAELILDLLVRNEFPALWRRHRDSDQVLEILRLRQSLVCQRTQVYNRLQAMAHSAGLPKGRMRTAAFQNVLKAVELDEAATLGRSQLFSLLDHLTHQINELGTWLMTKAEANNEVQLLLTQKGVGYLTSLSMVHTVGDVTRFTRLSKQITGFVGLDPLERSSAGKVRFGSISKAGSPLLRYQLGMSALIAARFDEKLKSFYKRLAKKKPRAVAKTAAARKLLVKLSIMLRDNITAAEFDQRGRTVGNARLTQGLQ

SEQ ID NO: 212921 - protein, 387 aa, unidentified
MESVTPSTAVATTVRSNDITLFVSLELSRSKWLVTINSPGSEKFSRHTVEGGNGVCLLDLLSRSRAKAEQRYGVAIKTVVIQEAGLDGFWIHRLLLASGIESHVVDAGSIAVARRHRRAKTDSIDGETLLRTLMAWARGERRVCSMVQAPSPEDEDRRRLTRERGTLVKERIQHTNRIRGLLSGQGVRDYNPLRRDCLERLEALRTGDGRPLPPMLKAEIRRELDRVAVVTTQLAAVERARDALVCAPAEESNTPASVLLKLKGIGPEFASLLWLEALFRSFANRRQVGAYGGLAPSPWQSGAVERDQGISKAGNHRLRRTLIELAWSWLRHQPNSALSRWFQARVGAAKGRIRRIAIVALARKLLVALWRYVTQGVVPEGAELKAA

SEQ ID NO: 212922 - protein, 411 aa, unidentified
MENIFACCAGFDVHKESVEACVRRTEPNGRVHSETRHWGTMTRDLLQMADWLVAQGVTNVAMESTGVFWKPIFNILESRFTVLLVNARHLKQVPGRKSDVRDCQWIAQLLQCGLLKGSFIPPRAQRDLRDLTRHRSQLVEEKTRTINRIQKVLEDANIKLASVATDVMGVSGRAMIQRLIEGETDPHKLADLAQKQLRGKIPELEKALEGKLTDHHRFMLTLLWKELAQQQEVIAELEMKIEEQTRPFATEIERLDVIPGADRRVAEVLLAEVGADMKPFPSDQHLSSWAGMCPGNEESAGKRTRRRITPGNRWLKKTLVQAAWAASHTKNSYLASQYRRIAARRGRKRALIAVGHSILVIYYHMLKTASTYADLGGDFFDRLEPQRLTRYYVKRLERLGHKVTLETGVTA

SEQ ID NO: 212923 - protein, 411 aa, unidentified
MDKIYDKCCGIDVHKKLIVACFRCGKQQEVRESGATTRELLELADWLKEGGCEMVAMESTASYWKPLYNILESSDLKAMVVNARHMKAVPGRKTDVKDAEWIADLLQHGLLQPSYIPGKDQRELRELVRYRKSLVGERTGELNRLQKMLEGANIKLSGTVSDINGKSARSILEYLLTGKSIDGSKYDEMYEQKIIAHNLKATKEQIVDDLNGVMSPLQRRMMKELLVHLDELNVHIKNLNDEIDNFMKPEEKQASQAIQDVTGIGNTSAQAIISVIGSDMSRFPTDRHISSWAGLCPGDNESAKKRKSGKTRKGNALLRTTLITCAHAAVKNKKSYFYAQYMRISAHRGPKRAYVAVAHSMLISIYHILKDGVMFKDLGADYYNQFNKERKINAYLKKLKTLGWEAPIVAA

SEQ ID NO: 212924 - protein, 382 aa, unidentified
MSQTASRRDLTAVQARLFVAFELGWRKWRLAFGTSMGQKAWQIVIPARDVLALTKVLGKARQRLGVPDSCPVFSCYEAGREGFWLHRLLSQMGIHNIIVDSSSIEVNRRARRIKTDRLDAEKLLSMLLRHHAGEKKLWSVVHVATPEQEDGRHLQRAIRTLKKEQTRQINRIRGLLAGQGVEARMGRAGLLDPIDSIRIWDGSPLPAGLARRLEVEIARHTFVHHQLLDLELERDTQIRQSQQPAAQITRLLTTLKSIGEASAETYVRELSWRGFKNRRQVGSLIGLTPSPYQSGDSSRERGISRAGNRHVRGIAINLAWAWLRFQPQSDLTLWFNRRFASGSPRLRKIGIVALARRLTIALWRFADFGEIPKGALLKTDPA

SEQ ID NO: 212925 - protein, 342 aa, unidentified
MHVTTVGLDLAKHVFQVHGIDQNGQVLIRRQLRRGELIGFFRRLPPCLIGMEACSTAHFWARELAALGHEVRLMPAAYVKPYVKRGKSDALDAAGICEAVTRPTMRYVAIKSSEQQAVLMLHRTRELLVRQRTMLVNALRGHLAEYGIIAPQGLPSVPKLREAAEKARGAALPELAWRCIRLIIAQLEEAHVRVAEAEQEILAWHRTNEVSQRLEMIPGVGIITASALAATISDPRSFRSGRHLAAWIGLVPRQSGTGGKVRLGHISKQGDRYLRRLLVLGATTLLRHARGKASAAAGWINALLARRPAGIVKVAIANKLARVAWAVLQGNQGYRAPAAAAA

SEQ ID NO: 212926 - protein, 329 aa, unidentified
MHSENIAAYVGLDVHKETLAVAIAAPERLGEVRYYGTINNEAQAVRRLFQKLQGLYGNILSCYEAGPCGFGLYHQLTAMNIKCQVIAPSRIPKSPTDRIKNDHRDAISLARLLRAGELTPVWIPDLTHEAMRDLIRARAAAKRDSRVARQRILSMLLRTDKHYAGKHWTGKHRTWLANQSFSQPSQQIAFQHYCQSLEQIEDRILQLDQEISRLLPEWSLCNLVCQLQALKGVGQLIAITLVAELGDFSRFSNPKQLMTFLGLVPGEYSSGNSIRPRGITKVGNSELRRLLYEAAWSYRTPAKVGAWLIYYRPDSVTEPPRVSWRVFYL

SEQ ID NO: 212927 - protein, 424 aa, unidentified
MTDADELAALVGIDWADQQHDVTMRDVTTGRIERQRLAHQPQAIIEWLTTLRRCYPKGRVGIAVETSRGPLVHALLEHDFVVLYPVNPRSLKRFRETFAPSGAKDDRPDADLLCELLDKHRDRLRPWIPDDVETRALRRLVENRRGTVDLRTKLTQQLTAALKEYFPQALDWAGEDLSSALACDFLLTWPTLDAVQRARRKTVERFYTTHNCRRPERIAERLEAIQQATPLTRDPAIVEPAVLVVHMLARQLQTLAASVERFDDEIARRFAAHEDAALFSSLPGSGAALAPRLLVAFGSDRTRFGRAAAVQEYAGIAPVLQRSGNSALVHWRWSAPTFVRQSFHEFATQSIRFSPWARAYYALQRSRGKGKHAAFRALAFKWIRIIWRCWQDRVPYNEARYTRALLRHTTPLTSRLATTHQKVG

SEQ ID NO: 212928 - protein, 333 aa, unidentified
MFNYSFFVGIDVSKAVIDVSFFSNGQVVYLGQYFNDESDFESVIKDLSFKTNIPIDQWMICFENTGSYSKALLYWLISQGIPCLEENPLAIKKSLGLRRGKSDKMDSKDICYYAFEKRDKITPTILDKPFVIQLKSLLSRRDLLVKHRTALKASLKEQKSSMLQELYVKLDHQNTLMIKFYNEQIKALEQEIQQVINSDHSAAKNNELIQTIIGIGSITAAYFIGTTNNFESFTNSRKYSCYIGAAPFPDDSGTKKGKTRVSAMAYKKMKSLLSNGVISAIGHDPEIGLYFKRKKKEGKKSGVVYNAIKNKLIHRVFAVVNRQTPYVKMMNYV

SEQ ID NO: 212929 - protein, 323 aa, unidentified
MTYIGIDISKDSFVAAFPKVSGYQTQTYPNTVKGIRKFIGSLSVTEHHCVMEATGNYGFLLLYLLDRQGIASSMVNPKQIKHFSRMMMTVTKTDPKDACMIAMYGEKMNPPVYKMPSEAVMLLKQKKTIIRQLKKQLTASKNLKSSLVMLPFQDKNGMKALDKTISFLASQIESLESELADLASSEFDRQVKLLTSIKGIGITLATALIVATGGFSYFNNAKQVSRFIGICPTYQQSGTSVHIKGGINRNGDASLRSLLYVASWSALRGNTTCKECYARLKANGKPSKVALIAVANKLVRQAFAVIKSDAPYVDGFVSTHQTK

SEQ ID NO: 212930 - protein, 364 aa, unidentified
MHYVDNTELSSHEGTRCQFNGGTGAIKLGVDVHQDFYVVVEQVGGGNPKPPQRFRKEAFLHWATRLKQKSGAQVHAVYEACGFGFALQRKLSAPGIHCYVVCPQKLDEQNRRVKTDGLDAKALCLKLDRFVQGNRDALAIVRVPTEEEEQARAIHRQREQLVKARKQLEAQGRSLMVNHGLEPVQNWWKPHTFAALPMPQWMKELLANSQPILVALQQKIAALTVQLQSAAAPDQPRGLGKMTSVVIDREIGDWKRFNNRRQIASYTGLCPGEYSSGNTRLQSCVTKHGNPRLRAALVELAWRLVRFQPDYKPIVKWRATLTKGALATGAARKKAIVAVARQLAVDLWRIKTGRLSAEELGLIN

SEQ ID NO: 212931 - protein, 405 aa, unidentified
MEVLHERCCGLDVHKKSITACLLTPKGKEIKTYGTMTDDLLEMADWLVAEGCTHVAMESTGVYWKPAYNLLEGLEMELLLVNARHMKAVPGRKTDVKDSEWIADLLRHGLLRGSYVPNRESRELRELVRYRQKLVRERAAESNRIQKVLEGANVKLGSVATDILGKSGRDMLASIIKGTDDPAELAGMARGKMKSKREELERALKGLVGEHQRKLLSIQMRHVEFLDEEIVVLSEEIKERMHPFEKALVAIDEIPGIGIRTAEQIVAEIGVDMSRFPTAEHLASWAGICPGNDESAGKRRSGKTNKGNMHLRATLVECATAIGHTKGTYLAAHYNRIAARRGSKRAKVAVAHTVLVIIYHMLKEGTAYQDLGGNYFDKRNETAIVRRMAKRLESMGFNVTIEKAA

SEQ ID NO: 212932 - protein, 416 aa, unidentified
MEYPPDALAAVPPGGVTCGIDWANDDHAVCVVNMAGQVVQRFTVEHTGEGLAELVRRLRKAGVGEVAIERPDGKVVEAVLAAGLTIVVISPNQLKNLRGRYGSAGNKDDRFDAFVLADTLRTDRARLRPLLPDTPATVTLRQACRARKDLVGHRVAVCNQLRAHLKAAFPGAVGLFYELDSPISLAFLARFDCQDRADWLSPRRLAAWLASQGYCGRKDPAILHARLTAAPRGATGGDGAAKAHITRALTAVLTSLAEQITALEAQIAEQLARHADAHIFTSLPKAGTVRAARLLAEIGDCRARFPTPEALICLAGVAPSTRKSGKTTFVDFRWAADKQLRDAICDFAGDSRHASPWAASLYHDAIARGKDHPHAVRILARAWLYVIWHCWQHHTAYDPARHKALQRILAEEKPAA

SEQ ID NO: 212933 - protein, 337 aa, unidentified
MKNASFRQQLSTCQGIGIDVSKAELVVGGLTADEPILKRISNQRSSVWAFVRAIRDSDYRGKMICESTGHYHLKLMLACAELGVGLTVLNPLQASKHSQAKIRKTKTDAVDALTLASMCLTEPNLPKPTRLNAADTLIRLKMGQLAALEKQLQQGQRSMNQYAETYAELGFELSPQQRALQVHYQELKKLRRQMERELEVLLMERMTSDETHLRLSAVPGFSKLVCGLVGQFDREVSNARAWVAYVGLDVSVRESGTWKGRGRITKRGNAYLRKRLYQSAWGAYMHDAQIKAYYEALKARGRNHVEALCIIARKLLRIAFEIVVNGKTYDPEIAFAH

SEQ ID NO: 212934 - protein, 339 aa, unidentified
MGLYTAFDLHSNNSYVGIIDEDGKRVFRRKLQNDEGLMVKVLNPFKNDIVGVVVESTFNWYWAVDLLMEEGYKVHLANPSKIQKYSGLKYADDEDDAFWLAEMLRLGILPEGYIYPKANRPIRDLLRKRGHLVKLRTSLIVSLQNIISRSLGGKMKTSDIKVLAEDRVTPLLECNDDLALTGKVSKEAIDSLTRQIKTIEGTVEKKIGLSRPYQHLLSMPGVGRILALTIMLETGPIGRFQEVGNYASYCRKVPTTWTSNDKKKGKGNKKNGNKYLAWAYSEASELARRFDDNARTYFDRKRRRTNAPIAHSALAHKLSRAAYYIMRDGVPFMAEKTFG

SEQ ID NO: 212935 - protein, 356 aa, unidentified
MKIYKVQEFVVKGKEIFVGLEDSKRTWKLAVRCDKMIIHQTAMEARYTVLISYLKHRFPECVIHLIYEAGFKGFNLYDRLTEDGVDCVVIPPHVVTEPKVNRIKTDKRDARRLAQVLESHDFKHGCYVPDRERREDRQISRTLIGIQRDIVATRNRIRTLLSFHGIEAPEKNTWGRKEFKKLEGLSLPSSLQISLTVLLTHLQQLWEHQLVLRKALRELCRKERYRKAFAIAKTLPGIGWFTAIRLILELGEDLAQFGSGKKIASFIGITCSEHSTGETERKGRITGMGSGFIRAVLIENSWMSIKKDPALLAKFMRVWRSSGSKKKAIVAVARVLIVRFRACLVLGTPYVQGVTQ

SEQ ID NO: 212936 - protein, 343 aa, unidentified
MNIKRVGVDIAKSVFHIHGVDRHDCVQWQTALKRGQWLDALCKRLEPESEVGMEACASSHFWARELQKRGYRVKLIAAQFVKPYVKSNKNDRVDAEAICEAMSRPGMRFVKVKTVSQQDTQAAHRIREELVGQRTAKANQIRGLVGEYGIVAPVGIRQLRMALPQWLEDAENGLTEGFRVLLAGLADDLRYLDDRIEALDQRIKEIVKQDPTACRLLELRGVGPLTASALAGALGDGRAFTWGRDFAASLGLTPRQNSTGGKDRLLGISKRGDNYLRKLLVHGARAVLRHAKGRDDGLSQWLNDLSARKHANVVTVALANKTARIAWAIVHNETSYDAQMAAG

SEQ ID NO: 212937 - protein, 391 aa, unidentified
MVCVGIDVAKDKHDCCILDSDGMVRADCFTIPNNMDGFKQLLQTIRNCTKKSDKIKVGLEATGHYSYNILGFLLDNGLPTYVINPLHTNLYRKSLSLRKTKTDRVDARTIATMLLSDVDLKSYTDTAYHNEELKSLTRYRFDKVRERAKLKQSVSRLVTILFPELEKLVPSLHIASVYALLSEYPGAKQISEIHLTKLTNLLVTASKGRYGKDKAIQIRDAARTSIGSVMPAKSLELKHTIKLIRELTSEIDEIEVSIQKIMDELNPPILSIPGVGIQSAAMILAEIGDFSNFESPDKVLAYAGCSPSTYQSGKLTNCYAHMEKRGSRYLRYALYNATKYVCYWNPVFAEYLAKKRAEGKHYNVALSHATKKLVRLIYALQKSGKAYLTAA

SEQ ID NO: 212938 - protein, 358 aa, unidentified
METTNLRQKVNFTDKNIFVGVDVHQKSWHISIILDSTYVRSFTQPPSVDAIVNLLRRDYPGGNYLCGYESGYSGFWIHRKLSQMGVPCKVLHAADIPQSIKQKLTKRDSVDSKKIAEALSSVKTKPIYVPDEISERDRSLVRYRERLLKDLTRSKNRIRSLLYQFGIELPDRFSSGWSNLFIVWLQETDQVIGSARLTLDHMIEQMILLRSSLLKVNRSIRNLKESPTYKQKTEWLLSIPGIGPLSAITILTELIDIHRFPSFRDLNSFVGLYPMEHSTGQDEHKGSIMIRHNKHLRKLLVEDAWVAIRHDPALTLAFTQWTKRMTSKRAIVKIARKLLSRIRYVLINETQYINGIEK

SEQ ID NO: 212939 - protein, 446 aa, unidentified
MDVVFPQCAGLDVHKKSITACRIVPDPTGQEAEGIMELRTFGTMTRDLLTLTDWLTEASITHVAMESTGEYWKPVYNLLEGTFTVFLVNATHVKNVPGRKTDKADARWLAKLMRFGLLQASFIPPKGQRDLRDLTRYRTKLVQERVREVNRVQGVLERANIKLASVIAEIMGVSGRAMLEALIAGRADPAAMAALAKRRMRSKIPLIEQALTGIVQAHHRQLLAMQLAHIDFLDEQIAALNQTIEASLKALSVDASPGEGQVPLLPPPCVAPSAVSPPLTFTRAVELLDTIPGVDQRGAEVIVAEIGIDMSRFETAPRLAAWAGVAPGNDESAGKQRSGKTRKGNRPLRAILTQLAHAAVRTKDTYLSALYQRLAVRRGKKRAIIAVAHAIMGSVFYMLSRNTPYRELGANYFDERRRQFTVDRLTRRIEHLGYRVHLEPVAAPAV

SEQ ID NO: 212940 - protein, 347 aa, unidentified
MKRIAVDLAKSVYQVAESVRSGQVVQRKRLNRAAFRRYIQEQGGPVEWVMEACGTAHYWGRLAQSLGHQVRLLHPRYVRPYRRRNKTDRNDCDAMLEAARCTDIHPVPVKSHDQQQLQQLHGLRETWKKSRTQRINLLRGMLREAGIEAPASTAAFIRAASELVEQPELAPLNRLLHIVLAEVNLYEQCMAECEQQLKRWHADDEIVRKLDEVSGIGLLTASALTAAVGKPERFASGRQLSAWLGMTPREFSSGNSRKLGHISRQGNVYVRTLLIHGSRAALLAAQRCQSRTPEKLTQLQRWAVETAARIGHNKAAVALANKLVRICWAVWCHERRFNGNWQSVKPP

SEQ ID NO: 212941 - protein, 435 aa, unidentified
MTELPTTTNKHSLAQYAAAIGIDWADQKHDIALLAEPADHHKHQAVEHRVIESTPQALMTWVASLQERFQERKIAIAVEQSRGPLIYFLSAFDFIDIYPVPTVTLKKLREALYPSGSKTDKDDSRLVLDVLTKHTDRLRPMKPESAEIRELAALCEQRRHLVDERTGKLQALRDACKSYFPVIVELFDFKSPVLCRFLKRWDTMEKLQKTRPATLRKFFYANRCRGDVIERRLAAIKDAVALTKDPGVIHPMKMRVFVLCKQIITLFEVIDPYERRICELFEALPSAGIFKSLPGAGEAMAPRLAVAFGEDKKKFQSATDIQNLSGTSPVTKRSGKSQNEVLFRWAAPTFMRQTFVEWANHSRKASQWAQAYYELCLDRGDRHNTALRKLAWKWQRIVFKLWNTGELYDEEKYVAALTKYGSPIVAKIEQLAEPA

SEQ ID NO: 212942 - protein, 427 aa, unidentified
MPYKIAGIDVHKRMLAVAVSDVEIDGEYEFEWRHFGSNPAQLRLLADWLIEQQVEEVVMESTAQYWRPVWEALERYWQPICQKWEGAGPMSGTLHLAQAQSNRAPQGRKNDFADAERLVKRLVAHELVLSFVPDPEQRLWRTVTRAKYQLTRNRVQLQNRLEALLEEAHIKLSSLVSDLLGVSARRMLYALADGETDLAVLAMRADGRLRATPEQLCDALGACRELNPTYRRLLKMALEDLYLIEKQIGQLDQEMADLLYPYQDQVQRLAEVPGLGVNSAQQIIAEVGVTAATFPSEGDLSSWVGACPGDNESAGISRGHRSPKGNRHMRRILNQAANAAVKYKGSIFQILYRRYVPRLGHNQTIGVIAHRLCRLVWKILNRGVRYEERGPAVSQRSRHQRASRMIRELRSLGYRVDPPNPQQAAPA

SEQ ID NO: 212943 - protein, 345 aa, unidentified
MSEVTTIGLDLAKQVFHLVGFDSKGKEVKRKRLTRGKLAEYVANLPPCLIAMEACGGAHHWARRFRDLGHEVRLIAPQYVKAYVRGNKNDYNDARAIGEAARVADMRFVEVKSVEQQDVQAMHRLREARVGERTGLCNQLRGVLAEYGIVLAQGVGTVRKRVPELLEDAENGLSDFLRSLLADAYRQLRELDGHIAFYTDALKAHARKNEAVERLQTVPGFGPIVASAFHAFVGNGHAFGKGRDLSAALGLVPRQHSSGGKTVLLGISKRGDRYLRSLLVHGARAVVRMADKKDDPLSRWICRLKVIRGANKAAVALANKLARIGWAILQRGGTYRAQPAPGGAV

SEQ ID NO: 212944 - protein, 351 aa, unidentified
MLYVGLDVHKEFCQACVIDERGRALSNERFPSTHESLDVFLAGIKHAKFVLESTGIWEYIYEGIEDRGFEVVLAHPLKVRAIAEARVKTDKVDAETLAQLLRADLIPRSWVPSRDIRDLRQLVRQRTYLARQSTSFKNRISAELLRRGVRRPPELKTSFSKKDIERMRSLDIPTITSNLDCLERIQAQIEVMNQQLLVEFKRRPDAQLIATAPGIGFYGALLIHAEIDDINRFPDPERLAAYAGLVPTVSQSASTVHYGGISKEGSAYLRWILIETVHIHRHLHPESRLSRFHSKLEKRRGKNRATTATARKLAHIIYWMLKTREPYHGQGFNPMTKPARTSASRGLGQDP

SEQ ID NO: 212945 - protein, 349 aa, unidentified
MRYFQPPADTRFYAGVDLHARSLFLSILDREGTTRFGRNLPAAPEPFLRAVQPFREGLVVGCECMHCWYWLADTCRDAHIVFALGHAWAMKAVHGSKTKCDRHDAEAIARLLRGGNFPLAYAYPKERRGLRDLLRARLRLVRQRAELYGHVHTARRQANLPPVSNDVKYKSKRATITADIADPFVRRRVETDLALLEPLDTTIRRLEAEIEQAAQEHYPTELAVLQTTPGVGAVLSLTILLEIDAIDRFDTRQQFCSYARLCGAVQESAGQRTRRRQPQGRQRLAEVAFSEAAVLSAQKDERIGALLQRLASRLGKAKALSALAHKLGRAFYHMLHTKEVFDVNRFVRH

SEQ ID NO: 212946 - protein, 388 aa, unidentified
MPAAETPVAYLGIDVGKSSHSACALDAGGGVAFRAELANRPDDIDRLLERAGSGALVVVDQKRNIGALVLARAHAHGNPCAYLPGYAEKQARGMFPGIAKTDAIDAEVIARTALGVPRALRPAPEEPEGAASLRILSSQREFASSARTRAKNRLRATLLEADPALEGAVDPSSRWQVSMLAEFGGAAGCSAAGWRRFSNAARRAGAPAAGARRLWEALLASSRSGRPLPAGEDVAVRMLAREIASLDADIGELDSLVADSLAGDEVYECLLTVPGIGPKTAAALVTSIDISAFRGHDELASYCGVAPSDRRSGSSIRSTSPQRGGNRQLKNLLIFSCNSLIGTDNRFGRYYGECRARGMRHGKALKAVARKRLKVIYAIMRNAVPYAA

SEQ ID NO: 212947 - protein, 400 aa, unidentified
MLSIGIDVSKGKSTVCGMKPGGEIVYTPFEIQHTREGMSELVSLLHNSGEEVRAVLESTGSYHCPVVAALLENGIFVSVVNSLRMKRFCSQSIRKVKTDRIDAMQIALYGLAYWQELQPTRLPEDTYRELQLLARQYYQMTSMLIKAKVDFNAICDQVLPGMQELMNDHAGRHKLSDFVLRYRHTTHILEMGETRFRKDYCKWAEKKGYRNRERMAALIFATAQNGIPVLPNAPSTQIVITEAIRVLHTVEASRDAILTQMQALAKTLPEYSLVREMPCIGDTLAPRLIAEIGDVRRFHSKRALIAYAGIDAPPYQSGKFCANNRHISKRGNRYLRKTGYEVMQSYVMHKPANDPIFTFIEKKRGEGKSGKLAMVAGLNKFLRVYYGKVTELYRSLPAIE

SEQ ID NO: 212948 - protein, 425 aa, unidentified
MSITQNSKIRRITDSTLVVGADIAKKVHVARACDVRGVELGKTLTFHNTRHGFVGLLKWIQSLMVDHSCDNVVFGVEPTGHYWINLAQFLRHEGIQVVLVNPLHVKKTKELEDNSPTKNDRKDARVIALLVKDGRYSVPHIPEDIYANLRVGMNERDRLSGDLKRVQGHIHNWLDRFFPEFTEVFKDWEGKAALICLHQFPCPTDIQEKSTSEIVQAWRDGGISRGIGMSKANLLREKASESIGLTEGLQMGHQELAILLRQYDLYQEQLDLLMSEIERLVSQIPGTQEMMSIPGVGLVTVAGFLAEVGDLSAYDNPRQIQKLAGLNLKENSSGKHKGLTKISRRGRPRLRALLFRGVIPLLAKNAEFQELHRYYTQRTQNPLKKMQSAIALSCRLIRVLFALGRKQVSYDPMKPMHMERLQNAA

SEQ ID NO: 212949 - protein, 433 aa, unidentified
MNTPHPYDLIIGLDRSDKKADLRLITTATGQRRSEIIDTTPEALWEWLLELRQQQPQARVGLCLEQPAVHLIAFLEAYEWITLYPINPITLQKYREAFVTSRAKDDAKDADYLADLLLTHHAKLKPWAPEDSATRAVQQLVFHRRAVVDERTGLSNRLIALLKQYFPQALVLCGEDLWRPLATRFLLKWSSLQAVQKAKPASLKQFYYLNGSRSAKLLEQRLALVEKAVPVTDERALIESFALRVQLICRQLQLVQQTITLYEKQIAAAYAVHPDREIFASLPGAGAVLGPRLLASLGSQRERFSAAADLQHYTGIAPVTKKSGGSCYIHRRYLCPKFHKQSFHEFAKESILWSRWAAAYYLQQRTKGSPHQTAVRALAFKWQRVIWRCWQNRTPYQESIYEAALRKRGSNLVTLFDRVELGKSPFKSPVKKS

SEQ ID NO: 212950 - protein, 340 aa, unidentified
MEDVTLVGIDLGKHTFHLHGQDKKGKGLFRKKLNRKQTIEFFATFHACTVVMEACAGAHHMARKLASFGHQVKLISPQFVRPFVKSNKNDFVDAEAICEAASRPAMRFVVPKTEARQVLSALHRVRESLVRDRMKVVNQLHGFLLEFGVSLPVGKATISRLPAVLTEHSLPPTLVVILVRLHTHYKYLNEQVAENDKEIARHLATDELGQRLLTIPGVGPITASVLTAEMGDGTQYQNSRDFAASVGLVPRQYSTGGRANLLGISRRGDKNIRRLLVSCARSYMMRLDKQTGVLADWVRTMLTRRHSNVVACALANKFARTAWAMARHHTVFRSEGTAAV

SEQ ID NO: 212951 - protein, 426 aa, unidentified
MQPHYQCVCGVDVHKEFLQVCILRRGEDPEVFRVFNNFSGVQNLKQRVEEEGCECIACESTGVYWYRLYLAFEEQTRVIIGNAYQIKSIPGRKTDVRDAQWIAELAMNGLINPSRVFPKKDRELRELTRTRESMVNSRTQMKNRIHHTLDSAGIALGKGVNDIFGKSGIHLIWGLLNRERSEDIISNIPSARVKKKADSLREILSGSLSDLQIMLIKNNLDMMAHINEHIRALDEQIIARMGEQERIRDVDIACSIPGVSVTTAVTALAEIGDYHDFETPEKLASWAGLVPSVYQSAGKNWSGKITKHGSAHLRWILVQAAKSAGRTVNTTFRKFFNRIMYRKGANTATVALARKILCILWHLLMKKELYIDPIKKAKVTKLPLVQKFSKNSPADIQKAIDFILDSGFKVIYPDATLDQNLRGVSR

SEQ ID NO: 212952 - protein, 394 aa, unidentified
MRFAGVDIASETHVVALVDEDGKVLVKPTAFAEDAAGYEKLLEQLGASAELLVAMEATGHYWKNLFAALAARGLSVALLNPVRTHRFAQEDLQRTKTDAIDALGIARFAAQKRPVPTRLPDPATEELRELVRLRERLLQDFGDRVRQLHRLVDLGFPEFTRYVKGLDSELASAILHDYPTAAAFRGVSAKRLAGLRYDGRHQVGAELAGSLIEAAKRSVGHHHGEAYRVQVRYACEDLDILRRRLRQLDRDIEGTLGTHEVGTLLTSIQGIGPNTAARLIAELGDPAEFRAPGALAAYVGVVPGLRQSGKRKNTRAAITPTGNARLRAALWMPTLTAVRKNPWLRAHYQRLLARGKLPKVALVACMHKLLLAVYSVAKHRRPFVAQLATDQATR

SEQ ID NO: 212953 - protein, 343 aa, unidentified
MNNITLLGIDLAKDVFQLHGVNEHGKKVLGKKISRAALPIFIANLPPCKIAMEACGSANYWSRKFMSYGHTISQISPQHVKPFVQGNKNDKNDARAIVIASLQDGMPTVSIKSIEQQEVQMLHRYRESLVQDRTALANRIRGYLREFGLFINIGLSQVRKQVPLFLEDAENELTFEIREIISSCHKKLLGLDEEIERYTQKIEQFCKKNTVCERLMKLSGVGPMIASIVYATVGNPNNYKNGRHFSAFLGLVPKEHSSGGKQCLMSISKRGDRYIRSLLIHGGRAVVKNAGKKDNYLNRWVQKLHKERGYNKAAVAVANKNARHMWAIMSYGDKYIDHLKLFA

SEQ ID NO: 212954 - protein, 355 aa, unidentified
MKYYTSTTQFNCGIDLHARQMYVCLMDRDGKKLVHTNIKNNDFEFFLKLVAPYRHDLTVCAECMFGWYWLADACQAAGLQFVLAHALYLKAIHGGKNKNDRIDSEKIAHLLRSNLIPPAYVYPADKRPLRALLRQRLFFVWRRAELLARIHSHQLAHNRIPPKQTRRNRDPWEKQLLAAEDHPLRQLALKNDLAMIRHFDTQIFQLEEELQRQAKKTASRDYALLQTVPGIGENLGMTLLCEIGDIARFPTVKNFLSYSRLVKGTVASAGKIKGLRGAKLGNPYLRWAFGEAAVIAKRDHAVIGPLAQRLEARMNGNKFKANTVVAIKLARAVYFMLKGKTVFDPDRLVATLSRN

SEQ ID NO: 212955 - protein, 370 aa, unidentified
MRKSIMYVGMDQHKESIEIATADEGRDGEVRRYGRIDGELESLDRVVRKLVSTGKDLRFVYEAGPCGYHLYRYLAAQGLECKVVAPSLIPKKSSDRVKTDRRDAVNLARLERAGELTAVYVPQVEDEAMRDLSRAREDAKRAETRARQQLLALLLRHGLKYSGKTAWSQPHLRWLARIKLPQPAQQIAFQEYVDAITEAAARVERLITQIRMLLPEWRMAPVVEALQALRGVSLVTAVITVAEIGDLTRFTNPRQLMAYLGLVPSEHSSGPHRRLGAITKAGNSHLRRVLVESAWAYRLPARVTPIIRRRQEQLPKPVCEIAWRAQLRLCARYRRLTLKGKTKQVVVTAIARELVAFMWAIAVEVKVTSS

SEQ ID NO: 212956 - protein, 316 aa, unidentified
MSQAEVFVGIDVAKARLDVALHPSGETWTVPNSEAGIATLVAHLQQQPVAHIVLEATGGLELPLLGALGAAALPAVAVNPRQVRDFAKALGRLAKTDRLDAQVLALFAERVRPALRPLPDQATQALSALVARRRQLVEMLTAEKNRRGQAPPTIQADIATHIAWLEGRLERLDKELGQHLKQSPLWRAQDDLLQSVPGVGPVLSRTLLADLPEIGTLDRKQIAALVGVAPLNRDSGTLRGARTCGGGRAAVRAVLYMATVAATRCNPVIRAFYHRLCQAGKAKKVALTACMRKLLTILNAMLKHRTPWRAQVSQCA

SEQ ID NO: 212957 - protein, 375 aa, unidentified
MHMGLKGGAMNTIYIGVDFHARQQTICYLKTETGELVTRELKHQDKDLVRSFYAQFQGRVVIGLEASGYSPWFETMLEQLGCEVWLGDATEIRRRARWRQKNDRRDAELILDLMVHDEFPRLHRPAVASREVLRMLRYRQKLTKLRTISKNSLQALALQAGLAKGKHLFTRDGQQELSAVAMSPVMQWQCEHWLQLMEPLNQQLLETMVWCKEQSKGDLRITRLRTHPGIGLLTALCVVHSLEPVSRFRNQRKVVAYAGFDPVERSSAERKHFLGISKAGSRLLRWLMVEAAHTAIRYDEDLKRFYKRLAERRGRPKAKVAAARKLLIRAYIMLRDEIDYAEFQRRAVAAALARRSQGPTSVPEVLIGQPASPGR

SEQ ID NO: 212958 - protein, 348 aa, unidentified
MTVTIVEADRAVIGGVDTHLDVHVAAALDPVGGVLGVESFAASRSGYAALLEWLGSFGTVAKVGVEGTGAYGAGLCRFLVDAGIEVIEVDRPNRQVRRRLGKSDPADAVEAARGVLSGRSKGRPKSRDGKVEAIRVLLVAKRSARQGRLRAIHQMRQLSYTAPDQLRARFKGLSTTDLVAEAATLRPRSGTDPVVYATKVALASLGRRCLELDEEIDHVDALLAGLVEEAAPELLGVYGVGVDTAATLLVTAGDNPERLHSEAAFARLCGVAPIEASSGKVTRYRLNRGGDREANAALWRIVMTRLSFDPRTRAYMERRTKEGRSKREVIRILKRYVAREVFRVLPRA

SEQ ID NO: 212959 - protein, 343 aa, unidentified
MIGLDTAKTVFQIHGVDETGRAEIRRKLRRNDLIAFFEKQAACTVVMEACGAAHHWARMLTGLGHSVKLIAPEAVKPFVKKGKKNDAADAAAICEAASRPDVKFVPAKSVEQQGILALHAARSLLVKQQTMLANAMRGLATEFGITVPKGIHKLDELMAVVDADEIMPQQAKQAITGLHDYCTNLSEGIETFEAEIVAHARRDETARRLATIPGIGPITASLIAATVGDITLFKTARQFAAWLGLVPRQSSTGGKTRLGRITKTGNREIRKLLVLGATSMVYRANGWNSAVGAWLRSVLERRPVRLVTVALANKMARIAWAVMTRKEVYRPKGGVAAVAQATA

SEQ ID NO: 212960 - protein, 352 aa, unidentified
MSHTIPLTQPTPVVVGVDTHADEHEAAVLDTTGRMLAHHRFPANESGYQELLGWACAHGPIMAAGIEQTGSYGAGLTRHLLAVGVDVLEVHDTHRAVKARRGKSDVIDAEQAARKVLSGQATAVAKDTTGIVEAIRQLKVARDSAVKSRTIALQQIRDLLVTGPDQLRQELAGRTLQAKARILANGEAPGPVNTPEHAAITALARLGRRVMILDEEIRDADRDLQALIDNTAPTLRALPGVGVHVAAQLLVSCGQNQRIRSSAALARLFGIAPVPASSGKTNRWRLHRGGDRQANRAIYIVAITRLAHHEATKTYRDRRRSEGLHNPDIIRCLKRYIVREIYQALKTDLSWA

SEQ ID NO: 212961 - protein, 371 aa, unidentified
MKSILSVGMDVHKNSFSLCAYDGYTGEIVSESTFASDVKLVIKFIETLKSRHENDVEIKCGYEAGCLGYSLYKSLTARGVDCVILAPTTMQVSAKNKMVKNDRMDALNIAKNLASGSYKAVYVPDEEAVEIKEYIRMIHDFKKELKRVKQEICAFVLRHGYQYDGKSKWTIRYMNWIRELEMSEIQRETLNEYIAEMENLNDKIDRFMNRIDEMYQSDRYNEKVSKLRCFKGIDTFAAMTIQVETADFERFPSAKAYASYTGLTTGEHSSGDKNNQIGITKQGNTVIRKTLVECAQSLVKGNVYAKKSQGLKSRQIGMDVNIIAYADKATERLKKKYQKLIERNVPRNKAIVAVARELACFIWGMETGNIH

SEQ ID NO: 212962 - protein, 356 aa, unidentified
MDNRKYIGMDVHQASISIAVVDAAGKLLMECIIETKTATVLEFIQGLRGSLWVTFEEGTSAAWLYDLLKPHVTKVVVCDPRRNALLKAGNKNDRVDARKLSDLLRAGLLTPVYHGESGVRTLRELSRSYLVASKDLTRVMNRLKAIYRSWAIPCGGQQVYSPRHRAVWLEKLREAGVRRRAEQTYGQLDFLMGIRKETRKELLAESRKHPARKLLEQIPRLGPIRVALLIALMQTPHRFRTKRQLWNYCGLGLRTRSSGEYRYTGGQLQHARKPPALRGLNVNHNHDLKNLFKSAATQAGTCKDDPLGEFYQNLLAGGMEPPMARLTLARKIAAIALTIWKKGERFDPAKLKQQAA

SEQ ID NO: 212963 - protein, 339 aa, unidentified
MDHVAIDLGSRKSQICVRNSEGEILEEKRWETLDLKRYLEGRPKSRVIVETCAEAFGVAEAARELGHETRVVPATLVRTLGVGARRTKTDQRDARVLSEVSCRIDLPSVHIPKAQSRERKTVCGMRDALVGARTKVINTVRGWLRGQGRRLGKGSRVTFTARVRVACGPELPDYVERQLRVGEALTVEIDDADKAVETQADGDDTCRRLMTVPGVGPLTALRFVAALDEVGRFANAHQVESYLGLVPGESSSSERQQRLSITKAGPPELRWVLVQAAWALRTRCRQPAAVPLQLWAHRIELRRGKRTATVALARKLAGILYAIWRDGTDYDGGRGAQMI

SEQ ID NO: 212964 - protein, 389 aa, unidentified
MKFIGIDIGSEKHVVAIVDRDGNVTRKPTEFREDEDGYAKLRSLLGPSEDALVVMEATGHYWQNLFAFLASEGFKIALLNPMRTHHFAQGEEMRRAKTDALDALGIARFAQQKRPRVTPLRDDATLELRELVRLRDRMMQDLGDRARQLHRALDLTFPEFTRHVADVKTPMATTLLSKYSTGTAFRDASPADVAKLAYGPRHKIGQKLADALCAPAQKTVGRHHGVQYALQVRYACEDIATFRARLQKLDDDIEQSLQRHEVGKLLTTINGIGGNTAARLIASIDFGLFETAAQLASFIGVAPSVNHSGKHRPRRGFTSSMGNADLRTKLYMPTLCAVRVNPWLRVFYERLVAQGKPKKLALIAAMRKLLTAIFSVASSKTAFVPRLPV

SEQ ID NO: 212965 - protein, 356 aa, unidentified
MHNEVKKLDFRNQSIFVGIDVHLKQWKITILGEYCSFSSFSQNADSRILINHLNTNFPNAAIKCAYEAGFSGFGLYYDLLEEGIDCIVVNPADIPTKDSEKKLKTDALDSKKIANCLRSDSLDPIYVPSWQTIGVRNLVRTRNKLIVQRTGVKNKIKHFLYFNDINIPIGFQGTKWNKEFIGWLKQVEFHTEPSTFCLEIYLNLLSSIENQIIECTTKINQLAKQVGIAEKLSLLKSIPGIGTLAGLAILSEIDDINRFKTLDQLSCYVGLVPHMHNSGENERVGGLTVRGNKKLKSILIECSWISIRKDPAMLLAFSKLCGRMQKNKAIIRIAKKLLNRIRHILITNEPYKMAIS

SEQ ID NO: 212966 - protein, 412 aa, unidentified
MEAIIERCCGLDVHKETVVACVLIGPPEGRARREIRTYGTTTTQLEELRDWLRQVGCTHVGMESTGVYWVPVYAVLEEHFELIVGNASHMKNVPGRKTDMKDAQWIADLIRCGLVQKSFVPPKWQRALRDLTRYRRKLVEAQASERNRLQRLLETCNVKLASVATDVFGKSGREIVRALIKGEASPEQMATLARGRLRKKLDELVLALTGKVEAHHRFMLEMQLGRVEDIEANIAIVDSKIDEAIAPHRAVMKRLKTIPGVDRVVAVTVIAELGIDMSVFPTPAHAAAWSGVCPGNNESAGKRMGQQKRRGNIHLATALVQAAMGASKTKDTYLKARFWKIAGRAGKKRAAVAVAHSILNAIYHMLADSVDYKDLGGDYLDRFLNRRTEHRLVQRLRSMGYDVSPKTALSEG

SEQ ID NO: 212967 - protein, 334 aa, unidentified
MEKVTTLGIDLAKSVFSLHGVDEKGQVMLRRTVRRDQLVKVVAGIAPCLIGMEACSGAHEWGRRFQELGHTVRLMAPKFVVPYRKSGKNDGNDAEAICEAVSRPSMRFVPVKSAEQQALLAIHRVRQGFVVERTATINRLRGLMSEFGVVLPLRSIMVRRQGAAAAENLPELARRAIGDLLDQLRVLDERIYGYDREIEAQAKLCEPAQRLMKIRGIGPTTALAIVATVGNAREFKNGRQFAAWIGLVPGQYSTGGKTRLGHISKRGDAYLRNLLVQGARSVLHTAATHRDPVSRWALELQPRRGYYRTLVAIANKNARIVWALLAKNESLRTV

SEQ ID NO: 212968 - protein, 411 aa, unidentified
MDKIYDKCCGIDVHKKLIVACFRYGRKQEVREFGATTRELLSLTDWLKEGGCEMVAMESTASYWKPLYNILESSNLNAMVVNARHMKAVPGRKTDVKDAEWIADLLQHGLLQPSYIPDKDQRELRELVRYRKSLVGERTRELNRLQKMLEGANIKLSGTVSDINGKSARSILEYLLTGESIDEAKYDEMYKRKVIAHNLKATKEQIIDDLNGVMSSLQRRMMKELLIHLDELNIHIRNLDDEIDNFMKPEEKQASQSIQDVTGIGNTSAQAIISVIGTDMERFPTDKHISSWAGLCPGDNESAKKRKSGKTRKGNSLLRTTLITCAHAAVKNRKSYFHAQFMRISAHRGAKRAYVAVAHSMLIAIYHILKDGVVFKDLGADYYNQFNKERKIAAYLKKLKALGWEAPVVVA

SEQ ID NO: 212969 - protein, 426 aa, unidentified
MTNSLFIGIDVSLQSNQICVLNFDQHKFFNLKFSNTPDGCEEAINKIKNIYDKFYFDKIVIVCETTGMYSFHLACYFSSHEYLNNFNAEVYQINAHDFAKYKDSFSDVEKTDPSDAYVLADFARVGRTKALHPFRGSQYIALQRLTRQRYHISKNLVKEKLYVMNNIYLSFSGLIIADKKSKPFSNMFGATSCAIFDNFDSPDQIAETPVDTLLDLISKVGKNRTKNPNEKIDLLNKAIRSSYRLEQTAYNGINIAIASSLSTIRFLENELKQVDKAILETVNGLNSNAYNSLLSIRGIGKVYAAGILAEIGNIDYFKHNSNLAKYAGLYWNRTQSGKFEKEDRKFSRHANKYLRYYLIEATASCVRMNFPFIKNFYDSKYKEVTKHQHKRALVLSARKLVRLIFGLLRKNQYYSPIDSNTQSLIN

SEQ ID NO: 212970 - protein, 357 aa, unidentified
MQTQGRKSSFEGQKVYVGIDVHKKTWKASTCTKHTNPGAWTVTIEKPFDENLRGYLDKHFPGAEFLCGYEAGFSGFWIHDALEAKGLQTKVMHAADIPTTDKERDQKEDRRDARKIAKALKNEDTDGIYVPSKQAQRDRSVVRERYSIAKSARRIKVQIKSHLALYGIEIPEEMGESHWSRNFIKWLEQVRDEYQDDTLSLQLERLEAMRTFQLKANRKLRQLGKEERNRKTYEVLLSVCGVGPLTAMLLLTEIVDMERFSSVRRLFSYTGFIPMSHSSGDKEVHSNITNRRNKHLRTALIESSWVAIRCDTELLSKYEEYCKRMNGQRAIVRIARILLRRIRFVWLNAQPYRKALA

SEQ ID NO: 212971 - protein, 445 aa, unidentified
MHYQRFLAFIDSVSSFLSVGLDVGADCTWMSIALPNGSLVGKPFKITHSDPTSRELAVSKIKEAQETYSLKSRCFLESTGIYHIPLLCFLRDKGFDCSVINPIITKNSTNINIRKLHNDKFDSKKAALLGLNVSLKTSIIPHDSVVDLRNLVRDYYYFKDLQSAVVLKLTAELKVSFPAYAKVFSKITIQSSLKLLSSYPLAQDMLAAPKDDIVDIIRNTARFGQAYALRKYDAIIAAAQDAAVFGRALPSNAIRIRLYIDAYYEYQKHLDALLKALHETVEKLQDTLIYNQICLLQSLPGIGFLSAVVLIAEMGDFNLFSSPKKLYAYFGLDPAVKQSGKLSGDKVHMSKRGPSLARRVLHIAALNNIKVAKGSGSPVNPVIYAYYTRKCSGKKKPVAMGAVMHKICNIIFAMLRDNRPFEIITPEEHCRRFAEEYPDKGRKAA

SEQ ID NO: 212972 - protein, 452 aa, unidentified
MTADRDLAAVRRPARNVAAGASSVAGLLGCDEESRLSRSHNPRLDIGSRIEVFCGVDVARETHHAVAVDRSGRRLVDRPLPNDELALRALFAELAVHGGLLVVVDQPASIGALAIAVARSMGVEVGYLPGLAMRRIADLYPGEGKTDARDAFVIADAARTLPHALRRVGPDEQTIVALGVLAGYDADLAAESTRLTNRLHAALLHVHPALERLLGQHFRRRGVLELLAAAGTPARLRELGEDGLRTALMARSRRLAVTLPGQIMAALDEQTVVVPATEQYGRAISGVAAQLLAVLDQRVSVADELDALLAEHPLAEVLTSMPGVGARTAVALLLTLGDGSTFATAGHLAAYAGLAPVTRQSGRSIRGESQPRRGNRALKSALYLSAFASLKDPTSRAYYDRKRAEGKNHPAALLCLARRRTDVLYAMVRDRRHYEHPAPEPRPDAAKNASAA

SEQ ID NO: 212973 - protein, 405 aa, unidentified
MRYYIGVDWADTAHAVWVEDTQGTRVLERAVSHTAEGLAEWGRWLDEQRARGAELWAAIERPDGRVVDFLLDHGVLVYPINPKALDRARDRYRMNASKSDPFDAHVLAAFLRTDHAHLHALQPNSEAAQELKLLTRDYARLVRDQTRLVNQLTATLKEDSPRALEICGDVTTKRAAAFLRAYPTPAALAACSRAKWLRFATSHRWNTEQAAAFWDLLRHPQLPVPDHVVRAKRRLVLVLLLQLETVVQAVDDYRKAVMEFFAQLPAAAWALTLPASQGTLVPTIWAELGDAAGRWASWQHLQGHSGVVPVTRSGGKSHAVCFRFACNLHLRRALQQFAFCSLKSSEWARAYYDQQRARGHWHQAALRALAAKWVKIIFVLWTSHIAYDENHHLATMARHHLRQAA

SEQ ID NO: 212974 - protein, 435 aa, unidentified
MSFTSPASIDPVWAAFAAIDWASQKHSWSLLPAEGGSIESGQLDNTPEAVELWAAELRRRFPPAPIAVALEQKRGSVVYMLSKYQHLVLYPVPPSMSAAYRRAFCPSGAKTDPGDANLLLDLLVHHRQQLSPIATDTAETRLLRFLVEQRRQLVQQKVGLIQQLTDSLQQYFPQIRTWFGSLDTVLVTALLHRWPTLSDLQHAHPGTLRRFFVDHACRNDDLIQQRIQAIYAALSATTDPVVIEAGTRKTAAIGSLLAAAREQIHALDKRIAAVVADHSDAELFASFPGAGAATVPRLIAAFGTDRNAWTSAAALQCFSGIAPVHKSSGNSTVVVMRHACPKFLRQTFHEFAGQSIRFSEWAKAYYRHQREDQKASHHTAVRSLAFRWIRILYRCWKDRQLYDERLFLEAQGRRNTPRTGWNTAAGFHKPATPNS

SEQ ID NO: 212975 - protein, 363 aa, unidentified
MFTERTSIGLDVHARSVVAAAIDGVTGQVSQTRLTPSYEHIQEWIKQLPGPVAVADEAGRTGFGLYRALTGAGIRCEVLAPSKLQKPAEDRVKTDARDALHLARLLRLDEVTSVSIPSVNREACRDLVRAREDCRGDLMRARHRLSKLLLRHGIVYHGGAAWTDAHDRWLRARAVPQLLTPATRMAFDSDYEHVLMLQARRQCLDSAIEDIAADSEFTAVVRRLSCLRGVGTLTAFALAVEIGDWDRFTGNTIGSFVGLVPSESSSGSTRAQGPITKTGNTHVRRLLVEAAWHHRPKYQVRAVMRSRWELAPAAARARGHEGNRRLHNRWLGFLARRKRSTVANVAIARELAGWCWSLAVMDD

SEQ ID NO: 212976 - protein, 343 aa, unidentified
MVMIGIDAHKRTHTVVVVDERGRQLAQRTTGTRSSDHLELVAWAARHGQHVWAVEDCRHLSRRLERDLLAAGERILRVPPKLMANARDGARSFGKSDPIDALAVARAALREPDLPLARLDGPEREVRLLVDHREDLVQERTRIISRLRWHLHELDPAGGPVPRSLNHLRNLDLLAKRLAGVEGTVARIARDLIERCRSLTIAITQLEREISQLIEQLATALLAICGCGPLTAAKILGETAGIERFKSPDAYARHNGTAPLPVWSSNRARHRLSRTGNRQLNAAIHRIALTQARHHPPAQAMLARRRAGGDGGLEALRVLKRRLSDVVYRALRADTTATLAEAA

SEQ ID NO: 212977 - protein, 401 aa, unidentified
MSKNNTRNALDTSLSYAVIGLDLAKADCAVAAVPCSDDELGLIDRMDYESLFEQAEKLEPTLFAMEPCCGYSQISLRLQNMGHEVKVISGHAVKNWIATHKSNQKTDLNDATALAKLALYDHDLQPIRVKNVEECRIASVQAIRIQLRTQATKSLVCFKSLCQCWGIVIRRGSSNTKKMAEAVAAVEKLLGAEVASSLMILRDAYKFTMKQINALDKLLDALVEANEQARTMKTVLGIGTQTAARLAVTTGDIKRFPMPRSYVAYFGLAPRNIITGHSGTPSPSKRGALKPVSSRGQGKVSRRGDRVARSFIIQGAATIYMLYCKDMLPECQLRRWLHEQIKRGKPYGKIIVSLAAKLLRIVWALLTYGEKFDSHKAGVPRSVLAAMEKPLKHDAAAESAA

SEQ ID NO: 212978 - protein, 342 aa, unidentified
MQIAILGIDLGKNSCSVVGMDVAGRVVLRRRLHRDGVIKLAAGMSGCVMAMEACCGAHHLGRLLRDHGHQVRLMSPEYVRPYVKAQKNDDRDAEAIAEAATRPTMRFVELKSEAQLDMQSLHRARDRLVGERTALINQLRAVLLERGIVVSQGRRKLECYVDALLAEEEIPLSPRTGLLIEDLRAEWRELDRRILAFDDEFAAQARTDETARLLTSIPGIGPLNATALTAAIGNAQTFRRGRDLAAWLGLVPKQVTTGGKPKLLGISKRGNGYLRKMLIHGARAALPTLSKGETPLGAWLRGLLARAHVNTVVVALAAKLARIAWAVIRRGEKFNMKAATAL

SEQ ID NO: 212979 - protein, 425 aa, unidentified
MTYRIAGIDVHKRMLAVVIADVAVEGEYQFERRKVGTSPSDLCRLADWLVAEQVEEVVMESTAQYWRPVWATLEQWWRPKLRESAGARSGQLHLAQAQSNRGAAGRKKDFPDAERLVKRLVAQELKLSFVPNVEQRLWRTVMRRKHQLTRNRVQFQNRLECLLEEAHIKLSSLVSDLLGKSARYMLQAVAEGETNPETIAALADHRLRATAPQLRDALGACRDLHPVYRQLLKMALEELKLMEEQIDKLEQEMASLLSAQQDVVQRLAEVPGLGVDSAQQIIAEVGPEATAFPSAKHLASWVGVCPGEEESAGVNYSHRSPKGNRQMKGLLNQASNAAVKTKGSIFEFIYRRLVPRLGHAQAIGAIAHRLCRLIWIILHRAIRYEERGPAVSRSKTERRAAKMIRELRRLGYRVEPVACQTGVSV

SEQ ID NO: 212980 - protein, 355 aa, unidentified
MDSKKYIGMDVHKESISIAVRNDVGKIVMECVIETKANIILDFIHGLRGELHVTFEEGTWAAWLYDLLKPHVTELVVCDPRKNASMREGNQSDKIDALRLAELLRLNHLSPVYHGEHGLRRLKELVRSYLTITKDLGRVMTRVKAIYRSWGIPCTGKQVYAPRHRAEWLGKIGEPGVRRRAEFYYQQLDALRTLRQEVRRDLLAESKKHQAWKRLCQIPSIGPIRAAVLLGVLQTPHRFRTQRQLWTYSGFGIETQSSADHRSVNGQLQRVKKPSSIRGLNRNCNHDLKNLFKGAAIVASSKPGPFQEFYTALLSKGIRPEMARLTLARKIATIALMVWKRGASFDAQYLKPQTA

SEQ ID NO: 212981 - protein, 320 aa, unidentified
MEHAQVFVGVDVGKQYLDVAIGREPPRRVGNDEAGIGELLAILRSRPPTLVVMEASGSYHRRLLASLTVAGVAAVAINPRQVRDFAKALGRLEKTDRVDARVLALFAERIRPEVRPVADEQTELLEELLNRRRQIVEMLVAEQNRLKQVHSKAVRRDLEQHIAWLKKRLRDAEKDLDSTVSLNPAWHAKVELLQQLRGVGRVTAITLLCAVPELGKLNRRQIAKLVGVAPLCSDSGKHSGPRRIWGGRSDARAMLYMAALVATRCNAAIKAFYQRLLAAGKPKKVALVACMRKLLSVLNASMRSHLQQPITATGCSSLQK

SEQ ID NO: 212982 - protein, 328 aa, unidentified
MSAIVCGLDVHSESTYATVLGPDGKIVAQNRVPNEFVPDFLKPFGVGKVGLEASTHVAPLYRRLVEEGYDVLVSHPKKTRYIAEARIKSDRVDSKAIAELVRLDALPLSYMPPKNIALLRESVRRRTFLVRERSKLMVKIRGVLAYEGLKPPEEYGLFTRRGVEWLQSLGLDPVDCYLRVMAPLSGEIRRLSRELRHLAEEDEEVNLLTTIPGVGYYTALLVWAEVGDIHRFRTGDQPCSYAGLVPSTHSSGGVTRHGGITKEGSRWLRWVMVEAAMTHLKYDTPITRAYHRIAERRGRKTAQVAAARRLLMCCWSVLRSKRSYHDQA

SEQ ID NO: 212983 - protein, 368 aa, unidentified
MKYIGIDVHKKICVACIKDEGGTTLTEIKFSNNKEGFNHLFSVVGEPEARAVMESTGNYWLQLYDALEAQGIEVILANPRKTRVIAESNLKTDSVDAAMLADLLRANLIAPCYVPPPEVRDIRALIRERMSLKKECTRVKNRIHSLLAKHELPPFPGSDLFGKKGLQWLEDQKEHLLSVDWIILEIELVRLKTLVGLIEKINGDIAVIAQQTEEVSLLMTITGVDYYTALLFTSEIGDIHRFSSSSKLSSWIGLVPRVHQSADTYYHGRITKQGSPLVRWALIQAAQVAVRWDSHWREVYERISSHAGKKKAIVAIARKLAVTMYCMLTRKEPYRYCNEETYRRKVKKLERIINTTPKNRGEIVLLSS

SEQ ID NO: 212984 - protein, 319 aa, unidentified
MRKHSIICAGIDTGKRKLDVALDGCPDEQLQVPNSEEGYQRLSAWLRQRKVKRVGIEASGGYEQAVVCRLRRAGFSVVVFQPAQVRAYAKFHLQRAKNDKIDAALIAACTAAVRKLHAAPDPRLIRLAEHQTLIDQIVDQISRIKNYLESCRDPRLRRFWQDEIKRFRGLFKTELKALVAAIRRHRDLSERLDLIASVDGIALRTATAILVRLPEIGRISREQAAALAGLAPYDNDSGERDGARHIAGGRQRLRNSLYGAAFAASFHWNAELIELYKRLIAAGKEHKVALVACTRKLLIFANAVVARGTPWESRAATTR

SEQ ID NO: 212985 - protein, 429 aa, unidentified
MNYTQNEKIKQVDEKTLVVGVDIAKETHYARTFDNRGIEYGKVIKFKSNRDGFEAFKKQIKEIAEITGREKIIIGIEPTGHYWYTLANYVNKRGMKLVQVNPYHVKRAKELDDNTPSKSDRKDPKTIAMLVKDGRYAIPYMPEGIYAEIRKAYDIRETINKKLLVVKNRIQRWVAIYFPEYKTVFKGIYGKASIITLEELSIPIEIIKLSAEEIVEIWQKEIKRAVGIKRAKSLIEAAKETTGLTNGLEMAKYEIKKLIQEYKMLEEEKAELEEKLKRKVYKISGVEKALSIKGIGIITISGFIAEVGEIKRFDHAKQIIKLAGLNLRENSSGKHKGETKISKRGRKRLRSLLFKSILPLVAQNKEFKLLHRYYTTRKTNPLKKKQSLVALMGKLIRIIYTLMTKKKEYDPEKLLKDIKGPKRQSFLAA

SEQ ID NO: 212986 - protein, 421 aa, unidentified
MSTPACAKFAAQIGLDWADTKHDFCLQPGRGGPREFGRFSHQPDEIDAWVQGLKARFGGPIAIALELARGPIVYALQKYDFIVLFPIDPSLLAKYRVAFKPSRAKDDPTDAELALELMLRYPERFHPLHSQSVAMRTLGYLVQQRRMLVDDRKRIVNRLCNALKQYFPQALDWFDHRDTPLFCDFLSRWPTLQQIKRSRVATLERFFHDHNVRRPALVTQRVDGVQRAIPLTEDAAVIQSFQLLATTLVDQLRILLQAIARFDAAIAAVAPTLPDYKLFSVLPGSGPHLAPRLLTAFGEQRERFQNAGQLQRYSGVAPVTQRSGKKSWVHWRWQCPTFVRQTFIEWAAQTINKSFWAGTFYQQQRAKGCPHQVAVRALAFKWIRILYRCWVTRTPYDESRYLKALQLRGSPLLAGLRPKTT

SEQ ID NO: 212987 - protein, 336 aa, unidentified
MNYYVGIDVSLEASSVCVVDSSGKIACEGKIRSEPDDLIEWLTALKLELTRIGLEAGPLSQWLYAAMRQAGLAVELLETRHVRNALKTMPVKTDRNDARGIAQLMRLGWFRPVHCKSMPAQETRALLAARKVVQVKLHDVEMSMRGILRGFGLKVGKTTPAHFEGRIRELTAGHPSLEAIAAGLLAVRAAMRRELDRFEKQVRALARCDTRVRLLMSVPGVGPIVSLTFAAAIDDPARFKSSKQVGPHFGLTPTKYQSGETDINGRISKIGDSWVRAGLYEAANIILTKPIKGCTALKSWAMKLARRAGMGNAQGGAGTQTRRHHASDAGRWHELP

SEQ ID NO: 212988 - protein, 336 aa, unidentified
MRYIGVDLHTTQITVCYLKAEAEFEIRKYQLVEMDKFVNTLEAGDEIAVEATCNTRWFAEQVQEKVSRVVLVNPREFEVVKNSVKKTDKNDALNLARFLKADLLPEVRAKREETERVQSLVNTRTKLVRLKTSLINKIHALFVSNGRKLKKASLASDKGLEKVLLSEWSAIERIELEIIIEQIRSLKVSIKKLDTAIEAESGKLKGFESLVSMSGIGSLSAGILLAVIGNIKDFATADKLASYFGIVPRVSNSNEKVNHGRITKRGNKTGRTTLVQCSLAAIKKSEYLKKYYEQVKARRGHGKAKIALARKYLGIIYNTLSNNWVFADFNNFELAE

SEQ ID NO: 212989 - protein, 414 aa, unidentified
MGSGCKFCIGGMNVNCVGIDISKGKSMIAVMQPLGEMVIPPFEVGHTDVALCELSRLLGKLDGETRVVMEATGSYHLPVASFLYDSGFYVSVVNAMLVHGYGNNSLRRAKTDKKDAIKLANYGLDHWLTLPRYIPEDEVRLMLKTTYRQYQQCAKVQTMLKNNLISLLDTAFPNANRLFTSPARIDGSEKWVDFVAAFPHCEYVCGLSEKAFTAKYQKWCKKHGYNFSQDKALDIYTSVCGYFSVMPRTDTSKLLVDQAVSQLRATSAALAALRNEMQSLAASLPEFPVVMGMFGVGPALGPQLMAEIGDVRRFHSKKALVAFAGIDAPPYQSGQMEVRSRSISKRGSSALRRTLFLVMSVILQHSPSDNPVYQFMDRKRTEGKPYRVYMMASANKFLRIYYATVKRHLDSLEA

SEQ ID NO: 212990 - protein, 357 aa, unidentified
MKDNLTQTKPPEPALLIGIDWADQKHDTYTIDRQGHGVWEQIEHSPEAIDAWLAEKLRQADGQPIAILLEQSRGALIHTLMFRKNVILYPINPKQFARYRESYSNAGCKDDPTDAQLLARMLRERIRLLKPWRPDDESTRLLARLCQTRRQLVNERTRLTQQLIDQLKAYFPLVLEFNSSQSVSSLVLELLRRWPDPRCLKRADRRVLHRVLREHGYRNEDKRQEVIERIRSAKLLSRDRALIEPAAIVVQCLARQIPVLEKSIDELETTIDKEMANHPDAKLFTALPGAGKTLAPRLLTAFGSQRDRFASANEVATFSGIAPVTKRSGKSCIVHRRYACPKYLRQTFHEFADHARK

SEQ ID NO: 212991 - protein, 360 aa, unidentified
MAKARSLVGLDVHATKVVAAVLDAETGEVTFFTLGGDVMEAAGLCAGLPRPVRATYEAGPTGYALARELMRRGVEVVVAAPSKIPRASGDRVKTDRRDAELLVRLLLAGKLHAVRIPGLQEEALRDLVRARDAVRQDLMRCRHRLSKLLLRHGHRFEDGPAWTQRHRDWLAGIDLGWPAAQATMLDARGAIDALVHRRDGLEREIVALLPSSPWALQAGRLRCLRGIDTLSAVGLCAEVGDFERFKRAEQLMSYVGLVPSESTTGQQRRQGAITKTGSGHARRLLVEAAWHYRKAPRIGKALTDRQDGQPAEAVAVAWSAQRRLNRTWARLEARAKRRTIIAVAAARELTGFVWAITQIE

SEQ ID NO: 212992 - protein, 314 aa, unidentified
MAKTDFDELMSIGIDIGKDTFHLVGFDHDGQRVLRKQIKRLALVATFEKLPRCIVGMEACLSAHFVSRTLRQMGFEPRIIPAIYVKPFTKGQKNDYNDAEAIAEAALRPNLQTVSEKSQDQLDLQALHRVRSRLVSRRTATINQIRAFLIEQGITVRKGLRALRNSFEAILEERKGEISPRMRSILIGLYGDWMWMDDRIDKLSAEIEEISRTEENCVNVMSVPGIGPMISTAMVAAIGEGEAFDRGRDFAAWVGLVPRQYSTGGRTVLGRISKRGSRYLRMLFVQAAKIMKMREEIKKKTIKKRRLQHQSAAA

SEQ ID NO: 212993 - protein, 409 aa, unidentified
MQVMHQVCCGLDVHKKSVTACVVWATGRRHQTREFGTFTKDLLELGDWLRSCGATHVAMESTGVYWKPVWNLLEGQFEVLLVNAQHIKAVPGRKTDQKDSEWIADLLQHGLLRASFVPPTPIRELRDLTRYRASLAQEINRIANRIQKVLEDANIKLASVATDALGASGRAMLEAIIHGEQDSQRLAEMSHGKLRNKIPELQQALQGRVTAHHRFLLRELLDHLYFVESKMRRIEQEVEEQLRPFQSEVARLCTIPGVDRVTAWSLLAEIGLDMSQFPDAQHLASWAGLCPGAHESAGKRKSGKIRKGSLWLRRCLCQAAWAVSTKRNNYLSALYRRLAARRGKKRATIAVAHNLLVIAYYILRDQTCYRDLGSDYFDRINPAGLRRRLTKRLEGLGFKVTLEPVAQVA

SEQ ID NO: 212994 - protein, 340 aa, unidentified
MNTTLIAVDLAKSVFEVAVSHAPGRVHERHRLSRPRFRRFFADRAPALVLLEACSSAHQWGRELQGLGHDVQLLPPSDVARYRDGNKTDRADAKALLEAARNAAVDRVPVKSVDQQALTALHRLRQGYLQTRTARINTVRGLLREFGITIPTGPASVLPRARAALATDLLPVYLRHALQDALEEIATLEARAQALQDQLANLAEHLPAVALLLSVPGVGILTATALVAFVGTIQRFRSGRNFAAYLGLTPREYSSGLARRLGGITKRGNSYVRMLLIHGARSALRAGHVAPHPDDLRTWALALQRRKGHNVAAVALANKLARVCWRVWRDERPFERREPA

SEQ ID NO: 212995 - protein, 405 aa, unidentified
MRYYLGVDWADQTHAVWVVDESGTKIAARAVSHTAEGLGEWGRELDEWRAQGIDLWAAIERPDGRVVDFLLDHGVVVYPVNPKALDRARDRFRQSGAKSDPFDARVLADFLRTDHAHLRALQPSSEAAQELKLLTEDCQRHIRQQTRLVNQLTATLKAYYPRALEVAEVTSALAREFLPAYPTPEALTALTERQWQRWARAHRLPEARAGELWAVLRQPQLPVPAHVVRAKARLMQTLMEQLRPVVAAVAQYRKAIDDFFASMPAAQWARTLPIGKHGITAPTLWARLGDAPGRWESFRHLQAHAGTVPVTKRSGKQQRVVQFRFACDKALRSVVDQVAYLSLLSSAWARPYYDQQRARGHSHRQALRALGAKWLKIIFIMWQRQVPYDEQYHLATMTRQQLGRR

SEQ ID NO: 212996 - protein, 346 aa, unidentified
MEIIGLDLHKRESQLCRRHPDGRVSDERIPTTRESFTAALGGIAPARILLEASTESEWVAAHLEQFGHAVTVADPNFAPMYATLTRRIKTDKRDARALMDACALGAYRPAYRLSAARRHLRAELAVRDALVHTRTRWIALCRTRVRAVGLRVPSGATPTFGARVAALDLAARAPTLGTELAPLLALLPGVSAAIAAAEARLAALAAADPVITRLATAPSVGVITAAGVVAVLDDVTRFRSAHAVEAYLGLVPREDSSAERRHRGGITKAGNTRARWLLVEAGWRLLRSTAPEAAALRSWGQGVAQRRTKRVAAVALARRLAGILYAMWRDEADYDAARLRRRPPRA

SEQ ID NO: 212997 - protein, 446 aa, unidentified
MPLGRWQGVKLLHERVAGIDVHKDMIKVAIRSPGEKPWTRKTEVFEFRTFYGVLQEMGRQLRHRGVTHVAMEASGVYTDPVYYALTELDFTEVIVVNPAHVKAIKGHKTDAKDCARLAELLECGLLHGSFIPSAEQRQVRDLTRYRMKVVQARASEIQRLQKALESAGIKLDSVLSDITGVSGRLMIDALIDGERRAQVLADLAKGTLRSAGKQADLSMALAARFTDHHAMLCRLHRDQIKLHDHAITGLDGQIAGRAGRWPRQLGLLKSVPGFGDVVSAAWLAEIGPEPHRWFPSHDKLACWVTVCPGNNISARKRKSGRTGEAGTYIKPVLVQAAWAAIRVRGRLQARYRRLVRRFGGDKNPGAKKKAIIAIAHTLLKIAYQVLKTGQPYTDLGADFYTRRESPEQQHAYLERRLQKLHPGCTITVTVSPPPGDPPPGTPAEAA

SEQ ID NO: 212998 - protein, 478 aa, unidentified
MVAARPTELNRKQRKELARRLRVEDPGLDVMHPHAAGIDVGNSTHYVAVRPDRDPDSVRRFECFTADLHRLADWLQHCGVTTVAMQSTGVYWIPLYEILDARGFEVYLVNARHTKNLPGRKSDVQESQWLLKLHTYGLLRNSFHPPAEIRVVRTYWRQRGDHVRAISTCIQRMQKVLTQMNIQLANVISDLSGWTGQRIVRAILAGEREPDRLAALSHPGIHATRDTIAKSLEGTWQPDLVFVLQQEVAMYDAYQERIAECDQALEQHLKGVADKVPDTALDGEPSPTTPRARLRSGPKRRRKAGSHAPQFDLGRELHRISGVDLTRIDGIDVGVAQTVISEVGVDMTRWKTEAHFASWLGLCPDNRITGGKVIRKGTRHVINRAATSLRLAATTLLRSQSYLGAQYRRLRARLGAPKAITAMAHKLARLVYRMLKWGHEYVDKGLQYYEQRHREQQVQLLKKRAAKLGLQIVEPDAA

SEQ ID NO: 212999 - protein, 346 aa, unidentified
MDIYIGLDVSLASTAVCVLSSHGKMVKEITALSEPDDLERVLQSLLGTVVAVGLEAGPLSQWLYRHLTEAGFDTVLMETRQVKGALKAMPIKTDRRDAEGIARLLHMGWFRPVHCKSISAQKMRALLSSRKAILQAIVALELSIRGVLRNFGLKMGRIAKGGLEDRVLELADGNVMLQAAARPVLSARAALRLELAGLEKRVRDHAKSDPVCRQFMTMPGVGPIVALTVKSAIDDPERFRSSKDVGPWVGLTPRREQSGERDIMGSISRAGDAGLRTALYQAAMVMLHKGRPNWLTAWAWNVAKRRGKKRATVALARRVGVVLHRMWLDGSAFRFTQAEAAAVSGA

SEQ ID NO: 213000 - protein, 355 aa, unidentified
MNKVKTNFEGQIIYAGMDIHKASWNLGLHLGDQFIKNVHQKPNPVVMANYLKQHFPGAKYVAAYEAGKFGFWIQRQLTALGIECLVVNPADIPKSQKDSLQKTDARDARNIGLRLQSGVLRGIFIPDEQQEADRIFFRHRKRIWKDLARCKNRIKGCLAFSGIDIPEQYDNASWSHNFINWLKALDCVQKSRRRALDYMIMQMELLRKELLAISNEVRKMMREQRYNKNYYLLRSIPGIGPLTAASILVEIGDVTRFETFYHLNSFVGLLPMEHSSGQSENKLSLTVRKHRQLRSDLVESAWTAKRTDPAMALYFQEQVKRKDSKIVIVKIARKLLNRIRYVLLNQQPYEYGLVK

SEQ ID NO: 213001 - protein, 341 aa, unidentified
MENVALIGIDLGKHSFHLHGQDRHGKVVFRKKMGRKQMLEFFATLHACSVVMEACAGAHYMARKLAGFGHMVKLISPQFVKPFVKSNKNDFVDAEAICEAASRPSMRFVTPKSESQQTLSALHRTRESLVRDRTKTINQIHGFLLEFGINLPVGQAVMTRLPAVLAEHSLPPRLVSTLERLHEHFKYLSGQIADLEKEIKHQLAEDDLGQRLMSIPGVGPITASVLATEMGDGKQYGCSRDFAASVGLVPRQYSTGGRSNLLGISKRGNKNLRRLLVQCARSYMRRLERQNGLLADWVRRMLTRRHANVVACALANKLARTAWALATHHTTFNAGEAAVPS

SEQ ID NO: 213002 - protein, 408 aa, unidentified
MFIVGIDIAKKTHVAAITDDTGKCIGKAFKVSNSVEGFNTLLQKLAEISTDISQFVFGMEATGHYWLNLYTWLGDKGFTIHVINPLQSDALRRLQIRRTKTDPIDAQLIAECIRLGKYCKTNLADDDMLALRDLTRQRFYLVDMAGDIKRKVISMMDRIFPEYESLFSDMFGRTSCQLLKECTTPEEILAVDTERLCEILRKSSKGRFKQQKADQVRESARNSFAVLLSSQSLSLLVKQMIEQLELLESQIGQIESLIEQLYAKFNCKLTKIHGVGITLAAVILSEIGDISRFQTPKQLTAFAGLDPVIKQSGSFSATTVHISKRGSPYLRRALWLAANTVKQWDPVFAFAYQKKINSGKNKTQALAFITHKLLNVVFTILKNNIDYLPLFPPDFDSNQLPQNFHFTP

SEQ ID NO: 213003 - protein, 340 aa, unidentified
MGVFVGIDVSLENSAVCAVDEHGKLLKETKVASDPGALNACIRSMPGVVEAIGIEAGPLSQWLHKSLTDLGLPVVLMETRQVKAALKAAPVKTDRRDAAGLARLLQMGWFRPVHCKSLSAQELRVLLGARRSVQDAAINIEMSIRGMLRNFGLRLGRIGKVSFEDRVRELTDGNKLIQLSIEPMLRARAALRSELVRLERMARDITREDPVCRLMMTMPGIGPVVALTVRSTIDDPGRFRRSKDVGPSIGLTPRRYQSGETDIIGGVTKAGDMDMRTALYQAATVVIHRSKKPTWLRAWAERVVRRRGVKRAAVALARRMGVILHRMWVDNTEFQAARMA

SEQ ID NO: 213004 - protein, 349 aa, unidentified
MNQIMRIGMDTSKYIFQLHGVDGSEQVVLRKRLSRKAMLEFFARLSPTVVVIEACGAAHHVARELGKLGHTAKLIAPQLVKPYVPRNKNDGRDAEGLCEAASRPRMRYVPVKTAEQQAALMLLGIREQLVARRTQLSNMIRGHAAEFGLIEAKGLDKLASLLAAIERDENLPVLARELFAMLAREYAQVQVEVKAIEARLLAWHRADAVSRRLAQIPGVGPVTAAALVMKAPDPHAFRSGRLFAAWLGLTPKDHSTAGKTRLGRITRAGDERLRQLLVVGATSVVKQAKARGRGPRWLIELLKRKAPKLAAVALANKIARIAWKLMTTGESYDGARIEARTEAQGAAAA

SEQ ID NO: 213005 - protein, 406 aa, unidentified
MDGPIITVDVSKGNCHYQPWLTAGHSLRKPKVLNDTKDGFEALSETIEMVKEKSEADTVPVVFEATGIYHRCLQKYLDDIGNPYIVVPPLLSAAYRKTNLHGNKTDNADCAHIAKVYYQEEHLQCHQNESDTYARLRAKNRMYESELKILRQRKCTFRAMLDVIYPRMDKCFKGHASLYDSVPMEVLKKYPHPSLLLRHREETIVKAIRKPAGHKKGFTENIVHKMYQCAEECYSGVDADSVEVQQFPQMINELMEQMELCNTYLEELIEDASKLPSFAILLSIPGIGRNIAARIIAEIGDVTRFRNARGIVAYAGLNPKINQSGEKDGTHLAISKKGNRHLRCLLYLAVTCNYRLKKGDSIYQFNQKKRQQAASPLKPKAANIAAADKLLVVIYSLMKNGSTFRS

SEQ ID NO: 213006 - protein, 430 aa, unidentified
MWRGDEAAVLAESDDQEEIIAKVAALDIGKAELVCCARLPAPDGRRKRLQEVSTHSTMTASLTELANHLVELGLQRVVMEATSDYWKPVFYLLEAHGLDPWLVNARDVKHLPGRPKTDVIDAVWLCKLAERQMLRPSFVPPLPIRRLRDLTRYRVDLVAARTAEKNRVEKLLEDACIKLSVVASDIFGVSGRAMMAALIAGERDPKVLAQLARKRMRTKIAQLEDAFNGHFDDHHRFLLARMLGRIDSIDADIAAVDEQIEAHLAPFAEATARLDEIPGIGPIAAAAIIAEIGLDMSRFPTAGHLCSWAKFSPGINSSAGKTKGNGSTGHGNRYLARSLGEAAVVAGRTDTFLGERYRRIAKRRGKKRAMVAVGRSILVIVWHLLANDHATFTDLGPDHFTRHLNPDRHKRNHIRQLEALGYTVTLTPAA

SEQ ID NO: 213007 - protein, 365 aa, unidentified
MKKKFHSGKREIPIGGNSYCGPIDNGPEDPPVTDPLLSESQYLGIIDSKDKRLFGKRLSNSMDTIKNALEPFRRGLIGVVVESTYNWYWIVDGLKEAGYRVHLANPSAIQQYEGLKHTDDKWDAFWLAHMLRLGILPQGYIYPKQDRSVRDLLRRRLLFVRQRATHILSLQSMITRNLGTNMSANEIKKMKEDTVCNLFDDPYLILTAQSNLSTIEFLKTKIRHIEKAVLSRMSLRPEFEILTSIPGIGNILALTIMLEIDNINRFVKAGNYASYSRCVKTQRLSDNKKKGEGNRKNGNKYLAWAYVEAAHFIIRYCPEADRFYQRKKAKVNGALATKALANKLARASYYMLRDQEVFDKDRLFR

SEQ ID NO: 213008 - protein, 320 aa, unidentified
MSKRKSKLFIGIDVSKNLLEVAAHESDYQFRCANKAKAFGELIVELIALRPALIVLEATGGLEIPVVAALHAAGLPVVVVNPRQVRDFAKALGQLAKTDRLDARVLAHFAAAIKPPLRPIKSADEVELDALVGRRRQLVEMLTAEKNRRGSAATDTVREEIKEHIDWLEERIAELDEQLKAQLKNSTLWQARDDILQSVPGIGPVVSFSLIADLPELGTLNRQKISKLVGVAPLNNDSGQQRGTRHIYGGRARVRSMLYLAALTATRFNPVIKEFYERLLANKKLFKVAITACMRKLLAIINVMVRDSTLWKTKNEPVSA

SEQ ID NO: 213009 - protein, 459 aa, unidentified
MRILGIDLAVTARHRAILADERGQFISRLMKFRTCKADLDRVYATACKGMAPDESLVVVLEATDIVWYPPAVYFLQRGATVYVVNPRMAADLARFYKRHAKSDRLSAKVLARLPVVSPDSLYPYVLPGPDYMALQRGCKELERLTTAASAIRNRLQSIDHLGWPDLKRRVFADPFSPAARWFRDHVYDPRQVVEAGPSGLRQAWRAAEELYNGDEDWIEPLVTLAAEMLTLYGPQGDYLDYAALAAEVQREQRRLAALEAEAHFVRLKVTRPLYRRLHPSRNLETLYGVGQDGAAVYTAFIHHPDRFPNNRAYRGWHGMVPRSNQSGERESKGLSISQAGPDPIKKYAFLGSETARQWDPQIADIYHDQMVNKGKHHTQAVCACATHLLDRIRVILLEDRPYELRDVDGTPVTHQQARAIIAERYTVPDEVRQRNNNRARRERAKRRAERKEERRSRSR

SEQ ID NO: 213010 - protein, 343 aa, unidentified
MELRAIGIDLGKTVFHLVGLDSSGKIMVRQRCSRRQLLAYTANVGVQVIGMEACSGAHFLGRALRDQGHNVRLMPAQYVKPYIKTNKSDYIDAEAIAEAVQRPTMRFVPIKTEEQLDLQAVHRVRERWVMRRTAVVNQIRGLLLERGLTLSKGRSHVDRALPEILTDPALRLAGSFRVLLGQLQVELEQLTARIEQMDAVIQQTARENEACQRLTAIPGIGPVTATALVAAIGNGAGFRRGKDLAAWVGMVPREYSTGGKQKLLGISKRGNSYLRRLFVQGARVVMQYRTKQAPALSIWLSQLMARTHQNVAVVALANKMLRMAWAVLCKNETYRIPALATAP

SEQ ID NO: 213011 - protein, 451 aa, unidentified
MKKKKMTLDIVNPDCAGIDVGSRSHFVAVGQALEDVKEFGVYADDLTAICLHLKDYGINSVAMESTGNYWQNLFVELQRHGMKVILCNGKFTKHPKGKKTDVKDCRLIQKLHALGFLTSSFLPDETTEQLRTYCRQRTNWIELAAEASNKMQKYLKLLNFRLDVVVKDICGLTGLAIITDICKGNLDPEKLSELRHGNCRKSKEEIAKALKGNNRPDFLFGLKQEHETYLFYQNKIDACDLQINSFLKTQINTDPDKRILHTDDKIYKRVNKNAIKGIDLNQAAYQYFGGVDLMKIEGLSHSTILTIMSEIGPDGFSKFESAKNFTSWLRVAPNNKKTGGKIISNKIPKGSNRLKIALRQAANAIGNLKDTHLANFFKKIAYKKGRSAAVSATARKLGVILWNMITKKTPYKPHTDYLFLDQKRKLRLVQNIKKNIAKFEIKPEDVGFVTA

SEQ ID NO: 213012 - protein, 338 aa, unidentified
MKITTIGMDLAKSVFQVHGVDERGKAVLKKQLRRQQVAQFFANLPCTVIGLEACGSAHHWARTLSRLGHDVRLISPQFVKPYVKTNKNDAADAEAICEAVSRPNMRFVPVKNVEQQAVLALHRARQGFVKARTAQANQIRGLLAEFGLIIPKGIAHIAKCVPDLLEDASNELPSTFRALLQRLTEHLQELGRQVIEIEQQIATWHRQNALSQKIIAVPGIGPITASAVVATVGDAKNFANGRQFAAWLGLVPRQHSTGGKQVLQGMSKRGDVYLRTLLIHGARAVITRARARTQPSPAGWLSRLIDRRNVNVATVALANKNARVVWCVFHAIVNRVST

SEQ ID NO: 213013 - protein, 340 aa, unidentified
METSIKFYLGIDVSKSWFDVSVLKVVNYEKQPMLTEQFLNTKEGISSFQKWLEQLGVPFDENTLIVIENTGIYHRPLWEFCSKHNLPLHIGNAANIKWSLGITRGKNDQIDSKRLCNYCCKQADELKATAVLNPVFMNLKDLMTSRTRLVTQLQATKSYVKELLCTNDKALLKTLEKAHKAAIDGVEKSIAQIEKAINDLIIADEKIYRNYELIKSIPGIGSITAIYIICCTNNFANKPSGKQLASYAGVVPFEHSSGSSVRGRNKVHKMANKELKRLIHMCAVSSIRYSKEMKAYYERKKAEGKPGLSVVNAIKNKLLLRVVAVVNKQEMYVENYQNVA

SEQ ID NO: 213014 - protein, 394 aa, unidentified
MTATRCVDCTARKQLKLYVSFELGWSEWKLAFGPAPGVPARLRTVPARDLELVLKEIAKAKERFGLPANAPVLSCYEAGRDGFWLHRYLLRQGIQNVVVDSSSIEVSRRARRAKSDRLDAAKLLTQLLRYHGGEERVWSVVVVPSEVEEDKRQLHRELLSLKEERTKHVNRIKGLLAGCGLVMAAVDAKFVERLGELRTWDGQAVPWELRQRLLREYARWQLLNAQIGVLEQERLQRIRQGPVEGMKKVRRLLEVSGVGVNTAWLLVHELFGWRRFANRRQLGALAGLAPSPYQSGAKNHEQGISKAGNPRLRAMLVEISWGWLRWQPRSRLSLWFQGRFGRGTSRYKRVGIVALARKLLVALWRYVEMGEVPEGVALVEWEAKLKGRRVPLAD

SEQ ID NO: 213015 - protein, 374 aa, unidentified
MSTKLRYLGLDVHAETIAVAVAEADGESRSLGMIPNRPDPIARLIRKLGPPARLRACYEAGPCGYVLYWQLTRLGLHCDVVAPTLVPTKAGDRVKTDQRDALKLARSYRAGDLTPVWVPDAASEALRDLVRAREAAKQDQLRARHRLGKFLLRRGVRRPEGMRPWTQRHRAWLATLRFAELAQEATGVDYLHEVDHAAERVARLEQAIDRAVAAAPPEIQAVIAALQALRGIQQVAAATIVSEVGPLTRFAHPRQLMAYSGTVPSEYSTGDRIRRGAITKTGNAHLRRVLIEAAWAYRHRPSCTGALRRRQVGLPDPIRAIAWQAQLRLCHRYRWLTARGKLKPQVVTAIARELLGFIWAIGCALDAPARGRAA

SEQ ID NO: 213016 - protein, 385 aa, unidentified
MTNTQYHSTIVPRDYDIFIGLDVDKKRMAVTCVDHGTLQKSLSLPYSGKQLLNYTAKHFPGQRVAFVYEAGPTGFGLHDELSAAQHPCLVVTPAMVPSAPRKRVKTNRLDSKKLALGLRGGDLQGIHVPTQSYRELRQLVQLRDTQAAQVRATKCRVKSLLLFEGIPFPEPHEKWTVAALQGLATLPCNATVRFKLDQLMEALQFHYQMAAKVQKEVRRFCNQDSELRQSVELLRTIPGVGTITATHAIARLGDWRLIKNERQIAGFLGLVSSEHSTGEKEKRGEITRIGDQRLRNKLIQCAWTAIKKDPELRAFYRRIYARHPPKVAARKAIVAVARKLATRLYAVLKKQRPYEIRADLATAPLTVEETVGLRERLDMAQNDEL

SEQ ID NO: 213017 - protein, 336 aa, unidentified
MSELATVGIDLAKSVFQIHGVDENGRVLVRRQLRRSQLLAFFEKQPRCLIGMEACGGAHDWGRRLQGLGHDVRLMPPSYVKPYVKRGKTDAADAAAICEAVTRPSMRFVAVKSEACSSVLVVHRTRDLLVRQRTQICNAIRAHMTEFGVIAAKGAQNVDRLRTQLHQLPEAARLPVSLLFEQLVDTDTRIERLTREIEAAHAQSETSQRLVTIPGVGKLSATIIAATTPDVGNFDCARDYAAWLGLTPKPHSTGGKQRIGRISKMGNRYIRRLLYLGAMSQIMVRHRCGPRQDWLSDMLARKKTKVAAIALAHRMARTIFAVLRDGSRYQPQATAA

SEQ ID NO: 213018 - protein, 373 aa, unidentified
MRDNSEAFVGLDTSKLHHSVAIADSGRTGEVRFYGEIENTPAATAKLVRKLAAKYERLTFCYEAGPTGYGLHRQVKSLGHDCVVVAPSLVPKRPGDKVKTNRRDAITLARLLRANELTAVWVPDERHEAMRDLTRARETAMLDLRSKRQQVSALLLRQGRSYPESKKTWTKAHMSWLASQKFDYPEQRLVFEEMMLAVRQALERLERMEQAIRAAVPDWSLAEVVTGLMAMRGLDLISAATFLAEIGDLSRFQTPQQLMAYLGLVPSEESTGNTIKRGPITKAGNRRARRMLVECSWSYQHPPRVGSIKQHKVDAAPPAVREIAWKAQCRLYRRYRALIRRGKLKTVAITAVARELAGFIWAVNRAIAPAATK

SEQ ID NO: 213019 - protein, 454 aa, unidentified
MCLEDRPVLEQNAAGIDIGSREIFVAVPPDRDPNPVRVFPTFTEDLQGLATWLLRCGVTTAAMESTGVYWIPLYDILEQHGIKPCLVNARHMKNVPGRRTDWHECQWLQFLHSVGLLRSAFRPEPEVCAVRTLIRHRSELVQAASQHIQHMHKALTQMNLQIHHVISDLTGVTGLAIVDAILAGERDPVSLAQFRDPRIKATEETMQKSLVGNWRREHLFTLKQSRELYRIYQQQIVACDQEIEDLLSQFTPRVDPIKKPLPPDRKRNRAARKRRKKTGNPDTTFDLRTEAYKLFGVDVTQIPGVETIALPLFSEVGRDLSKWPTGRHFASWLALCPDNDISGGHVLWKGMRKVNNQAGQLFRLAAYSLHHSLTPMGDYLRRMKSKIGPAGATTATAHKIAMVFYTMVKNQVEYDETIWAARDMHRHKHLEARLKRQAKQLGYELIPIGEKPAA

SEQ ID NO: 213020 - protein, 406 aa, unidentified
MIFVGIDWSEAHHDVCVLDDQGMVLAKGKVSDDVSGVGRLHAMAAEHAEDPSEVVVGIETDRGLLVGSLVQAGYRVYAINPLAASRYRDRHAVSRAKSDPGDAKVLADLVRTDRQNHREVAGDSELAEAVKVLARAHQNLIWSRQRQVNALRNTLREFYPGALRAFTTSQLATIEACSVLAMAPTPTWARDKLTLQRLRRSLSASGRKRNLDRRAGQILHALQAPELSAPALVEQAYGDVVGSLVVVIDGLTHQIVKLEAELAQRFEGHPDAEIITSLPGLSSVLGARVLAEFGDDPTRYQDARARRRYAGTAPITRASGTRLVVLARVARNRRLFDACYLWAFSSITTSAGARRYYDAHRARGKTHHQALRALANRWIGILHGCLTRHEPYRENVAWVAPVEAAA

SEQ ID NO: 213021 - protein, 339 aa, unidentified
MNNIVFCGIEVSAQELVVALPGKKGEALLQRYPNTAAGHRALLGALTRGGKRVRACMEATGMYGLDVALLLSGREGIELMVANPRAAKHFAMATMQRSKTDPLDALMLREFVTRMEFQSWARPGERSLELWSIARRLQALRKQRVAEKNRQHAAGISQATAECVRKSVARMLRAFDREIKQLREQAQQCIASEERLQRRYGLLRSVPGIGETSAIEILAELVMLPEDRDVRQWVAYAGLDPREYSSGTSVRKYTRISKVGNRNLRCALYMPALVASRCEPHLRGFYQHLQQRGKSKRQALVALARKLLHAIFGMFRSGQLYDGARLYTLPNPVFNHKTA

SEQ ID NO: 213022 - protein, 427 aa, unidentified
MKELTKVCGIDVHKMFLQVCILSRSGEYSQHRFHNTPHGILALKDLVLAEGCEVVAMESTGIYWYRLFLELESDIRTIVANARQIKSIPGRKTDMNDARWIAELALHGLIRPSRIFPRRDREFRDLTRNRETLVRTRTTIKNRIHKILDSAGIRLNVALKDIFGKSGRHLLAGIAEQKDLEATLATIPSPLILRRADQLREILQDSPLSPTQLHLLTTQLHLLEAIEEKIAQLDALILASLEDSQMEALPICTSVPGISITAATTLLAELGDVRDFSSADRLVSWAGLAPSVYQSADTLVCGKITKQGSKSLRWILVQVAQAASRTTDTVFSRFFRRIAFRRGRNKAIVALARKILTILWHLLVNRELYVEPGVQRVRKLPARATLSKISIDDATEILLNAGYRIYSPESQKSAGKGVGAKRATHPL

SEQ ID NO: 213023 - protein, 407 aa, unidentified
MQTRHARFCGIDVGKAKHVACVIEADGQVVLRSQSFLNDAAGYQQILVRLQQAGGPAQVLVGMEATGHYWYALHDFLTRHGYQVAVLNPIQTAQQARQGIRKSKTDRLDAHHIAILLKNGEYRPALIPGELAMTCRQLTRLRYAMVRQTSRIKQLIGSRLQPVWPEYEGLFTDLFAPTSRKLLAAAPTPADVLAMDPQALTDLIRLASRGKFAAGKAQEILSAAQDSVGMKRALDGARIGIRTLLTTLDAWRPIRQHLEVEIESLANQLPQYFLTLPGANPLRAVSLYGETDPIGHFASSDQLVAFAGLDPVVFQTGQYEAPRRHISKRGSPVLRQTLWLMAHAAVRQEGSLRDFWLRKREHGLHYLAAVTAAAAKLCRISWRVLTDQRDYVPEGCPAKHLCSTAKS

SEQ ID NO: 213024 - protein, 418 aa, unidentified
MHEIQSWFAGVDWASQKHDVWLADAGGKRLGKRTFAHSGEGLAQMCDWLIGTSGGKPEDIHVAIEVPHGAVVETLLDRGLKVYSINPRQLDRFRDRFSPAGAKDDSRDAETLSSSLRTDRRAFHQVSLASPAIIELREWSRMADDLKSDQVRHANRLREQLQRYYPQMLQFDSDLAEEWVLKLWEAAPTPVKAARLRQAEVEKLLKRHRIRRIGAAEVLAILKEQALVVAPGVTEAAVAHIRALIESIRLFTQQLKEAHRQLDKLCNLLAEPIASENEQTGPKPEQTLVAILQSLPGAGRIVLSTLLAEAFETLQRADYAILRKLCGVAPVTRRSGKSRAVTRRLACNPRLRNAIHYLADAARRCDEKSKTKYLALKARGCSHARALRAIGDRLLYVACAMLKNRTLFDPRLESQNCA

SEQ ID NO: 213025 - protein, 319 aa, unidentified
MTAPYDFHMGVYYHKSYSHLVVQNSTGKMLQPGRVKNDRQSLSSFLERYSDNSNAVLEATRNWMVMYDRLDDICDDVMLAHPLKVKAIADAKIKTDKIDATVLAHLLRAGLVPEAWAPGEKTRELRIALRERMFYVRLRTTVKNRILTVFDPYPEQTAQLRKLGDLCGKAGRQQFAALSVSDIDRIQIDRGLEFVGDIYGRIKQSEATIRAMTKTNGNAKRLKTIPGIEEFFARLIDAEIDDISRFHSPKKLAAYAGLVPPPNPPAARHITARSSNSDGAQAFDDRLSDPARPTSLRAARRPRRGEFIVHNIPAVLMIA

SEQ ID NO: 213026 - protein, 297 aa, unidentified
MVLVATIRGIGLKEETRTFSGFTESIEELRDWLKENRITHIAMESTGVYWKPVYNILESDFEILLVNARHIKNVPGHKTDKKDSKWITKLLLSGLLKGSFIPPKPIRELRDLTRYKRKVIEQISSEKNRIHKLLEDANIKLSSVVSNLSGATATKIIDAMIDGEENIAELLKFRHGKMQSSVEDLASSLKGNLTDHHRFMLQTVKESVKNKEQIIQKLDEQIDKQLKENELALDAELLATIPGVGKDGAAYIIAEVGNNMDQFPSEQHLASWAGMSPGSNESAGKKKAHESPMVINT

SEQ ID NO: 213027 - protein, 424 aa, unidentified
MKITYQTCCGVDVHKSFLVATIIKTTNGFEPSYQKKRFSTFNNSILQFKNWLLENNCYDVCMESTGKYWIPVFNLLEDDINVTIANPKWVKAVKGNKDDTKDSKWIGDLFRLGLVRGSYIPCKKIRILREYTRYRYKLVSCRSSEKNRYQNALTVCNVALDSVVSDIFGKSSTSIIDYLLEQSGASINHEEIASKLLRRLKSKEDSVIESIEGYQMTDSQKYRMRLIRAHLDYITAEINDVDSMIENMISSDSDYNNAVQLLCTIPGVKHDSAVTIISEIGIDMSQFCNSKRLCCWAGLTPGSNESGGKKKSVRITRAGVYLKPALVQCAHAAVKSDKSPYYKKKYESLVKRRGKKRAIIAIARMILTAIYQMLSTGETWNPSDLYKIDMPQALVDKQKAKAIKQAKKLLQQEGIIPLDEPIAS

SEQ ID NO: 213028 - protein, 381 aa, unidentified
MTTAATHHANGNTTEATLFVAFELSEKTWRLGFTTGHGQKPRERSVPARDHQRVLDEIAQAKHRLGLPETAPVVSCYEAGREGFWLHRLLLAQGITNHVVDSSAIEVSRRQRRAKSDGLDVRKLLSMLMRYEQGERKVWHVVKVPSMEAEDQRHLHRDLETLKQERASTTTRIKGLLSSYGIRVTSMTKLPEQLDALRLWDGSPIPPGLRRRVLRVYAHHTFVSEQIAEVEAQRRAQLQTSSDASIDKVRQLIQLKGIGINGSWLLVMAFFGWRELKHRREVGGLAGLTPTPYQSGESAREQGITKSGNRHVRWMTTELAWSWLRYQPDSALSVWFRERFGGGGKRLRRIGIVAVARKLLIALWRFLEKGVLPEGAVLKEA

SEQ ID NO: 213029 - protein, 356 aa, unidentified
MSRDVKYIGMDVHKEATVIAVLNGNGDLVMESIVETKASSLLQFIHGLRGELHVTWEEGTWAAWLYDLLKPHVQQVLVCDPRRNALLKEGNKNDKVDARKLADLLRTGMLRPVYHGENGLRTLRELGRSYQTISQDLNRVMNRVKALYRGWGIACAGTRVYAPRYRQEWLQKIEQAGVRRRAELLYQQLDGLQELRRTLRPELLAESRKHKASKLLRQIPCIGPIRAARLLALMQTPHRFRSKRQLWTYSGLGIETRDSAQYRFVDGQLRRAKKPQQIRGLNRNHNHEMKDIFKGAATRASCGVGPFREFYVGLLDKGMEPEMARLTLARKIAAIALTLWKKEERFDAEQLKAQAA

SEQ ID NO: 213030 - protein, 344 aa, unidentified
MAIVGGLDIHRRQITYDWIDTTTGETRRGQLSPATRLELRGWFARFTGQQADFALEATTGWRFVAEELECAGFRAHLAEPADTRALRGPKRRAKTDRTDARHLRELLRAGTLPESWMPPAHIADAWTQVRLRRGLVGERTGWYQRIHAILFHHGLPERSQLLTADGRAWLARAELPAVARQAVELALRMIDHLEVELDTLDAQLAGIARVQPGCQALQRRYGIGWLTAVAIWAEFGDVRRFANSRQAVRFTGLDITIAESDGKRARGHLARQGSPVLRWALHEAAMCAARPSSPDHTYYLQVKQRLGGKRAALSVARKLAREAYHTLRELGDQALVPADLPTAA

SEQ ID NO: 213031 - protein, 317 aa, unidentified
MAALICGVDVSSISLDARVGSQGSEARFENTPEGVGRLIAFCHEHGVELVAMEATGGYERLAFGLLWGSSVPVALLNPRAVRRFAQGMGLEEKTDRIDAGVIAWFAEVKKVVPTEPASAAQARLEAMVTRLRQLTELHAAQRNQRLLVSEPSVLDSFCELLALVKAQIRALETAIAELIAADPLWQQLDTAFRSIKGVAGRTVSRLMAEMPEIGTASNKAVSKLAGLAPLAKDSGKSQGKRVVRGGRSNVRTILYVVADVVRRYNADFAAFADRLRAAGKPKKVIRIALAHKLLVRLNAKARDVRQQHSTAACSATC

SEQ ID NO: 213032 - protein, 338 aa, unidentified
MIVIGVDVHKQSLTAVAVDEAGRMLGETTVAAASNDLLEWAAGLGGERLWALEDCRQLTRALERELIARGEELVRVPPKLMAPERRAGRQRGKSDPIDALAVARAALREPRLSRPRPDEQPFRDLKLLVDHREDLVDERRRIQQRLRWHLHQLEPSFFVLAKGLDRPVHLDRVGRWLARRPAEVQVRVARELVVRCRQLTRTIVELDRELERRTAETAPALLELPGCGAITAAKLLAEIGPIGRFETDAQLARHGGVAPLEASSGRVQRHRLDRGGNRQLNCALYRIAITQARYHPAARAYLERKQAEGKSRREAIRCLKRQLVRVVFNTLNASPALT

SEQ ID NO: 213033 - protein, 340 aa, unidentified
MFVGAIGTRQADLDKLSRRLEAKTPALVFAYEAGPCGYVLQRYLTGKGFACQVVAPSLLPKKPGDKVKTDRRDAMELARLLRSGDLTRVYVPTVDDEARRDLVRARDAARLSLTTAKLRLKGFLLRLGLHAGGRADWNAAHLRYLAKVVCPTAAQQIVFQESVRAVDEQVDRLHRLEAELLERAPAWRLYPVVQALQALRGVQWLVAITVVAELGDLTRFGSPRQLAAFVGLIPSEYSSGPSRRQGGIMKAGNGRARRALIEGAWAYRHPAKVSQHIQTRIDALPKPIQTLGWRAQVRLCKRFRRLVGRGKHPNVVVTAIARALIAFMWAIAKEVPLVAK

SEQ ID NO: 213034 - protein, 415 aa, unidentified
MPLPSGWKEQLLVFVGIDWSEKHHDICVVDREGEILAKGRVAEGVEGIARLHELVAEHAEEPEDAIVGIETDRGLLVGALVTAGYQVFAINPLSVDRYRDRHSTSGAKSDPGDAKVLADIVRTDRHNHRPVAGDSELAEAIKLLARTHQGFVWERQRHVNRLRSSLREFYPQALEAFGTGLASRDAVAVLSIAPTPDLGRRLSRSKIASGLRRAGRQRNIETRAEQIQAALRSEQLQAPQTVTRAYGSIVSSLVTLIVGLNDQIAGLEQELEEAFEDHPDAKILRSLPGLGTVLGARVLAEFGDDRTRYLDARGRKNYAGTSPITKASGTKRVVLARFARNEQLFDACFLWAFSSLTKSPGARAYYDLQRARGKTNNQALRSLANRLVGILHGCLRHRQPYDESVAWPSLMERAA

SEQ ID NO: 213035 - protein, 400 aa, unidentified
MSQMWAGVDVGKEHHWVVVVDDTGTVKLSRKLVNDEQPIRALVAEIDAMAERVSWTVDLTTVYASLLLTVLADAGKSVRYLAGRAVWQASGTYRGGEAKTDAKDARVIADQSRMRGTDLPVLHPHDDLITELRMLTAHRADLVADRTRTINRLRQQLVAVCPALERVAKLAQDRGWVVLLSRYQRPKAIRQSGLSRITKTLTEAGVRNASTIAEAAVTAVKTQTVRLPGEEVAAALVAELAQGVISLDDRIKATDADIEGRFRRHRLAEVITSIPGIGFRLGAEFLAAVGDPTLIGSADQLAAWAGLSPVPRDSGKRTGRLHTPQRYSRRLRRVMYMSALTAIRCDPHSRTYYQRKRDEGKRPIQATICLARRRTNVLYALIRDNRTWQPDSPHITKSAA

SEQ ID NO: 213036 - protein, 337 aa, unidentified
MKVTLIGIDLAKSIFQVCGVNQAGKRKFNRQVRRNRLMALLMQYPDATIAMEACSGSNYWGRTLQQRGFKVMLIPPQHVKPFVKGNKNDRNDAFAITEAARRPELKCVEPRTLAQTDMIQVHRVLDRMTRQRTALINQIRGFLNEYGVVVARGKEKLLAAMPDLLEDAENGLTPSSRALFQQLLEQWRQANEAIGWIEKQLKGQARTDDDAQRLMKMKGVAEKISTATIAHAGNGHGYKSGRHFSANLGLVPKERSSGGKQILGGITKRGNQYLRRLLIQGAWSVVRNADKNDDRMSRWARQLVERRGKHKAVVAVANKMARIMWSMLYHQTEYRAN

SEQ ID NO: 213037 - protein, 405 aa, unidentified
MTGADGVVLARRSPQVSVHDLGPCLDRALAQARAAGYAGLSVACEPTGSRWMAVQDLCAARGLPFVCVQPLVSHLAREQEDLTGDKTDEGDSGLIARLARELHCYEPERLEGAWAELRDEGRRRAQLITGATAAKQLIRDKLGLAAPALLETACEPFDSATWLASLEVVLERCGGDAATVTAMGYEAFAAAVAAVLPGWGGKRVGGTCRQLFSALGDSRGVARMRRAAMRRVRGALADLKYARSRRGQAEADMIALLSELGADAGRICEIPGLSPVTLAAILAETGDLHKYESSSSVVKHAGLSPARNESGSFRGQAKISRRGRPVLRLAAWRATWAVLRHCAVLAAKHAALTSRDDDSRLTPGQARVACAASLLRWIWSLTVHGTQWDPRIAAGQLGHHHAVAA

SEQ ID NO: 213038 - protein, 361 aa, unidentified
MNCVQRNKLDFRGQNIYVGIDVHLKSWSVAILSEHSILKRFSQSPEPEALHKYLVSNYPGANYFSVYEAGFCGFWIHEKLTDLGITNIVVNPADVPTMSKEKLRKTDAVDCNKLARELRSGSLEGIYVPKADVLEMRSLIRMRNLIVKDSTRAKNRIKSLLRFHGVEIPEEFTRCSIGCWSKRFLTWLHSLELSTEYGKKTLELHLEQFVRLRKMLLQETRAIREISRKEPFEKPIRLLTSVPGIGVITAATLMVELDDIVRFRNAGHLASFIGLVPMCHSSGESNGTGDITMRRHFMLRCLLVEAAWIAIRKDPAMTLAYTEYRKRMNPQKSIIKIARRLVNRIYYVLKHEKEYVPCVVK

SEQ ID NO: 213039 - protein, 349 aa, unidentified
MRFYTTQHQYYCGIDLHARSMYVCIQDQSGKILLHRNYRAGPDALLGAIDQYREDLVVAVECVFTWYWIADLCSREGIAFVLGHALYMKAIHGGKTKNDKIDSNKIAALLRSGMLPMAYVYPQGMRSTRDLLRRRLYLARQHAELQAHIQNTNTQYNLPYFEKRIDRNSNRAGIAMRFTDPAVRTSVEVDGALMDALHQQILAIERQINAQVPEHDPVALHLLRSIPGVGKTLALVILYEIHDISRFPAVGNFISYARLVKCTHESGGKRKTGPNNKIGNVHLKWAFSEAACLFLRKNERGKLYHQRLVSRYGKAKALSILAQKLGRTVYTMLKRRTPFDAKRFFETVG

SEQ ID NO: 213040 - protein, 496 aa, unidentified
MSMHYTTKQKVEQVKEKLLAAIDVGKRSLHVKYMDYTRKVHNRKAYRFDNSSKGFEDLIDCTKKMCDSLGLEEAVFGMEATGHYWQNLAVHLEILGYTLVTVNQNHTKKVEEIVDGSQRKDDDKDPEGIGILMALGDWSPYYRPEGDYAEIRKAYRLLEWCTEDTTRYTNKLHGYLEKHLPGYEPCFGKEKGVTGALSLAVLKKAALPEDIINLGAEGIINIWKEAGLRGTKNRAEKIVSAVSGNKGYAITDGSQTCRLELACIVRELELAIRTEKEAEEQVRKIVARIPGAQRLLGIKGISYRTVAGFFAIVGDLKKRFSNVKQIVKLAGLNIVIRSSGTYKGEARISKRGCPELRAALYRVLTALLENTPAFKPLRDHFMKRTDNPLNAIKANVAMCNKLLRIFYAMVIHDEDYDEKKMLGDIKRMERTKVSQAAVEAGKLKNELDMILCGAKGKEVTNEMIESIRKVGKAMKGLVAVAERGTVKETLPQAVGG

SEQ ID NO: 213041 - protein, 396 aa, unidentified
MCKVIMIGCDLHDKAMLLKVAVGRDEPETRLVKNSPAGRKAMIADLLRRAKALGGARVVFVYEASGQGFGLHDELTDAGIECHMLAPTKIARSPRQRKQKTDEKDALDLLQLLRAHVLAGNPLPTVWIPDLQTRDDRELVRMRLDVGTKIAALKAQVQSLLKRNQLRRSAATGKGWSRLFWVWLRSLQRTPAAVSENPLRAGARAALASLLRQLQFLQAEEARLDQLIIDLAWSPRYARGVREIGRLVGVGVLTAMVFLSEIGDLHRFANRRQIAAYLGLVPSSQESGEARDRKGHITRQGSSRVRKVLCQATWSRVRCDAQEKAAYERIKAKNPKHKKIAVVASMRRLAVRMWHCGLAAAAAPPATAEKMAGEGVPKTKAKRRRRCGCAAGFSEA

SEQ ID NO: 213042 - protein, 477 aa, unidentified
MEQQDGQPAGRRLMGIDLGIASRHSVRVLEADGQVVCRSSCVPTVESLTLVESAALAGAPDGTKLAVVFEPTGPAWMPIAVFFARRGHGVYRVSSAKAADLRRFLRRHAKSNGIDAETLARMPLADPAGLQQLELPGPDAAALDRRVRACERLTRAASEHKVRIKDLVRQLMPMTPLTGDLGKADLAVLERYADPRALLAAGTAELTRLITTASGKQQGQERAGQWRAAAAAAVELYGDHPAVPYDELAAEVVTEVRLLRAIQGELAVHAAAREQHYRRVDPGQLARSLPGFAEISAPVLVAVMGRPGRFRDGTRFKSYAGLAPRASETGDTDRKGQPMSKAGPSVLRATLFRAADTARRHDPQLARIYYQQMTERGATHLKACCVVAGHLAERAWTVLHRGTPYVTCDTNGNPVTAAEAKAIIAEKWTVPEDVRKRRRSRKMAGKAPQAATRPDKRGDPPRPRSSRPRTQAVKPIT

SEQ ID NO: 213043 - protein, 344 aa, unidentified
MEQQVFKQSVGLDISKDTFVACFSQRQTGKSFHILSSRTFKCTSGAFEQFHRWVQNQRHASAPLQLLMEATGVYYEEVAYFLHAKGYSLTVLLPNKTAAFAKSLSYKSKTDSIDAQMLAQMSIERDLPPWIPFSDSMLVIKRLCRERAEIIDTQVVFKNRLHAKQHAYRPLKSSMQRAKKAQSLLKKQISDIDLTLLKAINEDEILRQKVENACSIPGVGFITVANILAETNAFALFKSKAQLVSYAGYDVLQNTSGTSLNSPTKISKKGNHRIRKALHFPALVAVKSDPKMKNLFDRAFDKTKIKMKAYVAVQRKILVLIFAIFKTNQPYDPNHISVKSNNNQ

SEQ ID NO: 213044 - protein, 310 aa, unidentified
MKAAWVGIDVAKDTLAVCVWPDKGQRRYANTEAGWALLLEGLSDYEVQRVLLEATGGYEAGVLRYLAAAGLPVVRINPRQARAFAEAMGSQAKTDPLDAALLARQAQVIEAPLYQPPTAQAQALQELVKRRTHLVAQRDDDRRRLAQASLPKVQANIRHCLAFLNQQIAALNQDITQACRELDDERAQRLASVSGIGPVSVANLLAYLPELGHLDRRQIAALVGVAPYNADSGPKKGIRRIAGGRSAVRRVLYMAAWSVVRHQADFKRRYQDLRQRGKPAKVALIACLRVLLIRLNAMLRDGTPWRSEPV

SEQ ID NO: 213045 - protein, 387 aa, unidentified
MIYVGIDIAKKKHFAAFMDSNGEVLFKPFSFSNDMSGFKKLLSHLGSFPRDNLLIGLESTAHYGENLICFLYDKGFNVCIINPIQTAAIRKSNIRKTKTDKVDCYMIIKSLIMNRYRLFTKQDFESLKLKNLCRFRQNLMKARTKVKIQLVSYVDLLFPELQYFFKSGIHTKTCYALLKEFSNPDEIANMHLTRLTNLLTKSSHGRFKRSTAVSLKELASQSVGTKNNTLSLQILQSIIQIELFTKQLAEVEDSINDIMSDLDSVIKSIPGIGNVNGAMIIGEIGNINRFKKSSHLLAYAGLDPSVYQSGNFKASNTKMSKRGSKLLRYALINAAWQLTLNNKTFKDYYDLKVSQGRRHYSALGHVAHKFVRVLHKIMTDNVEFDLA

SEQ ID NO: 213046 - protein, 412 aa, unidentified
MELLHRRCCGLDVHKETVVACLRLVSDGKVTTEVRTFQTTTADLLRLSEWLAANECTHVAMEATGVYWKPVWRILDDGEFALVLANAAHVKNVPGRKTDINDAMWLAELLAHGLIRASFVPDAQTQEMRNLLRTRKQLVREQSSHVLRVQKTLEDANIKLDSVLTDLMGKSGRAIIEALIAGETNPVKLAGLADRRVKASPEEFREALRGRMTKNHRFLLRLHLNQIDALDAAMATLDAQVEANLGPFRTAVELIGSIPGIKNLGAHVIVSEIGIDMSRFPSAAHLISWACICPRNDESAGKRRSNRVRKGGTWLKTTLVQCAWAAVKKKDSYLQAQFYRIKARRGPKKAIMAVVASILTAIYHMLKDGTMYKDLGRNHFDRRSSDQQKNRLVKRLVDLGYAVEIKPLAATA

SEQ ID NO: 213047 - protein, 359 aa, unidentified
MERMLSKKQAWLKQVRLTKDDDLYVGIDAHKKSLHVALWLNDAPAIDFVMPPDSAKLIKTLNKLRLALRMVVYEAGPTGYSLARAMQNADLPVSVVAPSKTPRQAAPDSKTDSLDARKLAEYAAKGLLRHITIPTIKQEAQRQLTRLREQLVAKQTRVKLQIKGFLLQHGIDQPQDLSRWSRAAVEYLKNIRLSEPLRYCLDTLIEELLFVAEQIKLTEQKIKKAFSEKTLSTTCKLLATHPGVGPIIAAQFAAEIFNPKRFTDKTQLAKYVGLAPSVRQSGQTLRDGPILKTGRPQLRCSLIQGAWLWIRKDHDAYKTFCRLVHNTGHKNKAITAMARKLAIHLWKMACDNKPYTCAV

SEQ ID NO: 213048 - protein, 351 aa, unidentified
MMIIGVDYHPSFQTMAFLLEETGECGEQELNHSDGQAEKFYRDLKQRGISVRVGMEATGYSRWFERLLAELGFEVWIGDPAEIKAKRVKTLKNDREDARLLRRLMLEHNFPRIWVPDPENRDLRQLLWHRHRLVQMRTRIMNQLQALAMNEGYRWRKKLFSEQGRAQLEKLSLAPWASRRRQELLELLDRMNPTIAELTAAVEREARKRPAVQRLMTHPGVGPLTALAFVLILGTWERFPRGKQIGNYVGMIPSENSSAGKQRLGHITKQGNSLLRFLLVEAAQAAARVHPDWRRRYVHLAMRRHRSIAKVAMGRRLAVRLYWMWRNGCEYSQSLEFGSYAGQLGTGHGAK

SEQ ID NO: 213049 - protein, 372 aa, unidentified
MGKPSTIVGMDVHKKDIAVAMLVEGTEGSLEWRVANEPSAVKRLVGKIQRAGGADIQCVYEAGPCGYALQRQLRAQGLACDVVAPSMIPIRPGEKIKTDRRDARKLAELARGGLLTVVHPPTEDEEAVRDLCRGRDDARLDLMRARHRLSKFLLRRGRVFGTGEQRAWSQAHRWWLGKQAFERSAERIMFEDYLLSVEQTEARRRSLELHLGDIAHEPRYAEAVGWLRCFRGIDTVTAITLIAELHDFRRFRSPSQLMAYLGLVPSEYSSGPRQQRGGITHTGNRHVRRLLIEAAWHYRHKPRVGEALAERRHGQPANIIALADKAQQRLCRRYRRMERRGKHTTKIVVAVARELVGYLWAALTPATPAPAK

SEQ ID NO: 213050 - protein, 402 aa, unidentified
MNAVGIDVSKGKSMVAIMRPFGEIVSSPFEIKHTTSDINSLVELINSVEGESRIVMEHTGRYYEVLAHQLLEANLFVSAINPKLIKDFDNDSLRKVKSDKADAVKIARYALDKWQNLKQYNVMDELRNQLKTMNRQFGFYMKHKTAMKNNLIGILDQTYPGVNTYFDSPARSDGSQKWVDFASTYWHVDCVRKMSLNAFIDHYQNWCKRKKYNFSQSKAEEIYGKAKELVPVLPKDDITKLIIKQAVNQLNSASTTVESLRTLMNETASKLPEYPIVMAMKGVGTSLGSQLMAEIGDVSRFTHKSAITAFAGVDPGVNESGTYEQKSVPTSKRGSAGLRKTLFQVMDVLIKTHPQDDPVYQFLDKKRTQGKPYYVYMTAGANKFLRIYYGRVKEYLSSLPES

SEQ ID NO: 213051 - protein, 348 aa, unidentified
MDVGKRKCVACVMNQDGDISETYSYPNTTADASEFARCLVEKYGECKAVVESTGNMWMKTYEAFEEAGIEVKLANPSKTRVIAEARIKTDKLDCRVLAHLLRADLVAGCYVPTKQLRDTRYTLTHRMNITRDRTRIQNRIHSLLHKYDLQCEYGDIFGTHGMDWLRTLRLPAIRDRQILDSLIRQVEFLNCEEETVNSEIASDAVNNRYVVTIMSMTGFDYYGASVLAAYIADISRFPSPSRLVSWVGICPSVHQTGESLHMGKMKDGNTKVRWIMSQAANVAAKCDPRMKAFYERKLRRRHHNVAITHVANKMLRILWHMLRDNTLYNERKQQLYHRKLIRMARTAS

SEQ ID NO: 213052 - protein, 450 aa, unidentified
MVQRKQKICIKPGKSREPLTITHPNAAGIDIGSSSHYVSVPPDRDDEPVREFPSFTVDLNAMADWLDACGVDTVAMESTGVYWIPLFELLESRGFKVFLVNARHVKNVSGRKSDVLDCQWLQQLMTYGLLRGAFRPTEDVCVLRALWRQREMLLRGQGRQVQHMQKALTQMNVQLANVISDVVGETGQKILRAIVAGERDGQVLAAMKNARIRASADEIAKSLQGNWRDEHLFALKQALDMFDFIGTQLAECDNKIEGQLQNLQVHDGEPLKGKKRGRARNAPKFDLRTQMFRMCGVDLTRIDVTTALAVISETGTDMSRFPTAGHFASWLGLCPGTKITGGKVMSGKTKRVANRAAQALRLAAAALRSSQSALGAYFRRMCGRMDKPKAVTAAAHKLARLIYTMLTKGEEYTDQGQDYYEERYRERVLRQLAQRAEKMGMKLVVNEQPV

SEQ ID NO: 213053 - protein, 352 aa, unidentified
MLRRRRPLVSEFYEGRQFVGMDLHRRRSVLVRMSEAGEHLETVRILNDRDSLAKVMSRAGESPEAVLEATYGWYWAVDALAELGATVHLAHPLGVKAFSYRRVKNDQRDAADLADLLRMGRLPHAWIAPPETRELRELVRHRAKLVAMRSQCKAHVHAVLAKGGVWVPMTDLFGVEGNLLLDKVTMPAPYKERIASLRRFIEGFDAEIDLFTDLTQRRLSHDAGYTAIQQIPGIGPVLGAVFVAEIGDVRRFAGPAQLTCWAGLTPSHHESDTTVHRGRITKQGSRLVRWAAIESVKILPDTSRIGAIREQVAHRRGNRNIGAVAAARRQLELVFYGLRDHHIRALQRPRAA

SEQ ID NO: 213054 - protein, 413 aa, unidentified
MDVLHTNCAGLDVHKKTVVATVIVSNERDKPLKATQTFGTMTDDLLALSDWLMGYGVTHVAMESTGEYWKPIYNILEDNFEVWLVNAQHIKAVPGRKTDVKDSEWIAELLRYGLIRASFVPPKGQRELRELTRMRSTFVKERATLVNRLHKVLESANIKLTSVASDVNGVSGKAILQAMVAGGSTPAQMAELAQGRLRKKRDLLSRSLQGYVKPHHCFMLSELLLQIDGLDETIAKFDEKIREYCRPFEEVVILLDTIPGVARRTAEVIVSEIGVDMSRFPTANHLASWAGVAPGNNESAGKRLSGKTTKGNQALVSALTQAAHAASRVKNSYLHAQFHRLAGRRGKKKAIIAVAHSILIIAYHMIKNNEPYRDLSSDFFDKRNAQSVTRRMVRRLEHLGYKVNLELLTPLAA

SEQ ID NO: 213055 - protein, 301 aa, unidentified
MPRYSTAFGMDVHLRSTTVCALDAETGEAVTRRFRGNPWGEVAEWMSGFPGPSLAAYESGYLGFAPQRELSGLGVDCVVAAVSKVPRSAADLSSKNDRNDAARMAKAILSHDISPVWVPSPEIEGLRDLAGAHDAATARLAAAKQRLLAFLARRGYAYGGTTPAGNPRRYWTYDFLRWLDKVRPGRQVTSYFGLAPKQRSSADSVRLGGISGTGNALVRRLAVEGSWSYVQASHQPKLMPKGSGVPLEVRMHGRKGSERLLRRREEMLARGMPQAKANAATAAELVRWLWALGAMCREATE

SEQ ID NO: 213056 - protein, 471 aa, unidentified
MSTTPTRAKRRRQVRTASKPKVPLPPQLQRVNLNAAGIDIGSEEHWAAVPPSRDREGQDVRRFGAFSGDLCALADWLKRCEIETVAMESTGVYWIALYELLVERGFEVLLVDARRVKNVPGRKTDVLDCQWLQELHTYGLLRGAFRPADQVCVLRSYLRQRSMLVAYVSHHIQHMQKALELMNVKLAHVVSDITGLTGMGIIKAILSGERDPIKLAKLRDPRCKSSEATVARALEGHYREEHLFALKQAVELVEFYQHQITACDRQIEACLQQFEEKSTETPVTSRRRKRRHGAIAFDAHSYLYRMTGVDLTQIDSIEANTALTVIGEIGLDMSRWPTEKHFGSWLGLAPGSKVSGGKRLSGRTKPSANRAAAALRLAAQSLNQSQSALGAYFRRLKARLGAPKALTAAAYKLARILYRMLKYGAGYVDQGEATYEERYRDRLLRNLKRRAAELGFQLTAINSSTGQPALT

SEQ ID NO: 213057 - protein, 391 aa, unidentified
MRIVSGGEVSRAVRTFATTTARLIELAEWLEANGCTHVAMEATGVYWKPVWQMLAGARFELLLANAARVKNVPGRKTDVNDATWLAELLAHGLIRASFVPGPQIQELRGLLRTRKQLVREEASHVQRLQKTLEEANIKLESVLSDVMGRSGRAMIRALIAGETDPGKLAALAHPKVRAPQASLREALRGRVKRHHRFLLDLHLQQIDALDASIAAIDQEVDTGLASFRDAVKQLSTIPGVSELSAQVILSEIGTYMSRFATAADLRSWAGLCPHNDESARKRRSTRLRTGAPWLKAMLVQCGWAAARTKATYLNAQFVRLRTRRGPKKAVCAVAASILTAAYHMLKDGTFYQDLGAIHFDRRRPDAQARRLIKRLADLGFSVQLKPAAAVS

SEQ ID NO: 213058 - protein, 312 aa, unidentified
MHPVVGIDIAQDELVVVVYPSTEAKTFANTAKGHQQLITQMRKLDPFRIVVEGTGGLQRALVAALEDHQLPIIVANPRQVRDFANGTGRLTKTDPIDAAVLAHFGVVVDLPEPRPRTANERALQELLQRRRQLRNMHSAEECRRSRLTERTLPSLERSLAFLTTELKTIEAEITALMRDDPLLSQKDTLLQSTPGIGPVSSATLLGELPELGSLSRGQVAALVGVAPYTAQSGKLRGRASIGGGRSAVRTTLYVATMVAKRYNPVIKAFYDHLIAAHKPHKVAIIACERKLLTILNAMMRDGTLWNPEPQLT

SEQ ID NO: 213059 - protein, 396 aa, unidentified
MSFKIIKNNCCGLDVHKTWIFACIGITDSNNRTQYKQARFSSFTKGLNELCDWLAKYNCKDVCMESTGKYWIPVFNILEHHNLWVTLSHPKYTKPMKGNKTDRKDAKWICDLYMCGMVKPSFIPTADIRELRDLVRYRYKLTCMITGEKNRAQNCLTVSNLKLDEVFSDVFGKSSRSITEQILQHPGEAFDVAHFVHGRCKTPIEEIQAAVDGAISKEQEILRLSDKYETALNLIRTVPGFDKNPLTAIQVLSEIGGDMSVFPTAKHLVSWAGCCPRNDQSNQKIKSTRISRAGSYFKPILVQVANALIKSKKHPEFTTRYKRIKARRGHKKAIIAICRMILTAIWHILSDLEPYTPEGFLESRPVKEEKVLSTSQALNLLKQRGYIIKDEPLAVS

SEQ ID NO: 213060 - protein, 416 aa, unidentified
MQKHSNLPVKSEQRSKQTKSRVPVQRDTKELMAELLEKLTKTQDPKAISANAGKEQKQGRLRPNLDRLTVGVDLGDKWSAYCILGLEGETLIEGQLQTAPLGVAEFFQSLPAARVVLEVGTHSAWVRELISGCGHEVLVANPRLMEGSKRRKRKNDRIDANKLARLGRMDPQSLYPIQHRSPEVRQDLVMLRARDALVAVRTELINSTRGLVKSVGARLPKCASPSFSKKVKESLPVEIREALLPLVELVAALSDSIQGYDEKIEKLGSEKYGHAALLRQVKGVGPITALAYVLTLENPNRFAKSRDVGPYLGLVPNQEDSGDIQPQLGISKAGDPMLRRLLVGSAQYILGPFGPDTDLRRYGLRLCERGGKNAKKRAAVAVARKLAVLLHHLWVSGEVYEPLRKGLSVTLTQATA

SEQ ID NO: 213061 - protein, 415 aa, unidentified
MLKIVYRICCGIDVHKTFVVATIATTDRENITTYQTKRFSTFTQDLRALALWLSNNECVHVCMESTGKYWIPVHKILEPSCQITLAHPKYVKAIRGKKTDKKDSIWIADLHKHGLVPGSFIPPPDIREIRDLLRYRSKLVSFASSEKNRVQNSLTVSNIMLSSVVSDTFGKSALAILSHLLKHPDDQDFDFLPLLHGSMLKKQDAIALAIDGTISEVQAGKITLCLSHMDDIKSYIAQIEETAMQLAGSYSGTLKIIQSVPGISQLSALAILSEIGADMSTFHSAKHLCSWAGLAPSNDQSAGKKKSVRISRAGVYIKPLLVQCANAAIKDKEFPHYRTRYEAIKHRRGHKRALIAIARMMLTAIYHMLSTGELFNPALYEKSQCKPGYVASSEEHAVKLLQRLGYSVVKTPESA

SEQ ID NO: 213062 - protein, 401 aa, unidentified
MNCVGIDVSKGKSMIAVMRPLGEVVIPPFEVGHTDTELCGLSKLLGNLDGETRVVMETTGNYHLPVASFLYDSGFYVSVVNAMLVHSYGNNSLRRAKTDKKDAIKLANYGLDHWLTLPRYIPEDDVRLMLKTTYRQYQQCAKVQTMLKNNLISLLDTAFPDANRLFASPARADGSEKWVDFVAAFPHCECVCGLSERAFTAKYQKWCRKHGYNFNQDKALDIYASACGHFSVMPRTDTAKLLVVQAVSQLRAASASLAALRNEMQSLAASLPEYPVVMGMFGVGPALGPQLMAEIGDVRRFHSKKALVAFAGIDAPPYQSGQLEVRSRSISKRGSSALRRTLFLVMSVILQRSPADEPVYQFMDRKRAEGKPYRVYMMASANKFLRIYYATVKQYLDSLEV

SEQ ID NO: 213063 - protein, 421 aa, unidentified
MTPTSHDTFAAFVGIDWADAKHDICLQATGTAKRESLQLTHTPEAIDAWVTTLRTRFNGPPVAICLELTKGPIVSALHQYDFLVLFPINPLTLARYRDAFTPSRAKDDPTDAALHLELLLPHRDTLQPLQPQSPTMRALAQLVEHRRRVVGDKVRLTNRLTRTLKNYFPQVLQWFQEKDTAIFCDFLSRWPTLKAAQLARRATLETFFREHHVRYAEVIAQRIQAIKAAIPLTTDDGVIAPHALLVQALVAQLRVTLQAIADFDTAIAQRAQSHPDFPLFQALPGAGPVFASRLLVAFGEQRERYAAAAELQKYAGIAPVTERSGKKAWVRWRLQCPKFLRHTFVEWAAESIRPSFWAQLYYQQQRDKGKTHQAAVRALAFKWIRILYRCWQECTPYDEAVYLQALQHRGSSLIQNLAKAS

SEQ ID NO: 213064 - protein, 360 aa, unidentified
MQVQSKELNFEGQNIYVGIDVHLKSWTVCIMTEHLEHKRFTQPPQAGVLYKYLVRNFPGATYHSVYESGFSGFWAHRQLKSLGINNIVTNAADVPSGQKEKVRKDDPVDSKKLARSLRSKDLEAIYVPGESTLEERALLRTRTTLVKDMTRFKQRIKSFLYFFGIPFPERFSNSGSHWSKNFLQWLKEEVKLSEESGKQTLAIMIQEVEEQRQLLLRISRQIKQLSEEKKYSFNVKLLKTVPGIGLLTAMHFLTEMETLERFEDTDHFAAFVGLVPDRHNSGDVKNDGEMTFRGQKILKNCIIESSWIAARKDPALSLAYNKYAARMEPNKAIIRVARKLLNRIYFVLKNKKEYVTSIVK

SEQ ID NO: 213065 - protein, 402 aa, unidentified
MNAVGIDVSKGKSMVAIMRPFGEIVSTPFEIKHTTSDINSLIEFINSVEGESRIVMEHTGHYYEVLAHQLSRANLFVSAINPKLIKDFDNDSLRKVKSDKADAVKIARYALDKWQTLKQYSVMDELRNQLKTMNRQFGFYMKHKTAMKNNLIGILDQTYPGVNTYFDSPARGDGSQKWVDFASTYWHVDCVRKMSQNAFVVHYQNWCKRKKYNFSLSKAEEIYGKAKELVPVLPKDDITKLIVRQAIDQLNSISTTVEALRTLMNETASKLPEYPIVMEMKGVGPSLGPQLIAEIGDVSRFTHKSAITAFAGVDPGVNESGSYAQKSVPTSKRGSSDLRKTLFQVMDVLIKTKPQDDPVYQFLDKKRAQGKPYYVYMTAGANKFLRIYYGRVKEYLSSFSES

SEQ ID NO: 213066 - protein, 383 aa, unidentified
MGAVARTQLRETPVMQNRTCVVLDVHARSVWACTVDDESGEMRTSRISPKTAEIVKWAQALPGEVEVAYEAGPTGFGLARALIAAGMQCHVLAPSKMERPSGDRVKTDKRDCEWIARLVRLGELPVVVIPSEGQEAARDLVRAREDVRGDLMRSRHRLSKLLLRQGIVYEDTAWTAAHGKWLRSQSFDKPGVQFAFDEAYDTVLTTLARRDRLDKAILTMAAEPAWAPVVARLGCLRGVGTLTGFGLAVEIGDWHRFTGNSIGSFLGMTPSEHSSGGSRSVGSITKTGNGHARRLLVESSWHHRKPYRLSAEMIRRRDGQSPLVRARADQANRRLNQRWRTFDARKKRPTVAAVGVARELAGWCWSLAVMDGEKDNSAMNRQR

SEQ ID NO: 213067 - protein, 372 aa, unidentified
MEKSSRTIYVGLDVHKDSIAVAYAPEARDADVVALGTIGTRQCDIDKLIRQLQSKGPAQLVFVYEAGPCGYWLYRYLTHKGLACHVVAPSLIPRKPGDRVKTDRRDAITLARLMRSGDLTSIYVPQVQDEAIRDLSRAREDAVEDLKAAKHRLKAFLLRQDIRYEGRATWTAAHLRWLSEVVCPTPAQQIVFQEYLRAVTEQHERRGRLESELHAQVKSWRLYPVVEAIQALRGVELTGAVIVIAELGDLTRFDHPSPLMNYLGLTPSEHTTGQRRRQGGITKAGNTHARRALVEGAWAYRYPAKISRHLQLRLEKLPAEVQAIGWKAQVRLCKRYRQMTARGKHVNEVVVAIAREMAAFAWAIARIVPLAN

SEQ ID NO: 213068 - protein, 344 aa, unidentified
MNQIIRIGMDTSKHIFQLHGVDATEQVVLRRKLRRHQVLEFFAKLPPTVIGIEACGAAHYWARELRKLGHEVKLMAPQHVKAYVKRNKNDGRDAEGLCEAMSRPTMQFVPVKTEEQQAALMLIGVRQQLITRRTQLGNAIRGYAAEFGLTAAKGLDKIEPLLAQIAQDQTLPEMARELLALQGRDYARLQIELKAIEAKLMAWHRANPDSRRLAQIPGVGPIGATALVMKAPDPRLFPSGRHFAAWIGLTPKDHSTAGKTRLGKITRAGDEMLRSVLVAGATAVIKQAKHGRGSPWLLALLKRKSPKLAAVALANKIARIAWKLMVTGESYDGARMLGVSAFAA

SEQ ID NO: 213069 - protein, 315 aa, unidentified
MNKKLIYIGLDVDDTQYHGAAFDKETGEIVSFKCRPTLKGLVSQLEKMQKYFEADSLKLCYEASYIGHCLQRDLMQAGYYCDVISPGSIPRKGSKSIKTDRIDALDLAQFYANDLLTIVQIPDAETEQDRDLLRSRQQLMKQQVDLRRHVQSLLRRNGRHYRAETKNKTHWTKHHYCWLERTAEGSSGSLGVNLRLLLRQLKSINEIIAAYSEEIESMAKQPNYQEAVSALTCYKGIKNLFALTMITEIGDVKRFAHPRQLSAWVGMDIREYSSGGKHHRFGITKQGNYYDVRAGNHNVKLVPLPSILSKVISPS

SEQ ID NO: 213070 - protein, 319 aa, unidentified
MDAVLGIDIAKAKFDVALLSEGKLRRKSCPNTPAGFAELTQWLGRQGAPLVHASLEATGTYGDALAHYLHDAGHVVSVLNPAVTHAFAASQLARAKTDRIDAELIARYTATQHPAAWTPAPREVRDLQALVRRLDALQGMKTQETNRLEAGPVVAAVRTSIETILATLTAEIQAVQRQMRDHLDQHPGLRTQRDLLTSIPGIGEATAAVLIAELFDKRYRSARQAAAFAGVVPRVCESGTLRAHGRLAKIGPGRLRKALYFPALTALRFNPTLRALQIRLRAAGKPNMVIVGAAMRKLIHLAFGVLKSGRAYDATYARP

SEQ ID NO: 213071 - protein, 328 aa, unidentified
MQGKVSSERTAMATVYVGIDVCKEWLDIHLHPLGRSFRVTNDTAGLRRLKRELDALDQMPRSALHIVMEATGKWHRAVQRSLHADGFYVSVVDPLRARLFAKACGFLAKTDRLDARLLAIMGEALKPAQTPPQDQALEALQELVNARSAANGERTALSNRMKTAVTAFLRKELTRRLAALDTHIARLDAEIERSIGAEPEMRRRLDILISIPGIGAVTAASLIAGLCELGACSGKQAAMLAGLAPLACESGERAGHRAIRGGRPAPRNAIYMAALSASRHNPDLAHFAERLKKAGKPNKVVLVAVMRKLIVLANTLINKNRIWKPNPP

SEQ ID NO: 213072 - protein, 452 aa, unidentified
MSKGRANGVTRGDLRRNARKARLRALVPAAHAVAGLDLGEKKQALVVTGADGLVLARRSPRVTVHGLGAVLDWAVEQARAAGFPGLAVACEPTGSRWMVVQELCARRGLAMVCVQPLVSHVAREQQDLTGDKTDEGDCVLIARLARELHCYEPEKLEGLWADLREAGRCRAQVITRATAAKQLIRDKLGLAAPALLAASSEPLDSATWLASLEVVLDRCGGDPAGVAGMGYEAFAAQVASRVGGWGGKRAGPTAGKLFAALAGRTGVAVPARRAALRRARHGLEDLKAARARRAQVEAEMTGLLDELGIDHARICEIPGLTPAGLAAILAETGDLRRYDSSSSVVKHSGMSPARNESAAFHGKTRVSRRGRPALRLAAWRATWAVLRHCDVLAAKHTALTSRDGEGKLAGAQARVACAASLLRWIYALTVHGTRWDPRIAAGELGHHHAMAA

SEQ ID NO: 213073 - protein, 343 aa, unidentified
MQTITTIGLDIAKSVFQVHGVDAPGQVVIRRQLKRRHVLSFFAKLPPCLVGIEACASSHYWSRELQALGHTVRLMPPAYVKPYVKRQKNDMADAEAICEAVTRANMRFVPTKTPEQQSCLMLHRTRHLFIRQQTAVINSIRAHLAEFGIVAPVGRKGVTELLHVVADPNDGRVPEVARACLAALGTQLLRLKEQILEFDRMIIAWHRSNQTSKRLHCIPGVGPMLATALVASVADPKTFRSGRNFSAWIGLVPKQHSSGGKDRLGSISKQGDRYLRSLFVAGALAVIRYAKIHGTGHRPWLTALLGRRPTKVAAIALANKIARMAWAVMAKGERYKQPVVLAR

SEQ ID NO: 213074 - protein, 430 aa, unidentified
MNTLQKRITRITTATLIVGVDVAKEIHWARITDHRGIDLTKPFKVHNSIDGFENLLTKVEKLQAKHGCDHVIIGTEPSGHYWRALGWYLKLHKSKPYLVGINPYHTKQAKELNDNSQTKSDPKDALVIAHLIRNGNYFDTYLPEAEYAELRILNTERQRLMKQINRANNILIAMLDEFFPEYSTVWSNVTCQTSLTLLKTYTFPSDIMSASQSLLLDDIRKASNGTEGIKLMGDMLKAAGRSVGVKEGLQSARIRILNLIDELNYFEKKKILIEAELETVIGTLQLGEILQSVPGVGSIISAAFLGEVGDISRFDNWKQIRSLAGLNLVENSSGQHKGKTKVSKRGRPYLRHMLYLAGECGCRCNKEMNSFYRYLRERKNNPLNGYQAFVATGLKIMRILFHLAKSGDRYDPSKALGNARQQQIASLNAA

SEQ ID NO: 213075 - protein, 414 aa, unidentified
MNTETESREIERYIALDIHKEYVMVGAQNANQEWVIRARRVEMGQFRTWAGNNLRVGDAVVIETTTNVWDIYDIVAPLVTRTVVAHAGAVRQIAEARVKTDKQDIERLLRLLIADIVPEVWVPPTHVRELRGMIAYRNRLVKTGAMIRNRLHSLLHRHNLALPEEGLANKDWWEAQSISALEKLQVRQELSMLAEVEKHKAELGKELSKMSVGETWGGPATRLLQLSGIGVTVAMTVLAAIGDIRRFEDPKHLVGYAGLGAGVHDSGKEHIDKGITKSGRKELRWALIEAAWKAVQMSAIWKARFEELKKRKGSCKAIVAIARKLLVTIWYVLTDETTDRNASEEDLAWKMLLWSWSLAEEARLGLTPKQFAKYSLMRLGVQNDVTSFMRGKVLRRIAPAEEVLARISELGLPG

SEQ ID NO: 213076 - protein, 349 aa, unidentified
MIARSDAACFVGIDLHKDTLTACVLRGTDREVTYVKLACKCRERIRSFFSALPQPSVVAIETVGFYRWLWAELEPLTGQLVLCDARGARALAGRRIKTDREDALNVALLLADGRLPLAWAPPENVQVLRTWTRHRNGLTRQHAKVLHHVKSTLNRLNFPGPVRLDAAALQRYLLAGVERFTADDLTMLWQHQRRLVEIEQDRAQSERRISELMRAPEFSRLRELLESVPGVGLVTAATVIAEIGDFSRFADSKAIGRYAGLTPTVYASGNSSRLGHISKTGAPDLRWVLQQAAWTAIRCDAGFKKTWLRIAKTAGKKAAAVAVARKILVLMWTLQRKDEPSKSRDPVAA

SEQ ID NO: 213077 - protein, 349 aa, unidentified
MKEYIAFDSHKHYTLVEWEDVASGHRRQKRIEHMAGAIRACLADSQPGTPVAIEATANWYWIVQEIEEAGLQPRLVHPRKAKLMMGMINKTDKLDVHGLNRLQRNQTLPTVWIPPANLRDLRELTRVRLVLVRQRTQLKNRLHANLAKYGLRLDDCSDWFGAKARLRLETLFKQLPAQTRQVNRWLLEQLDFVGGQIQQQEKQLQTLLPAHPSIERLQSLPGVGLILAATIWLEIGTVERFASCEHLASYAGTTPRVHSSGDKTRYGRLRPDANRYLKWAFAEAGNSVAVHHTRQPQRHVSRLYQRIKSRKGHAKAIGAVARHLAEATYWVESRQETYRDPALGRANPG

SEQ ID NO: 213078 - protein, 340 aa, unidentified
MQAIRFGIDLAKNVFQVHGVDAAGRVVVQRQLRRAQVEKFFAAQPPALIGMEACGSAHHWARTLQALGHEVKLMPPAYVKPYVPRNKNDARDAHGCCEAVSRPDMRFVPIKTVEQQWARGLHRTRDLLVRQRTQLANAIRGLLYEMGLIGAKGAAGIETLLQRIEAADEVIPAALLICLAPLAGQWRALDGEIGKLDKQILARVRQQQAALRLTTIPSVGPIIAHATIAAIGDGSQFASARDFAAWLGLTRKSHDTGGKHKLTGHISRAGDRDLRRLLILGASSWLRQVRAKPDRGSPWIRGLLARRPVKVAVVAQAAKTARIIWAMLSSGQEYRAPTAA

SEQ ID NO: 213079 - protein, 363 aa, unidentified
MFTERTSVGLDVHARSVAAAAIDGVTGEVLQTRLTPSYEHIRSWISDLPGPVAVAYEAGPTGFGLQRALTGAGIRCEVVAPSKLQRPSGDRVKTDARDALHLARLLRLDEITSVSIPSVSQEAARDLVRAREDCRGDLMRARHRLSKLLLRHGIVYYGGRAWTGAHDRWLRTDAAPRLGMPATRMAFEADYDHVLTMQARRGRLDAAIQDMAADSEFTPIVRRVSCLRGVSTLTGLALAVEIGDWNRFTGNTIGSFVGLTPSESSSGSSRAQGPITKTGNTHVRRLLVEAAWHHRPRYHVGLVMRSRWDQASPAARARGDEGNRRLHGRWVGFLERRKRPTVANVAIARELAGWCWSLAVMED

SEQ ID NO: 213080 - protein, 412 aa, unidentified
MQDILTCAMGLDIHRDVIVACLAKGELGTDPEIEIRSFSTLIPEMRKLRDWVLEAECHYVAMESTGIYWQPIYEMLEPCFDGQISILVVNARHMKNVPGRKTDMRDAQWIATLLRAGLLKGSFIPDKTFRELRHLTRYRKSIVHDITAQKNRIDKFLQSSGFRFTAFLSDAFGASGRNIIRHLMEYGNISREALDRCLKTQTRKRIDEILVALNGSLSEHQRGFLRMIFGHLEALEQHRHTVEDAITKEITKHEEALSLLCSIPGIDVTAAAAIIAEIGTDMSAFPDSQHICSWAGLSPGNNESAGKRKSAHINKGNPYLKSMLCEVGWVISGKRTLYLSGWYWRIKQRKGAKRATIALARKLLALIYTMLKTGSPYNEECFETRRKQSERKRANRMVNELQKLGYFVVAPD

SEQ ID NO: 213081 - protein, 343 aa, unidentified
MQVSAIGVDLAKNVFQVHGVDSAGKVVITRQLRRKQVIDFFSKIPACLVGMEACGTAHHWAREVSKLGHTVRLMPPSSVKGYVKRSKNDAADAAAICEAVTRPSMRFVPIKSADQQALLMLHRTRDLLVRQRTQLINALRADLAEFGLVAATGREGLAQLAAIITDESNREALPFAMKQALQTIIDQLAALELQSGTLDRAIHAHHRDNDMSCRLETVPGIGVIGATAIASTVADAGAFKTGRDFAAWIGLVPRQHSTGGKERLGGISKQGDRYLRRLLVVGATAVVRHARQHPQKHPWIMRLLARKPAKLVAVAVANKMARIAWAIMAKGGYYRAPELAAAA

SEQ ID NO: 213082 - protein, 348 aa, unidentified
MQNITLIGIDLGKHSFHIHCQDKSGKALLRKKFTRTKLMQFLATCPPSVVVMEACAGAHFMARCISDFGHETKLISPQFVRPFVKSNKNDFVDAEAICEAASRPSMRFVQPRTETQQAMRALHRVRESLIRDKVKTTNQIHGFLLEFGISLPIGDAVIKRLSLVLAEHEIPEYLSRLLVRLHTHYFYLVEQIAELESELSQSINADDTAQRIMTIPGVGPITASLLSSQLGDGKQFSCSRDFAASTGLVPRQYSTGGKSTLLGISKRGDKNLRRLLVQCARSFIMRLERKHGKLAEWVREQLNKKHSNVVTCALANKLARIAWAITTQKKNIRPDIDADITQLVYFKQ

SEQ ID NO: 213083 - protein, 312 aa, unidentified
MTHACAAGVDVGRDWLDVGLAPSNKTFRIANAPAGITALVTRLKREGAGKVVLESIGGYGARLVRGLADAGFEVGVVDPKRIAALRTAEGRRAKTDRLDAGLIARFALLMQDAARPVPSAKAFEIRALSTRRRQLVEMAAMEKTRLKQTLDEAVADSCRQMIALLSQERARIEGRLQAMLLEVQDGPARAALLQTIPGVGPAVSMTLLADLPELGTLDRKAVASLAGLAPHANQSGTRTGPAHIGGGRPCVRAALYMAALSAARNDKGFRHEYLALRQAGKPAKVALVAIARKIVVAANGMLKSGQPWQKPA

SEQ ID NO: 213084 - protein, 418 aa, unidentified
MNKHNNSGKKSELTSKRAKPRGPMRRDTKEVLTELVGKLKEKLDPKKPAATSAGEKHKRGELRPNLDRLTVGVDLGDRWSNYCILGLEGETLAEGQLRTTQEDLAEFFQALNAARVVFEVGTHSPWVQEVIGGCGHEVLVANPRMMDGSKRRKRKNDRIDANKLARLGRVDPQSLHPIQHRSREVRQDLVILRARDALVAARTELINATRGLVKSMGTRLPKCSSPSFAEKVEGTVPAELRDALLPLMRMATALSDCIQEYDEKIEKLGREKYGHTALLRQVKGVGPITALAYVLTLENPDRFVKSRDVGPYLGLVPKQEDSGESQPQLGISKTGDTMLRKLLVGSAHYILGPFGPDTDLRRYGLRLCERGGKNAKKRAAVAVARKLAVLLHCLWVSGEVYEPLRQGTSATIAPAVAA

SEQ ID NO: 213085 - protein, 412 aa, unidentified
MDVIYPQCCGLDVHKKTVVACCLISTEGPETVKEIRTFRTMTADLLALADWLQERGCTHVAMESTGVYWRPVYNVLEGQCDLLVVNAQHIKAVPGRKTDIKDAAWIAELLRHGLLRGSFIPSKPQRQVRELTRYRSTLVQDHARALNRLQAVLEDANLKLASVVTDIYGVSARAMLEAILAGQRDVEVLADLARGRLRAKRDQLKEALEGRVTAHHSFLLTEHLSTLEYLDEAIERVSAEIDQRLTAEQEAIALLDTIPGVGQRAAEILIAEIGTDMSRFPSAKHLASWAGMCPGNHESGGKRLSGKTRKGSRWLRQILVEIAHVASKTKNTYLAAQYRRIAARRGKKRALIAVGHTILTIVYTLLTRKQSYQDLGAAYFDQREQHRVERRLVQRLERLGYEVALQPKALAS

SEQ ID NO: 213086 - protein, 338 aa, unidentified
MDTYAGIDLHSSNSFVGVINGEDRRLYGKRHSNRLDDILRALDPFQDSLKGVVVESTFNWYWLVDGLQDHGYAVHLANPSAIQQYEGLKHTDDKWDSFWLAHMYRLGILPEGYIYPKEHRAVRDLLRRRLLFVKHSTSHILSLQSTISRNLGLRMSGREIKKLKSEDIDGMFDCPNLVFMANNSLAAINFLKKIILDIEKNVKSQVKMRKEFLMLLTIPGIGNILGLTISLEVGDIGRFPAVGNYSSYSRCVESKRLSNGKKKGENNKKNGNRYLAWAYVEAAQFCRRYCVKAQSFYQSKAAKTKPVVAVKALSNKLSRASYYIMRDQVAFDEDKLFS

SEQ ID NO: 213087 - protein, 405 aa, unidentified
MEVIYPRCCGLDIHKKTVVACVITPEEKEIRTFSTMTEDILTMVDWIKSKRCTHVAMESTGSYWKPIYNILEIEGLNPMVVNANHIKNVPGRKTDVKDAEWIAGLLQHGLLQGSYIPSREQRELRELIRYRRSLIEERAREINRMQKVLEGANIKLASVTTDILGKSSRAMIEAIINGEEDPTILSELAQKRLKNKKEELKKALNGLIGPHQRLMLKTQLLHIDFLDEQIALLDEEIKRRMLPFEEDLERLDTIPGVGRRTAEHIIAEIGTNMDQFPSAAHLCSWAGVAPGNNESAGKRKSSRTRKGNKKLRSVLVEAARAAAHTKDTYLSAQYHRIAARRGANRAAVAVAHSILTIVYYLLKRKERYNELGVNYYEERKKEIIVKQSIKKLEALGLKVTVEDTA

SEQ ID NO: 213088 - protein, 371 aa, unidentified
MKTNNTQSVVSNSPTPATVVPSGFTLGLDLGDRSHHACVLDATGQVVRDGALTNTRPALAKLMAEFPCATVAMEAGTHSPWISRYLTELGAKVLVANPRKLHAISRNERKCDQRDAQMLARLARVDPALLYPIEHGSAQAQHDLLGLKLRDALVRTRVNLINTVRFTLKSLGYLVRNPSSESFHKTVLADVPADCLPVVQPLLTVLAQVTEQIKGMERDLVQRGKKEYPATQRLQQIAGVGPLTALCFVLKIGDPHRFGRGRDVGAYLGLCPRRDQSGGTDKQLRISKCGDGLLRRLLVSAAHYILGPFGPPCALREHGQRLAGTGSAREKKRAVVAVARKLAVLLLSLWKHGANYEPRATTTPALVMTPA

SEQ ID NO: 213089 - protein, 389 aa, unidentified
MKIYVGIDIAKLNHFAAAISSDGEIIIEPFKFTNDADGFQLLVSKLESFDKNSLIIGLESTAHYGDNLVRYLVTELYQVCVLNPIKTCQMRKNNIRKTKTDKVDTYVIAKTLMMQDNLRFVSFFDLDMMDLKALGRFRQKTIKQRTRLKIQLTTYVDQIFPEIQYFFKSGLHQHAVYALLKEAPSPKEIASMHMTHLANLLKVNSHGHFTKEQSKELRVLAQKSVGANDSAISIQITQTIQQIELLDSQLDKIEAEMTEIMKYSDSVIMTIPGIGYINGGMILGEIGDIHRFSNPNKLLAFAGLDPSVYQSGNFQAKTTRMSKRGSRVLRYALVNAAWNVVRNNATFKAYYDAKRAEGRSHYNALGHCAGKLVRVNWKMLTDEVEFNIE

SEQ ID NO: 213090 - protein, 345 aa, unidentified
MEIKSIGIDLGKTTFYLIALGSRSQVVIRKKFSRSQLLAYTANLPGSLIGMEAGVGSHFLGRALREQGHEVRLIPAQFVRPFVKSNKNDYRDAEAIAEAVERENMRFVPIKTEDQLDLQALHRVRDRLVARRTSVINQIRAFLLERGISFRKGPASLRRQMPEILENADAKLSAAMRRLLDFLWQEWKGLQLQIESLNTELEQIASSDPSCVRLQQIPGVGPLVSTAVVSAIGNGAAFKKGRDFAAWLGLVPRQWSTGGKAKLLGISKRGNPYLRKMFIHGARAAVLRVKREGSSLGKWMSGLETRATRNVVIVATANKLARISWAVLASGNDYQPLHQAAVFSN

SEQ ID NO: 213091 - protein, 475 aa, unidentified
MSNKLFVGIDVSLKENQLQCLDADGNFISKSKRFANNLPGTMDMINYLKSIMDKGNFESLTIGMEATSSYWFPLFHTLASSNELKNYSVEILSLNPKLISNFRKAYTDMDKNDLKDSFVIADRLRFGRLPESQTTDAKYLALQRLTRYRFFLCQTKAQLKNYTCSLLFLTFSEWNRVKPFSDMFGTTAKNLLKKFHSAKKLAEVPINELKNMLASSSKNHFRDIEQKSILVNQTAKHSFSIPDILAEQIHFIIKLNLQLLNLIEQHIDRLNKKISKLMKKFKNPLLSIPGIGPVLAAGIIAEIGDISRFPGQAQLAKYAGLTWRKIQSGNFTGDLTPLTRTGNAYLRYYFIQAAQSMIKHNSEYREYYKRKFKETSRHPHKRALTLTARKLVRLVYALLSKNQLYLSPEERKKHKLRQKEVIENQTPEIVEEKSKKIPVAAQKNSTKKVKTLGVAAKYTRTQPKLEHALVYAVNT

SEQ ID NO: 213092 - protein, 351 aa, unidentified
MMIIGVDFHPSFQQIAFLIEETGEYDEQRLNHEGGEAERFYRDLKQKGIRVRVGMEATGYARWFERLLAELDFELWIGDPAEIEAQRVKKRKTDREDARLLLRLMREDRFPKTWVPSPENRDLRQLLWHRHRMVQMRTRIMNQLQALAMNEGKRWKSKLWSKPGRAEFEALVLGPWASRRRRELLELLDRLNPSIEELTTAVEQEVKKRPEALRLMTHPGVGPITALAYVLIIGTPERFARGKQIGTYVGMIPTEDSSADKQRLGHISKQGSSLLRYLLVEAAQAATRFNPHWRRRYIHLAMRRHRSIAKVAMGRRMGIRLYWMWRNGCDYSPSFEFGSYAGQLAVRHGVQ

SEQ ID NO: 213093 - protein, 331 aa, unidentified
MNTYDNEKILLSLGVDVSKKSLNLAYLYYDNTVDYENIQNTKSDISKLKQKLKTIKKDKDFVCIAESTGDYHFMFAVMLSGLYSVKIINPILSKQMSMYTTRGAKTDKQDSKMLAGLRVLNPEALKYVDFKADLADIRLRKYINALAKIEKIIQEYKMHSVSYVNSLSLFFDREDIKEDTKAKEVVLSLLKKEKRRLERKINALAQDEAREISNKIKGVGMTSIAVVFSFLKHKEFKNRDALVAYFGLDVRAKRSGQFKGKEKISKRGNAFARSCLYRIAWGLVMHNDEYKEYYQKLRQRGLHYNSCLIAVARKFLRFLYAYYYKRTIRLS

SEQ ID NO: 213094 - protein, 342 aa, unidentified
MDHYAGIDVSLESSSVCVVDASGKIVREDKVASEPEALTGWLGGLGVELARIGLEAGPLSQWLYAEMKDAGLAVELLETRHVRDAFKAMPVKSDRNDARHIAQLMRLGWFRAVHCKSMGAQEMRALLTARKLVQSKLRDVENSLRGILRGFGLKVGKTTARTFAGRIGELVAGHANLETVAQALLAVHAVLLREFKTFEKRVRTAARSNAQARLLMSTPSVGAIVALTYAAAIDEPARFKSSKRVGAHFGLTPKRYQSGKTDFTGGISKIGDASVRTALYEAAHIMLTKPVKGCSQLKSWAMKLARRAGMRKAKVALARKLAVIMHRMLVDGTPFNAAATAA

SEQ ID NO: 213095 - protein, 341 aa, unidentified
MGEVTTIGLDLAKHIFQAHGADASGGVVFRKKLRREQVLAFFAGQPRCLVAMEACAGAHHWAREIGALGHETRLIAPAYVKPFVKRQKNDAADAEAICEAAQRPTMRFVAPKTAEAQAATTVFRTRDLLVRQRTQMINALRGHLAEYGMVVRKGAENAPRLVELVRDPASDLPQEARSVLEVLAQMLQLVEAKIDVLDAEIAGRARTTPLIRRLMTIPGIGAITATALAALAPAPETFRRGRDFAAWIGLTPLQKSSGGKERLGKVSKMGERTLRRLLIIGASSATKAAARKGATSETWLGRMLARKPRMLVAVALANKIARIAWALMARGGTYRASAAAA

SEQ ID NO: 213096 - protein, 401 aa, unidentified
MAPTAGIDWASEAHEVCVSEEGQVNERFSATHDERGIAAVAGKLVRLGVCRVAIERPDGILVERLLAAGLEVLAIHPNQVKAARARFAVAHGKSDRFDAYVLAELARTDAHRFRALVPDGEETKGLRALTRAREDLVGVRVELANQLRAQLQAFWPGALLFAAVDSPISLAFIERYPSPGDAKGLGVGRMAAFLARESYSGRTDPTELLARMKAAPQGTAGPEEQRARRAVVLGLVAALSPVVTEIAALDTQIRERLASHPDAAIFAPLFRDHKTTICPATLIAEIGDARGRYPTEAAMAADAGMSPVALESGKLRVATFRRACDKRLRVAVATLADSTRHWHPWARDVYRRARARGQDHPHAIRTLGRAWIRVLWRCWRDEVPYDPTRHGNFGRLQTAGG

SEQ ID NO: 213097 - protein, 373 aa, unidentified
MTKIIRIGVDTSKTIFVLHGVDAAEQPVLRRKLRRRHFLEFFGRLEPTKIGMEACGAAHHWARELGAIGHEVVLLPPQYVKPYVKRGKNDSADAEAICEAMSRPTMRFVPVKTAEQQAGLMLAGTLKGLRDRRTQLTNMIRGYAAEFGLVAAKGLDKIEPLLARIAEEARLPRLAKQLFAVYAKEYRQLREQIAKVEAKLMAWHKSNEQSRRLAEIPGIGPIGATLLTMKVANPRTFRTGRDFAAWLGLTPKDHSTAGKMRLGVITRAGDEQLRSILVVGATAAIKQARLGKGKHPRWLVELVNRKPPKLAAVALANKTARVAWKLMVSGERYDRNRASHREGRGAALIGGSAPRPSLPPCQTPRELPAPSNA

SEQ ID NO: 213098 - protein, 405 aa, unidentified
MNAVGIDVSKGKSTVTIRRPGDVVIMPPCDIPHTQSAINCLIEQLQNLDGDTKVCMEHTGRYYEPVATWLSDAGIFVSAVNPILIRDFGDDSLRTPKTDKADSKKIARYTLDRWTKLKQYGNMDKTRNQLKTMNRQFGFYMAQKTAMKNNLIALLDQTYPGANDFFDSPARSDGSQKWVDFVHTYWHVDCVRSKSLNAFTEHYQNWCKRKGYNFSVGKAEKIYHLSADLIAVFSKDDNTKMLIRQAVAMLNNASETVESLRSQMNELAATLPEYPVVMDMNGVGSTLGPQLMAEIGDVTRFTHREALTAFAGVDPGKNDSGQHVQKSVKTSKKGSPYLRKALFQVMDSLIKRSPVDDPVYAFMDKKRAQGKPYYVYMTAGANKFLRIYYGRVKEYFATLPKNEEI

SEQ ID NO: 213099 - protein, 382 aa, unidentified
MAEITRALIARVGVDLAKTVIQVHAVDRAGHRVLSRAMKREQLLAWCAQLPAGCLVAMEACSGAHAWARRLAAMGLDARLIAPSFVTPYRMEGKGGKNDMTDAAAICEAASRPTMRFVPIKTVQQQGVMALHRVREGFKEERTACINRIRGVLAEFGLVFGKSPKALRAVLGDVLEDASNELDARARLVLQSEQRHWQQLEEHMRWCDRQVGQHVRGSQEARRAARITGIGELGASALTAAVGEFEQFRSAAQFGAWLGLVPRQNSSGGKTQLGKITKRGNEYLRTLLVQGAKSAVMSAGKRDDATSRWLEALKQRVGWQKACVAMANKNARILWAVMTREKAYEAGHVSEKPQAKCARAPAARVPAAPVASARHPLQPCAA

SEQ ID NO: 213100 - protein, 407 aa, unidentified
MVCETGKENEELYAVSFYDLRGRIGEWSKSPKRVDSGGRGVRMRIDVGVDLHKTQMTVYVRTGKDEGEGGEYATGEEGYREFLKALGKWRSKGADVRVAVESTGNTRYFMHRLETRGYPVVVINTMKFKVITQSVKKTDKHDACTIAEFLSKDMLPASKLCSEKSEEVRRLLKVRSMLVRTRVSIKNQIHGLLVSRGMEDTRASLQSKRGRQKIQDTLAGAGNGLVVQPLFETIEVLGEKIKAIEAQIEKLLAEDKAVKLLETIPGCGPVTAWTIRAYTDDIRRFASYKQYSSYAGLVPWVQCSNETEHYGRITKRGPEELRTAFVQLVMGIRRSRSTVSWRLMVQYESMKRQKGTGKSIIATARKMSKIVWYMLMREEEFKTSLMVDTKLDSVIQSMREEALCESA

SEQ ID NO: 213101 - protein, 399 aa, unidentified
MLAVGIDISKSKSVAAILNQDGSMHTSPFEFHHTQPELDAFIKYILNSNQSATILMENTGHYHYPVLKAFREAGLPVCMVNAYQIKKFGDMDLRKAKTDKKDAVRIARYALEKSYSLVPYTSMEQKYEDLKFLARQYNQRMLTLKTNKVFLLNILDETMPGITNILPLTTRTPETSLSVLFINRFKSYDRIKKMGKSRFLDAFEKIARKSRNRQTKTYGLAIYEAALRNITTRGENEYTLAAQNQCLELVCESQKATDSIILKMQTLAETLPEYAVLRSMAGVGDRLGPLILAEIGDIRRFHSGKALNAYAGNDAPPYQSGTFESHNRHISKRGNAALRKYCFEVMQALKLTRPQDDPVYLFLLKKEQEGKPYNVAKMAGVNKFLRIYYARAMETLKQQ

SEQ ID NO: 213102 - protein, 421 aa, unidentified
MKPQAPEAFAAFIGLDWADAKHDVCLQAAGAERREFLILEHRPEAIDAWVQTLRTRFHGQPVAVCLELNKGPIVSALRQYDFLVLFPVNPFTLAKYREAFTPSRAKDDPTDAELQVELLLKHRDRLTPLAPQSPTMRALAQLVEHRRRLVGDKVRLTNRLTSALKNYFPHVLQWFAEKDTALFCDFLSRWPTLKAAQLARRTTLETFFRAHHVRAADVIDSRIQAIKSALALTTDEGVITPNVLLVHALVAQLRVTLQAIADFDKAIAPLAQGHPDFPLFDALPGAGAVFAPRLLVAFGEQRERFTSAADLQKYAGIAPVTERSGKKSWVHWRLQCPTFLRQTFVEWAAESTRHSFWAQVYYQQQRDNGKAHQAAVRALAFTWLRILYRCWQDRTPYNASVYLKALHRRGSSLMQNLAKES

SEQ ID NO: 213103 - protein, 348 aa, unidentified
MKHYAGLDVSVKETSVCVVDESGKLCRERKVASHPEDLVAILSDPAFRLERVGVEAGPLSQWLFEGLAKAGLPVFCIETRHTKAFLDALQQNKSDRNDARGIAHMMRVGLFKDVHVKTITSQKRRALLTARSLLQEKAIDLENEMRGLLRNFGLKVGHASGGMFERRILELVEHDAELAEIMEPLLAGRRRLREGLAKLEKRVLAEAKQDEVCRRLMTVPGVGPIVSLAYVSTIDIPSRFRHSRSVGAILGLTPVLKQSGEMSRVGHVSLRGDAMMRRLLYEAAQSMMTRVVKWCWLKAWAMNIAKRHGSKKAKVALARRLAVVMHRMWVDGSEFRWTREDAVSTVAA

SEQ ID NO: 213104 - protein, 342 aa, unidentified
MTFVGCDLHTRMQQVAVLDTGTGEVSERRLDHDGMAVEEFYAALPRPVTVGIESTGYAVWFHALMQRLGHTLLVGDAAKMRAMVVRKTKTDRRDALHSLDLLRHDRFPTIWVPDPATRDLRALLTHRMRLVRIRTMVKNGLQAIALNSRLAWGSKLLRQAGLVQLQALALPPHTARRRDQSLELLAGLNTQIRELDDAVTTAALAHPDAPRLITPPGVGALTALTTLVVWGPVSRFHDSKQVVSYVGLAPALNASADKYHLSHITKQGSPLLRFALGQAAAHAARMDPDLKRTYGALVHRRGRPKAKVAVTRKLLVRLFIMLRDQIDYDEFCRRGRSAPASA

SEQ ID NO: 213105 - protein, 405 aa, unidentified
MDIIIKRGCGLDVHKKTIAACIMGIGIKKEIRTYGTMTNDLLRLKGWLKENSVTHVAMESTGIYWKPVFNILEDSFDVVLVNARHVKNVPGRKTDVQDSEWLCKLLRSGLVKGSFIPPIEVRELRDLTRYKRKLIQAATSEKQRIEKILEDANIKLSSIASDTFGASGSKMIEALMKGDLNAEEMAELSKGRLRRRKEELREALVGNMRENHKFMIKASLGHIKAIEEELSALECRIQEKIERHFKVEYELLKTIPGVKENASVIIAEIGINMDIFPTEMHLSSWAGMSPGNNESAGKKKPGTITHGNKSLKSALTEFAWVAAKTEGTYLSAKYRSLAGRRGQKKALVAVGHKILIMCYHILKHKVPYKELGGNYLDERRRNRITKGYVKRLNNLGYTVTLHEAA

SEQ ID NO: 213106 - protein, 390 aa, unidentified
MIYVGIDVAKDKHDCCILGPDTEELFQVFTIRNNSDGYGELFHKIESVSKDKSQIKIGLEATGHYSYNILGSLLDHGYHTFVINPLHTNLYRKGQSLRKTKTDKVDARSIAEMLMTDKTLKPYTGTSYHSEELKSLTRYRFELVKERAKLKTSVSRLVNILFPELESLVPTLHMNSVYRLLQELPGAYFIASSNLTHLKALLADASKGHYGREKAIVIRETAKSSIGSPMPAKSMELRQTIRRIDTLTSDIKEVEQSIQKIMDECGSPITTIPGIKYRMGAMILAEIGDFTRFSNADQVLAYAGLSPSTYQSGKLISSYARMEKRGSKYLRYALFNAAIYVSGWDERFRLYLSKKRAEGKHYYVAISHVIKKLVRTIFRMEITHTSYQPL

SEQ ID NO: 213107 - protein, 310 aa, unidentified
MTHVVCGVDVSSTGLDARIGRSGAFAHFANSPEGMEALAAFCRKHEVALAVMEATGGYERQPFALLWSHGVPAAIVNPRAVRNFAQAMGWLEKTDRIDAGVIAWFAEAKGVEPMAPARDLQARLAALVTRLRQLTDLRTAQSNQRRLVSEPIALASFDELLALIARQIRALEKQIAELIEADPLWQALDKAFRSIKGVADRTVARLMAELPEIGLIPNKAASKLTGLAPLARDSGKAEGRRSVRGGRAGVRATLFVVAEIVRRYDPDFADFHRRLKLAGKPKKVIRVALAHKLLVRLNAKARDARASLLA

SEQ ID NO: 213108 - protein, 377 aa, unidentified
MRKVRFVGLDVHAETIAVAVAEPEGEVRSVGVIPNRLEAVRRLVKKLGPAEQLRACYEAGPTGYALYWQLTGLGVACEVIAPTLVPVKAGDRVKTDRRDAERLARCYRAGDLTAVWVPDAAHEALRDLVRAREAAKGDALRARHRLTKLLLRRGCRPAVGVRAWTVAWWAWLRREVRFEPAALEVTFLDYVDAVDHALARVARLEHAIEAAVADAPPAMQAVIAALQALRGIARVSAATIVAEVGELSRFASARQLMGYSGGVPREDSSGPRVRRGGITKTGNAHLRRIVGEAGWAYRHRPCLGGALKQRQAGLPDAVREIAWKAQHRLHDRYRTLVGRGKTKPQAVTAVARELLGFIWAIGVQVEQDWRSPQRRAA

SEQ ID NO: 213109 - protein, 366 aa, unidentified
MKKRNIYQNRSQELLSLFEEAGNSAKVMCVPMDYAKKDHVVMFCNGYGDILRKPFSVKNSPDGVKYLVDQATRSCRRRGIKKNHIFFGGEDANSYAENFVNTLRSKGWFVAGVNAHDAKKQRANLQASTDRLDLMGIATMLLNCRANCCPTQSGIYRNLRTLVRHRRKLVVMSTEVKNRIHGVVDRLFPGFLDEGKIGIVPFTSGSLYLMEDRFSPKQIRRRKREKLIEILKRFGTSKAEETADRLQQYAAQVLHTQADYVDTLQLSLAQHVKHLRCLKESVNQLEKEITVSLAQTQGAFLTSVRGIGIVLAAGVTAEIGDPNEQKPLNNLVSYSGIIPRVKQTGGKRPPNPGQVGHLSERSDAGF

SEQ ID NO: 213110 - protein, 351 aa, unidentified
MLTVGVDIAKATLEATAWQEGRGAVHLGTFAQTADGWADLRDAVVGLHRPPTVAAGSGPEDADRAPVAVVLEPTGGYELAFALWARRQPGWQVHRPNPARVRAWARSQGLRAKTDRQDALLLARFGASAQPALAVWQPLASEVSELDQLLRRRDDVAGGLRRERQRHEQLGVRPDASRTVQASVERLLTTLQDELAELERAIAEQVHRHATLQTAEQRLRSVPGVGPRVALPLLVACERYRALAGEQGTAKGMVAYGGLDPQPHESGTSIRRRALISRQGDRDLRARLYMGALGALRGENPVHTFYQRLVNRGKPKKLALIAAARKVLAWAWAVFDTGRPFDAAMTVKLTA

SEQ ID NO: 213111 - protein, 408 aa, unidentified
MQAVHERCAGLDIHKKTVVACVLTGSGKQIRTYGTMTRQLEALADWLAAEQVSHVAMESTGVYWKPVYNLLENRGLELLVVNARHIKNVPGRKTDVKDAEWIADLLRHGLLRASFIPGRDERELRELVRYRRTVIEQRAHDVQRIQKVLEGANIKLSDVASDIMGASGRAMLERLIEGEDDPVALSQLAQKGLRKKQDQLQQALAGSMGAHQRSMLRHLLDHVKFLERQIEELDGQIQERTRPFEQVIDHLDAIWGLGRRSVEEILAEIGVDMSRWPTHRHIASWAKISPGNHESAGKRYSGRTGMGNRWLRAILVEAARNVSRNPHSYYAALYHRLSQRRGKKRAMVAVAHSLLVAIYHMIKDGTLHHDLGSDHFERLDRGQIARRAIRRLERLGYQVTIQEAAPAA

SEQ ID NO: 213112 - protein, 359 aa, unidentified
MTRIASDDPPRKVIVGVDTHKHIHVAVAIDHHGARLGDLAVSADTGGYAQLEAWARALGRVDRFGIEGTGSYGAGLTSYLRRCGHRIIEVNRGDRRSRRQNGKSDTLDAEAAARSVLAGTATSIPKSADGLSEMIRQIKVARDTARKGRTSAIICLKTIVVNAPAELRESLDGLPDKALIDRCAGYRPRSMATTVDSAKHSLRALARRWLDLDAEIRSHDAVLDDLTAQASPTLRDGYGIGPDTAAEILIVFGDNPDRIRSEAAFAKLCGTCPIPASSGLTNKHRLYRGGHRQANAALYRTVIVRMRFHQPTIDYVARRTAEGLSKKDIIRCLKRFLAREVYQRVMIDHRARQGLAPAA

SEQ ID NO: 213113 - protein, 340 aa, unidentified
MDATTYGLDVAKRVFQMYWVDAQTGEIVNRRFGRNDLIEFLVKRPPGRVALEACGSGHWWARKIKALGHEVVLLHAKFIRPFVQTNKTDAADARAIWTAVQQPGMRTVAAKTEDQQAMLALHRMRSLLVKFRTMQVNQLRGLLYEFGATFRSGRVAGLSEIRARMAELECALPGTMVCSLNDQLNRIAGIEEDIDRLEKRIGSWQKQEAACRAIAAVPGIGKLTATALVATMGDAKTFRSGREFASFLGLVPRQSGTGGRIRLGSISKRGDPYLRTLLIHGARSVLCHAKVPTPWQTGIQARRPANVAAVALAHKMARTAWAILARGQAYQRNYVSVKPA

SEQ ID NO: 213114 - protein, 401 aa, unidentified
MDPQIRVGIDVGCKAHRVGISNPDGSILEEFDISHTGAGFRDFFRRIDHHRQKLDLPVAVAMEGFNGYARPLDRLIQERGYIMYNVNNLKLARFKEVFPGAAKTDPIDTRKILELFHLKDHLPLAKDVLQKVVAAPLVNDKLKRLSRRRRQLVNEKVRVANRIQSDMQAVCPELLAITNKASNLRFLRFLTCRDDLTQLPRLRRTTLLKIPSVGQKYARIIQEWQRKASFSAEVEYVGPMIIQDGRRILELRQQIHALDEAMAELADQSELACRIGSVQGFGKTCVAELAGEVGTTERFAGERSLSLYVGMSPLSRDSGQHHGSKCPRQVNHRAKAAMMRAVAHHIRCVPESRAYYEKKRAEGKSHNQAVRALGRHLVRVIWSMLKNERDYELREVIPSVT

SEQ ID NO: 213115 - protein, 453 aa, unidentified
MNKRIIGIDLAVSAKHKAVILDPARNEFIGKQLSFRARPADLDRLLYQARKDAPEDVALIAILEATGMAWYPVVAYLQRHGVLVYRVHGQKTKDLRRVMWKHAGSDLIDSRVLTRLYAIAEKRLDRSPLPNGDALALQRACRAYARWRELDVAEQNRMKAIDQWAWGGLAKLVPAAAQDWMRQHWYNPWRVLEAGETQLVTAWQATGAKASLDIEWIPAWVDRARQMTALYGCEEVVGYHHLQESMQYSLCLRERYAQEQALLTKEKIQPLYRKLYPDCPLVTIHGIGEQSAATYRAFIQDIERFPTVEKFRLWCGIVPHSKQSGDGEAKGLSMTKAGPNLIKATLYVNAEVARQWDVQLAALYHRQMVDFGKHHIKAVGACASHLASRIYALLKEQRSYELRDLNGNPISPQASRELCLELRVPDEVRKRNNKRFRRAQAEQKLELRTQKRG

SEQ ID NO: 213116 - protein, 438 aa, unidentified
MTQLQVLDQRAAFVDVGSEQMHVSIAGGTPVVFGTVTAQLHALRDWLLEQQVRSVAMEATGVYWLPLYGILEAAGLEAVMVNGRQTKNLPGRKTDMADCQWGATLHAHGLLRPGFVPPEHIRRLQDYVRLRNDHIMEAGGCVQQMQKALERMNVKLHDVISDLAGASGLAVVRAILEGERDPQKLLTLCNAQIQRAKGERVKESLRGTWAKEHLFALHHALQTFEHYQRQIADCDREIQALLPEPPDQQPPAAAQGKPNKRPGGNAPRIPGLRKILTHMCDGRDVTVLPAHTEYTALQIISEVGTDLTKWSTEKHFTAWMGLAPGTRQSGKRRRNVKRSRNRVGRLFCVMARALARSKDIALGGFYRRLAARRGGLVANIALARKLAILFWRVMVKGVDYVERGLANYQAKVRETKQRALKRLAKELGQRLVPATDPA

SEQ ID NO: 213117 - protein, 404 aa, unidentified
MTTKLFAGIDIGLNEATVCCIDSEGKQLSPTRTVGNNLDGAREILAIIADLAADETHIGLEATSVYGSHLRDFLLNSSNSRNWFVYEINPSLVAGFKKSFPRRDITDSTDARMIAERVRLGYLRPYTKGDMLRQPLLQLTRHRLHLVKMIGQEKNRALNMIFLKFSNYKRDNPFSTVFGKASLAVLNQLSPDEIVNMDIQELLSFINRHSRNMLPDPEKAALTLKTIAQKAYRLHPKMSNSVNATLIMTLENINFLEKQLAKLDKLIASELKAILQTLDTVTGIGPVYAAGIIAEIGDISRFPNEAALAQYAGLTWPRCQSGEFEAEERRLTKEGNRYLRYYLVEAANSLRVFNEEYKAYYQKKYAEVTKHRHKRALVLTARKFVRLVFALLSKGQIYRKEMMV

SEQ ID NO: 213118 - protein, 457 aa, unidentified
MGDDVMISVDPHKASNTLAVMDPVTKTVIARQRFMNTAVGYRRLREFAGGWTHRRWAVEGCHGAGRSLAQRLAGDGEIVLDVPAKLAARVRVYSQGHGRKSDADDAISIGLAALNSTRVAVVRRDDTLVSLRLLCDRRDELGALRTQAVCRLHRLLCELTPGGTHRGLRASRAEQLLAKLRPVDPVDVVRCQLAHQHLDDIRALDAKMTAVRAQIAALVDGTGTRLTELYGIGPVIAGRILAEVETIDRFPSKDHFASYNGTAPIDASSGEQVRHRLSRAGNRRLNHALHMMAVTQIRQPETIGRRYYERKRLEGKTPKEAMRCLKRRLSDVVYWQLVADRRATITQCGSATTPTRTRPTSTSATTPVPCTAPPRRPPHPTASTGSSHSTGKTAASSASKSSTPAVGSPKTSSTKQKTRAEATRKPRTNSAAVPDRRPTSAAAAGVKAGAATRRARP

SEQ ID NO: 213119 - protein, 363 aa, unidentified
MTVYIGVDFHPYEQSVAYASDEDGEIGYRRFLHSDKQSIRAFYRKCGADAVIGVEATGCLWWFEKMLAGGGQKLKIGDPRMIRRAALSRHKNDFRDAETILDLLMRGAFPSIVPRSEESREVLDLLHYRQTLVQKRTSIANQLQAFARGKGLARFRMPAVKGRRKLVDAPVTEIETLLVTSRLVLFDEITAQMKALESRLEKLAAEDERARLLMTHPGIGVINALALVHTLGEVRRFRRKEEVVAFVGLDPLEKSSGQTKRIGQISKHGSRLARHLLGQAAQACRDHRIRKFYLEVSRRRGRPKAKVAAARKLLINCYVMLRDGIGYEEFQRRGEVGLCEGSGEVRAKASVSEGLMARPAISI

SEQ ID NO: 213120 - protein, 316 aa, unidentified
MGERSVFVGIDVAKAQLDLAQRPEGPRLSAANTESGIATVVAHLRRVKPTMIVVEATGGLERPLVRAVVDAALPVVVVNPRHVRDFAKATGQLAKTDALDAQVLARFAQAVRPALRPVPDAPTQELAALIARRRQVVEMLTAEKNRLEGTPKRVQKRIQVHLNWLTTELARADDDLDQAIRTSPIWREQEDLLQSVPGVGPVVTRTLLAELPELGTLNRKQIAALVGVAPLNRDSGTLRGKRMVWGGRAQVRAVLYMGAIVAARFNPVLRMFYQRLRAAGKAKKVALTACMRKLLIILNAMMKHRTPWRPEMAQCA

SEQ ID NO: 213121 - protein, 403 aa, unidentified
MNSVGIDISKGRSTIAVMRPFGEVVISPFEVCHTGSELSALAKRLKSLDGETRVVMEATWNYHAPVAKLLHSAGLYVSVVNAKLVHGYGNNDLRRVKTDRKDAVKLANYGLDRWLALPRYTPEEDTRLLLKNCYRQYRQYSKVQTVLKNNLISLLDTVFPNANRLFGSPARADGSEKWVDFVAEFWHCECVSKRSEKAFINQYQKWCRKHGYNFSEEKAHDIYIEAGGHIGVMPMSETAKLLAEQAVSQLRATSAALAALKQEMQSLASRLPEYPVVMDMFGVGPTLGPQLIAEIGDVRRFYSKKALVAFAGIDAPPNDSGDMTGRHKSMSKIGASSLRRTLFLIMSVYLQNSPLDEPVYQFMDKKRAEGKPYRVYMMASANKFLRLYYATVKAYLEALEHIA

SEQ ID NO: 213122 - protein, 346 aa, unidentified
MEHYVGLDVSLKLTAICIVDQTGKIEREGVVASDPETIAAFIKSHAPHVARVGLETGATSTWLWTELNKMELPVICIDARHAKAALKLQINKSDRNDAVGIARIMQCGWYKAVRVKDLDSHAIKALLVSRALLVKIKRDIENQIRGLLKNLGLVIGQAKMNVFSVRAAEMAEARPALAAAVEPLLKAREAVGRQIADLDRKVMRLARNVAQVRRFMTAPGVGPITALCFLATIDEPTRFRKSRSVGAYVGLTTRRYASGEIDWTGRISKCGDKMLRTYLYEAANVLLTRVAKWSALKAWGIRLAKRSGLRKAKVAVARKLAVILHRMWIEGSEFKWSSKEAANQLA

SEQ ID NO: 213123 - protein, 347 aa, unidentified
MTIVEAAPGVTGGVDTHLDNHVAAALDPLGRLVGTESFRADVAGYKALLGWLETFGEVTKVGIEGTGSYGAGLSRFLRRRGIAIVEVNRPNRQARRNHGKSDPLDAVEAARAALSGRATGSGKTKDGPVEAIRVLVVAKRSARVARIAAITQMRHLGFTAPEQLHCRLKGLSVPAFVAEAAKLRPARSTDSITAATKASLSSLAHRVQALDDEIAELDEKIEPLLHATAPDLLALFGVGPDTAAALLVAAGDNPERLHSEAAWAHLCGVSPIPADSGKSSGHYRRHNGGDRQANSALWRIVMVRIAHDPETRLYFERRVKEGRTKRDIIRILKRYVAREVYRYLPRC

SEQ ID NO: 213124 - protein, 346 aa, unidentified
MMIIGCDFHPSWQQVSWLDTETGDCGERKLVHASGDAQQFYQQLAVPVLIGMEATGNSQWFVELVEDLGHAMWIGDAAQIRASYVRKQKTDKRDAAHILKLMLENRFPRLWNPDREQRDLRQLVLHRHKLVEIRSRVKNELQHLSLNKGMQKKCRLWSQAGQKMLRELPLKPWASCRREDLLGVLTMLNQQVGRLDAAVQTAAEENPQARLLMTQPGVGPNTALAYVLTIGDVSRFQRGKQGASYLGLIPREESSGGRQKLGAITKQGNRMLRSLLVEAAQTAVQHDPGMRKQYLHRCHQKPKGVAKVAAARKLAVRLYWMLRTNVAYPEIVRIESSPRVALVGAS

SEQ ID NO: 213125 - protein, 325 aa, unidentified
MSLPVLGIDIAKQSYQVTLRVGNKLQRHSFANHVAQFQELSAWLAQQGVKRCHVCMEATNRYWEDLASYLYTQGHTVSVVNPARIRDYARSKLLRNKTDKLDADLIADFCATQKPDAWQPLPPEVQELQALMRHWEDLKSLRSEIHTRLSNGSPSTSVHNMLSEHLAFLDQQIADLKKQIENHINQHPGLKQQRDLLASIPGIGNLTAAKLLSENIQAFSSTRALVAYAGLSPQQRRSGTSIHPPARMSKIGNSHLRKALYFPAVNARRFNPVIQTFCERLSQRDKHTMTIIGAAMRKLLCLSLGVLKSGVPFDPNYQTAATFSA

SEQ ID NO: 213126 - protein, 354 aa, unidentified
MIYAGIDVHSKRCTATLKHGSGSIIQQSTFDNTPSGINSLITTLNAMGESKAVVESTGNYWIRIHDMLEDNGIDTVLANPVKTKIIAKAKLKNDKADSNILCDLLRTDLVYESYVPDKEHRMLRQLVRGRLELVQTRTTLKNRIHSILAKYNHTPPCQKLFSNQCLEWLKTIELTSVDRLLLDANLQTLATLNNQIEQVTKHIAKHSIEDPRVTLLMTIPGINYYTALTIVSEIVDIKRFATKWKLVSYAGLCPIQRDSGMKRWRGGITREGSRWLRNALVEAANTARLHDQRLGAYYDRIAKRRGPQKAQVATAKEMLCIIWHMLRNNEPYRTMNPQLVEKKYKRLEWKTSMA

SEQ ID NO: 213127 - protein, 462 aa, unidentified
MTSSRNQRKRKTASPVPTSLPVIRPLVAGLDVGSSQHWVCGPARADGQPNVEVFGTTTDQLQALADWLAAQDVESVAMESTSVYWIPVFELLESRGIEGVLVNARQLHNVPGRKTDFSDCQWLQLLHSCGLLRGSFRPGEAITRLRALHRQLANLTAERTRCVQWMQKALDQMNVQVHRAVADLTGDTGMAVVRAIVGGERDPLQLALHRDPRCRKSADEIARYLTGTWRDEHLFNLASALRLFDALETEIAAYEAQLLKELEALLPPDRQVEPVPPHPNPAKEKAIKARGEQPARTTLWRFAGVDLTRIDGISAGAAQVILTEVGPQLAAFPSEHHFVSWLRLCPRTPISGGKPLKKRPNGLGANRIAGVLRMAATSLQRSKTALGASFRRIARYKGGAVAIFATARHLARLIYRMLRYGHDYVDIGEQAYDRQFQIRRLAALTQAAKSLGYTLVPNVAAG

SEQ ID NO: 213128 - protein, 340 aa, unidentified
MFHVGLDIHNTRISICVLDEAGQVAHRSQVRTIEEMLRTLRGLPGPFEVGYEASCGYGHDHDLLHPLAARVLVAHPGRLRLIFRSKDKNDRNDAERLAKLLYLGETPAVHVPPADVRAWRELINCRGQVVAKRTRAKNTVRALLRGAGVVPPKRPGLWTRAGLKRLRGLDLPTASQQLRRDLLLEEIDALTRQVRRIEEELNRQARKTPAVALLRSIPGVGARTAEAVAAFVDDPHRFRNAKAVGRYFGLVPCQDQSGERNRLGHITREGAPVVRQLLAEAAWQAIRRSATVRAFYERTHREDPQRQKVALVATAHYLVRVMWAMLRHGTAWRESTTRAA

SEQ ID NO: 213129 - protein, 414 aa, unidentified
MLPAETRCVVGIDVAKQAHVVCALEAPSGAMRHKPSRIEANAEGYALLSSWLRDWGTPETVLLGLEATGPLWEPLYECLIQAGYTVLLLNPRQTASWAASLGVRAKTDGLDAQTLARGLLAGLARASTLPSEIVQALRTLTRARRDLIQTRTAARQRLHDELVVLFPEFIGFLPTLPGRTDLGEPAVLKVLEIYSSAHAVAQAPLDELTTTLDRLSHGRWGYDQAQALQTLAQRSTASSRAVAARSLVARMLAQQLVELAAHIAEVEAAIADLFQDDADGQRLQEIPGVGPQGAATIRAELGDVTRFTRVEAVVAYAGLDPRTYQSGAFVGQKHLSKRGPGALRHALYLAAFVAARCAPEWHARYQRLLDQGRAKKEAFTILARAMLRVVYHLLRTGDKYDSALLNKLPPAVAC

SEQ ID NO: 213130 - protein, 325 aa, unidentified
MFDCIVALDWAKSNMAVAKLKKEVKEPKVFEMESDIEYLKRYLDELPGTVQLVFEVSSSARKLFFELYDYADDIIVCNPLKNELIMKGPKNDRIDAVKLALLARRGDLQNVFLDLGENFKLRRLVSGYVDVVKALVRCKNHRADLKENKIESQYDEFVMKLKEIETKKLSEIKAQYEDKFSELEKSNPEIKRMTSIPGIGAISAVKIVATVASAERFSSYKDYWGYCGLARYLIESGGRLYGTRKTRHNPMMKAIYKMAALVAISTTKEFGGYYEYLTRTKLLPAYDARNAIARHIAKVSLMMLKHKSKYKARLVEQKIKALSSI

SEQ ID NO: 213131 - protein, 438 aa, unidentified
MSQKEKTHIRGERGQAFADKIRGLNLEQILCVSLDISKYFQVVMIHNALGEIVKPTFEIDIFKTGFEQLCQAIDEAIEQSQAKLVLVGMEPTGHYFENLARHLHQRPQPVTLINSYAVSQNRKQQMMRREKDDPIDVAAIGDLLRRGEGTAYQPLQGIYLELQQLDRVRQGKVKMRTMLKNQIIGHLDRIFPGLVIIGEAAKERYTPMFATDFWECKTMQYLIRVCPDPRQLVAMSTTDLIDAFHAHHFKMGPKTATKIITYSQKVLLPDPEVIAIRSELLHHDLILLDAVEERIVVMEERLVDLVSQTPYQIWTKLKGFSDIQVARLAASIGDPNHYTHAKQVFRRSGLVSGRNDSGVRQNKGKGNKVVKTGDVHLRRALMDAINTFLLHQPVLFRYYSKLKLTKPDLVARVATVRRATGILWATLRDQHSTTLVYR

SEQ ID NO: 213132 - protein, 422 aa, unidentified
MLAETQDEEQIIARVAAIDIGKAELVCCVRVPAEGDRKKRLQEVSTHSTMTRSLMELADHLVDLRIERVVMEATSDYWKPVFYLLEAHGLEPWLVNARDVKHLPGRPKTDVLDSVWLCKVAERQMLRPSFVPPAPIRRLRDLTRYRADLVGTRTAEKNRVEKLLEDACIKLSSVASDIFGVSGREMMAALIAGERNPSRLAQLARTRMRGKISELEEAFTGQFDDHHAFLLARMLARIDGIDADIAAIDEQIEAQLAPFEAAAERLDEIPGIGPVAAAAIIAEIGVDMSRFPTAGHLSSWAKFSPGINSSAGKTKGNGSTGHGNRYLARVLGEAAVGASKTHTFLGERHQRIARRRGKKRAIVATGRSILVIIWHLLENPDARFNDLGPDYFSRRTNPDTKKNTHVRQLEALGYTVTLAPAA

SEQ ID NO: 213133 - protein, 337 aa, unidentified
MQKSCLGIDVSKLSFDVSLIVVLKGQKQPVVISKFDNNNIGLESFKVWLDEHNVTFDANSLLVIENTGIYHRLIWNFCSTHLLPIYIGNAADLKWSFGIARGKNDKVDSMRLCDYAYKNYEDIKPTTSLNKVLITLKDLLSNRGKLLKLRNAIKQTLNELKGSNDKTTQALMEKLNKAALEGLQKSIKQIDAELLKIVKQDESILTNYKRMLSVPGIGKITATFIICCTNNFAIKVTGKQLANYAGVVPFENTSGTSVKGKSRVHFMSNKELKSLLTMGALSAIQAYPEFTDYYERKIKEGKKHLQVLNAIKNKMLLRVASVINQQKDYVNNYKKAC

SEQ ID NO: 213134 - protein, 423 aa, unidentified
MTKRLSTLTDAVLVAIDVSKHRQEVLIERPEGGRRRRLTVMATKPDYDRLADELTAIGRPILVGFEATGNYHRTLAYRLLSAGFDLRLVSSVALARTREALHNGWDKNDPKDAQVILHMLRIGATQVYVDPLAADINDLQELSKTHEVISRAKTQTWHRILTHYLPLYFPEIARFAGNSRSDWFLALIERFPTPGSITALGVEAFTGEAWSLVGRKVSKAQLINDIYETASSSIALPVPEDAAAITMFRIIIAQARSLIQQRNQIEALAQTRLAGNRDYGLLRQIPGIGPINALTILAEAGDLRRFRHHRQFLKFCGLDLATCQSGTFRGRTKLSKYGNARLRRTFWMAAQVASRQRDNSFRDKLGRYVAGHGDDPDRRRKAMTALTAKMARVAHAVVKTGTQYRPFVERSDARWKDPSLQVP

SEQ ID NO: 213135 - protein, 427 aa, unidentified
MEAYYIAGIDVHKKMLAVVIAAVQPGEWEFQRRRFGTTPAQLRELAGWLREQGVSEAVMESTAQYWRPVWAALQGQLRLHLAHAHSNGARRGRKSDFRDAERLTHRLVAGDLVLSFVPDAEQQSWRDLTRTRYQLVVERGRVQSQVENLLERASIKLSSVITDLFGSSGRRILQALSEEAGAPWHSQNLARLAHPSLRASHEQLAEALDGHWSSEHRLLLQLHLERLSLLDRQIETLQQQMAESMKAHQAAVARLCQVPGIRTDAALQLLAEVGPTAASFPSASHLASWAGLCPGQQESAGQSYSKRPAQGNWQMKRVFHQVAHAAALKKGSFFQHLYRRLIVRMGPQKAIGALANRLCRLIWKILHEGVHYVEKGTAPLDPRAIRRRQQKVAAEFRKLGYNVQYVPPTARHHPGNLAVGFRVFDGV

SEQ ID NO: 213136 - protein, 321 aa, unidentified
MDKIKHFYGVDISKLFFDVVDQDGKHDQFSNDVKGFKALLKFIQKDSLVVMEATGYYHYRLAQYLYEKGITVSVVNPLSVKRFIQMKLSKIKTDKSDAKAICEYAQATKVPLYTARNAVQAECLQLLSLQDLYLKQRTAIKNKIHGEKALGTPSKTVTRSLNRSLKQLEKELFQIETKLESLVKRTQEEQLEQLISIPGMGKKTAMLLIVLTDGFTSFENARQLCCFTGITPTIRQSGTSVRGRSRISKVGNRKLRNLLFMCSFTACKTNKACREIYERIVEKGKSKKLALIAVCNKLLKQAFAIAKSGTYYQENYMSKLA

SEQ ID NO: 213137 - protein, 350 aa, unidentified
MLIIGCDYHPGFQQIAFVDSDTGEFQEQRLPHREEAEKFYRNLAGQGMKVRVGVEASGQARWFERLLAELNFELWIGDAAKIRAKRVRKKKTDREDARHILKLMLKDDFPQIWVPSWDNRDLRQLLWHRHRMVQMRTRIMNQLQAVALNEGLRRKKRLWREHGRQQLEGIRLAPWASRRRRDLLELLDRLNPTITELTQAIEQEVEKYPAAQLLMTHPGVGALTALAFVLIIGEPERFECGKQIAAYLGLVPEEDSSGESRRLGHISKQGSGLMRFFLVEAAQVTVRSDTEWRNKFFHLAMRRGRKIAKVAMARRLAVRLYWMWRKQWDYEQLKKFGPHAGKLGTGVGVE

SEQ ID NO: 213138 - protein, 464 aa, unidentified
MTAGKKLWRNRKERKEWARRLQSDDPGLEVVHPHAAGIDVGNAAHYVAVRPDRDPEPVRRFECFTVELHRLADWLQSCGVKTVAMQSTGVYWIPLYEILEERGLEVYLVNARHTKNLPGRKSDVQESQWLLKLHTYGLLNNSFQPVSEIRVLRTYWRQRGEHVREAATCIQRMQKALTQMNVQLANVISDISGLTGQAIIRAIVAGERNPLKLAALSDPRVHASWEEIAKSLEGNWRPELLFVLQQEVDMYDIYQKRIAECDQRLQKHLASLTHPLPLQAPMQKPKTKKPAAKNAPRFDLSSELLRVTGVDLTRIDGIDVMVAQTILSEVGLDMSRWKTESHFASWLGLCPDNRISGDKVLGRGTRRVVNRAATALRQSANTLMRSRSYLGAQYRRLRTKLGAPKAITAMAHRLARLVYRMLKYGQAYVDKGTEYYEERFRQQQIQLLRKRAAKLGLQIAEIQA

SEQ ID NO: 213139 - protein, 418 aa, unidentified
MKTTDYAARVALDWGDKTHAFACQTAGSNKKQTGQIEASAEALHGWLETMQQTYGGRPVALAIEAGRNALFHALLEHPWLEIYPVHPATSARFRTAFTPSGAKDDGPDAEMLLSLLTLHRDQLTRLQMDGPVTRELAALVSARRSAVDHRTQNTHQLRSVLKSYFPQALDLAGEDLGSALALDFLARWPELALAQKARPAVLRAFYAEHNVRSAERIEERIRRVASARALTSDRAWIEPALLQVTMLVALLRVQQEHVEQFEQRIAAVFAAHPRAGFFRELPGAGAALAPRLLVAFGDWLERYPAAAAFQKYAGIAPVREKSGRHVWTHWRWNAPKFLRQSLVEWAGQTVVYCDWANAYYRRQKRAGKEHHAILRSLAFKWIRILWRCWHDGIPYCEQHYLNALKRRGSPLASDLAAA

SEQ ID NO: 213140 - protein, 464 aa, unidentified
MTAGKQLWRNRKEKKEWARRLQSEDPGLEVVHPHAAGIDVGNSTHYVAVRPDRDPEPVRRFECFTADLHRLADWLQSCGVKTVAMQSTGVYWIPLYEILEEHGLEVYLVNARHTKNLPGRKSDVQESQWLLKLHTYGLLNNSFQPVSEIRVLRTYWRQRGEHVRGAATCIQRMQKTLTQMNVQLANVISDISGLTGQAIIRAIVAGERNPLKLAMLSDPRVHASHEEIAKSLEGNWRPELLFVLHQEVDMYDTYQKRIAECDQRLQKHLASFTRPLPIQPPTQKLKTKKPAAKNAPRFDLSSELQRVTGVDLTRIDGIDVMVAQTLLSEVGLDMSRWITESHFASWLGLCPDNRISGDKVLSRGTRRVVNRAATALRQAANTLMRSRSYLGAQYRRLRTKLGAPKAITAMAHRLARLVYRMLKYGQTYVDKGTQYYEERFRQQQIQLLRKRAAKLGLQVAEIHA

SEQ ID NO: 213141 - protein, 428 aa, unidentified
MLKINPLSTLYVGIDVSSKSNYVCALDFYKNKYINSSFANNQPGAEELAKKILECLKEHPDLNTIVAALESTSVYSIHIANFLSSCEELMHFKPYVFVLNPKCTANYKKSYIGLGKSDPIDAFVIADYARAGNIETEPWRGSQFLALKRLTRHRLHLVECMTREKTYLVSNLYLKFSELQMLEGDDQPFCDIYGATSSSVLTEYLSPEEIIDSSEEDLISFLAQKSRNRIKDISKTAELLRKAARDSYRLDKALYEPLNVSIASSFNCIETFKKEIKLIDIAIEREIRGLNPNAFIILQSIDGIGPVFAGGIVAEIGDISAFHSSDALAKYAGLMWKSNQSGDFDGEDTPISKAGNRYLRYYLGEAANSMRKHNAEYGAYYRKKYNEVPKHQHKRALALTSRKFVRLVYGLLARNQLYSGVSLDTSNE

SEQ ID NO: 213142 - protein, 356 aa, unidentified
MDQIRQLDFGDQRFHIGVDVHKKNWVVTIRSHQMELKTFSMNPSPEDLNIYLQRHYPGGRYYSTYEAGFCGFWIHRKLHSYGIENIVIHAADVPTSHKEKTRKTDKVDSRKLARELENGSLNAIYVPEEFYQQLRSLRRLRTSSVQNQTRVKNRIKGHLNYYGVPIPAERQNSYWSGHFINWLRSLKFAYPTAEDYLFYCLQELQQHRERTANITRKLRQYCKDHDLMEQINYLRSVVGIGFVTAITLFTELIDIKRFPTLDHLAAFIGLVPSVNSSGDRHSEEGLTERRNRFLRHVIIEAAWVAARKDPALTLAFIELTKRMKKQEAIIRIARKLLNRIRFVWKNQQNYVTAVVQ

SEQ ID NO: 213143 - protein, 331 aa, unidentified
MNKQNFQFFIGIDISKRSFDVAIIDDDRTTSYVFENTKKGINAFIRLLKNQKIPLPDTLICMEHTGVYGKIIITKLVEKQANFCVEMPIQITKSIGLHRGKSDRVDAKRIALYALKNYRQLELYKPIPEILERVKILLKIRKKLVNTRADINKYPNELELFSPALGKLASKNLKKINKNLCDEINRIESEIKKLILSDDKLNKTVGLVTSVTGIGQITALHFTIFTSFFTKYDNPKQLACYCGVVPFEYTSGSSIHRKSRIHPMANRTLKKHLHMSALAAINHDPDIKAYFERKVEEGKNKMLIVNNVRNKLVHRICAVIKRQQPYVKNVA

SEQ ID NO: 213144 - protein, 456 aa, unidentified
MSHCTANKKAASAFVRRNSIPTTGAVAKALFNSAIGIDVHHDILVCAYQYCNRESDEITTEVCSFGTTASELAKFTDWCRNRHPEQILMESTGVLWFSPYEALESVGFTNRQLSLINARDFKAIVGRKSDKQDAERLALYARIGNVRSSFVPAKCFREMRTVSRLLSKTTDEQSRARSRYLKTLNFIGCRASSVFSDVRGKAATAILEVLAEGTREQLIDAIKIHGRRLRKSAAEILDALDFAVSPAMAMQLRIQKQHMEALSQTCEELYALLKVMQANYQPWINRLMTVPGIKERAARVIFAEVTNDLSSFPDAAHLASWVGVCPGTMESAGKRYSGRAAKGNRYLRRILVECSQAIGLMRKGALYSLFQAFKERKGTRRAVVAMAHHLVKIIYCLFTKGGNFEALSTDALTKVRKQKYLSAVANIKKQNFEILTSGSLVDKATGAITAVDPLTV

SEQ ID NO: 213145 - protein, 399 aa, unidentified
MKKHVSLELRVSVDVGCRSHNVAIGLSSGEILDEFSIAHEPEGFRHFFSRIEKQERKFGCPVAVAMEGFNGYGRPLDTLVRARDYRLFNINNLKLARFKEIFPGAAKTDEIDARKGLELFQLRDHLPVAKDVLQEVYNTPQENDILKRLSRRRRRLVNERVRVLNNLQSDLQAVCPGLLEITGEADNLWFLRFLTSTDDLRKLARMREATIRKIPGIGVKYAFVILQWQKRAQFSHDVEWVGEMIQEDAVRVMELHDKIQSLEAKIEDVAQGSDMAQTLATIPGFGAVCTAELAGEIGTIERFSNEGSLALYLGMANLDNSSGKQKGSKPPRQVNTRAKAAMMIAVDRHRKKVLESQRYYEKKRAEGKKHNQAVRALGRHLCRVIFKILKMNRRYILSQ

SEQ ID NO: 213146 - protein, 368 aa, unidentified
MKSIIYIGMDVHKKTYSLCALLKETGEIIGETKIPADVSLIIKFIENAKKSVDSDDVQIKTGYEAGCLGYSLYWQLAAKGIECDILAPSTMHRSAKNKVVKNDRRDAKNIAANLANGTYKSVYVPTDEDVEIKEYIRMMHDFKIELKKVKQHINAFLLRFGHHYPGKSKWIPAHIKWLKELELSDIYREILDEYLSQLEILSEKIERFKYRLEELSQKETYNEKIGQLRCIKGIDTTAAMTMHAETSDFDRFPTANAFASYCGLTPGEDSSGESYHRLGITKQGNSMIRTTMVEAAQVLVRGTIGKKVKSKQKDQDVKVIDYADKAVVRLQKKYHRMIFRGVKRNIAITAVARELACFVWGIETGHIS

SEQ ID NO: 213147 - protein, 321 aa, unidentified
MNKDIKYFGLDISKDVFDVCDNNYNYYQFKNSVSGFKKLVKLLDSNTVCVMEATGYYHVRLAYFLLDCGFKVSIVNPLKIKRYIQMELSKIKTDKSDSRMIQLYGKDRVPKLWFGQSKTQQESLQLSRLLSVYSKQSTQIKNKIHGETVLGVPSKEVIESLNRQLKSLKKEIAFLEAKLEKNVKAEYQESLTLLKTIPGIGNKTGLMLLVFTDGFNRFESSKELCSYAGITPIIRQSGSSIKGRPRMSKMGNPKLRNLLFMCSFNACKYNKACKALFDRIVAKGKSKKLALIAVCNKLLKQAFSIVKNGVPYCDDYRSTLA

SEQ ID NO: 213148 - protein, 318 aa, unidentified
MISEAKPTRVLGIDVSKGLLECHWMPSGRHSQHNNDLKGIATLLEALGQEPVERIILEATGGYEIPLVVELSLAKQPVVLINPRRGRDFARANNMLAKTDRLDAIGLAEFGCSVRTEVRSLPEEKYSFLSQLVGRRRQVIEMLIAERNRLGTSHGAIRKNIEKHIQFLERNLLGIEEELQEEVKKSPAWDEKCQLMQTMKGVGKVTAQTLLAELPELGRTDHKRITALVGLAPYNRDSGLFKGKRMIYGGRKTVRNALYMATLVASRCNPDIKAFYQRLRKAGKMPKVALTACMRKVLIILNAMIANMVPWKARCVNT

SEQ ID NO: 213149 - protein, 353 aa, unidentified
MTEAITYRVGFDVAKGVFQVHGVKNEPGEPVAFKKRLKRSQVERFFATLPRSLIGMEACASAHYWARLAQRHGHEVRLMPPAYVKAYVKRNKTDALDAEAICEAVGRPTTRFVPVKSEDDQALVALHRIRASFVAKRTAAANQLRGELSEFGIVAPAGKRGLSDLLSLVESEAERFMGLPAALRLVLAELARQWRRCDEVVRGMDRAIAASVKRSARARRLSWVPGIGPVGASAIAAMLPNPQVFKSGRHFAAFLGLTPREDSSGKTVRRGPITKKGDSYLRRILVQGATSYLAKVRSGRVTGASAWVLRMAAHPKRKLAAVALANKMARIAWAMLAHDEDYRAPAAALKAAA

SEQ ID NO: 213150 - protein, 341 aa, unidentified
MDKLDFSGIEVSAEELVVALQRKGDRKALKTFPNTLPGHQAIIRHLSAAGRTVRVCLESTGLYALDLALALHRAGIQVMVANPRAVRHFAEALMKRSKNDRLDAGVLREFAARMPFQAWQPPATAALQLHALARRLQALTEMQTAEKSRLAAIQATATTPAALRRDLDRSLRSLRRSIARLSGEAVKIIDQGKELKLRFDLLLSVRGSIAATSAIQILAELAVVSPDLDVRQWGAYTGLDPRECSSGSSVHKKIRISKAGNAHLRRALYRPALVAIRHQPHLRAFYPHLRAQGKLKRVALVGVMRKLLHAIYGMFKHQKPFDGSKVYSLPSPKISTEEVAA

SEQ ID NO: 213151 - protein, 385 aa, unidentified
MQKAITYVGLDVHKDSIVVSLAEAGQRGRLREVREYGRVPNTPAALKAMATKLAAAGNELRFCYEAGPCGYGVQRQLSAMGHHCAVVAPSLVPRKPGERIKTDRRDAAKLAKLHRAGELTAVWVPDPAHEAMRDLVRARLAAVRNVREARQQLSGFLLRNGYHYHRHPWTLLHRRWMADLKFDQPLHYIVLQDCIAAVEASEQRRDLLEARIIAALPEWSLAPLVESLQALRGIALVSAATLVAELGDIARFGNPRQLMAYLGLVPSEHSSGRSRRQGGITKAGNAAARRMLIEAAWSYRFPARISRYQLLQQERLPKLIRDIAWKAQERLCRRHRKLMRAGKPKTVVCAAIARELAGFVWAIATEMRPAGKEGTGKPATVVAGS

SEQ ID NO: 213152 - protein, 361 aa, unidentified
MSESMALVGLDVHKSQTVAAVLDPVSGELRVERLRGEPERVVPTFLEELDRAVTAVYEAGPTGFVLARVAERHGLDVRVVAPGSIPRAPGDRVKTDRRDAKRLVRLFAAGELGFAFVPSEADERFRDLVRCIDDVRRDLMRSRHRLSKFLLRRGVRFQGKTWTQQHERWLCTLHFEDPLSQAVFVDYLCAAQALAQRRKTLGGVLEAAVPNSGHAETVGRLRCFRSIDTLTAAGLCAEVGDFTRFPKPTLLSGFLGIVPSEYTSDEKRTQGHITKAGPTNARRLLVEAAHNYRHRPAVGENLKARQSGQDPRVVQIAWRCQQRLHGRWMHLAKKRGKPARTVAVAVARELAAFCWEAATLR

SEQ ID NO: 213153 - protein, 416 aa, unidentified
MHVVYSSCCGLDVHKRSITACLLLSGSGGKGHHEIRRFGTMTRDLLELADWLQCHHVTHVAMESTGVYWKPVWNILEGQFEVVLVNAQHIKAVPGRKTDIKDCQWIAELLQHGLVRGSFVPPTPIRQLRDLTRMRTSLRQDHTAIANRMQKILEDANIKLAAVASDWLGVSGRAILSQLLAGEEDAEKLAELSRGRLRSKLPAMQLALEGRMTEHHRWMLRVLHEQLLFLEVQIAKLEAKIQDQLSDYQEAIALCTTIPGIEEVAAANLIAEIGVNMAQFPSAQHLASWAGICPGNHESAGKRLSGKPRKGSAWLRRSLCQAAWAASHTKDTYLAARFRRLAARKGKKRAIVAVAHTIVVSMYHMLKNKQPYRELGADFLDRRNAENVKRYLLKRLERLGLHVTVRSAEETAALSA

SEQ ID NO: 213154 - protein, 348 aa, unidentified
MSKVTLIGLDLAKSVFQVHGVNTEGKAILKKRLSRGQMLEFFAQLAPCIVAMEACSGSHYWGRKLTSLGHTPRLISPQYVKPFVRTNKNDAADAAAIATAARQPEMPIVPIKSAEQQAVLSIHRARSGLVKSWTALCNQVRGLLTEFGFVLPVGPHRVLSQVPAILEDGENGLPDLLRQLIQRLYDHLKQLAAEIAHCEALLAAWHRQNEASQRLAVVPGVGVLTATAMVATVGDAKQYRHGRQLAAALGLVPKQRSSGGKVGLLGISKRGDGYLRRLPIHGVRTIWRTQQKRPDFEHTWLGQLAKRRPTNVALVAFANKRARTLWALLYHGRVYHPDHQPRWTSAPT

SEQ ID NO: 213155 - protein, 351 aa, unidentified
MLAPTQIAVSVIGIDIGKNSFHIVGLDQRGAIVLRQKWSRGQVDVRLTNMPPCLIGMEACVGAHHLSRKLRALGHDARLMPAKYVRPYSKGQKNDFRDAEAIAEAVQRPTMKFVATKTADQLDLQALHRVRERLVSQRTGIINQIRAFLLERGIAVRQGQRFLRVELPRILAMPPDVLSARMVRVIEDLASDWRRLDERIETLSSEIETLARQDAGCERLMSIPGIGPIISSAMVAAIGTGDGFSTGRDFAAWLGLVPRQISTGDRTILGKISKRGNRYLRVLFVQAAWVVLVKVKPNRWDGHGLKHWIEAAKKRLHHNVLAIALANKLARIAWSVLARGRAFEASKLQAA

SEQ ID NO: 213156 - protein, 345 aa, unidentified
MKIATIGLDLAKNVFQVHGVDPRGVPVLRKQLKRIQVLPFFATLEPCLVGMEACCGAHFWARKLQAYGHTVKLIAPQFVKPYVKSNKNDAADAEAICEAVSRPNMRFVPVKSVEQQAILALHRVRQGFVTARTAHANQIRSLLVEYGLVVPQGIHHLHQDVPDLLEDASNELPGVFRQLVMRQLDYLRELDHQVQLLEAQIKTWHRENEASRRLAQIPGVGPITATALVASVGDARCFASGRQLAAWIGLVPRQHSSGGKQVLLGIGKRGDAYLRCLLVHGARAVISAVRQKDGTSTSWLGRLLARRHTNIATVALANRNARIAWALLAHHREFCSDYGRAAPVV

SEQ ID NO: 213157 - protein, 450 aa, unidentified
MEEQISLEVVNKNAAGIDIGSRSHWVAVGQSDDLIQEFGVYNENLYELADWLTQHNIATVAMESTGNYWQNLHAVLISKGFDVTLCNGKFTKNIKGKKTDVKDCQWIQKLHSLGLLSGSFLPDEDTEILRTFTRHRHNLIKQAASATKKMQKYLRLMNIRLDVVVKDVVGLTGLKIIRAIALGETDPKKLASLRHYNCKKSEEEIAKALHSNGRKDFLYALKDELDTYEFIQKKIRECDDQIAAKLDDIIGKDPEKQEHHIDKKPYKRINKNTPKDIDLNLKSYQMFKGTDLIAIEGMSYNTVLTIMSEVGYDGIKKFKTAKHFTSWLRLAPNNKVSGGKVLSSKIGKGSSRLKIALRNAANAIGNLKDSTPLRDFFHRINFRKGRVSAITATARKLAVIIWNMVTKGIPYQNPEGYLYLDQKRKLGLVKRIQKQIDKFGLTDDDLTIRL

SEQ ID NO: 213158 - protein, 441 aa, unidentified
MSKIENPNAAGIDISTKEHYVAVPEGRSEVDVRCFQSFTRDLHELASWLKECGVETIAMESTGVYWYHLYTVLLDYSFEVYLVNAYHVKNVPGRKSDVSDARWLQQLHSFGLLRSCFQPDNLTRSLRNYVRQRKHLIEGMSREVQRMQKALEQMNIKLNNVIRDIQGKTGMAIISSILGGEKDPKVLAQYRDPRIKASKETLIKSLEGNWREEQLFNLKQAYDHYFFLQGQLAECDKECERLVKDMSDDDIPDKEIESGKKSKNSPDFNVSQHLYNALGVDVTQIYGMKSITALAVFSETGPGLKEKFPTEKQFLSWLNVVPDNKITGGKVIYSRVKRKKNKAGLAFRDAANSLWKAKNPLGEYLRRKKAISGGRQAIVATARKISSIYYKMVTEGVEFDPQVLEFKTQEYLIKKLRRLEKNIQNTKALLADSQLVSELVI

SEQ ID NO: 213159 - protein, 368 aa, unidentified
MQEGNTTFVGLDVHKDSIAIAAAQSDREAPRFVGTVGPDLRHLRKALGNLGGIENLQVVYEAGPCGFGLARTLRSAGIRCEVIAASRITHSPTERIKTDRRDAMTLARLARSGDLVRVTVPDERDEAIRDLTRAREDAVKACLKARQQLKAMLLRHGHRYRGRKPWTAASDRTLSNISFAHPAQTIAFAEYRQAVRDTHERVERLTEALRVQCEGWRMKPLVAAFSCLRGVDFLAATTLLAEIGDFTRFAHPKELMGYLGLVPSEYSTGSRHHRGDITKTGNAHARRVLVEAAWNYRFPARLSLPITRRQEGQPKIVRDIAWRAQLRLAHRYRRLLSRKLHINKVCVAIARELAGFLWDIARQVDISA

SEQ ID NO: 213160 - protein, 351 aa, unidentified
MNYIAFDSHKRYTLACVERAQGGILRELRVGHERGAIRKFLLACDRGSPVAVETIGNWYWIVEEIEQAGRVPRLVHARKAKLMMGSSNKTDKLDARGLNRLQRSGTLPTVWIPPAELRDQRDLPRTRMVLSRERTRLKNRIHSTLAKYALNIEGLSDIFGKAGRELLRQRMEELPPHSRYATERVLEQLEVVESQISLFEQRTREVFSETAELELVMSLPGVGFILGVVIVLEVGDVSRFPSASHLASYAGTTPRVHSSGGRTRYGQLREDVNRYPKWAYVEAANAVCLQRRFFAHRHVSQLYDRIACRKGHQKAIGAVARHLAEATYWMLRRRQSYQEPKRTVPVSSTEA

SEQ ID NO: 213161 - protein, 352 aa, unidentified
MLIIGCDLHTRYQVIARLDTESGEMVTRRLQHENGEARAFYASLPAAALVGIEATGYTPWFERLMAELNYELWVGDAAQIRARAVRRQKTDTRDAEHLLELLSTHRFPRLWIPSPEQRDLRQLLKHRHKLVRMVTALKNQLHFLAMSQGVCRKSKLWSERGRQELESLALDPWASRRRQELLRLLDQLQPQIAELDTAVAQAAAANPAAVDLMTQPGVGPVTALAFVLTLGPVERFQNSRQVVSYLGLNPSEYSSGGRQRLGGISKQGNSMLRWLLVEAAQTAARFDPELRRKYQRLKFRRGGSVAKVALARRLAVRLYGRLRQSKTETQPVRMPGSSGSGVVLPPAAGSRQ

SEQ ID NO: 213162 - protein, 423 aa, unidentified
MLEETHDDQEIIARITALDIGKAELVCCTRLPSQNGSGRRVQEVTTCSTMTRSLQVMVDRLLELGVTRVVMEATSDYWKPPFYLLEAHGFDVWLVNAKDVKHLPGRPKTDRLDAVWLCKVAERQMIRPSFVPPKPIRRLRDLTRYRVALVADASAEKNRVEKLLEDAQIKLSVVASDIFGVSGRDMMNALISGQRDPKILAQMARARMRTKIPQLEEAFHGYFTDHHAFLLSSMLTRIDQISANITALDTKIEAEIAPFAEAVERLDQIPGVGVIAARVIIAEVGVDMSRFPTPAHLASWARFAPSVKESAGRKKGNGATGHGNRYLASVLGEAAISASRTDTFLGERYRRIARRRGKKRALLAVGRSILVIVWHLLSDPDAQFQDLGANFYDTRLGTERAKRNHVQHLEALGYKVTLEPTAA

SEQ ID NO: 213163 - protein, 387 aa, unidentified
MERSNQRVVGLDVHPDSFAGAILEGSDPWRARVVRSSTRVALGELEGWAARQTGPGDVLVLEASGNAFCVAERLRSLKRKVVILDSHRAGKVGKAYCATDRVDAIKIARIYLSALSPVVWQPDAKTRERREVFSAYQGVVKETVRLKQQLKSMLNEHCVRLEKGFRLSHPTALGRLRKRREWSGAQAMLLGQLHAGLVGACQRRQQLRHYMAGEILAEPELLRLTRLCGISLITLYGLISSIGQITRFANARKLSAYFGLNPSVCQSGNYEGATALKRHGRGAMRALLVQSAKKLLQVENPLRKWGLAVAARRGRNKAAVAVARKLCVAVWHVLQGHSIGALERLDTLHTKLHKLATELGVPTIKALGYETKEAFVQKKLYLLKSYP

SEQ ID NO: 213164 - protein, 386 aa, unidentified
MSRLTMFAGLDYHQNVIQVCVQDHTGQVCLNRSCNNDPAEVTALLRQAGDVSEVSLEACCGAAAFGEALAAMGSWRVNLAHAGYVSRLRSSPDKTDFSDARLLSDLTRVGYLPSVWLAPPEIRDLRQLVRHRQSLVNQRRNLKLQIGAAMREQRVKVPEHGRWSRLWVEAVREHAGLSSQVRWIIQEKLEELAWLSGRIERACDRLRESSSHHDLYNRLRELEGVGEVTAWTLLASIGRFDRFKNGKQLARYCGLSPRNASSGEKNADAGLVNACSRELRAVLIQCGHGLLRRPGRWRELADKLKRRGKPTNVVVAAVANRWVRSMHWRLVSAQAELTDKKKLSEKALTAKKLMEEDLSAKGLTTKKKLSAKNLTSKKHSIMKKCL

SEQ ID NO: 213165 - protein, 323 aa, unidentified
MCKVIGIDISKASFDVAYEKNENQFVHFKFSNNLKGFNKFIKGVTKADYCVMEATGPYYLSLAQYLYEKGIKVSVVNPLQVKHFVRMRMVKAKTDKKDAKMIALYGQSEHPDLWEPDEQPIMQIHQLNAAIEGLKKQTTMLKNRLEAFSQLPDPDTDVMRELRSLLRVMESKTVKLEKRLLEITKLHYEQTFRVVTDIPAIGPKTAIMLIAITNNFQKFNNAKKLSSYVGLSPRIYQSGSSVNGKGHITKMGNSQMRKLLYLCAWSAKKCNGQCKAMYERMSEKGKPERVIKIAIANKLLRQAFAIGKNLNSYQENYKKIFAF

SEQ ID NO: 213166 - protein, 447 aa, unidentified
MAAVMIGVDPHKASHTAVAISAAEEPLGEVRVRACVAQTERLLAWAAAWPQRTWAVEGAGGTGHLLAQQLVSAGERVLDVQPKLGARVRLLAAGDVNKNDPNDARSVAVAALRSAGVREVRADDHAAVLKIWSKRYRDLGRTRTQVVCRLHAVLGELIPGGVPRVITAGRAARVLRAIRPAGAVAAARCELAAALLDDLRRIDARIRETRKTLAVTTAAAGTSLTGLFGVGPVVAAAVIGDVRGVSRFPGRDHFAAWNGTAPVEVSSGPRKVYRLSRRGNRRLNHAIHMAAITQIRHSHSRGRAYYDKKLAEGKTPKEALRALKRQVSNAIFACLQADARRAAERGGGPGGQQGNDSSASAAGSHPRHRLFGQATPGPGHHPTATPGGLPPGPARGRGTAGPSPIAAKLPPATPQVQVERPQQSEDERPGGAARRRPHSAARKARDR

SEQ ID NO: 213167 - protein, 347 aa, unidentified
MNFYTQQHKHYCGIDLHARARYVCILDEQGTKLVHKNLPTTPEAFLRLIAPYREDLVVGVECMFTWYWLADLCSQEGIAFVLGHALYMKAIHGGKAKNDKIEAHKIAVLLRGGMFPQAYVYPSEMRATRDLLRRRCHLARKRAELLAHIHNTNSQYNLPEIGKRLANKSNREDVADHFPDPSVRKAIEVDVALIDQYDQLLGEVELYLTRSAKAHDVQPFARLQSVPGIGQILALVILYEIQDIARFPRVQDFVSYCRLVKCAKESNGKRFGTSGKKIGNVHLRWAFAEAAVLFIRQSQPGKEYFAKLEHKHGKAKALTVLAHKLGRAVYYMLSREQAFDLKRFVTA

SEQ ID NO: 213168 - protein, 449 aa, unidentified
MMEPQEIEDEGHERILERVAAIDVAKASGMVCVRVTHESRPGRRVSRVWEVAATTGAVTGLGDHLVCQGIEKVTVESTSDYWRIWFYLLEAAGLDVQLVNAREARNMPGRPKTDKLDSVWLAKCTERGVLRPSFVPPAGIRMLRDYTRLRTDLTQERTRYYARLEKLLEDALIKVSAVASTMNTKSVRDMIEALIAGERSPRALADLARGRMKAKRAALIEALTGRSDDHHAELARMLLDQIDALSAQIGTLTGRIEELIAAMPAARGVNADGTTGPAAGTGPGAAVLPALARLDQIPGISLAGAQGIVAEIGLDMTRFLTAGHLASWARLSPRTIQSGPKNRSGKTGKGNPYLKGILGEAAAAAARTDTFLGERYRRLVKRIGKLKALVAVARSILVIIWHLLSDPAARFCELGSAYHTSRTSTQRKARGHIRQLEALGYTVTLTQAA

SEQ ID NO: 213169 - protein, 346 aa, unidentified
MEKSIRCGVDIAKLVFQIHGVNAKSGETVIVKKLARGEMMRFFANKPPMLIGIEACGGAHYWARELTKLGHTVKLMTPQYVAPYRRGGKNDANDAEAICEALARPNMRFVAVKSESQQAVLVIHRMREQWVRERTSLMNQIRSYLHEFGIVINQGRAALAKTLPLVAESETLPLLFRQSIADLADRLTDLETRITALNKRIEAWSKQDTTAKALLELCGVGSVTASAAVATAGDVSVFKNGRQFAAWLGLVPKQNSSGGKAQLGAITKRGDRYLRTLLVQGARTVMLAASRAQKSTQTIPMFEWIYKLQERRPNNVVAVAIAAKQARMLWAIMAKQQRQDALGLAT

SEQ ID NO: 213170 - protein, 334 aa, unidentified
MSFTHFIGIDISKKTFDLALINENAPDKVITAKFSNNHKGIVKLEQFILNQELVKPQILFCIEHTGLYCRVLSNYLVENQYAVWLEMPVQILRSLGLQRGKTDQVDAKRIATYALTFRAKARLWQPPREEVQKIHDLMALRDRLVESRKSILIPIQELEATGLEEVAATLRKHCNKSIESLDKEIKQIEKELDEIIDKDTNLKNKYKLARSVPGIGKITAMTLLYYTNEFTLFRTAKELACYCGVAPFAKESGTSVRGKTKVSNFANKALKKLLHLAAMAAISSDKELKAFFERKVAEGKNKMLVLNAIRNKILHRLLAVIKRNSPFQLEYVPE

SEQ ID NO: 213171 - protein, 343 aa, unidentified
MNSTTIAVDVAKAVFEVAVSEHAGQVRERHRFSRERFRRYLGEQPPATILMEACGSAHYWGREAQTRGHRVVLLPPHAVRPYVVRNKTDRTDAKALLEATRNDEVRPVPVKSETQQALAALHRLRSTWLATRTARINTVRGLLREFGVVIRIGARHVVPALGSLEDDDGGVPSLLRPALAEAAREIRELEGRIRTVEHQLDAVAEQTPVVSRLCSIPGVGLLTATALVAAVGDVQRFPSGRHFASYLGLTPRERSTGQRRQLGAISKRGDAYLRMLLIHGARAVLCHAKTKTAPAPDRLRAWALHLERFRGHNKAAVALANKLARIAWAVWKYDTDFAAAPAA

SEQ ID NO: 213172 - protein, 396 aa, unidentified
MTEIWAGIDAGKTHHHCVVIDDTGKRLLSRRVANDETELLQLVGDVLALGEVTAWGIDLADGGGALLIAVLLNHGQYLLYIPGRAVNRASEGYRGDGKTDAKDAAIIADQTRVRRDLMPLKSGDELVTELKVLTGRRRDLADDRTRTVNRLRGHLNGIFPGLERHLDLTNVGPLILLTGYQTPAAIRRAGTRRLTTWLRNRKVVRPDQLAIKAVEAAEGQRTSVPGETVTAQVVHSLAREVTALNEKITEVDKLIEARFRRHRHAEVITSMPGIGPLLGAEFIAATGGDMDAFDSADRLAGFAGVAPAARDSGKISGNLHRPKRYSRRLQRVFYTSALISIRCCDESRRFYDRKRAEGKRHVQAVMALARRRVNVLWALLRDGRCYSPTPPVTLAA

SEQ ID NO: 213173 - protein, 338 aa, unidentified
MERQYVGIDLHRRSATIYRMAEGGEVLGTERIVSQPFELAQAMAEAGPEPEVVLESTYGWYWAADVLEDLGARVHLAHALGNNWGHRRVKNDERDAQDLAAMLRLGRLAEGWIAPPAVRERRELVRYRHSLTRHRTSAKAQIHGVMAKNGILPVVGELWGPLGQAHSLELPEAYALRMYSLRKLLAHIEREITALDDAQLHRRLKDDPGYRALVRLPGVGKVLAAVFVAEIGDISRFDSPKQLCSWAGLTPKHRESDTVVRRGSITKQGSGLVRWAAIEAVGNYRAKGNEKLLSDYKRIAERLGKYKACVAVARKLLMLVFYALRDGEVRCLDTSAAA

SEQ ID NO: 213174 - protein, 415 aa, unidentified
MEKVYGICCGIDVHKKLTVACLRNGRRQEIRQTGATARELLELADWLKSNGCQMAAMESTGSYWKPLYNILEMSGLPVMVVNAAHMKAVPGRKTDVSDAEWIADLTAHGLLRASYIPDKAQRELRELVRYRKRLVEDKTRELNRLQKMLEGANIKLSGTLSDINGMSARNILNYLVTGKKFDEATFDEMRQQGRISNHLKAPKSQILDDLNGVLSPLQRRVMKELLSHLYELNEHIRNLDDEIDRFMKPEEHEAAARIQDMPGIGSTSAQAIISVIGTDMSRFPTDRHISSWAGLCPGNNESAGKRRSGKTRKGNSLLRSTLLLCAHSAIKVKSSYFYAQYTRICAHRGKKRACLAVAHSMLIAIYHILKDNVPFHDLGADYYNQFNKDSKIRAYLKKLHALGWSEPTATAVASV

SEQ ID NO: 213175 - protein, 338 aa, unidentified
MGYKRISIDTSKHVFAIHGVDEAERPTLRLELRRSQIEAFFARLAPTEVALEACGGAHHWGRQLSAMGHQVKLIPPQYVKPFIKRNKNDRHDAEAIGEAASRPSMPTVAVKTVDEQAATMIAKHRELLVGQRTAAINALRGHAAEFGVIAAKGTAKIEALLVVLTSEPGIPAAAKAMFAAMGEHIADLDAKLTAAERQLLEQHKRNPVSQRLAAIPGVGPITAITMALSVNPANFESGRHFAAWLGLTPRERSTGGKQRLGRISKAGNERLRQLLVVGATAVIRVARPGRPSSSAWLLGLLARKPKKLAAVALANKVARIIWAMMARGEAYRHQPITA

SEQ ID NO: 213176 - protein, 367 aa, unidentified
MIVIGADTHKSSHTLAAVDAATGRVVATKTVNARRDGMLAAWRWAHGLDQVRVWAIEDCRHVSGRLERCLIGHGERLIRVPPKLMGERRRGERRPGKSDDIDAVAVARAALREGIDSLPTAFLDEAAMEIRLLADHRDDLVAERTRMHNRLRWHLVELDAEFAAMLPAGALDRTLWLDRLDRRLRRSGQTARVRVARDELRRIRELTRAERVLERELTSAIRALRPDLLAELGCGTLTAATLIGHTAGAERFPTDGHIARQAGAAPIPVSSGQRDRVRLNRGGDRQLNCALHRIAITRARTCPQTRAYLQRKLAKGKTKPEAYRCLKRHLARRFWHLLRRDPHPTSNTPTHRPRMTLNAPIPVACLT

SEQ ID NO: 213177 - protein, 347 aa, unidentified
MRFYTRQHRHYCGVDLHARTMYLCILGHDGEILLERNLACDPKLFLRTVEPYRENLVVAVECIFTWYWLADLCARENIPFVLGHALYMKAIHGGKAQNDRIDAHKIAALLRGGMFPQAYVYPPEMRSTRDLLRRRLYLVRKRGQLLAHIQNTHHQCNLPEPIRKIIYRANREGIAEKFTDPSVRKSVEVDFELVAHYDQLIRSLELFLVRSAKQHDPQSFQRLRSLPGVGKILAMTLLYEIHDIRRFPRVQDFASYARLVKCSKESGGKKLGTGGRKIGNVHLKWAFSEAAVLFLRNNPKGQALLAKLRRKHGKGKALSILAHKLGRVTYHLLQREIVFDMTKFLAA

SEQ ID NO: 213178 - protein, 352 aa, unidentified
MRLLKQVIGIDVAKNELVCCFGVLTEDLKINLKSNGVFKNQEKGFLKLAKWAEQHLSDRTEPFFVMEATGVYHEKLAHWLHQRAKNIAIVLPNKISNYARTLEVRTITDKTASEAIVRFGLERTLKTWGPPRSIFREMKQLTREREQIVSERTIIKNQLHAENSEAFPNPRSIKRLKKRIGLLNEQEKEIKRELEQLVKADQELSRQVANITTIPGVGRLTAMVILAETNGFELIQNKRQMASYAGLDVREKQSGTSVKGKPRISKKGNRYLRKAVHLPALTAIKHCEQYKGTYARLVARHGIKMKAVVAIQRKLLELVYIVYKNNTVFDTEYEEKRKALLNNAEPLESSLC

SEQ ID NO: 213179 - protein, 400 aa, unidentified
MKLKELSGGIDIGSEFHHVVVIGESGKVLYDKQVLHRFSEFHSAVRELKETERRTGGKIAFGLEGKNGYGAPFDRILGENGFSLYNIDNLKLKQFRNTFGAEWKTDRRDARMLAKLMSLKTQLNGERDKVFIPIEKTSLTNEKLKILSRHQQTLIDEKKRICNRLRKKLLEICPGILDVFGKVEAKTLLRILIRYPNFSRYRKLSKEKLLRIKGIGKVIAAKIINRLQGLEYVRELVEVYATVIQSQAKRILELKEETELLDKELDKLGEGSKEVQRLRSVPGVATKLSSRLAGEIGDIRRFKDSNKLAIYFGVGCINNDSGKRKMAKAVFKANKICKSAMIELAGCTIRSINESRRYYNKKRNEGKKHNHALRCLARQMTKVIFKLLIEDRDYYVKDES

SEQ ID NO: 213180 - protein, 329 aa, unidentified
MHSDNAVICVRRNALNKVGELVGKNIWCGRVSIRDGLENFIKALLPYCQDFDHVAVIESTYKWYCLADVFEERGWLLRIADPSTVSQANFKASDDRTDAQYLAERLRVGSLKHYLPLSYSSRALRDLCRYRMAMVQDCASLKIKLINLYRNQLSINLRVADLLDRCRNHMQSNYRFDPDILEEFKDTNIRLRVAFEVSRIAMLEEMIEECNAEIQKQCKDQELVKLCKTIPGCGPVLSAVICTEIGTMQRFKSAGDFVSYCRLCSTSKLSNGKSKGLGNAKNGNAYLSWAFTEVAQYASRNPVIREILQRLLRKYGGLRVKAFVLWPQK

SEQ ID NO: 213181 - protein, 408 aa, unidentified
MKVYIGIDWSEEKHDIVLMNEEGADLAYQCIEHTMEGFRQFDAMRRKLDLAKEDCVVGIETAHSLLVDYLWEQGYRQMYVLAPNQVHDNQGRFRQSGAKDDPADARLIADILRTDRGRLRMWQPDSLLIRQMRAEVSWIMQLTQEIGRLSNRLRAVLLRYYPAALEVFSSGLTTQIAPEFILAYPNPQAAQALSWPEFQAFARQHRYPKPKQLAKCFARLQADYPESSPETVLIFQDQAVQLADLLLDTTRTRLQNMRRLKELFEQHPKHMVFTSLPAAGEWIAPALLAKFGDNLQRFPYPSTVQAMAGTSPVTKRSGKSKFVQFRYACDKEWRHICQEWATSLVHRTQSPIALAYYQQIRPHCHSNEHAYRCVAHRWLAVAWKLWQTDQLYDEAYHFQQRALRSKPR

SEQ ID NO: 213182 - protein, 410 aa, unidentified
MELISLHRRVIGLDVHQAQITACGLIEGEDGVHIERRSFETFKRGLRALTDWCLELKAEVVVMESTGIYWKSPHAWLERAGLNCLVVNAHHVKNVPGRKTDIADPEWLAMLARAGLLRPSFLPPEKLRRLRLVSRQRQKMVGTLAAEKNRLGKVLSDAGVRLGVVVSDLNGKSARAMIAALIAGATPEQALGYASPRLKAPREEIAAALEGEISAEHSFVLQQILSHIAFLEESIGKFDAHLLAGLDSPEEKNALALLRTVPGIDLIGAAMLLVEIGTNMVLFAGSDHLASWAGMCPGNNRSAGKRKNERQRKANSYVRRLLCEFVQAARKTPCAFQAKHNAVAIRRGFKRAIMACAHKMLRVIWAMLLRNEPYRDSTVDYEALSVRRNAPRWIRALKRFGYLRPSAATR

SEQ ID NO: 213183 - protein, 402 aa, unidentified
MPMLSIGIDVSKGKSTVCGMKPGGEIVYAPFEVQHTREGMSELVSLLRSSGEEVRAVLESTGSYHCPVVAALLENGIFVSVVNSLRMKRFCSQSIRKVKTDRIDAMQIALYGLAYWQELQPTKLPEDTYRELQLLARQYYQMTSMLIKAKVDFNAICDQVLPGMQELMNDHAGRHKLSDFVLRYRHTTHILEMGETRFRKDYCKWAEKKGYRNCERMAAHIFATAQNGIPVLPNAPSTQIVITEAIRVLHTVEASRDAILTQMQALAKTLPEYSLVREMPCIGDTLAPRLIAEIGDVRRFHSKRALIAYAGIDAPPYQSGKFCANNRHISKRGNRYLRKTGYEVMQSYVMHKPANDPIFTFIEKKRGEGKSGKLAMVAGLNKFLRVYYGKVTELYRSLPAIE

SEQ ID NO: 213184 - protein, 411 aa, unidentified
MVEVVYERACGLDIHKQTVVACLLVPGPDKASHKEIRTFGTMTGELLQLADWLTAAGCTHVAMESTGVYWKPIYNLLEGSFTLLLVNARHIKQVPGRKTDVRDCEWIADLLRHGLLRASFVPDRPQRELRELTRYRTSLIRERAAEVNRVQKTLEGANIKLGSVATDVLGVSGRQMLAALVAGSSDPAALAELAKGKLRDKLPQLERALTGRVGAHQRFLLAQQLAHLDALDELIERVSTEVTERLRPFEAALARLDTIPGVGLRTAETLVAEIGTDLGRFPTAAHLASWAGMCPGNDESAGKRRSGKTRKGDPWLRSALIEAAQAAGRTRATYLAAQFHRLAIRRGKKKALVAVGHSILVIAYHLLTEDTDYHDLGPIFFDQRDEQRVTRRLVTRLQSLGYTVQLDRPAA

SEQ ID NO: 213185 - protein, 331 aa, unidentified
MVYAGIDVHRKRSQVAVLDEAGTELVNRNVDNGSEAMIDILEELEVGTPVAFEAAYGWGWLADLLERYELEPHLVHPSACKAIASARLKNDKVDARMLAHLLRTDLLPEAWLAPKEVRDLRSLLRHRAALVRMRTALKNRIHAVLADEGLKAEGEALWSDTGQQWLVRVPLRANHREIVDDCCGMLDALAIPIGRLEAEIHSLAKADPRVDALCELPGVGILTAMTLVAEVGDIARFPTARKLCAWAGLTPSVRNSDTKVHHGHITKAGPAAVRWILTEASYQARHFPPFSATFEATTKRRGKRIAGVAVSRKLLARSFHVLKSLEQAPIQ

SEQ ID NO: 213186 - protein, 359 aa, unidentified
MTTTMTYVGLDVHARSTHAAAIDVASGELRRARFGGSDEEVIAWLRTLPQPLRGCYEAGPSGFALYRAAEAAGLSLDVVAPSKTPRAAGDRIKTDRKDAELLARLLLAGQLKPVAVPPPAFEAARHLARAREQVRCDLMRCRHRVSKLLLLHGRVYEGSAWTKTHRRWLEQQRFEQTATELAYLDALAAVDGLAARKAALDERLSRLAREGEWWPTVARLRCFRGIDTLTAFVLCLEIGDFTRFQRPAKLAGWLGLVPSLDQSGESRRQGAITKTGSGYARRLLVEAAWHYLPRPSVGPALAERRAGQPDHVIQIALRAQRRLHRLYQRLRARGKPGNVTTVAVARELACFLWAAAIAD

SEQ ID NO: 213187 - protein, 313 aa, unidentified
MDGHPFVGIDVSKERLDIGVGADGEFWQAANDEVGIRETLRRLSALQPALVIIESTGGLEWPLVSELCAGRVPVALVNPGRVREFAKALGLLAKTDKLDAHLLARFGEAAKLSPMLLPDEAVQKLSALMGRRRQLLEMLVMEKNHLLSTRLSLRHGVQEHVAWLQQEIDQLTEQIQQELQDTPGFRDKDRILRSVKGVGPITSLILLSDLPELGQLDRKKISALVGVAPFNDDSGRRRGARRIKGGRASVRQALYMAAMSAARFNPVIRTFYQRLLASGKRRKVALVACMHKLLIILNAMIRDMTTWQAPLSA

SEQ ID NO: 213188 - protein, 410 aa, unidentified
MEIVREYVSGLDVHKKSVVAAVITPQGRRVKTFSTTTRALLELVDWLKAEGVRHVAMESTGIYWRPIFNLLEQTEMEVLVVNAGHMKQVPGRKTDVKDAEWIAELLQYGLLKGSFVPHRGQRELRDLLRYRRTLIEQRADEVKRVQKLLEGANIKLANVAADVLGVSGRAMLEGLIEGQQGTAELAYLARGRMKSKQRQLEEALEGSFGPHQRWMLRRHLDLIDFHDGKLKELDAEVAERMRPFLAALNHIDAIPGLGQQTAQEIVGEIGTDMSQFPTDRQIASWAKLSPGSNESGGKKRPGRTGKGGPIRHIMIRAALNVSRNPNSYYGAMYRRLCKRGCKERALVAVAHALLVAIYHMLRDGTVHQDLGANYFDERRREQSARNAVRHLQRLGFRVTIEKEPGQCPAA

SEQ ID NO: 213189 - protein, 425 aa, unidentified
MRSIALDIHRDFCEVAIKDGDEVRSAGRIKTRREELERFARSLGADDEVALEATGPALEIKRIIAPHVSRVVIANARKVRAIAEAKVKTDKVDAQTLCELLAAGFLPEVFGPDEQTRALRRRLARRAALVRQRTRAKNELHAVLSRNLKGRPPMSDVFGKRGRAWLSALVLPADERETVDGCLRQVDFLDLEIEELERRLARTALDSTEIQRLMSIPGVNLVSAATVVAAIGDVDRFATPRKLVSYVGLDPRVRQSGEAPARHGHISKQGSPQARHVLCEAAWIVVRTPGPLRAFYERLRARRGAQIALVATARKLCTLCWQLLTSEEHYAFGRPSLHRHKLRRLELIAGDPSHRGRRSGSAASKREQAHERELSEQFERAYRRLVSDWQQDSKKEGAGATRGRASRGPSSGQAARQGSAPEPAL

SEQ ID NO: 213190 - protein, 388 aa, unidentified
MSPIYEHEPLESTTVARRIFAAIELSKSAWVIALQLPTVDKVSLFRIAGGDIEGLIALLERARFRVGEPVEICTCYEAGYDGFWIHRALAARGIQNTVLDSASIQVSRRGRRVKTDRTNAESLIRVLMALYRGEQQVAKIVHVPSPEEEDHKRLLRSRTNLLRERIRHTNRIRGLLNLQGVRHIDPNRRDWIAALAKLRTGDGRPFPRQLMREIRREAKLLAMVKRMLAEVEAEIAGMIRDAGKRRHPAQRGQSHPIAIRLAAIRGIGPQAAGVLATEVFYRKFNNRREVASYMGLTPTPYNSGSMERDQGISKAGNRRARTMAIELAWVWLRNQPDSRLSQWFQTRAGGASGRVRRVAIVALARKLIVALWHFLEDGVVPDGAMTRA

SEQ ID NO: 213191 - protein, 319 aa, unidentified
MSDTCMVGIDVAQATLQVAVLPAGRTWEVAYTDDGLATLVAELQPLAPARVVLEGTGGLQAPAVAALALAGLPVVVVNPRQVRDFAKATGQLAKNDQLDALVLAQFAAAIHPPARALATDDTTRLSELVTRRRQLVEMRRAEEQRLVRLEHRRATPRVRADVADHIVWLSGRIERLDEELHTAIQASPVWCVRAQLYQSVRGVGPVVARTLLAELPELGTVSAKVIAALVGVAPYVRESGVWRGRGHIGGGRAEVRRVLYLAAMSGVRTNPILCAYYARLVAAGKPRKVALIASAHKLLTILNAMARDQRPWTPPLGTT

SEQ ID NO: 213192 - protein, 333 aa, unidentified
MNNVGIDVSHKELVIVVSVKGKARKAKTFENTPSGHNAIIQLLSKLNGESRVCLEATGIYHFDLAVALSRAEEIEIMVINPKASHNFAKVLMKRSKTDAVDAEILAIYCERMPFEAWQRPADEHIALKAISRRIATLTKLKTQTKNQLHALKATAETPVLVIEHIEEWVTVLDKQIQVHRESAIELIHQHDALAEAYTLITGIKGIAQASAVQMLGELMILPQDMSAKQWVAYAGLDPRQFESGSSVAKKSRISKAGNKFVRQALYMPALVATQHEPHVKGYYAHMINDNGLKKIQAICAVMRKLLHAIHGMLKAKKEFDGTRFYTFPIEANS

SEQ ID NO: 213193 - protein, 345 aa, unidentified
MKIVGCDLHTRYQQIAMLETETGELTERRLEHASGEAKDFYAGLPAPVRVGIEATGHTRWFERLLSELGHELWMGDAAQIRAAMVRKQKTDARDAAHLLQLLVEERFPRIWRPTLAERDVRQLVWHRQKLVWMRNAIGNQLHALAMGEGLCRKKQLFTQQGRKQLQSLELGAWASYRRQELLTLLDQLDGSLEQLNRAVEQQAQQNQAAVLLRTHPGVGPVTSLAFVLTLGPVERFERSKQVVSYLGLNPCEHSSGGRQKLGRISKQGNPMMRSLLVEAGHSAVRLDAELGKDYKRLKLRRGPGVAKVAIARKLAVRMYWMLRQQVSYAQLVRMQGSPRGTLVTK

SEQ ID NO: 213194 - protein, 344 aa, unidentified
MDQISRIGMDTSKHVFQLHGVNAAEAPVLRKKLRRKEMVAFFEKLSPTVIAIEACGASHQLARLLQSFGHTVKLIAPQLVKPYVKRGKNDAADAEALCEAMSRPTMRFVPVKTAEQQAALMLVGVRDRLIRNRTQLANTIRGYAAEFGLIAAKGMAHLLPLLERIEADGCLPALARELFAIQAKEYVQLQAQIDEVDAKLTAWHRADECSRRLAKIPSIGPIGAVLLRMKTPDPTQFQSGRQFAAWIGLTPKDHSTAGKVRLGVITRAGDEGLRSVLVVGATAVIKQVLRGGKASPWLVEILKRKSPKLAAVALANKTARIAWKMMLTGEPYTAKSAVALAGGR

SEQ ID NO: 213195 - protein, 479 aa, unidentified
MNGKGKKTKKQAVIDNSVVNVLSKEELDRRISTIESSIKASTWRSLETGGKFTKNEKLSFISDDMLIVGCDIGSETHYVRAIDTRGRELSKGAYSFTNDANGFQSAKDWALRIAAEHDKKQIVLGLEPTGHYWFCLAAWMITNNISVVQVNPYAVKQTKELEDNSQSKDDRKDPKLIANLVKDGNYGMPYLPEDLFADLRRLSMYRDQLMEDRTRTLNRLHRDMKICFPEYMEALGKVDGTFALEVIRHAPFPEDILTIGADGLRAIWHDAKLRGRGYSRADKIVRLAEQSIGLKEGVSAYKRAVKWFAEQILELDDELKDAESQLHEKCRKIPYAENVLEINGLGENILSGILAEMGDSTRFDDVNEIQKLSGLGLVACSSGKHKGETKISHRGRKRLRYWLFQGARSVVVHSEEFKSLHEYYTTRPENPLKKMQSLIAIACKLLRIIFTLLRTGAKYDPQKMMKDIKRPEQASGKVA

SEQ ID NO: 213196 - protein, 369 aa, unidentified
MTREFSTFCDDLQKLAKWLYESEIELAVMESTGVYWKCVYAEIEELGVPCYVVNARHVKNVPGRKTDVLDSEWLAELARCGLLRPSFVPPKDFREIRLLTRYRKKLTGMQSSEKNRLHKVLESGGIKLGAVVSDIDGVSAREMIAAIIDKTHTPEELAQLARGRLRSKEAELVRSFEGRLTDRHHFLLKQIQQHIQWLDSAIARVDDQVAEGMSPYRQEWELLQTHPGIDRIAAAMILAEIGVSMEAFGTKERASAWAGMSPGNNESAKKRKSSRTLHGDKFIKTVLCEIANCARKTESQYKGKFQSLVIRRGHKRSIVALGHKILEVIFVMLKNKVPYKDPGIDYDQLLVSRNAPRWIQALKKYGYLT

SEQ ID NO: 213197 - protein, 349 aa, unidentified
MRTFTPPADTRFYAGVDLHARSLFLVILDADGQTRFARNLPAAPEPFLRAVAPFRDGLLVACECMHCWYWLADCCREQHIAFVLGHAYSMKAVHGYKTKCDRKDAEAIARLLKGGAFPPAYAYPKERRGLRDLLRARLRLVRQRAHLYGHVHTARRQANLPPVSSDVKYKSKRAAIIDDIADPFVRRRVETHLALLEPLDAAIRRLEAEIEDAARLIFPAELAVLQSTPGVGAVLSLTILLEIDAIDRFDTRQQFCSYARLCGAVQSSDNKRVGQGNAKAGNAWLKWAFSEAAVLSAQKDERIGALLNRLASKLGKAKAYSALAHKLGRAFYHMLHTKEVFDVNRFVRH

SEQ ID NO: 213198 - protein, 350 aa, unidentified
MFSVGIDVHQKRSSGCILDQQGKKVKEFEVVGSWDNLIEAVAKLPRPMAVCFEASTGCGWLCDKLAPLAARVEVAHPGQLRLIYRSKKKNDRIDAKKLATLLFLGEVPRAYIPDAAVRGWRGLVEFRCRTVQKRTRTKNALRTLLRGCGILGLHPRKGLWAQKGVALLRELELPTGQDRLRRDLLMEELDQLNRQVKRIEAELDRLADDHAGVALLRTIPGVGPRTAEAVLAYVDKPERFDRNKQIGAYFGLVPCQDASADKNRLGHITRQGPATVRGLLVEAAWQAVYRSGTLKAYYERIRQGKKERRKIALVATAHHLVRVMLSMLKSGEVWREEAAGATPQAAETAA

SEQ ID NO: 213199 - protein, 402 aa, unidentified
MNKFNPTTAKVSTTSALGTIQTAQSALDKYAAYIGLDTHKDSIVVAIALPGRAQAYIDSELANNEKNISKLIHRLSKQFAGQLLLFCYEAGPCGYGIQRQIMASGHDCEVIAPSKIPKKPGEKVKTDRIDARKLAQYLRSGDLTAIWIPDHEQEAMRDLTRARSDMKSQELKARQQLNAFVLRHGHSWPSNKTRWTKSHYNWLESLKFNHDWLQVVLQEYIDAVKAATGRVTDITGQMERVLPQWSMAPVVDSLIALRGIDKLAAMVLLAELGDISRFDSPKQLMAYLGLVPSEHTTGSKRRQGSITRTGNSHARRMLVESAWSYRFPARQTMHLKRKAIKASDKAKTIAWRAQKRLCGRYTTLIQAGKNTKQTTVAIARELIGFIWDIVCHEMPKVKTVGQ

SEQ ID NO: 213200 - protein, 395 aa, unidentified
MGHQTFIPRDYDVFAGLDVDKRSISVTFTDHQGLLKSLRMPYSVEHLVSHVRKHFPNQKVAFAYEAGPTGYGLYDGLVAQDFSCLIASPSMIPKAPGQRVKTNRLDSVGLSENLRGGQLKGIHVPTPLYRELRHLTQLRDTLVSEMVGMKQRIKSLLLMEGMEFPPAPAGSQWSFMVKNKLRKLPCSSTVRFKLDQLIDSLEFNEKQVLKTTREIRRFCHNDPELSQCIEYMMSVSGIGWIVASQLLARIGDWRELRNIRQLGGFLGLVPTEHSTGERTDRGSITHTVCRMFGREDVRLSLRYSLSWIDSFIIDFRQRCPLVKNYRPPPVAYGWFTTPLVLSYKPKKNRQQIRCRFHHSLPAARGDHFEQSVHRVNAVCTRTRISVEAENMPLQA

SEQ ID NO: 213201 - protein, 436 aa, unidentified
MICLRAPRVGVTEQAHTKGVALEIVYPRVAAIDVGKKIVAVAVRTPGVQPGQRHQQLRKYKTFYPVLREMVGWLVAQGVTQVAMEATGVYWKPVFHALCEAEQLEVLLVNAQHVKNVPGRKTDAKDAEWLAELCEVGLLRGSFIPPAEIAAVRELTRYRKKLTEARTSELQRLCKVLEDGGVKIDSVASSITTMSARAMVEALIAGERNPRVLAELALGRMRKKIPDLAMALAGRFGAHHALLARMHLEHIDHLSGMIGRLDGEIDQVVAPFSEQVGLLCTIPGIGERTAQVLIGEIGVDMSRFPTADHLASWAGLCPANNESAGKHRRARTRKGNREVREALVEAAWAAGRTGTYLGARFRRLHRRFGKQGGSKAAVAIAHNLLVIVWFVLHDRADYRDLGADWFTRHDNPDARKRRLIRELQTLGYTVDLTPAA

SEQ ID NO: 213202 - protein, 344 aa, unidentified
MKQRNVIAIDLAKNTFQVVGLTRTGNVTMDKPMSRKRLETHLARQKPSLVAMESCGGAQHWGRQAETYGHEVRLLPPRQVKPYRQGHKTDSKDALAIGIACLQPKIKCAGVMSLEQQSLQSDKRVQEHLSDQLTATGNLLRALVAEFGVVIPTGKAALRRRFPEILADAENGLPLSVRESLHEAWRLWQQQEQSLKELEALLSRREQEVPACKRLAQLESVGSKNAVGLYVALGDGRQFKNGREAAACIGVTPKQKSTAGKVKLGSIGKYQGNQRLRSSLIVGARSVVNALAKRAPRNDKERWLKALIDRRGPGRAAVALANKTVRTAWAMLFYNTSYQPALST

SEQ ID NO: 213203 - protein, 430 aa, unidentified
MKSNTQNAKIEAITENTLVLGIDIGSETHYARAFDYRGIEYSKKPFKFSNTEAGFMSFKAWIQDMKEMHEKDKVVPGMEPTGHYWFNLGKFLQDNEMRPVLVNPHHVKKSKELDDNHPTKNDRKDPKVIAGLVREGRYMIPYLPEGVYADLRTASNIRFQLQAELTRIQNRISRWFNIYFPEYKTVYGKPDAKSGMMILKVAPHPEDILTLGIDGVNQIWRDAKMRAVGKARAKTLMEAAEHSVGSKEGAVSARMEIRMLLEDYESRNVRLQEVMALIEELVKQIPMAEKLLEIKGVGIKTVSGFLAEVGDISRFNNPKELQKLAGLALVENSSGKHKGETRISRRGRKRLRYLLFEVAMSLVSKNAEFKELHIYYTTRRINPLKKMQSLMAVAAKALRIFYAILTKGVAYDPKKMINDIKRPKIYLQAA

SEQ ID NO: 213204 - protein, 430 aa, unidentified
MGLIVPSTIHPAREDQPLPYEWFVGIDWGSQRHQVCVLDRDRRQVGERVVDHDGASLAQLADWLWTLSGGQPQRVAVAIEVPRGAIVEGLVERGFHVFAINPKQLDRFRDRHSVAGAKDDRRDAFVLADSIRTDQPSFRRLQLDDPQLLRLRELSRAEETLLEDFRRSANRLQDQLHRYYPQMLKLCSAADASWLWELIDLAPTPAHAALLSEEQVQRVLKAHRIRRVKAQEVLTCIQAPALPVAPGAAEAAQAHCAFLLPCLRVLAEQLQACSQQVSALLRALAQEPGEGEGPSDVAIVLSLPGVGRKITAWLFAEAAQPLAERDYQVLRTHGGVAPVTKQSGKRRLVVMRHGCNPRVRHALYHMARVAMQHDAHFSSVYAALRAKGQRHGQALRNLGDRLLRILMAMLRERTCYDATRIRREPVVQMG

SEQ ID NO: 213205 - protein, 335 aa, unidentified
MEFNYFIGADISKKELDFAVMQDAKLLFHREIDNSAKGISLLIKELLKLPDFDLKGAVFCMEHTGIYNHHLLSCLNKIGANICLEAASHIKNSLGNIRGKNDKVDAIRIADYAHRNSDRLRLWTPKRDIVIKLAQFSAIRSRLIQVKKMLTVPLAESNSFMEKRASKVNEKLCKESIEGIQNDLLKTENAIDGLIADDAELTRLFKLATSVSGIGKVVATEIIITTNEFKDIREAKKFACYSGVAPFTKESGLFKGRARVSPMANKKMKTLLHLAALAAIQHNKDLKTYFERKVKEEKKNKMLVINAVRNKLILRIFSCVNNNREYEKNYQKLVA

SEQ ID NO: 213206 - protein, 321 aa, unidentified
MYKYNQIFGVDISKDVFDVMSSQGKHLQFENSSKGFNQLTKHLTKKDLIVMEATGYYHYCLAQYLYDLGYIVSVVNPLAVKRFVQMKLSKIKTDKSDALAICQYASSNEVPIFTSRDSNQAECLQLMSLIEIYLKQSTALKNKLHGEKTLGIPSKTVYHSLNRSLKLIQKEIQLLENKLLELVKEHQQKQLTLLKSIPGMGTKTSIILIVLTDGFTKFDNAKQLCSYAGTTPTIRMSGTSVRGKSRISKMGNQKLRNLLFLCAFSACKYNKACRELYERIVAKGKSKKLALIAVINKLLKQAFAVAKSGLPYDENYVSNLS

SEQ ID NO: 213207 - protein, 351 aa, unidentified
MLIIGCDYHPSVQQIAFVDSETGETGERQLLHKDGEAERFYRDLKLRGISVRVGIEATGHARWFERLLAELGFELWIGDPAQIKAARVRKQKTDRQDAQLLLKLLVEERFPRIWIPSPENRDVRQLLWHRHRLVQMRTRVMNQLQAVAMNEGVRRKKALWSKSGRAQLESFVLSPWASRRRQDLLEVLDRLNPTIDELSTAVEQEAKKRPEVLRLMTHPGVGALTGLAFVLIIGSAERFACGKQIGSYLGLIPCEDSSANRQRLGHISKQGNTLLRFLLVEAAQAAVRGDAEWRRKFVHLAMRRDPRIAKVAMARKLAVSLFWMWRKEWNYEQLIKFGSHAGQSDYVHGVK

SEQ ID NO: 213208 - protein, 357 aa, unidentified
MLSSNVKYIGLDVHKEAIAIAVLNGAGKLVMESIVETKSSTLLDFLHGLRGELHVTLEEGTWAAWLYDVLKPHVREIVICNPRRNALLKEGSKSDKIDARKLAELLRSGMLRAVYHGENELRTLRELARSYLTVSKDLKRVKNRLKALYRSWGISCAGKQVYTPRHREQWLSKIAQVGVRRRAELLYQQLDGLQVLQRTARGELLAESRKHKAVKILRQVPLVGPLRAALLLALMQTPHRFRSKRQLWTYSGLAVVTYDSAQHRYVDGQLQRSKKPQQIRGLNQNHNHAMKDIFKSTALSASCCAGPLQDFYAGLLAKGMKPDMARLTLARKIAAITLTLWKKGGSFDAEHLKSQAA

SEQ ID NO: 213209 - protein, 407 aa, unidentified
MSFFVGLDWAATTHAVGVIDETGTVRWRGTVPHTAAGLAELVQRLSRFGAPATLPVALERPSGLVVDTLLEAGFPVVPIHPNVVKASRLRYSAAGGKSDPGDAYLLADLLRTDGHRFRPLQPLADETRALRALVRGRDDLVAQRVALANQLRAFLERFWPGAATIFAEVDSPIALAFLTRYPTPQSAERLGERRLAQFLRRHAYCGRRSAAELLSRLRNAPLSRTGDAETEVSGELVQALVAVLTPLVAQIQQLSAAIAAALVQHADGPLVQSFPRSGAVNAAQILAELGDDRARFSTADQLAAEAGVAPVTHASGKHRGVAFRWACNKRLRQALTTFADNSRHASAWAAAVYAHARARGCDHPHAIRILARAWVRVLWRCWQDRRPYDVSCHRAAQPLLAVQGARG

SEQ ID NO: 213210 - protein, 424 aa, unidentified
MKSHPDGEFAAFAGIDWSDTKHDICLQAAHSEQRELAVVPHRPAAIDAWASALRQRFGGRPVAVCLELAKGPLVYALQKYDFLVLFPVHPATLAKYREAFAPSHAKADSTDAQLALELLLRYRVKLKALTPQSVPMRMLLPLVEQRRRLVGDQNRISNRLTDALKQYFPDVLAWFADKDTILFCDFLTRWPTLKQLKRARRTTLLSFFHEHHVRSASRIEERLRAIKSATPLTDDPAVLRPNQLLVHALVEQLRVTLQAIERFDAEIATVSETLPDYALFRALPGAGATLAPRLLAAFGEQRERYQSAAEIQRYTGIAPVTESSGKKHWVHWRLQCPSFLRQTFVEWAGATIPRSFWAAAYYRQQRDKGCSHQAAVRALAFKWIRILYRCWQTRTPYDESTYLNALKRRGSPLLASIATTAKNT

SEQ ID NO: 213211 - protein, 350 aa, unidentified
MSPRNAPRPAAVYGVDIGKNIFHVVGLDSDGKPVQRVRFRRDTLIKFFERAAPAIVGMESCAGSQWIARRLQALGHKVRLIPAQFVKPYVKSNKSDIIDAEAIAEAATRPTMRFAAIKSEEQADLQAVHRVRDQMIGTRTRLINQMRAFCLEYGIALRQGAGLFKLDLPLVLDDLSNDLSPAMRKLLVDLFADLRQLEQRINDVTREIAAIADREDVARRLMTIPGIGALGATALLAAVGTGCQFQKARDLAAWLGLVPREYSTGGKQKLLGISKRGNRYVRKLLVHGARSCFRHLGRNRDRLGSWLDGLQSRMHPNKAVVALAAKMARIVWVVLTKPGALYERRDPAFA

SEQ ID NO: 213212 - protein, 407 aa, unidentified
MENCKVIVGIDVSSKDSTVCVLMDKVRQGKTFKISNDMVGFQQLYKRLRLYSVIPLIVFESTGVYSLSLQAFLEKKHIQYLKLNPLKAKKLMDNNLRHNKTDQVDAYRLALIQFNAPQKLLKPQSRAYHEMQNASRYYEELNKAMVVAKNQLHRNLQTTFPQIENLMCHPTGKIYWSVVALFPHAQAVLDSNKEHILGELETISGLSQKKAEYLTQRLISLARLTCAYDNKDSIVIRAIQRNIASLFSLDQEKKEALYKLASKNQADTRILTIYQSIPGIAKTTALRLLAELGDLRRFDSPNQIDAFIGIDPGIYQSGELDSHLSITKHGNSIARKIMYLSIGQMESVKTTQPCHITDYYDRKKSSQSRGFKKIAIASVHKLIRTMYALVTKNQLYDYNVATRNQRL

SEQ ID NO: 213213 - protein, 415 aa, unidentified
MALKIVYKICCGIDVHKTFVVACIASTDSNGVTIYEHHRFSTYTKGLKDLLQWLLKHNCKDVCMESTGKYWIPVYNVLENDCSIVLAHPKYVKAIRGKKTDKKDAKWIADLFKHDLVAGSFMPPADIRQLRDLMRYRFKLTCFMSSEKNRLQNCLTVSNIQLGNVVSDTFGKSAQAILDTLLENPADTSFDLEPLVYKSLKKKLPELRDAIDGYISPEQAGKLKVIKAHYENLESRKAELEELILALAAPYQQELAILQTAPGIRSDFTAIGIISEIGTNMEAFPSAKHVCSWAGLTPTNNESAGKKKSVRVSKAGCYIKPLLVQCANAVVTSKKHPEIRNRYLRIKKRRGHKKAIIAIARMLLTALYHMLKNGENYNAELYRKSDLLSVDREITVEQAIIIARKQGYKIKSATA

SEQ ID NO: 213214 - protein, 340 aa, unidentified
MKSTVIKQNVGIDISKNDFSVVFMYLLSDQRTKIKGSRKFANNPKGFEEFSIWFHKFKIKDLDLYFTMEATGVYYEDLAYFLYEKAHILHVVLPNAAKKFAQSYNQKHKTDKSDAKMLAVMGLERKLSPWKLSSTIFRRLKKLSRERERLINERTRLKNQLHAEEHSADKVKTLIRRIKNHINYINKLISGSEKEMKKIVSKDPFVAERIEKICTIPGISFLTAVTIIAETNGFVNISSIKQLVSYAGYDVKIQQSGKWIGKARITKKGNSHIRRALYMPAIATIQYTYKFRNFYERINEKKKSKLIGLTAVQRKLLAMIYTLWKNNCEYIDNYELKQVA

SEQ ID NO: 213215 - protein, 389 aa, unidentified
MEAQTVNSPPPTVSRDETIRCLLAIELSKKSWIVAVNTPLADKVSRHTLEACDWKGLLELIARMRTRVIQTLDRPVEVVSCYEAGYDGFWLHRLLEAHGVRNYVIDPASVQVNRRARRVKTDNIDVGRLLRSLMAYLRGEPKVWSVVRVPSVTEEDDRRLHRERDRLINERVQHVNRIKGLCAVHGIYDYEPIRPNRLARLEQLRTADGRELQPRVKAEILRELQRLELVLKMIKTIEAERDAIALAGKSATHANANKIQDLIRLKSIGPEIGTTLVGEVFYRQFNNRQQLGSYVGLTPSHFQSGPMSRDQGISKAGNPKARSVMIELAWLWLRHQPNSPLSIWFRERVGTARGRIRRITIVAVARKLLIALWRYLGTGVVPTAAVLKG

SEQ ID NO: 213216 - protein, 345 aa, unidentified
MQPMYYIGLDVHKQKISYCVKDSSGKIYAEGWTPATRFDLDRWMKTLPQPWSAALEATMFSGWIYDHLKPHAAELKVAHPLMLRAIAAAKKKNDRIGANKICDCLRCDFLPECYMAPTAIRERRRTLRYRNLLVRQMVQLKIKISTLLMEAGVSYNQQKLHKAGYFRELLASNPDIDESLRQLLRQCREMVVRLGKMESALIHSLQQDRVLVERVERLMSIPAIGPITALTWALEIGEVQRISSIKKAISYCGLCGDEQRSANTAQRTPLSKQRNKHLQTTLIEAAKMAPRYSPTLALLYDREKQKGNANRATLAVARKLVAYLMAVDRGQTHFLVLDRATCAVA

SEQ ID NO: 213217 - protein, 361 aa, unidentified
MKTYYIGADVHSNNTELAIEYNGQIIGRHALPTAIPAIKDVLASVGGKIHLTFEEGPMAGWLYRNLKDSVEEVVVCDPRRNKLICSDGDADDKIDAGKLAALLRGGYLRAVHHSDDEDRAEFKQWVSLYHDRVRDAVRMINKIRARCRMYGIAIPRKVIRDKLQRPLWLAGIQNKPLANQLDMLWIGYDAVAAQVRRSKRQLCTLSKRYPIIKLWSQLAGIGTIRAVTAFAFLDTPWRFAHKNKLWKYCGIGLQRSASGTDKKGKPKPARLQLAWAVNRLLKNVILGAAHTAIHQNKNTFKSYYERMLHDGIMPSNARHAVARKMLTVMWGMWKTNSRFNETKVETVAMTAGSLRFAQGNN

SEQ ID NO: 213218 - protein, 356 aa, unidentified
MKEYIAFDSHKHYTLAEREDARTGRSQQIRIEHRPGAIREYLRSCRKGTSVAVEALGSWYWIVQEIEEAGMQPRLVHPRKAKLMMGMINKTDKLDVHGLNRLQRNGTLPTVWIAPGPLRDLRELTRTRMVLTQQRARLKNRLGATLDKYGLAVQDWSDPYGKGARGELETLLDRLPEQTRFTGQALLEQLDFVQEQVKRHEQRLADLLEETAAMRLQRSLPGFGPILSAVVVLEMGEARRFGDAEHFASYAGTTPRVHSSGDKTRYGKLRPDVNRYLKWAFVEAANVIARHHRSWPDRHVSRLYARLKARKGGAKAIGAVARHLAEATYHVQNRQQPYRDPNVKRVFKEGLSATMA

SEQ ID NO: 213219 - protein, 349 aa, unidentified
MTDQRIPYCGRIVYVGIDVHKETYTVTCVCNKQIVKTVTMQADPAALAASLPRRFPGATLYAVYEAGFSAFVLHRVLTKADITNIIVNPASVAVAANDKVKTDRRDSKKLAIDLADGRLRGISVPTEAEELARLLPRTRAQIVKHRATIARQIKAKLHQFGLIAPASRRLISSRYLREIAAWSLPQELSVSLTLLAEQWRFATRQLIEMRRLLRDQAQAQEEIEKVYRSVPGIGEVVARTLATELGDMTRFANERALCSSTGLTPSEYASGASVRRGHMSRQGSSRVRHVLVETAWRALPRDGVLKERFDRIAATRGKKRAIVAIARRLTGRIRACFRQGTTYAVGTYA

SEQ ID NO: 213220 - protein, 356 aa, unidentified
MNIRRVQNFVVEGKEVFVGLEDSKKTWKLAVRCEGMVIHRASMEAKYSVLIRYLRNKFPECQIHVIYEAGFKGFNLFDRLTENGIDCVVIPPHMVTEPKTNRVKTDKRDANRLAFVLESHDFRNACHVPDKERREDRQISRTLIAIQKDIIRTRNRIRKLLDFHGIEVSLPDRWGRDEFRALRKLSLPDPLKISLETLLTQLEELWTHQITLRTALRKLCRKERYQKAFEIAVSLPGIGWFTAIRLVLELGEDLSRFTSGKKIASFVGLTCSEYSSGETEWKGRITGMGSGFIRATLIENSWIAIRKDPVLLAKFSRVWRASGSKKKAIVGVARMLIVRLRACIVLGTPYRIGMVQ

SEQ ID NO: 213221 - protein, 436 aa, unidentified
MQPEVEEIPDAEHELLAARVAAIDVAKASGKVCVRLPGRAGRRVSRVWDVAATSGAVTELAEHLVGQGIEKVTVESTSDYWRIWYYLLEAVELSVQLVNARDVKNVPGRAKTDKLDAVWLAKLTEKGLLRPSFVPPAPIRRLRDYTRLRTDLTHDRSRQVQRLEKLLEDALIKLSAVATDITGVSGRAMVEALIAGQRDPKVLAGLARGRMKTKHSALLAALDSRFDDHHAELARMLLDQIDALTTQIDALSARIDELLTAMPDAQPVDPHPGGPTPGPSTDTVSDAALGAVDRLDEIPGIGPNVAQVILAEVGLDMSRFPTAAHLVSWAKLCPRTIQSGPLTRGGKTGKGNPTSKVHSATPLPQPPRPTPSSVNATVASSNAAASSKPWSRSPAPSWSSSGTCSTTPPPGSATSAPTTTQPGSTPNAEHATTSRN

SEQ ID NO: 213222 - protein, 380 aa, unidentified
MNRVTLQSNDNAAEGVLYMAMELGDKHWKLVFSDGGAKRRHEIIEAGRRMQLVEAVSKAKANFHLLPEARVVSCYEAGRDGFWLHRYLVSLGIENQVVDSSSIETNRRERRAKTDRLDGVKLLTMLMRYWAGERGLWSVVRVPNVEEEDARRLHRELGSLKKERTRHRNRIRDLLVAQGLRLEPHRDFLKRLETLTLWDGTSLPAELKGELEREYRRLSMVEEQLRALEQTRTERIAHADSHPLRQVVRLMGLRAIGPNCAWLLVMEFFAWRGFRNRRELGACAGLTGTPYDSGGSKRDQGISKAGNARVRTMMVEIAWLWLRHQPNSKLSRWFRERFAGGGARMRRVGIVALARRLLVALWRYLEEGLLPEGAELKAGG

SEQ ID NO: 213223 - protein, 334 aa, unidentified
MDTHADVHVAAALDPIGGLLGVREFPATPAGYGRLLGWLSGFGTVCLVGIEGTGSYGAGLARHVTAAGVRVVEVDRSDRQDRRRQGKSDPLDAVSAARAAQSGRARGAPKGRDGAVEAIRALMVAKRTARSERTQTINQARSLVLTGPDDLRARFASHTAAGLVAGLAALRPRPGDVVGYATRIALRELGRRAEFLDGQLERLDELIIPLVTARAPGLLARYGIGPDTAALLLVAAGDHPERLRSEAAWAHLCATAPIPASSGKRTRHRLNPGGDRQANHALWRIVITRMSSHPPTRAYVERRSKEGLPKKEIIRCLKRYVAREVYPSLRAPGG

SEQ ID NO: 213224 - protein, 306 aa, unidentified
MKTVLSVDVAKNKSMIMLMNSDGEIFIDTKEINHNLEDFEKVKEEIKEINPQNLTVFMESTGTYHLPVERYFKENGFNTLVINSLTTKNNYDTIRKTKTDKKDCYRLAKLFFVNEVEYHDLSKKDLYANLKAMTRQYFYLLQNNVSCKNRYKRLINICFPELEKIFKSTRIYDDTALNFIKEFPYAEIVKEKRIDALYNNLYKTNGRNLNFYKKLATTIKQSGKSINVKGAISKRGNKYARYILFNCSQMVVKLGASNYPEHPVYIYYQNKKAEGKHYYESLTACSTKILRMLYSMCKNNKQFLEN

SEQ ID NO: 213225 - protein, 339 aa, unidentified
MKKVIKQNVGIDVSKKDLAVCLIFLYDDLSKKIKGTRKFGNNETGFKALHEWVEKKKDGDIPVNFTLEPTGVYHENLAYFLNDRKQLVHIVLTKKAKRYAESLGTNSKTDKLDSKALARMGVERELEIWQPGSPVFRKLKMLTRERSSMIKIRVMIKNQLEAINHSAFENKKSINRLRRLIKELNLNIARIEKDIETIVDNNDELKSKVLKVTTIPGVAFLTAITIIAETDGFALIKSIKQIVAYAGLDIKIRESGKWKGKAKISKAGNVHIRKALYFPAYTSISHSKNYKLFYERLLDKKDVSLIAAVAVQRKLLGLIYTLWKNDTVYIENYRKQKAA

SEQ ID NO: 213226 - protein, 470 aa, unidentified
MNQQNIYRNNNQVLKETLSMHKPEQLLYVPIEIGKFNHKAKIVNFFGDIIVNPFDFPNKKHGLDFFTDKLKFATSSTNAQKIFLGCESTGHYHLNLVYHLQQLNLPVEIVNSRDSKKEKPNKDAKTDNIDLNAIARVLISNKGGRQIVPEGIYYNLQRASRTHRKFIQRKSSSQNIITSLVDRVFPGLWDKDNSIFSDKWGKASLLLLQHYPHPHKVIQLGADKLARFFRKNNTKLGDDTANKVIAAAKNSLTKPVSELNMDIFALKAHIQCLNLYNQLIEDLQQEMACLLVQTPGTYLLSVDGISVIFASDFTAEVGDIHRFAYANQIISFAGSCTKVFESSEYQAQGLPISGRGSKFLRTTLNQIALSLNAWSEPFHNYYTKKYFEKPDKHGIARIATGNKFVKLAFALMRHEQLYRPKGILLDEKSYYSNIFDKITRKLSKFDLSNVNPENNFLLKIKKQIEIKEEI

SEQ ID NO: 213227 - protein, 418 aa, unidentified
MTSTYQWFVGIDWGSEIHQVCLLDRDGRVCAERAVAHTTVAVYEALQALQARTGAPAAEIAVGLEISRGVLVETILEQGFRVFALNPKQLDRFRDRFSAAGAKDDRRDARVIGDALRTDARAFRAIRPDDPSLVPLRELSRLLEDLQVDEGRLVNRLREQLYRVHAPWLTLSPAAADPWLWDLLRDTPHPDGWPALARRRIAPILRAHRIRRVTVDAVVTALRQPTLAIAPGVADAVALRLASLIPQLQLVNAQRTATERQIDRLLAQLIQNESVEGQPTEHRDAEILLSLPGVGRVVAAAMLTEASGLLAERDYPTLRTYTGAAPITKRSGKRLFLVRMRYACKARLRQALYHWARTSLQHDHAARAYDAKLRARGHSHGRALRSVGDRWLRILMGMLKTRTLYDCARFAHAGVEPA

SEQ ID NO: 213228 - protein, 350 aa, unidentified
MLIIGCDYHPSFQQIALVNTETGELQERRLGHREEAEQFYRALATVGSKVRVGMEASGHAGWFERLLAELNIELWMGDAAKIAAKRVRKQKTDRRDAQHILTLMVKDDFPKIWVPSWENRDVRQLLWHRHRMVQTRTRIMNQLQAAALNEGLRYKKKLWRESGRQQLESLPLAPWASRRRRDLLEVLDRINPTIAELTRAIEQQAEKCPDAQRLMTHPGVGALTAIAFVLIIGKADRFSCGKQIASYLGLVPEEDSSGERRRLGHISKQGNSLLRFLLVEAAQVTVRSDNRWRNRFFHLAQRRGRKIAKVAMARRLAIRLYWMWRRGWDYVQLESFGSHVGQPGHRHGVK

SEQ ID NO: 213229 - protein, 338 aa, unidentified
MTTKISMLAIDLAKGSFQVCAVRADGAVLYNRVFSRTRLMTLLAEQPTCIVAMEACATSHYWGRVALSHGHDVRLVPAAYVKPFVKRQKNDKVDAEAIAEAAARPTMRFVAVKSAETQGRAVAFRTHQCLVRQRTQLINALRGHLAEFGLVAPKGPASLKVLENALEDQTSDLPSSVREMGAIYVEQIARLSAVIGRLAEELEAASRTDSQLRRLCTIPGIGPVTAGAVAAFAPDLATFDSGRNFAAWLGLVPRQRSTGGKTRLGSVSKMGQTDIRRLLIVGAMSVIRWVVRKGGSANRWLAALVMRKPKMVAAVALANKMARMIWALTTKEQDYRMA

SEQ ID NO: 213230 - protein, 402 aa, unidentified
MNAVGIDVSKGKSMVAIMRPFGEIVSTPFEIKHTSSDINSLVKLIKSIEGESRIVMEHTGRYYEVLAHQLSEANLFVSAINPKLIKDFDNDSLRKVKTDKADSVKIARYALDKWQNLKQYSVMDELRNQLKTMNRQFGFYIKHKTAMKNNLIGILDQTYPGVNTYFDSPARSDGSQKWVDFASTYWHVDCVRKMSINAFIDHYENWCKRKKYNFSKSKAEEIYGKAKELVPVLPKDDITKLIIKQAVDQLNSASITVESLRTLMNETASKLPEYPVVMAMKGVGTSLGPQLMAEIGDVSRFTHKGAITAFAGVDPGVNESGSYEQKSVPTSKRGSSDLRKTLFQVMDVLIKTHPQDDPVYQFLDKKRAQKKPYYVYMTAGANKFLRIYYGRVKEYLASLPES

SEQ ID NO: 213231 - protein, 366 aa, unidentified
MEKGITYVGLDAHKEAINVAMLLPGESRPVEWQASSDAASVRRLVRKVQRSAGGEVRVCYEAGPCGYALQRWIRAMEVVCVVVAPSLIPKRPGERVKTDRRDARKLAELFRAGLLTEVHPPTEADEAVRDLCRAREDAHADLVRGRHRLSKLLLRRGWTWTGGKKMWGQGHRLWLRSLRFERREDQWVLEDYLLAIEHLEERLRGLDAQIEQVSQDPRYASVVSALRCFRGIDTLTAMSLVAELHDFMRFDSARGLMAYLGLVPSEHSSGGKEHRGEITKAGNRHVRRLLIEAAWHYRHRPSTLSLRKRRQGQSPRVVAIADKAMQRLHRRFTRMLERGKPRPKVVVAIARELTGFVWAAMRQHAA

SEQ ID NO: 213232 - protein, 369 aa, unidentified
MADYREAFVAFDVAKIKHAVAVADSGRAGEVRFLGEIENRPVTIERTIRKLAKRYDRLHVCFEAGPTGYGLYRQVRDLGHDCMVVAPALIPKRSGERIKTNRRDAVTLARLHRAGELSAVWVPDIVHEAVRDLVRARQAGAEDLRRKRQQLLSFLLRHGRIYDAGGHWTLAHRRWLARQAFEHQAAQIVFQETSDAIEDAAQRLHRLDEQLAAIVETWSMKPVVEAYQAMRGASFLVAVIFAAEIGDVRRFETPPQLMAFLGLVPGERSTGDTVRRSGLTLAGNRRARRALVEAAWTYRYPARVSEPLRARLEGLPKAVRDIAWKAQVRLCARYRRLAAAGKKPPVIAAAIAREMAAFLWAIGREVATS

SEQ ID NO: 213233 - protein, 454 aa, unidentified
MSKNKKQNQSKVIEIDALAQINLNAAGLDIGDEEIVAAVPKGRDDKSVRSFPTFTADLHRLADWLKDCEIDTVAMESTGSYWIPIYEILESRGFDVYLVNSRHVKNVSGRKTDVIDSQWIQQLHTYGLLAPSFRPPEDICAIRSLVRHREMLIRYRSSHIQHMQKALNLMNLKLTNVLSDITGVTGMKIIRAIVAGEHNPEILASFRNRQCKHTETQIAKSLEGHYKREHLFELKQALELYDIYDQKLAACDHELQDLYNAFDPPDGPGTEPPKPKKQKRRKNQPHFDLSQSLYRMTGVDLTQIDGLDALTVQDILSEIGTDMSAWPTVKHFASWLRLSPNNKVTGGKVIRRGTQPTQNRASTAFRLAAQSLARSDSAIGAFYRRIRARHGAPKAITATAHKLARIVYFMLKNRHPYNDPGASYYEEQYRKRVIRNLHRKAASLGMRLEPVGVS

SEQ ID NO: 213234 - protein, 428 aa, unidentified
MNKVERTRLEEFRQLKKEIRGSEGYLIVGIDIAKDKHNAFFGTATGKTLLKRLVFENTIEGFGRLRARTEAMKVQHCLNKVVYGMEPTANYHKPLAEYLIKCGHHVVLVSGMAVNKNRELLDGRWDKHDTKDSANVADLISQAKCLYYDYPSTRLRDLRNLLSLKRRLKKQEHGTRVRIRNHLLAQYFPEFDRYIGKGCSESLEIVKWCLNPSMIAGMEYDEFVQLVAPRMKTIGQEKRLKSIWGMAIDSIGCEVGHEIDFEAKLMVEDLQQIKDSIRAVEDHIEDICLGFPEYSYLLTIPGFGPDISSKVLGAIGDPFRFDNGKQVLKLAGYDLCAHRSGKTSYSAVPVISKRGKAYLRYALYQAAFIASTSNRHFIIYYTNKLCDREREKGIKTKMKVKLAAKMLIIAWTLMKKKEPFDPEYLNTE

SEQ ID NO: 213235 - protein, 339 aa, unidentified
MELYSAIDLHSNNSHVAIIDDQQNRVFYRKLANDPKVIVNAFAPYQERLRGIAIESTFNWYWLADLLIEKGYAVHLANPCAIQKYSGLKHADDRHDAFWLAQMLALNILPEGYIYPKEGRPLRDLLRKRAHLVRVRTALILSLQNIVLRNHGIKIRSEDLKKLTQDPVAELLKDQEELALAGRASKETIDFLTRQIQRIEAAVRNKALSKESFSRLLTLPGVGDILGMTILLETGPMERFQAVGHYVSYCRKVPSRWTSNEKVKGKGNTKNGNRYLSWAFSEAADHARQSHEASRNFYNRKLNQTNASVAHNALAHKLARAAYFIMRDHVEFKEDKMFR

SEQ ID NO: 213236 - protein, 408 aa, unidentified
MTVVGIDVSKGKSMVAAMKPGGELVAAPYEVRHSDIELSRLALDVLCMEPDTRVVMEATGRYHEPVAALLHSEGIFVSILNPLLIKQSGAGSLRKVKSDPKDALKIAKYGLDNWSTLREYTPTEAIRQQLKLCERQCDLYSKNIVMLTNNLISLSDKTFPGVNELFSSPEKADGHLKWVDFYRTFWHCDCINRMSPDAFGERYKKWCKKKGYHFSADATNALYAASCGLYTTLPRDNNAKLLVTVAADQLIALRENQSKLEAEMLNLCKQLPEYETVMAMYGVGKSTGPHLMAELGDVRRFPHRSSIVAFAGVDPGVVGSGKMQLSSVTTSKRGSPQLRKALFQVVSTYVKCKPENEAVYQFYAKKRDEGKPFFVCTTAAANKFLRIYYARVKECLNAVESATQVEEG

SEQ ID NO: 213237 - protein, 462 aa, unidentified
MKLYLGGDVSKGYADWIILSEKKRTVLENFQLDDTYTGHCKLYSMLETYIEKYPGSEIYAAVESTGGYENNWFNTLQSYQKVFNLKVARINPAGVTFNRKAGMKRNVTDAISALSIAEFMIDHPENIIYDQDDKWKSLCRHWNFVEMQKQQRVQTINQLETILYSANPTLMRFKKGDFPNWLLELIIQCPTADKLARAKPEKLAKIPYLSLARAKELVAEANQNIASATDRNAEILVTQIAIQIKSFDQNIKSQMELIERELICPEIELLKSFKGISTISAIGLLLEIETIERFPTVKGFSCYFGLHPKFKQSGDKVIGVRMSKQGSKNMRKILFNIAKGAITFNPLITEVYERKISHGMAKMSAIGVCMHKILRIIYGILKNKQAYNPLIDKQNCERSKEKQQDKLQQENANIEKNRRYQEFDVTAPISRKQTKKRREHDLSQCVITSQSTGSTCSSETKL

SEQ ID NO: 213238 - protein, 343 aa, unidentified
MELYIGLDVSLKLTSICVVNQSGAIVQEGVVDSDPEAIAAFVRSKAPGTVRIGLETGPTTTWLWTELRRLGLPVICIDARHAKAVLKMQINKSDRNDAAGIARIMQTGWFKEVRVKDLDSHAVKALLVSRALLVKIKRDLENQVRGLLKNLGLVIGRATFNVFTARAEELIKGRSEVVAAVGPLLKARKAIEQQLDDLDHKVLMLARHDAQVRRFMTAPGVGPITALCFKATIDDPARFRRSRSVGAYIGLTTRRHASGELDWSGRISKCGDAMLRMYLFEAAGVLLTRVPKWSALKAWGTRLTKRNGLRKAKVAVARKLAVILHRMWIDGTEFNWSKQEVAA

SEQ ID NO: 213239 - protein, 394 aa, unidentified
MKLVGIDVGKNSHHFCVMDKENGEFNVTPTSFSNNKEGFDFLINSLKPYSKKSILLGMEDTGHYHVALLKFLLSNGYTVALINPKTTDLTRKMEGGITKNDKLDTITICDVLDTPERKKQYRITKVDRFDLYEQRQLTRHHHNLKEELNVYCNRLQKSIDLVFPEFNTLFSSKYGVVYMNLLKTFGSAEAIASTDIRTIRKCFEIKGKGNRISLAPEKLKECAKNSIGISSEVETIQIKHLVSQIMLIKEQIAEIDKKIEEFSITNNSPILSIPGISHFSGTSILAELGDIGNYSKPSQIIKFAGVAPYHYESSQYNAQHTGITKKGSKYLRKTLYQIILPVINNNPLFKKYYRLKISQGKGHRCAQGHCIRKLLRIIYHLLETGQSFDPALLR

SEQ ID NO: 213240 - protein, 413 aa, unidentified
MATTSSPTRFVALDIHRKYLLVGAVDPHQQVVLPPRRFGFEAFSAWATTHLTSSDAVVLEATSNAWLLYDQLEPLVGSVTVAHPLAVKLIAAARVKTDSRDTIKLAHLLAANLVPAVWVPPVPVRELRALVSHRKRLVNQRTQVRNRLHAVLHRHNLTLPPGKPFAAHQQEWWLSLDLSSSEKLRVQQDLSLLHSLEELVEAVEAELGRLSTCEPWVKQVPFLVQLPGLGVLSVMSILAAIGDITRFPSAKKLVGYAGLGASVHDSGETHQGGHITKEGRRDLRGVMVEAAWVAVEHHPHWKVQFERLTKRIGKQKAIVAIARKLLVAVWHVLTEQEADCHADAQAVARKLMNWIAHHGLTPGQHRDRLLLLYQRLDELGVSEELEEIDYYGTTYRLSVRQQLLREAQKRKRS

SEQ ID NO: 213241 - protein, 475 aa, unidentified
MRNIIGKREEVIKLLERQKIRDVNDLESYKLSECHPLSAGIDLGSRELYVALNPAIASRMGISTVHRFSTVTGDLKACRDLLVLCGINTVAMESTSVYWTTIYFVLEDAGIEVFLVNPGKFRMVPGRKTDIADCQWLQTLHLYGLLRGSFHPAPNIAMLRSYMRERDNVIKERSTFIQRMQKALVMMNLLLHNVIDDITGKTGIQIITAILAGERDPKKLAAFRDPNCKKSEEEIARALTGYYKEDQLYLLKLNYQSYCFFDRQISDLDRQIVKLLKQFPRKKEKKEKRPDNGKSKSHGKNDIRTDENVEDVLYRILGTDMSALPGIRSNAILQIISEIGIDMSKFPTANHFASYLGFVPRNKITGGRVISSKTDRIKSSAAQAFRKLVPSISQTKTALGAFYRRLAARIGKAQAIIATCRKLAVLFYNTLALGTSYVEQGELMYQKKQAEWEKRKLENLAKKYNCSIVDNNVKQ

SEQ ID NO: 213242 - protein, 324 aa, unidentified
MTTIAQFDTTLVTVGVDTHLDVHVAVALDQLGRRLGDLEIPTTQDGYDDLADWAESFGEVEAFGIEGTGCYGAGLARVLRARGLLVVEVLRPKRQTRRHKGKSDLIDAEAAARAVLSGEAAGAPKTGDDIAEIIRVLRIQRQTAVKARTQAINSMRALLVTAPIERSLRALARRCQHLDAEVAELDADLDELVRSAAPALVALFGFGTDTAGQLIVTAGDNPDRLRSDAAFSMLCGSSPQPAGSGKTNGRHRLNRGGDRQANAALYRVALVRMRWHQPTRDYVERRTKEGKSKPEIIRCLKRYIARQAYTALTSTQPAEAQAAA

SEQ ID NO: 213243 - protein, 335 aa, unidentified
MRGTKAVIGIDLSKEFFTAYLLSKGEEFAVGPENFSRDKGGLEGLKPWAKGHGFRAEEVLVVMESTSNYWEAVAVGLFEEGFKISVVNPRVIKDFARSLQRKTKTDAIDAEVIALYGVRMKPREWDKGRHEKMLRLRHLERTREFLLKEKGRLRNYLEMLKGSDFAPEEAIKVIEESLDKVDRGIEETEKEIEEEVQAEEEIEEGVRILSSIPGIGLINAVVILSEAKGFDGFSRSREVVSYAGICPRVMESGKRRVEKGITREGNRRLRTAVYFAAVASLRHKDGVFRRYYERLVSSGKSKKAALMALGGKILRISFAMLKKREAFRPELCMAQ

SEQ ID NO: 213244 - protein, 438 aa, unidentified
MGQSWGLPFSSMLEVVMTQEVPLAYAAFIGLDWADQHHAYCLGEVGMDRVEVGLLDAQPEAMAVWLHQLQHRFKGRKIALCLEQSKGALIYQLMSVECIDIYPINPKALANFRKAFTVSNAKDAPTDAQLLWEYVLKHTDRLRVWTPEDVDTRRLALLVEDRRKLLDLRTQLSNKLTATLKGYFPQALSLVGSKVASPMACAFLQRWSSLRALKKSRAQTIRTFYTQHQNRRGTYIEHRLALIRASVPLVEDAAIVEVSALKVKSLSRQVAGLNVDLEEYDRLIASLFAAHPENALFDGLPAAGAVLAPRLLVAMGTNRQRFATAEDVATFSGIAPVTERSGQHTWVHWRLACSKFLRQTFHEYANQSRRKSLWAAAYYEVQRARGKSHHAAVRALAFKWIRIIYRCWKQQEVYDESIYLAGLEKRNSPLIKYMAEAA

SEQ ID NO: 213245 - protein, 409 aa, unidentified
MSHTIAGIDVHKKLLVVVIADEAKPDVPLQSRRFGTGSAELHHLSAWLSQYGVVEAVMESTAQYWKPVWMELEPHLRLHLAQAQSNKAPHGRKSDLADAKRLVRRFVAGELMLSFIPEPEQRAWRMVTRGRLQLIREKVQLQNQIESLLEEGRIKLSSVITDLLGVSGRRILRAMAQGETSPEALAALGDRHLKCGLPALLDALTGSMGDIHCRLLTQHLDRIDLIDRQIEELNKLAATQMQKYQDAVTRLIEIPGIGAEAAQEIIAEIGPEAAAFPSAEQLASWIGVCPGSNESAGENHSGRSAKGNRFLRRLLCQSAQAAARTNGSHLQSVFKRLVVRLGYVKAIWAIAHRICKIVWNVLRKGARFIEFSEARNPKAVQRAINHHLKALRRLGYSIPSVPQPAAAGE

SEQ ID NO: 213246 - protein, 316 aa, unidentified
MDRPPVFVGIDVAKAELVVGLRPAGTTWSVPNHDHGITQLVERLQTVAPELVVLEATGQYGSAVTAALATVGIPVVVVNPRQVRDFAKALGKLAKTDALDALVLAHFADAIRPEVRPLPDASATELAALVARRRQVVVMLVAEKNRKAAAPPRVRAEILAHIAWLEERLSRLDDDLQQLISASPLWRAKDDLLRSAKGVGPTVSLVLLAELPELGRLNRREISALVGLAPLNRDSGQYHGTRTTWGGRSQVRAALYMATLVAVRWNPPIKAVYDRLVAHSKQKMVAIVACMRKLLTVLNSMLSHQTPWQADFRVGS

SEQ ID NO: 213247 - protein, 457 aa, unidentified
MRKKSKRTLGVEEARPFAGMSRVNKDAAGVDIGAVEIVACVSQDESTQIVRAFGNYTVDLQNIGKWLKEHKIKTVAMESTGVYWIPLFEELERQGFECLLISSRSLRRVPGRKSDIIDAQWIQTLHNYGLLESSFRPEGELAALRTLLRHRGQLLEHRAPHVLHMQKALLQMNVQLSQALSDVTGDTGQAIIRAIVAGERDPQKLAALRNRNCKKSVEEIGRALTGTWREEHLFVLKQALELYDFYTKQVESCDMEIERMYALTRPDWEAGKVKPLPPKKKQSHSKNAPEQKEEIRQHLKRICGVDLSVVDGIGVSLAQTIIMEVGTDMNKFPSEKHFCSWLGLAPKHEISGGKVLKNKTLKTKNRAGQAFRMAAQSVKGSDCVFGSRYRRLRARLDNRQATVATAHAIARVVYRMLKHQVEYEELSVEEYEQEYKKQQVKYLKKKAEKFGFQLVPA

SEQ ID NO: 213248 - protein, 319 aa, unidentified
MSSNREIFAGIDVCKPYLDLAFWNDNRSWRFDNDEPGIESLIDLLIEHTVDLVVVEATGGFEKQAALAIGSSPLPVAIVSPRRVKAFARANGRLAKTDRLDAHNLAHFAQVVQPPVRPLPSAAREHLSGLTARRRQVNRMITAEKNRLRNAHPEVQGHLMEHLKWLQKDLKQLDDEIKALVQEDAEFKHKAELLCSVPSIGIVTATTLLADCPELGTLDRKKIAALIGVAPMNKDSGRKIGRRRIVGGRAHIRATLYMAALSASRTNPVLRPFYQRLVNNGKEKKVALTACMRKLLTMLNAMMRDNKSWNPAIPAQIQA

SEQ ID NO: 213249 - protein, 379 aa, unidentified
MSPKTIPTKKEQKAFHQLGNGVQGSALHSATTTVVGIDLGDRKSSYCALDEQGREIGDGTVSTTDHGLRIVFEGKAKLRIAIECGTHSPWVSRLLEQFGHEVIVINPRRLRLIAESNRKNDKADARMLATLAQAAPGLLKRVHHRSERAQLDLATIKARDAAVQARSRMVTAIRGIVKSTGARLAVCSTGAFARKALVGLPASLRDTLSPLLRIIDHLTAEIRSYDRMVEQKIGCEYPEAAPILTIPGVGPLTALTFVLLLDNDPERFHKSRDLGCFFGLQPKQHDSGKFVSQLGITKAGDHLMRKLAVQCSHFMLGRFGRDSALRRWGLSLCLRGGGNAKKRAVVAVARKLLILMHKLWKTQTTFVPFPQATQIPQAA

SEQ ID NO: 213250 - protein, 423 aa, unidentified
MEIMHERVAGLDVHKATIVACARLGTDRKVTRECRTFDTTTDGLLALSAWLVECRCSHVAMEATGVYWMPVWKILGEGDFVLIVANAAHIKNVPGRKTDMNDAMWIADLLACGLIKASFVPEEDMQELRSLLRTRKQLGREQTRHVQRIQKTLAEANIKLDSVLCDIMGASGRRIIEAMIAGVRNPRQLAALASAQIKATPKQLYDALHGRLTDHHRFLLKLHLRQWDGLDATIRDIDQEVEARIARMDKEVKAGAAPFLDLIRLLCTIPGVSTLSARTILSEIGRDMSRFPTAGHLVAWAGLCPGQNESAGKRKSARLRKGAPWLKTMLVQCAWAAKRKKDSYYKAQFFRLQARRGPQKAICAVAASILTAIYHILKDGTEHHDLGADHFNRRSTEGQTKRLVAQLSKLGFEVQLQRTAQAA

SEQ ID NO: 213251 - protein, 482 aa, unidentified
MHPRTTNKLTQTRDVYRFGFESTGALGFDNEYSGLAAEPAHLYCLRRTQTCMSLLFNLPLWRWVMQTELSQFTAIIGIDWADKKHDICIQAAASEQCQVYQVPHKVDELDQWARSLYRQYGGPIAVALELSKGPIVSALQKYDFFVIFPIDPTTLANYRRTFTPSGAKDDPTDAEYALKLLLTHTEHFTALRPQSVEMRKLMTLVEQRRRLMNDRVRITNRLRSTLKQYYPQALEWFDRIDTQLFCDFIKRWPSLVQAKRARKATFEKFFREHNMNRKALLELRMTAIKSALPLTEDEAIILPYRLQATTLVAQLEVALASIKIYDDEIAALAPQHPDYALFDGLPGAGPSLAPRLLVAFGEQRERYGKAAELQKYAGIAPVTERSGQSTWIHWRWQCPTFLRQTFVEWSAQTINKSYWAGLYYYQQRGKGCSHQAAVRALAFKWIRILYRCWITRTPYDEAKYLKALQERGSPLLKMAEAA

SEQ ID NO: 213252 - protein, 357 aa, unidentified
MQEKLYVGVDLHKTQFTICVINEEGDSFESGTKFPMDKEGYIAFADKMKKLSRRHDGATVSIAIESTANARFFRDIMEAKGFEVTVVNTLRFKVVNLSTKKTDKNDAKTLAEFLARDILPKSHLCRPESESLRRVLKSRTLMVQDAVALKNQAHAVMLAYGYITQPAQFQSKSSRTKLLARLPAKVKEVIEIIFETLDLVESQTHVLERRLRRITIDNECVNLLMTIPGIGIVNACTIYAYTDDIDRFESYKNFSAYCGLVPWVQTSNESIYYGKITKRGPQELRTALVQCVVAMVRMPGKTADLGIMKQYHQLKDDKSSGKAIIATARKLSRIIYVMLKTMTPFDSAKLIKDDPKE

SEQ ID NO: 213253 - protein, 337 aa, unidentified
MPKLFVGIDVAKDTSSAQGIDSTGNGKFSLTFTMDSEGFMELWKTIAAHSKDLTEVMAAVESTACYHINLYSFLTAKGVSTVVINPLLIANFSKLSLRKTKTDKKDAMSIAQFLLVHRDTITQLSLSQDLQDFRDIARERESVGNMLTAHKVEIKRLLQSTFPELERIANLSTRVMLEFIAEFPSARLVKMAKPKAIQKALQRKGVESRLTYTAEDLIQAAKQSVATISPAKELILQGKVRTLQHLQQRHEQLTKILTEYCKASMLEDFEIVTSIDGISKGTATTFLAEIGCIGNYGSHKKLIAFAGIDPTVYQSGKFEGASRISKRVTGILDESFG

SEQ ID NO: 213254 - protein, 464 aa, unidentified
MVISTFNHIQGNNGSHWNRLMRGENAHQICIVAIDAAKYVHSAMISNIYGDILTKPFDFSASHLGFQKLIEAIEQVKEGYDFQEIVVGIETTGHYYEDLVRMCTDHHFIVRVINAATTAKERETELNYSKTDSIDLMAITQSILHGRGQTSREAIPLLKQLQTFSRAHRTLINASSKAINHIRLYMDHIFREYQGVMMEVDGKMKKVEVFSTFVSKASLYLMRHYPHPSDILTLGKEGLRQVSIEQNLKLRDINIERLIGFASQSVSKPKEDLRAEIILLGLKLDEYALLSNQIEYLKVEMEQVLLQTDGGILLSIPGVGITTAAELTAEMGDLSKFTRPEQLIKMAGTNPIIKQSGGKQAFTYQISRQGREDFRGALYRAGRSMMLQNPAMQEKYKEMKERGKKPGQMYIALGNRLLRLAYAMMTKKQLYHSTQEDYCLQSVIASKLRNKEKQALFYNRYVLV

SEQ ID NO: 213255 - protein, 362 aa, unidentified
MTKSTTVIAFDQHAATTVAAVLLPADRTPALHELTSDIPTILRFLERMRRGHPVQCCYEAGPCGFELQRALSGRGIRCDLIAPALIPRRSGDRIKTDRRDAAQLAVLYRAGALTAIHIPTEQEEAARDLLRCREDIRADLLRARHRLSKFLLRHGRRFTGTKKAWSKRHDVWLRAQAWPIPALDQTHRAYLRAVDEALARLRSAEEDLRALVTLEPLQARVQRLRCFRGMDDLTALTIAAELGDPRRFASAPRTMAFVGLVPSEHSSGTRQARGAITKTGNAHLRRVLVEAAWHYRHRPFVGAALRRRQRGAPDAIVAQAWTAQDRLYRRYHRLAGRGKPHQQVITAVARELTGFVWAALVQ

SEQ ID NO: 213256 - protein, 363 aa, unidentified
MKKSNSEKRKPGQAPELTIGLDLGDRSSHYCVLDGKGEILLEGEVETRSEALRKRLGVLDRSRLALEAGTHSGWVERLLKEMGHEVMVANPRRIPLVTAHAAKNDKTDARTLARLARVDAQLLKPIQHRGERAQIHLLTVRSRAALVEVRTKLINAARGLTKAMGYRLPAAKADAVSSAILSGLPEALQAPLASLIQQVQSVNEQIRQLDEQMAEIAATHYGAETAKLQQVKGVGPVIALTLVLTLENAERFSSSRAVGCYLGLRPKQRQSGKSDPQLRISKEGDSYLRSLLVQGAHCILGRHGEDCDLRRWGRRLCERGGKNARKRAVIAVARKLAVLLHRLWVGQQAYDPLYNSKRLDAAA

SEQ ID NO: 213257 - protein, 349 aa, unidentified
MVVIGLDAHKRTHTVVAVDGTGRKLGERTVSTSPAGHLELLRWVRRWRERTWALEDCRHLTRRLERDLLAAGERVVRVPPKLMAGTRRSNREPGKSDPIDALSVARAALREPGLPTARLDGLERELRLLVDHREDLVVDRTGHQERLRWFLVELGIAEPPARSLDRAVVLDRLAAELADRTEPVARFARDLLIRIRELTAAVDALEREIRVLASQVAPSLLALTGCGHLTAAKLVGQTAGITRFRSRAAFARHNGTAPVPVWSGNTVRHRLNRGGDRQLNVALHRIAITQLQRPGPGKEYLAKRMAAGDTKTEAIRALRRRLSDEVFRRLTTDEMARAQAATALTAAAA

SEQ ID NO: 213258 - protein, 365 aa, unidentified
MKKIAYVGIDYHLNSLTIAVLIEGETDFYNIMKIPNTDSVILKNMKKLSKHFDIKACYEASFSGYSFQRKMTSWGYHCDVIAPSLVPQKKGDRRKNDSRDAKKLARAYSIGDLSIVHVPTEEEESVRSLIRCRLSFKDLEKASKNQINSLLHTQSIVWPNKKWNAKHLSWLSNIEMPQKHLQTILDEQIGLLRYAQSRLDFLDNEIEDIAKSDIYSPSVKKLRAFKGVGTLTAMILIAEITDFRRFPNARALMAFLGLIPSENSTGDKHRPGAITKTGNSRVRKHIVEAVQHCAKNPKVSSLMKANLSQVDAHSANIAVECMKRLHKKYWHLMLKNKLRQVALTATAREFAGFIWAMMQPDPATA

SEQ ID NO: 213259 - protein, 318 aa, unidentified
MPFAAPAFVGIDVAKAELVIAIRPSGDRWTVANDEVGIRALLKHLHQHATALVVLEATGGYERAVVAALAAARLPVVVANPRQVRDFARATGQLAKTDQIDAETLALFAERVRPEPRALPDEAATALDALLTRRRQVLEMIVAERNRLEHALPAVRRGITQHIHWLERQLHDVDRDLDDAIKASPVWRAKEDLLRSVPGVGPVLSRTLIGALPELGALPRKQIAALVGVAPLARDSGVLRGKRLVWGGRAPVRAALFMAALVGTRCNPVIRAFYHRLRVAGKPKKVALTACMRKLLTILNAMVRTNTTWRYVPPSQTT

SEQ ID NO: 213260 - protein, 348 aa, unidentified
MYPFYLGIDLHNKKTYAVLIDKAGAVIDEREFSNDETTKYLEEVVPSETYAVLEATRNWPFMYDLLSEHVKRVELAHPKELKAISSAAVKTDRIDAKVLAQLARLNYLPTAYAAPPETRDLRLYVRHREILVQERTQSKNRIHAVLAGYNLRSPVTDLFGSAGREWLQGVLDGELLRFVARRVIEDHLSIIDHLDRHIEALSKDLKFTPEQKKAVKLLKTIPGVGQIIATTIVAEIGDIQRFHSPKALCNWVGLTPRIRSSGGYTRHGRISKEGSPILRGAMTRAASVASRRSKRWYLVHEKLVKRCGKKGAKVAIARRLLTIAYYMLKRNQPYQENYDQQVPVARGA

SEQ ID NO: 213261 - protein, 358 aa, unidentified
MNYIGCDCHISSMDCAVVNERGQETKKQKVNTGVKGLMEFVRSIPKPRTIIIEEGPLAGWLLEICTAYGEKLIITDPKRNRWIGRAGQKNDTIDANKLAHLARGGYIKEIHHPIGHRRRFRELVLSYHDTVKSQTRIKNKLKAKFRQNGIRCSGETVYSTKHRKEWKKKLPKDKVVQVIVEGLWQQLDQVHEVQEELLNHIRKQGRQYSEIKRFKKIPGIGTVHAATISAIVENPHRFAHKKKLWMYAGLGLAEKASGEKVYSRGLTRDYNRLLKNALKQATEAAIIARDNQFRRQYLRLTIEKGIPSHRAKLTVARSILATVYGIWKSGEDYDPNIDKRRTESNKTQVRVYHLVRSG

SEQ ID NO: 213262 - protein, 385 aa, unidentified
MDVHSSNFTLCSFEPGYGVTEDKIFGQVQFKEDFINNTEKYISNLKKQRKDIEVVCGYEAGCLGYVPQRDLAKKGIKCIILAPTTMAVQKGGKKVKNDYRDSIDIARCLANGSYRPVYIPDTEDEDVRDYIRMRDDHNIALKHIKQQLTAFCLRHGFKFEGKSKWTQKHFKWIKELTCTEKQREIINEYLATFESLNNKIDALDVRIEDFSKQERYAETVKKLTCIKGIKTHTALSFTTEVSDFNRFESAEKFASYIGLTPGEKSSGDNERKTKITKAGNRHLRRLAVEAAWTYMRGNIGIKSAELKKRQKDMPSNVITYADKASRRCQRKYYRLTKMGKESNKAITAVARELCCFIWGMATSHFDSSDAGTIKCDSELSMSSLD

SEQ ID NO: 213263 - protein, 301 aa, unidentified
MFTERTSVGLDVHARSVAAAAIDSVTGEVFQTRLTPSYEHIRSWISGLSGPVAVAYEAGPTGLGLHRALTDAGVRCEVVAPSKLQKPSGDRVKTDARDALHLSRLLRLDEITAVSIPSVTQEAARDLVRAREDCRGDLMTARHRLSKLLLRHGIVYHGGAAWTGAHDRWLRTEAAPRLRAPATRLAFDADYDHVLTMQARRGRLDSAIEDVAADCEFTPIVRRVSCLRGVSTLTGSALAAEIGDWNRFTGHTIGSFVGLVPSEYSSGSSRVQGTITKTGNTHVRRLLVEAAWHHPGITWVR

SEQ ID NO: 213264 - protein, 324 aa, unidentified
MTNSDPTVVAGIDVSKAFLDIAVLNASLRPTRFANTAEGQAELAQALSSIGCALAVMEPTGGYEAGVASVLQLQEVRVAVINARRVRSFAQAMGYLAKTDKVDAKALAEFAAVLIRKPDVQKFLAPVKDISRKELEALVTRRSQLLVMRTAERNRLELAPDYVRPSIHAMLNAIQKLLDENDRELQGRINEHFEELDRMLQSVPGIGPVASRILIGALPELGHLDRRAISALVGVAPMAKDSGNSQGKRRIQGGRAPIRKVLYMATLTATTYNPVIRAFYQRLKAAGKPTKAVLVACMRKLLVILNAMVRTNTPWQGVPTAVFA

SEQ ID NO: 213265 - protein, 355 aa, unidentified
MTHRTYQPRNYEAFLGLDVDKNSFSFTVTDHFQTKRSKKMPSNPEHLYNYIHKHFDLNKIICAYEAGPTGYHLFDYLNKNGVKCFITSPASIPKASSDRVKNNRLDSIKITDYLMSAKFKSIRVPQGDYRELRDLVKIRENYARDRKTAKQRIKALLLFANLYPILKDSDIKWSRNYIKELIQLDCPFSTRQRLDMLLDDLEYARKKMLTIHRTLKSFCKEHGEINQYMHYLQSIPGIGFVVAVSILGKIGDPKQLQNPRELAGFIGLSPSEKSTGDSVNRGSITHLGDKTLRFMLVQASWAAIRKDTQLEQFYNRVRNKNNPRYASKIAITAVARKLTQIIYRILKDKRNYLQH

SEQ ID NO: 213266 - protein, 389 aa, unidentified
MPLDHHSEEPTAIRTNLGAIFVSLELSRSTWLITSLSPGGGEKMSKHSVSAGDIAALLSRFSELRQKAFARRGQSFPIIVIQEAGLDGFWIHRVLQSEGIESYVVDAASIATSRRRRRAKTDRIDGEALVRALLAYKRGEPRVCAMVRAPTPEDEDRRRLCRERKTLTVERVQHVNRIKGLLFCQGVSGYEPLRRNRRQRLDELKTGDGRPLPPHLKGQIGRELDRLELLLGQIKAVEAERDALLTPATETEGMPAPQAMLIDLRGIGAEFAAVVWSEGLCRSFANRRQVAAYGGLAPTPWQSGSVAREQGVSKAGNPRLRTTMIQLAWLWLRHQPNSALAQWFQERVKRNGRLRKTTIVALARKLLVALWKYVTAGVVVEGAVMKAVS

SEQ ID NO: 213267 - protein, 428 aa, unidentified
MNVEDNIRREQFCQIVKEIRGSHEYLIVGIDVGKDKHHAFMGTATGKSLLRRLVFENNTDGFSKLLTQAEAVKVRNGLSKIVFGLEPTGNYHKPLGRHLIRCGHNVVLVAGSAVKHNRHLLDGRWDKNDTKDAANVADLVSRGKCLYYDLPSSKIDELRDLLSLRRRLKKEEHSLKMRIRNSLLAKFFPELDRFYSACETETLAIVKWCLDPNKIAGMEFDDFFVVVTRTKRGTAQKLRLRKIHRLAVESVGCPMGQAAEFEAKLLVEKLKQVRQEIEETKEFIQDVSIDFAEYSWLLTIPGFGPYVSARVLASIADPRRFDRDKQLLRLSGYDLCASRSGKDSAKAIPVISKNGNAELRYALYQAAHVASTQNRYFIIYLNKLLRGRERERGIKTKMKVKLAAKMLVIAWTLMKKQEPFNTAFLNID

SEQ ID NO: 213268 - protein, 349 aa, unidentified
MLADEVDYVIGVDTHRDHHTLAVIVAPAGAVLAQTVVDANTRGYGASLRFVDKHAPGVRAWAVEGAGHYGAGLARYLAERDETVLEVGRQSRSERRLRGKDDPLDAIRAARAGLAAEAVTLPRSGERQEALRLLLLARRSAVDVRRVALVQLRSVIVTAPEHLREDLRRLPLTQLIRRCSRFRRSHSRTPDELALVLALRSLARRIEAATAEADELEREIIGHVRALVPELLNESGVGPIVAAQLIVSWSHRDRVRSEAAFARLAGVAPLPASSGQTIRHRLSRGGDRQLNRALHTVVLHRRQHHAATRDYIARRAAEGKTSREATRILKRYLARHLYRLMQNATPLTT

SEQ ID NO: 213269 - protein, 438 aa, unidentified
MSNKVFFNLDDLFISVGIDVGADFSWMSIALPNQQFVGKPYKILHNSIDSLTTAVSKIKEAEELYSLESRIFLESTGIYHYPLFCYLRDKGFNCSVINPIITKNSTNINIRKVHNDRFDSKKAALVGLKPDLKVSLMPSDLALNCRNLCREYYDLMDSRNAYVNKLIDELRMVFPQYLGIFSKVTIDTSLILLETYTSPSAFINADKQEIIDLIRSTARFGLTYACNKYNAIIQAANDADEFGYILDSNIKRIRLYIGFIRKYDEEINSILESMHELAAANEDTDFVKQIRLIETFKGAGFLSAMSLMGEIGDFSAFSKPKQLFAYFGLDPAVKQSGKFEGTKIQMSKRGSAIARRVIHTLTLQSISASRTGESKNPVLLDYYLKKCESKPKLVAMGAVSHKVCNMIFAILRDSKPFEIITPQEHIKKYNAAKCDVAA

SEQ ID NO: 213270 - protein, 428 aa, unidentified
MKYNKQNEKIEMITEDFLIVAIDVGSTTHYARAFDYRGIEYSKKAFSFKNTDQGFKTFKSWACAIAVQNKKKIFLVGMEPTGHYWFNLGKFVQNSGMILAHVNPAAVKKSKELDDNDPSKNDRKDPKVIAGLLKDGRYSFPYMPEGVYAKIRDISYLRDDAQKSLIRIKNRLARWLSIYFPEYKEVYGQIDAKTGMLILEEYPLPKDLVTLGVEGVIKIWKSHKARGAGQRRAEKLVNAAKRSVGRTESDEIARIELKVLLKDLKEYQQRVQVYENLAFEALLEVPNAEKLLNICGVGVVSVMRFVAEVGDISRFNNAKEIQKLAGLSIKTNSSGKHEGVGKITYRGRKRLRYGMYELAISLVSRNKAFKSIHQYFTTRQNNPLKGMQSMVAISCKVIRIFFGILVNGYEFDENKMLQDIVRPEATIA

SEQ ID NO: 213271 - protein, 361 aa, unidentified
MRIIGVDLHTRQQTLAMLDTTTGEVVEKTLMHEANNVRNFYSPLSRPVCVGIEATGSMQWFVNLMEELGIECQVGHPAEIRAAEPRKQKHDRRDADLILKLLLENRFPSIWLPSKELRDLRALLLHRHQWVRMRTRVQNALQAIALANGLRQGASLWSQAGQHTIASLPLAPHTAHRRTELQALYVKFEAEIEKLNQRVEEQAWERPGALLLMTHPGVGPVTALATDVFLGDPTRFADGKTLASYVGMIPSEYSSGGRQRLGGLSKQGHPLLRFLWCEAAMHAVRRDPQLQRFYRRKLIQKGLGKARVAAARKLGIRLWIMLRDQIDYNEFCRRGQMRHKNGGACAGMPDTAHGAKQSPTE

SEQ ID NO: 213272 - protein, 350 aa, unidentified
MTLYVALDVSLEKTAVCVMDAEGTPLVERAVASEAAALAELLTSLSERPERIGLEAGPLSEWLVRGLADAGFEAVLMETRQVRAALSSMTVKTDRNDARGMAHLLRMGWFRPVHVKSMDAREQRVLLSARTTLVRRLRDIENSVRGLLRGFGFRFPRVLRVRWAQSVREALSGNPVLLAVIDPLLAAGTALRDQLAVLEKRVRDAARQDPVCHRLMTMPGVGAVVALTFRAAVDRPERFSSSKAIGPCFGLTPRRYQSGETDRTGTISRAGDPAVRVALFEAAHVLMTRVATWSKLKAWAVAVAKRRGAKRAKVALARKIGVVLHRMWIDGTDFRFTDKNDRADQMTATA

SEQ ID NO: 213273 - protein, 405 aa, unidentified
MDIIIRRGCGIDVHKKTIAACIMGTGIKKEIRTYGTMTNDLLRLKGWLKENNVTHVAMESTGVYWKPVFNILEDSFDVILANARHIKNVPGRKTDVKDSEWLCKLLRSGLVRGSFIPPIEIRELRDLTRYKRKLIQNITSEKQRIEKVLEDANIKLSSIVADTFGVSGSEIITELMKGELNAEEMAELSKGRLRRRKEELKEALVGKMRENHRVMIKASQRHIDAMEKELSAIEEKIQEKIERHFRMEYELLKTIPGVKENASAIIAEIGVNMDIFPTEMHLSSWAGMSPGNNESAGKKKSGITTHGNKFLKSILTEFAWVAVKMKNTYMSAKYRSLVARRGQKKALVAVGHKMLIMCYHILKHKVPYKELGGNYLDERRRNRITKSYIKRLNSLGYTVTLKEAA

SEQ ID NO: 213274 - protein, 421 aa, unidentified
MNDSEPWQQHRAFGALDWASEKHYVIVVDQAGKVIEDFEIEHSALGWKKFREKLQPYGSIPFAIETSQGAAVEQLLEAGMIVYPLNPKSAQAYRERKAPSGVKDDRLDAWSFADALRVDGQDWKALRPEEPLIKELRLLCRDEVGLIEQRTAFIQQLRHALAEYYLAALEAFEDWTSVWAWIFLQRFPTPQALAQAGKRRWQKFLHSRRLWGSDQGPRRMEIFAHASEFAASPPTIQAKSLLALSLVQMLFAIEKQLAIYRQRIEELFARHPDHDLFGSLPGAGPKIAPRLLSEIGDDRQRFGAEAQALQCLGGTAPVTKRSGKGRKYWHVHQRWACDKHLRHAIYLFAEQSLSRCVWADIYYQHHRQKNHSHANAIRRLGHRWLKIIYKMSMDRTPYDPELHHCNQLQHGSWIFQLKECQ

SEQ ID NO: 213275 - protein, 347 aa, unidentified
MDHIGIDVHKKESQICILTEEGELIERRVRTEPQRFAAVLGDRPRARILIEASTDSEWVARCLEGLGQEVIVADPNFAPLDATRTRKVKTDRRDARALAEACLLGAYRPAHRLSDPQRHVRGRLLVRDAVVRTRTRYISLIRALLRQQGYRVPSGSAEAFERRVSAMMLPGRLLSTIAPLLAIMRPLNAQLAYSDAVIEQVTAADERVQRLRTVPSIGPVTAAAFVATIDDVRRFRRAHQVEAYLGLVPRELSSGETQRRGHITKAGHARTRWLLIQAAVSILRRRPPQAEALRTWALHIAARRGKHVAVVALARRLAGILYALLRDGSVFAPRRSPRPEAAATVAA

SEQ ID NO: 213276 - protein, 435 aa, unidentified
MTETRLQVGIDFSTRWVDVCLLNPENDNPVAQQRFPNSLPGYAGVKQLLLETLETHSYGGCAISGEATGMYWLPFFLHLAADADLQAYDAELYLLNPRWVSWYKKCFAQDHKTDPRDAYYIAHRTRTQPPSMSWQPDSDGLALRSYTRYRFHLVETLTREKCFASAYLFLKANLYRQLKPFSNVFGVTSRTLLSDSATFADLTALPVAELAAQLDALSQGKLPEPLRNAQRLQQVAQESFPLDAPLAEAVQHILSATLEHITCLATQITQAEAWIASALTQYPTMQQLQTIPGFGRTCAAGIGAEIGALDRFLSGTKWDARRHHDRPKNLRDAEDAIAKMAGLWWPRAQSGEFEAEERRMPKSGNDYLRYYLIQGADHLRKCVPEYRRFYARKYAEATKHKHKRALVLTARKSIGLIVGLLHRNEPYRSEEARQT

SEQ ID NO: 213277 - protein, 368 aa, unidentified
MFTETTSLGLDVHARSIVAAAIDGVTGEMIERRFANDPVSICEFAAELSKVHGPLRVIYEAGPTGFELARTLQDAGFHVLVAAPSKLLRPVGDRVKTDREDAQLLARLDRAGDIVEVRIPTRSEESARDLVRARDDARRDLMASRHRLGKLLLRHGYAFPGKTTWGPTHDAWLREIRRDALPAHGAGSVAAFDDGYDAVQHALARRDRLGKAILELAEASELPETTHRLACLRGISTLTGFALAVEIGDWDRFTGSTIAAYLGLVPSEHSSGQSRAQGGITRTGNSHARRLLIESAWQHKPGYFPGPAIRKRWQQAPATIAERADLGNRRLHRRWDVLTKHRKRHTVANTAIARELAGWCWSLATMEA

SEQ ID NO: 213278 - protein, 451 aa, unidentified
MPSRQRTVRLTHRALERAKVISDAEVAEFIMASGHIRIQRFHEGFQRAALQAVLLANNPGGAMMTQTPAAIPQPAALDYDGTLVLAIELSDTSWVLAAQVPGLPRVKAKRSIEPTAEALMTAIDIYRDRARDAGRMVERVIAVYEAGWSGFWLARWLERRGIEIHVIQPSSVPVDRRARRAKSDGIDAELLLRTLLAWLRGEPRVCSMVPIPAEADEDARRFIRERSELVAERVSLVNRIGAVLATLGIRDYNPLLRNRRRCLEELRTALGTTLPPHAQAKISRMLDRLELVQAQVTELDRERDAVLEEERPDKAAAMIQQLAKLRGIGVQSATVLVREAFVREFPNAKALGSYAGLTATPYSSGGAEREQGVSKAGNRRLRTVMVELAWLWHRYQPGSIQVSWFRQRAGEAGRRARKVMVVAMARKLLIALWRFATQGIVPEGAVLKPGL

SEQ ID NO: 213279 - protein, 456 aa, unidentified
MAKKGKQHTPTPEDMPLIHPHAAGIDVGAEEHWVCVPADRDAQPIQKFSAFTCDLHRLADWLKACGITTVAMESTGVYWIPLFQILETRGFEVALVNARHVKNVPGRPKTDRFDCRWLQKLHSYGLLAPSFRPPEDVCRLRSLLRHRDNLVHLSVKHIQHMQKSLDQMNLHLHHVISDVTGVTGMRIIRAIVAGERDPRTLATFRDYRIKSSEDTIAKALEGDYRPEHIFTLTQSLALYDFTQQQIAACDQEIERVLDTFASLIDPETHPLPPPTTAHRQPQRNEPAFDLRTHLYRITGVDLTQVPGLQALTIHTVLSEIGLDMSKWPTDKHFASWLGLCPDNQISGGKVLSTGSRRVQNRASRALRMAAQSLRTSPSYLGAFYRRLRSKLGPAKATTATAHKLAKIIYHMLQEKTPYRTQSAEAYLQKDQARRLRQLRKQATQLGFDLIPQASNA

SEQ ID NO: 213280 - protein, 369 aa, unidentified
MSQPTQFLGIDLHKREAVIAVLPAGAGACESITKLPNEEAPMRRFLRRVAKRGPIQACYEASGCGYVLQRRMKAWGHSCEVIAPSLAPTRPGDRVKTDRRDAARLAIDLRAGLLTPVHIPTEDEERVRGLLRSRGHLLQDVHRTKQFVLKFLDRKHLKYAGKNWSGAFWRWLRGLSFEAEDRFVFESHVGLLEVKETLLKETNVEIERVSQTGPYRKNVGMLRCFRGVDTLTAMTLLAELIDARRFRGPRALMDYVGLAVSEYSSGPRHRRGGITKAGNSHVRRILIEAAWHYRHRPALGIGLRKRQAGQPAAVIAHAWCAQRRLHRRFHRLAERMIKQKAVTAVARELVGFLWAVLQEDTRYMSPRAA

SEQ ID NO: 213281 - protein, 371 aa, unidentified
MDAREAYVALDVAKLKNAVAIAEGGRSGEVRYLGEVASTEAATRKLVAKLSEKYERLTFCYEAGPTGYGLYRLIKSLGHDCLLVAPSLIPTRPGDRVKTNRRDAEIMAKLLRADELTAVWVPDERHEAMRELTRARDVSQKDLRVKRQQISGFLLRIGDHYPGKKTWGKAHLNWLSCRKLDHVEQRFAFEELLLGMRQASERSGRIEQAIRDALPDWSLASSVEALQALRGIGLITAVGFLAETGDLSRFEHPRRLMAWLGLVPSESSTGDRVRRGAITKAGNTRARRFLIESAWSYRFPARVSKEKQVQVEAAPGPAREIAWKAQTRLCGRFRTLTRKGKRSTVVATAIARELSAFIWAINREVVTQSQS

SEQ ID NO: 213282 - protein, 352 aa, unidentified
MSKQVTTDSPKLFIGLDIHKKSWRFHFTTDLFSGSGHTFPPGSNLIQSYVLKNYTGYEVSIAYEVGCFGYMPARDFESFGWDTFVVNPADIPRPSKSKFMKTDKIDAKNIAQQLKSGNLKKITIPEPVRESLRALTRQRTALVRDYRRIKTRIKSLLMYYHIAIPEGMDSPKWAKRFLDWLTELDLEYVNTKRTLKSMLRQYHYIDQEIKELSNDIRKYCKQHHKKDYMLLRSVPGIAGLTAAYILSELGNLRRFTSFKRLASYVGFIPSMQQSGEGLYTGGSTPRANRHVRNMIVEASWQAVRKDPVMQNYFRSHAGKNSKAAIFKVGRKLLSKIHAVIRTEIPYSVGVLS

SEQ ID NO: 213283 - protein, 453 aa, unidentified
MPTCGVRALLLVKESGNLPHSGEAADKLDEDGPCAIPRISSRRLRSRVRKQEPAAEQKGDPMIYAGVDIAKADHVIGAVDETGAEAAKPMAFKNSEAGFERCIAWLESVAQTEDDVFVGMEATGHYWMACFAHLTAAGYRVCVVNPMQVHAMRRLKGLSGVKNDRIDSLLIAETLRQGDYDQTRLATDEVQALKQLTRYHQGLKRELATVKTQAICVLDAYFPEYSGLFSDMFGAASLKVLSECPTPSEAARKRASSIAKMLSEGSHGRLGAERAARIKAAARSSVGIRLGEDAASFQIKTMVSQIEFLNATIAKVEREVGMLLERIEPNITTIPGVSTTTGAQIVAEVGDVKRFKNAASIVKYAGLNSGVDESGKFSAEGVPITKQGSPYLRRSLWLAANRARQFDPRLKAFYDKKRREGKPHRVAVTAVARKLCHVVYAVMRDGEPYDPGK

SEQ ID NO: 213284 - protein, 393 aa, unidentified
MKGFCISLDVSKGSSFYQGFKGFDEPITKPKKIEHNLEGFKELLKLKETIRKEYNEDCIVVFESTGVYHRSLQTYLDEHNFKYTIISPLLSAKVRKSDIRGTKTDAKDCESIAKVFYLKELRIYSKIDEIYDDLKEKSRYYDFLMDEMKRWKIEFRRLLDIIYPGFDRVYDDLYGDFIQAFLLEYSHPEIIRKRRLDTIAKFLEKHTCHKEAYCIRQAQTLKEYAENCASGCSSKSYLVRQFDTVIHNLNAQIKHLEIVLEEIVELAKALPNYDSIRSIPGIGNNLAARILAEIGDVNRFNNASQLVAYAGIDPQIYQSGQISGLHLKISKKGNKKLRCLLYLAVKTSRNTVIVDFYKKKKADGLASKSALVASMNKLVRIIYSLCKNGCLFK

SEQ ID NO: 213285 - protein, 481 aa, unidentified
MAKRKLSTFDRLHADQLNRKQRKQLQQRLRSADPGLQIVHPDAAAIDAGSRSHFVAVPPGRDDLPVREFGAWTADLHRLTAWLLSCHIRTVVMQSTGVYWIALQEVLEHAGLEVYLVNARGTKNLPGRKSDVQECQWLRKLHTYGLLRNSFRPPEQIRAIRTLWRHRDRLVHDAGRAIQQMQKALISMNIQLANAISDISGVSGLAILRAILKGERDPQRLAQLRDRRIQASEEEVAASLQGHWREDVLFELGQVMEAYDFYQKQMATCDRRLQEYLAALPERERQSAAPDQEPTQGSGKKKRRRSQPRRKNQPTFPLQAELDRVFGVDLTRIDGIHVITAQVILSELGTDLSAFPSEAHFASWLELAPRRDITGGKVIQQKSRESKNRVANALRMAAESLSRSDSYLGARYRRLRARMEGTKAVKAMARYLACLVHRLLTKGQEYVDRGAAYFEAKRTERDMLSLKRKAAQMGMQLVPAS

SEQ ID NO: 213286 - protein, 412 aa, unidentified
MDVLHERCAGIDISKADVKVTIRVPGTGKRRRKETRTFSTMTRDLLVMRDWLLSEGVTLVGMEATGIYWKPIFYLLEHDVECWLLNARHMKAVPGRKTDVKDAEWIAELMEHGLVRPSFVPPEPIRQLRDLTRYRTEVVRERTREAQRLEKLLEDAGIKLSSVVSDILGVSGRAMLEALVSGLRDPQVLAEMARGSMRGKRAVLVEALTGRFGDHHAFLARAMLDRIDACTATEARLTERIEEQVAPFRRQLDLLATIPGVSPRTAPVILAETGADMGRFGSAERLASWAGVCPGNHESAGRQPTGKTRHGNPWLKAVLGQTAVSAARTKNTYLAARYRRLAARRGKKRALVALEHSVLIAMWHMLAHDVEYADLGGQYFLERTGRARQTRRLVSQLNQLGYQVTLQTVEAA

SEQ ID NO: 213287 - protein, 347 aa, unidentified
MQITTVGIDLAKSVFQVHGTDAHGKTVLRKQLKRDQMACFFVNLPPCLIGMEACGGAHHWARKLQSMGHTVRLMAPQFVKPYVKTNKNDAADAEAICEAVGRPNMRFVPIKNIEQQAVLSLHRVRQGFVKARTAQANQIRGLLAEFGLIVPQGIGHIAARVPQLIEDGANDLPGSFRLLIERLLEQMKLLHRQVLELELQIRKWHRSNPHSVRLAKVGGIGPLSASAMVASVGQADYFRNGRQFAAWIGLVPRQHSTGGKSNLLGISKRGDSYLRTLLIHGARSVLGHADRHPEQTVWVRAVATRRNSNVATVALANKNARIAWALLAHGRDYEEGYSPSRTAAQPA

SEQ ID NO: 213288 - protein, 440 aa, unidentified
MLQALPMLDPLAAFVDVGSEHMHVSVGGNRPAVFGTVTSQLHALRDWLLAQGVHSVAMEATGVYWLPLYGVLESAGLDVRMVNGRQTRNLPGRKTDMADSQWGATLHMHGLLRAGFVPPADIRRLQDYLRLRADHVAAAATCVQLMQKAFERMNIKLHDVISSLAGVSGLAVARAIVAGERSPEALVALCDVQIRRKKAQAVIEALRGSWADEHIFALAQALQSWDHYQKLIAECDARIATVLPPHDDTQPPLPRTTRQSSVNAPDIARLREILAQMCGGRDLTKLPALSSYGVLQLIGEVGTDLSAWPTEKHFTAWTGLAPGSHASGKRRKGVRRGRNRTGRLFCLMAQSLIRSRDIALGGFYRRLAARRGGLVATKALARKLAAWFWRVMVKGDDYVEQGLARYEEQVRQSKERALKRLARELGRELVPLSAVDHATA

SEQ ID NO: 213289 - protein, 389 aa, unidentified
MIYVGIDIAKLDHYASAIDSDGVVLIEPFKFRNDADGFHTLSSKLDSLPAGDKVIIGLESTAHYGNNLVRYLVCRSYDVCILNPIQTATLRKNNIRKTKTDKVDTFVICKALAMQQSHRFVSFDDLDLMDLKSLGRFRQKAIKQRSRLKIQLNASIDQTFPELQYFFKSGLHQKGVYALLKEAPTAKDVASMHLTHLAHILEVASHGHFKKEQAKELRVLARNSVGYPDSAIAIQIVHAVEQIELLDSQIAHVEAEMTDIMKVRDSVIMTIPGIGYINGGMILGEIGDIHRFSSPKQLLAFAGLDPTVYQSGQFQAKKTKMSKRGSKVLRYALVNAAHNVVKNNVTFAAYYDAKMAQGRTHYNALGHCAGKLVRVIFKMLTDNKEFALD

SEQ ID NO: 213290 - protein, 395 aa, unidentified
MEQYVGLDVSQKETAICVIDGEGNRVWQGTCRSTPDAIAEVVRTKAPLAVKVAMETGPLAVWHWHALKAAGIPIVCIHARHAKAALSMQINKTDSNDAFGLAQIVRAGWYRPVDVKSMESYKLRLLVTARTRVVSMRTGLYSQIRGLLKTFGVMLAPGKGTSFEQLVLRGIPNDHLVQEVVESLLSTWRHLSTQLKKLNREIERTARAIPVCRRLMTVPGVGSLTAVAYATTVDEPSRFRRSKDLGPYLGLTARKYQSGEVDRTGSISKCGDRTTRSLLFEAAGVLLFRNRQPSALKEWGLNLSRRAGTRKARVAVARKLAVLLHRLWTNGVSSRPTAPFEGLKHDGFPCSVSRMKHHRLVPTGDVARSHPATRLAAAAGRANHIGRLRRHLATC

SEQ ID NO: 213291 - protein, 353 aa, unidentified
MKSDKYMGMDVHQAMTVVAVLDADGKVVMETMVPTEAAAIIRLVQSLSGPLRVTFEETTQAAWLYEVIRAYVTEVIVCDPRRNKLLEEGSKADKVDARKLADLLRTGMLRSVYHGHEATRQLKELVRAYETLSIDTVRTMARIKAIYRGRGIRTPGRGVYQPKQREQWLQTLTEPGIRQRAAWLYEQLDHLQPLRRKAKQTMLIESRAHRAVSLLRTIPQLGPVRAAFIVATVDTPHRFRTKRQFWSYVGLAVVTHMSSEYEMKAGRVVRCRKPISTRGLNQNCNRRLKEVFIGAATSASNRKAYGSFLNERQKKGMRPEMARLTLARKIAATALAVWKKGEAFDPKKLNVMT

SEQ ID NO: 213292 - protein, 343 aa, unidentified
MQHASVPIAVGIDVAKATLSVCFRSREGAEIALTFRNIEADINKKLITNLHGFTGRIVLEATSYYHWLVTLLLADAGYHVYVVNPLLAKQYTTGNIRKVKTDPADAASLARMAAIADNLPPVFQETRETLAIKRKLSCIARLTNQIQSLGGMLTQLKESHDILGIPLSKGEKALYKTLQTLRKQKKILEQETIQGSQPIAVTHLDTIPGITPFVAKACFTYFSYRPDQTVKSWIGFAGLDVSSRESGVWKGRCKLTKRGNNFLRHRLFSAAWGAVMTNADFKSYYTTLRLQGRSHVESLLIVARRIVRIMFKIVEQNRSYDPSRMAPSKKETIPATLSTAITC

SEQ ID NO: 213293 - protein, 467 aa, unidentified
MKNKAFLGIDVSKGYADFLLLDQDKQILEDPFQLNDNKAGRLKLSHIIDHWFSLGLKELFCGVESTGGYENNWFSHLQNLTVEQNIKVARLNPKGVKSVSEAALKRTITDAVSAENIAVYLIAFPEKIIYRDKPVEFDNTFKEARQTLTFRHMLTKQRVQLNNQLEKLLYQYFSETLVYCRNVMPNWLLEMLVKYPSAKQVSRASEKMLVRIKGISMNKAQAILRKVQPSTQSVSDQIKHLISETAREILHKKELIENEDRIITRRYEQHDQVKLLSTIKGIGPSTAIRILLEIEDIKRFASAKQLCSFFGVHPTFKQSGDGTWGSRMSKKGRPDIRAALYMSCLSAIRTDENTKQLYARFRAKGMNHYQAMGVVMHKRLRIIYGVLKKQTHYDPRIDLQNIESANQKKEEAEAKIQELNLHKRRRAERYSEGGIDAPISRIAAQKRKKQEASQSLLTKENTGLPPA

SEQ ID NO: 213294 - protein, 413 aa, unidentified
MQVVYERCCGIDVHKQTVVACVIITEAMGQLRKETRTFATLTEDLEALAGWLATQSVTHVAMESTGVYWKPVFNILDGRFEVLVVNAEHLKKLAGRKTDVQDAEWIADLLRHGLLRGSFIPSALLRELRDLTRYRTKLTDARKSEINRLQKVLEDANLKLASVASDVMGVTGRAILNELVQGHADPTTLAALAKGRLRQKRDLLEKALTGRLQPHHRFLLAQHLSHIDFLDEAIAQLDAQIEEQLRPFQATLDRWDSLPGINRRLAEIIVAEIGIDLKPFEDAEHLASWAGMCPGNNESGGKRKSGKTRKGSKWLRRALTEAAHGAARTKNKYYQSLYRRLAARRGKQRAAVAVGHSLLVTGYHLITRNQTYQDLGANYFDERDREGVKRRALQRLEQLGFQVQLTPVMALAV

SEQ ID NO: 213295 - protein, 446 aa, unidentified
MQSPKPVSSIGTHHVSTTLQEDLNASITITGVLRRQLSHHAHRGRVALDEPHNTTSIEQRTSARTLVGHRRAGAPTIYGMVRPGFSGVYNSVVQSTTRERPSMEIKTVGIDIGKTWFHLVGCNQAGRPVAKHKLNRGKLAQFIAKLPICLIAMEACPGSQHLARMFQRHGHDVRLIAPKFIKPYLKGQKNDFNDAAAIAEAVTRPTMRFVTIKSNEQLDVQAVHRIRDRLVAQRTAVINQIRAFLLEYGLPVKEGRPSLSSSLPSILEDGANGLSHRMRQLIAQLREHWANIDMQISEYTHEIELAARRSDDCQRLLTIPGIGPLGATALVAAVGNAGMFNKGRELSAWLGLVPRQRTTGGKPTLLGIGKQGNSYVRRLLIHGARSMLKNLHRKDHELGAWLNKLQERTHRNVAVVAVANKLARIAWAVLTRHDIYRSSAAVAPMR

SEQ ID NO: 213296 - protein, 339 aa, unidentified
MAILTVGIDLAKNVFAVHGLDEHGKPELKRPTVPRAKLLELVATLPPCLIGMEACSGAHHWARQFAPFGHTVRLMAPKFVAPYRQSGGRSKNDAADAAAICEAVTRPNMLFVPIKSEEQQQRLMVHRARQGFIEARTATINRIRGLLSEFGIVLPLKASTVRREAANRLEELPGYANTVIGDLLSEVTRLDERITAYDGHIRSLARGKDNPAQRLMRLSGIGETTATAITAMIGNGRDFKCGRQFAAWLGLVPSQYSSGGKTRLGRITKAGDAYLRSLLVMGARAVLAAAKNKTDTISTWAIELEKRRGYWKAVVAIAAKNARMCWAVLAKGEAFKMPA

SEQ ID NO: 213297 - protein, 420 aa, unidentified
MKVEYPVCCGVDVHKSFFIATIIKTESLTPKYSKKRFSTFNNDILRFKQWLIEHECYDVCLESTGKYWVPIYNLLEDEIRVTVASPKWVKAVKGNKDDTKDSKWIGELFRLGLVPGSYIPEKPIRVLREYTRYRYKLTSCKSSEKNRFQNSFTVCNVALDSVVSDMFGVSASKITDYLMHTDTDSFDPEHVKSLLHGRMRPKEDAIVESIQGYLITAAQKDRMLMVREHLEYVEASIEKLDSMLDALVEPYETYISLLCSVPGINRQSAVTIISEIGVNMAQFKNSKRLCCWAGLTPSNNESAGKKKSVRISRAGVYLKPALVQVAHAAVKSTTDPYYANKYERISKRRGKKRAIIAIARMILTAIYHMLKSGELWNPSDLFKVDMPVALQEKQKQKAIDRALKLLLAEGIIKSDSVKTA

SEQ ID NO: 213298 - protein, 339 aa, unidentified
MKDTIYDHYIAIDWATKNMAIARMTKNSNKVSAIDVPSDVAELKAYIKRLKGTKILTIEETTTSQWLYTELKDYVDEIIICDPHRNKLLNEGAKTDKIDASKLVQLLKANLLKEVYHSTNRFLYLRRVVSGYEDLVKAGVRLQNQKASLLRACGKKGDKKTADELTIQGDQFVHESLDKQIGWYESEKKTYEKEFKALAKKYPEIRHQKSLPGIGDINAVKIVARVVSPDRFADSGHYLSYSGLIKHEKISGQKSYGKRLPRYCRQLKGVYKTGVMAAIGGNNPINEYYEYLIHEKGEPPHDARNKACRRLATLSLGVFKSGKKYQPYRRGNIKGKQAE

SEQ ID NO: 213299 - protein, 354 aa, unidentified
MSQKLNSEIAVIGIDIGKNSFHLVGQDRRGSIVLRQKWSRGQVEARLVNLQPCLIGMEACVGAHHLSRKLQALGHDARLMPAKYVRPYSKGEKNDYRDAEAIAEAVQRPTMKFVATKTADQLDLQALHRVRERLVSQRTGIINQIRAFLLERGIAVRQGLHFLRAELPGILAKRTDVLSPRMLRIIEDLAGDWRRLDERIESLSAEITWVVEQDPACQRLTTVPGIGPIISSAMVAAIGTGDAFAKGRDFGAWLGLVPKQMSTGDRTILGSISRRGNRYLRRLFVQAAWVVLVKVGPEQWERYGLKSWIEAAKKRLHHNVLAIALANKLARIAWAVLHKGRAFECVKTNASRPV

SEQ ID NO: 213300 - protein, 407 aa, unidentified
MEVLYPRCAGLDVHAGSVTACARIAAGPQVTYEHLTVATTTRGLLALAEWLTAHGCTHVGMEATGVYWKPVWHVLEEHFTLVLGNAMHIRNVPGRKSDMNDATWIADLLAHGLIRSSFVPPAPIQELRDLTRTRRQLVHEVSRHVLRIQKTLEDANLKLTQVMSDIVGVSGRAILKALIDGETDPGRLADLTRGRLKATRAELLDALHGRVTDHHRFMIKLHLDQIDAVERAVAAIEARIGDALGPFRAAVSLLTTMPGLSETTARVLIAEIGTDMTRFPSVGHLISWAGFCPRLDESAGKRRSTRTRQSAPWLKPTLVNAAWAATHKKDSYLRAQFLRIKSRRGAKKAILAVASSMLTAAYFMLRDGVEYHDLGHHYFDQRDKEQLAKRLLQRLRDLGVNVEVKAA

SEQ ID NO: 213301 - protein, 413 aa, unidentified
MTEQSNINSETVLVALDIAKKSHDAFVLMPNGKRYFTKVANSHLGYQQLLDRAGGDPRQVKVGFEPTADYHRNIAYWLADAGCQCFLVSSLASHRAREMLFQTWDKNDRKDARVILYLMEQNIMEPFHDPLRSNVMDIQELSNTYHQISLARTRAMNSLFNHYITLYFPEIERFFNSTRSEWFCRFMLKYPTPASITRYKLDTFIKRAWDVVGRKVSKTRLLTELYDAAANSVGIPVGVHSVAVETFKLQVQRFYDLSLQRAELETKADQFLGDRDDYNHLRSIPGVGPIVAMIILAESGDLRRFSHYRQYLNYCGFNLSAQQSGNKSGQYHLSKRGNARLRYAYWLAATSAIRQRENSFRAKFARYIHKDPENPDLKRKGRVAVATKMARIAHALVKTGSDYRGFYEFSRGT

SEQ ID NO: 213302 - protein, 424 aa, unidentified
MLGVGIDWAEEFHLVALGEPGEGVIEIVRVEHEPGAIARLVTRIAELEADPGEVRVVIETRHGMLVEALVDAGFTVVPVNPDLVARRRGPAKKKDDAEDARIACLLALDRFERLRPLIPHGEIAGELRAIARDDERAARDERRLLNRLRADLIATFPAALTIAGPDMGAPTFLRLLERWPTANALAEASRDDIVAFARAGRHGWPDRFADRVEAALAAQSFVARDYLVRAKADTIRLAATQLLLVGQQRRVWERRMGELLLGAPRLGRTGQPKEGGERGPAMPGGEIYLSFPGLGDRLAARIAGEIGDHIEQFDTPNSLQSYAGKAPVTRRSGKSELVVACRLACNRYLANAVQQWAFCSLERSGWARDFYDTQRARGKTHHAALRALGNRWLEILWHCLTKGVLYDEATHVANRNRWLNQAAA

SEQ ID NO: 213303 - protein, 344 aa, unidentified
MEIASLGIDLGKTTFHLVALGERNKVLVRKKFSRAQLLAYTAKIPSALIGIEACAGSHFMGAKLREQGHEVRLIPAQFVKPYRKSNKNDFQDAEAIAEAVRKENMRFVPIKTQEQLDIQGMHRVRDRLVQRRTALINEIRGFLLDRGITFAADPQHLRKNLPAVIEDAEQNLTPRLRWLLDRMWQEWKQLELNIETMSDELERISEENELCRRLRKIPGFGPLVSTATVAAIGNGAAFQCGRDFAAWVGVVPRQYSTGGKQKLLGISKRGNRYLRRMLIHGARAVLFRVKYDTGGFGEWFRRLAQRAPRNKVVVAIANKLARMAWAVLSSGKEYQYQRPQATAA

SEQ ID NO: 213304 - protein, 320 aa, unidentified
MSGYIGIDVAKSELVVAISGIDGVRSFPNSEHGHAEVTKWLKKLDAPPVLIVLEATGGYERGITAALGNAKLPVVVVNPRQVRDFARGMGKLAKTDKLDAAVLAEFAARVRPEVRELPTEEQEDLRELLIRRDQLKQMLIAENTRLLQAAGKRYHRRRKEIKSHVSDLEKRMRMLESDLDDTLRRSSLWREHDDLLQSAPGIGKQTARSMIGFLPELGTVNAAQIASLVGLAPRNRDSGMMRGQRHIGGGRSRLRATLYMATLAAIRTDPVVKGWYEHLLAAGKPKKVAIIACMRKLLVILNAMTKTNTRWQPQTQPLPA

SEQ ID NO: 213305 - protein, 415 aa, unidentified
MKVVFPTCCGVDVHKSFLVATIIKTPKDSLQPSYQKRRFTTFNSDLKRFAKWLHENDCLDVCMESTGKYWVPVFNILEKRDIRVVIANPKWVKAVKGNKDDTKDSKWIGDLFRLGLVKSSFIPSKDIRVLLELTRYRYKLTSMKSSEKNRFQNAFTVCNVALDSVVSDMFGKSATAITDYLTSNEDFDPQHCVSLLHRSLKKKAEDVLASIEGYEISPEQKCRIGIVRNHLHYIDKLIERMNACINTMVEKYDGAISLFCTIPGIDRSSAITIVSEIGVDMAQFGSSKRLCCWAGLTPGNNESAGKKKSVRISRAGVYLKPALVQVAHAAVKDKLNPYYAVKYERIAKRRGKKRAIIAIARMILTAIFSMLSTGEVWNPVDLFRVDMPEHIKEQHRAKAVKQAIRFLKAQGLEVS

SEQ ID NO: 213306 - protein, 319 aa, unidentified
MAQNDLVVAGIDVAKDKVDVCIRSQSLRRTFASTAEGRRELASWLRRHKVGKAVMEASGGYEREWAKALRDARIEVRIVDPKRVRSFAQSAGRLAKNDTIDAEMIAWFGETFDEARGQAYDATREQLHQMVNARQALKEMQAKLESQGEHAVPAAVQRMHARILKTIGVELVKIEAAISAMILATPRFVELAEIIESVPGIGRTTSAALIAAMPELGQADNKIVAALLGAAPYDDDSGRRRGERHIKGGRRRTRNVFYMACLGAATQHNPVLKAFYGRLVAKGKEKKVALIACMRKLICILNVMITRRQKWDASRYALS

SEQ ID NO: 213307 - protein, 365 aa, unidentified
MDTIYIGVDFHARQQTICYLKTETGELVTCELKHQDKEMVRAFYAQFGGRVIVGLEASGYSPWFERLLEELGCEVWLGHATEIRRRARWRQKNDRRDAELILDLMLHDEFPRLHRPAVQSREVLRMLRYRQKLIKMRTMSKNSLQAIALQAGLAKGSRLFTKAGQQELGTAEMSPVMHWQREHWLQLMEPLNQQLLETMGWFKAQSKGDVCITRLRTHPGIGLLTSLCLVHTLQPVSRFRNTRKVAAYAGFDPIERSSAERKCFLGISKAGSRLLRYLLVEAAQTAVRKDEDLKRFYQRLADRRGRPKAKVAAARKLLIRAYIMLRDEIDYAEFRHRAVAARLARRGQGPNVPEVLIGQPASPAQ

SEQ ID NO: 213308 - protein, 445 aa, unidentified
MTFRTIGIDLAIRGDHLAQIYDDGRPNGRAIRFRHDQPSLAAFVQTAVMGLRADDHIQAIMEPTGMSWFPVAHHLADAGVTVARVKGKRVKALRRYLSEHAKTDMADAQILAAMPSFGGPRLDPVHIPDPRSHALQRLTKQRSRFQNEIADARRRLLDLIRWASPRLEAVLPDLGTRLSLALLQKWFHPSDVLKARRTTLAKYVAAHAGGNHPRSGPFVETLITGLREAAQYAQDLHGTHIDFSELQFEIAMEIKNVLATIQTVGDLERHIADLYKHLDPQGLVLSIPGVGRHLAPTLIGILQNIERFHSEKHLRGFCGLFPRRADSGGVERAGQTLTQGGNNRIKQALYLAADTARKTDPELAELYWRLMTVKGHHHKQALCAVANRIVNRIFSVLKRGKPYEVRDREGNSITLSEAKAIILERYTVGENIRAGRRSNRIEKTP

SEQ ID NO: 213309 - protein, 427 aa, unidentified
MAYWIAGVDVHKKMLAVVIADVAVDGEYQFERRTVSTSPGALRALAAWFVEREVEEVVMESTAQYWRPVWEALERFWTPLRRTREDAGALSGTLHLAQAQSNRGAPGRKKDFPDAERLVRRLVAQELTLSFVPDAEQRLWRTVMRRKYQVTCHRVQLQNRLECLLEEAHIKLSSLVSDLLGASARRMLQALADGETDPATLAGLASRRLRATPDQLCDALGACRDLHPVYRRILTLALDELRLIEDHIAQLDHEMARLLSPHQPAVQRLAEVPGLGVDSAQQIIAEVGAAAATFPSPKHLASWVGVCPGDEESAGVNYSHRSPHGNRQMRRVLNQAANAAVKTKGSIFELVYRRLMPRLGHAQAIGAIAHRLCRLIWKILRQGVSYEERGPAVIQHRKHRRTAKMIRELRSLGYRVELALSPLGSPA

SEQ ID NO: 213310 - protein, 399 aa, unidentified
MKNLVSLELRVSVDIGCRSHNVAIGLSSGEILDEFSITHEPEGFRQFFSRIEKQERRFGCPVAVAMEGYNGYARPLDTLVRARDYRLFNINNLKLARFKEIFPGAAKTDEIDARKGLELFQICDHLPMAKDVLQEVRKTPQENEILKRLSRRRRRLVDERVRVLNNLQSDLHAVCPGLLEITGEADNLWFLNFLTSTDDLRKLVRMREATIRKIPGIGKTYASVILQWQKQARFSHDVEWVGEMIQEDAVRVLELRDKIESLEAKMEDVALGSDIAQTLATIPGFGAICTSELAGEIGTIDRFNNEASLALYLGMANLDNSSGKQKGSKPPRQVNTRAKAAMMIAVDRHRKKVLQSQRYYDKKRAEGKKHNQAVRALGRHLCRVIYKMLKEVRGYISPV

SEQ ID NO: 213311 - protein, 387 aa, unidentified
MARVVIGVDPHKRSATIEIMNHREKPVGRGRYGTDRDGYQAMLAAGRKHKDRVWAVEGCSGIGRHVAQRLVADGEVVLDVPAKLSARARVFATGQGRKTDPVDAHSVAVVALRTEGLRQVVVDDTTVALRLLVDRRDQLGRARTDIVNRLHALLLELIPGGAKKDLSAQHARTLLTTVRPRDVVGKTRRWLASELIHELVVIDKKIKIAKQELTELVNSTGSRLMELTGIGPSGAARLLGDIGDVHRFTSRAHFASWNGTAPIDASSGDQNRHRLSRAGNRRINRALHIMAIVQLRRDTEGRAYYRRKLAAGKTPMEALRALKRRLSDVVYRQMTADAKRAGTGPGGHTGATLQSSAADPNPNVGTSDKSLPGPAEPQPKTPLHAGH

SEQ ID NO: 213312 - protein, 347 aa, unidentified
MNRPKYYVGIDISSKTFTSAIGIMEDAWQIIGKPKQFENTVDGFAAYKNWLNQYGITTENTILCMESTGVYGELLAHFLVVNNYPVSIEPPLKVKRAFHPEGHKSDPVDSTQISEYAYRFWDELSIWQPRKEVIEQISTLLTVREQFVTEKTAHKNALIALKRKAIRTPLAESIHETAISQITISIKKIDDEILHLLDQDPHFRNMIRLLISIPGVGITLAAHILVVIQSAPQSLSAKELAAFIGICPYEHSSGSSIHKPATSRHYGPPALRRLLFLAAMSVRTHNKKFNRYFYQKLNEGKPAKLIINNIANKLLKIMIAVLRANTPYIENYHSVNPGMLSLSLTKS

SEQ ID NO: 213313 - protein, 355 aa, unidentified
MLIIGVDFHPEFQQIAWVDTDTGEFQEQRLQHGEPAERFYRALAAAGQQVRVGMEASGHARWFERLLAELQFELWIGDAARIQSKRGRKQKTDRQDAQHILKLMLKDDFPKIWVPSWENRDLRQLLWHRHRMVQARTRIMNQLQAVALNEGLRCKKRLWRAGGRQQLESFQLAPWASRRRHDLLELLDRLNPTIADLSHAIEQEAEKCPQARRLMTHPGVGPLTALAFALIIGNTERFQCGKQIASYLGLVPLEKSSGNRRRLGHITKQGSSMLRFLLVEAAQVTVRSLPEWRSQYFRLVIRRGRKTAKVAMARRLAIRLYWMWRQGLNYELLKSSVRTQENPEIAMVCSRTPSN

SEQ ID NO: 213314 - protein, 421 aa, unidentified
MRGIRGKRVRTVKEDTLIVTVDVGMTSNTGYCTTVDGRDTKPFKFDNTREGLDKFWGMAAASKRRFQCTEVMIGYESTGPYAEPLVHYLMNKPVSIVQVNPMHTKRIKELNDNSPLKTDDKDPRVIADVLRLGHALSVVVPEGDAACLRRLNNARERHIEERTALLNQLQQLVFLVFPEYKMVFKNIKSKTAQHILTHYTTPEKIGGLHRDDLGEEMRKRSMGKFGIKTAERLISLARDTIGIKEGVAGIVLDIRHILVQLQAVNDFIQEIETEMEKALEPIPCSTRILSMKGLGVVTVGGLIGEVGDFSKFRTQSEIMKLAGLDLYEISSGKRKGQRRISKRGRSLLRKILYYAAVSTIRKNGIMCAQYANLIGRGMVRTSALIVIAKKLLRIIFAMVRDDRDYVRDYISPKRMVMKKAA

SEQ ID NO: 213315 - protein, 341 aa, unidentified
MSQAQQLSNSDPATVFCGIDVSARTLTVAVQQVGQWAQREFANNANGHKELIVWLHKRQAMVRVSLEATGIYSLDLALALQAATRIELAVLNPKKIHEFAKSMRRSKTDRADARVLAEFSQRMAFVPWQPPNRQGLQLRTLSRYIQGLTVQHTRERNRLHAVQNVAHTPRCVLSDLKRSLASLEKRQQQLRREASALIQADPSLRQQFHWLLAIPGIAQISAIQLLAELTPLAQNMTVRQWVAHSGLDPVHHDSGSSVHKPSHISRSGNRHLRRALYMPALVAVQRDPHIKAFYLLLQSRHKTKMQALLAVARKLLHAIHGIFRSHSPYDGHKLFPALLPA

SEQ ID NO: 213316 - protein, 432 aa, unidentified
MKFNQSNKQNQRISRISETTLVIGTDIAKHNHVARAFNYRGIELGKRCLFQNDDNGLLNLLAWAESIKQEHGLTDVLLGVEPTGHYWLPLFHFLRQRSIEVVLVNPHHVKKSKELDDNSPTKNDIKDAKVVAKLVIDGRYTQPQLPEGVYADLRVLMNQRDRLCGDLNRVKGRIHNWLDRFFPEYRQVFKNWEGKASLITLTNFPLPQDVVAAGETTVVAIWKKNDVKRAVGPKRAELLYRKARKSIGLTEGATAAKHELAMYLEQYAMLCRQIEQLMELVAGLVEQIPGATHMMSIPCIGLITVAGFLAEVGDLSGYDHSQQIVRHAGLSLRENSSGLHKGKTTISKRGRCRLRALLFRAALTMVAKNPEFRALHLYFTTRRDNPLKKKQSMIAICNKLIRVLFELGRKQKEYDANKVLGPHREAQLQAAA

SEQ ID NO: 213317 - protein, 365 aa, unidentified
MVEVSEAAVIVGVDVAKRSHWARVIDPRGRELVKPLRFENTKEGFLRLERTIAEALHGLGLDKVIVGVEPSGHYWKPLAHHFHAQGVRVVLVNPYHVKQSKELDDNSQMKSDRKDALVVASLVQQGRFLRSYFPEGVYADLRVLVSQRSHLKRRLNSAVNRLRGVLDEYFPEYDQVFKDLLGKASMWVLRHCPFPQDVLQCDPEGLATCLKLATGDRVGMKRAKALIEAASVSVGVKVGIEGARKKLSSCLGEVDFYRRQLEAVEARMVELLEKLPEARLLMSIPGVGPVVAATVLGEVGDFRRFKNWKQLRKLSGYNLVAQSSGQKKGQSMISKRGRPGCGTSCILQLWSRLPGTGSSGRCTSC

SEQ ID NO: 213318 - protein, 354 aa, unidentified
MSQTPNTAIAVIGIDIGKNSFHVVGHDARGAIALRQKWSRGQVEARFANMPPCLIGMEACVGAHHLSRKLASLGHDARLMPAKYVRPYSKGQKNDFNDAEAIAEAVQRPTMKFVATKTAEQLDLQALHRVRERLVSQRTGIINQIRAFMLERGIAVRQGIGFLRTELPTILATRTDALSPRMLRVIEELAGDWRRLDQRIEGLTGEIAALAHQDQACSRLMTVPGIGPIISSAMVAAIGTGDVFSKGRDFGAWLGLVPKQISTGDRTILGKISRRGNRYLRVLFVQAAWVVLVKIKDWERYGLKSWIEAAKKRLHHNVLAIALANKLARIAWAVLAKGRAFELTRTDDASVRPA

SEQ ID NO: 213319 - protein, 394 aa, unidentified
MKLVGIDVGKNSHHFCVMDKETGELNVTPSSFSNNKEGFDFLINSLKPYSKKSILIGMEDTGHYHVALLKFLLSNGYTVALINPKTTDLTRKMEGGITKNDKLDTITICDVLDTPERKKQYRITKVDRFDLYEQRQLTRHHHNLKEELNVYCNRLQKSIDLVFPEFNTLFGSKYGVVYMNLLKTFGSAEAIASTDIRTIRKCFEIKGRGGRISLTPEKLKECAKNSIGISSEVETIQIKHLVSQIMLIKEQIAEIDKKIEEFSIKNNSPILSIPGISHFSGTSILAELGDIGNYSKPSQIIKFAGVAPYHYESSQYNAQHTAITKKGSKYLRKTLYQIILPVINNNPVLKKYYLLKISQGKGHRCAQGHCIRKLLRIIYHLLETGQSFDPALLR

SEQ ID NO: 213320 - protein, 321 aa, unidentified
MNDPIYCGIDVAKRSFVIGFSHQKKTKTETNNPKGIQHTLEYLSPFNVALITLEATGGLEIPVAKALAQAGYRVLIANPKKASDFAKSQTWAKTDAKDAHNLAFYGQMLDIKGEAEHLRYVPLTEQEELLEALVVRRRQLVDMRVAELNRLQQSHETQHANIRQLIETLDKLIAELDKDIDDHSQHFNDKADLISDIKGVGKNCIAVIMSSLPELGKLSSKRIASLVGVIPHPQESGQWKGQSFCCGGRAAVRSALYMAVLSAVRYEPVFKAFYDRLVARGKLKKVALVACMRKLLTIMNALVKRNEKWDATRHLSTETVG

SEQ ID NO: 213321 - protein, 361 aa, unidentified
MTSMTHDGPQITGGVDTHGLTHHGAVIDSIGRHLADREFPASIRGYRDLLDWMRSHGTLTAVGVEGTGAYGAELARVLTAAGVTVIDVDRPDRKTRRMKGKSDPIDSYAAATAVLSGRATGIPKSRDGVVEAVRVLRTARRSAVKARTQAMNQIRGLLVSAPAMLREQVAGLERAMLIRTLSRLRPGDDLSRPLAATRAALRRLARRHQALDDEIAELDTEIGPLAKQAAPVLLELFGVGPETAGQLLASAGDNPERMRPEAAFAHLAGVAPIPASSGRTHRHRLNRGGDRAANNALHTIVLTRMRFDERTRAYVERRTKEGLSKKDIMRCLKRFVAREVYRALTTKPTERITQTALAAAA

SEQ ID NO: 213322 - protein, 526 aa, unidentified
MSYHVRVNRRTNRKTSSTKRQSLQKPNGIISPRVQKVGGERFAIVCVDPAKHRSEWMMADYFGNLLIEPQTLNHGASGFRSAVDLVRQAQERHDIGDTIVVVERTGNYYLPLKRAFAKAGFETRIVHPFATKQYRMPADPGNKTDETDLYAQHRAAVAGFGLCEYELESPYRELQLRSRHRRNLVEKSSAIACQIRDHLHLAMPGYASLFDRLFERQTPLAIARYCESPAKLLAVGQDAISQHLRSKKIRHQVRTIGKVLVWARQVDCDTIEDGPMHHAIWTDLHELYQCFRGQITLLEGQLASDLVQTPYVRLLAISGINVVTAADFAAEMGPIWRYANANAITGRAGLYPSRYQSDQTDHDSGPIIRQANRRLRCALMRIAENLACHCGYYRSQAEADLALGVDRRASRVKIANRFSRLALACVAGDEPMRHPCFGKPDSIIEKLREFHHVHDTSMDPLLTDLNMAVEQLPYNTCGHEAEVVAKVLSQNTHRRRNYVAVGELLPAVLARLNVRIMKEDQDRDRP

SEQ ID NO: 213323 - protein, 431 aa, unidentified
MKKIRKNAAGIDIGAKNFFVAVEGEKVKVFFSYTEDIEALRDYLLEKNIETVAMEATGVYWVVLYEILESSGLDVWLVDGRETKQVPGRKTDIKDCQWIQQLHSFGLLNRCYVAKSDTKELRSYLRLREDHIRSASMHVNHMQKALTEMNIRLKEVLSQIHGKSGISIIKAILEGERDQDKLVSLCHTSILKKKRELVHKALKGKYTKAGLFALRQAYDAYNFYQQQMKECDSRINTIINKLGNNGEGQKPVSKRKPIRHNKPNVDNLGSNLLDIFDGKDATLISGLTDYTWLQLYSETGRDLSRWPSEKHFTSWLGLAPGQNHSGKKRKNAKKKGRPAAGQIFRVIAQSLINSKKIALGAFGRRLRARKGPGVAIKAVARKLAELYWRVMVKGLEYSENGIKKYEEQLHAQKLKTFTRLATELNLHVTEY

SEQ ID NO: 213324 - protein, 397 aa, unidentified
MIAVGIDVSKSKSTVAILNGDGSIRAKPFDVHHVADELQALVDYIKRTSEPPTILMEPTSHYHYPLLKAFQEAELPVCLINPYQMKKYGDTELRKAKTDKRDSLRIAQYALEKSYSLIPYTPQDQKYEDLRFLSRQYSQRISTLTVAKVQLLSLLDETMPGITTILPLKSRDPDNCVLLRFIKRFKSFDVIRKMGKTRFLDSYQVLVKKTKDRFAGSKGLAIYELVLNSITTRGENPLSAMTQDQCVDLVSTAQKAADEINLQMRIIAETIPEYKVLRSMAGVGDRLGPIILGEIGDIRRFHSGKALNAYAGNDAPPYQSGQFESRNRHISKRGNPALRKACFEVMQALKLTKPQDDPVYLFLLKKEQEGKPYNVAKMAAVNKFLRIYYARAMELYK

SEQ ID NO: 213325 - protein, 370 aa, unidentified
MSQPSTLDVGLDVHQESITVAYSSQEPHAEVVSLGNIGTRQCDIDQLIRRLQSKSPHLIFVYEAGPCGYWLYRYLTQKGHICWVVAPSLIPKKPGDRVKTNRRDAIKLARLMRSGDLTPVYVPTVEDEAIRDLCRAREDAIRDLKAAKFRLKALLLRHDIRYTGRATWGPAHLRWLSEVVCPTPAQQIVFQEYIRAVTEHTERLARLEQELTAQVQTWRLSPVVDALQALRGVQFTVAVTTVAELGDLTRFDNPRQLMNYLGLTPSEYSTGEWRRQGGITKTGNCHARRALVEGAWAYRYPATVSRHLQLRLEQVPKPIQDISWKAQVRLCKRSRQLSARGKNANQVVVAIARELSAFRWAMAQEVPLTP

SEQ ID NO: 213326 - protein, 346 aa, unidentified
MDYCGLDIAGVSSYLYLTNEKGRKLTCGAVETTKAAIERRLKPFVCGGLSVAIEAGNQTAWIYEVLVGMGAKVTVVNPTKVKAIAESRRKTDKIDARILCELLRLDALPHPVHMPGRDTRALRGLLAARRQLVSARTKLCNVVRGMLRQEGTRLPAGALSSFAGWRRLLAQGYEQAHLPVVLATFFDSFVSLTDSIRDLEKRLAESERKDPRVARLKTMPKVGRIAALTFVAAVDDVHRFPSSRKLVGYSGLAPTVRSSGERTEYGSISREGRRELRAVWVQIAHLVARDTSRATQPLRRWFEKVASRRGKKTALVALARRLLVIAYRLLKDETVYDAARLRRKAA

SEQ ID NO: 213327 - protein, 337 aa, unidentified
MSRLNIIGIDLAKTNFYLFSLSPEGKPGGRIKLSREKLIGWFTTQSRMIVAMEACGASHHWAREIQKTGHDVVMLPAQHVRAYQRRQKNDYNDAQAIAEACWHGTIRPVPVKTLSQQDEQTFLKMRRLVSEERTQLINHIRGLMAEYGIVLRKGATELRRKLPELLEDAENGFTPQMRELLQRQYQRLAALDDELIWYDNRQRKNAAGDSVCQRLLSIPGFGPLVSLAVKSWMGDGKQFKRGRDASAALGLVPRQFSTGGQQVLLGITKCGNSYVRSMLIHGARAVLFRSAGKTDQLSSWVREKRGFNRAVVALANKLIRIAWVIITRNEVYRVSVA

SEQ ID NO: 213328 - protein, 343 aa, unidentified
MEHYAGIDVSLERSSVCVVDATGRIVREAKVASEPEALVDFFRRLGLPLARVGLEAGPLSQWLHAGLAGAGFEAVLLETRQVKAALSAMIVKTDRKDARGIAQLLRMGWYRPVHRKSPPAQEVRALLVGRKLLQAKLLDVELSIRGLLRGFGLKLGEVSKGRFAVRVRELVAGQPTLERVIGPMLRAREALRSEYLALHRAVLAIVREDAVCRRLMSVPGVGALVALTFASAVDDPARFRRSRDVGAHFGLTPKRYQSGETDVTGGISKVGDAMVRAALYEAANVMLTRAGRFSTLKRWALEVAKRRGARRAKVALARKLATVLHRLWADGSEFRFGKEAAAA

SEQ ID NO: 213329 - protein, 332 aa, unidentified
MYLGIDVHKRYAQVAVIDSEGRIVEEVRVENANLDDLAQRYAGSRAVIEATSNYYHVYDTLAEYLDVTVAHPGKLTHIAQSDKKTDRVDAKELARLLRLNSVPQSYVPTDEIREARALVRGRQTLVEDRTKFANKIHGLLADNGILQEVKPLSVKGREFLRELSLPSPWDALLESYLDVVETLTKNISQLETAIEERAGSLRETQLLMTIPGVSYFSALLIYAELGEVDRFDSHREVVSYMGLNPTIRESGDSRIEGGISKRGSGRVRWILVQSAYTAVYNSEDEYLSRFFHRLASRMNSKKAIVATARKLLVSMYYMLDREEVYDPPGVSR

SEQ ID NO: 213330 - protein, 396 aa, unidentified
MTTIGIDIGGRAHVAARCRDGQSRADREILRVSQDRAGFTALDAWLLRQPGPVTLVTMESSGHYWMPLASHLLRRDVPVAVVNPLAAKYFARSRLGRTKSDPADARSLAEMAMRDTPDARDPLAGVELRQAARFAMTLVTEQAKVCQRLIHLVELGFPELGELFDDPTCRTAREVLRVAPTARAATRRRTATLANANGGPGHRRLGQAKAGRLQVAAADSIAVPELDAEVAVEVRLLLDQYDLLERQITDADHRVAGLLDGETARRLQTIPGVGPSIAASLISEIGDIGRFDDFDQLLAYAGVHPAERSSGTKGANPETSWHMSKAGNAHLRAAAYRMALVGIQHNPVIAAHYARKRDAGKSKMNALGHCMRKALAIVWGVWRNGTDFDPTYGVEA

SEQ ID NO: 213331 - protein, 434 aa, unidentified
MEEVTDEPLYRDRVCGIDIGKAQMAATIRVPSDKNPARRMQETRSFGTTRREVLALADWLRCWQVPALVMEATSDYWKGPFYRLEAEGFECVLADAKQVRHLPGRPKHDPGDSRWLAACFERGAVTSCFVATPEFRVIRLHTRYRRDLTAERTREKQRAEKLLESAAIKLSSVVTDLHGVTGRDIMDHLIAGERNPKILAQLARARARRKITQLEEALEGAEFFTPAHASLLAAMLERIDQLNAGIIKLTAVIEQLVAPFEEQLQQAESMPGWGRRAAEDAIAETGTDMSRFPTGAHLASWAGRTPLDNSSGKRKGKTKSKKGNRYLGGLLGETAIAAGKTATREGARYRRLARRRGKAKAQVALGNTQLKVYHALLSRPGTRYHDLGPDYYERQRDLRRQIAHHVGKLGALGFEVTLARIPGPEPGDSANQAA

SEQ ID NO: 213332 - protein, 367 aa, unidentified
MKKVSTVAAKQSRNNSQQKLTIGLDLGDRNSWYCVVDEAGQIQLEQRVRTTAKALQEVFGAMPRSRIALEIGTHSPWISRLLSELEHEVMVANARKVRLIGESRKKDDRLDAQTLARLARIDPELLYPVKHRSAQAQADLMMIRARAGLVRARTGLVNTARGLAKSYGERLRSCNVRNMNAEKAEGLSPELQRALEPLLAAIEEVSTRICEYNERIETLAQASYPQVALLKQIKGVGTLIALTFLLTLEDPHRFPKSRDVGCYLGLQPGRRNSGQSEPQMHISKEGDPYLRTLLVQGAQHILGPFGIDCDLRRWGLKLAERGGRNGKKRAIVATARKLAVLLHHLWVSGEVYEPLHHSRRVPVAAAA

SEQ ID NO: 213333 - protein, 340 aa, unidentified
MTVIIGIDPHKASHTAVAIGCDEQQLAEIRVRATSRQTQQLLAWAEPLGERTWAVESAGGMGYLLSQQLVGAGEQVLDVPATLASRVRVLGTGRSDKNDPNDALSVAIAALRSPGLRSVAPADHREVLRLLAKRNHEIGRLRNIVVSRLHAALVNLSPGGISKELNASDAVRLLNGFEPVTPVEQTRYDLAHELLDDVERLDVQLKESHRRIKTAVKASGTTLTELYGVGPILACELIGYTGDVGRFGTRDQFASYAGVAPVERSSGGRIFFRLSRRGNRQLNHAIHMVAICQIRQANSEGRIYFEKKVAEGKTKREAIRSLKRHVSNAVYRQLLIDAQK

SEQ ID NO: 213334 - protein, 336 aa, unidentified
MVYVGVDLHRKTAHVVALDQGGAAILSRRVATRPDELLRVFGELDHQPLEVAFEATFGWGWFADLLADAGIPAHMAHPLATKAISSARVKNDSVDAKTLAHLLRTNLLPEAWIAPPEAREARRLARMRTSLVRVRSQLRCQIHAVLAEHGVHAEVSDVFGKAGRALLEDLALPSISKARLDANLRLIDALTEEVAQAERELRALFRGDDRIKRLTAIPGIGLITAATVVTEVWDVTRFPSADRLCSWAGLTPSEHSSGEHTRRGHISKQGSRWLRWVLVEAAARPQADPDLRAFVDRIASRRGTKIGRVALARRLLTLCFYALRDERGCRAFPVAR

SEQ ID NO: 213335 - protein, 382 aa, unidentified
MHASNICTPIADHNGTIFVAIELSQKTWLAVVRSPDRDRISRHKLEGGNDAGLLALIASVRARAARALGTVPAVVSCYEAGYDGFWLHRRLVAAGIANFVFDPSSIAVEQRSRRAKTDRLDGELLLRTLMAHCRGEPRVVRIVRVPSPEQEDVRRGSRERERLIKEQTAHTNRIKALLRTLGLAAGNPRRRDWLRWLAEQRDWEGRAVPPHYLAELAREHARLLLVVAQLGDLSQAPEATDGPAAARMAKQKTQLRQLKSLGLASAGTLVDEALYKDFDNRRQVGSYIGLAPSPWASGATSREQGISKAGNPRARHQAIELAWLWLRHQPDSALSRWFRQRTAGASARTKRIAIVALARKLMVALWRYLTTGLIPDGAVVKA

SEQ ID NO: 213336 - protein, 401 aa, unidentified
MDPQIRVGIDVGCKAHRVGIADPKGSILEEFDISHTDAGFCDFFRRIDQHRQKLDLPVAVAMEGFNGYARPLDRLIQEHGYILYNVNNLKLARFKEVFPGAAKTDPIDTRKILELFHLKDHLPLAKDVLQKVVAAPPVNDKLKRLSRRPRQLVNEKVRVANRLQSDMQAVCPELLAITNNVSNLRFLRFLTCRDDLTQLARLRRTTLLKIASVGQKYARIIQEWRRKASFSAEVEYVGPMIIADARRILDLLSQIHILDEAMAELADHSELARRIGSIQGFGKTCIAELAGEIGTTKRFAGERSLALYVGMSPLSRDSGQHHGSKCPRQVNHRAKAAMMTAVARHINCVPESRAYYEKKRAEGKRHNQAVRALGRHLVRVIWSMLKNERDYELREVIPSVT

SEQ ID NO: 213337 - protein, 345 aa, unidentified
MQYFVGLDVALRSLALCIIDGEGKIVLEQALLCEVEDITSCLEQFGHPIVRIGFEAGTMSQTLFHGLKAEGYDVVCMEARQVYAALSAMRNKTDKNDARGIAQVLRSGWFNPVHIKSYEAHYDRALLTSRKAILRKCLDLEAEVRGLFKVFGIRLPSPLKRNRFDEAARVIIEDDERLAFALLPMLDARLVLYKTFLEMERRLRAITHKDPVCMRLLTAPGVGPVTALSFKAGVDDPTRFKSSRLVAAHFGLTPRRFQSGEMDNMGRISKAGDSTVRAALFSAANVLLMRSAKSCALKTWGMHLIRKKGRRRATVAVARKLAVILHRMWVDGTTFQWDDQEVAMT

SEQ ID NO: 213338 - protein, 352 aa, unidentified
MEKNNKLDFGGQHIYVGMDVHKKSWSVSIHTEQFEHKTFTQPPEVEKLTYYLERTFPGATYHTVYEAGFSGFWLHDQLRAKGIDCMVVNPADVPTKDKERAGKRDRVDCRKLARGLRNGEINGIYVPPRVKVEDRTLVRTRQSMVRKQTRCKNQITSILFFYGIVIPEEGRWSRRFINWIESIRMERASGDFALKAHLEELKHLRQIIANLNKAILSLSRTEEYMADVLLLKSVPGISTLTAMILLTELADLSRFSSLDKLASYAGLVPDIRSSGETEYSTGITFRRNAALRALLIESSWVAVRKDPALTMAFNKLSARMKKTKAIVHIARKLLNRIRFVFKNRQEYVPAIV

SEQ ID NO: 213339 - protein, 356 aa, unidentified
MSEGSCVGLDVHARSVVAGVIDMGSGEVRSLRVPPGAEATVAWLKTLPAPVRVVYEAGPTGYRLARSCAEAGISCVVAAPSKIRPAADRVKTDRRDAERLARLLRLGEITPVRVPGPAEEAARDLVRAREDARGDLMRARHRLSKLLLRHGAVYDATAWTRAHDAWLRKQRFQDGPLAIVFDECYSRMIDAKTRRDTLDKAIAELAASEPYVDVVERLVCLRGVSTLTAFALTVELGDWNRFRPESLAPFLGLTPSESSSGERRRQGGITKTGNTHARRLLIEAAWHQRSAPRLSVTLERRRTGKSLAVRAQADSSARRLHGRWNALEARGKPRTIVVVAVARELAGHCWALATME

SEQ ID NO: 213340 - protein, 346 aa, unidentified
MGKSIINLSSVTTVGLDLAKHVFQVHCVDASGCVVVAKPIRRNKLLEFFASLPHCLVGLEACGSAHHWARELIKLGHDARMMPPAYVKPYIRRQKNDAADAAAICEAVTRPSMRFIAVRSLENQAALMRHKAREMLVSQRTQLLNGLRGHLTEVGVIAPQGPRHARELAELIEACDETVPFEVCEALAALVVQLRNLDEAIARLDRTIAKLAQKDETARRLMSIPGFGPITASAMAATIQDTSSFAGPREFAAFLGLTPKQNSSGGKPKLGRISKMGNRNLRKLLVVGAHAVLFHRKPHTDSLRMWAKKLIEKKPFKLVAVALANKMARIAFAILRSKTVYREIPA

SEQ ID NO: 213341 - protein, 342 aa, unidentified
MFMEIDRVVSQCVGIDVSKKKLVATMCMFSQAEQAVYSRAAEFDNDKTGFNQLVKWSRKEAVKELPLRYVMEATGVYHEHLANHLVRIGCTAVVMMPTKAREFAYWEGMISKNDTIDSRVLALVGCVKRSMRPWNPTNPLYRELRTMSRFSQDAKKLRTEMKNHLEALEHSHEAERSVIKHYESLVASLDRRIEKNLENMKKKVASDEELSKKVENIMTAPSVGFLSAITVIAETDGFALIQNRRQLTSYAGLDVRDSQSGTVNGVSRISKRGNSRIRAILYMPAVQCRLHNKHLRKAYDRIIAKHPDKKMIAVTAMERRLLLLIYALWKGDRPYSEDYDKE

SEQ ID NO: 213342 - protein, 346 aa, unidentified
MDDLDYIGFDIHKKTISFCAKAQDGRIRDEGVIPARRADLKAWAEKRPRPWIGAMEATLFTGWIYDLLKPLARELKVGHPAMLKAIAASKKKNDKVDARKIADLLRCDLLPECYMAPSAIRNLRRVLRYRNLVVRQATRMKNRISGFLMETGTAYNKERLHGKAYFHELLEGLQETPRSVVHLLKLSRKQLEFFETIQKRLPKGLHEQPKLQERVERLQSIQGVGEILALTWALEIGEVERMDSICQAVSYCGLTSAQHNSAGKEQRGPISKQRNKHLQTILIEAAKLTPRYNPQLAAVHEKELQRGDRNRATLAVARKLVAYPMAVDRSGKPFQVRSNGPAQEAA

SEQ ID NO: 213343 - protein, 413 aa, unidentified
MDVLHPRCCGLDVHKSSISACILLREAGRVQKHQRRFGAMTQDLRELAEWLRQFGVTQIAMESSGVYWKPVWNILERQFTVVLANAQHIKNVPGRKTDQKDAEWIAQLLQYGLLRPSYVPCEIIRDLRDLTRMRASLSQEASRISSRIQKVLEDANVKLASVATNVLGKSGRAMLEDIISGEDDPEHLASLALGHLRVKIPQLRLALEGKIRSHHRFLLRRLVDQIQFVEHEIALLDERLEEIARQRPELSQAVARWDTIPGIDRVAAWALLAEIGDNMAQFPTAEHLASWAALCPGNHESAGKRLRGTTRQGSPWLRRMACQCAWAAARTKNTYLSSQFRRLAARRGKKRAIIAVAHTLIVIAYHLQKNQSNYDDLGGNYFDRIHSDGLKRYLVKRLQQLGNKVTLEPMEAA

SEQ ID NO: 213344 - protein, 462 aa, unidentified
MQLFYLGSDVSKGYADFVILDSRKQRVMKNFQLDDTFEGQCHLYNILNQFLADHSEATLFATVESTGGYENNWYNALVKFQSTLNIQTARLNPLGVMHNSKADLKQNNTDKISAQSIAEYLITHPEKVTYQQEDQMASLRKQGGVIKMLTKQSTQLLNQLESLLYTANTELLAYCKNSTPAWVLKLLLQYPTAARLARAKVPVVSRIPHVTSERAQELVISAKRSVASASDRIIEELIAATAKQILHLKKTINEQAELMVKECSIPEVDILKTFTGISDSSAIGLILEIQAVERFKTVKKLASFFGIHPVYRTSGDGSSGFRMSKKGRKEPRQILFMVTLTAIRSNPLIRNIYLERTEKGMEKMAAIGLCMYKILRIIYGMLKHGKPFDPQIDLDNRQRTVQTKPADRKDENRRFQDYDSNAPISRRQNKKRLERKQSHSVNDTKFGINAPVPEFVAQPELV

SEQ ID NO: 213345 - protein, 465 aa, unidentified
MAKKRNNKSKDSKRHRQSLKTIQPNSAGIDLGSREHWVAVPPSKDGTPNVERFGTTTPELLRLADWLKEQQIVTVAMESTGVYWIPIFEILDSRGFEVLLANARQISHVPGRKTDILDCQWLQLLHACGLVRGSFRPSDNICQLRALIRERNKMVQQRSDWIRRIQKNLDQMNVCVHHAVSDITGVTGMAIIRAIVDGERDPHALARLRDSRCRKSEKQIAEELTGNWRPEHLFNLRQALKVYDQLCAVITDYDSEILTYIAMLQPQDATDTSAPPPASKTKAKNISKRGQEPLRQALYDLSGFDLTSIDGIGVDTATVIVSELGLDFTAFPDESHFVSYLRLAPNLSISAGKKVPSKFKATTCTRVSTALRMAALTLRNSNTALGAFYRRVSWRKGASVAVFATARKLAQLIYRLVRYGQAYVDAGAQAYETRYNQRRLISYTKALNKMGYNVEPLSTGEAIPT

SEQ ID NO: 213346 - protein, 338 aa, unidentified
MYYTGIDLHKFTSYLTTVDSVGNIVKQQNIKNVDYNFVQYFNSIPGEHKTTVESTMTWYWLNDLLDSLKIPLVLAHAKYVKAIAYAKVKTDKVDSHILAQLLRLDFIPQAHKISNENRTLRDALRARLKIVQRHTSITNSMCLLLAKYNFDSPIQLTGIAKYQYEQLEEVELLLKEQILDLEKQLYPSLIPNEDIQRLLWIPGIGKLNAFNIILEVDDIYRFDDVKNFFSYCRLVPSARNSAGKSKQRSSKDGNKYLKVVFSDAAVHAIQYYPVIRKYNNSLLRKKNKQIAKTIIAKEIANIVYHVLKKKTNFNNKFKGNDLEHTKSLQWPRVISPYA

SEQ ID NO: 213347 - protein, 341 aa, unidentified
MNYIGIDHHKQYSHMTLMDEDGKVLKAGKVWNSRSEVEEFLKGTGEEVKAVIEAGRSSYAMVDLLDEIGINVTIAHPSEVRAIAKAKIKTDKRSSWMLAHLLRADLIPEVYTRPRENRQAQRVLRQRAFFVAIRTRVKNRIKSLLAQQSEEALRELNQVKDLFSKRGLELLKQLDLASTDKPLLEASVKIYWHLEERIKESDDLVKSLYKKMVEARLIDTVPGFDKFFSVLVATEIGDVGRFERPEKLHCYVGVVPSTYSSGERSYHGKMIKQGNKWLRWAAVEAVWPAIRADFDLRVFYERQARRKNSNAAKVATAKRLLTIIYRILKEKREYIPYKRIK

SEQ ID NO: 213348 - protein, 344 aa, unidentified
MHIASIGIDLGKTTFHLVALGEHSKVLVRRKFSRAQLLAYTANLPCSLIGLEACAGAHFMGAALRAPGHEVRLIPAQFVKPYRKSNKNDFIDGEAIAEAVTKQNLRFVPIKTQEQLDVQALHRVRDRLVQRRTALINEIRGFLLERGITFPAQPIHLRKNLATVMEDAEQNLSPRLRWLLDRLWQEWKQTEIDIQTITDEIERISIEDERCQRLRQIPGFGPLVSTATVAAIGNGAGFHRGRDFAAWVGVVPRQYSTGGKQRLLGISKRGNIYLRRMLIHGARAVLFRIQYDTAGLGQWVHRLSQRAPRHKVIVASANKLARIAWAVLSSGRDYHHQPLPSAAA

SEQ ID NO: 213349 - protein, 342 aa, unidentified
MAIVGAFDVHRRQVTFDVLDTETGQVRRGLVRPACRATLRRFLAGYAGVGEVEFTVEGCTGWRFIVEELERAGITTHLAEPAATADARGSKRRAKTDRTDARHLRQLLVEGRLPESWIPPEHVREVRARLALYHDLREEHTAWIQRIHATLFHQAVPVFDDALSSAAGRARLESGEGLSSAGVQVVAAALPVLDALDEELHTLHQQLAAFARRQPGCRALQTLYGVGTITSVAIWAFMGDTRRFSSSAQAVRHTGLDVTVYSSDGKRAPGHLARQGPPVLRWALYEAGCNASRTGSPDHDFYHDTKQRIDHKRAAISVARKIARRSHHILRNLGDQAWAPAT

SEQ ID NO: 213350 - protein, 460 aa, unidentified
MDQVPVVGIDLAVTASSELAVASGARIEASRRVASTPRDLTEGIRQSAQGRAVAIVVESTAMAWLVAAVAAVRSGVEHTLYRVSGRKAAALRAFYRSHTKTDHIDARVLARMPAVDDSLRTFAPPAPGELALKRLVVCRHKLTVESTKIANRVRSMLHWAAPGLIGAAGGTVSAGLVEVLKRWPDLRSLAEARATTIALSADWSAARAEAVKQAAAEAVAFYEGYVDFSDVGLELEVALSQRTFLEAQIRRLEERIGGLHNQLYPKDRLLSVPGVGPVVAGVVRAVVGDMSRFANLASLRAYTGLVPREDSSGQNRRRGRISKEGPSVLRWALYLAADAARQCDPALADLYRRLMVERGRTHTQAVCAVASHLVGRIYAVARRGGEYVWRDLDGNKITKEQARVIAQSLRVDPQTRARLRARREEGPRTPRTRQPEAPQDVTQPLADKLTEDALELARKA

SEQ ID NO: 213351 - protein, 348 aa, unidentified
MTKLARIGIDTSKSVFQLHGVDEKEQAVLRKQLRRRQFVVFFAKLEPTVVGLEACGASHHWARELQQLGHQVMVIPPQYVKPYVGRNKNDKTDAEAVCEAMSRPKVQERLVAIKSVEQSAAQMLLGVRESLVKRRTQLTNTIRGHAAEFGLVAARGLDKIEPLLARIAVDAGLPALTKEMFAVLGREYAELGPRIAQIDNKMLAFHRSNEVARRLMEVPAIGPIGACLLVTKIVDPHAFRSARRCAAWIGLTPKDHSTAGKQRLGGITRAGDERLRAVLVSGATTCIQHARNRRGRPSPWLVELLKRKPPKVAAVALANKTARIAWKIMTSGERYDPNRCAARRGLAA

SEQ ID NO: 213352 - protein, 334 aa, unidentified
MKKEIILGVDVSKNKLDLCLLPNGSTKPIEMKVIGNQKEKITKYLISLKKNYDKKDILICLEHTGVYGLALSMALEEQGIDYAMVPALEIKNSIGITRGKTDQVDALRIATYAWRFMDKLTLTKIPSNQLILMQALLALRDQNVKMSVQLQNSLKVHKIASKLLNNDTVIERIAKQIAMVKKEIKEIEKQLKEIIDTNPSIKQNYRLLQSIKGIGPITAVALILTTQNFIKITDSRKYNSYAGLAPFKNESGQMAKKAKVSNIANKNVKRLLHNGACSAINYDRELNAYYNIKLYEGKPRMSLLNAIACKLIYRVFAVIKRQTPFVNLYQNNFA

SEQ ID NO: 213353 - protein, 321 aa, unidentified
MEAVSFEQVVSRGCGLDVHKKTVVATIDGEGLKRTTLEFGTFTSSLTKLKDWLVENKITHVAMESTGVYWKPVYNILEPTGITVWIVNARHVKNVPGHKTDKKDSRWICKLLLAGLLKPSYIPPREQRELRDLTRYRKKLIQDVASNKNRIIRILEDCNVKLSSVLSDTSGITATKLINKLCDGKKVTPEDIDEVYHKKIRATKEEIWEACNGNVTDHHIYLMGTIRSNNRHIESSIEELNQKIRQILSPYENVMELLREIPGLSHKTADDLIAEIGLDMEVFPSEKHLASWVGVSPGNNESAGKKKAAEQPTVTSRQKQH

SEQ ID NO: 213354 - protein, 333 aa, unidentified
MCIYSFFIGSDISKSVIDISYIVDGEPIYLGQFLNSEEGFNDFVKALLKITDVPFCEWFICFENTGVYSKPLLNWLISKDIACKEENAMKIARSLGLRRGKNDKVDSKDISRYAFEKRDSIQATILSKPLIISLRKLLSRRDLLVRQKQSLSVSLTEQKSYIDENLYETLKQGDDILLKAYNDQIKIIEKLIQELIQSDPEVALNDQLAQSVIGIGKVTSAYIIAFTANYTTFKNARKFACYSGIAPFSNQSGTKKGKTKVSHIANKKIKSILSNCIASAITHDPEISWYYNRKVGQGKEKGIVLNAVKNKLIHRVFSVVQRQTPYVKMMRYA

SEQ ID NO: 213355 - protein, 343 aa, unidentified
MQQLYHYIGLDIHKRTVAFCEKRADGKTMDAGMFRAKRDCIQQWAAQRSTPWIAGMEATLFTGFIYDVLTPYAVEIQVGHPLQLKAISCAKHKSDDIDAETLANLLRADLFPACHMASPLVRELRRVLRYRNFLVRQAIAMKNKTTGILMEVGVQYDSRRIHRQGYFYELLDNLQETPESVRELLRTTRCGLEMFQSAQKQLLEALKKHDHLRERVARLMSIGGVGEMTALTWALEIDIPARFSNLKKVQSYCGLCSGRNESAGKNKRAPLSKQRNAHLQTILIEAAKLAPRYNTQLAQVHAAAIERGYNRNRATCAVARKLVAYLMAVDRSGRDYEDRSSTM

SEQ ID NO: 213356 - protein, 338 aa, unidentified
MKKYSGIDLHSNNCVVAVIDEADQVLYRKRLPNELSVIVAALGVHRGELHSVVVESTYNGYWLVDGLMEAGFEVRLANTAAIKQYEGLKHTDDGDDAVWLAHLMRLGLLPQGHIYPKAERAVRDLLRKRSQLVRQRTANVLAIENLVARNSGRLINGNQVKRLSPADLPAIEPEAERRLAIAANLAVMGTLNEQIKQLEMAVKARTKAHEALPPLKTVSGIGETLALTIALETGGIERFAKVGNFASYCRAVDSRRLSNGKKKGEGNAKCGNRYLAWAFVEAANFAVRYCAQAKRFYQRKRAQTNNAVAIKAVAHKLARASYYVMRDRVPFDPARCFS

SEQ ID NO: 213357 - protein, 351 aa, unidentified
MVIIGVDYHPSDQYIAFADTETGEHGERRLNHSDGEAEKFYRELAARGVGVRVGMEATGYSRWFERLLAELGIEVWMGNAAEIKTKRVRKQKTDRNDAQLLLKLLLENNFPTIWVPSPENRDLRQLLWHRHRMVQMRTRIMNQLQALAMNEGQRRKKKLWSDQGRVELEKLPLAPWASRRRQDLLELLDRMNPTIAELTKVVEQEAKKRPEVLRLMSHPGVGPLTALAFVLIIGTPKRFQCGKQIGSYVGMIPCEDSSAGHQRLGHITKQGSSLLRFLLVEAAQAGARYDADLRRRYIHLAMRRQRNIANVAMARRLAVRLYWMWRNGWEYSKWAKFGSNAGQLVLGQGVN

SEQ ID NO: 213358 - protein, 343 aa, unidentified
MEHYAGIDVSLELSSVCVVDATGRIVREAKVPSEPEALVGFLGQLGLPLTRVGLEAGPLSQWLHAGLTGAGLEAVLLETRQVKAALSAMIVKTDRKDARGIAQLLRMGWYRPVHRKSPPAQEVRALLVGRKLLQGKLVDVELSIRGLLRGFGLKLGEVSKGRFAARVRELVAGQPMLERVVEPMLRARDVLRAEYQVLHRAVLAIVREDAVCRRLMTVPGVGALVAVTFASAVDDPARFRRSRAVGAHFGLTPKRYQSGETDVTGGISKAGDGMVRAALYEAAHAMLTRTGRFSTLKRWALEVAKRRGMKRAKVALARKLSALLHRLWVDGSEFRFGREAAEA

SEQ ID NO: 213359 - protein, 461 aa, unidentified
MKSKKPTGKNKESVRSKVDWKALEIVHPNAAGIDVGGSEHWVAVSPERDPEPVRSFGCFTADLRAMAQWLIEKGVRSVALQSTGVYWMPVFEILEQHGLEVYLVNAQHTKNVPGRKSDVQECQWLLKLHTFGLLNNSFQPTDEIRIARALWRQRGNLVADASSAVQRMQKVLIEMNLQLSNVLSDISGVSGMKIIHAILDGERDPWELAALVEPEVKATPEDIVKSLEGNWRAELLFVLRQQVELYRTYQEKIRDCDLELRRHLKSLGSKVDLEAQPLGARPKGKKSGRNTPQFDLRTELYRITGIDWTQVNGMDVVTAQTVIAECGADLSAFPSEKQFTSWLGLVPSNEQSGGKILKRRTRKVVNRAATAFRNAASTLIRSQSYLGAQYRRLRTRLGAPKAITAMARKLACLFYRLIKHGQQYVDKGMEYYEARHREQQIRSLMKRAQKLGFQVVVSKTA

SEQ ID NO: 213360 - protein, 353 aa, unidentified
MRISIANYQLLFPMDVDKKSIHLAVMNKQQLLRKLTLPYDPANLLNYVRKHFAGQRGFFLYEAGPTGYGLYDYLMEHGEDCAVAVPSMVPKAPGQRVKTNRLDAYNLGVQARTDDMKFVHVPERKYRDLRHLTRLRLRYGKRIAGTKNALRGLYLYEGIAFPNGKWSRRIISELQGIRYTAAVEFKVQQLLTDLDFFRVHELKTKAEIRRFCREDEELNHCIVYLMSLPGVGWTVSSYILGALGGFKHLTSAKKSSGFLGLGPRENSTGEKVRRGEITAVGDPNARKMIVQASWVGIKKDLELRAVYDKVSNRNPERFAKQKAIIAVARKMVCRVHAVLRDQRPFENRQQKVA

SEQ ID NO: 213361 - protein, 385 aa, unidentified
MSQLNDLSRSLTSLEQDNAIIAVIETSQSSWLVAGIVPGIERHPLKKLEPNEAELLRLLMRWRAEATKMGCTITRIAVAYEAGRDGFWLARWLRAHDIETYVIHPTSVAVSREHRRAKTDRLDTGLLKRVFIGWLRGEPDHCHMVTIPTLAEEDAKRPNREREGLVRERTRIVNRMKSCLARFGVRSFKPTLRKAPERLATLVTPEGVPLPANTLLELRRDMARLRFIMDQIKEVEEARAQRLEQAPQEKSHAMVRLLARVIGVGIETADMLVHEILSRSLRDRRAVARYAGLTGAPDESGSRRQEKGLAKAGNARVRRGMIQLAWRFLLFQKDSALAQWYRTRTESAGKKRKTMIVALARKLLIALWRLVTIGEVPAGVVLRAA

SEQ ID NO: 213362 - protein, 345 aa, unidentified
MHIASIGIDLGKTTFQLVALGERSKVLLRKKFSRAQLLAYTATLPHSLIGLEACAGAHFMGGRLREQGHQVRLIPAQFVKPYRKSNKNDFLDAEAIAEAVTKQNMRFAQLKTQEQLDWQAMHRVRDRLVQRRTALINEIRRFLLDRGIIFAAQPIHLRKNLPGVIEDAEQSLSPRLRWLLNRMWQEWKQIDTEVQAITEEIERISKDDARCQQLRQIPGFGPLISTATVAAIGNGAAFRRGRNFAAWVGVVPRQHSTGGKQKLYGISKRGNVYLRRMLIHGARSVLFRVKYDTGGFGQWVRRLAQRAPSNTVVVAIANKLARIAWAVLSSGRDYRHQPLPHPAVA

SEQ ID NO: 213363 - protein, 369 aa, unidentified
MEKDTTYVALDDSKRKIVVGILRPGSTQPELREIANDPRQIRRLFERLKREGPVAACYEAGVSGYDLYRQIIGLGVTCDVIAPALTPRRPGQRIKTDRRDAAKLVRLFRAGELTAIHVPAEAEEAVRDLVRCRDDIRRDVLRWRHRVLKLLARHGRAYLAGKNWSQAHWRWIREQRFDLPPLQRAFEATVFTLEQALARQAELDKELEAVAATASYREPVGWLRCFRGIDTLSAIILLAEGVDFQRFRRPRELMAYLGLVPSEYSSGESQRRGALTKAGNSHARRVLVEAAWHYRHRPTIGRALASRTHGQPDEVIGQAWRAQQRLHRRYRHLVGHGKRTPVAVAAVARELVGFIWAAMTRHESRRAAA

SEQ ID NO: 213364 - protein, 396 aa, unidentified
MRNDVTIYVGIDFSKEKFNACLLMEQGVMGESEFPNSKTGYLKLTKWVKNTSELGRSFDSSLVLFCGEHTGTCSIGLCEYLYAKGMKIWLESALKIKYGSGLKRIKDDKADAEMIAYYAKRFYEPGSCALFEPDSADLKTLRTLYQFRNRVVCDRVAIGNRISSGAFDCSTLVRNRMVKHHKEAQKDEKDIEKEMVKLMETSEELASNYQILISFKGIGPITAAALIIYTSNFKKFDNPRKFACYCGIAPFGKQSGTSINTKPHVSRFAHIGIKAAIVQACKSAMQHNAVIKAYAQRLYAKGKHEGIVMNNVKNKVMHIIFKMIQTQTLWEHEYQQKHMKECKAIPGKNGIGATEAAPIINATLKTSSSVVECTFLEEHSFQKNSKKTSSFSCVET

SEQ ID NO: 213365 - protein, 323 aa, unidentified
MLTAPTPSFDLSSALVVAVEISRPTWVIAAHVPGLGHVKVRRRIEARAEALLLAIEQLKRRAATGIDHVIVTYEAGYTGFWLARLVRRHAIEVYVIQPVSVPVDRRRRRAKTDAIDADLLLRTCLAFLRGEPRVCSMVPIPDQKDEDARHLVREREDLIAERIGLTNRIGAILATLGVEEFDPLRRDRRVRVAEVRTALGEPIPENAKARILRLIERLELVLDQIRTVESQRDALAVAASAGAPETMTKRLTGLRGVGVQTATVLVREGFVRHFRSAKALGSYAGLVGSPFASGGLSHEQGITKSGNRRLRTAVVELAWLWLR

SEQ ID NO: 213366 - protein, 369 aa, unidentified
MTQFNTAFVGLDVHKNSIDIAIADAGRSGEIRHYGAVGGDLDSFGKAVRKLRSRHADLHFVYEAGPCGYEIYRYLSQQGLPCDVIAPSLTPRRAGIRIKTDRRDAKELARLHRAGELVPIYVPHAEDEAIRDLVRCREDAKIAERKARQQLKALLLRNGIRYQGKSSWIPAHLRWLSELKMPLPAQQLAFQEYLNAVTFAAERVRRLEQQIREQVESWRMKPLVEALQTLRGVQLVVAATVAAELGDLRRFDNPRKLSAYVGLVPSEHSSGNSTRRGAITRTGNAHVRRVLVEAAWAYRLPARVSRIIRLRQESQPQEINAISWQAQVRLCARYRRLMAAGKCKQQTTVAIARELLGYIWDIAQQVEIN

SEQ ID NO: 213367 - protein, 354 aa, unidentified
MGLFTGVDLHSNNGYYGIINEDEERIFKKKLPNHLPTVLSNLEPFREDIVGIVVESTYNWYWLVDGLMKEGYKVHLANPSAIKQYEGLKYSDDVREAFFLAQLLKLGILPEGYIYPKEERPVRDLLRRRLILIRQRTSHILSFQSLITRNTGVKMSCNDIKKLEVEDVKRFLDEECLILSGETNIAVIRFLSKKIGEIEKAVLKRVKLKEEYKKLLTAPGIGKILALTIMLETGDIRRFAKVGNYSSYCRCVKSEYITNNKKKGEGNRKNGNKYLGWAYVEAANFAKRYCPEAKKFYQRKMAKTNRIVATKALANKIARACYYVIRDREVFKVEKVFGRREGCGSEPRKGLVKS

SEQ ID NO: 213368 - protein, 361 aa, unidentified
MAMQKRITKKDQFFNNINLTVDDDVYVGIDVHKKSCHVAIWLNDAIAVTVGTPTDNLAIAQMLQKLTPGLKQIVYEAGPTGFSLARTLRAASLPVAVIAPSKTLRPAAQQSKSDRLDCRKLAEFAAKDLLVEVAIPGKQQEADRQIVRLRNQLGDKRIRIKQQIKSMLLQHYIKEPHGLTRWTRQSVIQLGTIELRPEIRFTLDIMLDELSYLESQIKRVELQLKNTFGKNRHAREIEILQSHPGVGPITARQFRAEVFSPDRFSKSTQLTRYLGLCPRVSQSGQKRIDGRLMKAGQIKLRANLVEAAWAWVRVDPAAKETFRRLLSNTGEPNKAITAMARRLAVHLWKMLSDGKLYRKTA

SEQ ID NO: 213369 - protein, 400 aa, unidentified
MYYCGIDIAKRKHEASVIEQSGRAISRSFSLENSADGAARLFNFFAENGIGKDSVIIGMEATGHYWLSLYSFLTEEGYTVKVINPIQSDAFRKMYIRQTKNDSRDSFIIAQIMRFEEYRTTELAEENVIALRQLSRYRLCLVESAGNCKRRIISLLDQMFPEYADLFSDIFGATSLEILESYPSPDDIMNVPTQQLADFLAKASKGRFKEKKARELKEIASGSFGVGFAKDAFCFQMKQLVTQLQFLEEQLSDLEQEIDLLMQSVDSPITTVIGIGPVLGAAILGEIGDIHRFDHPSKLVAFAGLDVKVVQSGEFTGTQGKMTKRGSPFLRRALWLAANVAAFNDPAMSAYYQSLKNRGKHHYVAISAVARKMCNIIFAILSTNKPYDPYYPKRIQTISG

SEQ ID NO: 213370 - protein, 397 aa, unidentified
MSTRSVYDMVSAGGMDVHYKFSQVTMRDEQGQVVRRERLDHPDRQALRDRLAQWPKGVPFVMEASFGWGWVADLMNELELTPVLSNCLKVERMRKARGLAKTNKKDADLLSLLPSEKDDWWKVWMAPPEVRDQREWMRYRSGLVKIGTQTQNRIHAVFHRHGIFHEFSDLFGAKGRVFLAELCKDGRAPDVQLAPGALNELRGQIRLLGHVRAQLAEVAKKLRGQLNRSPLAKRLDGIPGFGLILAHTLMSEIGEIVRFRNHRKVASYSLLSPIADDTGEDDPGRPPTGRRIGKRGNVTLKWAFIEAAHGAVRSGGKWRKIFDRYTDGGKKDRNRGYIKVARELVKVVDVVWRKGVDYTDNPPARPRASRRDKARRYFGSTRSGTGQPCRAMTAAQS

SEQ ID NO: 213371 - protein, 467 aa, unidentified
MSSKKIQIKKRAGRKKKGFSFGDRPLVEPNAAGVDVGAREMYVAVGPDRDPEPVRVFPTFTADLEALADWLLDRGITTVAMESTGVYWIPLYQILEDRGIRPCLVSARHMKNVPGRRTDWHECQWLQYLHSTGLLRAAFRPDQEVCAVRTLLRHRNELVQMASQHVLHMQKALTQMNFQIQHVISDIVGVTGSAIVEAILAGERDPAVLANLRHSNIKADAETIRKSLEGDWRQEHLFTLRQSRDLNNVYRKCIEDCDREIAERLGRFESKVDIERNPLPKISGLSQKRRTKRTGDFRFDVRKEAYQLYGIDVTQIPGLNGLVIPLFSEVGRDLASRFGNSARFASWLGLCPDNDKSGGKVLWKAVRRIKNRAGHMFRMAAAALHHSHSPLGDFLRRMKAKLGPAAGITATAHKIAQIFYTLVTRQIEYDDSAWAARDTQRNQRFEQKIKRQARDLGYQLVPLQPEA

SEQ ID NO: 213372 - protein, 342 aa, unidentified
MDHIGIDLGGRESQVCVRNGEGVILEEARRATRALGPWLATRSPARVIVETCTEAFRLAAIARQHGHEVRVVAATLVRTLGVGQRGLKNDVRDARTLSEASCRLDLPSVHIPTVASQEVKAICVSREALVRMRTLLVNRVRSYVRSRIGHPVRATPDTLAGKVRQALLVDPEGLPAHLERVLVVLETLRTQIASADAELKALASDDARMRRLMTVPGVGPVTSARFVAALDDVDRFPNASSVASYLGLIPGEHTTGFRTKRTRLTHAGSPQVRWALGQAAWSLYLHRPRDPMVLWAKQVAARRGSQVAIVALARKLSHVLFAMWKHETTYDPSRSARAIIAA

SEQ ID NO: 213373 - protein, 423 aa, unidentified
MKVVYQTCCGVDVHKSFLVATIIKTISGVEPSYQKKRFSTFNNSILQFKNWLIENQCRDVCMESTGKYWVPVFNLLEDDINVTIANPKWVKAVKGNKDDTKDSKWIGDLFRLGLVPGSYIPCKPIRILREFTRYRYKLTSCRTSEKNRYQNALTVCNVALDSVVSDIFGKSATSVIDYLIERSDNSINHEEIASRLLRSLKKKSDSVIESIEGYQMTDSQKYRMRLVRAHMDYITAEINDVDSMIENMISSNPDFENAVRFLCTIPGVKRDSAITIISEIGTDMSQFSGSKRLCCWAGLTPGSNESAGKKKSVRITRAGVYLKPALVQVAHAAVKSDKSPYYKQKCERIMKRRGKKRAIIAIARMILTAIYQMLSTGEAWNPTDLYKIDIPEPLKEKQKEKAIKQAKKLLIREGILSESQLAS

SEQ ID NO: 213374 - protein, 338 aa, unidentified
MHITTLGIDLAKQVFQLHGVDARGHAVLSRRVKRSQLVEVIASLPPCVIGMEACGSAHHWGRAFEQLGHTVKLMSPQYVKPYVKTNKNDARDAEAICEAVSRPTMRCVTIKTVDQADLQAVHRARSLLIKTRTAFINQIRGLLAEYGLVIAQSPEKVRPALVRFLDDAQTGLTAFARETFSELYEQLVALEQRIAKVNQRLERLFRTHPICRKLAAVPGIGPLTATALLAAVSRPHVFQNGRHLAAWLGLVPRQFSSGGHARLGGLSKRGNRYLRTLLIHGARAVVQRAAHKTDTRARWLWALKCRKGTNVAAVALANKNARVIWALLAHDEVYRPSA

SEQ ID NO: 213375 - protein, 452 aa, unidentified
MANSAKRKQTAKGLRFEVVNPNAAGIDISPKEMQVCVPADRDGDCNRTFGVYTDDLHYIAEWLKACRIDTVAMESTGIYWLPIFRVLKDKGFDVILVNPSDVKNYSGRKTDASDAEWLMMLHSYGLLKGCFQPENIARTMRELIRHRDNLIRSASREVLHLQKAMEQMNLKLDNVFSDILGKSGQAIIKAILSGERDPKKLSALADPRCRTSVEEIEKSLQATWDEEHLFEMKQSNALYQFYQQLISECESEINKIAERYTAMVDAPKAELLRSAKYNAKKNQIGFDVEKYAFELWGVNVMRMPGMSRALLLRLLGELGQDFTMKFPDVKHFVSWANLVPNNKISGGVLLSSKVPKKKNPVGMVFRQAANSLKAAKCPLGDYFRHIRAKGGHLQAMVATGKKLASVFYIMVQRKVEYDEEIYTIHKRTELQDKVSYLQKRLKRMELELANCS

SEQ ID NO: 213376 - protein, 432 aa, unidentified
MNRLQVGIDFSQKKADFCLLFPDGQPLESHVSFANSRSGYSSAKQLLIDALDTYAFDGVDISGEATGYLWLPFFLQLSADPDLTLWNMDLFLLNPRWVKWFKKCFAEDHKCDGKDAFYITERTRTHRPDVAWSPPDCLPLRFYTRLRFHIVQNLAREKCYFSAFLFLKASSYRCIKPFSDVFGVTSRLVLTQQPTLDELADLPVEDLASHLYELSGNHLPDPLNNARKLQRVAKESFHLDQPLVLPVQRILDLTLDHIRFLEAQLEQVDYWIAAELENHPVIAQLATIPGVGPVFSSGLGAEIGGIQRFLQGQKWDKKRKRYRPRNLRDAEDAVAKIAGLWWPRADSGDFEAQDRHMAKSGNRYLRYYIIQAANLMRLHIPEYAKFYARKHKESSKHHHKRALVLTARKSVGLVVGLLHRDEPYRSKEDRRT

SEQ ID NO: 213377 - protein, 339 aa, unidentified
MNSMAVGVDIAKQVFQVHYVDQATGEIVNKPIKRAKFLEHFANRAPCLIGMEACGGAHHWARQLTQMGHEVRLMPAEFVKAFNIRNKNDAADARAIWLAVQQPGKPVAVKTEMQQAMLALHRMREQLVKFRTMQINGLRGLLTEYGEVMSRGRAALNKEIPAALGRIAARLPAALIDTLREQWNGLARLDEQVAEIERRIREWKKEDQAVKAISEIPGVGLLTATAAVAMMGDAKAFRSGREFAAWAGLVPKQTGSGGKVNLHGISKRGDTYLRTLLIHGARSVLTHAKAPGPWVEQVKKRRPTNVVIVALANKMARTIWAVLAHDRPYRKDYASVKPA

SEQ ID NO: 213378 - protein, 390 aa, unidentified
MRFAGIDIASETHVVAVVDIEGKVLVKATEFTEDAGGHARLLELLGSPSDCKVAMEATGHYWQNVFAALASAGFEVSLLNPLSTRRFAEADLARTKTDAIDAVGIARFAQQKRPVATKLPDSATQELRELVRLRDRVVQDLGDAVRRLHRVVDLGFPEFTRYVKTLDSELATAILHEYPTAAAFPLATRPLSKLVYDGRHKVGPELARQLVDAAKSSVGRHHGDAYRVQVRYACEDVDVARRRLRELERRIETTLRDHEVGTLLTTIDGIGPQTAARLVAEIGEFERFSGPEKLAAFVGSIPGINHSGKSRPNGAMTTIGNARLRSALWMPLLTAVRRNAWLRAYYLRLVANGKLRKVALVASMRKLLHAIYSVATNRRPFVARIPEVTP

SEQ ID NO: 213379 - protein, 365 aa, unidentified
MDKAYYTTIGMDVSDRKTQVCVMAKTGATPKIVMETTIPTTKDGLAKFLSTQDGAAPVAFETGMHCRWMSEVAEGMGFKVYVANPCRLRMITESKTKNDVNDARMLARLALSDPGLLHPVKLRGPEHQKMLNLHEMRNLLVRQRTGIVVQLRAIAKSMGFRIAKCQAAGFHNLDRKAWPEGFRDIAWPMLKNLEQLAVTIKTYEKQIRELAETPTFKAQVERLMEIRYVGLFVATGFIAVTGGDMDRFEKPRDIGPWLGVTPRQDQSGDIDRQCHITKAGSPLMRRLLVESAQMILRDGSADTDLKAKGLRICAHGAKIAKRKAITAVARSLAVLMVAMLKKPDAPYVPLSERCEKELLAMRATA

SEQ ID NO: 213380 - protein, 338 aa, unidentified
MSEKEAILGIDISKDKFSAALLKGEKKSQVKEFSNNIEGFEQLKQWLEQNQLEKVHACLEATSTYGHSVATYLHGLGHVVSIVNPARIKGFAQSRLSRTKNDQADATTIARFCAALKPQAWTPPSPEMAQLQSYSRRLRALEQMATQEKNRLKTTVDESLIEDIEAHLVFLETQIDNVKKRQKELLNEYSSLKSQADLLTSIVGIGEPTAMTILAEIGDINQFSSARQLAAFAGLTPQEHQSGTSVKGKTRLCKIGNPHLRKALYFPALSSMRHCSPMKDLRERFLEAGKNKMQIVGVVMHKLIRIVYGVLKSGKPFDQTKLALPNVVGSVLNLWKHI

SEQ ID NO: 213381 - protein, 369 aa, unidentified
MSENITWVGMDAHKQAINVAVLSAPEARPQEWIVENTPAAIRRLVRKLLREAAGGEVRCCYEAGPCGYALQRQIEAEGAVRCAVIAPALIPRKPGERIKTDRRDARKLAELLRAGLLTEVHAPTLEQEAVRDLCRAREDAQQDLLRCRHRLTKLLLRRGVVYRAGKKAWTQAHRQWLRTLKFEQASEQAVLDDYRLAIEHVEERLKTLEQHMLTAAQSGGTAKPVGWLRCFRGIDTVTALSVVAELHGLERFASPRELMAYVGLVPSEHSSGSRIRRGGITKAGNTHVRRLLIEASWHYRHPPRLGAALKQRRAGQPAHVIAIADKAQQRLYRRQRHLLAHGKPPTTAVVAAARELTGFIWAALRSPPA

SEQ ID NO: 213382 - protein, 411 aa, unidentified
MKVVHEVCCGIDVHAKMLVACLRLANGEKQLRTFSTMTAELLQLRDWLVAAQCTHVALESTGVYWKPVFNILEDGLTVILINPEHARALRGRKTDVKDAEWLADLLRHGLLKASFIPPPVIRELRELTRYRESLVREQSAVANRIQKLIESGNIKLGQVASDALGVSGRAILKALATGEKDPRQLVALARGKLKEKSLSLERALEGRLTVNQRFVLGELLRRWEELETADARVTQEIDKYVQAHPKLARAREVLDSIPGIGPRAAEIIMAETGIEMTVFGDAAHLASWAGLCPGNKATGGKRLSGRTRKGNTYLRSVLVQAAWGASMKHHCYLSSQFQRLTKRLGRKKALVAVAHSLLVIIFHVLQRDQTYTELGGDYFDRHHVEQQREYYLRRLQMLGLKITVEELPAAA

SEQ ID NO: 213383 - protein, 346 aa, unidentified
MEYYVGLDVSLKQTSVCVVDQSGAIVREGVVDSDPEAIASFVRSKAPGTVRIGIETGPTTTWLWTELKRLGLPVICIDARHAKAVLKMQINKSDRNDAAGIARIMQTGWFKEVRVKNLDSHAVKALLASRALLVKIKRDLENQVRGLLKNLGLVIGRAKFNVFAVRAEGLIENRPELVAAVRPLLEARKAIEQQVDDLDRKVHKLARHDLQVRRFMTVPGVGPITALCFKATIDDPTRFKRSRSVGAYIGLTTRRHASGEIDWSGRISKCGDAMLRMYLFEAAGVLLTRVPKWSGLKAWGAKLTKRNGLRKAKVAVARKLAVILHRMWIDGTEFNWSTKKAAAEQA

SEQ ID NO: 213384 - protein, 468 aa, unidentified
MGRKGKRTKGMEEAHPFAGMSRVNPNAAGVDIGAVEIVVCVAGDGETQIVRAFGNYTVDLQAIGRWLKEHGVKTVAMESTGVYWIPLFEELERQGFECLLTLAPHASAGVSSRSMRRVSGRKSEITDAQWIQTLHTYGLLESSFRPQAELIALRTLLRHRSQLVEHRSPHIQHMQKALLQMNVQLSQAVTDVTGVTGQAIMWAILAGERDPQKLAALREPGCKKSEAEIGRALTGTWRAEHLFVLKQSMEMFGFYTQQIQACDDEIERVYTLTRPDWDAGELKSLSIRKRSSHSKNKPQNSESIRKHLKRISDVDLSAVDGFGASLAQTVIMEVGTDMGKFPSEKHFCSWLGLAPKHEISGGKVLKNKTLKTKNRAGQAFRMAAQSVKQADCVFGVMYRRLKARLGPAQATVATAHAIARVVYRMLKYKVEYETISVEEYEKKYRDQQLKYMKKKAAKLGFQLVPIPG

SEQ ID NO: 213385 - protein, 464 aa, unidentified
MKDNSLSQYPTAQQPPALPPHLSQLNLNAAGIDIGATRHYVAVPAGRDAVCVRDFGTFTTELNQLADWLVQCGIDTVAMESTGVYWIPVYELLESRGLEVKLVNARHVKTVPGRKTDVLDCQWLQQLHTFGLLAGAFRPPEQLCVLRAYLRQRANWVRYAAVHIQHMQKALNQMNVQLHHVVSDITGVTGMKIIRAIVAGEQSPQRLAGYRDHRCKQSREVIAQGLTGNYRPEHLFALKQALELYDTYHAKITECDQAIEQFLQTFDSQLDPATSPLPPPRRSHQPERNQPRLDLRTELYRITGVDLTQIDGISAYTALVVVSEIGLDMSRWPTYKHFTSWLGLCPGNKKSGGKVLSGKTKPSANRAAAALRLAAQGLHHSQSALGAYFRRQKTRLGAPKAATATAHKLARLIYSMLKHGTAYVDAGQDYYEQQYHQRVLQNLQRKARAMGYQLVAVESTDQAA

SEQ ID NO: 213386 - protein, 346 aa, unidentified
MDQIIRIGLDTSKRIFQLHGVDAGERPVLRRQLSRDQMLALFERLPPTLVAMEACGASHHWARVLRAIGHTVRLIAPQLAKPYRKRGKNDPADAEALCEAAGRPSMRFVAVKSAEQQAALMLAGTRERLVRERTRAMNAIRGYAAEFGLIAAKGAANIPKLLARIAADPAVPALAREMFALHAEEHARLDAQVAAIDAKLQDWHRQNPTARRLTAIPGIGPVTASLLAMKVPDPAAFRSGRDFAAWLGLTPKNHSTAGKQRLGGITRAGDETLRSLLVVGATAVIWQTRRGAARRPMAWLVGLLERKAPKLAAVALANRMARIAWKLMTSDEVYHPARPAAAAAAT

SEQ ID NO: 213387 - protein, 343 aa, unidentified
MQTISTIGLDIAKSVFQVHGVDAAGQVIVRRQLKRRQVLTFFRKLPPCLIGIEACASSHYWSRELQSLGHTVRLMPPAYVKPYVKRQKNDSTDAEAICEAVTRPNMRFVPTKTIEQQSCLVLHRTRQLFIRQQTATINSIRAHLAEFGIVAPVGRRGVEQLLEVIADSNDARVPEVARACVAALGVQLRQLKAQILELDRRITAWHRSSELSRRLNEIPGVGPALATALVASIADPKVFRSGRDFSAWIGLVPKQNSSGGQDKLGSISKQGDRYLRSLFTTGALAVIRYAKIHGTKHRPWLAALLARRPTKVAAIALANKIARIAWALMTTCERYKQPAALRV

SEQ ID NO: 213388 - protein, 490 aa, unidentified
MKSIFPRSCPAIENVFLNAGSPRKVILLPLDYAKRSHTALACDGEGHQLRAPFDIQNDLAGVDFLLDVVSGLRRKHHIRPQHVIYGGEDCGSFCFNFIHALAERQNLVIGLNAQDADLERGKLPASTDKLDLTGIAALLMKRQGRVIGAEYSAAAILRRLTHHRNSVVGAHSDSARRLHQLVDQLLPGFLDEKKSGLSPFTRASLWIMSDRFSPAGVHSRQRPALIAKFQEFGVRNPEKAATMLKALAERVLPPPPALASTLQTALQHEVGIYSGLEETLQRLLQSLAVELAPTPGALLTTLPGIAIPLAAGLFAELGDPARRRALRRLTSYGGLAPRLKQTGGPEKEARTRGVSRRANYTLRNLLFLLAHQIDQHGHPELKADYNRRRDAGQRVQFTMARRMLRIVLHVLDHRDFFVPPSLVHSPAPDALRQHYVSTWRPLLYKWRNAGAIRQAFTPGNPLEDWRTLINETHHLNLSNLSPQAADEPEG

SEQ ID NO: 213389 - protein, 350 aa, unidentified
MIRLGVDAHKRTHTIVAIDDAGRVLDDITVQTTVAGHVRAVAWAEQLGDERCWALEDCRHLTRRLEQDLIRAGEAVVRVPPRLMGQARRGSRKRGKSDPIDAEAVAIAALRNPQLASARLDGPERTIRLLVDHREDLVTERTRIHNRIHWHLHELRIDDIAPKTLSRYTVLDGLTARLAEHDGTVANIATELIDRCRHLTVRINDLEREIAELTAAQAPSLLALPGCGALTAAKLIGETAGVDRFHSKAAFAMVNGTAPIPVWSSNRERFRLNRGGNRQLNVALHRIAITQMRIHPPARAYVDKKLAEGKTKTEAIRALRRRLSDVVYRAMVTDQQTPQPAPATCVALAA

SEQ ID NO: 213390 - protein, 499 aa, unidentified
MENIFHYKVWAGVLFEISNGCSQRHRIVDQFFYIVPHLDCHKIIIMEKEGKINASDGSVKKKRYSQCLPVYNSFAGGIDVGDTMFDVAVSDGAGNFEVREYQTFTEDTVSLVNWLLKEGITTVAMEATGVYWLNLYLMLEDAGIEPYLVNAKHVKNVTGRKKDDTDAIWLQKLHTCGLLQKCFQPESEMRELRTYVRQRKNLVNISSDSVRRMQKALELMNIKLHTVISDILGKTGLQMVNAILNGERNPDELIKLKDPRIKASEEDIKKSLTGMWRDEYLFMLKQAYEEYSFYQSQITSCEERIKERLLKQVVQILDGDITDLQLKKNKKKKNQFEFEIRPMLNIIAGVDLCEIDGISEISSLELISEIGTDMNKWISGKHLSAWCNVAPNTKITGGKIISSKMQKKKNWAGQTLRMAASGLSRSKSPLGDYARKMKSRLGKKAGVVATAHKLALIIYSMMKEKLPYNPQITLDNQEKWKLKRIKYLEKQLYKLKIAV

SEQ ID NO: 213391 - protein, 344 aa, unidentified
MTEITTVGLDLAKRVVSLCGEDATGRVVERRSLRRESVLAWFAPRPACVVGMEACASAHWFARELTALGHTARIIAPEFVRPFRLSGKNDANDAQAICAAVRQPHLRFVTVKGAAQQARLVVHRLRQGWQEERTAGLNRLRGLLAEFGRVYPNSAMAALTGARQVLADTTLPAALRRGVARQLEHLRQLEALLAECDAEIAQDVRDDPRAQRVMRLSGVGVLTAGAVAATVADAQQFRCGRQFAAWLGLTPRQYLTGGKPRLGRITRRGDTYLRGLLVQGARSSLQSALRIAPQRRTRLVAWIVATYQRIGYHKTLVAIANKHARLIWVLLTRDEPLRAHAVTN

SEQ ID NO: 213392 - protein, 355 aa, unidentified
MDNKKYIGMDVHQATISVAVRDSAGKLVMESILETKASTILDFIRGLGGNLSVTFEEGTSAAWLYDLLKPHVAHLIVCDPRKNALLKVGNKNDRIDPRKLTDLLRAGLLSPVYHGESGVRTLQELARTYLTVTKDLTRVMNRLKGVYRSWAIPCAGQTVYAPRHRSAWLEKLVQPGVRRRAEQLYQQLDKLVEIRREARQELLRESRKHPAREYLSQIPRLGPIRVALLIALLQTPHRFRTKRQLWAYCGLALQTRSSGEYRYSGGQLQHSKRPPAIRGLNVNHNHDLKSLFKSTATQASGANDPWGDFYQNLLARGMKPAMARLTLARKMAAIVLRIWKKGEHFNPEPLKRKSA

SEQ ID NO: 213393 - protein, 366 aa, unidentified
MASITYVGLDVHKRTIAAALRDPDTGEFVQWQVAHEPTAVRRLIRRLGEHAPVACVYEAGPTGYALQRQFEAAEIPCLIAAPSLIPVRYGDRIKTDHRDARKLAELLAAGLLTAVHPPTEDQEAVRDLCRCREDAQIDLMRNRHRLSKVLLRRGLGFRDGCLWSKEHRAWLHSLRFERPADQIVFDDYLLAVEQQEARVAALDEQLAAIAEQEPYRTPIAHLRCFRGIDTVTAMCLTAELHDVRRFRSAASLMAYLGLVPSEHSSGEQRRRGAITKTGNRHVRRLLIETSWQYRHKPSVGPRLVKRRRGQPPTVIARSDRAQRRLCRQYRLMVAKGKHHNTIVVAIARMLVGYLWETLREAQPTEV

SEQ ID NO: 213394 - protein, 359 aa, unidentified
MPNIVAEKYKFVAGVDTHAKTHHLSLVNNMGALLGRREIKVLPCQMEKAIDWVVKKTEGNVLFAVEGTSSYGETFTMALTNRGLPVCEVKAPKTKTRGQTGKTDEVDSLLAARSVLIKPIDKLIAPKSQGMIKVLRILLSSRRNIITQFVMDKNALIALLRTNNLTTGYFSQLKTSDIKIIADWSVEPDLSIKTETAIAKLEAKRLASMLCMRQKSLVDNANKLHKVIKALAPSLLDMPGMGPVTSAQILCSYSHKGRFRNADAFACLAGTTPLPASSGNVTRHRLSRFGDRLLNSALTTIVMTRMRCDEQTKEYMKIRTTMGKSHREIKRSLKHYLARSIFKDLEKLDLERDFSIAVS

SEQ ID NO: 213395 - protein, 445 aa, unidentified
MLPTLHAHAAGIDAGSTDFFVAVPDGTVTSFESFTADLYRLRDHLLAHRVTTVAMEATGVYWLALHEILEAAKLEVWVVNGAHVKNVPGRKSDVQDCQWLQQLHAHGLLRKSFVPTEQIRVLRSYTRLRDDHIRTGAMYVHLMQKALDQLNVKLHTVISQITGVSGLAVVRAILAGERDVARLAALCDARILKTKRAAVERSLLGLWKEEHLFALKQALGGWEFCQTQVAECDAALTTQLAALTRDLPVPPAPPPAGPKKKNHARHHVPQVPELHQSLLTLSGGRDAAQLPGFTPSNWLKLLSEVGTDLARWRNEKAFCAWLGLSPGKNQSGKTHRRARRRAKTTAGQIFRLAAHSMAKSKYQALGAFYRRLKARTSAAVANVATARKLAVLFYYAMTQGLAYVERGLEAYEDSYRKQQQRFLHKRAAELGFALVPAQPQTTCVH

SEQ ID NO: 213396 - protein, 400 aa, unidentified
MRKPKQLTTRLRQPQQRAPNDLSRCLAPQDTEQTLVAVVELSLMGWLVAGVVPGVERQPLKKLKPEPGGLLDLLQRWRTEAERLGRTIGRVAVAYEAGRDGFWLARWLKAHGIDAYVIHPASVAVSREHRRAKTDRLDTEMLKRAFLGWLRGERDHCKMVAIPTFHEEDAKRPSRERECLVAEQSRLVNRMKSTLVRLGIRGFNPKLKCASEHLERLRTPEGGALPPNTLAELKRDLERRAFICDQIRKIEEERTAHLKRAPNAGPNKMVRLLARVVGIGIETADLLVHEILLRALRDRRAVGRYAGLTGSPQRSGSISREKGLARSGNARVRRTMVQLAWRFLLFQKDSALARWYRQRTENAPRGRKTMIVALARKLLIGLWRLVREGVVPEGVVMRPA

SEQ ID NO: 213397 - protein, 351 aa, unidentified
MMLIGVDYHPSFQTIAFFVEETGECGEQELNHSDGQAEKFYRDLKQRGICVRVGMEATGHSRWFEGLLAELGFELWIGDPAEIKAKRVKKQKFDREDARLLLRLLRENNFPQIWVPGPENRDLRQLLWHRHRLVQMRTRIMNQLHALAMNEGYCWKKKLFSEQGRAQLEKLALAPWASRRRQELLELLDRMNPTIEELTAAVEREARKRPEAMRLMTHPGVGPLTALAYVLIIGTPTRFQRGKQIGTYVGMIPCEESSARKQRLGHISKQGSSLLRFLLVEAAQAAARIHPDWRRRYMHLAMRRHKSIAKIAMGRRLAVRLYWMWRNSSDYSPSLEFGSYAGQLETRNGVN

SEQ ID NO: 213398 - protein, 351 aa, unidentified
MTTMTSPSQVVTGGVDTHRDMHVVAALDPVGGVLGTASFPTTAAGYRQLLTWLQSFGELGSVGVEGTGSYGAALARYLTNTGVAVVEVSRPNRQVRRRYGKTDVVDAIAAGRAVMSGEATATPKTHDGPVEALRALKSLQRSANKARTQAINQLHAVLVTAPEPLRARLHGLSRTELLATCAAFRIRADDDSLEAITRLTLRELACRIGFLDAQLKTTVTRLRRITTAVAPELVARPGVGPDTASTLLLAAGDNPERLRNERAFASLAGSSPVPANSGQIQKRYRLNRGGDRQANSALWRIAIVRMSSDQATRDYVARRISEGKTKSEAIRCLKRYIAREVFNALPPPALV

SEQ ID NO: 213399 - protein, 366 aa, unidentified
MIEAETKTYGEEHPMESLKYVGLDVHRDTISVVVLEESGKMVMQTILATRSGAIVDFVGGLRGSVHLTFEEGTHSAWLHDLLARRVARVVVCDPRQNALLKAGNKSDRIDARKLAELLRAELLSPVYHGETSTVTLKHLSRGYAALTEDTTRVKGRIKALYRSQAIASGGKKAYGKRHRGQWLVQLTQAGMHRRAELLYQELDALRREARRELIVESHKHDAVKLLCTVPFLGPIRAATLIARVQTPHRFRTKRQFWAYCGLALETRSSADYHFQEGQLVRAKKPAFIRGLNLNHNHDLKNLFKSAATSAGAMPGPFAMFYENLLTKGIQPAMARLTLARKIAAIALCVWKKGEPFNAEYLKPQAA

SEQ ID NO: 213400 - protein, 344 aa, unidentified
MNEISIVGLDIAKNVFQLHGVDEGGQIVLRRQLRRSEVLKFFGKQKPCLVGLEACAGAHYWARAITALGHDVRLMPPSLVKPYVKRGSKSDAADAAACCEAVTRPAMRFVPVKSVEQQAALMLHRARQLLVEQRTQLSNAIRAHMAEVGIVAAKGESGFDALLAMLGNPHDTRAPQALRPILGVLVEQWRGAGAQIEAIDRQIAAWHKGNAESLRLATIPQIGPVIASAAVATAGDATRFRNGRQFAAWLGLVPSKTGTGGKIKLGPITKAGDRYLRQLLVIAGAGLIRRVRKDPSLNPWLADILARRPAKQAAVAMANKLARTIWALLATGATYQADRLKAHS

SEQ ID NO: 213401 - protein, 342 aa, unidentified
MYYIGLDVHKKTISYCVKDASGRVHQEGKLGATRRELDIWMRTLPQPWTVAMEATIFTGWIYDHLHPHATQIKVAHPLMLRAIAAAKKKNDRVDASKIADCLRCDFLPECHMASTEIRDRRRTLRYRYLLVRQMVQTKNRISGLLMETGVTHNKQRLHKVGYFRELLASNEEVSESIRPLLRLSRDTIARLQKTERALVSSLQRDPLLTERIKRLRTVPGVGPITALTWALEMGEISRFRSIRQAISYCGLCGDERSSAEKSIRTPISKQRNKNIQFVLIEAAKLAPRQDHDLALLYEREKQKGNANRATLAVARKMVAYLLAVDRGQRDFVPAEDCRGAAA

SEQ ID NO: 213402 - protein, 397 aa, unidentified
MNPLYVGIDVSSKTNVVYLMKPDGSKISNFSVANSLDGSKKLVKNILSALDKHSLGEVVIGLEATSVYGDNLVYFLREDGSLAAHQNRIHVLNPKQVKKFKEAYNDLPKNDFVDSFVIADCLRFGRINKAVYLDDYRYDALKTLTRARFYAVQNLVKEKQRLINIIFKKYSSLTQDKIFSDTYGATACAIYTEFESADTLVNMDLNELTEFIKKKGKNRFDDPDAVAKAIQKAARSSYRLPKTVNDSVNQVLSISINSIRATEAQIKALEKAIAELPGVGPVYAAGIIAEIGEINRFNSQAALAKYAGLAWKQKQSGDFESENTHLIHTGNRFLKYYLCEAAFSLVRCDTEYNRFYHLKYKEVNKYQHKRALALTARKFVRLVFRLLKDNRLYISKS

SEQ ID NO: 213403 - protein, 371 aa, unidentified
MNTIVYVGMDVHKESYTLCCYCYDTDLVEYRQTIPADYRLVLKYMERVRNRYEGDVTFVCGYEAGCVGYSLYHQLTDHAVDCKILAPTTMAITNTNRVKTDRKDAANIARCLAFHTYSEVYVPDEQDNQVKEYIRMRDDQKLALKKVKQQILAFVLRQGKRFDGGKTYWTIRHMKWLYGLELAPLDKETLSEYLITYEYLVEKIERLDRRIEELASEERYREKVKKLGCFMGLQTHTALSMLVEIGDFERFAKAQKFAGFLGLVPSEDSSADDINRYGITKAGNRHLRRLMVEAAQCYTRGTVGHKSVALKKRQEGCSPEVIAYADKANERLRRRFYRLTLHNGVNRNKAATAIARELSCFIWGMMTDNVA

SEQ ID NO: 213404 - protein, 342 aa, unidentified
MERVYVGLDLGSSKFHQVGINDVGTRMLNRELVTSGGNLVRAFSGLEGEIHVHIEAGELAPWASEIIRPLVTRVVCSHPQTNAWIARDRDKCDRLDAYKLADLLRLNRFKEVHYARQQLRRDFKALVQHHDELTQQQARLKTKIKARLRMQGVITSGTVLFSVGGRQPVLQQVQSVMVRTAIGQLYRVLDQSLVSQSEARQLMLQLARALPEIRILRTAPGIGPVGACRFSAYIHAPQRFSSTRKLWKYCRLSVSHRSSNGKPLCRPRLDRSGCGRLKDVSRKAFEAALRTKTDNGFKRAYYRALAQTHDATHARLTVQRKIVSTLRAMWINQTPYSDELMP

SEQ ID NO: 213405 - protein, 441 aa, unidentified
MEKVIIGVDPHKLSATIEVVDDRERMLGSGRFATDRAGYAAMRTYAKTWPERVWAIEGANGTGRPLAQRLLEAGEHVVDVPAKLAARVRLFDTGHNRKTDARDAHSVAMVAVRTEGLRVLQVDGELEALRLLADRREALTRRRVQTVDRLQALLAELLPGQAKRDITTGQAKAMLATVRPRDIAGKTRRRIAAEELAELIAVDTKMKKATAELKAIVLARGSRLMDIHGVGPVVAARALADVGDVTRFADRNRFASWTGTAPIDASSGENNRHRLSRAGNRRMNHMIHVAAVTQIRLDTEGQAYYRRKRAEGKRPLEAMRCLKRRISDAIYRQLLADAHRAANPDSRDPDLKAGPGGHCGATQESSAVDLPPPIDTSDQPLPGPAHPTLPKTRTRANPHAASAPRPPRRRAGAVKVERPTGRTTLTVTSDGAHSKAPKPRS

SEQ ID NO: 213406 - protein, 316 aa, unidentified
MDIASRSLEARVGQQGATGSFANSPEGIAALGAFCHEHQVELVAMEATGGYEQQAFAQLSEQGLPVAILNPRAVRQFAQSMGSLEKTDLIDAGMIAWYAEVKKSRPVCVAPESQQHLRALVTRLRQLTEMRTAQLNQQRLVTDRAVQASFKKLLAVLGRQIRDLEKRIAALLDQDPLWRELNQAFRTIKGVADRTVARLMAEMPEIGTLSNKTISKLAGVAPLANDSGQHQGKRVVRGGRATVREILFIVASVVGRYEPDFIAFQQRLRAAGKPPKVVRIALAHKLLVRLNAKAREVRQRQAALKDDPSSLLLAIA

SEQ ID NO: 213407 - protein, 342 aa, unidentified
MQITTIGLDIAKNVFQVHGIDSNEKVVVRKQLRRGQVLAFFKALPPCLVGMEACATAHYWARELTKLGHRVRLMPAKDVKAYVKRNKNDAADAEAICEAVRRPTMRFVQVKSAAQQGQLMLHRTRDLLMRQRTQVINALRAHMAELGIVAAQGREGIKELLKIIAREEDVRLPVDAHTSLVVLAAQLQALQTMIRSIEKRIVVQHRSNEASRRLQTIPGIGIIGATAIAATVPDPKVFRSGRDLAAWIGLVPREGSTGGKHKLGPISKQGDQYLRRILVIGAHAVLKRARLHPEQYPWLTGLLARKPFRVVAVALANKMARIAWALLAKGGTYRAPALMAAA

SEQ ID NO: 213408 - protein, 338 aa, unidentified
MVSVGIDLHRRRSDLVGVDGLGSVVWKRRIPSSPADFLRVFGELEPGSFEVAFEATYGWGWLADLLQDVGIPAHMSHPLATKAISSARVKNDTVDATTLAQLLRTHLLPEAWIAPPQAREARRLVRSRAALVRIRSRLRCQVHAVLADHGIVPEMSDLFGVGGRRFLAEVSLPPLSRNRIITCLRLIDAVTSELDSVDQEMRVVFRAHPALPRLVRIPGVGFVTAATVIAEVWDVSRFAHPEQLCSWAGLTPTEHSSAEHTRRGHISKQGSRWLRWILVEAATNHSGSDPNLRRFESRIARRRGLKIARLALARRLLTLCFYALRDPEGCAAYPLVAA

SEQ ID NO: 213409 - protein, 317 aa, unidentified
MGKTNTIVAGIDVAKAKLDVATHGHKLRWQVTNDRVGFQELASLLHSRKVTRVGLEATGGYERGVVEYLRKAGFNVVVLQPRQVRAFAEFILCRAKSDRIDAGLIAACVAHHHIERQTPDPRIAEFADQLTFIEQTEEDIVRIKVRLEHTRDRQLCRVMLSDLERLKARRAKMIAKLVAALRTHEDLARRLDLVGSVDGIGPRTALALIIRMPELGRMSREQAAALAGLAPFVQDSGDRKGERHIAGGRDRLRKSVYAAALPAAFRWNTQLIALYKRLTDAGKPHKLALVACARKLVIFANTVLARGTEWSSRPATS

SEQ ID NO: 213410 - protein, 370 aa, unidentified
MSQSSTLFIGMDVHKDSIAVAYVAQDHGAEVIYLGSIGTRQCDIDQLIRKMQSKAKHLIFVYEAGPCGYWLYRYLSKKDHDCWVVAPSLIPKKPGDRVKTDRRDAVQLARLARSGDLTTVYVPTVEDEAMRDLTRAREDTISDLKDAKFRLKAFLLRQDIRYVGRANWGPAHLRWLSEVVCPTPAQQIVFQEYVRAVNEHTERLQRLEQELQEHVNAWRLNPVVEALQALRGVQFTVAVTMVAEIGDLTRFDTPRELMKFLGLIPSEYSSGEQRRQGSITKAGNTHARKAVVEGAWAYRYPAKVSRHLQLRLEKQPKMIQDLSWKAQVRLCTRYRRLVSRGKHANVVTVAIARELVGFMWAIAKQVPLTA

SEQ ID NO: 213411 - protein, 470 aa, unidentified
MAARKDKADGAGVPGHGGDGAEVAEELTQVVAYAAAIDVAKGSGMVCTRVPGSRPDRRRQKVWQVGATCGQVTALMDHLRAEGIQRLVLESTSDYWRIWHYLAEAAGLEVWLVNARDVKHLPGRGKSDTADCVWHCKLNERGMLRRSFVPPQAVRDLRALTRTRSRLAQDQARHQARVEKILEDALLKISVVISDLFGTSGRRFLDALVAGERSPAALAALGDPRLKATRKELEEALTGRFRDIHATGIALHLRLIDAINAEITALDEQIGQQLAAVPGTAPACSGCGLIGGGHAPDCDDLGILLLGLADRLDEVTGIGAVNGRAIIAELGTDPSQFPTPGHAAGWARLTPRSRQSGETARPGRTGKGNRYIRGALGQAVMTAAKTDTRLGAMYRRIARKRGKQKAIVAVARVICEIAWILICDPSARYQELGPDYYTPRSPARQTQARIREIERLNPGKKVILADDDAA

SEQ ID NO: 213412 - protein, 476 aa, unidentified
MNSKTKRANNQVNSVINVQEQREMVEKANHILSEMKSFTWRDLETQGKFSKNDKLSFISDDMLILGCDIGSETHYARAIDARGRELGRKALAFDNNAKGFQKARDWAVQLAAANDKKQIVLGLEPTGHYWFCLAAWMVSNGISVVQVNPYAVKQTKELEDNSQQKDDRKDPKLIANLVKDGNYGMPYLPEKVYAELRRLSMFREQLTEDRNRNMNRLHREMKIYFPEYKDAFGKIDGAFCMAVLKEAPFPEDILRLGIEGIREIWHEAKLRGRGYSRAAEIVKYAEMSIGLKEGTAAGKEAVRWFAEKIMELDEELEKIENSLSEKCKEIPHAENVLEIPGIGGKILSGILAEMGDISRFDDVKELQKLSGLGLVSCSSGKHKGETRISHRGRKRLRYWLFQAARSAVSHGEEYKRIHAHYTTRAGNPLQKMQSLIVIACKLLRVIYTMLKTGKGYDPEKLLKDIRYPENVQTAAA

SEQ ID NO: 213413 - protein, 358 aa, unidentified
MTATRCETQVITVGVDTHQLVHHAAIVDSRLGSVADREFPATSGGFADLVDWMSRYGQVSRVGVESTGSYGAGLTRHLIGAGVEVCEIQCPATSTRRREGKSDVVDAYSAARQAATGNPDRLGMPKLSTGVVESIRLLKVPRDSAVKQRTAAYSQLRDLITTAPTPIREDLLTKTGKQRVARAIGYRPDPARLDDPTQAAKKSLRALATRIRALDIEIRDADKDLTKLTQRVAPTVLAMPQVGVQSTAQLLITAGQNIDRMRTEATFAKLCGVAPLPATSGKTTTRHRLNRGGDRQANSALYMIIIGRLANDPATRAYRTRRTTEGKTTNEIIRCLKRHLARSIYRALKHDLKHLDDL

SEQ ID NO: 213414 - protein, 346 aa, unidentified
MLIVGCDFHPSWQQVAWLDSETGETGEQKLLHAADEAKQFYAQLGVPALIGMEATGNSQWFIELVEDLGHEIWIGDAAAIRASYVRKQKTDKRDAAHILKLVVEGRFPRLWTPDREQRDLRQLVLHRHKLVIIRSRVKNELQHLSLNKGMQKKRRLWSQAGLQLLRELPLKPWAACRRQDLLGLLAMLEQQIGKLDQAVQQAADQHPQAKLLMTQPGVGPNTALAFVLTIGDVSRFARGKQVASYLGLIPREESSGGRQKLGAISKQGNRLLRSLLVEAAQIAVRCDPGLRKQYLHRCHQKLKGVAKVAAARKLAVRLYWMLRTQTGYPEIVRIESSPRVALVGAS

SEQ ID NO: 213415 - protein, 346 aa, unidentified
MSKHSLRAGDVAALLARFSELQKKALARTGKSFPIIAVQEAGLDGFWLHRVLEREGIESHVVDPASIATSRRHRRAKTDRIDGETLLRTLLAYKRGEPRVCAMVKAPTPEEEDRRRLCRERKVLIAERVQHVNRIKGLLLCQGVSGHEALRRDRRQRLDELKTGDGRALPDHLKAQISRELARLELLLEQIKAMEAERDALFAAAKATMPASGPVAMLLEIKGIGPEFAAILWMEAFFRSFANRKQVAAYAGLAPTPWQSGSVDREQGVSKAGNPRLRTMLIQLAWLWLRHQPQSALTLWFKERVSRNGGRFKKTTIVALARKLLVALWKYVTAGVIIEGAVMKPA

SEQ ID NO: 213416 - protein, 342 aa, unidentified
MEHYAGIDVSLEYSSVCVVDASGKIVREGKVASEPGALTSWLRSLGYELSRIGLEAGPLSQWLFAAMWKAGLTVELLETRHVRKAFEAMPVKSDRNDARGIAQLMRLGWFRPVHCKSMGAQEVRAVLTARKLVQTKLLDVENSLRGILRGFGLKVGKTTARSFAGRIQELVKGHPNLEAIGEALLSVRGVLLREFNAFEKRVRAMARSDARTKLLMSTPAVGPIVALTYASAIDDTARFKSSKQTGPHFGLTPKRYQSGETDYSGRISKIGDASVREALYQAAHVMLTKPVKGCSQLKSWAMRIARRAGMSKAKVALARKLAVILHRMLANGTPFNAAAAAA

SEQ ID NO: 213417 - protein, 413 aa, unidentified
MDMLHPRCAGLDVHKKTVVAAVRLVEDGNVRVEVRTFETTTAGLIALAEWLSEHAVTAVAMEATGVYWKPVWHILSTEGGLELVLANAQHVKAVPGRKRDVSDAVWLADLQAHGLIRGSFVPPPEVAELRSLMRTRKQLVRERTSHIQRIQKTLEEANIKLDSVISDVLGQSGRAMLEAMIAGESDPKRLAALAHPRIKAAPETLMRALDGRLTEVHRVLLRIHLDQIDTLDRSIAVIERRAEDCLDPFREAVELIVTIPGMGERSAIVVLGETGIDMSRFPTEGQFMSWACMVPRSDESAGKRRSSRLRPGGNWLKTTMVQCAWAAVRKKGCRFAALFERLSPQRGARRAICAVAAEMLRTIYHMLKDGTFYEERRAEHRQATRQHEAQRLLRRLARLGFTAQITPVAPAAG

SEQ ID NO: 213418 - protein, 391 aa, unidentified
MLLAIDVAKGKSMVTLISSSGEVLIKPYEINHSINDFSNLLNRINNLKLENISVIIESTGIYHKPIERFFLENNFKVYTINALYSKIYKRNLRKTKTDKLDCISLSELFFTNDFKQYVRSDEIYLNMNALSRQYFALDELCSNLKNRYRNLVYLCFPEYENLFKGEAIYSDIALSFISNYPHADIISNTRIDCLQNYFKNNNFRYWRRKATLIKETAKLSYPSVSKNDELVNDLSQMATLIKTYQSEINKIKFKLIEYGKQTKYFNKINSIFGIGEFTTSIIIAELGDINRFNNIKEITAYCGLDPSIKQSGKSIDIHGPISKSGNKYIRKLLFISCLNIVRLSSKCHIENDIEIYYRKKRSEGKHHYAAIIACTTKLLRQILALCKQLDN

SEQ ID NO: 213419 - protein, 401 aa, unidentified
MNAVGIDVSKGKSMVAIMRPFGEIVSAPFEIKHTASGINSLVELINSVEGESRIVMEHTGRYYEVLAHQLSEANLFVSAINPKLIKDFDNDSLRKVKSDKADAVKIARYTLDKWQNLKQYNVMDELRNQLKTMNRQFGFYIKHKTAMKNNLIGILDQTYPGVNAYFDSPARSDGSQKWVDFASTYWHVDCVRKMSLNAFTCHYQNWCKRKKYNFSQSKAEEIYGKAKELVPVLPKDDLTKLIIRQAVDQLNSASTTVESLRTLMNETASKLPEYPIVMDMKGVGKSLGPQLMAEIGDVSRFTHKGAITAFAGVDPGVNESGSYEQKSVPTSKRGSGTLRKTLFQVMDALIKTKPQDDPVYLFMDKKRSQGKPYYVYMTAGANKFLRIYYGRVKEYLSSLPK

SEQ ID NO: 213420 - protein, 410 aa, unidentified
MRVIGMDIHRVFAEVVALSDGKVTRLGRVDMRRDRLEAFARSTLTRDDHVVVEATGNAAAVVEVLGPHVGRVVVANPKQVRLIADAKVKTDRIDATVLAQLYASGFLPEVWIPDERTAAMRRQVTRRTQLVRQRTRLKNTVQSILHAHLIPPCPHQDLFGRAGREWLAGQWLPEDERGAVERHIRELDRLGEELRGVERDIAQRALDDAVVRRLMTVPGIDMVVATGLAAAIGDVDRFAAPEQLVAYLGLNPSVRQSGEGPAHHGRISKQGRGQARGMLVEAAWSAARSPGPLRAFFLRIAARRGQHIAAVATARKIAVVVWHMLKRGEDYTWARPALHARKLRSLELKAGRPPRRGQPGSAQAYNLPATREAERRRAAGGEAAYRRLTDGWRPKGPKRVRMGAAKEERP

SEQ ID NO: 213421 - protein, 365 aa, unidentified
MNTQITTTPKLFIGMDMHKKSWSLHFRTDLFDHRGFSMPPNQEVLYEHVNRTFPGHEVHLSYEAGCCGFSTARYFLNLGWQVTVVNPGDIPVANKQQFQKTDKIDCRNLCKQLQDGRLKAIHVPTESEDHLKILLRQRNSVVKQQRREKQLIKSRLLYIGVQVPNEYDNPTWSKNFLQWLQEIKWPHTTGAFSMQSKLRILETLHKEYLQTGNELRAYCRKHQKKDYYLLKSIPGIGGFLAAALLAEVGDIRRFNNEKEFSSYLGMVPGIHQSGETEKHMGVTPRCNSSLRSYLMEATWTTVRRDPEMQAYYRKHSAKRSTTVIVKVAHKLVKRILSVIKNERPYQINYAFNKENVPSKQTTIPS

SEQ ID NO: 213422 - protein, 449 aa, unidentified
MSERTIAREASCIRLTPDRGAAALPKKHLLKRMKTWQQLTHYAGLDWARDHHDIVVVDGQGRIAAQFRISHNAAGWEEFRQKIALYPAVGVVIETSQGAAVDQLLHMAGLTVYPIHPVAAQRYRERKAPTGNKTDLLDAWSLADALRLDGSQWKALQPLDPLTQELRLLCRDEMSLIEQRTALVNQLQQALSEYYPVVLEAFDDWTRPSTWAFVLEFPTPEILLKRKRSRWEKFLHKHKLWRAETAEKRLEIFARAGEFCGSPAVTAAKSLLAVTLARLLRSLQGQLDEYRSQIEKLFEQHPDSGLFGSLPGAARYLAPRLLGEVTADTQRFDEPQALQCLAGTSPVSYQSGQIHKVRLRHQCSKVLRQIIHLWADCARHAAPWVQTYYQKKREEGKSHACALRCVGQRLLKILWKMIRTRTPYNADLHAKNQLAHGSWVLQLMSQKPA

SEQ ID NO: 213423 - protein, 411 aa, unidentified
MDTLIERCAGLDVHKDTVVACVRVRDGRGAPQVETAEFGTTTAALLALRDWLTGFGVQVVGMESTGVYWKPVFYVLEDAMACWLLNARHLRNVPGRKTDLADAAWIAQLVEHGLVRPSFVPPPEIRELRDLTRYRKSQIEERTREAQRLDKVLQDAGLKLSSVASDILGVSGRAMLAALVEGTRDPVALAELARGALRAKIPALREALTGRFSAHHALLVGEILAKLDYLDEAIGRLSAEIDRLIEPFRAQVALLDTIPGIDRRCAEALIAEIGVDMTRFGDASRLASWAGVCPGQHESAGKQKTGRTRKGPKWLQVHLNEAAKAAARSKGTYLAAQYARLRPRRGHAKATVALEHSILVAAYHILDRAVPYADLGGDWFSRRHDPERHARHLARQIEALGFQVTLSPVAP

SEQ ID NO: 213424 - protein, 375 aa, unidentified
MKKNTSKTKKQTRKVEAPKQRDGKELFASYMGIDLGDKHCEVCVLDQQGEFVKALRLPMKAADLERYLVRIGRSRVAIEAGGQSRWVAEVIERCGHQVFVSNTRKVGYIHQSDDKNDPGDAYKLAELVYFKPRLLHPIQHRSQQAQSDLSWIRAREVLVQARTEVVNAVRGMSKAFGGRLAKCSTEAFTAKLADQIPEAIRSAVAPLLETIDHLNEQIDYYDRMEEKIAGDRYEQHTLLTAVDGVGVHTALSFMLTIGDPLRFAKSRMVGCYVGLRPKQKDSGESQPQLGITKAGDEYLRKTLVNCAHYILGPHGKDSDLRRYGQRIGGRGGKNAKKRAVIAVARKLAVLLHRLWVSGEAYEPLRNSPKQTVVAA

SEQ ID NO: 213425 - protein, 308 aa, unidentified
MIVQNYVGCDISKQWLDFFDETSNRYQRIANQADAIAAYVAGLDPSRDFIVMEATGVHDRLLRHALAKAGVPFSRHNPAHTHPYAKSTRRRAKTDRLDARMLSGYGRRYQPAPEPGPCEENERLQSLARHRDQLVDMRARLKKLLGEAFEETVVAELEDMIAGFDTRIKALESRIAKVIRQSEDTARDYTLMISVPGVSKISALSLLAHLPELGQRSPKSIAALAGLAPFDNKSGKLQRRSQIQGGRSRVRRALYMAALSAIRACDRFRAFYTDLAARSGSKKLAIIAVARKLLVVLNAIIRDKTAFA

SEQ ID NO: 213426 - protein, 382 aa, unidentified
MVVFEVINLKRGKGKSVEQITRGEQRGQIVRVGADLAKRVIQVHAVDAAGRVVCRRALPRDKFMAWCSRLPAGCIVAMEMSSGAHHWARRLARLGLAPRLMSAQLVAPYRSEGAGGKNDANDAAAICEAASRPTMRFVPVKSVEQQSMLCVHRLRESAKADRTACINRIRGLLAEFGLAFAQGPQALRSVLAEVLEDGSHEMNLLGRLVIQRAAQHWSELDEHIAWCDQRIAQHACDNAAVRQAAQLMGIGVVGASAAVATVDDFGQFKNGAQFGAWCGIVPRQHSSGGKTQLGHITRRGDAYLRNLLVQGAKSAVFSAHKRSDPISRWALALRERSGWQVAAVALANKNARILWAVMTKGQRFDAHHVSVKPAAAPQCTQA

SEQ ID NO: 213427 - protein, 442 aa, unidentified
MQLRHYRNKISEREILMIHPKMKWTYCGLDSHKDSHTAVFLDCFFEKLGELNFGNCPGEFAGFLREAQKYKVKGTKIAFGFEDVSAYGRALVVFLKGKKQMVKHVNSSLVANERKSYNVLHKTDSIDAECAARVLLSRFNEMPVADPQDKHWILNNFVTRRNYLMKINHALKSQVHGLIADNYPSYRKFFSVIDCKTSLSFFETYPSPSTLEGMTPEELHQFMKQTAPSRYPLKKAAQMLADIQKDGDTTSEYQADRDVIIQSTIRQIRYNIKEVEEIDKALKNFLLNFDYPLTSMRGIDTVTAARLIAEIGDISRFSSPAKLAKYAGVSPVTYASGKSDVQFSNERGNRRLNEIFYQLALFNITTSGVNRKVLNFHFRDYYYKKISEGKTKRQSLKCVERRLVNIIWGIMTYKTEYRNPPMYNLPLEEEETTDEKEKSASH

SEQ ID NO: 213428 - protein, 430 aa, unidentified
MKSNTQNAKIEAITEKTLVLGIDVGSEMHYARAFDYRGIEYSKKPFKFSNTEAGFVTFKEWILDLKERHEKDKVVPGMEPTGHYWFNLGKFLQDNEMKPVLVNPHHVKKSKELDDNNPTKNDRKDPKVIAGLVREGRYMIPYLPDGVYADLRTASNIRFQLQAELTRIQNRISRWFNIYFPEYKTVYGKPDAKSGMLILKAAPLPEDILTLGIDGVNQIWRDAKLRAVGKARAKTLIEAAEHSVGSKEGAVSARMEIRMLLEDYESRNTRLQEVMILIEELVRKIPMAEKLLEIKGVGIRTVSGFLAEVGDISRFNNPKELQKLVGLALVENSSGKHKGETTISRRGRKRLRYLLFEVAMSLVAKNPEFRELHNYYTTRRLNPLKKMQSLMAIAAKLIRVFYAMLTKGVDYDPKKMVSDIKRPVVYLQAV

SEQ ID NO: 213429 - protein, 363 aa, unidentified
MKTINIQNNAQADGVPVVSKQYRCIKLGLDVHADSIRVVRMIDGATPQPAQKMTPDEFPKWAAKQLTLADRVCSCYEAGPLGYGLHRKLLALGIENIVIRPLVLDEYRVRVKTDKTDALALTKRLDTYVRGNRKAFAAIRVPSEQEEQDRTLSRQREQLVRESRRLGAQGRSLMLFHGFHIHGVWWRVQWKTLKEKLPGWLVERLEVFRALLHVLDAQLRKLTQAVEAQAPAVRPRGLGALSFEVIRREIGDWRRFNNRKQVGSYTGLCAGVSSSGGSRKTLSINKCGNPRLRSSLVTLAWRLVQYQPRCRLIQKWKRVLLKPQMTTGARKKAIVAVARQLAVDLWRWQTGRIQAEQLGWRMN

SEQ ID NO: 213430 - protein, 340 aa, unidentified
MNEITLIGIDLGKHVFHLHAQDVKGHEVFRKKLTRSQLLPFFGNLKTVTVVMEACAGSHWLARQLIAMGHAAKLISPQYVRPFVKSNKNDYIDAEAICEAAARPSMRFVEPRSEAQQTLAALHRVREGLVVERTATINRIHGILLEFGISLPSSKAVLHRLSDALAVNELPRRLAELLHRLHEHYRYLDKQVHDIDKDLTLQLREDENAARLLSIPGIGVVTASLLASEIGNVSQYEGGRNFAASIGLVPKQHSTGGRNVLYGISKRGDKHLRHLLVQCARAVIQRVALRTDRLGEWIRSMLTRRHSNVVACAVANKLARIAWAVLTKHAAYDPSLGCRA

SEQ ID NO: 213431 - protein, 403 aa, unidentified
MIVAVDIGKGFHAGYFRAPNGEERKPFLFFNSAKSFNEFWHSAQEFSRNHDLEEIVVGFESSGPYAEPLFHYLRKKPVTLVQVNPFHTKRVKELTGNSPNKTDRKDPRVIADVISLGHALTLVVPKGPSAHLRRLTQARERVIKRRTAALNQMQDLIFVIFPEFLKIMKGISTKTALYLIKNHPTAESIVALGLESLKTLIRTTSRGKLGPQRGEELFHASQSCVGVQEGKRSILLEIEYLISQISADNRFVASLEKQMEEHLEEIPYSHSILSLKGLGKVTVAGLIGEVGDFREFGTISEITKLAGLDLFEISSGKHRGQRRISKRGRPLMRKLLFYAAINVVKTNGILHKPYQEMLSRGMLKVKGLIAIARKLLRIVFALARDNTVYREDYCRNQHLKLAA

SEQ ID NO: 213432 - protein, 383 aa, unidentified
MAQVNDLSRSLTAFDPISTLVVVVEMSKASWLVSGVVPGVERQPLKKLEPDATALLRLIERWRSAGWPISRIALAYEAGRDGFWLARWLIARGVEAHVIHSASVAVSRDRKRAKTDRLDAAMLMRVFLGWLRGERGHCGMVVIPTMEEEAARRPSRERESLVNERSRITNRMKSALARLGIRGFKPHLRKAPERLAGLRTAEGAGLPVNVIEEFRRDMARLALVREQISSIEKTRAERLERAPDTGPHAMVRLLARVIGIGIETADMLVREILSRKLRDRRAVARYAGLTGSPDESGLKRREKGLAKVGNARVRRGLIQLAWRFLMFQKDSALARWYRTRTEGPSGARKTTMIVALARKLLIALWRLVTTGEVPDGVELRPAT

SEQ ID NO: 213433 - protein, 420 aa, unidentified
MTRIQTKKTQAVNQKSLIVTVDIGKKTNMGYYRFSHNRGAKPFPFGNHAHGFGLFWDRIAQVQRQNQLEEIVVGFESTGAYGEPLMHFLKRKGVKLVQVNPMHTKRLKELTGNSPNKTDRKDPKVIADIMELGHALTVIVPEGSAAELRRLTQARERNVVRRTGLLNQLQDLVFLVFPEFLTIMKGVKSKTARYLLNRYSTPGDFVACGDLDLLCSRVKKISRGRIGRERIEPLYRAACSSVGIQEGRDSLVLEIRQILSWIELVDGFIARLEEAMIPHLRQISYSDSILSIKGVGPVTTAGLIGEVGDFGSFRTIPEMEKLAGLDLFEISSGLHKGRRKISKRGRPLLRKLLYFGAINVVRRGGILHGWYHRALDRGMPKTKALVAVARKLLRIVFAVVRDHREFTYDYMNQPKLRMTA

SEQ ID NO: 213434 - protein, 355 aa, unidentified
MNDSKFIGLDVHKTSISAAVLDHDGKLVMQSIFATHAAAILSFIHGVGGSVRVTFEEGMHSSWLYDLLRPQVSEVLVCNPRKNALLKSGNKSDQIDARKLAELLRAGLVSPVYHGQTSTVTVKELGRTYTALTEDTTRVMSRLKALYRSQAIATEGKKLCTKRRREQWLKELTQAGRRYRAERMFEQLDALQGFRRQARRDLFVECRKHAATAILTSIPFLGPIRAALLIARVQTPFRFRGKRQFWAYCGLALETRSSADYRLVEGELHRAKKPVFIRGLNLNHNHDLENIFKAAATTASACPGPFRDYYETLLGRGMKPEMARLTLARKIAAISLIVWKKGERFDPEQLKAQAA

SEQ ID NO: 213435 - protein, 342 aa, unidentified
MEYYAGIDVSLKCSSVCVVDANGKIVHEAKVASEPQALIAWFGSLGFGLQRIGLEAGPLSQWLFAAMKAAGLAVELLETRHVRKVFEAMPVKSDRNDARGIAQLMRLGWFRPVHCKSMSAQETRSLLTARKLVQSKLQDVENSLRGILRGFGLKVGKTTGQKFAGRIEELVAGHPHLQTIAKALLAVRAVLRAEFAAFEKQTRRMVRSDTQARLLTSVPAVGPIVALTYASAIDDPARFKSSKQAGAHFGLTPKKHQSGETDYTGRISKIGDASVRTALYEAANVMLTKPVKGCSRLKSWAMRIKRRAGMSKAKVALARRLAVIMHRMLADGTPFNAAAAAA

SEQ ID NO: 213436 - protein, 351 aa, unidentified
MWIIGVDYHPSVQQIAFVKTDTGECGERRLNHSDGEAEKFCRELKAAGCSVRVGMEATGYARWFERLLAELGFELWIGDPAQIKAKRVRKQKTDRLDAELLLQLLLEDRFPRVWVPSPENRDLRQLLWHRHRLVQMRTRIVNPLQAVAMNEGVRRKKALWSKSGRAQLESLSLAPWATRRRHDLLELLDRLNPTIEELSATVEQEAKQRPEGLRLMTHPGVGPTTALAFVLIIDSAERFAGGKQIASYVGLIPCEDSSSDRRRLGHITKQGNTLLRFLLVEAAQAVVRRDPDWRRRYTHLAMRRDQRIAKVAMARKLAVRLYGMMRKEWNYEQSKKFGSYAGESDYGHGVQ

SEQ ID NO: 213437 - protein, 414 aa, unidentified
MDVIVERCAGLDVHRDSVVATVRVPGTGKSRRRRAQETRTFATTIAELELLGDWLEERGVTLVGMEATGVYWKPVFYVLERRFECWLINAQHLHNVPGRKSDVIDSRWCCELVELGLVRPSFVPPPEIRRLRDLTRLRTTQVQERSRAIQRLEKVLQDAGIKLTSVASAVYSVSARAMLEALLGGVTDPVVLAELAKGRLRKKIPQLQEALASRFDVAHHGVLVAGLLAHIDALDQAVATLDARIEINTEPYTDLIRLLDTIPGVGVRIAQVLIAECGVDMTVFPTAGHFVSWAAICPGTNQSGRKRRAGKTRHGNAWLRSALTEAAHAAVRTKGTYLASHYWQLRGRRGDAKAIGATRHDILIAYYHIARDRVPYRELGPDWLARRHSPEHRTRRLVKQLESLGHRVTLETAA

SEQ ID NO: 213438 - protein, 412 aa, unidentified
MQVMYKKCCGIDVHKMKIVCCLRKGNKQEIREFSAETKELKEIAKWLKENKCEMIAMESTGSFWKPLWNIFETSGLNQILVNAKDMKNVPGKKTDIKDAEWISDLLQHGLLKASYIPDRAQRELREVIKYRQSMIQERTRELNRLQKMLEGANIKVVSKFSKLENKTCRGLIDYILELEENEEIEEEKVRKLINNNVKSSLEEIMIAMEGVITPIQKELMKLVINHINDMAERIEEINKVVNKYMSEYEENIKKLEKIPGIGRTSAQVILAEIGQDMNQFPTAGHLASWAGVCPGNNESAGKRRNGKTRKGNKILKSTLVQCANASKRHKDSFYHAQYQRILVRRGKKRATVAVAHSILISIYYMIKYDKEYNELGAQFYNQFNTEKKINSYIRKLHELGVDVHVDTSLLKT

SEQ ID NO: 213439 - protein, 395 aa, unidentified
MVAALRPMGEVALLPQEFLHTEIGLEQMAYAIIALGEDTRVVMEATGRYHEPVAAALYEYGIYVCVLNPLFIKQSGGGSIRKVKTDKADAMKIAKYGLDNWVDLREYTPMDTVRQQLKLCSRQYNLYMKTVVSLQNNLISLADKTFPGVNELFSSPERADGHQKWVDFVMTFWHCDCVCRVSEKAFTERYQKWCKRKGYHFSAEKALDVYAGSCGHFTTLPKNDNTKLLITTAAQQLLAGKMTLAALRAEMTRLAKQLPEYDTVRAMYGVGETTAAQLMAEIGDVRRFPRRSSIVGFAGVDPAVDQSGKHEAKSTPTTKRGSPHLRKTLYQIVCTYLKRSPVDEPVYQFLDKKRSEGKPYFVYMTAAQNKFLRIYYARVKECLEAFDARQSLAQS

SEQ ID NO: 213440 - protein, 334 aa, unidentified
METLLKQSVGIDISKDTFMASICCIYQSGKMDFITTEPFKNVKAGFNQFVKWIRKNSSKEVQITFLMEATGVYYEQLAYHLHKLSFHISVLLPNKVKNYAKCLNIKTKTDKVDAKVISRMGAEQNLSRWTPPTPVYQQMRLLTRYYQELKKQKTALQNRVEALNHSVFTDDFVAQSYLEQLSLLDKQIELCEKKLKTLVKEDEELASKFENVETIKGVGFITIAIVVAETQGFSLITNRKQLASYAGLDVIERQSGTSVRGKSKISKKGNSHIRAALYFPAMVSSVRNISLRNDYQRIIKHKPNKKIGLVAVQRKLLLLIFTLWKNNEKYQERE

SEQ ID NO: 213441 - protein, 329 aa, unidentified
MKRNWFIGIDISKRTLDVAIYDPENKKAKTHFKVPNETKGFKKMLKLLKAEKVDFDSAFICLEYCGIYGLEIGLFLEKKIDFCFCSPLHIKRSLGLTRGKNDKLDAFKIARFSYLFRDDLSPSFMPTAPMLKLKNLMGERHRAVKAATIDKQVLKELSSQMDKKAKLRAQKRLKVLAIDISSIEKEMMSLITGNPELKKNYDLLITITGIAFVNATMMILCTNNFEGITNARSMACYCGVAPFEYTSGSSVRGKTKVSNLANKQMKANLTNAARSAIVHDPELRIYYKRKREEGKAYGTILNAIKFKLITRTYAVINRGTPFVKLRQAG

SEQ ID NO: 213442 - protein, 313 aa, unidentified
MTQPKSNVYVGVDVSKERLDVAVRPSGEHQSFTNDEAGIAQMTDSLGRLSPEMILFEATGGWQMNAVNALATRQLPVVVINPRQVRDFAKATGQLAKTDTIDAGILAHFAEAVRPEIRELKPLELRKLEALNTRRRQIVEMLTAERNRRITAPEWTRGDIEEHIAILKKRLAAINKDIDKLIRQSPLWREKDKILKSFPGVGPVTASTMLSDLPELGSLNPKAIAALVGVAPLNCDSGKYQGKRKIWGGRACVRSLLFMCAKTAVRCNPVIRGFYERLLRAGKPRKVALTACMHKILIILNAMIRDQVCWKTA

SEQ ID NO: 213443 - protein, 338 aa, unidentified
MAIVMGLDQHRAQITAEWVDTVTGEVSRGRIVPADRAGVRKFLARFGGQGLEVALEATTGWRFVVEELRRVGVEVHLAEAAQTSALRGTKQHAKNDRADARHLRELLMAGRLPECWIAPDHLLDLRARVRLRHTLVDQRGEWQQRMQAVLYHHGLPKRAGLLTGENRAWVAQLGLTGAAREQITVALAMIDAVDVRVAPLERELRSYARRQTGCRAIQAHYGIGPLTSVAVLAELGDARRFSSSREVVRYGGLDITVHASDKRRAPGHLSRQGPPVLRWALYEAAQTARRKTSPDHAYYRQAAERLGDNRALLSIMRKLLKRSYHTLRELGDEALAPA

SEQ ID NO: 213444 - protein, 332 aa, unidentified
MQVVYPICCGIDVHAKMLVACLLLNGQKQTRTFSTMTDDLLHLRDWLVKSQCTHVAIESTGVNWKPVFNILEGSLKVVLVNPLHVKAISGHKTDIRDAERLADLLAHDLLRPSFIPPPDIRQLRELTRYRESLVRQQASLANRIIKVLESAIIKLAQVASDVLGSSGRAMMRALSQGETDTEKLADLACGKLKRKNAELRCALDARLTLAQRFVLKQQLRRIEQLEAALAQVNEQIDQVLESHPKFEHCRALLQTIPGIGQRVAETIIAEIGVEVEAHYPTAKHLASWCGLCPGNNASGGKRKSGRARSGNRYLRSALVQAAWAAQRTKQTT

SEQ ID NO: 213445 - protein, 351 aa, unidentified
MMIIGVDYHPSFQQVAFLIEETGEYQEQRLNHEGGEAERFYRDLKRKGIRVRVGMEATGYSRWFERLIVELDFELWIGDPAEIAAQRVKKRKTDREDARLLLKLMREDRFPKIWVPSPENRDLRQLLWHRHRMVQMRTRIQNQMQALAMNEGKRWRSKLFSQQGRAEFEKLALAPWASRRRRELLELFDRLNPSIAELTAAVEQEVKKRPEALRLMTHPGVGPITALAYVLIIGTPERFTRGKQIGTYVGMIPIEDSSSDKQRLGHISKQGSSLLRYLLVEAAQAATRFNPHWRRRYIHLAMRRHKSIAKVAMGRRMGIRLYWMWRNGCEYSPSFEFGSYAGQLGTRHGGK

SEQ ID NO: 213446 - protein, 408 aa, unidentified
MEVVHERCCGLDVHKKTVVACLVTPGAGGQPTREVRTFSTMTKDLLALSDWLRQAGCTCAAMESTGSYWKPVYNLLEGSFELLVVNAQHMKAVPGRKTDVKDAEWIADLLRHGLLRPSFIPSRPERELRELTRYRTSLLQERASEVNRLQKVLEGANIKLASVATNVMGLSGRAMLAAMVAGEYEVEAVAGLARGKLRNKIGALKEALEGSLQSHQRFMLAAQLGHIDFLDSLIEEVSDEVEGRLAALQGELKRLSTIPGVSTRISQAMLSEMGADMGRFASAGHLASWVAICPGHDESAGKSRSGRTRKGSPWLRSALVQAAKAAGRTQTYLGAQYRRIAARRGANRAAVAVAHSIIVIAYYMLKRGEDYRDLGCNYFDERQEEQVKKRLTRRLEALGFRVHLEAAV

SEQ ID NO: 213447 - protein, 338 aa, unidentified
MDTYAGIDLHSSNNFVGVINDKDKILYGKRHPNRLDDVLRALDPFKDSLKGVVVESTFNWYWLVDGLQEHGYRLHLANPSAIQQYEGLKHTDDPWDSFWLAHMYRLGILPEGYIYPKEHRAVRDLLRRRLLFVQHSTSHILSLQSMISRNLGFKMSNNEIKKLKPTDIESLFDCSNLVFMANNSLAAIEFLKKITKGIEKKVKSQVKMRKEFEMLLTIPGIGNILGLTINLEVGDIGRFPKVGDYSSYCRCVESKRISNGKKKGENNKKNGNKYLAWAYVEAAQFARRYCVKAQSFYQSKEAKTKPVVAIKALSNKLSKASYYIMRDQVAFDEDKLFS

SEQ ID NO: 213448 - protein, 366 aa, unidentified
MREQDERNRITIGLDLGDRRHRFCVLDGKGEVVEEGTLSNKLESLSELSRRYRRALVVMEAGCHSPWISRHLEGAGCEVVVSNPRKTRAIYQHERKSDRRDALMLARIARMEPALLYPVQHGSAQAQHDLLRIKLRDSLVRARVGVINSLRFTLKSLGYAIANPSTERFHKVIQEQVPESVDSVIAPSVQALKELSLRIKLLDREIATLARSKYPETTWLEQIPGVGPITALYFVLKIQDPARFERVRDVGAFIGLCPRRDQSGENDPQLRISKRGDAYLRRLLVSAAQYILGPFGPPSALRQYGLALASGGTPRAKKRAVVAIARKLAVLLLTLWKNKSVYQAFPLSRDGEKMRTSDLERLRCIA

SEQ ID NO: 213449 - protein, 318 aa, unidentified
MSATPCFVGIDVSKAHLDVASRPDGQEFRLANTAEGIASLVDRLKLLGPTLILLEATGGQEWAAAVALAEAKLPVRIVEPGRVRHFARSIGQHSKTDALDARVLAHYADAVRPEARELPDQETRDLQALLDRRRQLVNMRVSEQNRLQQGPTAAVQADLKAHIAYLSGQIKAMDQAVGKAIEAKADWKLRDEVLRSIPGVGPQTSRSLLGLLPELGKLTGKQVSALAGLAPRARDSGTVKGARTIFGGRAEVRTALYMASVSAMRFNPDLKAFYKRLRESGKAAKVALVAVSRKLLTIANAMIRDMTPWTPTKTCAPV

SEQ ID NO: 213450 - protein, 493 aa, unidentified
MSASKTKVNKRSVQSLPILQPKVAGIDLGACEHYVCGPALISGEPNVRVFQSTTPQLIGLIAWLQEQGVKSVAMESTGIYWIPLYELLEASGIEPILVNARELCHVPGRKTDVQDCQWIQLLHSCGLLHGSFRPSEGICRCRALTRQCANLVEERSKTVNWMQKALDQMNVQVHRALTDITGKTGLAIVRGIVEGQRDPKVLACLRDSRCGKNEEEIAEHLTGTWKSEHLFNLKMALKLYDQLQAQITDYEQELHKELLAMTPQERKNKEAPEHPKAAKRKAIRNRGEQEDQKILWQFSGVDLTRIDGISAGVSQVILTEVGFNLSDFSSKKHFVSWLRLCPKMGISGGKALKKKPPRGTGSNRVAGILRMAVVSLSRSHSSLGAEYRRVARRRSGAVAVFALAHKLAILIYRMLRYGQDYVDEGEKVYHLDPSVKRGISVRMLWRQKVAKKRRRTRWVRRGFFVIPFGPNGSCRKPRLTDGSRYQEPGSVQT

SEQ ID NO: 213451 - protein, 373 aa, unidentified
MPKYSTAFGMDVHLRSTTVCALDADTGEAVTRRFPGNPWGEIAGWMDGFPGPSLAAYESGYLGFAPQRELAGLGVECVVAAVSKIPRSAADSASKNDRNDAARMAKAILAHDISPVWVPSPEVEGIRDLAGAYDGATARLATAKQRLLAFLAKRGFVYGGTTPAGNPRKYWTYDFLRWLDKVRPEDDGGVRTLAALRNEVEAAAEARADLLSEYRAAADASPIAAEVAALQSIKGCAFALAAAFSAEVGDFTRFRSGRQVTAYSGLAPSQRSSGGSVRLGGISGAGNALVRKLAVEGSWCYAAARHQPKLMPRDTGVPLEIRMHGRKGSERLLRRREEMLARGVPAAKANAATAAELVRWLWALGMMCREGAE

SEQ ID NO: 213452 - protein, 532 aa, unidentified
MVQLSPIRSVVPSSVRRTVVNSLEALGRLIPIKRVPSRVRNLAVAWSGEENGNMSRQPEKPSKANAKQRSNRKTRKKRMGLDNRPVLEPNAAGIDIGAREMFVAVPPGRNSHPVQVFDTFTEDLHRLANWLQACGVTTVAMESTGVYWIPLYDILEERGLKPCLVNARHMKNVPGRRTDWHECQWLQYLHSVGLLRGAFRPEADVCAMRVLVRHRGELVQAASQHVQHMHKALTQMNVQIQHVISDITGRTGLAIVEAILAGQRDPAELAKLRDSRIRATEDTIRKSLVGNWRREHLFTLKQSLQLYRTYQQQMVECDQEIEKLLGNFEPRVDPTEKPLPPDRKRNRSEQKRRKKAGHPETGFDLRTEVYRLYGVDVTQIPGVETIALPLFSEVGRDLSRFPTPAHFASWLGLCPDNDISGGRVLWTGTRKVKNRAGQMFRLAAHSLHRNLTPLGNYLRRMKAKLGPTAATTATAHKIALIFYTMITKQVEYDDTIWATRDADRQKRFEAKLKRQAQLLGYQLVPIDKRPAA

SEQ ID NO: 213453 - protein, 343 aa, unidentified
MQTITTIGLDIAKSVFQVHGVDAAGQVVIRRQLKRRSVLTFFQKLPPCLVGIEACASSHHWSRVLQALGHTVRLMPPAYVKPYVKRQKNDMADAEAICEAVTRANMRFVPTKTPEQQSCLMLHRTRHLFIRQQTAVINSIRAHLAECGIVAPVGRKGVTELLRIVADPSDKRVSEVTRACLAALGNQLLGLKKQILAFDRMILAWHRSNQTSRRLHYIPGVGPMLATALVASIADPSTFRSARNFSAWIGLVPKQHSSGGKDRLGSISKQGDRYLRSLFVAGALAVIRYAKIHGIGHRPWLTALLARKPTKVAAIALANKIARMAWAMMAKGERYKEPIALAR

SEQ ID NO: 213454 - protein, 415 aa, unidentified
MSSSNDTPRFVALDLHKRYVMVGAVNSQQAVVLRPQRVELVAFEGWAKKHLRFSDELVLEATSNAWYLYDLLQPLVAGVVVANPYGVKLIAASLVKTDRRDTLVLARLLAAHLIPAIWIPPVEVRELRALIAHRERLVSQQTATKNRLHGALHRHQLIPPEGRLFSAANRAWWRELNLLPSEKLRVQQDLTTLDHLAPHLAAVETELARLSTVDPWAGQVAFLIQLPGIGLIIAMTILSAIGDISRFPAAKKLVGYAGLGARVHASAQTHRTGGITKQGRRELRAALVEAAWVAVDTHPYWRERFEKLTARMGKQKAIVAIARKLLVVVWHVLAYQQADRQADPQKVARFFLSWGRKLGTTHRQGQRVATFARQQLDKVGLGSELEQVHLGYTYTLPPSSLSQPVTELPAAIAAD

SEQ ID NO: 213455 - protein, 399 aa, unidentified
MSGSVASSHPDPPTGGGLTYIGIDAHKKMCQATVMSADGTIVSEHRFSTNVKYLETFAQGLDRDCAFAIEAGTGTKRLYWALKGMGREVHMAHPLEVRRMMGTKKKTDRADSAFLANLLRMGSLPESYVPEPEDDETRQLLRFRIDLGKKMITSKNQVHAHLNSAGVSTSGFTDIFGRGGREMLRTVELSRQQRYLLDGHLQQLDLLVSQAKDVERGLAKMAQDDPAARSLMHIKGIGFYSALVILSEIGDITRFPTAKHLTSYAGLVPRVHQSGDVARTGHIHKEGPKRLRSMLIQCSTASVRGSGRFQKFYKRLKKRKGHSKAIVATARKMLATVFVLLTRGCEYIEVDERNTRKKLMRMDRIAKEISDIDVETSLSNLSENAKEVLRGDNNITNVG

SEQ ID NO: 213456 - protein, 352 aa, unidentified
MARRLWVGLDVGVETTSVCVIDADGAILHETVCPTNAKYVHREIVSLGCRRSGTVGLESGTGIGLARDLRNLGYTVEIYEARQLSKFLRVRRNKTDAGDALGIAHAGRIASPLVSRVHLKSLECQSIACRLKIRRYFVKARMDAVSIVRRQLELFGVRIAPGNPATFHARVDKALKTTFRSASDPLEGEIRHLIDHIEELRTHKSGLDRELNRLALGIDICRRLMEIPGVGPICALTFFAAVGEPGRFRRASDIGPYLGLTPKLHQSGLAQRSGRISRMGNSMARALLIQASLRFMRCCDPQSRFRAWTSEIESRRGRGKSRVALARKLATVMAAMWKKGTAFDPQLVLAAP

SEQ ID NO: 213457 - protein, 371 aa, unidentified
MKSIIYIGMDVHKKTYSLCALLKETGEIIGETKIPADVSLIIKFIENAKKSVDSDDVQIKTGYEAGCLGYSLYWQLAEKGIECDILAPSTMHRSAKNKVVKNDRRDAKNIATNLANGTYKSVYVPTDEDVEIKEYIRMMHDFKIELKKVKQHINAFLLRFGHQYPGKSKWIPAHIKWLKELELSDMYREILDEYLSQLEILSEKIERFKYRLEELSQKETYNEKIGQLRCIKGIDTTAAMTMHAETSDFDRFPTANAFASYCGLTPGEDSSGESYHRLGITKQGNSMIRTTMVEAAQVLVRGTIGKKGKKVKSKQKDQDVKVIDYADKAVVRLQKKYHRMIFRGVKRNIAITAVARELACFVWGIETGHIS

SEQ ID NO: 213458 - protein, 393 aa, unidentified
MIFVGIDVAKLKHDCVIINSDGEILENAFTIENNSKGFSTLKDNILKHLPDKDFKKLKVGLESTGHYSNNIISFISQNSFPLTIFNPLSTNLFRKAQTLRKTKTDKIDALFIATMLFSDDSNPYLPKSYHINEIKSLARHRFRLIDYRAKLKISYGRLLDIIFPELANVVWSVNQTSVYSLLLELPSTKDITECHLIKLTNILSKASKGKYGKEKAIIIRDLSKDSIGTNSIGVSFELQQTIRLIKNVDEEINLLDKKVKALMDELDITIMSIPGISYTLASIIISEIGDIESFSSPAKLLAFSGLEPSTHQSGKFTASYSKMVKRGSKYLRWALLNAARLVALKTPTFESYLKKKRSEGKHYFVALSHVARKLTRVIYQMLKVGDKYKEQMM

SEQ ID NO: 213459 - protein, 365 aa, unidentified
MLKAELSCEADSENDLGGSSETMYYIGLDVHKKTISYCVKDAAGKVHQEGKIGSTRRELDSWIKTLPQPRMMAMEATIFTGWIYDHLLPHAEKVKVAHPLMLRAIAAAKKKNDRIDAGKIADCLRCDFLPECHMASTEIRDRRRTLRYRGLLVKQMVQMKNRVSGLLMESGVSYNKQRLHKLGYFTDLLSTNEEISQSIRPMLKLGREHIVRAQRLDSALIGSLEKDPLLSERLRRLRTIPGVGPITALTWALEIGDYARFRSVKEAISYCGLCSAEKSSADKMMRMPISKQRNKHIQHVLVEAAKMAPRYSPELALVREREIQRGNKNRATLAVARKMVAYMLAVERRKQDFVPAEEMAGRAVA

SEQ ID NO: 213460 - protein, 347 aa, unidentified
MRFYTGRHRYYCGIDLHARTMYLCILDHESGEKLLHRNLRCDPDLFLQAVEPYRDDLVVATECIFCWYWLADLCAREHIPFVLGHALYMKAIHGGKAKNDRVDSHKIAVLLRAGALPKAYVYPPGMRATRDLLRRRLFFVRKRGELFAHVRTTHHQYNLPTPSGQLLYQCNRTKVPDAFLDPIVRTSIEADLALAGHYDGIIRSLERTILSTAKVEDPETLDRLQTIPGVGPILALTLLYELHDIARFKRVQRFLSYARLVKSQKSSAGKVLGTSGAKIGNAHLKWAFSEAAVFFLRKNPRGQKHIDRLRSKHGKGKALSILAARLGRASYYMLRRSTDFDMDRFMN

SEQ ID NO: 213461 - protein, 479 aa, unidentified
MKSKRQEKTNKQPTQHHWHEMNRKQRREMMRKIQSEDLRLEVIHPDAAGIDVGNESHYAAVPPGRDSQPVRRFGCTTAELKAMAAWLRHCGICTVAMQSTGVYWVAVFDILEQTGFEVFLVNARDTKNLPGRKSDVQESQWLMKLHTYGLLRNSFRPSQEIRVMRTYWRQRNDLVQSASRHILRIQKALTQMNLQLANVLTDISGATGQAIIKAILAGERNPHKLAEFRDPRVKASEEQIAQSLEGNWQPDLLFLLKQEQDGYEFSQRQIAECDRQLAQYLQQREDRSQGAPLPDEKRKGRLKKKRGNKPRFDLRKGLFRMTGTDLTRIDGIDVMTATTVISEAGYDMSKWKTENHFVSWLRLCPDNRISGGKVIGKGRLPTNNPISIALKMAATTLRQSKTYLGAQFRRLRTRLGAPIAIKAMAAKLARLVYRMLRYGMKYVDQGAAFYEAQHRQVQIKQLKWKAAKLGFQIVQAPAA

SEQ ID NO: 213462 - protein, 368 aa, unidentified
MEVTTIGIDLAKSVFAVCGADSSGRVVMRRQLRRPQVLSFMRGLPRCVVGMEASGGAQYWARQLTALGHEVRLMSAALVMPYRKGNKTDRNDADAILEAVTRPSMRFAMVKSVAQQDLLALHRVRAQLVKSRTALCNQLRGLLRERGVVVRTGAAALKRSLPAALADDRSELSGEMRELLCEMSQWLRTLEQRIASCEARITRKFKHDERCQRLAAVPGVGPLTATALVAAVGNAQRFRNGRELSAYLGLVPRQHSSGGKTVLLGITKRGDRYLRTLLIHGARSALRQCKDDARSGWVRRIRAERGPNVAAVALANKNARVLWALLARGDRYRSTNVATRAVLRSGSPPAVKRARSAKLRVRKDCVGS

SEQ ID NO: 213463 - protein, 284 aa, unidentified
MNFYTQQHKQYCGIDLHAKAMYVCILDQTGTILIHKNLPTTPEAFLRVIAPYREDVVVGVECIFTWYWLADLCQQEGIAFVLGHALYMKAIHGGKAKNDKIDAHKIAVLLRGGMLPQAYVYPAEMRATRDLLRRRCHLVRKRAELLAHIHNTNSQYNLPEIGKKLAYKANREGVEVHFPDPSVRKTIEVDVSLIDHYDKLLGEVELYITRSAKTHDVQTFARLQSVPGIGQILALVILYEIQDIARFPRVQDFVSYCRLVKCAKESGGKRLGTSGKKIGNVHLR

SEQ ID NO: 213464 - protein, 428 aa, unidentified
MTARRECSEEAVLVAIDVAKAWNTVLMETPDGRHQRFRVANNRCDHDRLVRLLTDQDVQCRVALEPTGNYHRPLAHRLLSEGFDVHLVSSLVAARFREAMFNSWDKNDPKDTVVILELLKQGKVLHYHDPVAVGIHDLQEISRTYVQVTQARTRLQHSILTHHLPLYWPEFGRYWHSSRADWFVRFLMRFPVPQAVLRLDREAFVQEAWALVGRKVNKQAKLEEIYELAGATIALPIDPESYAVQAFRLQLERYLSLNGLRRELEEWTEEALGTNEDGQLLRTIPGIGPVLALIILAEAGDLRRFGHHRQFLKFCGLDLAKSQSGASRGREKLSKRGNARLRYAFWMAGGVAIRMRENSFREKYQRYIHADPANRDLKRKALTAVMAKMARVAYAVVKTQTPYRTYYEAAVPSGSIPLSGAVEAVRTS

SEQ ID NO: 213465 - protein, 398 aa, unidentified
MYLNIGIDIAKNVHEACLVNENGEQIGKFIRLKNSKKSIEKFTKHIESVSKELNAEPRIGMEATGIYWYSLFSELSKKYKVHIYNPSQINGFASVNIRDSKTDKIDAKTIANMLRFGESTKTNYSDTQRLELREYGRFYFKLTSIKINLKKRLRRNLHLIFPGYDQIFKNLFTETSKEIITNISTPEKVLEMGEKKLLEIMKEKSKNHIDPDKARILIEKAEDTIPSEIIKESSLFEFKMMLEMIDNLEKQIDSIEKKMISIWKKVRENHYIQTIDGVSELRAAMIWAEMGNVDDFKHPDQIVAFAGYDPRVRKSGNKEVISGPNKRGSKFLRWILGWTVQEAKHSNPVIGQYFDKKILEGKHYNNARCAAAKKLIRIIWSVEKSKKPFQIPDNLLSS

SEQ ID NO: 213466 - protein, 310 aa, unidentified
MAMIVQNYVGCDISKARLDFFDETSGRYQHIANRAEAIAAYAAGLRPGQDFVVMEATGVHDRLLRHALAKAGLAFARLNPARTHHYAKSATQRAKTDRLDARMLSDYGRRYQPAPEAAPCEKAEHLQSLARHRDRLVEIRAEMKRYLSEAFDEEVVADAESLVADLDIRIGTLESRIATAIRETEGTARDYALMVSVPGVSTITALSLLAHMPELGQRSPKSIAALAGLAPFDHESGKSRRRARISGGRSRVRRALYMAALGAVRANQRFKAFYSALAARSGSKKLAIVAVARKLLITLNAIIRDKTAFA

SEQ ID NO: 213467 - protein, 406 aa, unidentified
MAAQAPEDTAGTGQKVFGGVDSHTDTLHVAVISDNGGHLADAEFATTPAGYAAALAFIDAHGQVTAIGVEGTSSYGAGFTRAARSRGHQVIEVNRPDKAERRRIGKSDPIDAYAAARAALSGRASSAPKDDTVTGIRALHNAARSAVKARTAALNQIGSILVCVPEAIRAKYGPLKSTDRADALARQRPAGDTVHTAVLTALRTLARRVKELTAEHEALTKALDTAVTVGNPGLRAAHGVGPDTAAQLLITAGGNPERMRTEASFAALCGAAPVPASSGRTNRHRLSRGGDRAANAALYRIALVRMGSDSRTREYAARQMAAGRTKKEIIRLLKRAIAREVFRCLTTTVNVPEIADLRPLRQSKNITLTAAARHLGVWPNRISDVERGTRRLDDLAHAYRDWLQTA

SEQ ID NO: 213468 - protein, 416 aa, unidentified
MKIIRFNCCGMDVHKNSVVATIGITNKDTQITRYIQETFSTLNTDLLRLKQWLIDHQCFDVCMESTGKYWIPIFNILEDTVKVHLTHPKYVKAIRGKKTDKKDSKWICDLFKHDLIRFSFIPPKEIRALREIARYRYKLVAMRSSERNRYQNCMTVSNIGIGSVFSDPFGKSAQAVMKEVLESKVIEDDRILKCIHGACKNRDKILDAIKHCHVGSDQRFKMNESMRHLEELQIHINNCEIEMIKRASRMFDSFMHITQIPGINTLSAILIISEIGIDMTQFESYKQLVSWAGLAPANNESANKKKSVRISKAGQYLKPLLVQCALGAIKDKESYFGIKYARIKKRRGHKKAIIAIARMILVSIYHMILTGESFNPSDYQSFKAPNSKKVIELTKESAIEFLRKSGFDVSKLTKLE

SEQ ID NO: 213469 - protein, 345 aa, unidentified
MTEAYDGRQVVGMDLHRRRSVLVRMTEDGRKLETVRITNSPAALRREIAKAGKHPRVVLEATYGWYWAADVLEAAGAEVHLAHPLGVQAYSSRRVKNDQRDAADLADLLRMGRLPEAWIAPAEIRELRELTRYRHKLVQARTSVKDQVHAVLAKLGIPVTCSDLFGVHGQAWLDELKLPQPYAGKVASLRQLAGELSAEITLLEQVLGDLLAGHEGYAAIQQLPGIGPVLAAVIVAEVGDIRRFRHPGQLGCWAGLTPRHRESDAKVTRGHISKQGPRILRWALCEAIQHQPDGTRPRQVKDGIIARRGPQARNIAKTAAARELLTLIFYAMRDGRVRRAISPAA

SEQ ID NO: 213470 - protein, 429 aa, unidentified
MDKTELTRLEEFRQLRGEIRGSEEYLIVGIDVAKERHHAFFGTATGKTLHKRLVFENSKEGFERFLVQAEALKVQHGLGKMVLGMEPTANYHKPLGEYLIRRGDQVVLVSGVAVARNRELLDGRWDKHDMKDSANVADLISQGKMLYYDLPSQEVRELRELLSLKRGLKRQEHGMRVRIRNHLLAQYFPELDKPYGEGEAQGLKVVKWCVAPSEIAKMSYEGFIRLVKPGPRIRVEQKERLMAIWKAAPHSIGCEAGGSLGFVARMMVEGLEGLRETLGKVDERIQEICKRVPSYPYLLSIPGVGPAIAAVLIAAIGNPHRFSSAKEVIKLAGLDLSANRSGTTSERAVPVISKKGNASLRYALYQAALIASNKSSPIMRYYTRILQGRERERGIKTKMRIKLAVKLLVIAWTLMKKEERFNPDYLKWD

SEQ ID NO: 213471 - protein, 417 aa, unidentified
MKNHTQKLYVGIDIHSREHKAALVPIALLECLDAPWRKVKPLNIRNTIGDFERLDTAIRLHISGTEEVAIAVDHTGGHYSEPLVHYLQARGYAVYHLETKAVKAARERFLDQESKSDVIDATSAAYLLYLRDVHGLSFRISAMTPELGSKAAALNSLVLQRWQFNKLVSQATNRLHQFLLAVFPEGEAQYFKQLLKVTLWYPTPKDILASNGLETIEGLRLKDKENILKLANDTVGIPNQIYQWLIRDLSLQRIESLAKRDALTSIIRKEVTVHPYGDVLLSFPYLGEIAAATIIGIIKDIERWPDKKKFKKALGVYSSLTQSGGDSGRTRQGREGSKHGRRVLFQVCFGCIGTKAPDNDFKDYYLRQVARGKPRIKALVSTMGKLAEIIYHCLKVEEPYQYQGKYKVPRISSNEKS

SEQ ID NO: 213472 - protein, 343 aa, unidentified
MEAYAGKQFVGIDLHRRRTVVVRTTEAGEVLETVRIVNDVERLASVMARAGECPEVVLEATYGWYWAVDALQAGGASVHLAHPLGVKAFEYRRVKNDVRDASDLADLLRMGRLPEAWIAPPATRELRELVRHRAKLVGLRSHCKAEIHAVLAKCGVQVLMSDLFGVAGTQLLDRLDLPSPYAARIASLRRLIDDLEFEIDLFAGMVRGRMAREPGYTAVQNIPGIGPTLAAVFVAEIGDITRFSSAPKLTCWAGLTPKHHESDTHVHRGRITKQGSRLVRWAAIESVKNIPAGTVAGVLRERVADRRGRNVGAVAAARRQLEFVFYALRDGHVRALEHPPGVA

SEQ ID NO: 213473 - protein, 344 aa, unidentified
MVVIGIDAHKRSHTAVIIDGNGRQLTTKTCGSTSTDHLALLRWAAKHGADRVWAIEDCRNMTRRLEQDLLAAGERIIRVPPKLMAHARDAARTYGKSDPIDALAVARAALREDGLPVAHLDGPDRDVRLLVDHREDLLAERTRAVNRLRWHLHELDPEWDPPARSLDRPSALNRISHRLVAMSGTVARLAAAITERCRHLTNDINSLEAEIKTLTEQLAPTLIAIPGCASLTAAKILGETAGVLRFRSAAAYARHNGTAPLPVWSSNRARHRLSRTGNRQLNAALHRVAMTQARCHPPARELIARRKAGGDGGLEALRVLKRRLSDVIYQALRTDIIARQPAAA

SEQ ID NO: 213474 - protein, 314 aa, unidentified
MAEGNVYIGVDVSKAWLDVAIEPSRKTMRVENNAKGISELIGCVRGLCLERVVVEATGGYESLLIEMMVGAGLPVSLVHPARVRKFAQGMNWLAKTDKIDARLLARFGEKASPRLVEMPSEQEKQLSALVKRRRQVLAIVVSERNRLETADPSVRGYIESSLQALRGQLDELDAAIQTFVEQTPDLKTKQDLLQSVPGVGKITASTLTSQLPELGKCNRKEIAALVGTAPFNHDSGYKRGKRVVKGGRADVRNVLYMATLTATRHNPVIKVFYDRLVKSGKEKKVALVACMRKLLTILNSMIRNNTTWQPTFSS

SEQ ID NO: 213475 - protein, 424 aa, unidentified
MSKFLNLGIDISLQTATCSFLSQDGKFHGKPFNIDNNIPGFENLKQKIADLCLLEGYTDVNIGLEASSNYGFHLLSYFSTVYLSGVKFHLYQINAKYINRFKKAFSEKEHTDILDARAIAEYLRFGRLPAEFKPDSPYLPLQRLVRYRYHLVKTIEREKKLYLANLFLKFPGWVQTKPVKNLGKTALDITTEFTLDELVEMPLEELALFIAKAGKNRYPDPTSIAESIQKAARESYRIRPELASSVTFILACLNRTIAALKVSLKEVDKAILEESKGFINPLISIKGIGNVYATGILASVGDVKRFPSHNQLARSAGLVWKRKQSGKFESDETHLVHECDKYLRYYLVEAANSLRVHNEEYQIYYRKKYQEVPDHKHKRALVLSARKLVRLVFALLSKNQMYDQFRDTQSPRLSKVTPNCQRAI

SEQ ID NO: 213476 - protein, 376 aa, unidentified
MPSEIAIRVAIELSHSSWIVAVRLPDVEKSRLHRLEGGDTAALLTLIDDMRSRVATKLGGPVNVACCFEAGRDGFWLYRVLTTHGIAAYVLEPTSILVNRRARRAKTDRLDAEGMLRVLAAWLNGDRQICSVVHVPSPEEEDAKRPHREREHLVQERLRIENRIEALLFTQGIRGRPSLRSWEGDMAELRTGDGRKLPPLLRAELERLRRRLVLTLELIREMETERDEALTVTSGAAATQKVTALQRIRGIGPNFAAILVCEVLYRSFANRRQLASYVGIAPMPYQSGGIDRDRSISRAGNPRARTTLIQLAWLWLRYQPDSALAIWFRERVGTLQGRTRRIAIVAMARKLLIALWRYVETGVVPDGVEIRAEASA

SEQ ID NO: 213477 - protein, 379 aa, unidentified
MNKTQVIQKDSNTKESNLYMAMELSDKKWKLAFSDGSKERLRTIDAGEIIELWKEIANAKEKFGLEEDAKVISCYEAGRDGFWIHRCLLSNGIDNNVIDPASVEVDRRRRRKKTDRLDAKKLLMALMRYMWGDKQACSIVRVPSIKDEDERQLHRELESLKKERTRHSNRIRALLISHGIRIENPGRRDFKRYLDSIRLWDGSEISKNLKERLNREHDRYSQVEDQIKELEGVRKRLVRDKESESMSRVRQMLKLKGIGIESSWLLEKEFFGWRKFKNGKEVGSLSGLSPTPYSSGDSNREQGISKAGNRRVRAMIVEISWIWIRFQKESKLTKWFNERFANGGKRMRRIGIVAVARKLLIDIWRYLEHGVIPEGAVVS

SEQ ID NO: 213478 - protein, 480 aa, unidentified
MNIKAKKAKVQPLSKKSVINVLSQDEIKKKVQVIEQELKASTWRELETKGKFEKNDKLSFISEEMLIVGCDIGSETHYIRAIDTRGRELSKGAFEFSNSSEGFASAKAWVLKLAAKNDKKQIVLGLEPTGHYWFAIAAWMVSNGISVVQVNPYAVKQSKEIEDNSQLKDDRKDPKIIANLVKDGNYGMPYLPEDIYADMRRLSMFRDQLTEDRIRNINRLHREMKIYFPEYMDAFGKIDGAFTLEILKVAPIPSDIVELDKEGLKSLWHEAKLRGRGYSRARVIVDYAKKSVGLTGGTDAGRESIKWFVEQIIQLDEQLAEIENVLHQKCMEIPHAENILEINGVGENILAGILAEMGDISRFDDVKEIQKLSGMGLVACSSGKHKGQTKISHRGRKRLRYWLFQAAKSAVAHAVEFKQLHAYYTTRSMNPLKKMQSLVVIACKILRVIYTILNTGMKYDPERMLRDIRYPQGNTVQAAA

SEQ ID NO: 213479 - protein, 354 aa, unidentified
MEKLYLGVDLHKRSCWVTVLDADGHLIESRKLGTEKRELEEFFGKVGKPAAVAVEATFNWYYFLNVVEPLGLELHLVHPWKTRAIASARIKHDKLDSRVLAELLRTGFLAEAWMAPREVREERQLLRHRARSVQGATRAKNGVHGVVNRQGIRPPMESLFGPKGRAFLAEWQWAARDRWEVDDHLLRLDVLKEQIAKLDREIRRRGRENGVAQALETIPGIGPFIALLLVAEIGEIERFPTAKHLASYTGLVPSLYASGEHRWGGAITKQGSTLLRWGLVQAAHQAARRARFSAYYQRQRLGTAKAIVARARKLAVISFYRWRAAELHPSSPPAVKSSGAHLGWRMVGPSTQTV

SEQ ID NO: 213480 - protein, 428 aa, unidentified
MNYNQNDKIAQITSQTLIIGVDIAKHKHVARAQDFRGLEFGKAFYFENTNSGFNHFLNWIQQLMNQQGMEKVVVGMEPTGHYWLNLAHFLIEQRINFVVVNPMHVKKSKELDDNSPTKNDVKDARVIAQLVKDGRYAVPNIPQGVYAELRVARKIRDLLSVDLQAVQGQIHNWLDRFFPEFLTVFKDWEGKSALQLLKLNLLPHELSKLTDQEILIHLRKAVTRAVGLSKITKLKEAASHSIGIREGSAMAKLELRTLINKYELINEQFEELESNIDDLLKQIPGVEQMLAITGIGKDTVAGFFSEVGDLSNYSHPRQIIKLAGLSLRENTSGKHKGQTKITKRGRKTLRALLFRVAMPLVAKNSAFKALHHYFTKRPNNPLKKMQSLIAICNKLIRILFTIGKKQCEFSEERMLRDIPHMVGLPKVA

SEQ ID NO: 213481 - protein, 346 aa, unidentified
MSQKTAATVAHTIGIDTGKNILHLIGLDDQGAIVLREKIARGRIAARLANVPQCLIGIEAGMATHYVARELGALGHDVKQVPPAYAKPFRQGHKNDFRDAHAIAEAVQRPSTRCVPVKTDDQLDLQALHRVRSRLVGQRTAVINQIRGFLLEHGIAIRQGLRFLRQQLPDILAKRSDVLSPRMIRIMEDLSGDWRRLDERIQHITEEIEVLAHGSESCRQLMTVPGIGPLIASAMVAAIGDGAAFAKGRDFAAWLGLVPKQMSTGDRTILGRISKRGNRYLRTLLMQGARVILLRPANWAKHSFGPWLTAAANRLHHNVLATALANKLARIAWTVLMQARSYEARV

SEQ ID NO: 213482 - protein, 402 aa, unidentified
MNAVGIDVSKSKSVVAIMRPFGEIVSTPFEIKHTASDIHSLIELINSVEGESRIVMEHTGRYYEVLAHQLLEANLFVSAINPKLIKDFDNDSLRKVKSDKADAVKIARYALDKWQNLKQYNVMDELRNQLKTMNRQFGFYMKHKTAMKNNLIGILDQTYPGVNTYFDSPARSDGSQKWVDFASTYWHVDCVRKMSLNAFIDHYQNWCKRKKYNFSQSKAEEIYGKAKELVPVLPKDAITKLIIKQAVDQLNSASTTVESLRTLMNETASKLPEYPVVMAMKGVGTSLGPQLMAEIGDVSRFTHKSAITAFAGVDPGVNESGTYEQKSVPTSKRGSADLRKTLFQVMDVLIKTHPEDDPVYQFLDKKRAQGKPYYVYMTAGANKFLRIYYGRVKEYLASLPES

SEQ ID NO: 213483 - protein, 333 aa, unidentified
MDSTSIQNEVIFGVDTHLDTHVGVIINHQGKVIGTLASVPTNAAGYLKLLTWARSLGDVRRTGVEGTGTYGAGLARLLYEQDIEVWEINRPDRAKRRLQGKSDPTDAESAARMVLSGEAVATPKLQSGVAEVLRTLSVARRSVVKARTQAINQLRSLLISAPDDLRERLWKTKPEQCVAGCARLRNIEGNVLLKTLTATLRLLAKRWLMLSAELEELDATLDRLTSQSAKRLRNQFGVGPQTAAILIAVAGDNPERLRNEAALAALCGASPLQASSGKTARHRLNRGGDRSANNALWTIAMVRMRSEPRTQAYVTRRTAQGMSNKEIQRCLKR

SEQ ID NO: 213484 - protein, 499 aa, unidentified
MITIPVITERCAGIDVGKRGLAAAVAVGPADKEAEIKTRWFATTMPALRQLHTWLREEGCTTVALESTGSWWISIKNELEDDLRMTLVCPRKHHPKKGDKTDFRDAIDLALHHRHGLLTGSFLPERGIVELRDLTRRRKKLLGNLSSEKNRIQKVLDTAGVKMGNVISDVFGVSGQEILQALLKNVPLQAEELAAMAKKRLRNRIPQLTEALQDHYMNDHHRWLIGQSVEHAQFLDVQVETLEKKIDAHLEPYRRQYELLQSIPGIKEHTAASILAEMGADMSQFATADKLCKWSRICPGNNRSAGKSRHSHIQRGNKFLLAALVEASWGAIRKEGSAFQRKYRRWLRKGEQKAIIAVCHCLLRVIWSVLKNDRPYVEPDATVVEGLERQRLIHHHTRKLREMGADEQTIGVLIEQLLVLPADSESKPARVETTKDTQAHRDPQPNRPLARGVLGFRIRTAPIKKYSDFKDRPDPPTGVDASETAASSKKRCRTQKAKT

SEQ ID NO: 213485 - protein, 327 aa, unidentified
MKKIPVPVYVGMDVAKATLQVHLNGHQFEFSNDAKGHAQLTTKLARLPLAQVVCEATGGYERPVVEACHKAEILISVLNPAHTLAASQAQGKRAKSDPCDAAALTDYGQRFRPEPTAAVPPAVREITELTLWLKQLIDNCAVVKTQAEHQGNSFVSLRHQELLAHYQSQIQTVEKEIKKLVLAQASFQQRVDCLTAIQGVGFRTALLTLVFLPELGTMNRGGTAALAGLAPWTRDSGTMKGKRCIGGGRAQVRPVIYMAALSASRCNPVLAPLYKRLKKREKPSKVALTAVMRRLLIHMNSELKKLALKPVNQKIVKSKKNKILVAK

SEQ ID NO: 213486 - protein, 295 aa, unidentified
MKQYVGLDVSMEETKVCVLDGAGVVVFEGSVASRPAALAKLLNAKAPHAERIALETGSLSSWLWHELKAAGFPVVCLDGRHAKAALSMRINKTDRNDARGLAELIRMGWYREAKVKSMESRQIRALLAARSKLVDLRRDLENQMRGLLKSLGLIIGKSGVRVLPNRIAALLRDAPHLRSLIDPLMTAHSTLAEQIATYDLQVRELAKTDQTIGRLMTVPGVGPVTALAFASTVDDPRRFARATDVGAYLGLTARRYQSAIWIEMAASSNEAISSRAPICSRLPVCSSMWFAVRRR

SEQ ID NO: 213487 - protein, 411 aa, unidentified
MHPKMKRIYIGVDTHKNTHTAVIINCFNEKLGEITFENRPSAFPALLQEVKKHAGKGISPAFGLEDTGSSGRALAVFLISNRKTVKKVNATYTHNERKKLTIMHKTDSFDAGCIAKVLLDNYDTLPDANPDDLYWTLGMLVSRRSALVKANVALKQQLHSYMVLHYPSYRRFFTVFDCKAGLEFWEKYPSPTKLRDISFSELGEFLHLHSSGFLGEKRAIKILGLVEKDGDTTTEYQDSRDFLVTTCIKQVKQNNEEMGRIEDEMQKLMSRLGYKLETFPGIDHVTAAGFTAQIGDIERFSNADKLAKYAGISPVTYSSGESDKNFSNRQGDRTLYHLFHALAARNVNRGRNKNKPVNDIFYEFYQKKISEGKTEHQAIICVMRRLVNILYGMMKNKCEYRNPTLPKKDAE

SEQ ID NO: 213488 - protein, 346 aa, unidentified
MKQIIRIGMDTSKHIFQLHGVDAAEQPVLRKKLSRKQMLEFFAELPPTVIGIEACGAAHYWARELRKLGHEVRLMAPQLVKPYVARNKNDGRDAEALCEAMSRPRMRFVPVKTAEQQAALMLTGIRDGLIARRTQLSNAIRGYAAEFGRIAAKGLDKLEALLAQIAQDETLPALAREQLAVLGREYGRLQVDLKEIDAKLMAWHRADAVGRRLAQIPSVGPIIATMLVMKAPDPHAFRSGRHFAAWLGLTPKDHSTAGKTRLGKITRAGDEDLRRLLVVGATAVIQQARRGRGHHSAWLLALLKRKSAKLAAVALANKVARIAWKLMVTGQSYDAARMKAEPALAA

SEQ ID NO: 213489 - protein, 430 aa, unidentified
MNRTSKSAELAALIGIDWASQRHALCLYDCATGKRESSILEHTPEAIAQWARGLQERFAGKKIALCLEQTRGPLIYALREYSFFVLYPINPATAARYRQAFKTSRAKDDPSDAQICLELLLHHREKLTPWLAEDAQMRELSCLLQHRRVAVDLRTLLTNMLRDALKAYYPQALELAGQDLFAPLGCQFLLKWPSLQDLQKACKESVRKFYYAHNCRRMDVIEKRLDAIAQMTPLCRDRALLEPAMVQVKMLARQLLQLGGALKEYDSKIEQLFAQHSDALIWQSFPGAGLTLAPRLACAFGTERSRYQSAAAIQQYSGTAPVTEKSGKNQHWVHRRWARPHFTHQSFFEYASQSVLHCGWAKVFIKDQLARGKTYPTAIHALAFNPERFRGMFVCWRDRVPYDETIYLQSLQRRGSHLAPKLNQQLPKAA

SEQ ID NO: 213490 - protein, 343 aa, unidentified
MKLSYVGVDLAKNVFQLHGVDRQGNAVWRRRLRRHQWLEVLLATIDTDCIVGMEACGGAHHWARELQARGITVRLIAPQFVKPYVKSNKNDRNDAEAIVEAMMRPSMRFVAVKTVEQQDIQAIHRVRSTVMGQRIAKANQVRGLVAEYGLVAPLQIVHLRSAIPVWLENVENGLTDCFRALLNELWVDLQQLETRLKALDKQIEAIARSNPVTQRLQQLRGVGPLVATALVATVGDGSHFNKGRQMAAAIGLTPRQHSTGDKRRLLGISKRGDTYLRTLLIHGARAVVSQAKHRDDRLSRWVTDIAKRSHTNVAAVALANKTARIAWVMLREQSDYDPARAVA

SEQ ID NO: 213491 - protein, 340 aa, unidentified
MKYCGLDLGKKSSHFCVMNEKKEIVKEDKVSNREEKIIKVFGKLEPMRIAIEASSKAFWVADVLEKCGHEPVVTDPGRTKAIGAAKIKHDKLDAKVLAMLCVADLLVEVNRPAAAQRLGRMPVVARDGLVRSRTMLVNQVRSMLDSEGIIMKPCATEVFVDHAVDLWDDLPPEMGAAIEPVLNSIHALTEEIKACDKKIEKAIKQDEEAKLLMTAPGVGPIVAACFLMAIRDPARFESGRHTGAYLGLVPSLYQSGKTYRRGRITKHGNKQARWALSIAANAVLNPRLKQRSALREWGRSLAKRIGRKKAVVAVARKLATVLWSMLRNQKPFEPRLAETA

SEQ ID NO: 213492 - protein, 361 aa, unidentified
MERQYVGIDFHRRRSVIVRLNAAGDRLAVTRVTNDPLAISAAVAEAGPVPEVVIEATYGWYWVVDLLRANGATVHLANPNALNWGERRVKNDVIDATDLADMLRLNRLPEAWIAPPGIRELRELVRYRAKLVGLRSGLKARVHAVMAKEGVLPTVADMFCDKGNAQLDAMTLGPNYELRVSSLRELIAIYDREVAMLERDIHRHLRHHRGYAAVQAINGIGRTIAAVLVAEIGDVMRFPNPEALCSWAGLTPKHRESDVKARRGEITKQGSRLVRWSLVEGIARYHGGPKLSSDLSPHRQAARRQQGAGGDRPQGPHARLLRPARRRDPLPGAGRGGVRLGHGQAASSTSGMTLSDGGSTN

SEQ ID NO: 213493 - protein, 345 aa, unidentified
MQTMYYIGLDVHKRTISYCVKDGSGTIRAQGTIPATRFDLDHWMKTLPQPWTAAMEATVFTGWIYDHLLPHAAALKVAHPLMLRAIAAAKKKNDRIDASKICDCLRCDFLPECYMASTAIRERRRTLRYRNLLVRQMVQMKNKIGMLLMEAGVSYNKQRLHKAGYFRELLATNQDIDEGLQSLLRLCRETVVRLQRTESALVRSLERDSLLLDRMERLMTIPAVGPITALTWALEVGEVQRFSSIKKAISYCGLCGAEKSSGNTVQRTRLSKQRNKHLQTTLIEAAKMAPRNSPELAMLYDREKQKGNANRATLAVARKLVAYLVAVDRRQKEFLTVERENRTAA

SEQ ID NO: 213494 - protein, 425 aa, unidentified
MLAVGIDWSEQFHLVALGRPGEGVFEMRRIEHSPKAVDALVERIAALEPDPSEVRVVLESQHGLLVERLVDAGYVVVPVNPDLVARRRGPAKKKDDAEDARIACLLALDRFERLRPLIPHGELAGELRAIARDDERAARDERRLLNRLRQDLIATFPAALEIGGDDLGAPSVLRLLERWPSAEALASVSREELVAFARECKHGWPDRFADKVAQALAGDHFRPRPYLVRAKADTIRLSAGQLLALGRQRRAWERRMGELLLGAPRQGRSRQPCEDERGQSFPGGEVYLSFPGLGDRLAARVAGEIGDHPEQFESPNALQCYAGKAPVTRRSGKSEFVISCRLAYNRHLGNAVQQWAFCSLRSSGWAREFYDSKRAKGAGHQAALRALGNRWLEVLWHCLRNRTLYEEAVHVANRRRALRALPNAA

SEQ ID NO: 213495 - protein, 340 aa, unidentified
MGEYIGLDVSLKETALSVRRDGKRIWRGRCESDPTVIAGVLRKHAPEAQRIVFETGPLSVWFYHALRAEGLPAICIDARHAKAALDMAANKTDANDADGLAHLAEVGFFRAVRVKGYDSMRVRTLVAARSKLVQVTTELSNQIRGLMKTFGLRVPGAKGGSFEAEVRRLLSGDHGLARVILPLLEAWSAVRRRAAELGRQLLAGARRSQACQRLMAIPGIGAITATAFVTAIEDPANFRSSRSVAAWFGLTTRRYQSGEVDDDGHISRRGDAQMRGLLYEAATVLLTRSQVDSDLRAWGLKLRERLGFKRAAVAVARKLAVVMHSMLKSGQSYRAKAAMA

SEQ ID NO: 213496 - protein, 414 aa, unidentified
MKLFVGDDWAEGDHDVELMDAGGRRLAKARLPDGVAGIARLHAMIGEQLGQDADEEDDAGQVAVGIETDRGPWVAALVAAGYTVFAVNPLQASRYRARHGVSGAKSDAADAHVLADMVRTDSHQFRPVAGDTAQAAAVKVVTRTHKTLIWERTRCTQRLRHALRDYFPAALEAFEDPGAPDVLELLARAPDPASAAALTTAQISAALKRAGRRHVAGKAAQIRAVLRAPHPGQPELVTAAYAVSVRALIAVLSALDEQVKALQGQVEAYFGQHPDAEIILSQPGMGQVLGARVLAESGDDPARYPSAKARKNYAGTSPITRASGKKKAVLARYVHNDRLVDALMAQAFSALRTSPGARACYDRQRARGAGHNAALRQLANRLTGILHGCLKARTRYDEATAWPQHAAHAGKTAA

SEQ ID NO: 213497 - protein, 340 aa, unidentified
MNIVFLGIDLAKNVFQLCGLNQAGKLVYSKRTGRKELLQTVANIPACLIGVEASTGAFYWQREFEKLGHKVKVISPQYVKPFVRGQKNDGNDAQAIAVAMMQPTMQFVPPKSPEQQDIQALHRARQRIVNHRTATVCQIRGLLLDRGITIGAAVSRVRRAVPLILEDAENGLSARMRRTIAELYDLFNDLGRRINFFDNEIDVVFRQSEACQRIAKVKGIGPKTATAVVAAIGKGTEFKNGRHFAAWLGLVPRQHSSGDRQVLMNMTKKGDKHLRTLFIHGARAVVRVATNNNDSYLNQWVNQLKERRGFNKTTVAVANKNARIIWSMLRNDTEYQAVGS

SEQ ID NO: 213498 - protein, 385 aa, unidentified
MNRIIKIGMDVHSKTFNLCAIEANIAGEDKILGSTQVTADYHEVVKFIEGLKKKLNTINPVDMFDIECGYEAGCLGFSLRNQLAAMHIKCHILAPSTILQPNGKRVKTDARDAEWIAKQLAWGSCTFVHIPTEKDAGIKEYLRMRDDHKSDLKKNKQRINALCLRNGYVYSGTKWTARHWEWLKKLELLEFVRETLDEYMATYQLQQSSIERFDARIEELAADGEYAESVKKLGCFLGIKTHTALSVIVETSDFSRFAKGSTYAAYLGLAPGESSSGEHICRTGITKAGNCHLRRLLVESAAGICKGKIGAKSKALKARQSGNTSEVIAYADRANIRLRSKYYHMIRNGKKRNVAVTAIAREMACFIWGMMTGNTSPNNDLRVAA

SEQ ID NO: 213499 - protein, 427 aa, unidentified
MDGNEVIRYKQFCQFKAEVRSSRDYLIVGVDVAKERHHAFFGTAAGCSLLRRLIFDNNQAGFNQLITRASQLQIEHGLKKIVYGLEPTGNYHKPLSNWLLEQDQMLVLVSSKSISDNRQTLDGRWDKNDIKDSANVADLIAQGKCQFFEMPDTRLVELRNLHSLLRRLKKTEHSVRMQIRNGLVCKYFPELDRHWGSCLTENLAIVRWCLDPHKITTMGYKEFVKRVTRRDRGIRQQKRLELIYEAAAVSVGCPMDEAANFEAHLLVERLEEISERIGQTESEIKDLCKSFSSYRRLLSIPGFGPYVSSIVLARIGDPHRFIGRRQVIRLGGLDLNANRSGKRSNAAVPVISKRGNSELRYALYQAAQIATYHSDRFRALFIRSLEGRENERGIKTKMRVKIAAKMLVIAWTLMKNDTDFDPLLIKA

SEQ ID NO: 213500 - protein, 340 aa, unidentified
MSEQYVGIDLHRRRSVIVRTSVEGEVLAETRIDNDPVSLALEIAKAGPDPEVVLEATYGWYWAVDVLELQGASVHLAHPLGINGFKNQRVKKDGTDALHLADLLRMNRLPESWIAPPATRELRELVRYRAKLVALRSGLKVQIHAVLAKEGVRVPMSDLFGLGGTRLLDEVQLARAYDLRVRSLRKIITLVDKEITGLEAETQRVLKEHQGYRAIQDIPGVGKVLAAIFVAEVGDVSRFSKPQKLCSWAGLTPRHHESDTTVRRGHITKQGSRLVRWAAIEATTRITPARSKIAGDLRRIAARRGTNIARVAAGRKVLTLVYYGLRDGEIRCLHQYPEAA

SEQ ID NO: 213501 - protein, 283 aa, unidentified
MDNFYFIGVDVSKKKLDFCVLFEGKVLREEQVSNHQQAVARLIGELKNDLEMDNEQFLICAEHTGQYTFPLVCACKSVECKLWLENPSQIKYSSGMQRGKNDKVDAKRIAIYASRFGDKVKYYDRPTEEIERLKQLERERALYVTDLAKYKGQMYDQKDFMPAALYRKKTKRMKGLIQELQAAIDAITAEMEKIIGSTEVLARQMELLMSIDGVGKVVALNVIIETEAFSRFDNPRKFCCHAGVAPFSYTSGSSQHSKNKVSHRANKNIKKLLHMAGGSGNQP

SEQ ID NO: 213502 - protein, 395 aa, unidentified
MFIVGIDIAKRSHEAIIITEDGQVVRKAFSFRNNCTGYNLLLEQVRRLTLVKSQIVFAMESTAHYWLALYARLLKDGYTVMVLNPIQSHSLRELYIRKAKTDARDSLIIADLVRFGRCKASNVPQDKILALRELCRSRAYLVDMAADLKRKLIALLDRIFPEYESLFDSVFSKASIAVLSKYSTPQKVKNANLRKLTDILMESSNGHFGEWKAHQLKEAACSSFGIDDSDGVYSMLLGMFLEQILSLTAQADSLEKQISVFFQEFNNPLTSIPGVGTVLAATILSEIGDITRFSSADKLLAYAGLDPSVKQSGEFKSNQNRMSKRGSPYLRRAIWLASTVAVHRDPMFQTYYEKKISEGLHYMNVIGHVSRKMTAVIFAVLRDGQPYQPILQSAG

SEQ ID NO: 213503 - protein, 480 aa, unidentified
MAKRAVQHADLKAVPMLLNESLYVGIDIGKAKHVAGFLSKTLLERHERFEACPALVFENSREGFRLLIERIRSLAPLEHIFVLMERTGHYHRTLEQYLQELDITVYVMHVQSRSTGMLKTDKRDALTLANQLYNQLELGVQVPNKLQLIRRVVPPTQAAAELRGLIRHRYELIHESTRRKNKLTAICDELFPELVRVVEDPNGQVALALRERFPTPAALATVSLTTLQQIRGGARSFSDAKLLELQRQAAQSIGIKEVARLRGLVLEQTQLIKELQMLQEHIQQLDKEIGGIVEHAREGQILLSFPGIGPIMAATSIAAIGSIHNFPSAAALKSYFGWAPVVAQSGSTLDHTRLTHGGARTMKHMLFLAVFQAIRLKDNEWARLYERLVKTKCPFDERTQSYLGKTRVIGRVAGQMTEAIYALLKRDAELLSKVPPSQDPPPPLLYDPEVHRQHRLGHYRPLKSTPPPNTITLLHPFPAE

SEQ ID NO: 213504 - protein, 421 aa, unidentified
MKGLRTKRIRTVREGALMATVDIGMASNTGYCITADGRDTKPFKFSNTREGLDKFWDMITISKKRFCCNEVIVGYESTGPYAGPLLHYMMSKPVKIVQVNPMHTKRMKEVNDNSPLKTDDKDPRVIADIIRLGHALTVVVPEGDAAYLRRLNNARERHIGERTALFNQLQQLVFLIFPELKTVMKNIKVKTAIHVLKKYTTPDTLGKLSIEALGEEMRKKSYGKFGIKDAEALINHAKNTVGIKEGIAGLVLDIRHILMQLEMIDGFIAEIEAEMVAILLRIPYSARLLSIKGLGTVSVAGIIGEVGDFMKFGTQSEIMKLAGLDLYEISSGKRRGERRISKRGRSLLRKILYYTAIQTIRKNGIMYEYYVNLTSRGMKRIMALVAIARKLLRIIYAIVRDDSEYKADYGLLKRKVIKKAA

SEQ ID NO: 213505 - protein, 346 aa, unidentified
MKITTIGIDLAKAVFQIHGVGERGKVAVRKQLKRSEMSSYFANLGPCLIGMEACGSAHHWARKLQGFGHTVKLMSPQFVKPYVKTNKNDKADAEAICEAVSRPNMRFVSVKTVEQQAILSVHRARAGFVKARTAQANQIRGLLSEFGVVIPKGIHSIMKRIPEILEDGENGLPGTMRNLLQRLTENLKEMDRQVDELEKQIQLWHRENEASRRLAEIPGIGPITASAIAATVGNAREFKNGRQLAAWMGLVPRQNSSGGKQNLLGISKRGDTYLRTLLIHGARSVIQYAKNKADESSWLRKLMARRNKNVAAVALANKNARTIWALLAHDRTFRPDYTRADVAAVA

SEQ ID NO: 213506 - protein, 520 aa, unidentified
MASTRTRRRSSRRRIPVSVGKPRGVLHPRVQQVGPEHFGIVCFDCHKVSSKFLLADFYGRPLIPPTVVQHNRPELEAAIAHIRRAFDQHQIRDGVVAIERTGRYHRVVQRAFAAAGFETRILHPFVTKQYRQPVDPGNKTDDTDLAAIHRATVTGCALLEATRDEAWTTLQLVIRHRRDLVCKGAALNCQIRDHLEAAVPGYAACFDKLWESAIPWHLLRHYPTAAQLRAAGRTTLCQALRQAGIRFQQRTVQTVLDWAEQAASGDVAAGQHLRIALALYDDRQRKTQEIQALECEIAGRLAQTPYVLLLSFPGINVVSAADFAGEAGPMEHYANPRSITGRAGLRPSRYQTAQVDNANGPLVRTCNRALRAAILGIADNLIVCNHHFQHLATRWRSQGKDARDIHVRVGLRFSRIAFQMVAGRQVFRHPCIQGRHYILDKLNAFHREHDTAMPQVLRDLQAAIGQLPCRAYTAEARPLQEEMQRIHDGRRRGPQLLGDILPIVLARLGVGAVQSDESGE

SEQ ID NO: 213507 - protein, 424 aa, unidentified
MSWLTLDVLLLARLLLKLAVGPVLERKGDITMFYVGLDIAAEKHDCCIMTEERQVLKQFVFRNDAKGFEFLKKTLTKLAPTEEIKIGLENTGVYGSNLVQFLRRNGYKTYTFNPLLINKSIQATTLRKTKTDKADAKFLAQYLTWDNSQPDHDVSYHISELKSLSRLRFSLVQQRSKCKTQAKGVLAQVFPELTQVFSDVFGTTARTILSLCPSAQRIAAYPVPQLADLHRTTSRGQLGLEKAELLHALAVHSVGNSSIALELQLQIYLEQITQLSFHICRCEAALRTILAQMDSPITTIPGIGTVLGATILGEIGDIFRFSSPAKLLSFAGLEPSITCSGKSVSAPGRMVKHGSHYLRWAFGQAARCIILRDQTFAAYASKKRAEGKHFNVVCSHVAKKLVRLVFALLKNHSSFIPNYSSLAA

SEQ ID NO: 213508 - protein, 415 aa, unidentified
MQKVYAHCAGLDVHKKTVVACRLSVGPAGRRQTDMQTFGTTTAELLQLSDWLTAGDCTQVAMESTGEFWKPVWNILEGSFELLLVNAQHLKRVPGRKTDVQDAEWLADLLQHGLVKASFVPPLEQRDRRDLTRQRTQLVRDRASVINRLHKVLEGANVKLTSVVSNVVGVSSRAILAELVADRLHPAQLGDLVRGRLQAKLPELEQALQGRVRAHHRFLLAQHLAQLDFLEEQIEAYSREIERLTHPFDELLTLLDTIPGVARTTAELILAEVGADLSRFGSADRLASWAGLAPGNNESAGKRRSGKTRKGSQWLRAGLVQAAQAAARTKDTYLSAQYHRLAGKRGRKRALVAVAHSILVMAYHMMQRRQPYQELGRNYFDERNQHGTLKRLARRLEKLGYAVIRQPSPVTPLAL

SEQ ID NO: 213509 - protein, 363 aa, unidentified
MIVIGADTHKHSHTVGAIDAMSGRVIADRTVKAKRRSFDDLLLWARGLDGERVWAIEDCRHVSGALERFLLRRGERVVRVAPKLMAEARRSARERGKSDVIDAVAIARAATREGLDTLPVARLAGRELDIRLLVDHRERLVAQRTALINDLRWHLHDLWPGFEIPARVLTSGCWQDRVAGRLARAEQTPRVRIARDELRRIRELTRSIDALQRELAVLVAQLAPRLLAEPGCGVLTAAKLIGEIAGIERFASDAKLARLAGSAPIPASSGRTTRHRLDRGGNRQLNCALHRLAVTKGRLDPDTAAYLARKQADGKTRREALRCLKRHLARRVWRLLQSPGTPLEPPRTIPVMIHCNVPYSRFS

SEQ ID NO: 213510 - protein, 375 aa, unidentified
MHMMQHREIRYIGLDVHKLSISVAIAEEGGAPTSYGKIPNDPVAIRTLMTRLGDPNVELRVAYEAGPTGYALHRQLTGVHIQCLVAAPSLIPKQPGNKVKTDRRDALKLARLLRSGDLTPVWVPDEAHEALRNLVRARADAKADLLRAKHRLSKFLLRQGCWAPIGVRAWSKRYFTWLHQLEFEHLPDRVVFADYLTEVNAAGERVKRLEAALHECAQSSSQVALIRALQAFRGIGFLSAVTLVAEAGDLRRFRTAPQFMAYAGIVPSESSSGGKQQRGSITKTGNRLLRHVLGEAAHHARRAPRVTSTVKQRQKDVPPEIIDLAWRAQVRLHTRYRHLSARIGALKALTAIARELAGFIWAAGHVIQEEVPVAA

SEQ ID NO: 213511 - protein, 418 aa, unidentified
MTNPTTQTWHEQGHFAGLDWARSHHDVIVLDQHGSVQEKLHFEHSAEGWEQLRALVARHPQLPIAVETSQGTVVEQLLACGARVYPVNPKAAQRYRERHAPSGVKDDERDAWSLADALRLDGAAWRELVAQDPIVAELRLLCRDEIALIEQRTAFINQLRQCLHEYYPAALEAFDDWTCPGAWAFVLAFPSAPALTAAGRHKWEKFLHTHKLWRSATVEARLAIFARAEALSGSAPTTAAKSLLAVSLARLLQTIEHQLDAYRERIAATFARHPDHDLFGSLPGAGEKLAPRLLAEIGARRAEFACAESLQCLGGTAPLTIETGKTCYQRVRHACNDTLRATVHLWADHSRTKCAWAEAYYQKHRADGHSHACALRCLGQRWLKIFWKMWQTRTPYDEALHTRNQTRHGSWVLSLKPA

SEQ ID NO: 213512 - protein, 338 aa, unidentified
MPNLIIGLDIAKNIFQVYGTNHRGVATIKRKLRRNSVLKFFATLDPALIGIEACHSAHYWARELTKLGHTVHLLPTQYVKPFVVGGKNDANDAAAIGMAVTRRDIHCVPIKSAEQQSLQSLHRIREGAIQERTAKSNQIRSLFSEEGIIFPTGLSSLKKGLLELIEDGESVITPILRKLGMMYLEQLSCLQAWIGELNEMIDRYFKENDACQRLATIPGIGPVIATAIVSRVGDPRLFKNGRHFAAWLGLTPRQYSSGGKTRLAGITKRGDGYIRKLLVQGARAVIYHINRRHDNYGEWIKKLIQRRPVNIVAIALANKIARISWVILTGEETFRVTP

SEQ ID NO: 213513 - protein, 377 aa, unidentified
MTKIRFVGLDVHAETIAVAVAEKDGEVRSHGIIPNRLESIRKTMAKLGPSKDLKCCYEAGPTGYVLYWQLTQLGVACEVIAPTLVPVKAGDRVKTDRRDAEKLARCYRAGELTPVWVPDAEHEALRDLVRAREAAKKDQLRARHRLGKFLLRHGKRPTDAGKAWTKKYLEWIKTHVRFAQAALEATLQDYLDEVDHVAERIGKLEKAIDEAVSEAGPEIRAVIEALQALRGVAQISAATIVCELGSLSRFESPRQLMGYSGLVSREHSSGGKIQRGAITKTGNAHLRRVLVEAAWAYQHRPNVTGYLLRRQKSLELADETKHMAWKAQHRLHKRYKALAARGKNKNQIVTALGRELLGFVWAIAVHTEAQYRQAQAA

SEQ ID NO: 213514 - protein, 341 aa, unidentified
MNHPKVVVGLDVGAETFSAAALRTAGEAVEMKGSFENTPEGFDAFAVWMKEYRITKEKSAVCLEATGVYGEALCYDLISRGYRVAVESPLKVKRAFAASAHKNDTVDARQIAEYGHRFYDELQWWSPPSEVMEQVQMLLSAREQFVTQRTANINALKTMQRKVIKTVTGMKAYEQAIKQLSENIEEIEREMKRLMKEDDSFYRLIKTLTSTPGIGLLLATNLAVTTNGFLRTSNHKRIASYAGISPIEHTSGTSVYRRPRSRSFGPPRMRKLLYLAAMSVSTHNPEFRRYYLRKVAEGKSKKLVLNNISNKLLKVVCALVRTETEYIPNYRSVNPILLKSA

SEQ ID NO: 213515 - protein, 344 aa, unidentified
MLHAGLDLSRRRLDVCLLDDGGELVAQTAAAPDADGLSHLAGRLGGQRVRAVIESMTGARFVHDTLEELGWDVLIADAQKVKGLAPLACKTDKIDARVLAELSWRDLVPAIWLPDPAIRRERELARYRLHLVRHRTTLKNRIHATLMTFGHPCPVSDLFGHAGRELLDRLQIPDPWRRNVDVSLGLIDDLELQIASLTVELRRQGADHRYIRLLMTAPGFGWINAYTVASEIGDIERFASPAKLVGYTGLCPRVYQSGASDRRGPISKHGSRYLRWALFEAALHACNHPIYAQRYQAMKKRLGRQRGPKVAQIDLSRKLTEAIWHMLTRNQPFAPADARFRLAA

SEQ ID NO: 213516 - protein, 359 aa, unidentified
MRKSISKFETVTTVGLDLAKNVMQVHAVDAAGNVVVNKPIRRGKLIAFFAALPKCLVGMEACSSAHHWGRQIAELGHDARLMPPAYVKAYVRRGKNDKVDAAACCEAVGRPSMRFVPLRSVENQAELMRHRAREMLSSQRVALLNALRGHLAEIGVIAPQGAQNAYYLKKLAETGHDENGEVLVPDGVRQSLAPLARQIDAIDAEIAAIDKILVKQAKSDPTARRLATIPGIGPVGATAFTATVLNVKAFANGREFSASLGLPPRQHSSGGKQRLGGISKMGDRYLRKLLVVGATAVLRHADGHNDALRGWAKDLLARKNGPYKKKIAAVALANKLARIVYAILSSGGTYDDRPVRARA

SEQ ID NO: 213517 - protein, 461 aa, unidentified
MRTIGIDLAITGTHYAVIVDGQGEALGRSFRFSTDPADLAELLRRARAGVGPDEPLRVVMEPTGLSWLPVASYCIQRGIQVYLVNTQQVAALRKFYSKHAKSDRISARVLARLPWINPEALHALRLAEADYLSGQRWCKQQEELAQLMTAIKNRVQAWEHAFWPGLEQVVGDLFAAWVRRWREVWYDPWLLQSLEPRSLAHFLAEAGADPERVEELAAGLQAVARRAVALFGTPQGNSSPYLSYTTLQDQVLRELRLLAGYQAEHQAVRQQVQRLYRQLHPSRDLESLKGVGGDGAAVYAFFIHEVDRFVSQKKLRGWSGMIPASDQSGDVEKKGLRITCAGPDLIKKYAYINAEVARQWDPQMAAIYYDQMVNKGKHHNQAVCACATHLLDRIRAVLRDGRPYQLRDANGQPVTWQQARTIITERYQVPEEIRQRTTQRARKARRDQRAEPKQKRRSRPA

SEQ ID NO: 213518 - protein, 410 aa, unidentified
MDVLIPRCCGLDVHQKTVVASVRILGPTGEVTRETRTFGTTTWELEALAAWLRPWQITHIAMESTGVLWKPVWHILEPEWQLLLVNPQHLKRVPGRKTDVQDAEWIAQLLQCGLLRGSYVPPAVIRELRDLTRTRTTLEDETTGVVNRIHKVLEDANIKLATVATDIMGVSGRAMLRAIIAGETDPTRLADLARRRLRLKRGALIQALHGRVTAHHRFLLERLLTQVEFLEEEIRRFDQRVAELSAPFAAALARLDGIPGINRRVAENVIAEVGHDMAPFASVPNMVSWAGICPGKRETAGKSRSARIRKGNRWLSRTLTQAAWAARRKKNCYLAAQFQRIARRRGEQRAAVAVAHSILTAAYFILRDGVEYRDLGPEHFHRLTPDKVVRDLVRRLEKLGHKVTLETVAA

SEQ ID NO: 213519 - protein, 442 aa, unidentified
MGAQSAETALTESRDGAAPTGTALFVGIDVGRHHHQVTAIPRERMEDSAWERAGVRKIAANVIGFRELLAWLESSGLPPDTIRVGIEPTGGWYSRTVVAWLETYGYQIDWLQNWAVHERRQLILGKQTKTDALDARLIARLLYERERLGQSRAFLRPAYSGTESLRMLVRNRLKLVNFRTRYRLQLGAVQDVLFPEFKLFFQARSTGRTARLLLERFGTPAALATATPEEVSAVLVGEARAYALGRRISELQHLAASSAGLTDDIDQLVRIQGWLLRQLSIIDKEIEVAEQTLGEALESWPVQARQILHSFPHMSILRSAVLLSAIGDVNAFKTDRQLRKHLGWYPEAAESGTSVFRHRLGQKGNRLARREIWLWVMTLIKPDCHPATFRSYYRRLRGRGVTGKVAAGHVAGKLISVLFFCLRNIEPCDPDRHARALGISDA

SEQ ID NO: 213520 - protein, 342 aa, unidentified
MYYIGLDVHKKTISYCVKDVSGQIQREGTIPATRTELDSWMKSLPKPWTVAMEASIFTGWVYDNLLPHAAQVKVAHPVMLRAIAAAKKKNDRIDAGKIADCLRCDFLPECHMVSTEIRDRRRTLRYRHLLVRQMVQMKNRVSGLLLETGVSHNKQRLHKVKYFRELLATNKEVDESIRPLLKLSRESIERLQKTDYALVSSLQRDPLLAERIKNLRTVPGVGPITALTWALEIGDVSRFRSVKQAISYCGLCGDEKSSADKMMRTPLSKQRNKHIQRVLVEAAKLAPRNSHELSLVYERAKQKGNVNRATIAVARKMVTYLLAVDRGQRPFLALEDFSTAVA

SEQ ID NO: 213521 - protein, 423 aa, unidentified
MDILYERVAGLDVHKDTVVACVRMVADGKTTRECRTFATTTEQLVALRAWLEECRCTHVAMEATGVYWMPVFRLLDAGKFKLIVANAAHIKNVPGRKTDMSDAMWIADLLACGLIEASFVPNEEVQELRALTRTRKQLVREQTRHVQRIEKTLAEANIKLSSVISDIVGASGRRMIQAMIDGVRQPNKLAELAGRQIKATPKELYDALHGRLTDHHRFLLALHLKQWDSIDEMIRKLDVEIDQRIGRMTAEAEGNETPFRALIGLLTTIPGVSAVAAPAILSEIGPDMSRFRTAGHLVAWAGLCPGQNESAGKRKSSRLRKGAPWLKTMLVQCAWAAKRTKDSYYRAQFFRLQAKRGPQKAICAVAASILTAIYHILKHGTEHHDLGSDYFDRRPVELKASRLVARLKKLGFTVQLQPIAEAA

SEQ ID NO: 213522 - protein, 378 aa, unidentified
MTRLVINSLPMKTKPTPVLVPTSPAAVVASGFTLGLDLGDRAHHVCVLDAAGNIVREAALPNTRPALAQLLAEFPGSTVALEAGTHSPWISRYLTGLGATVLVANPRKLHAISRSERKCDRRDAQMLARLARVDAALLHPIQHGSAQAQHDLLGLKLRDALVRNRVSLINAIRFTLKSLGHPVRNPSSESFHKTVLADIPADCLPVVQPLLTVLAQVTEQIKAMERDLVQRSQKDYPVTQRLQQIAGVGPLTALCFVLKVGDPERFRRGRDVGAYLGLCPRRDQSGGTDKQLRISKCGDGLLRRLLVSAAHYVLGPFGPACALREHGQRLTGTGSSREKKRAVVAVARKLAVLLLSLWKHGTDYEPRVTTPKLGLTPA

SEQ ID NO: 213523 - protein, 374 aa, unidentified
MSKSSTFFIGLDVHKETTDVAYCVDNSRDEPVFHGTIPTNIRSINKLIKKYKDLATHLCVVYEAGPCGFWLYRHLVKHGIECWVVAPALIPKAPSDKVKTDRRDAIALARMARAGLIRSIHVPNTDDEAVRDLIRCREDAMLDCRQARQRLKLFLLRNGHPCSGRQVWNEAYKRHLADIHFLEPAKKLTFQHYINIVTERYERLQHLEQELQVIAQDWSWYPLVQYLTVLRGIRFLSAITLVAELGDMRRFANPRSLMNFVGLTPSEYSSGNRQKQGGITKCGNTHARRILIEAAWAYRFPPKVSRELQIRQQDQSLHLQQRSWQAQQRLCRRFAQLKHRGKEYNKVVTAVARELLGYIWDIAQRFDPQSQHIG

SEQ ID NO: 213524 - protein, 345 aa, unidentified
MAEAYDGRQVVGMDLHRRRSVLVRMTMDGRKLETVRITNSPQALRAEIAKAGEHPLVVLEATYGWYWAADVLAAAGAEVRLAHPLGVKAFSYRRVKNDERDAADLADLLRMGRLPEAWIAPPPVRALREVIRYRHKLVGQRTSCKDQVHAVLAKLGVPVTHSDIFGTGGGLWLGQLVLPQPYAAKVASLRALIAVLDGQITRLADQAAGMLAGDPGYAAIRQLPGIGPVLGAVIVAEIGDVSRFRKPGQLCSWAGLTPRHHESDTRVIRGHVSKQGSRMLRWALVEAIQRAPAGTRPRLARDAILARRGPEARNIAKTAAARVLLTQVFYALRDGHARSARHPAA

SEQ ID NO: 213525 - protein, 420 aa, unidentified
MARTVEIVYPVCCGMDVHKNFLVACIAVTNEHSHTEHHIRRFSTFTGDLRRLSAWLASYNCRDVCMESCGKYWIPVFNALEKTCNVCLTHPKYVKAIKGKKTDKKDAKWISELFKCDLVRSSFIPPPDIRQLRDLCRYYVKLTGFASSEKNRTQNCLTMCNFKLDDVFTDIFGKSATRVIDALLEHGSGDFELDGLISGKCKSSPEKIRAALDGELNPIQAEKLNLIRRHINDINALKTALEDLIYKLAAKYHPQIDLLLTVPGISTPLTAIRILAEIGADMSVFETAKQLVSWAGLTPQNQESAGKKKTTRIGRAGAYLKPLLVQIALAASKSDRHPELKNKYLALKKRRGGKKAVIAISRKLLTAIWHILSKNEAYNAELYRKADKPPAAREFTTAQAVAFLRSKGFLVVDEETGEVA

SEQ ID NO: 213526 - protein, 466 aa, unidentified
MSSKIKKVKKRKSTISGLPSEFERININAAGIDIGAQKHYVAVPKGRDPQGSDVRHFDTFTADLHALADWLKECDIGTVAMESTGIYWIPLFEILEQKGFEVRLVNPRSIKHAPGRKSDVVDCQWIQQLHAYGLLTSAFRPDDQIGVLRAYHRQRTMLVNHASTHIQHMQKALEQMNLKLNNVISDITGTTGMKIIRSILAGERNPKKLSKHRDSRCKKSEKEIAKSLHGNWRDEHLFALQQAVALYDFYQTQIEACDKKIQAQLCRFEDRSAGGELPPPKSKPNSSGKKLTFDARGHLYQMTGVDLTQIVGLNTPTVLTILSEIGLDMNRWPTAKHFSSWLGLCPGSKISGGKNFSSKSKPSANRAAHAFRMAAYSLHRSHSSIGAFLRRKKAQLGAPKAITATAHKIARIFYEMLKTRTEYKDLGIDYYQNRYKERMLRNLKRKAREFGLELVNSNQDQLVMTC

SEQ ID NO: 213527 - protein, 412 aa, unidentified
MTQLSEYLVRVGIDWASESHQICIVDQDGHRTEHTVPHTSAGLAALATELVALSPEDPGRVAVGIEVPRGAVVDTLLERGLHVFALNPKQLDRFRDRHTVAGAKDDRRDAFVLADSLRTDRPAFRRVHLDDPLIVELRELSRLDDDLREELSRLSNRLREQLHRFCPDTLALCPAADEPWFWALLDRALPPPRPKPVSIKAVTAVLKVHRIRRLTVDTVHAALQVPPLRVAPGTLEAACAHIALLLPRLRLVHDQRTRIVGARIDTLLAALAKEDVTGEHRDVTILRSLPGVGRLVAATVLAEASRPLAERDYQTLRAYAGAAPVTRQSGKKAIVRMRRACNARLRNAVYHWARVSVQVDPRCRVHYDRLRQGGHEHARALRGVVDRSLGVLMAMLTSRTLYDPERRCEKAA

SEQ ID NO: 213528 - protein, 346 aa, unidentified
MKINRVGVDLAKNVFQLHGVDHKGNALWKRRLTRGKWLAVLCDTVEPGTEIGMEACAGAHHWARQLMQRGYPVKIIPPQFVKPFIKSNKNDANDAAAICEAMGRPDMYPVKVKTVEQQDLQAMHRIRDEIKSHRIARANQIRGLVTEYGLVAPQQLAALRSAIPDWLEDAENGLTFLFRQLLQGLWGDLYALDQRMAELDKQIAMVAQEDPTAKRLQQLRGVGPLIATALVATIGDGKQYRKGRDMAAALGLTPRQHSSGGKDRLLGISKRGDAYLRCLLVHGARSAMRTAKDKDDRLSHWIINLQARRHANVVAVAMANKMARMAWVIMTRDVDYDPDLAAASVS

SEQ ID NO: 213529 - protein, 455 aa, unidentified
MPKTTTADRPELKPVNVGAAAIDIGSKMHMAAVNPACTDEPVRTFGTFTRDLHSLADWFKTCGVTSVAMESTGVYWIPAYEILEQRGFEVILVNARYAKNVPGRKTDVSDAAWLRQLHSYGLLRGSFRPDAEVATLRAYLRQRERLVEYAAAHIQHMQKALMEMNLQLHHVVSDITGATGMRIIRAIVAGERNPDVLATYRDVRCHSSTETIRAALMGNDREEHVFALTQSLELYDIYQAKMLDCDRKLEVLIAALSNREAKPVGKLSKPRVKTKQVNTPTFDVRTALYGVLGVDLTEIHGLGPSLALKLVGECGKDLRAWPSAKHFTSWLCLAPGNKISGGKVLSSRTRRSSSRAAALLRLAATTVGRSDTALGAFYRRLSSRAGKSKAVTATARKIAVLFYNTLRHGMSYRDPGADQYEQQHRSRVLANLQRRAKSLGFVLQAIPCNANQAVS

SEQ ID NO: 213530 - protein, 341 aa, unidentified
MAEFIRIGVDLAKNYFQIHALSSEGAPATKRKLTRGKMREFFSKISPCLIGMETCGSAHFWARELKAMGHDVRLMPPAYTKPYVKRGKNDAVDAEAICEAVSRPGMRFVPVKSEDQQATLMLHKTRDLLVKQRTMSVNALRSHLAEFGLVVAKGIGRVDELLGLAEADTTLPEAAVMAVKVLGQQIEALDKGLEDLEKEIAKAHARNEMSRALCEVPGIGKLAASVIAVSVPDPSVFKSGRDFAAWLGLTPRQNSSGGKQSLGAITKAGNRYIRKLLVLGATSLLNVVGKRNGGLRDWIAGLLTRKPARLVTVALANKLARIIWAMMKTGECFRNGMFAKA

SEQ ID NO: 213531 - protein, 361 aa, unidentified
MNATTLKTIGVDLHKAALTATVLDSTGAILERKEIPTKCRRQVADYFASHGPSAQVAVESVGFYHWFWDTVRPKVQILRLADPAGVRACAGRQTKTDRNDSLLLARLLREDRLPMAYVPEEPVRALRELCRHRHRLARQLALARRHLRWIALKNNLAGPTMLVSDRAQKWLLSQESKLSAVHRLAARQLLDQIITLERQLSDTEATLKQSVAAHADLAPTLALIQSVPGIGFITAVTILCECGDIRRFDSIDQLSAYAGLCPRVSQSGLTAHHGHISKQGPPLLRWVLQQAAWVAMRCDPNARRIFARIARKAGAKKAATALARKLLSYAWSVCRQGHPFVWPNAGKNNGPGPVPVWSYDI

SEQ ID NO: 213532 - protein, 340 aa, unidentified
MKFIGMDAHSRQCTFAVLGKNGQILRRATVKTQERELLSFVRSIKGRKKLSFEEGIVSQWLYVLLKDEVEELVVCQPPKKNGAKTDKIDAEEIADLLRVGRLKLVFHADCDLMYLRILVSGYGDVIQELTRTKNRYKALYRNVAIATKVTGFYTSTDMIPLLDTDVRRYVASTLFEQIKFLEVQRSGYLERFNANVSTYKSIELLTTIPGIGPVRANQIVGVMVTPHRFPNKYHLFSYAMLTKHNLISDGKLYGKTRANGQVVLKAVFKSAVLSATRSENTFRRKRDAMKAAGKDDRAVRNAVAKMLAATVFGVWKSGKKYDDKKQEVSRRRNNSCHSGN

SEQ ID NO: 213533 - protein, 445 aa, unidentified
MSEPMPSAKPEPEWAAFAAIDWADQKHFWRLVPAGSQQQEQGELENTPEAVEVWAASLQQRFGGRPIAVCLEQSRGALVYMLAKYAHLVLFPVHPTVAARYRETFCTSGAKDDPGDTASLLDLLMRHRERLRQRQPDTGETRLMQFLVEERRRTVNEKTRQSNRLTDCLKLYFPQILRWFDDMDTPLVGDLLERWPSLEELRRAHPGTLRKFFQEHNCRSAERNQERIDAIYQAVPASNDAAVLEAGALTARGLVALLRTLRDNVDRLDRRIAELVAAHPEGALFASLPGAGPVLVPRLIVAFGTRRERYDSAYEVQCYSGIAPVKEASGKTSWVHFRRACPKFLRQTFHEFALHSIGQSEWAKAYYQHLREDENKSHHAAVRSLAYKWIRIIFRCWKDGKPYDEEVYLNSLRRRGSQLGAALAPATGLGWQMVAGFQKLSENNA

SEQ ID NO: 213534 - protein, 423 aa, unidentified
MTETPEQLNDQPGLFIGIDWADQKHDCHVIDRDGKGFHQEISHSPEDIDFWIGEMLNLADGKPIAIMLEQSRGPLVYALMFRENVLLYPVNPKQLVRYRESYPGGGKDDPTDARYLARMLRERIATLTCWQPDDENTRLLANLSQQRRKLVDGQTKLRQQLIAQLKSYFSVVLELFGKESQLPLLLSVLGRWTDPRKLRRADRRLIRRVLSDHSIRNQEQQDEIIDRIRSAQLLCSDEALITPSAMAAKLLASQIQQSRKTIQEFDTKIAEVMKKHPDAHLFTSLRGAGPALAPRLLCAFGSQKDRWEDADSLAAFSGIAPVTRKSGKQCKVQRRYACPKYLRQTFHEFADSARKYCPWTKARYRLLRDRGMKHNAALRKIARSWIRILFRVWQTGVPFDCERYIVQLQKRCPEITPYLEQEK

SEQ ID NO: 213535 - protein, 418 aa, unidentified
MGKLKIVYPVCCGMDVHRDFLIACIASTNSQGVTDYQIRRFSTYSGGLRDLRDWLAANHCRDVCMESTGKYWFPVHNILEASCNVIVSHPKFVKAIKGKKTDKKDAQWIADLFKHDLVRGSFIPPFDIRQLRDLCRYWCKLTAHMTGEKNRAQNCLTVSNFKLDSVFRDVFGKSASAITTQLLQHPGETFDVAPFVHGRCKTPIPQIQEAVDGCFAPQQAEKLKIIRSHMDSLEKLKLELESLILGIAEKYLPQIELLLTVPGIKEPFTAIRILAEIGADMSVFETAKHLTSWAGLTPQNAESAGKKKTTRIGKSGAYIKPLLVQIALAASRSDKYPEIKGKHQILKKRRGGKKATIAIARRILVAIYHMLGKNEEYNPNLYIKEENPPVSRRITPEQALMMVSQMGYVITGTVLLPI

SEQ ID NO: 213536 - protein, 345 aa, unidentified
MQVMYQRCAGIDVHLRFLVVCLIIVEAGQRRKEVRTFRNETADLLALRAWLLEDRCSHVGMESTGVYWLPVYRRLEGFFALVVANAQHIKAVPGRKTDVQDAEWIADLLQHGLLTASFVPSQDQQDVRDLTRTRISLVQERARLVNRVQKVLEEAGIKLSLVRSSVMGLSGRAILDALCAGESDPERLARLMHPSVHATREQVVAALTAEVRDHHRFLLRELLSLIDAQDRSIKHLEQEIERHLHPFEEQVQRCEQITGVSRHVLHVLMAEVGTDLQRFPDAEHSSSWAGVCPGESGKCGETTQRTVQTRQSLCASDAGASGSWGASLALLSGRTLSSPEKTPRK

SEQ ID NO: 213537 - protein, 360 aa, unidentified
MFCERTSVGLDVHARSVVAAAIDGQTGEVFKARLTPSHAEVLEWIGKLPGPCAVVYESGPTGFGLARALTAAGWRCEVAASSKLHRPAGDRVKTDARDALHLARLLRLDEVVPVRIPSPAEEAARDLVRAREASRQDLMRARHRLSKLLLRHGIVYSGGKAWTELHDRWLHQQRFDSMPTQAAFDDAYETVVLAAARRTRLDEKITALADDSEFTPVTRRLACLRGISTLTGFALAVEIGDWQRFTGASIGAYLGLVPSEHSSGESRVQGAITKTGNTHVRRLLVEAAWHHRTTYRPGVVLQRRWDQAPAAARARGHAGNQRLHARWVNLNLRKKRPVIANVAVARELAGWCWSLAVLPD

SEQ ID NO: 213538 - protein, 347 aa, unidentified
MRKIAYLAMDVHARNCVLGDMDGNGNFRDNRSFTTNENNIITALKAIKAKKKYLVIEAGAMSNWVAQVANDYLTQVIICDPRENALIYKSSPKNDKVDTKKLCRLLRLGEFKAVYRPENDQRAIFKAAVQHYMDLRDQLTALKQKIKAMYRQWGVIQVFTDSVYSVRSRDKFLNQVKHRPIYLQLKRLYALLDATAAMKQDAEKSMASLGRNYPEIKEFKKMPGMGPIGAHCYDAYIQTPHRFAKRSRLYKYCRLGVTDCSSDGKPLGYKRLDKSGINELKAVSYRAFLSAMKGDNEVKRFYLNSLQRTHDRTHARLNTQRKILSVMLSIWKKGQPYRAELFLDPST

SEQ ID NO: 213539 - protein, 344 aa, unidentified
MNHEVVIVGLDLGKSWFHVIGMDRVGRIVLRRRLNRAQLGELSATLPACRVAMESCPGSQYWGRRFVAQGHEVRIIPAQFVKPFVKSNKNDYNDAEAIAEAGSRDTMRCVPLKNSEQLDLQATHRVRQRFIIERSAVVNQMRALLLENGIAIPIGRALFARRLPDVIADAENGLTVRVRALLERLRGRWLALDAEISEVTGLLTHHAEDSELCRLAKTVPGIGPIVSTALIAAVGNARAFRRGRDMAAWLGLVPRQYSTGGKTTLGRISKRGNVYLRQLFIQGAQALYTHMKREKSRLGQWLRDLELRAHRHVVVVALANKIVRICWKVLTSGEDYRPFPAHGA

SEQ ID NO: 213540 - protein, 321 aa, unidentified
MPQGPMFVGIDVAKAHLDIALRPTAEGWRVANDDTGITPLVARLRDLQPVLIVLEATGGLEVPVTAALTAAGLPVVVVNPRQARDFAKATGRLAKTDALDAHGLAHFAEAVRPAQRPLPDAQTQALSAQLARRRQLLDMLTAEKNRLGSAPRTIQADIQAHITWLERRLADLNDDLGEAIRASPVWREQDDLLQSTPGVGPVLSHTLVADLPELGTLSRQQVAALVGVAPLNRDSGTLRGKRTVWGGRAQVRAVLYMSTLVAVRYNPVLQRFYERLRRAGKAPKVALTACMRKLLTILNAMVKHRTPWQQNSLNLSLFVGA

SEQ ID NO: 213541 - protein, 359 aa, unidentified
MIVIGIDPHMKTHTAVALDAVTGRSLGEKTVNCDERGRESLLTWARCLSADRFFAIEDCRHVSGRLERFLLSRSERVVRVPPKMMAGARSSARTYGKSDPIDAACVARAALREPNLPEASLAGPERDIRLLVDYRDDLVQERSRDQKRLRWDIHDLDIGLELPPRVLDRYVWLDRIEAALRSLPTTTLARIAIERTKRCRTLTVEIRSLEREIKKLTRELIPELLDLAGCSAVGAAHLVGQTAGASRFSGDAAFAMHNGTSPLPVSSGKSQRHRLNRCGNRQLNSTIHMIAITQARMHPPAKEFMARKKTEGMSNREALRCLKRHISRVVFKIMLRAERARAGEVLQVDFGTDSVAIAV

SEQ ID NO: 213542 - protein, 359 aa, unidentified
MITLGVDAHKTVHAAVALDDAGREIATWRGPNSPDGWAELAAWAAAHAASSGTERRWGIEGAGNYGRGLAQHLTAAGETVYDINPRWTAQGRRQARRPGKSDRLDARAVALVVWREAASLPPLQPEEQDETAVLDLLVSEREGALGEATRLRNQLHALLLQLDPQYKVHLPALTTPAGVAAAEAYTGPGRTPLQRAPAASVRRLAQRLRLATEQAADLARQIAARAQAGFSPLTRLKGINLLTAGALAGLLGPGCRFTGEAQLAAYAGVAPLEASSAGRVRHRLNCGGNRRLNAILYRIALTQARCWPPAQAYLARRLREGKTKREAIRALKRYLIRAIWRLWQECVSSHPVTSYGQAA

SEQ ID NO: 213543 - protein, 348 aa, unidentified
MNATIVAVDLAKNIFELAVADADWRIAQRQRLARAKFLGFFVRLAPCQVVMEACGSAHFWARRIRSLGHTVRLLPAHYVKPYVRRSKTDRADAGALIEAARCAEIREVPVKTVEAQQIQSLHRLRSQWMSTRQRYVNTLRGILREFGFAIPLGVNAAKTQIGAAIADPDSEVPVALRATLAEMLQEIRLLEEKILDVERHLNALTRADVRVQQLRQIPGIGALTSTALRAVVGDIQRFPSGRHFASWLGLTPSERSSAERRRLGKISKQGDTYLRTLLVHGARSTLLAAHRAERAGHCLDRLRRWALDCERQRGHNKATVALANRLARIVWATWKYERAFDGNWSAAA

SEQ ID NO: 213544 - protein, 359 aa, unidentified
MKKITKGVRMTVGLDLGDRLSQLVVLDEEGEVTEEGRVGTREAALRRRFSGCPPMRIALETGTHSPWVSRVLEECGHEVIVANSRKLRLIYENPSKDDRVDALYLARLARVEPGLLSPVQHRGASAQKDLALLRSRDALVAARTQLINHVRGLVKSVGSRLPACSTRAFPKKVCEQMPESLKPGLLPVLEEIASLNDRIKALDRQIQVLAQESYPQTKLLRQVDGVGPITSLAFVLTLEAPERFRKSRTVGPYLGLVPGRKQSGDSDPERRITKHGDRCLRRLLVNAAHYILGPFGKDCDLRRFGTKLASRGGKNAKKRAIIAVARKLAILLHHLWRSGEVYEPLYQQTHQAGRRGKAA

SEQ ID NO: 213545 - protein, 375 aa, unidentified
MEGAPRLDTTTFIGLDVHARSIKAVSLDVMTGEVRAATFGYDAGAVAEWVRSVDPRARCVYESGVTGFDLQKRLSGLGVDCVVGAVSKMIKPSADRRRKNDRNDAEFLARMLSVGNVVEVWVPDDECEAARDLTRALEDARDDLSRSKQRLSKFLLRHGLVFDERTPTGRRKGNWTRAHWSWIESIRFAERADNDVLAYYVDAVRRAAEEKARLEGLVEAEARKPRWRKRVDSLRCLKGVDTASAADLVFEAGEFSRFRNARSFAAWVGLTPSEHSSGESDRRGAITKAGNKHLRKTLVEAAWHYLTCSGRPKGLAKGQAPDRGARRHAAKGVRRLVERREALLARGVHGNKANVATARELACWVWAVGLMAEEA

SEQ ID NO: 213546 - protein, 370 aa, unidentified
MKKSIMYVGLDVHKNSIEVAFSDAGRDGEVRSYGKIDGNLTALDKVIRKLGAKGSELHFAYEAGPCGYEIYRHLSSNGYDCIVVAPSMIPRQSGNRIKTDRRDAQMLARLHRAGELTSIYVPALEDEAMRDLTRAREDARAVERKAKQRILAFLLRHGYRYGGKTPWSRAHFRWIAILKMPHPAQQIVLQESLDALSECTERVNRLTEQIQRLLPQWRMFPVAQALQTLRGVSLIVATTTIAELGDLTRFASPVELMSYLGLVPSEHSSGEQTKRGSITKTGNGHVRRVLVEAAWAYRLPARISTALHLRQEGMPQNICAISWKAQLRLCNRYKRLLTRGKANQLIITAIARELCGFMWAIANEVETPTA

SEQ ID NO: 213547 - protein, 340 aa, unidentified
MSEIRTIGLDLAKHIFQVHGVDAEGTTVLRKQLRRGQLLVFFSRLPRCVVGVEACATAHYWARELRALGHEVRLMPAQYVKAYIKRNKNDAADAEAICEAVLRPTMRFVPVKTAEQQAALLLHRGRERLVRQRTMMVNALRAHLAEFGVIAPQGLRNVGQLIAMIRDESDARLPDLGRRVPQVLAAQIEQIEAAVAELERQLMAWHRSNPVSQQLATIPGIGPITATAIAATVVDPIAFRSGREFAAWLGLVPRQNSTGGKTRLGGISKRGNQYLRRLLINGASANLLRSKATNTDPWVIGLRRRRPSLVVAVALANKTARIAWAVMHRQENYQRAAAAA

SEQ ID NO: 213548 - protein, 430 aa, unidentified
MHNKNYISVGIDVGSAFSFMTILAPDETVILKPFKITHNNKDSLERAVSEIKKAEELYSLESRTFLESTGIYHFPLFCYLVDCGFNASIINPIITHSTKNGNIRKVKNDKIDSKGIAKLGLSKDIPVSQFPAKLVLELRSLTRKYYDLTDERSAHINKLKGDLHTVFPQYLDVFCDVTGKTSTMILRQYGTPDKILRGHKKTMIEKISKASRKGLAKASERYEELCAAANAAKTFGCQIDSIYFNIFLTLDLVEKLDSALDSILNRIRQLITFNKNEKFIQQIKLLNTIPGVGFLTAVTIMCEIGDFSAFRNPKQLFAYFGLDPEVNESGKFVGTQLHMSKRGSRIARRAIFAVALASIRTKRNGEGINPYLRKYYELKSGQKPKMVAIGAVMHKVCNIVFAVLRDEKAFELRSPEEHCKQYQRPALAAA

SEQ ID NO: 213549 - protein, 344 aa, unidentified
MKITTIGIDVAKNVFQVHGVDERGKTVLRKQVKRDQMAAFFAKLPGCLIGMEACGSAHHWARKLQGFGHTVRLMAPQFVKPYVKTNKNDVADAEAICEAVARPNMRFVPVKSVEQQAVLALHRVRQGLVKARTAQANQIRSLLGEFGLVMPKGITHIRKRVPELVENASGELPAAFRQLVERMLDHLKDLHRQVGELEAQIKAWHRSSELSQKLEKIPGIGALGASALVASIADARSFDNGRQMSAWIGVVPRQHSSGGKPTLLGISKRGDVYLRTLLIHGARSAIVAAQRRASVNPWLAGLVQRRNPNVAAVALANKNARTVWALLAHDREFQPDYVPTRPAA

SEQ ID NO: 213550 - protein, 360 aa, unidentified
MKDTTIAVDLAKSVFQVAVSHKPGRVDAERRLSREKVLEYLAKQPPATVLLEACGSAHHWARQLQPFGHTVRLLPAHDVHRYVRRSKTDRTDAKALLEADRNEEIHAVPVKTIEQQSIAALHRMRSTWLATRTSRINTVRGLLREFGLVIPVGAQHVVPRVRDLLASSRDVPDVLRTSLSQACDEIRALETQMRAVERQLAVLARDRDDLRLLQTIPGIGVLTATALVALVGDIRRFDSSREFASFLGLTPKEDSSGSRRRLGAISKQGDIYVRMLLIHGARSILLRAHGAGQATTFQLWARALQKRRGHNVAAVAVANRLARIIWAVWIRQQPFAADYRSTRTTTSIPAAHQEDCTESN

SEQ ID NO: 213551 - protein, 349 aa, unidentified
MGQVITIGVDIAKSVFQIHGVDADGTVVIRRRVGRARVLEFFADLPPCLVGMEACATAHQWARELTKLGHDTRLMPPTYVKAYVKRGKNDAADAAAICEAVTRPSMRFVPVKNVEQQSALMLHRTRDLLIRQRTQLINALRAHLAELGLVAAKGREGLCQLVTVVTECGDERLPSNARFACQAIVTQLHAVQIEISGLDKRITQIHRTNADSKRLDTIPGFGVILSTAVVATMTDPKAFRTGREFAAWIGLVPRQNSTGGKERLGSISKQGDRYLRRLLVVGATSVINSARARPYKYPWVIALLGRRPTKLVAVALANKMARIAWAVLAKGEPYRAPTRSSNAVVPVAA

SEQ ID NO: 213552 - protein, 371 aa, unidentified
MSVSSSAGYLTQCCWYGFGYLEQEEHAVMYIGMDVHQKSTTFCLFDPWAAEEGQYRWVTQPTTEEAIRRTLAPLGGQCRVAFEIGTQAQWIAAIVRPLAVEVQVANPSRIPWLFRDGRKNDRLDARKLVTLLYLKQLPTVHLPSAEVSGWRALINHRRGLVTQRTQIKNQIRAILRAFGVVCPYRNLWTHRGQVWLETQTFDEARKLMIVSLPDELTFFDQKIEALENKLDAMAKTRPTVALLRTVPGLGPRTAEAIEAFTDGVDRFPDRKPFASYFGMTPTEDSSGDVRRLGHISKRGPSVVRWVLGEAAQVAVRKNPELKTFYERIHRGNKDRKKKAIVAVGRKLLTIVYAMMRDGKPFDAAKVLRAAA

SEQ ID NO: 213553 - protein, 397 aa, unidentified
MYIVGIDIAKRKHEAAVIDGDGAVIIKPFSFTNNCSGYNRLLAMLTKAKLPLDEVSFAMEATGHYWLALFTRLQKEGFRVQVINPVQTNSIRSFYIRQAKTDPRDALLIAEVIRFGHFSESTLHPENIYELRELCRGRHAIVSMQADVKRKVVALLDQVFPEYETAFTNMFGDTSMAILQTCPTPKELSEMPLEELCHLIEVSSRKRFRMVKAQELQELARNSFGFAMAGDVFSTMIRLYAKHLDFLKQQVREMDRKIAEIMETLDTPITTITGIGPTLGAYILSEIGDISRFSSAAKLAAYAGIDPTMRQSGEYNGVRNRMSKRGSPYLRHAIWLAASSAVLHDPALKLYFQKKRDEGKPYMASVGHACRKMVSIIYAVMRDNKAYTPCIPNEISA

SEQ ID NO: 213554 - protein, 386 aa, unidentified
MTQHSHIAASHQLDYERTLILAVEVSGRSWVVAAQVPGLRQKGVKQQLAPRADALMAAVEGYKRRAAAAGLAVERVIVAYESGGSGFWLARWLQQRGVEVYVMQPSSVPVDRRMRRAKSDRIDADMLLRTLLAWLRGEPRVCSMVPVPDEATEDARRPIREREELIRARVALVNRIEAVLTVLGAGEYNPLRRDCRERLGQLRTALDQPLPPHARAQIERLLDRLDLIRQQVADLEAQRDRAVEGETVGQAERMIQHLARVRGIGVQTATVLVHEAFVRRFRNARALGSYAGLTGTPYGSGGTHREQGISKDGNRRLRATLVELAWMWLRYQPGGARSRWFHDRLGGSRGRLRKVMIVALARKLLIALWRYLQDGAVPQGMELKPA

SEQ ID NO: 213555 - protein, 367 aa, unidentified
MKKVSTALAKPSRNISQQKLTIGLDLGDRNSWYCVLDEAGQIRMEQRVGTTANALREVFGGMPRSRVALETGTHSPWISRLLNELGHEAIVAHARKVRLIGESRKKDDRLDAQTLARLARIDPELLCPVKHRSAQAQADLTVIRARAALVRARTSLVNTARSLAKSYGERLRGCNVRNLNPEKADGLSPELQSALEPLLAEIESLSERIAEYNDRIEALAQSSYPQVELLKQIKGVGTLIALTFLLTLEDPHRFRKSRDVGCYLGLQPGRRNSGQSAPQMHISKEGDPYLRTLLVQGAQHILGPFGADCDLRRWGLKLAERGGKSGKKRAIVATARKLAVLLHHLWVSGEVYEPWHNRSRTTVAAAA

SEQ ID NO: 213556 - protein, 402 aa, unidentified
MNSVGIDISKGRSTIAVMRPFGEVAISPFEVRHTDSELSELARRLKSLNGETRVVMEATGNYHAPVAKQLHDAGLYVSVVNAKLVHGYGNNDLRRVKTDRKDAIKLANYGLDRWLTLPRYIPEENTRLLLKNCYRQYRQYSKVQTVLKNNLISLLDMTFPNANRLFNSPARADGSEKWVDFVAEFWHCECVSERPLKSFVNKYWRWCRKHGYNFSEEKAHAIYDEASGHIGVMPKSETTKLLVEQAVSQLSATSAALAALKQEMQSLSSQLPEYPVVMGMFGVGPILGPQLIAEIGDVRRFYSKKALVAYAGIDAPPNDSGDVIGRHKSMSKVGASSLRRTLFLVMSVYLQNSPPNEPIYQFMNRKRAEGKPYRVYMMASANKFLRIYYATVKAYLEILEQI

SEQ ID NO: 213557 - protein, 418 aa, unidentified
MTNPTTQTWHEQGHFAGLDWARSHHDVIVLDQHGSVQEQLHFEHSAEGWEQLRALVARHPQLPIAVETSQGTVVEQLLACGARVYPVNPKAAQRYRERHAPSGVKDDERDAWSLADALRLDGAAWRELVAQDPIVAELRLLCRDEIALIEQRTAFINQLRQCLHEYYPAALEAFDDWTCPGAWAFVLAFPSAPALTAAGRHKWEKFLHTHKLWRSATVEARLAIFARAEALSGSAPTTAAKSLLAVSLARLLQTIEHQLDAYRERIAATFARHPDHDLFGSLPGAGEKLAPRLLAEIGARRAEFACAESLQCLGGTAPLTIETGKTCYQRVRHTCNDTLRATVHLWADHSRTKCAWAEAYYQKHRADGHSHACALRCLGQRWLKIFWKMWQTRTPYDEALHTRNQTRHGSWVLSLKPA

SEQ ID NO: 213558 - protein, 354 aa, unidentified
MKKFFIGVDVSKDTVDVSFFDDDRMKSPEYLAQYSNSPKGFREMVKDLRMCCHGISSGQWLFCCETTGRYDHPLCHWLVDHGMVVWRESALQIKWSSGIQRGKNDKVDSLRIAEYAWRHQDKMQKFVKPSESLSNLKAAFTHRRRLVEKRTATRCQLKSMSSEKGLSASVARMIVRDLSREIERLSASIATMDESIQEIIRSDSELDRNYRHIISVKGVGPITAVALIVCSGNFKAITSAKKMACYCGVASFRSQSGTSINRKASVSNLSNRQIKSLLSMAARSASRSNPVFAEYFNRTLSRGKPVALVYNNLRNKIITVIYKLIERDCDFDVDYKRMHSTGQRANEPAIRETV

SEQ ID NO: 213559 - protein, 412 aa, unidentified
MKDLLEISCGLDVHKEKIVACILTGPLGKPTRSEIREFSTLIPDMIALRNWIVSKNCHHVAMESTGIYWMPIYEILEDAFSGDITLLVVNARHMKNVPGKKTDMRDSEWISTLLRAGLLNGSFIPEKRIREFRDLNRYRKSVIRDITSQKNRIEKFLQSSGFRLSSFISDIFGASGRNIILHLVEHGQIDKTALDSCLKTKTRNRIDEILMSVNGTLSEHQKAFLRILMTHYDSLKKHLAEIETSLEEDMAPFALQVEQLNSIYGISTTASCAIIAEIGIDMKPFKTAEHICSWAGLCPGNNESAGKRKSTSVTKGNPYIKSMLCEIAWAIAGKRNTYLSAWYWRIKQKKGAKKAIVALARKLLVIIYTMLKQGTVFDESCFETRRKHCEQKQLSRYIRELEKHGYHVEAQS

SEQ ID NO: 213560 - protein, 362 aa, unidentified
MEYFAGLDVSIDETAICVVGDDGKVVLETAVPTDPDLIAEALKRYAGRLRRVGHEAGSLSPWLHAGMIALGLPAICLETRHVRAALSAQRNKTDAADALGIAHIMRTGWFREAHMKTEECYRIRLLLVQRRNLKRKFLDLENAIRHSLKVFGIRLGKVGRGSMEKAVREAVAGDAMTAGLMECMLRARAALWAEYLILHKLVTQLAMRDELCRRFMAIPGVGPVTALTFKSAIDDPVRFRRSRNVAAYFGLTSRRWQSGSTIDVQGRISKAGDPDARRALYEAASAMLTRFKGRDTIKTWGLKLANTKCHAKARVAVARKLAIVMHAMWRDGTFYVGDPDATEHEVDAANAAKLQRLSYARS

SEQ ID NO: 213561 - protein, 333 aa, unidentified
MQDLSTKQHFVGCDVSKDTLDLALYQPKTDYRKFEHVQISNDTEGFKQLLQWLKARKIKKNEVAIAFEHTGAYSIALAEWLHKKKITFNMLHPLDVKNACSRGRNKTDEVDAKFIADYAYTLREKLAPSGREPKNIKHLRELRNERDLCVRCRASYLCQIKVQTEAQTIARMHKMVDFMTVQIHQIEEEIKKIIAADETIATNYHLLISIPGIGMVNAVNTIVATGNFTRFQTSRQYAKFCSVSPMAVQSGTSVHSGNHVCKKGHNELKATLSEAARSAIIHDPQLRHYYQRKRSQGKSHGCVMNAVKFKLICRMFAVIKRQQPYVNTECYRG

SEQ ID NO: 213562 - protein, 453 aa, unidentified
MTKSKTGGHPDLKMVNPNAAAIDIGSTMHMAAVNPDVDIMPVRAFGTFTQDLHDLADWFRSCNVTSVAMESTGVYWIPAFEILEAHGFEVILVNARYAKNVPGRKTDVSDAGWLRQLHSYGLLRGSFRPEAEIATLRAYMRQRERLTEYAAAHIQHMQKALMEMNLQLHHVVSDITGATGMRIIRAIVAGERDPEVLAAFRDIRCKSSIETIKAALVGNDREEHVFALTQSLELYDFYKAQIEACDRRLEAAVGTLTVRADDDLAPLPKARIKGKQHNAPSFDVRAALYGVLGTDLTQIHGLGPSLALKLVAECGTDLRAWQSAKHFTSWLCLAPGNKISGGKLLSSRTRRTSSRAAALLRLAAVTIGRSDTALGAFYRRLSSRIGKQKAVTATARKIAVLFYNAIRHGMAYQDQGAAAYDERHRKRVLSNLQRRAKTLGFALEPIPEAAAVS

SEQ ID NO: 213563 - protein, 466 aa, unidentified
MVRKPKKAKSKNRKQPVQALKTIQPNAAGIDLGSKEHWVAGPPHEDQTPNVERFGTTTPELNRLADWLSEQGVETVAMESTGVYWIPLFEILDSRGFEVVLANARQVKHVPGRKTDLLDCQWLQLLHACGLLRGSFRPSDDICQLRALMRERNTMVDQRSDWIRRMQKCLDQMNICVHHAVSDITGATGMAIIRAIVAGERDPKALARMRDRRCRKTEAQIAEELTGNWRREHLFNLRQALKMYDQLCAVIEDYDFEILNYLKMLQPDGSDDTSAPPPSSKSKARNIAKKGQEPLRQGLYRFSGLDMASIDGIGVDTAAVVISELGLDYSKFPDEGHFISYLRLAPNLSISAGKKVPNNSKATTCTRVSNALKTAAIALRNSKSALGAFYRRIAWRKGASVAVFATARKLAQIIYRLVCYGQAYVDIGAETYENRFKKRRLYHYTQTLKNMGYTVQPLTTAEAAVT

SEQ ID NO: 213564 - protein, 341 aa, unidentified
MEHSVIGMDIAKKVFQLHTVDQNTGKIERIKLRRDEVLAFFARRQPCLVAIEACGSAHWWARQLRQPGHEVRLLAPRSVRPFVLRNKTDAADAQAIWTAVQQPGACLVAIKQADQQAILSLHRIRAQLLKFRIMQSNGLRGLFYEFGIVLPEGYAPLSKAMPEAFAEAENQVPPVLLESLREQWARVLRLEEEIQVIELRLKRCLRENPDCQKIAEIPGIGLLTATAAVASLGDATTFRSGRQFAAWLGLVPRQTGTGGRVRQLGLSKRGDSYLRMLLMHGARSILARSQKSEWLERLLARRPHNVAVAAVANKLARTLWAVLAKGSPYRAERFTACPAGH

SEQ ID NO: 213565 - protein, 340 aa, unidentified
MKKFLFIGIDFSKSKFDVTVLKSIDQQDYAQAIFSNELKGFNEFLKWLSKQSDVLPKDWLFCGEHTGLYSRGLTEFLVKKNLFIWLENPLQIKCSWGIKRTKNDRIDSLEIARYALRFQDKAVACKPANKDIESIRMLLAYRGRLVKNKVSLEVAAKETRRVISRDSVSRFVYENSQRDIERIKKEIELLEFKMLEIIMASELKENYQLVVSIKGVGPITAITLIIYTDNFTAFDTARQLACYSGVVPFEKSSGTSIKGANHVSNLANKDLKVLLTQCARSAVQYDKELSAYYTRKIAQGKKHLVVINNVRNKLIHRIFAVVTNKIPYRENYLNPWADCA

SEQ ID NO: 213566 - protein, 402 aa, unidentified
MNAVGIDVSKGKSMVAIMRPFGEIVSTPFEIKHTSSDINSLVKLIKSIEGESRIVMEHTGRYYEVLAHQLSEANLFVSAINPKLIKDFDNDSLRKVKTDKADSVKIARYTLDKWQNLKQYSVMDELRNQLKTMNRQFGFYMKHKTAMKNNLIGILDQTYPGVNTYFDSPARSDGSQKWVDFASTYWHVDCVHKMSINAFIDHYENWCKRKKYNFSKSKAEEIYGKAKELVPVLPKDDITKLIIKQAVDQLNSASITVESLRTLMNETASKLPEYPVVMAMKGVGTSLGPQLMAEIGDVSRFTHKGAITAFAGVDPGVNESGSYEQKSVPTSKRGSSDLRKTLFQVMDVLIKTHPQDDPVYQFLDKKRAQKKPYYVYMTAGANKFLRIYYGRVKEYLASLPKS

SEQ ID NO: 213567 - protein, 361 aa, unidentified
MTSMTHDGPEITGGVDTHGLTHHAAVIDPVGRHLADREFPATIRGYRDLLDWMRTHGTLVAVGVEGTGAYGAELARVLTAAGVPVVDVDRPDRKTRRMEGKSDPIDAYAAAMAVLSSRATGIPKSRDGVVEAVRVLRIARRSAVKARTQAMNQIRGLLVSAPAMLREQVAGLDKAMLIRTLARLRPADDLSRPLAATRASLRRLARRHQALDAEIAELDTEIGPLVKQAAPALLELFGVGPETAGQLLATAGDNPERMRSEGAFAHLAGVAPIPASSGRTHRHRLNRGGDRAANNALHTIVLTRMRFDERTRAYVERRTREGLNKKDIMRCLKRFVAREVYRALTSTPTERITQTDLAPAA

SEQ ID NO: 213568 - protein, 453 aa, unidentified
MEQPREVQDEEHERVWERVAAVDVAKGSGVVCTRVPDEDRPGRRRTRIWTVPARSAAIIELGDHLRARQIQVVTLESTSDYWRIWFVILEAAGLKVQLVNARTVKNVPGRAKTDKNDAVWLAKLTEKGMLRPSFVPPPEIRRLREFTRLRASLVHDRSRYWARLEKLLERAQIKISDVMSELNSVSGRAMIEALIAGERNPRTLAALARKSLRTKIPELIEALTGQFEDHHGELARMLLDQIDALTAQIGQLTTRTGELLEQIPAAWGVDADGTTGPQAGTGPVAPVLPAVARLDEITGCGPYAAQAIIAELGLDMTIFGTPARLVSWAKKCPQTRQSGQKTTRGKQDKGNPWLGGILGEIAASAARTDTFLGERYRRIARRRGKRKALAAIARSVLIIIFHLLADPQARYHDLGPHHYDTHTDRDRKIRNHVRQLQALGIDVILQPRTEPAA

SEQ ID NO: 213569 - protein, 400 aa, unidentified
MISVGIDVSKGKSTVCILKPYGEIVSKPFNITHTQKDLSELSSMLFRLNDEVKIVMEATGIYHLPVLTYLQEKGFFVSVINPYLMKSYRNESLRKAKTDKIDSRIIANYGIDHWFKMKEFQISGVIYEELKLLGQQYRHYMKLHLLSLAELTHLLDLTMPGIKNLLASWNETNRKDKRSDFVERFWHYDVITSMSEQEFTEKYILWAKEKKYVPSQEKAKVIYTLAQESIPTLPSETSSVKMLVTEAVRVLKEVDATLGLILSRMQEIAKTLPEYSVVREMGGVGNTLAPKLIAEIGDVRRFRNGKALVAFAGIDPPPYESGQFVGCNRKISKRGSASLRKVGYETMRSLKMRSRPEDPVYRYVVKKESEGKSKKSAKIAGLNKFLRIYYARVTELYKNK

SEQ ID NO: 213570 - protein, 339 aa, unidentified
MGVYAGLDVSLDAVAICVVGETGEMLWQRKVLGDPEAVRGALGRWRDDLARVGLEAGSTSEWIGGHLVDEGFPVVCLESRHVKAALSAMTVKTDRNDAHGIAQIVRTGWFKTVHLKSAAGQRLRTLTAARKAAVRALTGNEQVIRGLLRPLGLKIGAVTRVRFEARVRQLLGTDRLLLSIFEPLLRLHKSLRENLADLHRLVLLAVRADPVCRRLMTMPGIGPVTALTYRATIDDPTRFRRSRSVGAYLGLTPRRYQSGEVDRVGRITKVGDGETRTALFEAANVILRPTTRWSSMKAWAMKIADRQGVRRAKVALARRMAVILHRMWVDEQDFRWTAA

SEQ ID NO: 213571 - protein, 482 aa, unidentified
MKVRLGIDVACRADHQASLAGADGEFLWSGWRFRTTPEDLEALWAKVPDGADVQVILEPTRNAWVPLAAWLTARGAEVVMVAPEQSADLRDYYNKHTKTDRLDSRVLARLPLLHPEGLDPVGGPTPADPFRRAVRRRARLVKARTVAFSRLDALIELLGPAWAEVLGGGDYNKTTLMVLERFADPRALKRFGLRRLSELLIKTSMGAWRRDKAEELLAAAEQTLTLWAGGGLDFGELAADIAGEVRAVRSINAEIDLLEGRIAPLFAAADRRPAAVSADGEILDDSDQAGIVASVPTLGGVLGAGILARFGDFDRFASLAGVRSFTGLVPKIDQSGTNTDGHGGPTKAGDPGLRQALYLAANQLRKVDPQFAQRYYRLVVDEGKHHNSALCHLAGNLATRIAACWRRREPYLLRDTDGRPITQAEGRAIVQQRFKIGDDVRRARRRSSKAKQLKQRTGRRGKESTGAAPAAGPSTNNATEAA

SEQ ID NO: 213572 - protein, 368 aa, unidentified
MVKIARIGIDTSKGSFQLHGVDAEEQVVLRKTLRRKQFLEYLAKLEVGEIGLEACGASHHWARALRQLGHRVVLVPPQYVKGYVARGKNDKNDAEAICEAMSRRRVRERLVPVKTLEQSAGQMMMKVRSSLIERRTQLTNSIRGHAAEFGLVAAKGMDKIGPLLERIAVDESLPARAREMFAMLAEDYAELAARIVRIDKRLLAFQRDNEVARRLMEVPTIGPIGACLWVTKVVDPHAFRSGRSCAAWLGLTPKDRSTAGKQRLGGITRAGDESLRATLVLGATAYLRHVRSGRIAATPWLAGMLARKPPKLVAVALANKTARIAWKLMTSGERYDPAHQPTREGLDASQWGGLRAEPLTAGGVEAVA

SEQ ID NO: 213573 - protein, 417 aa, unidentified
MELLHQRCCGLDVHKDTVVACLRLVSNGKITTEVRTFETITADLLKLSEWLATNDCTHVAMEATGVYWKPVWHILDDGEFVLVLANAAHVKNVPGRKTDVNDATWLAELLAHGLIRASFVPDQPTQEMRNLMRTRKQLVREQSRHLQRVQKTLEDANIKLDSVLSSLMTKSGRAMIAAMIAGETNPAKLARLADPRVKASPKDLREALRGHVTDHHRFLLRLHLKQIDTLTAALAEVDAQVATNLEPFRTAIDLIKSIPGFDDIGSHVVVSEIGIDMSRFLSAPHLVSWAGICPRNDESAGKRRSNRLRKGAPWLKTTVVQCSWAAIKKKGSYLQALYHRIKARRGPKKAIIAVAASILTAIYHMLKDGTMYHDLGAITSIVVPQTGKKHAWSNAWPTLDMPLNSNRSPLEPRLWHR

SEQ ID NO: 213574 - protein, 287 aa, unidentified
MDIVGGLDVHRKQITFDYVQIETGESHRGEIRPADREHLRSWLERFAERFRDREAAFAVEATTGWRYVVEELERAGIEAHLAEPADTRALQGRKKQRAKTDRIDARHLRELLLIERLPESWVPPEHIQQIRTLMRMRHSMVEERSAYLQRIHAQLFHNGCPRQEKELISAEGRERLGSLDLPVAARKVVEVCLKMIEHINEELAPIEEELRAYSRAQAGCRALMKHYGVGELTSVALLSELGDARRFSSSRKAVRFAGLDVTVHSSDEKRAAGKLSRQGSPVLRWAA

SEQ ID NO: 213575 - protein, 321 aa, unidentified
MIKNKNYIGIDISKLSFDVAFENENAKYLHFKFSNDNKGFKDFAKLINADLDICVMEASGPYYLKLASYLSNNRISVCVINPLVIRRFSQMRMSRTKTDKKDALIIAEYGKTEMPDLWKPEADYVLEIKQMQAYADQMNKSRTGFLRQKEAFKQNPAQSIILNESLEKMITMLEIEIAQIESKMIAIIKYHHDELFKQLTSIPGIGKKTAMLLIVISGGFTKFKNARQLSSYVGISPRIFESGTSVKGKSRICKMGMSRIRAMLYVCSWSAKKNNSACRELYDRLVEKGKAKKLALIAVANKLLKQAFALASKNEYYLQNN

SEQ ID NO: 213576 - protein, 438 aa, unidentified
MIDAEIERCAGIDVGKTFLAVCVMTGPLQEEPHTEQRHFGTNTTELEGLRDWLQREGVTHVVMESTGSYWKPVFNVLEGSVKIYLANPQEVKNRKGHKTDDKDCWWLAHLLRHSMIDPSFIPPRAIRELRDLTRRRKRLLGDATAEKNRVQKVLEDANVKLGNVLSDVFGISGQLMLEALLEGKAQPAEIAQFAKRKAKQRIPEIVQSLEGHRMSDHHRQMIRYSLKHLQFLEEQIAEMDAAIVAKIEEAKLVEQWQLLQTVPGIQERSAASILAETGADMEQFPSPQQLSSWAGVCPGNNRSAGKNKSSHTTGGNPWLRSALTECAWAAAATKNSFLNQKFWRITSKTGGKKAPALVAVAHTMLVLIYQVLKTHKPFTDRHAPPLDERQKQRMIRHHIRRLGKLGIAVSRSIVVAPEGNKRSRRCRSRLTTNDPASD

SEQ ID NO: 213577 - protein, 420 aa, unidentified
MKAYNVDNFAALIGIDWADKKHDICEHPTSTNKYHYTVVKHRPEALHEWAMDIKQRYPDQKIAIICELKKGPLIYALAKYDHLTLFTVNPCAVAKYRQAFTPSGAKDDPSDAFLQVEILKLHMDKLSVIEPESAAMRTLSQLVEYRRSLVQDSVDLSNKITATLKNYYPQALEWFKEKDTYIFCDFIQKWPSLTAVKKARKQTLLDFFESHNSHYCTVNNARLDSIKNAMPLTLDEGVIVPNQMLVEVLITQFKVLLKGIEKLDKAIKSAYKAQQDKKIFDSLPGAGPQLGPRLLVAFGSNRARYNDAAELQKYAGIAPVIERSGQKMWTHWRYSCPTFLRQTFVEWAGFSIRYSFWAKAYYEQQKAKGKPHNSIIRSLAFKWIRIVFRCWKTNTPYDESTYLAALKRRGSPLLKFAINS

SEQ ID NO: 213578 - protein, 335 aa, unidentified
MDKITTVGLDIAKSVFSLHGVDAQGRTILRKTVRRDKLMEFIAALPPCLIGMEACGGAHEWARQFQRHGHRIGIMMARFVAPYRKSSKNDGNDAEAICEAAGRPNMRFVPVKSAEQQAILSLHRVRQGYVEQRTATINRIRGLLAEFGMVLPQRAAEVRRAAVALAGQLPVLAREAITDLRTHLTYLDDRIIHYEQQITSLNRECEPARRIMTMPGIGPLTASAITASVASGHEFSNGRQFAAWLGLVPRQHSTGGNTRLGRITKRGDAYLRTLLMLGARAVLQTAAQKSDRLSRWAVALRERRGYHRTIIAIAAKNARIIWALLAKQSTFVPVT

SEQ ID NO: 213579 - protein, 356 aa, unidentified
MSRDIKYIGMDVHKEATVIAVLNGSGKLIMESIVETKASSILQFIHGLRGELHVTWEEGTWAAWLYDLLQPQATQVLVCDPRRNALLKEGHKSDKIDARKLADLLRTGMLRPVYHGEHGLRTLRELGRSYQTLSQDLNRVMNRIKALYRGWSIPCAGTQVYAPRYREEWLGKIEHAGVRRRAELLYQQLDGLQALRRTLRPELLTESRKHKASKLLRQIPCIGPIRAARLLALMQTPHRFRSKRQLWTYSGLGIETRDSAQYRFVRGQLQRAKKPQQIRGLNRNHNHEMKDIFKGAATRASCGVGPLRDFYVALLAKGMKPEMARLTLARKIAAIALILWKKEEHFDAEQLKLQAA

SEQ ID NO: 213580 - protein, 347 aa, unidentified
MLHAGLDLSRKKVDVCLLSDQGEHLDQLATPPDADALRNLARRIEETHRQPVCAVVESMTGARLVHDTLEQEGWDVEIADAQRVKGLAPLACKTDKIDSLVLATLSHRDLVPAIWLPDPRVREERELARFRLHLVKHKSALKNRIHSTLINFGKPCPVTDLFGVEGRELLARLQVPEPWRGNVTASLELIDDLEDQIAEINTRLKEGHADHPYIPLLMSAPGIGWVLAFTIAAEIGEIERFASPEKLTGYTGLCPRVNQSGDKDRRGPLTKHGPRYLRWALLEATMHALKHPAYSERYQRNKRRLGKQRGAKVAQIDIARRLTHAIWHMLSRKEEFAPRGAAFRLAA

SEQ ID NO: 213581 - protein, 349 aa, unidentified
MTIRSRITGGVDTHLDVHVAAALDERGGLLGVELFATTPAGYQRLLSWLQAFGEVVLVGVEGTGSYGAGLTRVLHAHQVPVVEVDRPNRQRRRRRGKSDPQDAISAARAAQSGEASGLAKTRDGNVEAMRVLRVARGSARRSRTQALNQMRALVSTAPDEIRNELRDLNARRLLERTSSYRPGQRRDVNALTRFALRTLARRAIALETEVDEIDKILKMLTTDTAPELMAINGVGTDVASALLVAAGDNPERLRSEATFAHLCGVAPIDASSGKNERHRLNRGGDRQANSALWHIVITRMACDQHTRTYIARRMDQGRTKKEAIRCLKRYIAREIYHQLPRRQLTLDNP

SEQ ID NO: 213582 - protein, 405 aa, unidentified
MQAVLERCCGLDVHKKSVVACVITPAGRETRSFGTMTEELWDLADWLEACGVTYVAMEATGVFWKPIYNVLEERALQLMVVNARHMKAVPGRKTDVKDAEWIADLLQHGLVRPSYIPGRAERELRELVRYRKALIRERSAEANRVQKVLEGANIKLGSVASEVLGKSGRAMVHALAGGVSDPQSLAALALGKLQEKRTELERALVGAVGAHQRLVLRTQLRHITYLDQEIVQLSEEIAERQRPFTEALGRLQTIPGVGRRTAEVILAEIGTDMTRFPTAGHLASWAGVCPGQHESAGKQRSGRTRHGDPWLREALVEAAHAAARARRTYLAAQYRRIAARRGSRRAAVAVAHTILTITYHLLSRQSDYEDLGANYFDDRDRTATIHRAVARIQRLGYEVTLTPAA

SEQ ID NO: 213583 - protein, 400 aa, unidentified
MSHYVGVDISKDNFHFCILTEDSKILSSGEFPMSSQGFSDFFNLLKSLTDTIVVMESSGRFHIPLYCFLVEKSIQTFILNPKIIHRFFEFISANNPSKQDKKDAKILALFALNKPQMLKSYPVAPELRALSRLIQKLKNELAEAKTQIKYCLTVLFPEAERFFNIYFHSFLHILHKYPSAKAIKKTKPEWLSEIIKNSISRGKPASFTPQEVIQTAKNSIGVDNPYLSETLIFYIDKLFFLEPRINKLEEILMDKIDKDQQEQMKLISSIKVISQRLAGLFLAEIKDIRNFPNAKKLIKYAGTDPVVKQSGKYKLRMSISKQGSSFLRNILFQMAVGVVKWNSYFRDYFVRKKKDFGSYKKTMIPVVNKLIRVIHALCMKRTFFVHSFSKSILPLKVSHV

SEQ ID NO: 213584 - protein, 411 aa, unidentified
MTNEFNVFVGMDWANSKHDVCIQGAESTKRKFSVLTHSPESIDDWIQKLHVQFKGKIAIAVELTRGPIVYALQKYSFVTIFPINPAMLAQYRKTFSPSGAKDDPTDAELALDLMLNYPAKVKRLSMQSEPMRKLMYLVEQRRKLVEDKRRFSNRLINTLKQYYPQLLDWFSHRSSDLFCGFITRWPSLQKVKRARATTIRKFFLSYGGRAAPFIEQRIEAIAEAVPLTHDRAIIESHQLLAVSLANQILTTAKAIQLFDKEIEQIFEAMPDAELFKSLPGTGPCLAPRLLVAFGENRDRFKVASDVQMFAGIAPVTVRSGQKSWIHWRWQCSKFLRQSFIEWAAKSVHSSYWAGIYYTKQRQKGNSHQSAVRALAFKWIRILFRCWKTRTTYDESKYLKVLKERNSPLLEV

SEQ ID NO: 213585 - protein, 320 aa, unidentified
MRNTVGLDISKLTFDATAIVGNAEYSAKFDNDSKGLDQFSDRLKSLGCQNLHICMEATGNYYEEVADYFAQYYSVYVVNPLKISKYAESRFKRTKTGKQDAKLIAQYCRSAQESELVKRQKPTDEQYRLLRMTAAYAQIKSECAAMKNRHYAAKDEEAAKAYAEIIKAMNEQLEVLKEKIKEQTEKPNCKEGVKRLETIPAIGRMTAAVLFHHLTSSKFETSNKFAAFAGLSPQQKESGTSVRGKGKLTKFGNRKLRAVLFMPAMVAYRIRAFPDFIKRLEEKKKPKKVIIAALMRKLAVIAYHVHKKGGDYDPSRYKSA

SEQ ID NO: 213586 - protein, 338 aa, unidentified
MKIFAALDVGDKATHICVLDGEGAVVWRGVCATDPEVVASTLERHAAGVERVVLETGPLSAFLYHGLIEREVPVVCICARHAKGALSVRVNKSDVHDAEGLAQLARTGWFKAVHIKGSATHLDRAQLKVREQLIRARLAMANQLRGLLKLFGLRMGKVTTPGKRAERLEALLTQKPELRPILAPLVAGLEALDAQIAASTRSIKARAAADPVVALLMTTPGTGPITALTFKSSIEDPSRFERGEDVGAFAGLAPRRSQSGERDVHGRISKAGDPMLRSALYEAANNLLCRVKRPCHLQTWGKALVATKGAKRARVAVARKLAVLLHRLWISGNSFQWA

SEQ ID NO: 213587 - protein, 320 aa, unidentified
MVNQNQSSSVSPLFVGIDVSGEFLDVAFHGSTEYFRLANSPEGIADLIARLSPLKPELIVLEATGKLEKAVLEALCKAGLPGVALNPRWVRDFARSTGHLAKTDRIDARVIAHYGAAVKPELRALNDAQSQQLQALILRRSQLMEMLTAEQNRRRRAHKATHASIDELIAFLKKRIKDADDDIDSFLRSNELWRKTEALLRSTPGIGRGTAATLIAFLPELGKLSGKEIASLVGLAPFNVDSGKQQGQRHIKGGRHMVRRALYMACVAAQKANPDIKAFCDRLRDKGKKTKVAFVAGMRKLLIRLNAMMRDATPWSPPKS

SEQ ID NO: 213588 - protein, 430 aa, unidentified
MKNRTNQKLEEITAGTLIVGTDIAKEEHWSRFVDYRGIEIGKAISFKNNRQGYESILARIKEICNQKTLKYPINTILIGMEPTGHYWKAMADYMMKKGYRVVCVNPYHTKKAKELDDNSPTKNDKKDALTIARLVKDGRYFDPYIPQGEYGELRILTNTRVNVIKKQSSIKNTITAILDEYFPEVWTVFKNPLTGKASKQILKTCPFPALILEMGELGVLAEIKKAVKKGVGIKKVYQLIGAAKSSVGVEYGMKSAKMRLGMLLEELEMTERQLAQIENEMKVILQQTGYAQFILSIRGIGVITAASFLGEVGDPLRFQNARQIANYAGFNLTEDSSGKSKSGTCISKRGRKQLRSILYQMAFTVVGCNAEMKALYKHLMTRTANPLKKKQALVVVSKKIITVIYSLLKKQEMYKSELVLGAVRQELMAA

SEQ ID NO: 213589 - protein, 313 aa, unidentified
MDEPRPACCVGIDVSKDRLDVHLRPSDEAFSVARDGKGLENLVDRLKALNVSLIVLEATGSFETTVAAALAGAGLPLAVVNPRQIRDFARALGRLAKTDAIDAEVIAIFAEKIRPQARPIASKEAQLLGELVARRRQIVEMIGMEQNRRRRTTDKRLAKRIDSHLAFLEKELAEVDGDIDAGVRASPAWRETEQLLTSVPGVGPVTARTLIAELPELGRLDRRKLASLVGVAPFNRDSGTWRGHRMIAGGRTSVRCALYMAALVAIRHNPPIKAVYQRLIARGRPKKVAIIACLRQLLTILNAIIRDATPWIV

SEQ ID NO: 213590 - protein, 390 aa, unidentified
MILIGIDVAKDKHDCCIINSDGEFPEEVFSILNNREGYETLYKWICSLAVDFTKVKVGLESTGHYSSNLLAFLLDKHLTAYVINPLRVNLFRKGQSLRRTKTDKIDSRDIAHLLMTDSSLKPYSLSSYHMEELKSLTRYRASMVRERTKLKTSIARLVTILFPELEQMVSSIHIHSIYAMLEEFPGSAYIAAANLTRLTALLLKASRGRFGRGMAIRIRDTAKQSVGAVSPAKSMELRHTIAHLRVYDQEIGEIESEIEKIMDDVNSPITSVPGIGMQMGAVILAEIGSFRRFDSPDKILAYAGMSPSTYQSGKLTGSYSRMEKRGSRYLRYALFNVTRYVCHYDPGFTAYLSKKRKEGKHYYVAISHAVKRLVRVLYAMEISGNWYQTA

SEQ ID NO: 213591 - protein, 386 aa, unidentified
MARKRTLSTLDTSIAYAVGLDLAKTDVALAAFDSDHKEPYLIDRIPYDKLYELLADMAPTLVAMEPCSGAHQIAEQIQELGHEVMMISGRHVQAWVKDHCNGQKTDLNDAFAILNLAYDRWLTPIRGKTREECRLLALQASYRQLKGQRTKTMVHVKATLHAWGFPIRAGSFNQKALHELIDANREAFGDEVVETLHLMINRVHDLDHDIATVLKLLTEATQRDPRASLLRSIPGFGVLTTSRWCAVIGDIARFDSPKQTMAFVGLVPNNRITGHHTETSSGREARGQGKMSKRGDKMLRSLCILGAGALCLMVRNDRLPDCPFVASIKERLASPRPWFKVLVYVAAKLVRIATALLKYGETFSFEKAGISKAVLKQWELEQAKAA

SEQ ID NO: 213592 - protein, 341 aa, unidentified
MKVSTISIDLAKNVFQIMGFTSTGKTLFNKRLSRDKFTHFMQMQPNCRVVMEACYSSHFWGRTFEAMGHTVYLVPAQHVTPFVRGNKNDSNDTLAIFEASHRPFIRFVPVKTQAQQETLVLHKLRERLLSTRVAASNQLRGLLTDFGIVFPLGKAAFNEKMKDLSVDESLSVKISWLVKDVYAEYKTLDARIKKIEKQLKNDIEANPLGKILLSIPGIGYLNASAFVASIGSGQAFASAREFAVWLGITPKQFASGNKSVMGGISKRGDQYLRKQLIHGARAIISHAGKKHDALSLWITQLRARKTFNCTAVATAHKLARIMWTLLQKQCPYTPQMPKVVA

SEQ ID NO: 213593 - protein, 388 aa, unidentified
MLLDHPSDGPAAIRTQFGAIFVSLELSRSTWLITSLSPGQGEKMSRHSVKAGAVAELMKLFAELNGKAQVRTGLSYPIITIQEAGLDGFWLHRVLKQEGIESHVVDPASIATPRRKRRAKTDRLDGETLLRALLAYKRGEPRVCAMVAVPSPEEEDRRRLCRERQTLIAERIEHVNRIMGLLFAQGISDYAPVRRDRRARLMVLRTGDGRELPPHLKAQIGRELDRLELLLDEIAAVEREQDALLVASKPAGAKSAPHPVTMLLALKSLGPNFTAVIWTEAFYRQFANRRQVAAYAGLAATPWCSGSIAREQGVSKAGNPRLRTTMIQLAWLWVRHQPQSALTMWFKAHSQRGRKRAIVALARKLLVALWKYVTQGVVIEGAVMKSAA

SEQ ID NO: 213594 - protein, 394 aa, unidentified
MNMLYVGIDVSKYKHDCFITNADGEALTDVFTIRNSREGFEDLHRRIKSLKLRPSQENTKVGLEATGHYSDNIVRFLRKIGLAPVILNPLQVNLYRKGETLRKTKTDKSEARSIAKLLMTKEFKPHSQSSYHSEELKTLTRHRQRMVCERSRFKVSYDRLRNIIFPELEGLAKGPPSVTELNLLLEFPTAESIANCHLTRLANLVKIYSHGRHGKEWAARLKMLAKESIGSDSPARALELQQTIRQIMFISKEIDLIEADIKTLVNTSGTTLMTIPGIGYTLAATIIAEIGDITRFATTAKLQAFAGLDPTKYESGQFIGQRNVMVKRGSTYLRWGLLQAARSVSMFDPVFGEYLDRKIAEGKHYNSAMGHVAKKLIRVIFKLMNTDEVYVAKA

SEQ ID NO: 213595 - protein, 433 aa, unidentified
MALSIANFIRQEMHNMNAAGIDVSSRKSMVAVLRPFGEVVMLPFEVRHDAKSLLHLAQTLKNLDGETRVVMEHTGRYYEPIANVLHDAGLFVSAVNPLLIKEYGGNSLRKVKTDKADAAKIARYGLDNWADLRDYTPMDTTRYDLKTLNRQFHLAVKQKTATANNLIALQEQSFPGIRKCFTSPVRKDGTQKWVAFTHDFWHADCVRGVSKNAFTERYRKWCKRHDYKFKQDKAEEVYTLAKSAVVLVAKSEVTKLLVQGAADQLTSISRSVEIYRAEMNRLASMLPEYPFVMAMYGCGDSTGPQLMAEIGDVRRFASKKSLVAFAGIDPAPNDSGAKVSKSNKTTKRGSPYLRKALFNIMEVYIRTSPADEPIFQFLDRKRAEGKPYYVYMTAGANKFLRRYYAQVNDYLKTLEPKETNPSQETTAETVSTS

SEQ ID NO: 213596 - protein, 309 aa, unidentified
MEMFIGIDVSKDQLDVHVRPSGEAFVVSRDGKGLEELVGRLGALAPTLIAVEATGGFETIVAAALGGAGLPLAVVNPAQVRHFAQAIGKRAKTDPVDAAVIAHFAESVKPERRPIPDEAQSLLAELVTRRRQIIEMLVAERQRQQRVNNRRVRKSLDRHIAALEKELRAIDQDIDTLMRGSPVWREKEDLLASVPGVGRVTARTMLAELPELGSLDRRRIASLAGLAPYTRQSGRWKGKSMIGAGRAPVRAALFMAALVASQKNPVLKPFYQRLLLAGKPKMVALIALARKLLTILNAILRDRRQWQNA

SEQ ID NO: 213597 - protein, 405 aa, unidentified
MFVGIDWASTEHAVCVLDQAGKTVRAFRIPHSAAGFDDLVARLRRLGAPAGLPVAIERPDGRLVDRLLEAGHPVVPVRSNAIKAWREGEVVSGAKSDTGDAKVIAEYLRLRHHQLRTLTPFSDATRALRAVVRARGELVRQRVAAINQLTATLDAFWPGAKAVFPDVEREIALAFLERYPTPESAAGLGEQRMAAFLTRHRYCGRTPAAELLARLRAAPAGVAGGAEATARRDAVLAFVGVLRALNQAIRDLDRSVIARLGEHPDSKVFASLPRSGQVNAAQMLACWGDCRDAYDGPEAIAALAGIVPVTRQSGKHAAVSFRWACNKRFRNAMTTFAHNSRLASPWAAKLYADAIARGHDHPHATRILARAWVRVIWRCWVDQVPYDPVKHRAAQRLAEEAAAAA

SEQ ID NO: 213598 - protein, 352 aa, unidentified
MRTSQKTAGIITTIGIDLGKNTFHLIGFDQRGAIILQQKVSRGQLERRLANIPRCLIGMEACSGSHHIGRQLQAAGHDVRLIPAQYVKPFLKGHKNDYRDAEAIAEAVQRPTMHFVAIKTPEQMDLLALHRVRSRLVSQRTGVINQIRGFLIERGIIVRQGVVPLRKALPEILSSQTGPLSPRMIGVIADLTQDWRRLDERIGGVSAEIEALAEQDDGCQRLMTVPGVGPIISSAVVAAIGNGAGFKQGRDFGAWLGLVPKQESTGDRTILGKISKRGNKYLRTLFVQAAHVVLVRRPRAAMRGLWPWIEQASKRLHRNMLAIALANKLARIAWAVLARGRAYQPRTAADAV

SEQ ID NO: 213599 - protein, 344 aa, unidentified
MSMVRSVVGGVDTHADFHVAAAIDGNGAMLGVESFPADAAGYEELLGWLVSFGVVRLVGVEGTGSWGVGLARFLHDQEVETVEVDRPNRQKRRKVGKSDPIDAEAAARAALSGEASVTPKTRNGPVEQMRVLLVARRSARTQRIQTLNQLRHLVFCGPEPIRVRFKDRYKTGLVTEAAKMRPRNGSDPVTFTTNTVIRSLARRIQHLNAEMASIDQMLSELVAATAPSLLELHGVGLDSAATLLVCAGDNPDRLKSEGSWAHLCGVAPLPASTGKTPRHRLNRGGDRQANAALYRIVLTRMSNHPETRRYVTRRRDQGRNTTEVMRSLKRYVARQVFKQLPRIA

SEQ ID NO: 213600 - protein, 392 aa, unidentified
MTTFVGIDVAKDTHWACALDAGGRVLLQRAVPNTQAGLDALSVELRAMPTPIRVGLDVDGSIATFLQALLLADGLDLVHVPGLAVNRAAHGYAGGERKSDPQDARVIADLVRTRDGLRPIRPDDEATASLRLLVSRRRDLVQDQVRRMSRLRQMLSQVHPGLEAKLDITNKSSLALLTRYVTPAEISKASTKAIVRHLRRTPNLRGPEQLADLARNCAAQQRIAVPGEAMTARLVREMATEAMLVRERLILLDKELEVIIGAHPQGALVRSLPGMGAVLAAEFIAAIGDIARFRSPAALAAAAGLAPVLRQSGHSRTLRRARRGDRDLKRILYQAAFCAFTNHDVSRAYYDRKRREGKHHVQAVIALARQRSNVLWAILTHNAPYDPSHRLA

SEQ ID NO: 213601 - protein, 398 aa, unidentified
MGSDEIAVFCGLDVGKSEHHATALDPAGKRLHDKKLPNTEPRLRELFTSLAQHGAVLVVVDQPASIGALPVAVARDAGCRIAYLPGLTMRRLADLHPGEGKTDARDAFVIADAARTLPHTLRSVDVADEALAELTMLTGFDDDLAAESTRIRNRLRGLLTQIHPSLERVLGPRASHPAVLALIERFPTPTAMNKAGRRRLLATATRHAPRMAERLVDDILAALAEQTVVVAGTTAAATILPHLASSLRSVQEQRDAVAAQVEHLLEDHPLSRVLISMPGIAVRTAARILVEIGDASGFASAACLAAYAGLAPVTRRSGTSIRGENPSRRGNKQLKRALYLSAFFSLRDPASRAYYQRKRAEGKHHVAAVTCLARRRVDVLFAMLRDHTLYQPATPSPA

SEQ ID NO: 213602 - protein, 367 aa, unidentified
MTERRPSATVHVGLDVHAASIRLAAISADELLDERTLPNDPEAVARAVSRWPRVRCCYEAGPTGYGLARHLRARGIACDVVAPGLVPVRPGDRIKTDPRDARKLARLHAGGLLEAITVPSEQVEALRDLVRAREDARIDRMRDRHRMSKFLLRHGLRMPNKSWGVTRRTWLGSLTFDYAHQQQAFQTYLHALDLVDRRVEALERQLDAAAKDGPWAQLVARLRCLRGVDTLTALGLVAEIGTDWSRFQTAEQFMSYVGLVPSESSSGQSRRQGSITKAGNAHVRRLLVEAAWHQRQRPRVGAALAARQRDQDPLVVERAWRAQQRLHRRWSRMAARGKPHNKIVVATARELAGFVWAIATDQQLRST

SEQ ID NO: 213603 - protein, 401 aa, unidentified
MNSVGIDVSKGKSTVAALRPMGEVALPPAEYFHTEIELEKLAYTILALGEDTRVVMEATGRYHEPVATALHEYGIYICVLNPILIHQSGGGSIRKVKSDKKDAIKIAKYGLDNWVNLREYTPVDALRQQLKLFSRQYNLYMKNSVALSNNLISLTDKVFPGVNELFSSPEKADGHRKWVDFIETFWHCNCISLVSEKAFIECYRKWCKRKGYNFSVAKAVDLYTSSCGNTVTLSKNDTTKRLITTAAKQLTSFNCQLASFRNEMISIAGQLPEFDTVLNMFGVGEISAVNLIAEIGDVRRFPNRNSLVGFAGVDPCVDQSGKHFSKSNPTTKRGSAILRKTLFQVISTYVKRSPVEEPIYQFICKKRADGKPYYVCTTAAANKFLRIYYARVKECLNDNLF

SEQ ID NO: 213604 - protein, 345 aa, unidentified
MKVTKVAERLGIDIGKNVFYLFGVDAQGTPVLRKKLRRGALLEFLAQQPSCLIGMEACGSAHYWAREIRELGHEVRLMAGQFVKPYVKGNKNDYNDAEGICEAVGRSTMRFVAIKTVEQQDVQGFHRMRQAAIKARTALVNQMRGLLAEYGIVFATGVAQARRRVPEILEDAKNGLTDRFRRWLNGLYEQLREWDRCIDEYDREIDVLFRADERCGRIAEIPGLGPVGATALVGAHGDARQFESARQFSAALGLVPRQHTTGGKPRLLGISKRGDRYIRTLLIHGARSVVCRAMNKTDARSRWIQRLVTERGKNCAAVALANKNARIIWAMLTRGQAYRPAAPAT

SEQ ID NO: 213605 - protein, 357 aa, unidentified
MQLRNSDLDFSNQEFYLGIDIHKKSWNVTIRSNNIALKTFSMNPDPQEITNYMKKNYPKGKYYSVYEAGFSGFHIHRDLNKYGFNSIVVSPTDIPTSGKERVTKTDKVDSRKLSRELENGSLKGIFIPSLLQQEIRSISRLRYQQVKKQTRIKNQIKSYLDFYGHKLPANPEMNRWSRRFIEYLQNLEFQYEMGKEQLEIYIEELLVIKNRIIQIMLSLKKHCAQYGIDKDIKLLRSVPGVGPITAITIVAEIIDINRFSNTDKFASYIGLVPSTNSSGEKEKVLGLTILFNRHIRSLMIEAAWISIRKDPVLTLAFNNYSKRMSNQEAIVRIAKKLLNRIYYVLKNKTEYVCAVVK

SEQ ID NO: 213606 - protein, 377 aa, unidentified
MKKPIRFVGLDVHAETIAVAVAEPSGEVRSVGTIRNRPEAVRRMVRKLGPAAQLRICYEAGPCGYVLYWQLTELGAVCEVVAPTLVPVRAGDRVKTDRRDAEKLARSYRSGDLTAVWVPDAAHEALRDLVRAREAAKKDQLRARHRLQKFLLRRGLRPPEKIKAWTAQHLVWAKTLRLEQPALAATLLDYITEVEHARERIERLERAIDQAIEAAPAAIRAVIEGLQALRGVARISAATIVAELGQLSRFHRPKQLMGYTGAVPSEHSSGERVRRGTITKTGNAHLRRILVEAAWSYRHRPNVGSELRRRQANASEEVKEIAWKAQHRLHYRYVRLMARGKIKQQVVTAVARELAGFVWAIGVEIEKQPVSRPARAA

SEQ ID NO: 213607 - protein, 316 aa, unidentified
MGKHRLAFIAFDSAKENHAVAIADDGRDGEVRYLGEINNSPDAVSKLVAKLSRQYERLHFCYEAGPTGYGLHRQLTDLGHVCDVVAPTMIPKRSGDRVKTNRRDSVTLVKLLRAGELRAIWVPDSVHEAVRDLTRAREVAMLDLKKKRQHLLSFLLRHDRNFPGGKNWTKMHERWLAKQTFNHPAQQIVFQDHVEVINAAKVRLAALEQQLREIVPTWTMAPVVAAYQALRGVSFLVAIIFVAEVGDVRRFATPQQLMAFLGLVPSERTTGDTVRRGAITKTGNHRARRVLIEGAWTYRFRARVSETLQGRLKDLV

SEQ ID NO: 213608 - protein, 340 aa, unidentified
MSYYAGIDVSLEVSHVCVIDGSGKILREARVVSEPEALIAWLGSVGLELTRIGLEAGPLSQWLYAAMRDAGLAVELLETRHVRNAFKIMPVKTDRKDAHGIAELMRLGWFRPVHCKSMEAQETRAMLTARKLVQKALHEVEMSLRGILRGFGLKVGKVAPTQFEARILELVEGHPSLEVIATAMLAVRATLRQEFNGFEKRLRTMARSDMRARLLMSVPGVGTIVALTYAAAIDDPARFTSSKTVGAHFGLTPTRYQSGETDRSGRISKIGDASVRATLYESANIIITRPVKGCTALKSWAMRIAKRAGMKKAKVALARKLAVIMHRMLVDGTTFTTRPA

SEQ ID NO: 213609 - protein, 515 aa, unidentified
MKRRIGVDLGIGSCHKAMVVDENGRSSRPIAIDVSLEGYERLADLAIGCAARCRSEVVMEPTGNMWLPLAAFLNSRGVPVVMGTGKKVSDLRKFYRRHAKTDIVDAETMARLPGVDPKGSHTFEIPPIEVLSLRRLVKQRERFVRQSMVCKVRIHALLQLANPALMESLGEVKFSSVARVMLRHFVDPATVVDLGLKRFKQSVRRHKTRAGEEIMDRIFAACEKSSALYRDLRKSGSLPFDYQLLAEEIRAELDMMEYAETLVASMERVIDTRYQQLDPAQTLRQIPGIGPTIAPAIEALSSSISRFRNAKAYAGYCGFVPRKSKSGKSDHQGLPITKASHRLLKKYYYLAAEIARRNDPELAAYYEAHTAAGWHHERIVIAIAHALVRRVYALLRRREDAELSAIENAKPVGYEIRTPDGKILDRKAARAYVAEQYPSKRARARAMTQSLKDKRDASQLGNEGQPKGSTNRVVRDHVPTTTIPQDAPQNHLDQLPIDTVENLAEKMCKKDDKKI

SEQ ID NO: 213610 - protein, 411 aa, unidentified
MLRKRRSSKKTGTPVFLHSLNPNAAGVDIGATEIYIAVPADRDAQPVRHFSTFTEDLHAAADWLKSCNIATVAMESTGVYWIPFFQILETRGLQVFLVNAHHVKNVPGRKSDVSDCQWLQYLHSVGLLRGSFRPEQDVCTVRSILRHRDGLVQMASSHVQHIQKALDQMNLQLHHVISDITGMTGLAIIEAILAGERNPQTLAKLRDGRIKATESTIAKSLVGDYRREHLFTLGQSLAAYRHYQKLIGACDKEIEQYLETFESKADPPEDPKGKSQDGQNTRDGRPGFELQSHLYRIFGVDLTQIPGVHTLTTQTLFAEIGPDLSRFANAAAFTSWLGLCPDNRISGGKILSVKTRKVKNRAATALRMAAQSLYRSQSYLGHYFAGCELSWEPRKRSQLLRTNWRASSTTC

SEQ ID NO: 213611 - protein, 400 aa, unidentified
MLSIGIDVSKGKSTVCGMKPGGEIVYTPFEIQHTREGMSELVSLLHNSGEEVRAVLESTGSYHCPVVAALLENGIFVSVVNSLRMKRFCSQSIRKVKTDRIDAMQIALYGLAYWQELQPTRLPEDTYRELQLLARQYYQMTSMLIKAKVDFNALCDQVLPGMQELMSDHAGRHKLSDFVLRYRHTAHILEMGETRFRKDYCKWAEKKGYRNRERMAALIFATAQNGIPVLPNAPSTQIVITEAIRVLRTVEASRDAILTQMQALAKTLPEYSLVREMPCIGDTLAPRLIAEIGDVRRFHSKRALIAYAGIDAPPYQSGKFCANNRHISKRGNRYLRKTGYEVMQSYVMHKPANDPIFTFIEKKRGEGKSGKLAMVAGLNKFLRVYYGKVTELYRSLPAIE

SEQ ID NO: 213612 - protein, 443 aa, unidentified
MGLAPQTTVMTERTDTMKTYLLRDPKTVEPQTPPHHARRDDPALTATVDVICGPARPVPPVLGCRVLFVGLDVHNDTIAVSLAPSDSTEVRRYGIIGGQHDDVLKLIKKLSAAHPGALLKFCYEAGPRGYPLCRFLRSHGAECLIVAPSKVPRQPGDRVKTDRRDADQLARLLRAGELTGIYVPDPQDEAVRDLIRARYQVSKQQHRARQQLKMFLLRLNIRYAGTKPWTQKHLNFLATVKLPFAEQQFVFQEMVNVITEAGQRLERYEKQIAAVVESWRWQPVVAALMSLRGVAWLTGATLVAELGDLHRFASAPQLMSYLGLCPGEHTSGTTRQQGGITKLGNGIARKAMIEAAWNNSRAPRLSRTVLARQEGLPKAVIEAAWAAQTRLHQRYQHLTGVGRKKSQVAAAALGRELAGFVWAIGRMVQPHPVKPELPKGKTA

SEQ ID NO: 213613 - protein, 339 aa, unidentified
MNLYVGLDLHSSNTYIGVLDQQFNRIFKKRVCNELDLILQTLEPFRGRLRGIVVESTYNWYWLVDGLMDAGYSCVHLANPSAIKQYEGLKHSDDQHDAFFLAQLLILDILPQGYIYPKEARPVRDLARKRLFLVQQKTAHILSLQSLLARCCGQRVTSNQLRKVSGRDLKQWLKEDNLVLSAKANLDNIVFLKQQICRLEAAIQKQVKLSEAFNCLLTVPGIGKILAMTIMLEAGDIRRFANVGNFASYCRCVSTQRLSDGKSKGSGNRKNGNRYLSWAFTEAAQMARRFNSRFRSYYDRKAAQTNSILATRALSNKLARVCYYIMRDQVEFREELASS

SEQ ID NO: 213614 - protein, 452 aa, unidentified
MKKEKLALDVVNPQAAGIDVGSRSHYVAIGQGDEDVKEFGVYNEDLIALSQWLVENQVKTVAMESTGTYWQSLFTTLQSAGLEVILCNGKFTKNIKGKKTDVKDCQWIQKLHTLGLLSGSFLPDEATEQLRTYCRHRANLLEQAADTSRKMQKYLRLLNLRLDVVVKDVTGLTGLSIINAICKGEMNPEKLASFRHGNCKKSEQEIAKALQSNGRKDLLFSLTHEYELYHVFQGKIRECDKQIQKLLNEQINQDDNKRQHHIDGKVHKRINKNNPDININLLSYQYFEGVDLLAIEGVSHSTVLTLMSEVGHGISKFESAKQFTSWLRLAPNNKISGGKILSNKIPKGSNRLKIALRQAANAVGNLKDTALSNFFKRIAFRKGRTSAISATARKLAVIIWNMVTKKVPYKTDSQYEFLDQKRKRKVMEMKKLIHKFDITPDDLGLQLNINNL

SEQ ID NO: 213615 - protein, 348 aa, unidentified
MALTIVETRAVTGGVDTHADVHVAAALDPVGGLLGVQEFPATPAGYTRLLDWLGGFGTVCLVGIEGTGSYGAGLSRHVTRAGVRVVEVDRSDRQDRRRQGKSDPLDAVSAARAAQSGRARGAPKGRDGTVEAVRALMVAKRSARSERTQTINQARALVLTGPADLRTRFAQHTVAALVAQTAALRPRPGDVVGYATRVALRELGRRAQFPGGQLGRLDELIVPLVAGHAPGLLALYGIGPDTAALLLIAAGDHPERLRSEAAWAHLCAAAPIPASSGKVTRHRLNPGGDREANHALWRIVITRMSSHPPTRAYVERRSKEGLSKKEIIRCLKRYVAREVYPCLRPPAG

SEQ ID NO: 213616 - protein, 433 aa, unidentified
MKVLHERVAGIDVHKEMIKVAIRSPGEKPWTRKTEILEYRTFYGVLQEMARELRRRGVTHVVMEASGVYTEPVYYALAERDFTEVAVINPAHAKALKGHKTDAKDCTRLAELFECGLLHGSYIPAPELKEVRDLTRYRMKTVQARTSEIQRLAKALESAGIKLGSVASSITGVSATAMIEALIDGERRGGVLADLAQGRMREAGKLADLSMALSGRFTGHHALLCRLHRDRIKMFEDAVAGLEDRIAGKAAPWRRELDLLMTVPGFGDAVTQAWLGEIGPAPHLHFSSHDKLACWVSLCPGNNISARKRKYGRTGDAGTYIKPMLVQAAWSAIRVRGRLQARYNRLVRRFGGDKNPGAKKKAIVAIAHTLLKIAYQVLKTGTPYQELGADFYARRESPEQKQAWLERQLQKLHPGCTVTITITPPEAALPPGA

SEQ ID NO: 213617 - protein, 411 aa, unidentified
MNQKMLYTYVGIDSHKATHTAVFIDCFFGKIGEICFNNLPSEFPAFLEDANKLKVEGTTLLFGLEDISSYGRNLLRFLKDNEQKIKHINPFLVSSERKNRNVARKSDSVDAECAARVLLSKFGEHPDVEPLDIIWTLRTIVTRRRQIVKDNTGIKSTLHSMLMCHYPNYKNFFSNIDCNSSLEFYNKYPSPNKLNGTTVEELTMFLLKTSNHYYGEAKAVEILSSIEDTTVEFQELRDESVQSSIRQLKFNIEEMEKLEIVIARALENFNTPLLYMTGFDIVSVAQLLVCIGDIKRFPKSGKLAQYAGVAPVTFASGKTDKQYSNRKGNRELNSLFYNLALRVSMPVGSSKKIVNTFFYEYYNRKLSEGKTKRQALKCVERRLVHIIWTMLTNNEEYVNPPTYDLQISVRA

SEQ ID NO: 213618 - protein, 412 aa, unidentified
MKDLLEVSCGLDVHKEKIVACILSGPLGGKTVSEIKEFTTLSSDLIALRDWIVENNCYHVAMESTGVYWIPVYETLETAVDGNMKLFVVNARHMKNVPGKKTDMRDAEWIATLLRAGLLNASFVPEKRIREFRDLNRYRKSIIRDVTKQKNRIEKFLQASGFRLSSFISDIFGASGMNIIDHLIEYGSIDKAALDKCLKTKTRKRIDDILMSVNGFLSLHQRTFLKTLFNHLEMLRSHLSEVEQSIKEEMEPFALQVDQLNSIYGIGTIAACAIIAEIGVDMSAFKTAEHICSWAGLSPGNNESAGKRKSTAVTKGNPYIKSMLCESAWVIAGKRNTYLSGWYWRIKQKKGAKKAIIALARKLLVIIYTMLKQGTLFDERCFEERRINSEEKKLARYRNELEKHGYRITAAS

SEQ ID NO: 213619 - protein, 375 aa, unidentified
MGDHSEAFVAFDTSKLRNAVAIADCGRSGEVRFVGEIENSAAATAKLVRKLAAKYERLTFCYEAGPTGYGLYRQITGLGHDCLVVAPSLIPTKPGDRVKTNRRDALSLVKLLRAGELTAVWVPDPRHEAMRDLTRTRGAAAEDLRRKRQQISSFLLRQGLHYPAGRKTWTKAHMTWLMSQKLEHAEQRIAFEEMLLALRQAQDRIERLEQAIRAAVPDWSLAEVVTALMAMRGMDLISATAFLAEIGDLSRFQTPRELMAYLGLVPSENSTGDTVQRGPITKAGNRRARRTLIECSWSYQHPPRVGKEKLAKVAAAPPAVREIAWKAQCRLSARYRALVRRGKGANVAVTAVARELAAFIWAISREVTTARAAAK

SEQ ID NO: 213620 - protein, 388 aa, unidentified
MIYVGIDIAKLNHFASAISSDGEELIKPFKFTNDNDGFQLLISKLNPLDKDSLIIGLESTAHYGDNLVRYLVAKNYKVCVLNPIKTSTMRKNNIRKTKTDKVDTYIICKTLMMQESLRFVTFYDLDLMDLKALGRFRQKTIKQRTRLKIQLTSYVDEIFPELQYFFKSGLHQKSVYALLKEAPTPEAIASMHMTHLAHLLKVNSHGRFDKEIAQQLRVLAQKSVGASDSSLSIQVTHTIQQIELLDSQLERVEAEMTEIMKFNDSVIMTIPGIGYINGGMILGEIGDIHRFSSPNKLLAYAGLDPSVYQSGNFQAKQTRMSKRGSKVLRYALVNAAHNVVKNNATFKAYYEAKMAEGRTHYNALEHCAGKLVIIIWKMMTDKVEFNLD

SEQ ID NO: 213621 - protein, 391 aa, unidentified
MSMYFVGIDISKYKHDCCIISAVDQQIVSKFTITNDKDGFEQLLISLNSLSTPEDIKIGFESTAHYALNLELFLENANHSFMEVNPVLIKEYKKSTTLRRTKTDSVDCESIARWLMTVEYKPHSKGFYHAYSLKSLTRLRDRLIRQRSFYLVKITNVLDHTFPEFKPFFNERLSKTAIYLLENYGSAEKMAHMNSVSYDKLRCISRGKFSIQQFLRLKELAANTVGVNNSIFDIELNSLLTLYNSLCKEIKNLEAEITRLIEEVHPHYMSIPGIGPISAAVIYAEYGDISNFSNPSQMLAFAGIEPGINDSGTESHGGRMVKHGSSQLRYVLLNACLPLIRFDLTFATYYAKKRAEGKKHRVAITHVAKKLIRVIYALERQDVDFNAQKLR

SEQ ID NO: 213622 - protein, 324 aa, unidentified
MKTKPKVVLGIDVSKTKLDVCLLRPESSPLAQSFSNDPVGFTRLAAWLHQQSVAHTHVGLEATGPYSRRIAQFLHEQSHTVSVLNPARPKSFAQARGCRNKTDGIDCQTLAEFVLAQSPEAWEPLSEEMAALQELVRRREDLLVMHGAEQARQEGASAQIAKSINRIVKAIQSEIQRIEQALEELIQSSPELRRQRRLLCTIKGVREITAAKILAELGDPKRFAQARQAGAFAGLTPKLHQSGKRQSSVGRICRIGSPLLRKALYLPSIVAMTHNPRFKVFAHRLRKAGKPPKVIITAVMRKLIVTATAMLRNDQPFQLEHSPC

SEQ ID NO: 213623 - protein, 448 aa, unidentified
MKAEPEEIPDTEHELVLERVCAVDVAKDSGKVCVRVSSRAGRRVSKVWDVAARSGAVAELAEQLVEEGIEKVTVESTSDYWRIWFYLLEAAGLSVQLVNARDVKNLPGRPKSDKLDSVWLAKLTEKGLLRPSFVPPAPVRELRDYTRLRIDLTRERTRYWQRLEKLLEDALIKVSAVASTLDTLSVRDMLEALIAGERDPRRLADLARGRMRVKHGALVEALTGRFDDHHAELTRMLLDQIDALSTQIATLTARIDELLTAMEPQTRPDEPDTPGGAGTVADGARESTTIERLDEIPGISPGLAQIILAEIGLEMSQFPTAADLVSWAKLCPRTIQSGAIQRGGKTGKGNPYLKGALGEAAAAAAKTNTFLGERYRRIVKRRGKLKALVAVARSILVIIWNLLHDPTARFRDLGADYHATRINTERRTRNYVTQLMAMGYRVTLEPAA

SEQ ID NO: 213624 - protein, 330 aa, unidentified
MKQYDHVFGVDVSKKTVDITHVINQEFTHRQFSNDEAGMEQLMDWLKELQLDFDKTLFCMEATGLYCFTLTHFLASHSIDTWIEHAAQIKKATALARGKNDKVDSQRIAVYATKNLDRLRLWKPVDATLEKIRHLASLRERLVETRKRLATPIKEFKDVGNLVMAKLLTKTIKSSLTAIDKDLKNIEIKIIDVINEDDNLKLLYKLITSVVGIGFVTAINLLIHTNGFTMMKDARKLACYCGVAPFEYSSGSSVRGKTKVHHMANKKLKCNLHMASLTAVKLDADLKTYYERKVAEGKNKMSVLNAVKNKLLARVVAVVNKQQEYVKKSA

SEQ ID NO: 213625 - protein, 416 aa, unidentified
MNNWKDLTHYAGFDWAKDHHAVVIVDRTGSIVADFEFAHSLEGWKSFEQKTSAWPSLAVAIETSQGAAVDQLLQRQGTVYPVHPVSAQSYRERKAPSGTKTDHLDAWGLADALRMDGQGWKPLQPMDAMTQQLRLLCRDEVSLIEQRTALVNQLQQALAEYYPAALEAFEDWTDSFTWEFVLAFPTPQALVSAGKRRWEKFLHTHKLWRPETVEKRLKLFAQADQFKASEPIVRAKSQLAVSLCKLLCTLGQQLKLYRKQIEALFRDHPDHDLFGSLPGAKKILAPRLLGAVGSDPDRYGSQEVLQCIAGTAPVSYQSGKINKVHIRWSCDKFMRHTVHLWTDCFRKASVWGQAYYQQKRDEGMSHACALRCLGQRLLKILFRMLKTKTRYDAELHARNQQKHGSWVIKLVNGSPA

SEQ ID NO: 213626 - protein, 379 aa, unidentified
MKLITLYLGLDVHKDSITIAIAEPGSKGEIRLFGTITNDIDRLEKALSRIRKAHPNAQLEIAYEAGPCGFVIARRLKQLKVPCLVAAPSLIPKQPGSPFKTDKRDARAIARLLRAGELTGVYVPEPTDEAIRDLCRARTDAVDDQRRCRFRLKAFLLRHGYRYQGKANWSQPHMRYLRELVLPHPAMKAILEEYLQGIDAAHARVQRIEASMLSLLETWRLKPAVQALMAFRGFQLVAAMITVSELGDIHRFEHPRQLMTYLGLVPTESSSGPHQRLGGISRCGNGHQRWLLTECAEHYLLPPKVSKELSARQQGQPQEVRDLSWKAQNRLHLRFIRLLGRRLQRNKAKVAIARELCGFIWALLRTQPCYTQPSATTAR

SEQ ID NO: 213627 - protein, 503 aa, unidentified
MGTPPLGISAPDTRCLRGAFSNGGVRLASNEYSRSRLFQDHYKTFAVSQASPLDWSLNMSIDPSLVSAEPDWAAFAAIDWGSQKHFWALRSANGDTIQSGILLNTPEAVAVWASDLRELFQHRPIALALEQKRGAVIYMLSQYPHFVLYPIPPSMSAYYRQAFFPSGAKDDPGDAALLLDLLVNHRSRLSVLRSETDATRLLQSLVETRRQLIQQKVCQVQRLIDCLQQYFPQVRTWFDDLDTPIVADLLHRWPTLPELQHTHSGTLRRFFRQHHSHSQDRNAQRIQAIYAAVAATVDPVVIETGTRKTNALLHLIADLRAEIALLEKRIREIVATHPDAPIFASFPGAGEATVPRLIAAFGTNREAFSSAADVQCLSGIAPVLKRSGNSSWIGMRRACSKFLRQTFHEFAGQSIPFSDWAKAFYRHQIDVQKASHHQAVRALAFKWIRILYRCWKDRILYNEQTYAESRRRRRALVGTELASLAELTVENIAGFKKISRKKA

SEQ ID NO: 213628 - protein, 297 aa, unidentified
MRIGRYRPDAIAELVRRLLAGPKVTRIAIEPTGGYEKPMVEALRQAKLPVELVHTSRFKGYRTMVGVKAKSDTSDARLLAAYAAAPDDVRGRKADRVELPQDALREELRELASRRDQLKHMIHAESCRLGITRHATLRQSILAHLETLRSEDKQVLQMMHALVRQRLDLRRDQKLLQTVKGLGVVSALTLIAAVPELGHLDNKQAAALIGVAPFVHKSGTLTAPARIHGGRAAVRRILYMAAVTASRYNPVLKSFYERLIAKGKPAKLALVALMRRLVVFANAVLRSGQPWKGAIPT

SEQ ID NO: 213629 - protein, 341 aa, unidentified
MQITTIGLDIAKNVFQVHGIDAAEKVVIRKQLRRGQVLKFFASLAPCLIGMEACATAHYWARELTKLGHEVRLMPAKDVKAYVKRNKNDAADAEAICEAVRRPTMRFVRAKSAEQQGRLMQHRTRDLLMRQRTQVINALRAHLAELGIVAAQGREGLKQLLAIIADEKDARLPIDARASLVVLAAQLQALQTMIGLIERRLLVQHRANEASKRLESVPGIGLIGASAIAATVADPNAFRSGRDFAAWIGLVPRQDSTGGKQKFGPISKQGDRYLRRILVVGAHSVLRRAKKNPEKYPWLTQLLARRPFKVVAIALANKMARVAWALLARGGSYRVPALAAA

SEQ ID NO: 213630 - protein, 385 aa, unidentified
MNQTSSCAISTSTLHCALELSKNSWLLAIQFPDREQPSLYPIEGGNTEKLMAKLAAARDCWAKVSGSPPAITVCYEVGYDAFWLARFLMGRSIECLVIDPGSLQVNRRGRRVKTDRVDVKMLLRTLIAWCRGERHVWSLVRIPSIDEEDLRRSHRERGRLVRERTAHINRIKGLLFGQGIRGINVKSQYKTLAVDNLMTGDGHRLPPRLAYEIAREIQRLAMVQEQIAKIERERDTAPTGCEATERKRHLLLQLKSIGPAISALLSREVYYRQFANRRQVGSFLGLAPSPYNSGAEERCQGISRAGSGHVRAIMIETAWLWIRHQPKSALTRWFVERTAGQSTRVRKILIVAVARKLAIALWRYVEHGMVPQGAILNPPTTGNAR

SEQ ID NO: 213631 - protein, 325 aa, unidentified
MRPPQSQVKPQTQIGLDVSSQTLDAHIRVDGKAFSVPNTDAGFDQLCDMLSAYSVSMILMEATGGYEDNVACYLQLQGFDVVVINPRFARRFAQSMGRLAKTDRIDAAILAQMAFMIDSGPDRERYIKPVTDEQRKQLSRLSSRRRQVVDLITIEKQRLTHADDYARESINGIISLLNVELKRIESDILRYVKKNFSELANRLLSIPGVGEQAMIVLIADLAELGHVNRRRISALLGVAPFNHDSGKFKGQRRIRDGRQSVRNVLYMGVISATRFNPVIKAFYDSLLLRGKPRKVAIIACMHKLIRIINAMMRTGKPFDISLHGV

SEQ ID NO: 213632 - protein, 345 aa, unidentified
MKKVIAGMDLHSNNVVIGVMDMDGKRLASRKMPCELKEVVKFLTPFKKRLERVAVESTYNWYWLVDGLQALKYPVVLANPAGMEQYSGIKHADDTNDAFFLAELLRLAILPTGHIYDAELRPVRDLLRRRLMLVHQRTSLMLSFKSLYTRTTGQEMTLSALKNLEIKEAQELYEHPANQMIAGMQIKHIEQLTESVEKIEKAVLSSARELPYYEKLATLPGVGRILGMTITMEVGDIKRFADPGHFASYCRTVEAKRMSNNKKKGENNSKCGNKYLAWAFVEAANFARRYDEQCRKWFDRKAARTSNIIATKALACKLAKAAWYLMAEATNYDPTRMFGQPAKTK

SEQ ID NO: 213633 - protein, 338 aa, unidentified
MNKHSLIAIDLAKNIFQVCIVNSNNRVLVNRQHTRTSLNEFIVKQPPATIAMEACYSSHYWARLFQSYGHQVKLLPAQHVKPFVRGNKNDHNDALAIAEAARRPNIRPVPIKTVAQQDIQCIHRLRERMVTQRTGLTNQTRGLLSEYGIVFATGFKAFKRALATLLDPKDDRLTALLKQQLRFIADEFERINTRLTELNKLLAHIAQDNPYCRCLMSIPGIGYINATALYSAIGNGSQFNSAREFSVWLGVTPKHYASGNKHTMAGITKRGNRYLRKQLIHGARAVMIRNKKRDDHLSQWLGALVARRGANKACVALANRMARLCWVLLHKNEMYHAQ

SEQ ID NO: 213634 - protein, 355 aa, unidentified
MNDEKYIGLDVHQATISVAVMDATGKVVMESILETKAATILEFFAGLRGTLWVTFEEGTWSVWLYDLLNPHVDKLVVCNPRKNALLKDGNKSDRIDARKLAELLRGNQLKPVYHGETGVRMLRELSRSYLTIVKDLTRVMNRLKAVYRSWAIPCAGRDVYYTRHRAQWLAKIREAGVRRRAERLYEQLDMLQHLRQQARRELLAEGRKHAITAKLRQIPYLGPIRSVLAVALMQTPHRFRSKRQLWAYSGLALETRTSADYRYVEGQLRRSKKLVSIRGLNKDHNHDLKGLFKGAATMASVRPGPFQDFYQAALAKGIKPTMARLTLARKMAAITLTLWKKGENFDAEKLKSQAA

SEQ ID NO: 213635 - protein, 421 aa, unidentified
MPNIEIGVDFMVKENFIYVGIDLHKETHTAVMIDCYNQKLGEITFPNRPADFPKLVTKVKKCNTDGKEVVYGLENAYGYGRALAVWLIDKGYLVKDVNTAISHRQAKHRGAMYRKSDSDDAEAIALATLNMLDKLPDACPNDAYWSLGQLVHRRDNIMKQRTRLVNQLHEQLCIAYPSYKSFFNDISRPTALYFWEHYPSRKYLKGKTVEDLREELVPVSHNKCSTKTCEKILDAVASDKVKNNDFQDARDMVTLSIVSDLQHYDRQLAEVDKMLEKMYEMLGCTLTTIPGVSIITAVKILSEIGDIKRCANSNKLAQFAGIAPLHLSSSGKGKDMATKQGNRRLQATIYFLAIQMVQVSSKGTPRNPVVRAYYEKRKAEGKTSQQALICISRRLISIIYGMLKSGTEYRMPIVENAGENR

SEQ ID NO: 213636 - protein, 356 aa, unidentified
MSRDIKYIGMDVHKEAVVIAVLNSTGKLVMESIVETKASSILQFIHGLRGELHVTWEEGTWAAWLYDLLQPQVAQVLVCDPRRNALLKEGNKSDKIDARKLADLLRTGMLRPVYHGEHGLRTLRELGRSYRTISQDLNRVMNRIKALYRGWSIPCAGTQVYAPRYREQWLQKIEHAGVRRRAELLYQQLDGLQTLRRTLRPELLAESGKHKAAKLLRQIPCIGPIRAARLIALMQTPHRFRSKRQLWTYSGLGIETRDSAQYRYVQGQLQRTKKPQQIRGLNQNHNHEMKEIFKGAATRASCGVGPLRDFYVALLAKGMKPEMARLTLARKIAAIALTLWKKEERFDAEQLKPQAA

SEQ ID NO: 213637 - protein, 475 aa, unidentified
MADLGGRARKGTAMEERKADRTGMDRRQLKGLPMVRVRVGGIDLGSERHWVCAPTQDGKEREVEDFGATTPELMRMAEWLKARQVESVAMESTGVYWIAPHEILEGQGLEVLLVDTRQLARVPGRDKKSDPSDCEWIQRLHSCGLLRGSFRPAEEICMLRTLVRDKATLVAERSDWVRRMQKSLDQMNVRVHRAVSSIEGVTGMAILRAIAAGERDAGKLAQLRDPHCRQSEEEIAEQLSGHWREDHVFSLQQALQMYDAIEERIGAYEKEILRKLGELERPEQQGKNAPPLGNVNKARSIRQRGQEAKRNALFRLNGVDGTQIDGVGVETLEVITSEYGPDLSRFPNEKEFVSHLRLAPSVPKSGGKPLPKKQRKGRSTRAANALRMAVLALRHSDTALGAHYRRLAQRLGADVAVFASARKVATVIYRLLRWGQPYVDEGAQAYEERYHELRVKSLISRAKQMGFQVTPAPAS

SEQ ID NO: 213638 - protein, 343 aa, unidentified
MQAVTTIGFDIAKSVFQVHGVDSVGQVIIRRQLKRRQIIAFFQKLPACLVGIEACASSHYWSRELQALGHNVRLMPPAYVRPYVKRQKNDMADAEAICEAVTRANMRFVPTKTAEQQSGLMLHRTRHLFMRQQTSVINAIRAHLAEFGIVAPVGRRGVEELLRVIADPSDKRLPEVVRACLAALGSQLLSLKKQILDFDRMIMAWHRSNQTSKRLNCIPGVGPLLSTALVASVADPKTFRSGRNFSAWIGLVPKQNSSGGRDKLGSISKQGDRYLRGLFVAGAFAVIRYAKIHGTKHRPWLTALLARRHTKVAAIALANKLARMAWAMMATGERYNYPASLKV

SEQ ID NO: 213639 - protein, 358 aa, unidentified
MQSVTRVGIDLAKMFIQVHAVDAVGKVVCNKQLSRDKFIAWCNQLPAGCLVAMEACSGSHAWARKLIALGLDAKIIAANHVTPYRLEGKGGKNDANDAAAICEAASRPSMRFVPVKTLSQQGMLCVHRYREGVKEERTANINRIRGLLAEFGIIAPQSPNKLRERLAEIIEDADNDLCGIARLVIQEAFSHWDEIDKQLGWCTQRISAHVKENQQAQTAVQLMGVGPVTASAAVVTVGDFKQFKNGAQFGAWLGLTPRQNSSGGKTKLGRITKRGDVYLRMLLIQAAKAAVMTAHKRDDPISRWLLQLREKSGWQKAAVAMANKNARILWAVMTKGCDFDPRYVSVKPSGGGSIAVAI

SEQ ID NO: 213640 - protein, 318 aa, unidentified
MNNASNQNIYIGVDTGKAQLDIYVRPTAHFFSVPNTDKGIKDALKIIKPYQSERIIIEATGRLEMPFVLACIEANLPIVRANPVHIKRFAGAIGRRAKNDRLDAELIAHYGDAIKPEITIIKAENIRLMSDLVIRRNQLLSMQTMEKNRLQILPKTLHSTIKPMLTAMKNQITNIEQKLVKLIEACPEYQTKNTLLQSVPGIGSIAAASIISNVPELGYITNKQAASLIGVAPVTKESGRYKGKRVIQGGRAQVRTVLYMAMMSAMQCNPVFKATYTRLVAAGKPKKVAIIACVRKLVVILNSMLRDGVMWDKNLANI

SEQ ID NO: 213641 - protein, 360 aa, unidentified
MRIIGCDLHARQQSVAMLDTETGEVVNRTLRHEGNEVRQFYSQLPRPVLVGIEAIGPMQWFLKLLEELGIECQVGDATKVRAAEPRKQKHDRRDAELILKLLVENRFPAIWRPSQELLDLRALLLHRHHWVRLRTQIQNALQAIALANGLRRGPGLWSYDGQAQIAFLPLPPHASYRRSMLQALYRKMEEDIEQLTAQVAEQAEQRSGARLLLTHPGVGPVTALATDVFLGDPQRFADGKALASYVGLIPREYSSGARQRLGALTKQGSPLLRFLWNEAGAHAVRRDPELQRFYRRKLVQKGLGKARVAAARKLGIRLWIMLRDQIDYQEFCRRGQKQCGAACAGMLEVGNGANSHRPVD

SEQ ID NO: 213642 - protein, 374 aa, unidentified
MAGLHELVGRHLGEDADDAEVAVGIETDRGPWVAALVAAGYTVFGVNPLQASRYRERHGVSGAKSDSGDAHMLADMVRTDSHQLRAVAGDSAEAEGIKVLARTHKTMIWERTRQVQRLRHQLREYFPAALEAFDDLDAPDTLELLGKAPEPARAARLTRAQVSAALKRAGRRNITDKATAVLAALRGEQLGQPAAVTAAYAVTVRSLIAVIAALNEQVKILQGQVEADFGRHPDAEIYRSQPGIGAILGARVLGEFGDDPDRYADGKCRRNYAATSPITRASGKKKVVAARFIHNDRLVDALNAQAFASLNASPGARALYDELRARGIEHNDALRRLANRLVGILHGCLKTRTLYDEAIAWGHRENLAKSSVAA

SEQ ID NO: 213643 - protein, 457 aa, unidentified
MTRKGKATKGIEKAQPFEGIGRVNPNAAGLDIGSVEIVASVNGAENMQLVRAFGNYTADLENIGDWLSEHGVKTVAMESTGVYWIPIFETLENRGFECLLISSRSLRRVAGRKSDIADAQWIQTLHSYGLLESSFRPQADLIALRTLLRHRGQLIEHRSPHIQHMQKALLQMNVQLSQAVSDITGVSGLRIITAILNGEREPAKLGALREPGCKKSAEEIGRALTGTWRAEHLFVLKQSFEMYVYYSEQIDDCDEEIERTYTGLRVDNDPGELPPMSRRKRGSHSKNKPKQSEEIRAHLKRISGVDLSLVDGFGVSLAQTVLSEVGTDMSKFPSEKHFCSWLGLAPKHEISGGKVLKNRTLKTKNRAGQAFRMAAQSVKRSDTVFGVKYRRMRARLGPAQATVAVAHAIARVVYRMLKYKVEYETISVEEYEKKYKEQQLKYMKKKAAKLGFTLVPA

SEQ ID NO: 213644 - protein, 338 aa, unidentified
MTTIKVIGIDLGKSSFHLIGHDHTGREQLRKHLSRPKLIQFLSQTPKTTIAMESCGGSHWLARKCQSLGHEVKLIPPQYVKPYVKTNKNDYIDADAIAEACTRPSMRFVGVKTETSQVISVIQRVRSSYIKERTACMSRIGAILLEFGMSFPRGHAKMKVLFQWIADNSEPLPAMLMQELIEHHEYYLLLNERIAGQDKKLKQLVEQDVRAQLLKTIPGVGDLTAAQCLAEISDVTHFKNGRQMAAWIGLVPHQYSTGGKSTLLGISKRGNKALRTLFIHGARAMLSRPEKALAVFGEWILELRARKPFNVAVVALANKLVRIAWSVLSTKHAFEIRV

SEQ ID NO: 213645 - protein, 425 aa, unidentified
MDFIQNQKINQVTEKTLVIGIDIAKRTHYACFVDDRGRVLQKSFSVSQSRDGFELFYKRILVAMKESEKTEVIVGIEPTGHYWLNLAYFLQERGIPLVMTNPMHVKRSKELDDNLPTKHDRKDALVIARLVKDGRFSYPRILKDMEAELRVGSTFREKLVEEFGGVKNMMIRWLDRYFPEFTQVFPKFGKMALAALECTPFPSDLHQKQVDELLVLFKKVEGMKSPQKPKAKRLIEVAATSIGLTEGREMARFEIATLVSRYNQLEQEIKSITQQLVELVKTSVEYEWLTTVPGLGDTTIVDLLAEIGSFSHYDDPRQIIKLAGLTLRENSSGLHKGQKRISKRGRRKLRALLFRVMMPMIRHNEAFRKLHEYYTNRQVNPLRKKQSIVVLCGKLLKVLHGISTKHKAFDAQRMMKDIPSLAEAM

SEQ ID NO: 213646 - protein, 355 aa, unidentified
MDTTKYIGMDVHTEAISVAVRNSAGKVVMESILETKANTILEFIDGLRGNVQVTFEEGTWAAWLYDLLKPHVTTVVVCNPRKNALLKDGNKGDKIDARKLAELLRLNNLKPVYHGEHGIRTLKELSRSYLTITKDLGRVMNRLKALYRSWSIPCAGQQVYAPRHRSEWLSKITEAGVRRRAEYYYQQLDALQALRHDVRRDLLAESRKQTATKLLRQIPCIGPIRAALLIALIQTPHRFRTKRQLWNYSGLGIETRDSAQYRFVGGELQRSKRPQQLRGLNENHNHDLKNIFKSAATMATISPGPFHDFYEGLLVKGRKPTMARLTLARKIAAITLIVWKKGDSFDAKHLKPQAA

SEQ ID NO: 213647 - protein, 344 aa, unidentified
MEAHVSVVGLDIAKSVFQVHAVDSVGKPIIRRRLKREEVETFFRKLPPALVALEACPGSHFWARLLREVGHDVRLLPAQYVRPYVKTNKSDAADAEAICEAVTRPTMRFVPIKEEIQQEVLVLHRVREMLIRQRTQLINSIRGHLAEFGIIAPNRAHNIGLLTKLIEDEEFDELPAVARHALRYLVEQLREVKTKLFRIDRDLMKIVKGSDACRRLMTIPGVGVVTATALVSSMREPADFKSGRHFAAWLGLVPRQHSTGGKESLGGISKRGDGYLRRLLIHGSRSIMRWRGRSWTWLAKLRDRRPANVAVVAVANKTARIVWALLKFGGTYGHPGDGATMRAT

SEQ ID NO: 213648 - protein, 350 aa, unidentified
MTTLPLQITGGVDTHLDTHVAAALDQRGALLGVESFDTTPAGYRQLLAWLRHFGEVELVGVEGTGSYGAGLTRHLHTEAVMVVEVDRPNRQRRRRRGKSDPQDAITAARAAQSGDSCGLAKTRTGNVEAMRVLRITRASARKGRAQNLNQMRSVISTAPEPLRGELRHLNIYRLLETASAFRPGTNRDLVSLTKLALRMMARRAIALQTEIDELDAILAELVTETAPELIAQVGVGVDTASALLVAAGDNPQRLRSEATFAHLCGVAPIQASSGQHQRHRLNRGGDRQANAALWRIVVTRMVYDPNTRDYIDRRMKDGKTKKEAFRCLKRYIARDLYSCLPHQQLALDSP

SEQ ID NO: 213649 - protein, 338 aa, unidentified
MDKITTIGLDLAKIVFHAVCCDQHGKIIKKKMLRRSGLLAWFANLPPCLIGMESCASAHYWARALKAQGHRVKLIPAQHVKPYVRGNKNDYNDALAIAEAVTRPEMRFVSIKTPQQQDIQALHRLRERRLQDRTALCNQLRGLLGEYGIVFSRGVNVLRKRIPEILEDGENGLSDFFRRLLSQGYQQLTELDAHIEAYTQTLEVHSKHDDACQRLQTIPGYGPIISSAFYSAVGNGKAYRRGRDVSASLGIVPRQHSSGGKIVLMGISKRGDRYLRSLLIHGARAVVIQAANKVDALSRWINKTRAARGFNKAVVALANKLARIGWAILANNTVYQAR

SEQ ID NO: 213650 - protein, 362 aa, unidentified
MNNVTKQSRSRSTIAIIGVDLSKHSFQVHATDSKGNVLLQQTFSRQKLVEFMSTIPSSIVGIEACGSSHDWAQRIRSLGHDVRMMSPERVKPYVQRNKNDRNDAAGICEAVTRPSMKFVPIKTIEQLDMQSIHRVRSRLIAQRIQISNQLRGLLAEYGIIIPQGNKGMRSIAFLMEDATSPLTTAMRAIAHELYEEYRTLQTRRARYDALIHHHACSDERCTALQKIPGIGPLTASIFVTAMGNGHAFTKGRSCAAWLGLTPKQYASAGRSFFGKISKHGDAYIRMLLIHGGRAVVRATLRNQQRDDPYYAWVRSLVARIGVKKASVAVANKNARIAWALLAHTKAFDPQVLAVHPRLPLAA

SEQ ID NO: 213651 - protein, 388 aa, unidentified
MQNIVHRPEGRAAIRTDLGAIFVSLELSRATWLITSLSPGAGEKMSKHVVQGGDIVSLLRRLAHLQEKARGRRRKEFPLVVIQEAGLDGFWIHRVLEHEGIESHIVDSASIMTSRRRRRPKTDRIDGEALVRALLAYHRGEPRVCAMVRVPTPEAEDRRRVSRELKTLTAERVGHVNRIKGLLFAQGVSGYAPLRRDRRARLEELRTGDGRLLPYHLKRQIGRELDRLELLLEQMNTVAAERDALLVPAEEQAVPTPAKMLLGLRGIGPDFASVLWQEGLFRNFDNRRQVAAYAGLAPTPWQSGAVDHEQGVSKSGNPRLRTTMLQLAWLWLRHQPSSALSQWFHQRVGDNGRIRKVMITALARKLLVALWKYVTAGVVIEGATMKTA

SEQ ID NO: 213652 - protein, 346 aa, unidentified
MNEITLTGIDLAKNIFRINSVDKKGKRVLSKNIQRDGLLRFLSTLPQCTVAMEACASSHYWGRSIAALGHTVKLIHPHYVTPYRLGDKNDANDAAAICAAALRPDMRFVRLRSQRQSDIQSLHRVRSGLIQERTATINRVRALLAENGTVIKQGPGAVFATLPAILDDEDNELSAIMLRILRSQYEHLLHLREQVKELEGVLKNLIAEDDDCKRLMQIPGVGPLTATMLASEIGNGSGFNRGRSFAAYVGLVPKQYSSGGKNILLGISKRGNQYLRTLLTHCARAALRTIALGKMPFGGSIERWILQVMERRGKHKAIVALAAKLARIACCMLSRGTDFKSEARVY

SEQ ID NO: 213653 - protein, 317 aa, unidentified
MPRKSGIVGLDVSKRKIDACIRSVELRRSFASTPEGQAELAGWLKGERVGTAVMEASGGYERSWAEALRAVIKVRIVDPKRVRYFAKSAGRLAKNDPIDAETIAWFAETFPAEAAQPHDPVRDELDRLVTARMGLKQLEAQIGNWSEHRQPGPVAAAHAAVLKAVRAEIRKLDAMIGAKIKTNPVLARRATIIESVPGLADQTVASLVAWLPELGHVTNEAVAALVGVAPYDDDSGEHKGARHIKGGRRKLRNLLFMPVMGASTQHNPVLKTYYQRLRARGKEAKVALVACLHKLIIILNTMLARDQTWNPQARAAA

SEQ ID NO: 213654 - protein, 340 aa, unidentified
MTITTVGIDLAKNVFAVHCVDQNGKTVLVKPKVSRAALPELIASLPPCVIGMEACSGAHYWARVFRQYGHEPRLMAAKFVSPYRMAGKSGQNDAADAQAICEAVRRPHMRFVPVKDESQQAMQCLHRTRQGFIEEKTATYNRLRGLISEFGVIAPQSTDALRHIVSEQKNSLPLQVQQCVDDLLEHINRIEDNIAEYDRILSRMAKTDHRSQRLMELKGIGPTTACALVASIGNAHDFKNGRQLAAWLGLTPSQYSSGGKSKLGRITKAGDSYLRTLLVQGARSVLIGAEKRTDSFSRWVCKLVERRGYWRAVVAIAAKNARLCWASLHYGDDFRLYSAS

SEQ ID NO: 213655 - protein, 456 aa, unidentified
MAGAIAVQQHDDVVNLSTISHKKTGYRFAFGKYVIQVYLWHLFGERSSISNQPYLYKRGSTSVAHNKRENLATFHALHRSAIGIDVHSNLIVATYQNCEYGSSSLFNENRGSGASKPELDAFASWCKAKEAEVLIMESTGVYWQSLYESLENVGFTNKQIVVVNARDVKNKRGSKTDLADAIHLAEVARQETYRASFVPAKEFRQLRCLWRSFFTLKISRKRFLNIMHKQLCQVGCRASSVFSDIRGKKATKIIDCLINGEHGETLYNHIIEITSCKQDKLKATPQQIYDALQADMESEVWFAIRQNMEHIKFLDAQIAESEANLRDKLKPYTHPMKLLTSIPGIKDITAMGIICELGDDISQFTSIRRFCKWIGLAPGNNESAGKKYSGRTTPGNKYLKVLLVEAVSGIVLMKKGFLHEVLQRFKERRGTKKSNVALAHKMCRIIFSVLTHGTAY

SEQ ID NO: 213656 - protein, 419 aa, unidentified
MDVLLERCAGIDIGKEEVVACVRAPGPGGKRRKETRTFRSFTGELEAMADWFSAEGVTQVVMEATGSYWKPVWYVLEERAFGLKLVNAHHVKILPGRKSDVLDAEWLAELLEHGLLRGSFVPPLAIRELRDLTRYRKRLVQAHTSECQRIHKTLEDAGIKLDSVASDVLGGSGRAMLHALVAGERHPEVLAELAKGMLRKKIPELRQALRGRFRDHHALLIGLCLDHTAHLEAATARLDDQIDTLLAANTSEAGVPFERARDRLDTITGVGKRAAETIIAEIGVDMSRFPTAAHLASWAGMAPGNNITGGERGSGKTTNGDVWLRDILVQCAWSAARTRDTYLAAQFWRLARRIGKKKAAIAVGHSILVICWHLLTEDADYDDLGGDYFQRRANPDRQRDRAIEQLHTLGYQVTLKKPA

SEQ ID NO: 213657 - protein, 339 aa, unidentified
MKLYGGIDLHSNNSYIVLMDSGGTVVQRSRVGNDMGLVLRSLAPYREQIDSLVVESTYNWYWLVDGLKEAGYRVKLANPSAMQQYQGLKYSDDRSDARWLAEMLRLGIVPTGYIYPQAQRPLRDLVRQRSFLVRQGTGQLLHTGNILCRNQGRKSSRQQIRQMTVAAAQQLFPDRERTLAVESSLRVIEVLEQQIASIEKQVLSRIKPEAGFQNLQTVYGIGPILAMTIWLETGDIGRFHQVGDYASYCRCVASTRLSNAKKKGENNSHNGNPYLAWAYVEAATYAARFYRQATRFVERKTAQVNRTLAIQALAHKLARACDYVLRDGVVFEPTRLLGS

SEQ ID NO: 213658 - protein, 409 aa, unidentified
MIRSIGLDVHPTTVYVTVLNPSQDKLEQYEFPLETPALEAFLASLRPDDRVALEATGNTYYLYNRLKKVVDDVVVAETAKLKKLLGGAKTDRNDSGGLAYLAYIGALPTVWIPDERTQKSREFLQYRAGLVRDQTRYQNKIRSLLSKYNQKCPVSDLRSNDAQLFLTKVKLNLPWLSREKLALLLEQMQAVSESLKRADDLVEALAAEHIETDLLATIPGVDSLLALTILACVGDISRFPTPESLANYAGLVPSVHSSGGKKRHGKITRKGNKLLRWAATQAVQSLRKVPGPFRNLYRRLTRRGKHGRAVVACGRKLLVVLWHMLRTGEAFRGADPVRVERKKTRRQNRRSQARARLSDSRARHDRTLTANLAILRDLATQNKSATPIPEQLRPHFCARHADQLLRLRS

SEQ ID NO: 213659 - protein, 451 aa, unidentified
MNQGNNGLSRGDRNRNARLAALRVVLPRDHAILGIDLAQSRQAAVLADHDSRVLARWRPRCSPWKLGELLDRALRKALAAGFSGITVACEPTGHRWMVIAQLAAERGMPMVCVQPLVVARGREAEDYTRGKSDDRDAVLIARLAAQLHCYLPEQADQGWARLRHLGARRSRLIEASTACGQQLRDLLEVAWPAVLSAAADPLESATWLACLSVTLERGDGDLGAVHAMGQDAFTAAARARLGALGARRICRRIAAAVYAALAGPAGVAAQRPGALERAFSVLGDWTTVHGELAAVNARMLQALDVMGVLAVAGSIPGVSALQVAAILAETGDPSRFPTARAMVKHAGLAPCENSSGNHTGETGISRRGRPALRLAAWRAVWGALRHNPVYAARYEGLTGRTRDQLTDQQARAAIAAALIRQIHAIITRRVSWDADIAAGRRRPGQEVNAAA

SEQ ID NO: 213660 - protein, 338 aa, unidentified
MKTYAGIDLHSSNNYIGVINAKDKRLYSKRHDNRIEDVLEVLGKFKASLQGVVVESTYNWYWLVDGLMDQGYTVHLANPNAIQTYDGLKHTDDKWDSFWLAHLLRLGILAEGYIYPKHQRPIRDLLRRRLMFVSQRTSQILSLQSMITRNRGLNFSGAQIKRFRDEFIEKLFSARHLVFTAKRNIETIRFLDRIVGEIEQEVASQIKIKKEFIKLLTTPGIGNILGLTITLEVGNIGRFPKAGNYSSYCRCVESKRTSNGKKKGKNNQKNGNRYLAWAYVEAANHAIRCCPKAQKFFQRKMAKSERVLATKALANKLTKATYYIMRYQVAFNEDKLFQ

SEQ ID NO: 213661 - protein, 344 aa, unidentified
MYWIGVDHHKRNTYVTSLDREGKDYFRGNLSAKAEDLRRFFAGHPRPFTVGIEATYAWEYVADIVEGMGETICVGHPLLLKAFARRHKKNDKVDSALSAHLLWRGDFPRIAHPPQSARLQRDLYRQRMELVVRRTSAVSRAKALADRLGFQAMMDLATLKGLETFAGLPFPLRSHTVVESHVSYLTFLYHAIKRLEQAIDQTRLEAPEIGWLRTVPGIGSYLALLIASEVFDIERFGNARRLVSYAGLAPGAWASAGKVYASHLCSNVNKYLRWAFVETVIHYIKVCRWAQAKYERLKRAKGWKTARLAVARHVATVVYHLLKERRGYQEAPPEPGQSLARQRP

SEQ ID NO: 213662 - protein, 411 aa, unidentified
MRLFVGDDWAEDHHDVELMDVQGRVLARKRLPEGAAGMARLHELIGEQLGEDADDAEVIIGTETDRGPWVAALVAAGYTVYGVNPLQASRYRERHGVSGAKSDTGDAHMLADMVRTDSHQLRAVAGDSPGAGAVKVVARAHKTLIWERTRQVQRLRHQLRDYFPAALGAFEDLDAPDALELLARAPDPARAAKLTRAQISAALKRARRRDIPGKATVIMAALRGAQLGQPPAITAAYAAAVRSLIAVITTLNEQVKILQGQVGEHFGQHPDAEIYLSQPGPGPVVGARVLGEFGDDPHRYASGKARKNYAGTSPITRASGKKKVVMARFIRNDRLIDALMAQALSALGSSPGARAFYDAQRAAGVEHNAALRKLANRLVGILHGCLKTRTLYDEATAWPHREKTPQSDIAA

SEQ ID NO: 213663 - protein, 384 aa, unidentified
MKNDSILFIGLDTHKTNTEVAYVIDGRENSPQHFGKILTNKQAFIKLARQLQSKYPNATLHFVYEAGPCGYWIYRLLTSLGHCCYLVAPSMIPKKPGQRVKTDKRDALMLTQLLKNGDIDPIYVPEPEDEAVRDLSRARETAMRDLNDTKYQLHAFLLRNNIRYGGTANWSLKHMRWLTEMILPHPAQQIVLQELIQAINERMNRLQRLDNELTHQVMKWRYYPVVKAIQALRGVRLLVATGVVAELGDLSRFDHPRKLMSYVGLTPTEHSSGGARKLGGITKCGNSRARRLLVEGAHSYRYAANISKELQIRQEGLPKQVIDTAWKAQLRLCKRYQKLMQRGKHRSVVITAIAREMVAYIWSISREVVLPKIDPKLRLSRVPA

SEQ ID NO: 213664 - protein, 339 aa, unidentified
MQIHSVGIDLGKTTFHLVALGAAGKVLVKKKFTQRQLLTFTANMETSLIGLEACSGAHFLGRALRKQGHNVRLIAAQFVKPFVKSNKNDFVDAEAIAEAVERKNMRFVPIKTDDQLDLQAIHRVRDRLISRRTAVINQLRAFLLERGMVFAQTPAKLKAVMADILENAEADLTPQMRNLIDMLWGEWKLVEQQIEELNDELERISASDAGCTRIRQIPGIGPVVATAIVAAIGNGAAFRKGRDFAAWLGVVPRQYSTGGKAKLLGISKRGNVYLRKILIHGARAAVLRIKRDRAPIGAWLDALDSRAPKNVVVVAMANKLARIAWAVLSSGNDYRPVAV

SEQ ID NO: 213665 - protein, 362 aa, unidentified
MAQVRSWVGLDVHRASVVAATMDSGTGETRVRRLAGETSEVVAFCAALPGPTRVAYEAGPTGFALARALQAAGIECVIAAPGKIERPSSDRVKTDQRDAERLLRLLMIDGLHPVRVPSTREEALRDLVRAREDIRGDLMRARHRMSKLLLRHDVRFDGTAAAWTTHHRAWLEKVDLGERGAQVTLHDYQGAIDALLIRRDALETAIDELIPDSPWAQSIARLRCMRGIDTLTAVGLCAEIGDWTRFPRATHVMSYLGLVPSEHSTGQTRRQGAITKTGSGHGRRLLVEAAWHYRRPPRKGDALKRRQAGQPPHVLAISWQAQQRLHRTWQRLDTERGKRRTVVAVAVARELAGFCWAAANAD

SEQ ID NO: 213666 - protein, 328 aa, unidentified
MLEENKGKEDNVLEDVPVFIGIDVSKAQLDICVRPLARRESLANDEVGVRTLVKEVRELQPALIVLEATGGVERQVVRALASEELPVVVVNPRQVRDFAKATGRLAKTDRIDAEVLARFGEAVRPELRPLPDVCSQELRALVVRRRQITEMIVAERNRLSGASKRVRKRIDAHIRWLEAELDRADKDLDQNIAQSPIWREKEDLLKSVPGIGPVISRTLLAELPELGRFNRKQIAALVGVAPLNWDSGIFRGRRAIWGGRSAVRAALYMAALVASRRNAVIQDFYRRLRHTGKAPKVALVACMRKLLTILNAMIKHKAHWSLKTVQAT

SEQ ID NO: 213667 - protein, 401 aa, unidentified
MKRLSGGIDVGSASHHITILDEEDHILFNQKVSHKLDEFTESIKQFKKIEEKGKGKISFALEGKNGYSSPLDRLLLDQGFTLYNIDNLKLKRFREAFAGEWKDDRRDALMLSKMLKLKEHINGKKEKVFIKIEKPSLITENLKLLSRHQQTLIEERIRLTNRLGKKLLEVCPEILKLGKVKYKKIITILVKYPDFSKYKRITFKSLLKIKGIGEKDAPFLLKKLNNIVYIPGLTDIYKTIILSYTKRILGLQKEIKGIDKKLDEIGEKNQSVKHLKTIPGVATKLASRLIGEIGNIKRFPSEKQLAIYCGIACVNHDSGKTTKAKAVYKANKICKQTLISMAGGSIRFIPQCKCYYLKKRTEGKSHNHTLRCLARQLIKVIYKILTEDRDYIIKKELKKVA

SEQ ID NO: 213668 - protein, 353 aa, unidentified
MPVYVGVDFHVKTQTVCWMDTADGAMHQRTLDHRREDVAAFYRQWTPPVTVGVEASGYAQWFHRLVQERGHRLLVGDAHAIRQFARRRQKNDRRDAELILDLLLHGDFPAVHQPPPASREALDLLHHRQRLVRMRTMLKNSLQAVALNHRVARGPSLFTARGRAALSALPLSVAEDWQRHDGFDLLDDLDRRIAALNEELERRAATDPRVERLRTHPGVGRLTALAVVHTLEPAARFTYSRQVAAYCGLDPQERSSGETVRYAGISKQGNRLLRYLLVEAAWSTIRPGQDAELRRFYFHLLTHKPAGVAIVAVARKLGLRLYRMLREGIDYDEFRRRGRDAWCARGMTETPRV

SEQ ID NO: 213669 - protein, 408 aa, unidentified
MNPLYVGIDVSSKSNVVYFMLPDGSKHCNFSVANSHTGSSQLVKRILSAMTSCSLDTVLIGLEATSVYGDNLVYFLREDAVLSRFNSKIHVLNPKQVSKFKEAYNDLPKNDLIDSFVIADCLRFGRINKEVYIGDYRYKALQNLTRARYFAVSNLIKEKQRFMNILFKKYSTMTQEKVFSDTFSTTALAVYDEFESAEALADMDLHELTAFIMEKGKNRFPNPNAVAKAIQKAARSSYRLPKTVNDSVNQVLSISITSIKALEAQIKEFDKAIATQMELLPNVLISIPGIGPVFSAGIMAEIGDINRFHNQAQLAKYAGLAWKQHQSGDFEAQTTRLINSGNRFLKYYLCEAAFSLVRCDKEYSDFYHLKYKEVNRYQHKRALALTARKFVRLVFRLLKDNRLYTSAE

SEQ ID NO: 213670 - protein, 416 aa, unidentified
MDAIVERCAGLDVHLDTVVACVSYGKLDIKPKKEVKTFSTTTKGLLELLDFINQKECTHVAMESTGIYWKPVWNILESGAFDLIVANAKKIKNVPGRKTDVKDAEWIASLLRCGLIEKSFVPPERIRDLRDLTRLRKELLGEVNRNKNRIHKVLQDANIKISSVLSDVFGETGKSILNQIIGNQCITEEFIYSLYEGRGKSKLKSTLMEMYEALNGKIRGHHVILLGMHNSNIVFLEKQINELEKEIDILLQKERDSLELLETIPGISKISASSIIAEIGTSMDVFKTEKHISSWAGLCPKNNESAGKKKRSGIKSWNNWLRSMLCECAWSATKKKDSRFKNKYWSMVPRMGRKKALIAIANMMLRLIYHLLKTKSTYKELEIQYFIDKDKRREDRIIKELKSKGYLVEKDSLQMA

SEQ ID NO: 213671 - protein, 384 aa, unidentified
MSNKRSTTRALVAVDEVGNVFGADPHKRTVTASVLDERGGVLGTETFRVSGDGHRAMEAWALRFGPITRWGIEGAGGLGRHTAMYLIGQGHDVRDVCPTRTAEQSRRRRDGKTDALDSVRVARETQADPALPTAFKRAAGDAGPVETHELMSLWHKARRSILKSRQHLLNEAEHLLGELPEAIRAALPDTAEVRPRLRALANRDTCDWDPATALRLRLLDTHREAVAQLDAQDREAAKALEKLARQAGSTLNELCGIAERIEAELLVEVGDPRRFTGTGGFARFNGSAPLPASSAEGDRAPVRHRLNRGGNRRVNASLHRIAVTQLRCEPRARKVYDDARRRGHTKKEAMRILKRHLSDVVYRRMMSDLRAQPAHPSTPHPRIG

SEQ ID NO: 213672 - protein, 337 aa, unidentified
MEQYVGLDVSMRETSIAVRQNGKRVWRGKCPSDPKALADVIRQRAPNAVRIVFETGPLSTWLYHALKAEALPAVCIDARHAKAALDMAPNKTDANDADGLAQIAEIGFYREVRVKGYGPMLMRTLVGARSQLLRISIQLSNQIRGIMKTFGLIVPKGAGRIFESNARALLKTNGAVARIVLPLLESWGVIRARAAELDRQLIAVARTGPSYRLLMTIPGVGAITAVSFVAAIGVPENFKRSRAVGAWLGLTTRRYQSGETDYDGHISRRGDRHLRALVYEAAVAVLTRARTDCALRSWGLKLKAKVGFKRAAVAVARKLSVIMHTMLKTRAAFAAAA

SEQ ID NO: 213673 - protein, 365 aa, unidentified
MHKLNSAATLIQRTTTEAPRDHMYYIGLDVHKRTISYCVKDAAGHVHQEGKIGSTRCELDAWIKTLPEPRMIAMEATIFTGWIYDHLLPHAEKVKVAHPLMLRAIAAAKKKNDKIDAAKIADCLRCDFLPECHMAPTAIRDRRRMLRYRNLLVKQMVQMKNRVSGLLLETGVSYNKRRLHKVGYFADLMATNEEVEESIRPLLKISREHIVRAQRLDYALVSSLERDPLLAERLKRLRTVPGVGPITALTWALEIGDFTRFRSVKQAISYCGLCGDERSSADKVMRMPLSKQRNKHIQRVLIEAAKLAPRECHELAMLRERELQKGNPNRATLAVARKMVSYMLAVERRKQDFVPAEEFKCRAAA

SEQ ID NO: 213674 - protein, 346 aa, unidentified
MEHYVGIDVSLELLSVCVVDGRGKIVKEAKVASEPEALVYFLKELGFPVNRIGFEAGPLSQWLHAGLTQAGFEAVLLETRHVKAALSAMPVKTDRKDAFGLAQLLRMGWFQQVHAKSIGSQEIRALLVARKQLLGRLLDVELSIRGILRGFGLKVGQVTRKTFEARIRELVTGHTTLERIAEAMLSARATLKAQYEKLHKAVLAIVRKDAVCRRLITVPGVGPVVAVTFKSAVDDPSRIAKSKAVGALFGLTPRKYQSGEKDVTGGITRTGDEMVRTALYEAANVLLSRITRFSKLKRWGMDVAKRRGSKRAKVALARKIGVILHRMWIDGTTYRWAEAKPIAAQA

SEQ ID NO: 213675 - protein, 438 aa, unidentified
MRAKCNDDLSTVNFSTIGLDVHKNRLVACAVHVQHDAKGREVHEKEYFESTGTYSGRQRLTEWCSSQNADLILMESTGIFWKAPFRDLEKADLHPVLINPRIFNRGSDKRKTDKSDATWLANLARLGLYRASFIPAEPYRSLRLVQSQIKSLVAERQRLKNRLVKVLDDSGFRFTVAFADIGGASSQSLIAGILEDAPREELALMIDPLCKKSIEEILDAVSGELSQINKDIVQSILRLIETHTKEIETLEQTVIRELKKCEKVKQNIRLMTTIPGVSQKSAQLLMSMIGPDFVENFSSPHAFARWLGVCPGNNESAGQIKSGRTPHGQRLIKKVLTECAQAACHTKGSHLAVLFGGWKHKGFCKAVMAVAHKLALLIHWVVVNQKPYIDKEFDYTGVFKQNGQRRPRWIRALRRYGLMTLADVEKEKAARGWIIAKA

SEQ ID NO: 213676 - protein, 409 aa, unidentified
MRYFVGLDVSSRDMKVCVLDQEGGQLAAFTVTNDVPGATVLKERLMEIIADTEVDILKIGLESTSVYSFHPSMFLHYDPDLQAYGAQVFVINPKQIANFKKSYADMNKTDEIDAFVIADYMRFGRNQMSVVKESQYVALQQLTRTRYHLIQAMTKEKQHFLQHLSFKCNTFSQEVDSSVFGHAMMELFLEKYSLEELAQLPLEELSAFLQEKGKNRFPDPEAVATSIQRAVRSSYRLDKVVENSLDVLLGTSIELIRSFQRQIKEIDKTITRLMDGVTQTLASVPGIGPVFTAGIIAEIGQVERFPDETKIAKFAGLYWRKHQSGRFTAEDTSLTRHGNQYLRYYLVEAANSVRKQVPEYQDFYAKKYQEVPNHQHKRALVLTARKLVRLVDALLRTRQLFSPERGVKL

SEQ ID NO: 213677 - protein, 354 aa, unidentified
MIIIGADYHPAFQQIAFVDTETGELQERRLEQPEGAEKFCRELAAQGKRVRVGMEASGHARWFERLLAELNIELWIGDAAEIRRKRERKQKTDRQDAQHILRLLLKDDFPRIWVPSWENRDLRQLLWHRHRMVQARTRMMNQLQAVALNEGLRCKKKLWREAGRKQLEAFRLAPWASRRRQDLLELLDRLNPTIAALSQAIEQEVEKCPEAQRLMTHPGVGPLTALAFVLIIERADRFQCGKQIASYLGLVPLEDSSGNRRRLGHITKQGNSLLRFLLVEAGQVTVRSLPEWRSKYVHLTMRRGRKIAKVAMARKLAVRLYWMMRQGWDYEQLKKFGSHSGQPGHRHGVKSNIE

SEQ ID NO: 213678 - protein, 375 aa, unidentified
MSEVNAFIGLDVHKDTISVAVAEAGRGGEVRHLGTIENTPAAIIKLARRLKQKHGSVEFVYEAGPCGYVIYRQLTAAGFICHVCAPSHTPIKPGERIKNDTRDAVALARLFRADELTLVWVPNEIDEAMRDLVRARQSATNDVRRLRTRIQLFLLRHDLRYATKPWSYRHRVWLTDRRFPHPAQQIAFQSYLNALEQAESRKADLERQIAAVTSQWSLRPLVQALQGLRGVGLVIAATIVAEVGDFNRFASPRQLMAYLGLVPGARSSGRKIRPGAITKAGNTAARSLLFEAAWSYRSTPKVGQWMARYRPDEVSQAVKDLAWKAQLRLHGRYKKLLGRGKRPTVAITAVSRELVGFMWAIAKLITPPREGAPAA

SEQ ID NO: 213679 - protein, 392 aa, unidentified
MIIVGIDVASEKHDCFMLQKETGLVFRASSVTIGNTEEGYKKLHADIQSFCGATGDSDVRIGLESTGIYHTNIITFLIAQNYKVMMINPILTNMARKAAKVHSAKNDNLDAKTICRYLVDHPDEFSPYTPTLYHTSVLKSIARKRYFITEDLRKAKMAVNNIVQLIFPEFKKLFSNIYGESALAILKEYPSVKKLAKARVSKLAALIHGRCKCTAEQLIDAAKHSIGLSDDWYAFELEDAIAELEHIQKRIAAYDAQIKRYVDEICPNILTIPGVGYVTAGLILGEIGDISRFRSPDALVSFCGLDLTVYQSGKYKAIHVSPSKKGSVYLRYALFQVSRVIWQCNSTFRDYYGKKQAEGKHHYVILGHIQKKLARVIFSVLKNNSAFQERPA

SEQ ID NO: 213680 - protein, 359 aa, unidentified
MQRNKISFKGQKIFIGIDVHKKNWDVAIAPEIGIVKRHPQKASAKELFDFLKKHYPDGDYLAVYESGFSGYSTYYALKEAGIECIVIHAADVPTTQYEEVMKTDRVDSVKLVRSLKAGLLKGIYIREKENIDDRSVVRIRKTIQKQLSGYKARVKHMLHCNGVSLPERFEKPGSHWSKAFIKWLKEDVRLLSSTRNSLDLLIRQVETIRMTLLESTKMMRNLSQTERYKRKFDLLMTVPGIGVAVSMCILTEVYDVKRFHNENQFAAYLGLIPTSHCSGDKVAHGEMTFRGNKQLGPMIIEAAWITICKDAGLGSLYLRYKERMKPQEAIVRIARKLSNIIYAILKDEKEYVPYHQTGK

SEQ ID NO: 213681 - protein, 322 aa, unidentified
MSTSVLGIDIAKQRFEAALLVNSKIKNKSFKNTTEGFESLSLWLDKQGSQKVHACLEATGNYGEDLAIYLHEAGHTVSIVNPARIKGFAQSELIRTKTDKIDAGIIARFCLAMKPDPWIPPSAEIRVLRALVRRADSLIDMRSQEKNRLSTAHGSVIHLIVEHIEYLDEEIEKIRREIAGLIDRHPTLRQKKELLASIPGIGKVTIAAILAELDDMGKFHHVRELVAFIGLAPKETLSGSSIKGKPRLCKIGHVRLRKALYMPALVSIQCNPVMIAFYNRLKEKGKNGKVIVCAIMRKLVHIIFGILKSGKKYDPNYKPAFA

SEQ ID NO: 213682 - protein, 372 aa, unidentified
MKKKRDREGMVTAALDLGDSESLATILSPDGDVVDSFSMSMNDDGYSLFASKVPKDARIAFEATSMAYPVSRRLTALGYSDITVAHSKELAWIVKSKKKNDRIDSLKIARLHMAHMLPESHLLSRQEQVKRDLLIQRVTLGKEIGKMKLKLIAYLKREDVYLSLPESSDGFSRERREAIRSMRFGDDDGRDLVIRTMMDRLEFLERQCAPLEEKVRTIVKDSEDIRRLMSIKGVDFYLASLASSYIGDVNRFPDDDHLASFLGIVPESWDSANVKRRGHMSKEGPSTARWAFSVMTDTVMRYNPRLKTYYLSVKKRKNSGSLAHVATMRKLVRMVDHMLRYKENWRWEDEASTTKKLANLDREAEAKTMGGD

SEQ ID NO: 213683 - protein, 406 aa, unidentified
MLFVGDDWAEDHHDVEIQDETGRRLAKARLPEGISGMARLHGLVGRFLPEDGDAAGVKIGIETDRGPWVAALVASGYQVYAINALQSARARQSQGVSGAKSDAGDAHVLADLVRTHSHQLPTVAGDSEHAGAVKVLTRMHQTLIWDRTRQVLRLRSSLREFFPAALEAYEDLAFPDVLELLTKAPEPNSAARLTRAQITAALTRAHRRDREAKTTAIMAALAAEHLTQPPLIAAAYGATVRALAALIRTSNEQITALQGQVEACFGQHPDAEIYLSQPGLGLVLGARVLAEFGDDPTRYDGARARKNYAGTSPITRASGRKKVVLARYVRNNRLADALHQQAFSALSGSPGARAYYDALRDRDISYNAALRQLGNRLVGILHGCIKTHTPYDEATAWNQHTQQAAA

SEQ ID NO: 213684 - protein, 378 aa, unidentified
MNRIIKIGMDVHTTNYTLCIFEPSFEHNGTVHCITQVKPEIKKIIHVIETFKKKHENEELNIVCGYEAGCLGYSLYHELKEKGVECVILAPTTMKTEKGGRKLKNDYRDAKMIAECLAYGGYSAVHVPTELDNSVKEFIRMRDDIKENLKSIKQQIIAFLTRNGKQFEGKSYWTRKHIDWINTVSFSEPLLQDTLKEYMIEYNHLCDRVETLDKQIEEVSLKEEYVEKVQQLQCLIGIKTHTALSLIVETSDFNRFKKGNMYSAYLGLIPGDDSSGGHVNKLGITKAGNNHLRKLLVEAAQGYTRGKVGFKSKDLKARQEKCSSEVVAYADKANERLRRKYYRMILRGKKYNVAKTAIARELACFIWGIMTDHIDLCS

SEQ ID NO: 213685 - protein, 335 aa, unidentified
MEHYIGIAVSKATLDLALINASGQLLAMVQTENSTKGLVRSWRRWSKEFDLVKDKCLICLEPTAHYSDQPLIALVELEIPTWLANASDMVRSLGMRRGKNDQLDAQRIADYARRFHDKARRFTRDHLRLRTLKKLLSRRRLLVDRRKAHQVLLKDYNPLMPAELRRTMDRLDKAMLRAYDKAIVEVEAMILVEIQRDPELQRQYELVLSVESVGPILAAHLLALTDGFARFGSARQLACHAGVAPYEFRSGSSIRGKTRVSSFAHRQLKTLLHMSAVSSISRSGELRAFYDRKVAEGKGAMSVLNAIRNKIIHRVYAVLARGTPYTKKTLANAIE

SEQ ID NO: 213686 - protein, 391 aa, unidentified
MESAQMLQPVFVPREFEVFAGLDVDKTRIAVTFTDHNRLLKSLQMPYSSQHLLNYTRKHFADRRVAFVYEAGPTGFGLHDDLLAAGHRCLVVAPSMVPRAPGQRVKTNRIDSRKLSEGLRGGQLNSIHVPSLAYRHLRHLVQLRDSHVRQMMAAKYRIKALLLYEGIPFPEAPASNQWSARVLQELGTLPCTSTVGFKLNSLVASLYFHKLEAAATQKQIRRFCQQDPELSRSIRYLTTIPGIGWIVASHLVARLGDWRLIRNVRQIASFLGLVSWEHSTGDQVQRGSITRTGDVRLRNKLVETAWTAVRKDPELEQFYRRIYQRHPRPIAARKAIVAVARKLTTRIYSVLKQQRPFRLKTVIAQAPLTPEETACPRGRLDQPQNEGTHGS

SEQ ID NO: 213687 - protein, 340 aa, unidentified
MRVLYAGCDLHGNNNLIGIIDGEGKRVFKKRLSNDLSLVQDTLKPFQEELVGIAVESTYNWYWLVDGLMETGYQVHLANPSAIQQYSGLKHVDDQHDAFWLAEMLRLGILPEGYIYPKQERPMRDLLRKRGHLVRLRTSLVNSLQNILSRNLGRKVNVNDMKVLKEDRISPLLEMNEDLALAGRVSKEAIDHLTQQIYRIEWAVQKKITLKEEYRYLLTLPGVGKILSLTIMLETGPINRFETVGDYVSYCRKVPSQWTSNGKRKGSGNTKNGNKYLAWAYSEASEFARRLYPEPRAYYNRKMQKANAAVAHSALANKLSRAGYYVMRDQVPFRPEKLFG

SEQ ID NO: 213688 - protein, 338 aa, unidentified
MAIVFVGIDLAKNVFAVHGVDEAGKAELVRPAVPRGRLLELVAMLPPCTIGMEACSGAHHWARQMQAHGHTVRLMAPKFVAPYRLSGKRGKNDAADAAAICEAVQRPNMRFVPPKSVEQQARLMVHRARQGFVEARTATLNRIRGLLSELGIVLPLKASTVRSQAAERLEELPGWANTVIGDLLGEVKRLDQRIEEYDRHITEMARQDERVARLMRLSGIGPTTATALIATIGNGHEFRNGRQLSAWLGLVPGQYSSGGKVRLGRITKAGDAYLRSLLVLGARAMLNASVGKTDSLSRWAQALVQRRGYWKAVVAIAAKNARMAWAVLSRGERFELPA

SEQ ID NO: 213689 - protein, 354 aa, unidentified
MNYVGVDIHKRYSVLVAVDERGRELVRGRISGNSVHAFAQFFETLQGPGKVVLEACWNWGRIYDVLSEIEQVEEVVLAHPLKTRLIAEAQIKTDSLDALALATLLRGNLIARAHVPSKATRARKELLRQRLYWARLRTRVRNRVHAVLDRQRELEMPQCSDLFGRKGLNALSKLRLAEPDAILLGEELDLLKLIDSQIKAQEGRIVAFNANEQATQYLQSLPGMGKILAAVAAAEIDAIERFDGAAKLCAYAGLVPTTYGSGGKVHQGHLLKSRNKWLQWAFIEAAWVAVGCSSYFGGIYRYHRARGKKANIAITIVARRMCRIAFTLLKERRNFQEQHRTFPGRSAVRLTAAA

SEQ ID NO: 213690 - protein, 397 aa, unidentified
MYIVGIDIAKRKHEAAVIDGEGTVIIKPFSFTNNCSGYNRLLAMLAKAKLPLDEVSFAMEATGHYWLALFTRLQKEGFRVQVINPVQTNSIRSFYIRQAKTDPRDALLIAEVIRFGHFSESTLHPENIYELRELCRGRHAIVSMQADVKRKVVALLDQVFPEYETAFTNMFSDTSMAILQNCPTPKELSEMPLEELCHLIEVSSHKRFRMAKAQELQALARNSFGFAMAGDVFSTMIRLYAKHLVFLKQQVQEMDRKIAEIMKTLDTPITTITGIGPTLGAYILSEIGDISRFSSAAKLAAYAGIDPTMRQSGEYNGVRNRMSKRGSPYLRHAIWLAASSAVLHDPALKLYFQKKRDEGKPYMASVGHACRKMVSIIYAVMRDNKAYTPYIPNEISA

SEQ ID NO: 213691 - protein, 338 aa, unidentified
MDHYAGIDVSLEWASVCVVDGSGKIVAEDKVASEPEALISWLGSRTVSLARVGLEAGPLSQWLFAAMRQAGLGVELLETRHVRNAFKAMPVKTDRKDAHGIAQLMRLGWFRPVHCKSMAAQETRAMLSARKLVQAKLHDVEMSLRGILRGFGLKVGKTTPRQFEGRIKELVAGHASLEVVATALLAVRAVLLREFNGFEKRVRSMARSDARARLLTSIPGVGAIVALTVASAIDDPARFKSSKSVGAHFGMTPKKYQSGETDISGRISKIGDGGVRTAAYESAHIILTKPLKGCARLKSWGMKLARRAGMKKAKVALARKLTVIMHRMLADGTTFRSA

SEQ ID NO: 213692 - protein, 338 aa, unidentified
MPLYAAIDLHSNNSVLCVLDETDRIVFSKRLPNDLAKIEQALRGCSGEIQGVAIESTYNWYWLVDGLQDAGFTVHLVNTCAVKQYDGLKHTGDFDDARHLAHLLRLGILPTGHIYPRQARALRDLLRKRGQLVRQRTSQVLSMQNLIARNLGAHARGNDIKRWEDADIVAMPLLPEQRLALMANRAVMACLDEQVCRLESAILQQARDSETFQGLNTVPGIGKTLALTITLEAGDMSRFASAGNFASYARTVDSRRESNGKKKGDGNAKCGNKHLAWAFIEAAHFAVRYDETIRRWFQKKCAKTLQVVAIKAVAHKLARACFHVMKTGTPFDAARAFG

SEQ ID NO: 213693 - protein, 421 aa, unidentified
MERLRAKRVRAVKEGTLIATVDIGVSYNTGYCTTLDGRSTRPFRFDNTKEGFDKFWCMTILSKKRFGCDEVLVGYESTGPYAEPLVHYLTGKQVKIVQVNPMHTKKMKEVNDNSPLKTDDKDPRVIADIMRLGRALSIVVPQGDAAYLRRLNNARERHVGEQTALLNQLQQLVFLIFPEFKTVFKDIKRKTAQYILKRYTTPDRIGTLSKEALGEEMRKRSMGKFSVKDAESLIDLARETVGIKEGLSGILLDIKHILMQLEAEGRFISEIEAEMGVTLERIPCSARLLSIKGLGTVSVAGLIGEVGDFSKFRTQSEIMKLAGLDLYEISSGKRKGQRRISKRGRSLLRKILFYAAIQMIRKNGIMYDYYARLTGRGMERMRALIAVSRKLLRIIHALVRDNRDYVEQYEVSERRLMKKAA

SEQ ID NO: 213694 - protein, 353 aa, unidentified
MTNTKYIGMEVHKESISIAVRNVAGKIVMQCVIETKANAILDFIHGLRGELQVTFEEGTWATWLYDLLKPHVTKLVVCDPRKNSRQGNKNDQIDARELADRLYMNKLSSVYHGGAGVRTLKELARSYLTISKDLARVMSRVKAIYRSWGIPCAGKQVYALRHRAEWLAKITEVGVLRRAEFYYQQLDALRPLRHEVRRELLAESKKHPATKLLCQIPSIGPIRAALLIALIQTPHRFRTKRPFWKYSGFAIEMHSSADYRSVKGQLERTQKQVSVRGLNRDCNHDLKNLFKSAATIASVKPGRFQEFYAALVAKGMKPEMARLTLARKIATIVLIVWKKGVSFDAQHLKPQTV

SEQ ID NO: 213695 - protein, 434 aa, unidentified
MDIVHPRVAGIDVHKRIVWVAVRLPGGTPGERKVMVRSFKTFWRSLQKMTGWLAELGVSDAAMESTGVYWWPVYHALAQAGTIEVCVCNAAHMRNVPGRKTDIRDCQWIAELHEHGLLRPSFIPGQQVAALRARTRYRKKLIEHRASEGQRLSKVLEDAGIKIDSVASELLGVSGRDMIEALIGGERDPSRLAGLARGRLRAKLDDLQMACDGRFTAGHAQLCRIHLDAYDLLTGQIATLDQLVEQAAEPFAAVIARLVTIPGIGPRLAQVIVAETGGDMARFATSARLAAWAGLAPGDNESAGKRKRAAARKGNPHLRAAMVEAAWAASRTASRPGARFRRLARRFGRLNIKKAAVAVAHTLLCVAWAVMKDDSDYAEAGADYYDLRDQRNHEHLIRHHQQALARLGCQVTLIPPGDGQAAGTGSDSPQYPAA

SEQ ID NO: 213696 - protein, 343 aa, unidentified
MGEVSTIGLDIAKSVFQIHGVDAGGAVVMRKRVTRAKLLEFFATLPGCLVGIEACPTAHYWGRRLQALGHTVKLMPPNYVKAYLKRSKNDANDAAAICEAVTRPSMRFVATKSEEQQCGLMLHRSRQLLVCQRTMLSNAIRGHMAELGVVSAKGRNGTAELLKIIADEHDDRIPSAARFSLDVLARQYAVVRAQIVAIEKRIHAWHRSSEESRRLEEIPGVGPIVATALVAEVGDWKEFTSGRSLAAWIGLVPRQHSTGGKERLGRISKQGNRHLRWLLVAGAMAVIRYARQHGTKRPWLARLIDRRPIKVAAVALANKIARMAWAMMVRGERFKEPKLLPAA

SEQ ID NO: 213697 - protein, 349 aa, unidentified
MNEPYAGRQIVGFDLHRRRSVLVRMTEAGERLETVRISNDPEYLREVMTRAGEAPEVVLEACYGWYWAADTLAELGATVHLAHPLGVKMFSYRRLKNDERDAADLADLLRMGRLPEAWIAPPATRELRGWVRHRAKLVGLRSNLKCQVHGILANAGITVPMSDLFGASGQRLLATADLATESRSRIDSLQRMITALDFEVELFAKLVAGRLRTHPGYQAIQLIPGVGPILAAVFVAEIGDITRFRRPEQLASWAGLTPKHHESDTTVHRGRITKQGSRLVRWAAIEAVQRLPGHTRIGQVRDRVAARRGRNIGVVAAARELTELVFYGLRDHHVHALAVHSPARTPLPA

SEQ ID NO: 213698 - protein, 337 aa, unidentified
MVDKVTKAAVVGGVDTHKDLHVAAVVDQNNKVLGTQYFSTTRQGYRQMLAWMTSFGTLKRIGVECTGTYGSGLLRYFQNAGLEVLEVTAPDRMERRKRGKSDTIDAECAAHAAFSGIRTVTPKTRDGMIESLRVLKTCRKTAISARRVALQIIHSNIISAPDELREQLRNMTRMQLIRTLGSWRPDASEYRNVTNVYRISLKSLARRYLELHDEIADLDVMIAAIVDELAPELIKRNAIGYESASQLLITAGDNPQRLRSESGFAALCGVSPVPVSSGKTNRYRLNRGGDRAANSALHIIAIGRLRTDAKTKEYVARRVAEGHTKMEAIRCLKRYAV

SEQ ID NO: 213699 - protein, 337 aa, unidentified
MTQVHILAIDLAKRSFQVCGTDRGGAVLFNRLLSRARLQQLLNEQSPCIVAMEACATSHFWGRFAQGCGHNVRLIPPIYVKPFVKRQKNDAADAAAIAEAAQRPNMHYVEVKSAEHQARAVAFRTHQCFVRQRTQLINALRGHLGEFGIVVAQGPANLTAVIAILADETNDLPAGVREIAQLYLDQIRLLTEKIDGLMLKLREATKSNEDMRRLCTVPGVGPVTAGAILAFAPDLRAFRSGRNFAAWLGLVPRQHSTGGKTRLGGVSKMGQTDIRKLLIVGAMSLIRWIVRKGVLPDNWLGSILSRKPRMVAAVALANKMARIIWAMMTREQNYRMA

SEQ ID NO: 213700 - protein, 354 aa, unidentified
MGEVITVGLDLAKSVFQVHGVDGTGAVMVRRQLRRGEVVKFFAGLAPCLVAVEACGSAHYWARQVGALGHEVRLLPPAHVKPYVKRGRKNDAADAAALAEAVTRPQMRPVPVKSAEAQAMLVLHRTRDLLVRQRTMLICALRSHLGEFGIVAAQGKGGFARLRESLDGMAGETVPEPALAALRLIAAQIDDADAKVEAIEMEIVARHRASAASRRLVTIPGIGPVIASALAAAVPDASAFSSGRQFAAWLGLVPGQNSTGGKERLGRITKTGDRYLRRLLVIGATGLIRYKRKNVPGGLAWLTGLLARKPVRLVTVALANKMARIAWAILARGGCARRLIAAVGRQERELRLRG

SEQ ID NO: 213701 - protein, 356 aa, unidentified
MSHDVKYIGMDVHKEAIVIAVRNESGKVVMESVIETKASSILEFLHGLRGELHVTWEEGTWAAWLYDLLQPQVQHIVVCNPRRNALLKEGSKSDKVDAQKLADLLRTGMLRPVYHGENGLRTLRELGRSYQTISKDLARVMNRLKALYRGWGIPCAGTRVYAARAREEWLSKIPQAGVHRRAELLYQQLDGLQALRREVRPEFLAESRKHKAAKLLRQIPYIGPIRAARLIGLMQTPHRFRSKRQLWTYSGLGIETHDSAQYRFVSGQVQRSRKPQQVRGLNRNHNHEMKEIFKSAATRASCGTGPFHDFYTGLLAKGMKPEMARLTLARKIAAITLTLWKKEERFDVEQLKTQAA

SEQ ID NO: 213702 - protein, 347 aa, unidentified
MLADELDYVLGVDTHRDEHVAAVLTAPAGVVVAGKAARANARGYCELLRLAERYAAGRRAWAIEGTGSYGAGLARYLAERGEIVLEVSRTPRTQRRLRGKDDALDAVLTARAALAAETAALPRAGERREALRLLLVARRSAVDVRREALTQLRAVIVTAPDRLRNELRGLSTGKLLDRCSRLRRTDSTADELATRLVLRSLARRIQAATLEADELERELLIHVRALAPTLLDEPGVGPVVAAQLIVAWSHPGRLRSEACFARLAGVAPVPASSGQTQRHRLSRGGDRQLNRALHTIALHRRQHDAATRDYIARRIADGKSKRDATRLLKRYLARHLYRLLEQQPQMT

SEQ ID NO: 213703 - protein, 317 aa, unidentified
MSKSSTVVAGIDVAKAHLDIAIHGCKQSWQVANMAEGFGKLVRLMRQHQVSRIGLEATGGYEHGVVEHLRAAGFSVVVLQPKQVRAYAEINLRRAKTDRIDAALIAAFVSEHGAVRETPDPRLTALAERLTYLEQIEEDMARIKVRLEHVRDPDLRHSWKDDLARLKQRRATIIARLLTLLRHHQDLASRLDLLLSIEGIGPRTAIALLIRMPELGRISRGQAAALAGLAPFNNDSGKRSRPRSIAGGRTRLRTSIYAAALPAAFRWNAALVRLYNRLKTAGKPHKLALVACARKLLTFANTVLARGTPWIKAPAPV

SEQ ID NO: 213704 - protein, 348 aa, unidentified
MNHYAGIDVSLECSSVCVVDGSGKILREAKIASDPVALLAWFGSLGLILDRIGLEAGPLSQWLCLAMREAGLAVELLETRHVRDAFKAMSIKTDRNDARNIAQLMRLGWFRPVHCKSIEAQETRAVLSARKLLQSKLLDLQNSLRGLLRGFGLKVGKTTERGFARRVEELVAGHPGLEAVARGLLAAHAVLLREFNVLDKQVSKMARQHVAAKLLMTTPAVGPVVSLIYASAIDDPQRFKSSKMVGPHFGLTPKKYQSGEIDVNGRISKVGDASVREALYQAAHIMLTKPVKNCTGLKSWAMRIAKRAGMRKAKVALARRLAVIMHRMLADGLPFNPNGRAAAMAAAA

SEQ ID NO: 213705 - protein, 402 aa, unidentified
MAGSPTRFFGLDIHKEYFVAVGVNAQREVVFGPQRVSNYQLDDWVSRVLTTQDSVVLEMTTNTYLFYDTLLPQVHSVIAVHPPSVTLVTNAQVKTDKKAALTLAQLHAAGMLTGVWIPPHEVRDLRALIARREKMVRLSTMAKNRLHSILHRNHLTLPEKPFSPEQRTWWESLPLSATEQFLVRSDLDTLAFAQKQVEQAEECLKKESAQDERIPLLVQLPGVAMLTAITILAAIGDITRFPTAKKLVGYTGLGTRVHDSGMTHNTGRITKAGRKDLRRAMVNAANHAIEHHPHWKKEFERLEPHLGRSKAVVAIARKLLVAVWHVLSEKTADRFADPDNVARSFFAHAYRVGVRNLPEGQSALAFTREQLDRLGIGKGLQEIPWGSKRHKLPPSKLLLEKE

SEQ ID NO: 213706 - protein, 395 aa, unidentified
MFIVGIDVAKRSHEVCMITSDGQTVQRPFSIRNNCTGYNLMLEKIRKHTNIKSQIVFAMESTAHYWLALFTRLRKDGYHVILLNPIQTSAMRDMFIRKIKTDAKDSFIIAELIRFGRYAESNVAQDRLLALKELCRNRFYLVDMAGDLKRKLIALIDRVFPEYEAQFDTIFCKSSVALLKKYPTPQKLSNAHLDKLTELLWNSSNGHFGERKARELRELARNSFGVEDCDGAYSTLILLMLDQIQSLSGKADALEKEIFRLFQSFDTTVTTIPGVGPIIGAVILSEVGDISRFSSADKLAAYIGVDPSVNQSGEFQAAHAHMSKRGSPYLRRCIWMASQVAVQRDPMFRAYYEKKAAEGLKYMTIIGHVTRKMTAVVFAILRDHKVYEPVLPTAA

SEQ ID NO: 213707 - protein, 403 aa, unidentified
MNAVGIDVSKGKSMVAIIRPLGEIVAAPFGIKHSASDIKSLVNLIHSVEGESRIVMEHTGRYYEVLAHQLSKADLFVSAINPKLIKDFDNDSLRKVKSDKADAVKIARYALDKWQNLKQYSVMDELRNQLKTMNRQFNFYMKHKTAMKNNLIGILDQTYPGINTYFDSPARSDGSPKWVDFASTYWHVDCVRKMSLHAFIDHYQKWCKRKKYNFSLSKAEEIYGKAKELVPVLPKDGITKLIIKQAVDQLNSASVTVEELRSLMNETASKLPEYPIVMQMKGVGPSLGPQLIAEIGDVTRFTHKGALTAFAGVDPGVNGSGSYEQKSVPTSKRGSAALRKTLFQVMDVLIKTMPQDDPVYQFLDKKRAQGKAYYVYMTAGANKFLRIYYGRVKEYLSSLPESE

SEQ ID NO: 213708 - protein, 411 aa, unidentified
MDVVHERAAGMDISKRDVKVCVRVPGKRPGTFEQKVTTWGATTSQVLELREHLLTNRVTTVVMEATGDYWKPFYYLLESVLPVTLVNARDVRNFPGRKTDVSDAGWLAQLAAHGLVRASFVPPEPIRELRDLTRTRATIVQERSRHIQRIEKILEDAGIKLSSVVSQLNGVSARSILDALVAGERDPEKLAALAKGRLRAKIPELVDALTGRFRDHHAFMVNLHLTQLDHSATLIDEITARIEVVVEPFRVFRETLTTIPGVSVRVADVIIAETGGNMHIFPSPGHLASWAGVCPGSNESAGRVKSTRTRPGNAHLKAALGISALVITRQKNTHLAVKYRRIAARRGSIKAIVALEHSILVAVWKMGTTGEAFAELGPNYYSNRHPDRTKSNAINQLRTLGYQVTLTPTAA

SEQ ID NO: 213709 - protein, 335 aa, unidentified
MKNYLFYVGIDVSKLKLDVVVLNSKSINQTDHFIVENNQKGIKSIVTYLQKKKINLITTLFCYESTGVYNYPLNVFLSEKKIDYWVVPPLEIKRAKGLVRGKNDKTDAKDIAYYSLRNIDKLNLSSVPEKEIQQLKLLFSEREKLVKAILLFESSKENRGFMSKDVYKEIALINSKTIQNLKNSLKGIEKKMKAIIINTEQLKQQYDLVKSIPGVGEQTAIYFIIATKGFKAFKTWRKFACYSGVAPFEYSSGTSVRGKTKVNHLADKKMKSLLQMCAMTSIKYDPQLKEYYTKKKAEGKNGMLVLNNIRCKIISRVFAVINRQTPYINTYKFAG

SEQ ID NO: 213710 - protein, 341 aa, unidentified
MKITTIGIDLAKSVFAVHGVNEHGRAVLKKVLKRDQMLAFFANLPACMIGMEACGSAHYWARKLQGMGHTVRLIAPQFVKPYVKTNKNDAADAEAICEAVARPNMRFVPLKNVEQQSVLSLHRVRQGFVKARTAQANQIRGLLSEFGLVIPQGITHIARRVPELIEDASNDLTGSFRLLIERLMEHLNELDRQVRELEAQIQRWHRDNEASLKLAQVPGIGPITATALVASVGDAKGFTSGRQLAAWLGLVPKQNSSGGKNILLGISKRGDTYLRTLLIHGARSVIRSAQRRNDHEGWLPRLLQRRNLNVVAVALANKNARIVWALLAHGRSYQPGYGAAS

SEQ ID NO: 213711 - protein, 412 aa, unidentified
MQVVYPCCCGLDVHKKSITACVLWVEARGEKRNEKRVFGTFTRDLLKLSDWLRECGVRQVALESTGIYWKPVWNILEGQFEVLLVNAQHIKAVPGRKTDQKDSEWIADLLQHGLLKGSFVPPSAIRELRDLTRYRVNLAEECNRIANRIQKVLEDANIKLASVATDTLGASGRAMLKAMIAGEENAEVLAEMSKGLLRNKMPELRGALEGRTTVHHRFLLQELMDHLEFVEGKMLRLEEEIAKRMHPFDDAVRRLRQIPGVDRITAWGLIAEIGVNMDQFGDSRHLASWAGLCPGNHESAGKRKSGRTRKGSAWLRRCLCQAAWAVSTKKNNYLSAQFRRVAARRGVKKATIATAHTLLVIAFHILKAPVEYRDLGGDYFDRLHPETLKHKLVKRLEALGLKVTVEPMAQTA

SEQ ID NO: 213712 - protein, 467 aa, unidentified
MGRKGRRTKGMEEAHPFAGMSRINPNAAGVDIGAVEIVVCVPGEGDTQIVRAFGNYTADLQAIGRWLKEHGVETVAMESTGVYWIPLFEELERQGFQCLLISSRSLRRVAGRKSDITDAQWIQTLHTYGLLESSFRPQAELIALRTLLRHRSQLVEHRSPHIQHMQKALLQMNVQLSQAVTDVTGLTGQTIMRAILAGERDPQKLASLRDPGCKKSEEEIGRALTGTWREEHLFILKQSMEMFDFYTQQVQACDDEIERVYGETRPDWDGGELKPPSIGKRNSHSKNRPQNPESIRKHLKRISGVDLSAVDGFGVSLAQTVIMECGTDMGKFPDEKHFCSWLGLAPKHEISGGKVLKNNTLKTKNRAGQAFRLAANSVKQADCVFGVMYRRMKARLGPSQATVATAHAIARVVYRMLKYKVEFETISVEEYEKKYRDQQLKYMKKKAAKLGYQLVPLVDGALVPMPN

SEQ ID NO: 213713 - protein, 353 aa, unidentified
MMRILALDLGKYKTVACEYEAESGRHRFVTVVTTPKALHDLIVECEPQRVVIEICSIADWVGDLVRALGIELQVANTADERWRWRKVKQKNDRRDALKAAQLSAVNQLFPVHVPELTMRQWRALIAYRSKLVQRRTKVKNHIRDLLLREGQLLPRGRTAWTQAGMATLAALAQPFAALDSEHLWRGELGIELAQLTELQQQIQSVETKLDELAAADARVQLLRTIPGVGPRLAEAIVTMFDDVTRFTTAGQVGAYIGMVPKQFDSGEMERSGRITRHGNRLVRSLLVEIAWASLRHNPWARQTFQRISGDKKSRRKIAIVAVGRKLLVRCWGMLRHQTPWRESVPRAVATGSM

SEQ ID NO: 213714 - protein, 342 aa, unidentified
MDHYAGIDVSLECSSVCVVDASGKIAREGKVASEPEALIAYFGSLRLSVVRIGLEAGPLSQWLYAAMKEAGLAVELLETRHVRTALQTMPVKSDRNDARGIAQLIRLGWFRPVHCKSIGAQETRAVLTARKLVQSKLLDVENSVRGILRGFGLKVGHTTNRSFAGRVEDLVVNHASLHMIAAALLSVHAVLLRELKAFDKQVRSMARVDVKAKLLMSAPAVGPIVALTYASAIDDPGRFTSSRRVGAHFGLTPKKYQSGETDYTGRISKIGDATVRTALYEAAHIMLIKPIKGCAPLKSWAMRIARRSGMKKAKVALARKLAVILHRMLANATPFNAAMAAA

SEQ ID NO: 213715 - protein, 429 aa, unidentified
MNYTEQSAAKKIESISPGTLVVGIGIAKASHCAQFVDYRGIVVAEKAFFANSREGFCIILSKIEEASKANGLKKVLAAFEPAGHYWKTLAFWLNSEGIRCVFVNPYHTKQAKELSDNSQTKSGPKDALVIARLANGGNFLEMRAPEGVYASLRRLDSALEVVEKEQTALKNRITALMDEYFPEFFEVSKKPYGGKAAMQILAECPLPRQILCLGVDGVLEAVRKAAKAGVGAGKAARLFEAAGASIGSKHAQSEAAFEISLMAGRLVLADGSGAKILERMEAALEECLYASFLLEIKGLGVATAGAIIGGAGNLAGFGSPRQIERLAGINLREESSGARKGETRISKRGRAGLRKALWNAVEPMGIWDPGFKGLYQYYKTRAENPLRHKQAMVALMRKLLAILHALAVKCESYGPGIAFKNIGNEKNAA

SEQ ID NO: 213716 - protein, 315 aa, unidentified
METIIAQNVGVDISKATLDVHLHPAGIARQFANDASGIKALLGWLGDRDIARIVFEPTGPYHHRLERRLGDAGLPLAKVNPLQARRFAQAAGAHAKTDAIDAAMLARMGALLTPPVRQITSEAIDDMRELHIARLALIKDRTAARNREHACRSPLLKRHAAQRLAQIDRQIAAIDAALNARLQTDPDLVSRFAILISIPGVGALTAIIMLIEMPELGQLESKQVASLAGLAPQARDSGQYRGKRHIRGGRAVLRQALYMPALVATRFNVDLKAKYQAMVTAGKPPKVAITAIMRKLIILANTLLKADRKWIEKPA

SEQ ID NO: 213717 - protein, 403 aa, unidentified
MISVGIDVSKGKSTVCILKPYGEIVSKPFNITHTQKDLSELSSMLFRLNDEVKIVMEATGIYHLPVLTYLQEKGFFVSVINPYLMKSYRNESLRKAKTDKIDSRIIANYGIDHWFKMKEFQTSGEIYEELKLLGQQYRHYMKLHLLSLAELTHLLDLTMPGIKNLLASWNETNRKDKRSDFVERFWHYDVITSMSEQEFTEEYILWAKEKKYVPSQEKAKVIYTLAQESIPTLPSETSSIKMLVTEAVRVLKEVDATLGLILSRMQEIAKTLPEYSVVREMGGVGNTLAPKLIAEIGDVRRFRNGKALVAFAGIDPPPYESGQFVGCNRKISKRGSASLRKVGYETMRSLKMHSRPEDPVYRYVVKKESEGKSKKSAKIAGLNKFLRIYYARVTELYKIYNLI

SEQ ID NO: 213718 - protein, 351 aa, unidentified
MMIIGVDYHPSFQAIAFFVEETGECGEQELNHSDGQAEKFYRDLKQRGISVRIGMEATGYSRWFERLLAELGFELWMGDPAEIKAKRVKKQKTDRKDAQLLLRLMMEKNFPQIWVPSPENRDLRQLLWHRHRLVQMRTRIINQLQALAMNEGYRWKKKLFSEQGRALLEKLSLAPWASRRRQELLELLDRMNPTIEELTAAAEQEVKKRPEALRLMTHPGVGPLTALAYVLIIGTPERFHCGKQIGTYVGMIPCEDSSARKQRLGHISKQGNSLLRFLLVEAAQAAARCNPQWRRRYIHLAMRRHKSIAKVAMGRKLGVRLYWMWRNGCEYSPSLEFGSYAGQLGTVHGMK

SEQ ID NO: 213719 - protein, 389 aa, unidentified
MSQSNLERIIGLDVHPDSFAGAILLKGKDPASARVLSTSRRVELPELEKWAARHTRPEDVLVMEASGNAFAVAERLRELKREVVILDSHRAGKVGKAYCANDRVDAIKIARIYLTALSPLVWQPDAKTRERREVFSAYQAVVKEATRLKQQLRSMLNEHCVRLKKGFRLTHPGAIHRLLKLREWTPAQAMLLGQLHSGLVSARVRRTKLRHYMAQEVLNEPELLRLTRLCGISLITLYGLIAAIGDIKRFSKSGKLSAYFGLNPSVEQTGNWEGQGALKRHGRGAMRALLVQSAKKLLRVSNPLQKWGLGIALRRGRNRAAVAVARKLCVAVWHVMQGHVIGAIERMDTLHTKLHKLATELGLRMIKSQGYETKEAFVQKKLYLLRSYP

SEQ ID NO: 213720 - protein, 419 aa, unidentified
MEVLYPNCAGLDVHKETVVACSRRMTGSKVEREVRTFPTTTSGLLALSEWLSSLGATHIVMEATGVYWKPVWNILSDGEFELMLANAKHVKNVPGRKTDVNDATWLADLLAHGLIRASFVPNAATQEQRGLLRTRKQLTRERTSHVQRLQRTLEEANIKLDSVISDVVGTSGRAMLEALIAGETDPAKLAALANRRIKAGPDALAEALRGRVTKHHRFLLRLHLQQIDALDQAIAEIDKEVEANLDPFRPLIPLLISMPGIGELAARMILAEIGTDMSRFPTAAHLISWAGLCPKNDESAGKRRSTRMRKGAPWLKSLLFQCAWAATRKKCSYLQAQFHRIRARRGAKKAIGAVAASMLTAVYHMLKTGTFYQDLGADHFHRRSEPTLIKRLLQKLSSLGYDVTVRPLAGPGSALPVSF

SEQ ID NO: 213721 - protein, 456 aa, unidentified
MGNARKNKIPARLVEDEDYQLRHERVAGIDVAKAKADVCTRLPPARDGGRRVSRAEEVPATAAEVMALAGRLLADGVELVVMESTSDYWRIWFYLLEAAGLRVQLVNSRQARQLAGRPKTDRLDAQWIARLAEMGLLRPSFVPPPEIRALRDLARTRLQLVRDRTREWQRLEKLLEGALVKLSSVVSSLAKVASARLILEAIAGGETSPQALAALAHGNVAGGRAAVAAALEGMRLAGHHPMLIRLHLDRIAFLDRSAAALEDEIAAALDAVPAAWGITAAGEPSPDPGPGAAALDAAARLAEIPGITPDLARAIIAETGLDMSRFPTAAHLVSWAGLAPAARQSGPRSRKPKKGQGNDYLKGYCTQAATGAAKTATFLGERYRRLHKRTGGLRARCAVGRSILVIVWHLLADPSARYADLGPGWHARKTGRDRKIRTHLRQLEALGLQVTITPAA

SEQ ID NO: 213722 - protein, 340 aa, unidentified
MVSLTRERVFVGLDYHQLSVQVCVLDDTGRVLHNASLANDVAAIATVARRYGQRIEAAIECCCGAANLAKQLREQGWSISLAHAGFVSRMKQNPDKTDFADARILADLVRVGYLPKVWLAPDEIVELRRLIRFRQQLVNERRNIKLRIRGLLRDERMPVSTESGKAWTKGWLSLLPTLPLPATAHWILEQQLARLTDLGQRIVQIEQRLKQRLEHDAVVQKLLQQPGIGWVTAATIRAEIAEFDRFHSGKQLARYCGLSPRNASSGERQSDAGLIKAGNPQLRAVLIEAAHRLLWREEHWQQFAAGLLRRGKPKSLVVAAVANRWIRRLYHQMQPEQLAA

SEQ ID NO: 213723 - protein, 429 aa, unidentified
MSYRIAGIDVHKKMLAVVVTDVEIDSEYHFEQRRFGSNPEQLRSLAAWLLEQEAEEVVMESTAQYWKPVWEALERCWKPICETRKGARRKSGTLHLAQALSNRGRRGRKRDFPDAERLVKRLVAQELTLSFVPDAEQRLWRTVTRKKYQLRCDRIRLQNQLESLLEEAHLKLSSLVSDLFGLSARRMLQAIAEGETNPATLAALADERLRATPEQLADALGACSELNPVYRRLLKMALEELRLIDEQIGRLDQEMAGLLRQHQDAVQRLAEIPGLGVDSAQQIIAEVGPTAATFPSDKCLSSWVGACPGDDESAGVNHSHRSPKGNRHMRRLLNQAANAAARTKGSIFEIVYRRSVPRLGHNQAIGAIAHRQCRLIWLILHQGVRYEERGPAVTKRSKQLRTWKMIRQLRTLGYRIEPPNPQPSRAPAQ

SEQ ID NO: 213724 - protein, 345 aa, unidentified
MPIVGGLDIHRKQITFDYLDTETGQVRRGQIAPADRTHLRAWLARFAGREDVAFAVEGCAGWRYVAEELAAVGATAHLAEPADTAFARGRKRRAKTDKTDSRHLRMLLAEGRLPECWIPPGHILEGRALLETYHDLRREHTAWVQRIHAVLFHQGAPALGAGTLRTGQGVAALRAAAAHLSPAGQLQVATALEVLEALEARMHVVRHQLLDAARQLTGAKVLAARLYGVGPFAALALTCWLAGEGRFSSSRKAVRFAGLDITVSSSDRKGPPGRLSRQGPPVLRWALYEAGKTHARTSAPDHAYYAQVKDRKNSKRAALSEARKILRQACHILTELGDDALAPVT

SEQ ID NO: 213725 - protein, 343 aa, unidentified
MDYYAGIDVSLELSSVCILDASGQIVREAKVASEPEALATFLASLSLPLTRIGLEAGPLSQWLYAGLVQAGFEVVLLETRHVKAALSAMIVKTDRRDARGIAQLLRMGWFRPVHCKSPPAQEVRALLMARKQLQAKMRDVELSLRGLLRGFGLKVGETSKGQFAARVRMLTAGHAMLEKITEAMLRAREALQKEFARLHRAMLSIARENEVCRRLMSVPGVGALIAVTFTSAVDNPERFARSRAVGAHFGLTPKKYQSGETDITGAVSRVGDPMVRTALYEGAHILLTRAVRFSALKRWALEVARRRGMRRAKVALARKLAVILHRMWIDGTTFRWSREGVAA

SEQ ID NO: 213726 - protein, 387 aa, unidentified
MPQVDDLSRSLATFDQDATLTVVVEMSLSSWLVAGMVPGVDRQPLKKLGPDPDALLRLVERWRDQAVKAGKRIERIALAFEAGRDGFWLARWLQARGIEVHVIHSTSVAVSREHRRAKTDRLDTAMLMRVFLGWLRGERGHCGMVAIPTLEDEDARRPSRERESLVGERTRIINRMKAILAWLGIRGFNPKLRKAPQRLDALRTPEDLPLPRNTVDELRRDMARLAMVCEQIKALEQARLAHLEQAPGTGPHAMVRLIANVIGVGIETADMLVQEVLSRNLRDRRAVARYAGLTGAPNESGSRRREKGLAKSGNARVRRGLIQLAWRFLRFQKDSALAQWYRVRTEGPAAARKTKMIVALARKLLIAFWRMVTVGEIPAGFALRQPA

SEQ ID NO: 213727 - protein, 439 aa, unidentified
MHFSGEVDEREERLNKQTVVAWVGIDWADEGHEVWEYTVQTDSATCYAIKHTAESLQEWVNQLRIRHGGKPVAVVLEQARGGLIYALMNTGFMEIYPVNPESLAKFRKALYPSGAKSDPTDAELLGQMVRQNPGRFRAWVPGDEQTRSLQLLAEGRRKLVEDMTALTNQLTSVLKTYYPQALNWAGDLSSEQACSFLEKWPTLADLQKSRPFRIRDFYEKYGRPPRQVLDERVTQMEKAQPLTADPAVVMAGKMMVNAVVAQIRPLRAAIEKYDVEIERIFRQHPDRAVFESFPGAGKVLAPRLLAAFGADRDRFEAALEVQQFSGIAPVTERSGKTIWVHRRLACPKFVLQTFHEFANQSRRFCVWSKLYYQQQRARGKQHNAAVRALAYKWIRILFRCWKDRRLYDDSRYEKSLIKRGASLAPLLNVLDCGNGVQEL

SEQ ID NO: 213728 - protein, 341 aa, unidentified
MSVMIGIDPAKGSHAAAAVNGGEEVLAELEVRASRRQTSELLAWAERFPLRRWAIESANGHGYLLAQHLTAAGEHVVDVPSTLSARVRVLDSTRSQKNDANDARSVAIVALRQPNLRVVTAEDHVAVLRMLAKRHKQLASLKTQAAARLHTVLAALIPGGLGKEMVVRQASALLQKVRPASMVEVERKRLAHQHLAEVRRLEKELKASKASLAVAVEASGTSLTDIYGVGPVVAGLLIGYSGDTARFPTRHHYAAYTGTAPIDASSGTKKRHRLNPRGNRMLNHALHLIAITQLRYPNTEGRLFYERKLEEGKTTKEAIRSLKRRLSDVVYRHLEADQQTR

SEQ ID NO: 213729 - protein, 468 aa, unidentified
MNEVRLGIDVACRADHRASLADERGEFIWSSWKFRTTITDLERLWAKIPDGASVTVILEPTRNAWVPLSAWLQSRGATVILVPPEQSADLRDYYNKHTKTDRLDSKVLARLPLLHPEGLRGIDNLGPAESLRRAVRHRFSLVKRRSAASLRLDALVELLGPGWADSLGSATASKTALVILEKYADPRALKRLGRARLAALLIRSSSGLWRQDKADELLAMANETLALWSGGGIDFTELAHDIASEVRVLRRLDDEIAAADKRIAVLYGEADPKGIVASTPGLGPVLSAAILGNAGDFNRFANLAGVRSFTGFVPKIDQSGLVAAHKGITKAGDAGLRQALYLAADHARHVDPTLAQRYHRLVMVEGKHHNSALCSVSAVLITRIAACWRKGELYQLRDEDGEAITEAEGKAACADRFKIDPKVRAARRRNTPAKVFKNRVAGRGRKESTQEVAPATDPPREEASENVA

SEQ ID NO: 213730 - protein, 305 aa, unidentified
MPTTVNAPPINWIGVDVSKDRLDVYDLSAETYTSYCNDTDGINALSQALLQRPHLAVVCEATGGYEASMALRLDQLGLRVSVVNPRPVRDLAKALSKLAKTDPIDAYVIAKYGEVTEPAATVFASEVESELKQWVNRRQQLVEILSAEKNRRTLLVNGPARDEVSEHIDWLEEKIKKIDQKIETLSDSTPEWKDRKAILRSPKGIGPLISASFLVLLPELGQLNRRQIAALAGLAPFNRDSGRFRGQRHIWGGRGAVRSLMYMATLSALKSNPPIRAFYQQLLTRGKVKKVAIIACCEFRKLWPE

SEQ ID NO: 213731 - protein, 341 aa, unidentified
MTLVMGMDQHRAQISAEWIDTLTGEISRARIAPADRMTVRKFLTQFKGSGLEVALEATTGWRFLVEEVQRVGAEAHLAESAETSGMKGKKQRAKTDWADARHLRELLLIGRLPESWIAPAHLLDLRARVRCRHMLVHQRTEWQQRMHAVLYHHGVPHARKLLTLANRERVAALKLPAVAREQLTIALEMIDAIELQIGPVDLSLRAYARKQPGCRTLTDQIYGIGPLTSVTILAELGDTRRFANSRDAVRYSGLDITVYQSDQRRAAGHLSRQGPPALRWALYEAAQAARRPSSPDRPYYEQLAERIGGNRACVAIARKLLKRSYHVLRGLGDQALEPVTA

SEQ ID NO: 213732 - protein, 309 aa, unidentified
MKEQLVYCGVDIAKSHLDAAIGKEKRRLLNDATGHRQFIKWIKQIEAQVQVICEPSGGYERRLIQALVGAQIKVSLVQANRVRQFARAAGILAKTDTIDARVLCAFGEAMRPQTFSASALEQERLRELESQRRHLTHLLVMEQNRAARVSEVLVRRLNRRLIHQIKKQIEQLDLLIQEHIEASPELSHKASKLTAISGVGERTAALLLAQMPELGQLNRREVAALVGVAPFNRDSGKWRGKRAIFGGRRFVRHGLYMAALVAARHNPILRPFYQRLRVAGKPAKLALTATMRKLLIVLNSALKPQSIYA

SEQ ID NO: 213733 - protein, 317 aa, unidentified
MEQRQTNTKIAGIDVGKSRLDGAVHGLEDTVQVGNAPAGFSELIAWLKAREVGRVGLEATGGYERGVRQALEAEGFEVVVHQPIEVRRFAQMKRWRAKTDRLDARLIAAATAQVEAVRAAQDPRLAELAERLTAYEQITDLTAQMKTQLEHITLKDVATAFRSQIRTMTALKVKLAAEILRQIKAHDDLAARFRLLLSLPGFGPIVAATHVIRMPELGQMRRGQAASLIGVAPFARDSGQYKGLRFIGGGRSRPRRMLYLAALAAKRCDPSLKAFAQHLIARGKPAKLVIVAVMRKLVEAANIVLSRGQPWLRQPAT

SEQ ID NO: 213734 - protein, 404 aa, unidentified
MTKEDFIYVGIDLHKETHTAVIIDCYNNKLGEITFANRPADFPKLVTKVKKCNTDGKAVVYGLENAYGYGRPLAVWLIDKGDLVKDVNTAISHRQAKHRGAMYRKSDSDDAEAIALATLNMIDKLPDACPNDTYWSLDQLVHRRDNIMKQRTRLVNQLHEQLCIAYPSYKSFFNDISRPTALYFWEHYPSRKFLKGKTVEDLREELVPASHNKCSTKTCEKILDAVASDKVKNNDFQDARDMGTLSIVSDLQHYDKQLAEVDKMLGCTLTTIPGVNVITAVKILSEIGDIERFANANKLAQFAGIAPLHLSSSGKGKDFATKQGNRRLQATIYFLAVQMIQVSSKGTPRHPAFRAYYEKRKAEGKTSQQALICISRRLISIIYGMLKNGTEYRMPVVENAGENR

SEQ ID NO: 213735 - protein, 348 aa, unidentified
MPNYNQSHQFYVGIDLHARSMFVHILSAKGKSVFERDLPAEPDSFLDAVKPFRKNLVVGCECMFAWYWLADLCEDKRIPFVLGHALAMKHIHGGKSKSDKIDAGKLANMLRGGMFPLAYVYPRGKRQTRDLLRRRSFFVRQRAQLITHIVNTNSQFNLPPFSKKLSYAANRSAEIADRFADPSTRLMIHTDLNLIDAYDSQIAELERHLLKSAKVDDPVTFGFLRTIPGIGPILGLILLYEIDRIERFPEAGNFLSYSRLVRCAHASAGKVKGFGGKKIGNAHLKWAFSEAACLMLRTCIPVKAWMQRQESKRGKRKALSVLEAKIGRTVFHLWRKQQAFDVKKFLHV

SEQ ID NO: 213736 - protein, 340 aa, unidentified
MHTTIIGLDIAKSVFQLHAEDASGKVLWKKRLRREELEPFLRKLPPGLIGMEACGSAHHWGRVISADGHEVRLMHAKYVKAYVKRGKSDVRDAEAICEAVQRPNMRFVPIKSVEQQIDRSLERARDLLVKRRTQLMNATRGLLAEFGVIARVGLRGFKTLSDKVDAGDAAIPKPLLTAVKPLLEQWRGLHASIDELEERLVKRARSDERMCRLMKIPGVGPFTAHALVTAIGDPRRFSTGRDFAAWAGLTPLTDSSAEKTRIGHISRQGDHSLRRLLVLGAANMARHAKAKPSEARAWLLGIIGRRPVKVAMVAQAAKTDRIAWALLRSGENYRGSMVAA

SEQ ID NO: 213737 - protein, 362 aa, unidentified
MKNYIFVGIDLGDKNSVARIAVDLEKGERFGFVNTRAGRARMFDEVKRRADRAGGATIVMAYEASSCGFVLRDQAQAVGIDCRVLAPTKMEKSVEQKRNKNDDRDADDVLEKLRGHVLAGNRLPTVWVPDLETRDDREVLRARLALSERQTQVKTQIQMLLKRHGLEKPSDLGTTRSKQYRHWLESLCEWERLGWGTRQSLASLLRQLKGIEAEMENLDKLVGQLGSQKRHQPIVEALMKEKGVGLLTALVYRTEIGKAGRFHRGRHVGKFVGLTPTSHESGQQNDRKGHISRQGPPRLRKVLCQASWVHVRHDPDSRQMYQRLVAKNPKKKKIALVAVMRRLAVRLWHRMREAELQQETAS

SEQ ID NO: 213738 - protein, 342 aa, unidentified
MQITTIGLDIAKNVFQVHGIDTAEEVVVRKQLRRGQVLAFFKALSPCLIGMEACATAHYWAREFTKLGHDVRLMPPKDVKAYVKRNKNDAADAAAICEAVRRPTMRFVQVKSSEQQGRLMLHRTRDLLMRQRTQVINALRAHLAELGIVAAQGREGIKELLKIIASEEDARLPVDAHTSLVVLAAELQAMQTLIGSIEKRIIAQHRSSEASKRLESIPGIGVIGATAITATVADPKVFRSGRDFAAWIGLVPREDSTGGKRKLGPISKRGDRYLRRILVVGAHAVLRYARQQPEKYPWLTQLLARKPFKVVAVALANKMARMAWALLAKGGTYRTPALAAAA

SEQ ID NO: 213739 - protein, 375 aa, unidentified
MKKNSSGCKSPKARMKATRATNVTVGMDLGDKTSRYCMLDENGEVSREAGVATTKKAMTQVFATMKPCRVAIEVGTHSPWVSRLLQSCGHEVIVANARQVQLISKSSRKNDRMDAQTLARLVRVDPRLLRPVQHRSEQAQGHLRVIRVRAALVEARTMLVNAARGLTKATGERLPSCDADQMGVELMESLPAGLQNSLRPLLEEVGSLTEKIQALDQQVEQIARTDYPETDLLRQVSGVGPLIALTFVLTVEDRERFQKSRDVGCYLGLRPRQSDSGESEPQLRITKEGDPYLRKLLVQGAHCIMGRRGPDTDLKRWGLKLSARGGKNAKKRAVVAVARKLAILLHRLWVTAEVYEPLRNSQSGPPVKKSRKAVA

SEQ ID NO: 213740 - protein, 346 aa, unidentified
MLADELDYVIGVDPHRDTHALAVVDVRTGGVVFEATAVADGEGYACVLRLVDQLAPGRRVFAVEGTGSFGAGLTRFLVDHQERVLEVGRLRRERQSGKSDALDAIRAARSVLSQTRPARPRAGGEREALRALTAAREGAVTARRAGLCQLRGLLVSAPEPLRAELRSLTRAQLLRRLAAVRPERRQDPELRGTLLALRALARRVKTLTVEEGELAGEIETLTRKLAPQLLDQPGVGPLAAAQILISWSHRGRVRSEAAFARLAGCAPIPASSGQTIRYRLDRSGDRRLNRALHMILVTRRRADPPTIAYINRRIQEGKSRREASRCLKRYLARNLYRLLEHAPMPT

SEQ ID NO: 213741 - protein, 372 aa, unidentified
MKQNILYVGLDVDDTQYHGAAFNKDTGEVIDFKCRPTLKGLLQQLDKLARHFKGHKIKLCYEASYIGYCLQRDLMSHDIHCDVVSPSSIPSPRGKAIKTDRIDAGYLAQFYANDLLTIVQPPDEEQEQDRDLLRSRQKVMQQRTQLRKHLQAVLRRSGLHYKAETGHKSHWTKHHYGWLTRTIDGLSGSLKVNLELLLRQLKGLNDILSEYGQQIEQLATTPRYQESVQSLTCYKGIKNIFALTMITEIGDIKRFSHPRKLVSWIGMDIREYSSGGKHNHFGITKHGNRYLRTAFVEANQRGYRTARIGKDVKARRKDIAPDLINIADRCLRRLNKKGNRLLLAGKHPNKVKVACAREMVGFVWESLNKVAA

SEQ ID NO: 213742 - protein, 465 aa, unidentified
MARKSKNVKSKDHKRLPRSLKTIQADAAGIDLGSREHWVCGPPLEDGTPNVERFGTTTPELFRLADWLKEQGVKTVAMESTGVYWIPLFEILDSRGFEALLVNARHISNVPGRKTDMLDCQWIQLLHACGLLRGSFRPSDDICRVRALIRERNTMVEQRSDWVRRMQKALDQMNVCVHHAVSDITGVTGMAMIRAIVDGERDPNTLARLRDARCRKSEKQIAEELTGNWRPEHLFNLRQALKMYDQLCAVIESYDAEILTYITKHQPEDAGSTPAPAHSSKSKARSLAKRGQEPLRQALYGFSGFDLTTIDGIGVDTALVILSELGLDFSMFPDESHFVSYLRLAPNLSISAGKKVPSKFKPTTCTRVSTALRMAALTLRNSRSALGGFYRRMAWRKGASVAVFATARKLAQLIYRLVRYGQAYVDTGTEAYDARFNQRRLKFYTKALKEMGYSLQPLTENALTA

SEQ ID NO: 213743 - protein, 426 aa, unidentified
MHRGYPAKDMIKVAIRSPGDKPWTRKTEIFEFRTFYGVLQQMARELRKRGVTHVVMEASGVYTEPVYYALAEQDFTEVAVINPAHAKALRGHKTDAKDCARLAELFECGLLRGSYIPVPELKEVRDLTRYRIKTVQARTSEIQRLGKALESAGIKLGSVASSITGTASTAMIEALIDGERRGGVLADLAIGRMRTAGKLADLSMALAGRFTDHHALLCRLHLDRIAVFDDAVDGLDKRIAGKAARWQREQGLLTSVPGFGDVVAQAWLGEIGPAPHRHFASCEKLASWVTLCPGNNISARKRKHGRTGDAGTYIKPMLVQAAWAAIRVRGRLQARYNRLVRRFGGDKNPGAKKKAITAIAHTLLKIAYQVLKSGVPYQEPGADFYTRRESPEHKQAWLERQLQKLHPGCTVTITITPPEAALPPGA

SEQ ID NO: 213744 - protein, 354 aa, unidentified
MEQFVGIDWATRRARWCAVTPAGVVLDEGWAPADEDGLAGLVMRVGPEARACLEMMSGAAWVRDQLQAAGWTVQIADARKAKAVGSLAAKTDKLDARVLAELARRDLVPQVHVPTFADRELKERLGRRMHMIRLRTAAINRAHGVLSQFGVRIAFDRLRAHDAHELLVERGVPEVWRRSIAEAVAIVRVLDERLVPIEQELRPLARADERVRLLVTIPGVGDLLGLTIASEIGDISRFASARKLVGYSGLTPRVYQSGQKARTGKLSKSGSAMLRWAAIEAAQQAWRPNNPWHQLYVDVKQRCGGKGNPAKAAVARKVLIASWHVLSLQQPFNPSRPRGAAAPAPANSSCVLAD

SEQ ID NO: 213745 - protein, 344 aa, unidentified
MEHYAGLDVSLELTSVCLVDRQGQVVREAKVASEPEALIGFLEQQDLEVARVGLEAGPLSQWLHARLVASGYESVLLETRHVKAALSAMTVKTDRRDARGIAQLLRLGWYRPVHAKSASAQEVRSLLTARKLIQCKLLDIESGIRGVLRGFGLKVGTISRGRFEARIRDLAQGHTMLETVIGSMLAARAALQAEFARLHRALLALVRADPVCRQLMSVPGVGAVVAITFKSGIDDPARFRRSRDVGPHFGLTPRKYQSGEIDVTGSISKVGDRMVRTALYEAASVMLSRTVRMSPLKSWAMGVARRRGAKKARVALARKLGVVLHRMWIDGTSFRWTGEVAAMA

SEQ ID NO: 213746 - protein, 369 aa, unidentified
MVENTLFLGLDVHKKTISVATVDGSARAEVRFYGTIENTPDAIRLLCKKLSKDGRRVHACYEAGPCGYNVQRHLTRLGHRCDVVAPSRIPRKAGDKVKTDRRDAMTLAQTLRAGQLTEVWVPDQAHEAMRDLVRLRSQAMRDLRKTRQHLLSFLLRHERISPFGHWTKMHRRWLGELKFAHPAQHLALEEMLHRIERAEELCEPLKQAIGELVPQWSLAPVVQALQALRGISLITAAVLVAEIGSFERFDNPRQLMAYLGLNPSEHSSGATVRRGAITKTGNALARTSLVEAAWTYRFPARITQIIRDRLKALPEPIRAVAWKAQVRLSARYRALIARGKSAPIAIVAVARELVGFIWAIARMVEPKFT

SEQ ID NO: 213747 - protein, 475 aa, unidentified
MNLKGKKTKNQVVTANIFEQQELLKKAEVIREKLTASTWHELETNGKIDKNAKLSFISDDMLILGCDVGSETHYLRAIDPRGRELSKSAYSFRNNCEGFQSAKEWAVELAAKNEKKQIVLGLEPTGNYWFCLATWMIANGISVVQVNPYAVKQTKEVEDNSQLKDDTKDPKLIANLVKDGNFGMPYLPEKVYAELRRLSMFREQLNEDRIRAINRMHREMKIYFPEYKEALGRVEGAFSLELLKQTPFPEEIQTLGEEGIRQIWHDAKLRGRGYSRVREIVGYAKTSVGMKDGAEASAMAVKWFVKEIRELDEKLAEIEKLMREKYQEIPYAKNILEISGIGENTLSGILAEMGDISRFDDVKEIQKLSGLGLVACSSGKHKGETKISHRGRKRLRYWLFQAAKSAVAHAEEFKELHVYYTTRADNPLKKMQSLIVIACKLLRIIYGILKNGTVYDPKKMLRDIRRPEKKEVIAA

SEQ ID NO: 213748 - protein, 348 aa, unidentified
MTGWRRRNMTIVTLGLDLGKNWVHMVGLDADGRIVLRRRVRRDRLLVETVDMPPCLIGMEACCGAHHLGRALAAQGHTARLMPPQYVKPFVKSNKNDHRDAEAAAEAVQRPTMRFVPLKSEAQLDLQTIHRVRQRLVGRRTALINQLRAILLERGITVARRRRVLELRLRAILADESARLSARVRHLIEDMRAEWRDLDARIDAFDAELTAKARQDDACRRLCEIPGIGALNATALVAAVGNGAVFDRGRDMAAWLGLVPREYSTGGKQRLLGISKRGNKYLRTLLIHGARAALPYLAARNDRLGSWLRSLLARAHRNVAVVALANKLARIVWAVLANDGCYAMPTTA

SEQ ID NO: 213749 - protein, 341 aa, unidentified
MSEISTIGIDLAKSVFQVHDADRGGNAILRKKLRRDQVLAFFASLPRCVVAMEACASAHYWAREIAALGHDTRLIPPAYVKPFVKRQKNDMADAEAICEAAQRPTMRFVQGKSAEAQASAVVFRTRDILVRQRTQLINALRGHLTEFGYVVRQGVGHVGKLVEIVGDPTSDIPAEARPVLVVIAQGLQALQAQIALLDREIAARAKADPVAQRLMTVPGIGPVIATALVALAPAASTFRRGRDFAAWLGLVPQQHSSGGKERLGRTTKMGERSLRRLLILGASSATKVAARDPDKASGWLAGMLARKPRMLVTAALANKMARIVWALMAHGGSYRAPAAAA

SEQ ID NO: 213750 - protein, 341 aa, unidentified
MKQAITIGLDIAKHVFQAHGADAAGHVLFRRRLTRAKLLGFLAAQAPCVVAMEACAGSHYWGREISKLGHTVRLIPPAYVKPFVKRQKNDAADAEAICEAAQRPSMRFVPVKDEEQQANGVVFRARDLLVRQRTQCINALRGHLSEYGYVFRQGITHAATLIAHVEDPNSSLPESARGVLKLLIDTFAALQVQIKELDGEINRRSRADPIARRLMTIPGVGPIAATAITALVPAAGSFRAGRDFAAWLGLTPLQKSTGGKQKLGAISKRGERTIRRLLILGASAVIRQACRRGAPAGSWLAQMLPRKPKMLVTVALANKMARVVWALLVKGGVYRAPAAAA

SEQ ID NO: 213751 - protein, 357 aa, unidentified
MTTQEKTRCMYVGIDVHKETHTAVGISPYGEKMFEITVGNYKNDFEILKEKVEEMKGVLSPYIGLEDVRGYGERLAEYLYQIYPVYHVPSILVDRQRQNATHPEKSDSLDAQGVAKVMIQNINTLLPYTISQEGQKAKQLKEISVDREDLVLERTRLKNQVHTLLYRIYNTEYATKYKDPFSIKALTFWRNAKPKCDPFLLKTMKRKVRRLLDIHAEVNDLEKDMKILLDTGEYTIHTASGCGMVLASTIIGEIGDIHRFTSPGALSKYAGCSPRERSSGKKVRHVKSRSGNRRLNCAFHRMALSQISRMGNDRARTYFKKKISEGKSKSQALVCLRRQMVNIIWMMLKHKTVYRNA

SEQ ID NO: 213752 - protein, 363 aa, unidentified
MNSVLNTDSIIVGVDVHKYGHTAVAVDCFGQELGFLNFSNDLLSNFCSWMLTLSEKQNIVVALEDANGYGVFIVKKLTAEKFNFRYVPAILTERDRRRSTHHDKSDIKDAKRVAKVILTKYEETLPARESISTKEEIDTSTNFDLLLSERRDIVNWKSILKNQLHALLHQCFGDHYKDGFSKAFGKKSCISFTKELKKKVKNNPNDFLAQSTLRRIDRLNLLTEQLAIIDKKIETISKDVIDVTLLTENIHGCGVSTAATIVSQIYTIKRFNSSAKFAKYAGIAPTEKSSGQRGRLYTSPFGNRILNKAIHRIALSQISGNGDPRGKLYYKKKLEEGKTKLWALRCLKRQLSNRVYQVLKHAN

SEQ ID NO: 213753 - protein, 376 aa, unidentified
MEVRIVSTPSAGTDNEPVHCYVAIELSKSSWIVGFQTPLTNKTSQYQVKACDASALLELIERVRTRVARELRRPIEVMSCYEAGYDGFWLHRVLKAHGIHNHVLDPASLQVNRRARRAKTDRIDADRMVRALIRYLRGEPEACSVVRVPSVEQEDARRLHRERRRLIAERVQHVNRIKGLCATQGIYHYAPLRKDRLARLDDLRTGDGRALPTRLKAEIARELKRLEVLLEMIATVETERDVILTSAASTHLNAGKIKMLAKLKAIGPEFATTLVGEVFYREFANRRKLGSYVGLGSSPFCSGPVDRDQGISKAGNPTARSMMIELAWTWLRYQPGSALSIWFRERVGNLKGRPRRIAIVAMARCRPVRSLRPDRV

SEQ ID NO: 213754 - protein, 403 aa, unidentified
MAKYHVGIDVGKYNHHVSVRDVEGDTYCSTFSVANDSKGFAELVASLGKLSNEKVDFLIGIEACPYGLNVSYFLMAEGFNLVEVNPFRAGQFRKAQGRKAKTDMIDARSVAAILSLGDHKPLSIPDPILDNLRELTRFRTDLVDEKAATIIHLREALSILFPEFDRVFRQLNSVSSLSLLMAFPGPEHIIAAGEERVAETLSTASPHRMGKGMAKRIITAAHDTVGVTQKQPALGIKISILAKRIVDLQATIRDLERQITALFNNLPCKPQGFPVGRAASLATIISEIGDVRRFPTLKKFLSHLGWCPQTFQTGNFRLEHPRMSHAGNKYVRRLIWMLSILAIRRVNRYREYFQRRVLEGKAKMHILVAVGRKLLSALYAMLKRGVPYDPNWEENGRIALARR

SEQ ID NO: 213755 - protein, 468 aa, unidentified
MTTLLYCRRWVKPAGKLQTININNKNMLDTNPTHDLVIGLDRSDRKADLHFINTATGQTNSESLASSPENLRQWLLNLRQKYPKASVGICLEQPAGHLIPFLETYDWITLYPINPISLQKYRETFVTSRARDDGKDAQYLAELLATHRDKLKSWQPQDSQTRLLQQLVAHRRAVVDERTALTNRLQALLKAYFPQALELCGEELWRPLATAFLLKWPTLLAVQQAKGADLKEFYYLNGSRSQKLIEQRLKLVEQAVPVSHEPALNLSFSLRVKLICRQLQDVGTTVKEYEKQIAQCFQQHPDREIFASLPGAGPVLAPRLLAAMGAERERFDSAVSLQRYTGIAPVTKQSGKMCYVHRRYLCPKFERQSFQEFADQSVLWSRWAAAYYLSQRSKGKPHSTAVRALAFKWQRIIWRCWQSHTPYKEEVYEAALRKGGSKLLGLFNQIDLGKNPVKNPAKPPSKTAVKKT

SEQ ID NO: 213756 - protein, 324 aa, unidentified
MEVEARYVGIDVSKARLDVAVWPGAQSFSVANDARGIVELVERVTALTPQAVVLEATGGLEALAASELHAAGLAVAVVNPRQVREFARSLGRIGKTDRLDALVLAQFAQSAHSNNRLHQLHLPDEAEAELKALVTRRRQLVAMLIAESNRRERAPKVIRRSIVASIRGLKRAIAEIEQQVRAVLDSSPVQQAKAVLLAAVPGVGAQLTATLLAELPELGRLGRRKIASLVGVAPHPHESGKFYGRRRCWGGRATVRTTLYMAALSGVRHNPALRACYRGLRSRGKSPKLALVACMRKLLVILNAILRDSASWNPDHRLDFQHSR

SEQ ID NO: 213757 - protein, 339 aa, unidentified
MFYVGLDVSVARTAVCVMDAAGQVVREQSVASTPEAIAAMVKASGTEVERVGLEAGINSAWIARGLLEAKLPVIVIDATHAAAALKTGFRNKTDKNDARGIADLMRVNKFRAVAVKSVAAQRDRALLTVREQLRRQSLDARNIIWSILQVEGLKPPKLTSPAFQVLVAQALDDEALAPLLRPLVAVVEHIDGQVAGLDKVIAARAKASAACKRLMTVPGIGPLVALTYAAGVDDPARFSDSRTVGAHFGLTPRQFQSGEMNWSGGISRAGDAGVRRALYQAANVLIHHSRGWCALKSWAVRVAKRRGLAKAKVALACKLAVVLHKMWTTGEDYRLKAAT

SEQ ID NO: 213758 - protein, 386 aa, unidentified
MIYIGIDISKYKHDCFICNDTGEVIVENLSFDNNKKGFQQFLDLLKPYDNSIVRIGLEATGHYGLNLKLFLEKNNYSFMEFNPLLVKEFYKSLTLRKTKTDKVDAVVICQKLMSVPYKPNSKLFYHKYSIKSLSRLRETLVKQRSKYKVQLTNILDMIFPEFKPFFSNCFGVTSLYILNKYKTPDKIANMRDFDSLKSISRGKFTYAKFVQLKDLAKNTIGESNNIFEIELTSVLNLYKNIDNEIIELDKQISTIIKDLNPPTLSIPGIGVISCASIISEFGDISKFANPSKMLSFAGLEPGINQSGIMSSNGKMVKRGSGYLRHSLMNVAITVIKFNNTFYDYYYKKISEGKCHRVALSHVCKKLIRIIYILETKNIQFDSSLLK

SEQ ID NO: 213759 - protein, 331 aa, unidentified
MNYSHFVGLDVGKKTFDASLMSAAEKELSHKSFDNTPEGIQSLLDWIAGYHLSLSKLLFCAENMGSYVTELSVSSVSMGFSLALVCPLTIKKSIGLQRGKNDRIDAKRIANYAVLHYRKLELYKLPNKDLVRLRGWIIIRDNLVKQKVSSIKLLETFSQMAKLADVTESISFLEEQLKSIKERILEVEEDMEQLIAASTSLYTNYLLLRSIKGIGIINAIVLLCVTDNFQRFDNPRKFACYCGVAPFEHTSGISIRGKTQTSSLANKEVKVYLTRAAITAISWDPQMKAYYKRKIAEGKHKASVINAVRAKIIARSFAVIRRQTPFVTLAV

SEQ ID NO: 213760 - protein, 446 aa, unidentified
MKKSSRMSVIHPHAAGVDIGAEFHVVAVPPDADAAPVRTFQRFTGDLHRMSDWLKTCHITTIAMESTGVYWLPAFEIPEAAGFNVILVNARDAKNVPGRKTDVNDAQWLQKLHSFGLLRASFRPEHDISVLRSYLRQRERLTEYRAAHIQHMQKALMQMNVQLHHAVSDITGVTGLSIVRAIVSGERAPSVLIQYRDVRCKKTPEVLQQALTGNWQPEHLFAPEQSVAFFDFYQEKIRECDDQIETSLLQLSTGTEEPEGVLPSARHRTKQPNQLSFDVRPLLWKITGADLTQIHGFGPYLALKFVAECGTDMNRWPDASHFTSWLCLSPGNKISGGKVLSPKTRLSSSRIAAALRLAATTIGRSDTALGAFYRRLSSRIGKAKAVTATARKLAILFYNALKYGQKYVDPGADYYEERYRNRVLDGLKRRAKSLGYSLQQDPELCV

SEQ ID NO: 213761 - protein, 352 aa, unidentified
MEKISTIGLDIAKRVFQVHGVDDQGRVVVRKKLSRNELLEWFGKIAPCVVGIEACATSTYWAREIGKLGHNVRLIPPSYVKPYVRRQKNDRVDAEAICEAVGRPAMRFVTLKTIEQQAIQVLHRSRSLLITQRIQHVNALRAHMAEFGVIFPQGMAGATLAIKTLKEGNDKSIPAFARNVLLSLVSQLEQLKQEINKLDQQMIAWHKTNADSQRLASIPGIGHVTASAVLAAIGDGKQFKSAREFAAWLGLVPRQNSSGGKDCLGHISKKGDPYLRRLFVTGATTQLRGRRRDNAVGGTWFSSLLQRKTPRVATVALANKMARVAWALLTKSEAYRPTASLPTNICFTEAAA

SEQ ID NO: 213762 - protein, 352 aa, unidentified
MDRYIGLDVHASSCTLAVIGPSGKRLSTQVVETNAATLIEVLRGIPKRRHLCMEEGTLSEWLHEVLEPHVDELVVTGVGKKSRGPKSDKQDALGLAEQLRIGAIKTRVYKGRGEFGRLGNLAKAYGFVVGDTVRVKNRLRSVLRSRGVAYGAGQSVYAKRERAHWLGELPAATRTLAELLYEEHDALVALREKAEKTMLAEARKHRQWHVLKTCPGLGPIRIAELLPVIVTPYRFRSRSGFWAYCGLGIVMRTSSDWMRNPSGQWVKTPVQQTRGLNRNFNRTLKRVFKGAATTVIGRAEDGPLYRHYQSLLDGGTKPNLAKLTIARQIASITLALWRTGERYDATRLEATK

SEQ ID NO: 213763 - protein, 315 aa, unidentified
MSSIVFVGIDVSQDRLDVALAPSGEAWAVNNDEAGIHQLVTRLRPLAPQLIVLEATGRLELPAVAALAATGLPVVVVNPRQSRDFARARGQLAKTDTLDARDLALFAERLRPQVRPLPDAQTQALADLVARRRQIVEMLVAEKNRLHRASRRVAQDIRRHIAFLEKQLHELDDQLQETIQASPVWLEKQALLMSVKGIGPAVSATLLAHLPELGCLNRRQIAALVGVAPLARDSGKYRGPRTIWGGRARVRAPLYMAVLVAMRWNPVIKAFYQRLCAAGKKKKVALTACMRKLLTILNAMLKTKTAWQQKPATAS

SEQ ID NO: 213764 - protein, 470 aa, unidentified
MVKKGFLGIDVSKGYADFVLFDEQCRVLEALFQLSDTIQGRKDLKRLIVGWQEQGLEELYCGVESTGGYENNWHSLLKGLQTKGGIWVSRLNARAVKSLSEAYLKRTITDGVSAENIASYLVKFPEKVDYGLRVGSMGEHFKDGRQFVTGLSMWTKQKVQLSNQLEKLLYQNMSELLIYCRHGIPTWMLQILVKYPCIGQIKKAGAASLSKIKGISKEKAQAILKKISENDRLTTKPIQRMISMTAREILHQQSLIESNKGYLNEMYREDPNVKKLFAITGIGLDSVVSLVLEIEDVTRFANAKKIVAYFGIDPTFKQSGDGLWGNHMSKKGRGHIRAVLYMVSLSAVRYNPLFKQLYARFRAKGMTHKQAAGVVMNKLLRVIYGVLKSGESFNPDIDKKHREQAAQKQVIKKQENKKEKKANQEKKERFQSYLDTAPISNRNFKKRKKQLASQSSEEVNTGSPTADANI

SEQ ID NO: 213765 - protein, 321 aa, unidentified
MIDAENKVLYKQRHRNDVPSILSALDPFREDIQGVVVESTFNWYWLVDALMDHGYRVHLANVSAIKQYEGLKQIDDRRSSLWLANLLRLNILPTGYIYPKEERPTRDLLRKRLQLVRHRTSHVLSVKNILARNLGIRMKTYDIKKLKASEVSTLFADTEMRLAILSSIGLIQHFQEEIDRIETVLTKKFKVKEEFKKLLTVPGIGEILGLTIMLEVGHIDRFPTVGDYSSYCRCIRSIHTSNGKVTGYGNSRNGNKYLSWAYLEAAHFARRHHERIQRYYERKRAKTNKVVAIKAVSHKLARASYYVMRDGVDYDEARLFV

SEQ ID NO: 213766 - protein, 341 aa, unidentified
MAEVSTIGLDIAKQVFHAHGADASGATVFSRRITRAKLIQFFASQPRCVVAMEACAGSHHWGRELTRLGHEVRLIAPAYVKPFVKRQKNDAADAEAICEAAQRPTMRFVPVKSEQQQASAAVFRARDLFVRQRTQLIDALRGLLAEHGWVSPKGLFHARAMMAKIEDPSCSLPRGARDAFLALIGSVKVLDEQIIVLDREIAQRAKEDPAARRLMTIPGIGPITATAILALAPPPESFRKGRDFAAWLGLTPLQRSTGGKQKLGQITKMGERTLRRLLIIGSAAVVLHAARRGAPKGSWLEQMMARKPRMLVTVALANKTARIVWAVLASGEDYRAPVAAA

SEQ ID NO: 213767 - protein, 369 aa, unidentified
MEKDTTYVAMDDSKRKIVVGILRPTANEPELREIANDPRQIRRLFERLKSEGPLAACYEAGVSGYDLHRQITALGVPCSVIAPALTPRRPGQRIKTDRRDAAKLVRLFRAGELTAIHVLDEREEALRDLVRCRDDLRRDVLRWRHRVLKLLARHGRTYLAGRNWSRAHWRWIREQRFELPPLQRAFEATLFPLEQALARQAELDTELQIVATTAPYREPVATLRCFRGIDTLSAIILLAEIVDFQRFPRPRQLMAYLGLVPSEHSSGETQRRGALTKAGNSHARRVLVEAAWHYRHRPAIGPALATRSHGQPDEIIGHAWRAQQRLHRRYRHLVGRGKRSPVAVAAVARELVGFIWAAMTRPDRQPAVA

SEQ ID NO: 213768 - protein, 340 aa, unidentified
MKNKKKYFIGLDVHKKKTTHVVKDRIGNIVIEGETATLYSELYERLEPYLKSAVIGLESCTSYYTLYQNFLKNNYNIKVANTIQLRMLVAKNDKLDAKRLAEMLRLGTFPTSYIPGEKIQRLRSLLQVRHSLVEEKTRCNNRIQAFLDRNGIVMPGQEAFGKKWREELLQYIGSSEVSLELRYEYDHFVYLEKKSEHLGQEISGYTMKHWKKEYILIQSITGFGPVLSCYVIANILPIRRFSSNRKLRRYAGVVPAFHESGGKKSKGHIPKTSSRKLLRWALIQAANSAGRTNTGLGRYYRKKKKQKGNASIAHVAVASSMIDIIYKVLTTNKPYNPEIC

SEQ ID NO: 213769 - protein, 367 aa, unidentified
MESSVSLSAGPIHLGLDVSKNKFAVGILRWGEQVPDVETIINDEASVRRLIDRFPDRSQLRVCYEAGPTGFGLHRLLTSMGAACEVIAPGLIPKAPADRVKTDRRDCQRLARLHRAGELVAIRVPTEAEEAVRDLCRARADLVADRTRTRHRLSKFLLRHDRIWRQDAWTGKHAQWIAGQRFDEAALRSTYAHYRAVLAARDGELGAIEADLAHWYTHGPFVDAVTRLAAYRGIARLGALTIASEVGDWRRFPAARTFMGFTGLVPCEYSSGESVHRGHITRAGNAHLRTQLVESAWAYQHRASLGVVLRRRQDGVDPATAARSWTAQQRLCARFRRLSSRKSSRSIVTVAIARELAGFLWAEMTAA

SEQ ID NO: 213770 - protein, 387 aa, unidentified
MATKGRFQMMVLGADTHKRSHAIAAVNDLTGRVIADLTVRATRRAFEELLVWARGLDDRERVWAIEDCRHVSGALERFLLARGERVVRVPPKLMAGARTSGRERGKSDVIDAVAIARAAIREGVDSLPVAQLAGSELDVRLLVDHRERLVAQRTALINDLRWNLHDLWSEYEIPARALIHRGWQDRVDGRLKRAEQSARVRIARDELRRIRELTRAITTLEAELAPLVAAIAPCLVAERGCGVLTAAKLIGEIAGIGRFATDAKLARTAAAAPIPASSGRTDRHRLDRGGNRQLNCALHRLAVSKGRLDPETAAYLARKQAEGKTRREALRCLKRHLARRVFRLLQPPPSPSPSPAAATAIGKRPPVVAKAGRMIACTTTSGPFTLT

SEQ ID NO: 213771 - protein, 418 aa, unidentified
MVHVHGRRVQQLVEPLRKIPPEQVIAVSVDAGKTTAVALVADFTGERLCRPFQFRLNRSGIAELVARVGSATEDRPARLVRVGVEASGYHLPLVAPGVLPSAWEAVEFNPAHVAEQRKTNGKRGVKTDVVDATAMFDLLVAGRGSPVNPVGPALIELAAWARYRRSRAALGRDVTRHLVSLLDRAFPGLTGCLHRVMVTRVGRLVVTDFCDPARLARLGVTRFRRYAATRGLRVTTDVAERLVGAAREALPAADAAVAREAIGWDLALLAEINRQVAHAGEQLARLLPETPYTVLTTVPGWATIRAASYGGAVGDPSRWATAAQVYRASGLTPAVHESAGRRVDGEISREGHVGLRWALLELALGLRHHDRAARAYAARLADRGKHSMIIWTALANRANRIAFAMVRDQTVYDPACWR

SEQ ID NO: 213772 - protein, 338 aa, unidentified
MEQVTTIGLDLAKNVFQLHGVDAAGNVLLRKQLRRGEVLRFFSGLSPCLVGMEACATAHYWARELAKLGHTVRLMPPAYVKPYVKRGKTDAADAEAIAEAVTRPTMRFVAVKTAEQQAVLMLHKVRDLLVRQRTMLINALRGHLAEFGIIAARGPSGVTAAIVALHETQDSLPALARVALHGLVDQLRIVRDEVVKVEKRIVAQHRADDASRRLATIPGIGPITASAIAAAVPDATLFKSGRQFAAWLGLTPRTHSSGGKERLVGITKQGDGYIRRLLVIGATAVIRLARQDNASKAWAAKLLKHKSARLVSVALANKTARIAWALLARNQSYVAPAM

SEQ ID NO: 213773 - protein, 334 aa, unidentified
MNLEIIRQNVGVDVSKNDLKVAFSCLATDYRVVVRSTRTFANTSKGFVELQGWITLKKNPTYALNFTMEATGVYYENLAYFLFEQGFSVNVVVPSRAKKYAESLGIKSKTDKLDAKTLAQMGLERELRRWQPVSPYLLSLKQLTRERDALICTKTVIANQLHAYRHQGKPNKDSIWRSEELISFLDKDVKQIEKEIISIVDKDEKLKTKIGYLVSIPGVGLITAAIIVAETNGFAAFESIKQVTSYAGLDIKIAESGKWKGKSKISKKGNGHIRKALFMPALSKKKHDKTTAMFYERLKEKKGNKMVAVVAVERKLLGLMFSLWKKEETYKQTE

SEQ ID NO: 213774 - protein, 417 aa, unidentified
MVKDVQWFVGIDWATRSHCVCLLDAEGRPAGQRDFAHGGAGLTELCDWLVEKTKAAPGQIAVAIETPHGPVVEMLLEHGFMVFAINPKQLDRFRDRFTVAGAKDDRRDAHVLGSSLRTDCAAFRQLAADNPVVIELREWSRMAEELQQERTRLANRLRQQLWRYYPQAAKLTDDVADDWFLALWQKVPTPDSAAKASDKAIARILSAYRIRRLDAATVLKTLRETPLLVAPGTTEAACVHIRSLAARLRLVNQQIKEAQHSLDRLCAKLEEQESPAGQNPEQCDVAILRSWPGIGRIVLATLLVEATEPLRRRDYHALRALAGVAPVTRQSGKQRFVIRRLACNRRLQSAVHHWSRGALQYDAAARRRYDALRQRGHGHARALRGVGDRLLFALCATLKHQTPYDADHNSAKISAAG

SEQ ID NO: 213775 - protein, 355 aa, unidentified
MSQEKYIGMDVHQATISVAVMDAQGKLIMECLLETKAATIVQFLQGLQGTLSVTFEEGTSAAWLHDLLKPHVSRLVVCDPRKNALLKDGNKSDRIDARKLAELLRGNQLHAVYHGEHGVRTLKELGRSYLTITQDVTRVMNRIKAVYRSWAIPCAGTTVYAPRHRAEWLAKIAEPGVRVRAERLYQQLDLLQPVRLEARRELLAEGHKHPAVKLLRQIPAIGPIRSALLVALLQTPHRFRTKRQLWAYSGFAVETHDSGEYRSVRGKLQRNRERMTVRGLNDNHNRDLKNLFKSAAISASTRPGPLRDFYVARVEKGMRPTMARLTLARKMAAISLTIWKKGVDFDAKQLDQQAA

SEQ ID NO: 213776 - protein, 343 aa, unidentified
MMGLPNSLCIGIDVSKMSLDIAANQQIAPFTVSNDIDGFDTIITELKRHSIALVLMEATGGLEAAVACSLQAEGFDVAVINPRQARDFARSMGYLAKTDRIDAVMLAQMTEVINRHPERARFIRNLPDAKREVLAAMVVRRRQLITMLTAERNRLYPSHPQSRKSISTIIDALKDELSRINKSMEVHISTHFKTLAEILGGVKGIGAATVATLLAEVPELGHLSRREISALIGLAPFNRDSGNLRGRRTIFGGRANVRSALYMATVVATGHNPVIKQFYDRLVDSGKVKKVALVACMRKLLTILNAMLRKEEEWDPKYHSVNPESLSHTLQCRNICQDISLSL

SEQ ID NO: 213777 - protein, 371 aa, unidentified
MGKHRLAFVAFDSAKNKHAVAIADSGRGAEVRYLGEIDNSPDAVRKLVAKLTRQYERLHFCYEAGPTGYGLHRQLTELGHVCDVVAPTMIPKRSGDRVKTNRRDSVALVKLLRAGELRAIWVPDSVHEAVRDLTRARATAMVDLKTKRQQLLSFLLRHGRGFPDGRHWTKTYERWLAKQTFAHPAQQIVFQDQLEAITTAQARLAALEQQLREIVPTWTMAPVVAAYQALRGVSFLVAITFVAEVGDVRRFATPQQLMAFLGLVPSERTTGDTIRRGSITKTGNHRARRVLIEGAWTYRFSARVSETLRTRLKDLPSSVRAIAWKAQVRLCARYRRLIARGKKTPVVTTAIARELSAFLWAIGQQVAPQTR

SEQ ID NO: 213778 - protein, 338 aa, unidentified
MKLYGGIDLHSNNNVIALTDESDRMVYRKRLANDVETVLAALAPYQDAITGLVVESTYNWYWLVDALMEAGYRVHLANTAAIVQYSGLKYSDDDTDAAWLAKLLRLGLLPEGYIYPKAERAVRDLLRRRQRLVQQHTANILAVQNLFSRNRGRSISANEVRRLTPESVAELVADTNLALAIQGTILAMRGQQAAIELLEREAWRQTKATQAWRPLQTVSGIGRILGLTIVLETGPIERFAAVGHYASYCRCVGSQHVSNGRQKGKGNTKNGNKYLAWAYVEAANFAVRYNPQIKRYYQRKRAKTKAVVATKAVAHKLARACYHILRDGSAFDVNRAFA

SEQ ID NO: 213779 - protein, 358 aa, unidentified
MKIIGCDLHARQQTIAMVDTETGEITEKTLSHEGNAMREFYAALEPPVVVGIEATGAMQWFLELLEELGVECRVGHPAKIRAAETRKQKHDRRDARLLLDLLLMKDRFPEIWMPSTEQRDLRTLLRDRHQWVRMRARLQHTLQAMALNHALRRGPALWSVAGQNALQALPLPPYSSQRRTELLRLYVQLQKRIQALDKEVDVQARQRPQARRLLTHPGVGAVTALATEVFLGDPNRFDTGNQVASYIGMIPCEHSSGKRQRLGKLSKEGNSLLRYLWTEATMHAVGKDPELKRCYRRKLIHKGMGKARIAAARKLGIRLWIMMRDQIDYQEFCRRGTLRQKGKAHAGMPDFNSGPALQ

SEQ ID NO: 213780 - protein, 356 aa, unidentified
MGKDITAAGRLTIGLDLGDKHTVGCVLSNSGEVEETFSVATTMAALGRTMTGFKSSRVVLEVGTHSPWVSRLVEQAGHAVIIANPRRVRLIAENDSKTDEVDAELLARLGRVDPGLLKPIVHRGEKAQHDRILLLARDGLVRSRTQLINQVRGFAKSLGHRMPSSSTEAFPRRVREQFREDLFPGQSVMLEMIARLTQEIRRMDREAEKLCKDRYPETRVLRQVKGVGALTALGFVLTLEDPSRFAKSRTVGAYLGLRPRSRQSGEQQPQLRITKAGDKLLRRYLVGAAQYILGPFGPDTELRRFGQKLAERGGKAAKKRAVVAVARKLSVLLHRLWVTGEEYQAIGYGQSAQEAA

SEQ ID NO: 213781 - protein, 443 aa, unidentified
MSFDRLKRTQRRKRLPGHKLKPSRATLFVQNSKPHLSMKPTYFLGIDAAKHKMRAALSNRSEHVLFEKDLSVHATGLRQLLAAIKRQVNDPEQLLVLIEATGLLHLNWSAALTKAGYAVAVINPLIARRLYTLQNSIRDNKSDPIDARGLCTIGLLHGEKLLVHYRFSLRPEQFTLQRAHSVRKALRSALSNLKKTYQSLMDLSFPELGGLLQLDGVGIRQLLIQAPTPAAIAGKRLSTLEKNWMVRPKASALKALAADSMADPDLAAASGPALVALLQSVAAMEARLHALDQQIAKLACTSVDPQTKALIETIPGFGPVNAAKTLAWLPTEILHSGSNRKVAARLQAFMGNDPRLRQSGQWKGHTKMSKRGVEMLRTAFFQSAFSAAHNDPELRAYYQCKRAQGKTHEVALSHLMRILTRRLVAVLRSGKPYQSHYNLKNAA

SEQ ID NO: 213782 - protein, 336 aa, unidentified
MTLYAAIDLHSNNNYVCVIDNKDKRLLETKLANDASSVIQALKPYKRRLMAVAIESTFNWYWLADALIEAGFEVKLVNTAKVIQYEGLKRTDDRYDAFFLAHLMRLGILPTGYIYPLEQRGLRDLLRRRMRLVQDRTRYLNSLNTQYQRQTGLHLSCNKINSKLFRLPIVGDENVQLAMKANLNMCKALKVQIKLLEKSIMGQVKECKEFNLLKTTNGIGDVLAETILLETGDISRFSSPGNYASYCRCVDSCKSSNGKKKGMGNRKNGNKYLAWAFIEAANFAIRYNLKAKKFYERKKLKTNNLIALKALAHKLSRACYYIMKQGVPFDENKIFS

SEQ ID NO: 213783 - protein, 576 aa, unidentified
MIVDMLPGDTEMGGQHHRSDLGNKFFCRSGFLVRMVFGEAITVQPVPNASSMDSLMSKRRKIRPLALEPRGVRHDDPVRLLQIGRVFVPVIDREGHPFEERGQLLVSPDAGVDIARNGVKAFGQSIDLIAVEYGVALEEAVHAPFPAIAIVSGIGTGRFGALALLRRGAVVDTMHLPTALRWASVLNFNVIREDAMTDFEGARSKACYAAIDLSKSKWVVAIDTGDALKPTVHVLPGFDTDGLLDLLSTSARETAGSSQHPADVVVCYESGYDGFWLQRLLTAEGHRAIVFDPVSFPVNRRAKQAKTDKIDAKQMVRFLKTWVESDPTICTAIRIPSPEEEDAKRFHRERGALVAERTRLAARCRALLALEGVHDIAPLAVTHVRRLDGLTTHDGRPFPAQKLAEVRRIFRRIKFINELIREVDAERDEAVQKDDARFPEAEKALQLERIKGIGRYSACLLASEIYHRDFTNRKQLASYLGLTPTPRASGDVEKCVGIDKAGNKIARTLLVELAWNWLRFQPDSALSKWYRTFTATRAPSSKKIAIVALARKIAVALWRYVGSGLIPTGVVMKAEA

SEQ ID NO: 213784 - protein, 421 aa, unidentified
MKKRRYRATNVKQANWGKIASLAAGQRIVFSVDVAKDDFFGALMMADRSVIATIKWVHPKQTGEVGEHLLNLDTQNLEVVMEPSGTYGDALRGYLTALGFAVYRVTPKRVHDAAEVYDGVPSLHDAKSAYLIGRVHLDGASAPWEELSAARRDHHALIAELDLYQGQHQGNLNRLEAALNRHWPEAVRILDLSTVSLHTLIGEYGDPSQVSRHRDEAEQLLLRTGRGLLSAEKVHQVLDSSEASLGLPCTEGERHLLQVLAQELLRTHEALKAIEHQIAKVVEDDRVLRRMANVVGKTTSLVLETTQGTPLDYANPHSYLKGLGLNLKERSSGKHAGQLKITKRGPGKARKYLYFTALRWSNKDPVIAAWYQRKVKRDGGLKGKAIIAVMRKLALSLWYVARGEAFDSRKLFNTRALGIAA

SEQ ID NO: 213785 - protein, 312 aa, unidentified
MKQQHQDSEITIGLDLGERRHRFCALDGRGEVVEEGSLLNDRASLARLTARYPGALAVMEAGTHSPWVSRYLEGLGWEVIVSNPRKVRAIYQHERKSDQRDALMLARIGRMDRALLYPVRHGSEQAQQDLLRIKLRDSLVRARVALINSVRFSLKSLGYAVCNPSSERFHKVAMERLPERVQQMIAPSVQALAELSTRIAVLEREINVVARTKYPQTLWLQQVPGVGVLTALYFVLKIEDPQRFENVRDVGAYAGLCPRRDQSGQSDPQLRISKRGDPYLRRLLVSAAQYILGPFGPQSALRGYGLMLAARW

SEQ ID NO: 213786 - protein, 367 aa, unidentified
MERQLERCGGLDVHKETVAACVRVGGRTGQAEQHVQTFGTTVGELLVLRDWLAAHGVTHVAMESTGVYWKAVFYTLESDFTCLLVNAAHIKQVPGRKTDVKDCVWIAQLLEHGLLRGSFVPPAPIRDLRDLTRYRKAVIQDRTRVANRQHKALEEAGMKLASVASDILGVSGRAMLAALVQGTTDPAVLADLARGRLRGKLPALRQALANRFRPHHAFVLGQLLTHLDYLDEAIATLSTEIERVMAPLAEPLRRLDTIPGINPRTAEVILAEIGPDMRVFPSARHLASWAVLCPGHHESGGKHKSGKTRKGNRWLRTALIEAAAGASRAKHSALQARFRRVLTTSRAEERRRGSGPRPVAHGLPRPR

SEQ ID NO: 213787 - protein, 342 aa, unidentified
MQIATIGLDIAKNVFQVHGIDAAERVVVRKQLRRRQVLEFFKALAPCLVGMEACATAHYWARELMKLGHLVRLMPAKDVKAYVKRNKNDAADAEAICEAVRRPTMRFVQIKSTEQQGRLMLHRARDLLMRQRTQVINALRAHLAEFGIVAPQGRQGVKELLLIIAGGEDERLPVDAHASLVVLSAEFTAMQTMIGSIEKRIMAHHRSNEASRRLETIPGIGVAGATAIAATVPDPTVFRSGRDFAAWIGLVPREDSTGGKHRLGPISKRGDRYLRRILVVGAVAVLRYARQNPEKYPWLAQLLARKPFKVAAVALANKMARTAWALLAKGGTYRVPVLVAAA

SEQ ID NO: 213788 - protein, 388 aa, unidentified
MLLDHAIDRPTAIRTQFGAIFVSLELSRSTWLVTSLSPGKGEKMSKHSVPASDVAGLMKLFADLKRKARARTGQGYPIITIQEAGLDGFWLHRVLQQEGIESHVVDPASIATPRRRRRAKTDRLDGETLLRALLAYKRGEPRVCAMVVAPSPEEEDRRRLCRERRTLIDERIRHVNRIKGLLFAQGIFGYAPLRGDRRARLEAVRTGDGRALPAHLKAQVSRELDRLELLLKQIKAVEAEQDALLAAASKPIAVSAAPDPVTMLLALKGMGPNFAAVLWSEAFYRQFSNRRQLAAYAGLAPTPWRSGGIAREQGVSKAGNPRLRTTMIQLAWLWRRHQGQSALARWFETHSRRGRKTAIVALARKLLVALWKYVTAGVVIEGAKMKSV

SEQ ID NO: 213789 - protein, 487 aa, unidentified
MRPRATNKSTQTFDVCGFSFESAGALAFVDEYSGFAVQPAHYIAFAERELARPGSPIYHYRRCRVKPLSDRPFTAHVGIDWADAKHDVCLQAADREQREFARFAHQVGSIDQWAKSLHQRFGGPIAVALELAKGPIVYALQKYDFFVLFPINPATLAKYREAFKPSGAKDDPTDAELALDLLLRHPERFAPLKPQSVAMRTLLSLIEQRRELVDDKTRVTNRLGNALKQYYPQALDWFEQRDTILFCDFLSRWPTLSAVKRARKAGLKAFFYAHNGRRPKLIDDRIDSIRAATPLTDDMGVIAPYRLQVQVLVEQLRVTLQAIDRFDRQIAAVATTLPDYALFSPLPGAGPHLAPRLLAAFGEQRERFMSADELQKYSGIAPVTERSGKKRWVHWRWQCPTFVRQTFVEWAGQTINKSFWAGLYYRQQRDKGSSHQAAVRALAFKWIRILYRCWQAGTPYDESTYLNALRQRGSPLLKQLHTTAQNA

SEQ ID NO: 213790 - protein, 341 aa, unidentified
MQVTRVGLDLAKRVFQVYGVDVHGKRKLSKKLGRGEMLQFFAQLPACVVGVEACGGAHYWARELGKFGHTVRLMAAQFVNPYRKSGKNDVNDAEAICEAVGRPNMRFVPPKSEEQQALLMVHRARSLVVANRTAQVNQIRGLLGEFGLVVPVGLRRLRTQLPQILEDAENGLPVLARHVFAELLQELHALDEKIQRYDRQLQELARQSEPARRIMALEGIGPITATAFVASVGDARVFKNGRQFAVWLGLTPRQYSSGGTTRLGRITKRGDRYLRMLLVHGARAHLRFVERKNDPKSPWIKGLRARRHVNVAAVALAAKHARIIWALLAKGTTYRLPAAAT

SEQ ID NO: 213791 - protein, 325 aa, unidentified
MSQPNSLCVGIDVSKATLDIAASSDIAQVTVSNDSDGFDSIILELKKHSVALVLMESTGGLEAAVACSLQAEGFDVAVVNPRQARDFARAMGYLAKTDRIDARVLAQMAVVINRHPERERYIRTLPDAERQVLTAMVVRRRQLIMMLVAERNRLYPSHPQSRKSINTIIKALEDELARIDDDMNRHIQNHFKELAERLGSIKGVGAMTAAALLAEVPELGSLSRRKISALVGVAPVNRDSGTMRGRRTIFGGRAGVRSALYMAALVATRFNPVIKVFYMRLLAAGKAKKVALVACMRKLLTILNAMLRKNEKWDDSYHHVAHINS

SEQ ID NO: 213792 - protein, 465 aa, unidentified
MRTDEKRRRNRKVKKELARRLQSENPGLEVVHPHAAGIDVGNGAHYAAVRPDRDSQSVRRFECFTADLYRLADWLQSCGVQTVALQSTGVYWIPLYNILEERGLEVYLVNARHTKNLPGRKSDVQESQWLLKLHTYGLLNNSFQPPSEIRTLRTYWRQRLQHVTGAATCVQRMQKALTQMNIQLAHVISDLSGVTGQLIVRAIVAGERAPQKLAELSHPRIQASRAEIAKSLEGNWRPELIFVLQQEMEMYDTYQRRVAECDQELQKHLRDFADTVPPPVKKELPPKKKKKQNKNNPHFHLADELERITGVDLTRIDGIDVIVAQTVISEVGLDMSPWKTEAHFASWLGVCPDNRISGDKVLARGTRHVLNRAATALRLGASTLLKSQPYLGAQYRRLRSKLGAPKAITAMAHRLARLVYRMLKYGQHYVDKGAEYYEQRNRQQQIEFLRKKAARLGLQLAPALP

SEQ ID NO: 213793 - protein, 386 aa, unidentified
MPQLNDLSRSLVILEQDATLIAVIEMGQSNWLVAGIVPGVERSPLKKLAVDESALLKLLNRWREEAEKAGHRIERIAIAFEAGRDGFWLARWLRARGIEAHVIHASSVAVSREHRRAKTDRLDTELLKRAFLGWLRGERGHCKMVAIPTLAQEDAKRPNRERESLVGEQSRIVNRMKAALARLGIRGFNPKLKKAAERLDGLRTPEGEPIPPNTLAELKHDMERRRLVRSQIRDIEGTRLERLKQAPGDGPHVMVRLLARVIGVGVETADMLVQEVLSRNLRDRRAVARYGGLTGSPDESGKKRREKGLARSGNARVRRGMIQLAWRFLMFQKGSALAHWFYARTKNAPQTRKTMIVALARKLLIALWRLAREGAIPEGIVLRPAL

SEQ ID NO: 213794 - protein, 365 aa, unidentified
MLYLGIDQHKRQLTVNLRSEDGSVVLKRQVSTQWERVHAFFADLAEKARPEGGFWTILEVCGMNPWLLEMLEEYGCGEIVVTQPTTRSKQKTDRRDASQLSHMLWVHRQQLAGGKHPTGLRRIEPPTAQQAEDRQLTTLRATLTKKRTAVLNTIHKILRKHNREQERPTKVFQTKKVRRWLAEMELSTVDRLEMDLLLPQWELLDQQLEVVEEKIAERAEADEDARLLESMPGMGHYSAVAVASRIGDIRRFRRPGSLANYFGLTPGCRNSGEANQRLGSITKRGSKIVRYLLGQVVIKVLRFDTAMRGWYKRIKRRRGSKIARVAVMRRMVTIIWHMLKKKQRYHYELSLKKHKEFEAFEGSVA

SEQ ID NO: 213795 - protein, 390 aa, unidentified
MLKFDGLSHSLTAFEQDSTLVVVIELAASSWTVGGLLPGVPRQPTKKMAADKYALARQLEDWREEAEAAGHPIKRVCVSMEAGRDGFWLARWLRARGIEAYVIHPTSIPVPREHRRAKTDRLDVGMLLRAFLGWLRGERKHCSMVKIPTREEEDGKRPLREREGLVGERSSLINQLKSLLALHGIRGFKVTMKKAATRLQGLQTEEGLPLPGHILAALERGMARLSLIKTQIADIDRERVRRLKEAPEEGLHPMVWIIAKVKGVGLMTAELLVREILSRPMRDRRAIARYAGLTGSPEESGKRRREQGLAKAGNSRVRHVLIELAWRFLRHQKDSALAQWFFARTQDGRGPTRKVMIVALARKLLIALWELATTGKLPEGVCLHDRPLVA

SEQ ID NO: 213796 - protein, 342 aa, unidentified
MHAVSAGDTAGLFSRFGDLQQKARTRTGRTFSIITIQEAGLDGFWIHRLLQGEGIESWVVDPASVLTSRRRRRAKTDKIDGETLVRTLLAYKRGEPRVCAMVKAPTPEEEDRRRICRERKTLTAERVTHVNRIKGLLFAQGVCDYEPLRRNRRGRLEELATGDGRPLPEHLKAQISRELDRLEIILAQLKAVGSERDAMLEPAKEGPPTPASLLAQLKGIGPEFAAVLWSEGLFRSFNNRRQVAAYAGLAPTPWQSGSVAHEQGVSKAGNPRLRTTMIQLAWLWLRHQPDSALSLWFRERVQRNGGRGKKIAIVAMARKLLVALWKYAVHGILIDGTKTKAA

SEQ ID NO: 213797 - protein, 354 aa, unidentified
MAIVGGFDVHRGQITFDYLDTETGEVTTGQVRPATRQTLRSWLGRFAGLTDVAFAVEGCTGWRFVVEELVRAGVEAHLAEPAETATLRGRKKRAKTDRTDARLMRELLRQQRLPESWIPPAAVREVRTQARMDVALLAERRAWRQRIHAQLFHQGAPAIAKLLTAEGQAALAQAALSPAGREVVDTALAAIAALTALLDPLRARLQATGARQPGCRALTAHDGIGPLGGTIIWAELGDCRRCARADQAVRFAGLDVTVRSSDSRRAPGRLARQGAPALRWALDEAAKSASHATAPDHPYYLAARDRLDGKLATLSVARKLARRCYHTLRDLGDDAWPTTANQAAPASTAESAAA

SEQ ID NO: 213798 - protein, 352 aa, unidentified
MIVFGADMHKQTHTVAAVAAATGELAGERTIRVSDDGFLALLEWARALGEDRVWALEDCRHVSGSLERFLMASGERVVRVATKLMSDVRRAGRERGKSDRIDALAVARAALREGLDALPSAQLAGVELDIRLLVDHRERLIRSRVALNNDLLWHLHDLWPELKLPGSALFSQKWSSRIGRRLARAEQTARVRIARDELRRLRDLTVAANELETEISDLVDQAAPHLLSEPGFGPLTTAKLLGEIAGAGRFVSEAKLARAAGVAPIPVSSGKTNRHRLDRGGNRQLNTAIHRIALTRARCHPETQDYLARKRAEGKTGLEAMRCLKRHLTRRIWHLLQTPHPVGGTPPSPSIS

SEQ ID NO: 213799 - protein, 407 aa, unidentified
MSAEETAREPVELHIVSDSTGETAQRLVLALEAQFPDQPFEEIRHPRVENVEDLHLAVQRARGRPAVMVYTLVEAGHPVVPIHPNALKASRPRYRAAGSKSDAEDAFILADLLRTDGHRYRVLRPLSDETRALRALVRTRDDLVAERVGLANQLRALLERFWPGAGAIFADVDSPIALAFLRRYPTPQSAERLGEKRLAAFLARHAYCGRRPVPELLERLRAAPAGLTGDIEADASGELVLALVAVLEPLVAQIQRLTAAVEHALEVHPDGALIASFPRAGHVNAAQILAELGDDRGRFVSEEHLAAEAGVAPVTRASGKSRAVGFRWACNKRLRQAVVCFADNSRHASAWAAGIYQRARARGCDHPHATRVLARAWMRVLWRCWTTHQPYDPARHHAAAALIQAAG

SEQ ID NO: 213800 - protein, 338 aa, unidentified
MKLYGGIDLHSNNSVVVLLDEEDRVVYEKRLPNDLGYLLLELGPYREGIEGLVVESTFNWYWLVDGLMEAGYRMHLANTAAIQQYAGLKYTDDRSDARWLAHLFRLRLLPEGYIYPKEERAVRDLLRKRGQLVRQKVTQILSMENLFSRNRGSRLSADRIRRLTEPEVDQLLPQADLALAVKSNLSVYRCLMGEITRLEKVVKERMKLKPSFRSLLTVDGIGPILGLTIMLETGDIGRFAGVGQFASYCRCVDSHKISNGKRKGSGNTKNGNRHLAWAFVEAAHFAIRYNPKVKRFYQRKKERTNAIVAIKAVAHKLARACYYILRDQVPFQVEKAFG

SEQ ID NO: 213801 - protein, 322 aa, unidentified
MRYIGIDVSKATFVVAYSSDKGGEIRTFNNTTAGIRQFIGTLPKDGSIHCVMEATGNYSALLLYMLNVAGITVSMENPLKVKNFAKAMLSTIKTDKSDARLITLYGEKMNPRPFKVQGEAILRLRQKRTVIRQLTKQITAMSNLRGSLACLPVPDKGATHTVDETIKFLEKRRDRLQSELTDLVEVEFSRQLALLTTIKGIGITLATALILTTGGFTYFQNAKQVSRYLGICPTYEQSGTSVNIRGHINRNGDAYTRGLLYIAAWPASRFNAQCKETYTRLRQNGKPGKLAMIAVANKLVRQAFAVVAHDKEYIDGFVSNRP

SEQ ID NO: 213802 - protein, 409 aa, unidentified
MERVSERVAGLDVHKKSVTVCVRVPGPAGDRRQEVQTFGTTAAALLALRDWLSAHGVTHVAMESTGVYWKPVYYVLEELFTCLLVNAAHVSKVPGRKTDVRDCEWLAQLLEHGLLRGSFVPPVAIRELRDLTRYRAVLVQDRTREANRLHKVLTDAGIQLASVASNVLGASGRAMLTALVEGTTDPTVLADLALGKLRRKLPALREALVGRFRKHHALLVSQLLAHLDYLDEALEVLTAQIEEALGPFANEAARLDAIPGVGPRTAQILIAELGVDMRQFPTARHLASWAGLCPGTHESAGKRRAVRTGKGNRWLRAALIEAALAAINVRESALAGRYRRLVRRCGHKKAIVAVAHKMLTTAFLLLADGRAYQEPGAGYFDAQRKDREVRRALHVLAHHGYRISLEPAA

SEQ ID NO: 213803 - protein, 368 aa, unidentified
MGMGWTPPRRPWCARVVAFLTTEQEASVSEASTIGLDLAKRVFQAHGADASGKVVFRKRLRREQVLAFFAGRAACVVAMEACSSAHYWAREIGELGHTVRLIPPAYVKPFVKRQKNDATDAEAICEAAQRPTMRFVSVKSEVAQANAVVFRTRDLLVRQRTQAINALRGHLGEHGVVVAKGPSHVAKLIAHVEDPATGLPEAARTVLRVLTASLQFLSERIDLLDREIARRAREDKEVRRLTTIPGVGPVIATALAALAPPADAFRRGRDFAAWVGLTPSQHSSGGKQKLGATSKMGERTLRRLLIIGASSVVQKAIKHGTPSGSWLGRMLARKPRMLVIVALANKMARTVWALRATGEIYRAPVVAA

SEQ ID NO: 213804 - protein, 346 aa, unidentified
MEHYAGLDVSLKEISICVVDRDGNTVARGTCLADPEGIAGWFRNRSLEPNRIVHESGMLSIWLQRGLERIGLAATCIDARKAHKSLSARLNKSDAGDAEGLAQLARTGWFTPVHIRTEASDRLRALIGARERLFRLRKDLEGHIRGVLKTFGIRMTGISQGRQRQAFRDQLAAAGETNTVLRVIADGFITAHATLCQAAADLDAALKRKARDHSVARRLMTIPGVGPVNALSFIALIDDPSRFGRTSDVGAFLGITPKRHQSGEIDWSGRVSKCGDSAMRGLLFEAAASVIRQVKRFSALKSWAVRLAGRRGFRKAAVATARKIAVLMLTLWKNETEYHWTKEATA

SEQ ID NO: 213805 - protein, 351 aa, unidentified
MIIGCDFHPRFQQIACLDSETGECAERRLMHTAEAEEFYRSLVGRAVRVGVEATGNFAWFRRLLGELGHELMLGDATAIRASNPRNQRTDKRDARHILRLLVEERFPLVWQPGLENERLRQLLLHRSSLVRMRTRIENQLDSVGKNEGLVGSRRWTGRRRREVEALKLEGWYGERRRDLLALLDGLQERIRPLDEAVRAAAAADPQARLLMSHPGVGPVVSLAYVLTIGDWQRFPRGKQVGSYLGLIPCEESSGDKRRLGHISKQGNPMLRWLLVQAATVAQKYDADWHRQYVRLSMAKHHGVAKLAIAHKLAVRLYWMLRSGQDYQQAMERGSHAGQSVCPNGCGRKPRT

SEQ ID NO: 213806 - protein, 364 aa, unidentified
MLRNRTSVGLDVHARSVVACGLDGHSGRVFERRLCPDHAEIISWVRSLPQPVSVTYEAGPTGFGLARFLTGEGIDCQVAAPSMLHRPAGDRVKTDVRDARLLARLLHLGEITPVAVPSVEQEAARDLVRAREDVRGDLMSARHRLSKLLLRQGIVYYGGHAWTGKHDLWLRAQRRSAVFDAPALGMAFDVGYDGVLAAVARRDRLDATISAMAAASTFTPVVRRLCCVRGVATLTAFGLAVEIGDWHRLSGRSIGAYLGLVPTESSSGDSRSQGPITKTGNRHARRLLIEAAWHHRAPLRPTVALRRRQDAASPAARDRAQRANQRLHSRWVGFDGRHKQPTVANTAIARELAGWCWSLAVLDD

SEQ ID NO: 213807 - protein, 378 aa, unidentified
MTCIPAQDCYIALELSRTKWLVGALLPGRTKVTTTLVPGGDTAALLDVLHHLAARGTREVGTPVALKVCYEAGFDGFWLARFLINRGVQTYVLDPASFLVSRRGRRTKTDRIDVEAMTLTLKAYLAGDRSVCRAVIIPSPEEQDAQRLSRERTQLAAEKTRHTNRIRGLLALHDIREIKGLWGGAWAQALSELRTGDGRALGPYLRAELAREFERLHLVLQHMKALDADRQAALTDETLAFPERHKAASLTRLAGIGPISATALVAEVFHRRFQNRKQLASYLGLAPTPYASGDSERDQGISKAGNQPARSLLVELAWGWLRHQPGSGLASWYRQTFAERGKRGRKVGIVALARKLALALWRYLESGVVPQGAELSSR

SEQ ID NO: 213808 - protein, 454 aa, unidentified
MSGSIRPHANHCFSLIVKCVMIQSMSSSSQLRGGCAMKVVYAVCCGVDVHKTFLVATIITSQGITPHYSKKRFSTFNNSILQFKQWLIENNCFDICMESTGKYYIPILNLLEDTIHITIANPKWVKAVKGNKDDVKDSKWIGDIFRLGLVPGSYIPNKPIRILREYTRYRSKLISCKSSEKNRFQNAFTVCNVALDAVVSDMFGKSASSITDYLISSESFDPEHCSSLLQKSLKKKAATVIESIEGYQITKEQKERMIMVRSHLDFVQQSLVELDEKLDKMVAPYESAITLLCTIPGVDRTSAITIISEIGTDMSQFANSKRLCCWAGLTPGNNESAGKKKSVRITRAGVYLKPALVQVAHAAVKSNRSPYYKNKYERICKRRGKKRAIIAIARMILTAIYHMFITGEAFNPSDLYKIDAPQEMLEKQKEKAIKQAMKLLISNGLIKPTDISVA

SEQ ID NO: 213809 - protein, 397 aa, unidentified
MYIVGIDIAKRKHEAAVIDGEGTVIIKPFSFTNNCSGYNRLLAMLTKAKLPLDEVSFAMEATGHYWLALFTRLQKEGFRVQVINPVQTNSIRSFYIRQAKTDPRDALLIAEVIRFGHFSESTLHPENIYELRELCRGRHAIVSMQADVKRKVVALLDQVFPEYETAFTNMFGDTSMAILQTCPTPKELSEMPLEELCHLIEVSSHKRFRMAKAQELQALARNSFGFAMAGDVFSTMIRLYAKHLDFLKQQVREMDRKIAEIMDTLDTPITTITGIGPTLGAYILSEIGDISRFSSAAKLAAYAGIDPTMRQSGEYNGVRNRMSKRGSPYLRHAIWLAASSAVLHDPALKLYFQKKRDEGKPYMASVGHACRKMVSIIYAVMRDNKAYTPCIPNEISA

SEQ ID NO: 213810 - protein, 343 aa, unidentified
MHLPYHFIGLDVHKKSVAFCEMRADGKRIDSGTFSTRQTAIAQWAAQRTQPWIGGMEATLFSGYLYDMLTPHAVEIQVGHPARIKAISTAKHKNDAADAETLANLLRADLFPECHMASKRVRELRRVLRYRNFLVRQAVRMKNKTTGILMETGVEYNAKKIHRQRYFNELLDNLEDVPNSVRELLRMTRSNLEIFQAAQKKLLDALVKLPELRARVERLMTIDGVGEITALTWTLEIDDPWRFANLKQAQSYCGLCSGQHESAGKNKNGPLSKQRNGNLQTILIEAAKLAPRWNAQLRDVHARAMEQEKNNNRATCAVARKLVAYLMAVDKSGKPYEDRSSEE

SEQ ID NO: 213811 - protein, 300 aa, unidentified
MQVSTIGVDLAKNVFQVHGVDSAGKVIITRQLRRKQVIDFLSKIPPCLVGMEACGTAHHWAREVSKLGHTVRLMPPSYVKGYVKRSKNDAADAAAICEAVTRPSMRFVPIKSADQQALLMLHRTRDLLIRQRTQLINALRAHLAEFGLVAETGREGLGQLAAIITDESNREALPSAMKQALQAIVDQLAALELQIGTLDRAIHAHHRANDMSCRLETVPGIGVIGATAIASTVTDPRDFKSGRDFAAWIGLVPRQHSTGARSGSAASPSREIAISDDCSSSVRQPLFDKPGRIRKSIHGS

SEQ ID NO: 213812 - protein, 412 aa, unidentified
MKVVHEICAGIDVHAKMLVACLLLANGEKEIRTFSTMTDELLRLRDWLVAARCTHVAIESTGVYWKPVFNILEDALTVILINPEHAHALRGRKTDVKDAEWLANLLRHGLLKASFIPPAEIRELRELTRYRESLVREQSAVANRIQKLIESGNIKLAQVASDALGVSGRTILWALARGETDPVKLAALAQRQLKEKRVQLERALHGRLTVNQRFVLRELLKRWEELEAADGRVSKEIDHYLQDRPKLARARDNLDTIPGLGPRAAEIIVAEIGVEMKANFASDAHLASWAGICPGNKATGGKRLSGRTRKGNTYLRSALVQAAWGASLKKNCYLSSQFFRLVKRLGRKKALVAVAHSLLVIIFHVLQNDQTYTELGGDYFDRQHVEQQREYYLRRLQMLGLKVTVEELSVAA

SEQ ID NO: 213813 - protein, 352 aa, unidentified
MTEFIGCDMHKKYSVFVSMNEAGQAQPAVRVEHADRQAFRQYLGTLTKGSAVAVETTGTWYWLVDELEAVGLRPQLTNARTAKLLMGCRYKTDKLDAKGLATLLRNGTLPTVWIATAEVRDLRELTRTRMALSAMRTKVKNRILADFAKYGIALEGYSDVFGLGGRRLLGRSLEALPEHTRQAVEDQLIVLDAVCERIGAIEPRLAELIEETPMLALLRSLPGIGKILATVIGLEIGTIERFATAERLCSYSGVVPCVRSSGGRTRFARTASDVNRYLKWAFVEAANLVVANRERWNYPSLRQLYERICRRKNHPVATMAVARQLAESAFWVLRKEQPYREPSLVRGSSSPR

SEQ ID NO: 213814 - protein, 401 aa, unidentified
MQEPLQHNSIDVFVGVDVGKGQHHAVAFDRSGKRLYNKALPNDEAKLRALINELKAHGQLLFVVDQPATIGALPVAVARDEGVLVAYLPGLAMRRIADLHAGEAKTDARDAAIIAEAARSMPHTLRSLRLADEPLAELTMLCGFDDDLAAQVTQTSNRIRSLLTQIHPALERVLGPRLDHPAVLDLLERYPSPAALAATSEKTLANRLTKLAPRMGKRLAAEIVQALGEQTVVVPGTQAATVVMPRLAKQLAALLQQRDEVASEAERLVHAHPLYPVLTSMPGVGVRTAARLLTEVAHKAFASAAHLAAYAGLAPVTRRSGSSIRGEHPSRRGNKVLKRTLFLSAFAALRDPISRAYYTRKIQQGKRHNQALIALARRRCDVLFAMLRDGTFYQPKTVPNA

SEQ ID NO: 213815 - protein, 331 aa, unidentified
MKIREIIGIDISKLDFHAFIHTTQVFTRFENSTKGFKALLKWVAKNSPHKQSQTLFVLEHTGRYSHNISYHFSANEIEFALVPGLEIKRSLGITRGKDDKIDAAKIALYGYRLRDEIKPTKLPGKQLDKLKRLLTLRDRMVRQRAGYKASLKEDEHVFCEEEAREIIEHQEDIIKALSSKISQIEKQMDDIIKANKKLNKLFKLLTSIKGVGKVTARYTIVYTAAFTKFATWRKFASYCGVAPFPHRSGTSVKGRNKVSNLANKKIKSLLTMCVCSAIQSNSEIKAYYERRLNEGKSTMSTQNNIRNKLLARMFAVVKRGTPYVDTMKYAA

SEQ ID NO: 213816 - protein, 338 aa, unidentified
MGVAIGVDTHKGSLAAAAVDGLGRILGAREFRNDPAGHRALLEWARGQGEPRTIGVEGSGTYGAGLARVLASAGEEVREVPATLTYRERRRKGSQGKSDPVDAVAIARVVARDGDLPSPRRVEALQDLKLLSDYRDQLVRSRTQVANRIHHDLVVLRPGYERSVPNLVGGRHLSQALSLLRGDPSVRAQLVRQRIGELRRLGREIAQTKAHIARKVKESGTTLTELQGIGPIIAAKFLGEVGDVARIRSKAAFAAMAGTAPLVASSGLTHRHRLNRGGNRQLNYALHYMALVRYRSDEETRAYIERRRAEGKSLKEVIRCLIGPVSGRGLQDGGRAPR

SEQ ID NO: 213817 - protein, 317 aa, unidentified
MQPVLNVGVDVAKDTVVVACAEQYFPVQEIRNQRASLRRWLKSLPAGSRLGLESTGSYHEVLADLAHAHGHTVYLLNPRETRHDAKAMGTRAKTDRVDAILLARLVAQEHRGLPPYTPPTATQRQLDRLIRRRAKIVRIKGMLKLTMSTLSGFTPDVQAVIRKLDALLAKLDTTMATLAARSSEHRDAQLRVETIVGVGPLVGLSLTNTLERVPFRNADAFVAFTGLDPRAKDSGQKTGRRRLSKRGPAELRRLLFNAAMAAVRTKAWKPIYDAYRTQGWSGTAALVIIARKIARAAWSIHRYHTTFNPDRLTKGLT

SEQ ID NO: 213818 - protein, 469 aa, unidentified
MSVGKTESDKKTKRKRKRMSIDGYPVLEPNAGGIDVGAREIYVSVPPDRDEESVRIFATFTEDLERMADWLIRVGVTTVAMESTGVYWIPVFEILEQRGIRPCLVDARHLKNVPGRRTDWHECQWLRFLHSVGLLRAAFRPESEICAVRALMRHRSELVQMAAQHVQHMQKALTQMNLQIHHVISDLTGVTGLAIVDAIIAGERDSKKLAKLRDFRIQADEETIRKSLVGNWRAEHLFTLKQSRQLYQTYQQQIVDCDEEIQRLTTAFSSRVDPSEKPLPPDRKHNRVGRKRNKDIDPKSCFDMRTETYRLFGIDVTQIPGIGNMALSLFTELGRDLSKWPTSSHFASWLALCTDNDISGGRVLWQATRKLKNRAGQLFRMAANSLHHSPTYLGNYLRRMKAKLGAPAGITATAHKIAVVFYTLVTKQIEYDESVWAEREAERQKRFEAKIKRQAKKLGFQLVPIQQNV

SEQ ID NO: 213819 - protein, 370 aa, unidentified
MGKSALYVGLDVHKMSVDVAVAEPGPGAEVRFYGRIGGDLEALDKVTRKLQAKGAELRFAYEAGPCGYQVYRHLTAQGHSCLVAAPALIPRRPGDRLKNDRRDALALARLLRAGELTPVKVPDADDEAMRDLTRAREDAICVERRARQRTVAFLLRHGRVYPGKTTWGRGHWAWLLQQVMDHPAQQIVLQEYLDAVREASARVLRLTGQIRDLVPQWHQAPFVAAYQALRGVSFIVAATVVAEVGDLDRFNNPKELMAYLGLVPSEHSSGASVRRGRITKTGNSHARRVLVEAAWAYRLRARVSRTLLKRQEGLPERVRQLAWKAQLRLCTRYRRLLARGKARQTIVIALARELAAFLWAIGRAVAPATA

SEQ ID NO: 213820 - protein, 342 aa, unidentified
MDYYAGIDVSLEASSICVVDASGKIIKEAKVLSEPEALIAWFKALPFTLARIGLEAGPLSQWLYAGLKDAGFAAELLETRHVRDAFKAMPVKTDRNDARGIAQLMRLGWFRPVHCKSAPAQETRALLTARKLVQAKLYDVQMSLRGILRGFGLKVGRTTPVGFAVRIRELTEHHPALSAIAKALLAVHEVLLRELNGFEKQVRKQARCDSRVRLVMTAPGVGAIVGLTYVAAIDDPERFSSSKTVGAHFGMTPKKYQSGETDVTGRISKSGDKGVRAALYEAAHVILTTPVKGGALKSWAAKLARRAGMRKAKVALARKLAVILHRMLADGSVFDVTKAAAA

SEQ ID NO: 213821 - protein, 405 aa, unidentified
MDEIVWVGIDVGRHAHHAAAVDEAGTVLWSRRLPNDQLAIEALVDRVADMKLVVWAIDMTAPESALLRHVLAARRQEIRYVPGRVVHSMTGAFAGEGKTDARDAVVIAQTARLRGDLSAITAPDDVAIELDLLTGHRNDLVAERTRGINRLRGLLTRIFPALERCFDYSTLTGLAFLTRFATPSAIAALSDDEIYEHLRGHGVRRPTIPKMINKARAAAASQTIALPGEATTALLVQQAAASLMALTRQIAELDKQITEVFRRHRHARILESVPGIGTRSGAELVAITGGDLTSFGSAAKLAAYAGLAPVPHDSGNRRGTLRRPQRYHRGLRKVFNMAALNSSQRDGPSREFYQRKRREKRSHVHALIALARRLVDVVWALIRDTREWAAEPAFSASERSASAAA

SEQ ID NO: 213822 - protein, 413 aa, unidentified
MTVFCGIDWAEHHHDVALVDEAGTLLAKARITDDAAGYHQLLAVLAEHGDSPEDPIPVAIETSHGLLVASLRTGSRRVFAINPLAAARYRDRHGVSRKKSDPGDALVLANILRTDMHAHRPLPADSELAQAITVLARAQQDAVWTRQQVANQARSLLREYYPAALLAFQGKQGNLTRADARVILTLAPTPAKAAKLTLTQLRAALKRSGRLRGCDAEAERLRAVFRAEYAHQLPGVEDAFGHQLLALLKQLDAACEAADDLAEAATSAFHQHTDSEILLSFPGLGPMLGARVLAELGDDRARFADARALKSYAGSAPITRASGKKRFVGRRFVKNNRLINAGFLWAFAALTASPEANAHYRRRREHGDWHAAAQHNLLNRFLGQLHYCLKTRQHFDEQAAFAPLLSPPTDQAA

SEQ ID NO: 213823 - protein, 355 aa, unidentified
MVQSNKKDFSGQNIAIGIDVHLRTWSVTVLTPSGFMRTHSQKASAKELFEHLNKHYPNGSYHAAYETGFSGFSTYYSLTELGIECTVVHAADVPTTQKEKVSKSDPVDSKKLAKALMRGELGSVYIHSKDSLDDRALVRHRATIVKLSGGIKSRIKHLLYNNGVEYPEEYFRSNRHWTRSFIAWLQNDVRLLSDTRISLDLLIAEILHYRERLDVNRRLRSLARSDRYAEKYGILMSVPGIGSTIAMSLLTEIDDISRFSNQRQFASFLGLVPMMSSSGDKEYVGEKTFRGNKFLGPKIVEASWIAIRHDAELSAKFGALCARGMKSQEAIIRIARKLSNIIFSVLKSNRRYECR

SEQ ID NO: 213824 - protein, 394 aa, unidentified
MKLIGIDIGKNKHFFCVMDQQTGEIISQPVSFSNDKEGFDFLIQKIKSYSKDSVLIGMEDTGHYHFTLLKYLLNLQYTVALINPKTTDFNRKIQGGITKNDKLDTINICDVLDTPERKKQYRITKVNSFDLYEQKQLTRHHHSLKEEENVYKNRLQKCIDIVFPEFNKLFNSKYGTVYMNILKMFGSAENIANTDIRTIRKCFEIEGRGNRISLTPERLKECARSSIGISSSVEVIQIKHLIAQIELIEEQLTEIDKKIEEFSIQNNSPILSIPGISHFSGTSILAELGDISNYSKPSQIIKFAGVAPLHYESSQFNAQHTAITKKGSKYLRKTLYQIILPVIRHNPVFNKYYQLKISQGKGHRCAQGHCVRKLLRIIYHLLKTNQQFDPQLLR

SEQ ID NO: 213825 - protein, 373 aa, unidentified
MKTYTLKDGTLKATPVACAKEIKNEKAPKAKLIAVGIDTGLGNNQASRKVDNAAIGPVQKLRSETELLLYVDKQLELAQEVVVVYEAGPFGYGLYRKLTARGAKCLVSAPDSTQQKRKRRKNNAIDSRTLTSNLSNYLNGNEAALQLVRVPTPEQEQARLVSRQHDQLVEERKRLGAQGNALLLSQGFGSWKNWWRPQAFKALERVVPQWVLEMLQTWVDLLRVLDEKIQKAKAGLAKGWSGPRPKGAGANSMVQLQSQVLDWNLYSNRRKIACLAGMVPSEWSTGKNQRLGSITKVGVPAIRRIITEMVWRMILFQPHYRPVQKWQEVLRGTNRALKKKAVVAIGRQLIVDLWRLQTGRISAQELNLVMIGG

SEQ ID NO: 213826 - protein, 341 aa, unidentified
MSIVILGIDLGKNSCSIVGLDADGSVIVRRRMRREGVIAFAAKLTPCTMAMEACCGAHHMGRSLAALGHEIRLMSPEYVRPYVKAQKNDDRDAEAIAEAATRPTMRFVELKSEEQLDVQTLHRVRDRLIGERTSLTNQIRSLLLERGYVVAQGHARLRLLLGELLDCSVGTLSPRMMFLLGDMRAHWEELDRRITAFDAEFAAMARTDDRARRLTSIPGIGALNATALVAAVGNAATFGKGRDLAAWLGLVPRQATTGGKPKLLGITKRGSKYLRKMLIQGARSAMPSLTKSKTAVGSWLRALLARAHPNVAVVALAAKMARTVWALLRHERTYQAVSMMA

SEQ ID NO: 213827 - protein, 361 aa, unidentified
MAGTMTWVGLDVHARSTHAAAIDTVTGELARARFGPGFDGPVGWLAELPGPVRACYEAGPTGFGLYRSATAAGIDMQVIAPGKTPRGPSDRVKTDRKDAELLARLLLAGSLTGVVVPPPAVEGARDLTRAHDAARRDLMTARHRVSKMLLRHGRVYPKPSTWTQEHRRWLGRQQFEQPASELTFADLVAAVDGLSARKMAIAGRLSQLALDEQWWPTVARLRCVRGVDTLTAFSLHLELGGDWERFGRAPQLAAWLGLTPSLNQSGESSRQGAITKTGSTLARRLLVESAWHYSREPRIGATLRNRQQGQPDHVLAIANRAQQRLHRVHHRMRARGKPANVTVVACARELACFQWAAATAD

SEQ ID NO: 213828 - protein, 478 aa, unidentified
MSRKKTQQQKVRGGQGPVPAKRKRNKRPDPWGQSDRPAFEPNAAGIDIGAREIFVAVPADRDEHPVRKCETFTGDLHQMAEWLVSRGITTAAMESTGVYWIPVYDVLEQHGIQPCLVNPRSMKNVPGKRTAFHECQWIQHLHSLGLLHAAFRPDAEVCAVRSLMRHRNDLVMMASEHIQHMQKALTQMNVQFQHVISDLTGLTGLAVLDAILAGERNPEVLAKLRDPRIQASEETIRKSLEGNWRAEHILALKQRLSLYRSHRDLIDECDREIEKLVAAFEPRVDPDEKPMPEDRKQKQRKRKKKSGSADFNLRAEAYKLFGVDLTQIPGLMTLVFLLFSEVGRDMSRWPTAAHFVSWLGLCPDNDISGGKVLWRGARRTKSRAGTLFRLAAHSLHHNQTPMGDYLRRMKAKLGPAAATTATAHKIAIIFYTMVSKQVEYDASLWANRDQMREKRLEARLQKQAAQRGYKLVPLESAA

SEQ ID NO: 213829 - protein, 344 aa, unidentified
MPTIDYIGFDIHKKTISFCVKARDGTILEEGTIPALRKKLLAWAKARPRPWIGAMEATLFTAWVYDLLKPLAQALQVAHPPMVEAIAAAKKKNDKVDARMIADLLRCNLLPECYMAPVAIRDLRRVLRYRNLVVRQATRMKNRIAGLLMETGTAYNKERLHGKAYFSELLGSLQEVPHSVVELLQLSRGQVEFFATIQRRLLQGLREHPELSQRVMRLESIPSVGEILALSWALEVGEVGRLPSIGQALSYCGLTSAQHNSAGKEQRGPISKQRNRHLQTILIEAAKLAPRYNPQLAAVHQRELQRGNRNRATLAVARKLVAYLMAVDKSGQPFQMRSSGKEAA

SEQ ID NO: 213830 - protein, 381 aa, unidentified
MKQDNKAKQNRGNEVSVEAPRDTCDLGRRRWKVQRVGLTVGLDVGDKISHYCVLNEEAEVVERGKLKTTPAALQPWIEALPAGTRVVLETGTHSSWISRLIEQAGQEVLVAQPRKMPQIYASKRKNDRRDAEKLARTGRLDPNSMGPIRHRSAEQQADLAVIQARDALVQVRTQLINTVRGLVKGTGERLRGCSAPSFARQAEAQIPQRLRGALLPLVSQIRSLSEQIERYDAEVEKLAQKKYPETELLRQVSGVGPVTSLAFVLTVGDRWRFRHSRDVGPFLGLVPAQDESGESSPQLGISKAGNSYLRRLLVGSANYILGPFGPDCELRRWGMKRSERGDKNARKRAKVGVARRLAVLLHKLWVSGEVYEPLPEKRAAA

SEQ ID NO: 213831 - protein, 400 aa, unidentified
MDGPVISFDVSKGSSHMRAFISLDKPLGKVIVIKHDFDGYQQVRDLYQKLREKTGREPVVIYEYTGVYAFPLLTFFVSEGYTIYQIAPLESAKKRKSEIRSTKNDSMDTRTIASIYYGDRRKPLTPFRIQDQKYEDLKEMSRRYQFEVSMAITEKNRYHRCLDAVWPCFDEVIDYESDISLDVIIEFGHPANIKTAKGVLSTMKKNHPGRSGKREKTAERIVEYTKNHNSGVSVNSYMVRELQEFARRVKEGKKRIDAVLDDLIALALTTDEFRLLQTIPSVKARSAVSIVAEIGDISRFSTAKGLIAFAGLDPTVNESGKKDSKHLQITKKGNKYLRTSLYLSVSSICHWHPESFISKFVDSKIKDGLPKKAAKVAGSAKLLRLIYSMFTNGTCYSEKE

SEQ ID NO: 213832 - protein, 318 aa, unidentified
MDSTHPAPIFVGIDVGKGHLDAAASDGRSLGRVANEADGHRTLIERLCRLAPELVVLEATGGYHRAAAAALAAAGLRVAVVNPRQVRDFARATGRLAKTDAIDAGVLAHFGQAMRPDARPLREPEREVFSEILTRRRQLVSMRTAESNRLGQAGDPRVRASVQAIIRVIDAQLKELDRELGERIKASPIWQHQVTLLTSVPGVGPCTARQLVAELPELGSLSRQRIAALAGLAPFNRDSGTLRGVRRIGGGRRAVRSAMYMATLVATRHNPVIRAQYQRLLAAGKRKKVALVACARKLLTILNAMVRNDLPWRTPKMA

SEQ ID NO: 213833 - protein, 355 aa, unidentified
MQKYKVSFKGQNIYVGIDVHLKTWHVTTLTESGYKYSFAQHADAKELFDRLNKKFPEAHFKSAYEAGFCGFSAHYALTEQGIENIVVNAADIPTTGKEKTMKTDAVDSEKIAWALKRNELTGIYIKDKRYMDDTNLIRLRQRFIMDLSRQKNRTKHLLYTQGVTYPERFRNSKTHWSRNFMKWLREEVELLSEQKLSLLMLCDQVENTRKAILKVTREIRRLSTTDRYKENYDLLFTVPGFGLITSMSMLTELDNDIMRFPNERSFVSMLGLIPTCHDSGEKKVSGEKTNRGNKHLGPLIVEASWVAIYRDYQLGAYYSSCCQIMKPHKAIIKVARKLACRTYAVLKTKTKYELS

SEQ ID NO: 213834 - protein, 410 aa, unidentified
MDVLYARCCGLDIHKRTVVACLIVPGPRGAPVKEIRTFETMTDDLLALADWLEAAGCTHVGMEATGVYWQPIWNLLEDRFTLQLANARHIKAVPGRKTDVRDCEWIADLLRHGLLPASVVPPRPQRELRELTRYRTSLVQERSAEVNRLQKTLEGANLKLAAVATNVLGQSGRAILTALVAGTTDPAVLADLAVGKLRAKLPQLERALAGQVGPHQRFLLARQLAHLDDLDALIEEVSAEIAERLRPFEDVIARLDTLPGVARRTAEILLAEIGTDMSRFRTARHLASWAGVCPGNHESAGRRQSGKTRPGSKWLRTALVEAAQAAARTKGTYFLAQYQRLVPRRGKKKALIAVAHSLLVRVYYLLRHGTRYEELGANYFDELDRQQVERRLVRRLERLGYKVILKPAAA

SEQ ID NO: 213835 - protein, 334 aa, unidentified
MTFRNFIGIDISKGTFDFALIKDGDLSNPISGETTNNLAGIVKLEEFLKKQGLIMNETLFCMEHTGIYCRLLSQYLVENNYNVWLEMPVQIIRSLGVQRGKNDHVDAIRIAEYACLKKDKAVLWQPPREVVIQINDLLTLRERLIESRKSLKQPIKEFNDAGFKTTANFIQNRCSSTLYSLDKEIEQIEKELDKLIRKDSNLKKLFKLVTSVPGIGKITALTLLYFTNEFKLYTNANQLACYCGVAPFEHTSGTSVKGRSRVSSFANKRLKKLLHMVAMTSIQFDKQLSQYYQRKVSEGKNRMLVINAIRNKILHRLCAVINRGTPYQVEYQTT

SEQ ID NO: 213836 - protein, 329 aa, unidentified
MVIAPSLPVVGLDVSKATLAVCYQVDDLVKHLEVSNNKVGFQQLVKVCGAHCRFVMEATGTYDLALAYYLHEQGGEVAVLNPLVIKRFIQMHLSKGKSDRKDAQWLLRYGQQQPVKVWQPDETVLVECRQLEQVNEQLLKQKTMVSNSLEALQRQPVISKLALKRLQQMLKTLTQQVALVEAELLTLLEQRFAAEMTLLCSIPGIGRKTAGMLLLFAGGFTRFDNYRQVIALAGLSPREHTSGTSIRGKVRITKMGGGLIRGKLFMCSFSAKKTNAACAALFDRLVAKGKNKKLALIAVCNKLLKQAFAIVKSGVPYQADFNSKLTITL

SEQ ID NO: 213837 - protein, 330 aa, unidentified
MKNYEEVVGIDVSKKTIDAYCYQAQVHKEFVNDLIGYKRLLKWVLKQTKTSKVFYCFENTGYYSLKLALYLHSQDIVYVEESPLKIKRSSGVVKEKTDKLDAKLIARYAWLYREELQPSTVKSMSHLELGRLLALRDQLVRNNAGLKGTLKEMKVLLSSPTTDFGCISLKRSIDYLSKQVKGIEDRIKEIITADDTMNKNYELLSSLKGVGLVVACQLIYHTGNFTRFASWRAFSSYCGTAPFEHRSGTSIHRRKQCHYLGDRKMKSLLSMASVSAIQHDTELRLYYKRKLAEGKDKMLAINNVRNKLIARAFAVVKRGTPYVVLQQHAA

SEQ ID NO: 213838 - protein, 429 aa, unidentified
MEVLHPRCCGLDVHKETVVACVRLVIDGKPVKEVRTFSTTTVSLIELSEWLTETKCTHVAMEATGVYWKPVWHILADDGFQLVLANAAHIKNVPGRKSDVKDSDWISDLLSHGLIRPSFVPDGSTQEMRTFLRTRKQFVHEKGSHILRIQKTLEDANIKLDSVITDIIGVSGRNMIEALIAGERDPAKLAALADRRLKASQQTLRQVLRGRVTAQHRFLLRLHLDQIDALDAAIARIDREVEASIAPFRTAVEQVRTVPGIKSLAAQTILSEIGIDMTRFPSSGHLISWACICPRSDESAGKRRSTRIRKGSPWLKTTLVQCAWAATRKKGSYLQAQYYRIRARRGPKKAIVAVAASILTAIYHMLKDGTMYQDLGPNHFDANANERQKNRLLKRLADLGYDVELTPFPTGVAPAEALAAEALAAEALA

SEQ ID NO: 213839 - protein, 316 aa, unidentified
MKNQKNNTVGIDVSLAMLDTYVNTTEAHGQYANTPEGLVELVAMLKKLQPTLVVFEATGDYTHELIMALGKADIPFHQANPRWTRAYALSLGALAKTDRVDAKILAGFAAERMPKAHKMPTQREVELHDQLRWHRQLTLQQAKLKTQFRQAKSKVVQKQILALLDACKQQLVTLEAAIDELIQQDPDMRQRKEIVESVPGIGPKTARMLAVALPELGHLDSSQLASLAGVAPMNCDSGRYRGQRHIQGGRGDLRTGLYRSIVSSVTRGYNAVLHAFYLRLTAAGKPFKVAMTACVHKILTILNAMVRNGTKWQQFS

SEQ ID NO: 213840 - protein, 350 aa, unidentified
MTNITTIGIDIAKRIFQFHGVDKNGKTVLKKKLMRDQVLTFIANLPKCLVGMEACGGANYWAREISKLGHEVKLMAPQFVKPYVKTNKNDQADAEAICEAVSRPNMRFVPIKSIEQQDILSIHRVRARLVKNRTALANEIRGLLHEFGMIIPQGINKITSKLTEVLDSGKLSPISQQTFSDLKEEFIENDKKIKCLESRLKIMASELDKYQQIIAIPGIGLITSTALIASIGNGNCFENGRQLSAWLGLVPRQASSGGKEKLLGISKRGDIYLRTLLIQGARAVLNTKLRFTTESQKAKKDYSKFTQWMFNLHDRGGHNKTVVAVANKLARVVFAVLSSGNDYVENKVCS

SEQ ID NO: 213841 - protein, 315 aa, unidentified
MLHKEVKARPESLLALLEPFRDDLVVGVACMHCWYWISALCEGHGINFLLGHALYMKAIHGGKAKNDRIDSFKIAMLMRGGNFPLAYVYPKEMRATRDLLRRRTRIVRHGAMLKAHAVNTLGQYNMPPSKANLNNPGGRSQLTAAFTDPDVQRNVDLDLAIVDCYQHELKKLEWHLEQQAKKHDPASLNVLKTIPGVGRILALTILYEVGDIQRFESVQKFASYARLVKCKAESAGKVYGTQGNKIGNAHLKWAFSEAAVLFIRNNDKAKRYVEKLQRRMNKAKALSALAHKLGRAVYFMLKDKRVFDEQRFLKG

SEQ ID NO: 213842 - protein, 449 aa, unidentified
MSRPQVIDDQEHERIYERVAAIDVAKDTGMVCTRTPHPARTGARRATVWTVQARMGTVRALGRQLAREGIEIVTLESTSDYWRIWFFVLEACGLAVQLVSASQAKNLPGRPKTDKLDAMWLARLTEMGLLRASFVPPRAIRDLRDYTRARTRLIHERTRCWQRLEKLLEGALIKLSSVASKLTTLSAQDMIKAMIAGQRDPEILAGLARRTMKAKHDALVQALDGMFDDHHGELAALLLDQIAGLDAKIAQLGARAAELAAALPEGWGTDADGTTGPGAGTGPDAPVLNAVARLAEIPGLSPDLARTIIAETGLDMTRFPTAAHLVSWAGLCPSARQSGPRTRAGKKGRGDTWLRGALGQAAVNAARTPTFLGERYGRIARRRGKAKAQVAVARSILVIIWHLLKDPAARFTDLGPGYHQARTDTDRKLRNHLQQIQALGFTVTLTKAN

SEQ ID NO: 213843 - protein, 391 aa, unidentified
MFLLGIDIAKLNHVASCFDSSTNEVVFSNFKFKNDFKGFSALLNKIKSFDAKNLIIGLESTSHYGENLINFLFIHDFKVALINPLQTSHLRKANIRDAKNDNLDSLNIAKSLVFTKLNFVSKKNIECFSLKKLTRFRSNLIKQRSKAKIQLISLLDLLFPELQYLFKSKIHSKAIYSLLKKYPSAEEIAALKDDEISNLLYASSKGHFKKEKSIELKSLAKTTVGIKDTSISLHLIQLIELIELYTKQIKDIEIKITDIVNNLDTTLLSVPGISVIACAIILGETNNFENFSSSKKLLAFAGLDPKIRQSGNFNASSCRMSKKGSPYLRYALIFTAWNIVRHSEKFNKYYSLKRSQGKSHYNALGHVAHKLVRILFTLIKKDISYQEEKLE

SEQ ID NO: 213844 - protein, 388 aa, unidentified
MIYVGIDIAKLNHFAAAVSLEGEILIEPFQFSNDYDGFYLLLSKLAPLDQHSIIIGLESTAHYGDNLVRFLICKDFKVCVLNPIMTSSMRKNNVRKMKTDKVDTLVIAKTLMMQDSLRFSTLEDLDYIELKELGRFRQKTMKQRTRLKIQLTSYMDQVFPELQYFFKSGLHQKAVYALLKEAPMPKDIASLHLTHLSNLLVKSSHGHFTKDMARELRVLAQRSVGLNDSSLSIQITQTIAQIELLDSQLFETELEMANLVTCLHSVLMTIPGIGTVNGGMILGEIGDIHRFSTLGKLLAFAGLDPTVYQSGNFQAKRTHMSKRGSRVLRYALMNAAHNVVKNNATFKAYYDTKRAEGRTHYNALGHCAGKLVRVIWKMLTDEVEFNLE

SEQ ID NO: 213845 - protein, 412 aa, unidentified
MKHRKERFIYVGVDLHKRMHTAVVINCWNEKLAVIPFENKPAAFPAMVEQVVCHVGEGQTVVFGLEDVGGYGRALAAYLVENGFRVKEVNAALSNWKRKSYAMTEKHDSWDAENIAKLLLDELDRLPTAAPQDAYWILKQLVMRRYSLRDTCVALKNQLHTQLSYSYPSYAKFFAIVDGQTALAFWKQYPSPYLLDGVTVDELAEFLRQKSRNVCSTRKATMILESVQSDGDTKRKHQEYRDFLVKSHVKQIEDVHREMNDVDNQIRVLMEQLGCTLDTMPGIDSVTASAILAEIGDIARFGNADKLAKFAGLTPSQMSSAGRGKDRNQRQGNRVLNKILWGLAVRQVALARTSEKPLNPLFRAYYEKRLGEGKKKKQVIICIMRKLVNIIYGMMKNKTEYRLAPLSERTAS

SEQ ID NO: 213846 - protein, 414 aa, unidentified
MLKIVYRVCCGMDIHKSFVVACIASTNEYGVTTYKRKRFSTFTGDLRRCAVWLAENNCKDVCMESTGKYWIPIYNILEPTCNIVLAHPKYVKAIHGKKTDKRDAKWIADIFKHDLVAGSFIPPADIRQLRDLFRYRWKLTSFTTGEKNRAQNCLTISNFKLDDVFSDVFGKAASAITARILENPTEKITDVSGFRTKGMKATNEQVLAAVDGEMCEEQAEKLRIIRSHMDSLELCKLNLESLILATAEKYLPQLNLVMTAPGIQSFAAIGIISEIGVDMSVFPTSKHLCSWAGLTPQNNESAGKKKTTRISRAGAYIKPLLVQCALSAIRAKQFPEVRNRYLALKKRRGHKKAIIAVARMLLTAIYNMLKKNEPYNSELYRKGDRPPAHREVSVEEAVFILQRQGYLVSAPPTP

SEQ ID NO: 213847 - protein, 455 aa, unidentified
MNRSKPAKAGNLPMVVPGAAAIDIGSTMHMAAVNPEADDRPVRAFGTFTGDLHHMARWFKACGVTSVAMESTGVYWIPAFEVLEEHGFHVILVNARYAKNVPGRKTDVNDAAWLQRLHSYGLLRGSFRPEAGVATLRAYMRQRERLIEYSASHIQHMQKALMEMNVQLHHVVSDITGATGMRIIRAIAAGERNPATLAEMRDVRCHASAGTICSALTGNWRDEHIFALCQSLALFDFYQTKIVECDRKLEISLRELEGGNGHDTTRLPKVRTRTKQVNAPDFEVRSALYRVLGVDLTQIHGIGPSLALKLVGECGTDLAAWPSSKHFTSWLCLAPGNKISGGKLLSSKTRRSSSRVAALLRLAATTIGRTDTALGAFYRRLSARAGKAKAVTATARKLAVLFYNALRHGMAYHDPGAAQYEERYRSRVIGNLQRRAKAFGFALQELPEDPEMAVS

SEQ ID NO: 213848 - protein, 342 aa, unidentified
MGEVVTIGLDIAKSVFQVHGVGAGGEVLIRRRLTRARMLPFFAKLPRCLVGIEACNNSHYWARELTALGHDVKLMPAQYVKAYVKRGKNDAADAEAICEAVTRPTMRFVAVKSPEQQSLMMLHRVRLMLNRQRTQISNAIRAHISEFGVVAPVGRLGVERLLEVVADAGDDRVPEDARLCLQMLAAQLEVVKRQILENDRRVLASARRTELGRRLMEIPGVGPLLASAFVASVADPSVFRTGRDLAAWIGLVPEQNSSGGKDRLGSITRAGNRYLRQMLVVGAMAVIRYAQRHGTKRPWLVQLLARRPAKVAAVALANKNARMVWALMTSGERYREPLPMSA

SEQ ID NO: 213849 - protein, 415 aa, unidentified
MEVVFAHCAGLDVHKKTVVACVFVSNPQGEIQRLVKTFPTTLAGLEALAAWLSGLGVTHVAMESTGVYWKPVFNVLTPHFEAWIVNARDIKQVPGRKTDVKDAEWIAQLMRHGLLKRSFIPDVAQRDLRDLTRYRTRLIGERSSASNRLQKILEDANIKLSSVASNIQGVSARAMLAALIEGETDVTKLADLARRRLRSKIPELEAALAGRIREHHRFMWREILYHLDELNERLATLDAQIRQLTAPYESIIERLDAIPGIDRRTAEVILAEIGPNVTPFPTAQHLASWACLCPGNNISGNKRRSGKTRHGQNWLRTALVEAAWAASRTKDTYLSSQFHRLRARRGDKRAAVAVAHSILIVVYHLLAKPEAVFHELGGDYFLKRNAEQEERRAIRKLTALGFTVTLTPAAAPVPS

SEQ ID NO: 213850 - protein, 391 aa, unidentified
MTKVRAEVVNDLSRSLVPLDMDTTLIAVVEMSQSSWLVGGIVPGVERQPLKKLAIDPNALLKLLLQWRSESERKGHRIGRIAVAFEAGHDGFWLARWLVARGIEPHVIHASSVAVTREHRRAKTDRLDTELLKRAFLGWLRGERGHCKMVAVPTLAEEDAKRPSREREKLVAEATRLMARLKAAFVRLGIRSFNPKLKAALERLEALRTPSGEPIPANTLAALKRDMARHRFVKAQIREIETERLARLRAAPAAGTNPMVRLLVRVVGISIETADMLVQEVLSRRLRDRRALARYAGLTGSPDESGAKRRERGLARSGNARVRLGMIQLAWRFLWFQKDSALGRWYRERTAAAPGARKTLIVAFARKLLIALWRLVHEGVVPEGLRLRPAI

SEQ ID NO: 213851 - protein, 370 aa, unidentified
MKWTPPHDSVGINVPESPLEKEKEEPMEKHTVAAVDIAKVVFDVALSDEPGRVRMTRRLPRSGFLPFFAQLPAATVVMEACGSAHYWARRLQELGHQVVLLPPHQVRPYVTRNKTDRTDAKGILEAYRNADIRPVPVKSVPQQVLVSLHRFRSGWLGARTAHINTLRGLLRELGIVIPVGAEKVLPLVRTLIADADSEVPDALRPVLDAACEEIETLSERIKMTQRQIEAIAEQTPVVDLLWSIPGIGLLIATALVAFVGDIHCFPSGRHFASYLGLTPREYSSGMKRRLGRISKRGDAYLRMLLIHGARSILCHAKNAKEHDRLRTWALDLERRVGHNKAAVALANKLARIAWATWKNGRPFESLPKAA

SEQ ID NO: 213852 - protein, 413 aa, unidentified
MEPVLVAGIDVHKSMLAVVIGGEGMAESSYERGKFGTSTAQIRVLAEWLREHGVVEVAMESTAQYWRTVWLGLEGQFRLQLAQARSNPAPKGRKSDYRDALRIVRRMLAKDLTLSLVPPAEQRAWRIWARTRVQRIHTSQQARNRIECILEEGQIKLSSVVSDLLGKTGRRILDALVKGEADPVVLAAMADRRIRAPAAQMQEACDGRMLPVHRQILRLFLEQVDELDKQIQQIERQLAEAQQEHVEAIRRLCEIPGIDVNAARQIVAEVGATVAAFATAEQLASWAGVCPGREESAGVSSRNASAKGNRHLRRILNQVAWAAVRTKGSYFQLRFERWVVRLGANQAAWAIAHKVLKLIWKVLKQGVHYQERGTLPQDPKAVKRLRLRHTAALRKPGYTVTLTPAIPSAEAGA

SEQ ID NO: 213853 - protein, 428 aa, unidentified
MKKTGMEKLEAITGKTLIGGIDVAKKVHWIRFVDYRGIALTKAIRFENNRAGFEHIVAETERLRKKHGMEDVVIGMEPTGPYWKALAWRLKNLGLRVVTVNPHHTKQAKMLDDNSQTKNDPKDALVVARLIKDGRYFEPYLPEDVYGELRVTSNARIALVRRMNGIKNRVIGILDEYFPEYTTVFKCTLKGKASVQLLKSCPFPAHILALGGEGVLEEVKKAVKKTVGRKKVLALLEAARDSVGVGYGLESARMQMRLLIKELEFLGEQLAEVETRMKELLEMTGYADLLLGIDGVGVVSTASFLGEVGDPMRFDSPRQISRFAGYNLVENSSGQSKSGTSISKRGRKQLRALLYRMAMVMVSKNSELKQLYQHLKTRRDNPLKGKQALVVISKKIITIIYRILKTRKAYESALVLGTVRKQQLGLAA

SEQ ID NO: 213854 - protein, 365 aa, unidentified
MKKISTVATEQGRNISEQKLTIGFDLGDRSSWYCVLDETGSVLLEQRVSTTPKAMKEVFGGMPRSRIALETGMHSPWVSRLLSELGHEVIVAHARNVRLIGESRKKDDRLDARTLARLARIDPQLLSPVKHRSAKAQADLTVIRARAGLVRARTALVNTARGLAKSYGERLRGCNVRNMNPEKAEALSPELQRALEPLLAGIESLSERIREYNEGIEQLAQESYPQVARLKQVKGVGTLIALTFLLTLEDAHRFRKSRDVGCYLGLQPGRRNSGQSEPQMHISKEGDPYLRTLLVQGAHHILGPFGVDSDLRRWGLKLAERGGKSGKKRAIIAVARKLAVLLHRLWVSGEVYEPLRNQRALSAAA

SEQ ID NO: 213855 - protein, 352 aa, unidentified
MNITTIGIDLAKNVFQVHGVDERGKAGLRRQLKRAQVLSFFVNLPRCVIGMEACGSAHFWARKFTELGHTVKLMAPQFVKPYVKTNKNDAADAEAICEAVGRENMRFVPIKNAEQQALLALHRARQGFVGARTAQVNQIRGLLAEFGIVIPVGIRRVTENMPEILEDAENGLPGISRELFSRLFSHFRELDRQVRQLEAQIQAWHRDDTVSRRLQRIPGVGPITASALVGSIGDASTFKNGRQLAAWLGLVPRQKSSGGKEQLLGISKRGDTYLRTLLIHGARSIVRQLKLKAGESQGWLARLALRRNLNIAAVALANKNARIVWALLVHDRDYQAGYVAPRSGRIMAVTAK

SEQ ID NO: 213856 - protein, 312 aa, unidentified
MHELFVGIDISKDKLDVHVRPSGEYITLGTAPAGLHDLVARVQAWGPALIVLEATGGYEVVVAAALASAALPVAVVNPRQIRDFARATGQLAKTDALDAAVIARFAEAVRPPVRPLAPPAAQALGELVTRRRQLLEMLGAERNRQAQARDRQGQRQLGTHVRWLTKALADLDRDINDTLRSSPVWRAPDDLLKSVPAVGPVTAHTLIAQVPELGQLGRRQIAALIGVAPLNRDSGPLRGRRMIGGGRASVRQVLYMAALVGVRYNPRLAAFYSRLTGAGRPKKVALVATMRKLLTILNAIVRDQRPWQPQNA

SEQ ID NO: 213857 - protein, 417 aa, unidentified
MNSPPETIPIVRYIGIDIHKHYLMIGGQNRHQEWTLRPRKVQVSRFRDWAEKNFQPGDAVVIETTGSVWDIYDIAAPLVSKTLVAHARKVRQIAEARVKTDKEDIKRLITLLIADIVPKVWVPPMHVRELRSLISFRWRLTKQITMSKNRLHSVVQRFNLNAPEGGLLTDKNRTWWDRQEFSDLTGFEVERDLEIVKTLEEQKESIDQKLGELSNTDPWASDMVYLMQIPGLGPIFSMVILSAIGDIKRFSHPKKLVGYAGLGAGVHDSGQKHQSKSITKEGRKELRWALVEAAWRAVGSDPYWEAQLKRLEKRMHRNKAIVAIARRLLVSIWHILTKREPYRHFDEETIAYKMLIWSWAMDEKSRDGMTPQQFAKYGLLRLGIGQDLERIKRGGALRRIAPTEEILALKPELEPPR

SEQ ID NO: 213858 - protein, 441 aa, unidentified
MTEFFLGIDVSKGYADFVLIDSQKNIIEKNFQLDDTFQGHNLLFSFLQSFFLNNPQSNIIAAVESTGGYENNWVSFIAKLKDDFPICVTRLNPFGVSHSSKAELKRVITDKISALTIAEYVINHRAKISFVGEDYFAPLRKQWIYIKLLVKQKVQLYNQLEALLYTANPELITYCKHGMPNWVLMLLKQYPSSKSLAKASPSVLSRIPYVTVQKAETIISNAKISVASQTDPVTGALLKSVVEQIIFLDKTIKAQEKKLTDSCAFPEVKLLSSFIGIGAYSAVGLLLEIRTIERFSSSKKLAAFFGLHPVYKASGDGMGSMRMSKKGRREPRLILFNIARTAINCNPLIKEVYKNNLKKGKSGLSAIGVVMHKILRIVYGMLKTNTPFNPDIDRRNTEHAAIKKPKVVVLKSRRFQEFDSLAPVSKKQNKKREEQKASQKE

SEQ ID NO: 213859 - protein, 343 aa, unidentified
MDQYIGLDVSLKDTAISIREDGKRIWRGKCPSDPKLLAEMIRKHAPHARRVVFETGPLSTWFYHALTAEGMPAICIEARHAQKVLDETLNKTDANDADGLAQLAEAGFYKVVRVKSFDSMLTRTLVGGRNQLLNISTQLSNQIRGLMKTFGLIIPKGTGRVFDGNVRELLAGNNDLARIILPLLEAWRDIRKRAADLDRQLLAVARQSQSTKLLMTIPGIGTVTAVSYIAAIEDPENFRTSRSVGAWLGLTTRRYQSGEVDYNGHISRRGDNHLRGLLYEAATVLLTRASVRTESSLKTWGLKLRERLGFKRAAVAVARKLAVIMHSMLRTGEVFNASVGATA

SEQ ID NO: 213860 - protein, 347 aa, unidentified
MSNFFQVHNIKLKIMKKKDIIIIGIDVSKSTLDVFIFGYDYHFIVDNGPDGFISLLETIFKITKCRTEDLFFCFENTGKYSKMLSVFLYSQEITFLMESALRIKKSLGITRGKNDKVDSKRIAMYAYEKFDSLTPTVLPGEKLDKLNALLTLREKLIKHRTAYKNGISDLNDCYKDDETVIIRESQQRLIERITEEITLVENEIEIIINTDEAMHKNFKLIISVKGIGKINAFFFIAITHNFTLFSSARSYACYCGIAPFENSSGTIKGKTRIHYFANKTVKKLLNMAAVSVIKHKNEYRTYYEKRVFKQGKSKMSTINIIRNKLVYRVFAVVNRGTPYIDLHKYAA

SEQ ID NO: 213861 - protein, 344 aa, unidentified
MTKIIRVGVDLAKNVFHIHAVDENEKTVWQGKYTRNNWIKAIVKRTPQTATIGMEACGSAHHWARELIKLGYEVKLVAAQFVKPYVKTNKNDKVDAEAICETINRPNMRFVSIKTIEQQDLQSMHRIREELISQRTAKANQIRGLTAEYGVFAPVGINHLRKCIPMWLENAENSLSFLFRELLQLMYHDLIALDESINNITDKIKNNLNSNPAALRLMKVTGIGPLVCSALLIDLGDGLAFNKGRDFAASLGLVPRQHSTGGRDRLLGISKRGNGYLRKLLVHGARSAFRHVKDKTDPLSLWIKKLSQTKHANIAIIALANKIARISWALVAKNEDYDASLAAA

SEQ ID NO: 213862 - protein, 394 aa, unidentified
MSKQTATASTIQITSPTPVLMLALELGEESWKLGFSSAFGQLPLVRDIGSRDKRVLLASIAWAKKKLGLCKQTRVVSCYEAGREGFWLHRFLVAQGVENLIVDSSSIEVPQKSRRAKTDRLDLAGLCDLLARHVAGSAKKVWSIVRVPTEADEDRRHLHRELKTAKQDRTRVSNRIKSLLANNGLTLSGWKNLSDQLKRLRLWNGNRLPSSLRGRLDRYALDYAYYTERIRGLESERRRMLSEEMRHEGSQGSAVAKAVQLYSLRGVGVNTAWLYSMEFFSWRTFRNTKEVGSLAGLTPTPKDSGKRYREQGIGKDGSRHIRGSAIELAWGWLRFQPESELTKWYERRFGTGSKRIRKIGIVALARKLLIALWRFVETGVVPAGAELKTDLRLH

SEQ ID NO: 213863 - protein, 272 aa, unidentified
MEHYAGIDVSLERSSVCVVDALGKIVKEAKISSEPTALVAFFEALGFVVKRIGLEAGPLSQWLHAGLQRAGFEAVLLETRHVKAALSAMTVKTDRKDARGLAQLIRMGWFRPVHAKSIRSQEVRALLVARKQLLGRLIDVELSIRGILRGFGLKVGPVTRTGFDGRIRELVTGQATLARIAVAMLSARAALKAEYEKLHKAVLAIVRDDAVCRRLMTVPSVGPLVAITYKSAMDDPNRITKSKAAGALFGLTPRKYQSGRKGRHWRDHAGGR

SEQ ID NO: 213864 - protein, 459 aa, unidentified
MSADAWYVGFDLGSQRHEVVICDQAGEPVRQFGMLRGQLGWKLLCEEVRAVVPPGTRVLYLVEAAQNFWQEVVHPLKTAGEEVYLLSPTKCSDLRKFYRKHTKTDPIDALATARVGYSDRRLVPVWVGTPQQESLRRLCRLSWKLSHEMRNHKRRIATQLEMILPGIGKVWRNRYCGSARLFYRRYLDPMRARRLGRKRLEAILRRRAWGKLSPQTMEKLWAVIENAPTLRFDRDDLLLEIQCELDGLEATEKRQQQLNERIDELYSEVDPARRLESVPGLGPVLAAAITSAIGDVSRWRNASRLVAASGLVPRKKASSGREKAHQPLTKQGDPHLRCWLYVAAEIARQYDPDLRAFYLRLTRRGTHHKAAICALGAKLLRRFYALLRDKVDYQITDQLQIQNAKKPIRASVHEVAERLLKDMPETAPSNKDHTANRTHPSTTRNSRHRAAGQLVPLIG

SEQ ID NO: 213865 - protein, 341 aa, unidentified
MEKNGYFIGLDIACDDFVASIYESPGKTVITKEAIENNPDGFSVLVSWLKEQGINNLNSVICMEATGVYSEACAHYLFANDFKVSVEPPLKVKRAFDPIGHKTDPVDSRQIAEYAYRYSDELRLWQPKQEIVEKIKQLLTAREQFTKQSTAIQNSIKAYEKHVIKVPLIINAHQETLKELKKHIKAIDKELDRLIRQNPTISQICNQLKGIPGVGLLLASDLIAITGAFNDISSHKTLAAFLGICPYQHQSGKSVYRQPRIRNFGPKYARKLLMLAARSCATHNVEFRKYYIRKLAEGKAKQLVLNNISNKIIKIACALIKNNAQYNKTYRSINPLCFNLA

SEQ ID NO: 213866 - protein, 389 aa, unidentified
MSQTFDASRSLTALEQDNTLIAVIEMSQSTWLVAAVVPGIKRQPLKKLDTDEEALLKLLHRWRNEAGQGRRQIKRIVVAYEAGRDGFWLARWLRARDVEAYVIHPTSVAVSREHRRAKTDRLDTELLMRAFVGWLRGEKRHCSMVAIPTAEEEDARRPNRERGNLVTEQTRIVNQIKAILARFGMRTFRPTLRKAEEKLEGLRTAEGTPLLENTRAELRRYLARLRVVREQIRAIEQGRLRKLAAAPVGEIGPHAMVRLIARVLGVGVETADMLVNEILSRHLRDRKAVARYAGLTGSPDESGRRRRERGLARAGNARVRCGMIQLAWRFLRFQKDSALAQWFQARTADGRGSTRKTMIVALARKLLIALWRLVTMGEVPQGVVLRPAS

SEQ ID NO: 213867 - protein, 343 aa, unidentified
MEYYVGLDVSLRQTSICVVNQTGSIVQEGVVDSDPDTIASFVRSKAPGTVRIGIETGPTTTWLWTELKRLGLPVICIDARHAKAVLKMQINKSDRNDAVGIARIMQTGWFKEVRVKDLDSHSVRALLASRALLVKIKRDLENQVRGLLKNLGLVIGRAKFNVFAVRAEELIEGRPELVVAVRPLLEARKAIEQQVDDLDRKVQKLARHDAQVRRFMTAPGVGPITALCFKATIDDPTRFKRSRSVGAYVGLTTRRHASGEVDWSGRISKCGDAMLRMYLFEAAGVLLTRVPKWSGLKAWGAKLTKRNGLRKAKVAVARKLAVILHRMWIDGTEFNWSTKKAAA

SEQ ID NO: 213868 - protein, 347 aa, unidentified
MKFYTGQHRFFCGIDLHARSMFLCILDSQGNVLVHKNIKATPEDFLNIVTPYREDLAVAVECIFSWYWLADLCARENIPFILGHALYMKAIHGGKSKNDKIDALKIATLLRGGMIPQAYVYPAQMRATRDLLRRRMHLMRKRAELLAHIQNTTSQYNLPEFEKVIAYKKNRTGIADVFPDPTVRASITADLELIDHYDDLLKRLELFILRSARVHDPNALLLLRSVPGIGKILSLVILYEIHDVARFPSVQDFASYSRLVRCPHISAGKRVGSGGRKIGNAHLKWAFSEAAVLFLRGNPEAQAWLARQAAKHGKPKALSILAHKLGRTVYHILTKERAFEMNRFLAD

SEQ ID NO: 213869 - protein, 355 aa, unidentified
MTITKYIGMDVHKESISIAVMNAAGKLVMECVIETKASMLLQFIDGLRGDVHVTFEEGTWAAWLYDLLKPHVSEVLVCNPRKNALLKDGSKSDQIDARKLAELLRGNHLKPVYHGEQGLRTLKELARSYLIISKDVTRVMNRLKALYRSWGIACAGTQVYAPRHRSEWLGRISEAGVRRRAEHCYQQLDALRLLHQQVRRDLLLESKKHQAWRLLGLIPGIGPIRAALLIALIQTPHRFRTKRQLWTYSGLGLETHDSAQYRVVEGQLQRSKKPVTLRGLNQDHNHDLKDIFKGAATRASSSRGPFHDFYEHLLAQGRKPTMARLTLARKIAAITLIVWKKEVRFDASYLKSQAA

SEQ ID NO: 213870 - protein, 337 aa, unidentified
MWIIGCDFHPRFQQIAFVNTEGGECGQRRLEHRGEAEQFYRSLAGQAVRVGMETGGSSRWFERLLGELGQELWIGDAAKIRAAETRKQKTDARDAEHLRQLLCSGQFEKMRIWIPPAENRDLRQLLWHRHRLVQMRTRVKNQLRSLATSEGMERKPGLWSQAGQKQFQALELAPWAQRRRQDNLELLSELLHRTDPLDQEAAQQAAQHPEAVRLMTHPGVGPITALAFVLVIGDPARFPNSKKLASYLGLIPREDSSGGKQRLGHISKQGNALLRGLLVVAVRHEAHWKRDYRRLAMRKNRSIAAVAVARKLAVRLWWMWRRGVDYAQLSASGSHAG

SEQ ID NO: 213871 - protein, 418 aa, unidentified
MKSIKTKKVTKINDKTVIATLDIGKNIQYGYFRAPNGNDVKPFAFYNSKKSYNEFWQKLCQFKDQEGLEQIVIGFESTGPYAEPLFHFLRKKPVTLVQVNPVHTKRVKELTGNSPNKTDNKDPRVIADVISLGHALTLVVPEGAAAELRRLTQARERAIKDRTAVINQLQHLIFVIFPEFLKVLKISTKTARYFIKHFTTPEKICALGLDSVDQIVKRVSRGKLGQDRAKQLHDAARDSIGISEGKQSIVFEIEHLVGRIEAEDQFIDSLEKQMCVYLQQIPYSQNILSIKGLAEVTVAGLIGEVADFNKFDTISEVMKLAGLDLYEISSGNHRGQRRISKRGRPLMRKLLFFAAINAVKSKGIMHAKYQQMLARGKLKMKALVAIARKLLGIIFAIVRDNTKYVEDYSDNYHYKLAA

SEQ ID NO: 213872 - protein, 421 aa, unidentified
MLAESHDEEQIIARVAALDIGKAELVCCVRLPAQRGPKRLQEVSTHSTMTRSLTELASRLVELGVQRVVMEATSDYWKPVFYLLEAHGLDPWLVNARDVKHLPGRPKSDVIDAVWLCKLTERQMLRPSFVPPWPIRRLRDLTRYHVDLVAARTAEKNRVEKLLEDACIKLSVVASDIFGVSGRAMMAALIAGERDPHVLAQMARARMRTKIARLEEAFNGHFDYHHRFLLARMLDRIDSTEADIAALDNQIEAHLVPFAAAAARLDEIPGIGPVAAAVIVAEVGVDMSRFPTAGHLCSWAKLSPGLNTSAGKTKGNGSTGHGNRYLAGILGEAAVVAGRTDTFLGARYRRIAKRRGNKRAIVAVGRSILVIIWHLLASDDARFTDLGADHFTKHLDPDAKKRNHIRQLEALGYTVTLTPAA

SEQ ID NO: 213873 - protein, 349 aa, unidentified
MSMAYVGLDVHKKTISYRVKSAAGAVLAEGELAARRSVLTDWARGLLRPWMGAMEATLFTGWVYDHLLPHALKLKVAHPLMLRAIAASKKKNDRVDAGKIADLPRCDLLPACYMAPSELREMRRMPRYRNRVVRMAVRMKNRISGLLMEVGEEHAKARLHGKTYFARLLEELRETPESVKSLLRISRANLDMFQAMQRQLPRRLLSNEALAERVRRLTTIPSVGVVTALTWALEVGEPERFSSIARAVSYRGLSSARHGSAGKDQRGPISKQRNKHLQTVLIEAAKLAPRWNEQLCALHAREMARGNRNRATLAVARKLVAYLLAVDKSGKDFVPPTPAPADSAQLPQS

SEQ ID NO: 213874 - protein, 411 aa, unidentified
MLHPRCCGLDVHKSSISACILLREGGRVQKHQRRFGTMTQELQELAEWLRQFGVTEVAMESSGVYWKPVWNILEGQFTIVLANAQHIKNVPGRKTDQKDAEWIAQLLQYGLLRASYVPCEIIRDLRDLTRMRASLSQEASRLSSRIQKVLEDANVKLASVATNVLGKSGRAMLQDIITGEDNPEQLASLALGHLRVKIPQLQLALEGKIRFHHRFLLRRLLDQVQFVEHEIALLDERLEDIGRQRPDLAHAVARWDTIPGIDRVAAWALLAEIGDNMGQFPTAGHLASWAALCPGNHESAGKRLRGTTRQGSPWLCRMACQCAWAAARTKNTYLSSQFRRLAARRGKKRAIIAVAHTLIVIGYHLQKNQSNYDDLGGNYFDRIHSDGLKRYLVKRLQQLGHKVTLEPIETA

SEQ ID NO: 213875 - protein, 350 aa, unidentified
MRVCKLGQQWVLLCSNRGRASGSRHNFKAIQAEEALSLVYFIYTLIGAGIDVSKDTLDVKVDEHRPQLHTSNDSAGWQQVIAWLTPFAPQQVVLEATGGYELQVLKALHAAGLPMVRVNPRQARDFARSTGQLAKTDRLDACVLAHMASVLKLNRYQPPNEETQFLHACHRRRQQVVQMLAAEKQRRRLTEQPAMRLMLERNIQRLEADRDELDMHISEQLKGSVQAQVASTIKGVGPVVLSTLVCDMPELGHLNRKAIAKLYGVAPLAKESGRSHGRRITWGGRANPRAMIYMAALSAVRYDPMLKAFYEGLVGRGKPKKLALVAAMRKLITILNARMREAFQASAQVA

SEQ ID NO: 213876 - protein, 416 aa, unidentified
METEREVVCGADIHKQFLLATILTKDGQKFQDRFDSNFEGLLNFRQWLLDHDCQRLAVESTANYWQPIYFVVGKDVEFVLANAYQIKHIPGRKTDVLDSEWIAELCLKDLISPSRIFSEDDRDLRSMTRTRENYVKMRSQIKNRIHQELESACIKLSSVLSDIFGKSGIHIIRGILNGLSIDDILDRIPSKKLKAKRGEIQDAIQANISPVQIDLISLLLDSVDFLNREIESIDKQIQSLISTRQEDLKIAMSIPGMGFTSASTILAEIGNLKDFNNGEKLAAYCGLVPSVYQSAGKLITGHITKHGSPHVRRMLIEVAHAISRTKADSKLKRFYFRIKSRHGAKVAVVALARKVLCILHHLIVNREMFEDGISSKSKREKTGRSSSSTEMIIEDAIQILVRAGYLVQKRSEKEGG

SEQ ID NO: 213877 - protein, 319 aa, unidentified
MNFIPVGVDIAKAKFDVAVLLPSQKYKTKKFANTPAGCREFMAWLARFGDCHVCMEATGCYSTELATSLADNGWSVSLENPARISAFGETELTRNKTDKSDAALIARYCALYQPAQWFPAPLYERQLTALVRHLKNLEEMRQMEENRLEGAEEVILPSLNEHIATLDGLIEETKKKISRHIDDNPDLKRDKALLKSIPGVGDILSISLLAFAGDLRRFSNSKALVAYAGLNPRRCESGLWKGKSRISKVGHAELRSALYMPAIVAGRYNEVVKRLMVRLSERGKSGKEQVCAGMRKLLQLAYGVVKSGRMFDAEIPLAA

SEQ ID NO: 213878 - protein, 386 aa, unidentified
MQKLNDLSRSLTALEPNGTLIAVIEMSLSSWLVAGIVPGVERQPLKKLAVDESALLKLLHRWREEAEKAGRRIERIAVAFEAGRDGFWLARWLKARGIEAYVIHASSVAVSREHRRAKTDRLDTELLKRSFLGWLRGERDHCKMVEIPTMQDEDAKRPNREHDSLIGERSRIVNRMKAALVRLGIRGFNPKLKRATTRLDGLHTPEGEPIPPNALAELRRDMERRRLVNNQIRQIEEERLERIEQAPCDGAHVMVRLLARVMGVGIETADMLVHEVLSRNMRDRRAVARYAGLTGSPDESGRKRREKGLARSGNARVRRGMIQLAWRFLLHQKNSALTKWFRSRTENARGTRKPMIVALARKLLIALWRLVREGIVPDGVVLRAAQ

SEQ ID NO: 213879 - protein, 385 aa, unidentified
MQASNTCTPIVEHNGTIFVAIELSQRNWLVVVRSPERDRIAHHKLTAGDFDGLLAVIEAARARAARKLGSRPAAVSCYEAGYDGFWLHRRLLAAGIGNFVFDPASIAVEQRGRRAKTDRIDGELMLRTLMAHCRGEPRAVRIVRVPSPEQEDMRRASRERQRLVQEQTAHINRIRALLRLWGLSAGNPRRRDWPSWIEAQRDWQGEPVPPQQMAEVKREHVRLMLVGEQLAALSTAPAAAAVTEAAAQRGERKKHLVRLKALGPAFAGTLTDEVFYKDFRNRREVAAYCGLAATPWRSGGINREQGISKAGNPRARHKAIELAWLWLRHQPDSALSQWFRQHTRDASGRTRRIAIVALARKLIVALWRYLTAGLVPEGALIKAST

SEQ ID NO: 213880 - protein, 400 aa, unidentified
MLSIGIDVSKGKSTVCGMKPGGEIMYAPFEVQHTREGMSELVSLLRSSGEEVRAVLESTGSYHCPVVAALLENGIFVSVVNSLRMKRFCSQSIRKVKTDRIDAMQIALYGLAYWQELQPARLPEDTYRELQLLARQYYQMTSILIKAKVDFNAICDQVLPGMQELMNDHAGRHKLSDFVLRYRHTTHILEMGETRFRKDYCKWAEKKGYRNCERMAALIFATAQNGIPVLPNAPSTQIVITEAIRVLHTVEASRDAILTQMQALAKTLPEYSLVREMPCIGDTLAPRLIAEIGDVRRFHSKRALIAYAGIDAPPYQSGKFCANNRHISKRGNRYLRKTGYEVMQSYVMHKPANDPIFTFIEKKRGEGKSGKLAMVAGLNKFLRVYYGKVTELYRSLPAIE

SEQ ID NO: 213881 - protein, 477 aa, unidentified
MVVAHPAALNRRQRKALARRLRVEDPGLDVMHPHAAGIDVGNSSHYVAVRPDRDPDSVRRFECFTADLHRLADWLQQCGVTTVAMQSTGVYWIPLYEILDARGLEVYLVNARHTKNLPGRKTDVQESQWLLKLHTYGLLRNSFHPPAEIRIVRTYWRQRGDHVHAISTCIQRMQKVLTQMNIQLANVISDLSGWTGQRIVRAILAGERDPQTLAALSHPGIHATQDMIAMSIEGTWQPDLLFVLQQEVAMYDAYQQRITECDQALEQHLKGVPDKLAGPAPEGEPAPSIPRERRSGPKRRRKAGSHTPQFDLGGELHRISGVDLTRIDGIDVGVAQTVISEVGVDMTRWNTEAHFASWLGLCPDNRITGGKVIRKGTRHVVNRAATALRLAATTLLRSQSYLGAQYRRLRGKLGAPKAITAMAHKLARLVYRLLKWGHEYVDKGLQYYEDRHREQQVQLLKQRAAKLGLQLVAAEVA

SEQ ID NO: 213882 - protein, 332 aa, unidentified
MHSENIAAYVGLDVHKETLAVAIAAPERLGEVRYYGTINNEAQAVRRLFQKLQGLYGNILSCYEAGPCGFGLYHQLTAMNIKCLVIAPSRIPKSPTDRIKNDHRDAISLARLLRAGELTPVWIPDLTHEAMRDLIRARAAAKRDSRVARQRILSMLLRTDKRYAGKHWTGKHRTWLANQSFSQPSQQIAFQHYCQSLEQIEDRILQLDQEISRLLPEWSLCNLVCQLQALKGVGQLIAITLVAELGDFSRFSNPKQLMAFLGLVPGEYSSGNSIRPRGITKVGNSELRRLLYEAAWSYRTPAKVGAWLIYYRPDSVTEPPRKSWRLNSLRKR

SEQ ID NO: 213883 - protein, 296 aa, unidentified
MGLHWPASQFPIHPDGLCQLHQFAVPFASRRWAIEGAGNHFIAVLVAQLLERSEIVYSIPPSLTSQYRSRRGRKKNDVVDAENVGRALLANSQLTPLHNTEQQRELQELTRAQRRLSEQLSANRVALQELLAESAVRDIIEQVIAVLLKQLAALEKQIRVAIHAVMPSLLQLPGVGPIVAGVLLAETGDPKRFASPHHFASYCGAAPVERGSGQNRRMQINPGGNRRLNWALHIVAMVRLRMDGGRSKRFLERAQLRGKTKRSGLRLLKTYIARELFRVLSIGHRQSLPAEADPIR

SEQ ID NO: 213884 - protein, 346 aa, unidentified
MMIIGCDFHPSWQQIAWLDSVTGETGERKLMHASGEAQRFYQQLAAPALIGIEATGNSQWFIELVEDLGHEIWVGDAAQIRASYVRKQKTDKRDAAHILRLMVQGRFPRLWTPDREQRDLRQLVVHRHKLVEIRSRVKNELQHLALNKGMQKKRTLWSQAGQTMLRELPLKAWASCRREDLLGLLAMLNQQVGQLDVAVQEAAEQNSQAKLLMTQPGVGPNTALAFVLTIGDVSRFPRGKQVASYLGLIPHENSSGGKQRTGAISKQGNRMLRSLLVEAAQIAVRFDPEMKKQYWHRCHQKPKGVAKVAAARKLAVRLYWMLRTNVAYPEVVRIESSPRVPLVGAS

SEQ ID NO: 213885 - protein, 355 aa, unidentified
MNDAKYIGMDVHTATISTAVRDSSGNLVMEATLETKSETILEFVHGLRGSLRVSFEEGMCASWLHDLLKPHVTEVLVCDPRKNALLRVGNKNDREDARKLSELLFLNKLHAVYHGETGIRTLKELARSYLTITRDLTRVMNRLKAIYRGWGIACAGQQVYAPGFRAEWLAKITEAGVRRRAEIYYQQFDILVALRQEVRRELLAESRKHPAMSLLRQIPSIGPIRAALLIALMQTPHRFRTKRQLWAYCGLALRTYDSGEYRFVGGQLKRSKKAVTIRGLNKNHNHDLKNIFKGAATRAAATAGPLQNFYEARIANGMKPPMARLTLARKIAAITLFVWKKGVRFDAEHLKQQAA

SEQ ID NO: 213886 - protein, 343 aa, unidentified
MGEVTTIGLDVAKSVFQIHGVDAAGTVVVRKRISRAKVLEFFSILPSCLVGLEACPSGHHWSRELRALGHTVRLMPPSYVKAYLKRSKNDANDAAAICEAVTRPSMRFVPIKSEQQQSGLILHRSRQLLVRQRTMLSNAIRGHLAELGIISAKGRNGTSELFKIIADEKDGRIPAAARFSLDVLARQHAAIAAEIGAIEKRIHAWHRSSEESRRLEQIPGVGPIVATALVSEVGDWKEFASGRSLAAWIGLVPKQHSTGGKERLGRISKQGNRYLRWLLVAGAMAVIRYARQHGTRRLWLAHIMERRPIKVAAVALANKIARMAWAMMVRGEQFKEPRLLPAA

SEQ ID NO: 213887 - protein, 386 aa, unidentified
MHHATTLAVPERTCSREDRATLFVSLELSRSTWVTTALVSGSSKMSKHTLAGGDARKLLDLLARLKSRAEERIVAPVKVVAIQEVGLDGFWIHRLLEANGVESHVVDPASIAVPRRHRRAKTDAIDGETLLRTLMAWQRGEPRVCAMTVPPSPSEEDCRRVSRERATLLRERIQHTNRIRGLLFGQGITNYNPLHKNRRECLEELRTGDGRSLPTHVKAEILREIDRLELVLRQISEVEAERDEMLRPAEASSPAALLMRLKGIGAEFATVLYLEGLFRHFENRRQLAAYAGLAPSPWKSGSIDHEQGISKAGNPRLRTTMVELAWMWVRYQPDSALSGWFRQRVGSERGRTRRISIVALARKLLIALSRYVTHGEIPAGAVMKPV

SEQ ID NO: 213888 - protein, 375 aa, unidentified
MIKDSEVFVAFDTSKLRNAVAIAEAGRAGEVRFLGEIENTAGATTKLVRKLEAKYERITFCYEAGPTGYELQRHIRGLGHECIVAAPSLIPKKPGDRVKTNRRDAVSLVKLSRAGELTAVWVPERRHEAMRDLTRAREAAVIDLRAKRQRISALLLRQGRPYPADKKTWTKVHMNWLASQRFEQPERGIVFAEMMFAIRQAQERVERLEQAIRAAVPEWSLAEMVTAFMAFRGIDLVSATCLLAELGDLTRFPTAPEVMGYVGLGCSEGSTGDKIKRGGITKSGNRRARRTLVECAWSYQHPPRVGIAKQAKVAAAPTKVREIAWKAQCRLNRRYRVLLRRGKLKTVAITAVARELAGFLWAAARELSSPQRVAK

SEQ ID NO: 213889 - protein, 344 aa, unidentified
MEYFVGLDVSLRSCALCIVDTKGNVLLERELGCEVDDIAECLSEFEFPIERVGLEAGTMSQHLYFGLQAAGFDVVCMEARQVNAALSAMRNKTDKNDAKGIAHVLRTGWFSPVHMKSREAHGLRALLSTRKALLKKTMDLANEVRGLLKIFGIRLPKTVSHGSFDGIVRPMIEMDDVLAHALVPLLDARVVLYQHYLELDRRVKRAASHDEVCLRLMTVPGVGPIAALTFKAAVDDPTRFKKSRTVGAHFGLTPRRFQSGEHDNPGRISKAGDRDVRAALYAAGNALLMRSMAQSQIKSWGMRLMRTKGRRRAVVAVARKLAVLLHRMWIDGTEFRQEQLGSTV

SEQ ID NO: 213890 - protein, 430 aa, unidentified
MSSTDSTNQKAVAAFVGIDWADQKHAIVLRAATSAASLEHRSIGAEPDALAEWVLEVRERFASAGRIVVCLEQSRGALIHFLMGYECFELYPINPKQLASYRQTFRPSGAKDDPIDAELLCQLVSLHHRQLRPWHPDDVLTRKLALLCEKRRQAVDARTALSNQLKSELKQYYPLALAVLDNDLTTALAADFLLQWPHFESLKKTAPHKLRKFFYGHQCRSEQKLQARLERIEAAQPLTRDSAIIEAGTLTVQMLAQQLKALVPYIARYEKEIAQLFEIHPDSALFNNLPGAGPTLGPRLLAAFGTDRERFQSPLDAVTFFGVAPVTEESGKSRWVHFRWACPKFLRQSFHEFAAQSIRFCDWAAVYYQQQRARGKGHHAAVRALAYKWIRILFRCWKTHQPYHPQLYLAALLQRGSPYTSPVKNSSPKT

SEQ ID NO: 213891 - protein, 465 aa, unidentified
MTKRHQSQVRRNSGSKVSRSLTLLNPDAAGIDVGASEHYVAVPPERDEQAVRRFGAFTEDLHKLAQWLLQCGVRTVAMESTGVYWIPLYQILEDHGLVVRLVNARHVKHVPGRKSDVQDCQWLQQLESFGLLTGSFRPEAKICVLRSYMRQRQMLISNASRYIQQMQKALTQMNLKLHQVISDLSGQTGMRIVRAILQGERDRLKLAALKDPRVKSSSERIAKSLEGDYRAEHLFALRQAVELYDYYQQKIAECDQAIFKEMQSLETRAAPDSVLPTPLKRKARSRHNAIPFDSQAELYRIMGVDLTRIDGLNEATVQLILSELGLDLCKKWPSEAQFCSWLGLCPNNEISGGKVLRRGTRKVINRVTNALRMCAESLLNSKSALGAYARRMRAKRDSKIAISATAHKLARLIYRTLKYGQEYSDIGQAQYEAKYRINALKSLQKRARQLGVQLVDLHSTSVVVP

SEQ ID NO: 213892 - protein, 397 aa, unidentified
MNKSQNQEPNGEGRVIGMDVHPTVFSASALNRKRASEAKVLWTHDKISMSSLSQWAKKNLHPSDIVVMEAGSNSFETCASLQRIGLHCVVLESYQASKVGQHYLKNDRVDSIKLARVYLSGLAREVWQPDEKTRVRREILGAYKKSVCDTTRSRNRINSFLTGFNIKRPKGLRLTRASGQQWVLNARTWDDCEKLLLRQFFSDLRHHDAKRRELAALMAEEVMADAQLCRLLTLCGLRHITVFAIAAVVGDISRFRNPKKLVAYIGLNPRVHASGDNSKDGRLVRHGRGYLRSLLTQGAQAILRLDPHDNPLARWGQKLTFRKCKQTATIAVARKMITSVWYILRGFASTILCPSKQLVVKIQKIGRDIGKEKINALGYNTITAYAEKKASIIMQST

SEQ ID NO: 213893 - protein, 409 aa, unidentified
MERLIERGAGLDVHRDTVSACVRGPGAPGQRPPHVRTFGATTVELLALRDWLQAYGVTHVAMESTGVYWKPVFYVLEDAFTCLLVNAAHIKQVPGRKTDVLDCIGIAHLLEHGLLRGSFVPPAPIRELRDLTRHRKVLIQERSRAVNRLHTLLQDAGIKLASVATDILGVSGRAMLEALVHGPTDPEVLADLARSKRRAKLPALRQALAGRFRPHHAFLVSHLLGHVDYLDEAISTLSAEIEARLVPFASPLTRLDTVPGIGRQTAEVILAEIGADMSVFPSDRHLASWAGICPGTHESAGKHKSGKIRQGNRWLRMTLIEAATATIRSKDSALAARYRRVMRHRGHKKAIVAVAHAMRRAVYHILAEGTTYRDPGPTYYDQRHKQRITRRAIDLLEREGYRVVLEPAA

SEQ ID NO: 213894 - protein, 343 aa, unidentified
MQIHSIGIDLGKTTFHLVALGDNGKVLIRKKFNQKQLITFTANLQTSLIGMEACSGAHFLGRTLRSQGHNVKLIPAQFVKPFVKSNKNDFLDAEAIAEAVDRQNMRFVPIKTDDQLDLQALHRVRDRLIARRTSVINQLRAFLLERGMTFAKMPTKLKVAMPEILENADSNLTPRMRNLVGLLWSEWKELEQQITAMNTEVEQIASSDPACQRLRQIPGIGPLIATAVVASIGNGAAFRKGRDFASWLGLVPRQHSTGGKARLLGISKRGNPYLRKILIHGARAAVVRMKRERSPFGSWLDALQTRAPLNVVVTATANKLARIVWAVLSSGEEFRPGGRLLAS

SEQ ID NO: 213895 - protein, 345 aa, unidentified
MDATTVAVDLAKDVIEVAVAGQGRAVTKRDRLSRKGFSRFLVEQKPSQVVMEACGGAHFWARRAQAEGHTVTLLPAQYVRPYRRRNKTDRADCSALLEAVKNPELKPVAIKSQWHQAIQGLHRVRSQWMATRTGRINTLRGLLREYGLTIPLGAVTALKRLPESIATPAIPDALRPMLNEVLAEIHELGRRIDDAEGQLKRLTREDPSVQRVQSVSGIGLLTSTALIASAVDARNFKSGRHLASWIGLTPREYSSGSTRRLGAMSKRGDVYLRMLFIHGARSALLVAGRLQREGKPLSRLQRWALDLKARTNHNKAAVGLANKMARIAWATWFYGREFDGNYAAA

SEQ ID NO: 213896 - protein, 356 aa, unidentified
MNPLYVGIDVSSKTNVVYLMKPDGSKISNFSVANSLDGSKKLVKNILSALDKHSLSEVVIGLEATSVYGDNLVYFLREDGSLAAHQNRIHVLNPKQVKKFKEAYNDLPKNDFVDSFVIADCLRFGRINKAVYLDDYRYDALKTLTRARFYAVQNLVKEKQRLINIIFKKYSSLTQDKIFSDTYGATACAIYTEFESADTLVNMDLNELTEFIKKKGKNRFDDPDAVAKAIQKAARSSYRLPKTVNDSVNQVLSISINSIRATEAQIKALEKAIAEQMALIPNTLQSIPGVGPVYAAGIIAEIGEINRFNSQAALAKYAGLAWKQKQSGDFESENTRKFVRLVFRLLKDNRLYISKS

SEQ ID NO: 213897 - protein, 422 aa, unidentified
MHEERRWFAGIDWASQEHVVTLCDGQGKKIEERKFAHGGTGISDMIAWLLKASGGEPGEVHVAIETPHGPIVEALLERGFNVYSVNPKQLDRFRDRFTVSGAKDDSLDAYVLADSLRTDMHLFRRLTIVDPLIIELREWSRIDEQLKVERVRLANRLRDQLWRYYPQMLDLADDLGADWFLDLWKAAPTPEKAARVREAAVARILKSHRIRRFDAAHVISELRKPALSVAPGTAEAAIGHIGVVVAQLRLINRQLLDAGLQLDRLCKKLAQPVTGSDGENVSGQRQEHRDVTILDSLPGVGRTVLVTMLAEAPDALQRRDYNTLRNLCGSAPVTRRSGKSCMVMRRRACNRRLSNAAFHWAQTAARCDPASRAKYEALRARGHGHARALRSVIDRLLYVACAMLENKTLFDPTFAGKKAAAT

SEQ ID NO: 213898 - protein, 483 aa, unidentified
MVRLRPLKSLVLEPRGGYPPLLLRARVSVSCTDLGAPAGGPSFPLSGSEPLQEADKLMRVMYERVAGIDVHKDMIKVGVRTPGYRAWTRASEVLEYRTFFGVLLAMAADMRQRGVTHVVMEASGVYTEPVYYALTGQGFEQVAVINPAHAKALKGHKTDARDCLRLAELFECGLLRGSYIPPPDLKDLRDLTRYRAKTVQARTSEIQRLAKALESAGIKLDSVVSDLTGKSATLMIEALIDGERRGQILADLAIGRMRTARKLADLSQALTGRFTEHHAALCRLHRDRIMLFNAAVDDLEQRIAARAAPYQREVELLKSVDGFGDAVAQAWLAEIGPAPHEYFASHEKLASWVTLCPGNYISAGKRAHGRTGTAGAYIKPMLVQAAWAAIRHEGRLQARYHKLVRRFGGPKNRGAVKKAILAIAHTLLKIAYQVLKSGQPYQDLGADFYTRRESPEQRRAYLLRQLEKLSPGCTITITNAEAA

SEQ ID NO: 213899 - protein, 391 aa, unidentified
MSMYFIGIDISKYKHDCCIISAANQKVVSKVTIKNNKAGFNELLTIIHSLANPADIRIGFESTAHYALNLELFLENSLLTFMEVNPVLISEYKKSKTLRRTKTDSVDCESIARWLMTVEYKPHSKGFYHAYSLKSLTRLRDKLIRQRSFYLVKITNVLDHTFPEFKPFFNERLSKTALYLLENYGSAEKMARMNSASYEKLRSVSRGKFSPQQFLRLKELAVNTVGVNNSIFDVELNSLLSLYKSLVKEIDTIKKEINQLIEEVHPHYMSVPGIGPLSAAVIYSEYGDISNFTNPGQMLAFAGIEPGINESGTESHGGKMVKRGSSQLRYTLINCCLPLIRFDMTFATYYAKKRGEGKPHRVAITHVAKKLIRVIYALESQDIDFNAQELR

SEQ ID NO: 213900 - protein, 348 aa, unidentified
MLIIGCDYHPGFQQIALVDTETGEFGERRLTHREEAEQFYGTLKERRVRVGMEASGHARWFERLLRDLQFELWIGDAAEIRTKRVRKQKTDRQDAQLLLRLMVEDRFPRIWVADAENRDLRQLLWHRHRLVQMRTRVMNQLHVVALNEGLRRKKALWRPAGRNELESLILAPWASRRRQDLLDLFDQLTPKIQELTRALEEEVEKRPVTRRLMTHPGVGPLTALAFELVIGTPERFHCGKQIASYVGLVPSEESSGDRRRLGHISKQGNSLLRYLLVEAAQVTVRSHPQWRSKFFHLAMRRGRKIAKVAMARKLAVRLYWMWRQGWDYGQFEKLGSHAGAPGNRHGAQ

SEQ ID NO: 213901 - protein, 337 aa, unidentified
MEYFAGLDVSMEETHVCVVTRNGTVIHEAKVPSTPASIAATLARVPSCQRVLFETGRMAPMLYHGLSQLGLPVVCVESRQAYQALKSLATHKTDRNDARGLAHLARTGFFKPVHVKSLPAHAVRSLIIARKKLVGQRVTLENQIRGLAVVFGVRLPRALSPAFIRQALQASEGIPGLSAAMKGLVAARAAVLAAVVAIDGDIRKMARASAACRRLMDIPGVGQLTALAFTTAVDDPERFRRSRDIGAYLGLVPRRYQSGEVDYTGGISKCGDRRVRTLLYEAANVMLTRYKGPLKLKAWALAIAKRSTMRKARIALARRLAIIMHAMLRDGTEFVTA

SEQ ID NO: 213902 - protein, 403 aa, unidentified
MIFVGDDWAEAHHDVYLMDESGRRLGSRRLPEGLSGIRQLHEVIGEHAEEPDQVVIGIETDRGLWVGALTGAGYQVYAINPLAVARYRDRHHVSGAKSDASDAKLLADLVRTDRHNHRRIAGDSAEAEGIKVLARAHQSLIWARTRHTNALRSTLREYFPAALVAFDDLAHGDALGVLGRAPTPGLAARLDRPAIQSALKRGGRKRNIAARAREIQAALRSEQLAAPAPVATAFGATTRAAVGIIAELNRQIAELETALAEHFDQHPDAGIYRSLPGLGVTLGARVLGEFGDDPNRYTDAKSRRNYAGTSPLTVASGKKRAVLARHARNRRLYDAIDQWAFCALSASPGARAFYDHHRTAGDTHHQALRALGNRLVGILHGCLRHHSPYNEHTAWARRMPAAA

SEQ ID NO: 213903 - protein, 450 aa, unidentified
MRDPEEIEDEAYEQILERVCAIDVAKASGKVCTRVPHPSQPGKRRTRVWDVDATTNAILELGEHLAGERIEKVTLESTSDYWRIWFYLLEAAGLDVQLVNARDIKNAPGRPKTDKLDSVWQAKMTERGMLRPSFVPPVEIRQLRDYTRLRVDLTRERTRYWQRLEKLLEDSLIKVSAVASTLDTLSVRDMLEALIAGERDPKVLAGLARGRMKAKHAALIEALTGHFDGHHAELARMLLDQIDALNGQIGKLTARIEELIAAIPAAQGVDADGTTGPGAGRGTDAAVLPAVDRLDQITGIGREGAQAIIAEIGLDMNRFPTAGHLVSWAKLSPRTIQSGATSRSGRTGKGNPYLKGILGEAAASAARTDTFLGERYRRIVKRRGKLKALVAVARSILVIIWNLLAHPGARYQDLGSGYYASRTNKDRRARSHIRQLEALGFTVTLTQAAA

SEQ ID NO: 213904 - protein, 364 aa, unidentified
MAKNTIAGALQAVLHPESTDAGPLAPPPAGVILLAGMVPAVITAPAPAPSPVACWVGIDVAKAHLDAATWPIPERVRVTRDEASLAELIAWLRPRTPQLIVLEAIGGLETLVVGTLIEATFQTAVINPRQARDFAKALGRLAKTDALGAEVLARFGHAIRPEPRPWQAEAAQELAAVLQRRRQVVAMLTAEKNRLASAHRQVRPDIQTTIDWLEGRLKDLDGDLQRRVRASPVWRAQEELLRRVPGIGPVAATTLVAILPELGTLDRRQISALVGVCPFNRDSGQCRGRRMIFGGRAGVRAVLYMATVSASRCNPVIKAFYARLRAAGKPAKVALTACMRKLLTILNAILRTKTPWQPPAECRS

SEQ ID NO: 213905 - protein, 323 aa, unidentified
MIYLGIDVSKLKLDCTLLLDPENDKRKSKVVPNSRDGVHELVRWCAKHGVGADQAHAVLEATGPYHEQAATTLHDGGIAVSIANPASVHDFSRAMAMRSKTDALDSLMLARYGVAMRPGAWQPPPAHVRELRALITQLDALSKDRLRTMNRQEKIEASSASELVERSISDTLSFYDKEIARLEKAIDDHIDRHPDLKDDTKLLSSIPGVGPKVARTMLRVMRMHQFKCAEDLAAYLGLVPVRRQSGTSLRGRSRMSKAGPADVRAKVYMAGVVASKHNPHVRALYQRLLAAGKTKMSALGACMRKVVHLCFGVLKTRQPYRPD

SEQ ID NO: 213906 - protein, 347 aa, unidentified
MQVTTIGLDIAKNVFQVHGIDAAEKVVVRKQLRRRQVLEFFKALPPCLVGMEACATAHYWARELTKLGHQVRLMPAKDVKAYVKRNKNDAADAEAICEAVRRPTMRFVQIKSTEQQGRLMLHRARDLLMRQRTQVINAMRAHLAELGIVAAQGRDGIKELLKIIASEEDARLPVDAHASLVVLAAGLHAVQTMIGSIEKRIMVQHRSNEASQRLETIPGIGVIGATAIAATVPDPKVFGSGRDFAAWIGLVPREDSTGGKQKLGPISKRGDRYLRRILVVGACAVLRYARHKPEKYPWLTQLLARKPFKVVAVALANKMARIAWALLAKGGTYHRARALVTVVTAAA

SEQ ID NO: 213907 - protein, 345 aa, unidentified
MNLTPVGIDIAKTVFQVHYVDHDTGEVVNKPIRRAVLLEHFANWPPCLIGMEACGGAHHWARKLVQMGHQVKLMPGEFVKAFNIRNKNDAADARAIWLAVQQPGKAVAVKTEMQQAMLALHRAWEQLVKFRTMQINGLRGLLAEYGEVSAKGRASLDKAIPEIVARVAERLPAVLIDTLREQWAGLTKLDEQIAAIERRMREWKKDDHAVKAISEIPGVGLLTATAAVAMIGDAKVFRSGREFAAWAGLVPRQTGSGGKVNLHGISKRGDTYLRTLQIHGARSVLIHANDPGPWVEQLQKRRHPNVVIVALANKIARTIWAVLAHDRPYQKGYVSVNPAGMANIS

SEQ ID NO: 213908 - protein, 347 aa, unidentified
MEHIGIDVHKRESQICILAEGGELIEQRIRTERERFAAVLGPRPRARILLEASTDSEWVARCLEGLGHEVVVADPNFAPMYATRTRKIKTDRRDARALMDANVLGAYRPTPRLSDVQRHVRGRLGVREALVRTRTRFISLIRALLRQHGYRVPSGSAQGFIDRVEALSLPGHLRSVIAPLLAVMLAVHRQLVYSDEVIEHLAAHDSRVARLRTVPGIGPITAAAFLATIDEVQRFHHAHELEAYLGLVPREHSSGDTQRRGPITKAGPGRARWLLIQAAHSILRRRPPEAEALYTWALRIAARRGKHVAVVALARRLAGILYALLRDGTTYAPRPARCPELVAPPRP

SEQ ID NO: 213909 - protein, 435 aa, unidentified
MDRVIIGVDPHKLSVTIEARDKREILRATGRFGTDARSYHQLLRVARQWPERVWAVEGANGIGRPLAQRLLADGERVLDVPAKLAARARVFDTGQGRKTDAADAHAIVMVALRDKGLRELSADPELMVLRMLCDRRDEISRARAQALNRLHRLFLELLAGGAPVKKSTAQYKALLATVRPRDPAGKIRRRMAAEELADLARCDAKLKAMKAELKTAVEATGSHLMDICGIGPAGAARILADVGDIARFPDRNHFASWTGTAPIDASSGEHTRHRLSRAGNRRHGHVLYMAGIVQLRNDTPGRAYYRRKLTAGKTAMEAMRCLRRRLSDVVYRQLTADAAACAPPRQAGPGGHSGATLSSSAAGLPPGTGTSDQPLPGPAPQTLPPPRVLKTTPAAPAAATSRRRAGGVNVERPTGRTTFTPTSAGAHSTASGPHT

SEQ ID NO: 213910 - protein, 354 aa, unidentified
MNNITFSNSSFFVGIDTHLKNWRVTIRNSGLELKTFSMNPSPDELYKYLTTHYPEGIYFIVYEAGFCGFWPQRKFNELGINCIVVNPADVPSSGKEKVIKTDPCDSRKLARELENGSLKAIYVPDINHEQLRSLMRLRFRLVQNQTRIKNRIKMLLYNYGIIIPKEHITNPRWSGYFIHWLKSIKLNSTAGQFTLDNLLLQLDQSRENLKQVLKQLREEAKQENISPVISSLVSVPGVAFITAMSLYTELIDIKRFNSLDQLASFVGLVPSVYSSGETDYTRGLTFRHNKFLRPLIVEASWTAVKTDPALTFKYKELIKTMAKQKAIIRIAKKLLRRIRHVWINQDRYVKALVA

SEQ ID NO: 213911 - protein, 336 aa, unidentified
MQTVSTIGLDIAKSVFQVHGVDANGLVVVRRQLKRRYVLAFFEKLGPCLVGIEACASSHYWSRELQALGHNVRLMPPAYVKPYVKRQKNDMADAEAICEAVTRANMRFVPTKTPEQQSGLVLHRTRHLFIRQQTSLINAIRGHLAEFGVTAPVGRKGIEELLRVIADPSDKRVPDVVRACLAALGSQLLSLKKQILDFDRMIMAWHRSNQTSKRLNCIPGVGPLLATALVASVADPKVFRSGRNFSAWIGLVPKQHSSGGRARLGSISKKGDRYLRGLFVAGALAVIRYAKLHGTKYRPWVAALLARRPTKVAAIALGNKLARIACARMARGERYN

SEQ ID NO: 213912 - protein, 342 aa, unidentified
MEAKRYIGIDLHRNCFTACLRLENGREYLKQWKLEDMTKFTAKLRRTDEVAVEVTGNTRLFHDAVAPHVERIVAVNPNQFKVITHSVKKTDPNDARNLALYLAKDLLPEVRMKDKTQAQIASLTQTRDTMVKLRTALKNKVNNICSAHGVNLNKESLGSEKGLQAVLEMHFEPLVHLELEIIVDQIRSLNQSIAKLQETIGKEGQKLEGHKNLTSIKGIGGLSAGILLSIIGDIRDFADEGKLAAYFGIVPRVSNSNESEHSGRITKRGTKLGRTTLVQCALIAQRYSPYLKNYYEKKKSRGVGKAIIALARKFLGIIYRTLKNKWVFEDFPNFVLAEAATA

SEQ ID NO: 213913 - protein, 342 aa, unidentified
MNEYDGRQFVGIDLHRRRSVIVRQSESGEQLSAVRIINDPVALGLEIERAGPNPEVVLEATYGWYWAVDTLQAAGARVHLAHPLGVKGFRYRRVKNDVRDAADLADLLRMNRLPEAWIAPPATRELRELVRYRAKIVAVRSGLKAQVHAVLAKAGVLIPVSDLFGVGGRQRLAKVPLGAAYVQRVISLLELIDALDAHETRFSIMVADKLGGHAGYQAIQQLPGVGPILGAVFVAEIGDVHRFADPAHLCSWAGLTPRHHESDTVVRRGHITKQGSKLVRWAAVEAIQRHPATSKIALDRTRIESRRGKNIAKIAAARKLLTLVYYGLRDGHIRALDRPRAA

SEQ ID NO: 213914 - protein, 350 aa, unidentified
MKKIVKQVAGIDVAQKMLVVCLGRMYDDWSPELYANKTFANTVKGIEALILWLKKQTAQHIAVRFVMEATGVYHETLAYFLEEKGYEISIVLPNKISNYMRTLDVKTVTDNTASQAITMFGLERKLDIWKRPKEIFRKLRQLTRERDQLVGERTMVKNQLHAEQAEAYPNKSSVKRIKDRIKMLEKQEREIMKEVAAMIAQDSELQKMIVIICSLPGVGLLTAAVVLAETNGFDLIRNRRQLASYAGFDVIEKQSGTSVKGKPRISKKGNRYLRKAMHCPALAAIRYDERFKAIFARLVSKHGIKMKAAVAVQRKLLEMIFILYKTGKKFDKDYLMKTKVQKLKQEFVKN

SEQ ID NO: 213915 - protein, 412 aa, unidentified
MEVLHRVIAGLDVHAKQVVACLRVQIGQRCRRTLRQFPTTTPGLLELHAWLIEQGCPIVLIESTGVYWRPVFNILEGSVEVILANAHHVKTLPGRKTDLRDAEWLADLGAHGLVRSSFIPPAPIRELRELTRYRKALIQARSSEMNRVQKVLESANIKLGTVVSDVFGASGRAMLRALVAGERDADRLAALAKGSLRTKLDQLIPALTGRFSDAHGFLLRQLLDHVEYLDRQIATVSAEVARLCGPFEKPLALLETIPGVGRATAEVLLAETGGDMRHFPTAHHLASWVGICPGNNESAGKRRTGRTRKGNRWLRAALCEAAWAASRSKGTYLQSQFRRLAFARGKGGKRAAVAVAHSILIAVWHMLAHRVPYRDLGPLSLTTREPERAKRVLVRKLEQLGYHVSLAAKVAA

SEQ ID NO: 213916 - protein, 391 aa, unidentified
MIYIGIDVAKDKHDCFITNSDSEVLFKAFTIANNLDGFNDLYQKIESVMDDVTKVKVGLEATGHYSYNLLGYLIDKGLPTYVINPLHTNLYRKSLSLRQTKTDKVDARTIASMLMSDVNLKSYSDTSYHNEELKSLTRYRFDKVKERAKLKTSVSRLVCILFPELEKLVPTLHIASVYALLSEFPSAKHVATAHLTRLTNLLSESSKGRYGKDTAITFRDSARASIGSNMPAKSLELKHTIKLIQELDSEIDEIENEIKIIMDEINSPILSIPGINYRMGAMIIAEIGDFNRFDSPDKILAYAGFSPSTYQSGQLDGAYAHMEKRGSRYLRYALYNATKYVCHWDPTFAAYLAKKRAEGKHYNVAISHAVKKLVRVIYHLEKTKQQYIKVA

SEQ ID NO: 213917 - protein, 390 aa, unidentified
MQALCPRPDEHIAVRTDLNAIFVSLELSRSTWIITSLAPGGGEKMSKHSVPSGDVAALLARLSQLQEKARARTGRIFPIIVIQEAGLDGFWIHRVLQQEGIESHVVDPASIATSRRRRRAKTDRIDGEAQVRALLAYKRGEPRVCAMVQAPTPQEEDRRRISRERETLTAERVRHVNRIKGLLFAQGIGDYEPLHRNRRERLEALITGDGRPLPECLKAQIRRELDRLELVIEQVKAVEAERDAVLARAQASPGVPAPAALLLALKGIGPEAAATLWSEGLFRTFSNRKQVAAYAGLAPTPWQSGSVHRDQGVSKAGNPRLRTIMIQIAWLWLRHQPQSALALWYRARIKRTGGRLGKTMIVALARKLLVALWKYATAGVLIEGAILKPA

SEQ ID NO: 213918 - protein, 383 aa, unidentified
MKKNSIVKQTVTKPRHRRASKARQADRGSSAGPVKQTVGLDLGDKSSRYCVLDNEGKIQSERSVATTRQGFSQTFAKMVRSRIALEVGTHSPWVSRLLESLGHEVIVANARRVRMISESSRKDDRMDAQILARLARVDPALLYPIRHRGERVQQHLAMVKARAGLVDGRTALVNTARGLTKSFGERIGKCDADQMGVEKIENLPAGVQSALKPLVTVVEAMTEQIQGYDKELAEIARKDYPETALLEQISGVGLLIALTFVLTLDDAKRFRYSRDVGCFLGLRPKRHESGESQPQLGITKEGDVYLRRLLVQGAHYILSRRGPDTDLKRWGAKLAGNKGDKRAKKRAVVAVARKLAVLLHHLWVSGDVYEPLRNSQAAAPAAA

SEQ ID NO: 213919 - protein, 338 aa, unidentified
MEFQILGIDIAKNKFDCSFIAAPNSPNSRKAKSKALPNNPAGFAGLIDWLAKNNGTNAQNIKVFMEATGVYHEALADFLHTQGFAVYVFNPADAAAYIRSDNLHKTDKSDARALADMGIDRLAKGSAGKSLWQPAPPEVKQLKALLARLEALETDLQREDNRMEKACAVSSPALVVQSITTMQTQLRKQIDGLKTEIDKHIDRHPDLKDDIRLLKSIPGVGDVVSPRMLTLYRSRDFTSASQMAAFVGLVPKKRESGQYKGQSRLSKRGNPVIRAKLYLAAVCATRFNPDIRVHCERLRAKGKTKMQTVGAAMRRLVQICYGVLKHRCEYQAQVTLAA

SEQ ID NO: 213920 - protein, 416 aa, unidentified
MEAGMVWVGVDVGRYSHALCAIDASGSVIWERKRVLNTTWAMRRVLVKLLHFLRGRSVHFAVEEPNGNAAALVRLLTADDLPVLLAQPLRVYRFHLALGQPHKTDPYDAQVIAQFARQNASKLPPVRILTPTTQSLRVLSRRADAVGKDMRRCVSRLRGVLAEYAPEWLACRVFRDWSSAAALGTLERYGCISKLQRTRVSQLGRALSKWTQGRYGETHARTLIEAFSEVALPPQLERAYHQVICSLVKQIRALVAERRHLLSLIRAQGEALPAIAELQSEFGYGPELSAIIVSEVGDMADFPSEARFATYCGVTPVKRKSGVSRGSSRLSRFTNKRLLRAVTQAARTAATHEPESRTYYQRKLAGRSDPHTKTLALIALARHRTRRLYKLLRRVSTQPEELVAQSIPDSPKKALD

SEQ ID NO: 213921 - protein, 411 aa, unidentified
MRRVIGMDIHRTFAEVVFWENGRLRHHGRVDMTRSGLEGFGRSLNSTDEVVVEATGNAMAVVRVLSPYVGRVVVANPMQVKAIAHARIKTDKIDAGVLAQLHASGFLPEVWVPDERTERLRRLVARRNQVVRHRTRVKNEVHGILQAHLVPKCPHADLFNNRGRAWLERQVLPDDERAAVARHIREIDHLAEDLADLDRDVALEAVDDPRVRRLQTITGVNAIVATGIIAAVGDIRRFSEPQKLVSYFGLNPRVRQSGLGLAQYGRISKHGRSHARAMLVEAAWAAAKAPGPLRAFFLRIRGKRGHQVAAVAVARKLAVLIWHMLTKELDYFWVRPALVAAKQRQLALKAGAPNERGVGRRGTTYAYNVKELRNRERASAEHAERAYELMVRQWRPRGPKRRTDATTEERR

SEQ ID NO: 213922 - protein, 324 aa, unidentified
MQGKEASEQETKVQSNVGIDISKCWLDAHVLPGNDRLHVANNCTGIRQLKRWLSHYRIALVAIEATGKWHRHLHRSLVASAIPVAIVDPYRVRMFAKAQGILAKTDQLDARVLALFAAMMAPPVRPVAPQTMAELAELVVARASAVEAQTALKNQFAAAESTFLKRQLDRRISRADKDIAALDREILKRIKADASLARRYAILTSIPSFGFAVAATLIACLAEIGSTTAKQIGMLAGLAPIADQSGDREGIRVIWGGRPAVRRVLYLAALSASRFNADMKAFYKRLIDNGKPSKVALIAVARKLVVLANTLVSEDRTWQPSAPI

SEQ ID NO: 213923 - protein, 343 aa, unidentified
MQMITTIGLDIAKSVFQVHGVDAAGEVVIRRQLKRRYVLAFFQKLSPCLVGIEACASSHYWSRELQALGHTVRLMPPAYVKPYVKRQKNDMADAEAICEAVTRANMRFVPTKTPEQQSCLMLHRTRHLFIRQQTAVINSIRAHLAEFGIVAPVGRKGVMELLHVVADPGDKRVPEVARACLAALGTQLLRLKQQILEFDRMIMAWHRSNQTSKRLHYIPGVGPMLATALVASVADPRTFRSGRNFSAWIGLVPKQHSSGGKDRLGSISKQGDRYLRSLFVAGALAVIRYAKIHGTKHRPWLTALLGRRPTKVVAIALANKIARMAWAMMAKGERYKQPVALAA

SEQ ID NO: 213924 - protein, 405 aa, unidentified
MWYAGIDWADQHHDAVVIDAGGKRVATTHVARSAEGLNTLVTFLKGIGDVADHPDHLACIVETNRGLLITALLDAGLPVYPVNPKTVDRHRKPAGAKTDAIDAYLLARTGRSDLADLRRLTPDSPLIAELKVLTRDQDTLIQSQTRLVNQLTACLKAYYPVAVDLFGKLQQPTTLAFLQAFPTLEQARAATVEQITLVLKGAGHPTAEVKARQIHARLRQPQLAADPIVTRTKTRLMLTLVGQLRVLLPEVAAYDDEITRLFRLHSDSRAFASLPRAGTRLAPRLLAEWGDDRGRYTDAASVQALAGTSPVPFQSGNFAKAHRRYACNKPLRNALQQFAWQSTQKEAWALAYDQRKRRDGKSHAMAVRALANQWVRLIYALWSKHETYDPAIFHAAQQAHAPRAA

SEQ ID NO: 213925 - protein, 389 aa, unidentified
MSQFFDASRSLTALEQDSTIIASIEMSQSKWLVAAVVPGVERQPLKKLNADEEALLKLLHRWRHEAGLAGRQIKRIVVAYEAGRDGFWLARWLRARDVEAYVIHPTSVAVSREHRRAKTDRLDTELLKRSFLGWLRGEKRHCSMVAIPTIEEEDARRPNRERGNLVTEQTRIVNQIKAILTRFGIRAFRSTLREVEEKLERVRTAEGTPLPENTRAELRRHLARLCVVREQIRAIEQERLRKLAATPAGEKGPHVMVRLIARLLGVGVETADMLVNEIFSRHLRDRKAVARYAGLTGSPDESGRRRRERGLARAGNARVRCGMIQLAWRFLRFQKDSALAQWFHARTADGRGSTRKTMIVALARKLLIALWRLVTTGEMPQGVVLRPAS

SEQ ID NO: 213926 - protein, 323 aa, unidentified
MNKGRIYFGIDISKNVFDVMDSSGNYFQFENDFKGFKKFLKLLGEKSHCVMEATGYYHYKLAYYLIENNIRVSVENPLSVKRFIQMRLSKIKTDKSDSKMICLYAQSVDLKLWKGQSKSQIECLQITRLLSLYFKQTTALKNKIHGEDVLGNPSLLVVRSLKRSLKHKQKEIKFLEEKLTQIVKMDHQELLTRLESIPGLGRKTSIMLIVLTDGFERFTSASELCSYSGLTPIIRQSGTSVNGRSRISKMGNKKLRNLLFMCSFTACKNNKACKALYDRIVAKGKSKKLALIAVCNKLLKQAFAIAKSGLIYDETYRSTLVKN

SEQ ID NO: 213927 - protein, 412 aa, unidentified
MDVVVERCAGLDVHQATVTACVRLPGRKGERTQVIQTFGTTTPDLLTLRDWLAAHQVTHVAMESTGVYWKPVYYVLEDGFTLLLVNAAHMAQVPGRKTDVQDCAWIAQLLECGLLRGSFVPPPAIRELRDLTRYRKALIQDRTREANRLHKVLEDAGVKLATVASDILGVSGRAMLTALVAGTTDPTVLADLARGKLRAKLPALRQALTGRFRGHHAFLVTQLLAHLDYLDETIATLSTEIASHLLPFAREVGRVQTIPGVKQRTVENLVAEIGVDMTRFLTAGHLTSWAGVCPGNNESAGKRRRGRTRKGDRWLKITLIEAALAAIRVKGSALGARYRRICRHRGHKIAIVAVARAILEIVWHLLTHGSTYAELGADYIDRRDKEQVTRRYVRLLENLGHRVTLEPAPIAA

SEQ ID NO: 213928 - protein, 340 aa, unidentified
MEAYAGIDLHSSNSYIGIIDEHDRRHFSKRLPNSLTQILVALEPFKKDLKAIVVESTYNWYWLVDGLQEEGYKVHLANPSAIKQYEGLKHTDDKSDSFWLAHLKRLNILPEGYIYPKEERPIRDILRRRLLFVGQRTAQILSLQSSIARNLSLKMSGRAIKKLKGEDTEELFDSPFLVLAAKSNIAVIQSLTKTIKAIENAVKSQAKLRKEFQLLKTIPGIGDILTLTIMLEVGDINRFSKVGNYSSYCRCVKSARFSDGKKKGENNRKNGNRYLSWAYVEAANFAIRFSPEAQKFYQRKMAKTNKIVAIKALSNKLARASYYIMRDQVAYDAASFLVDR

SEQ ID NO: 213929 - protein, 357 aa, unidentified
MDKITRIGVDLAKNIIQVHGVDSMERVVVRKAISRQKFLEWFANLEPCLVAMEACSAAHYWGRKLRELGHEVRLIAPQFAAPYRKGGKHVKNDRLDAEAICEAAGRPHMRFVAVKTADQQNTLVVHRMRSGFVEERTALINRLRSELMEFGVFLPQGIEAFRAHFVEALEDGDTELNGVARTALLQGWEHLRALDRQITWCDAQVATQVKHDSNTQRVMAIIGVGALTASAAVATVGDARLFKNGRQFAAWLGTVPKQKSSGGKTRLGRITKQGNTYLRTLLFQGARSAVTSAHRRTDRLSRWIVQLQARVGWYRALVAVANKHARILWAILAKGERFDPSYVSTPQHRASHGTTAV

SEQ ID NO: 213930 - protein, 335 aa, unidentified
MKKIHVGIDISKEKCNLCYRSGLEIVREEECSNEVRALKKAFKAALKALGASVEEVLVCAEYTGRYIYPLTVGCQELGIFLWMDDPTRIKNSMGLTRGKNDAIDAARIAEYAYRYSDKAVRYCIPDAALVSMKSLLADREFLLIDKKRYQSQLSDQKMYMAPGDFKHKNSRWKKVIKSIDEQIAAIDAEIESLIAADPVLTRQKELLVSIDGIGDRIAINMIAITGGFTRFQNARQFCSFAGLTPYKYDSGTSVRSKAKISKRANQTMKALLHLAAVNAATHMKGGEYKEYYERKTKEGKHVMCVLNVVRAKLVHRMFSVIRRDTEYTKEYKPAC

SEQ ID NO: 213931 - protein, 310 aa, unidentified
MKEELVYVGVDIAKRYLDGAMGNEKRRFSNDGLGHRELIKWVKQLSAPPVQVICESSGGYERALVQALARARVKISLVQANRVRQFARAAGILAKTDRIDAEVLCEFGKVMRPQTVTAARLEQEHLRELESQRRHLTRLLVMEQNRGARVSDASVQRLNRSLINQIKKQIEQLDLLIKGHIDQSHELSAKAAKLTSISGVGARTAALLLAQLPELGQLNRREVAALVGVAPFNRDSGRMRGKRAIYGGRKPVRHGLYMAALVAAHHNPILRNFYLRLRAAGKPGKLALTATMRKLLIVLNSALKTDLSYA

SEQ ID NO: 213932 - protein, 342 aa, unidentified
MSTIQTIGVDLAKNVFSIHGVDAYGKCVLRKTVKRNKLLDTFAKLPPCLIGMEACSGAHHWARELLKLGHNPKIMASKFVIPYRQNEKNDANDAEAICEAVSRPKTRFVSIKSEEQQAVLCLHRIRQGLIKTRTATINQLRGLLSEFGIVMPQGRYSAQNTIDSVLEDAENGLPILARELLQDLSNKIQHLNLEVLHYDRRVSALVREMASAKALMDIPGVGEHSASAIVATVNDAKQFGSSRQFAAWIGLVPRQYSTGGHVHLGRISKRGEKHIRTLLIHGARAVIARCKEKTDRNSIWLNQLVERRGYKRAAVALAAKNARIIWALLTTGKEYKINYVNG

SEQ ID NO: 213933 - protein, 309 aa, unidentified
MDTIVVGIDVSKDRLDVHILPSGEAFAVSRDAAGLEALVGRLLPLAPKTVAVEATGGFETVVAASLCAASLPVVVVNPSQVRAFAQAVGKRAKTDPIDAAVIARFVVATNPEVRPLPDAETQALSDLVTRRRQIIHMIVAERQREKRAAARMKKSIVRLTRALQKELTAIDEDIDDAVRGSPAWREKEDLLSSVPGIGTTISRTLIADLPELGSLDRRQIAALVGLAPFTRQSGQWRGRSFIGGGRATVRAAIFMGAMVAVRWNPQLKAFHHRLVATGKPKMVAIIAVARKLLTILNAILRDRRPWQPA
